United States Patent Application Publication US 2005/0196754 A1 - sequence listing, part 17

SEQ ID NO: 38248 - protein, 1075 aa, Homo sapiens
  DOMAIN (336)..(377): kw TRANSCRIPTASE REVERSE II ORF2 domain identified by eMATRIX, accession number DM01354I, p-value=1.000e-40, raw score of 15.55
  DOMAIN (582)..(780): Reverse transcriptase domain identified by PFam, accession name rvt, E-value=6.6e-12, PFam score of 53.0
  misc_feature (1)...(1075): Xaa = X or * as defined in Table 2
MGKKQNRKTGNSKTQSASPPPKERSSSPATEQSWMENDFDELREEGFRRSNYSELREDIQTKGKEVENFEKNLEECITRITNTEKCLKELMELKTKARELREECRSLRSRCDQLEERVSAMEDEMNEMKREGKFREKRIKRNEQSLQEIWDYVKRPNLRLIGVPESDVENGTKLENTLRDIIQENFPNLARQANVQIQEIQRTPQRYSSRRATPRHIIVRFTKVEMKEKMLRAAREKDRSTRQKVNKDTQELNSALHQADLIDIYRTLHPKSTEYTFFSAPHHTYSKIDHIVGSKTLLSKCKRTEIITNYLSDHSAIKLELRIKNLTQSRSTTWKLNNLLLNDYWVHNEMKAEIKMFFETNENKDTTYQNLWDAFKAVCRGKFIALNAYKRKQERSKIDTLTSQLKELEKQEQTHSKASRRQEITKIRAELKEIETQKTLQKINESRSWFFERINKIDRPLARLIKNKREKNQIDTIKNDKGDITTNPTEIQTTIREYYKHLYANKLENLEEMDTFLDTYTLPRLNQEEVESLNRPITGSEIVAIINSLPTKKSPGPDGFTAEFYQRYKEELVPFLLKLFQSIEKEGILPNSFYEASIILIPKPGRDTTKKENFRPISLMNIDAKILNKILANRIQQHIKKLIHHDQVGFIPGMQGWFNIHKSINVIQHINRAKDKNHMIISIDEEKAFDKIQQPFMLKTLNKLGDKIPRNPTYKGCEGPLQGEVHXTTAQXNKRGYKQMEEHSMLMGRKNQYRENGHTAQGNLXIQCHPPFKVTQDFLHRIGKNYLLKVIMEPKKSPHRQGNPKPKEQSWRHHTTXLQTILQGYSNQNSMVLVPKQRYRSMEQNRALRNNAAYLQLSDLXQTXVKQAMGKGFPIXXMVLGKLASHMXKAEIESLPYTLYKNQFKMDXRFKRXTXNHKSPRRKPRHCHSGHRHGQGLHVXNTKSNGNKRQNXQTGSDXTKELLHSKGKYHRNEQATYKMGENFRNLLIXQRANIQSLQXTQTNLQEKDKQPHQKVGQGHEQTLLKRRHLCSQKTHEKMLIITGHQRNANQNHYEISSHTSXNGNHXKVRKQQGHG

SEQ ID NO: 38249 - protein, 1074 aa, Homo sapiens
  DOMAIN (272)..(317): kw TRANSCRIPTASE REVERSE II ORF2 domain identified by eMATRIX, accession number DM01354N, p-value=1.000e-40, raw score of 13.17
  DOMAIN (358)..(606): Reverse transcriptase domain identified by PFam, accession name rvt, E-value=6e-69, PFam score of 242.5
MGDFNTPLSTLDRSTRQKANKDTQELNSALHQVDLIDIYRTLHPKSTEYTFFSAPHHTYSTTDHILGSKALLSKCRRTEIITNYLSDHSAIKLELRIKNLTQNRSTTWKLNNLLLNDYGVHNEMKAEIKMFFETNENKDTTYQNLWDAFKAVCRGKFIALNAHKRKQERSKIDTLTSQLKELEKQEQTHSKASRRQEITKIRAELKEIETQKSLQKINESRSWFFERINKIDRPLARLIKKKREKNQIDTIKNDKGDITTDPTEIQTTIREYYKHLYANKLKNLEEMDKFLDTYTLPRLNQEEVESLNRPITGSEIVTIINSLPTKKSPGPDGFTAEFYQRYKEELVPFLLKLFQSIEKEGILPNSFYEASIILIPKPGRDTTKKENFRPISLMNIDAKILNKILANRIQQHIKKLIHHDQVGFIPGMQGWFNIRKSINVIQHINRAKDKNHMIISIDAEKAFDKIQQRFRLKTLNKLGIDGTYFKIIRAIYDKPTANIILNGQKLKAFPLKTGTRQGCPLSPLLFNIVLEALARAIRQEKEIKAQNLLKLISNFSKVSGYKINVQKSQAFLYTNNRQTESQIMSELPFIIASKRIKYLGIQLTRDVKDLFKENYKPLIKEIKEDTNKRKNIPCSRVGRINIVKMAILPKVIYRFNAIPIKLPMTFFTELEKTTLKFIWNQKRAHIAKSILSQKNKAGGITLPDFKLYYKATVTKTAWYSYQNRDIDQWNRTEPSEITPHIYNYLIFDKPEKNKQWGKDSLFNKWGWENWLAIWRKLKLDPFLTPYTKINSRWIKDLNVRPKTIKTLEENLGITIQDIGMGKDFMSKTPKAMATKDKIDKWDLMKLKSFCTAKETTIRVNRQPTEREKIFATYSSDKGLISRIHNELKQIYKKKTNNPNKTWAKDMNRHFSKEDIYAAKKHMKKCSSSLAIREMQIKTTMRYHLTPVRMAVIKKSGNNRDMDETGNHHSQQTVTRTKNQTPHILTHTWELNNEITWTQEGEYHTLGTVTSELQVLWSLDSGTYSSGPLVFSGLGLESYTICCPESETLGLGLNHTTNFLSSPTCRQLNMGLLSF

SEQ ID NO: 38250 - protein, 635 aa, Homo sapiens
  DOMAIN (272)..(317): kw TRANSCRIPTASE REVERSE II ORF2 domain identified by eMATRIX, accession number DM01354N, p-value=1.000e-40, raw score of 13.17
  DOMAIN (356)..(621): Reverse transcriptase domain identified by PFam, accession name rvt, E-value=4.3e-38, PFam score of 140.0
MGDFNTPLSTLDRTTRQKVNQDTQELNSALHQADLIDIYRTLHSKSTEYTFFSAPHHTYSKIDHILGSKALLSKCKRTEIITNYLSDHSEIKLELRIKNLTQNCSTTWKLNNLLLNDYWVPNEMKAEIKMFFETNENKDTTYPNLWDAFKAACRGKFIALNAHKRKQERSKIDTLVSQLKELEKQEQTHSKASRRQEITKIRAELKEIETQKTLQKINESRSWFFERIKKIDRPLARLIKEKREKNQIDAIKNDKGDITTNPTEIQTTIREYYKHLYTNKLENLEEMDKFLDTYTLPRLNQEEVESLNRPITGSEIVAIINCLPTKKSPGPDGFTAEFYQRYKEELVPFLLKLFQSIEKEGILPNSFYEASIILIPKPDRDTSKKENFRPISLMNIDAKILNKILANRIQQHIKKLIHHDQVGFIPGMQGWFNIRKSINVIQHINRAKDKNHLIISIDAEKPFDKIQQCFMLKTLNKLVIDGTYFKIIRAIYDKPTANIILNGQKLEAFPLKTGTRHGCPFSPLLFNIVLEVLARAIRQEKEIKENKIPRNLTYKGCEGPLQGELQTTDQGNKREYKQMEKHSMLMGRKNQYRENGHTAQELEKSYFKVHMEPKKSPHHQVNPKPKEQSWRHHAT

SEQ ID NO: 38251 - protein, 1173 aa, Homo sapiens
  DOMAIN (204)..(245): kw TRANSCRIPTASE REVERSE II ORF2 domain identified by eMATRIX, accession number DM01354I, p-value=1.000e-40, raw score of 15.55
  DOMAIN (415)..(690): Reverse transcriptase domain identified by PFam, accession name rvt, E-value=1.7e-68, PFam score of 241.0
  misc_feature (1)...(1173): Xaa = X or * as defined in Table 2
MELKTKARELREECRSLRSPCNQLEERVSAMEDEMNEMKREGKFRDKRIKRNEQSLQEIWDFVKRPNLRLIGVPESDGENGTKLENTLQDIIQENFPNLARQANIQIQEIQRTPQRYSSRRATPRHIIVRFTKVEMKEKMLRAAREKAPHHTYSKIDHILGSKVLLSKCKRTEIITNYLSDHSAIKLELRIKNLTQNHSTTWKLNSLLLNDYWVHNEMKAEIKMFFETNENKDTTYQNLWDTFKAVCRGKFIALNAHKRKQERSKIDTLTSQLKELEKQEQTHSKASRRQEITKIRGELKEIEAQKTLQKINEYRSWFFERINKIDRPLARLIKKKREKNQIDTIKNDKGDITTDPTEIQITIREYYKHLYANKLENLEEMDKFLDTYTLPRLNQEVVESLKRPITGAEIVAIINSLPTKKSPGPDGFTAEFYQSWAETQPKKENFRPISLMNIDAKILNKILAKRIQQHIKKLIHHDQVGFIPGMQGWFNIRKSIKVIQHINRAKDKNHMIISIDAEKAFDKIQQPFMLKTLNKLGIDGTYFKIIRAIYDKPTANIILNGQKLEAFPLKTGTRQGCPLSPLLFNIVLEVLARAIRQEKEIKGIQLGKEEVKLSLFADDMIVYLENPIVSAQNLLKLIRNFSKVSGYKINVQKSQAFLYTNNRQTESQIMSELPFTIASKRIKYLGIQLTRDVKDLLKENYKPLLKEIKEDTNKWKNIPCSGEGRINIVKMAILPKELEKTTLKFIWNQKRACIAKSILSQKNKAGGITLPDFKLYYKATVTKTAWYWYQNRDIDQWNRTEPSEIMPLIYNYLIFDKPEKNKQRGKDSLFNKWCWENWLAICRKLKLDPFLTPYTKINSRWLKDLNVRTKTIKTLEEKLGITIQDIGLGKDFMSKIPKAMATKAKIDKWDLIQLKSFCTAKETTIRVNRQPTKXEKIFATYSSDKGLISRIYNELKQIYKKKTNNPIKKWAKDMNRHFSKEDIYAAKKHMKKCSSSLAIREMQIKTTMRYHLTPVRMAIIKKSGNNRCWRGCGETGTLLHCWWDCKLAQPLWKSVWRFLRDLELEIPFDPAIPLLGIYPNDYKSCCYKDTCTRMFIAALFTIAKTWNQPKCPTIIDWIKKMWHIYTMEYYAAIKNDEFVSFVGTWMKLEIIILSKLSQEQKTTHRIFSLIGGN

SEQ ID NO: 38252 - protein, 1526 aa, Homo sapiens
  DOMAIN (169)..(214): kw TRANSCRIPTASE REVERSE II ORF2 domain identified by eMATRIX, accession number DM01354N, p-value=1.000e-40, raw score of 13.17
  DOMAIN (981)..(1254): Reverse transcriptase domain identified by PFam, accession name rvt, E-value=2.2e-86, PFam score of 300.4
MENDFEELREEGFRRSNYSELREDIQTKGKEVENFEKNLEECITRITNTQKCLKELMELKTKARELREECRSLRSRCDQLEERVSAMEDEMNEMKREGKFREKRIQRNEQSLQEIWDYVKRPNLRLIGVPETLHPRDEAHLKNLIDAIKNDKGDITTDPTEIQTTIREYYKHLYANKLENLEETDKFLDTYTLPRLNQEEVESLNRPITGSEIVAIINSLPTKKSPGPDGFTAEFYQRYKEELLISNFSKVSGYKINVQKSQAFLYTSNRQTESQIMSELPFTIASKRIKYLGIQLTRDVKDLFKENYKPPLKEIKEDTNKWKNIPCSWVGRINIMKMAILPKVIYRFNAIPIKLPMPFFTELEKTTLKFIWNQKRARIAKSILSQKNKAGGITLPDFKLYYKATVTKTAWYWYQNRDIDQWNRTELSEITPHIYNYLIFDKPEKNKKWGKDSHIMAIIKKSGNNRPKVDKTTKMGKKQSRETGNSKKQSASPPPKERCSSPATEQSWMENDFDELREEGFRRSNYSELREDIQTKGKEVENFEKNLEECITRITDIEKCLKELMELKTKARELHEECRSLRSRCDQLEERVSAMEDEMNEMKNTHRLKIKGAPRFIKQVLSDLQRDLDSHTLIMGDFNTPLSTLDRSTRQKINKDTQELNSALHQADLIDIYRTLHSKSTEYTFFSAPHHTYSKIDHILGSKALLSKCKRTEIITNYLSDHSAIKLELRIKNLTQNRSTTWKLNNLLLNDYWVHNEMKAEIKMFFETNENKDTTYQNIWDAFKAVCRGKFIALNAHKRKQERSKIDTLTSQLKELEKQEQTHSKASRRQEITKIRAELKEIETQKTLQKINESRSWFFEGINKIDRPLARIIKKKREKNQIDAIKNDKGDITTDPTEIQTTIREYYKHLYANKLENLEEMDKFLDTYTLPRLNQEEVESLNTPITGSEIVAIINSLPTKKESRIRRLHSRILPEVQGGTEKEGILPNSFYEASIILIPKPGRDTTKKENFRPISLMNIDAKILNKILAKRIQQHIKKLIHHDQVGFIPGMQGWFNIHKSINVIQHINRPKDKNHMIISIDAEKAFDKIQQPFMLKTLNKLGIDGTYFKIISAIYDKPTANIILNGQKVEAFPLKTGTRQGCPLSPLLFNIVLEVLARAIRQEKEIKGIQLGKEEVKLSLFADDMIVYLENPIVSAQNLLKLISNFSKVSGYKINVQKSQAFLYTNNRQTESQIMSELPFTIASKRIKYLGIQLTRDVKDLFKENYKPLLKEIKEDTNKWKNIPCSWVGRINIVKMAILPKVIYRFNAIPIKLPMTFFTELEKTTLKFIWNQKRARITKSILSQKNKAGGITLPDFKLYYKATVTKTAWYWYQNRDIDQWNRTEPSEITPHIYNYLIFDKPEKNKQWGKDSLFNKWCWENWLAICRKLKLDPFLTPYTKINSRWIKDLNVRPKTIKTLEENLGNTIQDIGMGKDFMSKTPKAMATKAKIDKWDLIKLKSFLHSKRNYHQSEQATYKMGENFWNLLI

SEQ ID NO: 38253 - protein, 1190 aa, Homo sapiens
  DOMAIN (480)..(525): kw TRANSCRIPTASE REVERSE II ORF2 domain identified by eMATRIX, accession number DM01354N, p-value=1.000e-40, raw score of 13.17
  DOMAIN (553)..(829): Reverse transcriptase domain identified by PFam, accession name rvt, E-value=1.8e-52, PFam score of 187.7
  misc_feature (1)...(1190): Xaa = X or * as defined in Table 2
MENDFDELREEGFRRSNYSELWEDIQTKGKEVENFEKNLEECITRITNTEKCLKELMELKTKARELHEECRSLRSRCDQLEERVSAMEDEMNEMKGEGKFREKRIKRNEQSLQEIWDYVKRPNLHLIGVPESDGENGTKLENTLQDIIQENFPNLARQANVQIQEIQRMPQRYSSRRATPRHIIVRFTKVEMKEKILKAAREKDRSTRQKVNKDTQELNSALHQADLIDLIDLIYRTLHPKSTEYTFFSAPHHTYSKIDNILGSKALLSKCKRTEIITNYLSDHSAIKLELRIKNLTQNRSTTWKLNNLLLNDYWVHNKMKAEIKMFFETNENKDTTHQNLWDTFKADNYQNLWDTFKAVCRGKFIALNAQKRKQERSKIDTLTSQLKEVEKQEQTHSKVSRRQEITKIRAELKEIETKKTLQKISESRSWFFERINKIDRPLARLIKKKREKNQIDTIKNDKGDITTNPTEIQTTIREYYKHLYANKLENLEEMDKFLDTNTLPRLNQEEVESLNRPITGSEIVAIINSLLTKKSPGPDGFTAEFYQRYKEELIILIPKPGRDTTKKENFRPISLMNIDAKILNKILANRIQQHIKKLIHHDQVGFIPGMQGWFNIRKSINVIQHINRAKDKNHMTISIDAEKAFDKIQQPFMLKTLNKLGIDGTYFKIIRAIYDKPTANIILNGGQKLEAFPFEKLAQEQGCPSLTHSLFNIVLEVLARAIRQDKEIKGIQLGKEEVKLSLFADDMTVCIENPIVSAQNLLKLISNFSKVSGYKINVQKSQAFLYTDNRQTESQIMSEFPFTIASKRIKYLGIQLTRDLKDLFKENYKPLLKEIKEDTNKWKNIPWSWVGRINIMKMAILSKVIDRFNAIPIKLPMTFFTELEKTTLKFIWNQKRAHIAKSILSQKNKVGGITLPDFKLYYKATVTKTAWYWYQNRDIDQWNRTGPSEIMPHIYNYLIFDKPEKNRQWGEDSLFNKWCWETWLAIWRKLKLDPFLTLYAKINXRWIKDLNVRPKTIKTLEENLGNTIQDIGMGKDFMSNKTPKAMATKRAKIDKWDLIXLKSFCTAKETTIRVNRQPTKWEKIFGTYSSDKGLISRIYNELNPIYKKKTNNPIKKETERQIMSQLAFTIASKRIKYLGIQLTRDVKDLFKENYKPLSMKXKRIQTNGRTFHAHGXEESISXKWPHCPR

SEQ ID NO: 38254 - protein, 993 aa, Homo sapiens
  DOMAIN (316)..(361): kw TRANSCRIPTASE REVERSE II ORF2 domain identified by eMATRIX, accession number DM01354N, p-value=1.000e-40, raw score of 13.17
  DOMAIN (403)..(606): Reverse transcriptase domain identified by PFam, accession name rvt, E-value=2.4e-12, PFam score of 54.4
MVKGSIQQEELTILNIYAPNTGAPRFIKQVLSDLQRDLDSHTLIMGDFNTPLSTLDRSTRQKVNKDTQELNSALHQADLIDIYRTLHLKSTEYTFFSAPHHTYSKIDHILGSKALLSKCKRTEIITNYLSDHSAIKLELRIKNLTQNRSTTWKLNNLLLNDYWVHNKMKAEIKMFFETNENKDTTYQNLWDAFKAVCRGKFIALYAHWRKQERSKMDTLTSQLEELEKLEQTHSKASRRHEIAKIRAELKEIETQKTVEKINESRSWFFERINKIDRPLARLIKKKREKNQVDAIKNDKGDITTDPTEIQTTIREYYKHLYANKLENLEEMDKFLDTYTLPRLNQEEVESLNRPITGSEIVAIINSLPTKKSPGPDGFTAEFYQRYKEELVPFLLKLFQSIEKEGILPNSFYEASIILIAKPGRDTTKKENFRPISLMNIDAKILNKILAKRIQQHIKKLIHHDQVGFIPGMQGWFNICKSINVIQHINRAKDKKHMIISIDAEKAFDKIQQPFMLKSLNKLELEKTTLKFIWNQKRARIAKAILSQKNKAGGITLPDFKLYYKATVTKTAWYWYQNRDIDQWNRTEPSEITPHIYNYLIFDKPEKNKQWGKDSLFNKWCWENWLAICRKLKLDPFLTPYTKINSRWIKDLNVRPKTIKTLEENLGITIQDIGMGKDFMSKTPKAMATKDKIDKWDLIKLKSFCTAKETTIRVNRQPTKWKKIFTTYSSDKGLISRIYNELKQIYKKKTNNPIKKWAKDMNRHFSKEDIYAAKKHMKKCSTSLAIRVMQIKTTMRYHLTPVRMAIIKKSGNNRCWRGCGEIGTLLHCWWDCKLVQPLWKSVWRFLRDLELEIPFDPAIPLLGIYPKDYKSCCYKDTCTRMFIVALFTIVKTWNQPKCPTTIDWIKKMWHIYTMEYYAAIKNDEFMSFVGTWMILEIIILSKLSQEQKTKHRMFSLIGGNWNNEITWTQEGEYHTLGTVVGWGEGGRDSIRRYT

SEQ ID NO: 38255 - protein, 1037 aa, Homo sapiens
  DOMAIN (468)..(493): 7 kw REVERSE TRANSCRIPTASE RNA POLYMERASE domain identified by eMATRIX, accession number DM00895E, p-value=7.828e-10, raw score of 15.72
  DOMAIN (449)..(681): Reverse transcriptase domain identified by PFam, accession name rvt, E-value=1.1e-39, PFam score of 145.3
  misc_feature (1)...(1037): Xaa = X or * as defined in Table 2
WRKIYQANGKQKKAGVAILVSDKTDFKPTKIKRDKEGHYIMVKGSIQQEELTILNIYAPNTGAPTFIQQVLSDLQRDLDSHTLIIGDFNTPLSTSDRSTRQKVNKDTQELNSALHQADLIDIYRTLHPKSTEYTFFSAPHHTYSKIDHILGSKALLSKCKRTEIITNYLSDHSAIKLELMIKNLTQNHSTIWKLNNLLLNDYWVHKEMKAEIKMFFETNENKDTTYQNLWDTFKAVCRGKFIAKNAHKRKQERSKIDTLTSQLKELEKQEQTHSKASRRQEITKIRAELKEIETQKTLQKTNESRSWFFERINKIDRXTLARVIKKKGEKNQIDAIKNDKWDITTDPTEIQTTIREYYKHLYANKLENLEEMDKFLDTYTLPRLNQEEVESLNRPITGSEIEAITNSLPTKKSPGPDGFTAKFXQRYKEELVPFLLKLFQSIEKEGILPNSFYEASIILIPKSSRDTTKKENFRPISLMNIDAKILNKILANQIQQHIKKLIHHDQVGFIPGMQGWFNIRKSINVIQHINRTKDKNHMIISIDAEKPLKTGTRQGCPLSPLLFIVLEVLARAIRQKKEIKGIQLGKEEVKLSLFADDMIVYLENPIVSAQNLLKLISNFSKVSGYKINVQKSQAFLYTNNRQTESQIMSELPFTLTTTRIKYLGIQLTRDVKDLFTENYKLPLIKEIREDTNKWKNIPCSWIGRMNIMKMAILPKVIYRFNAILIKLPLTSFTKLEKTTLKFIWNQKRARIAKSILRQKNKAGGITLPDFKLYYKATVTKTAWYWYQNRYIDEXNRTEPLRNKAHIPYNYLIFDKPDKNKQWGKDSLFNKWCWENWLAICRKLKLDPFLTPYTKINSRWIKDLNVRPKTIKTLEENLSNTIQTIGVGKDSMTKSAKGMATKAKIDKWDLIQLKSFCTAKETTTIRVNRQPTEWEKIFAIYSFDKGLISRIYKELKQIYKKKTNNPMKKWAKDMNRHFSKEDIYAAKKHMKKCSSSLAITEMQIKTTMRYHLTPVRMAIIKKSGNNRDMDEIGNHHSQ

SEQ ID NO: 38256 - protein, 1478 aa, Homo sapiens
  DOMAIN (598)..(623): 7 kw REVERSE TRANSCRIPTASE RNA POLYMERASE domain identified by eMATRIX, accession number DM00895E, p-value=3.333e-11, raw score of 15.72
  DOMAIN (579)..(863): Reverse transcriptase domain identified by PFam, accession name rvt, E-value=7.7e-61, PFam score of 215.5
MELKTKARELREECRSLRSRRNQLEERVSAMEDEMNEMKREGKFREKRIKRNEQSLQEIWDYVKRPNLRLIGVPESDAENGTKLENTLQDIIQEDFPNLARQANVQIQEIQRTPQRYSSRRATPRHIIVRFTKVEMKQKMLRAAREKDFKPTKIKRDKEGHYIMVKGSIQQEELTILNIYAPNTGAPRFIKQVLSDLQRDLDSHTLIMGDFNTPLSTLDRSTRQKVNKDTQELNSALHQADLIDIYRTLHPKSTEYTFFSAPHHTYSKIDHIVGSKALLSKCKRTEIITNCLSDHSAIKLELRTKKLTQNRSTTWKLNNLLLNDYWVYNEMKAEIKMFFETNENKDTTYQNLWDAFKAVCRGKFIALIAHKRKQERSKIDTLTSQLKEPEKQEQTNHSKASRRQEITKIRAELKEIETQKNLLQPFKKINESRSWFFERINKIDRPLSKDLIKKKREKNQIDTIKNDKGDITTNPTEIQTSIREYYKHLYANKLENLEGMDKFLDTYTLPRLNQEEVESLNRPITGSEIVAVINSLPTKKSPGPDGFTAKFYQRYKEELVPFLLKLFQSIEKEGILPNSFYEASIILIPKPGRDTTKKENFRPISLMNIDAKILNKILANRIQQHIKKLIHHDQVGFIPVMQGWFNIRKSINVIQHTNRTKDRNHMFISIDAEKAFDKIQQPFMLKTINKIGIDRMYLKIIRAIYDKPTANIILKGQKLEAFPLKTGTRQGCPLSPLLFNIGVWEVLARAIRQEKEIKGIQLGKEEVELSLFADDMIVHVENSIVSAQNLLKLISNFSKVSGYKINVQKSQAFLYINNRQRESQIMSELPFTIATKRIKYLGIQLTRDVKDLFKENYKPLLKEIKEDTNKWKNIPCSWVGRINIVKMAILPKVIYRFNAIPIKLPMTFFTELEKTTLKFIWNQKRARIAKSILSQKNKAGGITLPDFKLYYKATVTKTAWYRWYQNSMVWYQNRDIDQWNRTEPSEIMPHIYNYLIFDKPLLEKNKQWGKDSLFNKWCWENWLAICRKLKLDPFLTPYTKINSRWIKDLNIRPKTIKTLEENLGITIQDIGVGKDFMTAKETTIRVNRQPTTWEKIFATYSSDKGLISRIYNELKQIYKKKTNNPIKKWAKDMNRHFSKEDIYAAKKHMKKCSSSLAIREMQIKTTMRYHLTPVRMAIIKKSGNNSFLTFLGNPRLPSFQAAGPQVQVNFLPCQRPGFHGVQSCPIRTLHSLGHYDWLRDDHVTRSNLTLRILLERPRRKAPFYPLDFPRSYDAGLELLVPSCHHKGQPAWKWSQRRGESNTVADLTGGSAQAVTFAHPPLTSCHVAQFLTGYEPVLVHGLGVWDSCYIQYITTTEVRCGHVAEFHPMACGGSDLTLKEQLFFFHILSHSADRKKMMMRPRAYRHACWKRFGTFWMFQGSYPNAENGLQSSTGKSSYGENGEIYKGKTFYSYKSRHLWMSSYACMKTHMDGEDLDFFT

SEQ ID NO: 38257 - protein, 2027 aa, Homo sapiens
  DOMAIN (252)..(293): kw TRANSCRIPTASE REVERSE II ORF2 domain identified by eMATRIX, accession number DM01354I, p-value=1.000e-40, raw score of 15.55
  DOMAIN (8)..(240): AP endonuclease family 1 domain identified by PFam, accession name AP_endonucleas1, E-value=2.8e-83, PFam score of 290.1
  misc_feature (1)...(2027): Xaa = X or * as defined in Table 2
MTGSNSHITILTLNINGLNSAIKRHRLASWIKSQDPSVVCIQETHLTCRDTHRLEIKGWRNIYQANGKQKKAGVAILVSDKTDFKPTKIKRDKEGHYIMAKGSIQEEELTILNIYAPNTGAPRFIKQVLSDLQRDLDSHTLIMGDFNTPLSTLDRSTRQKVNKDTQELNSALHQADLIDIYRTLHPKSTEYTFFSAPHHTYSKIDHIVGSKALLSKCKRTEIITNYLSDHSAIKLELRIKKLTQNRSTTWKLNNLLLNDYWVHNEMKAEIKMFFETNENKDTTYQNLWDTFKAVCRGKFIALNAHKRKQGRSKIDTLTSHLKELEKQTHAHSKDSRRQEITKIRAELKEIETQKNPFKKLMNSRSWFFERINKIDRPLARLIKKKREKNQIDAIKNDKGDITTDPTEIQTTLSRDYYKHLYANKLENLEEMDKFLDTYALPRLNQEEVESLNRPITGAEIVAIINSLPTKKSPGPDGFTAKFYQRYKEELVPFLLKLFQSIEKEGILLDSFYEASIILIPKPGRDTTKKENFRPRSLMNIDAKILNKILAKRIQQHIKKLIHHDQVGFIPGMQGWFNIRKSINLIQHINRAKDKNHMIISIDAEKAFDKIQQPFMLKTLNKLSIDGTYYFKIIRAIHDKPTANIILNGQKLEAFPLKTGTRQGCPLSPLLFNICKSKKLLEARAIRQEKEIKGIQLGKEEVKFSPLFADDMIVYVENPLPSQPQNLLXGWLSNFSKMSSGYKINVQKSQAFLYTNNRQTENQIMSELPFVIASKRIKYLGIQLTRDVKDLLKENYKPLLNEIKEDTNKRKNIPCSXVGRINIVKMAILPKVIYRFNAIPIKLPMTFFTELEKTTLKFIWNQKRAPTCPKSNPXAQKNKAGGITLPDFKLYLQGLQXPKTAWYWYQNRDIDQWNRIKPSEITPHIYNYLIFDKPDKNKQWGKDSLFNKWCWENWLAIYRKLKLDPFLTPYTKISNSRWIKDLNVRPKTIKTLEENLGITIQDIGMGKDFMSKTPKAMATKAKIDKWDLIKLKSFCTAKETTIRVNRQPTEREKIFATYSSDKGLISRIYNEHKQIYKKKTNNPIKNWAKDMNRHFTKEDIYAVNRHMKKCSSSLAIREMQIETTMRYHLTPVRMAIIKKSGNNRDVGNVVEAMYGDLPPPIMLIGHSMGGAIAVHTASSNLVPSLLGLCMIDVVEGTAMDALNSMQNFLRGRPKTFKSLENAIEWRNIKDLSWADSIKNVAAASLACISGALPASAVTTSPDNKRMARNVLKYERLLAESPNHVVAEAVIQRPNIPHLQTRDTYEGLCQTLGSQPTLYQIPSLYCSYETNSNAYLLLQPIRKEVIHLEPYIALYHDFVSDSEAQKIRELAEPWEQSSSPATEQSWMENDFDELREEGFRRSNYSELQEEIRTNGKEVKSFEKKLDEWITRITNAEKSLKDLMELKTKARELRDECRSLSSRCNQLEERVSVMEDEMNETKRGEKFREKRIKRNEQSLQEIWDYVKRPNLRLIGVPEDRSMRQKVNKDTQELNSALHQADLIDIYRTLHPKSTEYTFFSAPHHTYSKIDHIVGSKALLSKCKRTEIITNYLSDHSAIKLELKIKKLTQNFSTTWKLNNLLLNDYWVHNKMKAEIKMFFETNENKDTTYQNLWDTFKAVCRGKFIALNAYKRKQERSKIDTLTSQLKELEKQEQTHSKASRRQEITKIRAELKEIETQKTLQKINESRSWFFERINKIDRPLARLIKKKREKNQIDAIKNDKGDITTDPTEIQTTIREYYKHLYTNKLENLEEMDKFLDTYTLPRLNQEEVESLNRPITGSEIVAIIHSLPTKKSPGPDGFTAQFYQRYKEELRIKYLGIQLTKDVKDLFKENYKPLLKEIKEDKNKWKNIPCSWVGRINIMKMAILPKVIYRFNAIPIKLPMTFFIELEKTTLKFIWNQKRALIAKSILSQMNRAGGIMLPDFKLYYMATVTKTAWYWYQNRDIDQWNRTEPSEITPHIYNYLIFDKPWEKPSNGERIPYLINGAGKTG

SEQ ID NO: 38258 - protein, 258 aa, Homo sapiens
  DOMAIN (170)..(198): HECT-domain (ubiquitin-transferase) domain identified by eMATRIX, accession number PF00632B, p-value=3.314e-19, raw score of 18.45
  DOMAIN (2)..(258): HECT-domain (ubiquitin-transferase) domain identified by PFam, accession name HECT, E-value=1.2e-09, PFam score of 28.8
  misc_feature (1)...(258): Xaa = X or * as defined in Table 2
CGLAIYNCTIVDLHFPLALYKKLLKKKPSLDDLKELMPDVGRSMQQLLDYPEDDIEETFCLNFTITVENFGATEVKELVLNGADTAVNKQNRQEFVDAYVDYIFNTSVASLFRCFSSGFHKVCGGKGLRLFQPNELQAMVIGNTHFXWKGTGKDYRNTKGNIWAEHPTIKIFWEVFHELPLEKKKRFLLFLTGSDRIPILGMKSLKLVIQSTGGGEEYLPVSHTCFNLLDLPKYTKKETLRSXTXSQAIDHNEGFSLI

SEQ ID NO: 38259 - protein, 549 aa, Homo sapiens
  DOMAIN (358)..(376): HIV REV INTERACTING PROTEIN SIGNATURE domain identified by eMATRIX, accession number PR00405B, p-value=8.744e-14, raw score of 11.83
  DOMAIN (327)..(447): Putative GTP-ase activating protein for Arf domain identified by PFam, accession name ArfGap, E-value=4.8e-49, PFam score of 176.4
MGEAKAQVSTVRFSQQYSLCSTIFLDDSTAIQHYLTMTIISDADRSLSIPDEQLHSFAVSTVHIMKKRNGGGSLNNYSSSIPSTPSTSQEDPQFSVPPTANTPTPVCKRSMRWSNLFTSEKGSDPDKERKAPENHADTIGSGRAIPIKQGMLLKRSGKWLKTWKKKYVTLCSNGVLTYYSSLGDYMKNIHKKEIDLQTSTIKVPGKWPSLATSACTPISTSKSNGLSKDMDTGLGDSICFSPSISSTTSPKLNPPPSPHANKKKHLKKKSTNNFMIVSATGQTWHFEATTYEERDAWVQAIQSQILASLQSCESSKSKSQLTSQSKAMALQSIQNMRGNAHCVDCETQNPKWASLNLGVLMCIECSGIHRSLGTRLSRVRSLELDDWPVELRKVMSSIGNDLANSIWEGSSQGQTKPSEKSTREEKERWIRSKYEEKLFLAPLPCTELSLGQQLLRATADEDLQTAILLLAHGSREEVNETCGEGDGCTALHLACRKGNVVLAQLLIWYGVDVMARDAHGNTALTYARQASSQECINVLLQYGCPDKCV

SEQ ID NO: 38260 - protein, 64 aa, Homo sapiens
  misc_feature (1)...(64): Xaa = X or * as defined in Table 2
XVSLEFDQQQGSVCPSESEIYEAGAGDRMAGAPMAAAVQPAEVTVEVGEDLHMHHVRDREMPEX

SEQ ID NO: 38261 - protein, 375 aa, Homo sapiens
  DOMAIN (237)..(248): Tyrosine specific protein phosphatases proteins domain identified by eMATRIX, accession number BL00383E, p-value=6.211e- 09, raw score of 10.35
  DOMAIN (153)..(292): Dual specificity phosphatase, catalytic doma domain identified by PFam, accession name DSPc, E-value=5e-31, PFam score of 116.5
  misc_feature (1)...(375): Xaa = X or * as defined in Table 2
MVGAAELARAARVPRNAPRGERYRAATFLEYNSWHVLSSVNICCSKLVKCRLQKGKVTIAEFIWLATRSQMEATEPQDMVVYDQSTRDASVLAADRFLSILLSKLDSCFDSVAILTGGFATFSSCFPSLCQGKPAALLPMSLSQPCLPVPSVSLTLILPHLYLGSQKDVLNKDLTTQNGISYVLNASNSCPKPDFICESRFMRVPINDNYCEKLLPWLDKSMEFICKGKLSSCQVIVHCLVGISHSATIAIAYIMKTMGISSDDTYRCDLGGIGWMCGGMRRGSILCEADCCSREDACYRGCSIDIPFGGWGIVGPVESAEEWPGTGSVSLEFDQQQGSVCPSESEIYEAGAGDRMAGAPMAAAVQPAEVTVEVX

SEQ ID NO: 38262 - protein, 1042 aa, Homo sapiens
  DOMAIN (845)..(863): HIV REV INTERACTING PROTEIN SIGNATURE domain identified by eMATRIX, accession number PR00405B, p-value=1.563e-13, raw score of 11.83
  DOMAIN (817)..(945): Putative GTP-ase activating protein for Arf domain identified by PFam, accession name ArfGap, E-value=2.7e-16, PFam score of 67.6
  misc_feature (1)...(1042): Xaa = X or * as defined in Table 2
MVTHQQPAARKPNMTSKKPKPMGPKAHGIFSGTRKNNLEIYMDQTRTGIAKTKLSKNNKSGGMTLPDFKLYYKAIVAKIACGGSMYNSDTDEDEETEPSSSGQQIIENSITMNKMKLLKAKMKNMNLSKKHITQVSDEEEDDDGCDLFADSEKEEKDIEDIEENTRPKRSRPTSFADELAARIKGDAVGRVDEEPTTVSYEDDRRGKNQDAYTEGGLSTIKTVNCSSSLTLRRSKTSEDTQEKKERRTPSDDEEDNLFAPPKLTDEDFSPFGSGGGLFSGGKGLFDDEDEEDIEESSNPLWSGYSLRWAREPPQQPETHTVVSTNEKPEQWLKGENWGSVSTPLQKRSRPTSFADELAARIKGDAMGRVDEEPTNEEDNLFAPPKLTDEDFSPFGSGGGLFSGGKGLFDDEDEESDLFTEAPQDRQAGASVKEGKLGLGSCVSVCRVPKLSFSLGDGTLRRHGCAASVPSLKEPQKPEQPTPRKSPYGPPPTGLFDDDDGDDDNDFFSTPHSKPSKTGTEKPFRKIGMDCDLGDTSSYHTKVSTVHITKNRNGGGSLNNYSSSIPSTPSTSQEDPQFSVPPTANTPTPVCKRSMRWSNLFTSRKGEXPRTKRGKAPGGIMVDTIGEAGRAIPIKQGMLLKRSGKWLKTWKKKYVTLCSNGMLTYYSSLGDYYEELFIKKEIDLQTSTNQKSQEKWPSLATSACTPISSSKSNGLSKDMDTGLGDSICFSPSISSTTSPKLNPPPSPHANKKKHLKKKSTNNFMIVSATGQTWHFEATTYEERDAWVQAIQSQILASLQSCESSKSKSQLTSQSKAMALQSIQNMRGNAHCVDCXETQNPKWASLNLGVLMCIECSGIHRSLGHPPFPVLRSLGAGMDWPVXAQGRLCSSIGQXPXPTASWEGSSQGQTKPSEKSTREEKERWIRSKYEEKLFLAPLPCTELSLGQQLLRATADEDLQTAILLLAHGSREEVNETCGEGDGCTALHLACRKGNVVLAQSLIWYGVDVMARDAHGNTALTYARQASSQECINVLLQYGCPDECV

SEQ ID NO: 38263 - protein, 470 aa, Homo sapiens
  DOMAIN (409)..(427): HIV REV INTERACTING PROTEIN SIGNATURE domain identified by eMATRIX, accession number PR00405B, p-value=8.313e-13, raw score of 11.83
  DOMAIN (378)..(469): Putative GTP-ase activating protein for Arf domain identified by PFam, accession name ArfGap, E-value=5.5e-22, PFam score of 86.5
MLIDASFGFEMETFEFLNIGQVSTERFSQQYSSCSTIFLDGSTASQHYLIMTIISVTLEIHHHITERDADRSLTILDEQLYSFAFSTVHITKKRNGGGSLNNYSSSIPLTPSTSQEDLYFSVPPTANTPTPICKQSMGWSNLFTSEKGSDPDKGRKALESHADTIGSGRAIPIKQGMLLKRSGKWLKTWKKKYVTLCSNGVLTYYSSLGDYMKNIHKKEIDLRTSTIKVPGKWPSLATSACAPISSSKSNGLSKDMEALHMSANSDIGLGDSICFSPSISSTTSPKLNLPPSPHANKKKHLKKKSTNNLKDDGLSSTAEEEEEKFMIVSVTGQTCHFKATTYEERDAWVQAIQSQILASLQSCESSKSKSQLTSQSEAMALQSIQNMRGNSHCVDCETQNPKWASLNLGVLMCIECSGIHRSFGTRLSRVRSLELDDWPVELRKVMSSIGNELANSIWKGTKPGADKTLN

SEQ ID NO: 38264 - protein, 92 aa, Homo sapiens
PPKLTTPTSPDVLKVTSNATKQKQSSVPAFISGLVTGTLKHLVKHARALWNRLLQDPRRRAGSLGKPVPPDGSSVASDTATHSSGSFCSPFT

SEQ ID NO: 38265 - protein, 170 aa, Homo sapiens
  misc_feature (1)...(170): Xaa = X or * as defined in Table 2
FYLKELDPAEHSYVLIRKIDPALVWGLTGDQGTPKTRLLMITLDSIFMQASCVPEEVVWEVLRVLEAHSSKKHFVFGESMKLITKASVQQEYLVHKXVSHSNPTLYVFLWGLSKETRQMEVPEFVAKVNDTHPSSFSVGSKXGIXEKEGGRYPVPEMGSCRLVTVTSASV

SEQ ID NO: 38266 - protein, 116 aa, Homo sapiens
ARVLLDVFCALHGPRERCVEILRSGHLLAISPGGVREALISDETYNIVWGHRRGFAQVAIDAKVPIIPMFTQNIREGFRSLGGTRLFRWLYEKFRYPFAPMYGGFPVKLRTYLGDP

SEQ ID NO: 38267 - protein, 175 aa, Homo sapiens
  misc_feature (1)...(175): Xaa = X or * as defined in Table 2
EKGERPHWSNKPSNLKRTHELDIDENPASDFDDSGSLLGFKYGSGQKYGGIPYFSHRQVRXXEKNVKLKAKYLNMRGQIKMKNKHIFFTKETEKPFFKKSKILSKVEKFLTWVNKPMDEEASQESSSHDNGHDASTSCDSEEQDMSVKKGDDLLETNNPEPEKCQSVSSAGELET

SEQ ID NO: 38268 - protein, 456 aa, Homo sapiens
  DOMAIN (297)..(310): RNA methyltransferase trmA family proteins domain identified by eMATRIX, accession number BL01230B, p-value=2.373e-09, raw score of 11.62
  misc_feature (1)...(456): Xaa = X or * as defined in Table 2
MPVGTSNFLLLGLLENPNLPLTRPSPFPSQREASWGIQKATTGPGEGECTRLGFSLLLDVFCALHGPREKCVEILRSGHLLAISPGGVREALISDETYNIVWGHRRGFAQVAIDAKVVEKFLTWVNKPMDEEASQESSSHDNVHDASTSSDSEEQDMSVKKGDDLLETNNPEPEKCQSVSSAGELETENYERDSLLATVPDEQDCVTQEVPDSRQAETEAEVKKKKNKKKNKKVNGLPPEIAAVPELAKYWAQRYRLFSRFDDGIKLDREGWFSVTPEKIAEHIAGRVSQSFKCDVVVDAFCGVGGNTIQFALTGMRVIAIDIDPVKIALARNNAEVYGIADKIEFICGDFLLLASFXKADVVFLSPPWGGPDYATAETFDIRTMMSPDGFEIFRLSKKITKNIVYFLPRNADIDQVASLAGPGGQVEIEQNFLNNKLKTITAYFGDLIRRPASET

SEQ ID NO: 38269 - protein, 184 aa, Homo sapiens
  DOMAIN (152)..(169): Zinc finger C2H2 type, domain proteins. domain identified by eMATRIX, accession number BL00028, p-value=5.500e-13, raw score of 16.07
  DOMAIN (9)..(176): Zinc finger, C2H2 type domain identified by PFam, accession name zf-C2H2, E-value=4.2e-37, PFam score of 136.7
  misc_feature (1)...(184): Xaa = X or * as defined in Table 2
RIHTGEKPYDCKDCGKAFGRTSELILHQRLHTGVKPYECKECGKTFRQHSQLILHQRTHTGEKPYVCKDCGKAFIRGLQLTVHRRIHTGARPYGVLKECGESLLDSTHSXLLHQRIHTGEEPYECKECGKGFIHSSEVTRHQRIHSGEKPYECKECGKAFRQHAQLTRHQRVHTGDRPYESAED

SEQ ID NO: 38270 - protein, 378 aa, Homo sapiens
  misc_feature (1)...(378): Xaa = X or * as defined in Table 2
HTTASQTTMSQAVRRRRSDYLSSARRRRDPARSKPTQGGPPPNPPPTRQGRPTALTNPSQPRPRHRAHPHQHATPKPRTNEEQEGRRHTKQPNPTRTEPRPPNRRGRPNPQTRRTKQQNTTPQAHTSTRKNARTPGLCPXCVKGKTEGGYDARASARGPYMAGVSWPGEHEDPGAPEARRGRRALPGGSAFPEMSTHTESTPKTTAHTSNDRRNREQRVKKKTYKTTRSRGANRNSTERHEDGYFYGSLTTGPLPWHSAIHSVSAGQPWSLKFVTGLQQASEGYFSQSQERSLPNRKSSVPRLRLLFLQQASRLSELPLGTEGPGSLLLRPREELACTGKRRKTGGAIMGEVSVCELSLPAPAFQSPVQLCGCQPEKA

SEQ ID NO: 38271 - protein, 681 aa, Homo sapiens
  DOMAIN (382)..(397): WILM'S TUMOUR PROTEIN SIGNATURE domain identified by eMATRIX, accession number PR00049D, p-value=4.375e-12, raw score of 0.00
  misc_feature (1)...(681): Xaa = X or * as defined in Table 2
REAAAATPSFPPSSSVRPSVRASVRSARSGPKHGRRQLQRPPPGARWRLTRRXSERRARPTGLCTHMKMAPMTSSLQHQEKGACRSFRDTLRTRRXCTASAVSRTPKRSAKIRAHQLGGRRCAXCPQVRLCQPRGXGGRVLPGCRRDRERQQRGRHRRGCHRAAALXRAGATLQPCAAPTAAARGXERSSPWAPPTRRRMQLWKXSGLTESSSGSRPRRKKSCGRRRSGRRPWMRGSGSSRSGWSRSGRSKRSASGATGSGSSRSRSTGGNSRLXKRKRPRGGXRSSLSLVTIGMRRKRPTXRSQSRRWRRQQLLLPSGLTTQGSSSSSRKESHRPLRAAVMYPRPSTIDQAATWTATGGWRPLPSPRGARLTPAPPPPLSLSRXSGPWMRSPPPQPPPLPPPPPPPKRPRSPAPSXTVRRPEQQPLRPGPAPWRSPLRHRRLPGGQAALQRTXCSWSLQSRLSWLLPWSLPQLTPRRSTMQLTPLKLTLPLLTPLLPTTYPPPPPASLTYGLATGKGPPHSRVSPGPPRHPRVLRSPWQRCPCWMRWLRSHCCQQAKAVPPFSTLMSCLSRQPPSVTQRKWKGSPWLPPRPQLCPQPLRSWSKSRSRSPTCXPMARPPRRRGPRPSEGYFSQSQEEEFAQSEELCAKAPPPVFYNKASENVIHMLGCRPSSRRGGGLRGW

SEQ ID NO: 38272 - protein, 56 aa, Homo sapiens
  DOMAIN (11)..(29): Immunoglobulins and major histocompatibility complex proteins domain identified by eMATRIX, accession number BL00290B, p-value= 4.000e-21, raw score of 13.17
VVVPSGEEQRYTCHVQHEGLPKPLTLRWDRKGGSYSQAASSDSAQGSDVSLTACKV

SEQ ID NO: 38273 - protein, 286 aa, Homo sapiens
  DOMAIN (195)..(213): Immunoglobulins and major histocompatibility complex proteins domain identified by eMATRIX, accession number BL00290B, p-value= 4.000e-21, raw score of 13.17
  DOMAIN (24)..(111): Class I Histocompatibility antigen, domains domain identified by PFam, accession name MHC_I, E-value=5e-40, PFam score of 146.4
  misc_feature (1)...(286): Xaa = X or * as defined in Table 2
GVMASRTLLLLLLGALALTETWAGTHSIRYFSTAVSRPGRGEPRYIAVGYVDDTQFDAATPRMXPQSPWLEQEGPEYWDRSTRNIRPAHRLTRVNLPMPRRYYHQSXAGTGIFHGIRRYIPDTCVQTHMIHHSVSDYKATLRCWALGFYPVEITLAWQQDEEDQTRDHELVETRPAGDGTFQKWAAVVVPSGQEQRYTCHVQHEGLPKPLTLRWEPSSQPTIPIVGIIAGLVLFGAVITGAVVAAVMWQEEELRTFSSHRXSELTSERASSDHAQGSDVSLTACKV

SEQ ID NO: 38274 - protein, 197 aa, Homo sapiens
  DOMAIN (29)..(98): Neurotransmitter-gated ion-channel domain identified by PFam, accession name neur_chan, E-value=5.8e-30, PFam score of 105.5
MVTDYAIELFLQASLILLSSTLPYNEREMGLSIFALLTLTVFLLLLADKVPETSLSVPIIIKYLMFTMVLVTFSVILSVVVLTLHHRSPHTHQMPLLVPSDLHSQTSAVPASKKAQTRERPDAGAPSLFFSRKWLGYIARQLQEQEDHDVAEGGLAVCGHGSGPPLPVDFHHLHQRWDPSHLPGRHVPLAPSRPLSL

SEQ ID NO: 38275 - protein, 122 aa, Homo sapiens
  misc_feature (1)...(122): Xaa = X or * as defined in Table 2
ILKHPTLDKELILTYLFIYLFIFLRRNFTLVAXARVQWCDLAPPQPLSPGFKPFSCLRFPSSWDYRYAPPYLANFVFLVGTGFSMLVRLVSNSRPQCDPPASASQSAGITGVNHHARITFNF

SEQ ID NO: 38276 - protein, 202 aa, Homo sapiens
  DOMAIN (25)..(163): Josephin domain identified by PFam, accession name Josephin, E-value=4.5e-05, PFam score of 21.0
MSCVPWKGDKAKSESLELPQAAPPQIYHEKQRRELCALHALNNVFQDSNAFTRDTLQEIFQRLSPNTMVTPHKKSMLGNGNYDVNVIMAALQTKGYEAVWWDKRRDVGVIALTNVMGFIMNLPSSLCWGPLKLPLKRQHWICVREVGGAYYNLDSKLKMPEWIGGESELRKFLKHHLRGKNCELLLVVPEEVEAHQSWRTDV

SEQ ID NO: 38277 - protein, 219 aa, Homo sapiens
CRGSQPAPPLTPHPPNAPLGPSDLHSQTSAVPASKKAQTRGDLMPEPPHCSSPGSGWGRGTDEYFIRKPPSDFLFPKPNRFQPELSAPDLRRFIDVSKPGCGPASGATGGVSSISYIARQLQEQEDHDVAEGGLAVCGHGSGPPLPVDFHHLHQRWDPRSSSWSHVPLAPSRPLSLKTGGLRPGPLPVEVREFGDTVKPYPSLPLNSFTRNLGLLFRSG

SEQ ID NO: 38278 - protein, 276 aa, Homo sapiens
  misc_feature (1)...(276): Xaa = X or * as defined in Table 2
DEVSLCCQAGVQLHDVGSLQTASQVQAILLPQPPEVAEISGACHHACLIFVFLVEMGFHHIGQAGLKLPTSGDLPASASQSAGITGVSHRARPASSYLFFFXDEVSLCCQAGVQLHDVGSLQLPPRFKRFSCPASRSSXDFRRLPPRLPNFCIFMXRWGFTILARLVSNSRPQCDLPASASQSAGITGVSHRARPASSYCIFFLRWRLTIAQAGVXXCNLSSLQPPTPGFKWVSCLSLPSSWDYRSLPPLPANFCIFSRDGVSLCSLSWSRTPDFK

SEQ ID NO: 38279 - protein, 51 aa, Homo sapiens [sequence omitted]

SEQ ID NO: 38280 - protein, 215 aa, Homo sapiens
  misc_feature (1)...(215): Xaa = X or * as defined in Table 2
TGLYFLFLFCLRRSLASVAQPGVQWRDLGSLQPAPPGLRRFSFLSLQSSWEYRCPLPRPADFLYFXSRRGFSTLVRLVSNSRPQCDPPASASQSAGITGVSHCARLFFSFEMEFRSVAQAGVQWRDLDSLQPLPPGLTXFSCLSLPRLGAAWDYRRVPPCPAIFCIFFFFSRDRVSPCWSGWSQTPDPQVIRPPRPSQSAGITGVSHRARPSHIS

SEQ ID NO: 38281 - protein, 41 aa, Homo sapiens
  misc_feature (1)...(41): Xaa = X or * as defined in Table 2
YTMTGPGCWRPLXTGPHPPHTWPGGSSSHPQIPHRPPCVFG

SEQ ID NO: 38282 - protein, 366 aa, Homo sapiens
  misc_feature (1)...(366): Xaa = X or * as defined in Table 2
ERTEPDHTTTLTXPELPADTTATVEDMLPSVTSVTTNSDTITETFATAQYILTSETTTLTSSIAPPATATPDSNSVPAGQATPSKGPSASAPSPAPASAPKVAPLVDLSDTPTSTPAASNLSSSVLANQGAVLSPSAPAGVGEASKAPPASKPTPAPVPTPTGAASPLAAAAAPATEAPQAKQEAPSTKGPDPEPTQPGAAKSPAEAATALASPKSEAASVSTTNPSQGEDFKMDEGNFKTPDIDLAKDVFAALGSPAPAAGASGQAPELAPSTADSSVSPAPAKTEYGLSLSAVIGLCPVVSGWEDSGLPSIKWLLGLKVQEKGLNLSGKNTASGINLGLEEERTRSSDSVLLNYGCTLESLGCF

SEQ ID NO: 38283 - protein, 123 aa, Homo sapiens
  misc_feature (1)...(123): Xaa = X or * as defined in Table 2
ARQAMKSCLHQCFLTLPRQALEASSCNSTGWGGEGTGKSGLQRGPXNQCWEPSPAQQAAFTSSXAVATAAGQGEEELPLLPPSTTPGKNTASGINLWLEEERTRSSDSVLLNYGCTLKSLACF

SEQ ID NO: 38284 - protein, 738 aa, Homo sapiens
  misc_feature (1)...(738): Xaa = X or * as defined in Table 2
MFEASVGWFMRLEERTRLHDIQAQDEAVTADLEAAAGYPDLAKIIDEGGYTKQQIFSVDDTAFSWKKMTLRTFIAKEGTNTDGASSATSSLVSLCLELCFLRAHHDVGFYCDLDVYQSAVYAPTCPTGYSLPQAKEESDFIPLEYEKGRITSTAGQGQDVEPEMEQLEKGSIKGVTETRTGPLGCSNYDNLDSVSSVLVQSPENKVQLLGLQVLLPEYLRERFVAAALSYITCSSEGELVCKENDCWCKCSPTFPECNCPDADIQAMEDSLLQIQDSWATHNRQFEESEEFQALLKRLPDDRFLNSTAISQFWAMDTSLQHRYQQLGSWLXKVLFKKTHRILRRLFNLCKRCHRQPRFRLPKERSLSYWWNRIQSLLYCGESTFPGTFLEQSHSCTCPYDQSSCQGPIPCALGEGPACAHCAPDNSTRCGSCNPGYVLAQGLCRPEVAESLENFLGLETDLQDLELKYLLQKQDSRIEVHSIFISNDMRLGSWFDPSWRKRMLLTLKSNKYKPGLVHVMLALSLQICLTKNSTLEPVMAIYVNPFGGSHSESWFMPVNEGQFSLTWERTNVDAAAQCQNWTMHLGGIRWKTFFETVHVYLRSRIKSLDDSSNETIYYEPLEDDWIPLRNLGYMKINTLQVFGYSLPFDPDAIRDLILQLDYPYTQGSQDSALLQLIELRDRVNQLSPPGKVRLDLFSCLLRHRLKLANNEVGRIQSSLRAFNSKLPNPVEYETGKLCS

SEQ ID NO: 38285 - protein, 57 aa, Homo sapiens
  DOMAIN (47)..(56): Cell division protein domain identified by PFam, accession name GTP_CDC, E-value=0.037, PFam score of 11.1
MSVSARSAAAEERSVNSSTMVAQQKNLEGYVGFANLPNQVYRKSVKRGFEFTLMVVE

SEQ ID NO: 38286 - protein, 84 aa, Homo sapiens
  DOMAIN (2)..(17): WILM'S TUMOUR PROTEIN SIGNATURE domain identified by eMATRIX, accession number PR00049D, p-value=4.508e-09, raw score of 0.00
  misc_feature (1)...(84): Xaa = X or * as defined in Table 2
KLSPPPPPLPPSPPLPRPGPAGPPSRLPSPPASASPQGVPXLGPAAAELPGIRSRXPQVAAPEAETHPWCCCXRSSPQQQRISH

SEQ ID NO: 38287 - protein, 348 aa, Homo sapiens
  DOMAIN (15)..(260): Armadillo/beta-catenin-like repeats domain identified by PFam, accession name Armadillo_seg, E-value=1e-05, PFam score of 32.4
MAHSQNSLELPININATQITTAYGHRALPKLKEELQSEDLQTRQKALMALCDLMHDPECIYKAMNIGCMENLKALLKDSNSMVRIKTTEVLHITASHSVGRYAFLEHDIVLALSFLLNDPSPVCRGNLYKAYMQLVQVPRGAQEIISKGLISSLVWKLQVEVEEEEFQEFILDTLVLCLQEDATEALGSNVVLVLKQKLLSANQNIRSKAARALLNVSISREGKKQVCHFDVIPILVHLLKDPVEHVKSNAAGALMFATVITEGKYAALEAQAIGLLLELLHSPMTIARLNATKALTMLAEAPEGRKALQTHVPTFRAMEVETYEKPQVAEALQRAARIAISVIEFKP

SEQ ID NO: 38288 - protein, 259 aa, Homo sapiens
  misc_feature (1)...(259): Xaa = X or * as defined in Table 2
MAVTAAACWSLRPLARRDVCVGVALASPFVKPTHWFCKTLLEPCRPTGMGAQEIISKGLISSLVWKLQVEVEEEEFQEFILDTLVLCLQEDATEALGSNVVLVLKQKLLSANQNIRSKAARALLNVSISREGKKQVCHFDVIPNPWSHLLKDPVEHVKVXRCRLPLMFATVITEGKYAALEAQAIGLLLELLHSPMTIARLNATKALTMLAEAPEGRKALQTHVPTFRAMEVETYEKPQVAEALQRAARIAISVIEFKP

SEQ ID NO: 38289 - protein, 99 aa, Homo sapiens
  DOMAIN (12)..(49): Endopeptidase Clp serine proteins domain identified by eMATRIX, accession number BL00381A, p-value=3.143e-25, raw score of 16.48
  DOMAIN (1)..(84): Clp protease domain identified by PFam, accession name CLP_protease, E-value=4.7e-33, PFam score of 123.2
VEQTGRGERAYDIYSRLLRNAFLCVMGPIDDSVASLVIAQLLFLQSESNKKPIHMYINSPGGVVTAGLAIYDTMQYILNPICTLPRTVRMSPRWCRRSL

SEQ ID NO: 38290 - protein, 156 aa, Homo sapiens
  DOMAIN (112)..(156): Endopeptidase Clp serine proteins domain identified by eMATRIX, accession number BL00381C, p-value=1.250e-32, raw score of 23.84
  DOMAIN (27)..(156): Clp protease domain identified by PFam, accession name CLP_protease, E-value=2.7e-53, PFam score of 190.5
RPPQRTLQNGLALQRCLHATATRALPLIPIVVEQTGRGEASYDIYSRLLRERIVCVMGPIDDSVASLVIAQLLFLQSESNKKPIHMYINQPSGGARGQATDIAIQAEEIMKLKKQLYNIYAKHTKQSLQVIESAMERDRYMSPMEAQEFGILDKVL

SEQ ID NO: 38291 - protein, 283 aa, Homo sapiens
  DOMAIN (62)..(99): Endopeptidase Clp serine proteins domain identified by eMATRIX, accession number BL00381A, p-value=3.700e-26, raw score of 16.48
  DOMAIN (47)..(204): Clp protease domain identified by PFam, accession name CLP_protease, E-value=6.2e-17, PFam score of 66.5
  misc_feature (1)...(283): Xaa = X or * as defined in Table 2
SCRYPALGPRLAAHFPAQRPPQRRPPRTACSLQRCLHATATRALPLIPIVVEQTGRGERAYDIYSRLLRERIVCVMGPIDDSVASLVIAQLLFLQSRSNMKPIHMYINSPGWVWVTAGLGHLTDTIAVTFLQPDFCTWCSLGPGAASMGSLAFFAAGTPGMRHFAPQLPVFMIQPALQEGAGGQSPPDIAIQAEENPXKLKKQLYNIXRQRTTQTRSLQGDRVPPMAEGTAXHEAPMEGPQEFGILKTRFLVPPSPQDGEDEAPRLVQKEPVEAAPAAEPVSS

SEQ ID NO: 38292 - protein, 695 aa, Homo sapiens
  DOMAIN (465)..(481): CYCLOPHILIN PEPTIDYL-PROLYL CIS-TRANS ISOMERASE SIGNATURE domain identified by eMATRIX, accession number PR00153E, p-value= 2.385e-15, raw score of 9.10
  DOMAIN (431)..(507): Cyclophilin type peptidyl-prolyl cis-tr domain identified by PFam, accession name pro_isomerase, E-value=1.4e-20, PFam score of 74.5
MPTGDISVFLRIKVIDSWFKIRLSEIYSYAYKKLASEAPAGLSNPDCWAPPPEAGLSPQGMRTPPIAPRRENFSSNIRQKHYVARGPGRAGTSGLEMREVGNFHTSRAHKHSLPKRWLYPGKAPLRRPDHRQPRASTAKPRQVARRLGPPESRCGVARGSLTATQPQWVPFLLPRPPTPPPFPGVLLPTPPSGARTPAPARRWDVGSVTVDSPGLPESRSRKAASQARPALPVGLRTAAAARGRPSSASRRRVAPRTAGAGGRATPVERPPSWTTRAEGSRGRECGKAPSEELNLSTPLQKQNGPLLEGIHFGPQDGDSRRMASSTCQPLANGKIGGYPGEDCQIDFTHMPKTKGIQYLLVWSDTFTNWVEAFPCRTEKASERRRSGRHGGSTGDHFRRRRHRLVHRRTAACQLYGDQASFFEAEKVPRIKHKKKGTVSMVNNGSDQHGSQFLITTGENLDYLDGVHTVFGEVTEGMDIIKKINETFVDKDFVPYQDIRINHTVILDDPFDDPPDLLIPDRSPEPTREQLDSGRIGADEEIDDFKGRSAEEVEEIKAEKEAKTQAILLEMVGDLPDADIKPPENVLFVCKLNPVTTDEDLEIIFSRFGPIRSCEVIRDWKTGESLCYAFIEFEKGGGAYGKTPATRPFYGSWPFAGLLLTCSFLRYPLILWITVLPPLSELIPLAAAERPSAASQ

SEQ ID NO: 38293 - protein, 133 aa, Homo sapiens
  misc_feature (1)...(133): Xaa = X or * as defined in Table 2
FQSLFTCVLFHFKFSLTIHHMNSQPFXRIRSTFFFLKQSLDSVTQAGVQWRDLGSLQPPPPGFKQFSCLSLPSSWDYRRAPPHPANFFYFFXXQTGFTHVGRMVPIXPRDPPALASQSPGITGMSHCTRPRIR

SEQ ID NO: 38294 - protein, 58 aa, Homo sapiens
FAKATFDAISKTYSYLTPDLWKETVFTKSPYQEFTDHLVKTHTRVSVQRTQAPAVATT

SEQ ID NO: 38295 - protein, 14 aa, Homo sapiens
MASKVALAKLPRVA

SEQ ID NO: 38296 - protein, 253 aa, Homo sapiens
  DOMAIN (70)..(122): Ribosomal protein S5 proteins domain identified by eMATRIX, accession number BL00585A, p-value=1.500e-31, raw score of 28.43
  DOMAIN (76)..(204): Ribosomal protein S5 domain identified by PFam, accession name Ribosomal_S5, E-value=1.2e-60, PFam score of 215.0
  misc_feature (1)...(253): Xaa = X or * as defined in Table 2
GVRRSGGGRGRPGGGPRKARRGKAEDKEXMPVTKLGHLVKDMKIKYLEDVYFSLPIKESETIDFFLGSSLKEEGLKIMPVQKQTRAGQRTRFKAFVATGDYNGHVGLCVKCSKEVATAIRGSVILTKHSIVPVRRGYWGNKMDKPHTVPCKVTGRCGSVLVHLIVSAPVPKKLLMMAGIDDCHTSARGCTATLGNFAKATFDTISKTYSYLTLDLWKETIFTKSPYQEFTDHLVKTHTRVSVQRTRAPAVATT

SEQ ID NO: 38297 - protein, 56 aa, Homo sapiens
  DOMAIN (1)..(29): Ribosomal protein S5 domain identified by PFam, accession name Ribosomal_S5, E-value=7.4e-05, PFam score of 21.5
MAGIDDCYTLSNGAALQPWGNFAKATFDAISKTYSYLTPDLWKETVFTKSPSTGTH

SEQ ID NO: 38298 - protein, 35 aa, Homo sapiens
MWAWVLADGGSWSSSLLWNHSWISRWAPSTESLAW

SEQ ID NO: 38299 - protein, 56 aa, Homo sapiens
  DOMAIN (1)..(43): Nucleoside diphosphate kinases domain identified by PFam, accession name NDK, E-value=2.1e-14, PFam score of 57.9
AEAAPGTIRGDFSVHISRNVIHASDSVEGAQRRIQLWFQSSELGQSGLHHRRRLWD

SEQ ID NO: 38300 - protein, 219 aa, Homo sapiens
  DOMAIN (141)..(196): Nucleoside diphosphate kinases proteins domain identified by eMATRIX, accession number BL00469, p-value=7.662e-13, raw score of 22.22
  DOMAIN (67)..(212): Nucleoside diphosphate kinases domain identified by PFam, accession name NDK, E-value=3.3e-44, PFam score of 160.3
  misc_feature (1)...(219): Xaa = X or * as defined in Table 2
MGGLFWRSALRGLRCGPRAPGPSLLVRHGSGTIMGVFVAVGTIPVPSRVPCIEADTLKPGGPSWTRERTLVAVKPDGVQRRLVGDVIQRFERRGFTLVGMKMLQAPESVLAEHYQDLRRKPFPPCPSSRYMSSGPVVAMVWEGYNVVRASRAMIGHTDSAEAAPGTIKGVDFSVHISRNVIHASDSVEGAQRRIQLWFQEQXSWVSWADGGQHSSIHPA

SEQ ID NO: 38301 - protein, 299 aa, Homo sapiens
MEYYAAMKRDELMSFAGTWMKLETIILSKLTQEQNTKHHMFSLIKWQLNNENTWTKGGEHHTLGPVAGGAAWQSRAVCPHSSALGWSMGLGAREQGAALVWEAPLAAQEPTEGVGGSGMAGCRSRALPRGKAAKAGREIERNAGGLALLGNPVHPPQPLAGPASCSECRVCRGHAHPELALARKRHGQPRFPPAPASTPLCKLREPAPALASPESGSHSAVDHSSSPAVEQNWTENDFDELTEVDFRRSVITNFSELKEHVLTHRKEVKTLEKRLDEWLTRINSVEKTISDLMELKTTA

SEQ ID NO: 38302 - protein, 47 aa, Homo sapiens
MEYYAATKNDEVMSFVGTWMKLETIILSKLTQEQKTKHHMFSLISGS

SEQ ID NO: 38303 - protein, 267 aa, Homo sapiens
  DOMAIN (8)..(57): kw TRANSCRIPTASE REVERSE II ORF2 domain identified by eMATRIX, accession number DM01354Z, p-value=7.545e-38, raw score of 9.06
EPWREMFISVYTLQKLGALFTIAKTWNQPKCPSMIDWIKKMWHIYTMEYYAAIKKDEFMSFERTWMKLETIILSNLTQEQKTKHRMFSLISGSRTMRIHGHREGNITCQGLLGGECVHTVATRGSPSATEDESCRMNVNDYGGNSPSTLQVKTSPQGRAEKGNNVRTWLYSNLVCWPSLGSLMGKLRDRVIKRVIYTHTAGDVSMHEEGFQFPLKQVSLLLCAIAFQPSLVVAAALVHITMEAYTYLEVTLLQIHSPLFCFLPKCHF

SEQ ID NO: 38304 - protein, 94 aa, Homo sapiens
  DOMAIN (9)..(58): kw TRANSCRIPTASE REVERSE II ORF2 domain identified by eMATRIX, accession number DM01354Z, p-value=9.274e-31, raw score of 9.06
DTISHQLEWQSLKSQETTALLTIAKTWNQPKCPSMIGWIKKMWHIHTMEYYAAIKRNEFMSFAGTWMKLETIILSKLTQEQKTKHHMFSLIRGS

SEQ ID NO: 38305 - protein, 161 aa, Homo sapiens
DLPVEPHIGKMILFEALVLHCLDPVLTIAASLSFKDPFVIPLGKEKIADARRKELAKDTRSDHLTVVNAFEGWEEARRRGFRYEKDYCWEYFLSSNTLQIMMKIIKAVICAGLYPKVAKIRLNLGKKKKKVKVYTKTDGLVAVHPKSVNVEQTDFHYNWLI

SEQ ID NO: 38306 - protein, 92 aa, Homo sapiens
  DOMAIN (18)..(53): Prion protein domain identified by eMATRIX, accession number BL00291A, p-value=2.759e-09, raw score of 4.49
SARTISYDYYQNWGRDGGPRSSGGGYGGGPAGGHGGNRGSGRGGGGGGGGRGGRGRHPGHLKGREIGMWYAKKQGQKNKEAGEARESCSTHG

SEQ ID NO: 38307 - protein, 785 aa, Homo sapiens
  DOMAIN (8)..(18): DEAH-box subfamily ATP-dependent helicases proteins domain identified by eMATRIX, accession number BL00690A, p-value=1.818e- 13, raw score of 6.87
  misc_feature (1)...(785): Xaa = X or * as defined in Table 2
HRVTVISGETGCGKTTQVTQFILDNYIERGKGSACRIVCTQPRRISAHSSCGKSSCRKGQNLVASGNSTGYQIRLPESVAQGNRVLSYTVPTRNHPSSGSQSDPYLSSVSHIVLDEIHERNLQSDVLMTVVKDLLNFRSDLKVILMSATLNAEKFSEYFGNCPMIHIPGFTFPVVEYLLEDVIEKIRYVPEQKEHRCQFKRGFMQGHVNSQEKEEKEAIYKERWPDYVRELRRRYSASTVDVIEMMEDDKVDLNLIVALIRYIVLEEEDGAILVFLPGWDNISTLHDLLMSQVMFKSDKFLIIPLHSLMPTVNQTQVFKRTPPGVRKIVIATNIAETSITIDDVVYVIDGGKIKETHFDTQNNISTMSAEWVSKANAKQRKGRAGRVQPGSLLFICINGSXEASLLGWTIQLPEIFEEPFWEGTLFTKXRFLRLGEIAYFLSRXMDPPSNEPVLLSIRHLRSLNALDKQEELTPLGSHLARLPVEPHIGKMILFGALFCCLDPVLTIAASLKFQSPFVIPLGKEKIADARRKELAKDTRSDHLTVVNAFEGWEEARRRGFRYEKDFCWEYFLSSNTLQMLHNMKGQFAEHLLGAGFVSSRNPKDPESNINSDNEKIIKAVICAGLYPKVAKIRLNLGKKRKMVKVYTKTDGLVAVHPKSVNVEQTDFHYNWLIYHLKMRTSSIYLYDCTEVSPYCLLFFGGWTFPSRRDNDQETIAVDEWIVFQSPARIAHLVKRAVVHMDERREEQIVQLLNSVQAKNDKESEAQISWFAPEDHGYDKKYFFKE

SEQ ID NO: 38308 - protein, 197 aa, Homo sapiens
  DOMAIN (101)..(144): Ribosomal protein L19e proteins domain identified by eMATRIX, accession number BL00526C, p-value=3.602e-14, raw score of 20.60
WLIYVITDARMYRQRGRYYFLVSSSLDKVLMISFLLGWRRSSRRLRAFLVLHLRASPWAPRSFVRPVSAFSVGMCHMKTRVFENTFPFTLGHTVRYVGREIFCRRVFTRYRESIKISLPTYLTVCPRVKGNVFSNTRVFMWHIPTLKADTGRTKLLGAQGEARRCKTKKARKRREERLQPNKKEIIKTLSKEEETKK

SEQ ID NO: 38309 - protein, 139 aa, Homo sapiens
  DOMAIN (62)..(105): Ribosomal protein L19e proteins domain identified by eMATRIX, accession number BL00526C, p-value=1.132e-20, raw score of 20.60
  DOMAIN (1)..(112): Ribosomal protein L19e domain identified by PFam, accession name Ribosomal_L19e, E-value=7.1e-27, PFam score of 102.7
  misc_feature (1)...(139): Xaa = X or * as defined in Table 2
QQIRKLIKVGLIIHKPVIVHSQVGCQKSTFSRTRKGRHMGTGXRKSTANFQMPEKVTWMRRMRILHWLFGRYHESKKTDHHMYHSLYLKVQGNMFTNKQILMEHNHKLKADKAHKKFLADQAEARSSKTNKASKLREER

SEQ ID NO: 38310 - protein, 40 aa, Homo sapiens
KKRPELRDLLNQARKETLARKEDRSASSGAEGDVSSEREP

SEQ ID NO: 38311 - protein, 196 aa, Homo sapiens
  DOMAIN (100)..(143): Ribosomal protein L19e proteins domain identified by eMATRIX, accession number BL00526C, p-value=6.162e-20, raw score of 20.60
  DOMAIN (32)..(149): Ribosomal protein L19e domain identified by PFam, accession name Ribosomal_L19e, E-value=9.1e-29, PFam score of 109.0
SQRKARDQRRKRNKRASSIAKHKEPKRPILPSGKNSQEGVATHTKPLAQGKVWLDPNETNEIPNANFRQQIRKLIKDGLILRHRKPVTVHSRAQGWKSTLARRKGRHLGIESKKIDRHMYHSLYLKLKGNVFKHKRILTEHSHKLKADKARKKPLADQAEARGSKTKEARKLREEHLQTKKEEIIKTLSQEEKAKK

SEQ ID NO: 38312 - protein, 82 aa, Homo sapiens
  DOMAIN (24)..(67): Ribosomal protein L19e proteins domain identified by eMATRIX, accession number BL00526C, p-value=5.771e-14, raw score of 20.60
  misc_feature (1)...(82): Xaa = X or * as defined in Table 2
EVIHAAIGEKKGSYNAXXPWVEEQLTRQPLIHHQPASLHSVYRCRYHSLYLKVKGNVFKNKRILMEHIHKLKADKARKKLLA

SEQ ID NO: 38313 - protein, 59 aa, Homo sapiens
MDDGEWRIIDARLLQEDTREFLRKIGSPTWYHQPCTLKVEGGMCSKNKRDSSWNTIPQG

SEQ ID NO: 38314 - protein, 1033 aa, Homo sapiens
  misc_feature (1)...(1033): Xaa = X or * as defined in Table 2
WRATACTYPSWAPPRILVATGPAAVSAGLPSLHGTRAGPQAPCTAAVPPAPLPPHRPASXGMPAGPVQKGAPTAAAAGXRLLKHGQSRRQGRGGAERTEGCQHAVTFQDCFLRCFFGXCXCLSGERAIALEQGASHAAEQLPRLQAFKRPGPLQVNPDAPQKSAASSSLKVLSGLPKHQRPRRFCQNTGSXSGPXXTTGRRSAAGAAGKPENPGSPPAPHNFKSGTNPAVTTHHPVGSKPRPEPHGNSEAGEVIRGSPVERTSTAPDAVYAEALGLSELFGELREAGRRGDPGRPLCALPGRRATAAAPGQRHQRPRSGTRSPAMEGRPAERGRPGGARGPGRCLQAGDSGPEPPAPSPPPAAPPRCAGLSGNRRESGLWEPSLLEGKAXGTGGLGKSSWSQLHXGRFQNKPIXRTGAKQNLTRHCSWKSTRWTGNTQEQSQKLPPALRGSASGHFAPGPALSQXSRHTSPRYPCREGNGWRHKTANRKAENSGGTASPRNQKGAXCWKQLDGTAGHGPVYQLLGSAWPGLSTPMGTDTFPPQASCCATTTPLPLATGLGQHGTGRSVCETGPVDGANGCPGALRCSGKXHMDQGQKVLGLSPNSTSYRHVGSSQXPSLSSGSAPEQAEXQGQSWGRSKRGWLGWTGMPMWEARPAPAGVPHGMPANGGRGACLPASKFSQPAAATTRGPDQQAGRRGQQRPTSDMGALGDPAKRSXTRKRGGHPFSKXENQNNPCVWGSWVSSPWNKXPTQPLKKANMCPFRIKVWTLEELPVHRTGPGLGHGDAKKCQCPVARGSPKTSLGVSSWAVRGLAVFMSVKGCGFSSQPDWRRVPQSPSLRQVVSVMEGYGLYIPELGTPENPGGDWASRCECGAPQPTWNSRWPTSTMHSSSPARASPSTPPSKLREPAGPVQKGAPTVQLRDEGSSSTARVGAKAEEAPRGPRAASTLSPFKTASLDVSLGDVSACLVTCDCIGTGRFSCCRATPTLAGVQTARTIKVNPDAPQKSAASSSLKVLSGLPKHQRPRRFCQNTGS

SEQ ID NO: 38315 - protein, 40 aa, Homo sapiens
  misc_feature (1)...(40): Xaa = X or * as defined in Table 2
MTLTSIDPVLTTFFNLECPLVFTATASSGLGEVEXAIALN

SEQ ID NO: 38316 - protein, 474 aa, Homo sapiens
  DOMAIN (53)..(87): Chaperonins clpA/B proteins domain identified by eMATRIX, accession number BL00870G, p-value=6.262e-19, raw score of 8.07
  DOMAIN (13)..(260): Chaperonin clpA/B domain identified by PFam, accession name clpA_B, E-value=0.0037, PFam score of -226.9
  misc_feature (1)...(474): Xaa = X or * as defined in Table 2
MPESNCSLTWRHSVGRAVAAQGGEHSSQGASLVLGEPRGGSSWLLGLEGDTGLWGGLLKEGRLTDGKGKTIDCKDAIFIMTSNVASDEIAQHALQLRQEALEMSRNRIAENLGDVQISDKITISKNFKENVIRPILKVRGLSWHFLLEPKAHFRRDEFLGRIGEIVYFLPFCHSELIQLVNKELNFWAKRAKQRHNITLLWDREVADVLVDGYNVHYGARSIKHEVERRVVNQLAAALXSRTLLPGGCTLRITVEDSDKQLLKSPELPSPQAEKRLPKLRLEIIDKDSKTRRLDIRAPLHPEKGRLTDGKGKTIDCKDAIFIMTSNVASDEIAQHALQLRQEALEMSRNRIAENLGDVQISDKITISKNFKENVIRPILKVRGLSWHFLLEPKVLTTFFNLSVLYLHGNSIQRLGEVNKLAVLPRLRSLTLHGNPMEEEKGYRRARGHSLHQGIEKYICESDDIFRKYCNNQFL

SEQ ID NO: 38317 - protein, 263 aa, Homo sapiens
MTYRSCVADRVTQLMALEVEPKVEPLATPRSTKRPRKIPTRPIVFIALLQKLVIVALPSADSLRVNQLSALLVSGSLSGIQEESGHMDKLNYGKCGGILSPDGGGSQQDGRGAGKGMEWEDDLPLEFSHSTADLSNRPQPNSSPCSDAPSLLSSAVPLFCSSAVGLMELGEAHSLGVGEPSKQQDHPTCCGTVTGGSLLPELPEWPPATSKMVASLVFSDLGFLSSWIPRNGILGHAVNVIALLEAVCHRREPWNPVTSVQLD

SEQ ID NO: 38318 - protein, 136 aa, Homo sapiens
  misc_feature (1)...(136): Xaa = X or * as defined in Table 2
LRLELSFCSSCLLEPPWSTTVVCLYCRPATDFHPSGSGRVSAVLLIQXGRPLPLLIRLKACHCSHTAKCPGSSPSSMSPTAEEQKSGTAEERREGASEHGEEFGWGRLERSAVEWPNSRGRSSSHSIPFPAPRPSC

SEQ ID NO: 38319 - protein, 596 aa, Homo sapiens
  misc_feature (1)...(596): Xaa = X or * as defined in Table 2
MSKGESRKCNEENVSKSSKVVKVFIVLTPQFLSRDKDQLTKELQKHVKSVTVSCKSPRKLLSHITRLHPPSKGQGENLTHLVDSIKATIWCQPVWETVEGQRRRVGNCIDFTNGCDLVGSSSLHNMLVCSSYDINRQDTFQKDRTSEKHLLDSVFTALQDSAGQQWPARLHPQRGEEVADPRGAPSRHVEPENSSPCQGNGEQAGKAGARALCGQARRSPATMPPPLTTRSLCEFAVFLLHWLFPELFHYRKLGEQDSCYGDGGKQELDPQRLQIICNFTEVYFPHMQEEEAWRQAGPGPAEAADTSATSRRSTSPTCRRRRPGCSGAPSASTTSFRAWGWTQAAKASPPRDNCYNSSSLPDDISLFTHDNLHKQHSCSDSLGKKQLDPSCIKLIRHXVHLLYLCTKNNRVWTLEFMGNLHWNRNRGAPTSSSARSTCWPRVXRHEELCNQSXEVQRGVXGSPAAPERSSKDFCKIPLDEVVVPHXDFPVRSPYLLSDKEVCKIVQQSLSVGNFAAGLLLPPRTSSCSTTIFGLDNKKQLDPTQLRLICHXVEAVYPVEKVEEVWHCECIPSNDEQCHCPNRKKCNILKKAKKVEK

SEQ ID NO: 38320 - protein, 492 aa, Homo sapiens
  misc_feature (1)...(492): Xaa = X or * as defined in Table 2
MAVDFSLAVLMIVSSYDINRQDTFQKDRTSEKHLLDSVFTALQDSAGQQWPARLHPQRGEEVADPRGAPSRHVEPENSSPCQGNGEQAGKAGARALCGQARRSPATMPPPLTTRSLCEFAVFLLHWLFPELFHYRKLGEQDSCYGDGGKQELDPQRLQIICNFTEVYFPHMQEEEAWRQAGPGPAEAADTSATSRRSTSPTCRRRRPGLQRCAQCINDKLQGLGLDAGSEGEPPTRQLLQLLQPARXHLSNQGGGXLQGRALFTHDNLHKQHSCSDSLGKKQLDPSCIKLIRHXVHLLYLCTKNNRVWTLEFMGNLHWNRNRGAPTSSSARSTCWPRVXRHEELCNQSXEVQRGVXGSPAAPERSSKDFCKIPLDEVVVPHXDFPVRSPYLLSDKEVCKIVQQSLSVGNFAAGLLLPPRTSSCSTTIFGLDNKKQLDPTQLRLICHXVEAVYPVEKVEEVWHCECIPSNDEQCHCPNRKKCNILKKAKKVEK

SEQ ID NO: 38321 - protein, 1175 aa, Homo sapiens
  DOMAIN (221)..(242): Guanylate kinase proteins domain identified by eMATRIX, accession number BL00856B, p-value=6.034e-12, raw score of 9.61
  DOMAIN (225)..(329): Guanylate kinase domain identified by PFam, accession name Guanylate_kin, E-value=1.7e-07, PFam score of 37.6
  misc_feature (1)...(1175): Xaa = X or * as defined in Table 2
MCNNLIHLSLANNKITTINGLNKLPIKILCLSNNQIEMITGLEDLKALQNLDLSHNQISSLQGLENHDLLEVINLEDNKIAELREIEYIKNLPILRVLNLLENPIQEKSEYWFFVIFMLLRLTELDQKKIKVEEKVSAVNKYDPPPEVVAAQDHLTHVVNSVMQPQRIFDRYLLEIQRPEFRLVLKLVGNESLPIASADSLALTSDMVRNGLGDLFYDFRACHTTRPPYFGEGDRVDYHFISQDVFDEMVNMGKFILTFSYGNHKYGLNRDTVEGIARDGLASCIHMEIEGVRSLKYSYFEPRYILVVPMNKEKYEGYLRRKGLFSRAEIEFAVSRVDLYIKINQNFPGYFDEVINADDLDVAYQKLSQLIREYLGLTEEPAKSLATTAVGQEVEPVFFLSLRAVKKVPRNGDQMFTGSVHKSGANHSYLKTSVSVSRVGSCQWVRGLADFKNGAVDLRAGAPASKKTVSGVPAHLVPSPQVLGETASRWPDDRASLWNANSCQAPRKSERNSCPEPRAGSGWRNPSKRAFSXQPSQSXAPSTPQFISTGSSSAGPGPIPKPNGRGCPTIRSSPKTNTTETDVPEMEASEVGQSPITPTLVPPVHPSPPSSRSPQPGQDKESGEAQVTPTGPPLSEPLQGPGPTPLSPQRIQDEEIESDKLPPSSSHHDPPKDSSHTDLVQKLAGDSQQALKEETSKPASHPSQYPSPRTATSPSTXQQIPSSPRPGEPRGPASXKPAGSHSAAPASGAGSPPEQEASHPNSYRPAGKRLXEQPPIKPXRSPPRLPPTREADTSKLPPISPPHSKPPPNLSPQAAHSLQQVQEEKVSEVKLPLISPPSQEQAEPRILSPAQEEAAQKVRLPRIPAPLPEPGLPQNSGTQPDPRPAKERKAPQAGSSSRRKIPDMRASPHNQGPLQQTGAREKKLPNQKGTARGLAPLEEAPPGNHQPALQLEPHDQPAPTMREKAPAESLQDSSAPVEHPGRKGQVHRKGRSQRREIASQSPEQDSEPPPSSLSKTPSPSGESKPKRSEPENMGQCPGQKPRHSPEPGVYCGAGPAGREDCAPGAVRAPRFKPSLEPPAPLRSGNPEAALSPERPAMAGSCESPHWLPPEPMVSVGGGAVQPLSKPWIPRRQPICTPVPLLLLPSQPGRAVVAEGCSSISCCHQIEPFWKAGVSK

SEQ ID NO: 38322 - protein, 153 aa, Homo sapiens
  misc_feature (1)...(153): Xaa = X or * as defined in Table 2
MTPPSVLPXPSLSYXHPDYSLPFPFSPPVLCFPHPVQGLYSVLFVNTAAEPREKSAMAILPLSGHACSHVCLGSHQSLFQRACGRCPRPLSGSLRSHCHWLLILGVKKCSPPEAGKAILLTTDRTETMNISWKPRNPSHTVPHPHHICCHWRI

SEQ ID NO: 38323 - protein, 650 aa, Homo sapiens
MENELIALGASFRDVTAASTHCICDKADTRDNRGCLAKLQADGQMTEHLSGMQIHAKDLENQSVTPAQNQELAQDGETHQKELSPDSHLNPELPQHLSSSALGLHQQAQDLSLNPTEEDVQQSDLPLKQIATETDVPEVEASEVGQSPITPTLVPPVHPSPPSSRSPQPGQDKESGEPQVTRTGPPLSEPLQGPGPTPLSPQRIQDEEIESDKLPPSSAHHDPPKDSSHTDLVQKLAGDSQQALKEETSKPEAIRVSIPHPELPHPQDLATDTKQPQARGAPGTLLPRSRLAPTRLPQPQVLAPLQSRRPTPKLLSPSREEALGTTSHQTMTVSPRLPPTREADTSKLPPISPPHSKPPPNLSPQAAHSLQQVQEEKVSEVKLPLISPPSQEQAEPRILSPAQEEAAQKVRLPRIPAPLPEPGLPQNSGTQPDPRPAKERKAPQAGSSSRRKIPDMRASPHNQGPLQQTGAREKKLPNQKGTARGLAPLEEAPPGGPVPAPLTSGLHYYTTLEELWKSFDLCEDYFKPLFGPYPEKSILNVFSEYRDMTGFLRVCRVKPNICQFSHNSGYISFFRNVRRISRILSRYYRVTVIFSRIRVKFAEMFRDSPEFCSYIAKFRVYTLIRGYTGICLLLAFFAISHIFESRYFTI

SEQ ID NO: 38324 - protein, 166 aa, Homo sapiens
  misc_feature (1)...(166): Xaa = X or * as defined in Table 2
GRERPLLSPYMETLYRVPFLVLECPNLKLKKPPWLHMPSAMTVYALVVVSYFLITGGIIYDVIVEPPSVGSMTDEHGHQRPVAFLGLQSKMDNNINGKGLCIQASXFTMGGFRFSXILDPIECTKYPKTSIDSFFCSIGISSVVLLEFFPWARSNSMRNGNCPGLI

SEQ ID NO: 38325 - protein, 127 aa, Homo sapiens
  misc_feature (1)...(127): Xaa = X or * as defined in Table 2
TRRDSRCKGTWLLSVKTLAISAVKSQKSKASECRFTNRSSSTAVIRVLLPGILLSSKLRCSMVLATALERDDSDVGVTISSINPQDSHFSCLLLLRISSNSCXICCNFFAIRVHLAEVCIXQTSLLL

SEQ ID NO: 38326 - protein, 48 aa, Homo sapiens; identical to SEQ ID NO: 33933

SEQ ID NO: 38327 - protein, 405 aa, Homo sapiens
  DOMAIN (106)..(311): Gag P30 core shell protein domain identified by PFam, accession name Gag_p30, E-value=1.2e-67, PFam score of 238.2
EQCVAGPRGGSTQWLNTGKELALGVWTFETWERGSPLLSPRGLHLHKTNIPRPPRVGKRGGEASGETPPLAAGLRPKTGIQMPLREQWYTGIDEDGHMVERRVFVYQPFFSADLLNWKNNTPSYTEKPQALIDLLQTIIQTHNPTWADCHQLLMFLFNTDERRRVLQAATKWLEEHAPADYQNPQEYVRTQLPGTDPQWDPNEREDMQRLNRYREALLEGLKRGAQKATNVAIQGKEESPAQFYERLCEAYCMYTPFDPNSPENQRMINMALVSQSAEDIRRKLQKQAGFAGMNTSQLLEIANQVFVNRDAVSPKENRRENEHQVRRNADLLAAAITGVPPKRQGKGGPGKEIQPGCQSLQRNQCAYCKEIGHWKNKCPQLKGKQGDSEQEDPDKEEGALLNLAE

SEQ ID NO: 38328 - protein, 343 aa, Homo sapiens; identical to SEQ ID NO: 33948
  DOMAIN (68)..(101): RECEPTOR INTERLEUKIN-1 PRECURSOR domain identified by eMATRIX, accession number PD02870B, p-value=7.319e-09, raw score of 18.83
  DOMAIN (232)..(316): Integrase core domain identified by PFam, accession name rve, E-value=4.6e-09, PFam score of 35.3

SEQ ID NO: 38329 - protein, 586 aa, Homo sapiens
  DOMAIN (456)..(559): Integrase core domain identified by PFam, accession name rve, E-value=6.9e-12, PFam score of 45.1
MKIRRRFPSSLQLSADLQVPVRKAPRQGVSQEKRTKPSLELMISGTISQEDIRNNVTRGCTPPAIQRVISSSPLLAIRNNVTEGVYTPCDTGGRVHLPVILLLISRDGGHDISFNIAVDVHSPCDTDPNIQGVEYDMTPNIAMNVQPPGTISQKRCTLPAILGLISYASSVNIRSNITGWLYIDRYVGSHVILYPLGIRMGVTGEMKGERRRGLHAATKWLEEHAPADYQNPQEYGRTQLPGTQPQLDPHEREDMQRLNRDREALLEGFKRGAQKATNVNKVSEVIQGKEESPAQFHQRLCEACAKQVLVNGDAVSREEKRKENERQARRNADLLVSCSNQSGPPKEAREELWTKDYRPGQDLRLLSQATLTFHPTVPSPSTLLGLLPAEDSWFTCLDLKDAFFPIRSAPESQKLFAFQWEDPESALAKTVRQRCVSCRQHHARQGPAVPPGIQAYGAAAFEDLQVDFTEMPECGGNKYLPVLGRTYSGWVETYPTRAEKAREVTRVLLRDLIPRLELPFRIGSDNGPAFVADLLQKTATVLGITRKLHAASRPQSSGKGIQNNRTGGVYTPCDIESHVILFRSGY

SEQ ID NO: 38330 - protein, 200 aa, Homo sapiens
  DOMAIN (66)..(103): Gag P30 core shell protein domain identified by PFam, accession name Gag_p30, E-value=5.5e-05, PFam score of 20.9
  misc_feature (1)...(200): Xaa = X or * as defined in Table 2
LTNQKKSRTRRIHSRILPEVQGGAAADRHCPIDRLGSLQDHHRRSRLLSQWSPXKSTHDXHGFSYQSAEDIRRKLQQQAEFAGMNTSELLQIANQAFVNRDAVSRKENHRDNERQAQRNTDLLAAAIRGVPPKRQGKGGPGKETQPGCQSLQRNQCAYCKEIGHWKNKCPQLKRKPGDSEQEAPDKDEGALLNLAEGLLD

SEQ ID NO: 38331 - protein, 171 aa, Homo sapiens
  DOMAIN (87)..(171): Integrase core domain identified by PFam, accession name rve, E-value=4.6e-09, PFam score of 35.3
LSRSSPLLPLVWHQAMVGSMDVEPAAWVLMTFCWDTPRQSGVPRERMPHTGTWRTVGIRCPKKKLRSANSSMMRGKVQPFRPDIQAYGAAPFEDLQVDFREMPKCGGNKYVLVLGRTYSGWVEAYPTRTEKTREVTPVLLRDLIRRFRPPLWIGSDNGPAFLAALVQKTAK

SEQ ID NO: 38332 - protein, 254 aa, Homo sapiens
  DOMAIN (152)..(254): Integrase core domain identified by PFam, accession name rve, E-value=6.9e-12, PFam score of 45.1
KQVLVNGDAVSREEKRKENERQARRNADLLVSCSNQSGPPKEAREELWTKDYRPGQDLRLLSQATLTFHPTVPSPSTLLGLLPAEDSWFTCLDLKDAFFPIRSAPESQKLFAFQWEDPESALAKTVRQRCVSCRQHHAGKVQPFRPDIQAYGAAAFEDLQVDFTEMPECGGNKYLPVLGRTYSGWVETYPTRAEKAREVTRVLLRDLIPRLELPFRIGSDNGPAFVADLLQKTATVLGITRKLHAASRPQSSGK

SEQ ID NO: 38333 - protein, 510 aa, Homo sapiens
  DOMAIN (118)..(328): Gag P30 core shell protein domain identified by PFam, accession name Gag_p30, E-value=3.8e-66, PFam score of 233.2
CIYGAQLCTGPSAPVWYCPLGTMAPTGLPGHPAVATATEPHRERGSPLIDSTVLVPPQDKHILRPPTVDKRGGEASGETPPLAARLRHKTGIQMPLREQQYTGIDEYGHVVERRVFGYQPFTSAHLLNWKSNTPSYTEKPQALIDLLQTIIQTHNPTRADCHQLLMFLFNTDERRRVLQAATKWLEEHAPTDYKNPQEDVRTQLLGTYPQWDPNERQDMQRLNRYREALLEGLKRGAQKATNINKVSEVIQRKEESPAQFYERLCEAYRMYTPFDPNSPENQCMINMALVIQSTEDIRRKLQKQAGFARMNTSQLLEIANQVFVNRDAVSRKENQKENGGWPPCLRALAATALLVQEANKLTLGQNLNIKASRAVVTLMNTKGHHWLTDARLTKYQTLLCENPRITTEVCNTLHPATLLPVSESPVEPDCVEVLDSVDSSRPDLRDQAWASVDWELYVDGSSFFNPQGERGAGYAVVTLDTVVEARSLPQATSAQKAELVAFIRALELSE

SEQ ID NO: 38334 - protein, 298 aa, Homo sapiens
  DOMAIN (146)..(181): Matrix protein (MA) p15. domain identified by eMATRIX, accession number PF01140B, p-value=5.280e-14, raw score of 12.72
  DOMAIN (108)..(180): Matrix protein (MA), p15 domain identified by PFam, accession name gag_MA, E-value=4.1e-15, PFam score of 55.6
  misc_feature (1)...(298): Xaa = X or * as defined in Table 2
MDGAGICYLHQTNAGTEIQTPHVLTYKRELNNENMWAHRGDNTHWGPEGSTNSPASASGVADVSRVGSLQWVLGLADFKNEAKELRLYKQEKREKAKRWKETEKGFNGDYGVTMTPGKWRTYFEIDWSKLEVGWPSEGNLERSLVSKVWHKVTGKSGHSDQFPYIATWLQLVLDPPQWLRGQAAAVLVAKGQIPRKDPTPPGRGKSTPEVLFDPTSEDPLQEMEPSDPSGALPLPGKDAPHSXAHSPCASTRQTYPXATRSRQERRXSLERNPYIGSSFKTQNWDTNAPERAVVYWDR

SEQ ID NO: 38335 - protein, 652 aa, Homo sapiens
  DOMAIN (457)..(468): RNase H domain identified by eMATRIX, accession number PF00075B, p-value=6.276e-12, raw score of 12.56
  DOMAIN (210)..(366): Gag P30 core shell protein domain identified by PFam, accession name Gag_p30, E-value=1.7e-51, PFam score of 184.1
  misc_feature (1)...(652): Xaa = X or * as defined in Table 2
MLKNFKKGFNGDYGVTMTPGKLRTLCEIDWPTLEVGWPSEGSLDRSLVSKVWHKVTGKSGHSDQFPYIDTWLPQWVRGQAAAVLVAKGQIVKEGSRSTHRGKSTPEVLFDPTSDDPLQEMAKVIPVVPSPYQGERLPTFESTVLVPPQDKHIPRPPRVDKRGGEASGETPPLAARLRPKTGIQMPLREQRYTGIDEDGHMAERRVFVCQPFTSADLLNWKNNTPSCTEKPQALIDLLQTIIQTHNPTWADCHQLLMFLFNTDERRRVLQAATKWLGEHAPADYQNPQEYGKEESPAQFYERLCEAYHMYTPFDPDSPENQRMINMALVSQSAEDIRRKLQKQAGFAGMNTSQLLEIANQVFVNRDAVSHTGAEHSVVTGPVAPLSKKTIDIIGAMGVSAKQAFCLPRTCTPGTKDYRLVQDLRLVNQATVTLHPTVPNPYILLGLLPAEDSWFTCLDLKDAFFSIRLAPERQKLFAFQWEDPESGVTTQYTWTWLPQGFKNSPTIFGEALARDLQKFPTRDLGCVLLQYVDDLLLGHPTAVGCAKRTDALLRHLEDCGYKVSKKKAQICQQQVRYLGFTIRQAERTLGSGRKQVICNLPEPKTRRQVREFLGAAGFCRLWIPNFAVLAKPLYEVTKXGDREPFEWGSQQQQA

SEQ ID NO: 38336 - protein, 121 aa, Homo sapiens
RATPRHIIVRFTKVEMKEKMLRAAREKGRVTLKGKPIRLTADLSAETLQARREWGPIFNILKEKNFQPSTSYPAKLSFISEGEIKSFTDKQMLRDFVTTRKEALNMERNNQYQPLQNHAKM

SEQ ID NO: 38337 - protein, 228 aa, Homo sapiens
GGRRQRRSKVTSTWWQARESSCRGTLLYKTIRSCDTYSLSQEQHGPNLHLIGVPESDGQNGTKLENTLQDIIQENFPNLARQANIQIQEIQRMPQRYSSRRATPRHIIVRFTKVEMKEKMLRAAREKGRVTHKGKPIRLPADLLVETLQARREWGPIFNILKEKNFQPRISYPAKLSFISEGEIKYFTDKQMLRDFVTTRPALQELLKEALNMERNNWYQPLQNHAKL

SEQ ID NO: 38338 - protein, 331 aa, Homo sapiens
MMMIKAVTIDKLQGSSVTVSTEDGLLKAKYLYTESSFLSSAAGDITLGSVHDSSSGCLKASTNQGAIDVYVSQLGKVELKSHKGTSESTRAQCSSCVIIMRSQVLYYDEVGVCEIPWWLKAWALGWSQDAEYEQLQSTAASVSDAEDRPNLHLIGVPESDGENGTKLENTLQDIIQENFPSLARQANIQIEEIQRMPQRYSSRRATPRHIIVRFTKVEMKEKMLRAAREKGRVTHKGKPIRLTADLSAETLQARSEWGPIFNVLKEKNFQPRISYPAKLSFISEEEIKYFTDKQLLRDFVTNRPPLKQLLKEALNMERNNQYQPLQKHAKL

SEQ ID NO: 38339 - protein, 277 aa, Homo sapiens
  misc_feature (1)...(277): Xaa = X or * as defined in Table 2
MAEQEQLQSAVPSPLLVIPRQKGSGVDFQQSPTDLQLRDLTDRRKTNKQKGIASTLTKRTSTPKPHLYVTNIKDQRPNPRLIGVPESDGEKGTKLENTLQDIIQENFPNLARQANIQIREIQRTPQRYSSRRATPRHLIVRFTKVEMKEKILRAAREKGRVTHKGKPIRLTTADLSAETSTSQKTEWGPIFNILKEKNFQPRISYPAKLSFFISEGEIKYFTDKQMLRDFCHHQTCLPXKSTRPALKELLERKHLNMEKGNNWYQPLQNHAQICKDH

SEQ ID NO: 38340 - protein, 38 aa, Homo sapiens
MWSGALGLGGSLFSSPVCLILCQVHSEDHEKGDVRPSI

SEQ ID NO: 38341 - protein, 59 aa, Homo sapiens
KMAADSEPESEVFEITDFTTASEWERFISKVEEVLNDWKLIGNSLEKPLEKVRSICWCL

SEQ ID NO: 38342 - protein, 236 aa, Homo sapiens
VAASSFDTCADHLCALHLLQVLHYLAIQKPADLARHLLPCVIHAAVLKVKEEESLENISSVKKIIKQIISHSSKVLHFPNPEDKKLEEIIHQITNVEALIARARSLKAKFGTEKCEQEEEKEDLERFVSCLLEQPEVLVTGAGRGHAGRIIHKLFVNAQNVAAMTPPEEELKRMGSPEERRQNSVSDFPPPAGREFILRTTVPRPAPYSKALPQRMYSVLTKEDFRLAVKIIDGDV

SEQ ID NO: 38343 - protein, 983 aa, Homo sapiens
  misc_feature (1)...(983): Xaa = X or * as defined in Table 2
MAADSEPESEVFEITDFTTASEWERFISKVEEVLNDWKLIGNSLGKPLEKGIFTSGTWEEKSDEISFADFKFSVTHHYLVQESTDKEGKDELLEDVVPQSMQDLLGMNNDFPPRAHCLVRWYGLREFVVIAPAAHSDAVLSESKCNLLLSSVSIALGNTGCQVPLFVQIHHKWRRMYVGECQGPGVRTDFEMVHLRKVPNQYTHLSGLLDIFKSKIGCPLTPLPPVSIAIRFTYVLQDWQQYFWPQQPPDIDALVGGEVGGLEFGKLPFGACEDPISELHLATIDGTHLTEGIIVDNDVYSDLDPIQAPHWSVRVRRADNPQCLLGDFVTEFFKMCRRKESTDEILGRSAFEEEGKETADITHALSKLTEPASVPIHKLSGSNMVHTAKKKIRKHRGVEESPLNNDGLNTILLFLFPDAASEKPLDGTTSTDNNNPPSEREDYNLYNQFKSAPSDSLTYKLALWLCMNNFYHGGLKGVAHLWQEFVLEMRFRWENNFLIPGLASGPPDLRCCLLHQKLQMLNWLIERKKARDEGKKTSASDVTNIYPGDAGKAGDQLVPDNLKETDKEKGEVGKSWDSWSDSEEEFFECLSDTXELKGNGQESGGKGGPKEMANLRPEGRLYQHGKLTLLHNGEPLYIPVTQEPAPMTEDLLEEQSEVLAKLGTSAEGAHLRARMQRACLLSDMESFKAANPGCSLEDFVRWYSPRDYIEEEVIDEKGNVVLKGELSARMKIPSNMWVEAWETAKPIPARRQRRLFDDTREAEKVLHYLAIQKPADLARHLLPCVIHAAVLKVKEEESLENISSVKKIIKQIISHSSKVLHFPNPEDKKLEEIIHQITNVEALIARARSLKAKFGTEKCEQEEEKEDLERFVSCLLSKPEVLVTGAGRGHAGRIIHKLFVNAPDVASLXLHQEEELKRMGSPEKRRQNSVSDFPPPAGREFILRTTVRRPAPYSKALPQRMYSVLTKEDFRLAGAFSSDTSFF

SEQ ID NO: 38344 - protein, 562 aa, Homo sapiens
  DOMAIN (197)..(232): PROTEIN BOLA TRANSCRIPTION REGULATION AC domain identified by eMATRIX, accession number PD02462A, p-value=4.841e-09, raw score of 22.48
  DOMAIN (4)..(562): Zinc finger, C2H2 type domain identified by PFam, accession name zf-C2H2, E-value=3.8e-108, PFam score of 372.7
  misc_feature (1)...(562): Xaa = X or * as defined in Table 2
MREKPCQSNECGKAFNYSSLLRRHHITHSREREYKCDVCGKIFNQKQYIVYHHRCHTGEKTYKCNECGKTFTQMSSLVCHRRLHTGEKPYKCNECGKTFSEKSSLRCHRRLHTGEKPYKCNECGKTFGRNSALVIHKAIHTGEKPYKCNECGKTFSQKSSLQCHHILHTGEKPYKCEECDNVYIRRSHLERHRKIHTGEGSYKCKVCDKVFRSDSYLAEHQRVHTGEKPYKCNKCGRSFSRKSSLQYHHTLHTGEKPYTCNECGKVFSRRENLARHHRLHAGEKPYKCEECDKVFSRRSHLERHRRIHTGEKPYKCKVCDKAFRSDSCLANHTESSILGEKPYKCYKCCGGFLIQKGSLPQHQRVHTGEKPYECNECGKVFNQKASLAKHQRVHTAKKPYKCNDCGKPLPDQSTLFHHQSNPIGVGKRYQCNDCHKVFSNATTIANHYRIHIEEKIYKCNKCGKFFRRHSXLVVHQXTHTGEKPYKYHDCDKVFSQASSYAKHRIHTGEKPHKCDDCGKAFTSCSHLIRHQRIHTGQMPYKCKGGKVFTLWSFHAEHQKIHF

SEQ ID NO: 38345 - protein, 355 aa, Homo sapiens
  misc_feature (1)...(355): Xaa = X or * as defined in Table 2
IHIYSDSCSLSLQDSGDEKEFNLDDNVSFRASLWDLAAGPGQGGGGGREKWRAVISRTMNRKMGKMMVKALSEEMVRPADIGDGVSRGPGDRSGRMXAEKMALAFSEQEEHELPVLSRQASTGEXGMRGTPAESGGKDWVTAVLVAGPFCGRARVHTDFTPSPYDHDSLKLQVRSASGLLWSLAGCAQKGSWTEPVGSFKFIYVDVLPEEAVGHARPSRRQSKGKRPKPKTLHELLERIGLEVXAWSSLVSSIREAQLPQGWGPGHLNELNIMDPQHRAKLLTAAELLLDYDSEWLXERPGEGAESSQEPGGEACPKVDIPRDSGCFEGSESGRDDAELAGTEEQLQGLSLAGAP

SEQ ID NO: 38346 - protein, 134 aa, Homo sapiens
NSEAAQAFLCKNGDPQTSIFDHLVAIERAGRAADGNYYNARKMNIKHLVDPIDDLFLAAKKIPGISSTGVSNWGGYALACALYILYSCAVHSQYLRKAVGPSRAPGDQAWTHALPSVIKEEKMLGILVQHNSRS

SEQ ID NO: 38347 - protein, 615 aa, Homo sapiens
MAGELRPASLVVLPRSLAPAFERFCQVNTGPLPLLGQSEPEKWMLPPQGAISETRMGHPQFWKYEFGACTGSLASLEQYSEQLKDMVAFFLGCSFSLEEALEKAGLPRRDPAGHSQAGAYKTTVPCVTHAGFCCPLVVTMRPIPKDKLEGLVRACCSLGGVSRGKGPEQGSKALAAVSGLGLQMPLRFKELLGIKELSKPAYGDAMVCPPGEVPVFWPSPLTSLGAVSSCETPLAFASIPGCTVMTDLKDAKAPPGCLTPERIPEVHHISQDPLHYSIASVSASQKIRELESMIGIDPAKLESQWKRFDHLVAIERAGRAADGNYYNARKMNIKHLVDPIDDLFLAAKKIPGISSTGVGDGGNELGMGKVKEAVRRHIRHGDVIACDVEADFAVIAGEHSDGRPVRPATQGVSNWGGYALACALYILYSCAVHSQYLRKAVGPSRAPGDQAWTQALPSVIKVTNPSQPLAWKQLLPWMSSRPEVPSQQAPPPTPIPGSNPPPLGLLKEMGPAPLGGEAGGPDLRDIHNASVLNGTPTWGIFPGQVLSTHGDMDVEYAISPGHSSHVEEKMLGILVQHKVRSGVSGIVGMEVDGLPFHNTHAEMIQKLVDVTTAQV

SEQ ID NO: 38348 - protein, 70 aa, Homo sapiens
LRAPGDQAWTQALPSVIKEEKMLGILVQHKVRSGVSGIVGMEVDGLPFHNTHAEMIQKLVDKGQHFSGAF

SEQ ID NO: 38349 - protein, 181 aa, Homo sapiens
NQPHFVNACCVPRTLLSALLEEKMLGILVQHKVRSGVSGIVGMEVDGLPFHNTHAEMIQKAGGRHHGTGVTVHVPCEQSPYQRAGLHPGRMQLLLATILLVNTGLRQPTWSPVRIFSTVTYGDTCEQLTARQSMRTNIPRPCRIRYSRLQSSSPIHGFCYSWFQLLIANCRPKILNEKFQK

SEQ ID NO: 38350 - protein, 820 aa, Homo sapiens
MAGELRPASLVVLPRSLAPAFERFCQVNTGPLPLLGQSEPEKWMLPPQGAISETRMGHPQFWKYEFGACTGSLASLEQYSEQLKDMVAFFLGCSFSLEEALEKAGLPRRDPAGHSQAGAYKTTVPCVTHAGFCCPLVVTMRPIPKDKLEGLVRACCSLGGVSRGKGPEQGSKALAAVSGLGLQMPLRFKELLGIKELSKPAYGDAMVCPPGEVPVFWPSPLTSLGAVSSCETPLAFASIPGCTVMTDLKDAKAPPGCLTPERIPEVHHISQDPLHYSIASVSASQKIRELESMIGIDPGNRGIGHLLCKDELLKASLSLSHARSVLITTGFPTHFNHEPPEETDGPPGAVALVAFLQALEKEVAIIVDQRAWNLHQKIVEDAVEQVWGMTCRVFLAIRGSPGPPELGRVVEYEVAERLRQQSHLVVMGRAAPGAPSLAWRRLPDSTQSWVLSLVLMGAQRVEFAILDFTELTLHLHEESVLKTQIPILTYQGGSVEAAQAFLCKNGDPQTPRFDHLVAIERAGRAADGNYYNARKMNIKHLVDPIDDLFLAAKKIPGISSTGVGDGGNELGMGKVKEAVRRHIRHGDVIACDVEADFAVIAGEHSDGRPVRPATQGVSNWGGYALACALYILYSCAVHSQYLRKAVGPSRAPGDQAWTQALPSVIKVTNPSQPLAWKQLLPWMSSRPEVPSQQAPPPTPIPGSNPPPLGLLKEMGPAPLGGEAGGPDLRDIHNASVLNGTPTWGIFPGQVLSTHGDMDVEYAISPGHSSHVEEKMLGILVQHKVRSGVSGIVGMEVDGLPFHNTHAEMIQKLVDVTTAQV

SEQ ID NO: 38351 - protein, 147 aa, Homo sapiens
MIGIDPGNRGIGHLLCKDELLKASLSLSHARSVLITTGFPTHFNHEPPEETDGPPGAVALVAFLQALEKESVPEESSRTLQGTWEIQAWTQALPSVIKEEKMLGILVQHKVRSGVSGIVGMEVDGLPFHNTHAEMIQKLVDVTTAQV

SEQ ID NO: 38352 - protein, 62 aa, Homo sapiens
SASTTLWGLLIFLIHRLGTALRAVSSWGTHLTAKEVQWGHDCGTHWSYHHLHQPRAAGHKEC

SEQ ID NO: 38353 - protein, 780 aa, Homo sapiens
  misc_feature (1)...(780): Xaa = X or * as defined in Table 2
FFFMWDPQHFTFIVLPQGYYNSPGLYSTVLRDLENLDILXNIKFLYFIDNIMLTGMDEXEEDGTLEALVKHLLSRGVKINKPYRDSEVATAVKFLQVXWLGASRGVPSNVKDKLLHLCIPCKGREAHCLGXALFXVSXHHIPTCKVVSGFDPHFXVTXEECPAFEWSLQQERTLQQIPGHGAVTILQDPLVLKVPVGGVRFGVELNQAPVGESQWKGLGIWSKAMSSTAQKYAPFQSREICWKQLLACYWXALIEIECLTMGHKTTMXFQMPLRNXHLCNSXSHTLDMPQQHPIMRWKSFLXDXAXIPMLTSPRKHPNLKWPXTTKQKHWKLGQPSPWVSPGRVGWVHKWSKHSGRDGGYLWVQQYXLPPTKVDPDTATSKCPTHQHLNPMIFPRXGSISLGDQPDPKXGVDYIALFPSXKGQRFMFTGIGTYSIVGFSCRVVIPSVSTTFWGLLIFVIHRLGTASPCSSSWGTHLTAKEVQWGHDCGTHWSYHHLHQPRAPGPXRMLKRASIGTAQRQLAGSTLCGWEGAIFQDMVHFKNQRHLYSSVISVGRTRGSRYQGVEVDVAPYPIPSTHLSWDFALLSQNHHSAGXKVLDSKGGYPXKETNECPLNYTLQLPPGEFGQYVSRDQRVRRGVPSSPGTVIDPDPQEEAWLLSHNGGXEEFVWNPGDPLGGLLVLPCPIVSVRRIVQPPNLKGLISKSPDPSGRKISVAFPGNFPRPRSCALTSSAALVQEALLLSGCSQRVMGHTRDTKAGPFPGTHEDSFDGLIVAGGLFLRAL

SEQ ID NO: 38354 - protein, 432 aa, Homo sapiens
MGYTAESHSPPLARYRSGSPHTFGEQVIQDSSGPVFLRRSLKEVCAEELEPVTGASCKPRSGAEEEEEENVIGNWFWEGDDASFDPNPQSNKCNRRNLDPELQLQQYKTAKLQEAAVPIYKTVILSRCWQGEAESPADAACGLSKMHQLFKEKQGQAILGLKGKMTHLAIAETQFLKHKSKIQTALNIESFWQPTLQQNLAQTDMRDLVTCIPAAPAVTKRGQDTAQTMASEDASPKPWQLPHGIEPVGTQKSRIEVWEPPLRFQRIYGNAWMSRQKFAAGTTHSGLLVQRQSLVEQFSRLQTLLNFQTPASSLHLFVSGSSSNPPPPMESSGKEFIAHPGKREPPQQRLIVSRGASEITDNPYMTSIPVNAFQGLCNETLTLKLYNNGFTSVQGYAFNGTKLDAVYLNKNKYLTVIDKDAFGGVYSGPSLL

SEQ ID NO: 38355 - protein, 574 aa, Homo sapiens
  misc_feature (1)...(574): Xaa = X or * as defined in Table 2
KSVKTSTXDTLRTKAKTGQGHITGLQPWLGLRIRQEPSAKTEKKAAIQAKAGAEREATGVVRPVAKTRAKAKAKTGSKTDAVAEMKAVSKNKVVAETKEGALSEPKTLGKAMGDFTPKAGNESTSSTCKNEAGTDAWFWAGEEATINSWFWNGEEAGNSFSTKNDKPEIGAQVCAEELEPAAGADCKPRSGAEEEEEENVIGNWFWEGDDTSFDPNPKPVSRIVKPQPVYEINEKNRPKDWSEVTIWPNAPAVTPAVLGFRSQAPSEASPLFIYCSGLRXRKCLFFACGNSLPPFXEPRSCSQPIPECRFDSDPCIQTIDEIRRQIRIREVNGIKPFACPCKMECYMDSEEFEKLVSLLKSTTDPLIHKIARIAMGVHNVHPFAQEFINEVGVVTLIESLLSFPSPEMRKKTVITLNPPSGDERQRKIELHVKHMCKETMSFPLNSPGQQSGLKILGQLTTDFVHHYIVANYFSELFHLLSSGNCKTRNLVLKLLLNMSENPTAARDMINMKALAALKLIFNQKEAKANLVSGVAIFINIKEHIRKGSIVVVDHLSYNTLMAIFREVKEIIETM

SEQ ID NO: 38356 - protein, 150 aa, Homo sapiens
  misc_feature (1)...(150): Xaa = X or * as defined in Table 2
MEKLDELKIKIDNINGALICARHFSKCSSNAQSHLCPYLQAFPGGPGVRGLPGWPGRTGSRELGHGWRGCGEGLVSGCQTMLSGAPAGSPQPTGGTRAHAVRGRPXVPARSQGSRPLARPGQEDXGAAPDFDPGAAGVPGVPALQEAAQI

SEQ ID NO: 38357 - protein, 230 aa, Homo sapiens
  misc_feature (1)...(230): Xaa = X or * as defined in Table 2
SLSLPSSWDYRRAPPRPANFVFLVETGFTMLTTIVLISXPHHPPASASQNAGIVGVSHSPRPGIACLITRLDFHQGTQSRVPALGSSXPIPHARPRGHTLKALPYRLYTQTARGFGQPRVRIPLLSLLGSLKPSELRGQVGHAFASAIFASAISLCVFTLLVEGKLKPPGASVRRCLQSNRDLGFRATFPTSHRGHGALGLNYISQRATGTPNLWLPFRFRVVLLQAACG

SEQ ID NO: 38358 - protein, 64 aa, Homo sapiens
KLNNWPTWAGMSQLDHTVAPSASRRPQDYGVHLMILAKRRQSWRCCLLLNFLLECMGEGRERNL

SEQ ID NO: 38359 - protein, 46 aa, Homo sapiens
KLNNWPTWAGMSQLEHTIAPSASRRPQDYGVHLMILAKRRQSWRCC

SEQ ID NO: 38360 - protein, 118 aa, Homo sapiens
  misc_feature (1)...(118): Xaa = X or * as defined in Table 2
MQRGAGAEVEDGHCLSHPLVQSLCSRKTRLSRVGTNAFYWSGWRCLNGKNSRQELPYLAPGSPSSPLPGSSITHPEREACPWARGGRQXXGKNFQGLGSKLGLRGDAENVMLPGHPKN

SEQ ID NO: 38361 - protein, 313 aa, Homo sapiens
  misc_feature (1)...(313): Xaa = X or * as defined in Table 2
ASRPGSRVSLMFGAAGRQPDRSSSSPGTSWPFPVEPMEELVHDLVSALERELQSKPRGGFAEPGDPFSEVYPCPLKRPARKRRGRKRRFVXCASPVGGLVTAXSEGSDSSFRRTKSKKRKLKIIRQGPKIQDEGVVLESEETNQTNKDKMECEEQKVSDELMSESDSSSLSSTDAGLFTNDEGRQGDDEQSDWFYEKESGGACGITGVVPWWEKEDPTELDKNVPDPVFESILTGSFPLMSHPSRRGFPTKTQSAFMECLQRILKNLEGLQLQWYPFLAQWVTREWFIFPRILITMTIGLALGLGQSMTSISF

SEQ ID NO: 38362 - protein, 158 aa, Homo sapiens
  misc_feature (1)...(158): Xaa = X or * as defined in Table 2
LTRPVDXRPGTIHLGRGVRARPANRRRQRARRGAAISPPGPCSVAGFLRGRLGPEPGDNGQHLGEPWLGCGSLFAXRAXCSRSTRCTXRRRAPGDRELPRAPATWAPPIKLVPRVFSSKVGQGVSGLVEAMCLGQDSILNQSNKHNSVASSNTITVIG

SEQ ID NO: 38363 - protein, 47 aa, Homo sapiens
ACVRCPWCFSARSLGSEAQQRHLSVSGVVMKAKEKHLSLLFYLRIKF

SEQ ID NO: 38364 - protein, 53 aa, Homo sapiens
PWPFCQACVRCPWCFSARSLGSEAQQRHLSVSGVVMKAKEKHLSLLFYLRIKF

SEQ ID NO: 38365 - protein, 394 aa, Homo sapiens
  DOMAIN (156)..(167): Trp-Asp (WD) repeat proteins proteins domain identified by eMATRIX, accession number BL00678, p-value=4.600e-10, raw score of 9.67
  DOMAIN (43)..(247): WD domain, G-beta repeat domain identified by PFam, accession name WD40, E-value=4.1e-25, PFam score of 96.9
  misc_feature (1)...(394): Xaa = X or * as defined in Table 2
ESPLLGHHSSSDAARRRSVSSFPVPQDNVDAHPGSGKEVRVPATALCVFDAHDGEVNAVQFSPGSRLLATGGMDRRVKLWEVFGEKCEFKGSLSGSNAGITSIEFDSAGSYLLAASNDFASRIWTVDDYRLRHTLTGHSGKVLSAKFLLDNARIVSGSHDRTLKLWDLRSKVCIKTVFAGSSCNDIVCTEQCVMSGHFDKKIRFWDIRSESIVREMELLGKITALDLNPERTELLSCSRDDLLKVIDLRTNAIKQTFSAPGFKCGSDWTRVVFSPDGSYVAAGSCXRALLYIWDVLTGKVEKVLSKAHSSSHQCGWPWSPSWARTFVSVDKGCKAVLWGTVLTGLSGLGGPQCPPHEEAHGLLQPWSWQVNVLGYSMDLPEKLKANVGHCKLCP

SEQ ID NO: 38366 - protein, 269 aa, Homo sapiens
  misc_feature (1)...(269): Xaa = X or * as defined in Table 2
LSKSNRCWXGCEEKGTLIHCWWECKFNPLLKAIXRFLKELKVELPLDPAIPSLGLSKIGTGKKVWQRLPNCPTISLFSFFHKNRHTGTYRRRFLDSLAVRCPCNPATFGSKSDVCNFWVMPSTGKKCALPSHPLFPNGLNADVVCLSDSENLSQKILLILEVSDSVILGKLSHKNIIQHDCIEEPLTLLRNTQQFRFLCIACHGCTSQYSTFLVKASWTRSQGLIQRQPSAGSGYPEKLFSEGAGDEGVDLLPLLAKPASPDEQLRHSL

SEQ ID NO: 38367 - protein, 165 aa, Homo sapiens
SCSEVTEASWGSVPELRDAQLGVGLHSPTYRHPHRETLTCCPAGTLQAWPFCGRIRVRVPVSWLGEPGRGLIPGSGSAASSECLPGLHGRAPLGTSCRPGRPLPWNQPPPRLAQPGHRDPDADAATERPGLQRPSRTACERFPMGVSVRRRVEAHSQLGVPELRD

SEQ ID NO: 38368 - protein, 90 aa, Homo sapiens
  DOMAIN (16)..(31): WILM'S TUMOUR PROTEIN SIGNATURE domain identified by eMATRIX, accession number PR00049D, p-value=4.051e-09, raw score of 0.00
  misc_feature (1)...(90): Xaa = X or * as defined in Table 2
GPPRPPAXRGHGGRPENTPAPPRWPPPPPRSPAPLPPRRACADVTHPPVPTPGKRTPPPIGGAPAARAAPRRPAPSCFSAPTPGCSLTTG

SEQ ID NO: 38369 - protein, 85 aa, Homo sapiens
  DOMAIN (4)..(16): MOLLUSCAN RHODOPSIN C-TERMINAL TAIL SIGNATURE domain identified by eMATRIX, accession number PR00239E, p-value=9.566e- 10, raw score of 1.58
  misc_feature (1)...(85): Xaa = X or * as defined in Table 2
PPPHPQGPPPPGRPPGCXRPIQGRQVFSMKPGRTPERTAWSPPYPGCLGSRPRRPSAPAXSGAHCVVAPYPGCLGSRPRRPSAPA

SEQ ID NO: 38370 - protein, 133 aa, Homo sapiens
  misc_feature (1)...(133): Xaa = X or * as defined in Table 2
ENTLSFASFFFFFEMLSLCRPGWSAAAPCQLTAASTYWVKRFSCLRLPSSWDYRRAPQHPANSFCIFSRDRALTMLVRLVSNSXPQVIRLPQPPKVLGLXACCGFCSGSSGMAPGCGRVVSHAGAPGGGTRPP

SEQ ID NO: 38371 - protein, 240 aa, Homo sapiens
LTRLVLSPDAPDRATHLIAARAGTEKVLQAQECGHFHVVNPDWLWSCLERWDKIEEQLFPLRDDHTKAQRENSPTPLPDREGIPPTALSHPMPILPKAQPSPEVRIYDSNTGKLIRTGARGPPAPSSSLPIRQEPSSFRVDDILGEGSDDSDSEKRRPEEQEEEPQPRKPGTRRARTLGAPASSERSAAGSRGPRGHKRKLNEEDAASESSRESGNEYEGSSSEADEMAKALEAELNDLM

SEQ ID NO: 38372 - protein, 65 aa, Homo sapiens
  misc_feature (1)...(65): Xaa = X or * as defined in Table 2
NVKGTAANGDXGXRGEAAPAGRSRARVPEDAASESSRESSNEDEGSSSEADEMAKALEAELNDLM

SEQ ID NO: 38373 - protein, 961 aa, Homo sapiens
  DOMAIN (636)..(728): BRCA1 C Terminus (BRCT) domain identified by PFam, accession name BRCT, E-value=9.4e-06, PFam score of 32.5
MEVPAAGRVPAEGAPTAAVAEVRCPGPAPLRLLEWRVAAGAAVRIGSVLAVFEAAASAQSAGASQSRVASGGCVRPARPERRLRSERAGVVRELCAQPGQVVAPGAVLVRLEGCSHPVVMKGLCAECGQDLTQLQSKNGKQQVPLSTATVSMVHSVPELMVSSEQAEQLGREDQQRLHRNRKLVLMVDLDQTLIHTTEQHCQQMSNKGIFHFQLGRGEPMLHTRLRPHCKDFLEKIAKLYELHVFTFGSRLYAHTIAGFLDPEKKLFSHRILSRDECIDPFSKTGNLRNLFPCGDSMVCIIDDRKDVWKFAPNLITVKKYVYFQGTGDMNAPPGSRESQTRKKVNHSRGTEVSEPSPPVRDPEGVTQAPGVEPSNGLEKPARELNGSEAATPRDSPRPGKPDERDIWPPAQAPTSSQELAGAPEPQGSCAQGGRVAPGQRPAQGATGTDLDFDLSSDSESSSESEGTKSSSSASDGESEGKRGRQKPKAAPEGAGALAQGSSLEPGRPAAPSLPGEAEPGAHAPDKEPELGGQEEGERDGLCGLGNGCADRKEAETESQNSELSGVTAGESLDQSMEEEEEEDTDEDDHLIYLEEILVRVHTDYYAKYDRYLNKEIEEAPDIRKIVPELKSKVLADVAIIFSGLHPTNFPIEKTREHYHATALGAKILTRLVLSPDAPDRATHLIAARAGTEKVLQAQECGHLHVVNPDWLWSCLERWDKVEEQLFPLRDDHTKAQRENSPAAFPDREGVPPTALFHPMPVLPKAQPGPEVRIYDSNTGKLIRTGARGPPAPSSSLPIRQEPSSFRAVPPPQPQMFGEELPDAQDGEQPGPSRRKRQPSMSETMPLYTLCKEDLESMDKEVDDILGEGSDDSDSEKRRPEEQEEEPQPRKPGTRRGADARAPASSERSAAGGRGPRGHKRKLNEEDAASESSRESSNEDEGSSSEADEMAKALEAELNDLM

SEQ ID NO: 38374 - protein, 226 aa, Homo sapiens
  DOMAIN (116)..(134): von Willebrand factor type D domain proteins domain identified by eMATRIX, accession number PF00094B, p-value=9.892e- 09, raw score of 10.43
  DOMAIN (94)..(139): von Willebrand factor type D domain identified by PFam, accession name vwd, E-value=4.8e-07, PFam score of 28.8
EAALTDLRVQARSQPGTMSIGTENRGSGLSAVAVQEVISDVVEVRLANRPGGLEVLLNQEVLSFTEQSWMDLKGMFLSVAAGDRVCIMLASWAVLFVSLLGPFLSVSVLLPEKFLTHTHGLLGTLNNDPTDDFTLHSGRVLPPGTSPQELFLFGANWTVHNASSLLTYDSWFLVHNFLYQPKHDPTFEPLFPSETTLNPSLAQEAAKLCGDDHFCNFDVAATGSLS

SEQ ID NO: 38375 - protein, 331 aa, Homo sapiens
  DOMAIN (234)..(273): C-terminal cystine knot proteins domain identified by eMATRIX, accession number BL01185C, p-value=4.778e-09, raw score of 15.86
  DOMAIN (254)..(279): von Willebrand factor type D domain identified by PFam, accession name vwd, E-value=1.1e-06, PFam score of 27.5
  misc_feature (1)...(331): Xaa = X or * as defined in Table 2
PGILSLRNALLTGVDCKVVVPVPPGHTHPQLRLFHFHPKTCSGWGEWGDHGVVWAGPAPAYHLHRDVQALWTNDHALAWPXAMTSERTLWPGHELSARPGRSWRISCPTGLPQGGDDRTRGHWVTATCCSADGLRLCRYGDGVRGGLPTVAWPXLTGSCSLRYGSGQQCCYTADGTQLLTADSSGGSTPDRGHDWGAPPFRTPPRVPSMSHWLYDVLSFYYCCLWAAPDPGKDRAGLGCTPTXPSTLTLASAFGDPHFVTFDGTNFTFNGRGEYVGMGXNQGGRLEPSGSRSAPTTAGTETRGTGLTAVAVQEGNSDVVEVRLANRTGPER

SEQ ID NO: 38376 - protein, 307 aa, Homo sapiens
  misc_feature (1)...(307): Xaa = X or * as defined in Table 2
RCAGCPHSSSFFERGQXAAVGPCCHGGTYRKASSVXRVSVXHPPHDRGSRKQSLSGRXSTGLSXMPSGVASSASVXFVNVFSLSSSNXLAQSTARFPPGSVRGLGQGRAGGGXAPGHGADHPTGRQHSXGSPAPVTWLWWPPPRHQAALAPAPSTTPYDNSPLHCRPSGPSQSSHPHSALPGTSVPGSSPLEIVPGSSLYVSXSLIRALAAPISSSSVGKNCRCTERLAIKPAAESCRTRSSSAGQSVFSRFTSLXAFTGXARXPSASAADLLVKASILLAQLLILESLASSTRMYSFRDCTSSFSA

SEQ ID NO: 38377 - protein, 311 aa, Homo sapiens
  DOMAIN (153)..(168): PUROTHIONIN SIGNATURE domain identified by eMATRIX, accession number PR00288C, p-value=9.735e-09, raw score of 10.15
  misc_feature (1)...(311): Xaa = X or * as defined in Table 2
YSPARGSGRGDLSRRPGAGRRAGQGPQVGAPKPGGAEYVRWAAGGMKGAGGSSGSGSGSGSREAGXPGVPRGRRGWRTPAEPPGWGPGRRQACGAXGEGRAAAQVGGAPAAAGGGVAREEAPSXPGDAAGGSGTPGAASVQVSAPPAQPQINLSAGARAGVARRCVCPRGAESXGPGPDPGPGSRRXPPAAQSGPPPCPSALFLHPSGFLCRRPQPSRAQGGEVSGALRAVPRLSGGAGNLAALPCQLPGSGGLTPGCQASQGLGVLGLVRAGPAWSPLDGPLDQKVFSPQTSLWNQRCFSLAAAGPVIIR

SEQ ID NO: 38378 - protein, 121 aa, Homo sapiens
HEAEISSPAVERLISSVLRTCDLEEVRGTAAGIMGARWGAELQSPPAPPFQFQTCLVRHCKHAFGCALVHTSGWKVVYSGDTMPCEALVRMGKDATLLIHEATLEDGLEEEAVDKTHSTTS

SEQ ID NO: 38379 - protein, 414 aa, Homo sapiens
  misc_feature (1)...(414): Xaa = X or * as defined in Table 2
TPAWSREILAEELCTPPDPGAAFVVVECPDESFIQPICENATFQRYQGKADAPVALVVHMAPASVLVDSRYQQWMERFGPDTQHLVLNENCASVHNLRSHKIQTQLNLIHPDIFPAAHQFPLXEGGPHPQCAHGSGXMPPQVPAPFQEWSARGMPLLLAILRNSXLRRCSFPTSSRALQEYRRSAQDGPAPAEKRSQYPEIIFLGTGSAIPMKIRNVSATLVKQSPDTSLLLDCGEGTFGQLCRHYGDQVDRVLGTLAAVFVSHLHADHHTGLPSILLQRERALASLGKPLHPLLVVAPNQLKAWLQQYHNQCQEVLHHISMIPAKLPSGRWLRSPVLQWKDXFSSLLRTWIWEEFQTCLVRHCKHAFGCALVHTSGLKVVYSGDTMPCEALVRMGKDATRKQADELISFQGSF

SEQ ID NO: 38380 - protein, 252 aa, Homo sapiens
  misc_feature (1)...(252): Xaa = X or * as defined in Table 2
GAAASQLPAVPQPVPGGPAPHQYDSCQMPSGRGXDLQSCSGKIDQFAAWTTCDLEEFQTCLVRHCKHAFGCALVHTSGWKVVYSGDTMPCELLVRMGKDATLLIHEATLEDGFRKREALEKTHSTTSQGHSAWGMRMNAEFHYVLNHFQARRYSKVPLFSPNFSEKVGVAFDHMKVCFGDFPTMPKLIPPLKALFAGDIEEMEERREKRELRAGAGRPSCSRGAGRRPLEDGEPQQKRAHTEEPQAKKVRAQ

SEQ ID NO: 38381 - protein, 202 aa, Homo sapiens
  misc_feature (1)...(202): Xaa = X or * as defined in Table 2
SPGSWETRLWVWSFYRSCKHSLCPCLVGEFLVFNSPMQSGSAGEPPRLQFGAPLPGAAPGNYRRTGRGREGPWPPPLAPSLFAFSDLGSSPGRTSWRPPAVSRRLGPTFPPPAPGRGRPRRAAXTGPSAQPPRSLSTLSPAPAAPAVRTAPPVASPRAAPAPLRAITLLATKSEELPVVSFFSSRLVLAKRPKRLAQMHWGH

SEQ ID NO: 38382 - protein, 96 aa, Homo sapiens
QFLDAESGSAGEPPRLAVPAPFPGGAPGNYGRTGRGREERSWPPPLAPSLFALSDFGSSPGRTSRRPLAVSRRLGPTFPPPPLPPAPGRGRPRAAP

SEQ ID NO: 38383 - protein, 189 aa, Homo sapiens
  misc_feature (1)...(189): Xaa = X or * as defined in Table 2
SPGSWETRLWVWSFYRSCKHSLCPCLVGEFLVFNSPMQSGSAGEPPRLQFGAPLPGAAPGNYRRTGRGREGPWPPPLAPSLFAFSDLGSSPGRTSWRPPAVSRRLGPTFPPPAPGRGRPRRAAXTGPSAQPPRSLSTLSPAPAAPAVRTAPPVASPRAAPAPLRAITLLATKSEELPVVSFFSSRLVLA

SEQ ID NO: 38384 - protein, 141 aa, Homo sapiens
  misc_feature (1)...(141): Xaa = X or * as defined in Table 2
MGSAPVGLGACWGLYVGLRASPSKRPYGASPARELEVEKSALGGGKLPGGARRSSPGRIPNLKKRKGLELKVVAKTLLDPFQFVRNSLAQLREEVHELQARWFPSRTTLSIAIFVAILHCYNQIPKYKHGENGELDLIMSX

SEQ ID NO: 38385 - protein, 43 aa, Homo sapiens
GQTIPFICWGKRSRVQLVTLPWTGEWKEISHLISTPQVQGHRL

SEQ ID NO: 38386 - protein, 103 aa, Homo sapiens
  misc_feature (1)...(103): Xaa = X or * as defined in Table 2
VEELTARTGGGAPPGCQADAKRMPQFPPQRTPWGHGFAGAPFPISKPHGPPAGQLXPGPSCEQTEPPSPVNVTVTHLRANSATVSWDVPEGNIVIGYSISQQV

SEQ ID NO: 38387 - protein, 161 aa, Homo sapiens
  DOMAIN (83)..(160): Fibronectin type III domain identified by PFam, accession name fn3, E-value=4.7e-09, PFam score of 43.5
  misc_feature (1)...(161): Xaa = X or * as defined in Table 2
GSHRVGRWAALCDRAAPRGLTNRETGGGAPPGCQADAKRMPQFPSQRTPRGHGFAGAPFPISKPHGPPAGQLXPGPSCEQTEPPSPVNVTVTHLRANSATVSWDVPEGNIVIGYSISQQRQNGPGQRVIREVNTTTRACALWGLAEDSDYTVQVRSIGLRL

SEQ ID NO: 38388 - protein, 284 aa, Homo sapiens
  misc_feature (1)...(284): Xaa = X or * as defined in Table 2
RPPAARARRWLPKPSPARRSRRPAHRCSRRRRTCTPQATRPGMRXAPAAACGPTGRRSRLPALKLALEYIVPCMNKHGICVVDDFLGKETGQQIGDEVRALHDTGKFTDGQLVSQKSDSSKDIRGDKITWIEGKEPGCETIGLLMSSMDDLIRHCNGKLGSYKINGRTKAMVACYPGNGTGYVRHVDNPNGDGRCVTCIYYLNKDWDAKVSGGILRIFPEGKAQFADIEPKFDRLLFFWSDRRNPHEVQPAYATRYAITVWYFDADERARAKVKYRNRXKRCEG

SEQ ID NO: 38389 - protein, 69 aa, Homo sapiens
  misc_feature (1)...(69): Xaa = X or * as defined in Table 2
MVEEELAVNYVYSIYASKEQIRYKHGRSFANGHVKELMEGALSLIEELKYVTKQIGKASEAAREEGTKX

SEQ ID NO: 38390 - protein, 269 aa, Homo sapiens
  DOMAIN (76)..(95): TYPE III EGF-LIKE SIGNATURE domain identified by eMATRIX, accession number PR00011B, p-value=5.576e-13, raw score of 13.08
  DOMAIN (27)..(217): EGF-like domain identified by PFam, accession name EGF, E- value=0.00021, PFam score of 28.1
  misc_feature (1)...(269): Xaa = X or * as defined in Table 2
MPQRALLCQLTYACISAQLICPFAMEQQLVACCHPMSGECACKPGWSGLYCNETCSPGFYGEACQQICSCQNGADCDSVTGKCTCAPGFKGIDCSTPCPLGTYGINCSSRCGCKNDAVCSPVDGSCTCKAGWHGVDCSIRCPSGTWGFGCNLTCQCLNGGACNTLDGTCTCAPGWRGEKCELPCQDGTYGLNCAERCDCSHADGCHPTTGHCRCLPGWSVFTGNGVPINNIHIIVWDCFHVKVQTVVTFCLITLEAKTVTQDMTVSASX

SEQ ID NO: 38391 - protein, 762 aa, Homo sapiens
  DOMAIN (101)..(120): TYPE III EGF-LIKE SIGNATURE domain identified by eMATRIX, accession number PR00011B, p-value=7.102e-13, raw score of 13.08
  DOMAIN (44)..(634): EGF-like domain identified by PFam, accession name EGF, E- value=7.7e-10, PFam score of 46.1
  misc_feature (1)...(762): Xaa = X or * as defined in Table 2
MKVGLDQIIEVVPSHSVTSGAAAGECGGVHCDSVCAEGRWGPNCSLPCYCKNGASCSPDDGICECAPGFRGTTCQRICSPGFYGHRCSQTCPQCVHSSGPCHHITGLCDCLPGFTGALCNEAYSQSCPSGRFGKNCAGICTCTNNGTCNPIDRSCQCYPGWIGSDCSQPHCADKCVHGRCIAPNTCQCEPGWGGTNCSSVKKQSTVCESXKCEPWEERPCGGLHWDIAGXPGKHGGYLNELGAFGLDRSYMGKSLKDLGKNSEYNSSNCSLSSSENPYATIKGPTCTYPEKLRVWLCGDEIAGTKRFPICRDQXLNFSQQECLXSXTYSECCPRSIQQXWASFPGSIXPPKNSHIPCHYDLLPVRDSSSSLKQEDSGGSSSNSSSSSEXAPKDRLGLLVXXRSXSMXTNRLAKHPKQPGRKGPKIXXHGTWKSSQEKHAEEQSGKLAATLCGKDWLIQREGWPYILSRMFLCFISTDGRESESLWRKSNGNSKFKFXWGRPGKCGLXEGQREEVWGLGNSLYCLAGQLXCLDCECHHGFQECCPVLGHSWGYKSCLNRNPLKGLSSRCAGLAVRDSLAPNSQGWKATFDFPSLECPSGTYGYGCRQICDCLNNSTCDHITGTCYCSPGWKGARCDQAGCYHSWKSEQLKPNQYCSPCXFLPDRGHCRHHHSCPSCSLPTGIVHYLXTQAEGKGIKHASSYLHPCYEGRQCRLYHFRSLHQCVQNGCXTQPAETGRYLGEQQQQKCQARRCGASQEWRFHLCP

SEQ ID NO: 38392 - protein, 878 aa, Homo sapiens
  DOMAIN (742)..(757): Glycosyl hydrolases family 8 proteins domain identified by eMATRIX, accession number BL00812B, p-value=6.667e-09, raw score of 13.49
  DOMAIN (27)..(653): EGF-like domain identified by PFam, accession name EGF, E- value=2e-22, PFam score of 88.0
MPQRALLCQLTYACISAQLICPFAMEQQLVACCHPMSGECACKPGWSGLYCNETCSPGFYGEACQQICSCQNGADCDSVTGKCTCAPGFKGIDCSTPCPLGTYGINCSSRCGCKNDAVCSPVDGSCTCKAGWHGVDCSIRCPSGTWGFGCNLTCQCLNGGACNTLDGTCTCAPGWRGEKCELPCQDGTYGLNCAERCDCSHADGCHPTTGHCRCLPGWSGVHCDSVCAEGRWGPNCSLPCYCKNGASCSPDDGICECAPGFRGTTCQRICSPGFYGHRCSQTCPQCVHSSGPCHHITGLCDCLPGFTGALCNEAYSQCVPVADLGKTVQEFVPAPTTEPVTPLTDLVSVTPVGLAVTALNHVHLPTGAQTASTRATAIMELSAAPTMGNVNALLAGQGSTALRRSPRHSCRAAASPWFYGKDCALICQCQNGADCDHISGQCTCRTGFMGRHCEQKVRPPWDHRWLLTALGGGGVTTRMKTEFKFSILFFWALPSSPSYFWNVAAQSLKRSSRAFFMAEAEPGSHIGGQYIRWGGGLVAQGQSLLLPCAVWTVSATMIPGMLSSSGTLLGVQVSLNRNPLKGLSSRCAGLAVRDSLAPNSQGWKATFDFPSLECPSGTYGYGCRQICDCLNNSTCDHITGTCYCSPGWKGARCDQAGVIIVGNLNSLSRTSTALPADSYQIGAIAGIIILVLVVLFLLALFIIYRHKQKGKESSMPAVTYTPAMRVVNADYTISGTLPHSNGGNANSHYFTNPSYHTLTQCATSPSRSTTGDRMTVHEFKKQSTVCESMKSPARRDSPYAEINNSTSANRNVYEVEPTVSVVQGVFSNNGRLSQDPYDLPKNSHIPCHYDLLPVRDSSSSPKQEDSGGSSSNSSSSSE

SEQ ID NO: 38393 - protein, 90 aa, Homo sapiens
NSLNSRWLKGLPGAPGIQEIKEMWRCMSSICQKEGWRMTAGSLGHHRSLLHVGQAGNDVDRTGSLPASVRQHAYYTASSVEGRVSYKLYT

SEQ ID NO: 38394 - protein, 139 aa, Homo sapiens
  misc_feature (1)...(139): Xaa = X or * as defined in Table 2
FNISLGFACPLRIDFFGWFFFVFFLSWSFTLFAQAGVLWCDLGSLQPPPLGFKKFSCLSLPSSLDYRCLPPRLTNFXFLVEMGFHHVGQAGLELLTSGDPPASASQSAGITGMSHRAQSAALSFKXSGISKNRYFIFWA

SEQ ID NO: 38395 - protein, 317 aa, Homo sapiens
  DOMAIN (122)..(161): Gag P30 core shell protein domain identified by PFam, accession name Gag_p30, E-value=0.00017, PFam score of 19.1
MDWECQRPAHCGSPLDPEEAKLQEEATAAGGAACQSSTVHPHSSALGRSMGLGTVEQGVVLIGEAPAAPETTDSPLSTKAMLGMLVKDHWSPAAQTPFFVIKEGGKRGAGLLHGQLILKDKFITQSAADIKEKLQKSTLGPERNLKTLLNLATSVFYNRDQEEQAERDKRGKKKATTLVMALGQADFGGSGTRKAWANRMPNRACFQQYPLRPEAQQGLQKIVKDLKAQGLVKPCSSPSDTPILGVQKPNGQWRIEAVKLQMALQMEPQMQSMTKLYCGPLDWPASPCSDINDMEGTPPEEISTARPLLCPNSAGSC

SEQ ID NO: 38396 - protein, 308 aa, Homo sapiens
  DOMAIN (78)..(95): RNase H domain identified by eMATRIX, accession number PF00075A, p-value=4.060e-12, raw score of 14.44
  DOMAIN (58)..(243): Reverse transcriptase domain identified by PFam, accession name rvt, E-value=3.1e-38, PFam score of 140.4
ETSPDLGLTPESKGNVGHAGKGPLESSSQDHFLCGQERQYPLRPKAQQGLQKTVKDLKAQGLVKPCSSPCNTPTVGVQKPNGQWRLVQNLRIINETVVPLYPAEPNPYTLLSQIPEEAEWYIVLDLKDAFFCIPVHPDSQFLFAFEDPSNSTSQLTWTVLRQGFRDSPHLFGQALAQDLSQFSYLDTLVLWYVDDLLLATCSETLCHQATQVLLNFLTTCGYKVSKPKAQLCSQQVKYLGLKLSKGLRALSEEHIQPILAYPLPKTLKQLRGFLGITGFYRMWIPRYSKIGRSLYTLIKETQKANTHL

SEQ ID NO: 38397 - protein, 155 aa, Homo sapiens
  DOMAIN (6)..(18): RNase H domain identified by eMATRIX, accession number PF00075C, p-value=7.652e-10, raw score of 11.58
MSQLTWTVLPQGFKHSAHLFGQALAQDLSQFSYLDTLVLQYGDDLILATRSETWCHQATQALLNFLATCGYKVSKQNAQLCSQQVKNLGLKLSKGTRALSEERIQPILAYPHPKTLKQLRGFLGITSFCRIWIPRYSEIVRPLYTLRKLRKPIPI

SEQ ID NO: 38398 - protein, 191 aa, Homo sapiens
EPSPALGLTPERKGNVGHAGKGPLESSSPDPFLCGQERREKGCRTATSVSITNPINRGPWVVTHPGKELTPEHKGNVGHAGRDILAKAGAIIHLNIGEGTPVCCPLLEEGINPEVWATEGQYGRAKNARPVQVKLKDSTSFPYQRQYPLRPKAQQGLQKIVKDLKAQGLVKPCSNPCSTPILGVQKPNRQW

SEQ ID NO: 38399 - protein, 110 aa, Homo sapiens
QYPLRPEAQQGLQKIVKDLKAQGLVKPCSSPSDTPILGVQKPNGQWRIEAVKLQMALQMEPQMQSMTKLYCGPLDWPASPCSDINDMEGTPPEEISTARPLLCPNSAGSC

SEQ ID NO: 38400 - protein, 299 aa, Homo sapiens; identical to SEQ ID NO: 33771
  DOMAIN (117)..(134): RNase H domain identified by eMATRIX, accession number PF00075A, p-value=4.400e-13, raw score of 14.44
  DOMAIN (97)..(282): Reverse transcriptase domain identified by PFam, accession name rvt, E-value=2e-33, PFam score of 124.5

SEQ ID NO: 38401 - protein, 207 aa, Homo sapiens
  DOMAIN (13)..(201): Gag P30 core shell protein domain identified by PFam, accession name Gag_p30, E-value=1.9e-13, PFam score of 50.6
MYSGEFDPVRVCVPFSLSDLKQLKIDLGRFSDNPDGYIDVLQGLGQSFDLTWRDIMLLLDQTLTPNERNATITAAREFGDLWCLSQVNDRMTTEQRERFPTGQQAVPSVDPRWDTESEHGDGCHRHLLTCMLEGLRKTKKKPMNYSMMSTITQGKEKNPNAFLERLRQALRKHTSLSPDSIEGQLILKDKCITLSAADIRKNFRSPP

SEQ ID NO: 38402 - protein, 641 aa, Homo sapiens
  DOMAIN (399)..(424): ALDO-KETO REDUCTASE SIGNATURE domain identified by eMATRIX, accession number PR00069E, p-value=1.964e-23, raw score of 18.14
  DOMAIN (129)..(468): Aldo/keto reductase family domain identified by PFam, accession name aldo_ket_red, E-value=6.9e-136, PFam score of 464.8
MGEERYGMEEEGHLVISVTQASHFLTLQFDACSVIPYGDEQGPMKAILLLLTFGPCIFNLLVKFVSSRIEAIKLQMVLQMEPQVNSTNNFHQGPLDQPVGPLTGLKSSLLKDTTSAGPLLRPYPASLLGKVKEAVKVAIDAEYRHIDCAYFYENQHEVGEAIQEKIQEKAVMREDLFIVSKVHMAHLVWPTFFERPLVRKAFEKTLKDLKLSYLDVYLIHWPQGFKSLKKWYADVVFSKHQDPETLLNRTKCPDADSSKLFILYLQTGDDFFPKDDKGNMISGKGTFLDAWEAMEELVDEGLVKALGVSNFNHFQIERLLNKPGLKYKPVTNQNSLGTMQNRAGFPRDEDCLLLQVECHPYLTQEKLIQYCHSKGITVTAYSPLGSPDRPWAKPEDPSLLEDPKIKEIAAKHKKTTAQVLIRFHIQRNVTVIPKSMTPAHIVENIQVFDFKLSDEEMATILSFNRNWRAFDFKEERHPSKSRGHYTLELGEEKRVNIYTDSEYAYLVLHAHAVIWREREFLTSKGTPIKHQEAIRRLLLAVQKPKEVAVFHCWGHQKGKEREIEGNCQVDIEAKRAARIKAVKLQMVLQMEHQMQCMTKIYRGPLDWPASPCSDVNDIEGTPPEEISTAQPLLHPNSAGSS

SEQ ID NO: 38403 - protein, 682 aa, Homo sapiens; identical to SEQ ID NO: 33769
  DOMAIN (167)..(179): RNase H domain identified by eMATRIX, accession number PF00075C, p-value=5.622e-12, raw score of 11.58
  DOMAIN (69)..(250): Reverse transcriptase domain identified by PFam, accession name rvt, E-value=1.1e-21, PFam score of 85.5

SEQ ID NO: 38404 - protein, 236 aa, Homo sapiens
  DOMAIN (120)..(137): RNase H domain identified by eMATRIX, accession number PF00075A, p-value=2.600e-13, raw score of 14.44
  DOMAIN (100)..(231): Reverse transcriptase domain identified by PFam, accession name rvt, E-value=7.1e-06, PFam score of 13.8
NPAARTPFFVIKKGGKRGEGCLAKAGAIIHLNIGGTPVCCPLLEEGINLEDWATEGQYGRAKNARPVQVKLKDSASFPHQRQYPLRPEAQQGLQKIKDLKAQGLVKACNSPYNNPTLGVQKPSGQWRLVQDLRIINEVTVPLYLAVPNPYILLSQIPEEAEWFTDLDLKDAFFCIPVHPDSQFLFAFEDPSNPMSQLTWTVSPQGFRDSPHLFGQALAQDLSRFSYLGTLVLWYVD

SEQ ID NO: 38405 - protein, 249 aa, Homo sapiens; identical to SEQ ID NO: 33777
  DOMAIN (121)..(133): RNase H domain identified by eMATRIX, accession number PF00075C, p-value=1.000e-12, raw score of 11.58
  DOMAIN (28)..(207): Reverse transcriptase domain identified by PFam, accession name rvt, E-value=2.3e-16, PFam score of 67.8
  misc_feature (1)...(249): Xaa = X or * as defined in Table 2

SEQ ID NO: 38406 - protein, 393 aa, Homo sapiens
  DOMAIN (64)..(81): RNase H domain identified by eMATRIX, accession number PF00075A, p-value=4.400e-13, raw score of 14.44
  DOMAIN (44)..(229): Reverse transcriptase domain identified by PFam, accession name rvt, E-value=1.2e-41, PFam score of 151.8
  misc_feature (1)...(393): Xaa = X or * as defined in Table 2
NPAAQTPFFVVKKGGKRGAGLLHRQYPLRLEAKQGLKKIVKDLKAQGLVTPCSSPCNTPTLAVQKPNGQWRLVQDLRIINEAVVPLYPAVPNPYILLSQIPEEAEWFTVLDLKDAFFCIPVHPDSQFLFAFEDPSNPMSQLTWTVLPQGFRDSLHLFGQALAQDLSQFSYLDTLVLQYMDDLLLVTHSETLCHQATQVLLNFLATCGYKVSKLKAQICSQQVKYLGLKLSKGTRALSEERIQPILAYPHPKTRKQLRGLLGITGFCQIWIPRYSEIARPLHTLIKKTQKANTHLVRWTPEAEAAFQVLKKALTQAPVLSLPTGQDFSLYVTEKTGIALGVLTQHYGEERNSXLPTEYLSNIRKPLGDYYWLYRNLKRWQSYTARVIRKERKGK

SEQ ID NO: 38407 - protein, 172 aa, Homo sapiens
GEHHCRQLLDELYHRPYHPPDAGPGGLCYRAGGGLPGQLPVPLLRLPADQGPERAGRVPVQPDGGRPLLHLLAALLAAVRAAARQLVSRRPVLPGVRHPPVREHLHQRGLPLLHLRGPLPGCGPSLPLPPVPDPEGGRRRQRGHLGQGAADQHLLPDARGGHRGREPAPRVL

SEQ ID NO: 38408 - protein, 1067 aa, Homo sapiens
  DOMAIN (381)..(392): RNase H domain identified by eMATRIX, accession number PF00075B, p-value=6.276e-12, raw score of 12.56
  DOMAIN (314)..(500): Reverse transcriptase domain identified by PFam, accession name rvt, E-value=8.9e-27, PFam score of 102.4
  misc_feature (1)...(1067): Xaa = X or * as defined in Table 2
DSPLSTKAMLGMLVKDHWSPAAQTPFFVIKEGGKRGAGLLHGQLILKDKFITQSAADIKEKLQKSTLGPERNLKTLLNLATSVFYNRDQEEQAERDKRGKKKATTLVMALGQADFGGSGTRKAWANRMPNRAYFQCGLQGHFKKDCPSRKPQVCLTIESQEVNCLLDAGAAFSVLLSCPGQLSSRSVTIRGVLGQPVTRYFFQPLSCDWGALPFSHAFLIMPESLTPLLEREILVKAGAIIHLNIGEGTPICRLLFEEGISPEVWATEGQYGQAKNAHFVQVKLKDSTSFPYQRQYPLRPEAQQRLQKIVKDLKAQGLVKPYSSPCNTPILGVQKPKRQWRLVQDLRIINEAVFPLYPAIPSPYTLLSQIPEEAEWFTVLDLKDAFFCIPVHPDSQFLFAFEDPSNPTSQLTWTVLPQGFRDSPHLFGQALAQDLSQFSYLDTPVLWYVNEILLAVRSETLCHQATQMLLNFLATCGYKVFKPKAQLCSQQVKYLGLKLSKGTKALSEECIQPILAYPHLKTLKQLREFLGITGFCRIWIPRYSKIARPLNTRIKETQKANTHLVRWTPEAEVAFQALKKALTHAPVLSLPVGQNFSLYVTKNKQTKKKKTXIALRVLALVXGTSLQPVAYLSKEIDVVAKGQPHCLRVVVAVAVLVSEAVKIIQGRNLTVWTSHDVNGILTAKGDLWLSDNHLLKYQALLLEGPMLRLCTCAALNLDTFLPHNEEKIEHNCQQVIAQTYATRGDHLEVPLTDPNPNLYTDGRSFVEKGLQKVGYAVVSDNGILESNPLTPGTSAQLAKLTRALELGEGKRVNIYTDSKYAYLVLHAHAVIWREREFLTSEGTPIKHQEAIRELLLAVQKPKEVAVLHCRGHQKGKEREIERNRQADIEAKRAARQDPPLEMLIEGPLVWGNPLWETKPQYSEEEIEWGISRGHSFLPSGWQATEQGKIPLPAANQWKLLKTTHQNFHLCIDSTHQMAKLLFTGPGLFKTLKQIVGACKFVSSRIKAVKLQIILQMEPQMQSMTKIYRGPLDHPDSPCSNVNDIEGTPPEEISTAQPLLHPRPAGSS

SEQ ID NO: 38409 - protein, 57 aa, Homo sapiens
  misc_feature (1)...(57): Xaa = X or * as defined in Table 2
VHLHPQGHVPVKHTPTGLGYSSCRHLLLGRACYXKGEVGAKAGMQVSDALPRLGGVS

SEQ ID NO: 38410 - protein, 809 aa, Homo sapiens
  DOMAIN (223)..(261): Receptor tyrosine kinase class III proteins domain identified by eMATRIX, accession number BL00240E, p-value=7.660e-10, raw score of 11.56
  DOMAIN (103)..(372): Eukaryotic protein kinase domain identified by PFam, accession name pkinase, E-value=1.8e-44, PFam score of 161.2
  misc_feature (1)...(809): Xaa = X or * as defined in Table 2
MSKFSCASLTATESDGTPLMEQYVPCPVCETAWAQHTDPSEKSEDVQYFDMEDCVLTAIERDFISCPRHPDLPVPLQELVPELFMTDFPARLFLENSKLEHSEDEGSVLGQGGSGTVIYRARYQGQPVAVKRFHIKKFKNFANVPADTMLRHLRATDAMKNFSEFRQEASMLHALQHPCIVALIGISIHPLCFALELAPLSSLNTVLSENARDSSFIPLGHMLTQKIAYQIASGLAYLHKKNIIFCDLKSDNILVWSLDVKEHINIKLSDYGISRQSFHEGALGVEGTPGYQAPEIRPRIVYDEKVDMFSYGMVLYELLSGQRPALGHHQLQIAKKLSKGIRPVLGQPEEVQFRRLQALMMECWDTKPEKRPLALSVVSQMKAPDFCHLHVXTVLWEADSLLLIPGPGVHRGVLGWKRGVQELHGGNTEKGLMEVQRMCCPGMKVSCQLQVQRSLWTATEDQKIYIYTLKGMCPLNTPQQALDTPAVVTCFLAVPVIKKNSYLVLAGLADGLVAVFPVVRGTPKDSCSYLCSHTANRSKFSIADEDARQNPYPVKAMEVVNSGSEVWYSNGPGLLVIDCASLEICRRLEPYMAPSMVTSVVCSSEGRGEEVVWCLDDKANSLVMYHSTTYQLCARYFCGVPSPLRDMFPVRPLDTEPPAASHTANPKVPEGDSIADVSIMYSEELGTQILIHQESLTDYCSMSSYSSSPPRQAARSPSSLPSSPASSSSVPFSTDCEDSDMLHTPGAASDRSEHDLTPMDGETFSQQLAGREESSPSETSFGSPGAVEMLSSLAWRRILAPSGAESLPP

SEQ ID NO: 38411 - protein, 547 aa, Homo sapiens
  DOMAIN (10)..(123): PX domain identified by PFam, accession name PX, E-value=1.4e -17, PFam score of 71.9
MPQGNPLLLSHTLQELLARDTVQVELIPEKKGLFLKHVEYEVSSQRFKSSVYRRYNDFVVFQEMLLHKFPYRMVPALPPKRMLGADREFIEARRRALKRFVNLVARHPLFSEDVVLKLFLSFSGSDVQNKLKESAQCVGDEFLNSDIQAQFAISRELIRNIYNSFHKLRDRAERIASRAIDNAADLLIFGKELSAIGSDTTPLPSWAALNSSTWGSLKQALKGLSVEFALLADKAAQQTPAVSRAWMLPSVAAGAQGFGPTLHTADASEHRVFGPCALCLACAPTEGCYWWLPAVCCALTALLGSLCGCAARTEPCVRAEEEPVSTAAPTAECGASACSLGRPPLFLDQQHGKQEENDVVEKLNLFLDLLQSYKDLCERHEKGVLHKHQRALHKYSLMKRQMMSATAQNREPESVEQLESRIVEAEGEGAALAQGARWCSGLGAPVAGWAGCERRLFAPQQENAIQTMELRNYFSLYCLHQETQLIHVYLPLTSHILRAFVNSQIQGHKEMSKVWNDLRPKLSCLFAGPHSTLTPPCSPPEDGLCPH

SEQ ID NO: 38412 - protein, 353 aa, Homo sapiens
  misc_feature (1)...(353): Xaa = X or * as defined in Table 2
VLHKFPYRMVPALPPKRMLGADREFIEARRRALKRFVNLVARHPLFSEDVVLKLFLSFSGSDVQNKLKESAQCVGDEFLNCKLATRAKDFLPADIQAQFAISRELIRNIYNSFHKLRNRAERIASRAIDNAADLLIFGKELSAIGSDTTPLPSWAALNSSTWGSLKQALKGLSVEFALLADKAAQQGKQEENDVVEKLNLFLDLLQSYKDLCERGHEKGVFHTKHQRALAQSTAXLKRPDXLSATGAEPRSPEVRGSKLKSRIRGARENAIQTMELRNYFSLYCLHQETQLIHVYLPLTSHILRAFVNSQIQGHKEMSKVWNDLRPKLSCLFAGPHRTLTPPCSPPEDGLCPH

SEQ ID NO: 38413 - protein, 325 aa, Homo sapiens
  misc_feature (1)...(325): Xaa = X or * as defined in Table 2
MPQVPAPPLPSITSGHPGEPPARPSCSCLFSPQPCNSITPSSLLLRQLAVAAAGGCGGHGAPALSSTGWQQVCKSPQVRSVPDNPTTADSTASLAWKFGEVLRSHINCGYKXKQQPLLPVHAQRRAQVSAPAPPAGLSCGQHSLPQPPRCSDLSLGLHPGRLPCDRGHCPPLPPVTPTPDKAGPILDPAQSCPFCSPIPAPPKQPSPPARFPEMKRKKTLMMPPSEGSLSLASGMEASVFQRLLSRCTCLDQATVIWGFCYMQVQASQGIPCRGKDELLRLAPLPVKEARRTKPRSPGKHAKAPPSSSACSPHLCCSSPILQALD

SEQ ID NO: 38414 - protein, 152 aa, Homo sapiens
  misc_feature (1)...(152): Xaa = X or * as defined in Table 2
SLQAPRRNSRAEHTRTLNSECPRRRRCCIKGCTYTXLDAVPPPPVLDWLVQPKPRWLGGNGWLLDGPEEVLQAEACSTTEDGAEPLLCPSGYECHILSPGDVAEGIPNRGQCVKQRRQADGRILRHKLYKEYPEGDSKNVAEPGKGQQRHFQ

SEQ ID NO: 38415 - protein, 71 aa, Homo sapiens
  misc_feature (1)...(71): Xaa = X or * as defined in Table 2
NNHRLDRTLPRDYCHAATAYTTHELAFGDFRLPTEGHQELCHNSHLIYFRRDKXTHCTWRSVDSLTGVTHR

SEQ ID NO: 38416 - protein, 109 aa, Homo sapiens
  misc_feature (1)...(109): Xaa = X or * as defined in Table 2
NVRPSXALQAPWGRHHLCVTPMQLRMTLVVSSLGKGTCGLSLAQCAPVQEGTHGGSPPVEGWLAATRTCEGCRRENTMKNVGSRKYAFNSLQLKAFPKHYRPPEDLRKS

SEQ ID NO: 38417 - protein, 93 aa, Homo sapiens
KGFYLFNKQTIEQTNNGSKSFAKRNTEGHDDLLLQGFQGSQTPSFLSSSGRCYSWGAIGPQFGALSGFSPFPHSAANRQSSALDFWITTSISF

SEQ ID NO: 38418 - protein, 92 aa, Homo sapiens
  DOMAIN (34)..(72): Outer Capsid protein VP4 (Hemagglutinin) domain identified by eMATRIX, accession number PF00426S, p-value=4.563e-10, raw score of 15.67
VLEFGALSGSLSISPLCTIPALVEPPCGPQPSSSSSSSSSSSSSSSSSSSSSSSSSSSSSSSSSSSSSSPQGVQLPLGPRRLKMNTEPPTRP

SEQ ID NO: 38419 - protein, 124 aa, Homo sapiens
  misc_feature (1)...(124): Xaa = X or * as defined in Table 2
MMMLLLQGFQSSQTPSFLSSSSGRCYSWGAIGPRVWGSFRFSLHFPILHHPCPGGAPVRNTXXXXXXXXXXXXXXXXXXXXXXXXXXXXXXXXXXXXXXXXXXXXXXXXXXXXXXRDADPPTRP

SEQ ID NO: 38420 - protein, 99 aa, Homo sapiens
  misc_feature (1)...(99): Xaa = X or * as defined in Table 2
GLCHVLQPCDPCLPGTMQEAQPPEVLKTAGKAGGQEPGXLXRIPXGSLCPPCPVAFGAAAELPLPSSDPVSRTGAPPGQGXWLGFGYFSSNEGPSQAGG

SEQ ID NO: 38421 - protein, 176 aa, Homo sapiens
  misc_feature (1)...(176): Xaa = X or * as defined in Table 2
XLKAKGDKGFIRQVLVVRPCECQTLLPARGPTSDPHHHPCPGGAPGGTQDPKMAAEAPQHPNSDWAGWIQAPSLGEGGTKNRKNHPGSPPGVQLPLGPQASRAGSPTGEFLGSLPLAPESPNAQVSNVTSAIHRSNISGFPRTCSVVLPGGPCKQAVLSSGLLDHDVDILLNSVLP

SEQ ID NO: 38422 - protein, 353 aa, Homo sapiens
  misc_feature (1)...(353): Xaa = X or * as defined in Table 2
PNGLRPPCPSPASETPGNAPVCDPGSSSQGAQGKLKPGGLPGWLFPFFAQPSPSEGGLCPPCPVAFGAAAELPLPSSDPVFRTGAPPGQGSWPIXSPGSRSGTRADPVKGEVAGRERCLPLIEXASPGPPHSGXAGQVPGAGPPRTAGXGVXTGTAPCPKAQPRKXQRXRXRCSSXVGXESAEIVCPQGDAEGXRKGSPXGSHRRNVPSRYSNSHGPYDSNQPHRKTKITFEEDKVDSTLIGSSSHVEWEDAVHIIPENESDDEEEEEKGPVSPRSPRKRPPSATRAAASRLRGSXTLGGLLGCIFAFFAPPSPTEGACAHPAQSLSGPLRSFRCHLRILCPARGLHQGRDDG

SEQ ID NO: 38423 - protein, 149 aa, Homo sapiens
METSKTMGASPLPKGTQRVMMMLLLQGFQSSQTPSFLSSSSGRCYSWGAIGPRVWGSFRFSLHFPILHHPCLGGAPVRNTGSEDGSGSSSAAPRATGQGGYRLLHWVKAAQRTGRTIPGGHQAFSFPLGPQAARAGSPTGEFLGSLPLA

SEQ ID NO: 38424 - protein, 557 aa, Homo sapiens
MLFLGSNRSSSLGLFQVLSPFPHSATIDKQTKTILTSRRSRLYVCTSPSGGLDVWFTTPLLLFQLLLFPSPAPALPPHDPTTAQLSPRGSTAQKVHQRPCQLPSLPGLFKGLKAKGDDEFIPQVLVVRPGEYQTLLPARGPTSDPHHHPCPGGAPVRNTGSEDGSGSSSAARKATGQESPNTQASNVTGATHRSNLSGFPRPCSVVLPGHRQQFSVCAYSTCCPCWVSEHRLRLPLNQQTGPPSRTSPAAYPPNKFAGIASGRLFPRPNERLRWQRSYSQLSPMGVSGVATGKKSLQATHRGLREGHRGHESEGLERVAATRPQLTTGLEMRLCEVAASDQSVVRRQRSFMGHFLRHPRGQVRGARGRRGFDCGSRPPATNLHPDDLNPTPSPSTGDGAFPRAGDLAVLRTAEQGGRGGAWVVEERKPACPVAFILLVWNSQSPAGLQSFCTGRHPSLSVRAQRAGTGASREEGTFWTEPVGQERRLIRSGSSQNESQEDQGADLISHEGLKADNRRESSTWANEVEDRRPQCTSALNLTPSHLHSPHPLTTFFRNV

SEQ ID NO: 38425 - protein, 334 aa, Homo sapiens
  DOMAIN (249)..(264): WILM'S TUMOUR PROTEIN SIGNATURE domain identified by eMATRIX, accession number PR00049D, p-value=3.288e-09, raw score of 0.00
  misc_feature (1)...(334): Xaa = X or * as defined in Table 2
KLLEQCLHSVSTWETPQYRRPPSPSXRGSREQPCSFSSPRDTPGENHWLSLPQRDXAGPPVRPSAGGFMTPPPRGVPTVEVPPDPTCSPNHTRPFRPFPSKNPCFRFPEPLRAPTLVPGPLPPTHPGRVPHLERNLSALGLGKSEGLKRNPCVEPPAPTPIRFPKITGTLPLRPAADHALLGMRDQSLSGQSPGPKSPDADDQLQNRDHTETEQRISSGRSSALAPESQLQQGCAGIHFRGRFCKAPPLASGPARPPCLSLPPPPWAPVRPKPPRXAPPPAPPVPSPINHPRAEECGRTARDWQAAPLAALVRDPLDEASWAPESGGDVENLYV

SEQ ID NO: 38426 - protein, 302 aa, Homo sapiens
  DOMAIN (139)..(159): INHIBIN BETA B CHAIN SIGNATURE domain identified by eMATRIX, accession number PR00671C, p-value=5.862e-09, raw score of 4.18
  misc_feature (1)...(302): Xaa = X or * as defined in Table 2
TEGGASHRAHPVGPAPRGKRHSGATEPANGTWARRRGPGRDSSNQSSGGGERSQLRHRGWRRLSRPLLPPGAASPLAGEDPERNAGGWRGGAAPMRPKRGPMNGGGCGPGAGSGAGGEALGRGRGAVSGCRPAPPVRPPPPPPPPPPGGWLRRTAGSGPEYVGSRCARGSGQVSAGGGLCARAARGGKLAPRLRALRGRPSPWPAPLGRSPARAPARVPAGRCGPGAXRGRCALGGQGEEGPAGSEGAGRPLPGRPGCPGTSPRLLPRRPVRKTDVGNRSSFFPRAPGRAPHAQCPTQFLII

SEQ ID NO: 38427 - protein, 151 aa, Homo sapiens
  DOMAIN (79)..(121): Anion exchangers family proteins domain identified by eMATRIX, accession number BL00219K, p-value=9.883e-24, raw score of 12.73
  DOMAIN (59)..(150): HCO3- transporter family domain identified by PFam, accession name HCO3_cotransp, E-value=3.6e-43, PFam score of 156.9
LYVFIYDAEGKMLNLTHTYPIQKPGSSAYGCLCQYPGPGGNESQWIRTRPKDRDDIVSMPTLPGRGWLVSPFGANPWWWSVAAALPALLLSILIFMDQQITAVILNRMEYRLQKGAGFHLDLFWVAVLMLLTSALGLPWYVSTTVISLAHM

SEQ ID NO: 38428 - protein, 56 aa, Homo sapiens
  misc_feature (1)...(56): Xaa = X or * as defined in Table 2
MFIYTSAFIXQFTNSINIPIXTSFCXTASVHLSCIVAVFCFHPCQCSSSFIQCTTN

SEQ ID NO: 38429 - protein, 197 aa, Homo sapiens
  DOMAIN (19)..(63): Anion exchangers family proteins domain identified by eMATRIX, accession number BL00219N, p-value=1.000e-20, raw score of 10.66
  DOMAIN (1)..(64): HCO3- transporter family domain identified by PFam, accession name HCO3_cotransp, E-value=6.9e-25, PFam score of 94.4
  misc_feature (1)...(197): Xaa = X or * as defined in Table 2
LAPVFKLIPMPVSYGIFLYMGWAALSSIQFTNRVKLLLMPAKHQPDLLLLRHVPLTRVHLFTAIQLACLGLLWIIKSTPAAIIFPLMLLGLVGVRKALERVFSPQELLGLDELMPEEERSIPEKGLEPEHSFSGSDSEDSELMYQPKAPEINISVNXLEXESGSGDPRKQHEVLTQEVRTFLAFGLTSRCSVGLGKD

SEQ ID NO: 38430 - protein, 1133 aa, Homo sapiens
  DOMAIN (192)..(208): Ank repeat proteins domain identified by eMATRIX, accession number PF00023A, p-value=1.750e-10, raw score of 16.03
  DOMAIN (5)..(975): Ank repeat domain identified by PFam, accession name ank, E- value=6.1e-145, PFam score of 494.9
MPADSFESPLTLAACGGHVELAALLIERGANLEEVNDEGYTPLMEAAREGHEEMVALLLAQGANINAQTEETQETALTLACCGGFSEVADFLIKAGADIELGCSTPLMEASQEGHLELVKYLLASGANVHATTATGDTALTYACENGHTDVADVLLQAGADLDKQEDMKTILEGIDPAKHQEHESEGGRTPLMKAARAGHLCTVQFLISKGANVNRATANNDHTVVSLACAGGHLAVVELLLAHGADPTHRLKDGSTMLIEAAKGGHTNVVSYLLDYPNNVLSVPTTDVSQLPPPSQDQSQVPRVPTHTLAMVVPPQEPDRTSQENSPALLGVQKGTSKQKSSSLQVADQDLLPSFHPYQPLECIVEETEGKLNELGQRISAIEKAQLKSLELIQGEPLNKDKIEELKKNREEQVQKKKKILKELQKVERQLQMKTQQQFTKEYLETKGQKDTVSLHQQCSHRGVFPEGEGDGSLPEDHFSELPQVDTILFKDNDVDDEQQSPPSAEQIDFVPVQPLSSPQCNFSSDLGSNGTNSLELQKVSGNQQIVGQPQIAITGHDQGLLVQEPDGLMVATPAQTLTDTLDDLIAAVSTRVPTGSNSSSQTTECLTPESCSQTTSNVASQSMPPVYPSVDIDAHTESNHDTALTLACAGGHEELVSVLIARDAKIEHRDKKGFTPLILAATAGHVGVVEILLDKGGDIEAQSERTKDTPLSLACSGGRQEVVDLLLARGANKEHRNVSDYTPLSLAASGGYVNIIKILLNAGAEINSRTGSKLGISPLMLAAMNGHVPAVKLLLDMGSDINAQIETNRNTALTLACFQGRAEVVSLLLDRKANVEHRAKTGLTPLMEAASGGYAEVGRVLLDKGADVNAPPVPSSRDTALTIAADKGHYKFCELLIHRGAHIDVRNKKGNTPLWLASNGGHFDVVQLLVQAGADVDAADNRKITPLMSAFRKGHVKVVQYLVKEVNQFPSDIECMRYIATITDKELLKKCHQCVETIVKAKDQQAAEANKNASILLKELDLEKEQSSSPATEQSWTENDFDELREEGLRRSNYSELREEIQTKGKEVENFEKNLEDCITRITNTEKCLKELMELKTKARELREECRSLRSPCDQLEERVSAMENEMNEMK

SEQ ID NO: 38431 - protein, 1377 aa, Homo sapiens
  DOMAIN (427)..(475): Anion exchangers family proteins domain identified by eMATRIX, accession number BL00219H, p-value=5.034e-22, raw score of 10.06
  DOMAIN (82)..(600): HCO3- transporter family domain identified by PFam, accession name HCO3_cotransp, E-value=4e-169, PFam score of 575.2
MKLPGQEGFEASSAPRNIPSGELDSNPDPGTGPSPDGPSDTESKELGVPKDPLLFIQLNELLGWPQALEWRETGTWVLFEEKLEVAAGRWSAPHVPTLALPSLQKLRSLLAEGLVLLDCPAQSLLELVGSTHPRKASDNEEAPLREQCQNPLRQKLPPGAEAGTVLAGELGFLAQPLGAFVRLRNPVVLGSLTEVSLPSRFFCLLLGPCMLGKGYHEMGRAAAVLLSDPQFQWSVRRASNLHDLLAALDAFLEEVTVLPPGRWDPTARIPPPKCLPSQHKRLPSQQREIRGPAVPRLTSAEDRHRHGPHAHSPELQRTGSDFLDALHLQCFSAVLYIYLATVTNAITFGGLLGDATDGAQGVLESFLGTAVAGAAFCLMAGQPLTILSSTGPVLVFERLLFSFSRDYSLDYLPFRLWVGIWVATFCLVLVATEASVLVRYFTRFTEEGFCALISLIFIYDAVGKMLNLTHTYPIQKPGSSAYGCLCQYPGPGGNESQWIRTRPKDRDDIVSMDLGLINASLLPPPECTRQGGHPRGPGCHTVPDIAFFSLLLFLTSFFFAMALKCVKTSRFFPSVVRKGLSDFSSVLAILLGCGLDAFLGPNHTKAHGTQRVQAHTPWAWLAGVTFWSQPLVVECGSCPACPAAVYPHLHGPTDHSSHPQPHGIQHCRRELASTWTSSVWLCMAWAMFLFLQLLGLVGVRKALERVFSPQELLWLDELMPEEERSIPEKGLEPEHSFSGSDSEDERSSSPATEQSWMENDFNELREEGFRQSNFSELKEEVRTQHKEAKNLEKRLDKWLTRITSVEKSLNDLMELKTMAQELCDECTSLSSRFDQLEERVESFILDQEDLDNPVLKTTSEIFLSSTAEGADLRTVDPETQARLEALLEAAGIGKLSTADGKAFADPEVLRRLTSSVSCALDEAAAALTRMKAENSHNAGQVDTRSLAEACSDGDVNAVRKLLDEGRSVNEHTEEGESLLCLACSAGYYELAQVLLAMHANVEDRGNKGDITPLMAAFSGGYLDIVKLLLLHDADVNSQSATGNTALTYACAGGFVDIVKVLLNEGANIEDHNENGHTPLMEAASAGHVEVARVLLDHGAGINTHSNEFKESALTLACYKGHLDMVRFLLEAGADQEHKTDEMHTALMEACMDGHVEVARLLLDSGAQVNMPADSFESPLTLAACGGHVELAAPTLLKGGANLEEDNDEGYTPLMEAAREGHEEMVALLLAQGANINSQTEETQETALTLACCGGFSEVADFLIKAGADIELGCSTPLMEASQEGHLELVKYLLASGNTALTYACAGGFVDIVKVLLNEGANIEDHNENGHTPLMEAASAGHVEVARVLLDHGAGINTHSNEFKESALTLACYKDSLL

SEQ ID NO: 38432 - protein, 143 aa, Homo sapiens
  misc_feature (1)...(143): Xaa = X or * as defined in Table 2
DHAKLGTRTSGMRPHSLSLCFFSSSYDILMRITKDRVKNLTCITYTILPTDLQPGCGLPRSFYPSSKPTSFWLWACKLFPPLPISFNPSPAHSKTAHGHSGKHTEAGMXWSXTGEGITGRCCFVSIKAPPLPSSGPVGGPVGG

SEQ ID NO: 38433 - protein, 175 aa, Homo sapiens
  DOMAIN (115)..(136): COMPLEMENT C9 SIGNATURE domain identified by eMATRIX, accession number PR00764F, p-value=5.208e-09, raw score of 16.89
  DOMAIN (69)..(142): EGF-like domain identified by PFam, accession name EGF, E- value=8.6e-05, PFam score of 29.3
  misc_feature (1)...(175): Xaa = X or * as defined in Table 2
MALLPTVLCLWAQAQFLVDLGQSNSKHQEHQLAPDVAFAKMKGACVCAAGFRGWRCEELCAPGTHGKGCQLPCQCRHGASCDPRAGECLCAPGYTGVYCEELCPPGSHGAHCELRCPCQNGGTCHHITGECACPPGWIGTVXGPPSPGSLLGCLPRETSISLIISSIQLCLYLLL

SEQ ID NO: 38434 - protein, 350 aa, Homo sapiens
  DOMAIN (322)..(338): AGRIN domain identified by eMATRIX, accession number DM00758, p-value=8.544e-09, raw score of 13.12
  DOMAIN (43)..(346): EGF-like domain identified by PFam, accession name EGF, E- value=2.9e-09, PFam score of 44.2
  misc_feature (1)...(350): Xaa = X or * as defined in Table 2
MLIMTFHGLLPCMQMACKWQLRVLVAGIRCDSTCPPGRWGPNCSVSCSCENGGSCSPKDGSCECAPGFRGPLCQRTVHILYPRGCGIRDVGESGNRKQKAVEQYREHWTVSPEVQCSASHFSSVRPKSACPPGFWGPACFHACSCHNGASCSAEDGACHCTPGWTGLFCTQRCAPGTFGYGCQQKCECMNNSTCDHVTGTCYCSPGFKGIRCDQGIMLLLCPHCGAAGPICLASAAAEREGPRPGSPCLLHTCHEDDQHRLLPLSGANSIPTYRXSGRPDSPLRTEALILPQCQKFSGSQGEVCAVSCAAGTYGPNCSSICSCNNGGTCSPVDGSCTCKEGRIICLQHKQ

SEQ ID NO: 38435 - protein, 243 aa, Homo sapiens
  DOMAIN (205)..(226): COMPLEMENT C9 SIGNATURE domain identified by eMATRIX, accession number PR00764F, p-value=5.208e-09, raw score of 16.89
  DOMAIN (16)..(235): EGF-like domain identified by PFam, accession name EGF, E- value=1.8e-05, PFam score of 31.6
  misc_feature (1)...(243): Xaa = X or * as defined in Table 2
IRCDSTCPPGRWGPNCSVSCSCENGGSCSPEDGSCECAPGFRGPLCQRICPPGFYGHCCAQPCPLCVHSSRPCHHIIGICECLPGFSGAFCNQGQAPTGNPSPGWYRSXEMTDPRCSCRCLSGESTRHTSPVLLGTDASETQVIGFVNLAQFLIICPRKLHYKAQNSKKSNGSDASSDWKDWGIWDRESCEELCPPGSHGAHCELRCPCQNGGTCHHITGECACPPGWTVGAHCXALCCPVKS

SEQ ID NO: 38436 - protein, 263 aa, Homo sapiens
  misc_feature (1)...(263): Xaa = X or * as defined in Table 2
PAVPELXVFQAKPERKSRYWQLHFPPHSSSPTSWRKSLEPMYRCTCPPLTPYGCTCPPLSPYRRTCPPLTMYRRICPPLTPYRCTCPPLTPYRMFSSPLHKEITSAQRSPEPSSRPHSSKAAALRXQPRIMEKQRIYGPSPTSVQPASPPPCLDDPRKKAERPDHRATGKRHLPETSLYAELVRRAVENPEDSEAPAPAPAALSPASEHRTDPIQETKKARKSSDNDGSTPLAQTPTRRSSQWPRLGQFQQQEDDSSGLYSTG

SEQ ID NO: 38437 - protein, 291 aa, Homo sapiens
  DOMAIN (115)..(132): MALIC ENZYME SIGNATURE domain identified by eMATRIX, accession number PR00072G, p-value=5.500e-21, raw score of 10.45
  DOMAIN (12)..(274): Malic enzyme domain identified by PFam, accession name malic, E-value=7.1e-51, PFam score of 182.4
  misc_feature (1)...(291): Xaa = X or * as defined in Table 2
KHFLNFCLPYMILNKYRNQYCTFNDDIQGNKIFTAYGSITCLKLVHNCIKKIWLVDSKGLIVKVRICHFXPEXRXLCHSGWPSNLEAIVQEIKPTALIGKHFLLSLLPYPLFXPDCFFNERPIIFALSNPTSKAECSAEQCYKITKVKXNYNRYFNNQIFIHYREATLYPGQGNNSYVFPGVALGVVACGLRQITDNIFLTTAEVLXNPLSLPRVXNTKCAQPRNTIRDVSLKIAEKVKPLLFKLHYFSFLFLLNMQEAFVRSQMYSTDYDQILPDCYSWPEEVQKIQPQS

SEQ ID NO: 38438 - protein, 371 aa, Homo sapiens
  DOMAIN (7)..(32): Zinc finger, C2H2 type domain identified by PFam, accession name zf-C2H2, E-value=0.00031, PFam score of 27.5
  misc_feature (1)...(371): Xaa = X or * as defined in Table 2
SPAQVMFQCLWKSCGKVLSTASAMQRHIRLVHLGRQAEPEQSDGEEDFYYTELDVGVDTLTDGLSSLTPVSPTASIAACLPPPGAARAAGAPSPAXSPAAACPAPAPAPCPEHRCXPPVLSQXPCLPRAAXRPPAWSRMPRRLEPAHPPCPPGSESSXGSPAATRISAGMXYGMEAPGPPGAQPAAGRKPPAVPGLKSGSFKNIKLPPSPSPPPPGPGAETARRNKPQGAGPSPAAGSAFNWVGVPDLTLEPFPPPGPGEGSPPTQSSPLKKPSFLHXSPNPHPLSPFTPKGPGGSHPSRLSARRFIKGVMGPALGGQSRCTLRGVGEGTPPLALNSTALGPWGCFYPCLFLKLQVSHVWAATRRREKLKI

SEQ ID NO: 38439 - protein, 73 aa, Homo sapiens
  misc_feature (1)...(73): Xaa = X or * as defined in Table 2
KLRDRCLSHXKXNGASPPRPTNVSIMRPSLVSLVHHSGLXFPQMLRALSXLRVFGVAVSSPXMVPLNPCIISH

SEQ ID NO: 38440 - protein, 274 aa, Homo sapiens
  DOMAIN (176)..(196): VASOPRESSIN V2 RECEPTOR SIGNATURE domain identified by eMATRIX, accession number PR00898F, p-value=2.273e-10, raw score of 9.10
  misc_feature (1)...(274): Xaa = X or * as defined in Table 2
KPSPQPPCPRPGPPRARFLRRSPDVEKIPFAXRPCDVRGRPPAGGARRRAASLGPWVRRRLQARPGLFRPRDFYLRSPRSYGTRPXKSPQSSPRGSARPDPGPAPPPEPPVKRRARGVLESSRHAAPRRVFHLGREREQSQEGPAWPKRGRPAPSPQRTATWRPAAGGGKXGSAATSXARAGPARRGKRRGXEPRENRRAGRPATRGRPPGRRCCPPAXSPRPSKRSSPLCSPRPSWPPTRPSKSSYGASLARTTTLQWKFSVNLIRKQIRDAQ

SEQ ID NO: 38441 - protein, 280 aa, Homo sapiens
  DOMAIN (182)..(202): VASOPRESSIN V2 RECEPTOR SIGNATURE domain identified by eMATRIX, accession number PR00898F, p-value=2.273e-10, raw score of 9.10
  misc_feature (1)...(280): Xaa = X or * as defined in Table 2
KPSPQPPCPRPGPPRARFLRRSPDVEKIPFAXRPCDVRGRPPAGGARRRAASLGPWVRRRLQARPGRFAPGTFTCGAPRSYGTRPXKSPQSSPRGSARPDPGPAASARATREAQSARGLGELAARGSQAGLPLGKGARTEPGGSSCSQGPAWPKRGRPAPSPQRTATWRPAAGGGKXGSAATSXARAGPARRGKRRGXEPRENRRAGRPATRGRPPGRRCCPPAXSPRPSKRSSPLCSPRPSWPPTRPSKSSYGASLARTTTLQWKFSMNLIRKQIRDAQ

SEQ ID NO: 38442 - protein, 39 aa, Homo sapiens
  misc_feature (1)...(39): Xaa = X or * as defined in Table 2
RGIRLASEMYPLTCFWRSXLYRRGSLARIALVNCRRNAL

SEQ ID NO: 38443 - protein, 424 aa, Homo sapiens
  misc_feature (1)...(424): Xaa = X or * as defined in Table 2
YSLKSGSVTPLALFFLLKIDLAMQALFWFHVNFKVVFPNSVKKAIGSLMGMTLNLXITLGSMAIFTILILPTHEHGMFFHLFVSSFISLSNGLXFSLKRSFTSLVSWIPRYFILFEAIVNGSSLMIWVSVCLLLVYKNACDFCTLILYPKTLLKLLISLRRFWAGQWGFLDIQSCHVQTGTIXLPLFLIEYPLFPLLPNCPGQNFQHYVEXQWXERTSLSLPVFKGNTSSFCPFSMILAVGLSXIALIILRYVPSIPNLLRVFSMKGCXILSKAFSASIEYNHVVFVFGSVYMQFLLVPLVEFGCESIWSWTFFGWXAIDYCHNFRSCYWSIQRFNFFLVXSGRVYVLRNLSISSRFSSLFAXRCLXYSLMVVCISVGLVVISPLSFFIASIXFLSLFFFTSLASSLSILLIFSKNQLLDSLIF

SEQ ID NO: 38444 - protein, 570 aa, Homo sapiens
  misc_feature (1)...(570): Xaa = X or * as defined in Table 2
MDGISGGKRALRERHSKSKALGRCFPWTNITPPALPGITNDTTIQQGISGLIDSLNARDISVKIFEDFAQSWYWILVALGVALVLSLLFILLLRLVAGPLVLVLILGVLGVLAYGIYYCWEEYRVLRDKGASISQLGFTTNLSAYQSVQETWLAALIVLAVLEAILLLVLIFLRQRIRIAIALLKEASKAVGQMMSTMFYPLVTFVLLLICIAYWAMTALYLATSGQPQYVLWASNISSPGCEKVPINISCNPTAHLVNSSCPGLMCVFQGYSSKGLIQRSVFNLQIYGVLGLFWTLNWVLALGQCVLAGAFASFYWAFHKPQDIPTFPLISAFIRTLRYHTGSLAFGALILTLVQIARVILEYIDHKLRGVQNPVARCIMCXFKCCLWCLEKFIKFLNRNAYIMIAIYGKNFCVSAKNAFMLLMRNIVRVVVLDKVTDLLLFFGKLLVVGGVGVLSFFFFSGRIPGLGKDFKSPHLNYYWLPIMRNPITPTGHVFQTSILGAYVIASGFFSVFGHVCGTRSFLCFLGKDLGSVNNGFPGDRPYYMVPRAFLKILGKKNEAPPDNKKRKK

SEQ ID NO: 38445 - protein, 208 aa, Homo sapiens
  DOMAIN (56)..(76): CORONAVIRUS NUCLEOCAPSID PROTEIN domain identified by eMATRIX, accession number DM01206B, p-value=6.924e-09, raw score of 10.69
  misc_feature (1)...(208): Xaa = X or * as defined in Table 2
GTRASSPAPCPSSSAPAHSFEACCCRMSLWGSCGGSGDGSSACGSGWNLSMAGTSCSSPAMCSPSRAPSXRSASRPRTWRATTSAASSWAPRRCWCGWAXSATXPSSTTTISSSPHCGWPCPASCASAAAWLSSTWATASVAGSCWGPIMXSSAPAHSFEACCCRMSLWGSCGGSGDGSSACGSGWNLSMAGTSCSSPAMCSPSRAPS

SEQ ID NO: 38446 - protein, 642 aa, Homo sapiens
  DOMAIN (263)..(273): Integrins alpha chain proteins domain identified by eMATRIX, accession number BL00242B, p-value=9.538e-09, raw score of 8.13
  misc_feature (1)...(642): Xaa = X or * as defined in Table 2
SRAARERGRSDSGGRSDPGCPAVPACVPRSRPSMTAPAGPRGSETERFLTPNPGYGTQAGPSPAPPTPPEEVRPSPSSTNTFSXVPATSFEPRAASPASXCCKWSRSWWSRCSSSCLGSVISWLXHSGKRTPSPSDTSSCWATRTERMTPSQPTRGSSCTRPSSMLWTSAGGRAGAGGQAGAVPGVAWTCHWAGLLSASGTTTEATWTRPTTHLTLIRWWLLTASRWIPPSGPLRPPATISPSWKAAPVTRTSRSNSTSTACSLEGGPGVSTWQGTLALGAGRDPKTPLTLTRASCLGWSMSPSTSGXRPLTSRASSIMRSRTAIPSASXSRLTTKHTVGGSPSAWRPRPTSRSVSTPVSSSTGGQQLPGSCLTWWSYSPAPCTSSSSPLTPSRLPAAEQSLWGSCGGSGDGSSACGSGWNLSMAGTSCFVTSDVLHHLGHHSXRSASRPRTWRSLRRFAASSWAPRRCWCGWAXSATXPSSTTTISAHSPWCLSACSRSSMGTTCLXRSPPCRRSRAAAAWCGSSPSSTFTPSSSLFILHGAQPLHRAHHRAPTYTIKHSRRRRRKRRASCRPYIAQCPGQPHLRQVPPRERARPIAILLLLRKGPLGGAFAAGELIRPDCRWTVGPGLQRPPPPTPLIYL

SEQ ID NO: 38447 - protein, 997 aa, Homo sapiens
  DOMAIN (285)..(301): Ank repeat proteins domain identified by eMATRIX, accession number PF00023A, p-value=4.000e-10, raw score of 16.03
  DOMAIN (280)..(412): Ank repeat domain identified by PFam, accession name ank, E- value=6.9e-23, PFam score of 89.5
  misc_feature (1)...(997): Xaa = X or * as defined in Table 2
MQRPCLCVEPMRLCFDSFLLLVNQGEEEEGVVPCLEENGRAAADPGPQDQDCLLPTLTPSLSGDEAPDRTQSSGDPRERCGYLSVTCEEGDNRFAAFCLCGSWRLNHGHADWCDQRRSQISNRLPASLGIIVGTRGSRHLLAALRGVKEDRQTKGCVQTPASLSPWLPGLSSETRAQKTCSVLLIDYATFLKLANDDDDGCLDCLQPGVRTAWASSQHGIRAPRKSVQGSASSPSLRTWALTCTQNWFCCVLLVKAVTEPPQIVRLLLERGCDVNLSDKQGRTPLMVAACEGHLSTVEFLLSKGAALSSLDKEGLSALSWACLKGHRAVVQYLVEEGAAIDQTDKNGRTPLGPAAFYGDAETVLYLVEKGAVIEHVDHSGMRPLDRAIGCRNTSVVVALLRKGAKLGNAAWRDGHFQTXYLDYTFTEINGGRKCDVQKRENERGSPEVPVCLKKVSSRRIRRGHETLQXIKGFPLSQFVAMPKKNKXLWHGRGICFQGSRIEAQVLXSLLCQSKSEEKXQAIRGSSGXPARGCETLSHQSGSQEASGPRRRGVQTTPEESTAKTAGPATSSTQDSENEEDTPTPGLSDHFHSEETEEEETSPQEESVSPTPRSQPSSSVPSSYIRNLQEGLQSKGRPVSPQSRAGIGKSLREPVAQPGLLLQPSKQAQIVKTSQHLGSGQSAVRNGSMKVQISSQNPPPSPMPGRIAATPAGSRTQHLEGTGTFTTRAGCGHFGDRLGPSQNVRLQCGENGPAHPLPSKTKTTERLLSHSSVAVDAAPPNQGGLATCSDVRHPASLTSSGSSGSPSSSIKMSSSTSSLTSSSSFSDGFKVQGPDTRIKDKVVTHVQSGTAEHRPRNTPFMGIMDKTARFQQQSNPPSRSWHCPAPEGLLTNTSSAAGLQSANTEKPSLMQVGGYNNQAKTCSVSTLSASVHNGAQVKELEESKCQIPVHSQENRITKTVSHLYQESISKQQPHISNEAHRSHLTAAKPKRSFIESNV

SEQ ID NO: 38448 - protein, 67 aa, Homo sapiens
QKNANANGVDKFKCIHQQLLEYKQKISKNSQNSNPEGTSEGTPDEAAPLAERTPDTAESLVERTPDE

SEQ ID NO: 38449 - protein, 230 aa, Homo sapiens
  misc_feature (1)...(230): Xaa = X or * as defined in Table 2
WREHLTKFNVWGKQHLESLNSQQKNMRCPVRSQTRPPTDVKPVSRSGRREDRRAAGGEGGADRQGPGTARARAPGSPQRGGXGRNLRQAGPPGKHGRGIPPPQTRGRSRGAPPGTPEGPRHPPRPASRAPGPATGAPKRPQPQTQRQGHIARDSRPSSDPVPLRETGAPPPWDASQGQAARPRATQTPSSAPVATRQGSGRRADSRRRGVTRRTERCAQPSLAVSRVPTR

SEQ ID NO: 38450 - protein, 140 aa, Homo sapiens
EHALVLFEKCVQDKYLQQEHIIKKLIKENKKHQELFVDICSEKDNLREELKKRTETEKQHMNTIKQLESRIEELNKEVKASRDQLIAQDVTAKNAVQQLHKEMAQRMEQANKKCEEARQEKEAMVMKYVRGEKESLDLRK

SEQ ID NO: 38451 - protein, 271 aa, Homo sapiens
  misc_feature (1)...(271): Xaa = X or * as defined in Table 2
MVQKELEEEGRKSTPQSWGRENMEKALNSSLKASLGSGGVMICASVKALLTVVIAKVLGRLLESLFLLLQTQTALXQTLRHTNRNISHQYQDEIIILDGSDLPRMSPRRKYEPPVFPGRKTYKISIRGKANKKCEEARQEKEAMVMKYVRGEKESLDLRKEKETLEKKLRDANKELEKNTNKIKQLSQEKGRLHQLYETKEGETTRLIREIDKLKEDINSHVIKVKWAQNKLKAEMDSHKSFKNPLVRCNFAATFGYYKKLIPEIKTGSSH

SEQ ID NO: 38452 - protein, 268 aa, Homo sapiens
  DOMAIN (110)..(144): Iron-containing alcohol dehydrogenases proteins domain identified by eMATRIX, accession number BL00913D, p-value=8.981e- 17, raw score of 24.20
  DOMAIN (5)..(236): Iron-containing alcohol dehydrogenases domain identified by PFam, accession name Fe-ADH, E-value=2.4e-32, PFam score of 116.2
  misc_feature (1)...(268): Xaa = X or * as defined in Table 2
NVRVEPTDSSFMEAIEFAQKGAFDAYVAVGGGSTMDTCKAANLYASSPHSDFLDYVSAPIGKGKPVSVPLKPLIAVPTTSGTGSETTGVAIFDYEHLKVKIGITSRAIKPTLGLIDPLHTLHMPARVVANSGFDVLCHALESYTTLPYHLRSPCPSNPITRPAYQGRNPISDIWGYSTRWGFVGXVSXRRAVQEIPMDLXKARSHMHLASAFAGIGFGNAGVHLCHGMSYPISGLVKMYKAKDYNVDHPLVPHGLSVVLTSPAVFTFT

SEQ ID NO: 38453 - protein, 385 aa, Homo sapiens
  DOMAIN (1)..(81): Iron-containing alcohol dehydrogenases domain identified by PFam, accession name Fe-ADH, E-value=0.021, PFam score of 11.5
  misc_feature (1)...(385): Xaa = X or * as defined in Table 2
IDPLHTLHMPARVVANSGFDVLCHALESYTTLPYHLRSPCPSNPITRPAYQGSNPISDIWAIHALRIVAKYLKRAVNSTDKXRRRMSLRAPSWEWPSPSRGPARCLPRRFYITXGSXQRYLLWPLLETVDEKYVSLQFSFRRQGVVXITCLIFLPTEXHFFFFHHIFPXGSSLFCRNCQCXCVIVRYLYHSQGWQKSRXSXRQGLIWHLGKCFLLGIGFGKCWVFICGHGNVSYPISGFRWKDVIKGKGIYNVGIHPTGWPPWAFSVVPHVPQRCFTFHGPRCFPERTPWRWQEILGADTRTAQRSQDAGLVLADTLRKFLFRSGIVDDGLAAVGYSKADIPALVKGTLPPQERVTSFAPRPQSEEDLAALFEASNETVLNVHLN

SEQ ID NO: 38454 - protein, 330 aa, Homo sapiens
  misc_feature (1)...(330): Xaa = X or * as defined in Table 2
WENWISICXRMKLDPYFSPYTKIKSKWIKDINVKPQTMKLLQENIRETLQDIGLGEDFSQAQATKAKVDKLDHVKFKNFCTAKETINKVKRKPKEWEKILIFADYPSDKGLITRILFIDHSWVFLGEGNLAGSSDNSGGKAWKHLLPLLASRCSGTHSNLRAKLRLSQGTVATWPVLKREGEKSCGPSESPDLGAPQARDVTPCLGICSSWLLQASGHHHIPWCQLWKLFVVYLVQLQPHREVALVPAPGAAHPTTASVPVCAQWLDPMVIHSHTLCCSEPDSPLAGMGFRPVAQAKHNPARPSGWNESSRPEQNLDKGATSHRGFWLAR

SEQ ID NO: 38455 - protein, 65 aa, Homo sapiens
  misc_feature (1)...(65): Xaa = X or * as defined in Table 2
GQYPWPLETNPRFLREXTLPKSLQKSLLXDSPVPEXSLCGTCQQARSLSEEVDESSISQQVCCPT

SEQ ID NO: 38456 - protein, 136 aa, Homo sapiens
  DOMAIN (7)..(101): PH domain identified by PFam, accession name PH, E-value=2.1e -11, PFam score of 45.8
  misc_feature (1)...(136): Xaa = X or * as defined in Table 2
ITLGKDCIMHGYMLKLGNPFLTQWQRRYFTLFPKNIXWRRRGESRQNLLTMEQILSVEETQIKDKKCILFRIKGGKQFVLQCESDPEFVQWKKELNETFKEAQRLLRRAPKFLNKPRSGTVELPKPSLCHRNSNGL

SEQ ID NO: 38457 - protein, 425 aa, Homo sapiens
  DOMAIN (237)..(255): GPCR KINASE SIGNATURE domain identified by eMATRIX, accession number PR00717C, p-value=2.703e-18, raw score of 13.43
  DOMAIN (37)..(163): Eukaryotic protein kinase domain identified by PFam, accession name pkinase, E-value=0.00019, PFam score of 19.9
  misc_feature (1)...(425): Xaa = X or * as defined in Table 2
EIKVDSSLLKSFLDLMNGKQNLENLNALKDFAMMLNLSYATEIILGLEHMHNRFVVYRDLKVRTIDRLILHSRYCVNGPLEDKVTEKDFPGNPEIKPSGKWLGCPSXKSPTLSQRGLMTLPCQTLGSGXLSFPEVLDLPXWTNAHFADWFSLGCMLFKLLRGXVEMHPSSAVLMAAGAWMKTTVVRGFKTVFLSVWXLSCFIPSKRDVSKRLGCHGGGXAIVPAFRYLYQKSKIVILNFQYPPPLIPPRGEVNAADAFDIGSFDEEDTKGIKVHMCHLFLYFYFWMVMISVGKQEVTETVYEAVNADTDKIEARKRAKNKQLGHEEGKIAHVSQNISNAVNFQNFLYLTQWQRRYFYLFPNRLEWRGEGESRVSLRQPHRACFPVRTMAYGYWLLRRAPKFLNKPRSGTVELPKPSLCHRNSNGL

SEQ ID NO: 38458 - protein, 42 aa, Homo sapiens
MLFLFGDTESSESNDPDLAMEGADGEGGSSGLGKNDGILISL

SEQ ID NO: 38459 - protein, 60 aa, Homo sapiens
  DOMAIN (16)..(43): Protamine P1 proteins domain identified by eMATRIX, accession number BL00048, p-value=1.625e-11, raw score of 6.39
VWCCSRTATLRTRNCARRRCSRGSRTWKRSGRSSSRRRAHSQYDLERLRAAQKQLEREQE

SEQ ID NO: 38460 - protein, 222 aa, Homo sapiens
  DOMAIN (105)..(116): PROTEIN REPEAT MUSCLE CALCIUM-BI domain identified by eMATRIX, accession number PD00301B, p-value=2.038e-09, raw score of 5.49
ETGLKNEGRVLVRHSAWCPLLWGREGSRSSLSSWPELQGSPLCASQGVVLQQDSYIEDQKLVLSERALTRSLSRPSSLIEQEKQRSLEKQRQDLANLQKQQAQYLEEKRRREREWEDRERELRDGRPSWPSARRRCSRGSRTWKRSGRSSSRRRAHSQYDLERLRAAQKQLEREQEQLRREAERLSQRQTERDLCQVMGLPAESNLMMILIKTPCVLSKVRK

SEQ ID NO: 38461 - protein, 218 aa, Homo sapiens
MAECSTPLPEDCSPTHSPRVLFRSNTEEALKGGPLMKSAINEVEILQGLVSGNLGGTLGPTVSSPIEQDVVGPVSLPRRAETFGGFDSHQMNASKGGEKEEGDDGQDLRRTESDSGLKKGGNANLVFMLKRNSEQVVQSVVHLYELLSALQGVVLQQDSYIEDQKLVLSERALTRSLSRPSSLIEQEKQRSLEKQRQDLANLQKQQGPVPRGEAQARA

SEQ ID NO: 38462 - protein, 80 aa, Homo sapiens
  misc_feature (1)...(80): Xaa = X or * as defined in Table 2
MNRGGFAVKILALLDALSTVCSQRVQKAKKQQHLQNKEHFKALLKQKEKLKQQEDLRKKLFXIQGIRCPQATPHHGQCSL

SEQ ID NO: 38463 - protein, 309 aa, Homo sapiens
  misc_feature (1)...(309): Xaa = X or * as defined in Table 2
ASSCVVRAVPPGSGVWGFRCGLCGPDCESGLLISGSRMFAGPQGPPGAGTAVTLLAAGEEGLESSTAQHGSGLCSEEPPVPRRHAWQGKSYSRNWLPPARPRPALAMSSDTRGQAQLSPSWQLEKKGLSSSTAQRGCRALQGRAASARRQRGKANPTAGTGWLRLAPGLPLLCPQTPGGRHSCHPPGKPGKEGLEQFYSSARLQGFAGKSRQVPDVTRGKANPTAGTGWLRHRGPRGGEACAMAVRGPRSHEQRCPWSAGADSVSXGHCEGTDGRVASGACLQVDSRGSAGQNLPLDPEHWHVFCFDFP

SEQ ID NO: 38464 - protein, 969 aa, Homo sapiens
  misc_feature (1)...(969): Xaa = X or * as defined in Table 2
WVQGASLCVRASRAPLPLARPXVQGAELTHPWGPAAHPXTRNQKPALGSSGPHSPHGNPQTPTQAGQPXPHTARHGPVQEHGRGQRGPHLHKTETPQEATPXEVGSIATEQAWLPHLCLXRPPPFHQGLFPRGPCMEGAQQRVEGSSSAQGTQVCMGPKTAGDWDGPWLVCWFHXGEAAARILRPGLGGLSGHPLWPQGGGQMTVGYGGASEACGAGELLMRRAPPQSPGKARGLPAHYWHQGQTGPRKAEIGTEGGRQEDGPGRADGVGEAALWTGSATRPAGSQFGKEGKTNYGFMSCKKEPAAALQKPAVMERQHQHLRCPAVPISQRGHSRRAGPSSXAGGRSPGGRSTPWPPGSVPDLEEAGHRGGPGGDXPGGSQAPSASLXPGGKSVCPCQPCTSPSGQAIGPGGRTNTPLGPGSTSVNQKSEARSRQLRPTQPTPETPKHPPRRDSPDHTLLGMAQCRSMGGGSGDPIYTKPKHRRRPHREKSAPSLLNRLGFLTCVSSAHLPSIKGFSPEGRAWKVLSKELKDHQVHKGPKCAWDPKLLVTGTALGSSAGFTEERLLPESCGQVWGWLSGHPLWPQGGGQMTVGYGGASEACGAGELLMRRAPPQSPGKARGLPALTGTRARQGLERQKSAQKEGDRRMAQEERMVLEKLLCGREVLPDPQAPNLARKEKLIMASCPARKSLQRLFRNLPSWNVSTSTFAALLCPFPSEDTQGAQGPAAELEDEARVDAPHHGLQGVFPTWRRQVTGVALVETDLEGARLPVPLSDPAAGGAPGGLRAVPLRIICNQHQPHPALRTGRAGQIPFCKIETAAQAHMQCVECRRPGYSGSFQRQRGAADVRGDTDVEDATAASPPGLPERGWLRSQADGAAERFLPGREEVGLPPAGPVTGKRYLFIFLPWTLEISGENSALATKCSGSRMLPSFLPFHMEFIQSTKASHGTDIRGARSPGSGKHKPVLRGP

SEQ ID NO: 38465 - protein, 193 aa, Homo sapiens
  misc_feature (1)...(193): Xaa = X or * as defined in Table 2
MAAVVAATALKGRGARNARVLRGKERDPGEGRTAEDPFSFTSSPTIAGGILAGATANKASHNRTRALQNHTASPEGKEEPXDPLSPELENTFPRKEGQRTPMESCGNLPWAIGFPLWLFLPLSSFTQAGKWDKVTVLKADXRLRAEHCGFSNTGRVXRARRFRAFLPEVAPFPLMFGSGVSGGADLRSVCDPP

SEQ ID NO: 38466 - protein, 66 aa, Homo sapiens
  misc_feature (1)...(66): Xaa = X or * as defined in Table 2
GTRGSPSKKGERVRRDAQQTATWXTRSPASGCFQICEGNKQDEACDVRGLQHCERHSLAGPREYMP

SEQ ID NO: 38467 - protein, 173 aa, Homo sapiens
  misc_feature (1)...(173): Xaa = X or * as defined in Table 2
MKNRSRNKGNVEWQAEGIRSKRSVGKQRPSKAKIPSGDKNGVSLTHNEVINNDNPLESNDEKEGQEATCSRPQIVPEFQQXXLFRPEXWRRASGNLQLIPKKRVSAXGTRGSPSKKGERVRRDAQQTATWXTRSPASGCFQICEGNKQDEACDVRGLQHCERHSLAGPREYMP

SEQ ID NO: 38468 - protein, 205 aa, Homo sapiens
  misc_feature (1)...(205): Xaa = X or * as defined in Table 2
PEAELHNHGIQINSCSVRLVDIKKEKPFSNSKVECQAQARTHHNQASDIIVISSEDSEGSTDVDEPLEVFISAPRSEPVINRATPCELKCXKEGQEAICSRPRDVPRALGFRKFSPFEESFRKGLLGQDPDFPDSIEKKPPAEASSGALRSKHGEKAPMTSRSTSTWRIPSRKRRFSSSDFSDLSNGKELQETCSSSLRRGSGKE

SEQ ID NO: 38469 - protein, 226 aa, Homo sapiens
  DOMAIN (148)..(163): WILM'S TUMOUR PROTEIN SIGNATURE domain identified by eMATRIX, accession number PR00049D, p-value=1.915e-09, raw score of 0.00
  misc_feature (1)...(226): Xaa = X or * as defined in Table 2
PTTPPSAGSSWTTASPPSXGKAWLGTGRPPSPWRRMSASMRTSEEDGRLQPQLPLXAHPSESSGQDRGNQVSVGREADCGQDSPVSTMTRSHPGRPCAEGCXXPCCSSRPXPCPCGSGSLVTSPLSLPAPSFWLPLRPSSPPGLPPLQSSLSFPPPPPPVPQPPAPPALQWGLHLPGVPQPGVPAGRRVVRLSAKHLPRLPDHSVXGAPGRRSLREHLPQHRPGDQ

SEQ ID NO: 38470 - protein, 194 aa, Homo sapiens
MVEAGGLLEKWTLLEEEAVGWQEREQREDSEGRCGDYHPEGEAPRLLDAEGLMVTGGRRAEAKETEPESLEHVRGQEEQPTHQAPAEAAPESVGEAETAEAMGSARGGAANSWSEAPLPGSLLDVSVPRSRVHLSRSSSQRRSRPSFRRTPAWEQQEEPPAPNPPEEELSAPEQRPLQLEEPLEPSPLRHDGTP

SEQ ID NO: 38471 - protein, 1013 aa, Homo sapiens
  DOMAIN (966)..(981): WILM'S TUMOUR PROTEIN SIGNATURE domain identified by eMATRIX, accession number PR00049D, p-value=1.915e-09, raw score of 0.00
  misc_feature (1)...(1013): Xaa = X or * as defined in Table 2
AGPDGLAAPASCQGARGQTRVPGAFSWLAPGSHHASEGLAPGVPPAGGVSAQELTAPPQEGWGLGAPPAAPRPESDEKRAGSDAVRSFSRGARDSLGQRRLGGTRGAGPAGKGAQRTMGPASGFHSFPPRPHQEPSPRSSCWQHLLWHCPWPQPSRLPRLTPAQLLQGPGVLAAPPGPXHVPGFLAQSPWPLPSGPRSPXDPLHQGALVPLPQGGSPHTAPHCLPSVLSPAIQQPLLPTASTSSRSPPASTMAPIPSALAVWEPAGSSPQLSSAPADSSPLPALPKVLPPWTQKPLLGCLCQSPLPLLSPPDQIRCPPACSPAAASSFSFESQPCPSAPSKASPAPAALIVGPHHPPXSQQPQSQSVHPHGPGGPQPPLAASSLFWMFCQPPPPHPQFLWHRPLPVTGKALRLPLCFRPAPGSLRQMPLPPQFHIPRPGLSAPPPPASGTSDSSDSRSPSASAARVWPPASPPPPAARHRPHPPEYFLSPCPFSCGFPRLLGRPRRPQALQTPRAWDLPPGSSPAPLCSGPELPXAPPPLPPFPRVAXLGSGRPPSAQVLGLWXRCVXGHPIPRPVGHSXSGPPHSPPLXAPPQAWPLELPPSRQCLQPLHLRAAQPLDPCCSLSPPGPPLPVPALPSWPGRPXSPSPASSQPPYHAGLPGPQSSPLPPGLPQLPSLRSGSQQPLLFFQCPGPGAVWGKGSPQPLSPHPPPPARTQTFPVASRSLSPGTAPYSVCLTPSRSASSLPGVVLASSLPKIPQSSGSPLGPTSPMPXCFHRPSPPLPLSSPFPALRPQAPQFPLHLPPXPPAPSPGCPLPPLAQQHQPSPPSPHARSTLTPPLWPSLALLPXPLPPPPPVPSFSASLLCSLPAHGTPASPGLGRSCLGKPQTLPWISFWPPSGRLAPGTWQPWPVSPAPLSCLSAWDPWELPSPQPQVCSTAELPTSCLLSSPGPPAFQPPRFGCLXGPPGPPGLPPLQSSLSFPPPPPPVPQPPAPPALQWGLHLPGGRRQRCQGN

SEQ ID NO: 38472 - protein, 637 aa, Homo sapiens
MEELVQAEEAQEERGSSRDPVAELPSDGEAEGTADLEATPEARPEEELTGEESEAAQTSCGLLGVEWGGLTHSVTKGQGPELMGGAQTPTKQPEEREAGEVELMGVLALSKEEQERSLEAGPRHAGSVKPEASEAFPGAWENRTRKDMERGNTQEDAADGEQREEEETAGGQTLAAEAEGDRESELSEVPEAGGEGLTTQDAGCGTEEGEASVSENQELDGSTGADARALPAYARETEDEEAEADRTSRRGWRLQAVAVGLPDREDAQTGSVAAGIMGGDVVPHISAAGAGEALEGALGQGWDSKEKEEAAAGEHAGGQEFGLEGSAEEEVTGRGSQVEAFESREGGPWGGRVEAEESAGAEDSCGLDPAGSQTARAEGMGAMVEAGGLLEKWTLLEEEAVGWQEREQREDSEGRCGDYHPEGEAPRLLDAEGLMVTGGRRAEAKETEPESLEHVRGQEEQPTHQAPAEAAPESVGEAETAEAMGSARGGAANSWSEVRALGGVSGGTSGIPKPAPWSSVPPFLQAPLPGSLLDVSVPRSRVHLSRSSSQRRSRPSFRRTPAWEQQEEPPAPNPPEEELSAPEQRPLQLEEPLEPSPLRHDGTPVPARRRPLGHGFGLAHPGMMQELQARLGRPKPQ

SEQ ID NO: 38473 - protein, 154 aa, Homo sapiens
  misc_feature (1)...(154): Xaa = X or * as defined in Table 2
GGGGGRGQRGRPSRPRYLCPGPGPTGGPGACAAGGVTVGPSEDNGRPLLPPQRHPPVGDFSRRRCRFRLPKHKERSPDARFKEGPGGAAGPGARGQXDSARTPDSALKLVRPPLPIPTGRPSCASGGRXPAGKRGHLSAPPRPGRSSPGPSQPG

SEQ ID NO: 38474 - protein, 913 aa, Homo sapiens
  DOMAIN (784)..(829): kw TRANSCRIPTASE REVERSE II ORF2 domain identified by eMATRIX, accession number DM01354N, p-value=1.000e-40, raw score of 13.17
  DOMAIN (153)..(494): Protein-tyrosine phosphatase domain identified by PFam, accession name Y_phosphatase, E-value=3e-43, PFam score of 157.1
  misc_feature (1)...(913): Xaa = X or * as defined in Table 2
MALRRAGAGRTGCFIAIDTMLDMAENEGVVDIFNCVRELRAQRVNLVQTEEQYVFVHDAILEACLCGNTAIPVCKLQNLFQNTKCTAMSNYTLTQGLLQHWLSXTTXFIWLAGTMRLCLSLCVDAASAPWVLKTLNIVTPRVRPEDCSIARPNHDKNRSMDVLPLDRCLPFLISVDGESSNYINAALMDSHKQPAAFVVTQHPLPNTVADFWRLVFDYNCSSVVMLNEMDTAQRGQSFVGPLEFGGAQLEILSVQEDHWKRKGRREYLLGNEVEKVSWSRLLAEEFESILGSANFKSFTSKEENVKVAFRFCMQYWPEKTSGCYGPIQVEFVSADIDEDIIHRIFRICNMARDGYRIVQHLQYIGWPAYRDTPPSKRSLLKVVRRLEKWQEQYDGREGRTVVHCLLMNSGVITLGGGQDLERTVADKLCNVKKITEFYKPEFPRLFIGNGGGRSGTFCAICSVCEMIQQQNIIDVFHIVKTLRNNKSNMVETLENPITNPGVEEMCVLLLYVMEKIEALGGHCSAAPCNLLQGPLAPDICSLDQCDLTMFPRPQERPPILTPNLHGASPTTILYPFPSLGLDRPAFTGRPAVSTAVFDKGCQISGLLKKNNSTSQLSLPFSGPSMMLSGSPDPNSEQAHTFALGPASPALMMTSKEELVGKLKSVLTLTPEQLLECYMQRPCSLKACVLEAYDAPGNIWDIRILQFAIKESSLMKYSKTPIMYVPCSVHGMHTEVNLTDKILTSMGFPIWLRISVKREKNQIDAIKNDKGDITTDPTEIQTTIREYYKQLYTNKLENLEEMDKFLDTYTFPSLNQEEVESLNRPITSSEIELVIKSLPTKNKAQDQMDSQSNSTREENLGNTIQDIGMGKDFMTKTLKAMATKAKIDKWDLIKLKSFCTAKETIIRVNRQPTE

SEQ ID NO: 38475 - protein, 102 aa, Homo sapiens
RIRKPLLVFALAAPVMSMVTYLGLSKSSKEALSEVNATGVAMLFSAGTFLYVATVHVLPEVGGIGHSHKHDASGGRGLSRLEVAALVLGCLIPLILSVGHQH

SEQ ID NO: 38476 - protein, 322 aa, Homo sapiens
  DOMAIN (104)..(146): Plant hemoglobins proteins domain identified by eMATRIX, accession number BL00208A, p-value=3.204e-09, raw score of 18.41
  misc_feature (1)...(322): Xaa = X or * as defined in Table 2
GLFCSRKTPPSKXKHNVIASDKAAEKSVVHEHEHSHDHTQLHAYIGVSLVLGFVFMLLVDQIGNSHVHSTDDPEAARSSNSKITTTLGLVVHAAVFYVSLFPNIADGVALGAAASTSQTSVQLIVFVAIMLHKAPAAFGLVSFLMHAGLERNRIRKHLLVFALAAPVMSMVTYLGLSKSSKEALSEVNATGVAMLFSAGTFLYVATVHVLPEERLKLVTVLGAGLLCGTALAVIVPEGVHALYEDILEVVPSFYYCHLYVYEYLMFSSHFCSPDPWQDQLLTLRVCSSTSASLGEGCLGVSSIRKGMELSVQAQHHVEVAKA

SEQ ID NO: 38477 - protein, 25 aa, Homo sapiens
SCNKVSSQFQLKTLLLAIKKPPCLH

SEQ ID NO: 38478 - protein, 139 aa, Homo sapiens; identical to SEQ ID NO: 38309
  DOMAIN (62)..(105): Ribosomal protein L19e proteins domain identified by eMATRIX, accession number BL00526C, p-value=1.132e-20, raw score of 20.60
  DOMAIN (1)..(112): Ribosomal protein L19e domain identified by PFam, accession name Ribosomal_L19e, E-value=7.1e-27, PFam score of 102.7
  misc_feature (1)...(139): Xaa = X or * as defined in Table 2

SEQ ID NO: 38479 - protein, 132 aa, Homo sapiens
  DOMAIN (61)..(85): HMW KININOGEN SIGNATURE domain identified by eMATRIX, accession number PR00334B, p-value=6.571e-09, raw score of 8.69
  misc_feature (1)...(132): Xaa = X or * as defined in Table 2
RTRGCLSHHNHHXHLHRHHLHHHYPYSYXHHHCLNYHAPYLFHWLYHAPHHLNQHAHYLHLYYHHHYNHHHHLHHHHRSHCHHHHHHLTIHLLCQHHHHHFHPTKHLLLAHPQALQTHHNHHDMHHHYPYSY

SEQ ID NO: 38480 - protein, 369 aa, Homo sapiens
  misc_feature (1)...(369): Xaa = X or * as defined in Table 2
LLLQFSRATFILFQPPANTFTSAFSQTRARRGGSGRGGGQESAEETSEFGDRHAPEAAAATRGSARAPEPKHASSCGTRGQCACARREVEAQVRAKGDTVAERARRGGRWLTRSGMEHLERCEWLLRGTLVRAAVRRYLPWALVASMLAGSLLKELSPLPESYLSNKRNVLNVYFVKVAWAWTFCLLLPFIALTNYHHDRQGWLGPAADXCTLLVGTAIWYICTSIFSNIEHYTGSCYQSPALEGVRKEHQSKQQCHQEGGFWHGFDISGHSFLLTFCALHDCKKRCLCLQXRXKTDRSHCLHTAITTLVVALGILTFIWVLMFLCTAVYFHNLSQKVFGTLFGLLSWYGTYGFWYPKAFSPRTSSPEL

SEQ ID NO: 38481 - protein, 308 aa, Homo sapiens
QSCGDDYVAREEVPIGCWGEKGAPGRSSLPGPAPPSLSMDEESLESALQTYRAQLQQVELALGAGLDSSEQADLRQLQGDLKELIELTEASLVSVRKSRLLAALDEERPGRQEDAEYQAFREAITEAVEAPCRARGSGSETVPKAEAGPESAAGGQEEEEGEDEEELSGTKVSAPYYSSWGTLEYHNAMVVGTEEAEDGSAGVRVLYLYPTHKSLKPCPFFLEGKCRFKENCRTAETVVGVLLPNLRGEKEGTPEGDTATAPSAHQFLLYPQQRALGANAAGKFLSPGGVTGIAIAILAIAILAIATS

SEQ ID NO: 38482 - protein, 350 aa, Homo sapiens
  DOMAIN (234)..(268): 3 RETROVIRAL PROTEINASE domain identified by eMATRIX, accession number DM00892C, p-value=3.323e-14, raw score of 23.55
  DOMAIN (230)..(274): G-patch domain identified by PFam, accession name G-patch, E- value=4.4e-10, PFam score of 46.9
  misc_feature (1)...(350): Xaa = X or * as defined in Table 2
TRERFSVANRVTGSETVPKAEAGPESAAGGQEEEEGEDEEELSGTKVSAPYYSFWGTLEYHNAMVAGTEEARDGSAGVRVLYLYPTHKSLKPRPVSLEGKCRFKENCRFSHGQVVSLDELRPFQDPDLSSLQAGSACLAKHQGWPLERQHASPMWDNGYLHSQVXLAAAREAVVGGGRHPAPTAHKRPQESDSDSEVRVTPAMPEWWGQMLWTLGPAALPLLGWEVHTRGIGSRLLTKMGYEFGKGLGRHAEGRVEPIHAVVLPRGKSLDQCVETLQKQTRVGKAGTNKPPRCRGRGARPGGRPAPRNVFDFLNEKLQGQAPGALEAGAAPAGRRSKDMYHCQQECQAGP

SEQ ID NO: 38483 - protein, 84 aa, Homo sapiens
  misc_feature (1)...(84): Xaa = X or * as defined in Table 2
MPPWDPCFPNHPAPKPHQPHPARLTDRHHPXPFPTHQLPCLLPAPSPGSLVVALSPQGHVYTNVEGTRSIRECSCTKNPFPGPI

SEQ ID NO: 38484 - protein, 366 aa, Homo sapiens
  DOMAIN (198)..(231): PROLINE-RICH PROTEIN 3 domain identified by eMATRIX, accession number DM00215, p-value=5.881e-09, raw score of 19.43
  misc_feature (1)...(366): Xaa = X or * as defined in Table 2
ALDEPHGAGASEERAGDVFGPPRRVPGPSLWPLEAWPTSSQKVMPQVRCLHLHQVWGQRGGPPRKRWAWAARGHTGLGPTPHGPSWTHSNFLKEKIFXKMFAKQVGPEAKQSLPNGFPGVATAWSPVRSSVCPLFIKARPSCXQLQDSCWDPGGTETADPGHTGLELRFPEPPKPTLPLALSEAPVPQREEKTQGRGHYPAPQCLPGDPCSPHHPAPQPHQPHPARHNXPPPPRPSSHPPTTVPPTRPQPWQPGCCAQPPRPCLHXRGGNXVYXGMQLHQKSVSWPHSQWPQKREGNGSSHEIHPSCPPSGFHGPSPEGRMPTQAGALHSWVPGLSLSHGSGPHPPPRWTATVQAARPRVPPLTNL

SEQ ID NO: 38485 - protein, 120 aa, Homo sapiens
  DOMAIN (83)..(104): kw TRANSCRIPTASE REVERSE II ORF2 domain identified by eMATRIX, accession number DM01354S, p-value=1.180e-21, raw score of 11.61
LFDNTVYCPRTERLLKNDTKHQRHAQSACQLSTTLVCSQHRKVSDFIFQHKHSAPLPQKSKRKQNQQSFMLKTLNKLGIDEMYRAIYDKPTANIILNGQKLEAFPLKTGTRQGFSLSPLL

SEQ ID NO: 38486 - protein, 217 aa, Homo sapiens
  DOMAIN (6)..(36): kw TRANSCRIPTASE REVERSE II ORF2 domain identified by eMATRIX, accession number DM01354R, p-value=3.571e-31, raw score of 8.50
  misc_feature (1)...(217): Xaa = X or * as defined in Table 2
MIISTDAEKAFDKIQQPFMLKTLDKQGIDGTYLKIIRAIYDKPTANIILNGQKLEAFPLKTGTRQGCPFSQLLFNLMLEVLTRAVREEKEIKGIKYLGIQLTRDVKDLFKRNXKPLLNEIKEDTKKWKNIPCSWIGRTNTVKMAILPKFRXWTRXRQFSTVHKDXKLSETVSHSYLKIKFWKLKRPFLLHSEPLKERQQDSVSLMNWVCMSSKTGQY

SEQ ID NO: 38487 - protein, 641 aa, Homo sapiens
  DOMAIN (17)..(60): kw TRANSCRIPTASE REVERSE II ORF2 domain identified by eMATRIX, accession number DM01354T, p-value=1.000e-40, raw score of 9.48
  DOMAIN (1)..(141): Reverse transcriptase domain identified by PFam, accession name rvt, E-value=0.0076, PFam score of -29.2
  misc_feature (1)...(641): Xaa = X or * as defined in Table 2
DKPTANIILNGQKLQAFPLKTGTRQGCPLSPLLFNIVLEVLARAIRQEKEIKGIQLGKEEVKLSLFADDMIVYLENPIVSAQNLLKLISNVSKVXGYKINVQKSQAFLYTTNRQTESQIMSELPFTIASKRIKYLGIQLTRDVKDLFKENYKPLLNEIKEDTNKWKNIPCSWIGRINIVKMAILPKVIYRFNAIPIKLPMTFFTELEKTTLKFIWNQKRARIAKSILRQKNKAGGITLPDFKLYYKATVTKTAWYWYQNRDIDQWNRTEPSEIMPHIYTILIFDKPEKNKHGGKASLFIKWCWENWLAICRKLKLDPFLTPYTKINSRWIKDLNVRPKTIKTLEENLGITIEDIGVGKDFMSKTPKAMATKAKIDKWDLIKLKSFCTAKETTIRVNRQPTTWEKIFATYSSDKGLISRIYNELKQIYKKKTNNPIKKWAKDMNRHFSKEDIYAAKKHMKKCSSSLAIREMQIKTTMRYHLTPVRMAIIKKSGNNRCWRGCGEIGTLLHCWWDCKLVQPLWKSVWRFLRDLELEIPFDPAIPLLGIYPNDYKSCCYKDTCTRMFIAALFTIAKTWNQPKCPTMIDWIKKMWHIYTMEYYAAIKNDEFMSFVGTWMKLETIILSKLSQEQKTKHRIFSLIGGN

SEQ ID NO: 38488 - protein, 366 aa, Homo sapiens
  DOMAIN (1)..(47): kw TRANSCRIPTASE REVERSE II ORF2 domain identified by eMATRIX, accession number DM01354O, p-value=1.000e-40, raw score of 8.73
  DOMAIN (34)..(300): Reverse transcriptase domain identified by PFam, accession name rvt, E-value=9e-45, PFam score of 162.2
  misc_feature (1)...(366): Xaa = X or * as defined in Table 2
LPTKKSPGPDGITAEFYQRYKEELVPVLLKLFQSIEKEGILPNSFYEASIILIPKPGRDTTKKENFRPISLMNIDAKIPXXKYXQNXIPAAHQKSLSHHDKVGFHPPGMQDWFNIHKSINLIQHINRAKDKNHMIISIDAEKAFDKIQQPFMLKTLNKLGIGGTYFKIIRAIYDKPTANIILNGQKLEAIPFEMLKVMYRAFRQNKQIKGIILEKEEVKLSLFADDMIVYLENPIVSAQNLLKLISNFSKVSGYKINVQKSQAFLYTNNTQTESQIMSELPFTIASKRRKYLGIQLTRDVKDLFKKNYKPLLKEIKQDTNKWKNIPCSXVGRINIVKMAILPKXDVLASPSPFTMTVTCRKQVQVL

SEQ ID NO: 38489 - protein, 338 aa, Homo sapiens
  DOMAIN (182)..(234): Glutamine synthetase proteins domain identified by eMATRIX, accession number BL00180E, p-value=1.000e-40, raw score of 17.60
  DOMAIN (24)..(293): Glutamine synthetase domain identified by PFam, accession name gln-synt, E-value=2.6e-162, PFam score of 511.4
MTTSASSHLNKGIKQVYMSLPQGEKVQAMYIWIDGTGEGLRCKTRTLDSEPKCVEELPEWNFDGSSTLQSEGSNSDMYLVPAAMFRDPFRKDPNKLVLCEVFKYNRRPAETNLRHTCKRIMDMVSNQHPWFGMEQEYTLMGTDGHPFGWPSNGFPGPQGPYYCGVGADRAYGRDIVEAHYRACLYAGVKIAGTNAEVMPAQWEFQIGPCEGISMGDHLWVARFILHRVCEDFGVIATFDPKPIPGNWNGAGCHTNFSTKAMREENGLKYIEEAIEKLSKRHQYHIRAYDPKGGLGQCPTSNWDSMKPPTSTTFLLGVANRICQHSHYPDCWPGEEGLL

SEQ ID NO: 38490 - protein, 104 aa, Homo sapiens
  DOMAIN (8)..(23): Intermediate filaments proteins domain identified by eMATRIX, accession number BL00226A, p-value=4.600e-14, raw score of 12.77
  DOMAIN (8)..(91): Intermediate filament proteins domain identified by PFam, accession name filament, E-value=4.9e-37, PFam score of 136.5
TFQAVRTQEKEQIKTLNNKFASFIDKVRFLEQQNKMLETKWSLLQQQKTARSNMDNMFESYINNLRRQLETLAQEKLKLEAELGNMQGLVEAAMQGSTGNRRPT

SEQ ID NO: 38491 - protein, 482 aa, Homo sapiens
  DOMAIN (187)..(235): Intermediate filaments proteins domain identified by eMATRIX, accession number BL00226B, p-value=4.656e-29, raw score of 23.86
  DOMAIN (90)..(400): Intermediate filament proteins domain identified by PFam, accession name filament, E-value=9.4e-124, PFam score of 424.5
  misc_feature (1)...(482): Xaa = X or * as defined in Table 2
MSIRVTQKSYKVSTSGPWFFSSCSYLSGPSAHISSLSFSRAGSSSFQGGLGRGYGGASGMEVITAVMVNQSLLSPINLEVDLNIQAMHTXEKEQIKTLNKFASFIDKVQFLEQQNKMLENKWSLLQQQKMAQSNLDNMFESYINNLRWQLETLGRKKLKLEAELGNMQGLVEDFKNKYEDEINKYTEMENEFVLIKKDVDEAYMNKVELEYRLEGPTDEINFLRKLYEQEIRELQSQILDMSVVLSMDNSHSLDMDSIIAEVKVQYEEIANRSWAEAERMYQNXYEELQMLAGEHGDDLLSTKTEISTINQNISWLQAEIEGLKGQRASLESTITDVEQRGELVIKDANAKLSQLEAALQRAKQDMALQLHEYQELMNFKLAQDIVITTYRKLLESEGSWLESGMQSMSIHMKTTSGYAGSLSSAYGGLTSPSLSYSLGSSFGSGAGSSSFSHTSSTRAAVVKKIEAQNGKLVSKSSDVLPK

SEQ ID NO: 38492 - protein, 513 aa, Homo sapiens
  DOMAIN (386)..(433): Intermediate filaments proteins domain identified by eMATRIX, accession number BL00226D, p-value=1.000e-40, raw score of 19.10
  DOMAIN (121)..(432): Intermediate filament proteins domain identified by PFam, accession name filament, E-value=5.8e-173, PFam score of 588.0
KCGLRSRSSFSAPSRISAWFGPPASTPASTMSIRVTQKSYKVSTSGPRAFSSRSYTSGPGSRISSSSFSRVGSSNFRGGLGGGYGGASGMGGITAVTVNQSLLSPLVLEVDPNIQAVRTQEKEQIKTLNNKFASFIDKVRFLEQQNKMLETKWSLLQQQKTARSNMDNMFESYINNLRRQLETLGQEKLKLEAELGNMQGLVEDFKNKYEDEINKRTEMENEFVLIKKDVDEAYMNKVELESRLEGLTDEINFLRQLYEEEIRELQSQISDTSVVLSMDNSRSLDMDSIIAEVKAQYEDIANRSRAEAESMYQIKYEELQSLAGKHGDDLRRTKTEISEMNRNISRLQAEIEGLKGQRASLEAAIADAEQRGELAIKDANAKLSELEAALQRAKQDMARQLREYQELMNVKLALDIEIATYRKLLEGEESRLESGMQNMSIHTKTTGGYAGGLSSAYGGLTSPGLSYSLGSSFGSGAGSSSFSRTSSSRAVVVKKIETRDGKLVSESSDVLPK

SEQ ID NO: 38493 - protein, 1173 aa, Homo sapiens
  misc_feature (1)...(1173): Xaa = X or * as defined in Table 2
MHKELPALAACGLVADFDPVGEEETADFGPLVLDSDSDDSVDRDIEEAIQEYLKVGSSKDQGSASPVSMSRADSFEQSIRAEIEQFLNEKRQHETQKCDGSVEKKPDTHENSAKSLSKSHQEPATKVVHRQGLMGVQKEFAFCRPPRLAKTNVQPRSLRSKVTTTTTQEKEGSTKPATPTRPSEAVQNKSGIKRSASTARRGKRVTSAVQAPEASDSSSDDGIEEAIQLYQVQKTHKEADGDPPQRVQLQEERAPAPPAHSTSSATKSALPETHRKTPSKKKPVPTKTTDPGPGDLDADHSPKIPKETKAPPPTSPASRSKFVEWSSCQADTSAELIAVLDIFKTILPAPMEGSDGSLSASPLFYSPNVPSRSDGDSSSVDSDDSIEQEIWTFLALKVQSRSLLARGESCPQAAQGPLSPPGLSSQTGSPKAPLSKTLDPLLGCKRKHRGGSKAQPARPRDGRAPLGWDLSIQGTASEAPGGEGAARVPGDTRTSQGQGKTDEARHLDKKKSSEDKSSSLDSDKDLDTAIKDLLRRVPGPSSQPWLLVXQQQFSGQRRXHRTGDXEVFGGKGQGVGSPRPGPALSLEAHTCWRRRTAITGQAGRCLCYDSQDPKCGDSKKPSKKRVKRKPYSTTKVTSGSTFNENTRRYAVHTNQCRRPHGSRVKKKRYPQEDDFHHTVFSNLERLDKLQPTLEASEESLVHKDRGDGERPVNVKVVQVAPLRRESSKYSGITYQENNLDAKKAPHEDTVHNITNEDASHDITNEDAVHGIANEAADKGIANEDAAQGIANEDAAHGIASEDAAQGIANEVAAQGIANEDAAQGIAKEDAAHGIANEDAAHGIANEDAVHGIANEDSVYDIANEDAIYDIANDTVQGTLTRTLYTTSLMRTPYKALVMRTLYMTSLTRTLYKPSLTRTLYTTSLMTAPYKTSPMRALYTTLLMAPTRHANVDTVHDIANEDSVYDIANEGAVYDIANDTVQGTLTRTLYTTSLMRTPYKASVMRTLYTTSLTRTPYKPSLTRTLYTTSLMMAPYKTSPMRALYTTLLMIPTRHAIVDAVHDIANEDSVYDIANEGAVYDIANDTVQGTLTRTLYTTSLMRTPYKASVMRTLYTTSLTRTPYKPSLTRTLYTTSLMTAPYKTSPMRALYTTLLMIPTRHANVDAVHDIANEDTV

SEQ ID NO: 38494 - protein, 79 aa, Homo sapiens
  misc_feature (1)...(79): Xaa = X or * as defined in Table 2
AACVWRERHHRAEECGCPGVHLPPLLHPXKSKWPGRCRLRGNAAHHPPWGQGQATPALCGGLQQPESSQXGLSSLGGSR

SEQ ID NO: 38495 - protein, 536 aa, Homo sapiens
  misc_feature (1)...(536): Xaa = X or * as defined in Table 2
MDMFRSGIRRDGGLGDGIVRARRRRQGALAGSSQPIQAAAVPRGPGPAPRDPRSWPSCQGSSGEAXPYWKLEGAGLERKRGTEIRAVGEQLESWRSWRKDVAGCSSPTPIPEFGAAAPTKSGPAGPSSTQQPSSRIWAAPRKRLAGXDTAHKNHPSAAPXPAPQDRARPKXPPRADPQRSVTPPRSPKGSXGSPFFPKQPRIPKSGAASEASNPLLAITSQVVGGSESETRVEGLMKEESVREGNAAFSRFLRKSVACKPPASEKDRGSRAAEGDEHASSNLQEPIPHLPXTALGERPEARGQPIRFRPPGEPCSHPRSVNELGTGEPHTFQLGCLQRHPGAVDQAGPRGPGAGSRARETGKTGTNSEAAVRQEPKQRILSKIHTSSTPGHRLEPTAFRTRSARSPELASGHQAGKVVAGPRVRARGAPPTGRPGLAARPTEAERASRAPCPPPQTDARLFITARPRGKSGCRLPAHSPPDPPSRLPGPRSRSRLSPAVRVVAAGEKEASGAETAFPAWGTMALFWSLQPRALQAL

SEQ ID NO: 38496 - protein, 226 aa, Homo sapiens
  misc_feature (1)...(226): Xaa = X or * as defined in Table 2
ERGITAGPPGVHPPTARSAGAALPVWDSSACVEGVRPAPAMDPXEHQLRSGLGCQDTLMLIESGPQVSLVLSKGCTEAKDQEPRVTEHRMGPGLSLISYTFVCRQEDFCNNLVNSLPLWAPQPPADPGSLRCPVCLSMEGCLEGTTEEICPKGTTHCYDGLLRLRGGGIFSNLRVQGCMPQPVCNLLNGTQEIGPVGMTENCNRKDFLTCHRGTTIMTHGNLAACI

SEQ ID NO: 38497 - protein, 40 aa, Homo sapiens
  misc_feature (1)...(40): Xaa = X or * as defined in Table 2
XGPDSGEMEGAAGDVQGHSQRPSRVGCSDADPLLPGYTGF

SEQ ID NO: 38498 - protein, 96 aa, Homo sapiens
  misc_feature (1)...(96): Xaa = X or * as defined in Table 2
GRVSRCLPFKLVTPVLCFCLWHRSYXEYRNFXMNQISKTQLKQRPTRFTGXXQPWPRWWPAPPRPSQGRLAGREWSTQAHPRDSQGPRLCGEGRGA

SEQ ID NO: 38499 - protein, 323 aa, Homo sapiens
  misc_feature (1)...(323): Xaa = X or * as defined in Table 2
SRPVQAGPKATGTPQPPPSXPEPVERPLSMASSGTHAQGPSPPSWPQLTGAVAQDSPSPGLLPPRDTAPAPSMPTADGVQRCARQSGNTGPRVATXPVAPTSFPAGPDSGEMGESCRRRPGTXPTPFQSRLFRRRPSASRIYGLLGPCVISLHKKQKSLPPLAPPGTITVDILFTWASSLFSLNATEGHTVRHVXCSRRNYQKANAPRTPTASPNTRSHSLGNAKTPPQTVPHRDHPTPQEHTGDTSSCVAVLSANTRERAAVECGVTVLNLDXLKXTARSYSMSSASTGVAGSVQGKRLRTSALSSGGXGPKATGTPQPPPS

SEQ ID NO: 38500 - protein, 1188 aa, Homo sapiens
  DOMAIN (511)..(523): ALPHA-AMYLASE SIGNATURE domain identified by eMATRIX, accession number PR00110C, p-value=3.842e-11, raw score of 12.08
  DOMAIN (308)..(812): Alpha amylase domain identified by PFam, accession name alpha -amylase, E-value=6.1e-22, PFam score of 86.3
MKTMSVGFHSHPERPEEERHSPPNTHSDPGHPHHVSVRLCTRGGVGRDLTLNAVFSAVPQQAHGTGILSEGGLQELSGHFENQKVMYGFCSVKDSQAALQKYVLINWVGEDVPDARKHITVGETTARDQGVEIFQARASGQQVTHMHVDSIKACTVESCRHFNMRVHALLTQYGNFRTCASGNIRCCHIFVDIERQFYIQARIGVVRFRLMLLIGTLRVVTQALHLPGSFCPPDTQRGAAFAEYSLPVGGNHKTVTGNRLPYIMDTISKPMLCQYGLDRFTVSGTNLNHRTQFFVKQRRQAIVTQSGDIYHFSIVSHRHSGKLWPELAQRADGFNDIGINMDWLPPAYKGASGGYSVGYNSYDLFDLRELDQKSSLPTKYGDKAQLLAAFDALKQTILVRRVNADDRTLIDEKIIECEGWTRYTFPRRAGQYSQFIWDFKCFTGIDHIENPDEDGIFKIVNDYTGEGWNDQVDDELGNFDYLMGENIDFRNHAVTEEIKYWARWVMEQTQCDGFRLDAVKHIPAWFYKEWIEHVQEVAPKPLFIVAEYWSHEVDKLQTYIDQVEGKTMLFDAPLQMKFHEASRMGRDYDMTQIFTGTLVEADPFHAVTLVANDDTHPLRSHNVVETVTEFRCKDLLDLFHRIGAVILVDKTNGFALSFPYPGVGGHHQHHVTEVCFASVVIGQRTVIHHLQQNIEHVRVRFLDFVQQQHRMWMLDDRISQQTALIKTNVSRRRTNKTADGMAFHILGHIKAQKLNAQSFRKLYRHLCFPDPDQHFQAIAEVFQGITITLRNTLLWNACNTGHHGLNIRHINGFLAFAYRHQACASARFVDNINGFIRQMTIVNVFHRQLYRRTHRFCGITHVVVRFILRFQAIDDLNSFFDRRFSNIRPLEAGDNRTFHQCIHRIHGAANILNLQKLINISHQLEITPVSDDNPLLRANLFLDGLEGTVQVFVLFRDPGCKGHKFAHSGLACQLPQPCEADEGLGEEEDSSSERSSCTSSSTHQRDGKFCDCCYCEFFGHNARSERLGVMKAEWKQKGSQSPKCDSQPRDRPLPARAKMMHTDVDLKATACLAEPMLLMSVLDNLYSNAVHYGAESGNICLRSSLHGARVYIDVINTGTPIPQEERAMIFEPFFQGSHQRKGAVKGSGLGLSIARDCIRRMQGELYLVDESGQDVCFRIELPSSKNTK

SEQ ID NO: 38501 - protein, 34 aa, Homo sapiens
PNRFCLDSAKHTRQKVAVNWTNFSLKKTTPSTAQ

SEQ ID NO: 38502 - protein, 401 aa, Homo sapiens
  DOMAIN (230)..(254): DEAD-box subfamily ATP-dependent helicases proteins domain identified by eMATRIX, accession number BL00039C, p-value=4.000e- 18, raw score of 15.63
  DOMAIN (132)..(252): DEAD/DEAH box helicase domain identified by PFam, accession name DEAD, E-value=1.1e-13, PFam score of 46.1
MQGLFAFSTPCAPDLCRAVAGAIARQRERLPELTRPQPCPLPRATSLPSLDTPGELREMPPGPEPPTSRKMHLAEPGPQSLPLLLDLMVLHGTKKKVTHFQSGKGPYEFIICPSEDSSPLLRCAFCIGGMSVKEQMETIRHPLQTTRGPGPGPLFTDGPDPIPEAFLHGLLSIREMVSTEKVKPVGQESEPRVKPLELDDSASGGVHMMVATPGRLMDLLQKKMVSLNICRYLALDEADRMIDMGFEGDIRTIFSYFKHTSAAAIGLQLALDGGTGSGQKGKCEEFPSSMSAVSTGLEASACCLSVTMDPLETLSRMASSTSSMSSLARAWLSPEPGDSPGMVGGLPRELPGMAPLECGEFQRPESLCADRNELGSQSPEFPGQEEEDEDEDDDGGRRGTT

SEQ ID NO: 38503 - protein, 436 aa, Homo sapiens
MPAVTVRGSRVQGAQVSHSGLACQLPQPCEADEGWPPAPRRVGTIPRSGRSSARADQAERGAAHEGGHLGRIPGEPAVDHRDVDELLNSSTARSPKSPTAPGPQAGPAQAEKEGMERAQCLSAPFSHCQPGHSHLVFVSSVYTKEKEKAQLAAEALSRQIVFLEAGSQGLPGEALGVARPGTGSGQQLLSSRLQEIKNTVKDSIRPASVTTRYKLQASQPTMGRNERPPPTMDRAKRPPGNEPSSISFHRWFLSHYWVPAAPAAGPRVTLAAPESVARPGATQRSPVSSEASEDRRPCRRHGDVPGHLHVPTCFAGFWLIWGLIVLLAASAASCAAASNGARRTTARAEPARPRAGAPRTEGSLAGSPPGLAPPQPHHTVAAWRRRLTRTRIPRARAPAAAPRRKKGCRNAKRFTPFKGDWAQRGGNRRDIGKATG

SEQ ID NO: 38504 - protein, 830 aa, Homo sapiens
  misc_feature (1)...(830): Xaa = X or * as defined in Table 2
EAGEWEEGPSQNGLVLQGEKLPPDFMPKLVKNLLGEMPLWVCQSCRKSMEEDERQTGREHAVAISLSHTSCKSQSCGDDSHSSSSSSSSSSSSSSSSCPGNFGDWDPSSFLAEHKRLGLWNSPHSIGAMPGSSLGSPPTIPGEAFPVSEHHQHSDLTAPPNSPTGHHPQPALSNPALTPAPLAPAPHPHLLPTTPAAPFPAQASECPVAAATAPHTPGPCQSSHLPSTSMPLLKMPPPFSGCSHPCSGHCGGHCSGPLLPPPSSQPLPSTHRDPGCKGHKFAHSGLACQLPQPCEANEGLGEEEDSSSERSSCTSSSTHQRDGKFCDCCYCEFFGHNAPPAAPTSRNYTEIREKLRSRLTRRKEELPMKGGTLGGIPGEPAVDHRDVDELLEFINSTEPKVPNSARAAKRARHKLKKKEKEKAQLAAEALKQANRVSGSREPRPARERLLEWPDRELDRVNSFLSSRLQEIKNTVKDSIRASFSVCELSMDSNGFSKEGAAEPEPQSLAPSKLSGSSEQQPDINLDLSPLTLGSPQNHTLQAPGEPAPPWAEMRGPHPPWTEVRGPSPVFVPENGLVRRHEHRAQPIPGDLGQDTQAGHPSSEEASSKEVPSCKQELPEPVSSGGKPQKGKRQGSQAKKSEASPAPRPTSQPRGSQCQGPGRWPTSSQAGSXSLPKXAAVLKLERGAGGAGQDQVGLAVPKLRRRRAAPGETGQARPRHGLRSRSLCSPQAQQGHRACPKARGPSRRSRNKQEKPASSLDDVFLPKDIDGVEMDETDREVEYFKRFCLDSAKQNRQKVAVNWTNFSLKKTLQSPAQVKALPQAELPSGAS

SEQ ID NO: 38505 - protein, 52 aa, Homo sapiens
  DOMAIN (9)..(29): BACTERIAL LEADER PEPTIDASE 1 (S26) FAMILY SIGNATURE domain identified by eMATRIX, accession number PR00727C, p-value=9.063e- 16, raw score of 13.04
STFLWYPKVPMGHVWLEGDNLQNSTDSRCYGPIPYGLIRGRIFFKIWPLSDY

SEQ ID NO: 38506 - protein, 55 aa, Homo sapiens
KLASHVGVCLWSQLLGRLGHKNHLNPGGRVSRGCATALQPGLQRARLCLRKNKIK

SEQ ID NO: 38507 - protein, 64 aa, Homo sapiens
  misc_feature (1)...(64): Xaa = X or * as defined in Table 2
PRLQCIGQPRLTLPPGFKXFLCPSLPSSWDHRQTPTXLANFXKNYFXXIWGFTMLGMGSGTCNP

SEQ ID NO: 38508 - protein, 166 aa, Homo sapiens
  DOMAIN (108)..(128): BACTERIAL LEADER PEPTIDASE 1 (S26) FAMILY SIGNATURE domain identified by eMATRIX, accession number PR00727C, p-value=9.063e- 16, raw score of 13.04
  DOMAIN (38)..(139): Signal peptidase I domain identified by PFam, accession name Peptidase_S26, E-value=2.8e-16, PFam score of 56.3
MLRGVLGKTFRLVGYTIQYGCIAHCAFEYVGGVVMCSGPSMEPTIQNSDIVFAENLSRHFYGIQRGDIVIAKSPSDPKSNICKRVIGLEGDKILTTSPSDFFKSHSYVPMGHVWLEGDNLQNSTDSRCYGPIPYGLIRGRIFFKIWPLSDFGFLRASPNGHRFSDD

SEQ ID NO: 38509 - protein, 48 aa, Homo sapiens
MPVFMKTGPLHCCYAEMNFYKVLLTIANYRWHMPLKMHFSMYLIFCVQ

SEQ ID NO: 38510 - protein, 875 aa, Homo sapiens
  misc_feature (1)...(875): Xaa = X or * as defined in Table 2
MWGVGKITDPKDVDTLIPGTCGCVTLHGERHFVDVIKAGPTRSVQGNPKLGSKKMEVSIMKTQESIKLTVKATTQRRNRNESNGPTTEFHQSTMTNTHSDTWMVVLDPMKPGGPFEVMAQQTLEKINFTLRVHDVLFGDVWLCSGQSNMQMTVLQTLSCGVVTVIFIMTLAGAHGSTLSSGIFSIYQSDSLKCKSGRKAPVGPRVLRTGYTWSQENSTGNPDLFVQDHTWQFCTKHSGSYVASMETVDETAFILSTHTSFRTDWELKCFITVRRQLGRQYERTCYLSFRPVANTVEYCIGFRFASYINNDMVLQKEPAGAVIWGFGTPGATVTVTLRQGQETIMKKVTSVKGLISLLVCLSQFEIVPEDDPQNAIVSSSADACHAELLRTISTTMGKLMPNLLPAGADFFGFSHPAIHNLIQSCPGARKCINLPASRPVGLSIGPLSPLDSYQWVKFDVCKPGDGQLPEGLPENDAAMSFEAFQRQIFDEDQNDPLLXSSLXPWLVHMVPLWSSGIFSTISKXLFEVXVGSEGSSGSPCAEDRLHMVSRKFHRKSRPVCSGSYLAVLHXALRILCCFHGNSGXNCFHSLHPHXHSALTGNSSASSQXDASLGGSMREHATCLLDPLLTLXSTVLVFALLHTSIMIWCCRRSLLGQXYGASVHLEPQXPXPCAKVRKPSXRKXPVCKGLISLLVCLSQFEIVPEDDPQNAIVSSSADACHAELLRTISTTMGKLMPNLLPAGADFFGFSHPAIHNLIQSCPGARKCINLPASRPVGLSIGPLSPLDSYQWVKFDVCKPGDGQLPEGLPENDAAMSFEAFQRQIFDEDQNDPLLPELQPAAFVSSYQPMYLTHEPLVDTHLQHLKSPSQGSPIQSSD

SEQ ID NO: 38511 - protein, 300 aa, Homo sapiens
  DOMAIN (240)..(281): CAMP-DEPENDENT PROTEIN KINASE REGULATORY CHAIN domain identified by eMATRIX, accession number DM01513A, p-value=6.727e- 33, raw score of 13.61
  DOMAIN (242)..(279): Regulatory subunit of type II PKA R-subunit domain identified by PFam, accession name RIIa, E-value=3.7e-16, PFam score of 67.1
MSAVCWLFGRHLYDTLQYPIGLIASSWGGTPIEAWSSGRSLKACGVPKQGYLLKKLLQLQALTEGEVQAAAPSHSSSLPLTYGVASSVGTIQGAGPISGPSTGAEEPFGKKTKKEKKEKGKENNKLEVLKKTCKKKKMAGGARKLVQPIALDPSGRPVFPIGLGGLTVYSLGEIITDRPGFHDESAIYPVGYCSTRIYASMKCPDQKCLYTCQIKDGGVQPQAVLTKKMSIPFSNTHYRIPQGFGNLLEGLTREILREQPDNIPAFAAAYFESLLEKRETELKISANFLNVAGLFHIRSG

SEQ ID NO: 38512 - protein, 212 aa, Homo sapiens
  misc_feature (1)...(212): Xaa = X or * as defined in Table 2
IITDRPGFHDESAIYPVGYCSTRIYASMKCPDQKCLYTCQIKDGGVQPQFEIVPEDDPRNAIVSFFWQMLVMQNSQDYKALLWGKLMPNLLPAGADFFGFSHPAIHNLIQSCPGARKCINYQWVKFDVCQTLEMGQLPEGLPENDAARALKPFQRQILXXRIDKRNLLLKIKQLKVFPGKTITTRTFHDEIPLVSSLPSELLPSFIYPKILV

SEQ ID NO: 38513 - protein, 137 aa, Homo sapiens
GTQPVLSGTGEETVRLGFPVDPRKVLIVAGHHNWIVAAYAHFAVWYRIKESSGWQQVFTSPYLDWTIERVALLARARRTESFHSYRDFQTINLNRNVERAVPENGNLGPIQAEVKGATGECNISERKSPGVEIKSLR

SEQ ID NO: 38514 - protein, 815 aa, Homo sapiens; identical to SEQ ID NO: 35517
  DOMAIN (61)..(81): POTASSIUM CHANNEL SIGNATURE domain identified by eMATRIX, accession number PR00169A, p-value=4.090e-11, raw score of 16.77
  DOMAIN (18)..(117): K+ channel tetramerisation domain identified by PFam, accession name K_tetra, E-value=7.9e-36, PFam score of 132.5

SEQ ID NO: 38515 - protein, 83 aa, Homo sapiens
  misc_feature (1)...(83): Xaa = X or * as defined in Table 2
ENGNLGPIQAEVKGATGECNISERKSPGVEIKSLRELDSGLEVHKIAEGFSESKKRSSEDENENKIEFRKKGGFXGGGFLRRK

SEQ ID NO: 38516 - protein, 84 aa, Homo sapiens
  DOMAIN (25)..(45): POTASSIUM CHANNEL SIGNATURE domain identified by eMATRIX, accession number PR00169A, p-value=4.090e-11, raw score of 16.77
  DOMAIN (1)..(76): K+ channel tetramerisation domain identified by PFam, accession name K_tetra, E-value=4.1e-11, PFam score of 50.4
MWIPDSFFSSLLSGRISTLRDETGAIFIDRDPAAFAPILNFLRTKELDLRGVSINVLRHEAEFYGITPLEKIKMEYCFSVCMYS

SEQ ID NO: 38517 - protein, 225 aa, Homo sapiens
MDEAGNHHSEQTIARTENQTRHVLILVQYSAKERQVYKANMPHQGVFSLGVPVDALFFIGNQLVATSHTGKVGVWNAVTQHWQVRTGLSTLVAREESCQKDLKTERMEIISGPIKVKSVYGIYSTARKLSTVLNSIKDTLPVKKRENATKYELQGYAVPQYRAPFSVDSNLSVVCVNWSDTFLLNGQLKEYVLTDGGRRVYSGLDTTLYIPRTADKTLRDAKSES

SEQ ID NO: 38518 - protein, 38 aa, Homo sapiens
GRRARPEPPEMAGGHCGSFPAAAAGSGEIVQLNVGGTR

SEQ ID NO: 38519 - protein, 648 aa, Homo sapiens
  DOMAIN (145)..(167): PEPTIDYL-GLYCINE ALPHA-AMIDATING MONOOXYGENASE SIGNATURE domain identified by eMATRIX, accession number PR00790B, p-value= 4.727e-09, raw score of 13.54
  misc_feature (1)...(648): Xaa = X or * as defined in Table 2
PGTGEETVRLGFPVDPRKVLIVAGHHNWIVAAYAHFAVWYRIKESSXWQQVFTSPYLDWTIERVALNAKVVGGPHGDKDKMVAVASESSIILWSVQDGGSGSEIGVFSLGVPVDALFFIGNQLVATSHTGKVGVWNAVTQHWQVQDVVPITSYDTAGSFLLLGCNNGSIYYIDMQKFPLRMKDNDLLVTELYHDPSNDAITALSVYLTPKTSVSGNWIEIAYGTSSGPVRVIVQHPETVGSGPQLFQTFTVHRSPVTKIMLSEKHLVSVCADNNHVRTWTVTRFRGMISTQPGSTPLASFKILSLEETESHGSYSSGNDIGPFGERDDQQVFIQKVVPITNKLFVRLSSTGKRICEIQAVDCTTISSFTVRECEGSSRMGSRPRRYLFTGHTNGSIQMWGSGPLLWDMVNKSEDKDVSGPTEEELLKLLDQCDLSTSRCATPNISPATSVVQHSHLRESNSSLQLQHHDTTHESATYGSMRPYRESPLLARARRTESFHSYRDFQTINLNRNVERAVPENGNLGPIQAEVKGATGECNISERKSPGVEIKSLRELDSGLEVHKIAEGFSESKKRSSEDENENKIEFRKKGGFEGGGFLGRKKVPYLASSPSTSDGGTDSPGTASPSPTKTTPSPRHKKSDSSGQEYSL

SEQ ID NO: 38520 - protein, 127 aa, Homo sapiens
ARGPKSALLTQNGTGSLPRNLAATLQDIETKRQLALQQKGQQVIEEQRRRLAELKQKAAAEAQCQWDALHGAAPFPAGPSGFPPLMHHSILHHLLSFPALSPWLPGPRLGVFSICKHFSKTITPLDY

SEQ ID NO: 38521 - protein, 106 aa, Homo sapiens
  misc_feature (1)...(106): Xaa = X or * as defined in Table 2
SKGFIVLLKCLQILKTPSLGPGNQGLNAGKESRGGGLSVKAXRARPDSWRPGPPLSISITLRRLKEGRRHHRALPLCCIITLLASSPNCIAPTSVPXIPRLHPFWL

SEQ ID NO: 38522 - protein, 613 aa, Homo sapiens
  DOMAIN (393)..(590): gag gene protein p24 domain identified by PFam, accession name gag_p24, E-value=1.1e-84, PFam score of 294.7
MRGTSPMPPAPVPGLSPWASASRDLVPTTCLPPMLPSSSFASITPSPKMEKLLLPAVDLEQWYQELMAGLGTGPAAASPHSSPPPLPAKASRQLQVSQICIQVSKHMGGAKVMATTGGTNLRDDIMRLDDTAPYNACPCGLVFQAQSGIASTTQPPLSLSLKEAEALETETKLFEDLEFQQLERESRVEEERELAGQGLLRSKAELLRSIAKRKERLAILDSQAGQIRAQAVQESERLARDKNASLQLLQKEKEKLTVLERRYHSLTGGRPFPKTTSTLKEVRENKSQPPVAYQYWPLAELQYQPPPESQYGYPGMPQHHRAGRHTLSRPLGDLILRHRLVDRVVNYMKLLRRKEGDTEAWQFPVTLEPMPPGEEAQEGEPLTVEARYKSFLIKMLKDMKEGVKQYGPNSPYMSTLLDSIAHGHRLIPYDWEILARSSLSPSQFLQFKTWWIDGVQEQVRRNRAANPPVTIDADQLLGRGQNWSTISQQAFMQNEAIEQVRAICLRAWEKIQDPGSACPSFNTVRQGSKEPYPDFVARLQDVAQKSIADEKAHKVIVELMAYENANPECQSAIKPLKGKGFQGQKPPLSQVFQGISQLPQYNNCPPPQAAVQQ

SEQ ID NO: 38523 - protein, 121 aa, Homo sapiens
  DOMAIN (12)..(114): PH domain identified by PFam, accession name PH, E-value=8.4e -18, PFam score of 68.6
DDTCLHVELSSKDCRGYLVKMGGKIKAWKKRWFVFDRLKRTLSYYVDKHETKLKGVIYFQAIEEVYYDHLRSAAKSPNPALTFCVKTHDRLYYMVAPSAEAMRIWMDVIVTGAEGYTQFMN

SEQ ID NO: 38524 - protein, 1236 aa, Homo sapiens
  DOMAIN (1124)..(1236): PH domain identified by PFam, accession name PH, E-value=9.4e -18, PFam score of 68.4
  misc_feature (1)...(1236): Xaa = X or * as defined in Table 2
MIPAGGRAPGPPYSPVPAESESLVNGNHTPQTATRGPSACASHSSLVSSIEKDLQEIMDSLVLEEPGAAGKKPAATSPLSPMANGGRYLLSPPTSPGAMSVGSSYENTSPAFSPLSSPASSGSCASHSPSGQEPGPSVPPLVPARSSSYHLALQPPQSRPSGARSESPRLSRKGGHERPPSPGLRGLLTDSPCTTVLAEARRATETPRLGGQLPVVAISLSEYPASGALSQPTSIPGSPKFQPPVPAPRNKIGTLQDRPPSPFREPPGSERVLTTSPSRQLVGRTFSDGLATRTLQPPESPRLGRRGLDSMRELPPLSPSLSRRALSPLPTRTTPDPKLNREVAESPRPRRWAAHGASPEDFSLTLGARGRRTRSPSPTLGESLAPHKGSFSGRLSPAYSLGSLTGASPCQSPCVQRKLSSGDLRVPVTRERKNSITEISDNEDDLLEYHRRQRQERLREQEMERLERQRLETILNLCAEYSRADGGPEAGELPSIGEATAALALAGRRPSRGLAGASGRSSEEPGVATQRLWESMERSDEENLKEECSSTESTQQEHEDAPSTKLQGEVLALEEERAQVLGHVEQLKVRVKELEQQLQESAREAEMERALLQGEREAERALLQKEQKAVDQLQEKLVALETGIQKERDKEAEALETETKLFEDLEFQQLERESRVEEERELAGQGLLRSKAELLRSIAKRKERLAILDSQAGQIRAQAVQESERLARDKNASLQLLQKEKEKLTVLERRYHSLTGGRPFPKTTSTLKEMEKLLLPAVDLEQWYQELMAGLGTGPAAASPHSSPPPLPAKASRQLQVYRSKMDGEATSPLPRTRSGPLPSSSGSSSSSSQLSVATLGRSPSPKSAPTHPQNGTGSLPCNLAATLQDIETKRQLALQQKGQQVIEEQRRRLAELKQKAAAEAQCQWDALHGAAPFPAGPSGFPPLMHHSILTHLGLAGRERGEEGEHAYDTLSLESSDSMETSISTGGNSACSPDNMSSASGLDMGKIEEMEKMLKEAHAEKNRLMESREREMELRRQALEEERRRREQVXRRLQSESARRQQLVEKEVKMREKQFSHARPLTRYLPIRKEDFDLKTHIESSGHGVDTCLHEVLSSKVCRGYLVKMGGKIKSWKKRWFVFDRLKRTLSYYVDKHETKLKGVIYFQAIEEVYYDHLRSAAKKRFFRFTMVTESPNPALTFCVKTHDRLYYMVAPSAEAMRIWMDVIVTGAEGYTQFMN

SEQ ID NO: 38525 - protein, 6 aa, Homo sapiens
MRGQRK

SEQ ID NO: 38526 - protein, 13 aa, Homo sapiens
FGDDEDDSGTEES

SEQ ID NO: 38527 - protein, 307 aa, Homo sapiens
  DOMAIN (112)..(160): Ubiquitin-conjugating enzymes proteins domain identified by eMATRIX, accession number BL00183, p-value=8.920e-36, raw score of 28.97
  DOMAIN (63)..(236): Ubiquitin-conjugating enzyme domain identified by PFam, accession name UQ_con, E-value=1.1e-31, PFam score of 118.6
  misc_feature (1)...(307): Xaa = X or * as defined in Table 2
IAAAPELLERSGSPGGGGGAEEEAGGGPGGSPPDGARPGPSRELAVVARPRAAPTPGPSAAAMARPLVPSSQKALLLELKGLQEEPVEGFRVTLVDEGDLYNWEVAIFGPPNTYYEGGYFKARLKFPIDYPYSPPAFRFLTKMWHPNIYETGYVCISILHPPVDTDPQSGELPSERWNPTQNVRDHSSXVXSSLLERRPNTFLRPANVGRLPWMLQGSWEREQGGRIRELHRTSFRKQVLGTKVDAERDGVKVPTTLPEYCVKDQGRRAPDEGSDLFYDDYYEDARVEEEADSCFGDDEDDSGTEES

SEQ ID NO: 38528 - protein, 117 aa, Homo sapiens
  misc_feature (1)...(117): Xaa = X or * as defined in Table 2
IAQGPFYPPGWPCSGPGGNTSSPRPPPTGGKGKPGGPQKPLAPRIPAVFTRGDSGXRSCPATTPLSAGSPSLPHRIPEPKPPHRIPEHKLHRACAHAPDPGSGGLRIFLTAVHHGKL

SEQ ID NO: 38529 - protein, 212 aa, Homo sapiens
  DOMAIN (107)..(117): HOMEOBOX SIGNATURE domain identified by eMATRIX, accession number PR00024C, p-value=2.000e-12, raw score of 7.49
  DOMAIN (63)..(120): Homeobox domain identified by PFam, accession name homeobox, E-value=0.00018, PFam score of 24.2
  misc_feature (1)...(212): Xaa = X or * as defined in Table 2
FSVSHLLDLEEAGDMVAAQADENVGEAGRSLLESPGLTSGTATPQQDNDQLNSEEKKKRKQRRNRTTFNSSQLQALERVFERTHXTPSSLFFLSFLMPSCLLTILQVWFQNRRAKFRRNERAMLANKNASLLKSYSGDVTAVEQPTDLQLCETNACYSPCSLLCPYSAMATYSATCANNSPAQGINMANSIANLRLKAKEYSLQRNQVPTVN

SEQ ID NO: 38530 - protein, 301 aa, Homo sapiens
  DOMAIN (35)..(85): F-box domain identified by PFam, accession name F-box, E- value=1.7e-05, PFam score of 31.7
  misc_feature (1)...(301): Xaa = X or * as defined in Table 2
RVDDFVAVQLGRPIGSCFGGRAQLQEGVQKPQAMAVGNINELPENILLELFTHVPARQLLLNCRLVCSLWRDLIDLVTLWKRKCLREGFITEDWDQPVANWKIFYFLRSLHRNLLHNPCAEEGFEFWSLDVNGGDEWKVEDLSRDQRKEFPNDQVKKYFVTSYYTCLKSQVVDLKAEGYWEELMDTTRPDIEVKDWFAARPDCGSKYQLCGHLSDAAQGPHGTFQPDPATIQQKSDAKWREVSHTFSNYPPGVRYIWFQHGGVDTHYWAGWYGPRVTNSSITIGPPLPXHPLSPHLLNPDW

SEQ ID NO: 38531 - protein, 94 aa, Homo sapiens
  DOMAIN (14)..(31): Zinc finger C2H2 type, domain proteins. domain identified by eMATRIX, accession number BL00028, p-value=8.269e-11, raw score of 16.07
  DOMAIN (12)..(68): Zinc finger, C2H2 type domain identified by PFam, accession name zf-C2H2, E-value=6.5e-05, PFam score of 29.8
AADTSGQQMKKHPCRQCDKSFSSSHSLCRHNRIKHKGIRKVYACSHCPDSRRTFTKRLMLEKHVQLMHGIKDPDLKEMTDATNEEETEIKEDTK

SEQ ID NO: 38532 - protein, 1022 aa, Homo sapiens; identical to SEQ ID NO: 33980
  DOMAIN (986)..(1003): Zinc finger C2H2 type, domain proteins. domain identified by eMATRIX, accession number BL00028, p-value=8.714e-09, raw score of 16.07
  DOMAIN (472)..(1007): Zinc finger, C2H2 type domain identified by PFam, accession name zf-C2H2, E-value=4.2e-28, PFam score of 106.8
  misc_feature (1)...(1022): Xaa = X or * as defined in Table 2

SEQ ID NO: 38533 - protein, 396 aa, Homo sapiens
  DOMAIN (359)..(376): Zinc finger C2H2 type, domain proteins. domain identified by eMATRIX, accession number BL00028, p-value=2.286e-09, raw score of 16.07
  DOMAIN (15)..(383): Zinc finger, C2H2 type domain identified by PFam, accession name zf-C2H2, E-value=5.3e-09, PFam score of 43.3
  misc_feature (1)...(396): Xaa = X or * as defined in Table 2
MPLDEDPSKLCRHNLKCLECNEIFQDKTSLATHFQQAADMSGQKTCTICQMLLPNQCQRIHQHKSPXTCPECRAICRSHCEVFYKCPICPMTFKSAPSTHSHTYTQHPSIKIGESKIIYKCSMCNTVFTLQTLLYRHFDQHIENQKRDVYISHVRKEHGKQMKKQPCCQRDKPFSSSHSLCWHNRIKHKVIRKVYTCSHCSDSRGTFTKQLMLEKHVQLTHGIKDPDLKETDRRHQXGGNRNKRRPQGPQSQVEVERTGSGVQASQGAITQPKLEINVFKVHKCAVCGFTTENLLQFHEHIPQHKSDGSFYQCREHLFVAHKLKEPQPVSKQNGAGEDNQQENKPSHEDESPNGAMSDRKCKVCAKTFETEAALKTHMQTHGMAFIKSKRMSSDEK

SEQ ID NO: 38534 - protein, 617 aa, Homo sapiens
  DOMAIN (247)..(266): GLYCOSYL HYDROLASE FAMILY 37 SIGNATURE domain identified by eMATRIX, accession number PR00744A, p-value=9.778e-10, raw score of 10.81
  DOMAIN (318)..(563): Zinc finger, C2H2 type domain identified by PFam, accession name zf-C2H2, E-value=8.3e-10, PFam score of 46.0
  misc_feature (1)...(617): Xaa = X or * as defined in Table 2
KGECLPSALSLNGNGRESLESLESLSLEGFTRGRAGLRTCSPPCLSLPAPPWAPVLPEPPRGAPPPAPRRPVPSTTQGLRSAGARRGTGRQLHLRPRCADPLGEASWAPESGSAPAILKVRIKTIKMSSGEIKRTVTRVLPEVDLDSGKKSSEQTASVMASVTFLLSSPASAAILSSSPQGASPVHGHDQCSFTCSSSPLNRAPAGAIIKAANAIQQQTVVVPAPSRANAKLVPKTVHLANINLLPHGSATNISRQXSMQQRSQPPKKVSRVQVVSSLQSSVVEAFNKVLSSVNPVPVYIPNLSPPTNAGITLPTRGYKCLECGDSFAVEKSLTQHYDRQSMRIEAADTRGQKTCTICQMLLPNQCSYASHQRIHQHKSLYTCPECGAICRSVHFQTHVTKNCLHYMRRVGFRCVHCNVVYSDVAALQSHIQGSHCEVFYKCPICPMASNQNKEDTKSMNGKEKLEKKSPSPVKKSVETKKVASPGWTCWECDRLFIQRDVYISHVRKEQGKQMKKHPCRHLCQHNRIKHKGIRKVYACSHCPDSRRTFTKRLMLEKHVQLMHSLKDPDLKETDRCHQXGGNRNKRRHQVPQSQAPLHCTQVKGTSASVQAKWSWGR

SEQ ID NO: 38535 - protein, 146 aa, Homo sapiens
  DOMAIN (121)..(138): Zinc finger C2H2 type, domain proteins. domain identified by eMATRIX, accession number BL00028, p-value=8.200e-09, raw score of 16.07
  DOMAIN (15)..(141): Zinc finger, C2H2 type domain identified by PFam, accession name zf-C2H2, E-value=4.1e-05, PFam score of 30.4
MPLDEDPSKLCRHNLKCLECNEIFQDKTSLATHFQQAADMSGQKTCTICQMLLPNQCRESISTNLLKPALSAGPSAGSHCEVFYKCPICPMTFKSAPSTHSHTYTQHPSIKIGESKIIYKCSMCNTVFTLQTLLYRHFDQHIENQK

SEQ ID NO: 38536 - protein, 122 aa, Homo sapiens
MLEKHVQLMHSLKDPDLKEMTDATNEEETEIKEDTKFPSPKHLFIVHKLKEPQPVSKQNGAGEDNQQENKPSHEDESPNGTVSDRKCKVDTDEAAFEPDYNESDSGSYVSVKDEETSGNTSK

SEQ ID NO: 38537 - protein, 893 aa, Homo sapiens
  DOMAIN (369)..(493): dUTPase domain identified by PFam, accession name dUTPase, E- value=0.0056, PFam score of -2.6
MRLPAQLLGLLMLWVSGSSGDIVMTQTPLSLPVTPGEPASISCRSSESLLDTDDEYTYLNWYLQKPGQSPQLLIYEVSNRASGVPDRAQPPALKTFYRLVTPGAGVSPSQDTARMQGPPLSSWGSWCSGCQICEDSTCIFEEPCKGSSLYVRSNETALVLYWAFVETEHLTMSQQVTMRPELPIMNWVLSDSSSHNVGHAQQHSIITWKWCISDWAQAGPGGHKDGGYAWIQQCGLPLTKAELSVATAECPICQQQQRLTVNPLYGIIPWGDRPATQWQVDYIGPLPPWKGERFVLIGTGTYSGYGFAYLHAMLLPRLPFMDSRNALSTITVFHTALPLTKHSLYSQDSQIQDSRGGCESGTTHYDALAKCLLSVPTTLGSALLVILAPEGRTLLPGDTIMIPLNWKLRWPLGRFGVLLPLSQQAKNGVTVLAAVIDPDYQDEVSPLLHNGSEEEYAWNIGDPLGCLLVLSCTLIKVIYFPWVAYTRFFPLPYEGQYKPLDLTRQTVIQINKCKGKLGEKLEWRAQNLAPEKGRGKGDPVQNLDTRIRERTLMVTFFSGAYFGDPGENLSPSLTTAAQHAPQNTGAQKHWPTEGAAKEHSVSGDSEHFESWRAAQLFESVDAEPMNMESQLHFIMPKALRTKKAASDSSKEQVANSRESSPSPKEVNDSPRAATKSPESQNLIDGTKKPSLKQPDSPRNISSDNSSKGTPSSPAGSTTAIPKVRIKTIKTSSGEIKRTETRVLPEVDLDSGKKPSEQMVSVMASVTSLLSSPASAAALSSPPRVPLQSAVVTNAVFPAEPTPKQVTIKPVATAFLPVSAVKTAGSQVINLKLANNTTVKATVIPAASVQSASGIIIKAANAIQEQAVMMPASSLANAKLVPKTVHLANLNLLA

SEQ ID NO: 38538 - protein, 403 aa, Homo sapiens
  DOMAIN (367)..(384): Zinc finger C2H2 type, domain proteins. domain identified by eMATRIX, accession number BL00028, p-value=2.286e-09, raw score of 16.07
  DOMAIN (8)..(389): Zinc finger, C2H2 type domain identified by PFam, accession name zf-C2H2, E-value=6.3e-11, PFam score of 49.7
  misc_feature (1)...(403): Xaa = X or * as defined in Table 2
AADTRGQKTCTICQMLLPNQCSYASHQRIHQHKSLYTCPECGAICRSVHFQTHVTKNCLHYMRRVGFRCVHCNVVYSDVAALQSHIQGSHCEVFYKCPICPMASNQNKEDTKSMNGKEKLEKKSPSPVKKSVETKKVASPGWTCWECDRLFIQRDVYISHVRKEQGKQMKKQPCCQRDKPFSSSHSLCWHNRIKHKVIRKVYTCSHCSDSRGTFTKQLMLEKHVQLTHGIKDPDLKETDRRHQXGGNRNKRRPQGPQSQVEVERTGSGVQASQGAITQPKLEINVFKVHKCAVCGFTTENLLQFHEHIPQHKSDGSFYQCREHLFVAHKLKEPQPVSKQNGAGEDNQQENKPSHEDESPNGAMSDRKCKVCAKTFETEAALKTHMQTHGMAFIKSKRMSSDEK

SEQ ID NO: 38539 - protein, 111 aa, Homo sapiens
  misc_feature (1)...(111): Xaa = X or * as defined in Table 2
FAKNDGFQLHPCPEPLPWSQTRTQSAAWAXGCNYLQPTGAADLLAYFEFLGPEGKTGWXQGLDRDATGAPPSPTARQRVGKALGTAASLIPSFIPLXSKKMARETAAWSEW

SEQ ID NO: 38540 - protein, 413 aa, Homo sapiens
  misc_feature (1)...(413): Xaa = X or * as defined in Table 2
NGGPHLWRLPTAHRRACGERHGQAVACGGAVAEALVGPAPTVGLRRGCPHSAPGGYACPVSSSTYSGLGQRCVFPHYSPRAVPNLVPALGAPKPXMGPASGLXGDMLPAASVKRAPTAAGPWMLYPYSPARLDSAALQALSTKKVASDSSKEQVANSRESSSLSKEVNDSPRAADKSPESQNLIDGTKKTSLKQLDSPRNISSENSIKGTPASPAGSTPPIPKVRIKTTKTSSGEIKRTVTRVLPEVDLDSGKKPSEQTVSVMASVTSLLSSPASAATLSSPARVPLQSAVVTKQFPLQSPPLNRSQSSLWLLLSSQCLLXRQQDPKSLIXSSLTTPRXKPRSYLLPLSRVPAAPSLKLANAIQQQTVMMPASSLANAKLVPKMHLANLNLLPQVAPATSELCPVSIKTQPQI

SEQ ID NO: 38541 - protein, 1124 aa, Homo sapiens
  DOMAIN (1085)..(1102): Zinc finger C2H2 type, domain proteins. domain identified by eMATRIX, accession number BL00028, p-value=8.714e-09, raw score of 16.07
  DOMAIN (574)..(1110): Zinc finger, C2H2 type domain identified by PFam, accession name zf-C2H2, E-value=3.9e-23, PFam score of 90.3
  misc_feature (1)...(1124): Xaa = X or * as defined in Table 2
MIINTIITTTTTITIIFIITIMSSSPITITNIITIIQHHHHHNDQRPSLGKCRGLYIRVRKVPGERATANSRCPINAQGIESCWNGVMALWLGPNSTCSRLPELTDSEDCQIYGDTERKRRHSRKTCRWEYQVETKDTFLEELLFEPALRTGIQSKQGGPLLQLAANNYNLEPKQHFGSWFGTMKQLGETESIFSFAYEVCLTVYEIFGLPGIAPSKTKSFSNFLSCITAIAALSTKKVASDSSKEQVANSRESSSLSKEVNDSPRAADKSPESQNLIDGTKKTSLKQLDSPRNISSENSIKGTPASPAGSTPPIPKVRIKTTKTSSGEIKRTVTRVLPEVDLDSGKKPSEQTVSVMASVTSLLSSPASAATLSSPARVPLQSAVVTKQFPLQSPPLNRSQSSLWLLLSSQCLLXRQQDPKSLIXSSLTTPRXKPRSYLLPLSRVPAGTIIKAANAIQQQTVMMPASSLANAKLVPKTVHLANLNLLPQGAQATSELRQVLTKAQQQIKQAIINAAASQPPKKVSRVQVVSSLQSSVVEAFNKVLSSVNPVPVYIPNLSPPTNAGITLPTRGYKCLECGDSFAVEKSLTQHYDRQSMRIEVTCNHGTKNLIFYNKCSLLSHARGHKEKGVAADTRGQKTCTICQMLLPNQCSYASHQRIHQHKSLYTCPECGAICRSVHFQTHVTKNCLHYMRRVGFRCGAFAMVVYSDVAALQSHIQGSHCEVFYKCPICPMACKSAPSTHSHTYTQHPGIKIGEPEIIYKCSMCDTVFTLQTLLYRHFDQHIENQKLSVFKCPDCYLLYAQKQLMMDHIKSMHGTLKSIEGPPNLGINLPLSIKPATQNSANQNKEDTKSMNGKEKLEKKSPSPVKKSVETKKVASPGWTCWECDRLFIQRDVYISHVRKEQGKQMKKHPCRHLCQHNRIKHKGIRKVYACSHCPDSRRTFTKRLMLEKHVQLMHSLKDPDLKETDRCHQXGGNRNKRRHLSSPVPSGSWKNQFSRCAMCGFTTENLLQFHEHIPQHKSDSSSYQCQECGLWYTSHVSLSRHLFIVHKLKEPQPVSKQNGAGEDNQQENKPSHEDESPNGTVSDRKCKVCVKTFETEAALNTHMRIHGMAFIKSKRMSSAKK

SEQ ID NO: 38542 - protein, 145 aa, Homo sapiens
MGSSRLAALLLPLLLIVIDLSDSAGIGFRHLPHWNTRCPLASHTEVLPISLAAPGGPSSPQSLGVCESGTVPAVCASICCQVAQFVPFRDYVDRSGNQVLSMARLAKDVLAEIPEQLLSYMRTRDIQPRPPPPANPSPIPAPEQP

SEQ ID NO: 38543 - protein, 186 aa, Homo sapiens
  DOMAIN (80)..(95): 5-HYDROXYTRYPTAMINE 2A RECEPTOR SIGNATURE domain identified by eMATRIX, accession number PR00516B, p-value=6.600e-09, raw score of 10.78
  misc_feature (1)...(186): Xaa = X or * as defined in Table 2
VPCGPHCRLPSAWRTSPPRLWNDTTSRKWKSGVAKSSCYNLXPSAGMRRKRFXLRAPSTLSGSALLXNRLMRSRRFCATSSCASXXCEQRTSLSFEGSLWRSTITSRPPPSAARISSASAPTRRRCASESAACRRSTGRAGPGPGGGKQQMKAGRRGTAQPSSPHPLGIPTHHPDTRGASRQTGHL

SEQ ID NO: 38544 - protein, 353 aa, Homo sapiens
MLAKEEVSRQELRQRVRMADNEVMDAFRKIMAARQKKRTPTKKEKDQAWKTLKERESILKLLDGKFCLYPLPHLVGPLLHKALVCASLALFPLFVPASAVRWLSVPHTKSLESRIKEELIAQGLLESEDRPAEDSEDEVLAELRKRQAELKALSAHNRTKKHDLLRLAKEEVSRQELRQRVRMADNEVMDAFRKIMAARQKKRTPTKKEKDQAWKTLKERESILKLLDGVPNALQLTFSNTRDPRSGADLRPVSGPDPRSAPLLALLHAAPRPLLLLAYFSRLCAKGDIPPPLRALPRYRLLRDLPRLLRALDARPFAEATSWGRLGARQRRQSRLELCSRLEREAARLADLG

SEQ ID NO: 38545 - protein, 197 aa, Homo sapiens
  DOMAIN (41)..(68): Protamine P1 proteins domain identified by eMATRIX, accession number BL00048, p-value=7.750e-11, raw score of 6.39
  misc_feature (1)...(197): Xaa = X or * as defined in Table 2
WSSAQPRSASRAASRSSRLHSSRRLCLRCRAPRRPQLVASAKGRASSARSRRGRSRSRRXRGRARSGGGMSPLAQRRLKXASSSSGRGAAWSRASRGAARGSGPLTGRRSAPLHSSSTVPCSPRYARPGPPRATARGPTRATCLPSHRSTITSRPPPSLPVAVQPALPPGAAAPPSPPRAGGALAALGPGLTVGAGR

SEQ ID NO: 38546 - protein, 319 aa, Homo sapiens
  DOMAIN (146)..(281): Similarity to lectin domain of ricin b domain identified by PFam, accession name Ricin_B_lectin, E-value=0.00098, PFam score of 21.1
  misc_feature (1)...(319): Xaa = X or * as defined in Table 2
SRLQQTIQADAFAECAKGCWPGGMDELEAETSSSLFLLAMQVWMCGGRMEDIPCSRVGHIYRKYVPYKVPAGVSLARSKNLKRVAEVWMDEYAEYIYQRRPEYRHLSAGDVAVQKKLRSSLNCKSFKWFMTKIAWDLPKFYPPVEPPAAAWGEIRNVGTGLCADTKHGALGSPLRLEGCVRGRGEAAWNNMQVFTFTWREDIRPGDPQHTKKFCFDAISHTSPVTLYDCHSMKGNQLWKYRKDKTLYHPVSGSCMDCSESDHRIFMNTCNPSSLTQQWLFEHTNSTVLEKFNRNXAALLFDDESQFDSSNCQHSCYPRF

SEQ ID NO: 38547 - protein, 58 aa, Homo sapiens
  misc_feature (1)...(58): Xaa = X or * as defined in Table 2
VPASSPALGSTLEFQLCEPINSGFCLNQIDXGFGYLXARFMSWPYWSLLSPFPLIPLH

SEQ ID NO: 38548 - protein, 335 aa, Homo sapiens
  DOMAIN (189)..(322): Similarity to lectin domain of ricin b domain identified by PFam, accession name Ricin_B_lectin, E-value=0.001, PFam score of 21.0
MAAGSSKASGPTEKGGSHGIFMTVISAVSCGLHRKLSLREVKYLNQSHKVWMCGGRMEDIPCSRVGHIYRKYVPYKVPAGVSLARNLKRVAEVWMDEYAEYIYQRRPEYRHLSAGDVAVQKKLRSSLNCKSFKWFMTKIAWDLPKFYPPVEPPAAAWGEGQRQSMTYSKGFMSFSRRFQGMVPGPPAPESPGMGIRNVGTGLCADTKHGALGSPLRLEGCVRGRGEAAWNNMQVFTFTWREDIRPGDPQHTKKFCFDAISHTSPVTLYDCHSMKGNQLWKYRKDKTLYHPVSGSCMDCSESDHRIFMNTCNPSSLTQQWLFEHTNSTVLEKFNRN

SEQ ID NO: 38549 - protein, 499 aa, Homo sapiens
  DOMAIN (1)..(172): Glycosyl transferases domain identified by PFam, accession name Glycos_transf_2, E-value=0.0021, PFam score of 23.9
  misc_feature (1)...(499): Xaa = X or * as defined in Table 2
CLVVTSTDSIRFQIIPWAGTEMKQEIIKLKDGSMEEHLKKPLEDYMALFPSVRILRTKKREGLIRTRMLGASVATGDVITFLDSHCEANVNWLPPLLDRIARNRKTIVCPMIDVIDHDDFRYETQAGDAMRGAFDWEMYYKRIPIPPELQKADPSDPFECQLVRDTLGDADSQQHDVSHLARCQADFLFPWSPVMAGGLFAVDRKWFWELGGWAFSHGDPQQPWKESLFFPSSCTSPQVESHWPAGPMPIPEQYCNWSPAVTCPVTAGRVCLGWGWRXRKXWGTKDLLGARWKSKPFXSPXTNQDVKPNPHDLIEQFQRKEHFCTESAWLGCPQNGSWLLQSQRSHRERWNHGIFMTVISAVSCGLHGVVCGGRMEDIPCSRNLKRVAEVWMDEYAEYIYQRRPETGHLSAGDVAVQKKLRSSLNCKSFKWFMTKIAWDLPKFYPPVEPPAAAWGEQKDMPLSQYTSKGAGIKSYLGSCTHHWGHRGRQKQGNILIAHQ

SEQ ID NO: 38550 - protein, 159 aa, Homo sapiens
  DOMAIN (95)..(150): Ribosomal protein L18e proteins domain identified by eMATRIX, accession number BL01106B, p-value=1.000e-40, raw score of 27.89
  DOMAIN (23)..(159): Eukaryotic ribosomal protein L18 domain identified by PFam, accession name Ribosomal_L18e, E-value=4.1e-78, PFam score of 272.9
  misc_feature (1)...(159): Xaa = X or * as defined in Table 2
TIMKITGRAGDAIMGADICHNKDRKVRRKEPKSQDIYLRLLVKLYRFLARRTNSTFNQVVLKRLFMSRTNRPPLSLSQMIQKMKLPGRENKTAVVVGTITDDVRVQEVPKLKVCALRVTSRARSLILRAGGKILTFDQLALDSPKGXGTVLLSGPRKGR

SEQ ID NO: 38551 - protein, 77 aa, Homo sapiens
  DOMAIN (1)..(77): Eukaryotic ribosomal protein L18 domain identified by PFam, accession name Ribosomal_L18e, E-value=8.2e-07, PFam score of -14.4
  misc_feature (1)...(77): Xaa = X or * as defined in Table 2
QLCWAGGKILTFDQLAVDSRKGCITVLLSGPLKGRKVYGHFGKAPGTPHSHTKPYVHSKGRKFERARGXRASXGYKN

SEQ ID NO: 38552 - protein, 120 aa, Homo sapiens
  misc_feature (1)...(120): Xaa = X or * as defined in Table 2
MLGFALLPAPPGPGLVGSGXSPDDQGRTGPALAPSCLSRPSPATLNSAGSEIHDRPRSGAPPTPCLRGSAQASTSACSPGANGPEPKPGLGTLRQQLEHIMATNRLDEAGWVACYPTDVR

SEQ ID NO: 38553 - protein, 220 aa, Homo sapiens
  misc_feature (1)...(220): Xaa = X or * as defined in Table 2
MSFRQLFQDLKRYVQDADVRWEYCVRAKRGQTDTSLGRLFQQGPGVPGRHRAHSATSPDHRFPVADLTGQGVLXGCGPPAAPWGAGXYPGAPLHAGLGTLPAAAGAHHGHQPAGXGGAGSPATRLMSVEGCSQRPWTEAPDRPLEHEAVCSVRPRPRCFLGGVGRAGAFLEEEWQHQSVCVPCQPPWGLGTCSSMSGKLSRPPASSSLLSRGKAWGQEES

SEQ ID NO: 38554 - protein, 146 aa, Homo sapiens
  DOMAIN (92)..(129): Adenylate cyclases class-I proteins domain identified by eMATRIX, accession number BL01092N, p-value=1.557e-09, raw score of 13.54
  misc_feature (1)...(146): Xaa = X or * as defined in Table 2
RTSLEFFFFFFFXDGSFTLVAQAGVQWRHLGXLQPRPPGFKXFSYLSLLSSWDYRHALSHLANFVVYVLFCFYETKSRSVTKAGVQWCDLGSLQAPPPGFTPFSCFSLLSSWDYRHLPPHLVNFCIVSRDGVSLCWSGWSRTPDYK

SEQ ID NO: 38555 - protein, 117 aa, Homo sapiens
  misc_feature (1)...(117): Xaa = X or * as defined in Table 2
VSLQPVSQEGVSQRTLGQSSRSSGSGCPGELNSPIFSGVPHRWDAAXEESRAAGVPWPSGQISGMCSKFRIXNWXDVSWAGWSEDLRSXVDLSHGAKSRRTGDXSPKGGPPIRVTAP

SEQ ID NO: 38556 - protein, 79 aa, Homo sapiens
  misc_feature (1)...(79): Xaa = X or * as defined in Table 2
WSTGLLRRSGSNQSSAGKPRRSQSESPGPGSRSSGSGCQESGTCHXGXRRRGXGVLAPAPGKRDLPPRVKDQVRHPCVV

SEQ ID NO: 38557 - protein, 93 aa, Homo sapiens
  misc_feature (1)...(93): Xaa = X or * as defined in Table 2
AKKESVREPWARVPGALGVAARXVEQSDFQCGPAQMGHGLGGIPGCGPFLGLVVRFLALVASSCPFPRKAGLAAKGEGPRQASLRGLTPLKRG

SEQ ID NO: 38558 - protein, 100 aa, Homo sapiens
  misc_feature (1)...(100): Xaa = X or * as defined in Table 2
LSREGVGQKALGQSSRGSGSVCLGELNSPISSGVPQRWDTAXEESWAAGIPWPGGQIDFWHLXQAPCPRKSREGVETRREGVGVLAPSPEKRDLPLRVKD

SEQ ID NO: 38559 - protein, 66 aa, Homo sapiens
  misc_feature (1)...(66): Xaa = X or * as defined in Table 2
LSPKGVSQRALGQSSRGSGSGCPGELNSPISSGVPHRWDTAXEESWAAGIPWPGGQISGTCSKLHS

SEQ ID NO: 38560 - protein, 54 aa, Homo sapiens
ELPKARCPWWSTGLLRRSGSVSFQTLSPEGVSQRALGQSSRGSGSGCQQTVLMI

SEQ ID NO: 38561 - protein, 587 aa, Homo sapiens
  DOMAIN (525)..(542): Zinc finger, CCHC class domain identified by PFam, accession name zf-CCHC, E-value=0.002, PFam score of 24.8
MGCLGTQRAPRAFLLLPLPLHFAQLSNLTQLQAAASLSMVTHRSSGGGGERGATAAGTEQGGACLAASLLRGLWDAGEVTPIRVRVRPYDPFTLAPLHEHSEAQCVASPSLTVTKEKSLLPKSLLAGSREVARSRALCHGQARPPPRPQVTQQRTQLQGQRILQWRPATEGPHSPRRGSDSAKGTHPPTTGTCPPRRRQGAGYSRYNSGESRRRLGRQQDLVARSDEQRDPAPATRREDKMIEELQPFGEHRPRRSPSQGCDTLFQALWFLASPSFQRGGQLQVLALCKAAAGPGAPQAASTAGTREHGYAWKLGDTRNHRALKRKSQTWLRRFPAGCPDVCSALADLRAFMGLRGEEVCADWSMGGHGSGECRRGTGGQRAVVPKSPVQEKGKEPLSLLQYFMVDEKERFLRITSEHEDNDNSNNSSNHSSINETKETCFIHEPKTPAPVTDWEGSLPLVFNHCRDASLIIHSCFKGVRPHRDACLGPSPLVASPAFLGQGQVPLNPFSFTLSGKSHFPGTGARTCYKCQKSDHQAKECLRPRIPPKPCPICAGPHWKSDCSTHLAATPRAPGTLAQGSLTDSFSA

SEQ ID NO: 38562 - protein, 252 aa, Homo sapiens
  DOMAIN (127)..(144): PROKARYOTE METALLOTHIONEIN SIGNATURE domain identified by eMATRIX, accession number PR00859C, p-value=7.039e-09, raw score of 7.06
  misc_feature (1)...(252): Xaa = X or * as defined in Table 2
LRRGRTYPPPXELPKARHPXWSTGLLRRSGSISLQPVSQEGVSQRAFGQSSRGSGSGSPGELNSLISSGVPHRWDMAXEESWAAGIPWPGGQISGTCSRAPGGGGSGGMPGCCGSGVWKFLCASRKAGKGSGHRDTRSGCGHKGLGRRDMRLGCGNKGSGHRDIRGWGTCPFPRKAGLAAKGEGPRQASLRGLTPDLKLVRCPWAGWSEDLRSXVDLSHGAKNRRTGDXSPKGGPPILGRPLRACSAAAVHF

SEQ ID NO: 38563 - protein, 148 aa, Homo sapiens
  misc_feature (1)...(148): Xaa = X or * as defined in Table 2
SGSISLQPLSREGVSQRALGQSSRGSGSGCPGELNSPISSGVPHRWDTAXEESWAAGIPWPGGQISGTCSRAPVGGGSGGTPGRCGSGVWKFLCAGDVAGVCLTVEARNCNFFLLLYTLKARLIKSCPCPRKAGLAAKGEGPRQASLQ

SEQ ID NO: 38564 - protein, 352 aa, Homo sapiens
  misc_feature (1)...(352): Xaa = X or * as defined in Table 2
MEARETGPWKEGNVERVASVLIKKGTGLPSTVRVTGSSASVMVYGASEAIGQHQSSAAKPRRSQSESLGPEFQGLWEWLPGPRAVKRLRVIFDEKEPKRYLIWDKEKGALTLTMPLAPATFLRVNCWAGGGGLVTERNCKPXWSTGLPRRSGSISLQPLSREGVSQRALGQSSRGSGSGCQGLGLXSVLIKKGTGLPSTVRVTGSSASVMVYGASEAIGQHQSSAAKPRRSQSESLGPEFQGLWEWLPGPRAVKRLRVIFDEKEPKRYLIWDKEKGALTLTMPLAPATFLRVNCWAGGGGLVTERNCKPDQKMKGIEIKRRERLKCGSKIERRKRLRDSEGGWRRVEAAYRI

SEQ ID NO: 38565 - protein, 204 aa, Homo sapiens
  DOMAIN (7)..(31): HMW KININOGEN SIGNATURE domain identified by eMATRIX, accession number PR00334B, p-value=2.980e-10, raw score of 8.69
  misc_feature (1)...(204): Xaa = X or * as defined in Table 2
KCFPACHHYHNHHHHHYHHHHQHHHHYHHHHHHRITIIIITIIFTIITTIIINIIINIIITNITIVIFMRVRVKRPPNRLCVSNMAVYFTWVQKKKSSLAFSSVVTSDLKSKKRRLSGKSLETSSASLMVYGASEATGQRQSSAAKPRRSQSESLGPEFQGLREWXYGDGGDDDNDDGVDGGDDSGGGGGCGSGGKQESISIFD

SEQ ID NO: 38566 - protein, 169 aa, Homo sapiens
  misc_feature (1)...(169): Xaa = X or * as defined in Table 2
AEKESVREPRARVPGARGVAARPSARPRXGRPLLCSPTYPKHXNCAWHQQAGCWLGTGPAAPASPPACAAFSWGYGGLPAPIQTAFQAGWGAPGQRGRSKTTRPGVQSVSNPGEPAPEPRAAASSGLSSGAFPAPATDPGICSWAEGLVMGKGHHHRPSISARIPCFHV

SEQ ID NO: 38567 - protein, 251 aa, Homo sapiens
  DOMAIN (189)..(206): Zinc finger, CCHC class domain identified by PFam, accession name zf-CCHC, E-value=0.029, PFam score of 18.0
MKPRTLAVSVTVLKDGVSGVCSFRCPDVSRASSFRWVHGLADFRSEAADLHKSRFSGLGSQVSRPSVHLQLLSVSVLCTAKVIEVVETKETCFIREPKTPAPVMDWEGSLPLVFNHCRDASLMIHSRFKGVRPRRDACLGPSPLAASPAFLGQGQVPLNPFSFTLSAHKNFQTPEPQQPGVPPEPPPPGACYKCPKSDHQAEECLQPRIPPKPCPICAGPHWKSDCSTHLAATPRAPGTLAQGSLTDSFSA

SEQ ID NO: 38568 - protein, 603 aa, Homo sapiens; identical to SEQ ID NO: 31013
  DOMAIN (212)..(259): kw TRANSCRIPTASE REVERSE II ORF2 domain identified by eMATRIX, accession number DM01354V, p-value=1.000e-40, raw score of 12.97
  DOMAIN (18)..(225): Reverse transcriptase domain identified by PFam, accession name rvt, E-value=3.4e-05, PFam score of 4.1

SEQ ID NO: 38569 - protein, 345 aa, Homo sapiens; identical to SEQ ID NO: 36807
  DOMAIN (30)..(68): Ribosomal protein L21e proteins domain identified by eMATRIX, accession number BL01171, p-value=9.719e-36, raw score of 19.94
  DOMAIN (2)..(100): Ribosomal protein L21e domain identified by PFam, accession name Ribosomal_L21e, E-value=1.8e-62, PFam score of 220.9

SEQ ID NO: 38570 - protein, 219 aa, Homo sapiens
  DOMAIN (26)..(138): Ribosomal protein L21e domain identified by PFam, accession name Ribosomal_L21e, E-value=4.7e-06, PFam score of 24.9
  misc_feature (1)...(219): Xaa = X or * as defined in Table 2
SLIKLIPPPRPFGRNRHLPVIRQNERTQRGKRRGTRYMFSRPFXRKHGVVPLATYLCEIYKQRCDFVDIQGEWGTCSKKGMPHHKCYHGKTGRSLTIVTPACLLPLFNTTQFRRKILAKRINVRIEHIXALLRARDXLPXNRVKENDQEKERSPKRKGTWGSTXSRQPAPPREAHFLEEPNGEGALSCWEPFPYWISLGLLGVKKKNKKDLWATKKKKK

SEQ ID NO: 38571 - protein, 248 aa, Homo sapiens
  DOMAIN (189)..(204): G-PROTEIN BETA WD-40 REPEAT SIGNATURE domain identified by eMATRIX, accession number PR00320A, p-value=9.780e-09, raw score of 16.74
  misc_feature (1)...(248): Xaa = X or * as defined in Table 2
MSESFLKPLPEVDAGAILLVQPAELYSKASRLDDCYQKDSYTHRCQEKRTCHTTGGHSGKHQSLSGASVSPTCSAKTRDKINCFDFSPKSEVITLSSNDDSIVLSDCQEGKPKPCSGPFATFKMQYDRTCEWTALKISNGGKLILISTNVSFIRLIGAFKGVVIHTFGSYANSEAVTLEASFTADSQFVMIGSEDGKIHVWNEESGKKXLGWMVNTQAQLPVCNSTPSSMTFASACSNMAFWLPTIDD

SEQ ID NO: 38572 - protein, 71 aa, Homo sapiens
  misc_feature (1)...(71): Xaa = X or * as defined in Table 2
MGLSKSKEKPRKGEEQKKGSTYSVPKSKEKLMEKHSQEARQADRESEKPVDSLHPGAGTAKHPPPAASLEX

SEQ ID NO: 38573 - protein, 180 aa, Homo sapiens
  misc_feature (1)...(180): Xaa = X or * as defined in Table 2
EVWGPGLASEGAVGITHGPFPKAKRNPGKVRSKRRDPPIQFQNLRRSXWRSIPRKPGRQTGSRRSLWTALHPGAGTAKHPPPAACAGRETXCKSKSPAGRKWSFHRSSSRRASEXDASQFAVPAGVTSREPFGSRRTGAPTGGTGTPTRTARSRTWSSSWVRLSGRTGAVGYSRSPSCSS

SEQ ID NO: 38574 - protein, 19 aa, Homo sapiens
MPVRIPTSNLRLQITARTT

SEQ ID NO: 38575 - protein, 139 aa, Homo sapiens
QQNIIFAQDMCGRDAEDYAISHHLTKIQQQILEHKKKTLKTEKSDVGSSDESAVSIFHELHVDSLPASDDKDLNIATKCVPEKVSEPLPGPSHEKGNRIVDGQGEGPPAKHPSLKPSTEVEDPAVKGAVQRKNVQTLRA

SEQ ID NO: 38576 - protein, 158 aa, Homo sapiens
  misc_feature (1)...(158): Xaa = X or * as defined in Table 2
GIHTRLNSELLKEEESNKRLEAEIEYQSRLTAAISKHSESVKTERNVKLALEXTQDVSVQVKMSSDISEVEDKNEFLTEQLSKKQIKFNTLKDKFRKKRDTLRKKSLALETLQNDLSQTQQQIKEMKEMYENAEAKVNNSTGKWSCVEERICQLQHEN

SEQ ID NO: 38577 - protein, 173 aa, Homo sapiens
IFRAPFRICLGILLSPPNTEQAQYKKQLEQFKQGYNTASLNKKELTLKDVECKFYKMKTAYEEVTTELEEYKEAFAAALKANSSMLKKLTKSNKKIAMISTQLFMEKEQVKYFLSTLRARRGRESPCDENLTSIGLNRKYIPQMPVRIPTSSPQTSNNCQNYLTEVSHMTVSL

SEQ ID NO: 38578 - protein, 893 aa, Homo sapiens
  DOMAIN (124)..(171): Intermediate filaments proteins domain identified by eMATRIX, accession number BL00226D, p-value=2.179e-10, raw score of 19.10
  misc_feature (1)...(893): Xaa = X or * as defined in Table 2
NGRSCCERSSTKKECTDIESSEFVNRKSLTSGLEEEQQRRERSEKKQPQDFHNHEEVKDLMDENCILKTDIAIPRQEICTMKNDNLEKENKYLKDIKIAKGTNAALENCIKLNEEMITKTAFRYQQELNDLKAENTRLNSELLKEKESKKKLEAEIESYQSRLAAAISKHSENVKTERNLKLALERTQDVFEQPAGLEEAELVLSRLSCGEATEGAARRALAAEEAGRWRRGVGDSWLAPESRLHVLKTCGSCWWENLELGRHHXLCLWAVKNFQKRFLPGQKKSPFQLMSPQREFQHTLXITQKQNRVMNNFIKKYLRLMSSVXCMPLTIKHSIDKEVRSTSARLPCLGSEERICPAALSGKYKKLLEMTINVLSVFGNEDFDCHGDLKTDQLKMNILIKKLKHKFDDLTAEKEAVSSKCVDLAKDNQVLQQELLSMKKVQQQCEKLEKDKKMLEEEILNLKTHMEDNMVELSKLQEYKSELDERAMTAVEKLEEIHLQLNKGNTASLNKKELTLKDVECKFSKMKTTYEEVTTKLEEYKEAFAVALKANNSMSKKLTKSNKKIAMISTKLLMEKEWVKYFLSTLPTRRGQESPCVENLTSIVLNSKYIPKMTGRIPTSNPXTLNNWQNYLTEEDMVSGDLISGTWSMEEWSLGASSLGTWSAAVGQYLARWPLCDLSVTVAESPSPLCCGAVRDTQQCREWLCVKDRFLDERHISTQLTDQTQGFYSTVGFLDAKRQTTGHLEKDLVLPGLIGKELTDSVEGIYGEVGSMFKCRKGPIWWMNHTASFWMQAQCHIFCHFLMRPTSTEETAWRQGKRKAEKDELSRQDLDPAMDLLVLSQGHQTNILDIIHIHKEALTKVTESKQQVAEGNIKVQRLMMSESQEQDFFGHFG

SEQ ID NO: 38579 - protein, 69 aa, Homo sapiens
LKHLAIQCHWSQRPPVIGDVLQGYSGSEGRAIIFCETKKNVTEMAMNPHIKQVRLFFMLSLIEIMGMNH

SEQ ID NO: 38580 - protein, 477 aa, Homo sapiens
  DOMAIN (88)..(134): DEAD-box subfamily ATP-dependent helicases proteins domain identified by eMATRIX, accession number BL00039D, p-value=7.623e- 22, raw score of 21.67
  DOMAIN (47)..(130): Helicases conserved C-terminal domain identified by PFam, accession name helicase_C, E-value=5.6e-23, PFam score of 89.8
MTQKAAASVEHLAIRCHWSQRPAVTGDVLQVYSGSEGTAIIFCETQRSVTEIAMNPHIKQNAQCLHGDIAQSQREFTLKDFREGSFKVLVATNVAACGLDIPEVDLVIHGSPPQDVESYIHRSGRTGFVTMTLESLEEIQDVSCAWKELNRKLSSNAVSQITRMCLLKGNVRVCFDVPTTKSERLQAEWHDSDWIFSVPAKLPEIEEYYDRNTSSNSRQRSGWSSGQSGRSGGRSGSRNYFAVDTASAIAIALMTFGTMYPMSVYSGKVLLQTTPPHVIGQLDKLIREVSTLDGVLEVRNEHFWTLGFGSLAGSVHVRIRRDANEQMVLAHVTNRLYTLVSTLTVQIFKDDWIRPALLSGPVAANVLNFSDHHVIPMPLLKGTDDLNPVTSTPAKPSSPPPEFSFNTPGKNVNPVILLNTQTRPYGFGLNHGHTPYSSMLNQGLGVPGIGATQGLRTGFTNIPSRYGTNNRIGQPRP

SEQ ID NO: 38581 - protein, 248 aa, Homo sapiens
  DOMAIN (161)..(207): DEAD-box subfamily ATP-dependent helicases proteins domain identified by eMATRIX, accession number BL00039D, p-value=3.824e- 23, raw score of 21.67
  DOMAIN (12)..(98): DEAD/DEAH box helicase domain identified by PFam, accession name DEAD, E-value=3.9e-28, PFam score of 91.8
  misc_feature (1)...(248): Xaa = X or * as defined in Table 2
XQINHIRNGIDILVGTPGRIKDHLQSGRLDLSKLRHVVLDEVDQMLDLGFAEQVEDIIHESYKTDSEDNPQTLLFSATCPQSVYTVAKKYMRSRYEQVDLVGKMTQKAATTVEHMAIQCHWSQRPAVIGDVLKNAQCLHGDIAQSQREITLKGFREGSFKVLVATNVAARGLDIPEVDLVIQSSPPQDVESYIHRSGRTVPSPNSLKLKKYYDGNTSSNSQTRGVAGPIGRIRPVQAVQLVESGGRSX

SEQ ID NO: 38582 - protein, 206 aa, Homo sapiens
  DOMAIN (129)..(174): kw TRANSCRIPTASE REVERSE II ORF2 domain identified by eMATRIX, accession number DM01354N, p-value=1.000e-40, raw score of 13.17
MATKSLEMPETTEAKEILQPWLVKTLGLGFPEGHLFSHLLVTCNMVIMAPSRSHNFPPKSEQTPGVEKCQTVGAGPTEPAGKKRKPSSLKSTWIPGSGSVAGQLQLCPGAWDFHPSNLVKEIQTTIREYYKHLYANKLENLEEMDKFLDTYTLPRLNQEEVESLNRLITGSEIVAIINSLQPKRVQDQTDSQPNSSRGTRSWYHSF

SEQ ID NO: 38583 - protein, 110 aa, Homo sapiens
  misc_feature (1)...(110): Xaa = X or * as defined in Table 2
LFHSIFGYLPFARQTLLPGSILVFTYTQPPKIQFANGTKGLPDPLMTPKXQKAPLMPLLVSLGLSASTIALGTRIAGISTSVTTFCSLSNDFSASFSPYLHRCFLPWSSL

SEQ ID NO: 38584 - protein, 973 aa, Homo sapiens
  DOMAIN (322)..(336): C2H2-TYPE ZINC FINGER SIGNATURE domain identified by eMATRIX, accession number PR00048A, p-value=7.158e-11, raw score of 10.52
  DOMAIN (238)..(570): Zinc finger, C2H2 type domain identified by PFam, accession name zf-C2H2, E-value=3.8e-38, PFam score of 140.2
VHLPRSRRILDEFYNVKFCIDASQPDVGSWLKYIRFAGCYDQHNLVACQINDQTVTLKTNMGYFFFGETKGTATSSPHSELESTGAILDDKEDAYFTEIRNFIGNSNHGSQSPRNVEERMNGSHFKDEKALVTSQNSDLLDDEEVEDEVLLDEEDEDNDITGKTGKEPVTSNLHEGNPEDDYEETYAYAMMLSLSDKESLHSTSHSSSNVWHTFSMVEEDFQQKLESENDLQEIHTIQECKECDQVFPDLQSLEKHMLSHTEEREYKCDQCPKAFNWKSNLIRHQMSHDSGKHYECENCAKVFTDPSNLQRHIRSQHVGARAHACPECGKTFATSSGLKQHKHIHSKIIIEDKMPNASWSCAFTFQMSAIENMAEKLESFSALKPEASELLQSVPSMFNFRAPPNALPENLLRKGKERYTCRLEIEERMKFWLRQASLSRRHSCRDLIVGKKSSMNDLDESVADANTVTDHLAYLLTCKGMFATSTIKRSHLSVTYVIGVLVQQTNLDRHLKKHENGNMSGEVCHKSYTQFSNLCRHKRMHADCRTQIKCKDCGQMFSTTSSLNKHRRFCEGKNHFAAGGFFGQGISLPGTPAMDKTSMVNMSHANPGLADYFGANRHPAGLTFPTAPGFSFSFPGLFPSGLYHRPPLIPASSPVKGLSSTEQTNKSQSPLMTHPQILPATQDILKALSKHPSVGDNKPVELQPERSSEERPFEKISDQSESSDLDDVSTPSGSDLETTSGSDLESDIESDKEKFKENGKMFKDKVSPLQNLASINNKKEYSNHSIFSPSLEEQTAVSGAVNDSIKAIASIAEKYFGSTGLVGLQDKKVGALPYPSMFPLPFFPAFSQSMYPFPDRDLRSLPLKMEPQSPGEVKKLQKGSSESPFDLTTKRKDEKPLTPVPSKPPVTPATSQDQPLDLSMGSRSRASGTKLTEPRKNHVFGGKKGSNVESRPASDGSLQHARPTPFFMDPIYR

SEQ ID NO: 38585 - protein, 1396 aa, Homo sapiens
  DOMAIN (154)..(177): ACUTE MYELOID LEUKEMIA 1 PROTEIN SIGNATURE domain identified by eMATRIX, accession number PR00967F, p-value=1.250e-30, raw score of 17.64
  DOMAIN (42)..(211): Runt domain identified by PFam, accession name Runt, E-value= 1.3e-124, PFam score of 427.4
MRIPVDASTSRRFTPPSTALSPGKMSEALPLGAPDAGAALAGKLRSGDRSMVEVLADHPGELVRTDSPNFLCSVLPTHWRCNKTLPIAFKVVALGDVPDGTLVTVMAGNDENYSAELRNATAAMKNQVARFNDLRFVGRSGRGKSFTLTITVFTNPPQVATYHRAIKITVDGPREPRNNECVYGNYPEIPLEEMPDADGVASTPSLNIQEPCSPATSSEAFTPKEGSPYKAPIYIPDDIPIPAEFELRESNMPGAGLGIWTKRKIEVGEKFGPYVGEQRSNLKDPSYGWEILDEFYNVKFCIDASQPDVGSWLKYIRFAGCYDQHNLVACQINDQIFYRVVADIAPGEELLLFMKSEDYPHETMAPDIHEERQYRCEDCDQLFESKAELADHQKFPCSTPHSAFSMVEEDFQQKLESENDLQEIHTIQECKECDQVFPDLQSLEKHMLSHTEEREYKCDQCPKAFNWKSNLIRHQMSHDSGKHYECENCAKQVFTDPSNLQRHIRSQHVGARAHACPECGKTFATSSGLKQHKHIHSSVKPFIWEVCHKSYTQFSNLCRHKRMHADCRTQIKCKDCGQMFSTTSSLNKHRRFCEGKNHFAAGGFFGQGISLPGTPAMDKTSMVNMSHANPGLADYFGANRHPAGLTFPTAPGFSFSFPGLFPSGLYHRPPLIPASSPVKGLSSTEQTNKSQSPLMTHPQILPATQDILKALSKHPSVGDNKPVELQPERSSEERPFEKISDQSESSDLDDVSTPSGSDLETTSGSDLESDIESDKEKFKENGKMFKDKVSPLQNLASINNKKEYSNHSIFSPSLEEQTAVSGAVNDSIKAIASIAEKYFGSTGLVGLQDKKVGALPYPSMFPLPFFPAFSQSMYPFPDRDLRSLPLKMEPQSPGEVKKLQKGSSESPFDLTTKRKDEKPLTPVPSKPPVTPATSQDQPLDLSMGSRSRASGTKLTEPRKNHVFGGKKGSNVESRPASDGSLQHARPTPFFMDPIYRVEKRKLTDPLEALKEKYLRPSPGFLFHPQMSAIENMAEKLESFSALKPEASELLQSVPSMFNFRAPPNALPENLLRKGKERYTCRYCGKIFPRSANLTRHLRTHTGEQPYRCKYCDRSFSISSNLQRHVRNIHNKEKPFKCHLCDRCFGQQTNLDRHLKKHENGNMSGTATSSPHSELESTGAILDDKEDAYFTEIRNFIGNSNHGSQSPRNVEERMNGSHFKDEKALVTSQNSDLLDDEEVEDEVLLDEEDEDNDITGKTGKEPVTSNLHEGNPEDDYEETSALEMSCKTSPVRYKEEEYKSGLSALDHIRHFTDSLKMRKMEDNQYSEAELSSFSTSHVPEELKQPLHRKSKSQAYAMMLSLSDKESLHSTSHSSSNVWHSMARAAAESSAIQSISHV

SEQ ID NO: 38586 - protein, 682 aa, Homo sapiens
  DOMAIN (85)..(102): Zinc finger C2H2 type, domain proteins. domain identified by eMATRIX, accession number BL00028, p-value=4.150e-13, raw score of 16.07
  DOMAIN (26)..(572): Zinc finger, C2H2 type domain identified by PFam, accession name zf-C2H2, E-value=1.2e-49, PFam score of 178.4
MKSSFVWVTRVCLEKHMLSHTEEREYKCDQCPKAFNWKSNLIRHQMSHDSGKHYECENCAKVFTDPSNLQRHIRSQHVGARAHACPECGKTFATSSGLKQHKHIHSSVKPFICEVCHKSYTQFSNLCRHKRMHADCRTQIKCKDCGQMFSTTSSLNKHRRFCEGKNHFAAGGFFGQGISLPGTPAMDKTSMVNMSHANPGLADYFGANRHPAGLTFPTAPGFSFSFPGLFPSGLYHRPPLIPASSPVKGLSSTEQTNKSQSPLMTHPQILPATQDILKALSKHPSVGDNKPVELQPERSSEERPFEKISDQSESSDLDEAPTPQREMEPQSPGEVKKLQKGSSESPFDLTTKRKDEKPLTPVPSKPPVTPATSQDQPLDLSMGSRSRASGTKLTEPRKNHVFGGKKGSNVESRPASDGSLQHARPTPFFMDPIYSIIFEDSQKNSRKVRLSGCKYAEETFRHLTLGCEGFERTLNLTATQLQTAATDDAGMQSSRRKEAGSLSDCVEQSCLAILNNILLDFRCKYCDRSFSISSNLQRHVRNIHNKEKPFKCHLCDRCFGQQTNLDRHLKKHENGNMSGTATSSPHSELESTGAILDDKEDAYFTEIRNFIGNSNHGSQSPRNVEERMNGSHFKDEKALVTSQNSDLLDDEEVEDEVLLDEEDEDNDITGKTGKEPVTSNFT

SEQ ID NO: 38587 - protein, 25 aa, Homo sapiens
GLLGDPPTSASQSAGITGVSHRAQP

SEQ ID NO: 38588 - protein, 163 aa, Homo sapiens
  misc_feature (1)...(163): Xaa = X or * as defined in Table 2
ATMPGHFYLFCETGSNSVSQAGVQXHDFGSLQPPPPGFKQFSCLSLLSSWDYRHMPPRPANFSVFLVEMGFYHVGQAGLGLLTSGDPPASASQSVGITGMSHHAGPTMKLLNPQSEVIFSPRNSHSTLLTPLSRHLPHPISISTWCIHYAPLHTVSISAEEAP

SEQ ID NO: 38589 - protein, 696 aa, Homo sapiens
PTQSTRRIATVSIAAAVAPLTLFLYRGDGGLSSRRRADAAAGALCGEVAVKPPINPFTEFMEKAVNDGSHSEELFCHLKTISEKEDLPRCTSESHLSCLKQDILNEKTELEATLKEAELVTHSVELLLPLFKDTIEKINFENANLSALNLKISEQKEILIKELDTFKSVKLALEHLLRKRDYKQTGDNLSSMLLENLTDNESENTNLKKKVFEKEAHIQELSCLFQSEKANTLKANRFSQSVKVVHERLQIQIHKREAENDKLKEYVKSLETKIAKWNLQSRMNKNEAIVMKEASRQKTVALKKASKVYKQRLDHFTGAIEKLTSQIRDQEAKLSETISASNAWKSHYEKIVIEKTELEVQIETMKKQIINLLEDLKKMEDHGKNSCEEILRKVHSIEHENETLNLENTKLKLRFPCRITESKNMNILIVLDMLCYISSEKTTLAALKDEVVSVENELSELQEVEKKQKTLIEMYKTQVQKLQEAAEIVKSRCENLLHKNNQITKTKNKNVEKMRGQMESHLKELERVCDSLTAAERRLHECQESLQCCKGKCADQEHTIRELQGQVDGNHNLLTKLSLEEENCLIQLKCENLQQKLEQMDAENKELEKKLANQEECLKHSNLKFKEKSAEYTALARQLEAALEEGRQKVAEEIEKMSSRESALQIKILDLETELRKKNEEQNQLVCKMNSDPETP

SEQ ID NO: 38590 - protein, 606 aa, Homo sapiens
  misc_feature (1)...(606): Xaa = X or * as defined in Table 2
MMTKDGLVFGLQRGSPILYVQGLSRFRSFSVASGDSKRTRHREKLPLLEAGERDHNCYGSPQILAFQAICKIAKPGKEQSCSKLVGHTFDPLLIEARKPEERQKLPDPCVKWGGVGNFPPVKRVGDIRIFVSQGGKFSQAPEGPEVTSGSQGLESKTLEVYPVFYCTVAELALNHNVQPSHSTLPFPQAEEPHSVATTTGPWGVLPGCCQCSLKAQGLFSQLVMNAACTGIHTSGQWAPLWPSTVPEMPSKSSGLESGTPRTCFVLYPAVAKLLPRGTLAYSGKGCQNSSANHWDGTQIHSPCHAAAAREYGGKSGISDSRLSPTLFSASFSNMNLKLDFKVFKYGCFECFEATAGANVLIKIIRESKYKNTDDIDILSRQATPVIAQLAHEHSGHVAGMEVVFGFSNTDFHLPRQTWLQPLSHASLLAAETNTESKNDTTPQGDQPATWRLNSGYGYAFPACNASAKTIHGLTEVLYTVLVDGNHNLLTKLSLEEENCLIQLKCENLQQKLEQMAAEXKSLRRKRATQEECLMHSNLKFKEKSAEYTALARQLEAALEEGRQKVAEEIEKMSSRESALQIKILDLETELRKKNEEQNQLVFKNEQ

SEQ ID NO: 38591 - protein, 1700 aa, Homo sapiens
  DOMAIN (483)..(496): GLIADIN domain identified by eMATRIX, accession number DM00406, p-value=8.541e-10, raw score of 7.73
MDESSVHSSVGDRHVDRVSTSQVAERTRCNKMWRIETKSPSGDNEGTGTVIEKKTRLSGQGFCLQLSEGLQNLQAQRRKIKFREMEDPSSRPLCSSLDIALCASVKPSAGFPQRPKVKPLCVLGSGAGTGDAERSLQSSDPLKKQQPLARSLRGLCERIVLGGGSGCGARGLRGAGGGTALSVPGASRGFEGMFGLDQFEPQVNSRNAGQGERNFNETGLSMNTHFKAPAFHTGGPPGPVDPAMSALGEPPILGMNMEPYGFHARGHSELHAGGLQAQPVHGFFGGQQPHHGHPGSHHPHQHHPHFGGNFGGPDPGASCLHGGRLLGYGGAAGGLGSQPPFAEGYEHMAESQGPESFGPQRPGNLPDFHSSGASSHAVPAPCLPLDQSPNRAASFHGLPSSSGSDSHSLEPRRVTNQGAVDSLEYNYRARRPRDILTCFRPLTPKGSCLIMQRVARFLGGAFPGASAMPRAAGMVGLSKMHAQPPQQQPQQQQQPQQQQQQHGVFFERFSGARKMPVGLEPSVGSRHPLMQPPQQAPPPPQQQPPQQPPQQQPPPPPGLLVRQNSLPACAPSAPAGRGGHAQRRPAGRRPHAAQPARAIRVSHPPAGEPEHAPLFRACFQHAASSSAAGAQPAAAAFRRAPLHERGQEARFDFPGSAGVDRCASWNGSMHNGALDNHLSPSAYPGLPGEFTPPVPDSFPSGPPLQHPAPDHQSLQQQQQQQQQQQQQQQQQQQQQQQQQQQQRQNAALMIKQMASRNQQQRLRQPNLAQLGHPGDVGQGGLVHGGPVGGLAQPNFEREGGSTGAGRLGTFEQQAPHLAQESAWFSGPHPPPGDLLPRRMGGSGLPADCGPHDPSLAPPPPPGGSGVLFRGPLQEPMRMPGEATCRAAFTGLQFGGSLGGLGQLQSPGAGVGLPSAASERRPPPPDFATSALGGQPGFPFGAAGRQSTPHSGPGVNSPPSAGGGGGSSGGGGGGGAYPPQPDFQPSQRTSASKLGALSLGSFNKPSSKDNLFGQSCLAALSTACQNMIASLGAPNLNVTFNKKNPPEGKRKLSQNETDGAAVAGNPGSDYFPGGTAPGGPRTRRPSGTSSSGSKASGPPNPPAQGDGTSLSPNYTLESTSGNDGKPVSGGGGRGRGRRKRDSGHVSPGTFFDKYSAAPDSGGAPGVSPGQQQASGAAVGGSSAGETRGAPTPHEKALTSPSWGKGAELLLGDQPDLIGSLDGGAKSDSSSPNVGEFASDEVSTSYANEDEVSSSSDNPQALVKASRSPLVTGSPKLPPRGVGAGEHGPKAPPPALGLGIMSNSTSTPDSYGGGGGPGHPGTPGLEQVRTPTSSSGAPPPDEIHPLEILQAQIQLQRQQFSISEDQPLGLKGGKKGECAVGASGAQNGDSELGSCCSEAVKSAMSTIDLDSLMAEHSAAWYMPADKALVDSADDDKTLAPWEKAKPQNPNSKEGLSEPVLRTTYGHGDEELYFLPTDAGDKNQLCVLPPHGRHQLPATLLDYDDDDDDDDDDGNGDSDSSIHGAIAKYQTLMICPFRVEAELLFAGQAMQPTRGSSEALQGTPLCQSKMCEHIPEASKPAASGIITIMVAGARGAICQQGEKYAHLRVGVLEKHRHGADSQGSPYAEGFPAVISLNPPSSLQAHDLPANKASASQPGSHLQCLSVHCTDDVGDAKARASVPTWRSLHSDISNRFGTFVAALT

SEQ ID NO: 38592 - protein, 261 aa, Homo sapiens
MRAIANDEDISDSLKVTARIFIDQEHGLSTYWVPGLQPPLMRTWTSDITSLSLRFKVRDCAQLTPMQSPSPAMKQCVGTYVDEEIEAQRSQFPQNRRAVLLHKHAGNTTIRRKSKMCEHIPEASKPAASGIITIMVAGARGAICQQGEKYAHLRVGVLEKHRHGADSQRRGEHLARSTQGALDMGSCWALSFFPNTPGFPSAHDLPANKASASQPGSHLQCLSVHCTDDVGDAKARASVPTWRSLHSDISNRFGTFVAALT

SEQ ID NO: 38593 - protein, 1342 aa, Homo sapiens
  DOMAIN (315)..(328): GLIADIN domain identified by eMATRIX, accession number DM00406, p-value=8.541e-10, raw score of 7.73
LAGGAPRRAGCHALLIPLCPPPSMFGLDQFEPQVNSRNAGQGERNFNETGLSMNTHFKAPAFHTGGPPGPVDPAMSALGQPPILGMNMEPYGFHARGHSELHAGGLQAQPVHGFFGGQQPHHGHPGSHHPHQHHPHFGGNFGGPDPGASCLHGGRLLGYGGAAGGLGSQPPFAEGYEHMAESQGPESFGPQRPGNLPDFHSSGASSHRVPAPCLPLDQSPNRAASFHGLPSSSGSDSHSLEPRRVTNQGAVDSLEYNYRARRPRDILTCFRPLTPKGSCLIMQRVARFLGGGFPGAPSAMPRAAGMVGLSKMHAQPPQQQPQQQQQPQQQQQHGVFFERFSGARKMPVGLEPSVGSRHPLMQPPQQAPPPPQQQPPQQPPQQQPPPPPGLLVRQNSLPACAPSAPAGRGGHAQRRPAGRRPHAAQPARAIRVSHPPAGEPEHAPLFRACFQHAASSSAAGAQPAAAAFRRAPLHERGQEARFDFPGSAGVDRCASWNGSMHNGALDNHLSPSAYPGLPGEFTPPVPDSFPSGPPLQHPAPDHQSLQQQQQQQQQQQQQQQQQQQQQQQQQQQQRQNAALMIKQMASRNQQQRLRQPNLAQLGHPGDVGQGGLVHGGPVGGLAQPNFEREGGSTGAGRLGTFEQQAPHLAQESAWFSGPHPPPGDLLPRRMGGSGLPADCGPHDPSLAPPPPPGGSGVLFRGPLQEPMRMPGEATCRAAFTGLQFGGSLGGLGQLQSPGAGVGLPSAASERRPPPPDFATSALGGQPGFPFGAAGRQSTPHSGPGVNSPPSAGGGGGSSGGGGGGGAYPPQPDFQPSQRTSASKLGALSLGSFNKPSSKDNLFGQSCLAALSTACQNMIASLGAPNLNVTFNKKNPPEGKRKLSQNETDGAAVAGNPGSDYFPGGTAPGGPRTRRPSGTSSSGSKASGPPNPPAQGDGTSLSPNYTLESTSGNDGKPVSGGGGRGRGRRKRDSGHVSPGTFFDKYSAAPDSGGAPGVSPGQQQASGAAVGGSSAGETRGAPTPHEKALTSPSWGKGAELLLGDQPDLIGSLDGGAKSDSSSPNVGEFASDEVSTSYANEDEVSSSSDNPQALVKASRSPLVTGSPKLPPRGVGAGEHGPKAPPPALGLGIMSNSTSTPDSYGGGGGPGHPGTPGLEQVRTPTSSSGAPPPDEIHPLEILQAQIQLQRQQFSISEDQPLGLKGGKKGECAVGASGAQNGDSELGSCCSEAVKSAMSTIDLDSLMAEHSAAWYMPADKALVDSADDDKTLAPWEKAKPQNPNSKEAHDLPANKASASQPGSHLQCLSVHCTDDVGDAKARASVPTWRSLHSDISNRFGTFVAALT

SEQ ID NO: 38594 - protein, 220 aa, Homo sapiens
  misc_feature (1)...(220): Xaa = X or * as defined in Table 2
APTGCLACNLLLCELGQVTSPLXASAPKCVTVHNXPLCKALPRRXSSAWELSXMRKLRLRGVNFLRTDGLCFCISTRATPPSSARARCVSTSLKPASLQLAVSYHHGSRSQGCHLPAGREVCTSQSRGVRETSPWGCEKGSPYAEGFPAVISLNPPSSSTAHDLPANKASASQPGSHLQCLSVHCTDDVGDAKARASVPTWRSLHSDISNRFGTFVAALT

SEQ ID NO: 38595 - protein, 124 aa, Homo sapiens
  DOMAIN (61)..(94): TPR Domain domain identified by PFam, accession name TPR, E- value=0.00093, PFam score of 25.9
TVGDSYGEASAGGSAVQGGREPALPGREVPRCSCLLQMEPVNYERVREYSQKVLERQPDNAKALYRAGVAFFHLQDYDQARHYLLAAVNRQPKDANVRRYLQLTQSELSSYHRKEKQLYLGMFG

SEQ ID NO: 38596 - protein, 80 aa, Homo sapiens
FPASLNWLLLSVILLPTPELHLLLHFPVPQEPWATVMEKRLQEAQLYKEEGNQRYREGKYRDAVSRYHRALLQLRGLDPS

SEQ ID NO: 38597 - protein, 244 aa, Homo sapiens
  misc_feature (1)...(244): Xaa = X or * as defined in Table 2
RWASVFPHPFPYYLPALLEKKTAERRGGAFSRNKQTAGPCGGTLQEEGSARTVGDSYGEASAGGFSCNKEEGNQRYREGXVTEMLGVGYHRALLQLRGLDPSPALSVTXSRTSGPRPSRLNKKTYCIPPRQDCYNNLAACLLQMEPVNYERVREYSQKVLERQPDNAKALYRGSGVAFFHLQDYDQARHYLLGCREXAALKMPNVRRYPPRLTRVRTQQPTHRKEKQLLPWACLVNKEERCSSS

SEQ ID NO: 38598 - protein, 68 aa, Homo sapiens
GNCGPEKERTCLRSPSWTPMPSPKQAVPVSSWPPGPHHQRCVPSRSSNFSKSSKSNSCDGWNSSSSSS

SEQ ID NO: 38599 - protein, 50 aa, Homo sapiens
  misc_feature (1)...(50): Xaa = X or * as defined in Table 2
SVVSLSPHRXAIQILSGVAAGWGLSDGPSSSPPSPSGARDTGSPGSSLGL

SEQ ID NO: 38600 - protein, 162 aa, Homo sapiens
  misc_feature (1)...(162): Xaa = X or * as defined in Table 2
ARGSWGPGAGARPPGTARRAARCATGCGSRSRSSHAPVSPRRAAPSSVHPGGCHGPALPPPSPRRVTQAADARRAAPPLRAASAAPSRRWSQAPTPKRRLGYPPPRPPAHPGPRPPLRRMVSRSSGEDPPRRLTXTGSETPKSTWRELSSRRRSLQSKAATR

SEQ ID NO: 38601 - protein, 142 aa, Homo sapiens
  misc_feature (1)...(142): Xaa = X or * as defined in Table 2
RRCPAQRGEIWQSGHRALLSCSGLHPFQTSWLPVYTVRVKLPTQALAMVDAPPPTKLECPRLISVCCYAGSENFKPVDLSLLSSIGGSGGVGTRGNLLVCELRRPWDKRSIWAGVSRFLRLSPSRFPLAXLGLSSYLTTRKT

SEQ ID NO: 38602 - protein, 359 aa, Homo sapiens
  DOMAIN (155)..(170): G-PROTEIN BETA WD-40 REPEAT SIGNATURE domain identified by eMATRIX, accession number PR00320A, p-value=4.971e-10, raw score of 16.74
  DOMAIN (135)..(305): WD domain, G-beta repeat domain identified by PFam, accession name WD40, E-value=1.5e-13, PFam score of 58.5
  misc_feature (1)...(359): Xaa = X or * as defined in Table 2
RMSRISDDSRTASQLDEFQECLSKFTRYNSVRPLATLSYASDLYNGSSIVSSIEFDRDCDYFAIAGVTKKIKVYEYDTVIQDAVDIHYPENEMTCNSKISCISWSSYHKNLLASSDYEGTVILWDGFTGQRSKVYQEHEKRCWSVDFNLMDPKLLASGSDDAKVKLWSTNLDNSVASIEAKANVCCVKFSPSSRYHLAFGCSDHCVHYYDLRNTKQPIMVFKGHRKAVSYAKFVSGEEIVSASTDSQLKLWNVGKPYCLRSFKGHFNEKNFVGLASSGDYIACGSENNSLYLYYKALSKTLLTFKFDTVKSVLDKDREEDDTNEFVSAVCWRALTQMGESNVLIAAXQFRVPIKVLELV

SEQ ID NO: 38603 - protein, 653 aa, Homo sapiens
  misc_feature (1)...(653): Xaa = X or * as defined in Table 2
MRIKATSEDGTVIAQAEYGSVDIGEEVLKKGFAEKCRLASRTDICEEKKLDPGQLVLRNLKSPIPLWGHRSNQSTFSRPKGHLSEKMTLDLKDENDAGNLITFPKESLAVGDFNLGSNVSLEKIKQDQKLIEENEKLKTEKDALLESYKALELKVEQIAQELQQEKAAAVDLTNHLEYTLKTYIDTRMKNLAAKMEILKEMRHVDISVRFGKDLSDAIQVLGSKGALLLQLLXMDXRXYGQNTVWLRRILKLSEYVSEGNILIAQRNEMQQKLYMSVEDFILEVDESSLNKRLKTLQDLSVSLEAVYGQAKEGANSDEILKKFYDWKCDKREEFTSVRSETDASLHLLXHGSKEPXRIKVMQTRRXFQIHIVKYCKRFIQRKGSLPQYKLSTRTVLSSKKQLIEYLKKIPSVDHLLSIKTDIEKLKSSTQMEIGXKEXFGKSQMILMALKLRKXKKKXLKKGFAEKCRLASRTDICEEKKLDPGQLVLRNLKSPIPLWGHRSNQSTFSRPKGHLSEKMTLDLKDENDAGNLITFPKESLAVGDFNLGSNVSLEKIKQDQKLIEENEKLKTEKDALLESYKALELKVEQIAQELQQEKAAAVDLTNHLEYTLKTYIDTRMKNLAAKMEILKEMRHVDISVRFGKDLSDAIQVLG

SEQ ID NO: 38604 - protein, 108 aa, Homo sapiens
  DOMAIN (5)..(26): Intermediate filament proteins domain identified by PFam, accession name filament, E-value=5.5e-13, PFam score of 52.6
RCCRVKLALDIEIATYRKLLEGEESRLESGMQNMSIHTKTTSGYAGGLSSAYGGLTSPGLSYSLGSSFGSGAGSSSFSRTSSSRAVVVKKIETRDGKLVSESSDVLPK

SEQ ID NO: 38605 - protein, 197 aa, Homo sapiens
  DOMAIN (47)..(82): Crystallins beta and gamma 'Greek key' motif proteins domain identified by eMATRIX, accession number BL00225B, p-value=4.750e- 28, raw score of 18.06
  DOMAIN (13)..(195): Beta/Gamma crystallin domain identified by PFam, accession name crystall, E-value=9.9e-90, PFam score of 311.5
MSSAPAPGPAPASLTLWDEEDFQGRRCRLLSDCANVCERGGLPRVRSVKVENGVWVAFEYPDFQGQQFILEKGDYPRWSAWSGSSSHNSNQLLSFRPVLCANHNDSRVTLFEGDNFQGCKFDLVDDYPSLPSMGWASKDVGSLKVSSGAWVAYQYPGYRGYQYVLERDRHSGEFCTYGELGTQAHTGQLQSIRRVQH

SEQ ID NO: 38606 - protein, 671 aa, Homo sapiens
  DOMAIN (100)..(140): Chloramphenicol acetyltransferase proteins domain identified by eMATRIX, accession number BL00100B, p-value=4.333e-30, raw score of 25.01
  DOMAIN (95)..(143): Chloramphenicol acetyltransferase domain identified by PFam, accession name CAT, E-value=7.2e-23, PFam score of 89.4
MGQLREYQELMFVGPTLDIEIATYRKLLEGEESRLESGMQNVSIHTKTTSSYAGFCRFRNTIKQDFRLLGQTSVDRLLQLSQGQAVKGNQLLPVSLTVQLDITAFLKTVKKNKHKFYPAFIHILARLMNAHPEFRMAMKDGNSYDHDYEFELGTPVIGAMNYIQSYKNEHPDDETDEFLVPVESSNWIEKALKAHWLQRCRESRANSAPGYENRGRVEQRVGYTIEQINHMRDVFGTRLRRVEDVFPPVIGVAAHKGGVYKTSVSVHLAQDLAMKGLRVLLVEGNDPQGTASMYHGWVPDLHIHAEDTLLPFYLGEKDDVTYAIKPTCWPGLDIIPSCLALHRIETELMGIFDEGKLPTDPHLMLRLAIETVAHDYDVIVIDSAPNLGIGTINVVCAADVLSVPTPDELFDYTSALQFFDMLRDLLKNVDLKGFEPDVRILLTKYSNTSERIKYLGIQLTRDVKDLFKENYKPLLKEIKEDTHKWKNIPCSWVGRINIVKMAILPKVIYRFNAIPIKLPMTFFTELEKTTLKFIWNQKRARIAKSILSQKNKAGGITLPDFKLYYKATVTKTAWYWYQNRDIDQWNRTEPSEIMPHIYNYLIFDKPEKNKQWGKDSLFNKWCWENWLAICRKLKLDPFLTPYTKINSRWIKDLNVRPKTIKTLEENLGGDL

SEQ ID NO: 38607 - protein, 476 aa, Homo sapiens
  DOMAIN (123)..(170): Intermediate filaments proteins domain identified by eMATRIX, accession number BL00226D, p-value=1.257e-14, raw score of 19.10
  DOMAIN (41)..(169): Intermediate filament proteins domain identified by PFam, accession name filament, E-value=6.1e-49, PFam score of 176.0
  misc_feature (1)...(476): Xaa = X or * as defined in Table 2
LLARGAGRTNPAPPLMSCGPWGKFLKCCEVYKSGPYKVQXEEITIHSRAEAESTYQIKYEELQTLAGKHGDDLRCAKTEISEMNQNISRLQAETEGLKGQGASLEAAIADAEQWGELAIKDANTKLSELEAAMQRAKQDMARQLGEYQKLALDIEIATYRKLLEGEESRLESGMQNVSIHKKTTSGYAGAPARIVSLLQNELLSLEVGVLKGHPTGKGEELGAPYSECSFGLCRRTVMLTQAPSSVVRSRNSRNHTVNSGGSCLSASTVAIPAINDSSAAMSACSTISAQKRTCCTACEPARKYKDTASHQEPAVCQPACQLETADPKGGGVLALPQPPSPGMLCWPYCRAHATDYFLANFFSEFPCHFLHRAGAAQTQATGDGMEHGQSRELPKRKAPREESETSEEKSPNKWGPVSKQKKQLLVDILTTIIRPTRGNAYTGLSTRKWKPRSEENALMQPNKKDEKGTLTQKLGL

SEQ ID NO: 38608 - protein, 54 aa, Homo sapiens
TAVVSVLPAGSGASPFHSASWDPPAHPAAAATAAAVIPALEPPHTPVYAIFVNH

SEQ ID NO: 38609 - protein, 275 aa, Homo sapiens
  misc_feature (1)...(275): Xaa = X or * as defined in Table 2
YPPSPPGRSAAHVSCTLYRTTPXWPDQRSAAPPTAWAASXSPSARRRPSAESMVPREPLXYRPSAATSAATPAISPARALGAGAPCPLFRRRSGPFGRTSAIRPPSSAGKAVLFPPHGRPVWPVGRLARYATASGWGAHIXASSGASEPAVVSVLPAGSGASPFHSASWDPPAHPAAAASAAAVIPALXRSGDRPPVLSFQPLFWFLIRGDNSVSFWLLRGLPCPSQAVTTRHRSLQKEKLKRNRKSCVNFMQSQVSVSKYSNLVKHHHFCIRPL

SEQ ID NO: 38610 - protein, 82 aa, Homo sapiens
VDEFRHCHGCVPSSVRSRESSAVSRSYTAQRKWNHPSVRPLSGGSRTLGLESLPAASSDASLQKPPRSARLKSVLRSSDFLI

SEQ ID NO: 38611 - protein, 33 aa, Homo sapiens
YLTDYKGQRRGTWPVPHLPGCHSILKQTTLSGK

SEQ ID NO: 38612 - protein, 59 aa, Homo sapiens
  misc_feature (1)...(59): Xaa = X or * as defined in Table 2
MXSHPGSGRNXTLPLGTASRSPSRETAFPHNLERPISHHDVQRARHKIKHWEAGRVTRK

SEQ ID NO: 38613 - protein, 622 aa, Homo sapiens
MSEVKNYDKKIRHRKGNCTMDRYSPKVVHWLHPRAHTRTVPAAIRYPDRQTPNGLRGANTMHSQMDTLNGDGRTHLAGQRARSPRTARSERQYRIHTTSGPSGMFRQYGLGFCLRIPVMPIAWDRRSSYTPVRYRNQDDHELQITHGNKITMWNCVSDFHIDRCFLDLWNGEESARNWPRSGCVLVHPLCLPTAHLAIQGLLAAAALTRVPCDSSGQSLAAAQSMLAPFELRAVSWEKSERRCLNPSAPPLVTSSGVARVPPTSHVGPVQSGRGSHAAVWVQRSQTKCDHQAAKHKKKDKSTRKTTKKESSRCCPELRVEVEQPHHQLPREGSSSEYSSSSSSPMGVQAREESSDSAEENDRRVEIHLESSDKEKPVMLLNHFTSSSARPTAQVLPVQNEASSNPSGHHPLPPQMLSAASHITPIRMLNSVHKPERGSADMKLLSSSVHSLLSLEERNKGSGPRSSMKVDKSFGSAMMDVLPASAPHQPVQVLSGLSESSSMSPTVSFGPRTKVVHASTLDRVLKTAQQPALVVETSTAATGTPSTVLHAARPPIKLLLSSSVPADSAISGQTSCPNNVQISVPPAIINPRTALYTANTKVAFSAMSSMPVGPSKLHTLGRL

SEQ ID NO: 38614 - protein, 852 aa, Homo sapiens
  DOMAIN (656)..(676): INHIBIN BETA B CHAIN SIGNATURE domain identified by eMATRIX, accession number PR00671C, p-value=9.671e-10, raw score of 4.18
  DOMAIN (790)..(807): Zinc finger, CCHC class domain identified by PFam, accession name zf-CCHC, E-value=0.00076, PFam score of 26.2
  misc_feature (1)...(852): Xaa = X or * as defined in Table 2
FEVLWSDSSITSVTKSSSEVTEFISKLCQLYPEENLEKLIPCLAGPDAFYVERNHVDLDSGLRYLASLPSHVLKNDHVRRFLSTSSPPQQLQSPSPGNPSLSKVGTVMGVSGRPVCGVAGIPSSQSGAQHHGQHPAGSAAPLPHCSHAGSAGSALAYRTQMDTSPAILMPSSLQTPQTQEQNGILDWLRKLRLHKYYPVFKQLSMEKFLSLTEEDLNKFESLTMGAKKKLKTQLELEKEKSERRCLNPSAPPLVTSSGVARVPPTSHVGPVQSGRGSHAAELRVEVEQPHHQLPREGSSSEYSSSSSSPMGVQAREESSDSAEENDRRVEIHLESSDKEKPVMLLNHFTSSSARPTAQVLPVQNEASSNPSGHHPLPPQMLSAASHITPIRMLNSVHKPERGSADMKLLSSSVHSLLSLEERNKGSGPRSSMKVDKSFGSAMMDVLPASAPHQPVQVLSGLSESSSMSPTVSFGPRTKVVHASTLDRVLKTAQQPALVVETSTAATGTPSTVLHAARPPIKLLLSSSVPADSAISGQTSCPNNVQISVPPAIINPRTALYTANTKVAFSAMSSMPMGPLQGGFCANSNTASPSRHPSTSFANMATMPSCPAPSSSPALSSVPESSFYSSSGGGGSTGNIPASNPNHHHHHHHQQPPAPPQPAPPPPGCIVCTSCGCSGSCGSSGLTVSYANYFQHPFSGPSVFTFPFLPFSPMCSSGYVSAQQYGGGSTFPVVHAPYSSSGTPDPVLSGQSTFAVPPMQNFMAGTAGVYQTQGLVGSSNGSSHKKSGNLSCYNCGATGHRAQDCKQPSMDFNRPGTYXVEIRPSSRKSGLHRLIFFLWQTRTLFKPWRHKEN

SEQ ID NO: 38615 - protein, 87 aa, Homo sapiens
  DOMAIN (14)..(24): Eukaryotic  RNA-binding region RNP-1 proteins domain identified by eMATRIX, accession number BL00030B, p-value=3.368e- 09, raw score of 7.03
  misc_feature (1)...(87): Xaa = X or * as defined in Table 2
YCGPLXSVWVARNPPGFAFVEFEDPRDAAGVVXELDGRTLCGPPSWGHRPXDDYCRRGLPPRRRPPRRRNLSCSRSRSLYSPWTLSL

SEQ ID NO: 38616 - protein, 164 aa, Homo sapiens
  DOMAIN (77)..(87): Eukaryotic  RNA-binding region RNP-1 proteins domain identified by eMATRIX, accession number BL00030B, p-value=3.368e- 09, raw score of 7.03
  DOMAIN (44)..(110): RNA recognition motif. domain identified by PFam, accession name rrm, E-value=6.9e-16, PFam score of 66.2
ESWLVLGRRKAGRLIGACGFEPPHFLTLDLEMHRDSCPLDCKVYVGNLGNNGNKTELERAFGYYGPLRSVWVARNPPGFAFVEFEDPRDAADAVRELDGRTLIGCRVREELSNGEKKKSRNRGPPPSWGRPPSENDNRKEESFPPRRRSPRRRSFSRSRSRSLF

SEQ ID NO: 38617 - protein, 222 aa, Homo sapiens
  misc_feature (1)...(222): Xaa = X or * as defined in Table 2
EIAERRITQPAPPGPSRPSGPGPAGELGGPGTGRALCPADNGGLCCGCPLAVPGPLAVPRALKPQRTSLSHPTSVTNGGRGVSQPGPRRHPGLPTQASTKPPQSRRDAAPLGGAGRGGPGSMAAARTPRGGGHXGVDGPGRRPRDASRLGRLFRPRSRADPVPGXPPVAIGRDLPSPDDNGQRPXGAWKVSECPERRRVERLAAIGRLVFILPDFAVGREKW

SEQ ID NO: 38618 - protein, 27 aa, Homo sapiens
MTSGVYRPPRARLTTTKETPQGHQNLQ

SEQ ID NO: 38619 - protein, 135 aa, Homo sapiens
  DOMAIN (64)..(92): SODIUM CHANNEL SIGNATURE domain identified by eMATRIX, accession number PR00170C, p-value=5.939e-09, raw score of 11.12
  misc_feature (1)...(135): Xaa = X or * as defined in Table 2
RERETXSSINTTFIPGSVLQPDASPSKTGTLTSIPVTIPENTSQSQVIGTEGGKNASTSATSRSYSSIILPGVIALIVITLSVFVLVGLYRMCWKAHPGTPENGNDQPQSDKESVKLFTGKTISHESGEHSAXGK

SEQ ID NO: 38620 - protein, 115 aa, Homo sapiens
  DOMAIN (64)..(73): 5-HYDROXYTRYPTAMINE 5A RECEPTOR SIGNATURE domain identified by eMATRIX, accession number PR00518C, p-value=9.455e-09, raw score of 5.94
  misc_feature (1)...(115): Xaa = X or * as defined in Table 2
KFPTSTPENGNDQXPQSDKESVKLLTVKTISHESVILNQNKMDEITEIEFRIWMAMKITENQKIETHSEESEEFNKTIQGMKYEIAILRKNKTDLTELKNSPQEFHNTLEVLTAE

SEQ ID NO: 38621 - protein, 263 aa, Homo sapiens
MGKAKVPTSKRAPSSPVAKPGPVKTLTWKKNKKKKRFWKSKAQEVSKKPGSGPGAVVRPPKAPEDFSQNWKVLQEWLLKQKSQAPEKPFVISQMGSKKKPKIIQQNKKEISPQVKGEEMLAGKDQEASRGSVPSGSKMDRKAPVPRTKAGGAEHNKKGTKERTNGDIKHKKQKAKEADPAPPTEEDMWFDDVDPADIEAAIGPEVAKIARKQLSHSEGSVSLRLVEEPAFGGLTRALALDCEMVGVSPKGEESVAARVSIMNQ

SEQ ID NO: 38622 - protein, 140 aa, Homo sapiens
  DOMAIN (106)..(139): 6 kw INDUCING XPMC2 MUSHROOM SPAC22G704. domain identified by eMATRIX, accession number DM01417E, p-value=2.938e-16, raw score of 20.62
  DOMAIN (7)..(140): Exonuclease domain identified by PFam, accession name Exonuclease, E-value=9.1e-06, PFam score of 27.6
EDIWFDDVDPADIEAAIGPEAAKIARKQLGQSEGSVSLSLVKEQAFAGEELEVVQKEVAEMLKGRILVGHALHNDLKVLFLDHPKKKIRDTQKYKPFKSQVKSGRPSLRLLSEKILGLQVQQAEHCSIQDAQAAMRLYVM

SEQ ID NO: 38623 - protein, 359 aa, Homo sapiens
  DOMAIN (284)..(300): 6 kw INDUCING XPMC2 MUSHROOM SPAC22G704. domain identified by eMATRIX, accession number DM01417D, p-value=3.800e-13, raw score of 11.08
  DOMAIN (205)..(348): Exonuclease domain identified by PFam, accession name Exonuclease, E-value=7.8e-38, PFam score of 139.1
MGKAKVPASKRAPSSPVAKPGPVKTLTRKKNKKKKRFWKSKAREVSKKPASGPGAVVRPPKAPEDFSQNWKALQEMGSKKKPKIIQQNKKETSPQVKGEEMPAGKDQEASRGSVPSGSKMDRRAPVPRTKASGTEHNKKGTKERTNGDIVPERGDIEHKKRKAKGQPQPHPPRIDIWFDDVDPADIEAAIGPEAAKIARKHLTRALALDCEMVGVGPKGEESMAARVSIVNQYGKCVYDKYVKPTEPVTDYRTAVSGIRPENLKQGEELEVVQKEVAEMLKGRILVGHALHNDLKVLFLDHPKKKIRDTQKYKPFKSQVKIQDAQAAMRLYVMVKKEWESMARDRRPLLTAPDHCSDDA

SEQ ID NO: 38624 - protein, 212 aa, Homo sapiens
LPGRRARGGRGLGWPPAQALDGSRMGKAKVPASKRAPSSPVAKPGPVKTLTRKKNKKKKRFWKSKAREVSKKPASGPGAVVRPPKAPEDFSQNWKALQEWLLKQKSQAPEKPLVISQMGSKKKPKIIQQNKKETSPQVKGEEMPAGKDQEASRGSVPSGSKMDRRAPVPRTKASGTEHNKKGTKERTNGDIAPQRGDIEHNKRKAKEAAPAP

SEQ ID NO: 38625 - protein, 424 aa, Homo sapiens
  DOMAIN (344)..(377): 6 kw INDUCING XPMC2 MUSHROOM SPAC22G704. domain identified by eMATRIX, accession number DM01417E, p-value=1.240e-13, raw score of 20.62
  DOMAIN (226)..(395): Exonuclease domain identified by PFam, accession name Exonuclease, E-value=4.5e-48, PFam score of 173.1
  misc_feature (1)...(424): Xaa = X or * as defined in Table 2
MGKAKVPASKRAPSSPVAKPGPVKTLTRKKNKKKKRFWKSKAREVSKKPASGPGAVVRPPKAPEDFSQNWKALQEMGSKKKPKIIQQNKKETSPQVKGEEMPAGKDQEASRGSVPSGSKMDRRAPVPRTKASGTEHNKKGTKERTNGDIVPERGDIEHKKRKAKGQPQPHPPRIDIWFDDVDPADIEAAIGPEAAKIARKQLGQSEGSVSLSLVKEQAFGGLTRALALDCEMVGVGPKGEESMAARVSIVNQYGKCVYDKYVKPTEPVTDYRTAVSGIRPENLKQGEELEVVQKEVAEMLKGRILVGHALHNDLKVLFLDHPKKKIRDTQKYKPFKSQVKSGRPSLRLLSEKILGLQVQQAEHCSIQDAQAANXGCYVMVKEGVGRAWPETGAPCLTASRPLQXRRLSSPALLAACPPRLQRQC

SEQ ID NO: 38626 - protein, 137 aa, Homo sapiens
RPGEDSNDLIRHFLIESSAKGVHLKGADEEPYFGSLSAFVCQHSIMALALPCKLTIPQRELGGADGASDSTDSPASCQKKSAGCHTLYLSSVSVETLTGALAVQKAISTTFERDILPTPTVVHFKVTEQGITLTDVQ

SEQ ID NO: 38627 - protein, 207 aa, Homo sapiens
MLPLCLVAALLLGRRARAEPGRRSHPLPALLRGEASALPPPRGLRGAGVEKPLHTLMHGQGVCMELAEIEAIQESLQPSGKVTDENGWGQGIDWPEQWEFSVVGSGDTWGAFKQGKTFSPHILKAPEPVFQEFTVSGWGDHFNPFTAVCWVQIQRSGQAGKIFGFVAKSQTEPQENVCHLFAENDMVQPASQVIGLVTALLQDAERM

SEQ ID NO: 38628 - protein, 508 aa, Homo sapiens
  DOMAIN (440)..(473): ESICULAR LUMEN DOMAIN domain identified by eMATRIX, accession number DM01292C, p-value=4.672e-09, raw score of 12.45
  misc_feature (1)...(508): Xaa = X or * as defined in Table 2
MGEKPGPLLFSSAKPKNPQEGEHKDEGDHPNNSFSPCSAHDRRCLQKHFAKIRDRSTSGGKMKVNGAPREDARPVNKGTYLVSTGGQTVAFTTGSWDQDDSESSLGCQEDSTALHPTSTSPGPSETVPPSLLPEATKRLLSLDFESFGQTQRNLSCPLCPAGVWQEKTLCEWRDAGGNRQAGVPQAPCMKSNNALIVILGTVTLDAVGIGLVMPVLPGSPALLQRQAEESPGRRTQGRRVTTPTTASAPVAPMTAGACRSTSPKFETGAPVGARXRSMGRPGRMPGLXIKAPTWCPQVGRLLPSLLAPGTKTTQSPASGCQEDSTALHPTSTSPGPSETVPPSLLPEATKRLLSLDFESFGQTQRNLSCPLCPAGVWQEKTLCEWRDAGGNRQAGVPQAPCMKSNNALIVILGTVTLDAVGIGLVMPVLPGLLRDIVHSDSIASHYGVLLALYALMQFLCAPVLGALSDRFGRRPVLLASLLGATIDYAIMATTPVLWIYPLVNSPSC

SEQ ID NO: 38629 - protein, 132 aa, Homo sapiens
  DOMAIN (103)..(117): Thyroglobulin type-1 repeat proteins proteins domain identified by eMATRIX, accession number BL00484B, p-value=1.600e- 12, raw score of 9.04
  DOMAIN (75)..(132): Thyroglobulin type-1 repeat domain identified by PFam, accession name thyroglobulin_1, E-value=6.8e-05, PFam score of 27.8
MECEDSNDLIRHFLIESSAKGVHLKGADEEPYFGSLSAFVCQHSIMALALPCKLTIPQRGGSGPQRGNAKPQGSCQSELHRALERLAASQSRTHEDLYIIPIPNCDRNGNFHPKQVLPLGLVVAPSAWLAGS

SEQ ID NO: 38630 - protein, 646 aa, Homo sapiens
  DOMAIN (388)..(496): Src homology domain 2 domain identified by PFam, accession name SH2, E-value=2.9e-09, PFam score of 30.4
  misc_feature (1)...(646): Xaa = X or * as defined in Table 2
CPAHCWQEAMLSAWRLVMSPGGPCTQHPAPACHPSVLTTPRKAGEPRPXWPPCPAWGPLADSSKPHRWRPKPPASCRPLVRRPWGPQRTLTPTLTSHWRASIRXSWNWTPPSSCFPQGLGAPRLSWPRAPCQXERRRNLKPWTXSTSRXPPPDQGATMAPSTAPAPLSPRPSAPFAVVASSFPETSPERHEAAVRASSSLGTRAGGTSALCPPQRVSPHRPPNSPSISIPCMGSKASSPHGLGSPLVASPRLEKRLGGLAPQRGSRISVLSASPVSDVSYMFGRTPHSPPLAKEHAAAAPHPSPTPWWTYPLCXSTAAQNRGSSPPQRTPGHQNSVQPGAASPSNPCPATRSNSQTLSDAPFTTCPEGPARDMQPTMKFVMDTSKYWFKPNITREQGCPGGAVSISDSRIVPAIELLRKEEPGAFVIRDSSSYRGSFGLALKVQEVPASAQSRPGEDSNDLIRHFLIESSAKGVHLKGADEEPYFGSLSAFVCQHSIMALALPCKLTIPQRGCHTLYLSSVSVETLTGALAVQKAISTTFERDILPTPTVVHFKVTEQGITLTDVQRKVFFRRHYPLTTLRFCGMDPEQRKWQKYCKPSWIFGFVAKSQTEPQENVCHLFAEYDMVQPASQVIGLVTALLQDAERM

SEQ ID NO: 38631 - protein, 299 aa, Homo sapiens
  DOMAIN (232)..(246): Phage integrase family domain identified by eMATRIX, accession number PF00589B, p-value=1.621e-11, raw score of 16.17
  DOMAIN (70)..(278): "Phage" integrase family domain identified by PFam, accession name Phage_integrase, E-value=1.2e-14, PFam score of 62.1
LHVSHPGHADARGGLLQPCAAPPLWLCRIQCPPRWFQTPSQVFYHAATEHGGKDVYPGQCLWEGCEPFQRQRFSFITHLQAANCREAQRSTPRAQKAIVNHPSAALMALRRGSRNLVFRDFTDEKEGPITKHIRLTAALILKNIGKYSECGRSWPRASRYQQGHQDLFILRSDLPSQVFIRDKLMERRNRRTGRTEKARIWEVTDRTVRTWIGEAVAAAAADGVTFSVPVTPHTFRHSYAMHMLYAGIPLKVLQSLMGHKSISSTEVYTKVFALDVAARHRVQFAMPESDAVAMLKQLS

SEQ ID NO: 38632 - protein, 1411 aa, Homo sapiens
  DOMAIN (585)..(630): Involucrin proteins domain identified by eMATRIX, accession number BL00795C, p-value=7.600e-09, raw score of 17.06
  DOMAIN (102)..(182): RFX DNA-binding domain identified by PFam, accession name RFX_DNA_binding, E-value=0.025, PFam score of -5.3
  misc_feature (1)...(1411): Xaa = X or * as defined in Table 2
KPGLFPXRVYXEYVFRLSQSLGEFHQFXFKRGQYATTSSPPFSPWANIIRKATRCXCRWRFRFIMPFVMASMSAGMLNELQQYCDEWQGGAAVVAQHVAPPPGIVEIDSEKFACQWLNAHFEVNPDCSVSRAEMYSEYLSTCSKLARGGILTSTGFYKCLRTVFPNHTVKRVEDSSSNGQAHIHVVGVKRRAIPLPIQMYYQQQPVSTSVVRVDSVPDVSPAPSPAGIPHGSQTIGNHFQRTPVANQSSNLTATQMSFPVQGVHTVAQTVSRIPQNPSPHTHQQQNAPVTVIQSKAPIPCEVVKATVIQNSIPQTGVPVSIAVGGGPPQSSVVQNHSTGPQPVTVVNSQTLLHHPSVIPQQSPLHTVVPGQIPSGTPVTVIQQAVPQSHMFGRVQNIPACTSTVSQGQQLITTSPQPVQTSSQQTSAGSQSQDTVIIAPPQYVTTSASNIVSATSVQNFQVATGQMVTIAGVPSPQASRVGFQNIAPKPLPSQQVSSTVVQQPIQQPQQPTQQSVVIVSQPAQQGQTYAPAIHQIVLANPAALPAGQTVQLTGQPNITPSSSPSPVPATNNQVPTAMSSSSTPQSQGPPPTVSQMLSVKRQQQQQHSPAPPPQQVQVQVQQPQQVQMQVQPQQSNAGVGQPASGESSLIKQLLLPKRGPSTPGGKLILPAPQIPPPNNARAPSPQVVYQVASNQAAGFGVQGQTPAQQLLVGQQNVQLVPSAMPPSGGVQTVPISNLQILPGPLISNSPATIFQGTSGNQVTITVVPNTSFAPATVSQGNATQLIAPAGITMSGTQTGVGLPVQTLPATQASPAGQSSCTTATPPFKGDKIICQKEEEAKEATGLHVHERKIEVMENPSCRRGATNTSNGDTKENEMHVGSLLNGRKYSDSSLPPSNSGKIQSETNQCSLISNGPSLELGENGASGKQNSEQIDMQDIKSDLRKPLVNGICDFDKGDGSHLSKNIPNHKTSNHVGNGEISPMEPQGTLDITQQDTAKGDQLERISNGPVLTLGGSSVSSIQEASNAATQQFSGTDLLNGPLASSLNSDVPQQRPSVVVSPHSTTSVIQGHQIIAVPDSGSKVSHSPALSSDVRSTNGTAECKTVKRPAEDTDRETVAGIPNKVGVRIVTISDPNNAGCSATMVAVPAGADPSTVAKVAIESAVQQKQQHPPTYVQNVVPQNTPMPPSPAVQVQGQPNSSQPSPFSGSSQPGDPMRKPGQNFMCLWQSCKKQLPKPIHPAGRPVFTSDRGRGARSGRGPTVGSQVPVTPLPSSPTWTPSSALWCYRVSRTLTPLARSGGGGEAGSDPAPPFAHTADGAHAQRVDFGLCPPLAVLQAASRRTMKEALRELDRKDFAQATLTPARDEFPPHFAAAPPTDRFTAAFLHSRRLRCGVPCSRPEDVAFLALSSYAFC

SEQ ID NO: 38633 - protein, 215 aa, Homo sapiens
  misc_feature (1)...(215): Xaa = X or * as defined in Table 2
GPQNTPMPPSPSVRVQGQPNSSQPSPFSGSSQPGDPMRKPGQNFMCLWQSCKKWFQTPSQVFYHAATEHGGKDVYPGQCLWEGCEPFQRQRFSFITHLQDKHCSKDALLAGLKQDEPGQAGSQKSSTKQPTVGGTSSTPRAQKAIVNHPSAALMALRRGSRNLVFRDFTDEKEGPITKHTPTNSCPXYXKISGKYSECGSADWLKETMENNLSSA

SEQ ID NO: 38634 - protein, 108 aa, Homo sapiens
  misc_feature (1)...(108): Xaa = X or * as defined in Table 2
PPGRGSAHPAARQLQTPGSAAPLSXHQGPASRGTGPPGPIKARAPSKSRARGLRAAQRARLSARARAGCAPPXARGAARKLGAPGTFQETLPPGTRDRKCCSGDAVVH

SEQ ID NO: 38635 - protein, 133 aa, Homo sapiens
  misc_feature (1)...(133): Xaa = X or * as defined in Table 2
MAEGMAMLRWTRLGTWPDDSFDEMDSTLAVQQYTQQNIRAQDCSNTDKNLEPPEGQDADCHGFXAPRWHCSASYVASSEFAGDDRRIXIPLDPWVKKFCECWCSGPTPFRECPRELNXHLKDGCSCRYLRARN

SEQ ID NO: 38636 - protein, 202 aa, Homo sapiens
  DOMAIN (81)..(96): RIBOSOMAL PROTEIN P2 SIGNATURE domain identified by eMATRIX, accession number PR00456E, p-value=9.772e-09, raw score of 3.06
  misc_feature (1)...(202): Xaa = X or * as defined in Table 2
ISWPSPSLLGQTAALCANGAGPAGTPPGRGPVSARFGRRGAACVCSPPSPSPLAPLSRXRFAVMWWQEAXRRGPRLPLLSSLPAAAGSGRAARAAAELPGGGRAGARPLLLTPAQVQGESARGAGAEGGRGTPGPGCPLPAGRSLCQPGPRSPPXTAALCANGAGPAGTPPGRGPVSARFGRRGAACVCSPPSPSPLAPLSR

SEQ ID NO: 38637 - protein, 587 aa, Homo sapiens
  DOMAIN (222)..(246): TROPOMYOSIN SIGNATURE domain identified by eMATRIX, accession number PR00194D, p-value=1.240e-10, raw score of 9.57
  misc_feature (1)...(587): Xaa = X or * as defined in Table 2
DFQERLSMKDQLIAQSLLEKQQIYLEMAEMGGLEDLPQPRGLFRGGDPSETLQGELILKSAMSEIEGIQSLICRRLGSANGQAEDGGSSTGPPRRAETFAGYDCTNSPTKVEAPGTESDPRLPTVLESELVQRIQTLSQLLLNLQAVIAHQDSYVETQRAAIQEREKQFRLQSTRGNLLLEQERQRNFEKQREERAALEKLQSQLRHEQQRWERERQWQHQELERAGARLQEREGEARQLRERLEQERAELERQRQAYQHDLERLREAQRAAQPPSHPPSFNGEGLEGPRVSMLPSGVGPEYAERPEVARRDSAPTENRLAKSDVPIQLLSATNQFQRQAAVQQQIPTKLAASTKGGKDKGGKSRGSQRWESSAXAGPPLRLGLEGATGQALAAAGSQEIRDTCAILWRGNQKAQLASWLRPPHTGPVWSPGPKLRXSTLHLLTSTLKTVGWGPGALERARARRQRSLATWDQHSRTGTASFDLKQQLLLNKLMGKDESTSRNRRSLSPTCPGRHSPAPPPDPGFPAPSPPPADSPSEGFSLKAGGTALLPGPPAPSPLPATPLSAKEDASKEDVIFSKRAVTQANH

SEQ ID NO: 38638 - protein, 129 aa, Homo sapiens
  misc_feature (1)...(129): Xaa = X or * as defined in Table 2
WAQEGSGRNTHQQYKILDVMLKGLFKVCAGRGQLMAGPVFDLGTDGXTGVQLKDGWSALPRPVLRTTRSSLAAPSLLFYYFDHNSNWNLLIRWGISFCNQTGVFNQGPHSPILSLVRTGVEVAREPSVG

SEQ ID NO: 38639 - protein, 93 aa, Homo sapiens
SLLSEIFATSSSPDSSSMIPPMWLTSMMFCVGGWAQRKLGLCGGTNTDDDGDRGCRFLESGCWAQRKLGLSGDPPASASQSAGITGMSHHARP

SEQ ID NO: 38640 - protein, 156 aa, Homo sapiens
  misc_feature (1)...(156): Xaa = X or * as defined in Table 2
LLLWGGLRELTIMVEDEGEQMSIWVLDKDLGAPHLVLVGSMLTARSRCWTPWRSSHATAATSEGEGWGVGVLIADRPGWASDEGDGEGGGGGLLTSAEFGELAAVGEAGSAHPMFSFRPRYSTWCLTHIGQGGLELLTLXSTRSASQSAGVTGMSH

SEQ ID NO: 38641 - protein, 132 aa, Homo sapiens
  misc_feature (1)...(132): Xaa = X or * as defined in Table 2
FFYFLFIYFFETESRSVTLAGVQWYDLCSLQPLPPRLKRFSCLSLPSSWDYRHPPPHPANFCSFLVVTGFHHLGQAGLELLTSXSIPSSASQSAGITGVSHHARPGPLSLANNPRSQTRTSATVCPEQLGLD

SEQ ID NO: 38642 - protein, 108 aa, Homo sapiens
  misc_feature (1)...(108): Xaa = X or * as defined in Table 2
HSAARRPSSRRSSPRPETSCANSVNAGWNQDPTHVIRFRSMATAGSTRYRXGLHAAPSPPHPRRPRSPPGAEXARREARSLKRXSPPCHPTKKATMCRCIIYVPLIIK

SEQ ID NO: 38643 - protein, 189 aa, Homo sapiens
  DOMAIN (63)..(90): Protamine P1 proteins domain identified by eMATRIX, accession number BL00048, p-value=7.500e-11, raw score of 6.39
  misc_feature (1)...(189): Xaa = X or * as defined in Table 2
FEQQWGWAAAAAPPGKAHTRXTGRSPHRPHRTQPRXNPSGTAAPGPVPSXAGSSHXAGSGXRAWGPGSSRRXRSCTXRLRSRGRPPRXGPSRRXVRSARPSRAXRAPPGSHRPGCGAAAPAPAASAPARAPWAGADSSAPPRTADXSLPTRVCCSLSALHTGSESGDLGPGTQIEGKQNYSVTVWFLAR

SEQ ID NO: 38644 - protein, 270 aa, Homo sapiens
  misc_feature (1)...(270): Xaa = X or * as defined in Table 2
FEQQWGWAAAACSSRQSTYSLRTGRSPHRPHRTQPRXNPSGTAAPGPVPSXAGSSHXAGSGXRAWGPGSSRRXRSCTXRLRSRGRPTSMRAFSPLSAIRSPKSGRDAHHQASHRPGCGAAAPAPAASAPARAPWAGADSKRASSYSRLEVLKVIPEAAAWTSAGSFRTXPENLPIPVNEIMLLSNCPGRMGSVPLKRRLILGVRVLGERGPGAWCTCGPPTSMCTGALDLVSWAGRGMPWASQRRPQGDRVRDKPGTCFLPSAVPVLPCV

SEQ ID NO: 38645 - protein, 38 aa, Homo sapiens
MRKIHLRPQVLRPTSPRNISPISNPPLPEPLELWPKAL

SEQ ID NO: 38646 - protein, 447 aa, Homo sapiens
  misc_feature (1)...(447): Xaa = X or * as defined in Table 2
QKRKTFNTTKCYNKEKGSWPRWPTGSSXCAQLSWRGMEGTSKYRTFILKHPGQEIPSEPTPPGPSSLTCRATWSLSRAAPQPHMKPREPXILSIYVAPSPSTIEKPSIGERFAIFITLLMRNGDLGEASCDAVKALRQPWGKAQVEKNQLSQTKCPAMWHFESQNPALLIVRECLEGWKAYPQSTKEERLLHPEEGAGFTSSSQEKYVRVRGQRLWPTPFFSLQMIDRKERHLIPPNVIIKKRGVGQDGRLEAVSVHSSHGEEWKGQVNTEPSTETSRSGDPIMNPLHQGLKSDMQSYMESQQSSPSATHEAQGALDTQASWKKQQQLRKSRRAISSPQADGVQHGHEARHCHDVLKRDRQTSWPCKMSSLAEEVVAADTWLLDNGTMQATGRAAQVREQGKGMDLGQYISCYLMTLSRAIKQKENKKVCFQRLGKPRVKTASVQKK

SEQ ID NO: 38647 - protein, 191 aa, Homo sapiens
  misc_feature (1)...(191): Xaa = X or * as defined in Table 2
PPSAVPHDHSSPARTXPQSLSVITAELEPVRAPSLIAFFHGHSACMCPFRWRYSRFSLKQQRILAHDPVNTFGIDRRHTIKFCLSAKQRPYPTITIRWQLSDNMVYTEKHIRIISVTTAAAIHPVIGSFPIPGPIRARALSTFLPVHIQRLLXGVHFPSFSCRAGAGVLXSASWRQQVQRQEQPVLRRRQQ

SEQ ID NO: 38648 - protein, 71 aa, Homo sapiens
  misc_feature (1)...(71): Xaa = X or * as defined in Table 2
HPSPSPGLKHRSSLGSVPNPLLLPSGSFSLLPAGHSHGDGPSASQMHXFQNQTHPVPXPDPASLPAVQSHQ

SEQ ID NO: 38649 - protein, 18 aa, Homo sapiens
DKKALESFHWRRDCCKRI

SEQ ID NO: 38650 - protein, 136 aa, Homo sapiens; identical to SEQ ID NO: 30814

SEQ ID NO: 38651 - protein, 30 aa, Homo sapiens
VPSFPRPCQLLASPYIPPDSQELSPIDGQT

SEQ ID NO: 38652 - protein, 204 aa, Homo sapiens
  DOMAIN (122)..(139): Zinc finger, CCHC class domain identified by PFam, accession name zf-CCHC, E-value=0.0033, PFam score of 23.8
MRKSLLSTALENGMARSSQKSISGLSLAHGQKGGQDVSALLLVVSLKKQVLLAHNPFITIARVIVPNLFTRTRVTFGAKDLGQKDSFGRPVPCLRPHSVRRSTYDLRSSDQPKEHLTDFKSGSCFKCRKSGHWTKECQQPRIPPKPCPICAGPHWKSDCPSCPAATPRAPGTLAQDSLTDSFPTDPKGSLIDYFPDLLCLVAED

SEQ ID NO: 38653 - protein, 242 aa, Homo sapiens; identical to SEQ ID NO: 30812
  DOMAIN (192)..(237): Involucrin proteins domain identified by eMATRIX, accession number BL00795C, p-value=6.300e-09, raw score of 17.06

SEQ ID NO: 38654 - protein, 105 aa, Homo sapiens
  misc_feature (1)...(105): Xaa = X or * as defined in Table 2
MGAVCEALRQYGPEGDRLTFHCESYPKLGVHDGLGGFRGDPAVSVFSREAEKIWEGVNQRALGQSSRGSGSGRQKMKGNEIKRRERLKGGTKIERRKWLRDSERX

SEQ ID NO: 38655 - protein, 95 aa, Homo sapiens
  misc_feature (1)...(95): Xaa = X or * as defined in Table 2
TRSSCWGKEASLGDGNRGVVAALHHFTGAAARQHSGSPLERGPHPQLXSPRSXVEGHWLEILQAXSXVLPQKQPHQPARCWQLLSHWLPRPALLC

SEQ ID NO: 38656 - protein, 195 aa, Homo sapiens; identical to SEQ ID NO: 32373

SEQ ID NO: 38657 - protein, 153 aa, Homo sapiens
  DOMAIN (45)..(95): Protein prenyltransferases alpha subunit repeat proteins proteins domain identified by eMATRIX, accession number BL00904A, p -value=9.640e-12, raw score of 8.30
  misc_feature (1)...(153): Xaa = X or * as defined in Table 2
MNAIPVASPCMVCSLIVHVLGSRPMXPWXRPPTRFQWSEVQEVMELTTMRPRQPPPPPPPPPPXQQQQQQQQQQQQQEXLXLAATPRAPGTLAQGSLTPSQIFSAXRLKTDAAGSPGSPQTITDAELRVTLTVEGKSVPFWAVLPQSFTDSPH

SEQ ID NO: 38658 - protein, 136 aa, Homo sapiens; identical to SEQ ID NO: 30815

SEQ ID NO: 38659 - protein, 178 aa, Homo sapiens
MRVRNREEGNVGKWGERQVDQRDAVMRVRCGIWNNVGDRIEVRAENNGNCGTQQRVGTTEGAGGAESISVRLPRRSGSVSLQLLSREDLGRSQSESLGPEFQGLWKWLPDESSVWPAPGCLLLYCTHVDKEKGRRSLHVEHALLPVKGRDDPSKFRTNSRLFTLPGDRGTTLGSSYSW

SEQ ID NO: 38660 - protein, 257 aa, Homo sapiens; identical to SEQ ID NO: 32380
  DOMAIN (141)..(184): kw TRANSCRIPTASE REVERSE II ORF2 domain identified by eMATRIX, accession number DM01354T, p-value=1.000e-40, raw score of 9.48
  DOMAIN (26)..(257): Reverse transcriptase domain identified by PFam, accession name rvt, E-value=8.8e-20, PFam score of 79.1

SEQ ID NO: 38661 - protein, 234 aa, Homo sapiens
  DOMAIN (164)..(181): Zinc finger, CCHC class domain identified by PFam, accession name zf-CCHC, E-value=5e-05, PFam score of 30.1
MTDTQVNEQTIETANPSDLAPPPQAAPHQAKPGPNSSSTSTLPPYNASITSPLHTQSGLQFLSTQRDQKAILFSICILLPNPLPTLEKAPKIRFRPQTPQQDLINLAFKVYNNREEAAKRQCISGLQLLASALRETPATSPAHKNFKTPKPQWPGIPPGPPPPGSCFKCRKSGHWAKECPQPRIPPKPCPICAGPHSKSDCPACPKATPRAPGTLAQGSLIDSFPDLLGLAAED

SEQ ID NO: 38662 - protein, 98 aa, Homo sapiens
  misc_feature (1)...(98): Xaa = X or * as defined in Table 2
MPGHQKAPLRPAVSKKESMLEKGKIKXLLKPEGILPISEPPSNRIFACWGKPAWTACCNSLRARRXRAISCCPSHWXKEKPPWRPIRKPPLPARWPIH

SEQ ID NO: 38663 - protein, 124 aa, Homo sapiens
  misc_feature (1)...(124): Xaa = X or * as defined in Table 2
DPQLQAGSGHIPGRNVCPGERICWRGTPDSDPSTPTYXPPLEKEVAQGRDLIHASGCLWSXIPLEALQGPQGCPQFSQVCCIPVIPTVEMKQGRQQLASDFQDQQDLEFYEILSWKPGILIIPP

SEQ ID NO: 38664 - protein, 557 aa, Homo sapiens
  DOMAIN (56)..(94): Nuclear transition protein 2 proteins domain identified by eMATRIX, accession number BL00970C, p-value=6.667e-11, raw score of 14.80
  misc_feature (1)...(557): Xaa = X or * as defined in Table 2
MELVPEEATAVSARAYTGRWPLDAAARTILVTAPGVGHTNIVLCGQASLDAYIKSICLKKEGRKEGKKKGRKERKRDKYGKKEKKRKKGRKKGRRKKEKKKKEREKERRKEEKEGKKRKKEKERKKEKERKKLSIGKGVVYCLSSNTQKKQVSQTKIRVISTILFILAGCIVFVTIPAVIFKYIEGWTALESIYFVVVTLTTVGFGDFVAAHPSDHLCWVIVTCKGKYLLPDSPQEKATDFSGVAQKRNEPQKPLIWCWELRSYPTALMMQERVVXKEKPKAAAPNRRGLGTEKLEFXRXEVAAAVEPHAVLSMIGDWLRVLSKKTKEEVCRPPLFKSPSPNLRLLGVAHHVGEIKAHAAEWKANVTAEFRETRRRLSVEIHDKLQRAATIRSMERRRLGLDQRAHSLDMLSPEKRSVFAALDTGRFKASSQESINNRPNNLRLKGPEQLNKHGQGASEDNIINKFGSTSRLTKRKNKDLKKTLPEDVQKIYKTFRNYSLDEEKKEEETEKMCNSDNSSTAMLTDCIQQHAELENGMIPTDTKDREPENNSLLEDRN

SEQ ID NO: 38665 - protein, 139 aa, Homo sapiens
  DOMAIN (7)..(30): AROMATIC-RING HYDROXYLASE (FLAVOPROTEIN MONOOXYGENASE) SIGNATURE domain identified by eMATRIX, accession number PR00420A, p-value=1.682e-09, raw score of 14.78
FRLAMAQVLIVGAWMTGSLCAALLRRQTSGPLYLAVWDKADDSSAEVYFRHRVTQINLRDDKWEVSKQTGSPEQFDLIVLTMPVPEILQLQGDITTLISECQRQQLEAVSYSSRYALGLFYEAGTKIDVPWAGQYITSN

SEQ ID NO: 38666 - protein, 47 aa, Homo sapiens
  misc_feature (1)...(47): Xaa = X or * as defined in Table 2
GAQVPTLLVGVLTVTISTVQNLAISLLGKAKXGEGILSVSGRMYRVL

SEQ ID NO: 38667 - protein, 47 aa, Homo sapiens
  misc_feature (1)...(47): Xaa = X or * as defined in Table 2
EEGHHLLDPRMVDPMAACTMQLEKLQTLNASLXKQLGGGLYLAKPQG

SEQ ID NO: 38668 - protein, 188 aa, Homo sapiens
  misc_feature (1)...(188): Xaa = X or * as defined in Table 2
SITENCENKNPIPHVENKDIGTKYNSLKLPEHIRAEVMQPSKLDXVNPLPSTCKERFVMQSHLARTVGSSICNLXMSPCFGIWXQLAEANPAKCFPGCWKTNSCTSSMLCSKYVTPNGTVVXITREGPISDDSILRFLLSMETKRMQGLLVSTAQPKGHQSSYQLHKRGPEHIERSSSQPPVAAFGIH

SEQ ID NO: 38669 - protein, 138 aa, Homo sapiens
SGFRYGSDIVPFSKVDEEQMKYKSEGKCFSVLGFCKSSQVQRRFFMGNQVLKPFMEDLRQYMFSSLKNSKKYAPTEAQLNAADALIDSMSLAKKDEKTDTLEDLFPTTKIPNPRFQRLFQCLLHRALHPLEPLPSIQQ

SEQ ID NO: 38670 - protein, 710 aa, Homo sapiens
  DOMAIN (515)..(525): Short-chain dehydrogenases/reductases family proteins domain identified by eMATRIX, accession number BL00061C, p-value=3.250e- 10, raw score of 7.86
MGHRKKKRKESRPESIIIYRSDNEKQMRARRIRSHLACLPFAPIFPCLLLCLKIYAVLLPPLGFVSTFAGGDLADNLTDLPRPFCRADLSLGNLTRREGRVSVPACLPAAARAKLSGQGAAVPLNVSGGSNTTRSRLRRNGENVRMLGGNLRMLGGNLRMLGENLRMLGRNLRELGGNLRKLGGNLRMLRVPGHGFPAPFRPSRKRSGSFRYLPLVHRKRVATRQVPARKKRPKRLRTGNMVRSGNKAAVVLCMDVGFTMSNSIPGIESPFEQAKKVITMFVQRQVFAENKDEIALVLFGTDGTDNPLSGGDQYQNITVHRHLMLPDFDLLEDIESKIQPGKKFEKRHIEIFTDLSSRFSKSQLDIIIHSLKKCDISLQFFLPFSLGKEDGSGDRGDGPFRLGGHGPSFPLKGITEQQKEGLEIVKMVMISLEGEDGLDEIYSFSSYWGNRAHGWDPWVALVSRSVVAHTLRAPTQFVHLLQKRKRTLIPTHSGAARAGVYNLTKSLALEWACSGIRINCVAPGVIYSQTAVENYGSWGQSFFEGSFQKIPAKRIGVPEEVRSPLWSASYCLLQLPSSLDSRVDVDGGRSLYTHSYEVPASEPAGSGEQLRGPRSIFSEQRSNYIWSLPLVDWPSCGPLVSLKSNATSGLSNDLCCRKVGHAGAVTAPLTLVNRESMLMGRLQPASITVPVTPVLGWPVMKSSYQLAEFS

SEQ ID NO: 38671 - protein, 384 aa, Homo sapiens
MDVIQHETIGKKFEKRHIEIFTDLSSRFSKSQLDIIIHSLKKCDISLQFLWPWASFPLKGITEQQKEGLEIVKMVMISLEGEDGLDEIYSFSESLRKLCVFKKIERHSIHWPCRLTIGSNLSIRIAAYKSILQERVKKTWTVVDAKTLKKEDIQKETVYCLNDDDETEVLKEDIIQGFRYGSDIVPFSKVDEEQMKYKSEGKCFSVLGFCKSSQVQRRFFMGNQVLKVFAARDDEAAAVALSSLIHALDDLDMVAIVRYAYDKRANPQVGVAFPHIKHNYECLVYVQLPFMEDLRQYMFSSLKNSKKYAPTEAQLNAVDALIDSMSLAKKDEKTDTLEDLFPTTKIPNPRFQRLFQLFANATSATLALGEFQRNGIPGLKDMYI

SEQ ID NO: 38672 - protein, 106 aa, Homo sapiens
  DOMAIN (40)..(71): HMG14 and HMG17 proteins domain identified by eMATRIX, accession number BL00355, p-value=3.097e-09, raw score of 5.97
  misc_feature (1)...(106): Xaa = X or * as defined in Table 2
FKGTAAPWPLSFARAAAGRQAGTDTRPSLRVRFPRERSARQKGRGRSVRLSAKSPPAKVETKPSGGSRTAXIFRQRSKQGKMGAKGKQAKWLLILRALICFSLSER

SEQ ID NO: 38673 - protein, 341 aa, Homo sapiens
MVCELCVSATQAAVVKRACGADKEVTVVVGMRARQYLPPEGAAFGADGSCEGSVRGGAVGAMVSATVLHADVEGTDCLVYVQLPFMEDLRQYMFSSLKNSKKYAPTVHIPQPRRDSCSRLQLPQVTTATSLNQRPVHVPSSKSSLHDGFPDALAPAVDNAHLALQQTRRQLAPALSQGGHPASGRILPEQNRSPPAVRNLRQRRSLGRKAVAAALALDGESTMGHRKKKRKESRPESIIIYRSDNEKTDEEPGESEGGDQPKEEEGDDFLDYPVDDDDTEISTLSEFLMKWKRLIYTQKLVTQADYANYLILSSTNGEVRVIAGESWRREAGFRMQSELAD

SEQ ID NO: 38674 - protein, 757 aa, Homo sapiens
  misc_feature (1)...(757): Xaa = X or * as defined in Table 2
GGRPKRLRTGNMVRSGNKAAVVLCMDVGFTMSNSIPGIESPFEQAKKVITMFVQRQVFAENKDEIALVLFGTDGTDNPLSGGDQYQNITVHRHLMLPDFDLLEDIESKIQPGSQQADFLDALIVSMDVIQHETIGKKFEKRHIEIFTDLSSRFSKSQLDIIIHSLKKCDISLQFFLPFSLGKEDGSGDRGDGPFRLGGHGPSFPLKGITEQQKEGLEIVKMVMISLEGEDGLDEIYSFSESLRKLCVFKKIERHSIHWPCRLTIGSNLSIRIAAYKSILQERVKKTWTVVDAKTLKKEDIQKETVYCLNDDDETEVLKEDIIQGFRYGSDIVPFSKVDEEQMKYKSEGKCFSVLGFCKSSQVQRRFFMGNQVLKVFAARDDEAAAVALSSLIHALDDLDMVAIVRYAYDKRANPQVGVAFPHIKHNYECLVYVQLPFMEDLRQYMFSSLKNSKKYAPTREAQLNAVDALIDSMSLAKKDEEGQTPLKDLFPTTKIPNPSIFRGLFQCLLAQELLHPREAFYPPISGRHIWEYAGILPAEGGQRKSSGFPLSXNXRTLFFLXFEAKEKGFKWTAQGIFQGQPWKVGPTAKKLKTGARGEPTFSVSSLAEGSVTSVGSVNPAENFRVLVKQKKASFEEASNQLINHIEQFLDTNETPYFMKSIDCIRAFREEAIKFSEEQRFNNFLKALQEKVEIKQLNHFWEIVVQDGITLITKEEASGSSVTAEEAKKFLAPKDKPSGDTAAVFEEGGDVDDLLDMI

SEQ ID NO: 38675 - protein, 455 aa, Homo sapiens
  misc_feature (1)...(455): Xaa = X or * as defined in Table 2
GRKVVVVLPPPLGNQSTPGGICLSAQLPLXRDXXSASARCSSPGSXTSPPSYFLPDPRGPGRALQRFSRSPSSPGGNPASAAPSPRSKLLLGPPGAAAATAAAAGAKPELRHRLPPSSATTASRVRACHFLLASAAATPAFSPPPPPPPASPSQRTPKEVQRAGKAAESCPAAPELLGFGGSRDSAGELGGLSSDACVPDSSEPGVRRPARRRTLAHALTHASTHTRTLPGSCARVAVPVALCKGGFTXPIFSPQYVTNTYPGEEGARLGVLIGREQTVSAILLGGSRSKAPTTTVAVASAPPVTAAGRTPHASIRIPPRMLSKPSPPPQALXKGVMAPAQCPPARRGQAGLEGTGFGKSPTRPHQLTAASSPCNGLIRIRQGQGGGKGRRWRGSSGDPGAWYCFRGRRRGPSCPSLRTATLIPGLGGHGGGSGDAASPLLGTRDGGPEAHLGKE

SEQ ID NO: 38676 - protein, 41 aa, Homo sapiens
FVVTKQKLQRKDKFSCAWQGPPPPHQGLQWIEPSRSWTILS

SEQ ID NO: 38677 - protein, 180 aa, Homo sapiens
  misc_feature (1)...(180): Xaa = X or * as defined in Table 2
MLEALGALNKPESSRPLIPELHLASTAAANLGEHPNQQRLKFASQETPEESANAVPHYHKLCNRVSHVWGNRRGQHIRNTMDNPRPGKTTFVXIIVSPLPALLALTHSWDSQVRPAVLQPYSHGTGTPXWRSSSPCAASSTXKSPYPXCHXQRLSQSPSAFRPTLRRLSRSTRCRSWRRK

SEQ ID NO: 38678 - protein, 466 aa, Homo sapiens
  misc_feature (1)...(466): Xaa = X or * as defined in Table 2
RETRSCWAHYHAESSKHQKAKLKDSRKARRSIELIGPGSSQKGGDICSLIHLSSKLGILCYSKTGNMGGWEGGMQLRVSSENSMGKSSRERAAADLPQGSCWHELPGRLINTRISLKPRHVWNLSSVLCQVVKKVKSMQMFHMPITSAMQGDRLGICVTQFDPKLLERGLVCAPESLHTVHAALISVEKIPYFRGPLQTKAKFHITVGHETVMGRLMFFSPAPDNFDQEPILDSFNFSQEYLFQEQYLSKDLTPAVTDNDEADKKAGQATEGHCPRQQWALVEFEKPVYLPSAVPGDWLQARCGHSPNTCRLAFHGQSCSTGXRTGTTPTASCPGXRCTSXSTSMGLVERAMDDYSVIGRSLFKKETNIQLFVGLKVHLSTGELGIIDSAFGQSGKFKIHIPGGLSPESKKDPDTPPSKTGPGWPVGGQPGRRRSPSGANPHKMGWLTRPFKRYVFDTHKRMVQSP

SEQ ID NO: 38679 - protein, 71 aa, Homo sapiens
  misc_feature (1)...(71): Xaa = X or * as defined in Table 2
RSPREGGGHRGPSSGGGRCRRRPGWAGNEAMXPDRRARVVGIEVPAAEEGGAAVAQDGLGMKRCSLLRDLL

SEQ ID NO: 38680 - protein, 528 aa, Homo sapiens
  DOMAIN (466)..(486): CORONAVIRUS NUCLEOCAPSID PROTEIN domain identified by eMATRIX, accession number DM01206B, p-value=1.911e-09, raw score of 10.69
  misc_feature (1)...(528): Xaa = X or * as defined in Table 2
SFATHTAGPQPPAAPAPKRMAARASWGRNPPRAPVRTSAAAARAAGTRRPAPARVACPLPAGPGSPRRPPRAARTRRARRRPGPGRAAQQSAGRRWTPPAPAPSGASFAAPAAGSASPPSHRRSAPGGGSTQSSLLSPSSSALHSSPPSRPWAARHERSSWSXPRSALPPTSTEPGPGPRRAPVLGTRSCGRGAGQLEXEAXGAAXAPPPLGWTPXLLCVHVTLGNAVSHWVSCGAAPPHGGVGVGYRARSPREGGGHRVPARTREVPPSPRMGWNEAMXPFKXVSSRWPPLRLPSRGMAAPRGAAAGGARRVEGWEGASLLSGSAPGSARWPRAAPAPASQVGARCAAGAPCPLRPRVWRRGAVGAENAPSELAASTPAGGGRGAGSGSSDLAGRGAVAARFPGGXGHSRQQHGAEKDGGQGFLGSQPPPRSCAHQRRRGACSGNAAPSSSARRMSASSRSRQPEKATQSRSNSARSSAARPRSRSTAVSRAQVDTASSCAFWRVFCSSCRRFCESAEPPTVSTRWW

SEQ ID NO: 38681 - protein, 376 aa, Homo sapiens
  DOMAIN (116)..(157): Zinc carboxypeptidases zinc-binding region 1 proteins. domain identified by eMATRIX, accession number BL00132C, p-value=7.863e- 10, raw score of 21.35
  DOMAIN (5)..(374): Zinc carboxypeptidase domain identified by PFam, accession name Zn_carbOpept, E-value=2.2e-24, PFam score of 93.8
LDFQHHNYKAMRKLMKQVQEQCPNITRIYSIGKSYQGLKLYVMEMSDKPGEHELGYWHGEWGEVGTGQGPRHEPAASPHVSPGEPEVRYVAGMHGNEALGRELLLLLMQFLCHEFLRGNPRVTRLLSEMRIHLLPSMNPDGYEIAYHRGSELVGWAEGRWNNQSIDLNHNFADLNTPLWEAQDDGKVPHIVPNHHLPLPTYYTLPNATVSILRAAVEVLWGADPCLCLLPLLTCPIQVAPETRAVIKWMKRIPFVLSANLHGGELVVSYPFDMTRTPWAARELTPTPDDAVFRWLSTVYAGSNLAMQDTSRRPCHSQDFSVHGNIINGADWHTVPGSMNDFSYLHTNCFEVTVELFCDMFPHENELPHEWENNTDA

SEQ ID NO: 38682 - protein, 738 aa, Homo sapiens
  DOMAIN (228)..(273): 186 DISCOIDIN I N-TERMINAL domain identified by eMATRIX, accession number DM00516, p-value=8.606e-13, raw score of 30.53
  DOMAIN (117)..(271): F5/8 type C domain identified by PFam, accession name F5_F8_type_C, E-value=1.6e-41, PFam score of 151.4
  misc_feature (1)...(738): Xaa = X or * as defined in Table 2
MWGLLLALAAFAPAVGPALGAPRNSVLGLAQPGTTKVPGSTPALHSSPAQPPAETANGTSEQHVRIRVIKKKKVIMKKRKKLTLTRPTPLVTAGPLVTPTPAGTLDPAEKQETGCPPLGLESLRVSDSRLEASSSQSFGLGPHRGRLNIQSGLEDGDLYDGAWCAEEQDADPWFQVDAGHPTRFSGVITQGRNSVWRYDWVTSYKVQFSNDSRTWWGSRNHSSGMDAVFPANSDPETPVLNLLPEPQVARFIRLLPQTWLQGGAPCLRAEILACPVSDPNDLFLEAPASGSSDPLDFQHHNYKAMRKLMKQVQEQCPNITRIYRIGKSYQGLKVYVVEMSDKPGEHELGEPEVRYVAGMHGNEALGRELLLLLMQFLCHEFLRGNPRVTRLLSEMRIFLLPSMNPDGYEIALHRSSXLVGLSEGRWNNQSIDLNHNFADLNTPLWEAQDDGKVPHIVPNHHLPLPTYYTLPNATVAPETRAVIKWMKRIPFVLSANLHGGELVVSYPFDMTRTPWAARELTPTPDDAVFRWLSTVYAGSNLAMQDTSRRPCHSQDFSLNGNIINGADWHTVPGSMNDFSYLHTNCFEVTVELSCDKFPPEEXICPKEWENNKDALLTYLEQVRMGIAGVVRDKDTELGIADAVIAVDGINHDVTTALGPGIIWRLAXPPGDYMVDLPSSEGYHSVTRNCRVTFEEGPFPCNFVLTKTPKQRLRELLAAGAKVPPDLRRRLERLRGQKD

SEQ ID NO: 38683 - protein, 57 aa, Homo sapiens
  misc_feature (1)...(57): Xaa = X or * as defined in Table 2
HFRSAGVCWXPPPLSVHGPRXHFRSAGVCWSSTPDPVCLGITSRGCRTAKIAAFSFL

SEQ ID NO: 38684 - protein, 90 aa, Homo sapiens
TKPPGSSNTATRQSLWSHTMSLDSSSLGRASAAELRLASGRCPSVTKLPEEGTGSNLCCSAASAGDTQANRVWSGPPANSSRPAEEEPDC

SEQ ID NO: 38685 - protein, 887 aa, Homo sapiens
  DOMAIN (431)..(448): RNase H domain identified by eMATRIX, accession number PF00075A, p-value=4.429e-09, raw score of 14.44
  DOMAIN (592)..(697): Integrase core domain identified by PFam, accession name rve, E-value=2.7e-19, PFam score of 70.7
  misc_feature (1)...(887): Xaa = X or * as defined in Table 2
MVEEVLLDNILKSVFRLGSILPITFSFPSDSQGPLLQVCRSLLEIHSRPCLPGYHQWRLQNSKDCCLFLPLEASSQRGTCQMPAGALFYKVSVDPFWEVSSSQETWGSGIHLRRQSVPYQSSSAVLGDLLFSSEPACKNKSAEAVPTAAPSPRDALSREEESREAVWPQRLSHAPMGSAQLELPGGFVYTVRRKLPTQASVMLDAPPATKLEHPRSSSDCCVGSKNFKPVDLSLLGSMGVGSVELDHLAPWLQPPFQESERFCLSGVPVSPPLSEEINHALPKATVMASLGAVARKDNADSLHVPPPTPLFASRPVTALKYWQAPREDLQPFTRVTLHWGKGNDQTFWGLVDTSSELTLTPNDPKHHYGPPIKVGAYGGQVINGVFAHIQLRVNPMGHWTRPLVIFPVPERKISIDILSSWQNHIGSLIGRKTDGSWRMTVGYRKLNQVVTPIAAAVPDVVSMLEQINPSPESECLKMSHQITMRPELPIMNWVLSDPSSHELGYAQQHFIIKWKWYICDRAPAGSESTTSPFITQWVHEQSGYGDRDGGYTWAQQHRLPLTKNDLAMATAECPISQQQRPTLSPXHGVIPRGDQPATWWRVDYIAPLPSWKGQRFFFTRIDTYSGYKFIYPAPNASAKNTICGLMECLIHCHGIPHSIASDEGTHFIAKEVQQWAHAYRIHWSYHVPHHPEGWGKVLQKAVHALNQHPIYATASLIARIHGFRNQGVEVLSLTITLSDPLAKFLLPVSVTLCSAGLEVIVPEGGMLPPGDTTMIPLNWKLRLPPIHFGFLLSLSQQAKKGVTILAGAIDPYYQGEVSLLLNNGRKEEYVNGKQQQPNPSRTTNGPDPSGMVWVTPPSKKPRTAEVLAEDKGNTEWVVEESSHQYQL

SEQ ID NO: 38686 - protein, 1085 aa, Homo sapiens
  DOMAIN (1044)..(1064): D-ALA-D-ALA CARBOXYPEPTIDASE 3 (S13) FAMILY SIGNATURE domain identified by eMATRIX, accession number PR00922A, p-value=4.086e- 18, raw score of 15.09
  DOMAIN (200)..(302): ParA family ATPase domain identified by PFam, accession name ParA, E-value=5.1e-22, PFam score of 86.6
MKLMETLNQCINAGHEMTKAIAIAQFNDDSPEARKITRRWRIGEAADLVGVSSQAIRDAEKAGRLPHPDMEIRGRVEQRVGYTIEQINHMRDVFGTRLRRAEDVFPPVIGVAAHKGGVYKTSVSVHLAQDLALKGLRVLLVEGNDPQGTASMYHGWVPDLHIHAEDTLLPFYLGEKDDVTYAIKPTCWPGLDIIPSCLALHRIETELMGKFDEGKLPTDPHLMLRLAIETVAHDYDVIVIDSAPNLGIGTINVVCAADVLIVPTPAELFDYTSALQFFDMLRDLLKNVDLKGFEPDIGCNAVSWAPAVVPVSLIDHPSGQKPNYIKRFASGGCDNLIKLWKEGGRTASGREEQKLEAHSDWVSRCGPGPPPSACPPAPSPAAPVLTGHHSKMTGNPAKTNADPSSPGFTGLTGIPAETWNAFCLSPVPLSFPTKGSNPFFEGLEGSLRSKPLSQCPLDETSAFLALDTESCLVASAFGVCTVHWALVSTSLAFAHSDHQNAFPSPLAHNLLHRMNALLLGHRMLLALGELCEGGHLQAEEEDNRGGEGARVRLPEGEGSWVCEEREEWRVPVWSGCAGPTGSCGGLRKWREASQALTWPEGLRLHPDRRNFQQHRQGSDGKPAKKGQPGALAPSSWGVEAADRFLSSEHPEEGIECKSIKPVLAKYLVWTRLFVGLLAELRDESAPETTPAGRRRQPQVWSGARQTCGQRTERLAGGLGEMQACSGNLGAEKEKQSKKLAGGWPMSPTSLHALGPKLVPAKSQRHRAEHMSTWQVGVVSSSYFTGNLVGTLLTGYVIKRIGFNRSYYLASFIFAAGCAGLGLMIGFWSWLAWRFVAGVGCAMIWVVVESALMCSGTSRNRGRLLAAYMMVYYVGTFLGQLLVSKVSTELMSVLPWVTGLTLAGILPLLFTRVLNQQAENHDSTSITSMLKLRQARLGVNGCIISGIVLGSLYGLMPLYLNYKGGKSSPTPAVRPARHNSLPGPEAKKYRPGFIIGLTSCIAFSVQAANVDEYITQLPAGANLALMVQKVGASAPAIDYHSQQMALPASTQKVITALAALIQLGPDFRFTTTLETKGNVENGVLKG

SEQ ID NO: 38687 - protein, 64 aa, Homo sapiens
  misc_feature (1)...(64): Xaa = X or * as defined in Table 2
DWESCQNQCXPQQPRLHGTHWDPCXDMECPSVCPQSPCPSPLRDQWTIPCPDPLSPQTMAAGRW

SEQ ID NO: 38688 - protein, 58 aa, Homo sapiens
HFYPWGWGTFGESWRPPARRGTCTPGAHPRAPATPPRAQSCPGLRRGPEAPTLGQPHG

SEQ ID NO: 38689 - protein, 92 aa, Homo sapiens
LSSYCVHAGCYPREAAMRMISFSPSQRWKPFGESWRPPARRGTCTPGAHPPRPPSPRAAGPAHRPPPPPSSELPRAPQRPGRNRRPGNSGPV

SEQ ID NO: 38690 - protein, 293 aa, Homo sapiens
  DOMAIN (211)..(222): PROTEIN REPEAT NEUROFILAMENT TRIPL domain identified by eMATRIX, accession number PD01351A, p-value=5.680e-10, raw score of 8.69
  misc_feature (1)...(293): Xaa = X or * as defined in Table 2
TGKLHTSVICNSTELTSWDSRRLFLKGKPLLSAGAGVNVMPSTAPFPAPCKGSLRGNPSRPTHPXSRSPQLERDTGGASFRVDEGEERGASSGGSRDTEGGSGAVPFGESWRPPARRGTCTPGAHPPRPPSPRAAGPAHRPPPPPSSELPRAPQGPEAPTLGQPHGRGLFPPLFKLSKLYWPLGETRSRPRPRPYCQSPGPGVTERGRRWSAPRAPGAPRSPRWRRQSGPGALPRPRVNPCIQHGSEASYAPALXWALRIPQGGNTSSADEPADFTPNQQADQMPCLHSCSCG

SEQ ID NO: 38691 - protein, 1045 aa, Homo sapiens
  DOMAIN (635)..(684): Eukaryotic RNA polymerase II heptapeptide repeat proteins domain identified by eMATRIX, accession number BL00115Z, p-value= 9.093e-10, raw score of 3.12
MKGARWRRVPWVSLSCLCLCLLPHVVPGTTEDTLITGSKTPAPVTSTGSTTATLEGQSTAASSRTSNQDISASSQNHQTKSTETTSKAQTDTLTQMMTSTLFSSPSVHNVMETVTQETAPPDEMTTSFPSSVTNTLMMTSKTITMTTSTDSTLGNTEETSTAGTESSTPVTSAVSITAGQEGQSRTTSWRTSIQDTSASSQNHWTRSTQTTRESQTSTLTHRTTSTPSFSPSVHNVTGTVSQKTSPSGETATSSLCSVTNTSMMTSEKITVTTSTGSTLGNPGETSSVPVTGSLMPVTSAALVTVDPEGQSPATFSRTSTQDTTAFSKNHQTQSVETTRVSQINTLNTLTPVTTSTVLSSPSGFNPSGTVSQETFPSGETTISSPSSVSNTFLVTSKVFRMPISRDSTLGNTEETSLSVSGTISAITSKVSTIWWSDTLSTALSPSSLPPKISTAFHTQQSEGAETTGRPHERSSFSPGVSQEIFTLHETTTWPSSFSSKGHTTWSQTELPSTSTGAATRLVTGNPSTGAAGTIPRVPSKVSAIGEPGEPTTYSSHSTTLPKTTGAGAQTQWTQETGTTGEALLSSPSYSVTQMIKTATSPSSSPMLDRHTSQQITTAPSTNHSTIHSTSTSPQESPAVSQRGHTQAPQTTQESQTTRSVSPMTDTKTVTTPGSSFTASGHSPSEIVPQDAPTISAATTFAPAPTGDGHTTQAPTTALQATPSSHDATLGPSGGTSLSKTGALTLANSVVSTPGGPEGQWTSASASTSPDTAAAMTHTHQAESTEASGQTQTSEPASSGSRTTSAGTATPSSSGASGTTPSGSEGISTSGETTRFSSNPSRDSHTTQSTTELLSASASHGAIPVSTGMASSIVPGTFHPTLSEASTAGRPTGQSSPTSPSASPQETAAISRMAQTQRTRTSRGSDTISLASQATDTFSTVPPTPPSITSSGLTSPQTQTHTLSPSGSGKTFTTALISNATPLPVTYASSASTGHTTPLHVTDASSVSTGHATPLPVTSPSSVSTGHTTPLPVTDASSVSTGHPTP

SEQ ID NO: 38692 - protein, 745 aa, Homo sapiens
  misc_feature (1)...(745): Xaa = X or * as defined in Table 2
RQTVGDAQPHHHPPQPPRPSFPPFPALPCTPAPQLPPSPSCLREEFPSSPMGQTPGTWSSSGGPWTSPPHSSSRRLASPLAPLSVIPSTSQTMARSSSQSQTTRFSPTPTHSQQASQAGTLWPWWLRSGTMLTSPLVGGPHFIRNTRRSMVNTACXSSRPSLGLERSQTTGATRPGGPXRSRGSMPTPILPSGPSGATPTKPSSPRTGAGPMPCFSTRAVGCSGTWPSAQATRCSWASLVEMAISKTAHXCPSQCGRGIALIDSXIPTQASKGCSSTGYTGKKGPTTVSSACSGXRASLGGPAGAGTRSPALVPGSRDDGTYDSNPSAXVAGASAVGSCAASPLGEEACAAATGPGESFSEGWHEQTSLAVGPGTGATELVLPLEGHSPTSVPCTSRGGPTWAVATYRPPSPPGCSGTPTSPPWMVSVTPSMGWGTSCWSGPKTGTPPSCFRAAPPRLAQPRPPTSSPLRLSTASSSLGPVTVQWLLEPHDAIRVLLDNQTVTFQPDHEDGGGQETFNATGVLLSRNGSGSRPASTAGPPSRXSRSPTSSTPPPASRPSTRTARRGSWGSGITIQRTTSGCPMAPPFPQGALRRCFSTLEXPGRSTGQASLARGMTSCLPTSPLFSTHNCKKTAPGLNIXSPTVTEIAHASMTPWPCATQASDFTRGKSVKTTSRRTPPSISTRPPSMVVVXLKPTRGRPRXFSTPAMLRMPTSRSETAAPTWSSLRMGRCCGHPSRWSHSLWRF

SEQ ID NO: 38693 - protein, 967 aa, Homo sapiens
  misc_feature (1)...(967): Xaa = X or * as defined in Table 2
MVWGFTCSTTATLEGQSTAASSRTSNQDISASSQNHQTKSTETTSKAQTDTLTQMMTSTLFSSPSVHNVMETVTQETAPPDEMTTSFPSSVTNTLMMTSKTITMTTSTDSTLGNTEETSTAGTESSTPVTSAVSITAGQEGQSRTTSWRTSIQDTSASSQNHWTRSTQTTRESQTSTLTHRTTSTPSFSPSVHNVTGTVSQKTSPSGETATSSLCSVTNTSMMTSEKITVTTSTGSTLGNPGETSSVPVTGSLMPVTSAALVTVDPEGQSPATFSRTSTQDTTAFSKNHQTQSVETTRVSQINTLNTLTPVTTSTVLSSPSGFNPSGTVSQETFPSGQRRLWEAVKRRKALCKRKSWMSKVGEEVDQVGGASSFCQTSSCASCCMQSVVMTTSVLLDSWQDDTQRDKVSGKNSASSPLSGIDCNSPPSLTSAVTXTLNFHSSQTVSCALPTPSTLRAAVLGSPPSRQEICLAPTMRPAAQWPQCLQKRQHPIHCPRSXEGPCWIPKPCSCHQHRPALPSSPPTPPCPAKLSTIHRPALPSSQHNTTLPCQASPGPQPPRLTAVLRSPGTGATELVRAAGMTSPTSVPCTSRGGPTWAVLHTGPHSPPGCSGTPTSPPWMVSVTPSMGWGTSCWSGPKTGTPPSCFRAAPPRLAQPRPPTSSPLRLSTAPAAWAPSRSNGSLSLTTQSVSCWITRLXHFSLTMKTAEVVPVCCVLVASGPWLRWACAWGPGCVCVLQWPWLLLRVAGALVAVAVCSWPSALWCRARWLAASVTGAPSAATARAPRMPVRSRASRVSTAFLGRAARPALQTXLGMGGTVRLWGALPVSEPVLPCELHATIKATATSPRLWAVSPCAPAPQPSLTAAASWLGTTSVQLSTXNFPXESSSSCSVKRKMPPWQRSTPRSVLQAALWXTXARXRLTSDAMATRATTWSTAPRAASPACPRAVGATVTMEASASTCPVGPAAGA

SEQ ID NO: 38694 - protein, 156 aa, Homo sapiens
  misc_feature (1)...(156): Xaa = X or * as defined in Table 2
SSPPLGHPRPISQSCPRPAVSCSRGPSALLCRPLLGPEDAPPXGSSWPEGPLWGPRYPSVSVGNGHWSGAGVADEPAAPSRPAGARRAPSGGRPAAARCSRRRASRSSRPGPPAGRAGRXACPAAARSAVAAAPRPPGAPXCGSASSATAPAAAPP

SEQ ID NO: 38695 - protein, 439 aa, Homo sapiens
  misc_feature (1)...(439): Xaa = X or * as defined in Table 2
DSSRLCSRRSSRGHTVGLWGQSPGLGTKGRGGGGXEDPPPGTPRGQQDPSHSAKQPPAGLPAGVKWGPSSSPPSPPPPAKRELQGRCPKFGRCSEGRRAGDPGPSGCPRAKQTHSLGTAVPVVVIYYPPVHALSPAANRTLNXNIISSQPLGTPPMVPGEXHGPRGHAXPRHPLPKDPPQGPAQRXRGCRSEVQRRPGTLPXGSPPGNSHNGLPAMPPRXPPTARPQFPNPQDPRPLGQSSSEPLPRCPKTLCKTRHPDLRGRGKQPRGWAQVPPGEVFGGGNGAQLEAXEGARMSASPPXSLESSDTTASPPSQGLFTAQKGLWGPQRRLGALWLGRRESEKTSWRRLQSQVYWSCREEVEKCSRQGARLGQRRGWENVLGKSGSASECLSCPFCASLLAMPSGCPWELSKVAQCFPLKTGHPGPQEGSNNLKVTQQS

SEQ ID NO: 38696 - protein, 256 aa, Homo sapiens
  DOMAIN (132)..(160): PROTEIN SPORULATION REPEAT PRECU domain identified by eMATRIX, accession number PD02283C, p-value=4.713e-09, raw score of 17.54
  DOMAIN (68)..(249): Keratin, high sulfur B2 protein domain identified by PFam, accession name Keratin_B2, E-value=1.2e-05, PFam score of 8.8
  misc_feature (1)...(256): Xaa = X or * as defined in Table 2
HSLIHSLTHSLPSPPVQSPAWLRPLCLSAPATXATACRVCLPGSCDSCSDSWQVDDCPESCCEPPCCAPSCCAPAPCLTLVCTPVSCVSSPCCQAACEPSPCQSGCTSSCTPSCCQQSSCQPACCTSSPCQQACCVPVCCKPVCCVPVCCKPVCCKPICCVPVCSGASSSCCQQSSRQPACCTTSCCRPSSSVSLLCRPVCRSTCCVPIPSCCAPASTCQPSCCRPASCVSLLCRPTCSRLSSACCGLSSGQKSSC

SEQ ID NO: 38697 - protein, 151 aa, Homo sapiens
  misc_feature (1)...(151): Xaa = X or * as defined in Table 2
AQSLGRARPWRGASSGRVPDSRLEXTPTVCLAPEHGIVAATASLGTFPLTQWEGHNGCYQRSLFPPQSMPTPPCPASETPPVFRYRPPPSPGSSPRSITAHPVPLGSSVNPPHPEVWNLPCTWKRLATSLQQKFTFGPKLGITNVDSDSLS

SEQ ID NO: 38698 - protein, 197 aa, Homo sapiens
  misc_feature (1)...(197): Xaa = X or * as defined in Table 2
IGTWRFGGSDRQEGQSRQGNCEANDWPVSTALAKPRGATGKNKSPGNDPAAAIATAGAAATAGPGSPCSLQNRPHLLPFISXAPPEGXTPSTQDRPWYSAGAAXASVKCRTGAVQKQLLLXNRRRFPGSPAPAQTADPGRGGGRGTGSGVPSTGSSSDWQERPWPCGGMEPPRLRCLLRCSGSIHSPTALQSLRNHQ

SEQ ID NO: 38699 - protein, 890 aa, Homo sapiens
  DOMAIN (20)..(38): NEUTROPHIL CYTOSOL FACTOR 2 SIGNATURE domain identified by eMATRIX, accession number PR00499A, p-value=9.022e-09, raw score of 10.66
MTRAGPPRQTTTARTALLAAPQRPAAALLPPRPGPGTAPSEARARCGSGDREGGRCTVHRAPSRAPDTHARASHRRHPAAPLGASGGSEFSNFSVCENDLKKTTVRFHFAPTETAIHSASPDGSLISCLRFAFSEPPLSHMPNEDENISGKGCCEDSVGDSAQRSGSLELPAEARASPDAWLRWTPSELGHPSSREEPRGATGKNKSPGNDPAAAIATAGAAATAGPGSPCSLQNALIYSHSFLEHHLKAEHPAHRTDPGTQQVLHKRLLNAGLEQCRNSSYSEIAGASRGVPHRRRRRIQGVEGAGERVQSAIYRQFVGLAGKALALRRDGAPQTALFATLLRIHSLSNRSAITSQSPVNFAAYLRRERMSIALSLEKNKKPLTEEEAIAAAAAGHEPPQNQITEITMKEPKSTHSEPDAYTSAPRGSGPTYCAGAGNSRAGGGLTKYNSAHSSSRVPRPRLPSQRRGASCGLGPGPHQPAPRTRGLTHDPGDAQSPVLGKGQAPGEELLQGASQTASRVNAYCVPGSEHGTVAATASLGTFPLTQYRPPPSPGLAQDQLLRTRFPWGPSVNPPQPEVWNCLPWNDRQLKRAKTKLKEKNRIEGLAVPNFKTYYRAAAIKTVRTSSMEKPLTVLRVSLYHPTLGPSAFANVPPRLQHDTSPLLLGRGQDAHLQLQLPRLSRRHLSLEPYLEKGSALLAFCLKALSRKGCVWVNGLTLRYLEQVPLSTVNRVSFSGIQMLVRVEEGTSLEAFVCYFHVSPSPLIYRPEAEETDEWEGISQGQPPPGSGCQQFLFSAQKDDRFAPRASYKEVQLHSQALSIFSIRKTELEPSGWLQGLVFALDITIPHLLRQPEQAGILTLAFLCFSKNVNLAKLSVRDTGSPRGRLANAP

SEQ ID NO: 38700 - protein, 90 aa, Homo sapiens
  misc_feature (1)...(90): Xaa = X or * as defined in Table 2
TTSDPYHPAPEIGLGXSPNGGPMQGDLPGASGKEVSFLXGNVNEDIHNSGCVWQPSCDHLARQPKNKAVTMETKKRQKDTGSSLFSSSCS

SEQ ID NO: 38701 - protein, 138 aa, Homo sapiens
  DOMAIN (57)..(95): Synapsins proteins domain identified by eMATRIX, accession number BL00415O, p-value=4.434e-09, raw score of 3.44
  misc_feature (1)...(138): Xaa = X or * as defined in Table 2
EYGQQCQCHKRPRGPFGFHSPGPRGGSYISDLSGQESPEAGGGFPPRISALRPKSNCSFLRPRGRGSXYPAAGRPRAPGGPALQLSPRPHPAAPPCRAAPQPKPPRRDVEPAPPKLHPPPGGPAPRRQGQDLPGRLQP

SEQ ID NO: 38702 - protein, 398 aa, Homo sapiens
  misc_feature (1)...(398): Xaa = X or * as defined in Table 2
TMPPTRFLAHLPDQAYVCFCCVEGKERNLSRSKHTSPHSSTPAHLLSKPPRSSEVVYHSQVLPGTPRPTSQLHLELVLPVFARLPGHRGIEREQSSPYSRRGHHRGYTEEDXVNSXXDGVEPYGKVAAAAGPQRGRGYCCPWRRQRHGRHRRRPPIALQRRQPARTPSARPPIALQRRQQARTPSPRPPIALQRRQRHGRHRPRPRHRSAEKTTARTPSPRPPIALQRRQRHGRHRHGHHRSAEKTTARTPSPRPPIALQRRQRHGRHRPRPPIALQRRQRHGRHRPRPPIALQRRQRHGRHRPWPPIALQRRQRHGRHRPWPPITLQRTXRHRCHRHGHPLPLQRTXQHGCHRPWPPIALQRTXPAWTPLAMATHRSTKKITAWTPSPRPPIALQRT

SEQ ID NO: 38703 - protein, 110 aa, Homo sapiens
MGLGAGLGAPGSCFPSEENEESRILQPPQYFWEEEEELNDSSLDLGPTADYVFPDLTEKAGSIEDTSQAQELPNLPSPLPKMNLGEPPWHMPPREEEEEEEEEEEREKDE

SEQ ID NO: 38704 - protein, 336 aa, Homo sapiens
  misc_feature (1)...(336): Xaa = X or * as defined in Table 2
GNEGKAGTSSCWPDKPAAPAVASSLASXGASNSTPSPAAGSTVASASWLVESWSPGVTVVGVTEGSSKLGPMLLSTSTPDEAWSPESSCLLLVAPGVWLLPEAGFLLGIHSQGAAPPSPSSSCFSTSSFSLSSSSSSSSSSSLPMATPCDLGFSKCGSRLSPPAKALLEDALTPRGGAXAWMRDRASIGADPVWLCPSLPSSFLCFSLKAVCTSSAPPCYTTGFLSPTQKTKPSKQGLGVCSSQVSRHPALGQLLQDIAEDKSPPHSGSTICSLWLSSSRAPCDRCTSRPSSKVQGYLCQQDSRSRTRAGWKTPTVVGRHVPVKIEKESIRPANFG

SEQ ID NO: 38705 - protein, 21 aa, Homo sapiens
  misc_feature (1)...(21): Xaa = X or * as defined in Table 2
MLQLEELKKXXXXXXXXXXXX

SEQ ID NO: 38706 - protein, 350 aa, Homo sapiens
  misc_feature (1)...(350): Xaa = X or * as defined in Table 2
LYLKVCYIXKELFEFSNLYKHPSGEEVWERILRVXDNGGRNIKLYQAEFIDLGPVSRDSAFNVAAQGVKKGSNRLFPWLAEIWITRWPTVSELEMPDLPWFNVEEGIKRLREIGMVEWISHFRCTHPSWKGPEDIPLTNALQNRFVRAAPASLKSLVIALFCMSDATAGTAVTQLQNLNTMGIIGSRGVRDQVVALNHQRQVGVANRQGTPRQRGTKKRTRXPGQAKRPGPKERGTRSHAYAHTSVTTPKNNRHDTRPSQRTPQQKRDAQHQTETPNTTPNTSRPPSHVSFFRSKKRRRRPQHEERNKRTRTEEEARERNRANKDDTKRQPPKKTRENRRQLWSEFLSWE

SEQ ID NO: 38707 - protein, 86 aa, Homo sapiens
  DOMAIN (19)..(50): SERUM PARAOXONASE/ARYLESTERASE P domain identified by eMATRIX, accession number PD02637E, p-value=5.500e-26, raw score of 11.92
FFGSALKLETFWLRVVAKGFCSANGITVSADQKYVYVADVAVKNIHIMEKHDNWDLTQLKVIQLGTLVDNLTVDPATGDILAGCHP

SEQ ID NO: 38708 - protein, 60 aa, Homo sapiens
  misc_feature (1)...(60): Xaa = X or * as defined in Table 2
MGKLVALVLLGVGLSLFGEMFLAFRERVNASREVEPVEPENCHLIEELESGSEDIDILPX

SEQ ID NO: 38709 - protein, 382 aa, Homo sapiens
  DOMAIN (55)..(110): SERUM PARAOXONASE/ARYLESTERASE P domain identified by eMATRIX, accession number PD02637A, p-value=1.000e-40, raw score of 14.26
  DOMAIN (25)..(382): Arylesterase domain identified by PFam, accession name Arylesterase, E-value=1.8e-140, PFam score of 480.0
  misc_feature (1)...(382): Xaa = X or * as defined in Table 2
AGTARRAPESSRRRAVAAGHPETMGKLVALVLLGVGLSLVGEMFLAFRERVNASREVEPVEPENCHLIEELESGSEDIDILPSGLAFISSGLKYPGMPNFAPDEPGKIFLMDLNEQNPRAQALEISGGFDKELFNPHGISIFIDKDNTVYLYVVNHPHMEVHCGRIFXILREQQRSSGYYLKTIKTWNFFKSVNDIVVLGPEQFYATRDHYFTNSLLSFFEMILDLRWTYVLFYRPREVKVVAKGFCSANGITVLSQTQKYVYVADVAAKNIHIMEKHDNWDLTQLKVIQLGTLVDNLTVDPATGDILAGCHPNPMKLLNYNPEDPPGSEVLRIQNVLSESPRVSTGYANNGSVLQGTLWASVYHGKILIGTVFHKTLYCEL

SEQ ID NO: 38710 - protein, 524 aa, Homo sapiens
  DOMAIN (120)..(458): AIR synthase related protein domain identified by PFam, accession name AIRS, E-value=1.8e-06, PFam score of -5.1
  misc_feature (1)...(524): Xaa = X or * as defined in Table 2
KGPLLLSLPCRAGAMAETSATGACGEAMAAAEGSSGPAGLTLGRSFSNYRPFEPQAFGASSPSWRLDGAFSGNERAEGCKVPQEGRLLKLLAGLTRPDVRPPLGRGLVGGQEEASQEAGLPAGAGPSPTFPALGIGMDSCVIPLRHGGLSLVQTTDFFYPLVEDPYMMGRIACANVLSDLYAMGITECDNMLMLLSVSQSMSEEEREKVTPLMVKGFRDAAEEGGTAVTVGQTVVNPWDLLIGGVATCSIANQFEFIMPDSAVVGDVLVLTKPFRNPGLLFNAHQWLGXFLERWDXSXRWWFSREEVELAYQEAMFNMATLNQNCCRVXMHTFNAHAATDITGFGILGHSQNLAKQQRNEVSFVIHNLPIIAKMAAVSKRASGTVWGFFQGTSAETSGGITGFCLPREQGGLAFCSEIQILPKYGRGSPKAWIVGIVEKGNRTAPDPLTSPRVIEVLPRGATAAVLAPDSSNALLLSLAREIERTEVVWTLEPLSTITDGSQELIVKKFPKKAACIVVPAALSR

SEQ ID NO: 38711 - protein, 785 aa, Homo sapiens
  DOMAIN (724)..(743): CHROMOGRANIN SIGNATURE domain identified by eMATRIX, accession number PR00659C, p-value=5.673e-20, raw score of 7.46
  DOMAIN (73)..(756): Granin (chromogranin or secretogranin) domain identified by PFam, accession name Granin, E-value=0, PFam score of 1131.9
  misc_feature (1)...(785): Xaa = X or * as defined in Table 2
ARGRPLLAARSSRPCGPRLPFKRAGPAPAAPHRGDQEARWFSGAAPSRLPPAPRFSGPAAIFLSAQGPPSGAMQPTLLLSLLGAVGLAAVNSMPVDNRNHNEGMVTRCIIEVLSNALSKSSAPPITPECRQVLKTSRKDVKDKETTENENTKFEVRLLRDPADASEAHESSSRGEAGAPGEEDIQGPTKADTEKWAEGGGHSRERADEPQWSLYPSDSQVSEEVKTRHSEKSQREDEEEEEGENYQKGERGEDSSEEKHLEEPGETQNAFLNERKQASAIKKEELVARSETHAAGHSQEKTHSREKSSQFSAAXEAGSQENRPQESKGQPRSQEKSEEGDEDATSEVDKRRTRPRHHHGRSRPDRSSQGGSFPSEEKGHPQEESEESNVSMASLGEKRDHHSTHYRASEEEPDYGEEIKGYPGVQAPEDLEWERYRGRGSEEYRAPRPQSEESWDEEDKRNYPSLELDKMAHGYGEESEEERGLEPGKGRHHRGRGGEPRAYFMSDTREEKRFLGEGHHRVQENQMDKARRHPQGAWKELDRNYLNYGEEGAPGKWQQQGVLQDTKENRVEARFQDKQYSSHHTAEKRKRLGELFNPYYDPLQWKSSHLERRDNMIDNFLEGEEENELTLNEKNFFPEYNYDWWEKKPFSEDVNWGYEKRNLARVPKLDLKRQYDRVAQLDQLLHYRKKSAEFPDFYDSEEPVSTHQEAENEKDRADQTVLTEDEKKELENLAAMDLELQKIAEKFQPKGLTVIGAVGTVKKQPSHDLFFTTSLKDTIYLPKGRK

SEQ ID NO: 38712 - protein, 613 aa, Homo sapiens
  DOMAIN (547)..(571): Granins proteins domain identified by eMATRIX, accession number BL00422D, p-value=9.763e-17, raw score of 19.48
  DOMAIN (1)..(613): Granin (chromogranin or secretogranin) domain identified by PFam, accession name Granin, E-value=3.3e-224, PFam score of 758.3
  misc_feature (1)...(613): Xaa = X or * as defined in Table 2
ILPVPIIPCRQVLKTSKCPTRQADLGHCSDPCSYSLHITFPADASEAHESSSRGEAGAPGEEDIQGPTKADTEKWAEGGGHSRERADEPQWSLYPSDSQVSEEVKTRHSEKSQREDEEEEEGENYQKGERGEDSSEEKHLEEPGETQNAFLNERKQASAIKKEELVARSETHAAGHSQEKTHSREKSSQESGEETGSQENHPQESKGQPRSQEESEEGEEDATSEVDKRRTRPRHHHPRSRPDRSSQGGSLPSEEKGLPQEESEESNVSMASLGEKRDHHSTHYRASEEEPEYGEGNKRGYPGVQAPEDLEWERYRGRGSEEYRAPRPQSEESWDEEDKRNYPSLELDKMAHGYGEESEEERGLEPGKGRHHRGRGGEPRAYFMSDTREEKRFFGEGHHRVQENQMDKARRHPQGAWKELDRNFLNYGEEGAPGKWQQQGDLQDTKENREEAXVFKINHFSSHHTAEKRKRLGELFNPYYDPLQWKSSHFERRDNMNDNFLEGEEENELTLNEKNFFPEYNYDWWEKKPFSEDVNWGYEKRNLARVPKMDLKRQYDRVAQLDQLLHYRKKSAEFPDFYDSEEPVSTHQEAENEKDRADQTVLTEDEVWSRASV

SEQ ID NO: 38713 - protein, 127 aa, Homo sapiens
QKFARAHGVSVQPEASDTHILLLEGFLLYSYNTRNYTVPDPPGLFDGHVWPMYQKYRQEMEANGVEVVYLDGMKSREELFREVLEDIQNSLLNRSQESAPFPARPARTHGPGRGCGHRTAFLQRPSR

SEQ ID NO: 38714 - protein, 147 aa, Homo sapiens
  DOMAIN (2)..(20): URIDINE KINASE SIGNATURE domain identified by eMATRIX, accession number PR00988A, p-value=8.905e-09, raw score of 6.39
  misc_feature (1)...(147): Xaa = X or * as defined in Table 2
MKLIVGIGGMTNGGKTTLTNSLLRALPNCCVIHQDDFFKVPALARGVLESLDMEAMLDTVQAWLSSPQKFARAHGVSVQPEASDTHILLLEGFLLYSYKPLVDLYSRRYFLTVPYEECKWKEKYPQLHSPXSPRPLRWPRVAHVPEV

SEQ ID NO: 38715 - protein, 139 aa, Homo sapiens
LLKIEAGLGCFTTVAVEVPGEILTHQNLREMSLQTSKRRKRLERHYGEAYAGCHYSTERHDALYVVGALDEAMELRGMRYHPIDIETSVIRAHKSVTEWQQQRGSTGTQTPLARWSDAVLEMGTREDGETVAEATEREG

SEQ ID NO: 38716 - protein, 1352 aa, Homo sapiens
  DOMAIN (801)..(1276): AMP-binding enzyme domain identified by PFam, accession name AMP-binding, E-value=0.0002, PFam score of -196.9
  misc_feature (1)...(1352): Xaa = X or * as defined in Table 2
SAPPDVTTYTSEHSIQVERPQGSTGSRTAPKYGNAELMETGDGVPVSSRVSAKIQQLVNTLKRPKRPPLREFFVDDFEELLEVQQPDPNQPKPEGAQMLAMRGEQLGVVTNWPPSLEAALQRWGTISPKAPCLTTMDTNGKPLYILTYGKLWTRSMKVAYSILHKLGTKQEPMVRPGDRVALVFPNNDPAAFMAAFYGCLLAEVVPVPIEVPLTRKDAGSQQIGFLLGSCGVTVALTSDACHKGLPKSPTGEIPQFKGWPKLLWFVTESKHLSKPPRDWFPHIKDANNDTAYIEYKTCKDGSVLGVTVTRTALLTHCQALTQACGYTEAETIVNVLDFKKDVGLWHGILTSVMNMMHVISIPYSLMKVNPLSWIQKVCQYKAKVACVKSRDMHWALVAHRDQRDINLSSLRMLIVADGANPWSISSCDAFLNVFQSKGLRQEVICPCASSPEALTVAIRRPTDDSNQPPGRGVLSMHGLTYGVIRVDSEEKLSVLTVQDVGLVMPGAIMCSVKPDGVPQLCRTDEIGELCVCAVATGTSYYGLSGMTKNTFEVFPMTSSGAPISEYPFIRTGLLGFVGPGGLVFVVGKMDGLMVVSGRRHNADDIVATALAVEPMKFVYRGRIAVFSVTVLHDERIVIVAEQRPDSTEEDSFQWMSRVLQAIDSIHQVGVYCLALVPANTLPKTPLGGIHLSETKQLFLEGSLHPCNVLMCPHTCVTNLPKPRQKQPEIGPASVMVGNLVSGKRIAQASGRDLGQIEDNDQARKFLFLSEVLQWRAQTTPDHILYTLLNCRGAIANSLTCVQLHKRAEKIAVMLMERGHLQDGDHVALVYPPGIDLIAAFYGCLYAGCVPITVRPPHPQNIATTLPTVKMIVEVSRSACLMTTQLICKLLRSREAAAAVDVRTWPLILDTDDXPKXRFAQTLKPCNPDTLAYLDFSESTTGMLAGVKMTNAATSAFCRSIKLQCELYPSREVAICLDPYCGLGFVLWCLCSVYSGHQSILIPPSELETNPALWLLAVSQYKVRDTFCSYSVMELCTKGLGSQTESLKARGLDLSRVRTCVVVAEERPRIALTQSFSKLFKDLGLHPRAVSTSFGCRVNLAICLQGTSGPDPTTVYVDMRALRHDRVRLVERGSPHSLPLMESGKILPGVRIIIANPETKGPLGDSHLGEIWVHSAHNASGYFTIYGDESLQSDHFNSRLSFGDTQTIWARTGYLGFLRRTELTDPNGERHDALHVVGALEEAMELRGMRYHPIDIETSVIRAHKSVTECAEFTWTNLLVDVVELDGSEQEALDLVPLVTNVVLEEHYLIVGVEVEVDIGVIPINSRGEKQRMHLRDGFLADQLDPIYVAYNM

SEQ ID NO: 38717 - protein, 324 aa, Homo sapiens
  DOMAIN (1)..(55): Heat shock hsp90 proteins family proteins domain identified by eMATRIX, accession number BL00298I, p-value=6.637e-09, raw score of 30.07
  DOMAIN (27)..(123): Hsp90 protein domain identified by PFam, accession name HSP90, E-value=3.9e-38, PFam score of 140.1
  misc_feature (1)...(324): Xaa = X or * as defined in Table 2
KQCALLTFICSLPMSFGFAPAITVTVVNPRHPLIRDMLRRIKEDEDDKTVLDLAVVLFETATLRSGYLLPDTKAYGDRIERMLRLSLNIDPDAKVEEEPEEEPEETAEDTTEDTEQDEDEEMDVGTDEEEETAKMSXALLTFICSLPMSFGFAPAITVTVVNHFVLCSKTGSQVFRSENWKVWAESSRGDHDDCLDLCSVLCWGRTATGAFSCPAQLIFAVSSSSSVPTSISSSSSCSVSSVVSSAVSSGSSSGSSSTFASGSMFKLRRSILSILSPYALVSGKRYPDRSVAVSNKTTARSKTVLSSSSSLIRRSMSLISGCRD

SEQ ID NO: 38718 - protein, 651 aa, Homo sapiens
  DOMAIN (296)..(351): Heat shock hsp90 proteins family proteins domain identified by eMATRIX, accession number BL00298G, p-value=3.025e-31, raw score of 24.57
  DOMAIN (96)..(648): Hsp90 protein domain identified by PFam, accession name HSP90, E-value=2.2e-160, PFam score of 546.2
  misc_feature (1)...(651): Xaa = X or * as defined in Table 2
MTMAAAAVVARGAGARAATAAALRGGCGTAARGRPCAGPARPLCTAPGTAPDMKRYLWERYREAKRSTEGTKKYTTSLNARHYYTHFTEENEDEINSSSSYASQKKTFEINPRHPLIRDMLRRIKEDEDDKTVLDLAVVLFETATLRSGYLLPDTKAYGDRIERMLRLSLNIDPDAKVEEEPEEEPEETAEDTTEDTEPDEDEEMDVGTDEEEETGKESDDPMAYIHFTAEGEVTFKSILFVPTSAPRGLFDEYGSKKSDYIKLYVRRVFITDDFHDMMPKYLNFVKGVVIRKKLVRKTLDMIKKIADDKYNDTFWKEFGPTTKLGVIEDHSNRTRLAKLLRIQSSHHPTDITSLDQYVEKMKEKQDKIYFMAGSSRKEAESSPFVERLLKKGYEVIYLTEPVDEYCIQALPEFDGKRFQNVVQGKECKFHESXENLRKXXCKSVEQRISALCLNWMKDKALKDKIXKALWVSSAALTESPVLLLVAQPVRDWSWPTLGERSMKAQAYQTGQGHLLQIYYAESERKHFEINPQTPRLIRDMLRRIKEDEDDKTVLDLAVVLVXNRQRLGSGYLFTQTLKAYGDWRLERMLRLSLNIXPLMPKVEEEPREEEPEETAEDTTEDTEQDEDEEMDVGTDEKGRTSKGNLQLEKE

SEQ ID NO: 38719 - protein, 94 aa, Homo sapiens
  misc_feature (1)...(94): Xaa = X or * as defined in Table 2
GMASASDSSKTGFRGKQVVAGAVGDSAKESQGQPPGAPPRRAAGLWRRHHCSFXADXTTNAPGGKNPRPGKGAGGEQGTAGDFTCQMPRTQNTL

SEQ ID NO: 38720 - protein, 75 aa, Homo sapiens
STGVPVSQQNLPLEKASVLFNTGALYTQIGTRCDRQTQAGLESAIDAFQRAADMSPPGLTRRSLGPTRWHQGTPH

SEQ ID NO: 38721 - protein, 60 aa, Homo sapiens
  misc_feature (1)...(60): Xaa = X or * as defined in Table 2
RCFQPDCSHSTPGTGPRRSGCLLSSAAPWXKPPAAPRTPHSRSHNRGPRRQQHARHQDDP

SEQ ID NO: 38722 - protein, 262 aa, Homo sapiens
MANNRHMSVKLTVEGYSRTSQLTNGAVRYPASYLMRDIRTLIVSSSDRASKGVHKAVKGPNSSRPVVARWQALNRRGYRRHNFYNNHKVFMGSRVLAGCRLQLYSTFLQTYYSISPQNRRYTMAVVNQGVCGKALDRPVAVAGLHQILYDSLTGVLVSQQNLLLEKASVLFNTGALYTQIGKWRYWQMQAGLQSAIDAFQRAAGWEEGLPNSLHAAMSQALVEREHPLTSLGQLGPALKGPPLHGRLAHLLSLAILLIDHQG

SEQ ID NO: 38723 - protein, 311 aa, Homo sapiens
  misc_feature (1)...(311): Xaa = X or * as defined in Table 2
TVVLKDFILEHYSEDGYLYEDEIADLMDLRQARRTPSRDEAGVELLMTYFIQLGFVESRFFPPTRQMGLLFTWYDSLTGVPVSQQNLLLEKASVLFNTGALYTQIGTRCDRQTQAGLESAIDAFQRAAGPTRGGRASTYEMTPAASPEIPGASLQREEQWTGAWTHQQIYPQPGTTPXSPPQAQPSRFLFAMDFAATTSAIGSARPSTNQSXGYFHTGRSWQPVAXXECHILRGNAENVLHDLLSHXXXRQNXXNQENLQEAFLPELGHQQEQTEVSQHLVPPIGRGCTASGQEEAALPFQPSQLRQFLVL

SEQ ID NO: 38724 - protein, 129 aa, Homo sapiens
  DOMAIN (88)..(108): w LOW TRANSPOSASE SAPA 12K domain identified by eMATRIX, accession number DM00475B, p-value=1.300e-15, raw score of 12.12
GLYLKGCALLEDTHHRYDSLTGVLVSQQNLLLEKASVLFNTGALYTQIGTWRYWQMQAGLQSAIDAFQRAAEIPQVVPASELAAAMKQIKELQRLLGKKTMENELLKEAVEYGRAKKWIAHAPLLPGDG

SEQ ID NO: 38725 - protein, 168 aa, Homo sapiens
FTAEEGDLWFTLRGNAPVQGHFLDPYCSASEAGAREGDYIGSIQLVDCKWLTLSEVMKLLKSFGEDEIEMKVVSLLDSTSSMHNKSATYSVGMQKTYSMICLAIDDDDKTDKTKKISKKLSFLSWGTNKNRQKSASTLCLPSVGAARPQVKKKLPSPFSLLNSDSSWY

SEQ ID NO: 38726 - protein, 191 aa, Homo sapiens
MMKEKDELNATLKEEMRMFRMRVQEVVKENEELHQELNKSSAVTSEEWRQLQTQAKLVLEENKLLLEQLEIQQRKAKDSHQERLQEVSKLTKQLMLLEAKTHGQEKELAENREQLEILRAKCQELKTHSDGKIAVEVHKSIVNELKSQLQKEEEKERAEMEELMEKLTVLQAQKKSLLLENNSLTEHYKAL

SEQ ID NO: 38727 - protein, 299 aa, Homo sapiens
MLLGFRRGRRSHFKHIIHGLLPAASVAPKAAVPRTPPPRSPNPSPERPRSALAAAILATTLTGRTVAIPQPRQRSRSESDVSSVEQDSFIEPYATTSQLRPRPNWQSEMGRRSSLPSFETLDYGDEEDIETQLSSSGKELGDVSAREDRGGHSDDLYAVPHRNQVPLLHEVNSEDDENISHQDGFPGSPPAPQRTQQKDGKHPVLNLKDEKPPLCEKPPPSPDITGRARQRYTEITREKFEALKEENMDLNNMNQSLTLELNTMKQAMKELQLKLKGMEKEKRKLKEAEKASSQGSCCT

SEQ ID NO: 38728 - protein, 1111 aa, Homo sapiens
  DOMAIN (199)..(247): Anion exchangers family proteins domain identified by eMATRIX, accession number BL00219H, p-value=7.460e-10, raw score of 10.06
  misc_feature (1)...(1111): Xaa = X or * as defined in Table 2
MAALWNTCGAWKNMLIPECHSQLLRVAANPKVREQVRLELSFVNSDLQMLKEELEGLNISVGVYQNTDEDGYLYEDEITDLMDLRQACRTPSRDEARVELLMTYFIQLGFVENRLFPPTWQMGFLFTWYDSLTGVLVSQQNLLLEKASVLFNTGVLYTQIGTRRYRHTQAGLQSAIDAFQRAAGVLNYLKETFTHNPSYDMIPAMLSVLVKMMLAQTQESVFEKISLPGIWNEFFMLVKVAQEAAKVGEVYQQLHQAMSQAPVKENIPYSWASLACVKAHHYAALAHYFTAILLIDHQVKPGTDLDHQEKCLSQLYDHMPEGLTPLATLKNDQQRRQLGKSHLRRAMAHHEESVREASLCKKLRSIEVLQKVLCAAQERSRLTYAQHQEEDDLLNLIDAPSVVAKTEQEVDIILPQFSKLTVTDFFQKLGPLSVFSANKRWTPPRSIRFTAEEGDLGFTLRGNAPVQVHFLDPYCSASVAGAREGDYIVSIQLVDCKWLTLSEVMKLLKSFGEDEIEMKVVSLLDSTHPCLARGPGLRVMXAVLNRTASSSPMPPPTQLRPRPNWQSEMGRRSSLPSFETLDYGDEEDIETQLSSSGKELGDVSAREDRGGHSDDLYAVPHRNQDEKPPLCEKPPPSPDITGRARQRYTEITREKFEALKEENMDLNNMNQSLTLELNTMKQAMKELQLKLKGMEKEKRKLKEAEKASSQEVAAPELLYLRKQAQELVDENDGLKMTVHRLNVELSRYQTKFRHLSKEELDIKYLSPLLLAYEDMMKEKDELNATLKEEMRMFRMRVQEVVKENEELHQELNKSSAVTRGSLGSGASHLVGRPCRSRYLHTCTAAKPACSTRRQLQTQAKLVLEENKLLLEQLEIQQRKAKDSHQERLQEVSKLTKQLMLLEAKTHGQEKELAENREQLEILRAKCQELKTHSDGKIAVEVHKSIVNELKRKRNYWYLVCTVSVEGFSALVVPCAGISLAAEQASVYIDKVHAMTFPRCERWFSSCFADKSKEEEKERAEMEELMEKLTVLQAQKKSLLLEKNSLTEQNKALEAELERAQKINRKSQKKIEVLKKQVEKAMGNEMSAHQYLANLVGLAENITQERDSLMCL

SEQ ID NO: 38729 - protein, 563 aa, Homo sapiens
  DOMAIN (85)..(112): Putative esterase domain identified by eMATRIX, accession number PF00756B, p-value=7.750e-26, raw score of 16.64
  DOMAIN (54)..(260): Putative esterase domain identified by PFam, accession name Esterase, E-value=7.9e-76, PFam score of 265.3
MYRHYSQSLKCEMNVGVYLPPKAANEKLPVLYWLSGLTCNEQNFITKSGMQRYAAEHNIIVVAPDTSPRGSHVADADRYDLGQGAGFYLNATQAPWNEHYKMYDYIRNELPDLVMHHFPATAKKSISGHSMGGLGALVLALRNPDEYVSVSAFSPIVSPSQVPWGQQAFAAYLAENKDAWLDYDPVSLISQGQRVAEIMVDQGLSDDFYADSCDSKSEKIGLSENGLSLDAVLGLVRCFSTLQWLFRLDISTWIDVDVRIQFHDGHIEATGFKNGCEGGCGNAFTQRGYDPAGHKNIVRCHAEPENLPFSHLGPGGALSLAQALDGSPHLEEISLAENNLAGGVLRFCMELPLLRQIDCFRRLHQMQVWEEDQMGSSTYCFTDIETEAPFSAIFFPYAPVFNSHDIPEGVSVGTPPETPHLPLMKCSLLAERLLPVPQFQPPSRPTSVLTCQGVEPTRTGITCSKPPSPCGTGVLKPVDLNGVIKLFEETAKEGLEEKQLKSVKKLGAGQGLPWDFMHRSFLGLHVGPAIPSVLSEHELLPCGMSGRLSWNLLGDEAAAELAQ

SEQ ID NO: 38730 - protein, 240 aa, Homo sapiens
  misc_feature (1)...(240): Xaa = X or * as defined in Table 2
CPGGSERGQRQPCGCRSRGRTEPGFSPCXKSAPRPQAVSLKSASPRPSSSSGPAGISSPGRESRSCGTQNILGPFQLVSGXPLXGRXCQFPAAAEPPAVPLXAEDISAGPPAVXAPSGLAHLASGPGPLPPLGGAGLVXQSIXXGGHQGADEGPXGEMDAKEAGPAAQNCDLHVCPGARGAEGAPGEGCISXQPHAPDALXAASELPKDELLRQCSGGXRCSPAGSAAPRAGSSAVLEPQ

SEQ ID NO: 38731 - protein, 98 aa, Homo sapiens
MWELGHCDPRRCTGRKLARLGLVRCLRLGHRFGGLVLSHLRLLPYLVAANPVNYGRPYRLSCVEAFAATFCIVGFPDLAVILLRKFKWGKGFLDLNRQ

SEQ ID NO: 38732 - protein, 1433 aa, Homo sapiens
  DOMAIN (267)..(281): C2 DOMAIN SIGNATURE domain identified by eMATRIX, accession number PR00360B, p-value=6.447e-10, raw score of 13.61
  DOMAIN (197)..(1128): C2 domain identified by PFam, accession name C2, E-value=7e- 21, PFam score of 82.8
  misc_feature (1)...(1433): Xaa = X or * as defined in Table 2
MRPRGAAFAAGPPGDLHLGTAIGFAGAIWRSRSPAMSTLLDIKSSVLRQVQVCPSFRRRTEQDPGSASADPQEPATGAWKPGDGVEFFAHMRLMLKKGEGRQGLPCLEVPLRSGSPAPPEPVDPSLGLRALAPEEVEMLYEEALYTVLYRAGTMGPDQVDDEEALLSYLQQVFGTSLEEHTEAIERVRKAKAPTYALKVSVMRAKNLLAKDPNGFSDPYCMLGILPASDATREPRAQKEQRFGFRKGSKRGGPLPAKCIQVTEVKSSTLNPVWKEHFLFEIEDVSTDQLHLDIWDHDDDVSLVEACRKLNEVIGLKGMGRYFKQIVKSARANGTAGPTEDHTDDFLGCLNIPVREVPVAGVDRWFKLEPRSSASRVQGHCHLVLKLITTQRDTAMSQRGRSGFLSHLLLLSHLLRLEHSAEEPNSSSWRGELSTPAATILCLHGAQSNLSPLQLAVLHWQVSSRHHQTCTLDYSYLLGLLEDMQAHWEEAPSLPQEQEESLADSLSAFSEFGLQLLRQLRDYFPATNSTAVHRLELLLKWVQRRVSACLGKLQLFQPSFEICPFESELNMDIAAALKRGNREWYDRILNAKSPREQPGPQRLPGLVVLADAVYDDLQFCYSVYASLFHSILNVDVFTLTFRQLERLVAEEAWVLTEELSPKMTLEVASGLFELYLTLADLQRFWDSIPGRDSRSLALAGIHAPFLPAVKLWFQVLRDQAKWRLQGAVDMDTLEPVDASSRHSSSAATAGLCLSHIQELWVRLAWPDPAQAQGLGTQLGQDVCEATLFYTELLRKKVDTQPGAAGEAVSEALCVVLNNVELVRKAAGQALKGLAWPEGATGPEGVLPRPLLSCTQALDDDLQREAHTVTAHLTSKMVGDIRKYVQHISLSPDSIQNDEAVAPLMKYLDEKLALLNASLVKGNLSRVLEALWRLLLQAILQALGANRDVSADFYSRFHFTLEALVSFFHAEGQGLPLESLRDGSYKRLKEELRLHKCSTRECIEQFYLGQAQTEDPGSRTGFERLSVRCHYEAAEQRLAVEVLHAADLLPLDANGLSDPFVIVELGPPHLFPLVRSQRTQVKTRTLHPVYDELFYFSVPAEACRRRAACVLFTVMDHDWLSTNDFAGEAALGLGWRHWCRPAPGRVREFAPTLPQAQCEKQTHKGLTWPAASFARVAEAGHMSTAVLXFFAEEVGAALQASVEPGAADGEGGPGPAALPCTLAMWELGHCDPRRCTGRKLARLGLVRCLRLGHRFGGAGAEPCGQGSTRPPQTDSWWPQSGGRRHRLLLGQGWTRHRFGKDARGATLRLFALTWVAAKPRELIGRALQTFLAWKAFCLPPSAIVGFPDLAVISAAEVLNGGKGFLDLNPQAPWTKYASLRQPREEVLQAEQGSSWPMAKESPQGGGDRFLRCGFRERVWKPQQACGPAPRLPSEH

SEQ ID NO: 38733 - protein, 286 aa, Homo sapiens
  DOMAIN (53)..(79): PROTEIN REPEAT NEUROFILAMENT TRIPL domain identified by eMATRIX, accession number PD01351B, p-value=1.000e-09, raw score of 13.72
  misc_feature (1)...(286): Xaa = X or * as defined in Table 2
YCCLPRGGNAGCQTRQDPSCRPGPGSQGLSLPPGRPGAAVECGARSRGWGQQDGPGPPSPGKAQVPAEPAPPQTPGPPEDPCLGPRNEVPDGGGARQSHHPGPPPRSPGPEGGSPQAAARLVDWRVSRPQNQLPNPGPXDQPPRPAIPTATPSGCNGPGFPRAPRPRLSSEEEAPSRAGPEEEAPPTYTPRLRRGRPARGPVCRPPAGPPAVXPEFRRFALPRASVSGFQSSPVAAGGAPDPGPGRLLGYTDAHGDLLPLTNTTACTGPWPAGPRHCASGAEAGRS

SEQ ID NO: 38734 - protein, 232 aa, Homo sapiens
  misc_feature (1)...(232): Xaa = X or * as defined in Table 2
VLVARRPQRPGHEPAVLQQPAAGPPVPRKPNPSPPSRSPAGLRPPGRAGPLTSPRCPGLPAFTGHRTPVGPVRPKAAGPRRRTYQGRGMGPRPRPRRPVVPVGGERSHSHPSGPPLRSPGPEWGLTSSSCPARGLEGVSATQNQLPNPGPXDQPPRTCHPHGYTQRIPSGPPLRSPGPEWGLTSSSCPARGLEGVSAPRISSRIQGRRTSLPEPAIPTATPNGYIGSGFPAG

SEQ ID NO: 38735 - protein, 201 aa, Homo sapiens
  DOMAIN (25)..(98): Immunoglobulin domain identified by PFam, accession name ig, E-value=0.00074, PFam score of 17.5
  misc_feature (1)...(201): Xaa = X or * as defined in Table 2
PYSISIVSTGPSADSVYTKVRLLEGETLSVQCSYKGYKNRVEGKVWCKIRKKKCEPGFARVWVKGPRYLLQDDAQAKVVNITMVALKLQDSGRYWCMRNTSGILYPLMGFQLDVSPAPQTERNIPFTHLDNILKSGTVTTGQAPTSGPDAPFTTGVMVFTPGLITLPRPXPPPDLPPRQATASLLPAPPARDPGGPWGPRQ

SEQ ID NO: 38736 - protein, 84 aa, Homo sapiens
FGTRMKKVMPFVAMIKENLEKMGPRILDLQLEFDEKAVLMENIVYLTNSLELEHIEVKFASEAEDKIREDCCPGKGVHREDPHF

SEQ ID NO: 38737 - protein, 525 aa, Homo sapiens
  DOMAIN (25)..(36): Aminoacyl-transfer RNA synthetases class-I proteins domain identified by eMATRIX, accession number BL00178B, p-value=4.857e- 09, raw score of 7.11
  DOMAIN (19)..(56): tRNA synthetases class I (C) domain identified by PFam, accession name tRNA-synt_1e, E-value=0.00097, PFam score of 15.6
  misc_feature (1)...(525): Xaa = X or * as defined in Table 2
ALHCAIRHEDKWPTAVRANGHLLLNSEKMSKSTGNFLTLTQAIDKFSADGMRLALADAGDTVEDANFVEAMADAGILRLYTWVEWVKEMVANWDSLRSGPASTFNDRVFASELNAGIIKTDQNYEKMMFKEALKTGFFEFQAAKDKYRELAVGRDAQKLVFRFIEVQTLLLAPFCPHLCEAHLGHSWGKPGLQLWNCFPWACGRVPVXWKFLIHSSQYLMEVTHDLRLRLKNYMMPAKGKKTDKQPLQKPSHCTIYVAKEYPPWATLPPCLFLTVKHFEGQLTGKTGLDNKAIASELGSMPELKKYMKKVMPFVAMIKENLEKMGPRILDLQLEFDEKAVLMENIVYLTNSLELEHIEVKFASEAEDKIREDCCPGKPLNVFRIEPGVSRFLLVNRPQPIPMAHFLNPKLEIRQGDTVIPIIRRLMKMNRGIXRPFPKVKPGWRIXXSHCWGPRRSSCPWEKEYTREDPPFPEACLFSDVDLMSKKIHLTENGIRVDIGDTINLSGSLNSCTLEIYPGFLGILLL

SEQ ID NO: 38738 - protein, 348 aa, Homo sapiens
  DOMAIN (230)..(276): Eukaryotic RNA polymerase II heptapeptide repeat proteins domain identified by eMATRIX, accession number BL00115Y, p-value= 8.000e-17, raw score of 11.86
  DOMAIN (2)..(348): RNA polymerase A/beta'/A" subunit domain identified by PFam, accession name RNA_pol_A2, E-value=4.1e-70, PFam score of 246.4
  misc_feature (1)...(348): Xaa = X or * as defined in Table 2
MIKNIGPQYLTPSFLGEQEGDEEEEGHIVDAEAEEGDADASDAKRKEKQEEEVDYESEEEEEREGEENDDEDMQEERNPHRRGARKTQEQDEEVGLGHXGGPVPSRPPDAAPETHPQPGAPGAEAVERRVQAVREIHPFIDDYQYDTEESLWGQVTVKLPLMKINFDMSSLVVSLAHGAVIYATKGITRCLLNETTNNKNEKELVLNTEGINLPELFKYAEVLDLRRLYSNDIHAIANTYGIEAALRVIEKEIKDVFAVYGIAVDPRHLSLVADYMCFEGVYKPLNRFGIRSNSSPLQQMTFETSFQFLKQATMLGSHDELRSPSACLVVGKVVRGGTGLFELKQPLR

SEQ ID NO: 38739 - protein, 21 aa, Homo sapiens
  misc_feature (1)...(21): Xaa = X or * as defined in Table 2
MLQLEELKKXXXXXXXXXXXX

SEQ ID NO: 38740 - protein, 528 aa, Homo sapiens
  DOMAIN (53)..(79): Hypothetical hesB/yadR/yfhF family proteins domain identified by eMATRIX, accession number BL01152B, p-value=8.967e-10, raw score of 20.12
  DOMAIN (29)..(115): HesB-like domain identified by PFam, accession name HesB- like, E-value=9.2e-08, PFam score of 35.8
MQGWERCRFLSPGNCLGFEQEEAAAHPGTLTPTPSAVNKIKQFLKDKPELVDVKVGVRTRGCNGLSYTVEYTKTKGNSDEVIQDEARVFIEKKAQLTPLGTEMDYVEDKLSSELCSITQHELVAVELQESWWKPWGSLKKSCDCHMLNLRLPCKENKVMHFENEAIYSRECQVRHPELNYSYFVFPSQQQINRNRDCCNKINCQQDVDEAGSHYPQQTNTGTENQTSQVLTYKWELNNENTWTRGREHLLGPAGEGRGWPIVGPCDHNRFVRVAPASLKSPVIAVLCMSGLIVETTVTQLQNLNTMGIIGSRGDLGPFTRITVHWEEGNDQTLWGLLDTGFELTLIPGDPKHHCCPPVKVGAYVGAYGGHQHQRPKVGKTTKMKRNQSRNAENSKNQSASSPPKDRSSSPAKKQNWMENDLDELTEVGFRSDGENGTKLENTLQDIIQENFPNLARQANIQIQEIQRTPKRYSSRRATPRHIIVRFTKVEMKKKMFRVAREKDRVTHKGKPIRLRADLSAETLQARRE

SEQ ID NO: 38741 - protein, 25 aa, Homo sapiens
FVRTAPASLKSPVKALLCMSDLMSS

SEQ ID NO: 38742 - protein, 291 aa, Homo sapiens
  misc_feature (1)...(291): Xaa = X or * as defined in Table 2
LYLKVCYIXKELFEFSNLYKQPSGEEVWERILRVXDNGGRNIKLYQAEFIDLGPVSRDSAFNVAAQGVKKGSNRLFPWLAEIWIKKWPTVREVEIPDLPLFNVEEGIQKLREIGMGXWISHFRPTHLSWEGPEDIPLTRPSQNIFVRAAPASLKSPVIALLYMSDLMVRTAVTQLQNLNTMGIIGSQGGRDRVAPLNHQRQSGHGYHNGQQRESGNQNSLTGVELWHWLINHVVSRSEVDRKPTTFLLNLYKQKTSRSNGRKTSLNYKNRESRPLNQFPDLSQFTDPEPLQ

SEQ ID NO: 38743 - protein, 94 aa, Homo sapiens
  DOMAIN (13)..(37): HMW KININOGEN SIGNATURE domain identified by eMATRIX, accession number PR00334B, p-value=3.229e-09, raw score of 8.69
SVHTGHHHYHHRHHHHHHHQHQHHQHQHQHHHHHHHHHHHHHHLIFNKPLGKCLQWEPAATKGPWSWNPPLFASVGITKISPFSGPGQGGLPSS

SEQ ID NO: 38744 - protein, 93 aa, Homo sapiens
  DOMAIN (21)..(45): HMW KININOGEN SIGNATURE domain identified by eMATRIX, accession number PR00334B, p-value=8.110e-10, raw score of 8.69
  misc_feature (1)...(93): Xaa = X or * as defined in Table 2
SVHTGHHHYHHRHHHHHHHQHQLHQHQHQGGGHHHHHHHHHHHHYFQXATWEMLLWVGHSHLXRQPXKQHEHRDDVSQAGSVCPCASRGFHIR

SEQ ID NO: 38745 - protein, 79 aa, Homo sapiens
ASQNNRQQRETSMNKHRESAFPGEFQEPMAPPVQPSTAQSLPAPCLPLGASGGPRQHPPDVQQRGRPRPAAECFVRCCS

SEQ ID NO: 38746 - protein, 43 aa, Homo sapiens
MAPGWCLCLLWGAGGNVGSSVLSDRCIGKMKTALKSSLLIKVT

SEQ ID NO: 38747 - protein, 654 aa, Homo sapiens
  misc_feature (1)...(654): Xaa = X or * as defined in Table 2
MFSIPTGQLRAAASGARRHRGRGSIGGPFHAIQGPVETDTTAQHETVAPPDLAHPSPASRGPRPYGRHLALDEPFLHISGALFXDSLAVXEPPESRLDARPGARNSNSRCPITARPPDTDMGTPSAQGAKSSAFAQLPPPHNSTRRAPAGDMPPSMPGATELLACSVPAGXTSELRGGGFASSLSGSPCSKFGSPASSDAWPRLQPRWPVTFPEAQPLEVPGGTEHGCSPWEPLSNSAAQTPFFPPLHPTAPSCPLGLPGSPPGPTSSTGDYIPTXDQSGTSKLYCPLQQGGAEAAHCVPAPEQPETNSKRKGETPTPNDKEGETPTPNEKKEKHQQQTKRRNTNTKRKEGETPTPNEKKEKHQHQTKRRRNTNTKRKEGETEPAQGGTNPGRVQQSPAALXCFSYXSECGQACPSDESAGARFTAGSAPDKGLPPGPSSWAPSSXHLILATTVHLLVTRPCXPPSCTGPSGHLVVGGPRPSAHHHSDLLFXSSAGKPDSWPCWTMSAMGILRPRGRASGAPGSATPFPGEFQEAHAPPVQPSTAQSLPAPCLPLGASGGPRQHPPDVSRGGDRGLQQSVLSDAAPXPGVRGNPPRGARWGARAAWPAGPSAPHSPCPQPPGPRDPLVYPSPGTEAQMSCLTPQFLQILLCDFE

SEQ ID NO: 38748 - protein, 87 aa, Homo sapiens
  misc_feature (1)...(87): Xaa = X or * as defined in Table 2
LLEGKLTNRKDIHTKTPSVCHHHRGPKVDKTTKMGKKQSRKAENYKNQSASPPPKDRSSYQQRNKAGHRMTLMSXEKKASENQTSPS

SEQ ID NO: 38749 - protein, 444 aa, Homo sapiens
  misc_feature (1)...(444): Xaa = X or * as defined in Table 2
MDGRLYSVTIQPSSVLNLQLLLSGPKSAVLVVTILMCSETNLSFNEFSESFKTTSPEKMSIRKPQEKSADGKQFLQNDRKNPKLGNTQTLLRNDVSGLLSRTKRNIVPPGWYSVYVTNNYVFKKSPKAKKVSESTTKNDPVKNIHIESSHNIDLNKIAMNSNLQVVVKRLEDTISIAKKSWNNQPLSEGYKASKKLIEIDGKDQHADRNMTLTLNRMTCKEQSLSKSVVASGNIINSHCMPTVDLNNKRLENLKKSSILDMGRLISSVENVPAKYEGTESSSVSNYSSPIKLMFLSEVKSSEGVKYTLTSVGTSHSNVVLPSEKPTTHHVTEEKTETNEDISNANSENYHSSHYDTDTFQRELNKFSHAKETAGSSTMFIGDINSDKPQEEPKDNSSSATDPSFNKKTRXTKKNRSPSCETDXATNWKTTKAXNXSNKHHCLPE

SEQ ID NO: 38750 - protein, 136 aa, Homo sapiens
  misc_feature (1)...(136): Xaa = X or * as defined in Table 2
QFFFSLSQALKLDQAIHISMDAFHSVSELFASQSRRGLDPAMDLLVLSQGHQTNILDIVHIHKEALTKVTENRQHVAEGKTESAEADDVRITVNRNSFTTSLEIHHFHPIXIRDMKSQMQHFLQQEILFFQKSSRN

SEQ ID NO: 38751 - protein, 153 aa, Homo sapiens
  DOMAIN (35)..(57): FOS TRANSFORMING PROTEIN SIGNATURE domain identified by eMATRIX, accession number PR00042D, p-value=7.261e-09, raw score of 8.97
FDDLTAEKEAVSSKCVDLAKDNQVLQQELLSMKKVQQQCEKLEKDKKMLEEEILNLKTHMEDNMVELSKLQEYKSELDERAMTAVEKLEEIHLQLNKGNTASLNKKELTLKDVECKFSKMKTTYEEVTTKLEEYKEAFAVALKANNSMSKKLT

SEQ ID NO: 38752 - protein, 105 aa, Homo sapiens
SGFREPGSNRRAGARPTAFQVSLGLRGRRLRVSLLKAVVDRAGSRIVEGQTAQGSIEHVYTGSGYRIRDSELQKIHRAAVKGDAAGVERCLARRSGDLDALDKQH

SEQ ID NO: 38753 - protein, 123 aa, Homo sapiens
  misc_feature (1)...(123): Xaa = X or * as defined in Table 2
IFSSLNVAYPWIPEKKVDGSKCPIQQQLERKIKNFVLYLKRLQLTKCEFKNXRLENFIRVNKNEKYVCTSYHTKLLFNNLHMALILIVFKYQSFFSLHSCNQQPHAKVLEPALELQDEDGMVH

SEQ ID NO: 38754 - protein, 176 aa, Homo sapiens
  DOMAIN (83)..(105): FOS TRANSFORMING PROTEIN SIGNATURE domain identified by eMATRIX, accession number PR00042D, p-value=2.272e-09, raw score of 8.97
MGSNFQLFPWQGVGTSRAAMSLASCDGTAVFPVSSGCFQERQETNKSLFDDLMAEKEAVSSKCVNLAKENQVFQQELLSMKKAQQECEKFEEDKKMLEEEILNLKTHMENSMVELSKLQEYKSELDERAMQAVEKLEEIHLQKLIRHGLFDVFYGPPCMSGSRSSNSRPNEGIGEM

SEQ ID NO: 38755 - protein, 269 aa, Homo sapiens
  misc_feature (1)...(269): Xaa = X or * as defined in Table 2
GIHTRLNSELLKEEESNKRLEAEIEYQSRLTAAISKHSESVKTERNVKLALEXTQDVSVQVKMSSDISEVEDKNEFLTEQLSKKQIKFNTLKDKFRKKRDTLRKKSLALETVHNNLSQTQQQIKEMKEMYENAEAKENNSTGKWSCVEERICQLQHENPCIEQQLDDVHQKECLPSRKEKFKSEPPAFLSGNQVKSSSCSLQTLFPPDDLILYLENPKDSTKKLLELINKFRVTGYKIKLQKSVAFLNDKNEQSKEENQECNPIYNNYK

SEQ ID NO: 38756 - protein, 526 aa, Homo sapiens
MKELTLKDVECKFSKMKTTYEEVTTKLEEYKEAFAAALNANNSMSKKLTKASNQHTTSWGTNLPRGGIQHVEEVVLRCPLEKEGLREKKLLHEERSLWRRQPIVTGDALTSTCEFWRHLRMSCANWDVGSSDESAVRKKSLALETVQNDLSQTQQQIKEMKEMYQSAEAKVSKSTGKWNCVEERICQLQRENPWLEQQLVDVHQKEDHKEIVINIQRGFIESRKKDLMLEEKNKKLMNEYDHLKESLFQYERQKAETVIAQPLNLSAQQSACEGSTTATVAQREQIQEPWFSNRVQGFQLSVFSLSLLVMSVMYYSIQEASDSASPRGLEPPMLQRAAQRMARSAEARMGRRAWKQTVMRLGQNICVLCCEWLRQEDRAWMSQTVPQGLGGGSPYPRSQLERTAQLLGLWAWLSHLGSGYPGGRGGAQTLSPAEVVSGQSMKSSAGHGGSRQLTKSSAIACAKLCKASTYINWEDNAVIFLLVQSMVVDLKAEEPHPIATITTGPWGIPPGYHQCSLKIQGSLVHL

SEQ ID NO: 38757 - protein, 784 aa, Homo sapiens
  DOMAIN (216)..(263): Intermediate filaments proteins domain identified by eMATRIX, accession number BL00226D, p-value=7.750e-10, raw score of 19.10
  misc_feature (1)...(784): Xaa = X or * as defined in Table 2
EQNKPYQWLQRKNSKRRERSEKKQPQVKEGNNTNKSEKIQLSENICDSTSSAAAGRLTQQRKIGKTYPQQFPKKLKEEHDRCTLKQENEEKTNVNMLYKKNREELERKEKQYKKEVEAKQLEPTLQSLEMKSKTARNTPNRDFHNHEEMKGLMDENCILKADIAILRQEICTMKNDNLEKENKYLKDIKIVKETNAALEKYIKLNEEMITETAFRYQQELNDLKAENTRLNAELLKEKESKKRLEADIESYQSRLAAAISKHSESVKTERNLKLALERTRDVSVQVEMSSAISKVKAENEFLTEQLSETQIKFNTLKDKFRKTRDSLRKKSLALETVQNDLTQTQQQTQEMKEMYQNAEAKVNNSTGKWNCVEERICHLQRENPWLVQQLDDVHQKEDHKEKXLISQRGFIESGKKDLVLEEKSKKLTNECDHLKESLFQYEREKTEGVPKKENEELRKLFELISSLKYNVNRIRKKNDELEEEATGYKKLLEMTINMLNVFGNEDFDCHGDLKTDQLKMDILIKKLKQKFDDLTAEKEALSSKCVNLAKDNQVLQQEFLSMKKVQQQCEKLEEDKKMLKEEILNLKTHMENNRVELSKLQEYKLELDEKAMQAVEKLEEIHLQEQAQYEKQLEQFKQGYNTASLNKKELTLKDVECKFYKMKTAYEEVTTELEEYKEAFAAALKANSSMSKKLTKSNKKIAMISTKLLMEKEWVKYFLSTLPTRRGQESPCVENLTSIVLNSKYIPKMTGRIPTSNPXTLNNWQNYLTELLLYWTLAPIYFLL

SEQ ID NO: 38758 - protein, 932 aa, Homo sapiens
  misc_feature (1)...(932): Xaa = X or * as defined in Table 2
AVYLSRGCVCCIRCISSLLKEPHEEGVMCSFRSVATQKNDIRPDFQLGKMDSKIKELEPQLTILYQNPKTLKFQGKKSVKFALSPSMALRKXPFKMFSIXSIFIALQFLHGYYKPILFEPNQTWPGHVAVWQDTCSIVAISANITQKVHPVIWSSIPPYGVALSSLTTGTAAFPLCTQLGVXIPLDCAQATFISHDKMVISLKGYLFLSSCLGNSLLLKYTEKLQEPPASAICEAADKEEPPSQKKRVDTSASWSARDKSVSQDDMDEIEVYGSDAQSGTQLATYFEVCDSILNIGPCTNAAMGEPAFLSEEFQNNPEPDLEIVVCSSHRKNGALSVLQKSIQPQVVTTFELPGCYDMWTVIALVPKEEKENPKGEGTEQEPSTPEADIGDNHYIVQVSLLGIHLLEGMNQLYFIPVGLVTRNMQCTVGNPCVVIMSADGRVTMFLLKSNSYSGCHDHLVLHKPPLHHQPNVITLCLYRDLSGMFTTESCLSGAHDELGGHSGLEAESLGSETSPTVGDEEMLCGDLGSLFSPSKEVARRSSQPPADWDSVPFQTEPIHWRLVFLVKNFPVGQRVLMDSSFGEPTTQGEARREEAMCQEELPLVVKEVLLVVLGSRQSTPYLLVHVDQKLLSRLSQGNLKVHFKKVLHNISFREKKPKPSKKKAGGRTEERVGARGRVACFHYFEDIYGAPTHCAPASHMTGEEKAFETIERDEQCIHPQEAALSIQFISLVCWEAIPNARIELQKWELVTSTKTVSLQQGDQVRLQRLRVAAGTCLMQEEEEVMSXGRILIMDVTEVVPEPSQPLTCSLMVYMYLPEAKESFGGMCLLRWADFHVGAHMNAFYRTLCQGATEGLSKKSLPHHTGLNLRTFRMLRVDLRTLQNAVRKLHGELLNRYLYLSTMERAELAKKISTISDIILDDLLETDGVTAHF

SEQ ID NO: 38759 - protein, 81 aa, Homo sapiens
  DOMAIN (44)..(71): Protamine P1 proteins domain identified by eMATRIX, accession number BL00048, p-value=4.574e-12, raw score of 6.39
  misc_feature (1)...(81): Xaa = X or * as defined in Table 2
WAIAIQRHVVYDQEWQIADPCNMXXVENAETLPPGPFLNISLESSARRRATSRDDNRRFRPHRSRRSRRSRSDNALHLASE

SEQ ID NO: 38760 - protein, 300 aa, Homo sapiens
  DOMAIN (122)..(149): Protamine P1 proteins domain identified by eMATRIX, accession number BL00048, p-value=6.375e-11, raw score of 6.39
  misc_feature (1)...(300): Xaa = X or * as defined in Table 2
MAQKFMAPNRARTLRDICTDREAYPVQESMGSGTRGQRKEDMGGAALSTGEGGARDVKAPLPEATLCSQMGPTGRPSGSLCDLAGSTLAGRWMHQSFDFDGGMEASKLPGQEGVRIQPMSERTRRRATSRDDNRRFRPHRSRRSRRSRSDFSLHLASEREAISRLKDRPPLRAREDYDQFMRQRSFQESMGHGSRRDLYGQCPRTVSDLALQNAFGDRWGPYFAEYDWCSTCSSSSESDNEGYFLGEPIPQPARLRYVTSDDCCTNTAPTASPNLPHXVAEDSCTAGKDQRAKTCIISLY

SEQ ID NO: 38761 - protein, 108 aa, Homo sapiens
  DOMAIN (60)..(75): LIM domain proteins domain identified by eMATRIX, accession number BL00478B, p-value=4.109e-09, raw score of 14.79
  DOMAIN (45)..(97): LIM domain containing proteins domain identified by PFam, accession name LIM, E-value=5.5e-10, PFam score of 40.4
  misc_feature (1)...(108): Xaa = X or * as defined in Table 2
MGSSQGVYAELKELDRNVQKAVGLREVPRMTISTGKPVAAERWGKIIFADECTEAEGRHWHMKHFCCFECETVLGGQRYIMKEGRPYCCHCFESLYAEYCDTCAQHIX

SEQ ID NO: 38762 - protein, 820 aa, Homo sapiens
  DOMAIN (197)..(212): LIM domain proteins domain identified by eMATRIX, accession number BL00478B, p-value=7.652e-14, raw score of 14.79
  DOMAIN (173)..(524): LIM domain containing proteins domain identified by PFam, accession name LIM, E-value=1.9e-22, PFam score of 84.4
  misc_feature (1)...(820): Xaa = X or * as defined in Table 2
MEEKSKRRGVLWSLLILALKFGDEPPLGSPNSCKYKLTTLKELGWREVFSSLQFCLCTSVASQMLSQYFEYTQPHPGDICHPETCALQKVFLTSSGQSSSTSSSSQQFVLQINAIQTILEKTPTHISTPTPTPTLANPTAVGLEEDREQDVGTSSRGGAWDTRIKRELEKMSEKCGGQINGGDIAVFASRAGHGVCWHPPCFVCTVCNELLVDLIYFYQDGKIYCGRHHAECLKPRCAACDEIIFADECTEAEGRHWHMKHFCCFECETVLGGQRYIMKEGRPYCCHCFESLYAEYCDTCAQHIGEAIFGSQHWSFCRCGHLCFGEWGXPQLLWMLCXLELTKGPRDAIMSSLHSWHLRKGVRRRRRKKEDKSPEVLPXKSSSGTLSHXRXRPHXSLFLGSRVSLPSGECRGPGPPYSHSLRLYSQQALPTGRGPSSSQFPFCQFYCCYKKSLLCDCLSKSPALEKAMRGIDQGQMTYDGQHWHATETCFCCAHCKKSLLGRPFLPKQGQIFCSRACSAGEDPNGSDSSDSAFQNARAKESRRSAKIGKNKGKTEEPMLNQHSQLQVSSNRLSADVDPLSLQMDMLSLSSQTPSLNRDPIWRSREEPYHYGNKMEQNQTQSPLQLLSQCNIRTSYSPGGQGAGAQPEMWGKHFSNPKRSSSLAMTGHAGSFIKECREDYYPGRLRSQESYSDMSSQSFSETRGSIQVPKYEEEEEEEGGLSTQQCRTRHPISSLKYTEDMTPTEQTPRGSMESLALSNATGTKTCSVTFQAKETCRYQDAQFGKVKARVKERQSLWSKFQGSCGICLYSHKYILKSSSSS

SEQ ID NO: 38763 - protein, 312 aa, Homo sapiens
  DOMAIN (231)..(246): LIM domain proteins domain identified by eMATRIX, accession number BL00478B, p-value=5.909e-09, raw score of 14.79
  misc_feature (1)...(312): Xaa = X or * as defined in Table 2
NKNPKNHYPESYVSLKNDFTKLTSRRHRGVEQALVQLCHVFVCEHGHVIVTLSSGFIVYRTRANYSSSAQGVGIAAAALDAVLIRAHQRTQGCHHELSALLAFEKGSEKKEEEEGGQVSRSSSLKVQAQELSATEDKGHISPFFWEAVYHYASGECRGPGPPYSHSLRLYSQQALPTGRGPSSSQFPFCQFYCCYKKSLLCDCLSKSPALEKAMRGIDQGQMTYDGQHWHATETCFCCAHCKKSLLGRPFLPKQGQIFCSRACSAGEDPNGSDSSDSAFQNARAKESRRSAKIGKNKGKTEEPCXTSTASCK

SEQ ID NO: 38764 - protein, 311 aa, Homo sapiens
  DOMAIN (107)..(122): LIM domain proteins domain identified by eMATRIX, accession number BL00478B, p-value=7.652e-14, raw score of 14.79
  DOMAIN (82)..(267): LIM domain containing proteins domain identified by PFam, accession name LIM, E-value=1.3e-24, PFam score of 92.0
  misc_feature (1)...(311): Xaa = X or * as defined in Table 2
VHQYYSCLPEEKVPYVNSPGEKLRIKQLLHQLPPHDNEVRYCNSLDEEEKRELKLFSSQRKRENLGRGNVRPFPVTMTGAICEQCGGQINGGDIAVFASRAGHGVCWHPPCFVCTVCNELLVDLIYFYQDGKIYCGRHHAECLKPRCAACDEIIFADECTEAEGRHWHMKHFCCFECETVLGGQRYIMKEGRPYCCHCFESLYAEYCDTCAQHIGIDQGQMTYDGQHWHATETCFCCAHCKKSLLGRPFLPKQGQIFCSRACSAGEDPNGSDSSDSAFQNARAKESRRSAKIGKNKGKTEEPCXTSTASCK

SEQ ID NO: 38765 - protein, 113 aa, Homo sapiens
MDDIPQEARQYRHNQAYAYSIQGDGAEDDDERIVRFHTRCLRACSAGEDPNGSDSSDSAFQNARAKESRRSAKIGKNIVRTEEPMHYGNKMEQNQTQSPLQLLSQCNIRTSDS

SEQ ID NO: 38766 - protein, 380 aa, Homo sapiens
  DOMAIN (178)..(193): LIM domain proteins domain identified by eMATRIX, accession number BL00478B, p-value=7.652e-14, raw score of 14.79
  DOMAIN (153)..(275): LIM domain containing proteins domain identified by PFam, accession name LIM, E-value=7.9e-25, PFam score of 92.7
MVTWNFIQERNGSGMDQCDDGGGKILDPVYILTVELTGFAKGWKMFSVKDQSVNVLGFAGYPLITQTARKGAGKIPTWASLRQYQKGLGSKYQLRRALRPDCALGNGQGVRYCNSLDEEEKRELKLFSSQRKRENLGRGNVRPFPVTMTGAICEQCGGQINGGDIAVFASRAGHGVCWHPPCFVCTVCNELLVDLIYFYQDGKIYCGRHHAECLKPRCAACDEIIFADECTEAEGRHWHMKHFCCFECETVLGGQRYIMKEGRPYCCHCFESLYAEYCDTCAQHIGHAGSFIKECREDYYPGRLRSQESYSDMSSQSFSETRGSIQVPKYEEEEEEEGGLSTQQCRTRHPISSLKYTEDMTPTEQTPRGSMESLALSNAT

SEQ ID NO: 38767 - protein, 841 aa, Homo sapiens
  DOMAIN (57)..(72): LIM domain proteins domain identified by eMATRIX, accession number BL00478B, p-value=4.109e-09, raw score of 14.79
  DOMAIN (41)..(324): LIM domain containing proteins domain identified by PFam, accession name LIM, E-value=4.2e-10, PFam score of 40.8
  misc_feature (1)...(841): Xaa = X or * as defined in Table 2
MLNIQSVPGIGQGHYSRYLHSNPMHSGDFISNIHMRKPKFREIIFADECTEAEGRHWHMKHFCCFECETVLGGQRYIMKEGRPYCCHCFESLYAEYCDTCAQHIGEAIFGSQHWSFCRCGHLCFGEWGXPQLLWMLCXLELTKGPRDAIMSSLHSWHLRKGVRRRRRKKEDKSPEVLPXKSSSGTLSHXRXRPHXSLFLGSRVSLPSGECRGPGPPYSHSLRLYSQQALPTGRGPSSSQFPFCQFYCCYKKSLLCDCLSKSPALEKAMRGIDQGQMTYDGQHWHATETCFCCAHCKKSLLGRPFLPKQGQIFCSRACSAGEDPNGSDSSDSAFQNARAKESRRSAKIGKNKGKTEEPMLNQHSQLQVSSNRLSADVDPLSLQMDMLSLSSQTPSLNRDPIWRSREEPYHYGNKMEQNQTQSPLQLLSQCNIRTSYSPGGQGAGAQPEMWGKHFSNPKRSSSLAMTGHAGSFIKECREDYYPGRLRSQESYSDMSSQSFSETRGSIQVPKYEEEEEEEGGLSTQQCRTRHPISSLKYTEDMTPTEQTPRGSMESLALSNATENQDDCSFVNRLKGSNNRPGRRQELMVTWNFIQERNGSGMDQCDDGGGKILDPVYILTVELTGFAKGWKMFSVKDQSVNVLGFAGCLSADGGAKRQEHLSRFSMPDLSKDSGMNVSEKLSNMGTLNSSMQFRSAESVRSLLSAQQYQEMEGNLHQLSNPIGYRDLQSHGRMHQSFDFDGGMAGSKLPGQEGVRIQPMSERTRRRATSRDDNRRFRPHRSRRSRRSRSDNALHLASEREAISRLKDRPPLRAREDYDQFMRQRSFQESMGHVVPEGPVRPVP

SEQ ID NO: 38768 - protein, 96 aa, Homo sapiens
PLPSSPEQPAGRKGTGLPCALTEIYFRVTIYFYVEIEKLLIIVAKQEGLSGNHKPVERKYMTYLSAQDHELIQVVQNGHLQMCGKSETGNEASPVS

SEQ ID NO: 38769 - protein, 80 aa, Homo sapiens
  misc_feature (1)...(80): Xaa = X or * as defined in Table 2
MTYLSAQDHELIQVVQNGHLQMCGKSETGNEASPGXGRGVNPWPRHARSRMRALTRSSASCCRCSGASSICTGTSLSTGG

SEQ ID NO: 38770 - protein, 142 aa, Homo sapiens
  DOMAIN (77)..(142): Eukaryotic protein kinase domain identified by PFam, accession name pkinase, E-value=3e-13, PFam score of 51.7
  misc_feature (1)...(142): Xaa = X or * as defined in Table 2
QRSAWRSQIWSASRSVXSVFVRRASSRCLRNTGSGPGHPDRXDCRTARRCGWTRRRMASPSAACGRSRCCSACVILNIVELKEVVVGNHLESIFLVMGYCEQDLASLLENMPTPFSEAQVKCIVLQVLRGLQYLHRNFIIHR

SEQ ID NO: 38771 - protein, 304 aa, Homo sapiens
  DOMAIN (105)..(129): HMW KININOGEN SIGNATURE domain identified by eMATRIX, accession number PR00334B, p-value=3.700e-10, raw score of 8.69
  misc_feature (1)...(304): Xaa = X or * as defined in Table 2
SYHHLRHHHHHLPHHCFHHNNHYHHYHHYYHHHHHCHHYHYHHLHHHHHHHHHHDHCYYHNNNNNCHHHHHHYHHHHHXYHHYHPHHHHHHHYHHHHYHHHHHHHHHRHHYYHHHHHQHHHYHHLHHHHYHHYYHNNYHRHHRYSCNNNHHYHHHHPHHYHHHHCXHHHYLYHHHHHHNHHHHYHHHHHYYHYHYHHHHHHHHHHYHHYCHDHNYHYHHHHHYHAHFHHHYHHYHYHYHHHHRHHHHLHHHYCHRPHHYHYLSCCETSHTLFPQNAISSFDCKYLDGQDDEDFVVYKLCTLYYY

SEQ ID NO: 38772 - protein, 105 aa, Homo sapiens
  misc_feature (1)...(105): Xaa = X or * as defined in Table 2
DTGPGEGAAGGCGGGVGEGVAAPAAPGHSXVGGNQPYLSPVCSRGSPGTGRAAARGLSGCWPWWSPRSGSAPSQCSSASWSAWSAGAPRFAPSAPGHPEGRRCPA

SEQ ID NO: 38773 - protein, 33 aa, Homo sapiens
  misc_feature (1)...(33): Xaa = X or * as defined in Table 2
XALHFLSTFDEPQCVLSDIDTGFSESSRVLGEX

SEQ ID NO: 38774 - protein, 513 aa, Homo sapiens
  misc_feature (1)...(513): Xaa = X or * as defined in Table 2
AVLDRGPRVGSSSPSPGGMSTCLSSPLFATAAELGGGLCSAGRDGPRRKVYLSVDEKKLRCCQPKSGRSVAERAAGHSAEGWRPVHVGPGLLGLALXGPXAWGFQGRKGGIXKGAYTAKCMMGSDKAQASGIATGGGHSGAEAVGPQQQGTVLSFEGGGGLSFRRMPGSLGPSVPCKCGHPGPRCPPHHAVEGTDTVATVAATGPPLAPSHGTSWQSGSLQXDTGPGEGAAAAAVVGVGEGAELPAAPGHSXVGVISHICHPFVAGGSPGTGRAAARGLSGCWPWWSPRSGSAPSQCSSASWSAWSAGAPRSAPSAPGHPEGRRCPAXGWNPQGSKSSLKSSELWTPIPYVPYAVPXHTCGYAAGPAPVQTPCRGGWNGAQVGLDPGGHGDGTPHGSAPRLPGRVGGAPXAAVAAISTDPPATASLGPAPGGPACCPSLXAACPASSASPAPARSSWPPAPASCGSAAPWWHQTGHGSLWWPEHSCRLSHRSPSPGAPCWPFPFRASPDRGTA

SEQ ID NO: 38775 - protein, 179 aa, Homo sapiens
  DOMAIN (13)..(32): Eukaryotic  RNA-binding region RNP-1 proteins domain identified by eMATRIX, accession number BL00030A, p-value=9.500e- 10, raw score of 14.39
  misc_feature (1)...(179): Xaa = X or * as defined in Table 2
MKSLEEKIGCLLKFLGDLDDQTCKEDLHILFSNHGEIKWIDFIRGAKEGIILFKEKAKETLGKAKDANNGNLQLRSKEVTWEVLEGELEKEALKKITEDQQESLNKWKSKGCRFKGKRKGSKAAQPGSGKGKVQFQDKKTKFASDDAHDENGSTGPIKRGREETDKEXPASKQPKTENA

SEQ ID NO: 38776 - protein, 439 aa, Homo sapiens
  DOMAIN (50)..(68): LUPUS LA PROTEIN SIGNATURE domain identified by eMATRIX, accession number PR00302A, p-value=1.000e-23, raw score of 11.32
  DOMAIN (143)..(212): RNA recognition motif. domain identified by PFam, accession name rrm, E-value=9.9e-14, PFam score of 59.0
PAALGGGVVAVAVCEPVARLLWAGTLKIAVMAENGDNEKMAALEAKICHQIEYYFGDFNLPRDKFLKEQIKLDEGWVPLEIMIKFNRLNRLTTDFNVIVEALSKSKAELMEISEDKTKIRRSPSKPLPEVTDEYKNDVKNRSVYIKGFPTDATLDDIKEWLEDKGQVLNIQMRRTLHKAFKGSIFVVFDSIESAKKFVETPGQKYKETDLLILFKDDYFAKKNEERKQNKVEAKLRAKQEQEAKQKLEEDAEMKSLEEKIGCLLKFSGDLDDQTCREDLHILFSNHGEIKWIDFVRGAKEGIILFKEKAKEALGKAKDANNGNLQLRNKEVTWEVLEGEVEKEALKKIIEDQQESLNKWKSKGRRFKGKGKGNKSCPSPGSGKGKVQFQGKKTKFASDDEHDEHDENGATGPVKRAREETDKEEPASKQQKTENGAGDQ

SEQ ID NO: 38777 - protein, 110 aa, Homo sapiens
CSTSLMIREMQVKTTMRYHLTPARMAIIKKSRPGVCGPQFTASYCSSWNRGLSRAMAQSLTPRPLSTLQPLLAVDRGSPVLGASHRLPAQCCMTDSSSSTLGSAAGSWQQ

SEQ ID NO: 38778 - protein, 68 aa, Homo sapiens
MNSHFLKEDIQMANKHMEKCSPLLMIREMQIKPTVRYHLTSARMPIIKKSKNSRCWHGCGEHGTLLHC

SEQ ID NO: 38779 - protein, 122 aa, Homo sapiens
  misc_feature (1)...(122): Xaa = X or * as defined in Table 2
CSTSLIIREMQIETTMRYHLIPARMAIIKKSRCWQGCGEQETLLHSWKPQPLWRSSSGTARERQFLHPLLLKARIEITPPESLAVLKIPMEGTWMELEAVILSKLTQKQKTKHXMLSLTSGS

SEQ ID NO: 38780 - protein, 63 aa, Homo sapiens
CSTSLMIREMQIKTTVRYRLTSARMAIIKKSKNSRCWHGCGEHRTLLHCCNLWKERNVSYVSA

SEQ ID NO: 38781 - protein, 52 aa, Homo sapiens
QKQKSSGQHISKKIKFVHNTSGISYQKDWIIKISFYWEKKKKKKAPRAEKKK

SEQ ID NO: 38782 - protein, 221 aa, Homo sapiens
  misc_feature (1)...(221): Xaa = X or * as defined in Table 2
SLIHLELIFCIGLDVRLGKDFMTNNLKGNAIKTKINFWDLIKLKNFCKAKRNSQRANRXQTEWEKTFIICTSDKGLTSRIYNKLKQISKKKTNNPIIKWAKDMNRQFSKEDIQMANKHMKKCSTSLMIREMQIKTTVRYHLTSARMAIIKKSKNSRCWHGCGEHGTLLHCWKSKSLYEKDTCTRMFIAAQLAIAKTWNQPKGPSINAWIKDWCQSKTNHNK

SEQ ID NO: 38783 - protein, 157 aa, Homo sapiens
  DOMAIN (62)..(101): 3-hydroxyisobutyrate dehydrogenase proteins domain identified by eMATRIX, accession number BL00895B, p-value=4.282e-10, raw score of 21.14
MDEIRNYKFVGRKMESPEEIGDFLEKNVTKIDSRRGKHMSKLPTTRDIQTAITKKEQKIYSFASIPLPPNDSGVGAARSGNLTFMVGGVEDEFAAAQELLGCMGSNVVYCGAVGTGQQEGLDDENPVSGLFPSMALSLESGNILPAAKILQQHAVSY

SEQ ID NO: 38784 - protein, 154 aa, Homo sapiens
  misc_feature (1)...(154): Xaa = X or * as defined in Table 2
FFFFFLRRSLDSVAQAGVQWRDLSSLQAPPPGFTPFSCLSLLSSWDYRRLPPRPANFLYFXXRRGFTMLARMVSISXPRDPLASASQSAGIQKNSFFFLETRVSAFVAQAGVQWCDLGSPQPPPPGFKXFSCLSLLSSWDYRRLPPRPANFLYF

SEQ ID NO: 38785 - protein, 97 aa, Homo sapiens
  misc_feature (1)...(97): Xaa = X or * as defined in Table 2
AAAFFVFFETEFRSVAQAGVQWRDLDSLQAPPPGFTPFSCLSLPCSWDYRRVPPCPANFCIFSRDGVSPCXPGWSRSPDLVIHPSRPPKVLGLQAMS

SEQ ID NO: 38786 - protein, 126 aa, Homo sapiens
  misc_feature (1)...(126): Xaa = X or * as defined in Table 2
IRNTHAKIIELCLLPLFTELXCNFFFFFLRRSLDSVAQAGVQWRYLGSLQAPPPGFTPFSCLSLLSSWGYRRLPPCPANFFVFLVERGFTVLARMVLMSXPRDPPASASQSAGITGVSHHARPTLK

SEQ ID NO: 38787 - protein, 411 aa, Homo sapiens
  misc_feature (1)...(411): Xaa = X or * as defined in Table 2
FFPFFFFLRRSSPLPPRLQCSGMILAYCNLRLLGSSNSVASASGVAGITGTCHHTQXIFVFLVETGFHHVGQAGLEFLTSGDLPTSASQSARDYRRDDHTRPEKCFCXKTHILWHSPSWSSEERGSQFFSQDSXKSSRYPKKLLGMWVIAINIYGTRTXKXEKFKTREYIGTHSIHRGNHGVNTYHVASEKLHXYTYRMKKAKNFFFFFLRRELASVAQAGVQWRDLGSLQSPPPGFTPFSCPASLRSWDYRRVLPPCLANFFLYFFSMRRGFTVFSRMVSISXPRDQPASASQSAGITGVSHRARLKIIFLFFFFSETESRSVAQAGVQWHDLGSRHRPPPGFTPFSCLSFPSSWDYRGPPPRPANFCVFSRDGVSPCXPGWSRSPDLVIRPASASQKCWDYRREPPRPA

SEQ ID NO: 38788 - protein, 756 aa, Homo sapiens
  DOMAIN (46)..(85): PROTEIN ZINC FINGER ZINC-FINGER METAL-BINDING NU domain identified by eMATRIX, accession number PD01066, p-value=6.077e-33, raw score of 19.43
  DOMAIN (320)..(754): Zinc finger, C2H2 type domain identified by PFam, accession name zf-C2H2, E-value=7.6e-117, PFam score of 401.6
MAGPPSGPGRPEVCGAGRTRVAKARFRRRRAFASLGWSSGREVVTFGDVAVHFSREEWQCLDPGQRALYREVMLENHSSVAGLVGGTLKEASKQRPWLAHGSTAHLCTDRHKEAGFLVFKPELISRLEQGEEPWVLDLQGAEGTEAPRTSKTDSTIRTENEQACEDMDILKSESYGTVVRISPQDFPQNPGFGDVSDSEVWLDSHLGSPGLKVTGFTFQNNCLNEETVVPKTFTKDAPQGCKELGSSGLDCQPLESQGESAEGMSQRCEECGKGIRATSDIALHWEINTQKISRCQECQKKLSDCLQGKHTNNCHGEKPYECAECGKVFRLCSQLNQHQRIHTGEKPFKCTECGKAFRLSSKLIQHQRIHTGEKPYRCEECGKAFGQSSSLIHHQRIHTGERPYGCRECGKAFSQQSQLVRHQRTHTGERPYPCKECGKAFSQSSTLAQHQRMHTGEKAQILKASDSPSLVAHQRIHAVEKPFKCDECGKAFRWISRLSQHQLIHTGEKPYKCNKCTKAFGWSSRLIRHQRTHTGEKPFKCDECGKGFVQGSHLIQHQRIHTGEKPYVCNDCGKAFSQSSSLIYHQRIHKGEKPYECLQCGKAFSMSTQLTIHQRVHTGERPYKCNECGKAFSQNSTLFQHQIIHAGVKPYECSECGKAFSRSSYLIEHQRIHTRAQWFYEYGNALEGSTFVSRKKVNTIKKLHQCEDCEKIFRWRSHLIIHQRIHTGEKPYKCNDCGKAFNRSSRLTQHQKIHMG

SEQ ID NO: 38789 - protein, 766 aa, Homo sapiens
  DOMAIN (46)..(85): PROTEIN ZINC FINGER ZINC-FINGER METAL-BINDING NU domain identified by eMATRIX, accession number PD01066, p-value=9.270e-34, raw score of 19.43
  DOMAIN (310)..(766): Zinc finger, C2H2 type domain identified by PFam, accession name zf-C2H2, E-value=5.3e-98, PFam score of 339.0
  misc_feature (1)...(766): Xaa = X or * as defined in Table 2
MAGPPSGPGRPEVCGAGRTRVAKARFRRRRAFASLGWSSGREVVTFGDVAVHFSREEWQCLDPGQRALYREVMLENHSSVAGIGEDAPWGPFPCIISQHPPSQASIRGPCVYTVADVPVTGIAVIPPAAVCFSRLKDCDTRTEDKEFLHKEDIHEDLESQAEISENYAGDVSQVPELGDLCDDVSERDWGVPEGRRLPQSLSQEGDFTPAAMGLLRGPLGEKDLDCNGFDSRFSLSPNLMACQEIPTEERPHPYDMGGQSFQHSVDLTGHEGVPTAESPLICNECGKTFQGNPTLFSVKQSHTGEASFMCDDCGKTFSQNSVLKNRHRSHMSEKAYQCSECGKAFRGHSDFSRHQSHHSSERPYMCNECGKAFSQNSSLKKHQKVHMSEKPYECNECGKAFRASSNLIQHQRIHSGEKPYVCSECGKAFRRSSNLIKHHRTHTGEKPFECGXCGKAFSQSAHLRKHQRVHTGEKPYECNDCGKPFSRVSNLIKHHRVHTGEKPXKSSACGKAFSQSSSLIQHRRIHTGEKPHVCNVCGKAFSYXLQCSESTRFIHTGRGRPYRCSVCGKAFSHSSALIQHQGVHTGDKPYACHECGKTFGRSSNLILHQRVHTGEKPYECTECGKTFSQSSTLIQHQRIHNGAEAPYKCNQCGKAFNQSSKFSIHPQKVHIGEKPSPCVECGKGFSQSSHFFQHRYIHTGERPYKCSECGKAFSQRSVLIQHRRIHTGVKPYDCAACGKTFSPTDQSWIKHQLIHTQGIGCWAGRN

SEQ ID NO: 38790 - protein, 88 aa, Homo sapiens
  misc_feature (1)...(88): Xaa = X or * as defined in Table 2
MPELITCLEQGKKPLTVKRHEMIAKPXXXXXXXXXXXXXXXXXXXXXXXXXXXXXXXXXXXXXXXXXXXXXXXXXXXXXXXXXXSVHY

SEQ ID NO: 38791 - protein, 54 aa, Homo sapiens
  misc_feature (1)...(54): Xaa = X or * as defined in Table 2
MVFLQVYMESXXXXXXXXXGLHCLSVYLGLQSTLACGACQNSGSSCWNGQFPSG

SEQ ID NO: 38792 - protein, 80 aa, Homo sapiens
  misc_feature (1)...(80): Xaa = X or * as defined in Table 2
GPLTCRYWEIHSQEPGPPRSLEMVLFSPSQNXSPVWSKEKNLXPXRDMRXYAKPPGRCKXKXIQQMTQMRGRNIQEKASP

SEQ ID NO: 38793 - protein, 484 aa, Homo sapiens
  DOMAIN (133)..(185): Integrase DNA binding domain identified by PFam, accession name integrase, E-value=0.001, PFam score of 25.8
  misc_feature (1)...(484): Xaa = X or * as defined in Table 2
MHEEEGESGDSRVYMSTQCTHVTLNKFLGFIVSESVSGLNIQESMKEVLRGQSLKHNPIREAGLETLQSGRQLERRGRLSGMARPLSLAAAGAPDLLFTALCSLLIEAQPLRPFDLQTTLTAAECHYTGKKFSLNEGKPVLRKNSQTNTWEPGTIITWGRGYACVSPGDQSPVWVPTERLKLRVNSDKESHREKTSKSETAFIPAQDLAYNRFYLIILLLTLSVSPVSPQTDLPATXNYSYWAYVPFPPLIRPLTWMDAPAEIYTNDSVYMPGATDDHCPTRPREEGTAFNVTMGYKYPPLCLGHAHVDGCIHLQAQIWAAYLPERLATREQGHLISSLSLSPLRQMKGGVIGDTPNFQYKPVGKPCPKNFEGPSKILIWEDCVNSHVVVLKNDAYGLVIGWAPKGYFKNNCSSGGRECLEATYFISHWEDKDHHPTLHRRVSSFFPLXWEDKGITPPRPHMIFPILSLEHSELWKLAIAMSGL

SEQ ID NO: 38794 - protein, 449 aa, Homo sapiens
  DOMAIN (43)..(58): WILM'S TUMOUR PROTEIN SIGNATURE domain identified by eMATRIX, accession number PR00049D, p-value=9.643e-10, raw score of 0.00
  misc_feature (1)...(449): Xaa = X or * as defined in Table 2
AEPAPTHLPPPPSTAPQPERNSCCISQQSFSVPXSSPDSDRPRGRHSPPPPSPCPPPPCLPPPKSTTAMPTRCQCPPPPIPTVAAFPLPPSHFLRTLPAPRPPTQPPPLSHTTHPPEQRTLGPKFRLFSTPSPKNLEYLMNKSGRSPGCLLREATGTADLARSIASLTAPQTDASGISGGRSTLRQTRCSSGRLRTHPRLSMRASLPLRPRRRACLPQCRDKELLITKRKYRKKKDFAAGLEDVTEFQGREENPRHTFIYSLPLGLQKHQVLTVDIGFGGTAIMTGIARVPLAGAAGGPGVGRAAGRGVPAGVPIPQAPAGLAGPVRGVGGPSQQVMTPQGRGTVAAAAVAATASIMAPPPGMRPPMGPPIGLPPARGTPIGMPPPGMRPPPPGIRDCGGSLTPLGDVCLKGSLARVLCRAIVQIYSICVLLTTSEQQLSIRIHPQNAV

SEQ ID NO: 38795 - protein, 236 aa, Homo sapiens
  DOMAIN (43)..(58): WILM'S TUMOUR PROTEIN SIGNATURE domain identified by eMATRIX, accession number PR00049D, p-value=9.643e-10, raw score of 0.00
  misc_feature (1)...(236): Xaa = X or * as defined in Table 2
AEPAPTHLPPPPSTAPQPERNSCCISQQSFSVPXSSPDSDRPRGRHSPPPPSPCPPPPCLPPPKSTTAMPTRCQCPPPPIPTVAAFPLPPSHFLRTLPAPRPPTQPPPLSHTTHPPEQRTLGPKFRLFSTPSPKNLEYLMNKSGRSPGCLLREATGTADLARSIASLTAPQTDASGISGGRSTLRQTRCSSGRLRTHPRLSMRASLPLRPRRRACLPQCRDKELLITKRKYRKKKD

SEQ ID NO: 38796 - protein, 240 aa, Homo sapiens [sequence omitted]

SEQ ID NO: 38797 - protein, 142 aa, Homo sapiens
  DOMAIN (8)..(35): C1q domain proteins domain identified by eMATRIX, accession number BL01113A, p-value=1.692e-09, raw score of 17.99
  misc_feature (1)...(142): Xaa = X or * as defined in Table 2
ADAVGGPGGPGMAGCDGLPGGFGSDIRPRLWLWLGPRLWSSXRGTNIILASVPKKLLLMDCYALARDRTATLGTFDAISKTASNWIPDLWKETVFTKFPYQEFTDHLVKTHTRVSKQKTQVPAVATTAARQTMEGQAPVEYI

SEQ ID NO: 38798 - protein, 156 aa, Homo sapiens
GIPGSTISTGFLSHGSAKRLRKMSVKGATPKPEPEPEHVIKNYTEELKVPPDEDCIICMEKLSAASGYSEVTDSKAVGPLAVGCLTKCSHAFHLLCLLTMYCNGNKGPEHPNPGKPFTARGFPRQCYLPDNAQGRKPPGASRTRRHWLTFRPPHSC

SEQ ID NO: 38799 - protein, 103 aa, Homo sapiens
GCLLLRVGAIARALPRPSRSCSPSAVVPSAPSSCPPQPRCLGICVAESASLSDLPGFCCLWFVSRWELKQVIPPKELVSSSRRDSLCQLSREKRIWHCSGVAC

SEQ ID NO: 38800 - protein, 152 aa, Homo sapiens
MGLDWIIRFVAVFLHHASFFVGRGRTLLMYFSLLGATPKPEPEPEQVIKNYTEELKVPPDEDCIICMEKLSAASGYSDVTDSKAVGPLAVGCLTKCSHAFHLLCLLAMYCNGNKGPEHPNPGKPFTARGFPRQCYLPDNAQGRKSWCPTHHR

SEQ ID NO: 38801 - protein, 283 aa, Homo sapiens
  DOMAIN (16)..(49): PROLINE-RICH PROTEIN 3 domain identified by eMATRIX, accession number DM00215, p-value=7.102e-09, raw score of 19.43
  DOMAIN (100)..(131): Zinc finger, C3HC4 type (RING finger) domain identified by PFam, accession name zf-C3HC4, E-value=0.00055, PFam score of 17.2
  misc_feature (1)...(283): Xaa = X or * as defined in Table 2
PTRPLVLRVGATARALPRPSRSCSPSAVVPSAPSSCPPQPRRTPKPEPEPEQVIKNYTEELKVPPDEDCIISMEKLSTASGYSDVTDSKAIGSLAVGHLTKCSHAFHLLCLLAMYCNGNKDGSLQCPSCKTIYGEKTGTQPQGKMEVLRFQMSLPGHEDCGTILIVYSIPPGIQGPEHPNPGKAVSLPEGFPAQCYLPEQRPGPAKSLRAPXRWAWKRRLIFTVGHVPAPTGETDTVVWNEIHHKTEMDRNITGHGYPDPNYLQNVLAELAAQGVTEDCLEQQ

SEQ ID NO: 38802 - protein, 1265 aa, Homo sapiens
  DOMAIN (82)..(98): Protein kinases ATP-binding region proteins domain identified by eMATRIX, accession number BL00107B, p-value=2.286e-11, raw score of 13.31
  DOMAIN (43)..(174): Eukaryotic protein kinase domain identified by PFam, accession name pkinase, E-value=7.6e-28, PFam score of 104.3
  misc_feature (1)...(1265): Xaa = X or * as defined in Table 2
MEYYAAIENDEFMSFVGTWMKLEIIILSKLSQEQKTKHRMFSLIDFGFSNLFTPGQLLKTWCGSPPYAAPELFEGKEYDGPKVDIWSLGVVLYVLVCGALPFDGSTLQNLRARVLSGKFRIPFFMSTGLVPELDKRLKAGCLSIAECEHLIRHMLVLDPNKRLSMEQICKHKWMKLGDADPNFDRLIAECQQLKEERQVDPLNEDVLLAMEDMGLDKEQTLQSLRSDAYDHYSAIYSLLCDRHKRHKTLRLGALPSMPRALAFQAPVNIQAEQAGTAMNISVPQVQLINPENQIVEASSNLWELSAETTFFAISLLPFLLISNSMPDGTLNLDSDEGEEPSPEALVRYLSMRRHTVGVADPRTEVMEDLQKLLPGFPGVNPQAPFLQVAPNVNFMHNLLPMQNLQPTGQLEYKEQSLLQPPTLQLLNGMGPLGRRASDGGANIQLHAQQLLKRPRGPSPLVTMTPAVPAVTPVDEESSDGEPDQEAVQRYLANRSKRHTLAMTNPTAEIPPDLQRQLGQQPFRSRVWPPHLVPDQHRSTYKDSNTLHLPTERFSPVRRFSDGAASIQAFKAHLEKMGNNSSIKQLQQECEQLQKMYGGQIDERTLEKTQQQHMLYQQEQHHQILQQQIQVGPHSLLSPTCLEFAFRLICLCILEETTQCKVDLRLRIQPSSPPPNHPNNHLFRQPSNSPPPMSSAMIQPHGAASSSQFQGLPSRSAIFQQQPENCSSPPNVALTCLGMQQPAQSQQVTIQVQEPVDMLSNMPGTAAGSSGRGISISPSAGQMQMQHRTNLMATLSYGHRPLSKQLSADSAEAHSSLYQWVLPTEEEELFPGSLVLVTWMSGTPFCVCSLNVNRFSPANYDQAHLHPHLFSDQSRGSPSSYSPSTGVGFSPTQALKVPPLDQFPTFPPSAHQQPPHYTTSALQQALLSPTPPDYTRHQQVPHILQGLLSPRHSLTGHSDIRLPPTEFAQLIKRQQQQRQQQQQQQQQQEYQELFRHMNQGDAGSLAPSLGGQSMTERQALSYQNADSYHHHTSPQHLLQIRAQECVSQASSPTPPHGYAHQPALMHSESMEEDCSCEGAKDGFQDSKSSSTLTKGCHDSPLLLSTGGPGDPESLLGTVSHAQELGIHPYGHQPTAAFSKNKVPSREPVIGNCMDRSSPGQAVELPDHNGLGYPARPSVHEHHRPRALQRHHTIQNSDDAYVQLDNLPGMSLVAGKALSSARMSDAVLSQSSLMGSQQFQDGENEEXGALCMGHSREVPGGASLHLP

SEQ ID NO: 38803 - protein, 854 aa, Homo sapiens
  DOMAIN (110)..(151): kw TRANSCRIPTASE REVERSE II ORF2 domain identified by eMATRIX, accession number DM01354I, p-value=1.000e-40, raw score of 15.55
  DOMAIN (242)..(469): Reverse transcriptase domain identified by PFam, accession name rvt, E-value=3e-13, PFam score of 57.4
  misc_feature (1)...(854): Xaa = X or * as defined in Table 2
MGDFNTPLSTVDRSMRQKVDKDTQELNSALHQADLIDIYRTLHPKSTEYTFFSAPHHTYSKIDNIIGSKALLSKCKGTEIITNSLSDHSAIKLELRIKKLTQNHSTTEKLNNLLLNDYWVHNEMKAEIKMFSETNENKDTTYQNLWDTFKAVCRGKFIALNAHKRKQERSKIDTLTSQLKELEKLNQEEVESLNRPITGAEIVAIINSLPTKKSPGPDGFTAKFYWRYKEELVPFLLKLFQSIEKEGILPNSCYEASIILIPKPGRDTTKKENFRPISLMNIDAKILNKILANRIQQHIKKLIHHDQVGFIPGMQGWFNICKSINVIQHINRTKDKNHMIISIDAEKAFDKIQQPFMLKTLNKLAQNLLKLISNSQQSLRIQNQCTKITSILIHQXQTNREPNHEXTPIHNCFKENKIPRNPTYKGCEGPLQGELQTTAQGNKRGYKQMEEHSMLMGRKNQYLENGHTAQGNLXIQMPSPSSYXXLSSQNWKKLLXSSYGTKKGPHSQVNPKPKEQSWRHHTTXLQTILQGYSNQNSMVLAPKQRXRPMEQNRALRNNAAYLQLSDLXQTXQKQAMGNGFPIXXMVLGKLASHMEKAETGSLPYTLYKNXFKMDXRLTHXSXNHKNPRRKPRQYHSVHRHGQGLHVXNTKSNGNKSQNXRMGSNXTKELLHSERNYHQSEQATHKMGENFRNLLIXQRANIQNLQXTQTNLQEKNKQPHQKMGKGHEQTLLKRRHLCSQKTHEKMLIITGHQRNANQNHNEIPSHTSQNGDQLKSQETTGAGEDVEKXEHFYTVGGTVNXFNHCGSQCGDSSGIXNXKYHLTQPSHYWVYTQRTINHAATKTHAHVCLLRHYSQ

SEQ ID NO: 38804 - protein, 613 aa, Homo sapiens
  DOMAIN (544)..(560): Protein kinases ATP-binding region proteins domain identified by eMATRIX, accession number BL00107B, p-value=2.286e-11, raw score of 13.31
  DOMAIN (507)..(573): Eukaryotic protein kinase domain identified by PFam, accession name pkinase, E-value=1.9e-18, PFam score of 70.4
MPRALAFQAPVNIQAEQAGTAMNISVPQVQLINPENQIVEASSNLWELSAETTFFAISLLPFLLISNSMPDGTLNLDSDEGEEPSPEALVRYLSMRRHTVGVADPRTEVMEDLQKLLPGFPGVNPQAPFLQVAPNVNFMHNLLPMQNLQPTGQLEYKMSGLPLSPRLPLISWSVLPTLFLAEQSLLQPPTLQLLNGMGPLGRRASDGGANIQLHAQQLLKRPRGPSPLVTMTPAVPAVTPVDEESSDGEPDQEAVQRYLANRSKRHTLAMTNPTAEIPPDLQRQLGQQPFRSRVWPPHLVPDQHRSTYKDSNTLHLPTERFSPVRRFSDGAASIQAFKAHLEKMGNNSSIKQLQQECEQLQKMYGGQIDERTLEKTQQQHMLYQQEQHHQILQQQIQQPAQSQQVTIQVQEPVDMLSNMPGTAAGSSGRGISISPSAGQMQMQHRTNLMATLSYGHRPLSKQLSADSAEAHRLKWETREKGLEDDSSVSSNTGGDVTNEGKSTESADFGFSNLFTPGQLLKTWCGSPPYAAPELFEGKEYDGPKVDIWSLGVVLYVLVCGALPFDGSTLQNLRARVLSGKFRIPFFMSTGYFHLLGSHCNVVLNAKDKVGFAS

SEQ ID NO: 38805 - protein, 1292 aa, Homo sapiens
  DOMAIN (437)..(482): kw TRANSCRIPTASE REVERSE II ORF2 domain identified by eMATRIX, accession number DM01354N, p-value=1.000e-40, raw score of 13.17
  DOMAIN (488)..(766): Reverse transcriptase domain identified by PFam, accession name rvt, E-value=1.4e-71, PFam score of 251.3
MELKAKARELWEECRSLRSRCDQLKERVSVMEDEMNEMKREGKFREKRIKRNEQSLQEIWDYVKRPNLRLIGVPESDGENGTKLENTLQGIIQENFPNLARQANIQIQEIQRTPQRYSSRRATPRHIIVRFTKVEMKEKMLRAAREKGRVTHKGKPIRLTVDLSAETLEAGREWGPIFNILKEKNFQPRTSYPAKLSFISEGEIKYFTDKQMLRDFVTTRPALKELLKEALNMERNTRKCKRSEIITNCLSDHSAIKLELRNKKLTQNRSTTWKPNNLLLNDYWVRNEMKAEIKMFFETNENKDRTYQNLWDTFKAVCRGKFIALNAHKRKQERSKIDTLTSQLKELEKQEQRHSKASRRQEITKIRAELKEIETQKTLQKINESRSWFFERINKIDRPLARLVKKKREKNQIDAIKNDKGDITTNPTEMQTTIREYYKHLYANKLENLEEVDKFLNTYTFPRLNQEEVDSLNRPITGSEIVAIINSLPTKKSPGPDGFTAEFYQRYKEELPGRRDTTKKENFRPISLMNIDAKILNKILANRIQQHIKKLIHHDQVGFIPGMQGWFNIHKSINVIQHINRTKDKNHMIISIDAEKAFDKIQQPFMLKTLNKLGIDGTYFKIIRAIYDKPTANIILNGQKLEAFPLKTGTRQGCPLSPLLFKIVLEVLARAIRQEKEIKGIQLGKDEVKLSLFADDMIVYLENPIVSAQNLLKLISNFSKVSGYKINVQKSQAFLYTNNRQTESQILSELPFTIASKRIKYLGIQLTRDVKDLFKENYKPLLTEIKEDTNKWKNIPCSWVGRINIIKMAILPKVIYRFNAIPIKLPMTFFTELEKTTLKFIWNQKRARIAKSILSQKNKAGGITLPEFKLYYKATVTKTAWYWYQNRDIDQWNRTEPSQITPHIYNYLIFDKSEKNKQWGKDSLFNKWCWENWLAICRKLKLDPFLTPYTKINSRWIKDLNVRPKTIKTLEENLGITIQDIGMGKDFMSKTPKAMATKAKIDKWDLIKLKSFCTAKETTIRVNRQPTKWEKIFATYSSDKGLISRIYNELKQIYKKKTNNPIKKWTKDMSIHFLKEDIYAAKKHMKKCSPSLAIREMQIKITMRYHLTPVRMAIIKKSGNNRCWRGCGEIGTLLHCWWDCKLVQPLWKSVWRFLRDLELEIPFDPAIPLLGIYPKDYKSCCYKDTCTRMFIAALFTIAKTWSQPKCPTTIDWIKKMWHIYTMEYYAAIKNDEFMSFVGTWMKLEIIILSKPLQEQKTKHRMFSLIVSSKVIRRLSQKLPLKIVAMCIPVKRN

SEQ ID NO: 38806 - protein, 2921 aa, Homo sapiens
  DOMAIN (494)..(539): kw TRANSCRIPTASE REVERSE II ORF2 domain identified by eMATRIX, accession number DM01354N, p-value=1.000e-40, raw score of 13.17
  DOMAIN (578)..(2420): Reverse transcriptase domain identified by PFam, accession name rvt, E-value=1.4e-160, PFam score of 546.9
  misc_feature (1)...(2921): Xaa = X or * as defined in Table 2
MGKKQSRKTGNSKKQSASPPPKKRSSSPATEQSWTENDFDELREEGFRRSNYSELREEIQTKGKEVENYEKSLEECITRITNTENCLKELMEPKTKARELRKECRSLRSRCYQLVERVSAMEDEVNEMKDTHRLKVKGWRKIYQGNGKQKKAGVAILVSDKTDFKPTKIKRDKEGHYMMVKGSIQQEELTILNIYAPNTGAPRFIKQVLSDLQRDLDSHTLIMGDFNTPLSTLDRSTRQKVNNNTQELNSALHQADLIDIYRTLYPKSTEYTFFSAPHHTYSKIDHILGSKALLSKCKRTEIITNYLSDHSAMKLELRIKNLTQNCSTTWKLNNLLLNDYGVQNKMKAEIKMFFETNENKDTTYQNLWDAFKAVCRGKFIALNAHKRKQERSKIDTLTSQLKELEKQEQTHSKASRSQEITKIRAELKEIQTQKTFQKINESRSWFFERINKIDRPLARLIKKKREKNQIDAIKNDKGDITTDPTEIQTTIREYYKHLYANKLENLEEMDTFLDTCTLPRLNQEEVESPNRPITGSEIVAIINSLPTKKSPGPNGFTAEFYQRYKEELVPFLLKLFQSIEKEGILPNSFYEASITLIPKAGRDTTKKENFRPISLMNIDAKILNKILAHRVQQHIKKLIHHDQVGFIPGMQCWFNICKSINVIQHINRTKDKNHMIISIDAEKAFDKIQQPFILKTLNKLGIHGTYLKIIRATYDKPTDNIKLNGQKLEAFPLKTDTRQGCPLSPLLFNIVLEVLARAIRQEKEIKGIQLGKEEVKLSLFADDMIVYLENPIVSAQNLLKLISNFSKVSGYKINVQKSQAFLYTNKRQTQSQIMSELPFTIASKRRKYLGIQLTRDVKDLFKENYKPLLKEIKEDTNKWKNIPCSSVGRISFVKMAILPKVIYRFNAIPIKLPMPFFPELEKTTLKFIWNQKRARIAKSILSQKNKAGGITLPDFKLYYKATVTKTAWYWYQNRDIDQWNRTEPSEITPHIYNYLIFDKPEKNKQWGKDSLFNKWCWENWLAICRKLKLDPFLTPYTKINSRWIKDLNVRPKTIKTLEENLGITIQDIGMGKDFMSKTQKAMATKATIDKWDLIKLRSFCTAKETTIRVNRQPTKWEKIFVIYSSDKGLIFRIYNELKQIYKKKTNNSIKKRAKDMNRHFSKEDIYAAKNHMKKCSSSLAIREMQIKTTMRYHLTPVRMAIIKKSGNNRCWRGCGEIGTLLHSWWDCKLVQPLWKSVWRFLRDLELEIPFDPAIPLRGIYLKDYKSCCYKDTCTCMFIAALFTIAKTWNQAKCSTMIDWIKKMWHIYTMEYYAAIKNDEFMSFVGTWMKLEIIILSKLSQEQKTKHRIFSLIGGNXHKTGMPSLTTPIQHSVGSSGQGNXAGEGNKGYSIRKRGSQIVPVCRXHDCISRKPHCLSPKSPKADKQLQQSLRIQNQCTKITSIPYTPTKDKHRAKSXVNSHSQLLQQRRKYLGIQLTRDVKDLFKENYKPLLKEIKEDTNKGRTFHAHRXEESVLXKWPYCPRXFTDSMPSPSSYQCLSSQNWKKLLXSSYGTKKEPAXPSQSXAKRTKLEASHYLTSNYTTRLQXPPPKKRSSSPATEQSWTENDFDELREEGFRRSNYSELREEIQTKGKEVENYEKSLEECITRITNTENCLKELMEPKTKARELRKECRSLRSRCYQLVERVSAMEDEVNEMKDTHRLKVKGWRKIYQGNGKQKKAGVAILVSDKTDFKPTKIKRDKEGHYMMVKGSIQQEELTILNIYAPNTGAPRFIKQVLSDLQRDLDSHTLIMGDFNTPLSTLDRSTRQKVNNNTQELNSALHQADLIDIYRTLYPKSTEYTFFSAPHHTYSKIDHILGSKALLSKCKRTEIITNYLSDHSAMKLELRIKNLTQNCSTTWKLNNLLLNDYGVQNKMKAEIKMFFETNENKDTTYQNLWDAFKAVCRGKFIALNAHKRKQERSKIDTLTSQLKELEKQEQTHSKASRSQEITKIRAELKEIQTQKTFQKINESRSWFFERINKIDRPLARLIKKKREKNQIDAIKNDKGDITTDPTEIQTTIREYYKHLYANKLENLEEMDTFLDTCTLPRLNQEEVESPNRPITGSEIVAIINSLPTKKSPGPNGFTAEFYQRYKEELVPFLLKLFQSIEKEGILPNSFYEASITLIPKAGRDTTKKENFRPISLMNIDAKILNKILAHRVQQHIKKLIHHDQVGFIPGMQCWFNICKSINVIQHINRTKDKNHMIISIDAEKAFDKIQQPFILKTLNKLGIHGTYLKIIRATYDKPTDNIKLNGQKLEAFPLKTDTRQGCPLSPLLFNIVLEVLARAIRQEKEIKGIQLGKEEVKLSLFADDMIVYLENPIVSAQNLLKLISNFSKVSGYKINVQKSQAFLYTNKRQTQSQIMSELPFTIASKRRKYLGIQLTRDVKDLFKENYKPLLKEIKEDTNKWKNIPCSSVGRISFVKMAILPKVIYRFNAIPIKLPMPFFPELEKTTLKFIWNQKRARIAKSILSQKNKAGGITLPDFKLYYKATVTKTAWYWYQNRDIDQWNRTEPSEITPHIYNYLIFDKPEKNKQWGKDSLFNKWCWENWLAICRKLKLDPFLTPYTKINSRWIKDLNVRPKTIKTLEENLGITIQDIGMGKDFMSKTQKAMATKATIDKWDLIKLRSFCTAKETTIRVNRQPTKWEKIFVIYSSDKGLIFRIYNELKQIYKKKTNNSIKKRAKDMNRHFSKEDIYAAKNHMKKCSSSLAIREMQIKTTMRYHLTPVRMAIIKKSGNNRCWRGCGEIGTLLHSWWDCKLVQPLWKSVWRFLRDLELEIPFDPAIPLRGIYLKDYKSCCYKDTCTCMFIAALFTIAKTWNQAKCSTMIDWIKKMWHIYTMEYYAAIKNDEFMSFVGTWMKLEIIILSKLSQEQKTKHRIFSLIGGN

SEQ ID NO: 38807 - protein, 107 aa, Homo sapiens
  misc_feature (1)...(107): Xaa = X or * as defined in Table 2
TGNLQNGRKFLQPTHLTKGXYPESMMNSNKFTRKKQTTPSKSGRRTXTDTSQKKTFMQPKNTXKNAHHHWPSEKCKSKPLXDTISHQLEWQSLKSQETTGAGEDVDK

SEQ ID NO: 38808 - protein, 491 aa, Homo sapiens
  misc_feature (1)...(491): Xaa = X or * as defined in Table 2
AGEGNKADKQLQQSLRIQNQCTKITSILIHQQQTNREPNHESTPIHNCFKENKIPRNPTYKGCEGPLQGELQTTAQGNKRGYKQMEEHSMLMGRKNQYHENGHTAQGNLQIQMPSPSSYQXLSSQNWKKLLSSSYGTKKGLHHQVNPKPKEQSWRHHATXLQTILQGYSNQNSMVLVPKQRYRSMEQNRALRNNAAYLQLSDLXQTXEKQAMGKGFPIXXMVLGKLASHMXKAETGSLPYTLYKNQFKMDXRFKRXTXNHKNPRRKPRHYHSGHRHGQGLLCPKHQKQWHTKAKIDKWDLIKLIELLHSKRNYHQSEQATYKMGENFRNLLIXQRANIQNLQXTQTNLQEKNKQPHQKVGEGHEQTLLKRRHLCSQETHEKMLIITGHQRNANQNHNEIPSHTSXNGNQLKSQETTGAGEDVEKXEHFYTVGGTVNXFNHCGSQCGDSSGIXNXKYHLTQPSHYWVYTQRTINHAAIKTHAHVCLLRHYSQ

SEQ ID NO: 38809 - protein, 670 aa, Homo sapiens
  DOMAIN (25)..(71): kw TRANSCRIPTASE REVERSE II ORF2 domain identified by eMATRIX, accession number DM01354O, p-value=1.000e-40, raw score of 8.73
  DOMAIN (58)..(285): Reverse transcriptase domain identified by PFam, accession name rvt, E-value=3e-13, PFam score of 57.4
  misc_feature (1)...(670): Xaa = X or * as defined in Table 2
LNQEEVESLNRPITGAEIVAIINSLPTKKSPGPDGFTAKFYWRYKEELVPFLLKLFQSIEKEGILPNSCYEASIILIPKPGRDTTKKENFRPISLMNIDAKILNKILANRIQQHIKKLIHHDQVGFIPGMQGWFNICKSINVIQHINRTKDKNHMIISIDAEKAFDKIQQPFMLKTLNKLAQNLLKLISNSQQSLRIQNQCTKITSILIHQXQTNREPNHEXTPIHNCFKENKIPRNPTYKGCEGPLQGELQTTAQGNKRGYKQMEEHSMLMGRKNQYLENGHTAQGNLXIQMPSPSSYXXLSSQNWKKLLXSSYGTKKGPHSQVNPKPKEQSWRHHTTXLQTILQGYSNQNSMVLAPKQRXRPMEQNRALRNNAAYLQLSDLXQTXQKQAMGNGFPIXXMVLGKLASHMEKAETGSLPYTLYKNXFKMDXRLTHXSXNHKNPRRKPRQYHSVHRHGQGLHVXNTKSNGNKSQNXRMGSNXTKELLHSERNYHQSEQATHKMGENFRNLLIXQRANIQNLQXTQTNLQEKNKQPHQKMGKGHEQTLLKRRHLCSQKTHEKMLIITGHQRNANQNHNEIPSHTSQNGDQLKSQETTGAGEDVEKXEHFYTVGGTVNXFNHCGSQCGDSSGIXNXKYHLTQPSHYWVYTQRTINHAATKTHAHVCLLRHYSQ

SEQ ID NO: 38810 - protein, 954 aa, Homo sapiens; identical to SEQ ID NO: 32681
  DOMAIN (149)..(194): kw TRANSCRIPTASE REVERSE II ORF2 domain identified by eMATRIX, accession number DM01354N, p-value=1.000e-40, raw score of 13.17
  DOMAIN (198)..(472): Reverse transcriptase domain identified by PFam, accession name rvt, E-value=1.2e-65, PFam score of 231.5
  misc_feature (1)...(954): Xaa = X or * as defined in Table 2

SEQ ID NO: 38811 - protein, 688 aa, Homo sapiens
  DOMAIN (95)..(140): kw TRANSCRIPTASE REVERSE II ORF2 domain identified by eMATRIX, accession number DM01354N, p-value=1.000e-40, raw score of 13.17
  misc_feature (1)...(688): Xaa = X or * as defined in Table 2
EGRNKDVIXNQREQRHNIPESLGHIQSSVXREIXNTKCPQEKAGKIQNXHPNITIKRTRKARANTFKSXQKARNNXNQSRIEGNRDTKNPSKNXXIQTTIREYYKHLHANNLENLEEMDKFLDTYTLPRLNQEEVESLNRPITGSEIVAIINSLPTKKSPGPDGFTAKFYQRYKEELRIKYLGIQLTRDVKDLFKENYKPLLKEIKEDTNKWKNIPCSWVGRINIVKMAILPKVIYRFNGIPIKLPITFFTELEKTTLKFIWNQKRARVAKSILSQKNKAGGIMLPDFKLYYKATVTKTAWYWYQNRDIDQWNRTEPSEIMPHIYNYLIFDKPEKNKQWGKDSLFNKWCWENWLAICRKLKMDPFLTPYTKINSRWIKDLNVRPKTIKTLEENLGNTIQDIGMGKDFMSKTPKAMATKAKIDKWDLIKLKSFCTAKETTIGVNRQPTKWEKIFATYSSDKGLIFRIYNELKQIYKKKTNNPIKKWAKDMNRQFSKEDIYAAKRHMKKCSTSLAIREMQIKTTMRYHLTPVRTAIIKKSGNNRCWRGCGEIGTLLHCCWDCKLVQPLWKSVWRFLRDLELEIPFDPAIPLLGIYPKDYKSCCYKDTCTRMFTAALLTIAKTWNQPKCPTMIDWIKKMWHIYTMESYAAIKNDEFMSFVGTWMKLEIIILSKLSQGQKTKQRIFSLIDGN

SEQ ID NO: 38812 - protein, 844 aa, Homo sapiens
  DOMAIN (12)..(59): kw TRANSCRIPTASE REVERSE II ORF2 domain identified by eMATRIX, accession number DM01354V, p-value=1.000e-40, raw score of 12.97
  misc_feature (1)...(844): Xaa = X or * as defined in Table 2
KQKCNISHLWNAVKVERIKYLGIQLTRDVKDLFKENYKPLLKEIKEDTNKWKNIPCSWVEESIPXKWPYCPRXFTDSMPSPSSYQXLSSQNWKKLLXSSYGTKKEPASPSQSXAKRTKLEASHYLTSNYSTRLQXPPGKRGPPEVQGHNADENNHTEDRQGNRRHEHSIDQLAVTDVHSTTAEYTFLSTRGGFSKIDHMLGCKTNLNKYKEIEIIQSIFSNHNEIKQEINSRRKTRKSTNLWELSSALLMNGSEKKTQVNLDNIWKLMKAKMQHITLMECSESRKNKIPRNPTYKGREGPLQGELQTTAQGNKRGYKQMEEHPMLMGGRINTVKMAILPKVIYRFNAIPIKLPMTFFTELEKTTLKFIWNQKRARIAKSILSQKNKAGGLTLPDFKLFYKATVTKTAWYWYQNRDIDQWNRTEPSEIMPHIYNYVIFDKPEKNKQWGKDSLFNKWCWENWLAICRKLKLDPFLTPYTKINSRWIKDLTVRPKTIKTLEENLGITIQDIGMGKDFMSKTPKAMATKAKIDKWDLIKLKSFCTGKETTIRVNRQPTKWKKIFATYSSDKGLISRIYNELKQIYKKKTNNPIKKWVKDMNRHFSKEDIYAAKKHMKKCSPSLAVREMQIKTTMRYHLTPVRMAIIKKSGNNRCWRGCGEIGTLLHCWWDCKLVQPLWKSVWQFLRDLELEIPFDPAIPLLGIYPRDYKSCCYKDTCTRMFIAALFTIAKTWNQPKCPTMIDWIKKMWHIYTMEYYAAIKNDEFMSFVGTWMKLEIIFLSKLLQEQKTKHRIFSLIDSKPAPQDSGAIIGLQEPEPMTLAQDLLHLKSSATEAACRAISPDTKRDPLG

SEQ ID NO: 38813 - protein, 941 aa, Homo sapiens
  DOMAIN (538)..(578): kw TRANSCRIPTASE REVERSE II ORF2 domain identified by eMATRIX, accession number DM01354Y, p-value=1.000e-40, raw score of 10.69
  misc_feature (1)...(941): Xaa = X or * as defined in Table 2
MPHIQVMLMQEMDSHSLGKLCPYGFAEYSPTSSCFHGFVLSVCGSSRDKATQRVDALVRQVIVNGGIVLDQFAVHDRVALADLIDLLVDLSAMMLCGVPTTGDPFVAFALGHPDDFDHLILPKHLVDRYLLLEPLLGPVQLLSHSASVHLDLHQFCSDFSYGIQLTRDVKDLFKENYKPLLKEIKEDTNKWKNIPCSWVGRINIMKMAMRPRXFIDSMPSPSSYQXLSSQNWKKLLXSSYGTKKEPVSPSQALAKRTKLEASHYLTSNYTTRLQXPHIQVMLMQEMDSHSLGKLCPYGFAEYSPTSSCFHGFVLSVCGSSRDKATQRVDALVRQVIVNGGIVLDQFAVHDRVALADLIDLLVDLSAMMLCGVPTTGDPFVAFALGHPDDFDHLILPKHLVDRYLLLEPLLGPVQLLSHSASVHLDLHQFCSDFSYGIQLTRDVKDLFKENYKPLLKEIKEDTNKWKNIPCSWVGRINIMKMAMLPKVIYRFNAIPIKLPMTFFTELEKTTLKFIWNQKRARIAKSSLSQKNKAGGITLPDFKLYYKATVTKTAWYWYQNRDIDQWNRTEPSEITPHIYNYLIFDKPEKNKQWGKDSLFNKWCWENWLAICRELKLDPFLTPYTKIHSRWIKDLNVRPKTIKTLEENLGLTIQDIGMGKDFMSETPKAMATKAKIDKWDLMKLKSFCTAKETTIRVNRQPTKWEKIFTTYSSDKGLISRIYKELKQIYKIKTNNPIKKWAKDTNRHFSKEDIYAAKKHMKKCSPSRAIREMQIKTAMRYHLTPVRMAIITKSGNNRCWRGCGEIGTLLHCWWECKLLQPLWKSVWQFLRDLELEIPFDPAIPLLGIYPKDYKSCCYKDTCTRMFIVALFTIAKTWNQPKCPTMIDWIKKMWHIYTMEYYAAIKNDEFMSFVGTRMKLEIIILSKLSQGQKAKHRIFSLIGGN

SEQ ID NO: 38814 - protein, 1004 aa, Homo sapiens
  DOMAIN (149)..(194): kw TRANSCRIPTASE REVERSE II ORF2 domain identified by eMATRIX, accession number DM01354N, p-value=1.000e-40, raw score of 13.17
  DOMAIN (200)..(478): Reverse transcriptase domain identified by PFam, accession name rvt, E-value=1.4e-71, PFam score of 251.3
MKAEIKMFFETNENKDRTYQNLWDTFKAVCRGKFIALNAHKRKQERSKIDTLTSQLKELEKQEQRHSKASRRQEITKIRAELKEIETQKTLQKINESRSWFFERINKIDRPLARLVKKKREKNQIDAIKNDKGDITTNPTEMQTTIREYYKHLYANKLENLEEVDKFLNTYTFPRLNQEEVDSLNRPITGSEIVAIINSLPTKKSPGPDGFTAEFYQRYKEELPGRRDTTKKENFRPISLMNIDAKILNKILANRIQQHIKKLIHHDQVGFIPGMQGWFNIHKSINVIQHINRTKDKNHMIISIDAEKAFDKIQQPFMLKTLNKLGIDGTYFKIIRAIYDKPTANIILNGQKLEAFPLKTGTRQGCPLSPLLFKIVLEVLARAIRQEKEIKGIQLGKDEVKLSLFADDMIVYLENPIVSAQNLLKLISNFSKVSGYKINVQKSQAFLYTNNRQTESQILSELPFTIASKRIKYLGIQLTRDVKDLFKENYKPLLTEIKEDTNKWKNIPCSWVGRINIIKMAILPKVIYRFNAIPIKLPMTFFTELEKTTLKFIWNQKRARIAKSILSQKNKAGGITLPEFKLYYKATVTKTAWYWYQNRDIDQWNRTEPSQITPHIYNYLIFDKSEKNKQWGKDSLFNKWCWENWLAICRKLKLDPFLTPYTKINSRWIKDLNVRPKTIKTLEENLGITIQDIGMGKDFMSKTPKAMATKAKIDKWDLIKLKSFCTAKETTIRVNRQPTKWEKIFATYSSDKGLISRIYNELKQIYKKKTNNPIKKWTKDMSIHFLKEDIYAAKKHMKKCSPSLAIREMQIKITMRYHLTPVRMAIIKKSGNNRCWRGCGEIGTLLHCWWDCKLVQPLWKSVWRFLRDLELEIPFDPAIPLLGIYPKDYKSCCYKDTCTRMFIAALFTIAKTWSQPKCPTTIDWIKKMWHIYTMEYYAAIKNDEFMSFVGTWMKLEIIILSKPLQEQKTKHRMFSLIVSSKVIRRLSQKLPLKIVAMCIPVKRN

SEQ ID NO: 38815 - protein, 969 aa, Homo sapiens
  DOMAIN (325)..(370): kw TRANSCRIPTASE REVERSE II ORF2 domain identified by eMATRIX, accession number DM01354N, p-value=1.000e-40, raw score of 13.17
  DOMAIN (410)..(811): Reverse transcriptase domain identified by PFam, accession name rvt, E-value=2.2e-13, PFam score of 57.9
  misc_feature (1)...(969): Xaa = X or * as defined in Table 2
HPTVNIRQINETESQQGYPGIELSSAPSGPNRHLQNSPPPNQQNIHFFQHHTTPIPKLTTXLSTLDRSTRQKVNKDTQELNSALHQADLIDIYRTLHPKSTEYTFFSAPHHTYSKIDHIVGSKALLSKCKRTEIITNYLSDHSAIKLELRIKNLTQSHSTTWKLNNLLLNDYWVHNEMKSEIKMFFETNENKDTTYQNLWDAFKAVCRGKFIALNAHKRKQERSKIDTLTSQLKELEKQEQTHSKASRRQEITKIRAELKEIETQKTLQKINESRSWFFERINKIDRPLARLIKKKREKNQIDTIKNDKGDITTDPTEIQTTIREYYKHLYANKLENLEEMDKFLDTYTLPRLNQEEVESLNRPITGAEIVAIINSLPTKKSPGPDGFTAEFYQRYKEELVPFLLKLFQSIEKEGILPNSFYEASIILIPKPGRDTTKKENFRPISLMNTDAKILNKILANRIQQHIKKLIHHDQVGFIPGMQGWFNIRKSINVIQHINRTKDKNHMIISIDAEKAFDKIQQPFMLKTLNKLELEKTTLNFIWNQKRARIAKSILSQKNKAGGITLPDFKLYYKATVTKTAWYWYQNRDIDQWNRTEPSEITPHTYNCLIFDKPEKNKKWGKDSLFNKWCWENWLAICRKLKLDPFLTPYTKINSRWIKDLNVRPKTIKTLEENLGITIQDIGMGKDFMSKTPKAMATKDKIDKWDLIKLKSFCTAKETTIRVNRQPTTWEKIFATYSSDKGLISRIYNELNQIYKKKTNNPIKKWAKDMNRHFSKEDIYAAKKHMKKCSSSLAIREMQIKTTMRYHLTPVRMAIIKKSGNNRCWRGCGEIRTLLHCWWDCKLVQPLWKSVWRFLRDLELEIPFDPAIPLLGIYPNDYKSCCYKDTCTRMFIAALFTIAKTWNQPKCPTMIDWIKKMWHIYTMEYYAAIKNDEFMSFVGTWMKLEIIILSKLSQEQKTKHRIFSLIGGN

SEQ ID NO: 38816 - protein, 357 aa, Homo sapiens
  DOMAIN (193)..(229): kw TRANSCRIPTASE REVERSE II ORF2 domain identified by eMATRIX, accession number DM01354F, p-value=5.091e-23, raw score of 14.56
  misc_feature (1)...(357): Xaa = X or * as defined in Table 2
AVGPSVRTPRPYLCVRKDVHDVVPILRPSATSLFMPRAAGQGGQKAGGTEKSSGPXKDDVXRLQPPNGFRIIHXVQXTCRKGCPHLSKRNTFQFQNXRXNLLYPALPNIPHSSVEEGVGSIXARSEDLEGAQLPXLLARLFTCRSNTYRGLKFTEAXGGEXQSICYSTRRANYPKYHMHPIQEDPDSXSKSXVTYKETXTPTQXXWETLTPPLSTLDRSTRQKVNKDTQELNSALHQADLIDTTELSTPNQKNLHFFQHHTTPIPKLTTYLEVKLPQQMXKNRNYNKLSLRPQCNQTRTQDXETHSKLLNYMETEQPAPEXLLGTXRNESRNKDVLXNQREQRHNIPESLGHIQSSV

SEQ ID NO: 38817 - protein, 124 aa, Homo sapiens
  misc_feature (1)...(124): Xaa = X or * as defined in Table 2
IPYLPXSTYMETGMIYVVQGIYGYHHYMQDRIDDNGWGCAYRSLQTICSWFKHQGYTERSIPTHREIQQALVDAGDKPATFVGSRQWIGSIEVQLVLNQLIGITSKILFVSNTRKNKKVGNIVS

SEQ ID NO: 38818 - protein, 336 aa, Homo sapiens
MEGEEDMKLVWAMFKTSHQIVNIDLMLEMSTSLAAVTPIIERESGGHHYVNMTLPVDAVISVAPEETWGKVRKLLVDAIHNQLTDMEKCILKYMKGTSIVVPEPLHFLLPGKKNLVTISYPSGIPDGQLQAYRKELHDLFNLPHDRPYFKRSNAYHFPDEPYKDGYIRNPHTYLNPPNMETGMIYVVQGIYGYHHYMQDRIDDNGWGCAYRSLQTICSWFKHQGYTERSIPTHREIQQLSCVWMFYIFKYIKALVDAGDKPATFVGSRQWIGSIEVQLVLNQLIGITSKILFVSVGSSSSDRKWFLSSQGSEIASQGRELANHFQSEGTPVMIEYI

SEQ ID NO: 38819 - protein, 41 aa, Homo sapiens
LCKRLSFPVFSIQGWCGWKGPDFWNKDAYYNLCLPQRPNMI

SEQ ID NO: 38820 - protein, 157 aa, Homo sapiens
  misc_feature (1)...(157): Xaa = X or * as defined in Table 2
XYLLLVQTSGIHREVHSNTQRNSAGSSRCRGQTSNICRIAAMDWDLIEGAAGTKPIDRYNVKNPWFVQPKVPEIALSKDRELAXLCNKNGQTAEDLAWSCGFPDCAKFLTTIKCMQTIKASEHPDRNDCVAVLRQKRSLGSVKNTSGKRKCCDLLFA

SEQ ID NO: 38821 - protein, 218 aa, Homo sapiens
PSWREVDLQSLKGSPDEENEEIEDLSDAAFAALHAKCEEMERARWLWTTSVPPQRRGSRSYRSSDGRTTPQLGSANPSTPQPASPDVSSSHSLSEYSHGQSPRSPISPELHSAPLTPVARDTLRHLASEDTRCSTPELGLDEQSVQPWERRTFPLAHSPQAECEDQLDAQERAARCTRRTSGSKTGRETEAAPTSPPIVPLKSRHLVAAATAQRPTHR

SEQ ID NO: 38822 - protein, 661 aa, Homo sapiens
  DOMAIN (543)..(569): PROTEIN REPEAT NEUROFILAMENT TRIPL domain identified by eMATRIX, accession number PD01351B, p-value=9.855e-09, raw score of 13.72
  misc_feature (1)...(661): Xaa = X or * as defined in Table 2
EPHRIASPRFRQAFDSDGTDRTLXFLSDIEEEELTRGDPEQRHVPLRRKSEWKWAADRAAIDSRWNWLQAHVSDLEYRIRQQTDIYKQIRANKGLIGLGEVPPPEHTTDLFLPLSSEVKTDHGTDKLIESVSQPLENHGAPIIGHISESLSTKSCGALRPVNGVINTLQPVLADHIPGDCSDAEEQLHKKQRLNLVSSSSDGTCVAARTRPVLSCKKRRLVRPNSIVPLSKKVHRNSTIRPGCDVNPSCALCGSGSINTMPPEIHYEAPLLERLSQLDSCVHPVLAFPDDVPTSLHFQSMLKSQWQNKPFDKIKPPKKLSLKHRAPMPGSLPDSARKDRHKLVSSFLTTAKLSHHQTRPDRTHRQHLDDVGAVPMVERVTAPKAERLLNPPPPVHDPNHSKMRLRDHSSERSEVLKHHTDMSSSSYLAATHHPPHSPLVRQLSTSSDSPAPASSSSQVTASTSQQPVRRRRGESSFDINNIVIPMSVAATTRVEKLQYKEILTPSWREVDLQSLKGSPDEENEEPASPDVSSSHSLSEYSHGQSPRSPISPELHSAPLTPVARDTPRHLASEDTRCSTPELGLDEQSVQPWERRTFPLAHSPQAECEDQLDAQERAARCTRRTSGSKTGRETEAAPTSPPIVPLKSRHLVAAATAQRPTHR

SEQ ID NO: 38823 - protein, 207 aa, Homo sapiens
  misc_feature (1)...(207): Xaa = X or * as defined in Table 2
ADDRDHLHIQTWCAKAPVFLQPGSSWLSTKGKKMPETPASDEPPLRQPAVRFEFLQHAPPDSLQPLGSPGHSXGPSSDTGQPAAGRWPRRQPXAAVQDLGPQTRGSASPESQTVLPAAPSAPGSARPHGSMSASAPSPTASPQMSKPPCAAACLRGSGAGGGTVGPCLEPGGSAPPRARLPRCAAGSARPGAAAGPPPGAGTTRAVP

SEQ ID NO: 38824 - protein, 114 aa, Homo sapiens
  misc_feature (1)...(114): Xaa = X or * as defined in Table 2
MRMCLRLPTLMTKCTNWHVTGHLCRPTMREPTPEPWTGDTTTAXMETRWPAEQPALAERRLFRAAPRGAFAGIAAPSPAAPPQPGSLGILPEPTPAQAWAARNQLRGRIKERGS

SEQ ID NO: 38825 - protein, 135 aa, Homo sapiens
  misc_feature (1)...(135): Xaa = X or * as defined in Table 2
KKFNPAGERVCTILVDPSIPSTAYPSYGVPHSXGPSLSLPHLSSSSRPSSISCPLNGPWKGCSXPPCRAQCAQPQQATXESCIHSSSNCIPPAWEGETPSKKNKINGNPWSKIRDKTSGGEVEVWGLVAVAPVMR

SEQ ID NO: 38826 - protein, 433 aa, Homo sapiens
  misc_feature (1)...(433): Xaa = X or * as defined in Table 2
PPASTYLMLERLKAPWSAALQRKYFDLGIWTAPISPMALTMLNGLLIKDSSPPMLLHQVNKTAQLDTFNYQSCFMQSVFDHFPEILFIHRTYNPRGKVCIYLPGGWTSGAAGGSSCPSSLLCHPCARRDTCRPVPDVPSIQEVXSSMGESLYHPGGSSFPSTAYPSSWSSPQLRSFSQPSTFVSSSRPSSISCPLNGPWKGCSXPPCRAQCAQPQQATXESCIHSXATASLQPSCPSFTHTGCSTTASGWLTAGEAELRAATTSRASRSPPTSSASSLVPPHLRNKVWLLCSVTCSRTLQTRQTSTRACVPRTIMLPQTPSPKAPNWSSWXNPTSSTPSMPSAQGQQPNCAWASLLWSRNPHTSLALAQKRXTYRSWKIPIRCSPSPLPAAAATLTRPSTCPAATSXPCSVPAARCSSPTCCRLSGRQAVLPV

SEQ ID NO: 38827 - protein, 109 aa, Homo sapiens
  DOMAIN (47)..(62): OLFACTORY RECEPTOR SIGNATURE domain identified by eMATRIX, accession number PR00245B, p-value=9.795e-10, raw score of 10.38
CLTQMYFLISFANVDTFLLAIMALDRLLAICSALRYCSIITPGYSHFYCDAYLLMKIACSIHVNQHVFLGAVVLFLAPCALILVSYIRIAAAILRIPSPTRRRKACSIC

SEQ ID NO: 38828 - protein, 222 aa, Homo sapiens
  DOMAIN (185)..(202): G-protein coupled receptors proteins domain identified by eMATRIX, accession number BL00237D, p-value=6.885e-11, raw score of 11.23
  DOMAIN (7)..(198): 7 transmembrane receptor (rhodopsin family) domain identified by PFam, accession name 7tm_1, E-value=0.0031, PFam score of 12.5
  misc_feature (1)...(222): Xaa = X or * as defined in Table 2
TISYPQCLTQMYFLISFANVDTFLLPIMALDHYVAICSALQXCSIITPELCQGLPVLAXAGSSLISPVHTVIMSRLAFCSSAQISHFYRDAYLLMKIACSHTXNQHVFLGAVVLFLAPCALILVSYIRIAAAILRIPSPTRRRKACSICSSHLSLVTLFYGTVLGICIXPPDSFSAQDAIATIMYTVVTSMLNPFIYSLMNKEVQEAVRRLFSRGSHSSWCW

SEQ ID NO: 38829 - protein, 1198 aa, Homo sapiens
  DOMAIN (37)..(56): TYPE III EGF-LIKE SIGNATURE domain identified by eMATRIX, accession number PR00011B, p-value=5.424e-13, raw score of 13.08
  DOMAIN (574)..(988): Plexin repeat domain identified by PFam, accession name Plexin_repeat, E-value=4.6e-41, PFam score of 149.9
MVAAAAATEARLRRRTAATAALAGRSGGPHCVNGGRCNPGTGQCVCPAGWVGEQCQHCGGRFRLTGSSGFVTDGPGNYKYKTKCTWLIEGQPNRIMRLRFNHFATECSWDHLYVYDGDSIYAPLVAAFSGLIVPERDGNETVPEVVATSGYALLHFFSDAAYNLTGFNITYSFDMCPNNCSGRGECKISNSSDTVECECSENWKGEACDIPHCTDNCGFPHRGICNSSDVRGCSCFSDWQGPGCSVPVPANQSFWTREEYSNLKLPRASHKAVVNGNIMWVVGGYMFNHSDYNMVLAYDLASREWLPLNRSVNNVVVRYGHSLALYKDKIYMYGGKIDSTGNVTNELRVFHIHNESWVLLTPKAKEQYAVVGHSAHIVTLKNGRVVMLVIFGHCPLYGYISNVQEYDLDKNTWSILHTQGALVQGGYGHSSVYDHRTRALYVHGGYKAFSANKYRLADDLYRYDVDTQMWTILKDSRFFRYLHTAVIVSGTMLVFGGNTHNDTSMSHGAKCFSSDFMAYDIACDRWSVLPRPDLHHDVNRFGHSAVLHNSTMYVFGGFNSLLLSDILVFTSEQCDAHRSEAACLAAGPGIRCVWNTGSSQCISWALATDEQEEKLKSECFSKRTLDHDRCDQHTDCYSCTANTNDCHWCNDHCVPRNHSCSEGQISIFRYENCPKDNPMYYCNKKTSCRSCALDQNCQWEPRNQECIALPENICGIGWHLVGNSCLKITTAKENYDNAKLFCRNHNALLASLTTQKKVEFVLKQLRIMQSSQSMSKLTLTPWVGLRKINVSYWCWEDMSPFTNSLLQWMPSEPSDAGFCGILSEPSTRGLKAATCINPLNGSVCERPANHSAKQCRTPCALRTACGDCTSGSSECMWCSNMKQCVDSNAYVASFPFGQCMEWYTMSTCPPENCSGYCTCSHCLEQPGCGWCTDPSNTGKGKCIEGSYKGPVKMPSQAPTGNFYPQPLLNSSMCLEDSRYNWSFIHCPACQCNGHSKCINQSICEKCENLTTGKHCETCISGFYGDPTNGGKCQPCKCNGHASLCNTNTGKCFCTTKGVKGDECQLCEVENRYQGNPLRGTCYYTLLIDYQFTFSLSQEDDRYYTAINFVATPDEQNRDLDMFINASKNFNLNITWAASFSAGTQAGEEMPVVSKTNIKEYKDSFSNEKFDFRNHPNITFFVYVSNFTWPIKIQVQTEQ

SEQ ID NO: 38830 - protein, 157 aa, Homo sapiens
ALCAPQPGKCFCTTKGSSGDECQLCEVENRYQANPLRGTCYNTLLIDYQFTFSLSQEDDRYYTAINFVATPDEQNRDLDMFINASKNFNLNITWAASFSAGTQAGEEMPVVSKTNIKEYKDSFSNEKFDFRNHPNITFFVYVSNFTWPIKIQVQTEQ

SEQ ID NO: 38831 - protein, 1429 aa, Homo sapiens
  DOMAIN (111)..(130): TYPE III EGF-LIKE SIGNATURE domain identified by eMATRIX, accession number PR00011B, p-value=5.424e-13, raw score of 13.08
  DOMAIN (647)..(1061): Plexin repeat domain identified by PFam, accession name Plexin_repeat, E-value=4.6e-41, PFam score of 149.9
MVAAAAATEARLRRRTAATAALAGRSGGPHWDWDVTRAGRPGLGAGLRLPRLLSPPLRPRLLLLLLLLPPPLLLLLLPCEAEAAAAAAAVSGSAAAEAKECDRPCVNGGRCNPGTGQCVCPAGWVGEQCQHCGGRFRLTGSSGFVTDGPGNYKYKTKCTWLIEGQPNRIMRLRFNHFATECSWDHLYVYDGDSIYAPLVAAFSGLIVPERDGNETVPEVVATSGYALLHFFSDAAYNLTGFNITYSFDMCPNNCSGRGECKISNSSETVECECSENWKGEACDIPHCTDNCGFPHRGICNSSDVRGCSCFSDWQGPGCSVPVPANQSFWTREEYSNLKLPRASHKAVVNGNIMWVVGGYMFNHSDYNMVLAYDLASREWLPLNRSVNNVVVRYGHSLALYKDKIYMYGGKIDPTGNVTNELRVFHIHNESWVLLTPKAKEQYAVVGHSAHIVTLKNGRVVMLVIFGHCPLYGYISNVQEYDLDKNTWSILHTQGALVQGGYGHSSVYDHRTRALYVHGGYKAFSANKYRLADDLYRYDVDTQMWTILKDSRFFRYLHTAVIVSGTMLVFGGNTHNDTSMSHGAKCFSSDFMAYDIACDRWSVLPRPDLHHDVNRFGHSAVLHNSTMYVFGGFNSLLLSDILVFTSEQCDAHRSEAACLAAGPGIRCVWNTGSSQCISWALATDEQEEKLKSECFSKRTLDHDRCDQHTDCYSCTANTNDCHWCNDHCVPRNHSCSEGQISIFRYENCPKDNPMYYCNKKTSCRSCALDQNCQWEPRNQECIALPENICGIGWHLVGNSCLKITTAKENYDNAKLFCRNHNALLASLTTQKKVEFVLKQLRIMQSSQSMSKLTLTPWVGLRKINVSYWCWEDMSPFTNSLLQWMPSEPSDAGFCGILSEPSTRGLKAATCINPLNGSVCERPANHSAKQCRTPCALRTACGDCTSGSSECMWCSNMKQCVDSNAYVASFPFGQCMEWYTMSTCPPENCSGYCTCSHCLEQPGCGWCTDPSNTGKGKCIEGSYKGPVKMPSQAPTGNFYPQPLLNSSMCLEDSRYNWSFIHCPACQCNGHSKCINQSICEKCENLTTGKHCETCISGFYGDPTNGGKCQPCKCNGHASLCNTNTGKCFCTTKGVKGDECQLCEVENRYQGNPLRGTCYYTLLIDYQFTFSLSQEDDRYYTAINFVATPDEQNRDLDMFINASKNFNLNITWAASFSAGTQAGEEMPVVSKTNIKEYKDSFSNEKFDFRNHPNITFFVYVSNFTWPIKIQIAFSQHSNFMDLVQFFVTFFSCFLSLLLVAAVVWKIKQSCWASRRREQLLREMQQMASRPFASVNVALETDEEPPDLIGGSIKTVPKPIALEPCFGNKAAVLSVFVRLPRGLGGIPPPGQSGLAVASALVDISQQMPIVYKEKSGAVRNRKQQPPAQPGTCI

SEQ ID NO: 38832 - protein, 1157 aa, Homo sapiens
  DOMAIN (921)..(934): Laminin-type EGF-like (LE) domain proteins domain identified by eMATRIX, accession number BL01248, p-value=5.875e-10, raw score of 11.02
  DOMAIN (545)..(922): Plexin repeat domain identified by PFam, accession name Plexin_repeat, E-value=1.1e-29, PFam score of 112.1
  misc_feature (1)...(1157): Xaa = X or * as defined in Table 2
MDYGVLTRLTGSSGFVTDGPGNYKYKTKCTWLIEGQPNRIMRLRFNHFATECSWDHLYVYDGDSIYAPLVAAFSGLIVPERDGNETVPEVVATSGYALLHFFSDAAYNLTGFNITYSFDMCPNNCSGRGECKISNSSDTVECECSENWKGEACDIPHCTDNCGFPHRGICNSSDVRGCSCFSDWQGPGCSVPVPANQSFWTREEYSNFKALPRASHKAVVNGNIMWVVGGYMFNHSDYNMVLAYDLASREWLPLNRSVNNVVVRYGHSLALYKDKIYMYGGKIDSTGNVTNELRVFHIHNESWVLLTPKAKEQYAVVGHSAHIVTLKNGRVVMLVIFGHCPLYGYISNVQEYDLDKNTWSILHTQGALVQGGYGHSSVYDHRTRALYVHGGYKAFSANKYRLADDLYRYDVDTQMWTILKDSRFFRYLHTAVIVSGTMLVFGGNTHNDTSMSHGAKCFSSDFMAYDIACDRWSVLPRPDLHHDVNRFGHSAVLHNSTMYVFGGFNSLLLSDILVFTSEQCDAHRSEAACLAAGPGIRCTLDHDRCDQHTDCYSCTANTNDCHWCNDHCVPRNHSCSEGQYENCPKDNPMYYCNKKTSCRSCALDQNCQWEPRNQECIALPENICGIGWHLVGNSCLKITTAKENYDNAKLFCRNHNALLASLTTQKKVGICPXGRLRIMQVISEACPRLTLTPWGRAFGKINVSYWCWEDMSPFTNSLLQWMPSEPSDAGFCGNFIQEPSSLRGLKAATCINPLNGSVCERPANHSGKQCRTPWCPLRTACGDCTSGSSECMWCSNMKQCVDSNAYVASFPFGQCMEWYTMSTCPPENCSGYCTCSHCLEQPGCGWCTDPSNTGKGKCIEGSYKGPVKMPSQAPTGNFYPQPLLNSSMCLEDSRYNWSFIHCPVCQWNGHSKCINQSICEKCENLTTGKHCETCISGFYGDPTNGGKCQPCKCNGHASLCNTNTGKCFCTTKGVKGDECQLCEVENRYQGNPLRGTCYYTLLIDYQFTFSLSQEDDRYYTAINFVATPDEQNRDLDMFINASKNFNLNITWAASFSAGTQAGEEMPVVSKTNIKEYKDSFSNEKFDFRNHPNITFFVYVSNFTWPIKIQVNVEVRDRWAFKDWFTFNHGSMVTGRRLLLFANVQKHNQPQKQVTTNI

SEQ ID NO: 38833 - protein, 315 aa, Homo sapiens
  misc_feature (1)...(315): Xaa = X or * as defined in Table 2
YICNWYKMKDSSFPSLVQSPRSPGSCGLSGWGWGCPRVASAGSACSCNSAVPARRTQEACRRELIGGRSTIFTDVQGQWGAPGTVNEGNSACPPTLRVTVAAWLSLLFVLCRVCAASVPSLVRLRWGPQCSGPWGAWAPPWAARVSQPGAGPGRGAEAQLLPAASIQWPCHQAPHLLLVLALVTSQGPSRCRGFCLAGPCQGGPGGLLILFCHWNVPLQFSSLFFFFXDGVSLLLPRLECSGSISGHCNLRLPGSSDRPALGSXVAGDYRCLPACSANFFVFLVEKGFHHVGRAGLKLLMVIHLPRPPRVLRLQA

SEQ ID NO: 38834 - protein, 759 aa, Homo sapiens; identical to SEQ ID NO: 38128
  DOMAIN (523)..(561): Receptor tyrosine kinase class III proteins domain identified by eMATRIX, accession number BL00240E, p-value=4.073e-15, raw score of 11.56
  DOMAIN (519)..(552): Eukaryotic protein kinase domain identified by PFam, accession name pkinase, E-value=4.2e-05, PFam score of 22.3

SEQ ID NO: 38835 - protein, 36 aa, Homo sapiens; identical to SEQ ID NO: 38130

SEQ ID NO: 38836 - protein, 53 aa, Homo sapiens; identical to SEQ ID NO: 38131
  misc_feature (1)...(53): Xaa = X or * as defined in Table 2

SEQ ID NO: 38837 - protein, 59 aa, Homo sapiens; identical to SEQ ID NO: 38132
  misc_feature (1)...(59): Xaa = X or * as defined in Table 2

SEQ ID NO: 38838 - protein, 109 aa, Homo sapiens; identical to SEQ ID NO: 38133
  misc_feature (1)...(109): Xaa = X or * as defined in Table 2

SEQ ID NO: 38839 - protein, 256 aa, Homo sapiens; identical to SEQ ID NO: 38134
  DOMAIN (76)..(97): O-SIALOGLYCOPROTEIN ENDOPEPTIDASE (M22) METALLO-PROTEASE FAMILY SIGNATURE domain identified by eMATRIX, accession number PR00789B, p-value=5.821e-19, raw score of 10.48
  DOMAIN (1)..(254): Glycoprotease family domain identified by PFam, accession name Peptidase_M22, E-value=2.2e-13, PFam score of 34.6
  misc_feature (1)...(256): Xaa = X or * as defined in Table 2

SEQ ID NO: 38840 - protein, 277 aa, Homo sapiens; identical to SEQ ID NO: 38135
  DOMAIN (132)..(149): METHIONINE AMINOPEPTIDASE-1 SIGNATURE domain identified by eMATRIX, accession number PR00599B, p-value=5.339e-09, raw score of 12.01
  misc_feature (1)...(277): Xaa = X or * as defined in Table 2

SEQ ID NO: 38841 - protein, 271 aa, Homo sapiens
  misc_feature (1)...(271): Xaa = X or * as defined in Table 2
MGISSGNTIASGRFVSADHLPLIALEITITPLDSDASVMISTGIDATQTNHGRQHLDETQVRVFGQHLMQGSYSTQDGRSDVAISCCCKVSGDVQQCYTAKERRLLQHTSAQLHAGETMTLQKLVWIDWRDDRQAALDEWGSASLRQLEMCAQQSYDQLLAASTENWRQWWQKRRITVNGGEAHDQQALDYALYHLRIMTPAHDERSSIAAKGLTGEGYKGHDHWDTEFIFGPAAVEGGIQMYWAQHLQEFSWSAEPLKSLFPEGGFALHX

SEQ ID NO: 38842 - protein, 348 aa, Homo sapiens; identical to SEQ ID NO: 38136
  DOMAIN (89)..(107): KINASE TYPE RESISTANCE ANTIBIOTIC TRANSFERASE AM domain identified by eMATRIX, accession number PD01929D, p-value=9.143e- 20, raw score of 9.28
  DOMAIN (1)..(138): Aminoglycoside phosphotransferase domain identified by PFam, accession name APH, E-value=4e-08, PFam score of -4.2

SEQ ID NO: 38843 - protein, 490 aa, Homo sapiens; identical to SEQ ID NO: 38137
  DOMAIN (221)..(238): METHIONINE AMINOPEPTIDASE-1 SIGNATURE domain identified by eMATRIX, accession number PR00599B, p-value=5.339e-09, raw score of 12.01
  DOMAIN (56)..(138): Signal recognition particle 14kD protein domain identified by PFam, accession name SRP14, E-value=0.019, PFam score of 3.8
  misc_feature (1)...(490): Xaa = X or * as defined in Table 2

SEQ ID NO: 38844 - protein, 82 aa, Homo sapiens
QTLVVLAGSKPSKSTFSLEWVWFGPSYFLQGDIGRWPDVRALLEKVWSAPVRNCSALQQHQLAATLARLPRLKPLAVRAGVD

SEQ ID NO: 38845 - protein, 303 aa, Homo sapiens
  misc_feature (1)...(303): Xaa = X or * as defined in Table 2
GHTACEWYSQGRHPGPELSPFLXGPGXNAGHVISMPAARPMEPCLGTGGLDVLLHHLRPDLPPAALPGSAWPGEGALPLPGQVSGRGRSAACLQPGAWPGRGAAPVRRRPRPAAAGSVREAELLESPHLAAHRDCXLARKLNSGGYIPQAEYGKHAGLPLPGARALSCGCRARAPVPAALPHPLLDHQDPGPAGRIYGTGAGTQTLDGSAPRTSRALGSTQMPEARPGLAGWGVAGVWSRGXSRXTRGSASSPRPRRCALLALPGAAVSGDLRARNPRGSRPPKAPSGRGGPLLPPHRSTPRR

SEQ ID NO: 38846 - protein, 831 aa, Homo sapiens
  DOMAIN (692)..(723): Eukaryotic-type carbonic anhydrases proteins domain identified by eMATRIX, accession number BL00162A, p-value=5.857e- 12, raw score of 22.92
  DOMAIN (687)..(831): Eukaryotic-type carbonic anhydrase domain identified by PFam, accession name carb_anhydrase, E-value=0.012, PFam score of 13.1
YQRQSSSPEDPAETASPTYALIAACQSEIQLQTRQQPCDMAPGPLDCDPVKGSSRKRMFLMNAPPVVALQPKWEASVPPGSFRFPECFSEADKGVESMSPTMHKELPALAACGLVADFDPVGEEETADFGPLVLDSDSDDSVDRDIEEAIQEYLKGGGSRCKRELAHSSAPTALCSPKLVPGSGGGGPGSQVGSSKDQGSASPVSMSRADSFEQSIRAEIEQFLNEKRQHETQKCDGSVEKKPDTHENSAKSLSKSHQEPATKVVHRQGLMGVQKEFAFCRPPRLAKTNVQPRSLRSKVTTTTTQEKEGSTKPATPTRPSEAVQNKSGIKRSASTARRGKRVTSAVQAPEASDSSSDDGIEEAIQLYQVQKTRKEADGDPPQRVQLQEERAPAPPAHSTSSATKSALPETHRKTPSKKKPVPTKTTDPGPGDLDADHSPKIPKETKAPPPTSPASRSKFVEWSSCQADTSAELIAVLDIFKTILPAPMEGSDGSLSASPLFYSPNVPSRSDGDSSSVDSDDSIEQEIWTFLALKVQSRSLLARGAAGQAPERVEKQAPAGAEELPKSKRDSCEGSRKKPPSVFGSRAERTKPRPSCSSVDSDDSIELEIRKFLVEKAKESGVPGQAQPCLWKPTLAGEEGLRSPAKQEGLTSAIVAGISAALGPEHTWVPGATTPRTPSVAPVLVPAVPTHWKKLAPACGGPGQSLIDIDFHRVRRNSTLGPFIFRGYDSAPPGPWTLENDSHTETPPLRTPRTWSPSQEQDCSNTNFCAIVSGLRKVPEPGLSVNLRSTFLLASMRPNTSSYCRFAGSLTPPDCEPTVLWTVFEDPIPIR

SEQ ID NO: 38847 - protein, 822 aa, Homo sapiens
  DOMAIN (683)..(714): Eukaryotic-type carbonic anhydrases proteins domain identified by eMATRIX, accession number BL00162A, p-value=5.857e- 12, raw score of 22.92
  DOMAIN (679)..(822): Eukaryotic-type carbonic anhydrase domain identified by PFam, accession name carb_anhydrase, E-value=0.012, PFam score of 13.1
MHKELPALAACGLVADFDPVGEEETADFGPLVLDSDSDDSVDRDIEEAIQEYLKGGGSRCKRELAHSSAPTALCSPKLVPGSGGGGPGSQVGSSKDQGSASPVSMSRADSFEQSIRAEIEQFLNEKRQHETQKCDGSVEKKPDTHENSAKSLSKSHQEPATKVVHRQGLMDVQKEFAFCRPPRLAKTNVQPRSLRSKVTTTTTQEKEGSTKPATPTRPSEAVQNKSGIKRNASTARRGKRVTSAIQAPEASDSSSDDGIEEAIQLYQVQKTHKEADGDPPQRVQLQEERAPAPPAHSTSSATKSALPETHRKTPSKKKPVPTKTTDPGPGDLDADHSPKIPKETKAPPPTSPASRSKFVEWSSCQADTSAELIAVLDIFKTILPAPMEGSDGSLSASPLFYSPNVPSRSDGDSSSVDSDDSIEQEIWTFLALKVQSRSLLARGESCPQAAQGPLSPPGLSSQTGSPKAPLSKTLDPLLGCKRKHRGGSKAQPARPRDGRAPLGWDLSIQGTASEAPGGEGAARVPGDTRTSQGQGKTDEARHLDKKKSSEDKSSSLDSDKDLDTAIKDLLRESQGPAPSPGSLSDNSSSVDSDDSIELEIRKFLVEKAKESGVPGQAQPCLWKPTLAGEEGLRSPAKQEGLTSAIVAGISAALGPEHTWVPGATTPRTPSVAPVLVPAVPTHWKKLAPACGGPGQSLIDIDFHRVRRNSTLGPFIFRGYDSAPPGPWTLENDSHTETPPLRTPRTWSPSQEQDCSNTNFCAIVSGLRKVPEPGLSVNLRSTFLLASMRPNTSSYCRFAGSLTPPDCEPTVLWTVFEDPIPIR

SEQ ID NO: 38848 - protein, 1114 aa, Homo sapiens
MHKELPALAACGLVADFDPVGEEETADFGPLVLDSDSDDSVDRDIEEAIQEYLKAEAVDVSRNWLTAVPNCPVFPKTCTWLRWCGPGSQVGSSKDQGSASPVSMSRADSFEQSIRAEIEQFLNEKRQHETQKCDGSVEKKPDTHENSAKSLSKSHQEPATKVVHRQGLMGVQKEFAFCRPPPVSKDKRAAQKPQVQGHDHAGEGGQHKASNPHRPSEAVQNKSGIKRNASTARRGKRVTSAVQAPEASDSSSDDGIEEAIQLYQVQKTRKEADGDPPQRVQLQEERAPAPPAHSTSSATKSALPETHRKTPSKKKPVPTKTTDPGPGDLDADHSPKIPKETKAPPPTSPASRSKFVEWSSCQADTSAELISSPGHFQDDPAGPMEGSDGSLSASPLFYSPNVPSRSDGDSSSVDSDDSIEQEIWTFLALKVQSRSLLARGAAGQAPERVEKQAPAGAEELPKSKRDSCEGSRKKPPSVFGSRAERTKPRPSCSSVDSDDSIELEIRKFLVEKAKESGVPGQAQPCLWKPTLAGEEGLRSPAKQEAAWCYDSQDPKCGDSKKPSKKRVKRKPYSTTKVTSGSTFNENTRSYAVHTNQCRRPHGSRVKKKRYPQEDDFHHTVFSNLERLDKLQPTLEASEESLVHKDRGDGERPVNVRVVQVAPLRRESSKYSGITYRENNLDAKKAPHEDTVHNITNEDASHDITNEDAVHGIANEAADKGIANEDAAQGIANEDAAHGIASEDAAQGIANEVAAQGIANEDAAQGIAKEDAAHGIANEDAAHGIANEDAVHGIANEDSVYDIANEDAIYDIANDTVQGTLTRTLYTTSLMRTPYKALVMRTLYMTSLTRTLYKPSLTRTLYTTSLMTAPYKTSPMRALYTTLLMAPTRHANVDTVHDIANEDSVYDIANEGAVYDIANDTVQGTLTRTLYTTSLMRTPYKASVMRTLYTTSLTRTPYKPSLTRTLYTTSLMMAPYKTSPMRALYTTLLMIPTRHAIVDAVHDIANEDSVYDIANEGAVYDIANDTVQGTLTRTLYTTSLMRTPYKASVMRTLYTTSLTRTPYKPSLTRTLYTTSLMTAPYKTSPMRALYTTLLMIPTRHANVDAVHDIANEDTV

SEQ ID NO: 38849 - protein, 446 aa, Homo sapiens
MTKKSPGPDSFTGHWCVISIPSGYERSRLKVTLPEEGRGALPFLVSVAISSGSCSDNNAAVPTVLEGATTVISAAAVLRDPHDGAREIILEAMTISAVAIAAEISWTSQCGLCLHPGMFMPYRHGDGIRDLLPLVLSATICAEFFKGDSKKPSKKRVKRKPYSTTKVTSGSTFNENIRRYAVHTNQCRRPHGSRVKKKRYPQEDDFHHTVFSNLERLDKLQPTLEASEESLVHKDRGDGERPVNARVVQVAPLRLESSKYSGITCQENNLDAKKATPCRTPYMTSLTRTPHTTSLTRILSTASANEAADKGIANEDAAQGIANEDAAHGMPARMPPRASPTRSPPRASPTRTPPRASPTRTPPRASPRRTPPTGSPRRTPPRASPTRTPSTASPTRTPPMASPTRTLPTALLTRMPCTASLMRTPYTTSLMRVPYMTSLMTPYKAR

SEQ ID NO: 38850 - protein, 1030 aa, Homo sapiens
  misc_feature (1)...(1030): Xaa = X or * as defined in Table 2
MHKELPALAACGLVADFDPVGEEETADFGPLVLDSDSDDSVDRDIEEAIQEYLKVGSSKDQGSASPVSMSRADSFEQSIRAEIEQFLNEKRQHETQKCDGSVEKKPDTHENSAKSLSKSHQEPATKVVHRQGLMGVQKEFAFCRPPRLAKTNVQPRSLRSKVTTTTTQEKEGSTKPATPTRPSEAVQNKSGIKRSASTARRGKRVTSAVQAPEASDSSSDDGIEEAIQLYQVQKTHKEADGDPPQRVQLQEERAPAPPAHSTSSATKSALPETHRKTPSKKKPVPTKTTDPGPGDLDADHSPKIPKETKAPPPTSPASRSKFVEWSSCQADTSAELIAVLDIFKTILPAPMEGSDGSLSASPLFYSPNVPSRSDGDSSSVDSDDSIEQEIWTFLALKGTASEAPGGEGAARVPGDTRTSQGQGKTDEARHLDKKKSSEDKSSSLDSDKDLDTAIKDLLRRVPGPSSQPWLLVXQQQFSGQRRXHRTGDXEVFGGKGQGVGSPRPGPALSLEAHTCWRRRTAITGQAGRCLCYDSQDPKCGDLKKPSKKRVKRKPYSTTKVTSGSTFNENTRRYAVHTNQCRRPHGSRVKKKRYPQEDDFHHTVFSNLERLDKLQPTLEASEESLVHKDRGDGERPVNVRVVQVAPLRLESSKYTGITCQENNLDAKKAPHEDTVHDITNEDATHDIANEDTVHDIANEAADKGIANEDAAHGIASEDAAHGIASEDAAQGIASEDAAQGIASEDAAQGIAKEDAAQGIANEDAAQGIANEGAAQGIAKEDAAQGIAKEGAAHGIANEDAAQGIANEDSAHGIASEDAAHGIAIANEDAIYDIANDTVQGTLTRTLYTTSLMRTPYKALVMRTLYMTSLTRTLYKPSLTRTLYTTSLMTAPYKTSPMRALYTTLLMIPTRHANADTVHDIANEDSVYDIANEGAVYDIANDTVQGTLTRTLYTTSLMRTPYKASVMRTLYTTSLTRTPYKPSLTRTLYTTSLMTAPYKTSPMRALYTTLLMIPTRHANVDAVHDIANEDTV

SEQ ID NO: 38851 - protein, 974 aa, Homo sapiens
  misc_feature (1)...(974): Xaa = X or * as defined in Table 2
MHKELPALAACGLVADFDPVGEEETADFGPLVLDSDSDDSVDRDIEEAIQEYLKVGSSKDQGSASPVSMSRADSFEQSIRAEIEQFLNEKRQHETQKCDGSVEKKPDTHENSAKSLSKSHQEPATKVVHRQGLMGVQKEFAFCRPPRLAKTNVQPRSLRSKVTTTTTQEKEGSTKPATPTRPSEAVQNKSGIKRSASTARRGKRVTSAVQAPEASDSSSDDGIEEAIQLYQVQKTHKEADGDPPQRVQLQEERAPAPPAHSTSSATKSALPETHRKTPSKKKPVPTKTTDPGPGDLDADHSPKIPKETKAPPPTSPASRSKFVEWSSCQADTSAELIAVLDIFKTILPAPMEGSDGSLSASPLFYSPNVPSRSDGDSSSVDSDDSIEQEIWTFLALKVQSRSLLARGAAGQAPERVEKQAPAGAEELPKSKRDSCEGSRKKPPSVFGSRAERTKPRPSCSSVDSDDSIELEIRKFLVEKAKESGVPGQAQPCLWKPTLAGEEGLRSPAKQEGDSKKPSKKRVKRKPYSTTKVTSGSTFNENTRRYAVHTNQCRRPHGSRVKKKRYSTRRXHSIIQSSATLKDWTSFSPPLEASEESLVHKDRGDGERPVNVRVVQVAPLRRESSKYSGITYQENNLDAKKAPHEDTVHNITNEDASHDITNEDAVHGIANEAAAQGIANEDAAQGIANEDAAHGIASEDAAQGIANEVAAQGIANEDAAQGIANEDAVQGIANEDAAHGIANEDAAHGIANEDAVHGIANEDSVYDIANEDAIYDIANDTVQGTLKRTLYTTSLMRTPYKALVMRTLYMTSLTRTLYKPSLTRTLYTTSLMTAPYKTSPMRALYTTLLMIPTRHANADTVHDIANEDSVYHIANEGAVYDIANDTVQGTLTRTLYTTSLMRTPYKASVMRTLYTTSLTRTPYKPSLTRTLYTTSLMTAPYKTSPMRALYTTLLMIPTRHANVDAVHDIANEDTV

SEQ ID NO: 38852 - protein, 373 aa, Homo sapiens
  DOMAIN (242)..(257): G-PROTEIN BETA WD-40 REPEAT SIGNATURE domain identified by eMATRIX, accession number PR00320B, p-value=3.903e-11, raw score of 12.19
  DOMAIN (7)..(44): PQQ enzyme repeat domain identified by PFam, accession name Bacterial_PQQ, E-value=0.0038, PFam score of 23.9
MAGDSGRRVIAASYDKTVRAWDLETGKLLWKVRYDTFIVSCKFSPDGKYVVSGFDVDHGICIMDAENITTVSVIKELPRDYRPVHYFRPMVAATSENSHLLQVLSESAGKATPDPGTHSKHQLNASKRAELLGETPIQGSATSVLEFLSQKDKERIKEMKQATDLKAAQLKARSLAQNAQSSRAQLSPAAAAGHCSWNMALGGGTATLKASNFKPFAKDPEKQKRYDEFLVHMKQGQKGSFLISGGFDRTVAIWDVAEGYRKLSLKGHATDAVGLSAATGGPGFEMASPPRCSPTAHDRECKLPPPSAPASEYCPGKLSWGTMARALGRFKLSIPHTHLLATLDPLALDREPPPHLLHEKHQVPGEIDLGRPG

SEQ ID NO: 38853 - protein, 358 aa, Homo sapiens [sequence omitted]

SEQ ID NO: 38854 - protein, 339 aa, Homo sapiens
  DOMAIN (303)..(318): G-PROTEIN BETA WD-40 REPEAT SIGNATURE domain identified by eMATRIX, accession number PR00320B, p-value=3.903e-11, raw score of 12.19
  DOMAIN (89)..(153): bZIP transcription factor domain identified by PFam, accession name bZIP, E-value=0.00016, PFam score of 21.4
MWVAKHGRHMARAYQASLGSMPKFSIAANHSPGSCFNLRPFPLRQSCRALSAAGLPGPGSALKGLGAAHPDLRASGGSGAGKAKKSVDKNSNEYRVRRERNNIAVRKSRDKAKQRNVETQQKVLELTSDNDRLRKRVEQLSRELDTLRGIFRQLPESSLVKAMGNCARHYMPPQWTELPSGHAASWLGLIRSLQFQDSCQGVDHGDCFLLLWSAVLIMYPTSLAVISMTFSNYVLQPVFPNCIPPTTASRVLSMACLMLLTWVNSSSVRWATRIQDMFTGGKLLALSLIIGVGLLQIFQGSFLISGGFDRTVAIWDVAEGYRKLSLKCLPEVTECDLLQ

SEQ ID NO: 38855 - protein, 478 aa, Homo sapiens
  DOMAIN (153)..(196): Fork head domain proteins domain identified by eMATRIX, accession number BL00657B, p-value=6.294e-40, raw score of 22.27
  DOMAIN (108)..(203): Fork head domain identified by PFam, accession name Fork_head, E-value=9.6e-68, PFam score of 238.5
MNLPRAERLRSTPQRSLRDSDGEDGKIDVLGEEEDEDEVEDEEEEASQQFLEQSLQPGLQVARWGGVALPREHIEGGGGPSDPSEFGTEFRAPPRSAAASEDARQPAKPPYSYIALITMAILQSPHKRLTLSGICAFISGRFPYYRRKFPAWQNSIRHNLSLNDCFVKIPREPGRPGKGNYWSLDPASQDMFDNGSFLRRRKRFQRHQLTPGAHLPHPFPLPAAHAALHNPRPGPLLGAPAPPQPVPGAYPNTAPGRRPYALLHPHPPRYLLLSAPAYAGAPKKAEGADLATPAALPVLQPSLATVKPVGQFCSNSSGIRRRTGNGCAPTKGAVLGGHLSAASAAAAVSGGGRGLWADIARALWAERDLTSFFSIAHAQFPGRVRRALLEPGSRQPHSPTGVQKRPLLANPAGLGQSKSSETTENRGCPMSCQLLAGLRSNSPLSVVRKRLRADLPSFIANKRPGRAATAAEPRRDFL

SEQ ID NO: 38856 - protein, 428 aa, Homo sapiens
  DOMAIN (108)..(150): Fork head domain proteins domain identified by eMATRIX, accession number BL00657A, p-value=6.538e-35, raw score of 19.39
  DOMAIN (108)..(203): Fork head domain identified by PFam, accession name Fork_head, E-value=9.3e-64, PFam score of 225.2
  misc_feature (1)...(428): Xaa = X or * as defined in Table 2
MNLPRAERPRSTPQRSLRDSDGEDGKIDVLGEEEDEDEVEDEEEEASQKFLEQSLQPGLQVARWGGVALPREHIEGGGGPSDPSEFGTKFRAPPRSAAASEDARQPAKPPYSYIALITMAILQNPHKRLTLSGICAFISGRFPYYRRKFPAWQNSIRHNLSLNEXFVKIPREPGHPGKGNYWSLDPASQDMFDNGSFLRRRKRFKRHQLTPGAHLPHPFPLPAAHAALHNPRPGPLLGAPALPQPVPGAYPNTAPGRRPYALLHPHPPRYLLLSAPAYAGAPKKAEGADLATPGTLPVLQPSLGPQPWERGQGSGVATGRGCISFSIESIMQGVRGAGTGAAQSLSPTAWSYCPLLQRPSSLRTILQQQQQHQEEDCANGCAPTKGAVLGGHLSAASALLRYQPVAKGLWADIAAAPLGGEGTSPVFL

SEQ ID NO: 38857 - protein, 340 aa, Homo sapiens
  misc_feature (1)...(340): Xaa = X or * as defined in Table 2
AQNPTAFGVKHTSSGGEETFPNIRGIKKSPPQLSSSSIRLSKNILSTTGKTVHQTRDDDQPRDFFKKRNRVNESHQKSSNMNAGPSWNKVQHSKNSSGKRQSKSQVPHASSQPRSSLTAVTQPTEEKLIESISPEARRKRNPLGFRCQGASRNKLFLDFQSMKIIKENADEDSASDLSDSGKNSHSSFSPHTSRSQSSSXRNRVNESHQKSSNMNAGPSWNKVQHSKNSSGKRQSKSQVPHASSQPRSSLTAVTQPTEEKLIESISPEARRKRNPLGFRCQGASRNKLFLDFQSMKIIKENADEDSASDLSDSERIPIPPSPLTPPDLNLRAEEIGSSLL

SEQ ID NO: 38858 - protein, 264 aa, Homo sapiens
MKKVARQLGMAAAESDKDSGFSDGSSECLSSAEQMESEDMLSALCWSREDRPRQNSKTAKNAFPTLSPMVVMKNVLVKQGSSSSQLQSWTVQPSFEVISAQPQLLFLHPPVPSPVSPCHTGEKKSDSRNYLPILNSYTKIAPHPGKRGLSLGPEEKGTSGVQKKICTERLGPSLSSSEPTKAGAVPSSPSTPAPPSAKLAEDSALQGVPSLVAGGSPQTLQPVSSSHVAKAPSLTFASPASPVCASDSTLHGVREQLSPFTTVR

SEQ ID NO: 38859 - protein, 66 aa, Homo sapiens
MKTVGTCPGPSASLVVSSSSIPHPSGKVGQGPCEADEGSAEHAVVQTRGEYRSKRVQGFLPECPVP

SEQ ID NO: 38860 - protein, 139 aa, Homo sapiens
LICFSALLSSSGNIDEVLSENFLDYKNRGVNGSHRGQIIWKIDASSYFVEREYLYHSCGLADMDEAEFNCFIICSRCTASTKKWALSRVSLRLGLSCPSFPRVETWLDAHPDCCTLWSHHSHSKGWEVHDHSANRFCFC

SEQ ID NO: 38861 - protein, 450 aa, Homo sapiens
  DOMAIN (210)..(241): Protein kinases ATP-binding region proteins domain identified by eMATRIX, accession number BL00107A, p-value=7.480e-13, raw score of 18.39
  DOMAIN (130)..(358): Eukaryotic protein kinase domain identified by PFam, accession name pkinase, E-value=6.6e-62, PFam score of 219.1
  misc_feature (1)...(450): Xaa = X or * as defined in Table 2
RLRGPALGAGGGSVTLRLPRSEQAARKEAGLNTMIPLEKPGSGGSVPRRHLRLGPGSSGSXAGRARTPPPPQARGLLTEIRAVVRTEPFQERLQPVPRAGSWAGGKFSSGEKMYKEKILGKNLLQSSXEKRRKSQDCRMEIIHEIAVLELAQDNPWVINLHEVYETASEMILVLEYAAGGEIFDQCVADREEAFKEKDVQRLMRQILEGVHFLHTRDVVHLDLKPQNILLTSESPLGDIKIVDFGLSRILKNSEELREIMGTPEYVAPEILSYDPISMATDMWSIGVLTYVMLTGISPFLGNDKQETFLNISQMNLSYSEEEFDVLSESAVDFIRTLLVKKPEDRATAEECLKHPWLTQSSIQEPSFRMEKALEEANALQEGHSVPEINSDTDKSETEESIVTEELIVVTSYTLGQCRQSEKEKMEQKAISKRFKFEEPLLQEIPGEFIY

SEQ ID NO: 38862 - protein, 425 aa, Homo sapiens
MGPSSGLMGDLEKQCEVSKVNKTSVAPHSPMEKVLFLGVPWETPFTHFQLPPTLSGRQLRGALLNLEAQHASILWVGFWRLDCSQAGGGALVTGRGTVTPLSTAQALLGSGWSEAEVIMGAPHKCPGSWSWAPWAPGAALWFWEVNTYPFPLQVSVGIPGASAGPASGHLTHPSAVQEPGTQFEQFWAPSLVLTRIPELKEQSPMSRGMGFLCIMEQKVPLLGMGRRQGAVTAELVLEHNSDAEVQILPASRNGEDVCKDRVNLYQNRFLGLAAMASPSRNSQSRRRCKEPLRYSYNPDQFHNMDLRGGPHDGVTIPRSTSDTDLVTSDSRSTLMVSSSYYSIGHSQDLVIHWDIKEEVDAGDWIGMYLIESAVMEIDVFTQKSSYNCWKATRVNRFNTGSSEARPSAFSLCSATFAHSDTQHRI

SEQ ID NO: 38863 - protein, 1391 aa, Homo sapiens
  DOMAIN (720)..(735): WW/rsp5/WWP domain proteins domain identified by eMATRIX, accession number BL01159, p-value=8.568e-11, raw score of 13.85
  DOMAIN (705)..(989): WW domain identified by PFam, accession name WW, E-value=7.6e -26, PFam score of 99.3
QFSFVSLPTDVLEIEVKDKFAKSRPIIKRFLGKLSMPVQRLLERHAIGDRVVSYTLGRRLPTDHVSGQLQFRFEITSSIHPGYPNTTMLSSGRNDIFFFLPADDEEISLSTEPESAQIQDSPMNNLMESGSGEPRSEAPESSESWKPEQLGEGSVPDGPGNQSIELSRPAEEAAVITEAGDQGMVSVGPEGAGELLAQVQKDIQPAPSAEELAEQLDLGEEASALLLEDGEAPASTKEEPLEEEATTQSRAGREEEEKEQEEEGDVSTLEQGEGRLQLRASVKRKSRPCSLPVSELETVIASACGDPETPRTHYIRIHTLLHSMPSAQGGSAAEEEDGAEEESTLKDSSEKDGLSEVDTVAADPSALEEDREEPEGATPGTAHPGHSGGHFPSLANGAAQDGDTHPSTGSESDSSPRQGGDHSCEGCDASCCSPSCYSSSCYSTSCYSSSCYSASCYSPSCYNGNRFASHTRFSSVDSAKISESTVFSSQDDEEEENSAFESVPDSMQSPELDPESTNGAGPWQDELAAPSGHVERSPEGLESPVAGPSNRREGFTTADASRKQGFNMTCLIRDCVGDLCFHKNPYCSFALTSKIANSFTVETALDGWEFTFLARQLLDLSWYHLRVHSPQKSEKQPFGSPVMKPIQCLVLQSCFFDDVATAVNESECIDYLVRECPILHNSQPVSQLPSLRPEHHHYPTIDEPLPPNWEARIDSHGRVFYVDHVNRTTTWQRPTAAATPDGMRRSGSIQQMEQLNRRYQNIQRTIATERSEEDSGSQSCEQAPAGGGGGGGSDSEAESSQSSLGIGGGVPTTCDGFQGLCDRGLQASHPASWGAMCPRVKRVEVQGGGQRHAWCPQGKADRMSFPPGNLGEVITVKETPPPWHGDLETGKQMNSGDGAEFATVLVEQGNFSAYRVFTSSTCLKHMILKVRRDARNFERYQHNRDLVNFINMFADTRLELPRGWEIKTDQQGKSFFVDHNSRATTFIDPRIPLQNGRLPNHLTHRQHLQRLRSYSAGELCDSQSLWGLIPRLQDRITKRPINYIELRGAGKAGRKDGRMELSPPFLVLVLSEDHPILTPFFDQLNSASEVSRNRGASLLARPGHSLVAAIRSQHQHESLPLAYNDKIVAFLRQPNIFEMLQERQPSLARNHTLREKIHYIRTEGNHGLEKLSCDADLVILLSLFEEEIMSYVPLQAAFHPGYSFSPRCSPCSSPQNSPANDVLFYLTEKLKPSSRNFFKGLPTRLANLYTSSLSSLEVTKGGLQRASARAPSPYRRDFEAKLRNFYRKLEAKGFGQGPGKIKLIIRRDHLLEGTFNQVMAYSRKELQRNKLYVTFVGEEGLDYSGPSREFFFLLSQELFNPYYGLFEYSANDTYTVQISPMSAFVENHLEW

SEQ ID NO: 38864 - protein, 1702 aa, Homo sapiens
  DOMAIN (1470)..(1498): HECT-domain (ubiquitin-transferase) domain identified by eMATRIX, accession number PF00632B, p-value=3.700e-21, raw score of 18.45
  DOMAIN (1257)..(1628): HECT-domain (ubiquitin-transferase) domain identified by PFam, accession name HECT, E-value=5.5e-80, PFam score of 279.1
  misc_feature (1)...(1702): Xaa = X or * as defined in Table 2
PDQFHNMDLRGGPHDGVTIPRSTSDTDLVTSDSRSTLMVSSSYYSIGHSQDLVIHWDIKEEVDAGDWIGMYLIDEVLSENFLDYKNRGVNGSHRGQIIWKIDASSYFVEPETKICFKYYHGVSGALRATTPSVTVKNSAAPIFKSIGADETVQGQGSRRLISFSLSDFQAMGLKKGMFFNPDPYLKISIQPGKHSIFPALPHHGQERRSKIIGNTVNPIWQAEQFSFVSLPTDVLEIEVKDKFAKSRPIIKRFLGKLSMPVQRLLERHAIGDRVVSYTLGRRLPTDHVSGQLQFRFEITSSIHPDDEEISLSTEPESAQIQDSPMNNLMESGSGEPRSEAPESSESWKPEQLGEGSVPDRPGNQSIELSRPAEEAAVITEAGDQGMVSVGPEGAGELLAQVQKDIQPAPSAEELAEQLDLGEEASALLLEDGEAPASTKEEPLEEEATTQSRAGREEEEKEQEEEGDVSTLEQGEGRLQLRASVKRKSRPCSLPVSELETVIASACGDPETPRTHYIRIHTLLHSMPSAQGGSAAEEEDGAEEESTLKDSSEKDGLSEVDTVAADPSALEEDREEPEGATPGTAHPGHSGGHFPSLANGAAQDGDTHPSTGSESDSSPRQGGDHSCEGCDASCCSPSCYSSSCYSTSCYSSSCYSASCYSPSCYNGNRFASHTRFSSVDSAKISESTVFSSQDDEEEENSAFESVPDSMQSPELDPESTNGAGPWQDELAAPSGHVERSPEGLESPVAGPSNRREGECPILHNSQPVSQLPSLRPEHHHYPTIDEPLPPNWEARIDSHGRVFYVDHVNRTTTWQRPTAAATPDGMRRSGSIQQMEQLNRRYQNIQRTIATERSEEDSGSQSCEQAPAGGGGGGGSDSEAESSQSSLDLRREGSLSPVNSQKITLLLQSPAVKFITNPEFFTVLHANYSAYRVFTSSTCLKHMILKVRRDARNFERYQHNRDLVNFINMFADTRLELPRGWEIKTDQQGKSFFVDHNSRATTFIDPRIPLQNGRLPNHLTHRQHLQRLRSYSAGEASEVSRNRGASLLARPGHSLVAAIRSQHQHESLPLAYNDKIVAFLRQPNIFEMLQERQPSLARNHTLREKIHYIRTEGNHGLEKLSCDADLVILLSLFEEEIMSYVPLQAAFHPGYSFSPRCSPCSSPQNSPGLQRASARAPSPYRRDFEAKLRNFYRKLEAKGFGQGPGKIKLIIRRDHLLEGTFNQVMAYSRKELQRNKLYVTFVGEEGLDYSGPSREFFFLLSQELFNPYYGLFEYSANDTYTVQISPMSAFVENHLEWFRFSGRILGLALIHQYLLDAFFTRPFYKALLRLPCGFXVTWEYLDEEFHQSLQWMKDNNITDILDLTFTVNEEVFGQVTERELKSGGANTQVTEKNKKEYIERMVKWRVERGVVQQTEALVRGFYEVVDSRLVSVFDARELELVIAGTAEIDLNDWRNNTEYRGGYHDGHLVIRWFWAAVERFNNEQRLRLLQFVTGTSSVPYEGFAALRGSNGLRRFCIEKWGKITSLPSVWGSEQFPPMRTGDGTLGPGGSIWKELKEVAKFLYFEQELKGGQRKGSEGKRRAEARAHTCFNRLDLPPYPSYSMLYEKLLTAVEETSTFGLEDHGVQARFFPGRLFTPSSRRVTDRPRLLVPVRGAFKHPLSPARRSDCGRQTTAQGEKVQLSGRPGGWRRLTAPPFGQDSLLR

SEQ ID NO: 38865 - protein, 122 aa, Homo sapiens
  misc_feature (1)...(122): Xaa = X or * as defined in Table 2
ARVHQPVSLKQRFPLELGRHHQDSEAHAPPPGPAAASRGGIXVAWPAPRAGVVSLLGCRSSWTAAMELSAEYLREKLQRDLEAEHVLPSPGGVGQVRGETAASETQAGERVPSRRAPAHPCL

SEQ ID NO: 38866 - protein, 168 aa, Homo sapiens
GSKGSVAGARAWVVSLLGCRSRWTAAMELQRRIPPREAAAGPWRRSMWRWRTRPSTVAPVASESWWCRPSSRGNRCFQRHSLDPSMTIHCDMVITYGLDQLENCQTCGTNYIISVLNLLTLIVEQINTKLPSSFVEKLFIPSSKLLFLRYHKEKEVVAVAHAVYQAML

SEQ ID NO: 38867 - protein, 212 aa, Homo sapiens
  misc_feature (1)...(212): Xaa = X or * as defined in Table 2
LPSPGGVGQVRGETAASETQVLYRAMRRVTAANQAFFSEAEVTAAKERGIVLPLRCDPSQTIHCDMGITYGLDQLENCQTCGTNYIISVLNLLTLIVEQINTKLPSSFVEKLVIPSSKLLFWRYHKEKEVVAVAHAVLSRPMLQLGRNIPCFGRTAYXVXYWGRKWTCGPLNNLPGTVCNFPEACSEIKHEAFKNHVFNVDNAKFVVKFDLN

SEQ ID NO: 38868 - protein, 459 aa, Homo sapiens
  misc_feature (1)...(459): Xaa = X or * as defined in Table 2
SSAASHSSSPGAASRARATAGSRRRSSPIQSCHPPASACGQSGQSETHRLAMRNRTPPSXGFSSKHMRRSSSLASSXRGXKSVAVILXISASGILPTDVHLSPTPGSSETCHRPHPGHXEPSDCLQKLPASALGXSXQEQLSHNSPRSAXAQYAESSGNSFFSSKVGDXRFTTTVAPGGPGRRTLPGKPSPEHPHRLPELPPPRSPAQVCDQTLVAPHDHNTAGTPGDQVCLTLVSTSRSLSVLSKGCFFLHHSTLSVQAGVRHLSLVSXAAEPTSYLXVGPKLMAPSXKSLKIRTRKPRADDSPGTSRYSSAHTRTRKPRADDSPGTSRYSIAHTRMWKPRADDSRHSRYSTGCRSPGQMTLHAPADTALHTPGPRKPRADDSPGTSRYSTAHTRTRKPRADDSPGTSRYSTAHTRTQKPRADDSTGTSRYSTPLASRRHRIAASASWALVVLICLTL

SEQ ID NO: 38869 - protein, 574 aa, Homo sapiens
  misc_feature (1)...(574): Xaa = X or * as defined in Table 2
PLRNTGLCRGKGHPGLESSGSRRRRDGRASERRQTQRERGKTLPCSSHSPWWLKANASAPAVWSQAHRTQKPRADDSPGTSRYSTAHTRTRKPRADDSPGTPDTALQTPGRRSPGQMTPGTSRYSTGRGSPGQMTPGTSRYSTERRSPGQMTLQTPADTAQDAEAQGRXLQAPADTALHTPGRRSPGQMTLQAPADTALHTPGHRSRGKMTLQAPADTALHTPGRGSPGQMTLQAPADTALHTPERSEPGQMTPRRPADTALHTPGRGSPAQMTLQAPADTALHTPGRRSPGKMTPGTSRYSIAHTRTRKPRADDSPGTSRYSTAHTRTQKPRADDSPGTSRYSTAHTRMRKPRADDSRHSRYSTGCRSPGQMTLQAPADTALHTPGPRKPRADDSPGTSRYSTAHTRTRKPRADDSPGTSRYSTAHTRIRKPRADDSPGTSRYSTAHTRTQKPRADDSRHQQIQHRMQKPRADDSPGTRRYSIAHTRTRKPRADDSPGTSRYSTAHTRTRKPRADDSPGTSRYSTAHTRTQKPRADDSPGTSRYSTRAGCCPPGLASSAWAGLRLKTRKGWTW

SEQ ID NO: 38870 - protein, 95 aa, Homo sapiens
  misc_feature (1)...(95): Xaa = X or * as defined in Table 2
EKGQDILQNLFWQLRHGPIMSSPSASNTGWGSSSXSIVPSSTVSSWSTAMKLSSSLSEELAMTFHSTENIVVLGWVQWLTPVVPALWDSEAGRSP

SEQ ID NO: 38871 - protein, 514 aa, Homo sapiens
  misc_feature (1)...(514): Xaa = X or * as defined in Table 2
VHVGAARRGFGVYPVLSLTVSGTQNCGPCLQTVVSTYQRVXPISVIMVSXRLSRKETFSGRAVPILILEPQSLSASRTVHAIMMHNQSMYVFGGCTQSSCNAAFNDLWRLDLNSKEWIRPLASGSYPSPKAGATLVVYKDLLVLFGGWTRPSPYPLHQPERFFDEIHTYSPSKNWWNCIVTTHGPPPMAGHSSCVIDDKMIVFGGSLGSRQMSNDVWVLDLEQWAWSKPNISGPSPHPRGGQSQLFKDAWLLHMHSGPWAWQPLKVENEEHGAPELWCHPACRVGQCVVVFSQAPSGRAPLSPSLNSRPSPISATPPALVPETREYRSQSPVRSMDEAPCVNGRWGTLRPRAQRQTPSGSREGSLSPARGDGSPILNGGSLSPGTAAVGGSSLDSPVQAISPSTPSAPEGYDLKIGLSLAPRRGSLPDQKDLRLGSIDLNWDLKPASSSNPMDGMDNRTVGGSMRHPPEQTNGVHTPPHVASALAGAVSPGALRRSLEAIKAMSSKGPSASGRH

SEQ ID NO: 38872 - protein, 96 aa, Homo sapiens
  DOMAIN (24)..(39): CARBOXYPEPTIDASE A METALLOPROTEASE (M14) FAMILY SIGNATURE domain identified by eMATRIX, accession number PR00765B, p-value= 5.154e-11, raw score of 15.57
  DOMAIN (20)..(82): Zinc carboxypeptidase domain identified by PFam, accession name Zn_carbOpept, E-value=2e-08, PFam score of 34.8
QAPFGPKCFNVNLCFSLSLSKGEPEFHYIAGAHGNEVLGRELLLLLVQFVCQEYLARNARIVHLVEETRIHVLPSLNPDGYEKAYEGVMALAHLTQ

SEQ ID NO: 38873 - protein, 468 aa, Homo sapiens
  DOMAIN (77)..(92): CARBOXYPEPTIDASE A METALLOPROTEASE (M14) FAMILY SIGNATURE domain identified by eMATRIX, accession number PR00765B, p-value= 5.154e-11, raw score of 15.57
  DOMAIN (43)..(390): Zinc carboxypeptidase domain identified by PFam, accession name Zn_carbOpept, E-value=2.3e-30, PFam score of 114.3
  misc_feature (1)...(468): Xaa = X or * as defined in Table 2
MIERVLEGKWALSRAEGLHRHQCLEFLIHLVFQLMKVVNEMCPNITRIYNIGKSHQGLKLYAVEISDHPGEHEVGEPEFHYIAGAHGNEVLGRELLLLLVQFVCQEYLARNARIVHLVEETRIHVLPSLNPDGYEKAYEGGSELGGWSLGRWTHDGIDINNNFPDLNTLLWEAEDRQNVPRKVPNHYIAIPEWFLSENATVAAETRAVIAWMEKIPFVLGGNLQGGELVVAYPYDLVRSPWKTQEHTPTPDDHVFRWLAYSYASTHRLMTDARRRVCHTEDFQKEEGTVNGASWHTVAGSLNDFSYLHTNCFELSIYVGCDKYPHESQLPEEWENNRESLIVFMEQVHRGIKGLVRDSHGKGIPNAIISVEGINHDIRTATDGDYWRLLNPGEYVVTAKAGRFHCIHPRTCMVGYDMGAHKCLNFTLSKTNLARIRRDHWRSFGKAAPSALPSPGGXKLRGRKRRQRG

SEQ ID NO: 38874 - protein, 249 aa, Homo sapiens
  DOMAIN (10)..(50): kw TRANSCRIPTASE REVERSE II ORF2 domain identified by eMATRIX, accession number DM01354H, p-value=4.750e-26, raw score of 18.00
  misc_feature (1)...(249): Xaa = X or * as defined in Table 2
KTDHILGHKTCLKTFRKIEIISGILSDHSGIKLQINNKGNFGNHTSTWKLNNMLLNDQXVNEEIKKEIXNHPETNDNGNATYQNLXDTGKEVLRGKLIPISTYIKXVEKLQINNLTMHLKELEKPEQTKRKITRRKEIIKIRAEINEIEAKKTIPKFNETNSWFLENIHKTNEHLARLRKKDPNKIREEKEDIITDTVEIQRIIRSYYAKKWENLEETDKFLDTYNLPRLNNEEVQNLSRPITTTVPIP

SEQ ID NO: 38875 - protein, 280 aa, Homo sapiens
  DOMAIN (96)..(115): GONADOTROPHIN RELEASING HORMONE RECEPTOR SIGNATURE domain identified by eMATRIX, accession number PR00529C, p-value=1.000e- 08, raw score of 11.03
MAAEDELLLPRLPMLLETGKQLLDEVELAAETTGYQIVQEKRAREHFINYLTQCHYYHIAKFELLKTKNNSAENHTANSSMAYPSLVAMASQRQAKIERYKQKKELDHRLSAMKSAVESGQADDEHERPPVKSFILTRNTAQAKLFGASYPSLATMTVSDWYEQHRKYGALPDQGIATATPEKFRKAAQQQKYQEVKEGEDDEHSTEFGSGITGRTPILGAMATDRTWADLPPTRQDCRVHTSPTKENHAVFPSLGSRSAVYNEGKDAKYALHSMKCQVI

SEQ ID NO: 38876 - protein, 397 aa, Homo sapiens
  DOMAIN (148)..(167): GONADOTROPHIN RELEASING HORMONE RECEPTOR SIGNATURE domain identified by eMATRIX, accession number PR00529C, p-value=7.506e- 10, raw score of 11.03
  misc_feature (1)...(397): Xaa = X or * as defined in Table 2
VPELFGNCRQLLEEVEVATXPRRFRDSPGGSVQGLWTSLRRAAEMLFPVHLVRPRMXILERFVPHALDYLLGSRLFKEPLPLKQVNPSRSLDHLQRAREHFINYLTQCHCYHVAEFELPKTMNNSAENHTANSSMAYPSLVAMASQRQAKIQRYKQKKELEHRLSAMKSAVESGQADDERVRGYYLLHLQRWVDISLEEIESIDQEIKILRERDSSREASTSNSSRQERPPVKPFHSHFGTWLHSQSTFGAGYSKGWPTYRTVSDWYEQHRKLWSTYPDQGIAKAAPEEFRKAAQQQEDQKKRRKRMRTKQLPQSPGVGMTGSDTHPXGPMGTDRTWADLPTTPQDSGVHTPLPRKTMQSSPPPVSWLQLCTTEGKDAKSCFAFSKVSSDLSVYLYP

SEQ ID NO: 38877 - protein, 330 aa, Homo sapiens
  misc_feature (1)...(330): Xaa = X or * as defined in Table 2
GTKELLLTXLGGSPLLLTXTKPLGVDPLLKGGVTQGFNEKAVFAALRPSYGQPAGKPAFAGAMSLAGAQGSLWSVEGGNKLVCSGLLKLTKANVIHATVTSVTLHSTEGKALYQVAYENEVGNSSDFYDIVVIATPLHLDNSSSNLTFAGFHPPIDDVQGSFQPTVVSLVHGYLNSSYFRFPRPXAFPLSNILTTDFPSFFCTLDNICPVNISASFRRKQPQDAAVWRVQSTKPLFRTQLKTLFRSYYSVQTAGVGRANPLYGFRPHGFPRFALHDQLFYLNALEWAASSVEVMAVAAKNVAFAWLYNRWYQDLDKIDQKDLMHKVKTEL

SEQ ID NO: 38878 - protein, 124 aa, Homo sapiens
PDVLKNIITEIIHSILLPNQNGKLRSGVPVSLVKALGFEAAESSLTKLSKRSATDLCGRNDGNLKVIFPDAEMEDVNNPGLRVRAQPGDYVLVKLCPVIEASFNGMYADLLQLVKDAQTEIRHD

SEQ ID NO: 38879 - protein, 565 aa, Homo sapiens
  misc_feature (1)...(565): Xaa = X or * as defined in Table 2
MHAKSIKTQALADMEKLKVVVRDKNWVARIIPQMTSKGHVGVTTTSSAKLKSQGKDSVAVKRVRSGLMIGFRFMVIPPYSFGPQVLMEIPKDADKLLCPSCAAVVLGQKKHETQTLSLKELPVQDNVVPKEDPGTWEWRTVKEGILEEVMCWLQSRVEGDWAKEERKIFHEGELAEAKAGRGGLASCTCCPLTPGKMAGPWTFTLLCGLLAATLIQATLSPTAVLILGPKVIKEKLTQELKDHNATSILQQLPLLIAMREKPAGGIPVLGSLVNTVLKHIIWLKVITANILQLQVKPSANDQELLVKIPLDMVAGFNTPLVKTIVEFHMTTEAQATIRMDTSASGPTRLVLSDCATSHGSLRIQLLHKLSFLVNALAKQVMNLLVPSLPNLVKNQLCPVIEASFNGMYADLLQLVKVPISLSIDRLEFXPSVSCHQGXHHSALPGGQVVGLTGKGDQVVHNSAASLTMPTLDNIPFSLIVSQDVVKAAVAAVLSPEEFMVLLDSVLPESAHRLKSSIGLINEKAADKLGSTQIVKILTQDTPEFFYRPRPCQGGPTDRAGSVSLQ

SEQ ID NO: 38880 - protein, 353 aa, Homo sapiens
  DOMAIN (164)..(191): Enoyl-CoA hydratase/isomerase proteins domain identified by eMATRIX, accession number BL00166C, p-value=7.125e-10, raw score of 18.93
  DOMAIN (72)..(307): Enoyl-CoA hydratase/isomerase family domain identified by PFam, accession name ECH, E-value=0.00024, PFam score of -31.8
MGLPAQGVGGNTLAKLLASDDIAKGGKRNKSEASVVRNAADAPKVLQDLSARLMGDFELRNCNSPCTLLIGIVVLINAAAETLVFLSDHMEDQGSSQLNVAVLSYFQQQDPEGQKEETAGIDLMDMASDILQPKGDDVARISWYLRDIITRYQETFNVIERCPKPVIAAVHGGCIGGGGAAAPMPRPLASSLSSVMGQTVSQEAAPPPGSQGWFWWSFSIPGLYLLGVDLVTACDIRYCAQDAFFQVKEVDVGLAADVGTLQRLPKVIGNQSLVNELAFTARKMMADEISSKSPVALQSTKVNLLYSRDHSVAESLNYVASWNMSMLQTQDLVKSVQATTENKELKTVTFSKL

SEQ ID NO: 38881 - protein, 205 aa, Homo sapiens
MFCMSKLNRPNKRNAMNKVFWREDGRPFNVIERLPQARDCFRSMGAAFGGRCGTLSPPVNIRYLCPGMLFFQGEGGSSGNPEPWSNEPGLHPPAKMMADEALGKWAGQPGFSPDKEVHAGLLPLALAARDFPAKEPPWAVQSHQRSNLAGNSPRNHLGGRRALNYVVRRPGNMEHAGRPKTIVKVGPRPTTDEQGTENPSPSPKL

SEQ ID NO: 38882 - protein, 125 aa, Homo sapiens
  misc_feature (1)...(125): Xaa = X or * as defined in Table 2
TSLTFHSPEVPSSXPPSCTRXAGAARGPRPPGAAGRPRXSCXGPPGTRRWQSXGGTSPLGPVPGGRSGAASCGLPDCELXPLKRSAQGRNQCPVXSSPRSWSRSRSEPCAARGWPPSACRHGNRR

SEQ ID NO: 38883 - protein, 444 aa, Homo sapiens
  DOMAIN (30)..(57): C1q domain proteins domain identified by eMATRIX, accession number BL01113A, p-value=9.135e-09, raw score of 17.99
  misc_feature (1)...(444): Xaa = X or * as defined in Table 2
SLQLPRGLLPESCAADPGAXPPSCTRXAGAARGPRPPGAAGRPRXSCXGPPGTPALAKPPSCPVVTSAAPTQARPMIKPQGAAWSTQKLPIPTSASPTQKSPIPTSASSTQKLPIPTAAWSTQKLPIPTAAWSTQKLPIPTAAWSTQKLPIPTAAWSTQKLPIPTAASSTQKLPMPTAASSTQKSPIPTAASSTQKLPIPTAAWSTXKLPITRAAWSTQKLPIPTAASSTQKYTIATAASYHAKATDAWSTXKLPIPRAAWSTXKLPIPTAAWSTQKLPIPTAASSTQKSPIPTAASSTQKLPMPTAAWSTQKLPIPTAAWSTQKLPIPTAASSTQKLPMPTAASSTQKLPMPTAAWSTITTMGATTHGPSTDTQNVVFLHPRCPEQASSQRSGAGADXGLSNPKVSSAEAPSCAKDEPEVEKGRGPAPWTSQRWRRAVGRPRG

SEQ ID NO: 38884 - protein, 80 aa, Homo sapiens
  misc_feature (1)...(80): Xaa = X or * as defined in Table 2
KLHLGWGKTPGXHWGLYXNLPRLNGPNSLMPSLRRVRRNKARQVTSIAGCALQMEQWMHGMTRHPTRISTPITAAREVRI

SEQ ID NO: 38885 - protein, 48 aa, Homo sapiens
MHGMTRHPTRISTPITAAREVRIEAIIPFHLLNYFSSHPVKGSFTPEL

SEQ ID NO: 38886 - protein, 215 aa, Homo sapiens
  misc_feature (1)...(215): Xaa = X or * as defined in Table 2
LQDLSQYFGGSQLIKTXIGXTTSIITNSNLXTTLEMSVKGIAEQLGTNCQMAWENRIALDMILAERGGVCIMIKTECCAFIPNNTAPNGSITKALQGLTALSNELASSSGVNDPFTGWLEKWFGKWKGITASILTSLTAVMGVLILVGCCVIPCICGLVQRHRGPPLVVIETKPLGLERLAGLPVGHALKLGSGIQATPQNGENADRREAFPAAS

SEQ ID NO: 38887 - protein, 455 aa, Homo sapiens
  DOMAIN (56)..(154): Gag P30 core shell protein domain identified by PFam, accession name Gag_p30, E-value=5.1e-18, PFam score of 66.6
MLLLNQTLTPNERSATITAAREFGDLWYLSQVNDRMTTEERERLPTGQQEVPSVHPHWDTESKHGDWCRRHLLTCMLEGLRKTRKKPMNYSMMSTITQGKEENPTAFLERLREALRKHTSLSPDSIEGQLILKDKFITQSATDIRKNFKNLETLLNLATLVFHNRDKEKQAEQDKRDLKKATALVMALRQADFGGSGTRKGWANPMPNRACFQCGLQGHFKKIVQIQISHPLIHAPYVKGINGRPTAPGDKGFQTKAQLCSEQAKYLGLKLSKGTRALSEERIQPILAYPHPKTLKQLRGFFGIPGFCRIWIPRIKAVKLHIVLQMDPQRQSMTKIYHGPLDWPASPCSDVNDTKGNPPEEISTAPPLLCPNSAGSSWSGDNTERRPLPDAGPLTLDFLGSKPRVQNNSDASREKHSHETKHPDQRHRTASYSHFQAKQGASVLPCILEKREASY

SEQ ID NO: 38888 - protein, 87 aa, Homo sapiens
  DOMAIN (8)..(22): Gag P30 core shell protein domain identified by PFam, accession name Gag_p30, E-value=0.076, PFam score of 9.8
  misc_feature (1)...(87): Xaa = X or * as defined in Table 2
QLILKDKFITQSAADIKEKLQKSTLGPERNLKTLLNLATCCFLXXRSGGAGGTGQTRXEKGHHFSHGPRASGLWRLWNAESLGKSNA

SEQ ID NO: 38889 - protein, 35 aa, Homo sapiens
VLTRSDSFIKGFSPPSLCTSPCCYHVKKDVFASPS

SEQ ID NO: 38890 - protein, 426 aa, Homo sapiens
  DOMAIN (87)..(127): G-protein coupled receptors proteins domain identified by eMATRIX, accession number BL00237A, p-value=1.000e-21, raw score of 27.68
  DOMAIN (38)..(286): 7 transmembrane receptor (rhodopsin family) domain identified by PFam, accession name 7tm_1, E-value=1.7e-54, PFam score of 175.3
MGNITADNSSMSCTIDHTIHQTLAPVVYVTVLVVGFPANCLSLYFGYLQIKARNELGVYLCNLTVADLFYICSLPFWLQYVLQHDNWSHGDLSCQVCGILLYENIYISVGFLCCISVDRYLAVAHPFRFHQFRTLKAAVGVSVVIWAKELLTSIYFLMHEEVIEDENQHRVCFEHYPIQAWQRAINYYRFLVGFLFPICLLLASYQGILRAVRRSHGTQKSRKDQIQRLVLSTVVIFLACFLPYHVLLLVRRYWEASCDFAKGVFNAYHFSLLLTSFNCVADPVLYCFVSETTHRDLARLRGACLAFLTCSRTGRAREAYPLGAPEASGKSGAQEEEVTKFEGGRNGHTAKKSPCNSVQDFTGIKAVKLQIVLQMEPQMQSMTKIYHGPLDRPASPCSDVDDIEGTPPEEISTAQPLLRPNSAGSS

SEQ ID NO: 38891 - protein, 78 aa, Homo sapiens
HSLYGPRFHSLESMRPRTPGQRTRGLPPSWKRPTTILGALRTRTTRWETFPPKAKTPLRCILENSAQPECTYLFSCQT

SEQ ID NO: 38892 - protein, 604 aa, Homo sapiens
  DOMAIN (307)..(324): RNase H domain identified by eMATRIX, accession number PF00075A, p-value=4.400e-13, raw score of 14.44
  DOMAIN (287)..(472): Reverse transcriptase domain identified by PFam, accession name rvt, E-value=1.8e-36, PFam score of 134.6
MSSNRAITLTAWPKIPFLGIREAKNPRIGGKYWAPVSQLKTISVAAGLKTQVLRYLRKGFLTTPNPSGLGTLVLMVHTFISSSKLYLQRDLGRLCVVSLGTWAVTQGVLSLVSLLIQPEEFGDLWYLSQVNDRMTTEEREQFPTGQQAVPSVDPHWDTESEHGNWCRRHLLTCVLGLRKTRKKPMNYAMMSTITQGKEENPTAFLIRRSRRNGTNGIKKKATALVMALRQADFGVSGKGKSWANRMPNMACFQCGLQGHFKKDCPSRSSTLRPEAQQGLQKIVKDLKAQGLVKPCNSPCNTPVLGVQKPNGQWRLVQDLRIINEAVLPLYPAIPNPCTLLSQKPQKAEWFTVLDLKDAFFCIPVHPDSQFLFAFEDPLNPMSQLTWTVLPQGFKHSAHLFGQALAQDLSQFSYLDTLVLQYGDDLILATRSETWCHQATQALLNFLATCGYKVSKQNAQLCSQQVKNLGLKLSKGTRALSEERIQPILAYPHPKTLKQLRGFLGITSFCRIWIPRIKAVKLHIVLQMDPQRQSMTKIYHGPLDWPASPCSDVNDTKGNPPEEISTAPPLLCPNSAGSSWSGDNTERRPLPDAGPLTLDFLGSKP

SEQ ID NO: 38893 - protein, 144 aa, Homo sapiens
  misc_feature (1)...(144): Xaa = X or * as defined in Table 2
LLGSTVLFHDPQLLIELYHSSHGPKVPFLGIREAKNSRSENTRLATILGAGLLPSWKWFTTILGALXARTPRXHFGNHVTDIQSRIEAVKLQMEPKMQSKTKIYRRPLDRPASPRSDVNDIKGTPREEISAAKPLLRPNSAGSS

SEQ ID NO: 38894 - protein, 59 aa, Homo sapiens
YLFAVIVKGVEFLILFSAWSLLVYRRATNLCRLILYLKTLLNSFISSRSFLGEALGFSR

SEQ ID NO: 38895 - protein, 23 aa, Homo sapiens
LLKKWLSSWFDSLHGRCWYTSYY

SEQ ID NO: 38896 - protein, 224 aa, Homo sapiens
  DOMAIN (87)..(128): kw TRANSCRIPTASE REVERSE II ORF2 domain identified by eMATRIX, accession number DM01354I, p-value=4.529e-31, raw score of 15.55
  misc_feature (1)...(224): Xaa = X or * as defined in Table 2
MDLNYTLEQMDLTDIYRTFHPTTTEYTFYSTGHGTFSKTDDVIGHKMSLDKFKKIEMISNTVSDHSGIKLEINSERNLENHANTWKLNNLLLNECWVKNKMKMEIKKLFELNDNNDTTYHNLWDRAKVVIRGKCIALNTYIKKSERAQTDNLRIKNKNHMIISIDAEKAFDKIQHPFMIKTLSKISIRGTYLNLIKDISXQTHSQHNAEWGKIESIHSENWNRG

SEQ ID NO: 38897 - protein, 139 aa, Homo sapiens
  DOMAIN (87)..(130): kw TRANSCRIPTASE REVERSE II ORF2 domain identified by eMATRIX, accession number DM01354T, p-value=8.217e-11, raw score of 9.48
  misc_feature (1)...(139): Xaa = X or * as defined in Table 2
MPDCNYQHNITECGLEKKIPIWSYVNIQIRQVTIQIRNLEEQILRKTPTGESSAWTWMKPETIILSKLTQEQKTKPHSLTRKWESNNENTWKQGGEHHKPGPVGSIVLKVLARAIRQEKERKGTRIGKEEVKLVLFADX

SEQ ID NO: 38898 - protein, 172 aa, Homo sapiens
  DOMAIN (58)..(79): kw TRANSCRIPTASE REVERSE II ORF2 domain identified by eMATRIX, accession number DM01354S, p-value=1.545e-17, raw score of 11.61
DTAKVVLRGKVIALNAYIKKSERAQIDNTQKKHLTKLSIPLIKTLSKIGIEGTYLKVIKAIYDKSRANITLNGEKLKAFPLRTRTRQGCPFIRCSTGSPGQSNQTRERNKGHQISKEEVKLSLFADGIIIYLENPKDSSKKLLELAYKRKTEAAKKEYLKALAAYRASLVSK

SEQ ID NO: 38899 - protein, 91 aa, Homo sapiens
  DOMAIN (9)..(52): kw TRANSCRIPTASE REVERSE II ORF2 domain identified by eMATRIX, accession number DM01354T, p-value=1.000e-40, raw score of 9.48
MNEEKLQAFPLRTGTRQGCPISPPLFSIVLEVLARAIRQEKEIKGIQISKEKVKLSLFAVDIIYLENPKDDSRKLLELIEEFGKVSGYNIK

SEQ ID NO: 38900 - protein, 224 aa, Homo sapiens
  misc_feature (1)...(224): Xaa = X or * as defined in Table 2
QNKACQHPPKITRVHQQWIQTKKKSSIYLKKEFRRLVIKLIREAPEEGKAQCKEVQKLIQKVQGEIIDEIDTINKKQPKLQETMDTLTKMQNAQESLSNRIEQEEEHSKSLENIFGSIMEENFPSLARDLDSQIQEAQRTPGKFITKRSSPRHIVIRLSKVKTKERILRVVRQKRKIVLKSXPGNMTKQGLSTSPKNHTSSPTMDPNQEEILDLPEKRIQEVSY

SEQ ID NO: 38901 - protein, 35 aa, Homo sapiens
RRAIDLCTLILYLETLLTSFVSSRSFLVETLRFSR

SEQ ID NO: 38902 - protein, 210 aa, Homo sapiens
  DOMAIN (191)..(201): Ank repeat proteins domain identified by eMATRIX, accession number PF00023B, p-value=4.000e-10, raw score of 14.20
  DOMAIN (20)..(156): Ank repeat domain identified by PFam, accession name ank, E- value=7.5e-05, PFam score of 29.6
PRVRGRVGDLGAHPDVQDRMGCTPTMRAAELGHELSMEILAKAKADMTIVDNEGKGVLFYCILPTKRHYRCALIALEHGADVNNSTYEGKPIFLRACEDAHDVKDVCLTFLEKGANPNAINSSTGRTALMEASREGVVEIVRGILERGGEVNAFDNDRHHAAHFAAKGGFFDILKLLFAYNGDVGLISINGNTPLHYAAMGGFADCCKYI

SEQ ID NO: 38903 - protein, 783 aa, Homo sapiens
  DOMAIN (94)..(149): Domain present in ZO-1 and Unc5-like netrin receptors domain identified by eMATRIX, accession number PF00791B, p-value=4.600e- 12, raw score of 28.49
  DOMAIN (89)..(630): Ank repeat domain identified by PFam, accession name ank, E- value=1.8e-22, PFam score of 88.1
  misc_feature (1)...(783): Xaa = X or * as defined in Table 2
GSSKILLFNQNEDDKINFELFFFFVASALVLVQKAFSRSWSSMALADKRLENLQIYKVLQCVRNKDKKQIEKLTKLGYPELINYTEPINGLSALHLASVSNDIDMVSFLLDLGAHPDVQDRMGCTPTMRAAELGHELSMEILAKAKADMTIVDNEGKVLEGTGGLTSSPLAHIAVALHIPRRDTQGVLFYCILPTKRHYRCALIALEHGADVNNSTYEGKPIFLRACEDAHDVKDVCLTFLEKGANPNAINSILKLLFAYNGDVGLISINGNTPLHYAAMGGFADCCKYIAQRGCDLKWKNLDHKTPRAVAKEGGFKAASKEIRRCRENRXXTSQARSQKSQIPLWALRLHDWSVEREAFLREAFAVLDRGDGSISKNDFVMVLEESRIMQAQNSWLPFAHLHEKTRGGGVNINXILLKEPDILNKSFVLGSYGPKKKEKGMGKKGKKGKFVLPLPICVIPEYAFPRRQDGGPPYYMIETYKNVTDSSRFNRDHPPEHPIQDDSVWYIDDSEKVFSNINIITKAGDLASLKKAFESGIPVDMKDNYYKTPLMTACASGNIDVVKFLLEKGYASPSGQQDIVELLVESGALIDAASINNSTPLNRAIESCRLDTVKYLLDIGAKFQLENRKGHSAMDVAKAYADYRIIDLIKEKLDNLPKPAENQKLKGKTPPILKTEGPEIKKEEELLSSIYGVPTTSEGKKVQKGNVVHLNSLITSGYTKKVDITFIPRRIWSPEATTAELIRKRELRRERFTHEVDFDDFMMPFQKNITEKARALEAALKT

SEQ ID NO: 38904 - protein, 280 aa, Homo sapiens
  DOMAIN (208)..(252): Synapsins proteins domain identified by eMATRIX, accession number BL00415N, p-value=1.263e-09, raw score of 4.29
  misc_feature (1)...(280): Xaa = X or * as defined in Table 2
MGRGWTQAVGPRWSGGSSCTLYSVGADGRGQGHQSRGCRPPGPPSASSAPCLAWGAAGRARREGLRQNAERSSPLTAPAGRPXPCGAGPCRRXSRXRPLVGCLRPWASPGTGAACGRCCCPPPXPPXPNPWHFTVSKAFSYMPSTTARLVRGPRLLVGPVPVAPYIPPPGSPASRRGSRCRGRSRPSPRPRPSVLSCHGVSLXTGPSLPGWLLQIWQRSAQMSPPPKGPPXGSREGPPPPGPALLPAAAPGGQGHRAPAAGSCGRRAAARRMEWVRNSPP

SEQ ID NO: 38905 - protein, 899 aa, Homo sapiens
  DOMAIN (687)..(892): 3' exoribonuclease family domain identified by PFam, accession name RNase_PH, E-value=1.5e-28, PFam score of 108.3
MLGKSLDLLDDSLAETGSKESIPQTEVIAIRGRRQTFQGLKSCDKEFGVYAECDREPANVFHRASGKEGKTGGKRNTQTSEGSRQFTHFYSLTFSASKCQVVELQRETEVAGYENRQHSFFPPCGVFPDKKAGLNPGCCSSRPHERLDWLIERPKGGRRAELSIRSLALPLPQHCGSDNDWIPLQLRLLSRASFHSGPKLTEHFQLPWQKENGAKANNSIALTAFTGESDEMPSYSTAGSSCQNICWMALMTTTTTDCVGENTEKLKWENSLTPLAEPLEANKSKIKAPENLVSVLRRSTLQPYFNEQVLNFFAQIISSSCVIWKENKTAWDTAKSGNRPSGFPDSIKETETHQIGSLLWSECLCKPQIHTSNPNPQCGGIGRERKEMSLGSKCGKLCRDSQGERSFPLSKAAFVTRCCIVTESNELSDATVQKELAGWDRALIQLQVRALLSSTGSQAVAMDLGNRKLEISSGKLARFANGSAVIQSGDTAVMATAVSKTKPSPSQFMPLVVDYRQKAAAVGMTDGECVVNPTRKEMSSSTLNVVVAGAPKSQTVMLEASAENILQQDFCHAIKVGVKYTQQIIQGIQQLVKEIGVTKRTPQKLFTPSQEIVKHAHKLTMERLYAVFTDYEHDKISRDEAVNKIRLDTEEQLKEIFPEVDLYEIIESFNTVAKEVFRSIILNEYKRCDGRDLTLLRNISCEVDMFKTLHGSELFQRGQTQLLCAVTFDSLESSIKLDRVITTINGIKDKNFMLHYEFPPYATNEIVKVTGINRRELGPGALAEKALYPVIPKDFPFAIRVTSEVLESNGSSSMASACGVAMGLATKTDLEKGEIEDYHLLTDILGIEAYNGDMDFKIAGTNKGITALQADIKLPGITMKIVMEAIQQASVAKRRFYRS

SEQ ID NO: 38906 - protein, 541 aa, Homo sapiens
  DOMAIN (184)..(414): 3' exoribonuclease family domain identified by PFam, accession name RNase_PH, E-value=5.4e-13, PFam score of 56.6
  misc_feature (1)...(541): Xaa = X or * as defined in Table 2
FPPYATNEIGKVTGLNRRELGHGALAEKALYPVIPRDFPFTIRVTSEVLESNGMRRIGQPPASSRPVRRVRAPLPPPLLEVRAPLPASRPSGEVLCTVTFDSLESGIKSDQVITAINGIKDKNFMLHYEFPPYATNEIGKVTGLNRRELGHGALAEKALYPVIPRDFPFTIRVTSEVLESNGMRRIGQPPASSRPVRRVRAPLPPPLLEVRAPLPASRPSGEVLCTVTFDSLESGIKSDQVITAINGIKDKNFMLHYEFPPYATNEIGKVTGLNRRELGHGALAEKALYPVIPRDFPFTIRVTSEVLESNGSSSMASACGGSLALMDSGVPISSAVAGRTNXDWSPKPDPEKGEIRKIIVCXQIFLGIEDYNGDMDFKIAGTNKGITALQADIKLPGIPIKIVMEAIQQASVAKKEILQIMNKTISKPRASRKENGPVVETVQVPLSKRAKFVGPGGYNLKKLQAETGVTISQVDEETVFCNLHQHPVLMLEGKRLSFTEICKDDQEQAIRNLGAVILPAHNNWKSEILGVMGKIISQIWT

SEQ ID NO: 38907 - protein, 51 aa, Homo sapiens
  misc_feature (1)...(51): Xaa = X or * as defined in Table 2
DNQNGKLIKCSXPCNFVHRAPYAVEITVLRFHCNWTVQVAQRERTFLILIK

SEQ ID NO: 38908 - protein, 65 aa, Homo sapiens
MENGMGRFLKKLKTKPPQNPAIPLLCIYEKELKSVCQRYLCTLTFTTALFTIAKTWNPCKVSING

SEQ ID NO: 38909 - protein, 135 aa, Homo sapiens
  misc_feature (1)...(135): Xaa = X or * as defined in Table 2
MLLKSNILMLNLFAANVGANFALTVEKIGMILLNVRICHAVFHFVAVPFCVPTRNDESSYRSTSWSTFGSQYFDFGHSNRYFDGNLEKLFAECHVINPSKKSRTRQMNTRSSAQDMPCQICYLNYPNSNKICEVX

SEQ ID NO: 38910 - protein, 563 aa, Homo sapiens
  DOMAIN (203)..(212): Zinc finger C3HC4 type (RING finger), proteins. domain identified by eMATRIX, accession number BL00518, p-value=5.333e-09, raw score of 12.23
  DOMAIN (258)..(320): IBR domain identified by PFam, accession name IBR, E-value= 9.1e-25, PFam score of 95.7
  misc_feature (1)...(563): Xaa = X or * as defined in Table 2
MDSDEGYNYEFDEDEECSEEDSGAEEEEDEDDDEPDDDTLDLGEVELVEPGLGVGGERDGLLCGETGGGGGSALGPGGGGGGGGGGGGGGPGHEQEEDYRYEVLTSEMILQHMVECIREVNEVIQNPATITRILLSHFNWDKEKLMERYFDGNLEKLFAECHVINPSKKSRTRQMNTRSSAQDMPCQICYLNYPNSYFTGLECGHKFCMQCWSEYLTTKIMEEGMGQTISCPAHGCDILVDDNTVMRLITDSKVKLKYQHLITNSFVECNRLLKWCPAPDCHHVVKVQYPDAKPVRCKCGRQFCFNCGENWHDPVQCKWLKKWIKKCDDDSETSNWIAANTKECPKCHVTIEKDGGCNHMVCRNQNCKAEFCWVCLGPWEPHGSAWDTVPVXNEDDAKAARDAQERSRAALQSYLFYCNRYMNHMQSLRFEHRLYAQVTQTMEEMQQHNMSWIEVQFLKKAVDVLCQCRATLMYTYVFAFYLKKNKPSFHIFENNPKARFDENATEGLSGYLGTRKFPKDSLQDIKQKVPRPSTRYCESRRKGFVTSMCHEGYEKDLWEYIED

SEQ ID NO: 38911 - protein, 33 aa, Homo sapiens [sequence omitted]

SEQ ID NO: 38912 - protein, 131 aa, Homo sapiens
  misc_feature (1)...(131): Xaa = X or * as defined in Table 2
MDRLLNLTLNLGVTGVIFGRGGTDCQAILICRNLFPFLMGDADLRTWGHILLLLHFMNFDFATTGFQLIHTYINXXXXXXXXXXXXXXXXXXXXXXXXXXXXXXXXXXXXXXXXXXXXYSWLSCFVWTQLP

SEQ ID NO: 38913 - protein, 331 aa, Homo sapiens
  DOMAIN (49)..(64): LIM domain proteins domain identified by eMATRIX, accession number BL00478B, p-value=7.750e-12, raw score of 14.79
  DOMAIN (29)..(63): LIM domain containing proteins domain identified by PFam, accession name LIM, E-value=2e-05, PFam score of 24.4
MGRTYAASKVKTIDGGVFQKFQAPARETCVECQKTVYPMERLLANQQVFHISCFRCSYCNNKLRHVKCNGFSSEGTCDFQRIRSDCGDWSLMCSSVALDELERDTNCVLRAVDVMAPGCFFPDPTPAPRSACASGAVACAGLDAVMCARTARGRSGGRQASAPPRRRAGTGAGPLVLMENAARTRLERMDVRRVQSLGRMLRCGLAAKCLDWANTHLFRCERVVPGNTPLPQTPTSKGAGGELGESDPPPRVLGTWVAVPPNKPLNRGQRREGGRCILEGPVSACMLLLVACTCVGQKALKDKNDVSGKHLEGLAGQVHPSTGVPPSTATL

SEQ ID NO: 38914 - protein, 433 aa, Homo sapiens
MAPAEIPDDSINRLTCPGALPSAPVATKLLTPTAPAAPPRTPPTAAGARTPDSLPCGLGLSVRATGYVPSARVCSSRSGGAGRWRRDRVFAARGLVYLGTLFSEGDTHLHDDRCRQRSVVIFGEDRFRWSATMIGLSLAVFGILHALAQAFVTGPATKRFGEKQAIIAGMAADALGYVLLAFATRGWMAFPIMILLASGGIGMPALQAMLSRQPNFDHWTADRHGDLCRLGEHMERVGMDCRRRPIPCLPPRVASRCMEPGHLDLNGSRRHLANGFTTPRIGANQFLRRTVNAQTNPWQNISIASAISSSRTRRISGSVGSWPRVRMIVLLSLRTRLGWRGCLTANVKRLLLQNVCDLSNNMNGLRFPCFVKSGNAEVSALHHYVPDLHRRMLLATLWNTYICINEALALTLSDFSLVPPHPYRQLFTLTTFQ

SEQ ID NO: 38915 - protein, 820 aa, Homo sapiens
  DOMAIN (286)..(315): kw REPLICATION REPB REPA INITIATION domain identified by eMATRIX, accession number DM00653A, p-value=7.207e-27, raw score of 20.40
  DOMAIN (460)..(566): Putative GTP-ase activating protein for domain identified by PFam, accession name ArfGap, E-value=3.1e-05, PFam score of 12.3
  misc_feature (1)...(820): Xaa = X or * as defined in Table 2
DNWKSIRGSCWQDPRELLTFMAPCIGVVVMQTTRXKXNTLAGHPSAGVCWCVTSAAACTGAWDATSPLSSTFATAPGLPRCCSQASPAPRAEPLHGQPGAPPHALKRPPGLPWPXPQEARQYRHNQAYAYSIQGDGAEDDDERIVRFHTRVINHKKRKNSPRIVQSNDLTEAAYSLSRDQKRMLYLFVDQIRKSDGTLQEHDGICEIHVAKYAEIFGLTSAEASKDIRQALKSFAGKEVVFYRPEEDAGDEKGYESFPWFIKRAHSPSRGLYSVHINPYLIPFFIGLQNRFTQFRLSETKEITNPYAMRLYESLCQYRKPDGSGIVSLKIDWIIERYQLPQSYQRMPDFRRRFLQHIFVLRERPETVLIDLIQRTKDAVRELDNLQYRKMKKLLFQEAHNGPAVEAQEEEEEYGWNLDRAYDYVKERRTVTKPNPSFMRQLEEYQGILLARPKRTAYIYGSVYRRCGYADHKVEIKHPGWASISRGVLVCDECCSVHRSLGRHISIVKHLRHSAWPPTLLQSGFPGPSRRAAPRAARGPTPRTEEAAWAAMALTFLLVLLTLATLCTRLHRNFRRGESIYWGPTADSQDTVAGSPDHGLLAFAYHRLVRFLLWVLCPGWAFFLVNSSRGGVFNPILHPCPRHGQARFAGVGRAEDVTFLYHPCAHPWLKLQLALLAYACMANPSLTPDFSLTQDRVDIEQLDPRGRTPLHLATTLGHLECARVLLAHGETWARENRSGWTVLQEAVSTQDLELVQLVLRYRDYQRVVKRLASIPVLLEKLRKQRSYLPGRPLARLRRSVNSSGAVGMIKSESMGRWFVGP

SEQ ID NO: 38916 - protein, 242 aa, Homo sapiens
  misc_feature (1)...(242): Xaa = X or * as defined in Table 2
RKQEWLSKQKENIQHFQAEEEANLLRRQRQYLELECRRFKRRMLLGRHNLEQDLVREELNKRQTQKDLEHAMLLRQHESMQELEFRHLNTIQKMRCELIRLQHQTELTNQLEYNKRRERELRRKHVMEVRQQPKGLKSKELPNKKSSFQGYLQNSQTRQYKALRNHLLETTPKSEHKAVLKRLKEEQTRKLAILAEQYDHSINEMLSTQAVSLLFLGQNKFSAPFLPPPXAVSEQLCAHSLV

SEQ ID NO: 38917 - protein, 275 aa, Homo sapiens
  misc_feature (1)...(275): Xaa = X or * as defined in Table 2
SDQLTAHLLNCVEVAELQFLHRFMLSFIPIHHLRLFTAPAQDASLVPLKGDILGVKLSGDDGRGKPAQHLFLSGLSSSQQQLPVLPSQCQSLCVHHPAVVVNLHDHGACVSCLPDLGPXRQSCGSLAARSCGQSPGVWCLPSGSGRSSTLCRCHXGRSWTPGAPSXXTPISSPRRSPGPCAASPGARGCPPAASPPAGSPGTEAPAAPAPGPGYSQPPGALSSRCDSPCPRLRRAPGAHGHTPRCPSVVARCRGVRPRGSSCSMSTSLTRSCSKL

SEQ ID NO: 38918 - protein, 476 aa, Homo sapiens
  DOMAIN (120)..(135): LIM domain proteins domain identified by eMATRIX, accession number BL00478B, p-value=7.750e-12, raw score of 14.79
  DOMAIN (100)..(158): LIM domain containing proteins domain identified by PFam, accession name LIM, E-value=1.6e-12, PFam score of 49.3
  misc_feature (1)...(476): Xaa = X or * as defined in Table 2
MPAVAKSKFINRSKRRMCPQVLRSASPIQEGEKISANENSLAVRSTPAEDDSPGDSQVKSEVQQPVHPKPLSPDSRASSLSESSPPKAMKKFQAPARETCVECQKTVYPMERLLANQQVFHISCFRCSYCNNKLSLGTYASLHGRIYCKPHFNQLFKSKGNYDEGFGHRPHKDLIGQAKMKTEEILERQPQLANARETPHSPGVEDAPIAKVGVLAASMEAKASSQQEKEDKPAETKKLRIAWPPPTELGSSGSALEEGIKMSKPKWPPEDEISKPEVPEDVDLDLKKLRRSSSLKERSRPFTVAASFQSTSVKSPKTVSPLIRKGWSMSEQSEESVGGRVAERKQVENAKASKKNGNVGKTTWQNKESKGETGKRRXGKVHSLEMENENFVENGARLPIEDDNQLPPKQQSSTKNPSLLEFGPSFVDNHLLLKEFTTQNQKSQDVELWEGEVVKELSVEEQIKRNRYYDEDEDEE

SEQ ID NO: 38919 - protein, 1493 aa, Homo sapiens
  DOMAIN (240)..(1481): Immunoglobulin domain identified by PFam, accession name ig, E-value=2.5e-07, PFam score of 28.6
  misc_feature (1)...(1493): Xaa = X or * as defined in Table 2
MCFSPKKLYKHEIHKLKDLTCLKPSIESPLRQNRSRSIEEEQKQEENGDSQLILEKIQLPQWSISLNMTDEHGNLVNLVCDIKKPMDVYKIHLNQTDPPDIDINAMVALDFEYPMTQENYENLWKLIAYYSEVPMKLHRELMLSKHPRVSYQYRQDADEEALYYTGVRAQILAEPEWIMQPSIDIQLNRPQSTAKKVLLSYYNQYSQTIATKDTRQARGRSWVMIEPSRAVQKDQTVLEGGRCQLSCNVKASESPSIFWVLPDGSILKVPVDDPDSKFSILSSGWLRIKSMEPSDSGLYQCIAQVRDEMDRMVYRVLVQSPSTQPAEKDTVTIGKNPGEPVMLPCNALAIPEAHLSWILPNRRIINDLANTSHVYMLPNGTLSIPKMCGCQPAWGRPYHGGNHSDQERFWLAIQKRQMARSKGSFQMREDIVEDEGVSGTGDEENTSRRLLHPKHQEAFLKTKDDAINGDKKAKKGRRKLKLWKHSEKEPETSVAEDLRVFESRRRINVANKQINPEHWADILAKVFGKNLPTGTEVSPIIKTTSSPFLSLVVTPPLPAVSPPLASPIQTATSAEESSADVPLLSEGKHILSTISSASMGLEHHNNGVILVEPEVTSTPLEEVVDEYSKKTEEMTSTEGDLKGTAASTLISEPYEQSPTLHTLDTVYEEPTHEETETEGWSAADVGSSPDPTSSEYELPLVVVSLAESKPVQYFDPDLETNSQPHEDNIKEYSFAHLTPTAIIWFNDSSTSLSFEDSTVGEQGVPGKSHLQGPTENIQLVKSSFSTQDTLLIKKGMKEMSQTLQGGNMLEGDPTHSRSSENEGQESKSITLPDSTLGITSSTSPVKKPAETTVVTLLHKDTTTETTPRQKVASSSTMSTQPFSKETQWEKITPSQIPPPAQANPTHNFCSIRDFFYSTNSSNXHXDFKSNGEFSGSYILGDXHSXYPQTAGNGEECRAHIKGNSTEKTREEAKQTSISPSTVSSRASASKPSPSPENKHRNIVTPSSETTLLPRNVSLKTEGVYDSLDYTTTTRKIHSSHHKVQDTLPVMYKPTSDGKEIQDDVATNVDKHKSDILVPGESITNVTQTSRSLVSTMGEFKEESSPVGFPGIPTWNPSRKAQPGRLQTDIHVTTSGETPTDPPLVNELEDVDFTSEFLSSVTVSTPFHQEEAGFSTILSSIKVEMASSQVETTTLGQDHHETTVAILHSETRPQNHILTAAWMKEPASLSPPMILLSLGQTTTTKPELLSPRTSQICKDSKENVFLNYMGNPETEATPVKNEGTQRMSGPNELSTPSSDHDAFNLSTKLELEKQVFDSRSLTRGPDSHHQDGRVHASHQLTRIPAKPILPTGTVRLPEMSTQSTSRYFVTFQPPHHGTNKPEITTYPSRALPESKQFTTPRVASTTPLLSHMSKPSISRSIHQSGSKFFAGGPPASKFWPLGEKPQILTKSPQTVSVTAETDAVFPCEAIGKPKPFVTWTKVSTWTGSEELEWM

SEQ ID NO: 38920 - protein, 5266 aa, Homo sapiens
  DOMAIN (4839)..(4849): w KINASE ALPHA ADHESION T-CELL domain identified by eMATRIX, accession number DM00179, p-value=1.000e-10, raw score of 13.97
  DOMAIN (628)..(5251): Immunoglobulin domain identified by PFam, accession name ig, E-value=1.4e-114, PFam score of 374.2
  misc_feature (1)...(5266): Xaa = X or * as defined in Table 2
MDEFAPGKHLATSGDLFGDHNYGRRTYHTLEVKCAEEHPAVSDPFQRQSLRALSPLSEDLPPSSGLRSGLTKLELLMIHGNEIPSIPDGALRDLSSLQVFKFSYNKLRVITGQTLQGLSNLMRLHIDHNKIEFIHPQAFNGLTSLRLLHLEGNLLHQLHPSTFSTFTFLDYFRLSTIRHLYLAENMVRTLPASMLRNMPLLENLYLQGNPWTCDCEMRWFLEWDAKSRGHSCRGCAHSLSHEIQLAKGFCEMLLLVLAALSHSMYVCGYECEYMSKRQWGVELTECVWTREAHMVVITGGWMVIGTTHMREAIDAEADQKGKGLRLKSRRTQSAKIQAEEEEEAVTETQLWPERTEKIPEDFISRRPRGQRILKCKKDKAYEGGQLCAMCFSPKKLYKHEIHKLKDMTCLKPSIESPLRQNRSRSIEEEQEQEEDGGSQLILEKFQLPQWSISLNMTDEHGNMVNLVCDIKKPMDVYKIHLNQTDPPDIDINATVALDFECPMTRENYEKLWKLIAYYSEVPVKLHRELMLSKDPRVSYQYRQDADEEALYYTGVRAQILAEPEWVMQPSIDIQLNRRQSTAKKVLLSYYTQYSQTISTKDTRQARGRSWVMIEPSGAVQRDQTVLEGGPCQLSCNVKASESPSIFWVLPDGSILKAPMDDPDSKFSILSSGWLRIKSMEPSDSGLYQCIAQVRDEMDRMVYRVLVQSPSTQPAEKDTVTIGKNPGESVTLPCNALAIPEAHLSWILPNRRIINDLANTSHVYMLPNGTLSIPKVQVSDSGYYRCVAVNQQGADHFTVGITVTKKGSGLPSKRGRRPGAKALSRVREDIVEDEGGSGMGDEENTSRRLLHPKDQEVFLKTKDDAINGDKKAKKGRRKLKLWKHSEKEPETNVAEGRRVFESRRRINMANKQINPERWADILAKVRGKNLPKGTEVPPLIKTTSPPSLSLEVTPPFPAISPPSASPVQTVTSAEESSADVPLLGEEEHVLGTISSASMGLEHNHNGVILVEPEVTSTPLEEVVDDLSEKTEEITSTEGDLKGTAAPTLISEPYEPSPTLHTLDTVYEKPTHEETATEGWSAADVGSSPEPTSSEYEPPLDAVSLAESEPMQYFDPDLETKSQPDEDKMKEDTFAHLTPTPTIWVNDSSTSQLFEDSTIGEPGVPGQSHLQGLTDNIHLVKSSLSTQDTLLIKKGMKEMSQTLQGGNMLEGDPTHSRSSESEGQESKSITLPDSTLGIMSSMSPVKKPAETTVGTLLDKDTTTATTTPRQKVAPSSTMSTHPSRRRPNGRRRLRPNKFRHRHKQTPPTTFAPSETFSTQPTQAPDIKISSQVESSLVPTAWVDNTVNTPKQLEMEKNAEPTSKGTPRRKHGKRPNKHRYTPSTVSSRASGSKPSPSPENKHRNIVTPSSETILLPRTVSLKTEGPYDSLDYMTTTRKIYSSYPKVQETLPVTYKPTSDGKEIKDDVATNVDKHKSDILVTGESITNAIPTSRSLVSTMGEFKEESSPVGFPGTPTWNPSRTAQPGRLQTGIPVTTSGENLTDPPLLKELEDVDFTSEFLSSLTVSTPFHQEEAGSSTTLSSIKVEVASSQAETTTLDQDHLETTVAILLSETRPQNHTPTAARMKEPASSSPSTILMSLGQTTTTKPALPSPRISQASRDSKENVFLNYVGNPETEATPVNNEGTQHMSGPNELSTPSSDQDAFNLSTKPGIGKASIWXXESTTWPRXPTPGWKSSSSHQLTRVPAKPILPTATVRLPEMSTQSASRYFVTSQSPRHWTNKPEITTYPSGALPENKQFTTPRLSSTTTSSPIAHVQTQHSXXVYXPKNXPIQWLLQSVVEITTSLRQETQLESLPVTRIPHYSNGRLPFFTNKTLSFPQLGVTRRPQIPTSPAPVMRERKVIPGSYNRIHSHSTFHLDFGPPAPPLLHTPQTTGSPSTNLQNIPMVSSTQSSISFITSSVQSSGSFHQSSSKFFAGGPPASKFWSLGEKPQILTKSPQTVSVTAETDTVFPCEATGKPKPFVTWTKVSTGALMTPNIQDTTVXGSQERYLSDTEGSSTRSRPVYVHRQQPARPGQDGGLAFGHRAATSNPSLPPTRTSLSTWETPLQWSRLAKGTPAPQISWIFPDRRVWQTVSPVEGRITLHENRTLSIKEASFSDRGVYKCVASNGSRGGQPGHPPARGGTAPRYPPGEAGEHLAAPGAQHSQFTALPRLRPCPACAGCSGTVPRSAPRSSSTGTCLFSPTGRSTSATSRPRTAGAMSAWPPTWXAPRAGRCSXTSGDLFGDHNYGRRTYHTLEVKCAEEHPAVSDPFQRQSLRALSPLSEDLPPSSGLRSGLTKLELLMIHGNEIPSIPDGALRDLSSLQVFKFSYNKLRVITGQTLQGLSNLMRLHIDHNKIEFIHPQAFNGLTSLRLLHLEGNLLHQLHPSTFSTFTFLDYFRLSTIRHLYLAENMVRTLPASMLRNMPLLENLYLQGNPWTCDCEMRWFLEWDAKSRGHSCRGCAHSLSHEIQLAKGFCEMLLLVLAALSHSMYVCGYECEYMSKRQWGVELTECVWTREAHMVVITGGWMVIGTTHMREAIDAEADQKGKGLRLKSRRTQSAKIQAEEEEEAVTETQLWPERTEKIPEDFISRRPRGQRILKCKKDKAYEGGQLCAMCFSPKKLYKHEIHKLKDMTCLKPSIESPLRQNRSRSIEEEQEQEEDGGSQLILEKFQLPQWSISLNMTDEHGNMVNLVCDIKKPMDVYKIHLNQTDPPDIDINATVALDFECPMTRENYEKLWKLIAYYSEVPVKLHRELMLSKDPRVSYQYRQDADEEALYYTGVRAQILAEPEWVMQPSIDIQLNRRQSTAKKVLLSYYTQYSQTISTKDTRQARGRSWVMIEPSGAVQRDQTVLEGGPCQLSCNVKASESPSIFWVLPDGSILKAPMDDPDSKFSILSSGWLRIKSMEPSDSGLYQCIAQVRDEMDRMVYRVLVQSPSTQPAEKDTVTIGKNPGESVTLPCNALAIPEAHLSWILPNRRIINDLANTSHVYMLPNGTLSIPKVQVSDSGYYRCVAVNQQGADHFTVGITVTKKGSGLPSKRGRRPGAKALSRVREDIVEDEGGSGMGDEENTSRRLLHPKDQEVFLKTKDDAINGDKKAKKGRRKLKLWKHSEKEPETNVAEGRRVFESRRRINMANKQINPERWADILAKVRGKNLPKGTEVPPLIKTTSPPSLSLEVTPPFPAISPPSASPVQTVTSAEESSADVPLLGEEEHVLGTISSASMGLEHNHNGVILVEPEVTSTPLEEVVDDLSEKTEEITSTEGDLKGTAAPTLISEPYEPSPTLHTLDTVYEKPTHEETATEGWSAADVGSSPEPTSSEYEPPLDAVSLAESEPMQYFDPDLETKSQPDEDKMKEDTFAHLTPTPTIWVNDSSTSQLFEDSTIGEPGVPGQSHLQGLTDNIHLVKSSLSTQDTLLIKKGMKEMSQTLQGGNMLEGDPTHSRSSESEGQESKSITLPDSTLGIMSSMSPVKKPAETTVGTLLDKDTTTATTTPRQKVAPSSTMSTHPSRRRPNGRRRLRPNKFRHRHKQTPPTTFAPSETFSTQPTQAPDIKISSQVESSLVPTAWVDNTVNTPKQLEMEKNAEPTSKGTPRRKHGKRPNKHRYTPSTVSSRASGSKPSPSPENKHRNIVTPSSETILLPRTVSLKTEGPYDSLDYMTTTRKIYSSYPKVQETLPVTYKPTSDGKEIKDDVATNVDKHKSDILVTGESITNAIPTSRSLVSTMGEFKEESSPVGFPGTPTWNPSRTAQPGRLQTGIPVTTSGENLTDPPLLKELEDVDFTSEFLSSLTVSTPFHQEEAGSSTTLSSIKVEVASSQAETTTLDQDHLETTVAILLSETRPQNHTPTAARMKEPASSSPSTILMSLGQTTTTKPALPSPRISQASRDSKENVFLNYVGNPETEATPVNNEGTQHMSGPNELSTPSSDQDAFNLSTKLELEKQVFGSRSLPRGPDSQRQDGRVHASHQLTRVPAKPILPTATVRLPEMSTQSASRYFVTSQSPRHWTNKPEITTYPSGALPENKQFTTPRLSSTTIPLPLHMSKPSIPSKFTDRRTDQFNGYSKVFGNNNIPEARNPVGKPPSPRIPHYSNGRLPFFTNKTLSFPQLGVTRRPQIPTSPAPVMRERKVIPGSYNRIHSHSTFHLDFGPPAPPLLHTPQTTGSPSTNLQNIPMVSSTQSSISFITSSVQSSGSFHQSSSKFFAGGPPASKFWSLGEKPQILTKSPQTVSVTAETDTVFPCEATGKPKPFVTWTKVSTGALMTPNTRIQRFEVLKNGTLVIRKVQVQDRGQYMCTASNLHGLDRMVVLLSVTVQQPQILASHYQDVTVYLGDTIAMECLAKGTPAPQISWIFPDRRVWQTVSPVEGRITLHENRTLSIKEASFSDRGVYKCVASNAAGADSLAIRLHVAALPPVIHQEKLENISLPPGLSIHIHCTAKAAPLPSVRWVLGDGTQIRPSQFLHGNLFVFPNGTLYIRNLAPKDSGRYECVAANLVGSARRTVQLNVQRAAANARITGTSPRRTDVRYTGLWQCFSTKGDFAPRQHLAISEDTFDYHKWGSGCFWYLVGGGQGRCSTPCSAQDGPSQIVIHPTFNVHSAKVSFDSRIKVFANGTLVVKSVTDKDAGDYLCVARNKVGDDYVVLKVDVVMKPAKIEHKEENDHKVFYGGDLKVDCVATGLPNPEISWSLPDGSLVNSFMQSDDSGGRTKRYVVFNNGTLYFNEVGMREEGDYTCFAENQVGKDEMRVRVKVVTAPATIRNKTYLAVQVPYGDVVTVACEAKGEPMPKVTWLSPTNKVIPTSSEKYQIYQDGTLLIQKAQRSDSGNYTCLVRNSAGEDRKTVWIHVNVQPPKINGNPNPITTVREIAAGGSRKLIDCKAEGIPTPRVLWAFPEGVVLPAPYYGNRITVHGNGSLDIRSLRKSDSVQLVCMARNEGGEARLILQLTVLEPMEKPIFHDPISEKITAMAGHTISLNCSAAGTPTPSLVWVLPNGTDLQSGQQLQRFYHKADGMLHISGLSSVDAGAYRCVARNAAGHTERLVSLKVGLKPEANKQYHNLVSIINGETLKLPCTPPGAGQGRFSWTLPNGMHLEGPQTLGRVSLLDNGTLTVREASVFDRGTYVCRMETEYGPSVTSIPVIVIAYPPRITSEPTPVIYTRPGNTVKLNCMAMGIPKADITWELPDKSHLKAGVQARLYGNRFLHPQGSLTIQHATQRDAGFYKCMAKNILGSDSKTTYIHVF

SEQ ID NO: 38921 - protein, 3175 aa, Homo sapiens
  DOMAIN (262)..(3163): Immunoglobulin domain identified by PFam, accession name ig, E-value=3.3e-12, PFam score of 44.4
  misc_feature (1)...(3175): Xaa = X or * as defined in Table 2
MKASGILKCKKDKAYEGGQLCAMCFSPKKLYKHEIHKLKDLTCLKPSIESPLRQNRSRSIEEEQKQEENGDSQLILEKIQLPQWSISLNMTDEHGNLVNLVCDIKKPMDVYKIHLNQTDPPDIDINAMVALDFEYPMTQENYENLWKLIAYYSEVPMKLHRELMLSKHPRVSYQYRQDADEEALYYTGVRAQILAEPEWIMQPSIDIQLNRPQSTAKKVLLSYYNQYSQTIATKDTRQARGRSWVMIEPSRAVQKDQTVLEGGRCQLSCNVKASESPSIFWVLPDGSILKVPVDDPDSKFSILSSGWLRIKSMEPSDSGLYQCIAQVRDEMDRMVYRVLVQSPSTQPAEKDTVTIGKNPGEPVMLPCNALAIPEAHLSWILPNRRIINDLANTSHVYMLPNGTLSIPKMCGCQPAWGRPYHGGNHSDQERFWLAIQKRQMARSKGSFQMREDIVEDEGVSGTGDEENTSRRLLHPKHQEAFLKTKDDAINGDKKAKKGRRKLKLWKHSEKEPETSVAEDLRVFESRRRINVANKQINPEHWADILAKVFGKNLPTGTEVSPIIKTTSSPFLSLVVTPPLPAVSPPLASPIQTATSAEESSADVPLLSEGKHILSTISSASMGLEHHNNGVILVEPEVTSTPLEEVVDEYSKKTEEMTSTEGDLKGTAASTLISEPYEQSPTLHTLDTVYEEPTHEETETEGWSAADVGSSPDPTSSEYELPLVVVSLAESKPVQYFDPDLETNSQPHEDNIKEYSFAHLTPTAIIWFNDSSTSLSFEDSTVGEQGVPGKSHLQGPTENIQLVKSSFSTQDTLLIKKGMKEMSQTLQGGNMLEGDPTHSRSSENEGQESKSITLPDSTLGITSSTSPVKKPAETTVVTLLHKDTTTETTPRQKVASSSTMSTQPFSKETQWEKITPSQIPPPAQANPTHNFCSIRDFFYSTNSSNXHXDFKSNGEFSGSYILGDXHSXYPQTAGNGEECRAHIKGNSTEKTREEAKQTSISPSTVSSRASASKPSPSPENKHRNIVTPSSETTLLPRNVSLKTEGVYDSLDYTTTTRKIHSSHHKVQDTLPVMYKPTSDGKEIQDDVATNVDKHKSDILVPGESITNVTQTSRSLVSTMGEFKEESSPVGFPGIPTWNPSRKAQPGRLQTDIHVTTSGETPTDPPLVNELEDVDFTSEFLSSVTVSTPFHQEEAGFSTILSSIKVEMASSQVETTTLGQDHHETTVAILHSETRPQNHILTAAWMKEPASLSPPMILLSLGQTTTTKPELLSPRTSQICKDSKENVFLNYMGNPETEATPVKNEGTQRMSGPNELSTPSSDHDAFNLSTKLELEKQVFDSRSLTRGPDSHHQDGRVHASHQLTRIPAKPILPTGTVRLPEMSTQSTSRYFVTFQPPHHGTNKPEITTYPSRALPESKQFTTPRVASTTPLLSHMSKRQHFXXVCXPKNSTNPMAPTKCLETSNIPEARNSVGKPLSPRIYHYSNGRLPFSYQQDSFFFTVGSHPETPDTLFSCPSNEREKSXSGILKCKKDKAYEGGQLCAMCFSPKKLYKHEIHKLKDLTCLKPSIESPLRQNRSRSIEEEQKQEENGDSQLILEKIQLPQWSISLNMTDEHGNLVNLVCDIKKPMDVYKIHLNQTDPPDIDINAMVALDFEYPMTQENYENLWKLIAYYSEVPMKLHRELMLSKHPRVSYQYRQDADEEALYYTGVRAQILAEPEWIMQPSIDIQLNRPQSTAKKVLLSYYNQYSQTIATKDTRQARGRSWVMIEPSRAVQKDQTVLEGGRCQLSCNVKASESPSIFWVLPDGSILKVPVDDPDSKFSILSSGWLRIKSMEPSDSGLYQCIAQVRDEMDRMVYRVLVQSPSTQPAEKDTVTIGKNPGEPVMLPCNALAIPEAHLSWILPNRRIINDLANTSHVYMLPNGTLSIPKMCGCQPAWGRPYHGGNHSDQERFWLAIQKRQMARSKGSFQMREDIVEDEGVSGTGDEENTSRRLLHPKHQEAFLKTKDDAINGDKKAKKGRRKLKLWKHSEKEPETSVAEDLRVFESRRRINVANKQINPEHWADILAKVFGKNLPTGTEVSPIIKTTSSPFLSLVVTPPLPAVSPPLASPIQTATSAEESSADVPLLSEGKHILSTISSASMGLEHHNNGVILVEPEVTSTPLEEVVDEYSKKTEEMTSTEGDLKGTAASTLISEPYEQSPTLHTLDTVYEEPTHEETETEGWSAADVGSSPDPTSSEYELPLVVVSLAESKPVQYFDPDLETNSQPHEDNIKEYSFAHLTPTAIIWFNDSSTSLSFEDSTVGEQGVPGKSHLQGPTENIQLVKSSFSTQDTLLIKKGMKEMSQTLQGGNMLEGDPTHSRSSENEGQESKSITLPDSTLGITSSTSPVKKPAETTVVTLLHKDTTTETTPRQKVASSSTMSTHPSRRRPNGRKLHPHKFHHRHKQTPPTTFAPLETFSTQPTQATDIKISNQMESSLVPTSWEINTVNTPKQLEMEKNVELISKGTPRRKHGKRPNKHRYTPSTVSSRASASKPSPSPENKHRNIVTPSSETTLLPRNVSLKTEGVYDSLDYTTTTRKIHSSHHKVQDTLPVMYKPTSDGKEIQDDVATNVDKHKSDILVPGESITNVTQTSRSLVSTMGEFKEESSPVGFPGIPTWNPSRKAQPGRLQTDIHVTTSGETPTDPPLVNELEDVDFTSEFLSSVTVSTPFHQEEAGFSTILSSIKVEMASSQVETTTLGQDHHETTVAILHSETRPQNHILTAAWMKEPASLSPPMILLSLGQTTTTKPELLSPRTSQICKDSKENVFLNYMGNPETEATPVKNEGTQRMSGPNELSTPSSDHDAFNLSTKLELEKQVFDSRSLTRGPDSHHQDGRVHASHQLTRIPAKPILPTGTVRLPEMSTQSTSRYFVTFQPPHHGTNKPEITTYPSRALPESKQFTTPRVASTTPLLSHMSKPSISSKFADLRTDQSNGSYKVFGNSNIPEARNSVGKPLSPRIYHYSNGRLPFFTNRTLSFSQLGVTRRPQIPSSPVPVMRERKVNPGSYNRIYSHSTFHLDFGLPAPPLLHTPWTMVSPPTNLQNIPMVSSTQSSVSFITSSVQSSGSIHQSGSKFFAGGPPASKFWPLGEKPQILTKSPQTVSVTAETDAVFPCEAIGKPKPFVTWTKVSTWTGSEELEWM

SEQ ID NO: 38922 - protein, 428 aa, Homo sapiens
  DOMAIN (176)..(224): Intermediate filaments proteins domain identified by eMATRIX, accession number BL00226B, p-value=4.316e-25, raw score of 23.86
  DOMAIN (78)..(390): Intermediate filament proteins domain identified by PFam, accession name filament, E-value=6.9e-105, PFam score of 361.9
  misc_feature (1)...(428): Xaa = X or * as defined in Table 2
LSFTTCSTFSTNYRSLGPAQAPSYGSRPVSSVASVYAGTGNSGSRISVSCSTSFRGSMESGGLAAGMTGGLAGMGGIQNEETMQSLNDXLASYPDRVRHLETKNRKLESKIWEHLEKKGPQVRDWSHYFKTIRNQRAQSLAITVDNACIVLQINNTHLAADDFRVKYETELAMCQSVESNIHGLCKVNDDTNVTRLQLETEIKALKEELLFMKKNHEEEVKGLQAQIASSGLTMEVDPKSQHLAKIMAAIRAQYDELAWKNGEELDKYLSQQIEESTTVVTTQSAKAGAAEMTLTELRCTVQSLEINLNSMRNLKASLENSVREVKACYTLQMEQLNGILLHLGSELAQTQAKGQCQAQEYEALLNIKVKLEAEIATYCHLLEDGKDFNLGDALDSSNSMQTIPKTTTHQRVDGKVVSETNDTKVLRH

SEQ ID NO: 38923 - protein, 449 aa, Homo sapiens
  DOMAIN (193)..(241): Intermediate filaments proteins domain identified by eMATRIX, accession number BL00226B, p-value=8.393e-31, raw score of 23.86
  DOMAIN (94)..(425): Intermediate filament proteins domain identified by PFam, accession name filament, E-value=2.9e-90, PFam score of 313.3
  misc_feature (1)...(449): Xaa = X or * as defined in Table 2
RPQSLSPVLSLSPDSMSFTTRSTFSTNYRSLGSVQAPSYGARPVSSAASVYAGAGGSGSRISVSRSTSFRGGMGSGGLATGIAGGLAGMGGIQNEKETMQSLNDGVASYLDRVRSLETENRRLESKIREHLEKKGPQVRDWSHYFKIIEDLRAQIFANTVDNARIVLQIDNARLAADDFRVKYETELAMRQSVENDIHGLRKVIDDTNITRLQLETEIEALKEELLFMKKNHEEEVKGLQAQIASSGLTVEVDAPKSQDLAKIMADIRAQYXRAGLGKNREELDKYWSQQIEVSTTVVTTQSAEVGAAETTLTELRRTVQSLEIDLDSMRNLKASLENSLREVEARRTPLQMEQLQRGSLLHLESELAQTRAEGQRQAQEYEALLEHQGSSLEAEIATYRRLLEDGEDFNLGDALDSSNSMQTIQKTTTRRIVDGKVVSETNDTKVLRH

SEQ ID NO: 38924 - protein, 76 aa, Homo sapiens
  DOMAIN (25)..(60): CORE POLYPROTEIN PROTEIN GAG CONTAINS: P domain identified by eMATRIX, accession number PD02059B, p-value=6.831e-09, raw score of 24.48
GALQPTAALWEPLSGLAKAGWAWAWRAPHSEQPASLSLPPTPRAPVRPEPPRRAPPPAPRRPVPSTTQGLRNASAP

SEQ ID NO: 38925 - protein, 49 aa, Homo sapiens
  misc_feature (1)...(49): Xaa = X or * as defined in Table 2
LPSRRAGLGTCSPPCLSLPPASRAPVRPEPLRXAPPPAPRRPVPSTTQG

SEQ ID NO: 38926 - protein, 72 aa, Homo sapiens
LPSRGAGLGTCSPPCLSLPPTPWAPVLPEPPRRAPPPAPRRPVPTTTQGLTNASARRRTGRQLHLQPWCRIH

SEQ ID NO: 38927 - protein, 72 aa, Homo sapiens
LPFHGAGLGTCSPPCLSLPPTPWAPVRPEPPRRAPPPAPRHPVPSTTQGLRSASAQRGTGRQLHLLPWCGIH

SEQ ID NO: 38928 - protein, 70 aa, Homo sapiens
LPSRWAGLGTCSPPCLSLPPTPWAPVRPEPPRRAPPSAPRRPVPSTTQGLRSASAWRGTGRQLHLQPGHM

SEQ ID NO: 38929 - protein, 91 aa, Homo sapiens
LPSRRAGLGTCSLLCLSLPPTPWAPVRPEPPQRAPPPAPRRPVPSTTQGLRSASTRRVTGRQLHLQPWCGIHWVKPAGLLSLVGRWRVLMS

SEQ ID NO: 38930 - protein, 211 aa, Homo sapiens
  misc_feature (1)...(211): Xaa = X or * as defined in Table 2
MKFQYKEDHPFEYRKKEGEKIRKKYPDRVPVIVEKAPKARVPDLDKRKYLVPSDLTAAFPRGRARDLQPAMPEPPTHSMGTCAARASPTSTTPCSTAPSPIDREGTNNPRAEECERTARDWQAAPPAAPVWDPLGEASWAPESSGNVESISSSGIVNIPISTLCLAQGFSRFVNAPIDTLYLAALVGPWRTFMSSSGIVNTPIGTLYLAQX

SEQ ID NO: 38931 - protein, 637 aa, Homo sapiens; identical to SEQ ID NO: 33547
  DOMAIN (295)..(306): RNase H domain identified by eMATRIX, accession number PF00075B, p-value=1.346e-09, raw score of 12.56
  DOMAIN (466)..(599): RNase H domain identified by PFam, accession name rnaseH, E- value=1.3e-10, PFam score of 48.6

SEQ ID NO: 38932 - protein, 91 aa, Homo sapiens
YLKRRAGLGTCSLLCLSLPPTPWAPVRPEPPQRAPPPAPRRPVPSTTQGLRSASTRRVTGRQLHLQPWCGIHWVKPAGLLSLVGRWRVLMS

SEQ ID NO: 38933 - protein, 132 aa, Homo sapiens
  misc_feature (1)...(132): Xaa = X or * as defined in Table 2
LIELRHLVFFVLLLFRDLQHIMACNMRDAVRFFVCFLVIFFREGLSRSSGADDRFLAGPXLLSRGAGLGTCSPPCLSLLPTPWAPAAAPASLTTPPPAPRRPVPSTTQGLRSASARHGTGRQLHLQPRCGIH

SEQ ID NO: 38934 - protein, 482 aa, Homo sapiens
  DOMAIN (395)..(436): kw TRANSCRIPTASE REVERSE II ORF2 domain identified by eMATRIX, accession number DM01354I, p-value=8.380e-32, raw score of 15.55
  DOMAIN (121)..(381): AP endonuclease family 1 domain identified by PFam, accession name AP_endonucleas1, E-value=5.7e-10, PFam score of 35.7
MPAAAPPASACSATPSSARRRGSDSRAGDRSRHGPASRVGTGPGQQMRKTYCRNSEPSDLDQGGGSRGGPRRQSKCVRNWWVLGLTDFKNEAADPHDSGAQLASPSGFRTRAAGGAACQSRAMRSYSSALGWSMGLGAVEQGVVLVGEAQAAQEPMEWVGGSGMVGCRSRAPPAGRQLRPDKKLSTAPVGRHRWRPSTPSAATGLGAKSLIARGQQGRLAAPNKTDFKARAVKKDKEGHYIMIKGLVQKESITIINIYAPNTGAPKFTKQLPLDLRNKTDSNTIIVGYFSTPLTALNRSSRQKVNKETMDLNYTLEQMDLTDIYRTFYPTTAEYIFYSSEHGTFSKTDRMIGHKTSLNKFKKIEIIPSTLPDHSGIKLEINSKKNLQNQTNTWKLNNLLLSDHWVNNEIKMEILKFFKPNDNSDTTYQNLWETAKAVLRGKFIALNAYIKKSERAQIDNLRSHLKELEKQEQTKPKPSRRKK

SEQ ID NO: 38935 - protein, 100 aa, Homo sapiens
LPSHGAGLGTCSPPCLSLPPPLWAPAAAEPPRQAPPPAPWCPVPSTTQGLRNASTRRRTGRQLHMIWPFPASLKSSPATLPCEHCAPTTLTFSCSSNMQT

SEQ ID NO: 38936 - protein, 72 aa, Homo sapiens
LPSRGAGLGTCSPPCLSLPPTPWAPVRPKPPQRAPPPAPRRPVPSTTQGLRNASAGRMTGRQLHLQPWCRIH

SEQ ID NO: 38937 - protein, 398 aa, Homo sapiens; identical to SEQ ID NO: 36568

SEQ ID NO: 38938 - protein, 88 aa, Homo sapiens
  DOMAIN (19)..(52): PROLINE-RICH PROTEIN 3 domain identified by eMATRIX, accession number DM00215, p-value=9.847e-09, raw score of 19.43
  misc_feature (1)...(88): Xaa = X or * as defined in Table 2
NHTSCLPLGPGTTAEELPSLVAGFGTCSPPCLSLPPTPWAPVRPEPPRXAPPPAPQRPVPSTTQGLRNASTRHRTGRQLHLQPRCGIH

SEQ ID NO: 38939 - protein, 213 aa, Homo sapiens
  misc_feature (1)...(213): Xaa = X or * as defined in Table 2
GAGLGTCSPPCLSLPPTQRAPVRPEPPRRAPPPAPRRPVPSTTQGLRSASTRHRTGRQLHLQPQCGVHXVKPAGLLSLALETRTNPAADKHLWQSIISLQLKSDLLKEMLGSQTGNGNVQDVLRYLVKSETQKAIKVSLDCVRKRYYRSSLSLQLKLCDCWGQALFSSALTLDPKEVVVRDLEELSNYKTTLEGSGIFDSVARVREESEAEGT

SEQ ID NO: 38940 - protein, 88 aa, Homo sapiens
LPSRGAGLGTCSPPCLSLPPTPWAPVRPEPPQGAPPPAPRRPVPSTTQGLRSASARHGTGRQLHLQPWCGIHWVKLAGLLSCLGPRCF

SEQ ID NO: 38941 - protein, 126 aa, Homo sapiens
  misc_feature (1)...(126): Xaa = X or * as defined in Table 2
RLLSPAACRSGTMIFPSIHPSQCRMIGLGWKKXSSVHNATPWAPVPPEPPGRAPPPAPGRPVPLTTQGLRSASARRRTGRQLHLQPQCGIHWVKPAGLLSHEGPRLRSSSQSDQEPTNSGHSGMCL

SEQ ID NO: 38942 - protein, 72 aa, Homo sapiens
LPSHGAGLGTCSPPCLSLPPTPWAPVRPEPPRRAPPPTPRRPVPLTTQGLRNVSARRRTGRQLHLQPRCGIH

SEQ ID NO: 38943 - protein, 72 aa, Homo sapiens
LPSRGAGLGNCSPPCLSLPPTPWAPVQHKPPRRAPPPTPRHPVPSTTQGLRNASAWRRSGRHLHLQPQCGIH

SEQ ID NO: 38944 - protein, 87 aa, Homo sapiens
  misc_feature (1)...(87): Xaa = X or * as defined in Table 2
NKQPIWIPSRHLKPYHEPDAKEEIPGGSXGPTSCSHVETDAEEDPNCHEQHLSNTATHLGTDQEAVIDGRRKPEESRTTSHICRCRS

SEQ ID NO: 38945 - protein, 581 aa, Homo sapiens
  DOMAIN (93)..(104): dUTPase domain identified by eMATRIX, accession number PF00692B, p-value=5.891e-09, raw score of 8.14
  DOMAIN (27)..(144): dUTPase domain identified by PFam, accession name dUTPase, E- value=3.8e-25, PFam score of 97.0
  misc_feature (1)...(581): Xaa = X or * as defined in Table 2
MGQVWALVHSTLETFHTDEEEGEYNEVTEQVCLPAKAGSAAVDLCCTKAVSLLPGESPQKVPTGAGGPLPAGMTGLLLGRSSLNIKAVQVQTGVTDSDYNGEIQIVTSTSVPWKAKPGDHIAQLLIVPKKFARFEGTASSGKTKFLPRFRISFLMAAIVKPPEPIPLKWLTDKPIWTEQWPLSKEKLEALEDLITQQLKKGHIAPTFSPWNSPVFIIKKKSAEQDCEWFVFTILAVNNLQLKPAKRFHWKVLPQGPNQQPIWIPSRYLKPYHKPDAKEEIPEGSQGFPVAAMSRLTLRRTPTVTSNTHRTQPPTWGQIEKLPQMAEENLRKAGQPVTISNWILPRITKFKPIEGAENVFTDGSSNGKASYSGSKGPLTEGNQMADRLVAKVISNARHFHNLTHVNASGLKRRYSITWKEAKAIIQRCPTCQVMLSAAEQHLQKSAAKTEAEKLVWWRDPITKSREIGKIITWGRGYACVSPGPNQQPIWIPSKHLKPYHKPDAGEKIPGESRETPGCSHVKTDAEEDANCHEQHPSNTATHLGTDQEAVTDGGRKPEESGTTSHNEXFNDSGDHHCLQQGL

SEQ ID NO: 38946 - protein, 175 aa, Homo sapiens
  misc_feature (1)...(175): Xaa = X or * as defined in Table 2
PDGTTRDAGRGDLRSVSWETLRGCPAVRKDSIGWIRLSRTLKKNVHLCPLPRGQGLFVCPVTSSSPQHISSHRGFWNISKDAPMSWPGSYSCHNVVAPVGQGQXSRRARMLRGLLSKAGHHSFCTDQAIDLEITKFTFTWTDXVTLGQXFMLSESXSSCKPNSCCPVQCLVHSGG

SEQ ID NO: 38947 - protein, 252 aa, Homo sapiens
  DOMAIN (173)..(212): Integrase Zinc binding domain identified by PFam, accession name Integrase_Zn, E-value=1.1e-13, PFam score of 49.5
EQDCEWFVFTILAVNNLQLKPAKRFHWKVLPQGPNQQPIWIPSRYLKPYHKPDAKEEIPEGSQGFPVAAMSRLTLRRTPTVTSNTHRTQPPTWGQIEKLPQMAEENLRKAGQPVTISNWILPRITKFKPIEGAENVFTDGSSNGKASYSGSKGPLTEGNQMADRLVAKVISNARHFHNLTHVNASGLKRRYSITWKEAKAIIQRCPTCQMVHSSSFTGGVNPRGLEPNSQALAKFFSIRNIKHITDIPYNSE

SEQ ID NO: 38948 - protein, 451 aa, Homo sapiens
  DOMAIN (403)..(437): ELEMENT TRANSPOSABLE INSERTION PROTEIN TRANSPOSITION DNA domain identified by eMATRIX, accession number PD02455B, p-value= 4.740e-09, raw score of 21.87
  DOMAIN (121)..(232): gag gene protein p24 domain identified by PFam, accession name gag_p24, E-value=4.7e-34, PFam score of 126.5
MGISCPGSSKMLNSRALPVLKLTQGALRDCKERANYTNFNIYKAVESQGKFVCVLYNGQQSPEYVMIPCTSVSPTGQEVPEDRGMRMVMKNKPNKPSKMQSLKSSKHLTNSVIVIAVGIFFSVTLQARDPQLDDAIEQLRGVCIRAWEKITSGGEQYPSFSAIKQGPKEPYIDFIARLQESLKKMIADSAAQDIVLQLLAFDNANPDCQAALRPIRGKAHLVDCIKACDDIGDGSSNGKASYFGSKSKVFQTSYTSAQKAELVAVIEVLTAFDMPINVISDSSYMVYSTQLIENAQLRFHTDEQLMTLFTQLQTAFRSTMHPFYITHIRARHTPLPGPLTEGNQMADCLVATAVSNARHFHNLTHVNASGLKCRYSNTWKAAKAIIQRRPTCQMVHSSSFTGGVNPQGLEPNSLWQMDVTHVPSFGRLAYVHVCVDTFSHFVWATCQSGES

SEQ ID NO: 38949 - protein, 408 aa, Homo sapiens
  DOMAIN (182)..(193): PROTEASE POLYPROTEIN HYDROLASE ASP domain identified by eMATRIX, accession number PD00302A, p-value=3.571e-10, raw score of 6.33
  DOMAIN (31)..(151): dUTPase domain identified by PFam, accession name dUTPase, E- value=3.7e-36, PFam score of 133.5
RREPDFRKCHEGPVLGPIPNWGISSSGHSLTPVQCLSPATAGSAAVDLCCTKAVSLLPGEPLQKVPTGVCGPLPAGTIGLLLGRSSLGLKGIQIHTGVIDSNYNGEIQIVISTSVSWKAEPGERIAQLLIVPYVGMGKSEIKRTGGFGSTNKQGKAAYWVNQITDKHPTCETTIQGKKFKGLVDTGVDISIISLQHWLSTWRIQPTQFNIGPLTEGNQMADHLVANAISNARHFHNLTHVNASGLKHRYSITWKEAKNIIQRCPTCQMVHSSSFRGGVNPRGLEPNSLWQMDVTHIPLFGRLAYVHKRRRIRGGGGGEGEGEGEGEGEEEEEEEEEEEEEEEEEEEEEEEQEQEQEEQEQEEQEQEEQEQEERRRKDTEELSYSLPLNRTQPCWHPDFGLPATRTVRR

SEQ ID NO: 38950 - protein, 406 aa, Homo sapiens
  DOMAIN (211)..(229): RNase H domain identified by eMATRIX, accession number PF00075J, p-value=4.892e-17, raw score of 15.78
  DOMAIN (116)..(275): Integrase core domain identified by PFam, accession name rve, E-value=1.2e-32, PFam score of 117.0
  misc_feature (1)...(406): Xaa = X or * as defined in Table 2
RLGSSLLEYTLPDQQGNIIATFEPFPFKFGKAHSVDYIKACDGIGGPLTEGNQMADCLVANAISNARHFHNLTHVNASGLKRRYSITWKEAKAIIQQCPTCQMVHSSSFTGGVNPRGLEPNSLWQMDVTHVPSFGRLAYVHVCVDTFSHFVWATYQSGESSACVSKHPLLQCFVVVGIPAFIKTDNAPGYTSQALATFFSVWNIKHITGIPYNSQGQAIVERMNLSLKQQLQKQKGGNRDYRTTPXMQLNLALLTLNFLSLPKGQMFSAAEQHLQKPAAKTKTEQLIWWRDLITKSWEIGKIITWGRGYAYISPGQNQQPIWIPSRHLKPYHEPDARKRLQEDPEDPPSCSHVKTDAEEDPNCHEQHPSNTAIHLRSDQEAVTDGRRKPEEWSGTRTWWRPWSCRT

SEQ ID NO: 38951 - protein, 186 aa, Homo sapiens
  misc_feature (1)...(186): Xaa = X or * as defined in Table 2
ERPWGPEGNSEGSFCPKGLEPRTCLRGPAASAAAGAEGRQDPPGGPWCSPAAGDLGSPGVQSPGGGSPRGAQVAMSGSRRRRAEPGVWGALQXHRRXARRMHSFPPSLPLLXNGXSPLFLVSKCLTGSPLRSASPCPPAARSCXKHPDSSPGRGPGARQSPALHPALPSLARRAAPGRSFPLTSRK

SEQ ID NO: 38952 - protein, 49 aa, Homo sapiens
WNLHRSGEGDSDTLHAGCPVLVGDKWVANKWIHEYGQEFRRPCSSSPED

SEQ ID NO: 38953 - protein, 847 aa, Homo sapiens
MGPGARLAALLAVLALGTGDPERAAARGDTFSALTSVARALAPERRLLGLLRRYLRGEEARLRDLTRCNDETITYLLDKRLTVLTAANIPYSSPENGAKRRRQDAFPPIHYNTQDALLQYLSGVGWGAPPAAQAHRDAPFVDSIAQVLLRTSGGSAEASGWSLRSRWAVGGATGSWVLSKGDRASLGERVVTGWATLNVGRSFAYCLTTCVQPPLDVGPRKEHAPRPPSLSPTSTRQRGQSERSQDANGRRKQKTKSEPERFEDAVLLAGFKVEEEPVQRPRRKEWFQGPSPGHCCPAQPQDSAPCILATHAPARAQNAPGTAWAAALEGTSTVSLDHFHVVGVVVVSGGEIILLLSFRFYDKVLSLHEDSTTPVANPLLAFTLIKRLQSDWRNVVHSLEASENIRALKDGYEKVEQDLPAFEDLEGAARALMRLQDVYMLNVKGLARGVFQRVTGSAITDLYSPKRLFSLTGDDCFQVGKVAYDMGDYYHAIPWLEEAVSLFRGSYGEWKTEDEASLEDALDHLAFAYFREQSSSPATEQSWMENDFDELREEGFRRSNYSELQEEIRTNGKEVKSFEKKLDEWITRITNAEKSLKDLMELKTKARELRDECRSLSSRCNQLEERVSVMEDEMNETKRGEKFREKRIKRNEQSIQEIWDYVKRPNLRLIGVLESDRENGTKLENTLQDIIQENFPNLARQANIQIQEIHRTPQRYSSRRATPRHIIVRFTKVEMKEKMLRAAREKGRVTHKGKPIRLTADLSAETLQARREWGPIFNILKEKNFQPRISYPAKLSFISEGEIKSFTDKQMLGGFVTTRPALQELLKEALNMERNNWYQPLQKHVKL

SEQ ID NO: 38954 - protein, 329 aa, Homo sapiens
  misc_feature (1)...(329): Xaa = X or * as defined in Table 2
MQRGQQATGSSANAWGILQPKWVQTGPDNKRMARNVLKYERLLAESPNHVVAEAVIQRPNIPHLQTRDTYEGLCQTLGSQPTLYQIPSLYCSYETNSNAYLLLQPIRKEVIHLEPYIALYHDFVSDSEAQKIRELAEPWLQRSVVASGEKQLQVEYRISKSAWLKDTVDPKLVTLNHRIAALTGLDVRPPYAEYLQVVNYGIGGHYEPHFDHATSPSSPLYRMKSGNRVATFMIYLSSVEAGGATAFIYANLSVPVVRVVQWPGTSXAFDNQCQNAALFWWNLHRSGEGDSDTLHAGCPVLVGDKWVANKWIHEYGQEFRRPCSSSPED

SEQ ID NO: 38955 - protein, 168 aa, Homo sapiens
  misc_feature (1)...(168): Xaa = X or * as defined in Table 2
AWLKDTVDPKLVTLNHRIAALTGLDVRPPYAEYLQVVNYGIGGHYEPHFDHATSPSSPLYRMKSGNRVATFMIYLSSVEAGGATAFIYANLSVPVVRVVQWPGTSXAFDNQCQNAALFWWNLHRSGEGDSDTLHAGCPVLVGDKWVANKWIHEYGQEFRRPCSSSPED

SEQ ID NO: 38956 - protein, 34 aa, Homo sapiens
  misc_feature (1)...(34): Xaa = X or * as defined in Table 2
KKSLLVRRSWRMKELKKKIGQYXRKLGRLKGKAI

SEQ ID NO: 38957 - protein, 140 aa, Homo sapiens
FRAAPAPESGGESVFGETHRALQGAMEKLQRRLWKEKVDLKERVEKLELQFIHLSGQTDTIGRKYISQGAVSETQHWEKEDIVRLAQDQEEMKVNLQELREQVLQLVGDHKEGHGKFLTIAQNPADEPTLGAPIAQELGC

SEQ ID NO: 38958 - protein, 143 aa, Homo sapiens
  DOMAIN (15)..(42): Protamine P1 proteins domain identified by eMATRIX, accession number BL00048, p-value=1.675e-09, raw score of 6.39
AAVKPLGSAETAVPIARLGCRRFSRSRCCRRRGRGSLLSFSAAKVAFFNSAGANAQEEQRVCCQPLAHPVASSQKKPEVAAPAPESGGESVFGETHRALQGAMEKLQRRLWKEKVDLKERVEKLELQFIHLSGQTDTHNKISY

SEQ ID NO: 38959 - protein, 923 aa, Homo sapiens
  DOMAIN (291)..(326): Troponin domain identified by eMATRIX, accession number PF00992A, p-value=9.859e-12, raw score of 16.67
MSEKTQQGKLAAAKKKLKAYWQRKSPGIPAGANRKKKINGSSPDTATSGGYHSPGDSATGIYGEGRASSTTLEDLESQYQELAVALDSSSAIISQLTENINSLVRTSKEEKKHEIHLVQKLGRSLFKLKNQTAEPLAPEPPAGPSKVEQLQDETNHLRKELESVGRQLQAEVENNQMLSLLNRRQEERLREQEERLREQEERQREQEDRLHEQEERLREQEERLCEQEERLCEQEERLREHEERLCEQEERLREQEERLCEQEERLREHEERLCEQEERLCEQEERLHEQEERLREQEERLCEQEERLREHEERLCEQEERLREHEERLCEQEERLREQEERLCEQEERLREQEERLCEQEKLPGQERLLEEVEKLLEQERRQEEQERLLERERLLEEVEKLLEQERQQEEHEMLLERERLLEEVEKLLEQERRHEELETLLERERLLYSTPEFIISEPLANMYSCGNQNTLMEELAEQAQQHDEMLHMHHALKEALSIIGDINRTTVTMPPPVDDTWLQVQSIPDAHRPEASPDPFGPYPPGALVPQPGSPVCRVAARPRSMRHVPAGPGGSPQTQTHPHSLGLGPLPLASSGTLFLLGTGSSGVEKCHLKTRGLKASWHIHHPLNFQFTTTSPDSDHILIKVQISILIPTSANPKPTLSRLYGIGAKIAGTHLIESFEMHFITFSPPPPPSTLSLNETAVLPSTKDKIKHLFAARTPHRGRPPQGRSESAPAAPTRGPGARVRGHPPPGAPPIRKAATAPKLGCGVGGAPSPKQTMREKGDAQGGGVRKAEVPAPPGYPSVPPAPEAPRSPRPSYWARPTERPQGTGRVRTPTPPQITKLPPTPPTKLRSHRAAPGAPPRAEPRQLLTFAAEKDNRLPLPRRRQQRLRLKRRQPRRAMGTAVSAEPRGFTAAVPAPRQLCT

SEQ ID NO: 38960 - protein, 104 aa, Homo sapiens
  DOMAIN (41)..(56): TYPE I ANTIFREEZE PROTEIN SIGNATURE domain identified by eMATRIX, accession number PR00308A, p-value=4.918e-09, raw score of 5.90
  misc_feature (1)...(104): Xaa = X or * as defined in Table 2
FVNLFEIPVRVVEFGATCRAVAEPEQQRXSPSARPRPPCPLLASVAAALAAAAAAAAGGEAAYCLSPRRRXGAVSARPAGEPREPHEWDNRRSDFKRRRRGRDG

SEQ ID NO: 38961 - protein, 88 aa, Homo sapiens
  misc_feature (1)...(88): Xaa = X or * as defined in Table 2
GRSESAPAAPTRGPGARVRGHPPPGAPPIRKAATAPKLGCGVGGAPSPKQTMREKALHVAPATPRTGYKPPGGGRGTQEGSNVCESSX

SEQ ID NO: 38962 - protein, 1527 aa, Homo sapiens
  DOMAIN (72)..(99): Protamine P1 proteins domain identified by eMATRIX, accession number BL00048, p-value=1.675e-09, raw score of 6.39
  DOMAIN (184)..(310): Laminin G domain identified by PFam, accession name laminin_G, E-value=2.5e-14, PFam score of 54.5
MGSSAVQSQLAALAPRVLTGGLADVTALLRAPATPGRLVAGARGGWGYVQSCRGAGAAAVKPLGSAETAVPIARLGCRRFSRSRCCRRRGRGSLLSFSAAKPIVFKEKLTMKTDSLMEEKLECSLWCCLSDPSTPGRCCVLERRIVPWMQQLLANIKQAEKHEKNHPEVTVAMALTDIDLQLQFSMSQPEALLLLAAGPADHLLLQLYSGHLQVRLVLGQEELRLQTPAEILLSGSVPHTTVLTVSEDWPTLSVNGFLNASSVVLGAPLEVPYGLFVGSTGRLGLPYLRGTSHPLRGCLHAAALNGRRLLQPLTPNKHEGCAEEFSANDDVALGFSGSHSLAALPAWGTQDEGTLEFTLTTQSWQAPLAFQAAGWHGDFIHVDIFEGHLWSMVEKGQGTVLLLNSVPVTDAQPHKVSIHINIHQLEISMDQYPTRTEESSATWSHEHRSGLTPGAANASLLGWLHGRPQCQWLEAGAVGSLADAQHGGWLQTGGAAISAVVVTEGGTAWLEWWHVQPMLALMEAELRKSQARFIHDGPEDTSDQLVLEVSVMAWLPMPSCLRRGQTDLLPIQVNPVNDPPHIIFPHGSLMVILEHTQKPLGPEVLQAYDLDSACEGLTFQLLGTPSGLPVEHRDQPGEPVTEFSCWELEAGSLVYVHCGGPTQDLTFRVSNGLQASPPAMLKVVAVQLAIQIHRSTGLHLAQGSAMPILPTNLLVETSAVGQDVTVLFRVTGGLPFRELQKQGAGGHYTEDTVENLDLQVQVSWKILSNLSFLVTIQRATVWMLQLEPLHTQNTQQEALTTAHLEATLEEAGPSPPTFHCEVVQAPRKGNFQLQGTMLSDGQGFTQDDVQAAEVTYGAMAHASVAVEDTFCFHVTAPPYFSPLCTFSIHIGGDPDMPVLVVPEGGGCVLSADQLFIKSLNSARYLYEVMEQPRHGRLTWRGTQDKITMVTSFTNGDLMHGQLTISCVFHVAWGRWRLLTTDNMAFSNADSGFAEAQLVLTHQDLLSGSIMATDEPMQPICRFIQEGPQEEASPVSDGQHQAITVLEVQALEPYLCVANGSGLMVPQGGQGTINMAELHLGTNLNICSRDEAHYHVTDSPHWGQLLQATQPATAFSQQDLLVGAVFYGHNGSLSSRNTLAFSMDVGPVHTDATLQVTIALEGPVAPLKLAQHKEIYIFQGEAAEIRRDQLEVAQEAVPPADIVFSVKSPPSAGYLVMVLRGILADEPPSLDPVQSFSQEAVDTGRILYLHSRPEACLLAGCGLGLGAPLEDVTWSWRCWSHPGMGPCRRRMGLKPGPSAPSAGERYGCGRASDPVPARWEQDTDGFVLMANASEMDRQSHPVAFTVTILPVNGQPPTSYKLRPAEALRSMDGYSGPKDLVYTIKQPSNGWVVQWAVPGTESPSSHSAARASEPAGTDPQLLLYHVVRGLQLGRLFHAQHDSTGEDLVNFTQAETPEFIISEPLANMYSCGNQNTLMEELAEQAQQHDEMLHMHHALKEALSIIGDINRTTVTMPMPPPVDDTWLSEHP

SEQ ID NO: 38963 - protein, 32 aa, Homo sapiens
MGTAVSAEPRGFTAAVPAPRQHEVVDSANPNR

SEQ ID NO: 38964 - protein, 33 aa, Homo sapiens
  misc_feature (1)...(33): Xaa = X or * as defined in Table 2
XLHVAPATPRTGYKPPGGGRGTQEGSNVCESSX

SEQ ID NO: 38965 - protein, 272 aa, Homo sapiens
  misc_feature (1)...(272): Xaa = X or * as defined in Table 2
RIMETIANLSSQSPVSLPLRVGLAEYLEMEEDDLDSEQEAPRPMPNIPGDLESREPQVAFFNSAGASAQEEQRVCCQPLAHPVASSQKKPEVAAPAPESGGESVFGETHRALQGAMEKLQVTTLWKEKVDLKERVEKLELQFIHLSGQTDTIVSERLGHRWGELPGHPRGPSIXAMSSCRKVHQPGGSVRDAALGEEDIVRLAQDQEEMKVNLQELREQVLQLVGDHKEGHGKFLTIAQNPADEPTLGAPVAQELGCADEQGGFYPRSPLDC

SEQ ID NO: 38966 - protein, 47 aa, Homo sapiens
  misc_feature (1)...(47): Xaa = X or * as defined in Table 2
XVDEMHMSLPKMKKDIYWDDSAARPPYTLAAADYCIPSFLGSTVQMG

SEQ ID NO: 38967 - protein, 701 aa, Homo sapiens
  DOMAIN (156)..(200): Putative membrane protein domain identified by eMATRIX, accession number PF01062E, p-value=3.667e-28, raw score of 16.81
  DOMAIN (153)..(473): AMP-binding enzyme domain identified by PFam, accession name AMP-binding, E-value=2.5e-40, PFam score of 147.4
MAFMLSPLLKRYTWNSAWLYYARIFIALCGTTAFPWWLGDVKLTIPLTLGMVAAALTDLDDRLAGRLRNLIITLFCFFIASASVELLFPWPWLFAIGLTLSTSGFILLGGLGQRYATIAFGALLIAIYTMLGTSLYEHWYQQPMYLLAGAVWYNEMNRYRSWCSLLFGYDWVGIPLVYTQVVTLAVYTFFFACLIGRQFLDPTKGYAGHDLDLYIPIFTLLQFFFYAGWLKGSAPLQLSQPHHTAYIIFTSGSTGRPKGVMVGQTAIVNRLLWMQNHYPLTGEDVVAQKTPCSFDVSQFFAEYGVTTTHFVPSMLAAFVASLTPQTARQSCATLKQVFCSGEALPADLCRVWQQLTGAPLHNLYGPTEAAVDVSWYPAFGEELAQVRGQQCADWLSGLSRTPRSDTPAALLPILLPPGERMYRTGDVARWLDNGAVEYLGRSDDQLKIRGQRIELGEIDRVMQALPDVEQAVTHACVINQAAATGGDARQLVGYLVSQSGLPLDTSALQAQLRETLPPHMVPVVLLQLPQLPLSAKAGCPAAQVPRVAQVRVCAVLEDLGDIRESEGERKQEADAVLGTQDTPRVTSQPNGLLLKIEPQENVKIEGQHQGLVWLCVAASPVLVRVTREKEEKKKEEGNNMRFTSLVLSVLVNIVRALEKKVLDIMFNNCRTGVQAITLSHRRALAIAIALARYIKSALYDG

SEQ ID NO: 38968 - protein, 368 aa, Homo sapiens
  DOMAIN (116)..(170): Putative membrane protein domain identified by eMATRIX, accession number PF01062F, p-value=1.000e-40, raw score of 17.08
  DOMAIN (1)..(197): Putative membrane protein domain identified by PFam, accession name Worm_family_8, E-value=1.5e-18, PFam score of 25.4
  misc_feature (1)...(368): Xaa = X or * as defined in Table 2
FMTTDERKLFNHLKSPHLKYWVPFIWFGNLATKARNEGRIRDSVDLQSLMTEMNRYRSWCSLLFGYDWVGIPLVYTQVVTLAVYTFFFACLIGRQFLDPTKGYAGHDLDLYIPIFTLLQFFFYAGWLKVAEQLINPFGEDDDDFETNWCIDRNLQVSLLAVDEMHMSLPKMKKDIYWDDSAARPPYTLAAADYCIPSFLGSTVQMGLSGSDFPDEEWLWDYEKHGHRHSMIRRVKRFLSAHEHPSSPRRRSYRRQTSDSSMFLPRDDLSHSQGPTGCALKKPPQGLTHLEDNPASQKEAPRCTSAWESCPPSGRPARQALYRAXPHSPVXELPPSKCHGTXGIDHSSRSTSAHIRGLPPXFRYLHLEL

SEQ ID NO: 38969 - protein, 131 aa, Homo sapiens
  DOMAIN (83)..(130): SEX HORMONE-BINDING GLOBULIN domain identified by eMATRIX, accession number DM01077A, p-value=8.183e-10, raw score of 16.30
  DOMAIN (95)..(131): Laminin G domain identified by PFam, accession name laminin_G, E-value=1.3e-13, PFam score of 51.9
NLIFNLELLDFISAVGHEQVDLDTCWLSERPKLAPDAEDSKLLPEPRAFPEQCVVDAALEYVPGAHQFGLTQNSHFILPFNQSAVRKKLSVELSIRTFASSGLIYYMAHQNQADYAVLQLHGGRLHFMFDL

SEQ ID NO: 38970 - protein, 43 aa, Homo sapiens
VLFHVNNGAGRITAAYEPKTATVLCMKMFLRERQPPVVDVLFL

SEQ ID NO: 38971 - protein, 446 aa, Homo sapiens
  DOMAIN (101)..(148): SEX HORMONE-BINDING GLOBULIN domain identified by eMATRIX, accession number DM01077A, p-value=5.046e-10, raw score of 16.30
  DOMAIN (113)..(419): Laminin G domain identified by PFam, accession name laminin_G, E-value=3.3e-89, PFam score of 309.8
  misc_feature (1)...(446): Xaa = X or * as defined in Table 2
MHSTWLCFPARLLKELPFPQGLFPRLTIRSASRTPPAALERVTRDPCAATCLDRGSLKGILGHSPFQSPPVTSHCAENPNTLKAPPPYVGATSALVLSLGGPVTPWLSVELSIRTFASSGLIYYMAHQNQADYAVLQLHGGRLHFMFDLGKGRTKVSHPALLSDGKWHTVKTDYVKRKGFITVDGRESPMVTVVGDGTMLDVEGLFYLGGLPSQYQARKIGNITHSIPACIGDVTVNSKQLDKDSPVSAFTVNRCYAVAQEGTYFDGSGYAALVKEGYKVQSDVNITLEFRTSSQNGVLLGISTAKVDAIGLELVDGKVLFHVNNGAGRITAAYEPKTATVLCDGKWHTLQANKSKHRITLIVDGNAGWRXKSHTPQSTPVDTNNPIYVGGYPAGVKQKCLRSQTSFRGCLRKLALFRGPQVQSFDFSRAFELHGVFLHSCPGTES

SEQ ID NO: 38972 - protein, 29 aa, Homo sapiens
  DOMAIN (1)..(22): GLUTELIN SIGNATURE domain identified by eMATRIX, accession number PR00211B, p-value=5.300e-13, raw score of 0.86
IPPPPLPPPPPLPPPPPLPPPPHPPLLHL

SEQ ID NO: 38973 - protein, 51 aa, Homo sapiens
  DOMAIN (12)..(45): PROLINE-RICH PROTEIN 3 domain identified by eMATRIX, accession number DM00215, p-value=2.059e-11, raw score of 19.43
HTFPTFSSSPHLVMMIQPSSSSPPPPLPPPPPSSPPLPLPPSPPPLLLFFL

SEQ ID NO: 38974 - protein, 150 aa, Homo sapiens
  DOMAIN (3)..(38): CORE POLYPROTEIN PROTEIN GAG CONTAINS: P domain identified by eMATRIX, accession number PD02059B, p-value=1.887e-09, raw score of 24.48
  misc_feature (1)...(150): Xaa = X or * as defined in Table 2
DGPQDQPPHQPSSSSPPPPLPPPPPFPPPLPLPPSPPPLLLFFCSDEALLCCHTGVELFFVIFAYCSGPETEPAISPRYASSSGLNGFPLPRTPPAYAXIPSSGIHFNPSLAIKPSTTTTLVRTPTTHHHSRRPTITTQSSTTAPSRLHP

SEQ ID NO: 38975 - protein, 34 aa, Homo sapiens
  DOMAIN (1)..(34): Actin domain identified by PFam, accession name actin, E- value=7.7e-19, PFam score of 63.1
GGSILASLSTFQQMWISKRSTHESGPSIVHRKCF

SEQ ID NO: 38976 - protein, 86 aa, Homo sapiens
  DOMAIN (37)..(86): Actins proteins domain identified by eMATRIX, accession number BL00406E, p-value=1.000e-40, raw score of 8.44
  DOMAIN (1)..(86): Actin domain identified by PFam, accession name actin, E- value=2.6e-57, PFam score of 189.3
RKDLYANTALSGGTTMYPGIADRMQKEITALAPSTMKIKIIAPPERKYSVWIGGSILASLSTFQQMWISKQEYDESGPSIVHRKCF

SEQ ID NO: 38977 - protein, 250 aa, Homo sapiens
  DOMAIN (15)..(70): Actins proteins domain identified by eMATRIX, accession number BL00406C, p-value=1.000e-40, raw score of 6.75
  DOMAIN (5)..(250): Actin domain identified by PFam, accession name actin, E- value=6.5e-126, PFam score of 414.5
  misc_feature (1)...(250): Xaa = X or * as defined in Table 2
NTPAMYMAIQAVLSLYTSGRTTGIAMDSGDGVAHTVPIYEGYTLPHAILHLDLAGWDLTDYFMKILMECSYRFTTMAEQEIVCDIKEKLCNIALDFEHKMATGASSSSLEKSYEVPDGQVITIGNEWFXVPEALFQPSMGMESCGIQETTFNSIMKCDVDICKELYAKMVLSSGTTMYLGIADRMQKEITALGRPSTLRFRFIAPPERRKYSVWIGGSILASLSTFQQMWISKQEYDESGPLHPSTANCF

SEQ ID NO: 38978 - protein, 56 aa, Homo sapiens
  misc_feature (1)...(56): Xaa = X or * as defined in Table 2
CPLCRGNHWKVHCPSGRMVPXVRSPQPDDPTTGQRVPGASASSCHHPHXAPGTFNH

SEQ ID NO: 38979 - protein, 108 aa, Homo sapiens
  DOMAIN (4)..(21): Zinc finger, CCHC class domain identified by PFam, accession name zf-CCHC, E-value=0.00022, PFam score of 28.0
  misc_feature (1)...(108): Xaa = X or * as defined in Table 2
SPSRTCYQCGLQGHFXKDCTSEKPPPRPCLLCQGNHWKVHCPRVTKVLWVRSPQPDDPATGLRVPDDXEHTIRRAYALGKSAVTSKPPPPYPARSRLNVRRLCSLATN

SEQ ID NO: 38980 - protein, 125 aa, Homo sapiens
  DOMAIN (16)..(68): Heat shock hsp70 proteins family proteins domain identified by eMATRIX, accession number BL00297C, p-value=7.261e-34, raw score of 9.51
MSPMVVTKMKEIAEAYLGKTVTNAVLTVPAYFNDSASGYQKDARTIAGLNGLRISNEPTAAAIAYGLNQKVYEGERAVSKDNSLLGKFELTGILPVTVLLTLKSLDTDASDILSVSAVDKSIGSW

SEQ ID NO: 38981 - protein, 141 aa, Homo sapiens
  DOMAIN (69)..(121): Heat shock hsp70 proteins family proteins domain identified by eMATRIX, accession number BL00297C, p-value=2.615e-39, raw score of 9.51
MVFDAKRLIAHRFDDAVVQSEMKHWPFMVVNDAGRPKVQVEYKGESKSFYPEKVSSMVLTNMKEIAEAYLGKTVTHAVVAVPAYFNDSQRQATKDAGTIVGLNVLRIINEPTAAAYGLDKRHRSSLPILTASLVCWFRFMK

SEQ ID NO: 38982 - protein, 553 aa, Homo sapiens
  DOMAIN (307)..(362): Heat shock hsp70 proteins family proteins domain identified by eMATRIX, accession number BL00297G, p-value=1.000e-40, raw score of 21.87
  DOMAIN (3)..(519): Hsp70 protein domain identified by PFam, accession name HSP70, E-value=1e-247, PFam score of 836.4
MDTKQLIGDAAKHQVAMNPTNTVFDAKRLIGRRFDDAVVQSDMKHWPFMVVNDADRPQVQVEYKGETKSFYPEEVSSIVLTKMKEIAEAYLGKTVTSAVVTVPAYFNDSQFQVTKDAGTIAGLNVLRIINEPTVAAIVYKSSDKKVGAQRNVLIFDLGGGTFGVSILTIEDGIFEVKSTARDNHLGGEDFDNRMVNHFIAELKRKHKKDISESKRAVRCLRTACEHAKRTLSSSTQVSIEIDSLYVGIDFYTSITCAQFEELNADLFCGTLDPVEKALRDAKPDKSQIHDIVLAAILSGDKSENVQDLLLLDVTPLSLGIETASGVMTILINCNTTIPTKQTQTFITYSDNQPGVLIQVYEGERAMSKDNNLLGKFEFTGIPPEPQGVPQIEVTFDIDANGILSVSAVDKSTGKENKITITNNKGHLSKEDIEPEDEKQRDKASSKNSLESYAFNMKATVEDEKLQDKINDEDKQKILDRCNEIINWHNKNRTAKKEEFEHQQKELEELCNPIITKLYQSAEGMPGRMPGGFPVGGAPPSGGASLGPTIEEVD

SEQ ID NO: 38983 - protein, 483 aa, Homo sapiens
  DOMAIN (41)..(93): Heat shock hsp70 proteins family proteins domain identified by eMATRIX, accession number BL00297C, p-value=1.000e-40, raw score of 9.51
  DOMAIN (1)..(450): Hsp70 protein domain identified by PFam, accession name HSP70, E-value=3.2e-153, PFam score of 522.4
  misc_feature (1)...(483): Xaa = X or * as defined in Table 2
MVNDTDRPKVQVEYKGETKIFYPEEVSSMVLTKMKEIAEAYLGKTVTNAVVTVPAYFNNSQHQATKDAGTIAGLNVLRIINEPSAADIAYGLDKKVGAERNVFIFDLRGGTFDVSILIIQDGIFEVKSGDTHLGEEDFDNRIVSHFIAEFKHKYKKDITIRDVKLDKSQIHDIVSIGGYTHIPKIQKLLQDIFNRKELNKSINLDEAVAYGAAVQAAILSGDKSENVQDLLLLDVNPLSFGIELAGGVMTVLPVLIKHSTTIPTKQTETFXQPIYSDNQPGYEGECAMTKDDNLLDKFELTGIPSAPHGVPQIEVTFDIDANGILNVSAVDKSVGKENTITTTNDKHRLSKEDMNIWSAEKYKAEDKRQRDKVSSKNSLESYAFHMKATVKDEKLQGKINGEDKQKILDKFNEVIKWLDKNQAAKKEEFEHQQTELEKVCNLIISKRYQSAGGMPGGMPGGFPGGGAPPSSGASSRPITEEVD

SEQ ID NO: 38984 - protein, 451 aa, Homo sapiens
  DOMAIN (31)..(68): Heat shock hsp70 proteins family proteins domain identified by eMATRIX, accession number BL00297A, p-value=1.000e-40, raw score of 17.58
  DOMAIN (30)..(451): Hsp70 protein domain identified by PFam, accession name HSP70, E-value=1.6e-128, PFam score of 440.4
  misc_feature (1)...(451): Xaa = X or * as defined in Table 2
TRLQLLGFLWLPSLLEPGLHPSNHGPRGPAVGIDLGTTYSCVGVFQHGKVEIIANDQGNRTTPSYVAFTDTERLIGDAAKNQVAMNPTNTSFXLPNGLIGRRFDDAVVQSDMKHWPFMVVNDAGRPKAPSXNTKGETKSLYPEEGVFLWVXPKMKEICRSLTLGKTVTNAVVTVPSYFNDSQRQATKDAGTIAGLNVLRIINEPTAAAIAYGLDKKGLEQKRNRAHLLTWGGGTFDVSILTIEDGIFEVKSTAGDTHLGGEEDFDNRMVNHFIAEFKRKHKKDISENKRAVRRLRTACERAKRTLSSSTQASIEIDSLYEGIDFYTSITRARFEELNADLFRGTLDPVEKALRDAKLDKSQIHDIVLVGGSTRIPKIQKLLQDFFNGKELNKSINPDEAVAYGAAVQAAILSGDKSENVQDLLLLDVTPLSLGIETAGGVMTVLIKRNTTI

SEQ ID NO: 38985 - protein, 518 aa, Homo sapiens
  DOMAIN (185)..(205): Phosphoglycerate mutase family phosphohistidine proteins domain identified by eMATRIX, accession number BL00175A, p-value= 7.667e-20, raw score of 15.42
  DOMAIN (192)..(501): Phosphoglycerate mutase family domain identified by PFam, accession name PGAM, E-value=8.1e-23, PFam score of 86.5
  misc_feature (1)...(518): Xaa = X or * as defined in Table 2
RYLNWIGTPTKGMSLKAFVQQPHKSYWLKTLLPDNMEALQIRKXVPNILGTCAVSWLKGPCSDVAVKKFFIFSLGNYWEGNXLIXEHGYKVWXHSNSYLEPISPAQTPKKRTTSYFSTLLCLRLRSCLSFLKRIECYEVNYQPLDEELDRXEPAPQSQGLDLSPSFDILXDHIQSRTVYYLMNIHVTPRSIYLCRHGESELNIRGRIGGDSGLSVRGKQVGWATHTQMGWLGCPRWAAGFPILPSRPYPNAGVTLAAPVPTHDSVLPALPTRAGGQDETEPGLKAGPTGLPSAPPLEMGGGAPGKALSWMATPWCLPFCYVEVALTCAAPTVYQAVVWVLPIHYLKCSPQTAGQMRQCSLDMRPERGRDVSEGTRDHVRELREFNLWLIPPCQGLLPTSHMKRTIQTAEALGVPYEQWKALNEIDAVRCMGXISCVWGXLESGIIPLRDQDKYRYRYPKGEVRFAGWPNAXDYSPVSSLQLNVLLICHQASMRCLLAYFLIKSSGTTLISALGMFDGI

SEQ ID NO: 38986 - protein, 63 aa, Homo sapiens
  misc_feature (1)...(63): Xaa = X or * as defined in Table 2
MSGVSTTSTWXLXPLRLPVVXALVTDVAPSLEKNRRHFLHLSPSSFLPCLPFLVTGSEVGHKK

SEQ ID NO: 38987 - protein, 86 aa, Homo sapiens
  misc_feature (1)...(86): Xaa = X or * as defined in Table 2
ALVCSSSLAIREMQIKTTMRYHLTPVRMAIIKKSGNNRCWRGCGEIGTLLHCWLDCKLVQPLWKSVWXFLRNLELEIPFDPAIPLL

SEQ ID NO: 38988 - protein, 338 aa, Homo sapiens
MGKKQNRKTGNSKTQSTSPPPKERSSSPATDQSWMENDFDELREEGFRRSNYSELREDIQTKGKEVENFEKNLEECITRITNTEKCLKELMELKTKARELREECRSLRSQCDQLEERVSAMEDEMNEMKQEGKFREKRIKRNEQSLQEIWDYVKRPNLRLIGVPESDAENGTKLENTLQDIIQETFPNLARQANVQIQEIQRTPQRYSSRRATPRHIIVRFTKVEMKEKMLRAAREKGRVTLKGKPIRLTADLSAETLQARREWGPILNILKEKNFQPRISYPAKLSFISEGEIKYFTDKQMLTDFVTSRPALKELLKEALNMERNNRYQPLQNHAKM

SEQ ID NO: 38989 - protein, 577 aa, Homo sapiens
  DOMAIN (152)..(198): kw TRANSCRIPTASE REVERSE II ORF2 domain identified by eMATRIX, accession number DM01354O, p-value=1.000e-40, raw score of 8.73
  DOMAIN (185)..(460): Reverse transcriptase domain identified by PFam, accession name rvt, E-value=1.4e-76, PFam score of 267.8
ERSSSPATEQSWMENDFDELREEGFRRSNFSELKEKVRTHHKQDKNLEKRSWFFEKINKIDRPLARLIKKKREKSQINAIKNDKGDITADPTEIQTTITEYYKHLYANKLENLEAMDKFLDTYTLPRINQEEVESLNRPITGSETEAIINSLPTKKSPGPDGLTAEFYQRYKEELVPFLLKLFQSIEKERILPNSFYEGIILLIPKPGRDNTKKDNFKPISLMNMDAKILNKILANRIQQHIKKLIHHDQVGFIPGMQGWFNICKSINVIQHINRTKDKNHMIISTDAGKAFDKIQQPFMLKTLNKLGIDGMNLKIIRAIYDKPTANIILNRQKLEAFPLKTGTRQGCPLSPLLFNIVLEVLARAIRQEKEIKGIQLGKEEVKLSLFADDMIVYLENPIVSAQNLLKLISNFSKVSGYKISVQKSQAFLYTNNRQTESQIMSEIPFPIASKRIKYLGIQLTRDVKDLFKENCKPLLKEIKENTNKWKNIPCSWIERINIVKMAILPKVIYSFNAIPIKHPMTFFTELEKTTLKFIWNQKRARITKSILRQKNKAGGITLPEFKLYYKTTVTKIAWYG

SEQ ID NO: 38990 - protein, 558 aa, Homo sapiens
  DOMAIN (203)..(249): kw TRANSCRIPTASE REVERSE II ORF2 domain identified by eMATRIX, accession number DM01354O, p-value=1.000e-40, raw score of 8.73
  DOMAIN (236)..(511): Reverse transcriptase domain identified by PFam, accession name rvt, E-value=3e-80, PFam score of 280.0
AIKLELRIKNLTQNRSTTWKLNNLLLNDYWVHSEMKAEIKMFFETNENKDTTYQNLWDTFEAKSKSKQHSKASRRQEITKIRAELKEIEIQKTLQKINESRSWFFERINKIDRPLARLIKKKREKNLIDAIKTDKGDITTNPTEIQTTIREYYKHLYANKLENREEMDKFLDTYTLPRLNEEEVESLNTPITGSEIVAIINSLPTKKSPGPDGFTAELYQRYKEELVPFLLKLFQSIEKEGILPNSFYEASIILIPKPGRDTTKKENFRPISLMNIDAKILNKILAKGIQQHIKKLIHHDQVGFIPGMQGRFNIRKSINVIQHINRTKDKNHMIISIDAEKAFDKIQQPFMLKTLNKLGIDGTYFKIIRAIYDKPTASIILNGQKLEAFRLKTGTRQGCPLSPLLFNIVFEILARAIRQEKEIKGIQLGKEEVKLSLFAGDMIVYLENPIVSAQNLLKLISNFSKVSGYKINVQKSQAFLYTNNRQTESQIMSELPFTIASKRIKYLGIQLTRDVKDLFKENYKPLLKEIKEDTNKWKNIPCSWVGRINIVKMAILPK

SEQ ID NO: 38991 - protein, 713 aa, Homo sapiens; identical to SEQ ID NO: 34589
  DOMAIN (57)..(100): kw TRANSCRIPTASE REVERSE II ORF2 domain identified by eMATRIX, accession number DM01354T, p-value=1.000e-40, raw score of 9.48
  DOMAIN (1)..(179): Reverse transcriptase domain identified by PFam, accession name rvt, E-value=2.8e-15, PFam score of 64.2

SEQ ID NO: 38992 - protein, 414 aa, Homo sapiens
  DOMAIN (161)..(216): kw TRANSCRIPTASE REVERSE II ORF2 domain identified by eMATRIX, accession number DM01354Q, p-value=1.000e-40, raw score of 9.23
  DOMAIN (104)..(389): Reverse transcriptase domain identified by PFam, accession name rvt, E-value=1.2e-67, PFam score of 238.2
MAQELRDTCTSFSSRFDQVEERVMVIEDQINEMKQEEKFREKRVKRNKQSLQEIWDYVKRPNLRLIGVPEKNLEETDKFLDTYTLPRLNQEEVESLNRPITDSEIEAIINSLPTKKSSGPDGFTAEFYQRYKEELPGRDTTKKENFRPISLMNIDAKVLNKILANRIQQHIKKLIHHDQVGFIPGMQGWFNIHKSINVIQHINRTKDKNHMIISVDVEKAFDKIQQPFMLKTLNKLGIDGTYLKTIRAIYDKPTANIILNGQKLEAFSLKTGTREGCPLSPLLFNIVLEVLARAIRQEKEIKGIQLGKEEVKLSLFTDDIIVYLENPIISAQNLLKLVSNFSKVSGYKINVQKSQAFLHTNNRQTESQIMSELPFTIATKRIKYLGIQLTRDVKDLFKGSYKPLLNEVKKDTNK

SEQ ID NO: 38993 - protein, 590 aa, Homo sapiens
  DOMAIN (219)..(264): kw TRANSCRIPTASE REVERSE II ORF2 domain identified by eMATRIX, accession number DM01354N, p-value=1.000e-40, raw score of 13.17
  DOMAIN (304)..(579): Reverse transcriptase domain identified by PFam, accession name rvt, E-value=5.4e-76, PFam score of 265.9
  misc_feature (1)...(590): Xaa = X or * as defined in Table 2
FDQVEERVSVIEDQMNEMKREEKFREKRVIRNEQSLQEIWDYVKRLNLHLIGVPESDWENGTKLENTLQDIIQENFPNLARQANIQIQEIQRMPQRYSSRRTTPRHIILNAHKRKXERYKIDTLTSQLKELEKQEQTYSKASRRREITKIRAELKEIETQKTLQKINESRSCFEKINKIDRLLARLIKKKREKNQTDVIKNDKGDITTDPTEIQTTIREYYKHLYTNKLENLEEMDKFLDTYTLPRLNQEEVESLNRPITGSEIEAIINSLPTKKSTGPDRFTAEFYQRYKEELVPFLLKLFQSIEKEGILLNSFYEASTILIPKAGRDTTKKENFRPISLMNIDAKILNKILANRIQQHIKKLIHYNQVSFIPGIQGWFNICKSINVIQHINRTKDKNHTIISIDAEKAFDKIQQPFMLKTLNKLGIDGTYLKIMTAIYDKPTASTILNGQKLEAFPLKTGTRQGCPLSPLLFNIVLEVLARAIRQEKEIKGIQLGKEEVKLSLFADDMIVYLENPIVSAQTLLKLISNFSKISGYKINVQKSQVFPYTNNRQTESQIMSELLFTIASKRIKYVGIQLTRDVKDLFKEN

SEQ ID NO: 38994 - protein, 1709 aa, Homo sapiens; identical to SEQ ID NO: 32700
  DOMAIN (797)..(842): kw TRANSCRIPTASE REVERSE II ORF2 domain identified by eMATRIX, accession number DM01354N, p-value=1.000e-40, raw score of 13.17
  DOMAIN (391)..(621): AP endonuclease family 1 domain identified by PFam, accession name AP_endonucleas1, E-value=7e-83, PFam score of 288.8

SEQ ID NO: 38995 - protein, 486 aa, Homo sapiens
  DOMAIN (234)..(281): kw TRANSCRIPTASE REVERSE II ORF2 domain identified by eMATRIX, accession number DM01354V, p-value=1.000e-40, raw score of 12.97
  DOMAIN (1)..(247): Reverse transcriptase domain identified by PFam, accession name rvt, E-value=1.8e-06, PFam score of 22.1
MGDFNTPLSTLDRSTRQKVNKDTQELNSALHQVSLTDIYRTLHPKSTEYTFFSAPHRTYSKIHRIVGKIPTTIREYCKDLYANKVENLEEMDKFLDTYTLPRLNQEAVESLNRPITGSEIEAIINSLQPKKVQDQMNSKPNSTRVLEVLARAIRQEKEIKCIRLGKEEVKLSLFADDMIVYLENPIVSAQNLLKLISNFSKVSGYKINVQKSQAFLYTNTRQTESQIMSELPFTIASKRIKYLGIQLTRDVEDLFKENYKPLLNEIKEDPNKWKNIPCSWIGRISILKMAILPKVIDRFNAIPIKLPMTFFTELEKTTLKFIWNQKRAHIAKTILSQKNKAGGIMLPDFKQYYKATVTKTAWYWYQNRDRDQWNRTEPSEIIPHIYNHLVFDKPDKNKQWGKDSLFNKWCWENWLAMCRKLKLDSFLTPYTKINSRWIKDLNVRPKTIKTLEENLGNTIQDIGMGKDFMSKTPKAMATKPKLTNGI

SEQ ID NO: 38996 - protein, 625 aa, Homo sapiens
  DOMAIN (192)..(238): kw TRANSCRIPTASE REVERSE II ORF2 domain identified by eMATRIX, accession number DM01354O, p-value=1.000e-40, raw score of 8.73
  DOMAIN (225)..(500): Reverse transcriptase domain identified by PFam, accession name rvt, E-value=3.6e-86, PFam score of 299.7
APNTGAPRFIKQVLSDLQRDLDSHTIIMGDFNTPLSTLDRSMRQKVNKDIQELNSALHQADLIDIYRTLHPKSTEYTFFSATHHTYSKIDHIVGSKALLSKCKRTEIITNCLSDHSAIKLELRIKKLTENRSTTWKLNNLLLNDYWVHNEMKAEIKMVFETNDTLPRLNQEEVESLNRPKTGSEIEAIINSLPTKKSPGPDGFTAEFYQRYKEELVPFLLKLFQSIEKERILPNSFYEASIILIPKPGRDTTKKENFRPISLMNIDAKILNKILANRIQQHIKKLIHHDQVGFIPGMQGWFNICKSINVIQHINRTKDKNHMIISIDAAKAFDKIQQPFMLKTLNKLGIDGTYLKIIRAIYDKPTASIILNGQKLEAFTLKTGTRQGCPLSPLLFNIVLEVLARAIRQEKEIKGIQLGKEEVKLSLFADDMIVYLENPIISAQNLLKLIGNFSKVSGYTINVQKSQAFLYTNNRQTESQIMSELPFTIASKRIKYLGIQLTRDVKDFFKENYKPLLNEIKEDKNKWKNIPCSWVGRINIVKMAIPPKVIYRFNAIPIKLPMTFFGMIFLSQKYGHVTLLFRLLQWLLNVARNNNKVFYKIYKVGHKLSSAYVLCLTCSHFSVSFL

SEQ ID NO: 38997 - protein, 432 aa, Homo sapiens
  DOMAIN (210)..(253): kw TRANSCRIPTASE REVERSE II ORF2 domain identified by eMATRIX, accession number DM01354T, p-value=1.000e-40, raw score of 9.48
  DOMAIN (79)..(332): Reverse transcriptase domain identified by PFam, accession name rvt, E-value=4.1e-44, PFam score of 160.0
  misc_feature (1)...(432): Xaa = X or * as defined in Table 2
MKLPEEGSGSIICCSAIFAVLQLPLVIHRQTGYGEDLQQTPTDLQLRDLTDHSSSPAMEQSWMENDFDELNRSRLQKANKLENLEETDKFLDTYTLPRLNQEETESLNRPITGSEIEAIINNVPTKKSPGPDGVTAKFYQRYKEELRTVNKNHMIISIDAEKAFDNIQQPFMLKTLNKLGIDATYLKIIRAIDDKPTANIILNGQKLEAFPLKTGTRQGCPLSPLLFNIVLEVLARAIRQEKEIKGIQLGKEEVKLSLFADDMIVYLENPIVSAQNLLKLINNFSKVSGYKINVQKSQEFLYNNNRQTENQIMSELPFTIASKRIKYLGIQLTRDVKDLFKENYNPLLNEIKKDTNKWKNIPCSWIGRINIMKMAILLKVIYRFNAIPIKLLMIFFTELEKTTLKCIXNQKRAHIAKPILSQKNKAGSITLR

SEQ ID NO: 38998 - protein, 728 aa, Homo sapiens
  DOMAIN (224)..(271): kw TRANSCRIPTASE REVERSE II ORF2 domain identified by eMATRIX, accession number DM01354V, p-value=1.000e-40, raw score of 12.97
  DOMAIN (1)..(705): Reverse transcriptase domain identified by PFam, accession name rvt, E-value=4.3e-07, PFam score of 31.0
MGDFNTPLSTLDRSRKQKVNKDIQELNSALHQADLKDIYRTLHPKSTEYTFFSAPHHTYSKIDHIVGSKALFSKCKRTEIITNCLSDHSAIKLELRIKKLTQNRSTTWKLNNLLLNDYWVHNEMKAEIKMFFETMLEVLARAIRQEKEIKGFQLGKEEVKLSLFADDMIVYLENPINSAQNLLKLISNFSKVSAYKITVQKSQAFLYTNNRQTKSQLMSELPFTIASKRIKYLGIQLTKDMKDLFKENYKPLLNEIKEDTNKWKNIPCSWVGRINIVKMAILPKLIYRFNVIPIKLPMTFFTELEKTTLKFIRNQKRTHISKSILSQKNKAGGITLPDFKLYYKATVTKTAWLKFLRRLVSQGKGYLHCYSTVWKKPRADHQDESAFQGQHIILNVPASRPLHSPGFISERGLGSIGWRTSWKASLINQLAVAYGLVATADRISEDAESIPKAAPWGTGAVSTAEKSIERSHHRTLCRQPPVPAQSQEDLLEPNQMKRHQKTNPGNMTKQGSLIPPRNHTSLPTMNPNQEEIPDLPEKKFRSKIGLQGTYLNVIQAVYDKPTANIILNGEKLKAFPLRTGTRQGCPLSPFLLIVVLEVLARAIRQEKEIKSIQISKEEIKLSLFADDMIIYLENPKDSYRKLLEPIKEFSKVSRYKINVHESVALLYKNSNQAENQIENSTPFTEKKKLKNIPNQGRERHLQGKLQNTTERNHRQHKQMETHPMLMDG

SEQ ID NO: 38999 - protein, 566 aa, Homo sapiens
  DOMAIN (111)..(152): kw TRANSCRIPTASE REVERSE II ORF2 domain identified by eMATRIX, accession number DM01354I, p-value=3.357e-38, raw score of 15.55
  misc_feature (1)...(566): Xaa = X or * as defined in Table 2
MMGDFNTPLSTLDRSMRQKVNKDIQELNSALHHMDLIDIYRTLHPKSTEYTFFSAPQRTYSKIDHIVGSKALLSKCKRTEIITNCLSDHSAIKLELRIKKLTQNHSITWKLNNWLLNDYWVHNEMKAEIKMFFETNEIKDTTYQNLWDTFKATLNQEEVESLNRPITGSEIQAMINSLGTKKSPGPDGFTAKFYPEXHDCISRKPHRLSPKSPXADKQLQQSLRIQNQCSKITSILIHQXQTNREPNHEXTPIHNCIKDNKIPRSPTYKGCEGPLQGELQTTAQRNKRGHKQMEEHPMLMDRKNQYHENGHTAQGNLXIQCHPHQATNDFLHRIGKKYSKVHMEPKKSLHCQVNPKPKEQSWRHHTTXLQTILQGYSNQNSMVLVPKQRYRPMEHNRALRNNATYLPLSDLXETXQKQEMGKGFPIXQMVLGKLASHMXKAETGSLPYTLYKNXFKMDXRLKCXTXNHKHPRRKPRQYHSGHRHGQGLHVXNTKSNGNKSQNXQMGSHXTKELLHSKRNYHQSEQATYRMGENFCNLLIXQRANIQNLQRTQTNLQRKKQPHQQVG

SEQ ID NO: 39000 - protein, 1691 aa, Homo sapiens; identical to SEQ ID NO: 34342
  DOMAIN (795)..(836): kw TRANSCRIPTASE REVERSE II ORF2 domain identified by eMATRIX, accession number DM01354I, p-value=1.000e-40, raw score of 15.55
  DOMAIN (1031)..(1306): Reverse transcriptase domain identified by PFam, accession name rvt, E-value=1.3e-79, PFam score of 277.9

SEQ ID NO: 39001 - protein, 427 aa, Homo sapiens
  DOMAIN (139)..(185): kw TRANSCRIPTASE REVERSE II ORF2 domain identified by eMATRIX, accession number DM01354O, p-value=1.000e-40, raw score of 8.73
  DOMAIN (173)..(423): Reverse transcriptase domain identified by PFam, accession name rvt, E-value=7e-68, PFam score of 238.9
  misc_feature (1)...(427): Xaa = X or * as defined in Table 2
EKKASDDQTTPSYRRKFKPKAKKLNTLKKIXTNRITRITNREKCLKELMELKAKARELREECRSLRSQCDQLEERVSVMEEIQTTIREYYKHLYENKLQNLEEMDKFLDTYTLRRLNQEEVESLNRPITGSEIVAIINSLPTKKSPGPDGFTAKFYQRYKEELIPFLLKLFQSIEKEGILPNSFYEASIILIPKQGRDTTKKENFRPIFLMNINAKILNKILANRIQQHIKKLIHHDQVGFIPGMQGWFNICKSRNVIHHINRTKDKNHMIISIDAEKAFDKIQQPFMLKTLNKLGIDETYLKIIRAIYDKPTANIILNGQKLEAFPLKTGTRQGCPLSPLLFNIVLEVLARAIRQEKEIKGIQLGKEEVKLSLFADDMIVYLENPIVSAQNLFELISNFSKVSGYKINVQISQAFLYTNYRQSAKS

SEQ ID NO: 39002 - protein, 480 aa, Homo sapiens
  DOMAIN (189)..(235): kw TRANSCRIPTASE REVERSE II ORF2 domain identified by eMATRIX, accession number DM01354O, p-value=1.000e-40, raw score of 8.73
  DOMAIN (222)..(441): Reverse transcriptase domain identified by PFam, accession name rvt, E-value=1.6e-39, PFam score of 144.7
MKLPEEASGSNICCYAIFAVLQPLLVIPKETVSGVDLQQTPTDLQLSDLTPGRKTNKQKGIASPSTKRTSTPKPHLQANAQRFCHHQACVTRVPKGSTKHGKEQLVPATAKTCQIVKNINAMKKLHQLTEIQITIREYHKHLYANKLKNLEEMDKFLDTYTLPRLKQEEVESLNRPIMGSEIEAIINSLPTKKSPGPDGFTAKFYERYKEELVSFLLKLFQSIEKEGILPNSFYEASIILIPKPGRDTTKKENFRPISLKNIDAKILNKILANRIRQPIEKLIHHDQVGFIPEMKGWFKKCKSINVIHHINQTNDKNHMIISIDAEKAFDKTQQPFMLKTLNKLGTIRQKKEIKGIQLGKEEVKLSLFADDMIVYLENSIVSAQNLLKLISNFSKVSRYKINLQKSQAFLYTNNRHMESQITSELPFTIDTKRIKYLGIQFTRDVKDLFKENYKLLLNEIKEDTNKWKNIPCSWIEESIS

SEQ ID NO: 39003 - protein, 626 aa, Homo sapiens; identical to SEQ ID NO: 38210
  DOMAIN (7)..(54): kw TRANSCRIPTASE REVERSE II ORF2 domain identified by eMATRIX, accession number DM01354V, p-value=1.000e-40, raw score of 12.97
  DOMAIN (348)..(580): Reverse transcriptase domain identified by PFam, accession name rvt, E-value=1.7e-43, PFam score of 157.9

SEQ ID NO: 39004 - protein, 493 aa, Homo sapiens
  DOMAIN (69)..(114): kw TRANSCRIPTASE REVERSE II ORF2 domain identified by eMATRIX, accession number DM01354N, p-value=1.000e-40, raw score of 13.17
  DOMAIN (153)..(428): Reverse transcriptase domain identified by PFam, accession name rvt, E-value=1.2e-80, PFam score of 281.4
MELKTKARELREDSGADAINWKKGINKIDRPLARIIKKKREKNQIDAIKNDKGDITTDPTEIKTIIREYYKHLYANKLENLEEMDKFLDTYTLPRLNQEEVESLNRPITGAEIVAIINSLPTKKSPGPDGFTAEFYQRYKEELVPFLLKLFQSIEKEGILPNSFYEASIILIPKPGRDKTKKEDFRPISLRNIDAKILNKILANQIQQHIKKLIHHDQVGFIPRMQGLFNICKSINVIQHINRTKDKNHMIISIDAEKAFDKIQQHFMLKTLNKLGIAGTYLKIIRAIYVKPTANIILNGQKLEAFPLKIGTRQGCPLSPLLFNIVLEDLSRAIRQEKEIKGIQLGKEEVKLSLFADDMILYLENPIVSAQNLLKLISNFSKVSGYKINVQKSQAFLYTNNRQTESQIMSELPFTIASKRIKYLGIHLTRDVKHLFKENYKPLLNEIKEDTNKWKNIPCSWVGRINIVKMAILPKVIYRFNAIPIKLPITFFT

SEQ ID NO: 39005 - protein, 696 aa, Homo sapiens
  DOMAIN (425)..(470): kw TRANSCRIPTASE REVERSE II ORF2 domain identified by eMATRIX, accession number DM01354N, p-value=1.000e-40, raw score of 13.17
  DOMAIN (365)..(552): Reverse transcriptase domain identified by PFam, accession name rvt, E-value=0.01, PFam score of -31.0
MVFLEKISVGISRLSKQHPPFIRVALPLDADPTVSRIGSFQWVLGLADFRNEAVDPRDVQMCPEFIPSGGFVVFLTSGVKPQTFTVSITALKGEPTQMRRNQKTNSGNMTKLGYLTPQKNHTSSPAMSPNQEQIPDSPEKEFRRTEEASLTEGGTINPIISWAVGNGSSKNLYHILGKGRKIFSSSGIKQKSIASGERQNFQRNDQTAAFAVHENPLFCSHRCWYPGKQEKCLKELMELKAKARELREECRSLRSRCDQLEERVSVMEDEMNEMKREGKFREKRIKRNEQSLQEIWDYVKRPTLHLIDVPETLNAHKRKQERSKTDTLTSQLKELEKQEQTHSKASRRQEITKIRAELKEIETEKTLQKINESRSWFFERINKIDRPLARLIKKKREKNQIDAIKNDKGDITSDPTEIQTTIREYYKHLYANKLENLEEMDKFLDTYTLPRLNQEEVESLNRPITGSEIVAIINSLPTKKSPGPDGSTAEFYQRYKEELLISNFSKVSGYKINVQKSQAFLYTNNRQMESQIMSELPFTITSKRIKYLGIQLTRDIKDLFKENYKPLLNEIKEDRNKCKNIPCSWVGRINIVKMAILPKVIYRFNAIPIKLRMTFFTELEKTTLKFIWNQKRARITKSVLSQKNKAGGITLPDFKLYYKATVTKTAWYWYQNRDIDQWNRTEPSEITPHIYNYLIF

SEQ ID NO: 39006 - protein, 1170 aa, Homo sapiens; identical to SEQ ID NO: 34344
  DOMAIN (246)..(287): kw TRANSCRIPTASE REVERSE II ORF2 domain identified by eMATRIX, accession number DM01354I, p-value=1.000e-40, raw score of 15.55
  DOMAIN (459)..(736): Reverse transcriptase domain identified by PFam, accession name rvt, E-value=5.5e-72, PFam score of 252.6
  misc_feature (1)...(1170): Xaa = X or * as defined in Table 2

SEQ ID NO: 39007 - protein, 697 aa, Homo sapiens; identical to SEQ ID NO: 37095
  DOMAIN (424)..(449): 7 kw REVERSE TRANSCRIPTASE RNA POLYMERASE domain identified by eMATRIX, accession number DM00895E, p-value=4.517e-10, raw score of 15.72
  DOMAIN (395)..(620): Reverse transcriptase domain identified by PFam, accession name rvt, E-value=6.2e-48, PFam score of 172.7

SEQ ID NO: 39008 - protein, 927 aa, Homo sapiens
  DOMAIN (491)..(536): kw TRANSCRIPTASE REVERSE II ORF2 domain identified by eMATRIX, accession number DM01354N, p-value=1.000e-40, raw score of 13.17
  DOMAIN (576)..(851): Reverse transcriptase domain identified by PFam, accession name rvt, E-value=5.7e-86, PFam score of 299.0
MGKKQNRKTGNSKKQSASPPPKERSSSPATEQSWMENDFDEMREEGFRRSNYSELREDIQTKGKEVENFEKNLEECITRITNTEKCLKELMELKTKARELREECRSLRSRCDQLEERVSVMEDEMNEMNDGENGTKLENTLQDIIQENFPNLARQANVQIQEIQRTPQRYSSRRATPRHIIVRFTKVEMKEKMLRAAREKDFKPTKIKREKEGHYIMVKGSIQQEELTILKIYAPNTGAPRFTKQVLSDLQRDLDSHTLIMGDFNTPLSTLDTSTRQKVKKDTQELNSALHQADLIDIYRALHPKSTEYTFFSAPHHTYSKIDHIVGSKALLSKCKRTEIITNYLSDHSAIKLELRIKNLTQNHSTTWKLNNLLLNDYWVHNEVKAEIKVFFETKENKDTTYQNLWDAFKAVCRGKFIALNAHKRKQERSKIDTLTSQLKELEKQEQTHSKASRRQEITNIRAELKEIETQKTLQKINESRTEIQTTIREYYKHLYANKLENLEEMDKFLDTYTLPRLNQEEVESLNRPITGSEIVAIINSLPTKKIPGPDGFTAEFYQRYKEELVPFLLKLFQSIEKEGILPNSFYEASIILIPKPGRDTTKKENFRPISLMNIDAKILNKILAKRIQQHIKKLIPHDQVGFIPGMQGWFNIRKSINVIQHINRAKDKNHMIISIDAEKAFDKIQQPFMLKTLNKLGIDGTYFKIIRAIYDKPTANIILNGQKLEAFPLKTGTRQGCPLSPLLFNIVLEVLARAIRQEKEIKGIQLGKEEVKLSLFADDMIIYLENPIVSAQNLLKLISNFSKVSGYKINVQKSQAFLYTNNRQTESQIMSELPFPIASKRIKYLGIQLTRDVKDLFKENYKPLLQEIKEDTNKWKNIPCSWVGRINIVKMAILPKGIYRFNAIPIKLPMTFFTELEKTTLKFIWN

SEQ ID NO: 39009 - protein, 527 aa, Homo sapiens
  DOMAIN (252)..(297): kw TRANSCRIPTASE REVERSE II ORF2 domain identified by eMATRIX, accession number DM01354N, p-value=1.000e-40, raw score of 13.17
  DOMAIN (267)..(515): Reverse transcriptase domain identified by PFam, accession name rvt, E-value=3.8e-37, PFam score of 136.8
MSISGTVRMSAKSKGNPSSSCPAEGPPAASKTKVKEQIKIIVEDLELVLGDLKDVAKELKEQHWWHPISGDTATSICTVLESEKSKIKVTAFDVWLHLWGKGTDKQKDSSNFCRLKCPCLTALKRAVVLPARSWRCENGQTASSSGSLTPDPRAANREAPPSRGRLTPHTASDGENGTKLENTLQDIIQENFPNLARQANIQIQEIQRTPQRYSSRKATPRHIIVRLTKVEMKEKMLRAAREKEIQTAIREYYKHLYANKLENLEEMDKFLDAYTLPRQNQEEVESLNRPITGPEIVAIINSLPTKKSPGPDGFTAEFYQRYKEERHINRTKDENHMIISIDAEKAFNKIQQPFMLKTLNKLGIDGTYFKIIRAIYDKPTANIILNGQKLEAFPLKTGTRQECPLSPLLFNIVLEVLARAIRQEKEIKGIQLGKEEVKLSLFVDYMIVHLENPIISAQNLLKLISNFSKVSGYKINVQKSQAFLYTNNRQTESQIMSELPFTIASKRIKYLGIQLTRDVKDLFEEND

SEQ ID NO: 39010 - protein, 573 aa, Homo sapiens; identical to SEQ ID NO: 38217
  DOMAIN (260)..(305): kw TRANSCRIPTASE REVERSE II ORF2 domain identified by eMATRIX, accession number DM01354N, p-value=1.000e-40, raw score of 13.17
  DOMAIN (275)..(473): Reverse transcriptase domain identified by PFam, accession name rvt, E-value=2.4e-08, PFam score of 41.2
  misc_feature (1)...(573): Xaa = X or * as defined in Table 2

SEQ ID NO: 39011 - protein, 343 aa, Homo sapiens
  DOMAIN (90)..(145): kw TRANSCRIPTASE REVERSE II ORF2 domain identified by eMATRIX, accession number DM01354Q, p-value=1.000e-40, raw score of 9.23
  DOMAIN (33)..(318): Reverse transcriptase domain identified by PFam, accession name rvt, E-value=1.2e-67, PFam score of 238.2
NLEETDKFLDTYTLPRLNQEEVESLNRPITDSEIEAIINSLPTKKSSGPDGFTAEFYQRYKEELPGRDTTKKENFRPISLMNIDAKVLNKILANRIQQHIKKLIHHDQVGFIPGMQGWFNIHKSINVIQHINRTKDKNHMIISVDVEKAFDKIQQPFMLKTLNKLGIDGTYLKTIRAIYDKPTANIILNGQKLEAFSLKTGTREGCPLSPLLFNIVLEVLARAIRQEKEIKGIQLGKEEVKLSLFTDDIIVYLENPIISAQNLLKLVSNFSKVSGYKINVQKSQAFLHTNNRQTESQIMSELPFTIATKRIKYLGIQLTRDVKDLFKGSYKPLLNEVKKDTNK

SEQ ID NO: 39012 - protein, 355 aa, Homo sapiens
  DOMAIN (133)..(176): kw TRANSCRIPTASE REVERSE II ORF2 domain identified by eMATRIX, accession number DM01354T, p-value=1.000e-40, raw score of 9.48
  DOMAIN (2)..(255): Reverse transcriptase domain identified by PFam, accession name rvt, E-value=4.1e-44, PFam score of 160.0
  misc_feature (1)...(355): Xaa = X or * as defined in Table 2
ANKLENLEETDKFLDTYTLPRLNQEETESLNRPITGSEIEAIINNVPTKKSPGPDGVTAKFYQRYKEELRTVNKNHMIISIDAEKAFDNIQQPFMLKTLNKLGIDATYLKIIRAIDDKPTANIILNGQKLEAFPLKTGTRQGCPLSPLLFNIVLEVLARAIRQEKEIKGIQLGKEEVKLSLFADDMIVYLENPIVSAQNLLKLINNFSKVSGYKINVQKSQEFLYNNNRQTENQIMSELPFTIASKRIKYLGIQLTRDVKDLFKENYNPLLNEIKKDTNKWKNIPCSWIGRINIMKMAILLKVIYRFNAIPIKLLMIFFTELEKTTLKCIXNQKRAHIAKPILSQKNKAGSITLR

SEQ ID NO: 39013 - protein, 328 aa, Homo sapiens; identical to SEQ ID NO: 36612
  DOMAIN (37)..(83): kw TRANSCRIPTASE REVERSE II ORF2 domain identified by eMATRIX, accession number DM01354O, p-value=1.000e-40, raw score of 8.73
  DOMAIN (70)..(289): Reverse transcriptase domain identified by PFam, accession name rvt, E-value=1.6e-39, PFam score of 144.7

SEQ ID NO: 39014 - protein, 766 aa, Homo sapiens
  DOMAIN (235)..(290): kw TRANSCRIPTASE REVERSE II ORF2 domain identified by eMATRIX, accession number DM01354Q, p-value=1.000e-40, raw score of 9.23
  DOMAIN (183)..(463): Reverse transcriptase domain identified by PFam, accession name rvt, E-value=3.3e-54, PFam score of 193.5
MGKKQSRKTGNSKKQSASPPPKERSSTPATEQSWSENDFDELREEGFRRSNYSKLQEEIQTKGKEVKHFEKNLDECITRITNREKCLKELMELKAKARELREECRSLRSQCDQVEERTASKTNKEEKREESNRCNKNDKGDITTDPTEVQTTIREYYKHLYANKLQNLEEMDKFLDTYILPRLNQKEIDSLSRPITGSEIVAIINSLPTKKSPGPDGFTAEFYQRYKEELKILNKILANQIQQHIKKLIHHDQVGFIPGMQGWFNICKSRNVIHHINRTKDKNHMIMSIDAEKAFDKIQQPFMLKTLNKLGIDETYLKIIRAIYDKPTANIILNGQKLEAFPLKTGTRQGCPLSPLLFNVVLEVLARAIRQEKEIKGIQLGKEEVKLSLFAEDMIVYLENPIVSAQNLLKLISNFSKVSGYKINIQKSQAFLYTNNRQTESQMMSELPFTIASNRIKYLGIHLTRDMKDLFKENYKPLLNELKENTNKWKNIPCSWVGRINIMKTAILPKAIYRFSAIPIKLPMTFFKELEKTTLKFIWNQKRACIAKSILSQKNKAGGITLPDFKLYYKATVSKTAWYWYQNRDIDQWNRTEPSEITPHIYNYLIFDKPVKNKQWGKDSLFNKWCWENRLAICRKLKLDSFLTPYTKINSRWIKDLNVRPKTIKTLEENLGITIQDIGMGKDFMSKTPKAMATKAKIDKWDLIKLKSFCTAKETTIRVNRQPTKWEKIFTTYSSDKGLIISRIYNELKQIYKKKKTTPSKSGRRT

SEQ ID NO: 39015 - protein, 1063 aa, Homo sapiens; identical to SEQ ID NO: 34337
  DOMAIN (272)..(317): kw TRANSCRIPTASE REVERSE II ORF2 domain identified by eMATRIX, accession number DM01354N, p-value=1.000e-40, raw score of 13.17
  DOMAIN (212)..(466): Reverse transcriptase domain identified by PFam, accession name rvt, E-value=8.3e-07, PFam score of 27.0

SEQ ID NO: 39016 - protein, 349 aa, Homo sapiens
  DOMAIN (63)..(108): kw TRANSCRIPTASE REVERSE II ORF2 domain identified by eMATRIX, accession number DM01354N, p-value=1.000e-40, raw score of 13.17
  misc_feature (1)...(349): Xaa = X or * as defined in Table 2
ASAADTQANRVWSGPPANSNRPAARVLTVRRKTNKQKGHPHQNPICTSPSSKTKEIQTTIREYYQHLYTNKLENLEEMDKFFDTYTLPRLNQEEVESLNRPITGSEIEAIINNLPTKKSPGPDGFTAKFYQSVGSSGQGNQAGEGNKGHSIRKRGSQIVPVCRXHDCISRKPHRLSPKSPXADSQLQQSLRIQNQCAKITSILIHQXQTNREPNHEXTPIHNGFKQNKIPRNPAYKGCERPLQGELXTTAQXNKRGYKQMEEHSMLMGRKNQYHENGHTAQGNLXIQCHPHQATKNFLHRIGKNYFKVHMEPKKGPHCQVNPKPKEQSWRHHTTXLQTILQGYSNQNSI

SEQ ID NO: 39017 - protein, 733 aa, Homo sapiens
  DOMAIN (345)..(391): kw TRANSCRIPTASE REVERSE II ORF2 domain identified by eMATRIX, accession number DM01354O, p-value=1.000e-40, raw score of 8.73
  DOMAIN (380)..(652): Reverse transcriptase domain identified by PFam, accession name rvt, E-value=6.3e-78, PFam score of 272.3
MELKAKARELREECRSPWSRCDQLEEGVSVMEDEMNEMKQEGKFREKRIKRNEQSLQEIWDYVKRPNLRQIGVPESDGENGTKLENTLKDIIQENFPNLARQANIQIQEIQRTPQRYSLRRATPRHKIVRFTKVEMKEKMLRAAREKAPHHSYSKIDHIVGSKALLSKWKRSEIITNCLSDHSEIELELRIKKLTQNRSTTWKLNNLLLNDYWVHNEMKAEIKMFFETNENKDTTQQNLWDTFKAVCKGKFAALSAHKRKQERSKIDTLTLQLKELEKKEQTYSKEIQTTIREYYKHLCVSKLEHLEEMDKFLDTYTLPRLNQEEVDSLNRPITGSEIVAMINSLPTKKSSGPDGFTAKFYQRYKEELVPFLLKLFQTIEKEGILPNSFYEASIILIPKPGRDTSKKDNFRPISLMNTDAKILNKILANQIQQHVKNLIHHDQVGLIPGMQGWFNIRKSINVIQHINRTKDKNHMIISIDEEKAFNKIQQHFMLKTLNKLGIDGTYLKIRAIYDKSTANIILNGQKLEAFPLKTGTRQGCPLSPLLFNIVLEVLARAIRQEKEINGIQLGKEEVKLSLFADDMIVYLENSIVSAQNLLQLISNFSKVSGYKINVQISQAFLYTNNRQTESQIMSELPFAIASKRIKYLGIQLTRDVNDLFKEKFKPLLNEIKEDTNKWKNIPCSWAGRINIVKMAILPKVIYRFNTIPMKLPITFFTELEETTLKFKWNQKRA

SEQ ID NO: 39018 - protein, 746 aa, Homo sapiens
  DOMAIN (382)..(425): kw TRANSCRIPTASE REVERSE II ORF2 domain identified by eMATRIX, accession number DM01354T, p-value=1.000e-40, raw score of 9.48
  DOMAIN (246)..(504): Reverse transcriptase domain identified by PFam, accession name rvt, E-value=1e-43, PFam score of 158.7
MSVLFTVSPVPSSVPGGHSTTLLTGSLTGCEGLWQLGFTMGFGRLPGEDSIPRKNCECGNQTSGRQGREHVGQGGLDWGPAYGSGKDVNKATAQAGSKISPAGSGQWKKGWLFSDGKHAMREGGNQKRGLETQEHISEQNIKLALKSFSILRMLLEGTSAFSMGWVITEGLLELMSTGVLISTIWRPEGEWTIRLRVFKAVVMENCPGTFLLDPGPLRRVDVLPLEDEDTRDRFFVRDDWRPLFFSKRCLALPSKTVSHSNLEIQPRLNQEEVESLNRPITGSEIEAIINSLPTKKSPGPDRFTAEFYQRYKEELHINRTSDKNHMIISIDAEKAFDKIQQPFMLKTLNKLGIDGTYLKIIRAIYDKPTANIILNGQKLEALPLKTSTRQGCPLSPLLFNIVLEVLARAIRQEKEIKGIQLGKEEVKLSLFADDMIVYLENPIVLAQNLLKLISNFSKVSGYKINVQKSQAFLNTNNRQTESQIMSELPFTIASKRIKYLGIQLTRDVRDFFKENYKPLLNKIKEDTNKWKNIPCSWIGRINIVKTAILPKVIYRFIAIPIKLPMTFFTEFLKTTVKFIWNQKRAHTAESILSQKNKAGGITLPDFKLYYQATVTKTAWYWYLNRDIDQWNRTEASEVTPHIYNHLIFDKRDKNKKWGNDSLFNKWCWENWLAICRKLKLDPFLTPYTKINSRWIRDLNVRPKTIKTLEENLGNTIQDIGMGKDFMSITPKAMATKAKIDKWDLIK

SEQ ID NO: 39019 - protein, 628 aa, Homo sapiens
  DOMAIN (148)..(193): kw TRANSCRIPTASE REVERSE II ORF2 domain identified by eMATRIX, accession number DM01354N, p-value=1.000e-40, raw score of 13.17
  DOMAIN (235)..(508): Reverse transcriptase domain identified by PFam, accession name rvt, E-value=3.8e-86, PFam score of 299.6
RSMRQKVNKDTQELNSALHQADLIDIYRTLHPKSTEYTFFSAPHHTYTKIDHILGSKALLRKCKRTEIITNYLSDHSAIKLELRIKNLTQNRSTTWKLNNLLLNDYWVHNKMKAEIKMFFETNENKDTTYQNLWDAFKAEIQTTIKEYYKHLYANKLENLEEMDKFLDTYTLPRLNQEEVESLNRPITGAEIVAIINSLPTKKSPGPDGFTAEFYQRYKEELVPFLLKLFQSIEKQGILPNSFYEASTILIPKPGRDTTEKENFRPISLMNIDAKILNKILAKRIQQHIKKLIHHDQVGFIPGMQGWFNIHKSINVIQHINRAKDKNHMIISIDAEKAFDKIQQRFMLKTLNKLGIDGTYFKIIRAIYDKPTANIILNGQKLEAIPLKAGTRQGCPLSPLLFNIVLEVLARVIRQEKEIKGIQLGKEEVKLSLFADDMIVYLENPIVTAQNLLKLISNFSKVSGYKINVQKSQAFLYTNNRQTESQIMSELPFTIASKRIKYLGIQLTRDVKDLFKENYKPLLKEIKEDTNKWKNIPCSWVGRINIMKMAILPKVIYRFNAIPIKLPMTFFTELEKTKFIWNQKSAHITKGILSQKNKAGGITLPDFKLYYKATVTKTAWYWYQNRDI

SEQ ID NO: 39020 - protein, 592 aa, Homo sapiens
  DOMAIN (231)..(276): kw TRANSCRIPTASE REVERSE II ORF2 domain identified by eMATRIX, accession number DM01354N, p-value=1.000e-40, raw score of 13.17
  DOMAIN (247)..(495): Reverse transcriptase domain identified by PFam, accession name rvt, E-value=8.8e-45, PFam score of 162.2
MGDFNTPLSTLDRSTRQKVNKDTQELNSALHQADLIDIYRTLHPKSTEYTFFSAPHHTYSNIDHIVGSKALFSKCKRTEIITNCLSDHSAIKLELRIKKLTQNHSTTWQLNNLLLNDYWVNNEMKAEIKMFFETNENKDTTDQNLWDTFKAVCRGKFMALNAHKRKQERSKMGTLTSQLKELEKQEQTHSKASRRQEITKIRAELKEIETQKTLQKINESRTEIQTTIREYHKHLYANKLENLEEMDKFLDTYILPRLNQEEVESLNRPVTGSEIEAIINSLPTKKSPGPYGFTAEFYQRYKEELHINRTKDKNHMIISIDAEKAFDKIQQPFMLKTLNKLGIDGTYLKILRAIYDKPTANIILNGQKLEAFHLKTGTRQGCPLSPLLFNIVLEVLARAIRQEKEIKGIQLGKEEVKWSLFADDMIVYLENPIVSTQNLFKLISNFSKVSGYKINVQKSQAFLYTNNRQTESQIMSELPFTIASKRIKYLGIQLTRDVKDLFKENYKPLLNEIKEDTNKWKNIPCSRAGRINIVKMAILPKVIYRFSAIPIKLPMTFFTELEKTKFIWNQKRAHIAKSILSQKHKAGGITLP

SEQ ID NO: 39021 - protein, 698 aa, Homo sapiens
  DOMAIN (195)..(240): kw TRANSCRIPTASE REVERSE II ORF2 domain identified by eMATRIX, accession number DM01354N, p-value=1.000e-40, raw score of 13.17
  misc_feature (1)...(698): Xaa = X or * as defined in Table 2
MEITTNCLSEHSAITLQLRIKKLTQNCTTTWKLNYLLLNDYWVNNEMKEEIKMFFETNENKDTTYQNLWDVFKAVCRGKFIALSAHKRKQERSKTDTLTSQLKELEKQEQTHSKASRRQEITKIRAELKEIETQKTLQEINDSRSSFSEKLNKIDRPLARLIKKKREKTQIDAIKNDKGEINTNPTEIQTTIREYYKYLYANKVENLEEMDTFLDTYTLPRLNQEEVESLNRPITGSEIEAIINSLPTKESPGPDGFTAEFYHEGNQERERNKGYSIRKRGSHIVPVCRXHDCLFRKPHHLSSKSHEAVKQLQQSLRIQNQWAKITSMPVHQXQTNREPNHEXTPIHNCYKENKIPRNPTYEGCEGPLQGELQTTAQQNKRGQKEMEKHSMLMDRKNHYHENGHTAHGNLXIQCHPHQATNDFLHRIGKNYVNFHMEPKKSLHCQENPKQREQSWRHHATXLQTILQGYSNQNSMVLVPKQIHRTMEQNRGLRNNTTHLQPSDLXQIXQKQEMGKQFPIXXMVLGKLASYMXKAETGSLPYTLYKNXFKMDXRLKCXTXNHKNPRRKPRQYHSGHRHGQGLHDXNTRSNGNKNQNRQMGSNXTKELLHGKRNYHQSAQTTYRMGENFCNLPIXQRANIQNLQRTXTNLQEKNKQPHQKVGKGHEQTLLKRRHLCSQQTHEKMLIITGHQRNANQNHNE

SEQ ID NO: 39022 - protein, 600 aa, Homo sapiens
  DOMAIN (424)..(471): kw TRANSCRIPTASE REVERSE II ORF2 domain identified by eMATRIX, accession number DM01354V, p-value=1.000e-40, raw score of 12.97
  DOMAIN (154)..(438): Reverse transcriptase domain identified by PFam, accession name rvt, E-value=3.8e-06, PFam score of 17.6
PLSTLDRSSRQKVNKDIQDVISALHEAGLIDIYRTLHPKSTEYTFFSAPHHTYYKIDHIVGSKALLSKCKRTEITTNCLSDDRAIKLELRIKKLTQNYTTTWKLNNLLLSDYWVNNEMKAEIKMFFETNENKDTMYQNLWDTFKAVCRGKFIAVNAYKRKQERSKIHTLTSQLKEPEKQEQTHSKASRRQEITKIRAELKEIDTQKTLQKISVSRSWFSERINKIDRLIARLMKKKREKNQIDAIKNDKGDITIDPTEMQTTIREYYKNLYANKLENLEEMDKFLDTYILPRLNQEEVELPNRPITGSENEAIINSLPTKKSPGPDEFTAKFYQRYKEELQGIRQEKEREDTQLGKEEVKLLLFAEDMIVYLENPIVSAQNLLKLINNFSKVSGYKINVQKSQAFLHTNNRQTESQIMSECPLTIASKRIKYLGIQLTRDVKDLFKENYKPLLNKIKEDTNKWKNIPRSWLGRNNIVKMTILPKVIYRFNTLNFIWNQERARIAKTILSKKNKAGGITLPDFKLYYKATVTKTARYWKQNIKKGSVWPISLKSEKRGHRTRPLWKLCHNDVQGELLKTIQFLFGSPLGHSSLDPSALVCK

SEQ ID NO: 39023 - protein, 580 aa, Homo sapiens
  DOMAIN (50)..(95): kw TRANSCRIPTASE REVERSE II ORF2 domain identified by eMATRIX, accession number DM01354N, p-value=1.000e-40, raw score of 13.17
  DOMAIN (136)..(359): Reverse transcriptase domain identified by PFam, accession name rvt, E-value=1.1e-42, PFam score of 155.2
MVFEKINKIDRRLARLIQKKREKNQIDAIKNDKGDITTNPTEIQTTIREYYKHLYAHKLENLEEMDKFLDTYTLPRLNQEELESPNRPITDSEIEAILESLPTKKGPGPDGFTVKFYQRYKEELVPFCLKLFRSIEKEGLLPNSFYEASIILIPKLGRDTTKKENFRPISLMNIDAKILNKILAKRIQQHIKKLIHHDQVGFIPGMQGWFNIGKSIKVIRHRNTTKYKNHMIISTDAEKAFDKIQQHFMLKTLNNLVLEVLARAIRQEKEIKGIQLGKEEAKLSLFADDMIVYLENSIVSAQNLLKLISNFSKVSGYKINVQKLQAFSYTNNRQTESQIMSELPFAIASKRIKYLGIQLTRDVKDFFKANYKPLLNEIKKGHKQMEEQSMLVDRKNKYCENGHTAQELEKTNLKFIWNQKRDRIAKTILSQKNKAGGITLPDFKLYYKATVTKTAWYWYQNRHIDQWNRTEPSETIPHIYNHLNFDKPDKNKKWGKDSLFNKWCWENWLAICRKLKLDPFLTPYTKINSRWIKHLNVRPKTIKILEENLGNTIQDIGMGKDFMTKTPKAIATKPKLTNGI

SEQ ID NO: 39024 - protein, 419 aa, Homo sapiens
  DOMAIN (37)..(83): kw TRANSCRIPTASE REVERSE II ORF2 domain identified by eMATRIX, accession number DM01354O, p-value=1.000e-40, raw score of 8.73
  DOMAIN (72)..(331): Reverse transcriptase domain identified by PFam, accession name rvt, E-value=1.3e-50, PFam score of 181.6
MDKFLDTYTLPRLNQEEVESLNRPITGSEIEAIINSLPTKKSPGPDGFTAEFYQRYKKELVPFLLKLFQSTEKEGILPNSFYEANIMLIPKPGRDTTKKENFRPISLINIDAKILSKILANQIQQHIKKLIHHDQVGFIPGMQGWFNIRKSINVIQHINRTNDKNHTIISIDAEKAFDKIQQPIVLKTFNKLGIDGTQYHTEWAKTGSIPFENRHKTGMPSLTTPIQHSVEVLARAIRQEKGIKGIQLGKEEVKLSLFADDKIVYLENPIVSAQNLLKLIGNFSKVSGYKINVQKSQAFLYTNNRQTESQIMSELPFTIASKRIKYLGIQLTRDVKDLFKENYKPLLNEIKEDTKKWKNIPCSWVGKINIMKMAILPKKLLTLKALELNPSGVDTPKMLRKSLSFEQQCTEVSQLTLHI

SEQ ID NO: 39025 - protein, 614 aa, Homo sapiens
  DOMAIN (392)..(435): kw TRANSCRIPTASE REVERSE II ORF2 domain identified by eMATRIX, accession number DM01354T, p-value=1.000e-40, raw score of 9.48
  DOMAIN (271)..(514): Reverse transcriptase domain identified by PFam, accession name rvt, E-value=6.6e-31, PFam score of 116.1
VPPTTCGNYGSTIQDEIWMGTQNQTISVSEEMMFQAEEIASAQKMWNQHHITPSKVDHIVGSKALFSKCKRTEIITNYLSDHSAIKLKLRIKKLTQNRSTTWKLNNLLLNDYWVHNEMKAEIKIFFETNENKDTTCQNLWDTFKAMCRGKFITLNAHKRKQQRCKIDTLTSQLKELEKQEQTHSKASRRQEITKIRAELKEIEAQKTLQKINESRSWIFEKINKTDRLLARIIKKKREMNQIDAIKNDKGDITTNPTEIQTTIREYCKHLYANKLENLEEMDKFLNTYTLPRLNQEEIESLNRPITGSEIEAIINSLPTKKSPGPDGFTAEFYQRYKEEMIEKKAFDKSQQPFMLKTLNKLGIDGTFLKIRRAIYDKPTANIILNGQKLEAFPLKTGTRQGCPLSPLLFNIVLEVLAREIRQGKEIKHIQLGKEEVKFSLFADDVIAYLENPIVSAQNLLKLISNFSKVSGYKINVQKLQAFLYTNNRQTESQIMSEFPFTIASKRIKYLGIQLTRDVKDLFKENYKPLLNKIKEDTNKWKNIPCSWIGRINIMKMAILHKVIDRFSAIPFKLPKDFFTELEKTTLKFIWNQKRPRISKTILSKKNKAGGITLR

SEQ ID NO: 39026 - protein, 531 aa, Homo sapiens; identical to SEQ ID NO: 38214
  DOMAIN (236)..(281): kw TRANSCRIPTASE REVERSE II ORF2 domain identified by eMATRIX, accession number DM01354N, p-value=1.000e-40, raw score of 13.17
  misc_feature (1)...(531): Xaa = X or * as defined in Table 2

SEQ ID NO: 39027 - protein, 526 aa, Homo sapiens
  DOMAIN (229)..(274): kw TRANSCRIPTASE REVERSE II ORF2 domain identified by eMATRIX, accession number DM01354N, p-value=1.000e-40, raw score of 13.17
  DOMAIN (272)..(526): Reverse transcriptase domain identified by PFam, accession name rvt, E-value=2.7e-45, PFam score of 163.9
MGDFNTTLSTLERSARQKVNKDIQELNSGLHQADLIDIYKTVKPKSTEYTFFSGPHRTYSKIDHIVGSKALLSKRKRTEIITNCLSDHSAIKLELRIKKLTQNRSTTWKLNNLFLNDYWVHNKMKAEIKMFFETNENKDTTYQTLWDTFKAVCRGKFIALNAHKRKQERSKIDTLTSQLKELEKQEQTHSKVSRRQEITKIRAELKEIETQKTLQKINESKIQTTIREYYKHLYANKLENLEEMDKFLDTYTLPRLNQEEVESLNRPITGSEIEAIINSLPTKKSPGPDGFTAEFYQRYKEERPISLMNIDAKILNKILANGIQHDIKKLIHDDQVGFIPGMQGWFNIRKSINVIQHVNRTRDKNHMIISIDAEKAFDKIQQPFMLKTLNKLGIDGMYLKIIRAMYDKPTANIILNGQRLEAFPLKTGTRQGCPLSPLLFNIVLEVLARAIGQEKEIKGIQLGKEEVKLSLSADDMIVYLEKPIISAQNLFKLISNFSKVSGYKINVQKSQAFLYTNNRQTESQIM

SEQ ID NO: 39028 - protein, 993 aa, Homo sapiens
  DOMAIN (472)..(527): kw TRANSCRIPTASE REVERSE II ORF2 domain identified by eMATRIX, accession number DM01354Q, p-value=1.000e-40, raw score of 9.23
  DOMAIN (427)..(650): Reverse transcriptase domain identified by PFam, accession name rvt, E-value=2.4e-40, PFam score of 147.5
MGNYNLYPIITILSHEVEQAMSLCVHPKTIVSQDEVESEKWYLSTDFPSTSIKTEPITDEPPPGLVPSVTLTITAISTPLEKEEPPLEMNTGVDSSCQTIIPKIKLEPHEVDQFLNFSPKEAPVDHLHLPPTPPSSHGSDSEGSLSPNPRLHPFSLPQTHSPSRAAPRAPSALSSSPLLTAPHKLQGSGPLVLTEEEKRTLIAEGYPIPTKLPLSKSEEKALKKIRRKIKNKISAQESRRKKKEYMDSLEKKVESCSTENLELRKKVEVLENTNRTLLQQLQKLQTLVMGKVSRTCKLAGTQTGTCLMVVVLCFAVAFGSFFQGYGPYPSATKMALPSQHSLQEPYTASVENLEEMDKFLDKSTLPRLNQEEDESLNRQVTGSEIEAIINSLPTKKSPGPDGFTDKFCQRYKEELVPFLLKLFQSTEKEGILLNSFYEAGIILIPKPGRDTTKKENFRPISLMSINAKILNKILANRILQHIKKLIHHDQVGFILGMQGWFNICKSINIIHCINRTNDKNHMIISIDAEKAFNKIQQPFMLKTLNKLVLEVLAKAIRQEKEIKGIQLGKEEVKLSLFADDIIVYLENPIVSAPNLLKLISNFRKVSGYKINVQKSQAFLYTNNRQTESQIMSELPFTIATKRIKYQGIQLTRDVKDLFQENYKPVLNEIKEDTNKWKNIPCSWLGRMNIVKMAILPKVIYRFNAIPIKLSMTFLTELEKTTLKFVWKQKGAHIAKTILSKNNKAGGIMLPDFKLYYKATVTKTAWYWYQNREIDQWNRTEPSEIIPHIYNHLIFDKPDKNKKWGKDSLFNKWCWEHWLAICRKLKLDPFLTPYTKINSRWIKDLNVRPKTIKTLAGHLGNTIRDIGLGKDFMTKTPKAMATKAKIDKWDLIKLKSFCTAKETAIRVNRQPTEWEKIFTIYPSDTGLIPRIYKELKQIYKRKQTAHQELGKGYEQMFLKRRHLCSQQTHEKMLIITGHQRNANQNHNEIPAHTS

SEQ ID NO: 39029 - protein, 179 aa, Homo sapiens
  DOMAIN (66)..(113): kw TRANSCRIPTASE REVERSE II ORF2 domain identified by eMATRIX, accession number DM01354V, p-value=1.000e-40, raw score of 12.97
SIAYQPKSPGPDGFTAEFYQRHKEELLISNFSKVSGYKIDVQKSQAFLYTNNRQTESQILSEFPFTIASKRVGYLGIQLTRDVKDLFKENCKPLLNEIKKDTKKWKNIPCSWVGRINIMKMAILPKVIYRFNAIPIKLPMTFFTELEKTTLRFIWNQKRDHIAKSILSQKNKAGSITLP

SEQ ID NO: 39030 - protein, 608 aa, Homo sapiens
  DOMAIN (359)..(384): 7 kw REVERSE TRANSCRIPTASE RNA POLYMERASE domain identified by eMATRIX, accession number DM00895E, p-value=3.333e-11, raw score of 15.72
  DOMAIN (330)..(498): Reverse transcriptase domain identified by PFam, accession name rvt, E-value=3.8e-19, PFam score of 77.0
MGKKQSRKTGNFKKQRHLSFSKGIAVLHQQWNKAGQRLTFDELREGFRPSNYSKLQKEIQTKGKEVENFEKNSDECITRITNTKKCLKELMELKAKARELREECRSLRSRCDQLEERVSGMEDEANEMKREGKFGEKRIKRNEQSLQEIWDYVKRPNLRLIGVPESDGENGTKLKNTLQDIIQENFPNLARQANIQIQEIQRTPQRYSSRRATPRHIIVRFTKVEGKNIKGSQRERAEIQTTIREYYKHLYSNKLENLEEMDKFLDTYTLPSLNQEEVESLNRTITGSEIVAIINSLPTKKSPGPDGFTAEFYQRYKEEVVPFLLKLFQSIEKEVILPNSFYEARIILIPKPGRDTTKKENFRPISLMNIDAKILNKILANRIQQHIKKLIHHDQVGFIPGMAIRQEKERKGIQLGKEEVKLSLFADDVIVYLENPIVSAQNLLKLISNFSKVSGYKINVQKSQAFLYTNNRQRESQIMSELPFTIASKRIKWLGIQLTRDVKDLIKENYKPLLNEIKEDINKWKNIPCSWVGRISIVKMAILPKVIYRFSAIPIKLPMTFFTELEKTTFKFLWNQKRARIAKSILSQKNKAGGITLPDFKLYYKATV

SEQ ID NO: 39031 - protein, 517 aa, Homo sapiens
  DOMAIN (37)..(83): kw TRANSCRIPTASE REVERSE II ORF2 domain identified by eMATRIX, accession number DM01354O, p-value=1.000e-40, raw score of 8.73
  DOMAIN (70)..(345): Reverse transcriptase domain identified by PFam, accession name rvt, E-value=1.7e-76, PFam score of 267.6
MEKFLDTYTLPRLNQEELESLNRPITGSEIEAIINSLPTKKSPGPDGFRAKFYQRYNEELVPFLLKIFQSIEKEGILPNSFYEASIILIPKPGRDTTKKDNFRPISLMNIAVKILNKILANQIQKHIKKFIHHDQVGFIPGMQGWFNIRKSINVIQHINRTKDKSHMIISIDEEKAFDKIHLPFMLKTLSKLGIDGMYLKIIRAIYDKPTANIILNGQKLEAFPLKTGTRQRCPLSPLLCNIVLEVLARAIRQEKEIKGIQLGKEEVKLSLFADDMIVYLENPTVSAQNLLKLISNFSKVSGYKINVQKSQAFLYTNNRQTESQIMSELPFTIASKRIKYLGIQLTRDVKELFKENYKPLLNKIKEDTNKWKNIPSSWMGRNIMKMAILPKVTWMKLEIIVLSKLPQEQKTKHRMFSLTGVFIEGRALQNKSETSQSRHPGATHSLPEYTIPGSSPSNFYWFTLGLKEEVTSGWKREKKKRKREGGKEGRKEGRKEGRKEGKKEGRKKGRKEVPLIP

SEQ ID NO: 39032 - protein, 661 aa, Homo sapiens; identical to SEQ ID NO: 34819
  DOMAIN (235)..(260): 7 kw REVERSE TRANSCRIPTASE RNA POLYMERASE domain identified by eMATRIX, accession number DM00895E, p-value=3.333e-11, raw score of 15.72
  DOMAIN (206)..(481): Reverse transcriptase domain identified by PFam, accession name rvt, E-value=4.6e-82, PFam score of 286.0

SEQ ID NO: 39033 - protein, 812 aa, Homo sapiens
  DOMAIN (100)..(147): kw TRANSCRIPTASE REVERSE II ORF2 domain identified by eMATRIX, accession number DM01354V, p-value=1.000e-40, raw score of 12.97
MDKFLDTYTLTRLNQEEVESLNRPIIGSEIEAIINSLPTKKSPGPDGFTAEFYQRYKEELLIGNFSKVSGYKINVQKSQAFLYTNNRQTESQIVSELPLTIASKRIKYLGIQLTRDVKDLCKENYKPLLNEIKEDTNKRKNIPCSWVGRINIVKMAILPKISCSSSAWSLLEILILRPLPPDLLEQCLQVNKIYECFIRKLKMRPGISTINASFHWLEWRRPMGLQYESSCFRNGEYIDTGQSEHLSLNYLRVSYVTGNRMKLRTLTVSVTALKDGVSGVCSFRCSDVSGVSSFQWVRGLADFRSEAADLCNWFPHLRKGKGRRRGAWLALSKMEWQIHMALEHSGPANLRNSCFSARYPQHTPATLSSPEAIPQKPAVVSEKMKVVLLLLPKPFIFMESSEFSTSKDGWRSKRKAMGAIAERKSKNEQNGDGKKTLEPFPAESNGEEETRVLNYFPSHLYRVRTGAIREYGSIATLQKAGNTKPEGAQFIISHYQTSKCKKKGPSPVVVIPSTGITYFSTAGALGSEQGKGRHRDGMVEAEPGRAWVSGSGVYYSPNDKTFCAELHADSAQTAARGWMQPLLAFSGFYELTTSPCMEMGQTSLWALVILYVRRLTLSYCYLVLASSGIQRASYPKRRLQKITAVKANICDCCLYSRCGTKAFISAVSFELGLLRLKVAQSCGGVSECEVVQTSYLFAYERNEIDIIHHQNANEKVLAWEDHRCFVFQGVVISRGKKEVDSGWALREHCPFPTPLTQSWIPVSVEIGWEMRVHQGKTSVYIAEDEDDGDGDGDGAEVVGDGFDSYKTECEKF

SEQ ID NO: 39034 - protein, 1046 aa, Homo sapiens
  DOMAIN (388)..(413): 7 kw REVERSE TRANSCRIPTASE RNA POLYMERASE domain identified by eMATRIX, accession number DM00895E, p-value=3.333e-11, raw score of 15.72
  DOMAIN (359)..(634): Reverse transcriptase domain identified by PFam, accession name rvt, E-value=6e-86, PFam score of 298.9
MVKGSIQQEELTILNIYAPNTGAPRFIKQVLSDLQRDLDSHTLIMGDFNTPLSTLDRSTRQKVNKDTQELNSALHQADLIDIYRTLHPKSTEYTFFSAPHHTYSKIDHIVGSKALLSKCKRTEIITNYLSDHSAIKLELRIKNLTQSRSTTWKLNNLLLNDYWVHNEMKAEIKMFFETNENKDTTYQNLWDAFKAVCRGKFIALNAYKRKQERSKIDTLTSQLKELEKQEINKIDRPLARLIKKKREKNQIDTIKNDKGDITTDPTEIQTTIREYYKHLYTNKLENLEEMDTFLDTYTLPRLNQEEVESLNRPITGSEIVAIINSLPTKKSPGPDGFTAEFYQRYKEELVPFLLKLFQSIEKEGILPNSFYEASIILIPKPGRDTTEKENFRPISLMNIDAKILNKILANRIQQHIKKLIHHDQVGFIPGMQGWFNIRKSINVIQHINRAKDKNHMIISIDAEKAFDKIQQPFMLKTLNKLGIDGMYFKIIRAIYDKPTANIILNGQKLEAFPLKTGTTQGCPLSPLLFNIVLEVLARAIRQEKEIKGIQLGKEEVKLSLFADDMIVYLENPIVSAQNLLKLISNFSKVSGYKINVQKSQAFLYTNNRQTESQIMSELPFTIASKTIKYLGIQLTRDVKDLFKENYKPLLKEIKEDTNKWKNIPCSWVGRINIVKMAILPKVIYRFNAIPIKLPMTFFTELEKTTLKFIWNQKRARIAKSILSQKNKAGGITLPDFKLYYKATVTKTAWYWYQNRDIDQWNRTEPSEIMPHIYNYLIFDKPEKNKQWGKDSLFNKWCWENWLAICRKLKLDPFLTPYTKINPRWIKDLNVRPKTIKTLEENLGITFQDIGVGKDFMSKTPKAMATKAKIDKWDLIKLKSFCTAKETTMRVNRQPTTWEKIFATYASDKGLISRIYNELKQIYKKKTNNPIKKWAKDMNRHFSKEDIYAAKKHMKKCSSSLAIREMQIKTTMRYHLTPVRMAIIKKSGKNRRTATLSLLPAIRHEREAFHQREEEKEGGRILPLQNRVILCFCSLCPHLSPASKPKH

SEQ ID NO: 39035 - protein, 1185 aa, Homo sapiens
  DOMAIN (800)..(825): 7 kw REVERSE TRANSCRIPTASE RNA POLYMERASE domain identified by eMATRIX, accession number DM00895E, p-value=4.103e-10, raw score of 15.72
  DOMAIN (157)..(1046): Reverse transcriptase domain identified by PFam, accession name rvt, E-value=4e-129, PFam score of 442.4
MFFETNENKDTTYQNLWDTFKAVCRGKFIALNAHKRKQERSKIDTLTSQLKELEKQEQTHSKASRRQEITKIRAELKEIEKQKTLQKINESRSWFFEKINKIDRPLARLIKKKREKNQIDTIKNDKDITTDPTEIQTTIREYYKHLYANKLENLEEMDKFLDTYTLPRLNQEEVESLNRPITGSEIEAIINSLPTKKSAGPDGFTAEFYQRYKEELHINRTKDKNHMIISTDAEKAFDKIQQLFMLKTLNKLGIDGTYLKIKRAIYDKPTANIILNGQKLEAYPLNTGTRQGCPLSPLLFNIVWEVLARAIRQEKEIKGIQLGKEEVKLSLFADDVIVYLENPIISAQNLLKLISNFSKVSGYKINVQKSQAFLYTNNRQTESQIMSELPFTIASKRIKYLGIQLTRDVKDLFKENNKSLLNEIKQDTNKWKNLPCSWVGRINIVKMAILPKVIYRFNAIPIKLPMTFFTELEKPTLKFIWNQKRARIAKSILSQKNKAGGITIPDFKLYYKDTVTKTAWYWYQNRDLDQWNRTEPSEIMPHIYNHLIFDKPDKSKEWGYDSLFNKWCWENWLAICRKLKLDPFLTLYTKINSRWIKDLNVRHKTIKALEENLGNTIQDIDMGKDFMSKTPKAMAAKAKIDKWDLIKLNSFCTAKETTIRVNRQPTEWEKIFAIYSSDKGLISRIYNELKQIYKKKTNNPIKKWTKDMNRHFSKEDFYAAQRHMKKCSSSLAIREMQIKTTYHAGPDGFTAEFYQRYKEELVPFLLKLFQSIEKEGILPNSFYEASIILIPKPGRDTTKKENFRPISLMNIDAKILNKILAKRIQQHIKKLIHHDQVGFIPGMQGWFNICKSINVIQHINRTKDKNHMIISIDAEKAFDKIQQLFMLKTLNKLGIDGTYLKIIRAIYDKPTANIILNGQKLEAFPLKTGTRQGCPLSPLLFNIVWEVLARAMRQEKEIKGIQLGKEEVKLSLFADDMIVYLENPIVSAQNLLKLISNFSKVSGYKINVQKSQAFLYTNNRQTESQIMSELPFTTASKRIKYLGIQLTRDEKDLFKENYKPLLNEIRGYKQMEEHSMLTGRKNQYRENAHTAQAKANHRPATSKKVYLITAMKPLSSPIPEGLGLENRTGKEIKSREWTTMLRLAVAAELTFRDWKERSRRTLDTHETKGIPLSKSRAGILVIDIR

SEQ ID NO: 39036 - protein, 710 aa, Homo sapiens
  DOMAIN (433)..(480): kw TRANSCRIPTASE REVERSE II ORF2 domain identified by eMATRIX, accession number DM01354V, p-value=1.000e-40, raw score of 12.97
  DOMAIN (1)..(184): AP endonuclease family 1 domain identified by PFam, accession name AP_endonucleas1, E-value=8.3e-28, PFam score of 105.8
MEEDLPSKWKIKKQTKKAGVVILVSDKTDFKPTKIKRDKEGHYIMVKGSIQQEELTVLNIYAPNTGAPRFMKQVLRDLQRDLDPHTTIMGDFNTPLSTLDRSARQKVNKDIQELNSALHQADLINIYRILHPKSTEYTFISAPHRTYSKIDHIVGRKALLRKYKRTEIITDCLSDHSAIKLELRIKKLTQNSSTTWKLNNLLLNDYWIHNKTKAEIKMCFETSENKDTTYQNLWDTCKAVCREKFIALNAHKRKQERSKIDTLTSQLKELRSKSRHIQKLAEENLEEMDKYLDTYTLPRLNQEEFESLNRPITGSEIEAIINSLPTKKSSGPDGFTAKFYQSIVLEVLARAIRQEKEIKGIQLGKEEVKLSLFADDMIVYLENPIISAQNLLKLLSNFSKVSGYKINVQKSQAVLYTNNKQTESQIMSEPSFTIASKRIKYLGIQRTRDVKDLFKENYKPLLNKIKEDTNKWKNTPCSWIGRINIMKMAIVPKVIYRFNAIPIKLPMTFFTELEKTTLKFIWNQKRARIAKSILSQKNKAGGITLPDFKLYYKATVTKTAWYWYQNRHIDQWKRTEASEIIPHIYDHLVFDKPDKNKKWGKDSLFNKWCWENWLAICRKLKLDPFLTPYTKINSRWIKDLNVRPKTIKTLEENLGNTIQDIGMSKDFMSKTPKAMATKAKIDKWDLIKLKSFCTAKETTIRVNRQPTEWE

SEQ ID NO: 39037 - protein, 1017 aa, Homo sapiens
  DOMAIN (154)..(199): kw TRANSCRIPTASE REVERSE II ORF2 domain identified by eMATRIX, accession number DM01354N, p-value=1.000e-40, raw score of 13.17
  DOMAIN (379)..(581): Reverse transcriptase domain identified by PFam, accession name rvt, E-value=2.9e-05, PFam score of 5.2
MGDFNTALSTLDRSMRQKVNKDIQELNSALHQADLTDIYGTLHPKSTECTFFSAPHHTYSKIVHIVGSKALLSKWKRREIITNCLSDHSAIKLELRIKKLNQNCSTTWKLNNLLLNNYWTNKKKREKNQIDAIKNDKGDITTNPTEIQTTIREYYKHLYANKLENLEEMDKFLDTYTLPRLNQEEVESLNRPITGSEIEAIINSLPTKKSPGPDGFTAEFYQRMNYISFKSTWKIIKNAYSLAHSRELRDGGQSQKICEQFYILFLTPSPDMSDMLKNIQWRNPTHTVLKRLEKKNLNRIQSSMMKMHSERKASVHLLETDNCASAMHHCFVLFVAKPVAHYEVGIDFMIAKQMHRDILSRAVDSYLLNRIRSNVQNNMLKQPFTKASHNPLPLSFSRQPASGGLQIATCGTNVFLYIMHVSPSRYESNSKNLNVYHGKHLRHPTQSTAGHPKVKFTLAVAVLQGSGTVCISETTPVLEVLASAIRQEKEIKGIQLGKEEVKLSLFADDMIVYLENPIVSAQNLLKLISNFSKVSGYKINVQKSQAFLYTNNRQTESQSMGELPFTIASKRIKYLGIQLTRDVKDLFKENYKPLLKEIKEDTNKWKNIPCSWVGRINIVKMAILPKVIYRFNAIPIKLPMTFFTELEKTTLKFIWNQKRARIAKSILSQKNKAGGITLPDFKLYYKATVTKTAWYWYQNRDIDQWNRTEPSEIMPHTYNYLIFDKPEKNKQWGKDSLFNKWCWENWLAICRKLKLDPFLTPYRKINSRWIKDLNVRPKTIKTLEENLGITIQDIGVGKDFMSKTPKAMATKAKIDKWDLIKLKSFCTAKESTIRVNRQPTTWEKIFTTYSSDKGLISRIYKELKQIYKKKTNNPIKKWVKDMNRHFSKEDIYAAKKHMKKCSSSLAIREMQIKTTMRYHLTPTQKEEGSTPQGQQEEGESSRTCTLNWRLGRRQKEIDMWVEVFTGVRRVTQGTVVREGCGEVVLRSGMPVFRLQWWQQGADCACPWAQGGIHWYQC

SEQ ID NO: 39038 - protein, 902 aa, Homo sapiens
  DOMAIN (272)..(317): kw TRANSCRIPTASE REVERSE II ORF2 domain identified by eMATRIX, accession number DM01354N, p-value=1.000e-40, raw score of 13.17
  DOMAIN (287)..(485): Reverse transcriptase domain identified by PFam, accession name rvt, E-value=3.6e-09, PFam score of 43.9
MGDFNTPLSTLDRSMRQKVKKDTQELNSALHQADLIDIYRTLHPKSTEYTFFSAPHHTYSKIDHILGSKALLSKCKRTEIITNYLSDGSAIKLELRIKNLTQNRSTTWKLNNLLLNDYWVPNEMKAEIKMFFETNENKDTTYQNLWDAFKAVCRGKFIALNAHKRKQERSKIDTLTSQLKELEKQEQTHSKASRRQEITKIRAELKEIETQKTLQKINESRSWFFERINKIDRPLARLIKKKREKNQIDTIKNDKGDITTNPTEIQTTIREYYKHLYANKLENLEEMDKFLDTYTLPRLNQEEVESLNRPITGSEIVAIINSLPTKKSPGPDGFTAKFYQRYKEELHINRAKDKNHMIISIDAEKAFDKIQQRFMLKTLNKLVLEVLARAIRQEKEIKGIQLGKEEVKFSLFADDMIVYLENPIVSAQNLLKLISNFSKVSGYKINVQKSQAFLYTNNRQTESQIMSELPFIIASKRIKYLGIQLTRDVKDLFKENYKPLLKEIKEDTNKCKNIPCSWVGRINIVKMAILPKVIYRFNAIPIKLPMPFFTELEKTTLKFIWNQKRARIAKSILSQKNKAGGIMLPDFKPYYKATVTKTAWYWYQKRDIDQWNRTEPSEITPHIYNYLIFDKPEKNKQWGKDSLFNKWCWENWLAICRKLKLDPFLTPYTKINSRWIKDLNVRPKTIKTLEENLGNTIQDIGMGKDFMSKTPKAMATKDKIDKWDLIKLKSFCTAKETTIRVNRQPTKWEKIFTTYSSDKGLISRIYNELKQIYKKKTNNPIKKWAKDMNRHFSKEDIYTAKRHMKKCSSSLAIREIQIKPTMRYYLTPVRMAIIKKSGNNRITIVLLPGSLIVRSFHVTLNAILLHPGLTLFSPSAGRRDIPRVAFSYLAFSAQPSHNTPVN

SEQ ID NO: 39039 - protein, 857 aa, Homo sapiens
  DOMAIN (123)..(164): kw TRANSCRIPTASE REVERSE II ORF2 domain identified by eMATRIX, accession number DM01354I, p-value=1.000e-40, raw score of 15.55
  DOMAIN (369)..(644): Reverse transcriptase domain identified by PFam, accession name rvt, E-value=4.2e-89, PFam score of 309.4
MSSEWEWLRCSEVKGQRDVRPGCLGWDFRVYIVEDTQDEDRTWSVKEACELVLRVQEMIITRVVDAAPHHTYSKIDHIVGSKALLSKCKRTEIITNCLSDHSAIKLELRIKNLTQSRSTTWKLNNLLLNDYWVHNEMKAEIKMFFETNENKDTTYQNLWDAFKAVCRGKFIALNAYKRKQERSKIDTLTSQLKELEKQEQTHSKASRRQEITKIRAELKEIETQKTLQKINESRSWFFERINKIDRPLARLIKKKREKNQIDAIKNDKGDITTDPTEIQTTIREYYKQLYANKLENLEEMDTFLDTYTLPRLNQEEVESLNRPITGSEIVAIINSLPTKKSPGPDGFTAEFYQRYKEELVPFLLKLFQSIEKEGILPNSFYEASIILIPKPGRDTTKKENFRPISLMNIDAKILNKILANRIQQHIKKLIHHDQVGFIPGMQGWFNIRKSINVIQHINRAKDKNHMIISIDAEKAFDKIQQPFMLKTLNKLGIDGTYVKIIRAIYDKPTANIILNGQKLEAFPLKTGTRQGCPLSPLLFNIVLEVLARAIRQEKEIKGIQLGKEEVKLSLFADDMIVYLENPIVSAQNLLKLISNFSKVSGYKINVQKSQAFLYTNNRQTESQIMGELPFTIASKRIKYLGIQLTRDVKDLFKENYKPLLKEIKEDTNKWKNIPCSWVGRINIVKMAILPKVIYRFNAIPIKLPMTFFTELEKTTLKFIWNQKRARIAKSILSQKNKAGGITLPDFKLYYKATVTKTAWYWYQNRDIDQWNRTEPSEITPHIYNYLIFDKPEKMSIIDTGGWYEAPVSSFFKEGLCRTGTENQVNRQPPAASPFKVYVSCTGSLHPRPHYFLEHPYP

SEQ ID NO: 39040 - protein, 654 aa, Homo sapiens
  DOMAIN (207)..(252): kw TRANSCRIPTASE REVERSE II ORF2 domain identified by eMATRIX, accession number DM01354N, p-value=1.000e-40, raw score of 13.17
  DOMAIN (291)..(566): Reverse transcriptase domain identified by PFam, accession name rvt, E-value=5.8e-83, PFam score of 289.0
  misc_feature (1)...(654): Xaa = X or * as defined in Table 2
VPKTVVSSWNRKAAEYGKKAKSETFRLLHAKNIIRPQLKFREKIDNSNTPFLPKIFIKPNAQKPLPQALSKERRERPQDRPEDLDVPPALADFIHQQRTQQVEQDMFAHPYQYELNHFTPADAVLQKPQPQHHSYRSFLGLTCLMQISTRTEDFIIDTLELRSDMYILNESLTDPAIVKKNQIDAIKNDKGDITTDPTEIQTTIRDYYKHLYANKLENLEEMDKFLDTYTLPRLNQKEIESLNRPITGAEIVAIINSLPTKKSLGPDGFTAEFYQRYKEELVPFLLKLFQSIEKEGILPNSFYEASIILIPKPGRDTTKKENFRPISLMNIDAKILNKILANRIQQHIKKLIHHDQVGFIPGMQGWFNIRKSINVMQRINRTKDKNHVIISIDAEKAFDKIQQRFMLKTLNKLGIDGTYLKIIRAIYDKPTANIILNGQKLEAFPLKTGTRQGGPLSPLLFNIVLEVLARAIRQEKEIKGIQLGKEEVKLSLFADDMIVYLENPIVSAQNLLKLISNFSKVSGYKINIQKSQAFLYTNNRQTESQIMSELPFTIASKRIKYLGIQLTRDVKDLFKENYKPLLNEIKEDTNGRTFHAHGVGSEMPYKSQVLELGTPKACLVLYPPVGILVPETRKSQEAHPKPLMYLGVVAVYSX

SEQ ID NO: 39041 - protein, 101 aa, Homo sapiens
ATQRTGPCASWWPSAGAGSVPLITGPPAESRKPRWSSCWGWSRAWCWSTRAPITPTRCMSWRRCCAGQALRSGSGGWRSAWQPGCRGGHGAPGCRPGCGSG

SEQ ID NO: 39042 - protein, 148 aa, Homo sapiens
  misc_feature (1)...(148): Xaa = X or * as defined in Table 2
SSWQAPAPVLGSSWASKKXMKKKYAAQQIEKQKSPXCKSIKCSPLRSASYAQLLSFSLSSCLCFSTCHSTLAWYCLXSSWQAPAPVLGSSWASKKRSLLWKEPSRSLPSFSITARSXACCCLCSSTEPQLLKAQYLLSHSRTRSFRLQ

SEQ ID NO: 39043 - protein, 1401 aa, Homo sapiens
  DOMAIN (203)..(244): kw TRANSCRIPTASE REVERSE II ORF2 domain identified by eMATRIX, accession number DM01354I, p-value=1.000e-40, raw score of 15.55
  DOMAIN (449)..(724): Reverse transcriptase domain identified by PFam, accession name rvt, E-value=1.8e-86, PFam score of 300.7
DTHRLKIKGWRKIYQANGKQKKAGVAILVSDKTEFKPTKIKRDKEGHYIMVKGSIQQEELTILNIYAPNTGAPRFTKQVLRDLQRDLDSNTIITGDFNTPLSTLDRSMRQKVNKDIQELNSALHQADLIDIYRTLHPKSTENTFFSAPHHTYSKIDHIVGSKALLSKCKRKEIITNCLSDHSAIKLELRIKKLPQNCSTIWKLNNLLLNDYWVHNEMKAEIKMLFETNENKDTTYQNLWDTLKAVCRGKFIALNAHGRKQERSKIDTLTSQLKELAKQEQTHSKASRRQEITKIRAELKEIETQKTLQKINESRSWFFERINKIDRPLARLIKKKREKNQIDTIKNDKGDITTDPTEIQTTIREYYKHLYANKLENLEEMDTFLDTYTLPRLNQEEVESLNRPITGSEIVAIINSLPTKKSPGPDGFTAEFYQRYKEELVPFLLKLFQSIGKEGILPNSFYEASIILTPKPGRDTTKKENFRPISLMNIDAKILNKILANRIQQHIKKLIHHDQVGFIPGMQGWFNIRKSINVIQHINRAKDKNHMIISIDAEKAFDKIQQPFMLKTLNKLGIDGTYFKIIRAIYDKPTANIILNGQKLEAFPLKTGTRQGCPLSPLLFNIVLEVLARAIRQEKEIKGIQLGKEEVKLSLFADDMIVYLENPIVSAQNLLKLISNFSKVSGYKINVQKSQAFLYTNNRQTESQIMGELPFTIASKRIKYLGIQLTRDVKDLFKETYKPLLNEIKEDTNKWKNIPCSWVGRINIVKMAILPKVIYRFNAIPIKLPMTFFTELEKTTLKFIWNQKRARIAKSLLSQKNKAGGITLPDFKLYYKATVTKTAWYWYQNRDIDQWNRTEPSEIMPPIYNYLIFDKPEKNKQWGKDSLFNKWCWENWLAICRKLKLDPFLTPYTKINSRWIKDLNVRPKTIKTLEENLGITIQDIGVGKDFMSKTPKAMATKANIDKWDLIKLKSFCTAKETTIRVNRQPTTWEKIFATYSSDKGLISRIYNELKQIYKKKTNNPIKKWAKDMNRHFSKEDIYAAKKHMKKCSSSLAIREMQIKTTMRYHLTPVRMAIIKKSGNNSSREAAPKPPRRRRRRSRILSRLLAKSGRPEAAANSSQLLPIRWAKQHASCASLLGAEPVSEGLGRLHSLALHTTYVEARPARGAQRKPAPGEALAGSQTRTQTWVRVGDLPVISDLPIALNLRKPCHLKPPNGAYQSVLQSVREAERGITEPPDIGCNLMGRSDSRNSTMAIDVPAHALCRSLGNLFKALPPPESIMTSVAGTKVRIIRKHDHSSAPAYARYPAQRRSRFLSPPETHQPQAHIYTKFFRRPSLLLDILPLCNTLINPTWFSHSAAMNIHGIKRNESMSFAGAWMELEVIILSKLTQEQKTKYRKFSLISGH

SEQ ID NO: 39044 - protein, 923 aa, Homo sapiens
  DOMAIN (246)..(291): kw TRANSCRIPTASE REVERSE II ORF2 domain identified by eMATRIX, accession number DM01354N, p-value=1.000e-40, raw score of 13.17
  DOMAIN (330)..(606): Reverse transcriptase domain identified by PFam, accession name rvt, E-value=8.1e-86, PFam score of 298.5
MGKKQNRKTGNSKTQSASPPPKERSSSPATEQSWMENDFDELREEGFRRSNYSELREDIQTKGKEVQNFEKNLEECITRITNTEKCLKELMELKTKARELREECRSLRSRCDQLEERVSAMEDEMNEMKREGKFREKRIKRNEQSLQEIWDYVKRPNLRLIGVPESDVENGTKLENTLQDIIQENFPNLARQANVQIQEIQRTPQRYSSRRATPRHIIVRFTKVEMKEKMLRAAREKEIQTTIREYYKHLYANKLENLEEMDTFLDTYTLPRLNQEEVESLNRPITGSEIVAIINSLPTKKSPGPDGFTAEFYQRYKEELVPFLLKLFQSIEKEGILPNSFYEASIILIPKPGRDTTKKENFRPISLMNIDAKILNKILANRIQQHIKKLIHHDQVGFIPGMQGWFNIRKSINVIQHINRAKDKNHMIISIDAEKAFDKIQQPFMLKTLNKLGIDGTYFKIIRAIYDKPTANIILNGQKLEAFPLKTGTRQGCPLSPLLFNIVLEVLARAIRQEKEIKGIQLGKEEVKLSLFADDMIVYLENPIVSAQNLLKLISNFSKVSGYKINVQKSQAFLYTNNRQTESQIMSELPFTIASKRIKYLGIQLTRDVKDLFKENYKPLLKEIKEDTNKWKNIPCSWVGRINIVKMAILPKNWKKTTLKFIWNQKGARIAKSILSQKNKAGGITLPDFKLYYKATVTKTAWYWYQNRDIDQWNRTEPSEITPHIYNYLIFDKPEKNKQWGKDSLFNKWCWENWLAICRKLKLDPFLTPYTKINSRWIKDLNIRPKAIKALEENLGNTIQDIGMGKDFMSKTPKAMATKDKIDKWDLIKLKSFCTAKETTIRVNRQPTKWETIFVTYSSDKGLISRSCKELKQIYKKKTNNPIKKWAKDMNRHFSKEDIYAANRHMKKCSSSLAIREMQIKTT

SEQ ID NO: 39045 - protein, 821 aa, Homo sapiens
  DOMAIN (290)..(335): kw TRANSCRIPTASE REVERSE II ORF2 domain identified by eMATRIX, accession number DM01354N, p-value=1.000e-40, raw score of 13.17
  DOMAIN (375)..(651): Reverse transcriptase domain identified by PFam, accession name rvt, E-value=5.9e-83, PFam score of 289.0
FKPTKIKREKEGHYIMVKGSIQQEELTILKIYAPNTGAPRFTKQVLSDLQRDLDSHTLIMGDFNTPLSTLDTSTRQKVKKDTQELNSALHQADLIDIYRALHPKSTEYTFFSAPHHTYSKIDHIVGSKALLSKCKRTEIITNYLSDHSAIKLELRIKNLTQNHSTTWKLNNLLLNDYWVHNEVKAEIKVFFETKENKDTTYQNLWDAFKAVCRGKFIALNAHKRKQERSKIDTLTSQLKELEKQEQTHSKASRRQEITNIRAELKEIETQKTLQKINESRTEIQTTIREYYKHLYANKLENLEEMDKFLDTYTLPRLNQEEVESLNRPITGSEIVAIINSLPTKKIPGPDGFTAEFYQRYKEELVPFLLKLFQSIEKEGILPNSFYEASIILIPKPGRDTTKKENFRPISLMNIDAKILNKILAKRIQQHIKKLIPHDQVGFIPGMQGWFNIRKSINVIQHINRAKDKNHMIISIDAEKAFDKIQQPFMLKTLNKLGIDGTYFKIIRAIYDKPTANIILNGQKLEAFPLKTGTRQGCPLSPLLFNIVLEVLARAIRQEKEIKGIQLGKEEVKLSLFADDMIIYLENPIVSAQNLLKLISNFSKVSGYKINVQKSQAFLYTNNRQTENQIMSELPFPIASKRIKYLGIQLTRDVKDLFKENYKPLLNEIKEDTNKWKNIPCSWVGRINIVKMAILPKLIGNCSKISGYKINVQKSQAFLYTNNRQTESQIMSELAFTIASKKIKYLGIQLTRDVKDLFKENYKPLLNEIKRGHKQMEEHSMLMGRKNQYCENGHTAQADRQLQQNLRIQNQCAKITSILIHQ

SEQ ID NO: 39046 - protein, 1721 aa, Homo sapiens
  DOMAIN (294)..(335): kw TRANSCRIPTASE REVERSE II ORF2 domain identified by eMATRIX, accession number DM01354I, p-value=1.000e-40, raw score of 15.55
  DOMAIN (542)..(817): Reverse transcriptase domain identified by PFam, accession name rvt, E-value=2.8e-88, PFam score of 306.7
MGKKQNRKTGNSKTQSASPPPKERSSSPATEQSWMENDFDELREEGFRRSNYSELWEDIQTKGKEVENFEKNLEECITRITNTEKCLKELMELKTKARELHEECRSLRSRCDQLEERVSAMEDEMNEMKREGKFREKRIKRNEQSLQEIWDYVKRPNLRLIGVPESDVENGTKLENTLQDIIQENFPNLARQANVQIQEIQRMPQRYSSRRATPRHIIVRFTKVEMKEKMLRAARQKAPHHTYSKIDHIVGSKALLSKCKRTEIITNYLSDHSAIKLELRIKNLTQSRSTTWKLNNLLLNDYWVHNEMKAEIKMFFETNENKDTTYQNLWDTFKAVCRGKFIALNAYKRKQERSKIDTLTSQLKELEKQEQTHSKASRRQEITKIRAELKEIETQKTLQNINESRSWFFERINKIDRPLARLIKKKREKNQIDTIKNDKGDITTDPTEIQTTIREYYKHLYANKLENLEEMDKFLDTYTLPRLNQEEVESLNRPITGSEIVAIINSLPTKKSPGPDGFTAEFYQRYKEELVPFLLKLFQSIEKEGILPNSFYEASIILIPKPGRDTTKKENFRPISLMNIDAKILNKILANRIQQHIKKLIHHDQVGFIPGMQGWFNIRKSINVIQHINRAKDKNHMIISIDAEKAFDKIQQPFMLKTLNKLGIAGTYFKIIRAIYDKPTANIILNGQKLEAFPLKTGTRQGCPLSPLLFNIVLEVLARAIRQEKEIKGIQLGKEEVKLSLFADDMIVYLENPIVSAQNLLKLISNFSKVSGYKISVQKSQAFLYTNNRQTESQIMGELPFTIASKRIKYLGIQLTRDVKDLFKENYKPLLKEIKEDTNKWKNIPCSWVGRINSVKMAILPKVIYRFNAIPIKLPMTFFTELEKSTLKFIWNQKRARIAKSILSQKNKAGGITLPDFKLYYKATVTKTAWYWYQNRDIDQWDRTEPSEIMPHIYNYLIFDKPEKNKQWGKDSLFNKWCWENWLAICRKLKLDPFLTPYTKINSRWIKDLNVKPKTIKTLEENLGITIQDIGVGKDFMSKTPKAMATKDKIDKWDLIKLKSFCTAKETTIRVNRQPTTWEKIFATYSSDKGLISRIYNELKQIYKKKTKNPIKKWAKDMNRHFSKEDIYAAKKHMKKCSSSLAIREMQIKTTMRYHLTPVRMAIIKKSGNNRNMDGAGGHYPKQTNEGTENQIPDVLTCKWELNDKNIWTQRGEQHTLEPVGGEGELRKDNHSTKNDQYDNRHFQLAVGNGLMAKTFMVSFFYKASAYVVPTGELPDLDIIQLKQFGNALSHLTVGTSVTQIQNLNTMGIIGSQDSRDQLATLKCQGKGDPKYQCDPPVKVGANGGQIINEVLAQVQLTVGPKTNGYWRMTVDYHKLNQDVTPIVAAVPDVVSLLEVISTLQKDFYCFFLLQNITLVHYIDGIMLTESSEQEVADTLDLLTSIRGLMECLIHHHGIPHSIASDQGPHFMAKELWEWAHAHGIHWSYHIPHHPEAAGLIEWRNDLLKSQLQHQLGDNALQGWGKVLQKAMYALNQHPIYVTVFPIARIHKSWNQGVEVEVASLTITPSDPLAKFLLSVPTTLHSPGLEVLVPAGGMLPPGDTTIPLNWKLILPPGHFGLLLPLSQQAKKAVTVLARVIDPDYQDEISLLLHNGGKEEYAWNSGDPLGVSWYYHALSLRSMRTTTVQSRQDYKWPRYLRNEDLGHVTREKKHNLLRCLLKAKGI

SEQ ID NO: 39047 - protein, 1516 aa, Homo sapiens
  DOMAIN (962)..(973): NEUROKININ RECEPTOR SIGNATURE domain identified by eMATRIX, accession number PR00244D, p-value=1.000e-13, raw score of 6.84
  DOMAIN (415)..(694): Reverse transcriptase domain identified by PFam, accession name rvt, E-value=1.5e-80, PFam score of 281.1
MGRKNRKLDSRQHSYTSPQSRSHEDPAAVLQALSSSGVVIYQSLVAVQSPLAAPGCDGSRCEVRGLTVGSRYGSWRLAGCRDNEMVNACQSGWCYQNLTVLRGWKVLLEMTPHHTYSKIDHILGSKALLSKCKRTEIITNYLSDHSAMKRELRIKNLTQNRSTTWKLNNLLLNDYWVHNEMKAEIKMFFETNENKDTTYQNLWDIFKAVCRGKFIALNAHKRKQERSKTDTLTSQLKELEKQEQTHSKASRRQEITKIRAELKEIETQKTLQKINESRSWFFEKINKIDRLLARLIKKKIEKNQIDAIKNDKGNITTNPTEIQTTIREYYKHLYANKLENLEEMDKFLDTYTLPRLNQEEVESLNRSITGSEIEAIINSLPTKKSPGPDGFTAEFYQRYKEELVPFLLKLFQSIEKEGILPNSFYESSSILIPKPGRDTTKKENFRPISLMNIDAKILNKILANRIQQHIKKLIHHGQEGFIPGMQGWFNIRKSINVIQHINRTKDKNHMIISIDAEKAFDKIQQPFMLKTLNRLGIDGTYLTYLKIIRAIYDKPTANIILNGQKLEAFPFKTGTRQGCPLSPLLFNIVLEALARAIRQEKEIKGIQLGKEDVKLSLFADDMIVYLENPIVSAQNLLKLISNFSEVSGYKINVQKSQAFLYTNNRQTESQIMSEFPFTIASKRIKYLGIQLTREVKDLFKENYKPLLKEIKEDTNKWKNIPCSWIGRINITKMAILPKVIYRFNAIPIKLPMTFFTELEKTTLKFIWNQKRAHIAKSILSQKNKAGGITLPDFKLYYKATVTKTAWNPYGATTTIPALLLHNPTGQSAVLTPVIRVLCKAIEEDHLSSSRNKDLNVKPKAIKALEGNLGDTLLDKGRDKDFITRTPKAIATKAKIDKWDLIKLKSFCTAKETINRAYRQPTEWEEIFVNYPSDNGLISSISEQSVLLFYPITGRYMAIIHPLQPRLSATATKVVICVIWVLALLLAFPQGYYSTTETMPSRVVCMIEWPEHPNKIYEKVSYFGQPSGNQPEMLALYTALFPQPPLEEGIHWRMLQVVQLQDAEPPSPKFLTKEKDSPGLGGTYTGKEYRRVDHSVPPITLRPNLAQCPVAMSRQSSANMFWSQTISLHEAGLFFQDSPLADPSQKPESKGVLWCGPYSTHLDAEEDKDREALERAVAANALKPSGHPIATKSSHLGKYVMGRYHDPSVCTKAPVAIPFLLWTYSPLKSHKESVWNLHNENLVEFLEVRSIRVTAPLKRVDSRSSLLSCYSSQPLVIAQTSHGHVSLPIKDYVSSAPGIYEEELPMSSIGSTEDSTKLPVLRYQLELTDDYIIRINRLKMKGRIKVMFGCALQAVRPYGYLLCSLNIAVILFFFKLPRFHNAQTHMFYKQFVQEATYAEHFLHLCSNEQQLHPGLIWKTDRNSGRPCREELIDEISAYPGIGEGRTGRVCNDDIQLIDTVRIPVGVHWPCLTVQAGAISPPLPRVALSDLPRPGRLIHSLRTSSCKFLPSWGLCFGG

SEQ ID NO: 39048 - protein, 888 aa, Homo sapiens
  DOMAIN (316)..(361): kw TRANSCRIPTASE REVERSE II ORF2 domain identified by eMATRIX, accession number DM01354N, p-value=1.000e-40, raw score of 13.17
  DOMAIN (1)..(140): AP endonuclease family 1 domain identified by PFam, accession name AP_endonucleas1, E-value=2.5e-08, PFam score of 10.5
  misc_feature (1)...(888): Xaa = X or * as defined in Table 2
MVKGSIQQEELTILNIYAPNTGAPRFIKQVLSDLQRDLDSHTLIMGDFNTPLSTLDRSTRQKVNKDTQELNSALHQADLIDINRTLHPKSTEYTFFSAPHHTYSKIDHIVGSKALLSKCKRTEIITNYLSDHSAIKLELRIKNLTQSRSTPWKLNNLLLNDYWVHNEMKAEIKMFFETNKNKDTTYQNLWDAFKAVCRGKFIALNAYKRKQERSKIDTLTSQLKELEKQEQTHSKASRRQEITKIRAELKEIETQKTLQKINESRSWFFERINKIDRPLARLIKKKREKNQIDTIKNDKGDITTDPTEIQTTIREYYKHLYANKLENLEEMDTFLDTYTLPRLNQEEVESLNRPITGSEIVAIINSLPTKKSPGPDGFTAEFYPESYLXQTHSQYHTEWAKTGSIPFENWHKTGMPSLTAPIQHSVGSSGQGNQAGEGNKGYSIRKRGSQIVPVCRXHDCLSRKPHRLSPKSPXADKQLQQSLRIQNQCTKITSILIHQKQTNREPTHEXTPIHNCFKENKIPRNPTYKGCEGPLQGELQTTAQRNKRGHKQMEEHSMLMGRKNQYRENGHTSQGNLQIQCHPHQATNDFLHRIGKNYFKVHMEPKKSPHRQVNPKPKEQSWRHHTTXLQTILQGYSNQNSMVLVPKQRYRSMEQNRALRNNAAYLHYSDLXQTXEKQAWGKGIPIYKMALGKLASPMXEAETGSLPYTLYKNXFKLDXRLKRXTXTHKNPRRKPRHYHSGHRHGQGFHVXNTKSNGNKSQHXQMGSNXTKELLHSKRNYHQSEKATYKMGENFRNLLIXQRANIQNLQXTQTDLQEKNKQPHQKVGKGYEQTLLKRRHLCSQKTHEKMLIITGHQRNANQNHNEIPSHTSXNGNHXKVRKQQERQNS

SEQ ID NO: 39049 - protein, 860 aa, Homo sapiens
  DOMAIN (105)..(160): kw TRANSCRIPTASE REVERSE II ORF2 domain identified by eMATRIX, accession number DM01354Q, p-value=1.000e-40, raw score of 9.23
  DOMAIN (58)..(588): Reverse transcriptase domain identified by PFam, accession name rvt, E-value=5.3e-80, PFam score of 279.2
MDKFFDTYTLPRLNQEEVESLNRPITGSEIEAIINSVTTKKSPGPDGFTAEFYQRYEEELKKRESSLTHFMRSIILIPKPGRDITKKENFRPISLMNIDAKILNKILANQIQQYIKKLIHHDQVGFIPGMQGWFNIRKSIKVTQHINRTKDKNHMIISIDAVKAFDKIQQRFMLKTLNKLGIDGTYLKIIRAIYDKPTANIILNGQKLEAFPLKTGTRQGCPLSPLLFNIALEVLSRAIRQEKEIKDIQLGKEEVKFSLFADDMIVYLENPIVSAQNLLKLIGNFSKVSGYKINAQKSQAFLYTNNRQTESQIMSELPFTIASKRIKYLGIQLTMDVKDFFKENYKPMLNEIKEDTNKWKNIPCSWVGRINIVKMAILPKIHSRVTVLLRSDTVLHIVKLAVKIPTIVLLLEGSPRALRKHRQKPGSGSSRPRVRPSAVLASGLSQCSHSGGGNRGAYVTPPQALAEKAFDKIQQPFMLKTLNKLVLEFLARAIRQEKEIKGIQLGKEEVKLSLFADDMIVYLGNPITSAQNILKLIGNFSKVSGYKINVQKSQAFLDTNNRQTESQIMSEFPFTIASKRIKYLGIQLTRDLKDLFKENYKALLNEIKEDINKWKNIPCSWVGRINIVKMAILPKVIYRFNAIPIKLPMTFFTELEKTTLKFIWNQKSARIAKSILSQKNKAGGIMLPDFKLYYKATVTKTAWYWYQNRDIDQWNTTEPSEIMPHIYNYLIFDKPEKNKQWGKDSLFNKWCWENWLTICRKLKLDPFLTPYTEINSRWIKDLNVRPKTIKTLEENLGNTIQDIGMGKDFMSKTPKAMATKAKIDEWDLLKLKEFLHSKRNYRQSEQATYRMGDNFCNLLI

SEQ ID NO: 39050 - protein, 80 aa, Homo sapiens
  misc_feature (1)...(80): Xaa = X or * as defined in Table 2
XMRRAGLGEGVPPGNYGNYGYANSGHSACEEENERLTESLRSKVTAIKSLSIEIGHEAKTQNKLLAEMDSQFDSTTGFLX

SEQ ID NO: 39051 - protein, 860 aa, Homo sapiens
  DOMAIN (606)..(652): kw TRANSCRIPTASE REVERSE II ORF2 domain identified by eMATRIX, accession number DM01354O, p-value=1.000e-40, raw score of 8.73
  DOMAIN (49)..(856): Reverse transcriptase domain identified by PFam, accession name rvt, E-value=2.3e-66, PFam score of 233.9
MILCLENPIISTQKLLKLISSIGKVSGYKINVQKTQSFLHTNNRQAESQIMYELPFTIATKNKIPRNSANKEHEGPLQELQTIAQGNKRGHKQMEKQSMLLDRKNRYHENGPTAQDAEKAIDKIQQRFMLKALNKLGIDGMYLKILRAFYDKPTANIILNGQKLEAFPLKTGTRQGCPLSPLLFNIVLEVLARAIRQEKEIKGIHLGKEEVKLSLFADDMIVCLENPIVSAQNLLKLIGNFSKASGYKINVQKSQAFLYSNNRQTESQIMSEFPFTIASKRIKYLGIQLTRDVKDLFKENYKPLLNEIKEDTNKWKNIPCSWVGRINIVKMAILPKAEAPHPRATTMTVPWEVPPGYDQCSLKAQELFSQLVVNAAKTGTHPSETQILIATQLQPQDGKGVVSAIQDCLSYPLQCLFQQHKVKTSAIKLELKIKKFTQNHKTTGKLNKLLLSDSLVNDEIQAEIKKFFETTENKETIYQSLCDTAKTVLRGKFIALNGHIKKLERSQINTLTSQLKELENQEQTNPKASRRQEITKIRVELKEIEKHKTLQKINESRSWFFETINKIDRMDKFLDTYTLPRLNQEEVESLNRPITGSEIVAIVNSLPTKKSPGPDGFTAEFYQRYKEELVPFLLKLLQSIEKEGILPHSFYEASIILIPKPGRDTTKKENFRPISLMNIDAKILNKILANQIQQHIKKFIHHDQVGFIPGMQGWFNTCKSINVIQHINRTKDKNHMIISIDAEKAFDKIQQPFMLKTLNKLDIDGLEVLARAIRQEKEIKGIQSGKEEVKLSLFADDMIAYLENPIVSAQNLLKLISNFNKVSGYKINVQKSQAFLCTNNRQTESQIMSELPFHNCFQEN

SEQ ID NO: 39052 - protein, 1385 aa, Homo sapiens
  DOMAIN (605)..(646): kw TRANSCRIPTASE REVERSE II ORF2 domain identified by eMATRIX, accession number DM01354I, p-value=1.000e-40, raw score of 15.55
  DOMAIN (349)..(591): AP endonuclease family 1 domain identified by PFam, accession name AP_endonucleas1, E-value=5.4e-05, PFam score of -40.9
  misc_feature (1)...(1385): Xaa = X or * as defined in Table 2
PLSTLDRSTRQKVNKDIQELNSALHQVDLIDIYRTLHPKSTEYTFFSVPHHNYSKIDHIVGSKALLSKCKRTEIITNCLSDYNAIKLELRTEKLTQNRSTTWKLNNPLLNDYWVHKEMKAEIKMFFETNENKDTTYQNLWDAFKAVCRGKFIALNAHKRKQERSKIDTLTSQLKELEKQEQTHSKATRRQEITKTRAELKKIETQKTLQKINESRSWFFEKTNKIDRLLATLIKKKREKNQIGARKNDEGAITTNPTEIQTTIREYYKHLYTNKLENLEEMDKFLDTYTLPRPNQEEVELLTSPIRGSEIEAIINSLPTKKKSRTRWLHSRILPEVQGGTGTIPSDRAIRQEKEIKGIQLGKEEVKLSPFADDMIVYLENPIVSAQNLLKLISNFSKVSGYKINVQKSQAFLYSNKRQTENQIMSELPFTIASKRIKYLGIQLTRDVKDLFKENYKPLLNEIKEDKNKWKNIPCSRVGRINIVKMAILPKVIYRFKFPLTTDQENVVRLTRQKVNKGIQELNSALPRVDLIDIYRTLQPKSTEYTFFSVPHHNYSKIDHIVGSKALLSKCKRTEIITNCLSDHSAIKLELRIKKHTQNRSTTWKLNNLLLNDYWVHNKMKAEIKMFFETNENKDTTYQNLWDTFKAVCRGKFIALNAHKRKQERSKIDTLTSQLKELEKQEQTHSKASRRQQITKIRAELKEIETQKTLQKINESRSWFFEKNNKIDRPLARLIKKKREKNQIDATKNDKGDITTDPTEIQTIIREYYKHLYTNKLENLEKMHKFLDTYTLPRLNQEEVESLNRPIIGSEIEAIISNSIPTKKSPGPGGFTAEFYQRYKEGAVLEVLARAIRQEKEIKGIQLGKEEVKLSLFADDMIVYVENPLPSSPHISLKLISNFSKLSGYKINVQKSQAFLYTNNRQTESQIMSELPFVIASKRIKYLGIQLTRDVKDLLKENYKPLLNEIKEDTNKRKNIPCSXVGRINIVKMAILPKVIYRFNAIPIKLPMTFFTDLEKTTXKFIWNQKRSRIAKSILSQKNRAGGITLSDFKLYYKATVTKTAWYWYQNRWYWYQNRDIDQWNRTEPSEITPHVYNYLIFDKPDKNKKWGKDSLFNKWCRENWLAICRKLKLDPFLTPYTKINSRWIKDLNVRPKTITTLEEKLSNTIQDIGMGKDSMSKTPKAMATNVKIQKWDLIKLKSFCTAKETTIRVNRQPTTWEKIFATYSSDKGLISRIYNELKQIYKKKTNNPIKKWVKDMNRHFSKEDIYAAKKHMKKCSPSLAIREMQIKTTMRYHLTPVRMAIIKKSGNNRCWRRCGEIGTLLHCWRDWKLVLPLWKSLTPWLPPSQVHREYCQTTAYVLLRLFSQLMTVLRHTFQGSGLHSGPRQL

SEQ ID NO: 39053 - protein, 368 aa, Homo sapiens
  DOMAIN (81)..(126): kw TRANSCRIPTASE REVERSE II ORF2 domain identified by eMATRIX, accession number DM01354N, p-value=6.236e-37, raw score of 13.17
  misc_feature (1)...(368): Xaa = X or * as defined in Table 2
MKVEIKTFFETNENKDTTYQNLWDTFKAVCRGKFIALNAHKRKQERSKIDTLTSQLKELEKQEQTHSKASRRQIQTTIGEYYKHLYTNKLENLEEMDKFLDTYTLPRLNQEEGESLKRPMAGSEIEAIINSLPTKNSPGPDRFTAEFYQRYKEELPDKQLQQSLRIQNQWEKITSIPIHQXQTNREPNHEXTPIHNCFKENKIPRNPTYKGCEGPLQGELQTTAQRNKRGHKQMEEHSMLMDRKNQYCENGHTAQEETAFCTHSRRESSRLGLLVANFRACHQERFRRERSVPAGVHAEAHPCWENRGREERHWEQHPGPETVLLQAGGHVCDQGLHHGQPQVGQVPRGSRGHSGHFQLPSVQDRSWL

SEQ ID NO: 39054 - protein, 1223 aa, Homo sapiens
  DOMAIN (38)..(54): PARANEOPLASTIC ENCEPHALOMYELITIS ANTIGEN FAMILY SIGNATURE domain identified by eMATRIX, accession number PR00961D, p-value= 4.541e-09, raw score of 12.39
  DOMAIN (33)..(299): Reverse transcriptase domain identified by PFam, accession name rvt, E-value=6.9e-07, PFam score of 28.2
  misc_feature (1)...(1223): Xaa = X or * as defined in Table 2
RSPTAGRNTNYPSRDYYKHLYANKLENLEEMDKFLDTYTLPKTITQEEVESLNRPITGSEIVAVINSLPTKKSPGPDGFTAKFYQRYKEELHINRTKDKNHMIISIDAEKAFDKIQPQPFMLKTLNELGIDGTYFFKIIRAIYDKPTANIRLEWGQKLEAFPFEKLAQEQGMPLLLNPLPQSNIVVGKFLARAIRQEKEIKGIQVEKQEVKLSLFADDMIICLENPIVSAQNLLKLISNVSKVXGYKINVQKSQAFLYTTNRQTESQIMSELPLTIASKRIKYLGIQLTRDVKDLFKENYKPLLNEIKEDTNKWKNIPCSWIGRINIVKMAIMPKVIYRFNAIPIKLPMTFFTELEKKTALKFIWNQKRARIAKAILSQKNEAGGITLPDFKLYYKATVTKTTXYWYQNRDIDQWNRTEASEIMPHIYNNLIFDKPEKNKQWGKDSLFNKWCWENWLAICRKLKLDPFLTPYTKMNSRWIKDLNVRPKTIKTLEENLGITIQDIGMGKDFMSKTPKAMATKAKIDKWDLIKLKSFCTAKETTIRVNRQPTKWEKMFTTYSSDKGLIFRIYNELKQIYKKKTKNPIKKWAKDVNRHFSKEDIYAAKKHMKKCSSSLAIREMQIKTTMRHHLTPVRMAIIKKSGNNSWRSCLQPWAAHSTTYRHPGTMEKKTSSGDTPTVFPSTLGRKKSTSAQLTELTALTLELSKGKVRNAPSKLDLSPFEMLYGWPFLTNDFLLDQETSELGKHVNSLARFQQELTQVAEAQPQEVGPPLFNPGYLVLPKQGGPYTILLSMPSAVKVTGIDSWIHHAQVKAWKTERAIPGSPAECLGYQCEEIRDLKLKIKRDKKMSKGYSSYSVPVIHSVIQSSSLCTTGTQKSRIEVWEPLPRFPKMYGYAWIPRQKFAAGAGPSWRTSVKAVQKGNVGSKPHHRDPTGALPSGAVRRGPPSSRPQNGRSTGSLHRVPGKARPQHQPVKAARREAVPYKATGVELPKTMGTHLLHQCDLDLPATFSLSLHIKYLKHRHSYSPHLHLLFTVMGPHARQMIRISGIDVDTRNLYKLNLKVKWLEVLDQEEPEYSRTTSRKKQGFPNSDEEDVLWMEKQLSCFCDKYQKWIPTRQLKGQLSYVKEADLIPDVMPPQALFHDDDEMEGNGAIDAGMEYVYNIDTLLRWSDGEEEGEGGEEGRGGGRGGEGGGKREEGEGKKEEEQGGWGGGQEVEEEGGGGGGN

SEQ ID NO: 39055 - protein, 1628 aa, Homo sapiens
  DOMAIN (1338)..(1363): 7 kw REVERSE TRANSCRIPTASE RNA POLYMERASE domain identified by eMATRIX, accession number DM00895E, p-value=3.333e-11, raw score of 15.72
  DOMAIN (519)..(1597): Reverse transcriptase domain identified by PFam, accession name rvt, E-value=3.5e-102, PFam score of 352.9
  misc_feature (1)...(1628): Xaa = X or * as defined in Table 2
MTGSNSHITILTLNINGLNSAIKRHRRASWIKSQDPSVCCIQETHLTCRDTHRLKIKGWRKIYQANGKQKKAGVAILVSDKTDFKPTKIKRDKEGHYIMVKGSIQQEELTILNIYAPNTGAPRFIKQVLSDLQRDLDSHTLIMGDFNTPLSTLDRSTRQKVNKDTQELNSALHQADLIDIYRTLHPKSTEYTFFLAPHHTYSKIDHIVGSKALLSKCKRTEIITNYLSDHSAIKLELRIKNLTQSRSTTWKLNNLLLNDYWVHNEMKAEIKMFFETNENKDTTTHTRISGTHSKQTTYQNLWDTFKAVCRGKFIALNAQKRKQERSKIETLTSQLKELEKQEQTHSKASRRQEITKIRAELKEIGDTKKPLQKINESQELWFFERINKIDRPLSKDLIKKKREKNQIDAIKNDKGDITTDPTEIHTTIREYYRIHFYANKLENEEEMDKFLDTYVSLPRLNQEEVESLNRPITGSEIVAIINSLPTKKGPGPDGFTAEFCQRYKEELVPFLLKLFQSIEKEGILPNSFYEASIILIPKPGRDTTKKKNFRPISLMNIDVKILNKILANQIQQHIKKLIHCDQVGFIPGMQGWFNIYKSINVIQHINRTKDKNHMIISIDAEKAFDKIQQLFMLKTLNQLGIDGTYYFKIIRRAIYNKPTANIILNGQKTGGIPLWKTGTRQGCPLSPLLFNIVLEVLARAIRQEKERKGIRLGKEEVKLSLLADDMMVYLENPNVSAPKSSLRLVKQLQQKSSGYKINVQKSPSILIYTNNRQTNREAKSXLMSELMSELPFTIASKRIKYLGIQLTRDVKDLFKENYKPLLKEIKEDTNKWKNIPCSWVGGRINLVKMAILPKVIYRFNATPIKLPMTFFTELEKTTLKFIWNQTRAWFAKSILSQKNKARGITLPDFKLYYKATVTKTAWHWYQNSMYWYQNRDIDQWERNRTEPSEIMPHIYNYLIFDKPEKNKQWGKDSLFNKWCWENWLAICRKLKLDPFLTPYTKINSRWIKDLNIRPKTIKTLEENLGITIQDIGMGKDFMSKTPKAMATKDKIDKWDLIKLKSFCTICTAKETTIRVNRQPTEWEKIFAIYSSDKGLIPRIYNELKQIYKKKTNNPIKKWTKDMNRHFSKEDIYAAKKHMKKCSPSLAIREMPIKASMRYRLTPVRMAIIKKSGNNRSWYFEKINKIDRLLARLIKKKREKNQIDAIKNDKGDITTDPTEIQTTTREYYKHLYANKLENLEEMDKFLDTYNLPRLKQEEVESLNRPIRGSEIVAIINSLPTKKSPGPDGFTAEFYHRYKEELVPLLLKLFQSIEKEVILPNSFYEASIILIPKPDRDTAKKENFRPISLMNIDAKILNKILANRIQQHIKKLIHHDQVGFIPGMQGWFNIRKSVNVIQHINRTKDKNHMIISIDAEKSFDKIQQHFMLKTLNKLGIDGSYLKIIRATYDKPTANIILNGQKLEAFPLKTGTRHGCPLSPLLFNIVLEVLARAIRQEKEIKGIQLGKEEVKLSLFIDDMIVYLENPKASSKKLPELNKDTIYQNLWDAFKAVCRGKFTALNAHKRKQERSKIDTLTSQLKELEKQEQTHSKAIRRQEITKIRAELKEIETQKTLQKINESRSWFFEKDQQN

SEQ ID NO: 39056 - protein, 624 aa, Homo sapiens
  misc_feature (1)...(624): Xaa = X or * as defined in Table 2
SASVVPASGLRPSSTSLLTSRQPRFLGLLRSHPALLVAVPGDWDDLAVCCIVAPSHVCRMVFVMDRTLGISLPGLLKREEDACWVEANINGRVLAQCNIDELKKEMNMNFGDWHLFRSTVLEMRNAESHVVPEDPRFLSESSSGPAPHGEPARRASHNELPHTELSSQTPYTLNFSFEELNTLGLDEGAPRHSNLSWQSQTRRTPSLSSLNSQDSSIEISKLTDKVQAEYRDAYREYIAQMSQLEGGPGSTTISGRSSPHSTYYMGQSSSGGSIHSNLEQEKGKDSEPKPDDGRKSFLMKRGDVIDYSSSGVSTNDASPLDPITEEDEKSDQSGSKLLPGKKSSERSSLFQASLKLKGRGLRLSKLPSEEDECGAEESDNTPLLKDDKDRKPEGKVERVPKSPEHSVEPIRTFIKAKEYLSDALLDNKGNSSDSWSVDPRESSPNHVSAQCKCADDLPDLKRHNLIELEDDSHSGKRGIPHSLSGLQDPIIARMSICSEDKKSPSRIASLDXPSSPEENWPACQKAYNLNRTPSTVTLNNNSAPANRANQNFDEMEGIRETSQVILRPSSSPNPTTIQNENLKSMTHKRSQRSSYTRLSKESPELHAASSSESTGFGEERESIL

SEQ ID NO: 39057 - protein, 244 aa, Homo sapiens
  misc_feature (1)...(244): Xaa = X or * as defined in Table 2
EGNEAQTCSFWNTRRQLLASSDPSLSVSQRMDPSWRRSSHSWPQPMPDSGRAPVRPHLAKLEEDVWPCPQFHQTKAASGPPFVTFQPANCFPSVISFHLHCHTWSEQDRAYHPVYQMRXXGSDVQLLEYEASAAGLIRSFSERFPEDGPELEEILTQLATADARFWKGPSEAPSGQALRKSVWPCPQFHQTKAASGPPFVTFQPANCFPSVISFICTAIRGVSKTGLTILSTRXGNGSSEKSLV

SEQ ID NO: 39058 - protein, 665 aa, Homo sapiens
  misc_feature (1)...(665): Xaa = X or * as defined in Table 2
QDFLDSQNLSAYNTRLFKEVDGEGKPYYEVRLASVLGSEPSLDSEVTSKLKSYEFRGSPFQVTRGDYAPILQKVVEQLEKAKAYAANSHQGQMLAQYIESFTQGSIEAHKRGSRFWIQDKGPIVESYIGFIESYRDPFGSRGEFEGFVAVVNKAMSAKFERLVASAEQLLKELPWPPTFEKDKFLTPDFTSLDVLTFAGSGIPAGINIPNYDDLRQTEGFKNVFAGGIVLGCGLTPRKREKLTFLEEDDKDLYILWKGPSFDVQVGLHESLLGHGSGKLFVQDEKGAFNFDQETRDPPQKRGEQIQSWNRTGETWDSKFSTIASSYEECRAESVGLYLCLHPQVLEIFGFEGADAEDVIYVNWLNMVRAGLLALEFYTPEAFNWRQAHMQARFVILRVLLEAGEGLVTITPTTGSDGRPDARVRLDRSKIRSVGKPALERFLRRLQVLKSTGDVTEGRALYEGYSTVTDAPPECFLTLRDTVLLRKESRKLSVQPNTHLEGNEVSDVQLLEYEASRAGLIRSFSERFPEDGPELEEIFTQLATADARFWKGPQXGPHSGPSLRKIVVALPPKFHQTKAASGPSHSVCVFRGWGGGGAGAWTLVLPQLEGWXHNPLPICQHVSSLPNCFPSVILSFICTAIRGVSKTGLTILSTKMRNGSSEKSLV

SEQ ID NO: 39059 - protein, 173 aa, Homo sapiens
  DOMAIN (111)..(128): Zinc finger, CCHC class domain identified by PFam, accession name zf-CCHC, E-value=4.6e-05, PFam score of 30.3
MLLTQSLFGGLFTRTHMKFGAVTQIRGPPLGDKSPVLLLFALERQRRHVLSMDPKLRCWSRTGKAAFPWCLIIAEMPDYSPTFQRCQTTQGRLPWSFTLSSKSRFSGEGARACYKCQKSDHQAKECPQPGIPPKPCPICAGPHWKSDCSTHLAATPRAPGTLAQGSLTDSFLA

SEQ ID NO: 39060 - protein, 26 aa, Homo sapiens
PHWKSDCSTHLAATPRAPGTLAEGSL

SEQ ID NO: 39061 - protein, 156 aa, Homo sapiens; identical to SEQ ID NO: 31762
  DOMAIN (94)..(111): Zinc finger, CCHC class domain identified by PFam, accession name zf-CCHC, E-value=0.0026, PFam score of 24.4

SEQ ID NO: 39062 - protein, 158 aa, Homo sapiens
  DOMAIN (89)..(106): Zinc finger, CCHC class domain identified by PFam, accession name zf-CCHC, E-value=5e-05, PFam score of 30.1
  misc_feature (1)...(158): Xaa = X or * as defined in Table 2
MTWGTVPLFHIFQMRCCHWSCQGIMRGWGLCSQTLNCLLLSKCXTCSRGGGQIWSRKFRLVRVEXGXGNFKTPELQQPGVPPGLPPPGSCFKCRKSGHWAKECPQPGIPPKPCPICAGPHWKLDCPTRLAATPRSPGTLAQGSLTDSFPDIRGLAVED

SEQ ID NO: 39063 - protein, 204 aa, Homo sapiens; identical to SEQ ID NO: 38652
  DOMAIN (122)..(139): Zinc finger, CCHC class domain identified by PFam, accession name zf-CCHC, E-value=0.0033, PFam score of 23.8

SEQ ID NO: 39064 - protein, 78 aa, Homo sapiens
  DOMAIN (22)..(39): Zinc finger, CCHC class domain identified by PFam, accession name zf-CCHC, E-value=0.00014, PFam score of 28.6
  misc_feature (1)...(78): Xaa = X or * as defined in Table 2
PSPTCPAIYSXKGGWSQRHSQGACYTCRKSGHWAKECPQPGIPPKPRPICVGPHXKSDCSTHLAANPRAPGTLAQGSL

SEQ ID NO: 39065 - protein, 81 aa, Homo sapiens
MRKIHLQPQVLRLTGPRNISSILNQELATRAGNLATRPRNACSLGFLLSRISSVWDPTENRTVQLTWQPLPEPLELWPKAL

SEQ ID NO: 39066 - protein, 196 aa, Homo sapiens; identical to SEQ ID NO: 38311
  DOMAIN (100)..(143): Ribosomal protein L19e proteins domain identified by eMATRIX, accession number BL00526C, p-value=6.162e-20, raw score of 20.60
  DOMAIN (32)..(149): Ribosomal protein L19e domain identified by PFam, accession name Ribosomal_L19e, E-value=9.1e-29, PFam score of 109.0

SEQ ID NO: 39067 - protein, 82 aa, Homo sapiens; identical to SEQ ID NO: 38312
  DOMAIN (24)..(67): Ribosomal protein L19e proteins domain identified by eMATRIX, accession number BL00526C, p-value=5.771e-14, raw score of 20.60
  misc_feature (1)...(82): Xaa = X or * as defined in Table 2

SEQ ID NO: 39068 - protein, 226 aa, Homo sapiens
  DOMAIN (29)..(72): Ribosomal protein L19e proteins domain identified by eMATRIX, accession number BL00526A, p-value=1.474e-35, raw score of 19.50
  DOMAIN (27)..(186): Ribosomal protein L19e domain identified by PFam, accession name Ribosomal_L19e, E-value=5.1e-52, PFam score of 186.2
  misc_feature (1)...(226): Xaa = X or * as defined in Table 2
AFLLQELCLKSSTGELFPFAAVAAALSMLRLQKRLASSVLCCGKKNIWLDPNETNEITNANSRQQIRKLIKDGLIIRKPVTVHSRLRCRKNTLARXKGRHMGIGKRKVPANARMPEKVTWMRENEGFCRRLASEDTRESKKIDRPHVVTALYLEVKGNVFKNKRILMEHIHKLKADKARKKLLADQAEARRSKTKEATKRREERLPARPRKREIIXTLSKEEETKK

SEQ ID NO: 39069 - protein, 28 aa, Homo sapiens
KLGPGGSSPSGTVMPPMHWIYQHLLLSL

SEQ ID NO: 39070 - protein, 148 aa, Homo sapiens
  misc_feature (1)...(148): Xaa = X or * as defined in Table 2
PATELPGLPTRPGMLCIWRGAPDWPEGPPSSGELSSIQPTQGLHNCFQPDGARPAAPGPVPGQLGALPWSCRPPAEPTLFMESLVQWPPGDGIRQXCEDAAELREPGVQRHQGSPGXVRTLPPLRGPSQVPAGSSSSASPRSIPGSRG

SEQ ID NO: 39071 - protein, 442 aa, Homo sapiens
  DOMAIN (284)..(325): CORE POLYPROTEIN PROTEIN GAG CONTAINS: P domain identified by eMATRIX, accession number PD02059A, p-value=8.013e-11, raw score of 28.10
  misc_feature (1)...(442): Xaa = X or * as defined in Table 2
MPNIYTMEYYAAVKKDEFMSFVGTWMKLETIILSKLSQGQKTKHRMFSLIGTRMKLETIILSKLLQGQKNQTPYILTHRISFEDVRNYMPLAVIHSDESPILPLHEQQDASENGWIKDTERDADLEIYIVSGIGSFRWVLGLADFKSEAADPCGMKLQTFAVSVTALKGGASRVVHSSWWVCVLTDFRSEAAYLSVTALEGGASRVAHSSRFVVSLTSGVKLQTFTVNATAHKGSADPKSEQHQDLLQRAKKHTFHSMKGEPRRVVAAGWGGAIKADSNNLILLFQTIEKYCPWFPDKGSVDLLDWDRVGTTLCQLMRDGVLLPISVWTDWALIRVALLPFQSGDTLQLPQVNADVEPLPLPRCIGGITGPEGGDPPGPSFHYLVGVYYFLTCRSTWEQRKSPVALRXXKLGPGGSPPSGPVMPPMHRGKGSGSTSALTCGS

SEQ ID NO: 39072 - protein, 45 aa, Homo sapiens [sequence omitted]

SEQ ID NO: 39073 - protein, 566 aa, Homo sapiens
  misc_feature (1)...(566): Xaa = X or * as defined in Table 2
PKTLKMGGGTAGLVGMGFSTTGRTPSAPGRPHPCRGAPGSPGKAGLFLQRPRLGTGLXGSAPRGPGXMGCPGTGRGSNSRHXRGPPRRPQASXAAPFQPGPLETWTPGXSQVPGAPSPCNFSYPHREVPPWGPVPPPAPHGSCGWALALPRRKRAAVFSSWAPGQAGQLLDAASVGAAPXQDIPPCRGSSAPSPCSPHPPPGLESGPKPGAASWAGPQTPFSGRAQQLCQEGPAGAGNTSGRSAXAASAGTCDGPRSGGRVRTYPGLPXCRWTPGSRSSAASSHHCRMPSPGGHCTRLSMKRVGSAGGRQLQGRAPSXPARGTXQRPRGGQSGLAAPLESRHXDGECXAFWRAETVRSSVQRRREFATGLSGPSSXPRWSTCSVPASSPGGGDVAGPQEGPRSFHCLPSCLXVRPSHPEGDAAPXGALHKXRMHEEGRPGPCGGWGLVGSWEPVQGCRRNLARWGRAWNCLQFPEXPPGGPGLADSGFIIQTARLNFQGWASVSFSIKRPGRAILRPCPTSEFLLPESFVSGNCSSTERAMWPFWAPPRSAPGAENFPCASVPCKL

SEQ ID NO: 39074 - protein, 136 aa, Homo sapiens
  DOMAIN (78)..(95): DECARBOXYLASE PHOSPHATIDYLSERINE domain identified by eMATRIX, accession number PD02876D, p-value=8.826e-18, raw score of 12.13
  misc_feature (1)...(136): Xaa = X or * as defined in Table 2
LTHLTAQNVPNLFARNERVICLFDTEFGPMAQILVGATIVGSIETVWAGTITPPREGIIKRWTWPAGENDGSVALLKGQEMGRFKLGSTVINLFAPGKVNLVEQLESLSVTKIGQPLAVSMXSKATQLGNPRVFPV

SEQ ID NO: 39075 - protein, 508 aa, Homo sapiens
  DOMAIN (375)..(388): DECARBOXYLASE PHOSPHATIDYLSERINE domain identified by eMATRIX, accession number PD02876C, p-value=3.667e-16, raw score of 8.80
  misc_feature (1)...(508): Xaa = X or * as defined in Table 2
MTFVNAQAEDSQIFLYKRRYVPVEGYAPWLVSGNASELERIHYEGMDDVILLDFLPKELGFDMNMHILSFAPGANHGYIEHTFKEHGGATQAFAKENNHKAYKDTYGVSHITRHDMLQIPKQQQYEKYQDTHDTPYCEPLPGETRLWGDTDVIGLFDAETDMNDVVAILENHPLLGAGFAHKIEQLEDKDWEREWMDNFHPMRFGERLWICPSWRDVPDENAVNVMLDPGLAFGTGTIQTLSVPAMLDSSTHTRRMRSTLNLYEITRMSTVSTSEHSMTYTLVQVDMKEAQKPDTASYRTFNEFFVRPLRDEVRPIDTDPNVLVMPADGVISQLGKIEEDKILQAKGHNYSLEALLAGNYLMADLFRNGTFVTTYLSPRDYHRVHMPCNGILREMIYVPGDLFSVNHLTAQNVPNLFARNERVICLSDTEFGPMAQILVGATNGGSIETPESEGATVDESFVVGGPVGDFELLLCQERSALSGRCVIXSFNSAKVRFIQQSRRPVKSA

SEQ ID NO: 39076 - protein, 140 aa, Homo sapiens
  DOMAIN (16)..(31): DECARBOXYLASE PHOSPHATIDYLSERINE domain identified by eMATRIX, accession number PD02876B, p-value=9.526e-15, raw score of 13.72
  misc_feature (1)...(140): Xaa = X or * as defined in Table 2
QNFKEIFVRPLRDEVRPIDNDPNVLVMPADGVISQLGKIEEDKIVSNLFARDERVICLFDTEFWPNAQILVGATIVCSIETVWAGTITPPREGIIKRWTWQAIEEDSWQNLGRVAGXNKLPTELCNNFDWAQTLSSRNRG

SEQ ID NO: 39077 - protein, 375 aa, Homo sapiens
  misc_feature (1)...(375): Xaa = X or * as defined in Table 2
MHFAKKEDVSEIETGSDGEKPKARAGCLIGNSERLFSVTFCVQFQATLPLSYTIMKHKDTGTSSVPESIDASLEASQQNPAFLKTLTRSCSPSWPCSRNWPHLLIPLTCPAQAGATPQLPGLGPPGHLPMNQPASSFPPRPNAASQILTSTFHKPPPGSSLACCCCPGPCDWQEDSQXPTPACPSWPPWPTQLSPSAAGSPIIHSPIQGFHSQLLSXRSPGTEEPXEANKLPPWTGHREPEPHPGLPGHPCAAGMHRPLAPTTARPLATLHGERQRHLHPGQRRRVPRAPAESTEAPALWLHRPPECPECSGHGPAALEQGAGMAXCRSCRHLPCFPGEEADAGSREGPHQEVPRSKICQQPQAASFRICLHSIF

SEQ ID NO: 39078 - protein, 577 aa, Homo sapiens
  DOMAIN (109)..(123): ACONITASE FAMILY SIGNATURE domain identified by eMATRIX, accession number PR00415I, p-value=6.897e-09, raw score of 13.62
  misc_feature (1)...(577): Xaa = X or * as defined in Table 2
KKQNKSRGCNVNWAMRRALKMCIPYRNGHSIFLVMVKVERSKRFALKLSVAEKNQMPRNATVIENSAGYSYGKMAFSXPRICTQIVGPRIISTTAVISSQPATHHRATRGAIIRTAFCGPCFGAGDTPINNGLSIRHTTRNFPNREGSKPANGQMSAVALMDARSIAATAANGGYLTSASELDCWDNVPEYAFDVTPYKNRVYQGFVKGATQQPLIYGPNIKDWPELGALTDNIVLKVCSKILDEVTTTDELIPSGETSSYRSNPIGLAEFTLSRRDPGYVSRSKATAELENQRLAGNVSELTEVFARIKQIAGQEHIDPLHRVYRHCSRSGNCPSDVFDSKKDPVQDHRPQKRVTLIWGYDIHPQIEIIQTGDNFFQFRAIANNFGFLRFYQIRHFGLSGQHGVQIFTADVERGVGLRLQRFPVVKHAIVQRQVEVIAVAHIEVQADIFTRSFRAIEANGHKVEQHFDRHPANGVRGTGGAVAELMHPFAQLFRAGQVETAPCGGLGLIAQLFKVIRLQILRGESKKFSANLTALKLPLPMVYEGDKVLKHLLRPKFNLPPLVQPPKKMLPRHLSR

SEQ ID NO: 39079 - protein, 626 aa, Homo sapiens
  DOMAIN (188)..(200): ABC transporters family proteins domain identified by eMATRIX, accession number BL00211A, p-value=1.000e-13, raw score of 12.23
  DOMAIN (556)..(612): S1 RNA binding domain identified by PFam, accession name S1, E-value=1.3e-17, PFam score of 69.6
MVFWSDLPAIALQQWWSSLSLRSCLAARLALRHRHRAVDYYRYRRSRHAASFRNGANSRFVECRIAQRPDVGRNLAFRTHHYIDAHCRRLTVAPHIARRISGTARWGLTQAALCGALLLLAADLCAQQLFMPYQLPVGVVTVSLGGVSQKMTESVARLRGEQLTLGYGKYTVAENLTVEIPDGHFTAIIGPNGCGKSTLLRTLSRLMTPAHGHVWLDGEHIQHYASKEVARRIGLLAQNATTPGDITVQELCRGQANGKRVATDTSYPHTGQAAKAAMTVAALCEKHNVELVAIGNGTASRETERFYLDVQKQFPKVTAQKVIVSEAGASVYSASELAAQEFPDLDVSLRGAVSIARRLQDPLAELVKIDPKSIGVGQYQHDVSQTQLARKLDAVVEDCVNAVGVDLNTASVPLLTRVAGLTRMMAQNIVAWRDENGQFQNRQQLLKVSRLGPKAFEQCAGFLRINHGDNPLDASTVHPEAYPVVERILAATQQALKDLMGNSSELRNLKASDFTDEKFGVPTVTDIIKELEKPGRDPRPEFKTAQFADGVETMNDLQPGMILEGAVTNVTNFGAFVDIGVHQDGLVHISSLSNKFVEDPHTVVKAGDIVNVDSAGSGFFRVNVLP

SEQ ID NO: 39080 - protein, 64 aa, Homo sapiens
TPRPLPCCTPSCQMRFSQPISSSPSVKASSRLKRRHSSRKISKSLRASNCGGTTCFMAIMPRLE

SEQ ID NO: 39081 - protein, 452 aa, Homo sapiens
MKINLKLTNDSKVADGQFANIVVFLINWFYIHATTCEIDNGGVIVADGFQASKAYSADSIVDYNDAHYKTSVDQDAWGFVPGGDNPWKKYEPAKAWSASTVYVKGDRVVVDGQAYEALFWTQSDNPALVANQNATGSNSRPWKPLGKAQSYSNEELNNAPQFNPETLYASDTLIRFNGVNYISQSKVQKVSPSDSNPWRVFVDWTGTKERVGTPKKAWPKHVYAPYVDFTLNNHHRRTDSFRSKATAELENQRLAGNVSELTEVFARIKQIAGQEHIDPLQTEIGSMVYAVKPGDGSAREQAASCQRVIGGLANIAEEYATKRYRSNVINWGMLPLQMAEVPTFEVGDYIYIPGIKAALDNPGTTFKGYVIHEDAPVTEITLYMESLTAEEREIIKAGRIRHLLSDAMLAHLIRPTNRIESVGQIRHFRSIRHLLSDAMLAHLIRPTNRIEP

SEQ ID NO: 39082 - protein, 492 aa, Homo sapiens
  DOMAIN (30)..(59): Aminotransferases class-III pyridoxal-phosphate attachment si domain identified by eMATRIX, accession number BL00600E, p-value= 1.000e-25, raw score of 16.43
  DOMAIN (2)..(327): Aminotransferases class-III pyridoxal-pho domain identified by PFam, accession name aminotran_3, E-value=4e-99, PFam score of 286.6
MAAHRHEIAAVIIEPIVQGAGGMRMYHPEWLKRIRKICDREGILLIADEIATGFGRTGKLFACEHAEIAPDILCLGKALTGGTMTLSATLTTREVAETISNGEAGCFMHGPTFMGNPLACAAANASLAILESGDWQQQVADIEVQLREQLAPARDAEMVADVRVLGAIGVVETTHPMNMAALQKFFVEQGVWIRPLTTDLPDAALYYSPATVHNWLALHGRGQDYCQLNPQPMAYYDGCISVDLSAIKPMIALPFHPSNVYEIDTLNQNLTDILREIEIESERVAHGKAKLSLLDKVENGRLKVQQGIIAGCSGGNYENVIAAANALRGQSCGNDTFSLAVYPSSQPVFMDLAKKGVVADLIGAGAIIRTAFCGPCFGAGRYANQQRFEYSPHHAELDCWDNVPEYAFDVTPYKNRVYQGFVKGATQQPLIYGPNIKDWPELGALTDNIVLKVCSKILDEVTTTDELIPSEKPLLSFNRLSAEFPCLARSCR

SEQ ID NO: 39083 - protein, 337 aa, Homo sapiens
  DOMAIN (228)..(248): RIBOSOMAL PROTEIN S1 SIGNATURE domain identified by eMATRIX, accession number PR00681H, p-value=9.471e-11, raw score of 11.58
  DOMAIN (211)..(284): S1 RNA binding domain identified by PFam, accession name S1, E-value=6.2e-29, PFam score of 109.6
MHCSGQSCGNDTFSLAVYPSSQPVFMDLAKKSELDCWDNVPEYAFDVTPYKNRVYQGFVKGATQQPLIYGPNIKDWPELGALTLNIVLKVCSKILDERHWIIQGTTFKGYVIHEDAPVTEITLYMESLTAEEREIIKAAHWRMRLEYFWTTYSMTLPEIESTVPRLILRSFLAKHDCRGENIEPKLEKRVAIRVRNLKPLSFADGVETMNDLQAGMILEGAVTNVTNFGAFVDIGVHQDGLVHISSLSNKFVEDPHTVVKAGDIVKVKVLDVDLQRKRIALTMRLDEQPGETNARRGGGNERPQNNRPAAKPRGREAQPAGNSAMMDALAGAMGKKR

SEQ ID NO: 39084 - protein, 397 aa, Homo sapiens
  DOMAIN (123)..(162): 'Cold-shock' DNA-binding domain proteins domain identified by eMATRIX, accession number BL00352B, p-value=8.902e-22, raw score of 23.66
  DOMAIN (101)..(165): 'Cold-shock' DNA-binding domain identified by PFam, accession name CSD, E-value=3.7e-22, PFam score of 83.8
  misc_feature (1)...(397): Xaa = X or * as defined in Table 2
MSEVEAAAGATAVPAATVPATAAGVVAVVVPVPAGEPQKGGGAGGGGGAASGPAAGTPSAPGSRTPGNPATAVSGTPAPPARSQADKPVLATRVLPGTAKRFNVRSGYGFTNRNDAKEDVFVHWTAVKRNNPRKFLRSVRDGETVEFDVVEGEKGAQATNVTGPRAAGVPMKGSRYAPNRRRFRXFIPRPPSVAPPPMVAEIPSAGTGPGSKGERAEDSGQRPRRWCPPPFFYRRRFVRGPRPPNQQQPIELTGAFACSQGTDRVEPKETAPLEGHQQQGDERVPPPRFRPRYRRPFRPRPRQQPTTEGGDGETKPSQGPADGSRPEPQRPRNRPYFQRRRQQAPGPQQAPGPRQPAAPEEAPTEAIKPMIAHDGHAPPNPSPTCCLEPSYQLVDVN

SEQ ID NO: 39085 - protein, 312 aa, Homo sapiens
  DOMAIN (66)..(102): Synapsins proteins domain identified by eMATRIX, accession number BL00415Q, p-value=6.255e-11, raw score of 2.23
  misc_feature (1)...(312): Xaa = X or * as defined in Table 2
RHQESLCAPLEILQKKGCPCLEEPLQRQPCPCQSSEVTAXXNISFRFASPGGNSPWASHXAPSVRGAAPAGPVGLEAAAGSEPHPGPPDAGGARPVPGGAGSRPRMVLSPRSAPHLGGGRSAPAMRTGNPCTHTQVVTTSPNLPNIPXGAKSHPIVERPLSXKGTGPSAPQIATENIYPXQLHGKGPLIRDXKIVPHDGAAGQSPLLPVRSCQRGYLPSAKXFFDALKIKFTLKFLHLRRFSCTLSLRGLLVSPLLLPVRLLLAGWAHAWMHGCGGWEPRITQQRASCQLPDRTKSKMRVKIPAANSSWLCH

SEQ ID NO: 39086 - protein, 308 aa, Homo sapiens
  misc_feature (1)...(308): Xaa = X or * as defined in Table 2
RGSEQIPPSSIPGAPXKMLFPSGSSEPEHLXTVPASSLGCRPGGPVASRSRPPRPPARAALRGPPASSPIRFPGASPRAPPTSXMRSGAGSKTTPRPGPSASGDRPRAPCVRGPGCGSEPAAASSPTGPAGVPRARXGPGHGQTSPHGWXPSSMQQRTRRCSPPSSVPGQFPLLPLSCSQVSPWTWXGLPYSLLIPVSSLLPWPEDRVPSSFVAGPLPSFDNTSLPVEGGSXLHPVCLLYVYQENSSKHIPYSCRGSRIFPFSQRQRVMAGQRKLCDHPGGLISKPLAWTRIPEAPVVAAMVEGGGGL

SEQ ID NO: 39087 - protein, 120 aa, Homo sapiens
SCSRARSGDTHLFDKVRGYDIKLLRYLSVKYICDLMVENKKVKFGMNVTSSEKVDKAQRYADFTLLSIPYPGCEFFKEYKDRDYMAEGLIFNWKQDYVDAPLSIPDFLTHSLNIDWSQYQ

SEQ ID NO: 39088 - protein, 137 aa, Homo sapiens
RGLGELLEEFSRTQYRAKDGFGTGGSKVERIEKRCLELFGRDYCFSVIPNTNGDICGHYPRHIVFLEYESSEKEKDTSGDTHLFDKVRGYDIKLLRYLSVKYICDLMVENKKVKFGMNVTSSEKVDKAQRYADFTLL

SEQ ID NO: 39089 - protein, 351 aa, Homo sapiens
MGKKVGGADDAWADVEDVTEEDCALRSGDTHLFDKVRGYDIKLLRYLSVKYICDLMVENKKVKFGMNVTSSEKVDKAQRYADFTLLSIPYPDDDDGGDDVDDGDDDDDDNDAGDYVDAPLSIPDFLTHSLNIDWSQYQCWDLVQQTQNYLKLLLSLVNSDGQTDSKSLVAIRTSVGGALAQTSGNALAYGTKKAQEQSQDGLIHTSLKPTEILYLTVAYDWFLFGRKSLPARDGGFTLEDICMLRRKDRGSTTSLGSDFSLVMESSPGATGSFTYEAVELVPAGAPTQAAWRKSHSSSPQSVLWNRPQPSEDRLPSQQGLAEARSSSSSSSNHSDNFFRMGSSPLEVPKPR

SEQ ID NO: 39090 - protein, 399 aa, Homo sapiens
  misc_feature (1)...(399): Xaa = X or * as defined in Table 2
FQTRMGISVATIPGTSCSWSMRASEKEKDTFESTVQVSKLQDLIHRSKMARCRGRFVCPVILFKGKHICRSATLAGWGELYGRQATTYFFSGGADDAWADVEDVTEEDCALRSGDTHLFDKVRGYDIKLLRYLSVKYICDLMVENKKVKFGMNVTSSEKVDKAQRYADFTLLSIPYPGCEFFKEYKDRDYMAEGLIFNWKQDYVDAPLSIPDFLTHSLNIDWSQYQCWDLVQQTQNYLKLLLSLVNSDGQTDSKSLVAIRTSVGVALAQTSGNALAYGTKKAQEQSQDGLIHTSLKPTEILYLTVAYDWFLFGHMLVDRLSKGEEIFFFCFNFLKHITSEEFSALKTQRRKSLPARDGGFTLEDICCXDERTVAVPPDLVCDCLPGHGEFPRSHWELHL

SEQ ID NO: 39091 - protein, 197 aa, Homo sapiens
  misc_feature (1)...(197): Xaa = X or * as defined in Table 2
HSFFFPNREKCSTKRXRLSASRFPPXPWSRLPSGQPAGGASAGSPSAPRGTGRGAGSRPAHGVQPPRAHPEAPCPACPRSVGGARRAPEPSSNLSGEAPASGDRDVPPPSPLARXVPLGGREFGWPWANAALRPGKTPRSDRVSRSPWSPAGFSVPASWPRRSTSGNRGPPSRPSRLSRTSGPLNRLGEPFDVQGPL

SEQ ID NO: 39092 - protein, 66 aa, Homo sapiens
MAGAPPPASLPPCSLISDCCASSQRDSVGSSEKRGIRVGVTRFSRCPPSPLSLTRKGNSLTPCASP

SEQ ID NO: 39093 - protein, 91 aa, Homo sapiens
MAGAPAPASLPPCSLISDCCASNQRDSMGVGPSEPGAGYNLVPVEKRSIRVGVTGFSRCCPSPLSLTRKGNSLTPWASQVRQCLALLQLAH

SEQ ID NO: 39094 - protein, 43 aa, Homo sapiens
  misc_feature (1)...(43): Xaa = X or * as defined in Table 2
KLSKFPYTEELSSGLYGIGSLCPHKYNCLVSSHSRCKNXVTGY

SEQ ID NO: 39095 - protein, 108 aa, Homo sapiens
FSEGNSYLVGIMHPLKAMLPGLQYQTETFPPPGYLMPCRLQQQSHLLTLRDCCASNQRDSVGVGPSEPGAGYNLVVRRFLSLLEKRSIWVRVTRFSSALNHELKVNDH

SEQ ID NO: 39096 - protein, 66 aa, Homo sapiens
VFHSCGQRKNHAVSKGAPPLSLSPVSVPCPVLSPFLLPFLERALIPRDGALGKNMWREGPFHPYAA

SEQ ID NO: 39097 - protein, 663 aa, Homo sapiens
  DOMAIN (329)..(376): kw TRANSCRIPTASE REVERSE II ORF2 domain identified by eMATRIX, accession number DM01354V, p-value=1.000e-40, raw score of 12.97
  DOMAIN (150)..(342): Reverse transcriptase domain identified by PFam, accession name rvt, E-value=4.8e-06, PFam score of 16.2
LISDCCASNQRDSMGVGPSEPGAGYNLVMRHFLSRSEKRNIRVGVTRFSRDFADFGTTIKQDFRLLGQTSVDRLLQLSQGQAVKGNQLLPVSLVKRKTTLAPNTQTASPRALADSLMQLARQVSRLESGQDFADFGTTIKQDFRLLGQTSVDRLLQLSQGQAVKGNQLLPVSLVKRKTTLAPNTQTASPRALADSLMQLARQVSRLESGQYALTAHAANTGKSKCVSKSEDCEYVGAQNVLEVLARAIRQEKEIKGIQLGKEEVKLSLFADDMIVYLENPIVSAQNLLKLISNFSKVSGYKINAQKSQAFLYTNNRQTENHIMSELPFTIASKRIKYLGIQLTRDVKDLFKENYKPLLKEMKEDTNKWKNIPCSWVGRINIVKMAILPKVIYRFNAIPIKLPILSSQNWKKLVVDLSPKSRMQDFADFGTTIKQDFRLLGQTSVDRLLQLSQGQAVKGNQLLPVSLVKRKTTLAPNTQTASPRALADSLMQLARQVSRLESGQDFADFGTTIKQDFRLLGQTSVDRLLQLSQGQAVKGNQLLPVSLVKRKTTLAPNTQTASPRALADSLMQLARQVSRLESGQDFADFGTTIKQDFRLLGQTSVDRLLQLSQGQAVKGNQLLPVSLVKRKTTLAPNTQTASPRALADSLMQLARQVSRLESGQ

SEQ ID NO: 39098 - protein, 222 aa, Homo sapiens
LNTTAITMCSLEQGSPKDADDTSIYMFYQKVGDNSIDSWKNAGRVFKDSDKFDANDPIKKDQTQEWSGSATFTSDGKIRLFYTDYSGKHYGKQSLTTAQDFRLLGQTSVDRLLQLSQGQAVKGNQLLPVSLVKRKTTLAPNTQTASPRALADSLMQLARQVSRLESGHPSEKRSIRVGVTRFSRCRPSPLSLIRKGNSLTPCASRVRQCLALLRLMHGARTH

SEQ ID NO: 39099 - protein, 476 aa, Homo sapiens
  DOMAIN (172)..(191): PROTEIN TYROSINE PHOSPHATASE SIGNATURE domain identified by eMATRIX, accession number PR00700D, p-value=8.788e-11, raw score of 12.47
  DOMAIN (102)..(231): Dual specificity phosphatase, catalytic domain identified by PFam, accession name DSPc, E-value=0.018, PFam score of -15.9
  misc_feature (1)...(476): Xaa = X or * as defined in Table 2
DTLVPTSQGDISRGLEGNLNSCPTXQXXRAPFLWCQPKAEWGTWIFNPEAEESLEPRSLISDCCANNQRDSVGVGPSEPGAGYNLVVRSFLSPSEKRSVRVGVTRLSRCRPSPLSLTQKGNPLTPCASQVRQCLALLRLRHVYFYNFGWKDYGVASLTTILDMVKVMTFALQEGKVAIHCHAGLGRTGVLIACYLVFATRMTADQAIIFVRAKRPNSIQTRGQLLCEAQQSGAFSADVSGSHSPGEPVSPSFANVHKDPNPAHQQVSHCQCKTHGVGSPGSVRQNSRTPRSPLDCGSSPKAQFLVEHETQDSKDLSEAASHSALQSELSAEARRILAAKALANLNESVEKEELKRKVEMWQKELNSRDGAWERICGERDPFILCSLMWSWVEQLKEPVITKEDVDMLVDRRADAAEALFLLEKGQHQTILCVLHCIVNLQTIPVDVEEAFLAHAIKAFTKISIIFVNQNPEVTVLL

SEQ ID NO: 39100 - protein, 484 aa, Homo sapiens
  DOMAIN (287)..(298): dUTPase domain identified by eMATRIX, accession number PF00692B, p-value=9.804e-09, raw score of 8.14
  DOMAIN (225)..(345): dUTPase domain identified by PFam, accession name dUTPase, E- value=0.016, PFam score of -7.8
MGKKQNRKTGNSKTQSASPPPKERSSSPTTEQSWMENDFDELREEGFRRSNYSQLQEDIQTKGKEVENFEKNLEECITRITNTEKCLKELMELKTKARELREECRSLRSRCDQLEERVSAMEDEMNEMKREGKFREKRIKRNEQSLQEIWDYVKRPNLRLTGVPESDAENGTKLENTLQDIIQENFPNLARQANVQIQEIQRTPQRYSSRRATPRHIIVRFTKVEMKEKMLRAAREKEVFVPEGGTLPRGNTTMIPLNWKLRLPPGLFGLLLALRQQAKNGVTVLAGVVDPDYQDEISLLLHNREILNVSTLQQSYSSGEKQVSFLISDCCASNQRDSVGVGPSEPGVGYSLMVHRFLSLSEKRSIRVGVTRFSRCVRHPFLRLRKGTPDPLRFPKIQKLLKLQCSHGASITWEAASKQHAALSETAPPRVRMALEAKRKDSNRNENLDKRTLCAAQGKSTVEVQGRVCAQGRATGLWADSRDA

SEQ ID NO: 39101 - protein, 28 aa, Homo sapiens
EQHGGSCCHDPITSHQVPSFTCGDYNSR

SEQ ID NO: 39102 - protein, 54 aa, Homo sapiens
IPHALVLMSPVSCWASLDITDPPAAGSFLYGATSTPWTVQDVKDCQKCELLDVQ

SEQ ID NO: 39103 - protein, 356 aa, Homo sapiens
  misc_feature (1)...(356): Xaa = X or * as defined in Table 2
MEESRYWGTGRNRREGLKLQWAQPAPLFNIRQGPNEGDNQQGSYWEALASIMQIIHLVPSGLGMVTAFHCSWYLSTTATFPGVLNPALTEIKSGNYYVHGSFILQVADYKEFQTLLMITKATFHQKTQCWACEEGVQQSFHCPCRMQAAASVERYTELLKEFLFKEHTCDNQEPTSTLHYHSKLTVHIHVYSSRCTLPCQPSQAAQAEGISQPAPACEDFVFAALAPPESGRCPTLRLLGGLCTPTNARRTRTHSTTACWARAQWDSLGPLKLSHRPRVCGGTRAPGRQGCMGNQRLGTSNSEARDPGGLRVKHRCEAIQEPPNRSRRQGAPLHSPPAYXMSSWRPXSFSKRHNLS

SEQ ID NO: 39104 - protein, 84 aa, Homo sapiens
MQLMTVDASHARHIQGIQPAPISTQAVVLADGATIVANPISNPFSAAPAATTVVQTHSQSASTNAPAQGSSPRPSILRKKPATD

SEQ ID NO: 39105 - protein, 534 aa, Homo sapiens
  misc_feature (1)...(534): Xaa = X or * as defined in Table 2
QWMHRMLDIFKGSSQHPSVPRVSSRPPLGPQGYSLHHFGTQGIHSATPINTQGLQPAPMGTQQPQPEGKTSAVVLADGATIVANPISNPFSAAPAATTVVQTHSQSASTNAPAQGSSPRPSILRKKPATDGMAVRKTLIPPQPHDVASPRVESSMRSTSGSPRPAGAKPKSESTCLWPLRSLCPWRLYPIKIMISLPLPSLKLPSSPHRPFQLXLQQPVPRHNQPLPFQPFLERSPSLHPSPPLHCTTSISHCGWQSFLRLGPSRSXNXSERRSRTNGYHEASFSVPPLATNTVSPSLALLANNLSMPTSDLPPGASPRKKPRNNSMWISTEEGDMMETNSTDDEKSTAKSLLVKAEKRKSPPKEYIDEEGVRYVPVRPRPPITLLRHYRNPWKAAYHHFQRYSDVRVKEEKKAMLQEIANQKGVSCRAQGWKVHLCAAQLLQLTNLEHDVYERLTNLQEGIIPKKKAATDDDLHRINELIQGNMQRCKLVMDQISEARDSMLKVLDHKDRVLKLLNKNGTVKKVSKLKRKEKV

SEQ ID NO: 39106 - protein, 55 aa, Homo sapiens
RPTRPPKSNKRQCLVFVTPKEEEPVRNILEKFNTISGSKVRSLYLHAPPLLPLER

SEQ ID NO: 39107 - protein, 82 aa, Homo sapiens
  misc_feature (1)...(82): Xaa = X or * as defined in Table 2
XAVKARGCRIATLPMDLIGFGYAALVTFGSIFGYKRRGGVPSLIAGLFVGCLAGYGAYRVSNDKRDVKVSLFTAFFLATIMX

SEQ ID NO: 39108 - protein, 234 aa, Homo sapiens
  misc_feature (1)...(234): Xaa = X or * as defined in Table 2
VWGGEFLPRIWFMLPTSHQWMLFSVFLGWGSCQWSCSHLLSCLWRAAFSEFPLGPEPGEGIGPELCLCFQMEAIELSVDPKSNKRQCLVFVTPKEEEPVRNILEKFNTISGSKCTEVQRGVIYPGHIRXRXXSIPRGFXFYSKXGRPDSAGGHGPGGVLQGEKGHSACARQGGRFQEGAAFAQRETAGRRVGQRWCGDCFRTPVHRKSLSSPNFGGFGAGSEAVPCHLVLYLVW

SEQ ID NO: 39109 - protein, 59 aa, Homo sapiens
  misc_feature (1)...(59): Xaa = X or * as defined in Table 2
LRLTLLFFQNLLGGKSSMLWTAHPCPEGACSSSCTSLGSHLLLSSFPVLGRXPGPSGDH

SEQ ID NO: 39110 - protein, 198 aa, Homo sapiens
  DOMAIN (48)..(68): VASOPRESSIN V2 RECEPTOR SIGNATURE domain identified by eMATRIX, accession number PR00898F, p-value=8.886e-09, raw score of 9.10
  misc_feature (1)...(198): Xaa = X or * as defined in Table 2
TFFKFPPDSGAQLASPRGSRIGAAGGAASSPEPSAALLSPWVVDGTGRPGAGGGARRGGSGCTGAHGGGGSSGMVGPAGPEPCPAGRQLRPGEKSSAAPLREPASALAGPERGSHSAAAGXRAPQGRQSGSPGRGGAESERGLXGLPSCCHLSPGSGAAAVPRSVGSRWPCGAPTLATPPTSASFFSAATPEGPPLAS

SEQ ID NO: 39111 - protein, 198 aa, Homo sapiens; identical to SEQ ID NO: 39110
  DOMAIN (48)..(68): VASOPRESSIN V2 RECEPTOR SIGNATURE domain identified by eMATRIX, accession number PR00898F, p-value=8.886e-09, raw score of 9.10
  misc_feature (1)...(198): Xaa = X or * as defined in Table 2

SEQ ID NO: 39112 - protein, 28 aa, Homo sapiens
  misc_feature (1)...(28): Xaa = X or * as defined in Table 2
KEGEGGKPDXPVRMCPPKPSGHWKHPGE

SEQ ID NO: 39113 - protein, 197 aa, Homo sapiens
  misc_feature (1)...(197): Xaa = X or * as defined in Table 2
GGASGVVRSSWWARGLAGFRSEAADLRGLPVELRASPAPCVRTPQPLGGRGIGRPGAEGGPCWGGSGRTGAHGGAEGAGSSLGQPRKGLPQCSGGPEGLLKCGQSGSPGRGRAQSERGLXGLPACCHLSHXPQGRQIXPRTCPTPFQSKTSDQGGPSGPAVSGSERQVXLHHQXPGCRDYLCGPFCSWEINPVWGWL

SEQ ID NO: 39114 - protein, 187 aa, Homo sapiens
  misc_feature (1)...(187): Xaa = X or * as defined in Table 2
NCPSLLVESCFQECGSSIPFALPSTQVEHALYASERXQRAGSPHSPHSLSVPPLPGLPLWRHLRSPSGPPLHXPPXASTLTGGPQXRLGSAGINVSSEPVSSSRPNVXSFPFPQYTVTLVKGWRSREPSPKSSVLGSMVPXSTKSEPXREPPIXSLTGKAGERGEKGREKAIGSGRXGVAKCSDHVR

SEQ ID NO: 39115 - protein, 27 aa, Homo sapiens
  misc_feature (1)...(27): Xaa = X or * as defined in Table 2
XLLCGPSLLDEHHPLLHGAQSHRPPKG

SEQ ID NO: 39116 - protein, 334 aa, Homo sapiens
MEQGAALLGEAPAAQEPTAGQGEAQAWWAAGPKPCPARRQLRPSEKSSTAAAGPGAKPLTARGLWAGQPLQVWGLPSPHPPGTCAGPQAPCAALVPIGTSPSRPLSKLRELALALASPERGSHSAVKALPEASQYGSIQAKLPQSSGFYCMITRCHLLAKALNLGPDHSSSPAMEQSWTENDFDELTEVGLRRLVITNFSELNEDVRTHGKEAKNLEKRLHELLTTVNSVEKTLNDLMELKTMARKLHDTCTSFNSQFDEVEVRVLVIEDQINEIKLEEKFREKRVKINEQSLQEIWDYVKRPNLLRGDSVLAVLTALARSQRLLCLGSHFGGT

SEQ ID NO: 39117 - protein, 407 aa, Homo sapiens
  misc_feature (1)...(407): Xaa = X or * as defined in Table 2
MKPRTLAVSVTALKVARLEFVPSDVRMCSEFLPSGGLVVSLASGVKLQTFAVSVTARNSVDPKNSGAQLASPSGSSTRAASGAACXSPSPPPCARTPQPLGGRGTGCPGAGGGTRRGGSGRTGAHGAAEGVGSGLGQPRKGPPTVQWWAEGLLKCRQSGSPGRGGAESKRGLXGLPASTLSPPPGECAGKSENSHMNLNCSGGSLGPGTGAHLPLGPDSGQPAETLLWGPCCGPGGTGLTGSGQTISLGCQGGQPRREVKPPVPQRVSVLLVAVNPPPDSRCRVETDRPWRLCIQSCLCGTLKRDVLHSPSVVFNTTRGGTAEWSREDKDALLPEYALHMPFAVGFKLEYKEGVLGSNLAAGPEKELCEAKRNQCPKSGVSHTSRPLKPEWSDFVAEIDESKLPDRS

SEQ ID NO: 39118 - protein, 432 aa, Homo sapiens
  DOMAIN (130)..(147): PROKARYOTE METALLOTHIONEIN SIGNATURE domain identified by eMATRIX, accession number PR00859C, p-value=8.105e-09, raw score of 7.06
  misc_feature (1)...(432): Xaa = X or * as defined in Table 2
ESLRAGSFQQEIQPELAPLIILRGFGTWPGWSFQATGFCVGVRGSPGSGFRGCGAYRAPXSFRTQLWPWQPLQGLDPKPLKDALRPSPLGRRACAEHHLCSADERPDLGFEGLQRWGGCRGSQGKPAVHQAWGRCGEGTGGGHTGSPPPRLTPPPGPGSFRAQPGERRPAACGQQRALGPMRPPPACGPSPTXGCALNPTSPPAPLVXGFIHIVAAFCSFVTPVSKSHSFQLGGELRVAGSDGGRWGERENTQGSTLPPSSPASSPGSPSPDPATPPGPATPGLIDILLLLPMVASSRKHDFSGFSGRLPPQGEFFQXGPTGWQSWVWPLDPSYLGGCQGGCGQGPRTGRRGASSHCCVPAAPGLSMDCSRGSGGSPPRSPPWALLGDLPSSLETVCLVMMFPCPIWMASEFAMEIQLLGPFWQIMLIGLCW

SEQ ID NO: 39119 - protein, 220 aa, Homo sapiens
  misc_feature (1)...(220): Xaa = X or * as defined in Table 2
RIPLLVTRLKINEKVLQVLTNIFLFHDFSVQNFIKGLQLSLLEHFYSQPLSVLCCNLPEAKRRINFLSNNQCENIRRLPSFRRYVEKQASEKQVALLTNERYLKEETQLLLENLHVYHMNYFLVLRCLHKFTSSLPKYPLGRQIRELYCTCLEKNIWDSEEYASVLQLLRMLAKDELMTILEKCFKGFKSYCENHLGSTAXRIEEFLGQFQSLDEPRGRR

SEQ ID NO: 39120 - protein, 297 aa, Homo sapiens
  misc_feature (1)...(297): Xaa = X or * as defined in Table 2
NPILHGNFIFMLDHSLKNVQDQEXTLMXHYGPQVVTMCQCSFIERNKRIPVVQGIRRGRGHVQWGRYVEKQASEKQVALLTSERCLKKETQLLLENLHVYHMNYFLVLRCVHKFTSSLPKYPLGRQIRELYRTCLEKNIRNSEEYASVLQLLKMLAKDELMTILEKCFEVFKSSCEKHLGSTAKRIQEFLAQFQSFDETKENEALKREEGCIPNITPDICIAYKLYLECRRLINLVDYSQAFATILTAAEKMDANSTSSEEMNEIIYAWCIRTVFELELLGFIKPTKQKTDHVARLT

SEQ ID NO: 39121 - protein, 180 aa, Homo sapiens
SLLEMKELRRSKKQTKFEVLRENVVNFIDCLVREYLLPPETQPLHEVVYFSAAHALREHLNAAPRIALHTALNNPYYYLKNEALKSEEGCIPNIAPDICIAYKLHLECSRLINLVDWSEAFATVVTAAEKMDANSASSEEMNEIIHARDIRAVSELELLGFIKPTKQKTDHVARLTWGGC

SEQ ID NO: 39122 - protein, 54 aa, Homo sapiens
MNSMIQICQDRAEIISSYCNLKIHQRLQNLLISFLQSLKKLKNVNLSFINKNLK

SEQ ID NO: 39123 - protein, 52 aa, Homo sapiens [sequence omitted]

SEQ ID NO: 39124 - protein, 131 aa, Homo sapiens
  DOMAIN (16)..(124): Elongation factor Tu family domain identified by PFam, accession name GTP_EFTU, E-value=1.9e-05, PFam score of 21.0
ETTEARNALIEQVADLDDESADLVLEEFCENFDLLPAEKLQTAIHRVTLAQTAVPVLCGSALKNKGIQPLLDAVTMYLPSPEERNYEFLQWYKDDLCALAFKVLHDKQRGPLVFMRIYSGTIKPQLAIHKY

SEQ ID NO: 39125 - protein, 428 aa, Homo sapiens
  DOMAIN (254)..(418): Elongation factor G C-terminus domain identified by PFam, accession name EFG_C, E-value=3.2e-21, PFam score of 83.9
  misc_feature (1)...(428): Xaa = X or * as defined in Table 2
DDLCALAFKVLHDKQRGPTGFYAPFNSRPLXKPQLAHSIILMETATERISRLLLPFADQHVEIPSLTAGNIALTVGLKHTATGDTIVSSKSSALLQLVEPNGREKRSTDKTMKAERLLLAGSGRFQEPVFFCTIGTPITVXGSQIWEHAFEMSFSVRIPVLKVRLDPDSGQTVLCGMGELHIEIIHDRIKREYGLETYLGPLQVAYRETILNSVRATDTLGXELXGDKRHLVDLLGSGKARPIETSSVMPVIEFEYAESINEGLLKVSQEAIENGIHSACLQGPLLGSPIQDVGNYLYIPXQIHPWAPSTTYDFCLCLKMPCKKALERKADKQVLEPLMNLEVTVARDYLSPVLADLAQRRGNIQEIQTRQDNKVVIGFVPLAEIMGYSTVLRTLTSGSATFALELSTYQAMNPQDQNTLLNRRSGLT

SEQ ID NO: 39126 - protein, 100 aa, Homo sapiens
LAIHLSSLISRHDDEATRTSTSEGLEEGEVEGETLLIVESEDQAFSVDLSHDQSGGISLNSDEGDVSWMEEQLSYFCDKCQKWIPASKELLNSFDLSIPV

SEQ ID NO: 39127 - protein, 794 aa, Homo sapiens
  DOMAIN (665)..(741): Acetyltransferase (GNAT) family domain identified by PFam, accession name Acetyltransf, E-value=0.00015, PFam score of 28.5
  misc_feature (1)...(794): Xaa = X or * as defined in Table 2
MDSSIHLSSLISRHDDEATRTSTSEGLEEGEVEGETLLIVESEDQASVDLSHDQSGDSLNSDEGDVSWMEEQLSYFCDKCQKWIPASQLREQLSYLKGDNFFRFTCSDCSADGKEQYERLKLTWHQVVMLALYNLSLKGSGRQGYFRWKEDICAFIEKHXTFLLRNRKKTSTCRSTGAGCLSVGSPMYFRXGAXEFGEPRWWKLVHNLPLTMKPEREKTAASTLNIFAASKPTLDPIITVEGLRKRASRNPVESAMELKEKRSRTQEAKDIRRAQKEAAGFLDRSTSSTPVKFISRGRRPDVILEKGEVIDFSSLSSSDRTPLTSPSPSPSLDFSAPGTPASHSATPSLLSEADLIPDVMPPQALFHDDDEMEGDGVIDPGMEYVPPPAGSVASGPVVGGRKKVRGPEQIKQEVESEEEKPDRMDIDSEDTDSNTSLQTRAREKRKPQLEKDTKPKEPRYTPVSIYEEKLLLKRLEACPGAVAMTPEARRLKRKLIVRQAKRDRGLPLFDLDQVVNAALLLVDGIYGAKEGGISRLPAGQATYRTTCQDFRILDRYQTSLPSRKGFRHQTTKFLYRLVGSEDMAVDQSIVSPYTSRILKPYIRSDPHWTPEPDAPLDYCYVRPNHIPTINSMCQEFFWPGIDLSECLQYPDFSVVVLYKKVIIAFGFMVPDVKYNEAYISFLFVHPNWRRAGIATFMIYHLIQTCMGKDVTLYVSKSNPAMLLYQKFGFKTEEYVLDFYDKYYPLESTECKHAFFLRAPALDANTAHRGNACAIGRTRSLWEILKAVIEFHREL

SEQ ID NO: 39128 - protein, 120 aa, Homo sapiens
  DOMAIN (51)..(100): kw TRANSCRIPTASE REVERSE II ORF2 domain identified by eMATRIX, accession number DM01354Z, p-value=4.758e-14, raw score of 9.06
  misc_feature (1)...(120): Xaa = X or * as defined in Table 2
GDSVPTAEGGDQVCVILSSVPQTVWEPMFNKRACGPXSPXSLSATSIYPRELKAGTQKDTCPPVFRAVLFTTATQCPSTDAWMNKMWYSRTMECYSALKRKEIPPHATARHPMCLQFCRW

SEQ ID NO: 39129 - protein, 72 aa, Homo sapiens
  misc_feature (1)...(72): Xaa = X or * as defined in Table 2
ARPGDQATSGGQGTTFQHPLFCFELGGSQNPALQXPFAAACPVGADXTKFTFAFCCRLKXKRTCCLSLGSRC

SEQ ID NO: 39130 - protein, 38 aa, Homo sapiens
MFLVNDHKIMKRSIGSSFLLMAKMEPTTASVKTSASSA

SEQ ID NO: 39131 - protein, 32 aa, Homo sapiens
IYFGCLLGEPVVAAEAGIWDNDCVKKQLLHSW

SEQ ID NO: 39132 - protein, 130 aa, Homo sapiens
  DOMAIN (2)..(21): Chaperonins TCP-1 proteins domain identified by eMATRIX, accession number BL00750D, p-value=8.342e-10, raw score of 16.16
  DOMAIN (13)..(129): TCP-1/cpn60 chaperonin family domain identified by PFam, accession name cpn60_TCP1, E-value=1.1e-32, PFam score of 122.0
MEMKHKSETVTILIRGLVLDHGARHPDMKKRVEDAYILTCNVSLEYEKTEVNSGFFYKSAEEREKLVKAERKFIEDRVKKIIELKRKVCGDSDKGFVVINQKGIDPFSLDALSKEGIVALRRAKRRNMES

SEQ ID NO: 39133 - protein, 456 aa, Homo sapiens
  DOMAIN (171)..(212): Chaperonins TCP-1 proteins domain identified by eMATRIX, accession number BL00750F, p-value=1.000e-27, raw score of 18.40
  DOMAIN (2)..(417): TCP-1/cpn60 chaperonin family domain identified by PFam, accession name cpn60_TCP1, E-value=1.6e-63, PFam score of 224.5
  misc_feature (1)...(456): Xaa = X or * as defined in Table 2
ARHPDMKKRVEDASILPCNVSLEYEKTEVNSGFFSKSAEEREKLVKAERKFIEDRVKKIIELKRKVCGDSDKGFVVINQKGIDPFSLDALSKEGIVALRRAKRRNMERLTLACGGVALNSFDDLSPDCLGHAGLVYEYTSPACPKQSGLCILSSTLGEEKFTFIEKCNNPRSVTLLIKGPNKHTLTQIKDAVRDGLRAVKNAIDDGCVVPGCWCRGKWAMAEALIXPXAPVLKGRAQLGSPKHLLDAFAHYFPKVLCFRNSGFLTFQGNIKLKFKAEHSRIQVQLVGVDLNTGEPMVASRSKAVWGHTXLWXKKTSLPSTPCTWXIATNILLGLNEIMRAGMSFSXKGFVVINQKGIDPFSLDALSKEGIVALRRAKRRNMERLTLACGGVALNSFDDLSPDCLGHAGLVYEYTSPACPKQSGLCILSSTLGEEKFTFIEKCNNPRSCHIIDQRTK

SEQ ID NO: 39134 - protein, 129 aa, Homo sapiens
MEFYVAAAKAKHPVHWVKDLLYLCTLQCNFLKNTVIIISELPNFNRCQCSLLFSQWENSLETHLKLGQKFHSCILQDHFAESSRLRYRGSFNSTFQEKIPARMISSTKRMLVATSAGMKKLFLYTIVIP

SEQ ID NO: 39135 - protein, 491 aa, Homo sapiens
  misc_feature (1)...(491): Xaa = X or * as defined in Table 2
KCISASVKVDFSDLLLSNNTSXSAFTPTRTQKSSSKLLRKESHYSGMMSIQEKSKENSSKVTKKSDDKNSETEIQDSQKNLAKKSGPKETIKSQAKSSSESKINQPELETRMSTRSSKAASNDKATKSINKNTVTVRGYSQESTKKKLSQKKLVHENPKANEQLNRRSQRLQQLTEVSRRSLRSREIQGQVQAVKQSLPPTKKEQCSSTQSKSNKTSQKHVKRKVLEVKSDSKEDGKSSNXXSNKFSSKGKNARXNIRSACACSSQCTQGSEKCPQKTTRRDETKPVPVTSEVKRSKMATSVVPKKNEMKKSVHTQVNTKHNTPKKSTAISAXTKXXXAGASRKEQTRXYSPAREEIAGEIESDNVEVKKESSQMESVKEEKPSEIKLEETSVERQILHQKGTNQDVQCNRFFPSRKTKPVKCILNGINSSAKKNSNWTKIKLSKFNSVQHNKLDSQVSPKLGLFTNQFFTTSFRNASSSDSKYIFRDKAT

SEQ ID NO: 39136 - protein, 130 aa, Homo sapiens
  misc_feature (1)...(130): Xaa = X or * as defined in Table 2
AISRALGRYVLFPCLIQDGIFVAHTAHAILTSLEDSLXMFQPKTCWCLANXHDTLSVNMETPHPSFQEELSGLLLLKMLRSPIEASKDKDKVKSNAVRALGNLLHFLQPSHIEXPTFAQINEEAIQALIS

SEQ ID NO: 39137 - protein, 225 aa, Homo sapiens
  DOMAIN (115)..(130): TEA DOMAIN SIGNATURE domain identified by eMATRIX, accession number PR00065A, p-value=6.914e-09, raw score of 9.88
  misc_feature (1)...(225): Xaa = X or * as defined in Table 2
KSACDALSSILPEAFRNLPNDRQMLCITVLLGLNDSKNRLVKAATSRALGVYVLFPCLRQDVIFVADAANAMVMSLEDKSLNVRAKAAWSLGNLTDTLIVNMETPDPSFQGRVLWSPALENGYDQALEASKDKDKVKRHAVRALGNLLHFLQPSHIGKTPHLQKFIXGSLSRALNFLLFXQKLAMKVRWNACYAMGNVFKNPALPLGTAPWTSQAYNALTSVVTS

SEQ ID NO: 39138 - protein, 437 aa, Homo sapiens
  misc_feature (1)...(437): Xaa = X or * as defined in Table 2
XLLTKVWNQIKPYIRHKDVNVRVSSLTLLGAIVSTHAPLPEVQLLLQQPCSSGLGNSNSATPHLSPPDWWKKAPAGPSLEETSVSSPKGSSEPCWLIRLCISIVVLPKEDSCSGSDAGSAAGSTYEPSPMRLEALQVLTLLARGYFSMTQAYLMELGEVICKCMGEADPSIQLHGAKVVMFWTMMLNDSLQNSEHPTLQASACDALSSILPEAFSNLPNDRQMLCITVLLGLNDSKNRLVKAATSRALGVYVLFPCLRQDVIFVADAANAILMSLEDKSLNVRAKAAWSLGNLTDTLIVNMETPDPSFQEEFSGLLLLKMLRSAIEASKDKDKLSTISIYYFNGQENRKEKNWNEREYKLEIPYELCTEVDAINKWTAPWTSQAYNALTSVVTSCKNFKVRIRSAAALSVPGKREQYGSVDQYARIWNALVTAFTEE

SEQ ID NO: 39139 - protein, 917 aa, Homo sapiens; identical to SEQ ID NO: 36655

SEQ ID NO: 39140 - protein, 91 aa, Homo sapiens
MVIMERSKLSELAASTSVQEQNTTDEEKTQPVSLLPITIKLLHDLSPLPLLRNILAPEFLLPGTHVAQPESLTESKELEDSRGFSSLTAHP

SEQ ID NO: 39141 - protein, 57 aa, Homo sapiens
HLPFRFYDQGRRGSSDPTVQRSVFASVDKVPEAPSAGSTSFLEFVKAQRKIKHNTPP

SEQ ID NO: 39142 - protein, 329 aa, Homo sapiens
MVHGREEGGMDPEKLERIQLPVPNAAEKTTYNHPLAERLIRIMNNAAQPDGKIRLATLELSCLLLKQQVLMSAGCIMKDVHLACLEGAREESVHLVRHFYKVIGRAQMDSSMGEDIFLDMFEDEYRSMTMKPMNVEYLMMDASILLPPTGTPLTGIDFVKRLPCGDVEKTRRLLPRVDECGCEVTSPGPGRQQLAHAARKQEGENRAFVPGQLVGSAHHRCHPVVPARSVSSSIKSSSYNKVPTVPATPDYYEGHLILGDKVLADDGCSVQAIRVFFMLRSLSLQLRGEPETQLPLTREEDLIKTDDVLDLRGLSPGSGKMAFSSPKIC

SEQ ID NO: 39143 - protein, 692 aa, Homo sapiens
  DOMAIN (460)..(503): Histone H2B proteins domain identified by eMATRIX, accession number BL00357, p-value=2.598e-10, raw score of 7.74
DERRVGAADMFGRSRSWVGGGHGKTSRNIHSLDHLKYLYHVLTKNTTVTEQNRNLLVETIRSITEILIWGDQNDSSVFDFFLEKNMFVFFLNILRQKSGRYVCVQLLQTLNILFENISHETSLYYLLSNNYVNSIIVHKFDFSDEEIMAYYISFLKTLSLKLNNHTVHFFYNEHTNDFALYTEAIKFFNHPESMVRIAVRTITLNVYKVDNQAMLHYIRDKTAVPYFSNLVWFIGSHVIELDDCVQTDEEHRNRGKLSDLVAEHLDHLHYLNDILIINCEFLNDVLTDHLLNRLFLPLYVYSLENQDKVFLIIHHAPLVNSLAEVILNGDLSEMYAKTEQDIQRSSVLPTLSSLWQGSHLSLNQLQSGLHKCSSHLCGAQAAADSVTGEIPAIRSLEWLISAGSKARTFFFLKMLIGFWEKVDCEYQRRQVLSTRLQEALPSNRLTDVAAVHSSCMLGFGSTAPRGSWIGDPAAVHLPLPGELAEHLGSKGTTTVTKHQPQAKPSIRCFIKPTETLERSLEMNKHKGKRRVQKRPNYKNVGEEEDEEKGPTEDAQEDAEKAKGTEGGSKGIKTSGESEEIEMVIMERSKLSELAASTSVQEQNTTDEEKSAAATCSESTQWSRPFLDMVYHALDSPDDDYHALFVLCLLYAMSHNKGKSPEKEEGLSGTQSHPGKAGTFGKEGAEERKRAQV

SEQ ID NO: 39144 - protein, 1015 aa, Homo sapiens
  misc_feature (1)...(1015): Xaa = X or * as defined in Table 2
RNLLVETIRSITEILIWGDQNDSSVFDFFLEKNMFVFFLNILRQKSGRYVCVQLLQTLNILFENISHETSLYYLLSNNYVNSIIVHKFDFSDEEIMAYYISFLKTLSLKLNNHTVHFFYNEHTNDFALYTEAIKFFNHPESMVRIAVRTITLNVYKVSLDNQAMLHYIRDKTAVPYFSNLVWFIGSHVIELDDCVQTDEEHRNRGKLSDLVAEHLDHLHYLNDILIINCEFLNDVLTDHLLNRLFLPLYVYSLENQDKGGERPKISLPVSLYLLSQVFLIIHHAPLVNSLAEVILNGDLSEMYAKTEQDIQRSSAKPSIRCFIKPTETLERSLEMNKHKGKRRVQKRPNYKNVGEEEDEEKGPTEDAQEDAEKAKGTEGGSKGIKTSGESEEIEMVIMERSKLSELAASTSVQEQNTTDEEKSAAATCSESTQWSRPFLDMVYHALDSPDDDYHALFVLCLLYAMSHNKGMDPEKLERIQLPVPNCGREGPPYNHPLGERFIQGSWNNVAQPDGKIRLATLGAXGCLVSXRQQVLMSAGCIMKDVHLACLEGAREESVHLVRHFYKGEDIFLDMFEDEYRSMTMKPMNVEYLMMDASILLPPTGTPLTGIDFVKRLPCGDVEKTRRAIRVFFMLRSLSLQLRGEPETQLPLTREEDLIKTDDVLDLNNSDLIACTVITKDGGMVQRFLAVDIYQMSLVEPDVSRLGWGVVKFAGLLQDMQVTGVEDDSRALNITIHKPASSPHSKPFPILQATFIFSDHIRCIHIAKQRFAKGRIQARRMKMQRIAALLDLPIQPTTEVLGFGLGSSTSTQHLPFRFYDQGRRGSSDPTVQRSVFASVDKVPGFAVAQCINEHSSPSLSSQSPPSASGSPSGSGSTSHCDSGGTSSSSTPSTAQSPADAPMSPELPKPHLPDQLVIVNETEADSKPSKNVARSAAVETASLSPSLVPARQPTISLLCEDTADTLSVESLTLVPPVDPHSLRSLTGMPPLSTPAAACTEPVGEEAACAEPVGTAED

SEQ ID NO: 39145 - protein, 52 aa, Homo sapiens
  DOMAIN (15)..(43): PH domain identified by PFam, accession name PH, E-value= 0.0062, PFam score of 15.5
LFQTIFEDVSGFGAWHRRWCVLSGNCISYWTYPDDEKRKVIYIVLFSGESPD

SEQ ID NO: 39146 - protein, 55 aa, Homo sapiens
TDPSPQASDYETMETVVQIQEEKSESQLSVSPGKNQESEAGELSHNQLSSPLGFQ

SEQ ID NO: 39147 - protein, 66 aa, Homo sapiens
MASPGGLSAVRTSNFALVGSYTLSLSSVGNTKFVLDKVPCFIFLWRAYLFKDKMSSGFPVLEEEVF

SEQ ID NO: 39148 - protein, 24 aa, Homo sapiens
  misc_feature (1)...(24): Xaa = X or * as defined in Table 2
DPSXEARSMLLLLFLPPDHSGLPH

SEQ ID NO: 39149 - protein, 82 aa, Homo sapiens
  misc_feature (1)...(82): Xaa = X or * as defined in Table 2
GRNAVVQSXAHCRSQTPGPKXSSLLVFPSSWTYRHMPPHLANXKKFFLHRDGGLDMLPRLVWNSWPQVILPPQPPKALGLLL

SEQ ID NO: 39150 - protein, 594 aa, Homo sapiens
  misc_feature (1)...(594): Xaa = X or * as defined in Table 2
VLDARNAGAGGLAGPAGVLRGRASRCDPGAAVGAGQGGARVRPGRAAAPSPGPPGGAXCVPTDAGAGPGSAGARQPLPFAAGALSHSGHCXRGLRGPGSLASPAQAKAAWSGLLLSPAAAGRDGGRGHNPRDPPPLREHGPGIPGFHGDRGXELYQCHLGGEGGGPDKPGSPCASCGLDGHWYRALLLETFRPQRCAQVLHVDYGRKELVSCSSLRYLLPEYFRMPVVTYPCALYGLWDGGRGWSRSQVGDLKTLILGKAVNAKIEFYCSFEHVYYVSLYGEDGINLNRVFGVQSCCLADRVLQSQATEEEEPETSQSQSPAEEVDEEISLPALRSIRLKMNAFYDAQWKENGYYRAIVTKLDDKSVDVFLVDRGNSENVDWIINMLLRFLTNQEQGEETISKVIAQAGYAKYQEFETKENILVNAHSPGHVSNHFTTESNKIPFAKTGEGEQKAKRENKTTSVSKALSDTTVVTNGSTELVVQEKVKRASVYFPLMQNCLEIKPGSSSKGELEVGSTVEVRVSYVENPGYFWCQLTRNIQGLKTLMSDIQYYCKNTAAPHQRNTLACLAKRTVNRQWSRALISGIQVCGSMSM

SEQ ID NO: 39151 - protein, 271 aa, Homo sapiens; identical to SEQ ID NO: 34869
  DOMAIN (140)..(268): dUTPase domain identified by PFam, accession name dUTPase, E- value=4.7e-09, PFam score of 43.5

SEQ ID NO: 39152 - protein, 195 aa, Homo sapiens
  DOMAIN (64)..(192): dUTPase domain identified by PFam, accession name dUTPase, E- value=4.7e-09, PFam score of 43.5
IGFAYPVCDASAKTTIRGLLECLIRCDGIPHSIASDQARIHRSRNQEVEVEVAPLTITPSDPLAKFLLSVPVTLRSAGLEVLVPGEGMLPPGNTRTIPLNWKLRLPPGHFGLLLTLSQEAKNGVTVLAGVIDLDYQDEISLLLHNGGKKEYARNTGDPLGRLLVLPCPVIKINGKLQQPNPGGTTNGSDPSGMKV

SEQ ID NO: 39153 - protein, 565 aa, Homo sapiens
  DOMAIN (263)..(271): RNase H domain identified by eMATRIX, accession number PF00075E, p-value=9.182e-10, raw score of 8.53
  DOMAIN (303)..(397): Integrase core domain identified by PFam, accession name rve, E-value=3.4e-15, PFam score of 56.5
MDKYFMIKTPKAMATNTTIDKWDLIKLKNFCTAKETMIRVNRQPIECKKMFAIYPSDKVILLFKMAPKRNAEGLSTVSTCKKAAMCLIEKGCELVGPVGPQTHPVVTSPVSECIIGIDILSGWQNPHIGSLTGRVKAIMVAKDKLKPLELPLPGKIVNQKQHCIPGWIVEISATIKDLKDAVIGIPTLPPFNSPIWPVQKTNGSWRMTVDYHKLNQVVTPIAAAVPDVVSWLEQINTSPGTCLHWWPHGEFPRLVDREERTRTWFTDGSAQYAGTTQKWTPAALQPLSRTSLKESECFIHHHGIPHSIASDQGTHFMAKKVRQWAHAHEIHWSYHVPHYPEAAGLIEKWNGILKPQLQCQLGDNTLQGWDKVLQKALYALNQHSVYGTISPIARIHRSRNNQEVEVEVTPLIITPTDPLAKFLLPVPSTLHSLDLEVLVPEGGMLPPGHTAMIPLNWKLRLPPGHFGLLLPLSQQAKKGVIVLAGVIDLDYQNEISLLLHNGGKEEYALNIGDPLGHLLVLPCPVINVNGKLQQPNPGRITNGEDPSGMKVCVTPPGTTTTTKKP

SEQ ID NO: 39154 - protein, 239 aa, Homo sapiens
MWKQLWNSVTGRGWNSLKRSEKDRKMWESLELPRDLLNGFAQNADSDTDNRIQAEVVSDGDEELVGNWSKGDSSYVLAKRLEAFCPCLRDLWNFELEKDDLGYLVEEISKQQSIQNVSWVLLKAFSFIRKAEHKSLENLQPDNVIEKKILFSEEKFKLAAKIWISNEELNINPQDNGENVCRACQRSSQQLLLSQTWRPRRKKWFHGLGPRPPCSVQPKDLVPCVPATPAMAKRGQGTV

SEQ ID NO: 39155 - protein, 67 aa, Homo sapiens
  misc_feature (1)...(67): Xaa = X or * as defined in Table 2
WNFCDPGGPMMKLFISFKLKTISSTFLSPTCLVLXRRPSRSASSLTVLCTTTRSSSPLLGALVXTWP

SEQ ID NO: 39156 - protein, 385 aa, Homo sapiens
MAKGTVWRAIALCHPPRVCSGAEADASVSASSPQESFMPTKGHMLVVRLPLKHLHAFADSLKPEQVLEVWLSYLQPWWYAADKQAASSNSQPQYLGGILKTCGQQPGSLCPRKWALGSSPAFQFEQLFPEPELVIPLPPAPTLHSLHIRQQHPVIVATSESHLWPGGPGLQVHPMFGPEAYTLVLHLTQLITQAKHTARSISDQCVETPAGHSFLLWLGFGPTDTNGSYSAMTWARWGRTASRRWTSAWRRPWSTCARYSEYEQWGLFHGQPTLASGHRLNLHFLGSYLTLPWLLLAFFMASLFCIRPLTCALLFTLGYALYSLAMMLLTRWGSCTSPDGIGGGRPLQCRRSVGVQIDQQRQILDLDLGLQFLQQQYLELLAKLH

SEQ ID NO: 39157 - protein, 840 aa, Homo sapiens
MAYMRRVKLCGPETKKRALGLAFGTSSDEPVYTELQVMDNSSDQQSTGAARHLPMAGSIFGSLDGVLVGWNLRCLQRRVNPVKYSMVMEFLDPGKVPVMVPAHQRQPATTLTVLQPRMGQSLTCSQEAAYRPVSADAGPPQICWHVQASTCHHTRKTPAMPFASCSLQHTSPLKRHFSHQMSVNADPASQEIWRSETLLRVRAELVSTSVSKETGFCRNVASTLFSGDVPKNAVPLMPRQHALGTHPVVRCPWRLCMGDFAFIADKVPEGFIQNEGSVGDGVKLQKSLLSLFLRFWRRALEVLHYRLCVSSAHHSPRQPNLQALHTYQGPVLRKELKTQRPGTYGNVGAALFRTVIQLGGSMTQTVCTNDKRMDGFEVSEAEFRPMGDFGDDRVRATGEEGHEGLGQGSVQEASSNPHGRTGDQGDPGGESFMPTKGHMLVVRLPLKHLHAFADSLKPEQVSPFVHSHTTSPLGEFKQATLLCKRLVTLPSSAGRCPEVLEVWLSYLQPWWYAADKQAASSNSQPQYLGGILKTCGQQPGSLCPRKWALGSSPAFQFEQLFPEPELVIPLPPAPTLHSLHIRQQHPVIVATSESHLWPGGPGLQVHPMFGPEAYTLVLHLTQLITQAKHTARSISDQCVETPAGHSFLLWLGFGPTDTNGSYSAMTWARWGRTASRRWTSAWRRPWRTCARYSEYEQWGLFHGQPTLASGHRLNLHFLGSYLTLPWLLLAFFMASLFCIRPLTCALLFTLGYALYSLAMMLLTRMPSTFCHWTTLPCCEQAKSRCFSDLMAWSLWQHSFRLSRHHPCSLHLHIPLLAPGNAIPLEPICGPLSSMTNTSYL

SEQ ID NO: 39158 - protein, 124 aa, Homo sapiens
  DOMAIN (63)..(124): Integrase core domain identified by PFam, accession name rve, E-value=5.4e-09, PFam score of 35.1
CGPEQEKALQQAQAAVQAAVPLERYDPADPMVLEADLAMATAECPICQQRRPTLSPPYGTVPWGGQPATWWQVDYIGYLPSWKGQSFVLTGIDTYSGYGFAYPAHNAIAKTTICELTKCLIHRH

SEQ ID NO: 39159 - protein, 55 aa, Homo sapiens
DFQPFTRVTVHWGKGNDQTFRGLLDTGSELTLIPGDPKHHYGPPVKVGAYGAQLL

SEQ ID NO: 39160 - protein, 124 aa, Homo sapiens
  DOMAIN (50)..(73): PHOSPHOLIPASE D SIGNATURE domain identified by eMATRIX, accession number PR00718F, p-value=9.909e-09, raw score of 11.34
LWPFTRVTVHWGKGNDQTFQGLQDTGSELMLIPGDPKRHCSPPVKVGSYGGQVINGVLAQVRLTVAAVSDVVSLLEQINISPGTWYAAIDVANAFFSIPVHMAHLKQFAFSWQGQQYTFTVLPQ

SEQ ID NO: 39161 - protein, 198 aa, Homo sapiens
  misc_feature (1)...(198): Xaa = X or * as defined in Table 2
MVNQKRYHIPGGTAEISGTIKKLKNAGVVIPTTSPLNSPIWPVQKTDGSWRMTMDYHKLNQVVTPIAVAVPYVVALLEQINTFSCTWYAAIDLANTFFSFSVHKAQRSNLPSAGKASNIPLLSTLSDNYSPFERQLLACYWASVETEHLTMGYQVTIQLELPIMNWVLSDPSSHKLGHAKQHSIIKWKWYIRDRARAX

SEQ ID NO: 39162 - protein, 106 aa, Homo sapiens
GDLQPFARVTVHWGKGNNQTFEGLLDTCSELTLISGDPKRHCGPPAKVGAYGGQGYINSPALCHNLIQRELDRFSLPQDITLVHYTDDIMLIGSSEQEVAKHTELI

SEQ ID NO: 39163 - protein, 357 aa, Homo sapiens
MTKTPKAMTTEAKIDKWDLIKLKSFCTAKETIVKVNKQPTEWEKIFTIYPSDKGLISRIHKELKQIYKKKSNNPIKKWAKDMNRHFSQEDIYAAKRHMKRCSSSLAIREMQIKTTMRYHLTPVRMAIIKKSGNNRMQGEEHGFIPALSHRHCSHIHLVMRDTHLSCEAHRTHSRATDLFRTHLESWCVQSEHLQPADNLLWDLVSMVTVHWGKGNDQTFQGLLDTGSELTLIPGDPKRHCGPPVKVGAYGGQVINGVLAQVQLTVGPKTDGSWRMAVDYHKLHQVVTPTVAAVPDVVSLLEQINTSLGTWYAAIDLANAFFSILVYKAHQKQFAFSWQGQQYAFTILPQGYISYLAL

SEQ ID NO: 39164 - protein, 287 aa, Homo sapiens
MVRLVNSMNMSPLPHFFSHKVSALVRGNAVWNTMTVDKAFCESTDDSLGRSIAYRIGKHISRVSVYSSEDKPLPFQKRSNTINLLPGSWLITLRNVAILRAQCQSLLLANWALDSGCSQVCLVALTLPFREPMVGVLPAAKYVYASYASWHWENDHKMSPGTHWTHCSAGFISSDKGGMADGSMGQEGDIATTGDGEAVCSGKKASPEFTSSVSPASSGSSHTSPFKVVGSHSFPVNALTLIVDTCFAALLTAVRLSSLKAKQKLALSNNATTVINQLPDTAPPFLP

SEQ ID NO: 39165 - protein, 496 aa, Homo sapiens
  misc_feature (1)...(496): Xaa = X or * as defined in Table 2
MGRARRLTPVIPALWETEADGSRALTVETTVTQLQHLNTVGIIGFRGGRGQVAAVNCQKRDIQPFTRVTVHWGKRNDQTFQALVDTGLELTLIPGDPKHHCDPPVKVGAYGHQVINGVLAQIQITVGPVGPWTHPVVIFTVPKCIIDIDILRWQNSHTGSLTGRMKAIMVGRAKWKPLELPLPRKTVNQKPYHTPVGTAEISATMKDLKDAGVVIPTTTLFNSPIWSVQKTGGSWRMTVDYCMLNQVVSAVEAIVLDVVSLLEQINTSPWPXSGSCTAAFHHQMEVVHTXSGSSRSXRHNCTNGLMGSFLXSVDRGREDYGLVHRRFFTICXHHPKLDSCSTTVPFXDIPEGQLXREIFPPPVSWRQGWRLCMGSATWTFTHQGXPGYGHCXVPNLPAAETNTEPSIWHHSSGXSASYLVAGXLYGTSSIMERAEVCPHWNRHLFXIWVVCLSCTLCFCXDYHPWTLEMPYPPSPYSTKLCCCPRHLLYGXRSAAV

SEQ ID NO: 39166 - protein, 352 aa, Homo sapiens
  DOMAIN (233)..(285): ELEMENT TRANSPOSABLE INSERTION PROTEIN TRANSPOSITION DNA domain identified by eMATRIX, accession number PD02455C, p-value= 8.406e-10, raw score of 29.23
  DOMAIN (186)..(323): Integrase core domain identified by PFam, accession name rve, E-value=1.5e-24, PFam score of 88.9
MSSVLLRLIYQLTQKTASFEGGPEQKALQQIQAAVQAALPLGPYDPANPMVLEVSVADRDTVWSLWQVPIGESQQRSLGFWSKVLPYSADNYFPFERQLLACYWALLETDRLTVGHQVTLQPELPIMNWVLSDPSSHKVGHVHQHSIIKWKWYIRDQTRAGPEGTTTPVITQWDAHEQSGLSGRDGKGQRFVLTGVDTYSGYWFAYPAHNASAKTSIYGFTECLIHCHGIPHSIASDQGTLFTAKEVWQWAHAHGIHWSYHIPHHPIAAGLIEWWNGLLKSQLQCQLGDNTLQGWGKDLQKAMYSLNQRLIYSTVSPISRIHGSRNQRVEVEVAPLTITLSDPLAKFFFLLP

SEQ ID NO: 39167 - protein, 688 aa, Homo sapiens
  DOMAIN (145)..(157): RNase H domain identified by eMATRIX, accession number PF00075C, p-value=2.038e-09, raw score of 11.58
MKEDDELRDSVSWLQKQILSLKSAKITLSESLISCRERAEIVGKQTQLLSCKWLTCNKRRPPAFYQGNCHWGKGNDQTFQGLLDTGCEQTLIPGDPKHHCGPPVKVGAFGGQAGIDLANAFFSIPVHKAHQKQFVFSWKSQEYTFTVLPQRYINSPALSHNLIRRELDHFSLLDDITLVRYIGDIMLIGSSKQEVVNTLDLLVQAAVLAALQLGPYDPADSMVLEVSVSDRDAVWRLWRAPIGESQRRSLGFWSKVLPYSADNYFPFERQLLACYWALLETDRLTVGHQVTLQPELPIMNWVLSDPSSHKVGHVHQHSIIKWKCHPCHHPMDTHEQSGLSGRDGGYAWAQQHGLPLTKADLAMATAECPICQQQRPTLSPRYSIIPRGDQPATWWQKGQSQQAKKGVTVLTGVIDLDCQDEISLLLHNRVRGLAPKPAAAEGAPGPPAVPADGLKSAGAWRGKGKQLHLQHQCEIHWVKPAGLESLLKTNRLSVKWTNQQDGPAILVKDLSTLPGILQQKTVEGIDVDSRRERVQLWPGKILSDKTSEQKKNGQNSEDILEALAEPLQEDESIAGSTDGGGTSGLQLLRHVVCPEERSYLSSAPTLTNRRTFQEHPASVFSSLVKKNRVLSEILFVVVFGSSAQLETVFGVNIEKQDMGPLRPLKQESFPYACDTDELPEFCGGGETS

SEQ ID NO: 39168 - protein, 155 aa, Homo sapiens
  DOMAIN (59)..(104): TRANSFERASE ACYLTRANSFERASE PHOSPH domain identified by eMATRIX, accession number PD02355C, p-value=1.551e-26, raw score of 21.47
  DOMAIN (1)..(147): Phosphate acetyl/butaryl transferase domain identified by PFam, accession name PTA_PTB, E-value=3.9e-08, PFam score of -39.9
  misc_feature (1)...(155): Xaa = X or * as defined in Table 2
RIHVRPEITLTAANTARPYXIDPHDTLLSHSNFGSSDCPSSSKMRQALELVRERAPELMIDGEMHGDAALVEAIRNDRMPDSSLKGSANILVMPNMEAARISYNLLRVSSSEGVTVGPVLMGVAKPVHVLTPIASVRRIVNMVALAVVEAQTQPL

SEQ ID NO: 39169 - protein, 626 aa, Homo sapiens
  DOMAIN (483)..(534): Site-specific recombinases proteins domain identified by eMATRIX, accession number BL00397B, p-value=2.800e-38, raw score of 27.48
  DOMAIN (470)..(605): Site-specific recombinases domain identified by PFam, accession name recombinase, E-value=9.1e-58, PFam score of 205.3
MWRMFHFRTIAGRCFYYFLSTLSLLGREIVRKKLAPTLAYTRMGHRQVTDVSQTSYNGYFRLTGKHYEKDDDSHTGCRQRAACRCKSGAAGATLDAVQKKGFVQCGISDGLPGFSYADADGKFSGIDVDICRGVAAAVFGDDTKVKYTPLTAKERFTALQSGEVDLLSRNTTWTSSRDAGMGMAFTGVTYYDGMGFLTHDKGGLKSAKERDGRYRRYSGGQMLDRKGMNLASNLFHIGILGIFVGHFFGMLTPHWMYEAWLPIEVKQKMAMFAGGASGVLCLIGGVLLLKRRLFSPRVRATTTGADILILSLLVIQCALGLLTIPFSAQHMDGSEMMKLVGWAQSVVTFHGGASQHLDGVAFIFRLHLVLGMTLFLLFPFSRLIHIWSVPVEYLTPNFSSHRPCFGGVFLYILVMPNMEAARISYNLLRVSSSEGVTVGPVLMGVAKPVHVLTPIASVRRIVNMVALAVVRALKDAGVKANRIFTDKASGSSSDRKGLDLLRMKVEEGDVILVKKLDRLGRDTADMIQLIKEFDAQGVSIRFIDDGISTDGEMGKMVVTILSAVAQAERQRILERTNEGRQEAMAKGVVLGRTRTLDRDAGINYVATGVRCLTYIKNNEYGSFNSI

SEQ ID NO: 39170 - protein, 227 aa, Homo sapiens
  DOMAIN (42)..(97): Heat shock hsp90 proteins family proteins domain identified by eMATRIX, accession number BL00298G, p-value=5.800e-38, raw score of 24.57
  DOMAIN (1)..(218): Hsp90 protein domain identified by PFam, accession name HSP90, E-value=2e-121, PFam score of 416.8
MPNYLRFVRGLIDSSDLPLNVSREILQDSTVTRYLRNALTKRVLQLLEKLAKDDAEKYQTFWQQFGLVLKEGPAEDFANQEAIAKLLRFASTHTDSSAQTVSLEDYVSRMKEGQEKIYYITADSYAAAKSSPHLELLRKKGIEVLLLSDRIDEWMMNYLTEFDGPPFQSVSKVDESLENLADEVDESAKDAEKALTPFIDRVKALLGERVKDVRLTHAGSGLVGENV

SEQ ID NO: 39171 - protein, 129 aa, Homo sapiens
  misc_feature (1)...(129): Xaa = X or * as defined in Table 2
LEFGKKLGNAAADYFIANKIDQPKIAVINCEAFEVCVQRRKGFEEVLKSRVPGAQIVANQEGTVLDKAISVGEKLIISTPDLNAIMGESGGATLGAVKAVRNQNRPEKLLFSVRIXQPKLLRSWKTIRC

SEQ ID NO: 39172 - protein, 129 aa, Homo sapiens
  DOMAIN (33)..(88): Heat shock hsp90 proteins family proteins domain identified by eMATRIX, accession number BL00298F, p-value=1.000e-40, raw score of 11.21
  DOMAIN (4)..(121): Hsp90 protein domain identified by PFam, accession name HSP90, E-value=1.8e-52, PFam score of 187.8
  misc_feature (1)...(129): Xaa = X or * as defined in Table 2
TPSRVEGNQEYPSLVYIPSQAPWNMXTRDHKHGLNLYVQRVFIMTDAEQFMPNYLRFVGGLIDSSDLPLNVSREILQDSTVTRNLRNALTKRVLQMLEKLAKDDAEKYQTFWHQFGRGIIIFTDSQFNR

SEQ ID NO: 39173 - protein, 227 aa, Homo sapiens; identical to SEQ ID NO: 39170
  DOMAIN (42)..(97): Heat shock hsp90 proteins family proteins domain identified by eMATRIX, accession number BL00298G, p-value=5.800e-38, raw score of 24.57
  DOMAIN (1)..(218): Hsp90 protein domain identified by PFam, accession name HSP90, E-value=2e-121, PFam score of 416.8

SEQ ID NO: 39174 - protein, 205 aa, Homo sapiens
  DOMAIN (49)..(103): Heat shock hsp90 proteins family proteins domain identified by eMATRIX, accession number BL00298H, p-value=3.500e-34, raw score of 20.50
  DOMAIN (1)..(197): Hsp90 protein domain identified by PFam, accession name HSP90, E-value=6.1e-81, PFam score of 282.3
  misc_feature (1)...(205): Xaa = X or * as defined in Table 2
AKLLRFASTHTDSSAQTVSLEDYVSRMKEGQEKIYYITADSYAAAKSSPHLELLRKKGIEVLLLSDRIDEWMMNYLTEFDGKPFQPGAKVDESLEKLADEVDESAKEAEKALTPFIDRVKALLGERVKDVRLTHRLTDTPAIVSTDADXMTPRMAKCFGGAGQKVPEVKYIFELNPDHVLVKRAADTEEEAKFCVWGKNCVLGPF

SEQ ID NO: 39175 - protein, 62 aa, Homo sapiens
LSVSLSIGSLFFTGAGAGAATAGAAVLPTVTGAGAEEPNKGPTNTLELEFVFTFSFSKPSVV

SEQ ID NO: 39176 - protein, 65 aa, Homo sapiens
  misc_feature (1)...(65): Xaa = X or * as defined in Table 2
SSNTMMHFQIHMKQESTEQQTMTARRXQXSEVDEXREDTTLAARGRTEAXSARYQLTXQSVPSPH

SEQ ID NO: 39177 - protein, 460 aa, Homo sapiens
  DOMAIN (174)..(182): Helicases conserved C-terminal domain proteins domain identified by eMATRIX, accession number PF00271, p-value=3.250e-09, raw score of 7.99
MRIVLSQQHQKAMLGGPIKGGLGWDHDREEHNCCICKKDSGLRRMPDDGACGRRMTPKDGWTGSASWHTVISLTRNPLKLYGPECDPHCRRPRGDTLVFEPRLQLVYLVLRTLYAARCRWNWLDPSFSRDLPKNCGIRGLPGNWISGSHDVPAGCNIRQNAVCNSMYRMDCEDYVHRIGRTGRAGASGHSISLACEEYALNLPAIETYIGHSIPVAGSIQTLTRIKRKVRLAAGLNSENALSNEAMERGWQCLRLFAERLTLVDLSKRSNLRLFYYFSRFSQTMMWIDTVNGLIMVDCASAKKAEDTLALLRKSLGSLPVVPLSMENPIELTLTEWVRSGSAAQGFQLLDEAELKSLLEDGGVIRAKKQDLTSEEITNHIEAGKVVTKLALDWQQRIQFVMCDDGSLKRLKFCDELRDQNEDIDREDFAQRFDADFILMTGELAALIQNLIEGLGGEAQR

SEQ ID NO: 39178 - protein, 149 aa, Homo sapiens
SQHSEVFVCHMLSQPRAPGAGRYLLQRKASEALEVEVVDTWQADAVRDTRTLSGGESFLVSLALALALSDLVSHKTRIDSLFLDEGFGTLDSETLDTALDALDALNASGKTIGVISHVEAMKERIPVQIKVKKINGLGYSKLESTFAVK

SEQ ID NO: 39179 - protein, 51 aa, Homo sapiens
  misc_feature (1)...(51): Xaa = X or * as defined in Table 2
GHRRRPFKRGRKSRXRGGSQRRVNEDARRSAWMRKKQRRLISKISDRTARK

SEQ ID NO: 39180 - protein, 309 aa, Homo sapiens
FDSRCRPDKTRKRRIRHRAPIAGCGVNALSFLHRHFIEVTCTHFLLVRYEGIAIFRGGKFRLLHFLNVVLHTLALGIGVCQVKHVEPHAVDTCQGDELELVAHIRQLLLEAGNKPFLASLMDEQTLTQLEQLKQNLKNQRRQAQTLVTQTAETLAQHQQHRPDDGLALTVTVEQIQQELAQTHQKLRENTTSQGEIRQQLKQDADNRQQQQTLMQQIAQMTQQVEDWGYLNSLIGSKEGDKFRKFARGVTLDNLVHLANQQLTRLHGRYLLQRKASEALEVEVVDTWQADAVRVSRTLSGGESFLVSLA

SEQ ID NO: 39181 - protein, 560 aa, Homo sapiens
  misc_feature (1)...(560): Xaa = X or * as defined in Table 2
MGFWVENGEIQYPVSEITIAVSSLVFSSASFAADLEDNMETLNDNLKVVEKADNAAQVKDALTKMRAAALDAQKATPPKLEDKSPDSPEMKDFRHGFDILVGQIDDALKLANEDVFTRTLGADALYQFQNIRHVLRMQRIAAGEGNTLAFDTSVIQIVNDLVFHCFGKWLTGIYPPCAFVIATGAFMNTPGDKQGATSAGAVDDVDRISNEITIGIPMLTGYILLHVKGVRAKSSADHRRRPLASLATPPHKSWTCTLLFFRLPNVVCYANRIQQLTPILETLPQSDELPHCEETVVLENWRQVHEQCLALHSQQQTLQQQDVLAAQSLQKAQAQFDTALQASVFDDQQAFLAALMDEQTLTQLEQLKQNLENQRRQAQTLVTQTAETLAQHQQHRPDDGLALTVTVEQIQQELAQTHQKLRENTTSQGEIRQQLKQDADNRQQQQTLMQQIAQMTQQVEDWGYLNSLIGSKEGDKFRKFAQGLTLDNLVHLANQQLTRLHGRYLLQRKASEALEVDVVDTWQADAVRDTRTLSGGESFLLRLRXVTRRHQLWLHPLRHR

SEQ ID NO: 39182 - protein, 273 aa, Homo sapiens
  DOMAIN (26)..(53): BACTERIAL HAEM CATALASE-PEROXIDASE SIGNATURE domain identified by eMATRIX, accession number PR00460L, p-value=5.705e- 28, raw score of 10.45
KFAIADSGLSVSELVSVAWASASTFRGGDKRGGANGARLALMPQRDWDVNAAAVRALPVLEKIQKESGKASLADIIVLAGVVGVEKAASAAGLSIHVPFAPGRVDARQDQTDIEMFELLEPIADGFRNYRARLDVSTTESLLIDKAQQLTLTAPEMTALVGGMRVLGANFDGSKNGVFTDRVGVLSNDFFVNLLDMRYEWKATDESKELFEGRDRETGEMKFTASRADLVFGSNSVLRAVAEVYASSDAHEKFVKDFVAAWVKVMNLDRFDLL

SEQ ID NO: 39183 - protein, 104 aa, Homo sapiens
  misc_feature (1)...(104): Xaa = X or * as defined in Table 2
YSGLSAVNPVNDAYGVRFQLPSVNRIPVSXXXVKLAPPAHQIKRISGKCRFIPLCXYAPPGFSSASTMRATGILSTASQPPGKLPCMEESTAERRVGLPPLAKW

SEQ ID NO: 39184 - protein, 685 aa, Homo sapiens
  DOMAIN (42)..(75): PROLINE-RICH PROTEIN 3 domain identified by eMATRIX, accession number DM00215, p-value=6.186e-09, raw score of 19.43
  DOMAIN (549)..(685): Mur ligase family domain identified by PFam, accession name Mur_ligase, E-value=1.2e-08, PFam score of 27.0
MLRLRWAIPAVSVDLGTYEYVLKSDGTSNWTLTNDVKPNPDPIPNPKPDPKPDPKPDPNPKPDPTPDPTPTPVPEKRITPSTAAVLNMAATLPLVFDAELNSIRERLNIMKASPNNNNVWGATYNTRNNVTTDAGAGYEQTLTGMTVGIDSRNDIPEGITTLGAFMGYSHSHISFDRGGHGSVGSYSLGGYASWEHESGFYLDGVVKLNRFKSNVAGKMSSGGAANGSYHSNGLGGHIETGMRFTDGNWNLTPYASLTGFTADNPEYHLSNGMKSKSVDTRSIYRELGATLSYNMRLGNGMEVEPWLKAAVRKEFVDDNRVKVNSDGNFVNYLSGRRGIYQAAGYPIHRILRTILCPFRADKRQRQPAMVAVVQVNFSRRRVYRVHLALHLRHRQAARCQPAAAFLTHPVSQDFTFQPVEHLHQHRREHHTATVFATGLLKGIRQAAALRFRQLTGGGFNPDEWREAPRLINRLDAGSVDKYRGQAVAVPAVPERHTGSLNDEWMMAGDLIVASPGVALAHPSLSADADAGIEIVGDIELFCREAQAPIVAITGSNGKSTVTTLVGEMAKAAGVNVGVGGNIGLPALMLLDDECELYVLELSSFQLETTSSLQAVAATILNVTEDHMDRYPIGLQQYRAAKLRIYENAKVSVVNADDALTMPIRVEWVLRFTEFMAKPDGYCLKT

SEQ ID NO: 39185 - protein, 663 aa, Homo sapiens
  DOMAIN (464)..(496): ABC transporters family proteins domain identified by eMATRIX, accession number BL00211B, p-value=2.500e-19, raw score of 13.37
  DOMAIN (347)..(539): ABC transporter domain identified by PFam, accession name ABC_tran, E-value=3.2e-17, PFam score of 70.7
MKIELKITINLTTSYTTNSDSASPPIMIGRCKDNTNKNRKLEVSAKHRPDGFNTCLVYSTSARQIIDEITVTIHFHPVIIDKFFAHSRLQPRLNFHTGPQTHVVTQACGQFTLRPNNRLSDMQATMEQTQAFENRVLERLNAGKTVRSFLITAVELLTEAVNLLVLQVFRKDDYAVKYAVEPLLDGDGPLGDLSVRLKLIYGLGVINRQEYEDAELLMALREELNHDGNEYAFTDDEILGPFGELHCVAALPPPPQFEPADSSLYAMQIQRYQQAVRSTMVLSLTELISKISLKKAFQNFVSLMLGRDHVDIAPVAPQEIVDQAVLEVRALRHKPKLEDISFTLRRGEVLGIAGLLGAGRSELLKAIVGLEEYEQGEIVINGEKITRPDYGDMLKRGIGYTPENRKEAGIIPWLGVDENTVLTNRQKISANGVLQWSTIRRLTEEVMQRMTVKAASSETPIGTLSGGNQQKVVIGRWVYAASQILLLDEPTRGVDIEAKQQIYRIVRELAAEGKSVVFISSEVEELPLERYRMEQITKPHCGARLDRLPDCRWHSSMFAIVAFGLLVCWSNAVGGLILAQLKALGWTDNSTTATFSAITTAGMFLGALVGGIIGDKTGRRNAFILYEAIHIASMVVGAFSPNMGTYAISVILYLIIDFLTRER

SEQ ID NO: 39186 - protein, 1043 aa, Homo sapiens
  DOMAIN (620)..(668): CHEMOTAXIS CHEW PROTEIN domain identified by eMATRIX, accession number DM01794, p-value=1.000e-40, raw score of 26.50
  DOMAIN (614)..(741): CheW-like domain identified by PFam, accession name CheW, E- value=2.6e-12, PFam score of 54.3
MSEADFAEVLKALGQRSYATELARWVHGKGELPLESLLQQHGVAVLEEPAQLAQRLGLRVSENNGIQVKTVLRGGIAEKAGFAAGDEWLGLEPATRAKTPASSGWRMSRLDESPSEQFPNRQHTIHPQDPNHKIRVKNLIHLTFHRNFFIAVISESDCATIENLRSCPKFGRNRTSTHLLKTLVGDLQPDSGTVKWSENARIGYYAQDHEYEFENDLTVFEWMSQWKQEGDDEQAVRSILGRLLFSQDDIKKPAKVLSGGRCELLPVRGPLHVRIVDINRPSILVTRTDVNAKARKINRLTRRRHSLYCVERRGSVTAHPRDRKVADDCYEAHATAAPGWRTVYISGYKTGRKDIMNIYYGNIWRLLLPRKSSVIDTYQFVLFHQKIDCIGQSDTSIDMFLNNSFITERRVVQLGVPAAVGERGCPVGFGRTDDPGGLSLCSPRFLLGFRNCLCNGPWNLGRPGRVGPSTKGPPGRGRRPRIVRPNGTNGSNGCNGLNGKCPGNKDGGRPKLTSLNTPGPCLPRPGRTVVGALDVQCVMGQALVLTRTRVFVVEMCDAGSTNCHNMDNMHMTHDVRTCELRGGIQDIEIQITVVANAGTFSMTNVTKLASEPSGQEFLVFTLGDEEYGIDILKVQEIRGYDQVTRIANTPAFIKGVTNLRGVIVPIVDLRIKFSQVDVDYNDSGLRIELPQVEETGCFGAALAARVGTGVYHNFSEALLRKPEWMKIKLPADSTRIQASKPHFMITTSRYQRQQQRDSKQPGTDRQNGERLTRCRTGAARTGTSGGECTTTTARFGYQCRQLKITHPSWRLAGHSLSASCYHGMEVWDKDSFGHISFDDQSMGYSHLGHIVENSVIHYALWNKAHQSSDITLLAPAELQQVAWGENETFLTLKDGSMLTARLVIGADGANSWLRNKADIPLTFWDYQHHALVATIRTEEPHDAVARQVFHGEGILAFLPLSDPHLCSIVWSLSPEEAQRMQQASEDEFNRALNIAFDNRLGLCKVESARQVFPLTGRYARQFASHRLALVGDAAHTIHPLRGE

SEQ ID NO: 39187 - protein, 201 aa, Homo sapiens
  DOMAIN (21)..(48): BACTERIAL HAEM CATALASE-PEROXIDASE SIGNATURE domain identified by eMATRIX, accession number PR00460L, p-value=5.014e- 15, raw score of 10.45
  misc_feature (1)...(201): Xaa = X or * as defined in Table 2
LTKLPSLFTFTRLSSSDNDLRGGDKRGGANGARLALXPQTRTGDVTRRQPIRVCTVIEMFELLEPIADGFRNYRARLDVSTTESLLIDKAQQLTLTAPEMTALVGGMRVLGANFDGSKNGVFTDRVGVLSNDFFVNLLDMRYEWKATDESKELFEGRDRETGEVKFTASRADLVFGSNSVLFVRILGGFFCEYSLTIRILH

SEQ ID NO: 39188 - protein, 92 aa, Homo sapiens
  DOMAIN (30)..(92): TonB dependent receptor C-terminal region domain identified by PFam, accession name TonB_boxC, E-value=2.1e-11, PFam score of 46.0
SAHHHQLVIGLYLQNIQTVVDGADDQPEQSIVGLSATWDVTKNVSLTGGVDNLFDKRLWRAGNAQTTGDLAGANYIAGAGAYTWYMSVNTHF

SEQ ID NO: 39189 - protein, 210 aa, Homo sapiens
  misc_feature (1)...(210): Xaa = X or * as defined in Table 2
THRPPKSGPPCAKITRTTHVTAKPLFPQTNPKQTVRRMQGELYLVDESGQEFVSALNYRRRKTRNNATAYPIRLFYLSVRPRAGSKSSRTIWILLADAKITPYERRQLVARIEALSTEIPAQVRPLYQLWRDGQALQLQLAEERQRYTGGADTKQDGATTTKDKQQRXTKGTRSQPSTREVQQQSTQKHSTSRPPNHSAQPSNSALVTRQ

SEQ ID NO: 39190 - protein, 101 aa, Homo sapiens
EPPLQTGDASAHTDTHRVSQQFHWWETDTPEHFNNRFSLLKFSSAPFTVSSDHTIWFCLFLHVKGFLVSGGLRLFISEHEALIKDVEPPECVCVRVRVSAT

SEQ ID NO: 39191 - protein, 58 aa, Homo sapiens
MEKEAKPNCVVRGDSEWGRRKLQQRKAIVEMLRGVCLPPVELLCHSVCVSVCRGISCL

SEQ ID NO: 39192 - protein, 44 aa, Homo sapiens
  misc_feature (1)...(44): Xaa = X or * as defined in Table 2
MRPTRLPGYPRVPQANLLMXXXXXXXXXXXXGVPHPFSVPHAEK

SEQ ID NO: 39193 - protein, 94 aa, Homo sapiens
  misc_feature (1)...(94): Xaa = X or * as defined in Table 2
MPLPHLHTHRVSHKFHWWETDTPEHFNNRFSLLKFSCAPFTVSSDHTIWFCLFLHVEGFLVSGGLRLFISQHEALRKDVEPXXXXXXXXXXXXX

SEQ ID NO: 39194 - protein, 114 aa, Homo sapiens
  misc_feature (1)...(114): Xaa = X or * as defined in Table 2
VSGVRCWIHSSAFPPVFPGFFLPVAFFDRPPARLYRMHTWSHMESQEPARLPSHYADXGQGSQKRDSCSSGWAGLLFISPQFVLWSAEIEGSLNHITLGFRLSHGTTSADGMTF

SEQ ID NO: 39195 - protein, 988 aa, Homo sapiens
  DOMAIN (204)..(227): Guanine-nucleotide dissociation stimulators CDC24 family sign domain identified by eMATRIX, accession number BL00741B, p-value= 5.731e-09, raw score of 14.27
  DOMAIN (73)..(255): RhoGEF domain identified by PFam, accession name RhoGEF, E- value=5.5e-33, PFam score of 123.0
AKDGTKDGLERTRAAVKRGRSFIRTKSLIAQDHRSSLEEEQNFFIDVDCKHPEAILTPMPEGLSQQQVVRRYILGSVVDSEKNYVDALKRILEQYEKPLSEMEPKVLSERKLKTVFYRVKEILQCHSLFQIALASRVSEWDSVEMIGDVFVASFSKSMVLDAYSEYVNNFSTAVAVLKKTCATKPAFLEFLKQEQEASPDRTTLYSLMMKPIQRFPQFILLLQDMLKNTSKGHPDRLPLQMALTELETLAEKLNERKRDADQRCEVKQIAKAINERYLNKLLSSGSRYLIRSDDMIETVYNDRGEIVKTKERRVFMLNDVLMCATVSSRPSHDSRVMSSQRYLLKWSVPLGHVDAIEYGSSAGTGEHSRHLAVHPPESLAVVANAKPNKVYMGPGQLYQDLQNLLHDLNVIGQITQLIGNLKGNYQNLNQSVAHDWTSGLQRLILKKEDEIRAADCCRIQLQLPGKQDKSGRPTFFTAVFKTFTPAIKESWVNSLQMAKLALEEENHMGWFCVEDDGNHIKKEKHPLLVGHMPVMVAKQQEFKIGSCTHQMGQIAIVSFQNSTPKVIECFNVESRILCMLYVPVEEKRREPGAPPDPETPAVRASDVPTICVGTEEGSISIYKSSQGSKKVRLQHFFTPEKSSVMSLACTSQSLYAGLVNGAVATYARAPDGSWDSEPQKVIKLGVLPVRSLLMMEDTLWAASGGQVFIISVETHAVEGQLEAHQEEGMVISHMAVSGVGIWIAFTSGSTLRLFHTETLKHLQDINIATPVHNMLPGHQRLSVTSLLVCHGLLMVGTSLGVLVALPVPRLQGIPKVTGRGMVSYHAHNSPVKFIVLATALHEKDKDKSRDSLAPGPEPQDEDQKDALPSGGAGSSLSQGDPDAAIWLGDSLGSMTQKSDLSSSSGSLSLSHGSSSLEHRSEDSTIYDLLKDPVSLRSKARRAKKAKASSALVVCGGQGHRRVHRKARQPHQEELAPTVMVWQIPLLNI

SEQ ID NO: 39196 - protein, 908 aa, Homo sapiens
MADGRKVGKGLPASHVLSGQSHSGGDATCVALFSMQVAAAFSVTVSVYISRYLRDKHWCEFSGSGRPTFFTAVFNTFTPAIKESWVNSLQMAKLALEEENHMGWFCVEDDGNHIKKEKHPLLVGHMPVMVAKQQEFKIECAAYNPEPYLNNESQPDSFSTAHGFLWIGSCTHQMGQIAIVSFQNSTPKVIECFNVESRILCMLYVPVEEKRREPGAPPDPETPAVRASDVPTICVGTEEGSISIYKSSQGAKKVRLQHFFTPEKSTVMSLACTSQSLYAGLVNGAVATYPRAPAAGGGQLLCVCSLSSPCRVGGSCALQALPVDLAAAACGSSGAVRRTVWERARRPAQKRIACHFVLGDGSWDSEPQKVIKLGVLPVRSLLMMEDTLWAASGGQVFIISVETHAVEHSGMRANAVFSQERALRLAPGDVGLVRNARSTLGQGADGTWVLSLLEADALPWIMNSIPAPQAGTVSRNPGALHPTVTTSFTTAAAKRQAKHASLQAQGPRQLPRDGAHVASWSRGQLEAHQEEGMVISHMAVSGVGIWIAFTSGSTLRLFHTETLKHLQDINIATPVHNMLPAPEPPNPAPAALQRRPPSGAKQPTVTLVPEFREQPRKCSGPAGSLVFIPLRLIVSRRPMMDPSQAHHKPLTWQQMHGALQSHHPLAPTLPGPSNILGWLSMATVRALSPLLRGPLNRHQRLSVTSLLVCHGLLMVGTSLGVLVALPVPRLQGIPKVTGRGMVSYHAHNSPVKFIVLATALHEKDKDKSRDSLAPGPEPQDEDQKDALPSGGAGSSLSQGDPDAAIWLGDSLGSMTQKSDLSSSSGSLSLSHGSSSLEHRSEDSTIYDLLKDPVSLRSKARRAKKAKASSALVVCGGQGHRRVHRKARQPHQEELAPTVMVWQIPLLNI

SEQ ID NO: 39197 - protein, 1129 aa, Homo sapiens
  DOMAIN (316)..(339): Guanine-nucleotide dissociation stimulators CDC24 family sign domain identified by eMATRIX, accession number BL00741B, p-value= 5.731e-09, raw score of 14.27
  DOMAIN (185)..(367): RhoGEF domain identified by PFam, accession name RhoGEF, E- value=5.5e-33, PFam score of 123.0
SFNFILEFMHSDEMIYDDVENGDEGGNSSLEYGWSSSEFESYEEQSDSECKNGIPRSFLRSNHKKQLSHDLTRLKEHYEKKMRDLMASTVGVVEIQQLRQKHELKMQKLVKAAKDGTKDGLERTRAAVKRGRSFIRTKSLIAQDHRSSLEEEQNLFIDVDCKHPEAILTPMPEGLSQQQVVRRYILGSVVDSEKNYVDALKRILEQYEKPLSEMEPKVLSERKLKTVFYRVKEILQCHSLFQIALASRVSEWDSVEMIGDVFVASFSKSMVLDAYSEYVNNFSTAVAVLKKTCATKPAFLEFLKQEQEASPDRTTLYSLMMKPIQRFPQFILLLQDMLKNTSKGHPDRLPLQMALTELETLAEKLNERKRDADQRCEVKQIAKAINERYLNKLLSSGSRYLIRSDDMIETVYNDRGEIVKTKERRVFMLNDVLMCATVSSRPSHDSRVMSSQRYLLKWSVPLGHVDAIEYGSSAGTGEHSRHLAVHPPESLAVVANAKPNKVYMGPGQLYQDLQNLLHDLNVIGQITQLIGNLKGNYQNLNQSVAHDWTSGLQRLILKKEDEIRAADCCRIQLQLPGKQDKSGRPTFFTAVFNTFTPAIKESWVNSLQMAKLALEEENHMGWFCVEDDGNHIKKEKHPLLVGHMPVMVAKQQEFKIECAAYNPEPYLNNESQPDSFSTAHGFLWIGSCTHQMGQIAIVSFQNSTPKVIECFNVESRILCMLYVPVEEKRREPGAPPDPETPAVRASDVPTICVGTEEGSISIYKSSQGSKKVRLQHFFTPEKSTVMSLACTSQSLYAGLVNGAVASYARAPDGSWDSEPQKVIKLGVLPVRSLLMMEDTLWAASGGQVFIISVETHAVEGQLEAHQEEGMVISHMAVSGVGIWIAFTSGSTLRLFHTETLKHLQDINIATPVHNMLPGHQRLSVTSLLVCHGLLMVGTSLGVLVALPVPRLQGIPKVTGRGMVSYHAHNSPVKFIVLATALHEKDKDKSRDSLAPGPEPQDEDQKDALPSGGAGSSLSQGDPDAAIWLGDSLGSMTQKSDLSSSSGSLSLSHGSSSLEHRSEDSTIYDLLKDPVSLRSKARRAKKAKASSALVVCGGQGHRRVHRKARQPHQEELAPTVMVWQIPLLNI

SEQ ID NO: 39198 - protein, 75 aa, Homo sapiens
NPHPQSAGELVCKQVTAGAIGLQEAVLEQARLTQCGSVLMTAEASTGTRSHLAVQLQELPGVPTAGGRWKRQGRL

SEQ ID NO: 39199 - protein, 63 aa, Homo sapiens
  misc_feature (1)...(63): Xaa = X or * as defined in Table 2
VINTFSLHTMGSTSXHQGNGWRHLTLHPRNSKHPLEQPTPGVLQLRPPTASLRQLLSNAGCSG

SEQ ID NO: 39200 - protein, 190 aa, Homo sapiens
  misc_feature (1)...(190): Xaa = X or * as defined in Table 2
GEGLRRGLFPGAEAQGRAETAGCLRRGRGALALALPGSPGLSPWVEDAGGHRVLHGRAVLRCARAPPVPQPAGLAKVEPYSGVSSLTAFPQAPILLSSGGQSRAGERTTMXGXPEMEKLXSCIGEGHQPCHRKSRPAAPCPPPSAMLFLTPRSSATLLSSSSKGASGGWEPSAAPLGGSGQPFREMVSQH

SEQ ID NO: 39201 - protein, 113 aa, Homo sapiens
ATSHSDWLSATGVPTEGLLILYRGFRGPRAYCGCPLEHENAIPDQTAMPFHPDSKAHDLVIAATQAVKHPYVGLCKQRPFQITAEKAKQQHRDVNSMGPYRVVSVPTMSRYGP

SEQ ID NO: 39202 - protein, 205 aa, Homo sapiens
  DOMAIN (33)..(71): Oleosins proteins domain identified by eMATRIX, accession number BL00811A, p-value=1.833e-10, raw score of 8.26
  misc_feature (1)...(205): Xaa = X or * as defined in Table 2
QHRLTYRTALWIHYRPDPKPLMSFRPGHQRLSVTSLLVCHGLLMVGTSLGVLVALPVPRLSSPSLPPVELLXHSVCVSVCRGISCLXWRLWDQISDWSRTLIQPPRPPSCCPVVASPGPGKGPQCNGDPKWKSCEAASVKGTSPATGKSRPAAPCPPPSAMLFLTPRYSATLLSSSSKAASGAREPSAAPLGGSGQPFREMVSQH

SEQ ID NO: 39203 - protein, 72 aa, Homo sapiens
MPFDMEKEAKPNCVGQRRPVNGAEENFNREKRMVKCSRVGVSPTSGNACATRCVSSVCKRHLLSLGETLGSK

SEQ ID NO: 39204 - protein, 117 aa, Homo sapiens
  misc_feature (1)...(117): Xaa = X or * as defined in Table 2
NLETNGKIPFENPWSKVPIRFGRQNLRRVCLTTGGQIPTGRWVTATDSRGAGDYRLCLHHLRXPDGARLSAGSADCAANRRDVDGSGRGLPGRLSVQQPRRVRRGQPDVQPVSWPGC

SEQ ID NO: 39205 - protein, 38 aa, Homo sapiens
ESRLPTGAKAKLCILSVIQILSIDIFWRFSGSNNCARA

SEQ ID NO: 39206 - protein, 591 aa, Homo sapiens
  DOMAIN (386)..(431): PROTEIN TRANSMEMBRANE MG064 ATP-B domain identified by eMATRIX, accession number PD02980B, p-value=4.000e-14, raw score of 25.07
  misc_feature (1)...(591): Xaa = X or * as defined in Table 2
MEISFTRVALLAAALFFVGCDQKPQPAKTHATEVTVLEGKTMGTFWRASIPGIDAKRSAELKEKIQTQLDADDQLLSTYKKDSALMRFNDSQSLSPWPVSEAMADIVTTSLRIGAKTDGAMDITVGPLVNLWGFGPEQQPVQIPSQEQIDAMKAKTGLQHLTVINQSHQQYLQKDLPDLYVDLSTVGEGYAADHLARLMEQEGISRYLVSVGGALNSRGMNGEGLPWRVAIQKPTDKENAVQAVVDINGHGISTSGSSRGDXDGYGQGLSRVIDPQTGRSIEHNLVSVTVIAPTALEADAWDTGLMVLGPEKAKTCSPGGLRGTESLNTLRDRITQINGIDEVRMDDSWFARLAALTGLVGRVSAMIGVLMVAAVFLVIGNSVRLSIFARRDSINVQKLIGATDGFILRPFLYGGALLGFSGALLSLILSEILVLRLSSAVAEVAQVFGTKFDINGLSFDECLLLLLSSMVTFWCRNLFTSLLELWINHADKQDDNSCLSSASVYLKAKMMKVMLPMQLLSSGTGFYRDRLENSGGRYESRRSLTRQFREEPTAPIPRECSQRIDFLLFETPSVSASSSAGFWLRFGSTAG

SEQ ID NO: 39207 - protein, 97 aa, Homo sapiens
  misc_feature (1)...(97): Xaa = X or * as defined in Table 2
PTSIPRESSSGTWFQVASTTVLFSAILAGLGSASAFCLGPGIPQARPNNSAVNSKNSRFGIPRPQAEXPEQGGVYHHTAGVLKKLIPPSARQHPDRC

SEQ ID NO: 39208 - protein, 135 aa, Homo sapiens
  misc_feature (1)...(135): Xaa = X or * as defined in Table 2
QMPGNNPAFSALLVAFKHQFAIAGGIFIKEVTFAIKTSQLLWFGQPIFNNETTHQTACFLSVEADDLKFAVLLIEEHRLDNLGIQFLRLHRFKILIXRQINHHIIALCCERLVQLVGDDISPEFDELELRFSEVH

SEQ ID NO: 39209 - protein, 813 aa, Homo sapiens
  DOMAIN (73)..(121): Bacterial export FHIPEP family proteins domain identified by eMATRIX, accession number BL00994B, p-value=1.000e-40, raw score of 10.70
  DOMAIN (5)..(220): FHIPEP family domain identified by PFam, accession name FHIPEP, E-value=7.3e-158, PFam score of 537.8
MVTVMAMFTPRTLEFDAFPTILLFTTLLRLALNVASTRIILMEGHTGAAAAGKVVEAFGHFLVGGNFAIGIVVFVILVIINFMVITKGAGRIAEVGARFVLDGMPGKQMAIDADLNAGLIGEDEAKKRRSEVTQEADFYGSMDGASKFVRGDAIAGILIMVINIVGGLLVGVLQHGMSMGHAAESYTLLTIGDGLVAQIPALVISTAAGVIVTRVSTDQDRLVDITMTQNQITYDRLNVTLTRDDVMGESLYNPMLPGIVADLKAKGLAVESEGATVVFLDEFKNKEGEPMGVIIQKKDGGYLYTTTDIACAKYRYETLHADRVLYYIDSRQHQHLMQAWAIVRKAGYVPESVPLEHHMFGMMLGKDGKPFKTRAGGTVKLADLLDEALERARPSGGRKEPGYASRRAGKTGMSFDIAKYPTLALVDSTQELRLLPKESLPKLCDELRRLFTRPALWNRETAQAGHQDTFRGGNATNPRVHRKGRVCTRSRGAAKGEYDVLSVGHSSTSISAGIGIAVAAEKEGKNRRTVCVIGDGAITAGMAFEAMNHAGDIRRDMLVIVNDNEMSISENVGALNNHLAQLLSGKLYSSLREGGKKVFSGVPPIKELLKRTEEHIKGMVVPGTLFEELGFNYIGPVDGHDVLGLITTLKNMRDLKGPQFLHIMTKKVVVMNRQKKTRSHSTPVLFAVVQLAAIVARHQEVTHGFRGHNHGRLYPPGKSFPHRMAGALPGWPRRPPGQRRNRGNTRIGLAPTGPHQPPTPPPHSPPPPTTPSTPHPNPRKTGQIVLVSTHYMRRAFTGNHAGELPVALHDLHG

SEQ ID NO: 39210 - protein, 1132 aa, Homo sapiens
  DOMAIN (334)..(366): Fumarate reductase / succinate dehydrogenase FAD-binding site proteins domain identified by eMATRIX, accession number BL00504G, p-value=9.710e-31, raw score of 10.93
  DOMAIN (37)..(242): Periplasmic binding protein domain identified by PFam, accession name Peripla_BP_2, E-value=6.3e-42, PFam score of 152.7
MWALIRFLFAALLLVISHAFAATVQDEHGTLTLEKTPQRIVVLELSFADALAAVDVIPIGIADDNDAKRILPEVRAHLKPWQSVGTRAQPSLEAIAALKPDLIIADSSRHAGVYIALQQIAPVLLLKSRNETYAENLQSAAIIGEMVGKKREMQARLEQHKERMAQWASQLPKGTRVAFGTSREQQFNLHTQETWTGSVLASLGLNVPAAMAGASMPSSPGPLGASCPPRCSIHAITVTSTTPCLWTPGSVIRCRPVGVLKMTDEAGEDAKLVAVPHSKLSKEYDHIKDVNDLPELLKAQIAHFFEHYKDLEKGKWVKVEGIETDQNCETRIKGLFAVGECSSVGLHGANRLGSNSLAELVVFGRLAGEQATERAAIILVLRAQRGWVRPIPRKEQQEIAERFIRQLGIRTPSTEQPIEFLSGGNQQKVLLSRWLLTRPQFLILDEPTRGIDVGAHAEIIRLIETLCADGLALLVISSELEELVGYADRVIIMRDRKQVAEIPLAELSVPAIMNAIAAIISARFGVPRTQVRTWVALYEKHGEKGLIPKPKGVSADPELRIKVVKAVIEQHMSLNQAAAHFMLAGSGSVARWLKVYEERGEAGLRALKIGTKRNIAISVDPEKAASALELSKDRRIEDLERQVRFLETRLMYLKKLKALAHPTKKLSASLDSMRTVKSVLVRFITRIKGDTDTRGNAVSSREGNDYISVTPSDSPSAICRDPLKEWNALFKNRGHKGKVRLHYHAYLTAASRNDSHARATMAGELTMIHGVPAGCDEREYLRELQNALLWINFRFYLAPLFWLIVGGTWGPVTLMGYAFLRAWQYWLARYQTPHHRLQSGIDAVLHVLDWVPVRLAGVVYALIGHGEKALPAWFASLGDFHTSQYQVLTRLAQFSLAREPHVDKVETPKAAVSMAKKTSFVVVVDSNDNFLANIQKDGTYSVIPRSPGGEITPEGLMAVGRIAREFNLYTKIITRLIDVCGQYRLLCPRLPPTDGRYHRTSVVDDDLHLWQIPWQSGFRRCRTRSGLSALVVEKQQQENAGEMELADLEGFYRDAKKHYDEDEEFAERAHKSDASDIREVETRAFGFSKEADLVASLLEDESARPAGNKFSRGIYPSGEAWSPCRPIWSDVK

SEQ ID NO: 39211 - protein, 1174 aa, Homo sapiens
  DOMAIN (857)..(874): DNA PHOTOLYASE SIGNATURE domain identified by eMATRIX, accession number PR00147A, p-value=1.290e-16, raw score of 13.95
  DOMAIN (811)..(1036): DNA photolyase domain identified by PFam, accession name DNA_photolyase, E-value=3.8e-83, PFam score of 289.6
MSGHAEAAISQKLSAEVVVRQTKRSSLSGKQSVTDAGAHTAKHYLVAEDAHAGSRRPVLRHHIAFVIGGHFCRTHATLNTGLQHGQAYRDVATGTQQQLLIEAHTSLVWVRQFGGQLLRSRHPRAFACHVTAHPARSVMGVSCSADRNIKAKINRQGIWIEKLEHNPGKYIPEELRKAGEGEAVRVDLNRPMKEILAQLSQYPVSTRLSLNGTIIVGRDIAHAKLKERMDNVRSETVDFFGDKMEWVAPHMGTDVALMLGIAHTLVENGWHDEAFLARCTTGYAVFASYLLGESDGIAKTAEWAAEICGVGAAKIRELAAIFHQNTTMLMAARAPIPPIPRLAANLFGKGPNPVPGPLPLNYRQFSCVSLPRSRGVWASVNGEGQRVPGFRVQAVEPLLPEIPLTLECLTKEDDGDDDGENNQHQIGDFYVVHQPCAYEDHHHAANLLKLIGRKSGSEPMSFTIPRTWRCKPGECAIKPRIFRRIALRKQAGWVSFKQAVTDSDSPQIDHLAIEKLTSASFAFTVEQPQQWSAESPYLYHLVMTLKDANGNVLEVVPQRVGFRDIKEPEDSGSDEVPDRWGDCIAARNLGITTFLSTPIHLPDGSFYGTLCAASSEKRQWSERAEQVLQLFAGLIAQYIQKEALVEQLREANAALIAQSYTDSLTGLPNRRAIFENLTTLFSLARHLNHKIMIAFIDLDNFKLINDRFGHNSGDLFLIQVGERLNTLQQNGEVIGRLGGDEFLVVSLNNENADISSLRERIQQQIRGEYHLGDVDLYYPGASLGIVEVDPETTDADSAQHAAGPVVLGNSVTHLFYNYQYEVNERARDVEVERALRNVVCEGFDDSVILPPGAVMTGNHEMYKVFTPFKNAWLKRLREGMPECVAAPKVRSSGSIEPSPSITLNYPRQSFDTAHFPVEEKAAIAQLRQFCQNGAGEYEQQRDFPAVEGTSRLSASLATGGLSPRQCLHRLLAEQPQALDGGAGSVWLNELIWREFYRHLITYHPSLCKHRPFIAWTDRVQWQSNPAHLQAWQEGKTDTRLMMPAMRQLTAMLVGTRCSHPEGAICSQSRYRRFPVLWPNLGFNFPRSRTRTPTLRTHQSRSDGFGGVLDPTKSSGYLIVDIYNEILRMLSTAVDPGYYFYSTKRSEPSSKLGSPVGTGLGLALTREMNKVVKRF

SEQ ID NO: 39212 - protein, 100 aa, Homo sapiens
  misc_feature (1)...(100): Xaa = X or * as defined in Table 2
SPQPDRHYRHHRQGPLVCIVIIFYFCAKRWMAAILXTQHRHRFLTTDDGKFAVANGSFSXRGLHHATGLLRRFPPICXGPLVCIVIIFYFCAKRWMAAIL

SEQ ID NO: 39213 - protein, 319 aa, Homo sapiens
MHEVTLEDPSSAQILITVITGHGEIITLKRSSRRQNDIRMYCRRRPEAFRDHHQLRFLPGTDQAIGILMMSKVGTARPPDKTNIREMSVHTVVLICATRVFQCFNNAGNRDFIHRIAATRQAALHGREHRRTPRGVTTIGKMVRKTKTAAGWEHESGFYLDGVVKLNRFKSNVAGKMSSGGAANGSYHSNGLGGHIETGMRFTDGNWNLTPYASLTGFTADNPEYHLSNGMKSKSVDTRSIYRELGATLSYNMRLGNGMEVEPWLKAAVRKEFVDDNRVKVNSDGNFVNYLSGRRGIYQAAIVPVWNPVEPVAGVNWSF

SEQ ID NO: 39214 - protein, 856 aa, Homo sapiens
MSKVGPSGTEINEFPGNVGSYRCVDMRHQGFPVLQQCGQQDFIHRIAATRQAALHGREHRRTPRGVTTIGKMHGGILVENSRQLADFRCANTTNLCCPFGGFRYSVTLAQQIRGEDGHNLWCNAPETLRRANHFPPAYGRSPASAQHRCPCAVPPTPFYRQRNRRFPIALDQCRSAFSRCHAVQKSKKAPAHRMHSTQFSACPVYSCKICFDSPVSMIIINDDSAARSKLGPPVSVVGFIQQQVAHWHPLRKILLHVDHRAVWLTDPARLTHRRRCHVYRVRRFGILRSCISSCRQSSRLRSSVVMDFFMSGNGAQSESRSAYSMRRYQPPLPAKSTVTNRKPAQYLRSSWLRPRVMKTALTPDSSPHQNLPRNDGFTKHIGINSSQVTFHRNIGNAIGINQQACPAHILGTVKCAAVGSGMSYVDWCCKCQVVWVAFRSPRTIFKPVVTKPLPPFSYPPFLAWSFPTPLYPDSAVLSAGFSYVNDFSLPVRRPPSYTHTAGLNAVTLPPSNQQLAEARTPRRACRAKKLSTCRPPPPTPTNMYTAQRRGTLFIWGFYKISHLSQFYFRDLVTPLRFGRRLMDMWGHIRRAPVTTFPELDPGCHTKIIRMGVIRRSMGTITGHTTGIRRTFVRLYSRATGAIGAPRGAAPSWGGGAALVAPVSLLGGCFMVVTHILPGGCSSYHYCWQWKKAVTVVSLPAVRFFLSLLTVMKNRCYRCESGDMRAGTASPPEKPRRSEDSQQPPNTPQLRGQRKHHSPTNTQEEVDDGYSAATQPPNHLTTLDNTPHRRAHTTPSACRCGRHEPPHTHRHRQATTAQGQNSHAERANDRSVHQIALAKTVPHLEYTAAARACPRAP

SEQ ID NO: 39215 - protein, 164 aa, Homo sapiens
  misc_feature (1)...(164): Xaa = X or * as defined in Table 2
MGLSARGALLILALFLFDLLVVEHGWCGHICPVGALYGVLGSKGVITVAATDRQKCNRCMDCFHVCPEPHVLRAPVLDEQSPVQSPPRLHDVRRCVMSILRGDPLESWLYRLGSIWWFCPERCVELVFWLPLVGIVRDDGIDTCSTRVHASATTSQLASSDCSX

SEQ ID NO: 39216 - protein, 171 aa, Homo sapiens
ATEGYRQQCRQFHPAAYDESPHRNRRRKWRPTYRCHPAPDHRTACLRSAFYGNAPGCVQTGPVRRSGAASASSPAVFLSGTSPWSFARTIALVRGRSLKIDTNSPWAYFSALLMFDLLSHVHEWCGRYISPPRFAQTGETLPCRRHQGSRYSAYLSASRYPARRKWYFSPR

SEQ ID NO: 39217 - protein, 238 aa, Homo sapiens
  DOMAIN (210)..(222): 4Fe-4S ferredoxins iron-sulfur binding region proteins. domain identified by eMATRIX, accession number BL00198, p-value= 4.115e-10, raw score of 10.43
  DOMAIN (170)..(227): 4Fe-4S binding domain identified by PFam, accession name fer4, E-value=0.016, PFam score of 14.3
  misc_feature (1)...(238): Xaa = X or * as defined in Table 2
EVDDTAKHRRRDSFPQXDPLMNIRYAPSPHLPATVALTGAVIITVLYALAGKRLFCSWVCPLNPITDLANWLRRRFDLNQSATIPRHIRYVLLVVILVGSALTGTLIWEWINPVSLMGRSLVMGFGSGALLILALFLFDLLVVEHGWCGHICPVGALYGVLGSKGVITVAATDRQKCNRCMDCFHVCPEPHVLRAPVLDEQSPVQVTSRDCMTCGRCVDVCSEDVFPITTRWSSGAKS

SEQ ID NO: 39218 - protein, 107 aa, Homo sapiens
MTAEMRSEFAQLFADYEIMPPFRQLSRRTVLLTPDESTSNSLTRWEGKSATVGQLMGMRYKGWESGYEDAFVYNLAGSDATARYQHDLPAGKAMIVQKELVAIYDYE

SEQ ID NO: 39219 - protein, 703 aa, Homo sapiens [sequence omitted]

SEQ ID NO: 39220 - protein, 63 aa, Homo sapiens
  misc_feature (1)...(63): Xaa = X or * as defined in Table 2
FNQLGRDWRTYYRKSDPPRQWLRHSPVRXVLKMVPMAIRGLLWMLSAQPAPAICSSRQTKMVR

SEQ ID NO: 39221 - protein, 676 aa, Homo sapiens
  DOMAIN (1)..(218): DAHP synthetase family domain identified by PFam, accession name DAHP_synth_1, E-value=7.7e-12, PFam score of -78.4
MEYATRLQSLRNQYQSRLEIVMRTYFEKPRTVVGWKGLISDPDLNGSYRVNHGLELARKLLLQVNELGVPTATEFLDMVTAVDVYFHLYLAAIGYDPLNGLVIITVQPVVRLVTGEDVWSALEQLLKQGPMDIYPARIPKAPDFWHPQMWSRPRLITNNQTVTNDALEIIGEMLRFTQGGRFYSGLEQLKTFCQPQTLAAFAWDLFTAWQQAGAPAKDNWAFLALSLFGDESTARDLTTQILAWPQEGKSARAVSGLNILTLMNNDMALIQLHHISQRAKSRPLRDNAAEFLQVVAENRGLSQEELADRLVPTLGLDDPQALSFDFGPRQFTVRFDENLNPQNVRQKSVPRLRADDDQLKAPEALARLKGLKKDATQVSKNLLPRLETALRTTRRWSLADFILCLLIIPYPSEMTAEMRSEFAQLFADYEIMPPFRQLSRRTVLLTPDESTSNSLTRWEGKSATVGQLMGMRYKGWESGYEDAFVYNLGEYRLVLKFSPGFNHYNVDSKALMSFRSLRVYRDNKSVTFAELDVFDLTGSDATARYQHDLPAGKAMIVQKELVAIYDYEVPVPEDPFSFRLEIHKCSELFTGSVYRLERFRLRPTFHQRDREDADPLINDALIYIRDECIDERKLRGESPETVIAIFNRELQNMFHQEIDVVSSWIFPVGPISGSDD

SEQ ID NO: 39222 - protein, 115 aa, Homo sapiens
  DOMAIN (4)..(19): AMINOMETHYLTRANSFERASE GLYCINE domain identified by eMATRIX, accession number PD01543D, p-value=8.313e-13, raw score of 10.61
  misc_feature (1)...(115): Xaa = X or * as defined in Table 2
FIATPGYTGEAGYEIALPNEKAADFWRALVEAGVNPCGLGARDTLRLDGDESYGQEMDETVSPXAMKLRCPMKKRPISGVRWWKRVLTHVAWARVTRCVWTGMNLMARDGETVSP

SEQ ID NO: 39223 - protein, 206 aa, Homo sapiens
  DOMAIN (59)..(99): PROTEIN LIPOPROTEIN MEMBRANE TRA domain identified by eMATRIX, accession number PD01632B, p-value=3.000e-33, raw score of 23.36
  DOMAIN (1)..(166): Secretory protein of YscJ/FliF family domain identified by PFam, accession name YscJ_FliF, E-value=9.2e-56, PFam score of 198.7
MWPSVSHLTQMNIPSRFSEPSGAIEVPPDKVHELRLRLAQQGLPKGGAVGFELLDQEKFGISQFSEQVNYQRALEGELSRTIETIGPVKGARVHLAMPKPSLFVREQKSPSASVTVNLLPGRALDEGQISAIVHLVSSAVAGLPPGNVTLVDQGGHLLTQSNTSGRDLNDAQLKYASDVEGRIQRRIEAILSPIVGNGTAQLDFAS

SEQ ID NO: 39224 - protein, 758 aa, Homo sapiens
  DOMAIN (384)..(424): PROTEIN LIPOPROTEIN MEMBRANE TRA domain identified by eMATRIX, accession number PD01632B, p-value=3.000e-33, raw score of 23.36
  DOMAIN (283)..(491): Secretory protein of YscJ/FliF family domain identified by PFam, accession name YscJ_FliF, E-value=1.4e-94, PFam score of 327.6
MATHVETDSPFAIPVEGSGEGYFLLHIFYFRSVFSASPISARLRTVFTPAGFQTSEFLIRSPFPTGNDGTRVAHTFAFRRSHTSDVTHNWLGNVLFDVRSCFFFSATADLTDHHDRFGLRIFFEHFENVDKVRARDRVTADTDTGRLTETVIRGLFNRFIGQCTGTGNDTHFTRFVNVTRLDTDFAFTRSDNAWAVRADHTNACFIQLHFHGQHIQRRDAFSDGDNQFDACVDGFQNGVFAERCWYVDNRSGSASGSNGFTHGVEHRQAETSLEETNAELNRLRANPKIPLIVAGSAAVAVMVALILWAKAPDYRTLFSNLSDQDGGAIVSQLTQMNIPYRFSEASGAIEVPADKVHELRLRLAQQGLPKGGAVGFELLDQEKFGISQFSEQVNYQRALEGELSRTIETIGPVKGARVHLAMPKPSLFVREQKSPSASVTVNLLPGRALDEGQISAIVHLVSSAVAGLPPGNVTLVDQGGHLLTQSNTSGRDLNDAQLKYASDVEGRIQRRIEAILSPIVGNGNIHAQVTAQLDFASKEQTEEQYRPNGDESHAALRSRQLNESEQSGSGYPGGVPGALSNQPAPANNAPISTPPANQNNRQQQASTTSNSGPRSTQRNETSNYEVDRTILRAQGVIPALRRLTIATCVIASLHHKRLICRPQVIKITANFGIQHRLIPVVVIFHQRVVIRSHIDVAAACQTELRIVLKLRGISCEINHFNACRCRLTNPCNGVNHHSCVASSITVHHQLIAYRVIAV

SEQ ID NO: 39225 - protein, 37 aa, Homo sapiens
RVPPSPGLTALCGLPPASLLQMCPCRSATHSHPAAKK

SEQ ID NO: 39226 - protein, 414 aa, Homo sapiens
  misc_feature (1)...(414): Xaa = X or * as defined in Table 2
MDGLNTDKGSSVFHTPTDRLVICCPVDADERMTTPPRLWDHEPSKPLFFTNYPVSAPFVGLPPGKRPQGGFRAGNLXTSSKTIGRDLNDAQLKYASDVEGRIHRRIEAFLSPIVGSGNIPAQVRAQLDFASKDQPEEQYRPNGDESHAALRSRQLNESEQSGSGYPGGVPGALSNQPAPANNAPISTPPANQNNRQQQASTPSNSGPRSTQRNETSNYEVDRTIRHTKMNVGDVQRKLGIIGQGKNEKPLKQLERVEEKPNGEGWEKKWQGKEVWKKEDGTIYLQKNKLRAPTDSTLWFAKNGRVAKIAKALVEPANNFNPGVDEDDTEKLLEVVPEELTNEKLDLEQKCIHIYDDKRKQTKQTPQDVFLKRVTSPQEPQPGPSGGIPEEGIVIIGEDSSVQVLAPEDLPVEKL

SEQ ID NO: 39227 - protein, 416 aa, Homo sapiens
  DOMAIN (153)..(180): SYNTHETASE BETA CHAIN LIGASE PHENYLALANYL-TRNA domain identified by eMATRIX, accession number PD02410D, p-value=8.962e- 21, raw score of 19.06
  misc_feature (1)...(416): Xaa = X or * as defined in Table 2
RRFVGFRTGVTKEDAIGKRGVDQFFRQSQYRLVGVTVAGMPELTRLFVQRFTQFRMRMAQRVHRNATREVDILFPLLIPQARTFATYRYKGCRSVNRYHPFIKVFTRNWREADLSLKRVXTLLNDTGYQEVITYSFVDPKVQQMIHPGVEALLLPSPISVEMSAMRLSLWTGLLATVVYNQNRQQNRVRIFESGLRFVPDTQAPLGIRQDLMLAGVICGNRYEEHWNLAKETVDFYDLKGDLESVLDLTGKLNEVEFRAEANPALHPGQSAAIYLKGERIGFVGVVHPELERKLDLNGRTLVFELEWNKLADRVVPQAREISRFPANRRDIAVVVAENVPAADILSECKKVGVNQVVGVNLFDMYRGKGVAEGYKSLAISLILQDTSRTLEEEEIAATVAKCVEALKERSQASLRN

SEQ ID NO: 39228 - protein, 37 aa, Homo sapiens
QLRTVIRNAKKEKEGNKPPKSARQIFQYLRELAENEG

SEQ ID NO: 39229 - protein, 284 aa, Homo sapiens
  DOMAIN (62)..(81): FLAGELLAR BIOSYNTHETIC PROTEIN FLHA FAMILY SIGNATURE domain identified by eMATRIX, accession number PR00949E, p-value=6.400e- 20, raw score of 12.26
  DOMAIN (62)..(122): FHIPEP family domain identified by PFam, accession name FHIPEP, E-value=3e-28, PFam score of 99.0
MASPPSMMTNVFPRVAHLASTHDCRMRRKRLIRPTVQAQVCRPDKTRKRRIRQWCSDAGCGAQIPALVISTAAGVIVTRVSTDQDVGEQMVNQLFSNPSVMLLSAAVLGLLGLVPGMPNLPLPKQHCSLILVFSERQVDVLGEWAGDADCTVIAYASVLPKLRDRQQLFTRQHPELPAAGKGEEAEGVELGRVPRGPPRRAPCRAHPRRERKELGRSGQGRTEQPQCYDTTTLPPYVAAHQTACCWLTCRLWRMPRRNKPSKTPQRLCVPVLRHKSISEKRSTN

SEQ ID NO: 39230 - protein, 94 aa, Homo sapiens
  misc_feature (1)...(94): Xaa = X or * as defined in Table 2
MRRKRLIRPTVQAQVCRPDKTRKRRIRQWCYGCRMRRKRLIRPIKYANRQAETAXGLDALHLSCSSHGXKGPTXSSGHGFRGCKPQALEASMWC

SEQ ID NO: 39231 - protein, 271 aa, Homo sapiens
MGPRSPLREHIKNWLCILVSLELGSYTANSLADDTRYMCRSTGRFPHGPVRCVADGASSPGVTSHPSSPVKPRLHGPLPTRKHKTDRKRNVIIMGLFDEVVGAFLKGDAGKYQAILSWVEEQGGIQVLLEKLQSGGLGAILSTWLSNQQGNQSRIAFIGQRFQNFTRRCFNVQQRAFFITLRACKLLFDGRFKINDNATSGKTKVGMVHAINVALTAPYFHRGDVPTLDGAVKLMLRYQVGKELPQEDVDDIVAFLHSLNGVYTPYMQDKQ

SEQ ID NO: 39232 - protein, 392 aa, Homo sapiens
  DOMAIN (1)..(19): Aspartate-semialdehyde dehydrogenase proteins domain identified by eMATRIX, accession number BL01103A, p-value=4.400e- 11, raw score of 15.39
  DOMAIN (5)..(260): Semialdehyde dehydrogenase domain identified by PFam, accession name Semialdhyde_dh, E-value=2.3e-05, PFam score of -35.3
MSEGWNIAVLGATGAVGEALLETLAERQFPVGEIYALARNESAGEQLRFGGKTITVQDAAEFDWTQAQLAFLAKKLPLTEVEEATNIRVAWVSRTQQVGIGNGIIRKPGTALEISRPFRTPRGARKTPDRTAGLDRAPDTGAQLGVHRDTYQQWKEPKERLEYRGPVQPGRFQPNADPNFYSKSREAEHQAFLDWLLETAQTHQVDAIIVAGDVFDTGSPPSYARTLYNRFVVNLQQTGCHLVVLAGNHDSVATLNESRDIMAFLNTTVVASAGHAPQILPRRDGTPGAVLCPIPFLRPRDIITSQAGLNGIEKQQHLLAAITDYYQQHYADACKLRGDQPLPIIATGHLTTVGASKSDAVGKELPQEDVDDIVAFLHSLNGVYTPYMQDKQ

SEQ ID NO: 39233 - protein, 205 aa, Homo sapiens
  misc_feature (1)...(205): Xaa = X or * as defined in Table 2
AGGPPLNPIEMAXKSWDEIIVKLEKDPQLKTQFLEVYPQGFSGENITDAIAEFEKTLITPDSPFDKWLRGDENALTAQQKKGYQLFKDNKCATCHGGIILGGRSFEPLGLKKDFNFGEITAADIGRMNVTKEERDKLRQKVPGLRNVALTAPYFHRGDVPTLDGAVELMLRYQVGKELPQEDVDDIVAFLHSLNGVYTPYMRDKQ

SEQ ID NO: 39234 - protein, 69 aa, Homo sapiens
  misc_feature (1)...(69): Xaa = X or * as defined in Table 2
QYPGLDLHGAKGLGDGLAGKRYRQLLVSCRHVLYRHPAGPGTRKXRRSGIRWLHRLCGNEPRGKLLVDQ

SEQ ID NO: 39235 - protein, 213 aa, Homo sapiens
  DOMAIN (33)..(156): Pyridoxal-dependent decarboxylase conse domain identified by PFam, accession name pyridoxal_deC, E-value=5.5e-52, PFam score of 181.3
MDQKLLTDFRSELLDSRFGAKAISTIAESKRFPLHEMRDDVAFQIINDELYLDGNARQNLATFCQTWDDENVHKLMDLSINKNWIDKEEYPQSAAIDLRCVNMVADLWHAPAPKNGQAVGTNTIGSSEACMLGGMAMKWRWRKRMEAAGKPTDKPNWCERAGAYWRRGGQNLPYCAGEILPAASAVAGKSGVAGPSYHPDAARRAGRVRADGH

SEQ ID NO: 39236 - protein, 234 aa, Homo sapiens
  DOMAIN (18)..(144): Uncharacterised protein family UPF0066 domain identified by PFam, accession name UPF0066, E-value=7.2e-87, PFam score of 302.0
  misc_feature (1)...(234): Xaa = X or * as defined in Table 2
MSSFQFEQIGVIRSPYKEKFAVPRQPGLVKSANGELHLIAPYNQADAVRGLEAFSHLWILFVFHQTMEGGWRPTVRPPRLGGNARMGVFATRSTFRPNPIGMSLVELKEVVCHKDSVILKLGSLDLVDGTPVVDIKPYLPFAESLPDASASYAQSAPAAEMAVSFTAEVEKQLLTLEKRYPQLTLFIREVLAQDPRPAYRKGEETGKTYAVWLHDFNVRWRVSPXACSTFQLEP

SEQ ID NO: 39237 - protein, 103 aa, Homo sapiens
  misc_feature (1)...(103): Xaa = X or * as defined in Table 2
AQRGGIXRGSLATAGLRSFGGLHPIRTSQQFCLPVRGKPPTQASVMVDAPHSTKLKHLRSISDCCTGSKNFKPVDLSLLGSMGVGSTELDHLAPWLQAPFPGE

SEQ ID NO: 39238 - protein, 147 aa, Homo sapiens
SQHFGSRVGDTLQRNGFQHRFRIFRTVQRNQRFCQQQADLPVLIRQLPGVFQQWQGIGVIAFLHQLHRLLRFQLFFARQHFIQQGADRLFRLRPLEAIYRLPVLEQIHGRNRTQTKLRGNHLLRVAVQLRQNKLPVVLRREAFQNWG

SEQ ID NO: 39239 - protein, 196 aa, Homo sapiens
  DOMAIN (20)..(57): Respiratory chain NADH dehydrogenase 49 Kd subunit proteins domain identified by eMATRIX, accession number BL00535F, p-value= 8.313e-29, raw score of 19.62
  DOMAIN (43)..(86): Respiratory-chain NADH dehydrogenase, 4 domain identified by PFam, accession name complex1_49Kd, E-value=1.4e-06, PFam score of 18.8
LRHAVLLTEGFSYKPHAFALGFVEAPRGEDVHWSMLGDNQKLFRWRCRAATYANWPVLRYMLRGNTVSDAPLIIGSLDPCYSCTDRVTLVDVRKRQSKTVPYKEIERYGIDRNRSPLNRSLYPREVPSTTLQPLRTPRCPGKNLALAVNVSTGTNGQKPESCGPGRCRMKKGEYKRTISGGRTIIRVHIARLLRTF

SEQ ID NO: 39240 - protein, 224 aa, Homo sapiens
  DOMAIN (98)..(135): Respiratory chain NADH dehydrogenase 49 Kd subunit proteins domain identified by eMATRIX, accession number BL00535F, p-value= 8.313e-29, raw score of 19.62
  DOMAIN (46)..(164): Respiratory-chain NADH dehydrogenase, 4 domain identified by PFam, accession name complex1_49Kd, E-value=7e-08, PFam score of 22.4
SQVPICQRSTSCRVKRLFSWKMAYRSALVTPWRVFRRNPAVPRTSPVVFTGGDVFSRVMVRVKETFDSLAMLEFALDNMPDTPLLTEGFSYKPHAFALGFVEAPRGEDVHWSMLGDNQKLFRWRCRAATYANWPVLRYMLRGNTVSDAPLIIGSLDPCYSCTDRVTLMPSQCIACGACACACPANALTIQTDDQQNSRTWQLYLGRCIYCPSSTNNNGPVISFN

SEQ ID NO: 39241 - protein, 374 aa, Homo sapiens
  DOMAIN (208)..(245): Respiratory chain NADH dehydrogenase 49 Kd subunit proteins domain identified by eMATRIX, accession number BL00535F, p-value= 8.313e-29, raw score of 19.62
  DOMAIN (144)..(280): Respiratory-chain NADH dehydrogenase, 4 domain identified by PFam, accession name complex1_49Kd, E-value=2.3e-07, PFam score of 20.9
  misc_feature (1)...(374): Xaa = X or * as defined in Table 2
MKKRKTVKKRYVTALVIVIAGLMTLWRIRNAPVPTYQTLIVRPGDLQHSVLAPGKLARTSKNFAQFIRVRYSAFSLAGEKKKRXXPRVHGVQNASSGRYRGTGCRLGSDSRKKLVEILLATPNMEQRTQGIGILDPQIARDLRFDHPYAEYDNIPKTLFTFTAADVFSRVMVRVKETFDSLAMLEFALDNMPDTPLLTEGFSYKPHAFALGFVEAPRGEDVHWSMLGDNQKLFRWRCRAATYANWPVLRYMLRGNTVSDAPLIIGSLDPCYSCTDRVTLVDVRKRQSKTVPYKEIERYGIDRNRSPLNRRCTGEGWTRAWITLPLLIKPLTPLMIASFAFNFNNFVLIQLLTNGGPDRLGTTTPAGYTDLLVNI

SEQ ID NO: 39242 - protein, 822 aa, Homo sapiens
  DOMAIN (56)..(110): Chaperonins cpn60 proteins domain identified by eMATRIX, accession number BL00296B, p-value=1.000e-40, raw score of 15.98
  DOMAIN (8)..(104): TCP-1/cpn60 chaperonin family domain identified by PFam, accession name cpn60_TCP1, E-value=5e-55, PFam score of 196.2
  misc_feature (1)...(822): Xaa = X or * as defined in Table 2
MLRGVNVLADAVKVTLGPKGRNVVLDKSFGAPTITKDGVSVAREIELEDKFENMGAQMVKEVASKANDAAGDGTTTATVLAQAIITEGLKAVAAGMNPMDLKRASRSRKGYGPARIRQELNQKGISREATEKAMRECDIDWCALARDQATRKYGEPLPTVFSEKSRKLIAGVKRAFTHQAVNAGFCTQPAVSVIAGDFDRHGFNTRHFTFRLFDDFSFETTRFCPAQIHTLKHARPVLCFRTARPRLNIEVAVGAVIFAREHTAELKLRQFFQGAPQKAVISIPVVPQVTGVVIEVTDKKNTLIKKGEVLFRLDPTRYQARVDRLMADIVTAEHKQRALGAELDEMAANTQQAKATRDKFAKEYQRYARGSQAKVNPFSERDIDVARQNYLAQEASVKSSAAEQKQIQSQLDSLVLGEHSQIASLKAQLAEAKYNLEQTIVRAPSDGYVTQVLIRPGTYAASLPLRPVMVFIRSETSLRTHCPGHADYVKNMITGAAQMDGAILVVAATDGPMPQTREHILLGRQVGVPYIIVFLNKCDMVDDEELLELVEMEVRELLSQYDFPGDDTPIVRGSALKALEGDAEWEAKILELRWLPGFLYSGTRACDXQAVPAADRRRSSPSPVVVPLLPVVXNAVSSKLVKKLKRWYPRDSEVYLYWRXNVPPTAGRRPCWXERRCSAAWYQTXRNRTWSGMAKPRYADYLPFKDADGSVLDQGIALWFSNRKAEHYFLNGKLAAVRMDEFKYHVLIQQPYAYTQSGYQGGFTGTVMQTAGSSVFNLYTDPQESDSIGVRHIPMGVPLQTEMHAYMEILKKYPPRAQIKSD

SEQ ID NO: 39243 - protein, 478 aa, Homo sapiens
  DOMAIN (325)..(370): ubiE/COQ5 methyltransferase family proteins domain identified by eMATRIX, accession number BL01183B, p-value=3.838e-09, raw score of 21.31
FWRAAAPIPDCWRSGAVKKQHVEVTQLDWTPPGRQYAGPIPCSRRGYCPLPRSGSVRWADLFPPALDLAGHPGAKVANLVPKTTFIDGVDQTSFFLGTNGQSNRKAEHYFLNGKLAAVRMDEFKYHVLIQQPYAYTQSGYQGGFTGTVMQTAGSSVFNLYTDPQESDSIGVRHIPMGVPLQTEMHAPGLPLASSMKRWIRRATGFIFGKEQFEDVVPVLGSKVNGVQFNAELVADSLGISQIRCRCAIFLTVVFFPVLHKQAFDLISLLLQQPGRNGGIDTAGHADDYFFCGFRHWITHDIELQGGARQKDAADHYLAGDIESLPLATATFDLAWSNLAVQWCGNLSTALRELYRVVRPKGVVAFTTLVQGSLPELHQAWQAVDERPHANRFLPPDEIEQSLNGVHYQHHIQPITLWFDDALSAMRSLKGIGATHLHEGRDPRILTRSQLQRLQLAWPQQQGRYPLTYHLFLGVIARE

SEQ ID NO: 39244 - protein, 306 aa, Homo sapiens
  DOMAIN (89)..(104): Phosphoglucomutase and phosphomannomutase phosphoserine signa domain identified by eMATRIX, accession number BL00710, p-value= 8.875e-15, raw score of 12.98
  misc_feature (1)...(306): Xaa = X or * as defined in Table 2
MARADTVSVPMFMGLAAKPCWRDTEPNTGYRGPHVRNIQLTHDPRLDYRSILIDINDIGQTFHERLHPDACLSNAILVHNKKGGPLADGIVITPSHNPPEDGGIKYNPPNGGPADTNVTKVVEDRANALLADGLKGVKRISLDESDGIRSKNDVIDTSDDDMXXQCLSRRSNGHPGAKVANLVPKTTFIDGVDQTSFFLGTNGQSNRKAEHYFLNGKLAAVRMDEFKYHVLIQQPYAYTQSGYQGGFTGTVMQTAGSSVFNLYTDPQESDSIGVRHIPMGVPLQTEMHAYMEILKKYPPRAQIKSD

SEQ ID NO: 39245 - protein, 65 aa, Homo sapiens
RRQSSGCPLYALPRDAPAQRHVAHLCAEWRKPLQRYRYQSDRAAVQSLRPALRRGGVRGNSAPVD

SEQ ID NO: 39246 - protein, 411 aa, Homo sapiens
  DOMAIN (1)..(242): HlyD family secretion protein domain identified by PFam, accession name HlyD, E-value=0.0004, PFam score of 27.2
MAHIVTAEHKQRALGAELDEMAANTQQAKATRDKFAKEYQRYARGSQAKVNPFSERDIDVARQNYLAQEASVKSSAAEQKQIQSQLDSLVLGEHSQIASLKAQLAEAKYNLEQTIVRAPSDGYVTQVLIRPGTYAASLPLRPVMVFIPDQKRQIVAQFRQNSLLRLAPGDDAEVVFNALPVLQLAYAVIHPRPAALVFTGIQIEVEATAQFVIFVIQFDRIPRHTADTGNTSGFDAGQHMVQAVTELVEEGDHFVVSEQRRFTIYRAVEMYCWCEGLAVLLHLNPHLQWEVHGLEGLSKKNWYLLICNHRSWADIVVLCVLCIRPRISPHQIPAVFPDDQNRGHSDERCRLYSIKLKEGRFPSTKPELTKHGKINGTGSYNIFRSSSGSGVSLKAQGNSYISSCQQQLLLL

SEQ ID NO: 39247 - protein, 515 aa, Homo sapiens
  DOMAIN (303)..(332): AMINOTRANSFERASES CLASS-V PYRIDOXAL-PHOSPHATE ATTACHMENT SI domain identified by eMATRIX, accession number DM00813A, p-value= 6.250e-22, raw score of 20.30
  DOMAIN (180)..(496): Aminotransferases class-V domain identified by PFam, accession name aminotran_5, E-value=1.9e-41, PFam score of 151.1
MFLKNLPEIANVIKPYCMEQADNVESLHNLLLPADAPFTTFEGQGLFSHKILIQTQVPGYDRAIQSNNLCGITTGHQRTDIHRLNSHFGKLQCCRSALRRGGQAAVYPRSERDTDVARQNYLAQEASVKSSAAEQKQIQSQLDSLVLGEHSQIASLKAQLAEAKYNLEQTIVRAPSDGYVTQVLIRPGTYAASLPLRPVMVFIPDQKRQIVAQFRQNSLLRLAPGDDAEVVFNALPGLQVRVRYVITYLVPQRDGIIDLKELEAAMRDDTILVSIMHVNNEIGVVQDIAAIGEMCRARGIIYHVDATQSVGKLPIDLSQLKVDLMSFSGHKIYGPKGIGALYVRRKPRVRIEAQMHGGGHERGMRSGTLPVHQIVGMGEAYRIAKEEMATEMERLRGLRNRLWNGIKDIEEVYLNGDLEHGAPNILNVSFNYVEGESLIMALKDLAVSSGSACTSASLEPSYRCARWVRQFWDEPDERLIRSPRGTESENRDIPVVPRAGRTCALVPHAEREKWK

SEQ ID NO: 39248 - protein, 420 aa, Homo sapiens; identical to SEQ ID NO: 37462

SEQ ID NO: 39249 - protein, 489 aa, Homo sapiens
  DOMAIN (46)..(93): BINDING-PROTEIN-DEPENDENT TRANSPORT SYSTEMS INNER MEMBRANE domain identified by eMATRIX, accession number DM00914C, p-value= 1.000e-40, raw score of 21.08
  DOMAIN (131)..(302): Lyase domain identified by PFam, accession name lyase_1, E- value=1.3e-45, PFam score of 165.0
MVYTNGSPVNTGFTENADLFGWFGIGRPLGEPTPVWIMGIVFLAAWYMLHHTRLGRYIYALGGNEAATRLSGINVNKIKIIVYSLCGLLASLAGIIEMARLSSAQPTAGTGYELEKWLRSFLAVCHIRNINQNVHDCLQHLAVQYRDIPLLSRTHGQPATPSTIGKEMANVAYRMERQYRQLNQVEILGKINGALTGISFSEEFVTSLGIQWNPYTTQIEPHDYIAELFDCVARFNTILIDFDRDVWGYIALNHFKQKTIAGEIGSSTMPHKVNPIDFENSEGNLGLSNAVLQHLASKLPVSVVHQNRCIPDSLPAVEWLTYGSGWLSGMKLGDTPLVEYTRDRLHRETLRSFGRYELTTAYTPAGQLQSQHLNSLLSDRDYTWNDNGELIRISSPRQTRSYSYSTTGRLTGVHTTAANLDIRIPYTTDPAGSKKAGKRLGRGIGSGLGKTGGRGHKGQKSRSGGGVRRGFEGGQMPLYRRLPKFGFTS

SEQ ID NO: 39250 - protein, 111 aa, Homo sapiens
  misc_feature (1)...(111): Xaa = X or * as defined in Table 2
RSESCCCGHEPDGPETRQPXPQRLWTCAYSPGTESERYFPRSDRKSDAXMXHRLVRTGARSGDAKIWRTFANCLFRKIKKTYRRSQTGFYAPGGERRFLYAASRKRNRRRF

SEQ ID NO: 39251 - protein, 451 aa, Homo sapiens
  DOMAIN (106)..(127): RHS PROTEIN SIGNATURE domain identified by eMATRIX, accession number PR00394D, p-value=2.170e-28, raw score of 6.56
  misc_feature (1)...(451): Xaa = X or * as defined in Table 2
CLPGLKLVRLLYRLEERNARRTSAAVDATXRAGAWLAQCGLTVEQLARQVDPDMTTRAHLYHCDHRGLPLALISEDGNTAWSAEYDEWGNQLNEENPHHVYQPYRLPGQQHDEESGLYYNRHRYYDPLQGRYITQDPMGLKGGWNLYQYPLNPLQQIDPMGLLQTWDDARSGALTWYGWDGDRLTTIQNDRSRIQTIYQPGSFTPLIRVETATGELAKTQRRSLADALQQSGGEDGGSVVFPPVLVQMLDRLESEILADRKRAATTWSHNHYANKKEGIKATGYRLAQTLGFKCEESSVFRVTRKSHSSFVWLDKAVTPHPTSNVRAGCLMRRWRVLSGLHRCEVLHPHTPHPAYHAGCGVSLQRNIRHFFLNGLRFQLRFRRTICCLRLVVVQPQHFAGVLQLAFCCRYITVQLASIRRNDRFQRSLPLRAGNTIAKYFFQQIQHNRRGG

SEQ ID NO: 39252 - protein, 387 aa, Homo sapiens
  DOMAIN (180)..(231): Domain of Unknown Function 2 domain identified by eMATRIX, accession number PF00563A, p-value=2.313e-27, raw score of 30.25
  DOMAIN (158)..(387): Domain of unknown function 2 domain identified by PFam, accession name DUF2, E-value=3.6e-30, PFam score of 113.6
  misc_feature (1)...(387): Xaa = X or * as defined in Table 2
MGRRVLTPESQQSFTREFSNLFDCSPREYRHRDYWDLANIFPSCLIRQQQKTELVCLLCPHWPKRKQPANSKLGDPLALVKAAHTLVLQHFAIAMCQSGTFCWTSCTATTFTPDDRPCTDERQSSFRFNGRTAAGSNNAGVMEMINIDLLTTMLLEPQLPQISSASLTVNNRHLLYGNGLPLLNARSQQCIGVEILLRWNNPRQGWISPDVFIPIAEEHHLIVPLTRYVMAETIRQRHVFPMSSQFHVGINVAPSHFRRGVLIKDLNQYWFSAHPIQQLILEITERDALLDVDYRIARELHRKNVKLAIDDFGTGNSSFSWLETLRPDVLKIDKSFTAAIGSDAVNSTVTDIIIALGQRLNIELVAEGVETQEQAKYLRRHGVNLQX

SEQ ID NO: 39253 - protein, 435 aa, Homo sapiens
  misc_feature (1)...(435): Xaa = X or * as defined in Table 2
MAETQQQFKKRMAASGLETRFDEVGNLYGRLNGTEYPQEVVLSGSHIDTVVNGGNLDGQFGALAAWLAIDWLKTQYGAPLRTVEVVAMAEEEGSRFPYVFWGSKNIFGLANPDDVRNICDAKGNSICRCDEGLRIYSSERPTNSVVRILKPLLNCILNRADVLERITAWDKPDCHTLHHHADLSGHFPEEIGPLLFAGFSSAWQNGPSAFSWQKHGSAQTSSIAVLHRTPRHAGCLAQCDFTRAFFQIMLKNYLRKKRWKKKIHFPNASGKSSRAIPEGYVTTYGDVAKLGGIAPGRAPGGRVQRQALLAEGAGTAEDGFTXVGEVEDAARDGPXTDAERTGXTYADAGRQDPQSAEDRQRANLHGNADRXXXRFASGGFHRGYHPRAAAGFCDHRKPACGNARRAGWPDRAXSKSSAYAFRYRYEHRLHAGRSG

SEQ ID NO: 39254 - protein, 565 aa, Homo sapiens
  DOMAIN (506)..(527): RHS PROTEIN SIGNATURE domain identified by eMATRIX, accession number PR00394D, p-value=1.090e-28, raw score of 6.56
MRSDPDTSVNEIETKLSALLGSETTGEILFDLLCANGPEWNRFVTLEMKYGRIMLDTAKIIDEQDVPTHILSKLTFTLRNHPEGVVMKNFEVLQPLQNSLSGLPLWVSERILQQINQLTHYEPVIGIMGKTGAGKSSLCNALFAGEVSPVSDVAACTRDPLRFRLQIGEHFMTIVDLPGVGESGVRDTEYAALYREQLPRLDLILWLIKADDRALATDEHFYRQVIGEAYRHKMLFVISQSDKAEPTSGGNILSTEQKQNISRKICLLHELFQPVHPVCAVSVRLHPVVALLQQFRTDDERTHRYHYDSQHRLVDYTRTQYEEPLVESRYLYDPLGRRVAKRVWRRERDLTGWMSLSRKPQVTWYGWDGDRLTTIQNDRSRIQTIYQPGSFTPLIRVETATGELAKTQRRSLADALQQSGGEDGGSVVFPPVLVQMLDRLESEILADRVSEESRRWLASCGLTVEQMQNQMDPTEGTTAWYAEYDEWGNLLNEENPHQLQQLIRLPGQQYDEESGLYYNRHRYYDPLQGRYITQDPIGLKGGWNFYQYPLNPISDIDPLGLSMWE

SEQ ID NO: 39255 - protein, 263 aa, Homo sapiens
  DOMAIN (116)..(150): ELEMENT TRANSPOSABLE INSERTION PROTEIN TRANSPOSITION DNA domain identified by eMATRIX, accession number PD02455B, p-value= 2.241e-28, raw score of 21.87
  DOMAIN (124)..(176): Integrase core domain identified by PFam, accession name rve, E-value=2.3e-12, PFam score of 46.8
  misc_feature (1)...(263): Xaa = X or * as defined in Table 2
SMSLLKNIRLSSASKQCAACSGWPAAAGIRGVSGGQGXARVSSSANTATALSSRLLPGQNSVTVPHAXRMNCVLRVTPLSKNRGGKPAPSGTEGKGLPEVQPGQLRAHGLPVSENLLEQDFYASGPNQKWAGDITYLRTDEGWLYLAVVIDLWSRAVIGWSMSPRMTAQLAAGCPKPLWGTPSFPGPACGLAPSSAGVLPRGFVPAVWLDSEDPEEYVGSSDFLTKMQSMKKVDLKKNRAATDADGQFSPRCCMPEKYAGSHN

SEQ ID NO: 39256 - protein, 638 aa, Homo sapiens; identical to SEQ ID NO: 37465
  DOMAIN (301)..(314): PROTEIN ZINC-FINGER METAL-BINDI domain identified by eMATRIX, accession number PD00066, p-value=3.077e-15, raw score of 13.92
  DOMAIN (255)..(601): Zinc finger, C2H2 type domain identified by PFam, accession name zf-C2H2, E-value=1.6e-74, PFam score of 261.0

SEQ ID NO: 39257 - protein, 1589 aa, Homo sapiens; identical to SEQ ID NO: 34556
  DOMAIN (58)..(90): Nickel-dependent hydrogenases large subunit proteins domain identified by eMATRIX, accession number BL00507D, p-value=8.297e- 26, raw score of 14.28
  DOMAIN (610)..(794): Bacterial type II secretion system prote domain identified by PFam, accession name GSPII_E, E-value=1.7e-121, PFam score of 410.8

SEQ ID NO: 39258 - protein, 673 aa, Homo sapiens
  DOMAIN (488)..(503): ADRENODOXIN REDUCTASE FAMILY SIGNATURE domain identified by eMATRIX, accession number PR00419D, p-value=2.189e-10, raw score of 10.62
  DOMAIN (490)..(643): Pyridine nucleotide-disulphide oxidoreducta domain identified by PFam, accession name pyr_redox, E-value=1.3e-07, PFam score of 28.4
MGKVPGLEERGHRRGSCGTQQRSWHSVLIDQGRYRARIVRMLQVDSRGSPDDFHHVLPWQNLLHAGQENLFSGLTALTAEFTVGEETSHMKLTNRKNINSVTKDPKLLSHSQKDGQYSHLLTFLLQDDRHHIRMVIGDRMCSGVCRWTLSAKLCHQGLDLWGTGQLAATLYAKGFPEKADPGGQGQGPIAHPQPSAPEKKVDNKGRNFLHVAVQNSDIESVLFLISVHANVNSRVQDASKLTPLHLAVQAGSEIIRIPLVEYTRDRLHRETLRSFGRYELTTAYTPAGQLQSQHLNSLLSDRDYTWNDNGELIRISSPRQTRSYSYSTTGRLTGVHTTAANLDIRIPYATDPAGNRLPDPELHPDSTLSMWPDNRIARDAHYLYRYDRHGRLTEKTDLIPEGVIRTDDERTHRYHYDSQHRLVHYTRTQYEEPLVESRYLYDPLGPQGGKTVTWYGWDGDRLTTIQNDRTRIQTIYQPGSFTPLIRRIPVLGGGDTTMDCLRTSIRLNAASVTCAYRRDQISMPGSRKEVVNAREEGVEFQFNFQPQYIACDEDGRLTAVGLIRTAMGEPGPDGRRRPPPVAGSEFELPADVLIMAFGFQAHAMPWLQGSGIKLDKWGLIQTGDVGYLPTQTHLKKVFAGGDAVHGADLVVTAMAAGRQAARDMLTLFDTKAS

SEQ ID NO: 39259 - protein, 1144 aa, Homo sapiens
  DOMAIN (308)..(359): LIPOPROTEIN-28 domain identified by eMATRIX, accession number DM01922D, p-value=7.873e-30, raw score of 19.59
  DOMAIN (984)..(1144): Integrase core domain identified by PFam, accession name rve, E-value=3e-48, PFam score of 170.9
  misc_feature (1)...(1144): Xaa = X or * as defined in Table 2
NPALTRIVPAQQNLYTNTLLAARIKQRLTEQFELMLRQAQIDFAGKAHSLTEAQANTTQVSAERDRLFKNYQRYLKGSQAAVNPFSERDIDDARQNFLAQDALAQIQSQLDSLVNGEQSQIVSLKAQLAEAKYNLEQTIVRAPSNGYVTQVLIRPGTYAASLPLRPVMVFIPDQKRQIVAQFRQNSLLRLAPGDDAEVVFNALPGKVFSGKLAAISPAVPGGAYQSTGTLQTLNTAPGSDGVIATIELDEHTDLSALPDGIYAQNPKNLKIVELKAPQLPRSLDDAQIALAVINTTYASQIGLTPAKDGIFVEDKESPYVNLIVTREDNKDAENVKKFVQAYQSDEIPCRTRSKHCTPAESGACKTESAARHAGPNLYQCRRIRSANRSAISVKGWRTPCIPDSLPAVEWLTYGSGYLAGMKLGDTPLVEYTRDRLHRETLRSFGRYELTTAYTPAGQLQSQHLNSLLSDRDYTWNDNGELIRISSPRQTRSYSYSTTGRLTGVHTTAANLDIRIPYATDPAGNRLPDPELHPDSTLSMWPDNRIARDDNYLYRXCRSGRVTEKNDLIPKGVIRTDDERTHRYHYDSQHRLVHYTRTQYAEPLVESRYLYDPLGRRVAKRVWRRERDLTGWMSLSRKPQVTWYGWDGDRLTTIQNDRTRIQTIYQPGSFTPLIRVETATGELAKTQRRSLADTLQQSSGEDGGSVVFPPVLVQMLDRLESEILADRVSEESRRWLASCGLTVEQMQNQMDPVYTPARKIHLYHCDHRGLPLALISTEGATAPRGSRDVPVPDSRESRASCEQRFPRPTRGRHTYSAVTLTATFRTELRVYRDARLKRQLQERKEELAILQKPAKYFAKRVFIEKHQAEFSIKAMCRVLRVARSGWYTWCQRRTRISTRQQFRQHCDSVVLAAFTRSKQRYGAPRLTDELRAQGYPFNVKTVAASLRRQGLRAKASRKFSPVSYRAHGLPVSENLLEQDFYASGPNQKWAGDITYLRTDEGWLYLAVVIDLWSRAVIGWSMSPRMTAQLACDALQMALWRRKRPRNVIVHTDRGGQYCSADYQAQLKRHNLRGSMSAKGCCYDNACVESFFHSLKVECIHGEHFISREIMRATVFNYIECDYNRWRRHSWCGGLSPEQFENKNLA

SEQ ID NO: 39260 - protein, 122 aa, Homo sapiens
  misc_feature (1)...(122): Xaa = X or * as defined in Table 2
DKGEIGGWAAQTHRGSHEQGARRVPEDRDARARRKNEEPAARPRTTNTRNGSRKGPERKWADGRGHKAEAGRRKRRKRQXKEEMRKIRQQESGGEKKRGLCGRPPGGGNNCMEGRERRGRKR

SEQ ID NO: 39261 - protein, 72 aa, Homo sapiens
  misc_feature (1)...(72): Xaa = X or * as defined in Table 2
NRPPPVCACHRQVVLPVPVNRAPAEKWQVPRVTLPGRQSTSWFAAVVYRNXYQYCALTAQRGRRSPRQLPHR

SEQ ID NO: 39262 - protein, 226 aa, Homo sapiens
  DOMAIN (17)..(42): DNA mismatch repair proteins mutL / hexB / PMS1 proteins domain identified by eMATRIX, accession number BL00058D, p-value= 6.571e-26, raw score of 15.09
  misc_feature (1)...(226): Xaa = X or * as defined in Table 2
MIRIPGCEDKLGADQQPAFVLYLEIDPHQVDVNVHPAKHEVRFHQSRLVHDFIYQGVLSVLQQQLETPLPLDDEPQPAPRSIPENRVAAGRNHFAEPAAREPVAPRYTPAPASGSRPAAPWPNAQPGYQKQQGEVYRQLLQTPAPMQKLKAPEPQEPALAANSQSFGRVLTIVHSDCALLERDGNISLLSLPITGIWCSDXHXXPMIPRLLIPASVRSSSMVESAK

SEQ ID NO: 39263 - protein, 629 aa, Homo sapiens
  DOMAIN (286)..(301): CYCLIN-DEPENDENT KINASE REGULATORY SUBUNIT SIGNATURE domain identified by eMATRIX, accession number PR00296C, p-value=9.658e- 09, raw score of 7.99
  DOMAIN (14)..(345): Hydrogenase formation hypA family domain identified by PFam, accession name HypD, E-value=1.7e-218, PFam score of 739.3
MARKNNAFVDEYRAPEQVMQLIEHLRERASHLSYTAERPLRIMEVCGGHTHAIFKFGLDQLLPENVEFIHGPGCPVCVLPMGRIDTCVEIASHPEVIFCTFGDAMRVPGKQGSLLQAKARGADVRIVYSPMDALKLAQENPTRKVVFFGLGFETTMPTTAITLQQAKARDVQNFYFFCQHITLIPTLRSLLEQPDNGIDAFLAPGHVSMVIGTDAYNFIASDFHRPLVVAGFEPLDLLQGVVMLVQQKIAAHSKVENQYRRVVPDAGNLLAQQAIADVFCVNGDSEWRGLGVIESSGVHLTPDYQRFDAEAHFRPAPQQVCDDPRARCGEVLTGKWRLTGPLRQAQLTPGEAPVCAQPLLIPLRLKVSAEEKSALEKAQSALAELGIDFQSDAQHVTIRAVPLPLRQQNLQILIPELIGYLAKQSVFEPGNIAQWIARNLMSEHAQWSMAQAITLLADVERLCPQLVKTPPGGDESWVKTPMRQTPFPGIVPDESDRAAETRSTLTSSGAMAAVIGFQSPYNDQRSVIALLADSPRGYEMLNDAVNDSGKRATMFGSVAVIRESGINSLRVGDVYYVGHLPWFERVWYALANHPILLAVLAAISVILLAWVLWRLLRIISRRRLKPDNE

SEQ ID NO: 39264 - protein, 120 aa, Homo sapiens
  misc_feature (1)...(120): Xaa = X or * as defined in Table 2
LFRGEKGARNEVLATRYYRQTVSGDFRHLHCLADQYALGGAYQFXAGLYXLHQAWEMNRGLQLLSDALGEQYAQHGNWRFLRNNDRFVFQILRSFEHDNSEDKPGPGMPPHGWRTQFWGG

SEQ ID NO: 39265 - protein, 1096 aa, Homo sapiens
  DOMAIN (940)..(982): Aldehyde dehydrogenases glutamic acid proteins domain identified by eMATRIX, accession number BL00687B, p-value=1.675e- 22, raw score of 17.54
  misc_feature (1)...(1096): Xaa = X or * as defined in Table 2
TGGPSSPSSHWKTPVVIYWDGTALRCVFVPVLGETGAQRKRISARKGSLTTSCPQGALSEHCPTTPAPLPSQRRNHWMENISPFRSVGVSASRCSESXMRPWNSRMPRLGRSQGDSSSALMSTGVAFRGRFLKGGLPQAPAVAAATPWLCTQGVAGETTPAVNVKYNVRVRVSEYISMHVHREVTARNVYVTQTRRPMTTFPTLAWETPHYHRRYGVSLLSSAWVQVGPPRYCRQTNALSNLPNFNLKSGADTQSRTGDLTLTKGALYQLSHISTLNLMPGSSLLSHGETPHYHRRYGVSLLSSAWAVWMEASRVDGNRSERSHLALRGTFARLRLRARSCRMSKTPLVITTFSPCLRAAATASFSSSSVITLKAWYRATSTLQRFSRLDRRNRGGSQYWRPPRQVASICLKNAELHSTRNYHAASGCPAVTPYHRLHLLGVVRKHQRANRTQRLINPLVQRLRINTFETFFKIQTDQLLVAGKTKSHLTLNVRPKRTLTQRARCIVNARQPDQACISTERSDIHRHIQRPVGERSNELSLAWRTFPTYASGMSPFMTPVSCKLASFLAVSCRTDDDPDGAWQHGNEANCGTGGESLWLSSGTGSDHAGSVAGHPVVYDYRPAGLVLRFAVRPVFTRDGQLDAFLLHEHPDAERSPGQSGEQRQQPAVDDYAIVDEYRRHYRRAVAGTFWFTACQRRQRHHTNRLYSAERYASKCSYFAAKKERAMKFWRPGITGKLFLAIFATCIVLLISMHWAVRISFERGFIDYIKHGNEQRLQLLSDALGEQYAQHGNCASCATEELRSLLSGNIFPRLELGVHSQYTFLSVLQSVGPYRLINTLLAASVMGSDHESPDMAAARQLAIEKAVAKHLLSEKERFYALSAQTGATRADSWLDIEGGIGTLFTYASLGSRELPDDTLWPEDELIPLSKEGGFAARHLLTSKSGVAVHINAFNFPCWGMLEKLAPTWLGGMPAIIKPATATAQLTQAMVKSIVDSGLVPEGAISLICGSAGDLLDHLDSQDVVTFTGSAATGQMLRVQPNIVAKSIPFTMEADSLNCCVLGEDVTPDQPEFALFIREVVREMTTKAGTRCSVIEFF

SEQ ID NO: 39266 - protein, 599 aa, Homo sapiens
  DOMAIN (24)..(49): DNA mismatch repair proteins mutL / hexB / PMS1 proteins domain identified by eMATRIX, accession number BL00058D, p-value= 6.571e-26, raw score of 15.09
  DOMAIN (432)..(501): HAMP domain identified by PFam, accession name DUF5, E-value= 3.4e-18, PFam score of 73.9
  misc_feature (1)...(599): Xaa = X or * as defined in Table 2
MMRDRLINHAIRPACEXQLGADQQPAFVLYLEIDPHQVDVNVHPAKHEVRFHQSRLVHDFIYQGVLSVLQQQLETPLPLDDEPQPAPRSIPENRVAAGRNHFAEPAAREPVAPRYTPAPASGSRPAAPWPNAQPGYQKQQGEVYRQLLQTPAPMQKLKAPEPQEPALAANSQSFGRVLTIVHSDCALLERDGNISLLSLPVAERWLRQAQLTPGEAPVCAQPLLIPLRLKVSAEEKSALEKAQSALAELGMVNSTRFSLHEHPDAERSPGQSGEQRQQPAVDDYAIVDEYGRHYRRAVAGTLLHVSVDSGTTQTVFMYTWLSMALIIALPAFIFARVPNDTHQNVAISRRKTESRNEVLATRYHRQTVSGDFRHLHCLADQYALGAPIPPDGTRRPILVNGAEVGAVIASPVERLTRNTDINFDKQQRQTSWLIVALATLLAALATFLLARGLLAPVKRLVDGTHKLAAGDFTTRVTPTSEDELGKLAQDFNQRASTLEKNQTPITSRGHPRIFLARHPAPAPTTLTSLALKIIRSPAFLPDTASECAMAIDCYILAASTQAYKAASSLSLSVVLATSARFKTSSTSIWVKSSSTNSCE

SEQ ID NO: 39267 - protein, 281 aa, Homo sapiens
  DOMAIN (113)..(141): Sigma-54 interaction domain proteins ATP-binding region A proteins domain identified by eMATRIX, accession number BL00675C, p -value=1.000e-29, raw score of 13.51
  DOMAIN (91)..(193): Sigma-54 transcription factors domain identified by PFam, accession name sigma54, E-value=8e-49, PFam score of 175.6
NNWRGFPDIMSSDYAGEVMLWIMLAALTVVFVVGFRVLSCGARKAIRRLSDRLNIDVVPVESMVDQMGKSAGDCKLVLRGGGEGGVKPPSPIQVDIRIISATNQNLAQFIAEGKFREDLFYRLNVIPITLPPLRERQEDIELLVHYFLHLHTRRLGSVYPGIAPDVVEILRKHRWPGNLRELSNLMEYLVNVVPSGEVIDSTLLPPNLLNNGTTEQSDVTEVSEAHLSLDDAGGTALEEMEKQMIREALSRHNSKKQVADELGIGIATLYRKIKKYELLNT

SEQ ID NO: 39268 - protein, 35 aa, Homo sapiens
MIQRANCRTVQQAFSAHWKQQTGDNVVIVSHTVAQ

SEQ ID NO: 39269 - protein, 260 aa, Homo sapiens
  DOMAIN (40)..(72): Sigma-54 transcription factors domain identified by PFam, accession name sigma54, E-value=7.6e-06, PFam score of 24.9
MLCTKWDKLGLEKNAGKNKNAYKWYGWPANAPDEPHIEQLVGECRVMRQLKRLISRIAPSPSSVMVVGESGTAIPVVSHAEFKGGFADIGVHYLDWTSRTTEKSSTKSHKDDFGYLEFEGGANFSWGEMYGFFDWENFYNGRHNKPGSEQRYTFKNTNRIYLGDTGFNLYLHAYGTYGSANRVNFHDDMFLYGIGYNFTGSGWWFKPFFAKRYTDQTYYTGDNGYVAGWVAGYNFMLGSEKFTLTNWNEYEFDRDATYAA

SEQ ID NO: 39270 - protein, 499 aa, Homo sapiens
  DOMAIN (23)..(64): Prokaryotic sulfate-binding proteins domain identified by eMATRIX, accession number BL00401A, p-value=1.000e-40, raw score of 26.15
  DOMAIN (204)..(436): Sigma-54 transcription factors domain identified by PFam, accession name sigma54, E-value=1.6e-133, PFam score of 457.0
MNKWGVGLTFLLAATSVMAKDIQLLNVSYDPTRELYEQYNKAFSAHWKQQTGDNVVIRQSHGGSGKQATSVINGIEADVVTLALAYDVDAIAERGRIDKEWIKRLPDNSAPYTSTIVFLVRKGNPKQIHDWNDLIKPGVSVITPNPKSSGGARWNYLAAWGYALHHNNNDQAKAQDFVRALYKNVEVLDSGAPNAPDEPHIEQLVGECRVMRQLKRLISRIAPSPSSVMVVGESGTGKEVVARAIHKLSGRRNKPFIAINCAAIPEQLLESELFGYVKGAFTGASANGKTGLIQAANTGTLFLDEIGDMPLMLQAKLLRAIEAREILPIGASSPIQVDIRIISATNQNLPQFIAEGKFREDLFYRLNVIPITLPPLRERQEDIELLVHYFLHLHTRRLGSVYPGIAPDVVEILRKHRWPGNLRELSNMMEYLVNVVPSEVSEAHLSLDDAGGTALEEMEKQMIREALSRHNSKKQVADELGIGIATLYRKIKKYELLNT

SEQ ID NO: 39271 - protein, 18 aa, Homo sapiens
DNHVVFVVGSVYMMDYVY

SEQ ID NO: 39272 - protein, 58 aa, Homo sapiens
  misc_feature (1)...(58): Xaa = X or * as defined in Table 2
FFSLFFFISLASGLSILXWXFVFLWDRWXYPLYHFLLHLFDSSLFSSLLVLLVVYQFC

SEQ ID NO: 39273 - protein, 105 aa, Homo sapiens
  misc_feature (1)...(105): Xaa = X or * as defined in Table 2
SGSVMPPALFFWLRIDLAMQALFWFHMNFKVVFSNSVKKVIGSLMGTALNLXITLGSMAIFTILILPYPXAWNVLPFVCVLFYFLEQWFVVLLEEVLHIPCKLDS

SEQ ID NO: 39274 - protein, 120 aa, Homo sapiens
  misc_feature (1)...(120): Xaa = X or * as defined in Table 2
GLCSVPLVYISVLVAVPKLFWXLXPCSIVXSQVASIPPALFFWLRIDLAMWALFWFHANFKEVFSNSVEKVIGSLMGMALNLXMTLGNMAVFTILILPTHEHGMFFHLFVSSFISLSSGL

SEQ ID NO: 39275 - protein, 348 aa, Homo sapiens
  DOMAIN (102)..(147): kw TRANSCRIPTASE REVERSE II ORF2 domain identified by eMATRIX, accession number DM01354N, p-value=1.000e-40, raw score of 13.17
  DOMAIN (186)..(348): Reverse transcriptase domain identified by PFam, accession name rvt, E-value=3.8e-09, PFam score of 43.8
MKEKMLRAAREKEKQEPTHSKASRRQEITKIRAELKEIETQKTLQKINESRSWFFERINKIDRPLARLIKKKREKNQIDAIKNDKGDITTDPTEIQTTIREYYKHLYTNKLENVEEMDKFLDTYTLPRLNQEEVESLNRPITGSEIVAIINSLPTKKSPGPDGFTAEFYQSYKEELVPFLLKLFQSIEKEGILPNSFYEASIILIPKPGRDTIKKENFRPISLMNIDAKILNKILTNRIQQHIKKLIHHDQVGFIPGMQGWFNIPKSINVIQHINRTKDKNHMIISIDAEKAFDKIQQRFMLKTLNKLGIDGMYFKIIRAIYDKPTANVILSGQKLEAFPLKTDTRQG

SEQ ID NO: 39276 - protein, 22 aa, Homo sapiens
YVPAERPSFPPGSAEYLPLKAY

SEQ ID NO: 39277 - protein, 994 aa, Homo sapiens; identical to SEQ ID NO: 36964
  DOMAIN (158)..(203): kw TRANSCRIPTASE REVERSE II ORF2 domain identified by eMATRIX, accession number DM01354N, p-value=1.000e-40, raw score of 13.17
  DOMAIN (242)..(520): Reverse transcriptase domain identified by PFam, accession name rvt, E-value=1.5e-78, PFam score of 274.3
  misc_feature (1)...(994): Xaa = X or * as defined in Table 2

SEQ ID NO: 39278 - protein, 222 aa, Homo sapiens
  misc_feature (1)...(222): Xaa = X or * as defined in Table 2
MCGIISEGSILFHCSITLFWYQSHAVLVTVALXYFLKSGGLMPPALFFWLRIDLGMLALLWFHMNLKVVFSNSLNKVIGSLMVMALNLXITLGSMAIFTILILPIHEHGMFFHSFVSSFISLSSGLXFSLKRTFTSLVSWIPGYFIFFVAIVNGSSLMIWLSVCLLLVYKNACDFCTLILYPETLLKLLICIRRFWAETMGFSRDTIMSSANRDNLTSSFPN

SEQ ID NO: 39279 - protein, 142 aa, Homo sapiens
  misc_feature (1)...(142): Xaa = X or * as defined in Table 2
FFSLFFFISLASGLSILXWXFVFLWDQWXYPLYHFLLHLFDSSLFSSLLVLLVVYPILLIFSKIKNKKPAPGFIDFFEGFFVSLSPSVLLXSXLFLAFCXLLNVFALASLVLLIVMLGCQFXIFPAFSCGHLVLXISLYTLL

SEQ ID NO: 39280 - protein, 186 aa, Homo sapiens
  DOMAIN (68)..(88): Binding-protein-dependent transport systems inner membrane co domain identified by eMATRIX, accession number BL00402B, p-value= 6.063e-11, raw score of 16.55
  DOMAIN (59)..(136): Binding-protein-dependent transport system domain identified by PFam, accession name BPD_transp, E-value=3.7e-06, PFam score of 33.9
  misc_feature (1)...(186): Xaa = X or * as defined in Table 2
LYKNSVKYFHNXPVGNIMSNIPIVGALFSGPAFGIGILAAGVILAIMIIPYIAAVMRDVFEQTPVMMKESAYGIGCTTWEVIWRIVLPFTKNGVIGGIMLGLGRALGETMAVTFIIGNTYQLDSASLYMPGNSITSALANEFAEAESGLHVAALMELGLILFVITFIVLAASKFMIMRLAKNEGAR

SEQ ID NO: 39281 - protein, 619 aa, Homo sapiens
  DOMAIN (127)..(174): kw TRANSCRIPTASE REVERSE II ORF2 domain identified by eMATRIX, accession number DM01354V, p-value=1.000e-40, raw score of 12.97
  DOMAIN (2)..(140): Reverse transcriptase domain identified by PFam, accession name rvt, E-value=0.006, PFam score of -27.8
QTHSQYHTEWAKTGSIPFENWHKTGMPSLTSPLLFNIVLEVLARAIRQEKEIKGIQLGKEEVKLSLFADDMIVYLENPIVSAQNLLKLISNFSKVSGYKISVQKSQAFLYTNNRQTESQIMSELPFTIASKRIKYLGIQLTRDVKDLFKENYKSLLKEIKEDTNKWKNIPCSWVGRINIVKIAILPKVICRFSAIPIKLPMPFFTELEKATLKFIWNQKRARIAKSILSQKNKAGDITLPDFKLYYKATVTKTAWYWYQNRDIDQWNRTEPSEIMPHIYNYLIFDKPEKNKQWGKDSLFNKWCWENWLAICRKLKLDPFLTPYTKINSRWIKDLNVRPKTIKTLEENLGITIQDIGVGKDFMSETPKAMATKAKIDKWDLIKLKSFCTAKETTIRVNRQPTTWEKIFATYSSDKGLISRIYNELKQIYKKKTNNPIKKWAKDMNRHFSKEDIYAAKKHMKKCSSSLAIREMQIKTTMGYHLTPVRMAIIKKSGNNSHLESALINSSVHHQKCIAPLEGNQKFKSSRYNVNWLLSHHMRKAPFFVPILEIRRLKYKDMKLLAQSCPDKQQSWGLSQLESGACTKNHEHYAAFVECVGVIKLKYFHMGLCKHYQGGENCSS

SEQ ID NO: 39282 - protein, 145 aa, Homo sapiens
  misc_feature (1)...(145): Xaa = X or * as defined in Table 2
VGQLFWKGYPLAGFPDPCAQSWKVAHVLLLRLGHIKSVSANGKEVTSKFHRKENLARGLHSRPRRGQRVRGGVAQHCEPRXTPPPACRVRLPGCPVDPASPGRGRRTSAGTPEPALRHPHTPRGPVAARTLPAEPGPARPSGLPP

SEQ ID NO: 39283 - protein, 124 aa, Homo sapiens
CSLRRGPPDPPGAYCKRRATGAASTRSLSGAVAGSPAHRCESRPLQAMGAGGLPHPEGGRGGSGGRKRTDGPVCGCGERAPREYPDPSRSWRGPQRKPAPSQHPCLPRLSRGPGRHPEGPHQVR

SEQ ID NO: 39284 - protein, 155 aa, Homo sapiens
  misc_feature (1)...(155): Xaa = X or * as defined in Table 2
XVRLPGCPVDPASPGRGRRTSAGTPEPALRHPHTPRGPVAARTLPAEPGPARPSGLPPSAMDASASAAAPDPRTPLGQEAERPATTSGAEGNGGRVGVAASGGRAPASLVSGAAQGPRLRFRPRCLAGRWLVPSSGGNFAANRLSGCRPRCGFLT

SEQ ID NO: 39285 - protein, 49 aa, Homo sapiens
  misc_feature (1)...(49): Xaa = X or * as defined in Table 2
VASQAPGVRALQVGPAHSCXGRGHVSWPPPWPWGPPCCPLCLLNGLPNI

SEQ ID NO: 39286 - protein, 104 aa, Homo sapiens
  misc_feature (1)...(104): Xaa = X or * as defined in Table 2
TLFFFESESHSVTQDRVQWYDLNSLQPPPPGLKXFSCLSLPSSWDYRRPPPCPANFFFLVELEFHHVGQDGLELLTSGDPPALASQSARITGMSHCAQQNKHIL

SEQ ID NO: 39287 - protein, 33 aa, Homo sapiens
TVVEARSLPQGTSAQKAELIALIRALELSEGDS

SEQ ID NO: 39288 - protein, 606 aa, Homo sapiens; identical to SEQ ID NO: 33935
  DOMAIN (457)..(468): RNase H domain identified by eMATRIX, accession number PF00075B, p-value=6.276e-12, raw score of 12.56
  DOMAIN (210)..(366): Gag P30 core shell protein domain identified by PFam, accession name Gag_p30, E-value=1.7e-51, PFam score of 184.1

SEQ ID NO: 39289 - protein, 688 aa, Homo sapiens
  DOMAIN (325)..(341): Eukaryotic and viral aspartyl proteases proteins domain identified by eMATRIX, accession number BL00141A, p-value=4.150e- 10, raw score of 12.10
  DOMAIN (9)..(214): Gag P30 core shell protein domain identified by PFam, accession name Gag_p30, E-value=1.2e-67, PFam score of 238.2
MVERRVFVYQPFFSADLLNWKNNTPSYTEKPQALIDLLQTIIQTHNPTWADCHQLLMFLFNTDERRRVLQAATKWLEEHAPADYQNPQEYVRTQLPGTDPQWDPNEREDMQRLNRYREALLEGLKRGAQKATNVAIQGKEESPAQFYERLCEAYCMYTPFDPNSPENQRMINMALVSQSAEDIRRKLQKQAGFAGMNTSQLLEIANQVFVNRDAVSPKENRRENEHQVRRNADLLAAAITGVPPKRQGKGGPGKEIQPGCQSLQRNQCAYCKEIGHWKNKCPQLKGKQGDSEQEDPDKEEGALLNLGSRTPKEPMVRMTVGGKDIDFLVDTGAEHSVVTTPVSPLSKKTIDIIGATGVSAKQAFCLPRTCTVGGHKVIHQFLYMPDCPLPLLGRDLLSKLRATIYFTEHGSLLLKLPGTGVIMTLMVPREEEWKLFLTESGQEIRPALAKWWPRVWAEDNPPGLAVNQAPVLIEVKPRAQPVRQKQYPVPREALQGIQVHLKCLRTFGIIVPCQSPWNTPLLPVPKPGTKDYRPVQDLRLVNQATVTLHPTVPNWYTLLGLLPAEDSWFTCLDLKDAFFSIRLAPESQKLFAFQWEDPESGVTTQYTWIRLPKGFKNSPTIFGEALAQDLQKFPTRDLGCMLLQYVDDLFLGHPTAVRCAKGTDALLRHLEDCGYKVFKKKVQICRQQ

SEQ ID NO: 39290 - protein, 76 aa, Homo sapiens
MEEGWIRLPDGRLAVPQLLGAAVVLAVQETTHRDQESLEKLLGWYFYISLLSALAKTISTALRIGSDNGPVFLAAL

SEQ ID NO: 39291 - protein, 32 aa, Homo sapiens
MRKLIAGLIFLKIWTYTIGTSTDLPQTEDYSQ

SEQ ID NO: 39292 - protein, 47 aa, Homo sapiens
  misc_feature (1)...(47): Xaa = X or * as defined in Table 2
MRKLIVGLIFLKFWTCTVRTSADLPQTENCSQSXXXXXXXXXXXXXX

SEQ ID NO: 39293 - protein, 368 aa, Homo sapiens
  DOMAIN (210)..(366): Gag P30 core shell protein domain identified by PFam, accession name Gag_p30, E-value=1.7e-51, PFam score of 184.1
MLKNFKKGFNGDYGVTMTPGKLRTLCEIDWPTLEVGWPSEGSLDRSLVSKVWHKVTGKSGHSDQFPYIDTWLPQWVRGQAAAVLVAKGQIVKEGSRSTHRGKSTPEVLFDPTSDDPLQEMAKVIPVVPSPYQGERLPTFESTVLVPPQDKHIPRPPRVDKRGGEASGETPPLAARLRPKTGIQMPLREQRYTGIDEDGHMAERRVFVCQPFTSADLLNWKNNTPSCTEKPQALIDLLQTIIQTHNPTWADCHQLLMFLFNTDERRRVLQAATKWLGEHAPADYQNPQEYGKEESPAQFYERLCEAYHMYTPFDPDSPENQRMINMALVSQSAEDIRRKLQKQAGFAGMNTSQLLEIANQVFVNRDAVS

SEQ ID NO: 39294 - protein, 200 aa, Homo sapiens; identical to SEQ ID NO: 38330
  DOMAIN (66)..(103): Gag P30 core shell protein domain identified by PFam, accession name Gag_p30, E-value=5.5e-05, PFam score of 20.9
  misc_feature (1)...(200): Xaa = X or * as defined in Table 2

SEQ ID NO: 39295 - protein, 107 aa, Homo sapiens
DCLAVKRASWVQPTGYSCKPLLQGVLTYQRRQAAFPPLRRERLASSSRDKPKCAGKHTSSLVRAGDMQGTIVTGTEVLRLDMEPKFEDDQLRPVLLEHKVPRREMAG

SEQ ID NO: 39296 - protein, 81 aa, Homo sapiens
MVQKTAKVLGITRKLHAASQPQSSGKVSKSHRATESHRSLRTPPPGTLRGSRTAAHPRWAVPVHVSGHGAEEPPHQPGCQL

SEQ ID NO: 39297 - protein, 430 aa, Homo sapiens
  DOMAIN (134)..(339): Gag P30 core shell protein domain identified by PFam, accession name Gag_p30, E-value=1.2e-67, PFam score of 238.2
LKPLPSLSRCLLSAARPATFLGSLTGKREPCVAGPRGGSTQWLNTGKELALGVWTFVTRERGSPLLSPRGLHLHKTNIPRPPRVGKRGGEASGETPPLAAGLRPKTGIQMPLREQWYTGIDEDGHMVERRVFVYQPFFSADLLNWKNNTPSYTEKPQALIDLLQTIIQTHNPTWADCHQLLMFLFNTDERRRVLQAATKWLEEHAPADYQNPQEYVRTQLPGTDPQWDPNEREDMQRLNRYREALLEGLKRGAQKATNVAIQGKEESPAQFYERLCEAYCMYTPFDPNSPENQRMINMALVSQSAEDIRRKLQKQAGFAGMNTSQLLEIANQVFVNRDAVSPKENRRENEHQVRRNADLLAAAITGVPPKRQGKGGPGKEIQPGCQSLQRNQCAYCKEIGHWKNKCPQLKGKQGDSEQEDPDKEEGALLN

SEQ ID NO: 39298 - protein, 345 aa, Homo sapiens
  DOMAIN (193)..(228): Matrix protein (MA) p15. domain identified by eMATRIX, accession number PF01140B, p-value=5.280e-14, raw score of 12.72
  DOMAIN (155)..(227): Matrix protein (MA), p15 domain identified by PFam, accession name gag_MA, E-value=4.1e-15, PFam score of 55.6
  misc_feature (1)...(345): Xaa = X or * as defined in Table 2
MEEGWIRLPDGRVAAPQLLGAAVVLAVQETTHRGQESLEKLLGRYFYISPLSALAKTVRQRDFADFGTTIKQDFRLLGQTSVDRLLQLSQGQAVKGNQLLPVSLTSQCQVYKCVWNWWVLGLTDFKNEAKELRLYKQEKREKAKRWKETEKGFNGDYGVTMTPGKWRTYFEIDWSKLEVGWPSEGNLERSLVSKVWHKVTGKSGHSDQFPYIATWLQLVLDPPQWLRGQAAAVLVAKGQIPRKDPTPPAEGNQLLKSLFDPTSEDPLQEMEPSDPSGALPLPGKDAPHSXAHSPCASTRQTYPXATRSRQERRXSLERNPYIGSSFKTQNWDTNAPERAVVYWDR

SEQ ID NO: 39299 - protein, 693 aa, Homo sapiens
  DOMAIN (646)..(664): RNase H domain identified by eMATRIX, accession number PF00075J, p-value=5.135e-17, raw score of 15.78
  DOMAIN (126)..(299): Gag P30 core shell protein domain identified by PFam, accession name Gag_p30, E-value=6.8e-50, PFam score of 178.5
MLVAKGQIAKEGSRSTRPGKSTPEVLFDPTSEDPLQEMAPVIPVVPSPYQGERLPSLEPTVLAPLQDKHIPRPPRIDKRGGEASGETPPLAARLRPKTGIQMHLREQQYTGRDEDGHMVERRVFVYQPFTSADLLNWKNNTPSYTEKPQAQIDLLPTIMQTHNPTWADCHQLLMFLFNADVRWRVLQAATKWLEEHAPADYQNPQEYVRTQLPGTDPQWGPNEREDMQRLKGDREAVLEGLKRGAQKTTNVNKVSEVIQGKEESPAQFSERLCEAYRMYTPFDPDSRENQRMIQMALVKAQKTLEENCRNRLGYWKNKCPQLKRKQGDSEQEAPDEEEGALLNLAEGLLDSGGPGSSAPKEPMVSMTVGGKDIDILVDTVAEHSVVTAPVAPLSKKTIDIIGAMGVSAKQAFCLPRTCAVGGHTVIHWELYVDGSSFINPQGERCAGYAVVTLDTVVEARSLPQGTSAQKAELIAFIRALELREAPDLVPTSSKDEKDFLQVEGGQVMEEGWIRLPDGRVAAPQLRGAAVVLAVQETTHRGQESLEKLLGRYFYISHLSALAKTVMQQCVTCQQHHARRGPAIPPGIQTYGAAPFDRSPGGLHRNAKVWRFGLPLWIGSDNGPAFVADLVQKMAKVLGITWKLHAAYRPQSSGKVERMNRTIKNSLGKSDPEEDDKPCSSHTRKLTGPRMAEA

SEQ ID NO: 39300 - protein, 120 aa, Homo sapiens
  misc_feature (1)...(120): Xaa = X or * as defined in Table 2
ENLNIKAPHAVVTLMTTTGPDWISNAILTKDFCLLCENTHISRWGCNTLNATTLLLVSESPVKHNCLEVLDSVYSSRPNLRDHPXTSVDWELYVDGSGFANPCKVTLKKETSPAPVTPRS

SEQ ID NO: 39301 - protein, 997 aa, Homo sapiens
  DOMAIN (420)..(431): RNase H domain identified by eMATRIX, accession number PF00075B, p-value=6.276e-12, raw score of 12.56
  DOMAIN (210)..(325): Gag P30 core shell protein domain identified by PFam, accession name Gag_p30, E-value=1.1e-29, PFam score of 107.6
  misc_feature (1)...(997): Xaa = X or * as defined in Table 2
MLKNFKKGFNGDYGVTMTPGKLRTLCEIDWPTLEVGWPSEGSLDRSLVSKVWHKVTGKSGHSDQFPYIDTWLPQWVRGQAAAVLVAKGQIVKEGSRSTHRGKSTPEVLFDPTSDDPLQEMAKVIPVVPSPYQGERLPTFESTVLVPPQDKHIPRPPRVDKRGGEASGETPPLAARLRPKTGIQMSLREQRYTGIDEDGHMAERRVFVCQPFTSADLLNWKNNTPSCTEKPQALIDLLQTIIQTHNPTWADCHQLLMFLFNTDERRRVLQAATKWLGEHAPADYQNPQEYVRTQLPGTDPQWDPNEREDMQRLNRYREALLEGLEGSPEGHKHTGAEHSVVTGPVAPLSKKTIDIIGAMGVSAKQAFCLPRTCTPGTKDYRLVQDLRLVNQATVTLHPTVPNPYILLGLLPAEDSWFTCLDLKDAFFSIRLAPERQKLFAFQWEDPESGVTTQYTWTWLPQGFKNSPTIFGEALARDLQKFPTRDLGCVLLQYVDDLLLGHPTAVGCAKRTDALLRHLEDCGYKVSKKKSSDLPTAGWPPCLRALAATALLVQEADKLTLGQNRNIKAPHAVVTLMNTKGHHWLMSARLTKYQSLLCENPRITTEVCNTLNPATLFPVSESPVEHDCVEVLDSVYSSRPDLRDQPWASVDWELYVDGSSFINPQGERFAGYAVVTLDTVVEARSLPQGTSAQKAELIALIRALELSEVHGALYKEKGLLNSGGKDIKYQQEILQLLEAVWKPHKVAVIHCRGHQRASTLVGLGNSRADSEARKAPSAPFRASVTAPLLPQAPDLVPTYSKEENDFLQAKGGQVMEEGXIRLPDGRVAAVVLAVHETTHRGQELLEKLLGWYFYISHLSGLAKMVTQWCVTCRQHNAGKVQPFHPDIQAYGAAPFEDLQVDFTEMPKCRGNKYLLVLGRTYSGXVEAYPTRTEKAREVTRVLLRDLLPRFELPLRIGSDNRPAFVADLVQKAAKILRITWKLHAAYWPQSSGKDPRLSS

SEQ ID NO: 39302 - protein, 147 aa, Homo sapiens
  misc_feature (1)...(147): Xaa = X or * as defined in Table 2
SSASTPETRAKFTXDNLCCASWQRLASANFRVLVDCILSDTFEDLRLQCDAVNLAFGRRCEELEDARYKLHHHLHKAVEXGGGAEHVPHRLREKLLEAEQSLRNLEDIHMSLEKDIAAMTNSLFIDRQKCMAHRTRYPTILQLAGYQ

SEQ ID NO: 39303 - protein, 524 aa, Homo sapiens
  DOMAIN (367)..(384): TEKTIN SIGNATURE domain identified by eMATRIX, accession number PR00511A, p-value=9.507e-13, raw score of 13.59
  misc_feature (1)...(524): Xaa = X or * as defined in Table 2
MVQTDVLLPEPAPQTVSPCELPCKEYDVARNMGPGHRQLEVWFQNCYARYHQAFADCNQSERELQGRESQQLAAETQALAQPTQQDSTCRVGERLQDTHSWKSELQHEVEVLAAETDLLLAQKQRLERALDAMEVPFSIATDNMQCSQRHQHANLVRDYVETELLKAYPPAPSQCLKNCCSSRKPSACNKGACEVMETLTVQEEANPGTEGCRTRALAHKEEAEPIRNIQELLKRAIVQAVSQIQLNREHTEICEMDWLDKVEAYNLDETCGRHHSQSTERPWTKFTQDNLCRAQRKRLSSANLWVLVDCILRDTSEDLGLQCDAVNLAFGRRCEELEDARHKLQHHLHKMLREITDQEHNVVALKEAIKDKKEPLHIAQTRLYLPSHRPNMQLCREAAQFRAAFPGXESFQWRLPRTSLPAPNWEFWVPFHPSRCILLPSPAPAHTPPTPPSWXVRWRSLYKSITALREKLLQAEQSLRNLKDIHMSLEKDVTAMTNSVFIDRQKCMAHRTCYPTILQLAGYQ

SEQ ID NO: 39304 - protein, 114 aa, Homo sapiens
  misc_feature (1)...(114): Xaa = X or * as defined in Table 2
MATGSPVSSGPEAHGSRXXXXXXXXXXXXXXXXXXXXXXXXXXXXXXXXXXXXXXXXXXXXXXXXXXXXXXXXXXXXXXXXXXXXXXXXXXXXXXXXXXXXXXXXXXXSDPRPG

SEQ ID NO: 39305 - protein, 148 aa, Homo sapiens
  misc_feature (1)...(148): Xaa = X or * as defined in Table 2
TESSASEKTTGEDGTRVFVSLLRSLLSLLPSAPLRHHPPSAXLSLCSCVSDXAVALIPQSAHHFPNISXPFPLHCFAHAKPPVWIFHSHSLWLPXAFLAPMTSFTDQVAVDDFLSIVYLFTFTPFLAFCGEPSTALATREQVWVESAS

SEQ ID NO: 39306 - protein, 109 aa, Homo sapiens
  misc_feature (1)...(109): Xaa = X or * as defined in Table 2
AAARPGRGSETGDWVLLCYPGWSAVVXSXLTTASELLGSRGXGSLLSLPSSWDYRLSAPCLANSKKPSERXGLSMLPXLVSNSWPQVILLLGPPKALGLQAPGTMGLRP

SEQ ID NO: 39307 - protein, 271 aa, Homo sapiens
MAETAVINHKKRKNSPRIVQSNDLTEAAYSLSRDQKRMLYLFVDQIRKSDGTLQEHDGICEIHVAKYAEIFGLTSAEASKDIRQALKSFAGKEVVFYRPEEDAGDEKGYESFPWFIKRAHSPSRGLYSVHIPPYLIPFFIGLQNRFTQKCKNLLTILGGSTCQGKSHVSGRHHCILRNMHGPHQVVHVEEMSTGDQALEVLQYLFSNDLDVPVGHIVHTGMLNEGGGLAAGSTRFCAGILSTARHLTIEQKMADYSNKLYHQLEQETGIRT

SEQ ID NO: 39308 - protein, 29 aa, Homo sapiens
  misc_feature (1)...(29): Xaa = X or * as defined in Table 2
TASSSLTLVYGHRLCWLGPSHPXPSLWLP

SEQ ID NO: 39309 - protein, 412 aa, Homo sapiens
  DOMAIN (194)..(208): C-type lectin domain proteins domain identified by eMATRIX, accession number BL00615B, p-value=1.000e-10, raw score of 12.25
MKLMETLNQCINAGHEMTKAIAIAQFNDDSPEARKITRRWRIGEAADLVGVSSQAIRDAEKAGRLPHPDMEIRGRVEQRVGYTIEQINHMRDVFGTRLRRAEDVFPPVIGGAAIKLAFTNLIFCSSCSGSGSEGLRVLLVGGGGTGAPEMQGPDGWRAYASPGSLTSLLPPDHHTLACRFGNCVELQASAAFNWNDQRCKTRNRYICQFALMYDLKVPRWDFQTGRQLRTSPLYDRLDAQGARWMEKHGFERPKYFVPPDKDLLALEQSKTFYKPDWFDIVESEVKCCKEAVCVIDMSSFTKFEITVRAQPLSRAPCLPDLAAVGGGRAGVLVGFFAVADSVTREHGLRWFARAALEDRLAAGSTRFCAGILSTARHLTIEQKMADYSNKLYHQLEQETGIQTGTYAERWEN

SEQ ID NO: 39310 - protein, 365 aa, Homo sapiens
  DOMAIN (236)..(285): Heat shock hsp70 proteins family proteins domain identified by eMATRIX, accession number BL00297B, p-value=9.400e-18, raw score of 22.91
MAILFLLLSTTVCPLAYLRENGPPTDQQIQQPLLPAQPVWLILSREAAMKLLLMYDLKVPRWDFRTGRQLRTSPLYDRLDAQGARWMEKHGFERPKYFVPPDKDLLALEQSKTFYKPDWFDIVESEVKCCKEAVCVIDMSSFTKFEITVPSTTRGNYGSTIQDLGADTAKPYQLPTHCHCYQGYQEAMNSATINSPGPPLALAVLFFVTLMQGSQWLTWKDPSYSEARGAYVLGTASFTLNKGDARTNAALDTANTISSVKRLMGRSLADIQQRYPHLPYQFQASENGLPMIETAAGLLNPVRVSADILKALAARATEALAGELDGVVITVPAYFDDAQRQGTKDAARLAGLHVLRLLNEPTAAL

SEQ ID NO: 39311 - protein, 771 aa, Homo sapiens
  DOMAIN (88)..(127): SYNTHETASE LIGASE PROTEIN ALANYL domain identified by eMATRIX, accession number PD01168K, p-value=1.783e-17, raw score of 17.79
  DOMAIN (96)..(131): tRNA synthetases class II (A) domain identified by PFam, accession name tRNA-synt_2c, E-value=9e-16, PFam score of 56.6
MIYRELNRAYALGNLPAAKGVDAEQSALENGLTLVLKNIEFRLLDSDGATSAILEAHRSLAGDTSLREHLLAGCDPPAKGCQGLFHYGLCVLPFRHLRNSSHAGAFVIVTEEAIAKGIRRIVAVTGAEAQKVSRGQLVTTIVSVRRNGHVVIAGDGQATLGNTVMKGNVKKVRRLYNDKVIAGFAGGTADAFTLFELFERKLEMHQGHLVKAAVELAKDWRTDRMLRKLEALLAVADVTSNEMSVGYANGIRVMSMTHTGEPGFMLYIPIEEDCLGLGPPIPSDALSPPLEEEERKKMGPERSPHTRPWGSSGEGELNDKSHPRRPQGPTDLSSCRGQGSLEEREKYSGHCAVLSAGACPAIIQGAVTAMQGSDGIHRQEKAETILRGQAGRRVLLIDNGKKPGRKILMSGGGRCNFTNLYVEPGAYLSQNPHFCKSALARFTQWDFIDLVNKHGIAWHEKTLGQLFCDDSAQQIVDMLVDECEKGNGDFRLRSEVGKSHLNQELTMKPVKPPRINGRVPVLSAQEAVNYIPDEATLCVLGAGGGILEATTLITALADEYKQTQTPRNLSIISPTGLGDRADRGISPLAQEGRKGNPQVQDRNGSEGKTGDAHRKDRKRQRREPDEQRGTGTKGPTPNREKPERKPARPKQRPQKASGTGRKDPHTPAPGEHTMEEHKNNSERARTRNTDTQLRRQAPQKHQTSELRAGVNGGSGIALTGRLPPASIGISLYCKPSISSRKSGPAVPCALRELAYSVAPLWSWAFQPCGLC

SEQ ID NO: 39312 - protein, 109 aa, Homo sapiens
  misc_feature (1)...(109): Xaa = X or * as defined in Table 2
FSQQLCGENHPHLRTENTQAQRAGVPLGVRILSRPGFPXLSTHSCFSCPLVXPPSQGQPGPLSLWTLCSAIQAPAELESCRSSCDRDGRSHWPRVSGGLWLSQVPRPRR

SEQ ID NO: 39313 - protein, 320 aa, Homo sapiens
  DOMAIN (158)..(320): Glycine cleavage T-protein domain identified by PFam, accession name GCV_T, E-value=0.013, PFam score of -148.4
  misc_feature (1)...(320): Xaa = X or * as defined in Table 2
MGESPAVXGYFVLAGMNSAGLSFGGGAGKYLAEWMVHGYPSENVWELDLKRFGALQSSRTFLRHRVMEVMPLMYDLKVPRWAFKTVSQLRTSLLYDRLDAQEARWMEKHGFERPKYFVPPDKDLLALEQSKTFYKPDWFDIVESEVKCCKEAVCVIDMSSFTKFEITSTGDQALEVLQYLFSNDLDVPVGHIVHTGMLNEGGGYENDCSIARLNKRSFFMISPTDQQVHCWAWLKKHMPKDSNLLLEDVTWKYTGTGVRALYGDVEHESWLSCVRHAHHPDPICIAHTYLHLRSFSQADGREWRKVLDKHKIFLFARSLC

SEQ ID NO: 39314 - protein, 624 aa, Homo sapiens; identical to SEQ ID NO: 38222
  DOMAIN (211)..(258): kw TRANSCRIPTASE REVERSE II ORF2 domain identified by eMATRIX, accession number DM01354V, p-value=1.000e-40, raw score of 12.97
  DOMAIN (1)..(224): Reverse transcriptase domain identified by PFam, accession name rvt, E-value=2.6e-30, PFam score of 114.1

SEQ ID NO: 39315 - protein, 750 aa, Homo sapiens
  DOMAIN (272)..(317): kw TRANSCRIPTASE REVERSE II ORF2 domain identified by eMATRIX, accession number DM01354N, p-value=1.000e-40, raw score of 13.17
  DOMAIN (340)..(552): Reverse transcriptase domain identified by PFam, accession name rvt, E-value=0.0057, PFam score of -27.4
MGDFNTPLSTLDRSTGQKVNKDIQELNSALHQADLIDIYRTLHPKSTEYTFFSAPHSTYSKIDHIVGSKALLGKCKRTEIITNCLSDHSAIKLELRIKKLTQNCSTTWKLNNLLLNDYWVHNEMKAEIKMFFETNENKDTTYQNLRDTFKAVCRGKFIALNAHKRKQERSKIDTLTSQLNELEKQEQTHSKASRRQEITKIRAELKEIETQKTLQKISESRSWFFGKINKIDRPLARLIKKKREKNQIDAIRNDKGDITTDPTEIQTTIREYYQHLYANKLENLEEMDKFLDTYTLPRLNQEEVESLNRPITGSEIEAIIAYQPKKAQDETDSQPNSTREKEGILPNSFYEASIILIPKPGRDTRKKENCRPISLMNVDAKILNKILANRIQQHIKKLIHHDQVGSIPGMQDWFNRIKYLGIQLTRDVKDLFKENYKPLLNEIKEDTNKWKNIPCSWTGRINIVKMAIVPKNWKKATLKFIWNQKRARITKSILSQKNKAGGITLPDFKLYYKATLTKTAWYWYQHRDINQWNRTEPSEIIPHIYNHLIFDKPDKNKKWGKHSLFNKWCWESWLDICRKLKLDPFLTPYTKINSRWIKDLNVRPKTIKTLEENLGNTIQDIGMGKDFMSKTPKAMATKAKIDKWDLIKLKSFCTAKETTIRVNRQPKEWENIFAIYSSDKWLISRIYKELKETYKKKTNNPIRKWAKDMNRHFSKEDIYAANRHMKKMLIITGHQRNANQNHNEIPSHTS

SEQ ID NO: 39316 - protein, 419 aa, Homo sapiens
  DOMAIN (193)..(240): kw TRANSCRIPTASE REVERSE II ORF2 domain identified by eMATRIX, accession number DM01354V, p-value=1.000e-40, raw score of 12.97
  DOMAIN (6)..(206): Reverse transcriptase domain identified by PFam, accession name rvt, E-value=0.00053, PFam score of -12.8
MGRNHNRKAENSKNQNPSYPPKDCSSSPATEQSWMENDFHKLTEICFRRSVITNFSKLKEDVQTHRKEAENLERRLEEWLTGVNSIQKTLNDLTELKNMARELLLEVLARVIRQEKEIKGIQLRKEEVKLSLFADDVTVYLENPIVSAQNLLKLISNFSKVSGYKINVQKSQAFLYTNNRQTESQIMHDFPFTIASKRIKYLGIQLTRDVKDLFKENYKPLLNEIKEDTNKWKNIPCPWIGRINIVKMAILPKFQSRFHIFRYLFRNTPLYWYQLTVLVRFHAADKDIPETGKKNGFNWTYSFTWLGRPQNHRGRQKELRTSRQQEKMRDEAKAETPDKRIRSRETYSLSREQQGKGSCQKSKSRSSKRGKSSLLPKTWAACHDEVKDPAKRKEEEEEEEEEEEEEEEEEEEEREKIRA

SEQ ID NO: 39317 - protein, 532 aa, Homo sapiens
  DOMAIN (365)..(412): kw TRANSCRIPTASE REVERSE II ORF2 domain identified by eMATRIX, accession number DM01354V, p-value=1.000e-40, raw score of 12.97
  DOMAIN (105)..(378): Reverse transcriptase domain identified by PFam, accession name rvt, E-value=2e-07, PFam score of 35.6
MENEFDKLREKGFRRSVITNFSELKDEVRTHRKEAKNLEKRLDEWLTKINSVETSLNDWMELKIMARELKDACTIFSSQFDQVEERVSVIEDQMNEMKREEKFREKRVKRNEQSLQEIWDYVKRPNLHLIGVHQSDGENGTKLENTLQDIIQENFPNLAKQANIQIQETQRTPQSYSSRRATPRHIIVRFTKVEMKEKMLRLNHEELESLNRPITGSEIQAIINSLPTKKSPESDGFTAKFYQSQYHTEWAKTGSIPFENRHKTGCPLSPLLFNIVVDVPARAIRQEKEIKGIQLGKEEAKLSLFADDMNVYLKIPIVSVQNLLKLISNFSKVSGYKINVQKSQAFLYTNNRQTESQIMSELPFTIASKRIKYLGIQLTRDVKDLFKENYKPLLNEIKEDTNKWKNIPCSWIGRINIMKMAILPKVIYRFNAIPIKLPMTFFTELEKTALKFIWNQKRACIAKTILSQKNKAGGITLPDFKLYYKATVAKTAWYWYQNSMVLVPKQRYRPVEQNRALGNNTIHLQPSDLRKT

SEQ ID NO: 39318 - protein, 528 aa, Homo sapiens
  DOMAIN (157)..(204): kw TRANSCRIPTASE REVERSE II ORF2 domain identified by eMATRIX, accession number DM01354V, p-value=1.000e-40, raw score of 12.97
  DOMAIN (1)..(170): Reverse transcriptase domain identified by PFam, accession name rvt, E-value=1.5e-06, PFam score of 23.3
MNIDAKILNKILANRIQQYIKKLIHHDQVGFIPGITNDKNHMITSVDGEKAFDKIQQPFMLKTLNKLVLEVLARAIRQEKGIKGIQLGKEEVKLSLFADDMIVYLENPIVSAQNLLKLISNFNKVSGYKINVQKSQAFVYTNNRQTESQIMSELPFTIASKRIKYLGIQLTRDVKDFFKENYKPLLNEIKEDTNKWKKIPCSWVGRINIVKMAILPKVIYRFNAIPIKLPMTFFTKLEKTTLKFIWNQKRAHIAKTILSQKNKAGSIALPDFKLYWKATVTKTAWYWYQNRDIDQWNRIEPSEIIPHIYNHLIFDKPDKNKKWGKDSLFNKWCWENWLAICRKLKLDPFLTPYTKINSRWIKDLNVRPKTIKTLEENLGNTIQAMGMGKDFMTETPKAMATKAKIDKWDLIKLKSFCTAKETTIRVNRQPTEWEKIFTIYPSDKGLISRIYNELKQINKKKSNNPINKWAKDMNRRFSKEDIYAANRHMKKCSSSLAIREMQIKTTMRYHLTPVRMAIIKKSGNNRCW

SEQ ID NO: 39319 - protein, 487 aa, Homo sapiens
  DOMAIN (110)..(151): kw TRANSCRIPTASE REVERSE II ORF2 domain identified by eMATRIX, accession number DM01354I, p-value=1.000e-40, raw score of 15.55
MGDFNTPLSTLDRSTRQKVNKDIQELNSALYQVDLIDIYRTLQPKSTEYTFFSAPHRTYSKIDHIVGSKALLSKCKRTEIITNCLSDHSAIKLELRMKKLTQNHSTTWKLNNLLLNDYWVHNKMKAEIKMFFETNENKDTTYQNLWDTFKATASKTNKEEKREESNRCNKNAKGVITTDPTEIQTTIREYHKHLYANKLENLEDTDKFLDTYTLPRLNQEEVESLNRPITGSEIEAIINSLPTKKRPGPDGFTAEFYQRYKEEQRIKYLGIQLTRDVKDLFKENYKPLLNEIKEDTNKWKNIPCSWIGRINIMKMAILPKVIYGFNAIPIKLPRTFFTELEKITLKFIRNQKRARIAKTILSKKNIAGGIMLPDFKLYYKATVTKTAWYWFQNRDIDQWNRTEASEITPHIYNHLIFDKPEKNKKWGKDSLFNKWCWENWLAICRKLKLDPFLIPYTKINSRWIKDLNVRPKTIKSLEENLGIPFRT

SEQ ID NO: 39320 - protein, 295 aa, Homo sapiens
  DOMAIN (142)..(182): kw TRANSCRIPTASE REVERSE II ORF2 domain identified by eMATRIX, accession number DM01354Y, p-value=1.000e-40, raw score of 10.69
  misc_feature (1)...(295): Xaa = X or * as defined in Table 2
TSTELSTPSQQNIHSSQHHIALVPKLTTXLERIKYLGIQLTRDVKDLFKQNYKPLLNKIKEDTNKWKNIPCSWTGRINIVKMAILPKVIYRSSAIPIKLPMTVFTELEKSTLKFIWNQKRAHIAKTILSQKNKTGGIMLLDFKLYYKATVTKTAWYWYQNRDIDQWNRTEPSEIIPHICNHLIFDKPDKNRKWGKDSLFNKWCRENWLAICRKLKLDPFLTPYTKINSRWIKDLNVRSKTIKTIEENLGNTIQDIVMGKDFMAKTPKTMATEAKIDKWDLIKLRASAQQKKLPSE

SEQ ID NO: 39321 - protein, 395 aa, Homo sapiens
  DOMAIN (7)..(54): kw TRANSCRIPTASE REVERSE II ORF2 domain identified by eMATRIX, accession number DM01354V, p-value=1.000e-40, raw score of 12.97
MSELPFTIASKRIKYLGIQLTTDVKDLFKENYKPLLNKIKEDTNKWKNIPCSWIGRMNIVKMAILPKVIYRFNAIPIKLPMTFFTELEKTTLKFIWNQRRACIAKTILSQKNKAGGIKLPDFKLYYKATITKTAWYWYQNRDTDQWNETEPSGITPHIHNHLIFDKPEKNKQWGKDSLFNKWCWENWLAICRKLKLDPFLTPYTKINSRWIKDLSVRPKTIKTLEENLGNTIQDIGMAKDFMSKTPKAMATKAKIDKWDLIKLKSFCTAKETTIRVNRQPTEWEKIFAIYPSDKGLISRIYKELKFTRKKSNNLIKKWMKDVNRHFSKEDIYAANRHMKKCSSSLAIREMQIKTTMRYHLTPVRMAVIKKSGNNSTIHNSKDLETTQMSSNDRLD

SEQ ID NO: 39322 - protein, 61 aa, Homo sapiens
RIKYLGIQLTRDVKDLFKENYKLLLNKIKEDTNKWKNIPCSWVGRINIVKMAILPKPYGKS

SEQ ID NO: 39323 - protein, 440 aa, Homo sapiens
  DOMAIN (25)..(71): kw TRANSCRIPTASE REVERSE II ORF2 domain identified by eMATRIX, accession number DM01354O, p-value=1.000e-40, raw score of 8.73
  DOMAIN (58)..(328): Reverse transcriptase domain identified by PFam, accession name rvt, E-value=1.8e-69, PFam score of 244.2
LNQEDIESLNRPITGSEIEAIINSLPTKKSPGPDGFTADFYQRYKQELVPFLLKLFQSIEKEGILPNSFDEASIILIPKPGRDTTKKENFRPISLMNIDAKILANQIQQQIKKFIHHDQVGFIPGMQGWFNIHKSINVIQHINRTKDKNHTIISTDAEKAFDKIQQPFMLKTLNKLGIDGTYLKIIRAIYDEPTANIILNGQKLEAFPLKTGTRQGCPLSPLLFNIVLEVLARAIKQDKEIQDIQLGKEVKLSLFADVMIVYLENSIVSVQNLLKLISNFSEVSGYKINVQKSQAFLYTNKRQRESQIMSELPFTIASKRIKYLGIQLTRDVKDLFKENYKPLLNEIKEDTNKWKNIPCSWIGRINIVKMAILPKIIYAAKKHMKKCSSSLAIREMQIKTTMRYHLTPVRMAIIKKSGNNRSTRGLLSCDSADLRTSLVK

SEQ ID NO: 39324 - protein, 585 aa, Homo sapiens
  DOMAIN (172)..(219): kw TRANSCRIPTASE REVERSE II ORF2 domain identified by eMATRIX, accession number DM01354V, p-value=1.000e-40, raw score of 12.97
  DOMAIN (1)..(185): Reverse transcriptase domain identified by PFam, accession name rvt, E-value=1.7e-10, PFam score of 48.3
TNDKNHMTISIDAEKAFNKIQQPFMLKTLNKLGIDVTYLKIIRDIYGKPTANIILNGQKLGAFPLKTGTRQGCPLPPLLFNVVLEVLARAIRQEKEMKNIQLEKEEVKLSLFADDMIVYLENPIILAPNLLKLISNFSKVSGYKTHVQKSQAFLYTNNRQTESQITSELPFAIASKRIKYLGIQLTRDVKDLFKENYKPQLNEIKEDTNKWKNIPCSWIGRINIVKMAILPKNWKKTTLKFIWDQKRACIAKTILSKKNKAGGITLRDFKLYYKATVTKTAWYWYQNRDIDQWNRIEPSKIIPHIYNHLIFDKSDKNKQWGKDSLFNKWFWENWLAICRKLKLDPFLTPYTKINSRWIKKVNVRPKTIKTLEENLGNTNQATGMGKDFMTKTPKAMATKAKIDKWDLIKLKNFCTAKETTIRVNRHTTEWEKIFAIYSSDKGLISRIYNELKRIYKKTNNPIRKWVKDTNRHFSKEDIYAAKRHMKKYSSSLAIREMQIKTTMRYHLTPVRMAIIQKSGNNRCWRGCGEIEMLLHCWRDRKLVQLLWKTVWRFLKDLELEIPFDPAIPLLDIYPKDYKSCCYKDT

SEQ ID NO: 39325 - protein, 336 aa, Homo sapiens
  DOMAIN (109)..(156): kw TRANSCRIPTASE REVERSE II ORF2 domain identified by eMATRIX, accession number DM01354V, p-value=1.000e-40, raw score of 12.97
TASKTNKEEKREESNRCNKNAKGVITTDPTEIQTTIREYHKHLYANKLENLEDTDKFLDTYTLPRLNQEEVESLNRPITGSEIEAIINSLPTKKRPGPDGFTAEFYQRYKEEQRIKYLGIQLTRDVKDLFKENYKPLLNEIKEDTNKWKNIPCSWIGRINIMKMAILPKVIYGFNAIPIKLPRTFFTELEKITLKFIRNQKRARIAKTILSKKNIAGGIMLPDFKLYYKATVTKTAWYWFQNRDIDQWNRTEASEITPHIYNHLIFDKPEKNKKWGKDSLFNKWCWENWLAICRKLKLDPFLIPYTKINSRWIKDLNVRPKTIKSLEENLGIPFRT

SEQ ID NO: 39326 - protein, 437 aa, Homo sapiens
  DOMAIN (97)..(142): kw TRANSCRIPTASE REVERSE II ORF2 domain identified by eMATRIX, accession number DM01354N, p-value=1.000e-40, raw score of 13.17
  DOMAIN (112)..(339): Reverse transcriptase domain identified by PFam, accession name rvt, E-value=4.7e-30, PFam score of 113.3
QDEYHMVHLVCTSRTPPSSPKSSTNRESHEALASSSNSSSDHSGSTTPSSGQETLSLAVGSSSEGLRQRTLPQAQTDQAQSHQFPYVMQGNMAIREYYKHLYANKLENLEEMDKFLDTYTLPRLNQEEVESLNRPITGSEIEAIINSLPTKKSPRPDGFTAEFYQRCRKGLYKIQQLFMLKTLNKLGIDGTYLKIVKAVYDTPTANIILNGQKLEAFPLKTGTRQGCRLSPLLFNVVLEVLARAIRQEKAIKGIQLGNEEVKLSLFADDMIVYLENPIISAQNLLKLISNFSKVSGYKINVQNSQAFLYTNNRQTESQIMSELPFTIASKRIKYLGIQITRDVNDLFKENYKPLLSEIKEDTNKWKNIPCSWIGRINIVKMAILPKVIHRFNAIPIKLPMTFFTELEKTKVHMEPKKSPHCQVSPKPKEQSWRHHAT

SEQ ID NO: 39327 - protein, 384 aa, Homo sapiens; identical to SEQ ID NO: 34597
  DOMAIN (219)..(266): kw TRANSCRIPTASE REVERSE II ORF2 domain identified by eMATRIX, accession number DM01354V, p-value=1.000e-40, raw score of 12.97
  DOMAIN (20)..(232): Reverse transcriptase domain identified by PFam, accession name rvt, E-value=0.00033, PFam score of -9.8

SEQ ID NO: 39328 - protein, 174 aa, Homo sapiens
  DOMAIN (99)..(146): kw TRANSCRIPTASE REVERSE II ORF2 domain identified by eMATRIX, accession number DM01354V, p-value=1.000e-40, raw score of 12.97
MPSLTTPIQHSVGSSGRAIRQEKEIKGIQLGREEVKLSLFADDMIVYLENPIISAQNLLKLISNFSKVSRYKINVQKSQAFLYTNNRQTESQIMSELPFTIAKRIKYLGIQLTRDVKDLFKENYKPLLNKIKEDTNKWKNIPCSWVGRINIVKMATLPKMTWIANWLRNSLQAQ

SEQ ID NO: 39329 - protein, 541 aa, Homo sapiens
  DOMAIN (234)..(281): kw TRANSCRIPTASE REVERSE II ORF2 domain identified by eMATRIX, accession number DM01354V, p-value=1.000e-40, raw score of 12.97
MGDFNIPLATLDRSTRQKVNKDIQELNSALHQADLIDIYRTLHPKSTEYTFFSASHHTYSKIDRIVGSKTLLSKCKRTEVLTNCLLDHSAIKLELRIQKLTQNRSTTWKLNNLLLNDYWKLVFEKINKTDRPLARPIKKKREKNQIDAIKNDKGDITTNPTEIQTTNREYYKHLYANKLENLEEMHKFLDTYTSPRLNQEEVESLNRSITGSEIEAIIKSLTTKKSPEPDGFTAEFYQRIKYLGIQLTRDVKDLFKENYKPLLNEIKEDTNKWKNIPCSWIGRINIVKMAILPKVIYRFNAIPIKLPMTFFTELEKTTLKFIWNQKRACIAKTMLSIKNKVRGITLPDFKLYYKATVTKTAWYWYQNRDIDQGNRTEPSEIIPHFYNHLIFDKPDKNKKWGKDSLFNKCCWENWLAICRKLKLDPFLTPYTKINSRWIKDLNVRPKTIKTLEENLGNTIQDIGMGKDFMSKTPKAMATKAKIDKSDLIKLKSFCTAKETTIRVNRQPTEWEKIFAIYSSDKGLICRIYNELKQIYKKKTTP

SEQ ID NO: 39330 - protein, 787 aa, Homo sapiens; identical to SEQ ID NO: 35812
  DOMAIN (209)..(234): 7 kw REVERSE TRANSCRIPTASE RNA POLYMERASE domain identified by eMATRIX, accession number DM00895E, p-value=3.333e-11, raw score of 15.72
  DOMAIN (182)..(455): Reverse transcriptase domain identified by PFam, accession name rvt, E-value=8e-88, PFam score of 305.2

SEQ ID NO: 39331 - protein, 380 aa, Homo sapiens
  DOMAIN (7)..(54): kw TRANSCRIPTASE REVERSE II ORF2 domain identified by eMATRIX, accession number DM01354V, p-value=1.000e-40, raw score of 12.97
MSELPFTIASKRIKYLGIQLTRDVKDLFKENYKLLLNKIKEDTNKWKNIPCSWVGRINIVKMAILPKFIWNQKRARIAKTILSKKNKAGGITLPDFKLYYKSTVTKTAWYWYQNRDIDQWNRTERSEIIPHIYNQLIFDKPDKNKKWGKDSLFNKWCWENWLAIWKKLKLDPFLTPYTKIHSRWIKDFNVRPKTIKTLEENLGNTIQDVGLGKDFISKTPKAMATKAKTDKWDLIKLKSFCTAKETTIRVNRQPTKWEKIFAIYSSDKGLISRIYKELKQTYKEKTNNLIKKWVKDMNRHFSKEDFYAAKRDMKKCSSSLAIREMQIKTTTRYHLTAVRMAIIKKSGNNRKPTLDRAVGHEKNGDDDSNNNYSHTSEILQ

SEQ ID NO: 39332 - protein, 704 aa, Homo sapiens
  DOMAIN (419)..(464): kw TRANSCRIPTASE REVERSE II ORF2 domain identified by eMATRIX, accession number DM01354N, p-value=1.000e-40, raw score of 13.17
  DOMAIN (356)..(590): Reverse transcriptase domain identified by PFam, accession name rvt, E-value=2.8e-07, PFam score of 33.7
MPYGSVLAFLPADEILGAFSKLKLHLHEEAREITDWFEDNDVHGRIRRHALELLFDHQYCFHQICDLHISTAHMIEADVLLPSDGSEHSQPIMAHPPETNSDNTLQEWLTEVMKSNKGIKLDFKSLAVVEPSMMLLENVKRHLKRPVWINADILPGPNGNSKVIDAKPFLDTVISFFPDVTFSLGWTTGWHPEKVNEGYSWTMVKEMEYICNELSQPVTFPVRAALVRQSCSQLLWLLKKSNRIKKLTQNRSTTWKLNNLLLSDYWVHNEMKAEIKMFFETNKNKDTTYQNLWDTFKAVCRGKFIALNAHKRKQERSKIGTLTSQLKELEKQEQTHSKASRRQEITKIRAELKEIETQKTLQKSNESRSWFFEKINKIDRPLARLIKKKREKNQIDAIKNDKADITTDPTEIQITIREYYKHLYANKRENLEEMDKFLDTYTLPRLNQEEVESPNRPITGSEIEGIINSPPTKKSPGRDGFTAESTRVLEVLARAIRQEKEIKGIQLGKEEVKLSLFADDMIVYLENPIVSAQNLLKLISNFSKVSRYKINVPKSQAFLYTNNRQTESQIMSELPFTIASKRIKYLGIQLTKDVKDLFKENYKPLLNEIKEDTNKWKNIPCSWIGRINTVKMAILPKVIYMFNAITIKLPMTFFTELEKTTLKFIWNQKRARIAKTILSQKSKAGGIMLPDFKLYDKAAVTKTA

SEQ ID NO: 39333 - protein, 354 aa, Homo sapiens
  DOMAIN (158)..(203): kw TRANSCRIPTASE REVERSE II ORF2 domain identified by eMATRIX, accession number DM01354N, p-value=1.000e-37, raw score of 13.17
MGDFNTPLSTLDRSMRQKVNKDIQELNSALHQVDLIDIYRTLHPKSTEYTFFSAPHCTYSKIDHIVGSKALLSKCKRIEIITNCLSDHSAIKLELRIKKLTQNRSTTWKLNNLLLNDYWVHNETKAEIKMFFETNENKDTTFSLGHIQSKIPTTIRECYKHLYANKLENLEGMDKFLDTYTHPRLNQEEAESLNRPITGSEIEAIINSLPTKKKIQDQMDSQPNSTRENKIPRNPTYKGCEGPLQGELQTTAQGNKRGHKQMEEHSMLMGRKNQYRENGHTAQDTLGWRGGSQGFRGPDLHVFAGCSPCCSFHRLEFSACGSLELELHVGDSTGLECWEQPSPTVLLGMTQVEL

SEQ ID NO: 39334 - protein, 472 aa, Homo sapiens
  DOMAIN (236)..(279): kw TRANSCRIPTASE REVERSE II ORF2 domain identified by eMATRIX, accession number DM01354T, p-value=1.000e-40, raw score of 9.48
  DOMAIN (119)..(358): Reverse transcriptase domain identified by PFam, accession name rvt, E-value=1.9e-45, PFam score of 164.4
MKMFFETNENKDTMYQNLWDTIKAVCRGKCIALNAHKRKQERSKIDTLTSQLKELEKQEQTHSKANRRQEITKIRAELKEIETQKPFQKINESRAEIQTTIREYYKHLYTNKLENLEEMDKFLDAYTLPRRNQEEGESLKRPITGSEIEAIINSLPTKKSPGPDIFTAKFYQRTKDKNHMIISIDAEKAFDKIQQPFMLKTFNKLGIDGMYLKIMRAIYDKPTANIILNGQKLEAFPLKTGTRQGCPLSPLLFNIVLEVLARTIRQEKERKCIQLGKEEVKLFLFADDMIVYLENPIVSAQNLLKLISNFNKVSGYKINVQKSQAFLYTNNRQTESQIMSELPFTIATKRIKYLGIQLTRDVKDLFKENYKPLLNKIKENTNKWKNILCSWIGRINIMKMAILPKVIYRFSAILIKLPMTFFTELEKTTLKFIWNQKGARIAKSILSQKNKAGGIMLPDLKLYYKAAVTKTA

SEQ ID NO: 39335 - protein, 563 aa, Homo sapiens
  DOMAIN (282)..(337): kw TRANSCRIPTASE REVERSE II ORF2 domain identified by eMATRIX, accession number DM01354Q, p-value=1.000e-40, raw score of 9.23
  DOMAIN (252)..(510): Reverse transcriptase domain identified by PFam, accession name rvt, E-value=4.9e-63, PFam score of 222.8
MPMVEELYGNYGIMADTTERVGQHKDAYQVILDGVKGGTKEKRLAAQFILKFFKHFTELADSAINAHLQTVSGRQQLVKLVAEQADLEQTFNPSDPECVGRLLQCTQQAVPFFSKTVHSTRSVTYFCEQVLPNLGILTTAVEGLDIQLEVLKLLVEMSSFCGDMEKLETNLGKLFDKLLEYMPLPPEEAENGGNAGDEEPKLQFSYVECLLYSFHQLGQKLPDFLTAKLNAEKLKDFKIRLQYFARGLQVYIRQLHLALQVKQCFAQYMEKENGIDAKILNKILANRIQQHIKKLIHHDQVGFIPGMQGWFNIRKSINVIQHINRAKDKNHMIISIDAEKAFDKIQQPFMLKTLNKLGIDGTYFKIIRAIYDKPTANIILNGQKLEAFPLKTGTRQGCPLSPLLFNIVLEVLARAIRQEKEIKGIQLGKEEVKLSLFADDMIVYLENPIVSAQNLLKLISNFSKVSGYKINVQKSQAFLYTNNRQTESQIMGKLPFTIASKRIKYLGIQLTRDVKDLFKENYKPLLKEIKEDTNKWKNIPCSWVGRINIVKMAILPKNWKKLL

SEQ ID NO: 39336 - protein, 525 aa, Homo sapiens
  DOMAIN (171)..(214): kw TRANSCRIPTASE REVERSE II ORF2 domain identified by eMATRIX, accession number DM01354T, p-value=1.000e-40, raw score of 9.48
  DOMAIN (46)..(293): Reverse transcriptase domain identified by PFam, accession name rvt, E-value=1.7e-52, PFam score of 187.8
MELKTKARELREECRSLRSRCDQLEERVSAMEDEMNEMKREGKFREKRIKRNEQSLQEIWDYVKRPNLRLIGVPESDVENGTKLENTLQDIIQENFPNLAKQANHINRAKDKNHMIISIDAEKAFDKIQQPFMLKTLNKLGIDGTYFKIIRAIYDKPTANIILNGQKLEAFPLKTGTRQGCPLSPLLFNIVLEVLARAIRQEKEIKGIQLGKEEVKLSLFADDMIVYLENPIVSAQNLLKLISNFSKVSGYKINVQKSQAFLYTNNRQTESQIMGELPFTIASKRIKYLGIQLTRDVKDLFKENYKPLLKEIKEDTNKWKNIPCSWVGRINIVKMAILPKVIYRFNAIPIKLPMTFFTELEKTTLKFIWNQKRARIAKSILSQKNKAGGITLPYFKLYYKATVTKTAWYWYQNRDIDQWNRTEPSEIMPHIYNYLIFDKPEKNKQWGKDSLFNRSSNDAAGCTCIGGDGTAAGVRQQHPCIHAHASDGTDVVVGASKAVGRCTMDECAPASGRGRLQLGEAVGQW

SEQ ID NO: 39337 - protein, 894 aa, Homo sapiens
  DOMAIN (316)..(361): kw TRANSCRIPTASE REVERSE II ORF2 domain identified by eMATRIX, accession number DM01354N, p-value=1.000e-40, raw score of 13.17
  DOMAIN (256)..(527): Reverse transcriptase domain identified by PFam, accession name rvt, E-value=3.5e-24, PFam score of 93.8
MVKGSIQQEELTILNIYAPNTGAPRFIKQVLSDLQRDLDSHTLIMGDFNTPLSTLDRSTRQKVNKDTQELNSALHQADLIDINRTLHPKSTEYTFFSAPHHTYSKIDHIVGSKALLSKCKRTEIITNYLSDHSAIKLELRIKNLTQSRSTPWKLNNLLLNDYWVHNEMKAEIKMFFETNKNKDTTYQNLWDAFKAVCRGKFIALNAYKRKQERSKIDTLTSQLKELEKQEQTHSKASRRQEITKIRAELKEIETQKTLQKINESRSWFFERINKIDRPLARLIKKKREKNQIDTIKNDKGDITTDPTEIQTTIREYYKHLYANKLENLEEMDTFLDTYTLPRLNQEEVESLNRPITGSEIVAIINSLPTKKSPGPDGFTAEFYQRAIYDKPTANIILNGQKLEAFPLKTGTRQGCPLSPLLFNIVLEVLARAIRQEKEIKGIQLGKEEVKLSLFADDMIVYLENPIVSAQNLLKLISNFSKVSGYKINVQKSQAFLYTKNRQTESQLMSELPFTIASKRIKYLGIQLTRDVKDLFKENYKPLLNEIKEDTNKWKNIPCSWVGRINIVKMAILPKVIYRFNAIPFKLPMTFFTELEKTTLKFIWNQKRARIAKSILSQKNKAGGITLPDFKLYYKATVTKTAWYWYQNRDIDQWNRTEPSEIMPHIYNYLIFDKPEKNKQWGKDSLFNKWCWENWLAICRRLKLDPFLTPYTKINSRWIKDLNVRPKTIKTLEENLGITIQDIGVGKDFMSKTPKAMATKAKIDKWDLIKLKSFCTAKETTIRVNRQPTTWEKIFATYSSDKGLISRIYNELKQIYKKKTNNPIKKWAKDMNRHFSKEDIYAAKKHMKKCSSSLAIREMQIKTTMRYHLTPVRMAIIKKSGNNRDMDEIGNHHSQ

SEQ ID NO: 39338 - protein, 695 aa, Homo sapiens
  DOMAIN (295)..(338): kw TRANSCRIPTASE REVERSE II ORF2 domain identified by eMATRIX, accession number DM01354T, p-value=1.000e-40, raw score of 9.48
  DOMAIN (193)..(417): Reverse transcriptase domain identified by PFam, accession name rvt, E-value=4.8e-28, PFam score of 106.6
MVKGSIQQEELTILNRYAPNTGAPRSIKQVLSDLQRDLDSHTIIMGDFNTPLSTLDRSTRQKVSKDIQELNSVLHQADLIDIYRTLHPKSTECTFFSAPHRTYSKIDHIVGSKALLSKYKRTEIITNCCSDHSATKLELRINKLTQNRSTTWKLNNLLLNDYWVHNEMKAQIKMFFETNENKDTAYQNLWDTFKAMCRGKFIALNAHKRKQERSKIDTLTSRLKELEKQEQTLHSKDSRRQEINAEKAFDKIQQPFMLKTLNTLDIDETYLKIIRAIYDKPTVNIILNGQKLEVFPLKTGTRQGCRLSPLLFNIMLEVLARAIRQEKEIKGIQLGKEEVKLSLFADDMIVYLENPIISAQNLLKLISNFSKVSGYKINVQESQAFLYTNNRQTESQIMSELPFTIAAKRIKYLGIQLTKDMKDLFKENYKPLLNKIKEDTNKWKNIPCSWIGKINIVKMAILPKATVTTTAWYWYQNRDIDQWNRTEASEMTPHIYSHLIFDKPDKNKKWGNDSVFNKWCWENWLAICRKLKQDPFLTPYTKINSRWIKELNVRPKTIKTLEENLGNTIQDIGMGKNFMTKTPKATATKAKIDKWDLIKLKSFCTVKETNIRVNKQLIEWEKIFAIYPSDKGLISRIYKELKQIYKKETNNPIKKWAKDINRHFSKEDIYAANRHMKKCSSSLVIREMQIKTTMR

SEQ ID NO: 39339 - protein, 802 aa, Homo sapiens
  DOMAIN (163)..(208): kw TRANSCRIPTASE REVERSE II ORF2 domain identified by eMATRIX, accession number DM01354N, p-value=1.000e-40, raw score of 13.17
  DOMAIN (247)..(428): Reverse transcriptase domain identified by PFam, accession name rvt, E-value=4.5e-22, PFam score of 86.8
MSELPFTIASKRIFKENKIPRNPTYNGCEGPLQGELQTTAQRNKRGHKQMEEHSMLMHRKNQYRENGHTAQELEKQEQTHSKASRRQEITKIRAELKKIETQKTLQKINESRSWFFEKINKIHRPLARLIKKKREKNQIDAIKNDKGDITTNPTEIQTTIREYYKHLYANKLENLEEMDKFLDTYTLPRLNQEEVESLNRPITGSEIVAIINSLPTKKSPGPDGFTAEFYQRYKEELVPFLLKLFQSIEKEGILPNSLYEANIILIPKPGRDTTKKENFRPISLMNIDAKILNKILSNQIQQHIKKLIHHDQVGFIPGMQGWFNIRESINVIQHINRTKDKNHMIISIDAEKAFDKIQPPFMLKTLNKLAQNLLKLISNFSKVSGYKINVQKSQAFCYTNNRQTESQIMSELPFTIASKRIKYLGIQLTRDVKDRFKENYKPLLNEIKEDTNKWKNIPCSWIGRINIVKMAILPKVIYRFNAIPINLPMPFFTELEKTTLQFIWNQKRARIAKTILGQKNKAGGIMLPDFKLYYKATVTKTAWYWYQNRDVDQWNRTEPSEIMPHIYNYLIFDKPEKNKQWGKDSLFNKWCWENWLAICRKPKLDPFLTPYTKLNSRWIKDVNVRPKTVKTLEENLGNTIQDIGMGKDFMSKTPKAMATKAKMDKWDLIKLKSFCTAKEITIRVNGQPTEWEKLFAIYSSDKGLISRIYNEFKQIYKKKTNNPIKKWVKDLNRHFSKEDSYVAKKHMKKCSPSLAIREMQIKTTMRYHLTPVRMAIIKKVRKQQVLERMWRNRNTFTLLVGL

SEQ ID NO: 39340 - protein, 150 aa, Homo sapiens
  DOMAIN (94)..(134): kw TRANSCRIPTASE REVERSE II ORF2 domain identified by eMATRIX, accession number DM01354Y, p-value=8.500e-39, raw score of 10.69
RIKYLGIQLTRDVKDLFKENYKPLLNEIKEDTNKWKNIPCSWVGRINIVIMATLPKNWKKATLKFIWNQKRARITKSILSQKNKAGGITLPDFKLYYKATLTKTAWYWYQHRDINQWNRTEPSEIIPHIYNHLIFDKPDKKQEIGEGFPI

SEQ ID NO: 39341 - protein, 1447 aa, Homo sapiens
  DOMAIN (100)..(147): kw TRANSCRIPTASE REVERSE II ORF2 domain identified by eMATRIX, accession number DM01354V, p-value=1.000e-40, raw score of 12.97
  DOMAIN (913)..(1165): Reverse transcriptase domain identified by PFam, accession name rvt, E-value=0.00018, PFam score of -6.1
MDKFLNTYTLPRLNQEEVESLNRPIAGSEIVAIINSLPTKKSPGPDGFTAEFYQRYKEELLISNFSKVSGYKINVQKSQAFLYTNNRQTESQIMSELPFTIASKRIKYLGIRLTRDVKDLFKENYKPLLNEIKEDTNKWKNIPCSWVGRINIVKMAILPKRKQPSALTAEGKAAGWGFLWPTSEPVTRKGLEENAQSRQESTRRLILVGRTGAGKSATGNSILGQRRFFSRLGATSVTRACTTGSRRWDKCHVEVVDTPDIFSSQVSKTDPGCEERGHCYLLSAPGPHALLLVTQLGRFTAQDQQAVRQVRDMFGEDVLKWMVIVFTRKEDLAGGSLHDYVSNTENRALRELVAECGGRVCAFDNRATGREQEAQVEQLLGMVEGLVLEHKGAHYSNEVYELAQVLRWAGPEERLRRVAERVAARGEWTEEIFEKEMVKTFLKVLKDTKLQIQETESSKQGSPLSSTMIGSLLRPSPEEDASTVRPSPEEDASTVLPAQPANWWAPSRARQLTRVSHEPRVKPCKGLFWSSLDQSAFLILVSRNFPEAEPLSHGAFSPSTWLLLNCVCSTSLSPVNSIPAHRRRAGLSLLPLHLPERGPAARASVTATLEDRAQQPFLERMGGFQRGKYGTMAEGRSEDNLSATPPALRIILVGKTGCGKSATGNSILGQPVFESKLRAQSVTRTCQVKTGTWNGRKVLVVDTPSIFESQADTQELYKNIGDCYLLSAPGPHVLLLVIQLGRFTAQDTVAIRKVKEVFGTGAMRHVVILFTHKEDLGGQALDDYVANTDNCSLKDLVRECERRYCAFNNWGSVEEQRQQQAELLAVIERLGREREGSFHSNDLFLDAQLLQRTGAGACQEDYRQYQAKVEWQVLPVVFLAGPSPASLEQLGIQEEVIAVEGALSLPPQPLDRSQELCLLLPLLLPGSPVVEGTVPSLTFLHQCSGRKSTQAPQKNNFSGFATMKNPYNPFQSNMRTLLCAKFHTMKHAGLGEGIPPDNSGNDGYANNGYSAREEENETLTENLRSKVTAIKSFSIEIGHEVKTQNKLLAVMDSQFDSTTGFLVLEVLARAIRQEKEIKGIQLGKEEVKLSLFADDMIVHLENPIVSAQNLFKLISNFSKVSGYKINVQKSQAFLYTNNRQTESQIMSELPFTIASKRIKYLGIQLTRDAKDVFKENYKPLLNEIKEDTNKWKNIPCSWIGRINIVKMAILPRNWKKLLQSSYGTKKARITKTILSKKNKAGGITLPNFKLYYKATVTKTAWYWYQHRDIDQWNRTEASEVTPHIYNHLIFDKPDKNKKWGKDSLFNKWCWENWLAICRKLKLDLFLTPYTKINPRWIKDLNLRPRTIKTLEENLGSIFRDIGMSKGFMTKTPKAKATKAKTDKWDLIKLKSFCTAKETTIRVNRQPTEWEKIFAIYPSDKGLISRIYKELKRIYKKKTTPSKSGQRV

SEQ ID NO: 39342 - protein, 87 aa, Homo sapiens
  DOMAIN (42)..(57): FUNGI-IV METALLOTHIONEIN SIGNATURE domain identified by eMATRIX, accession number PR00874C, p-value=7.500e-09, raw score of 4.37
  misc_feature (1)...(87): Xaa = X or * as defined in Table 2
NHPQLKVAGLKNGCCVCMCVCVCCVCVRVWIWVCVCVCVCVCVCVCCVCVCCVCICVCIXVWVCVCVCLCLSLPKCWDYRHEPQRPA

SEQ ID NO: 39343 - protein, 166 aa, Homo sapiens
  DOMAIN (79)..(94): FUNGI-IV METALLOTHIONEIN SIGNATURE domain identified by eMATRIX, accession number PR00874C, p-value=7.500e-09, raw score of 4.37
  misc_feature (1)...(166): Xaa = X or * as defined in Table 2
YLSGNGGEKGFCHALPDHRLRVLHQHPPHACVETDTVDLGITSISLADVRVCVCMCVCVCCVCVRVWIWVCVCVCVCVCVCVCCVCVCCVCICVCIXVWVCVCVCCVCVCVCICCVCVCVCVCVCCICVCIXVCVCVYVCVCVCLCTVLGIHSFLTARNAHQPIGH

SEQ ID NO: 39344 - protein, 211 aa, Homo sapiens
HRGRCGHRGKQSHICAGTLFLPCLCGTLFLPCLCGTLFLPCLCGTLFIPCLCGTLFISCLCGTLFIPCLCLTLFIPCLCGTLYLCVLSSHTCQACHPLQDEAWCPWLALSTSHNIVSLVAPSYGLLNPHSPLKRVWPCRHPDCRLLAPGTVCEFLLFHTVWFVALFSSNHRTLIHPLASRNVHQPGGHMQDPSSFEPTLIHHLDVNLTCCH

SEQ ID NO: 39345 - protein, 239 aa, Homo sapiens
  DOMAIN (109)..(124): FUNGI-IV METALLOTHIONEIN SIGNATURE domain identified by eMATRIX, accession number PR00874C, p-value=7.500e-09, raw score of 4.37
  misc_feature (1)...(239): Xaa = X or * as defined in Table 2
RVPHRHGMKRVRQRHGMKRVPHRHEMKRVPHRHGMKRVPHRHGRKRVPHRHGRKRVPHRHGRKRVPAQVQDEEGHCQKPGRCVCMCVCVCCVCVRVWIWVCVCVCVCVCVCVCCVCVCCVCICVCIXVWVCVCVCCVCVCVCICCVCVCVCVCVCCICVCIXVCVCVYVCVCVCLCLFYLVLQCFICSCIISGGQRWCXRKTMCSLPFAHSHHSFPGHFFLIFQSRSFQVSFHPHCTFW

SEQ ID NO: 39346 - protein, 41 aa, Homo sapiens
MPPGAEAEEEAKAIGVPLAGDDLLHPHSQVWAGHRPIDQAQ

SEQ ID NO: 39347 - protein, 318 aa, Homo sapiens
  misc_feature (1)...(318): Xaa = X or * as defined in Table 2
GGENVKAINQQTGAFVEISRQLPPNGDPNFKLFIIRGSPEQIDHAKQLIEEKIEVGWGGLWGFGLTARIPAHLPWLLSFLLGPLCTVGPGPGGPGPAGPMGPFNPGPFNQGPPGAPPQXVSSASWVLRPEGLLSWQEEXQTPFPFPXKCRAGALIQAHFCGYHQQALSCLPGRACAFQHPSVHVQVSRLLSCPQADAARPSSCFLSRPFPGAPLSLVVWVSGASPLKNIPTPGGPAAPPPHHCSSIPFFSPAVPGGPLLTSTHPRAGAIPTPSGSQPAPHDPSKXWALQPGATRGSPTVSILCLLGFEAGGLLSWQEE

SEQ ID NO: 39348 - protein, 145 aa, Homo sapiens
  DOMAIN (21)..(36): WILM'S TUMOUR PROTEIN SIGNATURE domain identified by eMATRIX, accession number PR00049D, p-value=9.571e-10, raw score of 0.00
ATADPNAAWADDYSHYYQQPPGPVPCPAPAPAAPPAQGEPPQPPPTGQSDYTEWAWEEYYKKIGQQPQQPGAPPQQDYTKAWEEYYKKQAQVATGGGPGAPPGSQPDYSAAWAEYYRQQAAYYGQTPGPGGPQPPPTQQGQQQAQ

SEQ ID NO: 39349 - protein, 418 aa, Homo sapiens
  DOMAIN (279)..(294): WILM'S TUMOUR PROTEIN SIGNATURE domain identified by eMATRIX, accession number PR00049D, p-value=9.643e-10, raw score of 0.00
  DOMAIN (118)..(170): KH domain identified by PFam, accession name KH-domain, E- value=0.013, PFam score of 20.5
  misc_feature (1)...(418): Xaa = X or * as defined in Table 2
TCVSALSVLASDDGTGPEKIAHIMGPPDRCEHAARIINDLLQSLRVGGPGCXRGWQGLQGSARPDRLPGFIILLLLLSCRVVPQGPPGGPGMPPGGRRPKEEGQGNWGSPWAGKMTFSIPTHKCGLVIGRGGENVKAINQQRGAFVEICRQLPPNGTANFKLFIIRGSPQQIDHAKQLNEEKMKGPLCPVGPGPGGPGPAGPMGPFNPGPFNQGPPGAPPHAKKPPPHQYPPQGCGNTYPQWQQHAPHDPSISAGKAAAAAADPNAAWAAYYSHYYQQPPGPVPGPAPAPAAPPAQGQQPQQPGAPPQQDYTKAWEEYYKKQAQVATGGGPGAPPGSQPDYSAAWAEYYRQQAAYYGQTPGPGGPQPPPTQQGQQQQWVAPETPSPRGVPLMPAAGAVWPEVPGVPTHRQGSIRWVQR

SEQ ID NO: 39350 - protein, 591 aa, Homo sapiens
  DOMAIN (358)..(379): Bacterial type II secretion system protein E proteins domain identified by eMATRIX, accession number BL00662D, p-value=2.300e- 09, raw score of 8.67
MPVLPVTATEIRQYLRGHGIPFQDGHSCLRALSPFAESSQLKGQTGVTTSFSLFIDKTTGHFLCMTSLAEGSWEDFQASVEGRGDGAREGFLLSKAPEFEDSEEVRRIWNRAIPLWELPDQEEVQLADTMFGLTKVTDDTLKRFSVRYLRPARSLVFPWFSPGGSGLRGLKLLEAKCQGDGVSYEETTIPRPSAYHNLFGLPLISRRDAEVVLTSRELDSLALNQSTGLPTLTLPRGTTCLPPALLPYLEQFRRIVFWLGDDLRSWEAAKLFARKLNPKRCFLVRPGDQQPRPLEALNGGFNLSRILRTALPAWHKSIVSFRQLREEVLGELSNVEQAAGLRWSRFPDLNRILKGHRKGELTVFTGPTGSGKTTFISEYALDLCSQGVNTLWGSFEISNVRLARVMLTQFAEGRLEDQLDKYDHWADRFEDLPLYFMTFHGQQNIRTVIGTMNHAVYVYDICHVIIDNLQFMMGHEQLSTDRIAAQDYIIGVFRKFATDNNCHVTLVIHPRKEDDDKELQTASIFGSAKGGEWSAPHSTSSRPSAQPKSDSTVAEAAPLASDFTAYWIWFLTWGRGRASRDREFGYLAALN

SEQ ID NO: 39351 - protein, 224 aa, Homo sapiens
  misc_feature (1)...(224): Xaa = X or * as defined in Table 2
SPLIVSSARMHAGRDLPLYFMTFHGQQSIRTVIDTMQHAVYGYDICHVIIDNLQFMMGHEQLSTDRIAAQDYIIGVFRKFATDNNCHVTLVIHPRKEDDDKELQTASIFGLSQRQAREADNVLDPAGTGKLGNRGQGKRYFAGVPKEPFXWEMXGVFPLEFNKNSLTFSIPPKNKARLKKIKDDTGPVAKKPSSGKKGATTQNSEICSGQAPTPDQPDTSKRSK

SEQ ID NO: 39352 - protein, 75 aa, Homo sapiens
  misc_feature (1)...(75): Xaa = X or * as defined in Table 2
GTLRKRYRAFHCRITIFKALTEVCKNFSALHCEFSWGFFFFCSFFFLASSXGXNCLPSQPQPCWFLQPPCPWQIL

SEQ ID NO: 39353 - protein, 711 aa, Homo sapiens
  misc_feature (1)...(711): Xaa = X or * as defined in Table 2
PRLSSVLSEFITTHIYFLLSETTYNYEWNLISLYVVDPSRLACXTVQLFFMLQLSVGLYVFNVGNDICLHKMGSVTVLFFVTARRVNLPPVAVIKLMSSSSCISFLSLFLNLVESTDDTEIVSYHWEEINGPFIEEKTYLCFFTFLFCFVFIFVFAITXGVQTPYLHLSAMQEGDYTFQLTGLQTXCKEIILFHTVSVIPENNRPPVAVAGPDKELIFPVESATCLSYSKPHAPSLMLTTSMFYRGPSAVEMENIDKAIATVTGLQVGTYHFRFYSITGVLNQSLCFHFAIFDLENNSPPRARAGGRHVLVLPNNSITLDGSRSKKPRNWDPRIDSCPVIRVLSQDVIDGSDHSVALQLTNLVEGVYTFHFLMLXSLCKCPSANPVSSLSPDPRKSGLVELTLQVGVGQLTEQRKDTLVRQLAVGVSWXSPSDHVAVLSHCLLHSTVIVFYVQSRPPFKVLKAAEVARNLHISXSRDSLFCMLPSALHTSSAGCLLKCSGHGHCDPLTKRCIXKXSWSTNSLXLCPLWFSCVSEWSIFYVTVLKSXLSVTFLKIXVELFIVPFRQKRTKIRKKTLNMYXVHLKYFTHXILILPIAVRGMCNDYPHDXQLEVNHGVPPQMLLCFSLGIKHRSTEHNSSLMVSESVRSFDRDCLQSLNYLLSGLLQKEKNLQKAGLTSPAPSLWEDKCSGRTEHAQSARLPLKEDTEKTLMQF

SEQ ID NO: 39354 - protein, 36 aa, Homo sapiens
  misc_feature (1)...(36): Xaa = X or * as defined in Table 2
FDKICIFKRQVTKSEVILNLTNXVLXYLEYHIRNIN

SEQ ID NO: 39355 - protein, 131 aa, Homo sapiens
MATAKDRIQYYQLDEVFVFPYDMGSRWRNFKQVFTWSGVPEGDGLEWPVREGCHQYSLTVRYKVIEDYSGACCPLNKGIKTFFTSPCTEEPRIQLQKGEFILATRGLRYWLYGDKILDDSFIEGMEMEGHV

SEQ ID NO: 39356 - protein, 27 aa, Homo sapiens
MSLSSIRLFHLNFIFSLRCFKNKGLVP

SEQ ID NO: 39357 - protein, 121 aa, Homo sapiens
QVPHSSLSLPGFALCLSWDTTGGSVNFIMLINWTVMILYNYFNAMFVGPGFVPLGWKPVRKIHNQTFCACAIVAAIALLWVEHSEDRHECSPERSSSNCSIWISCICYHLVCLGISFRNNH

SEQ ID NO: 39358 - protein, 144 aa, Homo sapiens
  DOMAIN (8)..(71): DHHC zinc finger domain identified by PFam, accession name zf -DHHC, E-value=4.8e-21, PFam score of 83.3
  misc_feature (1)...(144): Xaa = X or * as defined in Table 2
CGWEYGNXADTMDEQYCKVCQAYKAPRSHHCTKCNTCVMKMDHHCPWINNCCGYQNHASFTLILLLAPLGCIHAAFIFVMTMYTQLYSFGMENNFFRKQNFYLSSWDWKEEGLKDPDFSIIQLGWKSFVFFHMDMGEVDGEGTF

SEQ ID NO: 39359 - protein, 76 aa, Homo sapiens
  misc_feature (1)...(76): Xaa = X or * as defined in Table 2
XCIRGSSVQGLVKKGFDSFIQRAAGTTIIFYYFIANTSDSLICFFVSTVLLLSCIGDSLLFTGHVKSISVQGPLTT

SEQ ID NO: 39360 - protein, 226 aa, Homo sapiens; identical to SEQ ID NO: 33757
  DOMAIN (145)..(209): SAM domain (Sterile alpha motif) domain identified by PFam, accession name SAM, E-value=6.5e-05, PFam score of 29.8

SEQ ID NO: 39361 - protein, 317 aa, Homo sapiens; identical to SEQ ID NO: 33758
  misc_feature (1)...(317): Xaa = X or * as defined in Table 2

SEQ ID NO: 39362 - protein, 288 aa, Homo sapiens; identical to SEQ ID NO: 33759
  misc_feature (1)...(288): Xaa = X or * as defined in Table 2

SEQ ID NO: 39363 - protein, 580 aa, Homo sapiens
  DOMAIN (201)..(217): Calcium-binding EGF-like domain proteins pattern proteins domain identified by eMATRIX, accession number BL01187B, p-value= 4.176e-15, raw score of 12.04
  DOMAIN (9)..(55): S4 domain identified by PFam, accession name S4, E-value=9.2e -14, PFam score of 59.1
  misc_feature (1)...(580): Xaa = X or * as defined in Table 2
MKEKPAVEVRLDKWLWAARFYKTRALAREMIEGGKVHYNGQRSKPSKIVELNATLTLRQGNDERTVIVKAITEQRRPASEAALLYEETAESVEKREKMALAQMIMPQHDQLHRYLFENFAVRGELVTVSETLQQILENHDYPQPVKNVLAELLVATSLLTATLKFDGDITVQLQGDGPMNLAVINEINERAQNPLLCAFRCVNTYGSYECKCPVGYVLREDRRMCKAVFPYCQNESSDVLWQFDSTSQIFLKGTPKTTVRRGGEHNLKNPDECEDNPNICDGGQCAGIPGRNRCLCYDGFMASEDMKTCVDIDECSLPNICVFGTCHNLPGLFRCECEIGYELDRSGGNCTEDPDHSKSRSGRSQNDWGRRRKTSXKRSAVYRXRQLYIRRQPYAERPSLRXRQRPXIPCIRSQHGNRKRMRRRRIFISTKRTTAAARTSSVKKARSFSRALKNAMLSXRTAPSVSXSXIMITHXKKXXSRXSLQTRXLMKSSARVFSKXTANGTWSLHSRGSKVTIDGINSNDIYMLGYVSNSLTGPYRPVDKTGLGLEMGLDPNDVTLTYSHFRVPEAEAAMWVSHAT

SEQ ID NO: 39364 - protein, 583 aa, Homo sapiens
  DOMAIN (431)..(447): Calcium-binding EGF-like domain proteins pattern proteins domain identified by eMATRIX, accession number BL01187B, p-value= 4.176e-15, raw score of 12.04
  misc_feature (1)...(583): Xaa = X or * as defined in Table 2
MTTSTMTHMMTMHFPIIVCADSRDDVDVTNDVNDHDDSAKRKSHRERPIAAKRTETKKRRRRARPKRRTKARSXSAKXQTAQHTRTTAAIIMRDTQARRVXRPTKHAAEQRQNTTGKQRRXTKRVKAAKKEGEXRRRKMARRTTPQTRRXTRAKRRINRPRHGAKKRAXNRRLKSAPKRHRVNRRDENARTTTRHKKRRNRRVKRAERSGAERTPYKQRHQQTREKRTCKRRQTKRRTKAKXTXRDHENDGTRAYNKTPKKAAKRTRNNLRIHNATKGGDNRGQTRRAXTKPRKYRPDENRYNTSSPERTPRKRRGKSERRDKTAQRAQXADRYNSRKTQQRLXKGHTHTERXRQARMHTRHAQNLDTQHSTRLCNAXSTCHDRRSSSTMCHRYDQLYSRSHALTMIIVNKPLRQCIRMLSFHDRHRSLAIDGDSASTGSPAFRCVNTYGSYECKCPVGYVLREDRRMCKDTCTEKAFPAGGCEVDKTHTVPQERAYIHRTRLGRARTKKRDLYRRAHNDRRRQKSAAYYESTSVRRAHKYNSGKSDTQNGSHHRQKLRQYGDAGKSHYLQYNIHFMYPLFNT

SEQ ID NO: 39365 - protein, 149 aa, Homo sapiens
  misc_feature (1)...(149): Xaa = X or * as defined in Table 2
FFEMKSHSVAQAGVQCSGVILAHCNLHLLESSDSPASAFRVAGIIDARPHAWLIFVFLVETGFHHVGQAGLELLSXVIHPPWPPKVLRLQHETPCPAVSLYLNQSPENNLEEDSLAMSNNRRSKGPGIWQNPGFEILALSTFLVESDLK

SEQ ID NO: 39366 - protein, 96 aa, Homo sapiens
AAGGSRSPNETGSHGPPQPAGQEYQRIEFGVDEVIEPSDTLPRTPSYSISSTLNPQAPEFILGCTASKITPDGITKEASYGSIDCQYPGYALCMDG

SEQ ID NO: 39367 - protein, 72 aa, Homo sapiens
CLFIRIFNVICYSKTCKNSICIGVIEIVIDGCMCGGEDGGGGGGSVTAGGAPSPIETGSHGPPQPAVYFWRF

SEQ ID NO: 39368 - protein, 290 aa, Homo sapiens
  misc_feature (1)...(290): Xaa = X or * as defined in Table 2
INFSVCVLARFFLGVVVLCVSCCWFRCVCACVCALAFPFCSCCVVVLCPVGCRCTLFAVCCCLCVCALFCGFLLRFLFCLCVCPCSCSARCRCVCLALGAVVCFPPCSVVASCGCCDWVWLCCGAVVALVGLLCCVLVCAWSFRCGCVCLCVCVVVVLVVRCCVCWCGSCVVDCAGVVLVCCLLVVLMMSLCGCRVYSWYGVCWVCSVVCRVIDLCPCCLCWCVTXRGCWSVWCMCTCCGCVCGLAVMCWCRCVVRLVCLCAVXFICACVCFECAVGGFVGGCFLGSCLI

SEQ ID NO: 39369 - protein, 81 aa, Homo sapiens
  misc_feature (1)...(81): Xaa = X or * as defined in Table 2
QGVSASLCREAGLTKISPGAPLWLPCSPGVTAECSGERTVRHNVTDRVCGVLGAVTSPGRNXRGHVTHKFCILCTDTVRDC

SEQ ID NO: 39370 - protein, 227 aa, Homo sapiens
  DOMAIN (27)..(37): Eukaryotic  RNA-binding region RNP-1 proteins domain identified by eMATRIX, accession number BL00030B, p-value=8.800e- 10, raw score of 7.03
  DOMAIN (1)..(59): RNA recognition motif. domain identified by PFam, accession name rrm, E-value=2e-13, PFam score of 58.1
ALEAVFGKYGQIVEVHLMKDCETNKSRGFAFITFERPADAKDAARDMNGKSLDGKAIKVEQATKPSFESGRRGPPPPPRSRGPPRVLRGGRGGSGGTREPPSRGGHMDDSGRDSYRGPPRRESLPSCRDAPPTRGPPPSYGGSSRYDDYSSSRDGYGGSRDSYSSSRSDLYSSGRDQVGRQERGLPPSMERGYPPPRDSYSSSSRGTPRGGGRGGSRSDRGGGRSRY

SEQ ID NO: 39371 - protein, 117 aa, Homo sapiens
  misc_feature (1)...(117): Xaa = X or * as defined in Table 2
NVVYIQFIVLPYYLTIDPAGNSRSAPPTRGPPPSYGGSSRYDDYSSSRDGYGXSRDSYSSSRSDLYSSYDRIVSTLFFVSLNWDFGPKFCLFLVSASASPSIRSASSRASTSWCSAA

SEQ ID NO: 39372 - protein, 110 aa, Homo sapiens
  DOMAIN (10)..(29): Eukaryotic  RNA-binding region RNP-1 proteins domain identified by eMATRIX, accession number BL00030A, p-value=4.706e- 11, raw score of 14.39
  DOMAIN (10)..(81): RNA recognition motif. domain identified by PFam, accession name rrm, E-value=3.1e-30, PFam score of 113.9
MVEADRPGKLFIGGLNTETNEKALEAVFGKYGRIVEVLLMKDRETNKSRGFAFVTFESPADAKDAARDMNGKSLDGKAIKVEQATKPSFESGRRGPPPPPRSRGPFQEVL

SEQ ID NO: 39373 - protein, 68 aa, Homo sapiens
SSSIEDLALGRCMEIMNVEAGDSRDTIGKETFHPFVPEHHLIKGYLPRTFWYWNYNYYPPVEGPGLLL

SEQ ID NO: 39374 - protein, 472 aa, Homo sapiens
  DOMAIN (109)..(285): Galactosyltransferase domain identified by PFam, accession name Galactosyl_T, E-value=0.081, PFam score of -66.8
  misc_feature (1)...(472): Xaa = X or * as defined in Table 2
IHFREMASKSWLNFLTFLCGSAIGFLLCSQLFSILLGEKVDTQPNVLHNDPHARHSDDNGQNHLEGQMNFNADSSQHKDENTDIAEKLEEKVRILCWVMTGPQNLEKKAKHVKATWAQRCNKVLFMSSEENKDFPAVGLKTKEGRDQLYWKTIKAFQYVHEHYLXDADWFLKADDDTYVILDNLRWLLSKYDPEEPIYFGRRFKPYVKQGYMSGGAGYVLSKEALKRFVDAFKTDKCTHSSSIEDLALGRCMEIMNVEAGDSRDTIGKGNFFHPFVPEHHFNLKGYLPRTFWYWNYNYYPPVEGGELRFLFSTVTIRHSKALSLGVAQCSWLLKQQVISDDKTKRPDFPDRSRIMKERVQIVLYESGQAPVESSPPLPGYCSALFATCFQVTKGNFSQDPTQAILYTQADKIEGWMRASGERVAEQQSGQTAMDGGKKEAEWKRTRKAKYRDDVCSKHHPPYPTPVPPSLED

SEQ ID NO: 39375 - protein, 103 aa, Homo sapiens
  DOMAIN (31)..(47): 6 kw INDUCING XPMC2 MUSHROOM SPAC22G704. domain identified by eMATRIX, accession number DM01417D, p-value=3.618e-11, raw score of 11.08
RWSGITRQHMRKAVPFQVAQKEILKLLKGKVVVGHALHNDFQALKYVHPRSQTRDTTFHKLGVIDCPVTGSLPVSTAQRKGLTESFTTSGLAPELCSRFLKSR

SEQ ID NO: 39376 - protein, 163 aa, Homo sapiens
  DOMAIN (27)..(43): 6 kw INDUCING XPMC2 MUSHROOM SPAC22G704. domain identified by eMATRIX, accession number DM01417D, p-value=5.418e-11, raw score of 11.08
  misc_feature (1)...(163): Xaa = X or * as defined in Table 2
ITRQHMRKAVPFQVPRKEILKLLKGKVVVGHALHNDFQALKXSTLGARPGDTTYVPNFLSEPGLHTRARVSLKDLALQLLHKKIQVGQHGHSSVEDATTAMELYRLVEVQWEQQEARSLWTCPEDREPDSSTDMEQYMEDQYWPDDLAHGSRGGAREAQDRRN

SEQ ID NO: 39377 - protein, 106 aa, Homo sapiens
  misc_feature (1)...(106): Xaa = X or * as defined in Table 2
NQAAASRPHCAARTMAGEEQAACVHEDRTQCRGDKAAPQAAHLCGPPRGSGSVSTAPRARXCPVCSSCPGPGAPEDTPEEVDVGAASAHRSPRLCCSHLTHRWPKH

SEQ ID NO: 39378 - protein, 561 aa, Homo sapiens
  misc_feature (1)...(561): Xaa = X or * as defined in Table 2
ICVPKSVPSFLWAGRGPHCLLPCGSSSPXSGGLARAXGVFQGRAGVARAPSHLSFHNSPCVWSLSTCCRAGSQDGPCPHAAGQGPGKQTSSGTGASSSPWTSCLXKSLPKVCSXGLETTIGRGRVKPIKVTDTAQXCAASVTAPLLSSXLQDGGSTAKVTRCTTAGGRAVYGTAEGKAFPEAPELTCRSALAALGTWPLPPLQVSCGLRNPSPDLPSVVGSRASVXTKSGSSPAKVWPLAEWFKSGSAPVTGQEAWLLWASDSSSELSLCPRKHAAPPHSAEHRQISQGLASSCWGAGGDKVVSASMVGSAPGQCPMSALMTGSASGQCPGHPCWSGTNADSXGRDPHRASRLLALPTASYEQXPQPHWGSWTAHGQNGLGIFFQRVSWFVXGQTMVSRPRISGLGQPVCLSAASPQAAPLGSHDPTPAGRXGLEPGGRQPSSSXIYVWEAPPGLWVPPGPFLSHXSWRFGRTKAAPLKEPRPGGRCPGDRPSPRAEAGLPQTRKPALPAIGRPKKACSLRRPRVILEQSSQHLAAALSSWMQPALLETGGKAVFFTPGGL

SEQ ID NO: 39379 - protein, 631 aa, Homo sapiens
  misc_feature (1)...(631): Xaa = X or * as defined in Table 2
PLLAIPAHSTFPARKPEEPPRPDXLCPHIHCAAVXGEIRTVPSKTVRGVATRTRPRSASSLGTTTGLRVSSVRRVQLSIKPGCSRVNENSSNSPCSSSQPGTSVLPCPTVCREAGPAGPXPPGXALSLPAAGFTTATEWKQSQLSSGGXTHSGEDMGRATAAATEKAQEQCMLREKLGTRQKAESGSRGAAGLQHFCSAPRTAWQPRASRARAGVRAWPCADPMXPPSHSPSFPKPFIPAAPGAQTLGAAGVEHVAGSARIPCCRTGLEPHPHSPRRTLERQARISGAGRRSSPNAATGARPRPAAGSPVSARRAPRRRPAXSSPCSGPWTAVSAPRSPGPRGGGRPPSPGRRRPCCSVFSGGASPSSARVSSPSGSCSASPPAAPAPGASGAVVAGPVVGSPREHGGXLRPPLPRLGVPGLLAARTSGAEVIHEQAAAQGTAADTPGAPGLLLAPAAAGAVTRPGPPGASGCPRPAPRPPTPASRSGRPVPGGGRGRRGGRGAGGEALQGAVVGGQVGGSGALAATARGSPAAGVSRWTAPRCRHRRSDASASGTPARFPGAGRKGRTLWQXSWRSAPPPGLSELLXGLPRPLPESGRSKAPLPSGSTPLPSGRTPLPSGRSPSTRRSPS

SEQ ID NO: 39380 - protein, 442 aa, Homo sapiens
  DOMAIN (189)..(211): DOPAMINE 1A RECEPTOR SIGNATURE domain identified by eMATRIX, accession number PR00565E, p-value=9.020e-09, raw score of 11.45
  misc_feature (1)...(442): Xaa = X or * as defined in Table 2
GLENKRAKGTEAHTRACPXGKSTEQDTTWTNTGRNEQQGPRPKGEQTQRKTERKPGRERQVQVLSSPPGRWCXDVGPLGGLPSRAKAEAALTAAQKAQGRRGSPGSLPKSSPLPSAPGKRTPPRGHLLVPLPSPYYPALLSQHPPQGPPCGASAPPSALLQRAPPPGTRTLQRPPGPRVTCGTTPMAAKAKSQSNAPRGSLLKKSNSFYNIPLKQVSCLITISKHSRNEVSVYQTSRPRAAATDVPRTPSLSVGCSWSCTRGHWPSSCCPTAPRGQGLXEHSQGPGSRSKLPWPTGPCGGLTPSCWSLAGSAGERVDLNQAAASRPHCAARTMAGKTLSGGCGCVDVGAASAHRSPRLRCTTSPTDGPNTERGSRKTGWTPGPPGFWPCPRPPTSNTTTPLGLMDSARPGKAPAPFTDFRTPSGLLLPGWAVRARREEDGCG

SEQ ID NO: 39381 - protein, 112 aa, Homo sapiens
  misc_feature (1)...(112): Xaa = X or * as defined in Table 2
LGAPCTPPRSAPRTGRPEYAXARGXPVGDLCRGPEAVVSTQVLLPRGLQXNFAVLLLQMSCATPPPNCALKGCVXVPLEQSPFFHQAVACREWKRGKGMVCGGNASPQRTEA

SEQ ID NO: 39382 - protein, 76 aa, Homo sapiens
  misc_feature (1)...(76): Xaa = X or * as defined in Table 2
MEGDDCEFRYGDGTNEAQDNDFPTGAVLEPRAALRLAPPAHLPGLRQEPGGPSTRNEGDKPVTYEEAHAPHYIAHX

SEQ ID NO: 39383 - protein, 47 aa, Homo sapiens
  misc_feature (1)...(47): Xaa = X or * as defined in Table 2
MASPGHSDLGEVAPEIKASERRTAVAIADLEWREMEGDDCEFRYGDX

SEQ ID NO: 39384 - protein, 81 aa, Homo sapiens
  misc_feature (1)...(81): Xaa = X or * as defined in Table 2
MEKQGDGFRALAGLAFCDPEKQHIWHIPGLWHGAPPMAAGSLAYSEAIFELKRCLLENIRNGLSNQNKNIQHLIELDERGX

SEQ ID NO: 39385 - protein, 370 aa, Homo sapiens
  misc_feature (1)...(370): Xaa = X or * as defined in Table 2
HCSVPGAEWPRKPPAQICPQLTSRPHLSSPRSLSPGCGHSPGPGXSPQPPVMSLHEGPPRGPQVPSPVANPQPKPWLLRSVDLPVPWHLPTVDRTTSLAPSLQSDVPAPSGALXPSGRACSGVPPIDXAPEAALSAAAPRPSLGSGQNASGLPAASLPPQDSSQPHKTVPSPARSVPPLGAQARAAPPRLWCPHALVSGXEASPEAVSVAAGPPVPGPTPSTSGSTASHSRRGCXSPRXTPAPPRRDHGRSAAFEVLAAAASAQPCASQGGPRPTGAGRTPSPLGLPFSRGPPAASARPFCRHPSLXFSWXSSPSGLSLSDTPHSPRRPLGPVCGLRAPCPPQIPACRVPAAHSQRWPGSSSRSCRCQCC

SEQ ID NO: 39386 - protein, 92 aa, Homo sapiens
  misc_feature (1)...(92): Xaa = X or * as defined in Table 2
ACEPMVLFCLLALLLQDLFLGSYPRVLAAFDIQVFFLGTSDRMXNTGLEYFMLNSWLWLLNRLXSWGELCHFIPLHSPVKRGLNFYLQEFFI

SEQ ID NO: 39387 - protein, 226 aa, Homo sapiens
  DOMAIN (26)..(81): Actins proteins domain identified by eMATRIX, accession number BL00406C, p-value=3.629e-11, raw score of 6.75
  misc_feature (1)...(226): Xaa = X or * as defined in Table 2
GTRVNMILMKMGFSGIVVHQESVCATYGSGLSSTCIVDVGDQKTSVCCVEDGVSHRNTRLCLAYGGSDVSRCFYWLMQRAGFPYRECQLTNKMDWLLLQHLKRNFLSFRSRTSLGFRTMSFRFRHPDSPALLYQFRLGDEKLQAPMALFYPATFWICWTGKXRPLHTDLRAILKILTMNITCWPHKAHENSLQKLLLTESLHPNLLDLKGIFVASPLIFQKDSIPR

SEQ ID NO: 39388 - protein, 584 aa, Homo sapiens
  DOMAIN (48)..(83): Actins proteins domain identified by eMATRIX, accession number BL00406A, p-value=1.000e-09, raw score of 9.95
  DOMAIN (548)..(583): Actin domain identified by PFam, accession name actin, E- value=0.0018, PFam score of 12.7
  misc_feature (1)...(584): Xaa = X or * as defined in Table 2
GERLRYGVTENGKEKGGEKEKEQRGVKRPIVPALVPESLQEQIQSNFIIVIHPGSTTLRIGRATDTLPASIPHVIARRHKQQGQPLYKDRWLLREGLNKPESNEQRLNGLIMVDQAIWSNKMSNGTRRNPVSPEQARSYNKQMRPAILDHCSGNKWTNTSHHPEYLVGEEALYVNPLDCYNIHWPIRRGQLNIHPGPGGSLTAVLADIEVIWSHAIQKYLEIPLKDLKYYRWILVIPDIYNKQHVKELVNMILMKMGFSGIVVHQESVCATYGSGLSSTCIVDVGDQKTSVCCVEDGVSHRNTRIFSWRSGHLWVQDHEFQIRHPDSPALLYQFRLEDEKLQAPMALFYPATFGIVGQKMTTLQHRLRAILRILTMNITCWPHRANKNSLQKLLLTESLHPNLFEFERGFLWASPLIFQKDSIPRRXIWGLHREMAXWPATIPRRPLTALMSRKTAISLFEGKALGLGXSPSSIAIDCCSSDDTKKKMYSSILVVGGGFDVFIKASRIFCSTEFSTKCPPSLQADYLKMWMXSQGLKDMDPRLIAWKGGAVLACLDTTQELWIYQREWQRFGVRMLRERAAFVW

SEQ ID NO: 39389 - protein, 252 aa, Homo sapiens
  DOMAIN (174)..(207): Ank repeat domain identified by PFam, accession name ank, E- value=0.0098, PFam score of 22.5
  misc_feature (1)...(252): Xaa = X or * as defined in Table 2
MRRIVALVETGEQPFGAATVGSRFGCLEDLGTDQRERHDHEMAAAHTYFIGDGDTLTEDEDEDTWGMAKGHHAINIEGFKLARVEDEMQFQEREPEKVKIRGRTRGYTFIMLAALAAAEAEDMQVGEELCXKVSLKASQLGQMALMLQSVTVQIGMVYGLPACGAQVNLQDDKGSMVLMCASKHGHMEIIKLLLAQLGCNVHLQDNDGSTMLSIALEVGHKGITVLLYAHISFAKAQSPGTPRLGMKPQSFI

SEQ ID NO: 39390 - protein, 1811 aa, Homo sapiens
  DOMAIN (930)..(944): C2 DOMAIN SIGNATURE domain identified by eMATRIX, accession number PR00360B, p-value=7.158e-10, raw score of 13.61
  DOMAIN (110)..(1388): C2 domain identified by PFam, accession name C2, E-value=4.1e -33, PFam score of 123.4
MTPSELMDEIISIRVYNSHSLRADCLMGEFKIDVGFVYDEPGHAVMRKWLLLNDPEDTSSGSKGYMKVSMFVLGTGDEPPPERRDRDNDSDDVESNLLLPAGIALRWVTFLLKIYRAEDIPQMDDAFSQTVKEIFGGNADKKNLVDPFVEVSFAGKKVCTNIIEKNANPEWNQVVNLQIKFPSVCEKIKLTIYDWDRLTKNDVVGTTYLHLSKIAASGGEVEDFSSSGTGAASYTVNTGETEVGFVPTFGPCYLNLYGSPREYTGFPDPYDELNTGKGEGVAYRGRILVELATFLEKTPPDKKLEPISNDDLLVVEKYQRRRKYSLSAVFHSATMLQDVGEAIQFEVSIGNYGNKFDTTCKPLASTTQYSRAVFDGNYYYYLPWAHTKPVVTLTSYWEDISHRLDAVNTLLAMAERLQTNIEALKSGIQGKIPANQLAELWLKLIDEVIEDTRYTLPLTEGKANVTVLDTQIRKLRSRSLSQIHEAAVRMRSEATDVKSTLAEIEDWLDKLMQLTEEPQNSMPDIIIWMIRGEKRLAYARIPAHQVLYSTSGENASGKYCGKTQTIFLKYPQEKNNGPKVPVELRVNIWLGLSAVEKKFNSFAEGTFTVFAEMYENQALMFGKWGTSGLVGRHKFSDVTGKIKLKREFFLPPKGWEWEGEWIVDPERSLLTEADAGHTEFTDEVYQNESRYPGGDWKPAEDTYTDANGDKAASPSELTCPPGWEWEDDAWSYDINRAVDEKGWEYGITIPPDHKPKSWVAAEKMYHTHRRRRLVRKRKKDLTQTASSTARAMEELQDQEGWEYASLIGWKFHWKQRSSDTFRRRRWRRKMAPSETHGAAAIFKLEGALGADTTEDGDEKSLEKQKHSATTVFGANTPIVSCNFDRVYIYHLRCYVYQARNLLALDKDSFSDPYAHICFLHRSKTTEIIHSTLNPTWDQTIIFDEVEIYGEPQTVLQNPPKVIMELFDNDQVGKDEFLGRSIFSPVVKLNSEMDITPKLLWHPVMNGDKACGDVLVTAELILRGKDGSNLPILPPQRAPNLYMVPQGIRPVVQLTAIEILAWGLRNMKNFQMASITSPSLVVECGGERVESVVIKNLKKTPNFPSSVLFMKVFLPKEELYMPPLVIKVIDHRQFGRKPVVGQCTIERLDRFRCDPYAGKEDIVPQLKASLLSAPPCRDIVIEMEDTKPLLASKLTEKEEEIVDWWSKFYASSGEHEKCGQYIQKGYSKLKIYNCELENVAEFEGLTDFSDTFKLYRGKSDENEDPSVVGEFKGSFRIYPLPDDPSVPAPPRQFRELPDSVPQECTVRIYIVRGLELQPQDNNGLCDPYIKITLGKKVIEDRDHYIPNTLNPVFGRMYELSCYLPQEKDLKISVYDYDTFTRDEKVGETIIDLENRFLSRFGSHCGIPEEYCVSGVNTWRDQLRPTQLLQNVARFKGFPQPILSEDGSRIRYGGRDYSLDEFEANKILHQHLGAPEERLALHILRTQGLVPEHVETRTLHSTFQPNISQGKLQMWVDVFPKSLGPPGPPFNITPRKAKKYYLRVIIWNTKDVILDEKSITGEEMSDIYVKGWIPGNEENKQKTDVHYRSLDGEGNFNWRFVFPFDYLPAEQLCIVAKKEHFWSIDQTEFRIPPRLIIQIWDNDKFSLDDYLGFLELDLRHTIIPAKSPEKCRLDMIPDLKAMNPLKAKTASLFEQKSMKGWWPCYAEKDGARVMAGKVEMTLEILNEKEADERPAGKGRDEPNMNPKLDLPNRPETSFLWFTNPCKTMKFIVWRRFKWVIIGLLFLLILLLFVAVLLYSLPNYLSMKIVKPNV

SEQ ID NO: 39391 - protein, 1430 aa, Homo sapiens
  DOMAIN (560)..(574): C2 DOMAIN SIGNATURE domain identified by eMATRIX, accession number PR00360B, p-value=7.158e-10, raw score of 13.61
  DOMAIN (521)..(1037): C2 domain identified by PFam, accession name C2, E-value=1.7e -18, PFam score of 74.9
WAVFDGNYYYYLPWAHTKPVVTLTSYWEDISHRLDAVNALLAMAERLQTNIEALKSGIQGKIPANQLAELWLKLIDEVIEDTRYTLPLTEGKANVTVLDTQIRKLRSRSLSQIHEAAVRMRSEATDVKSTLAEIEDWLDKLMQLTEEPQNSMPDIIIWMIRGEKRLAYARIPAHQVLYSTSGENASGKYCGKTQTIFLKYPQEKNNGPKVPVELRVNIWLGLSAVEKKFNSFAEGTFTVFAEMYENQALMFGKWGTSGLVGRHKFSDVTGKIKLKREFFLPPKGWEWEGEWIVDPERSLLTEADAGHTEFTDEVYQNESRYPGGDWKPAEDTYTDANGDKAASPSELTCPPGWEWEDDAWSYDINRAVDEKGWEYGITIPPDHKPKSWVAAEKMYHTHRRRRLVRKRKKDLTQTASSTARAMEELQDQEGWEYASLIGWKFHWKQRSSDTFRRRRWRRKMAPSETHGAAAIFKLEGALGADTTEDGDEKSLEKQKHSATTVFGANTPIVSCNFDRDYIYHLRCYVYQARNLLALDKDSFSDPFAHICFLHRSKTTEIIHSTLNPTWDQTIIFDEVEIYGEPQTVLQNPPKVIMELFDNDQVGKDEFLGRSIFSPVVKLNSEMDITPKLLWHPVMNGDKACGDVLVTAELILRGKDGSNLPILPPQRAPNLYMVPQGIRPVVQLTAIEILAWGLRNMKNFQMASITSPSLVVECGGERVESVVIKNLKKTPNFPSSVLFMKVFLPKEELYMPPLVIKVIDHRQFGRKPVVGQCTIERLDRFRCDPYAGKEDIVPQLKASLLSAPPCRDIVIEMEDTKPLLASKCLSSMSTALSKMASPATVHLTEKEEEIVDWWSKFYASSGEHEKCGQYIQKGYSKLKIYNCELENVAEFEGLTDFSDTFKLYRGKSDENEDPSVVGEFKGSFRIYPLPDDPSVPAPPRQFRGLPDSVPQECTVRIYIVRGLELQPQDNNGLRDPYIKITLGKKVIEDRDHYIPNTLNPVFGRMYELSCYLPQEKDLKISVYDYDTFTRDEKVGETIIDLENRFLSRFGSHCGIPEEYCVSGVNTWRDQLRPTQLLQNVARFKGFPQPILSEDGSRIRYGGRDYSLDEFEANKILHQHLGAPEERLALHILRTQGLVPEHVETRTLHSTFQPNISQYYLRVIIWNTKDVILDEKSITGEEMSDIYVKGWIPGNEENKQKTDVRYRSLDGEGNFNWRFVFPFDYLPAEQLCIVAKKEHFWSIDQTEFRIPPRLIIQIWDNDKFSLDDYLGFLELDLRHTIIPAKSPEKCRLDMIPDLKAMNPLKAKTASLFEQKSMKGWWPCYAEKDGARVMAGKVEMTLEILNEKEADERPAGKGRDEPNMNPKLDLPNRPETSFLWFTNPCKTMKFIVWRRFKWVIIGLLFLLILLLFVAVLLYSLPNYLSMKIVKPNV

SEQ ID NO: 39392 - protein, 112 aa, Homo sapiens
MAVLPLPSNPHDQPQNSMPDIIIWMIRGEKRLAYARIPAHQVLYSTSGFLELDLRHTIIPAKSPEKCRLDMIPDLKAMNPLKAKTASLFEQKSMKGWWPCYAEKDGARVMAV

SEQ ID NO: 39393 - protein, 583 aa, Homo sapiens
  DOMAIN (54)..(138): C2 domain identified by PFam, accession name C2, E-value=3.4e -07, PFam score of 37.3
  misc_feature (1)...(583): Xaa = X or * as defined in Table 2
KLYRGKSDENEDPSVVGEFKGSFRIYPLPDDPSVPAPPRQFRELPDSVPQECTVRIYIVRGLELQPQDNNGLCDPYIKITLGKKVIEDRDHYIPNTLNPVFGRMYELSCYLPQEKDLKISVYDYDTFTRDEKVGETIIDLENRFLSRFGSHCGIPEEYCVSGVNTWRDSLRPTQLLQNVARFKGFPQPILSEDGSRIRYGGRDYSLDEFEANKILHQHLGAPEERLALHILRTQGLVPEHVETRTLHSTFQPNISQGKTLQMWGGMFFPKSLGPPGPPFNITPRKAKKYYLRVIIWNTKDVILDEKSITGEEMSDIYVKGWIPGNEENKQKTDVHYRSLDGEGNFNWRFVFPFDYLPAEQLCIVAKKEHFWSIDQTEFRIPPRLIIQIWDNDKFSLDDYLGFPRTLTCRHTIHFLQKSPGGNCRVWTXFPGPSKAMNPLKAKTASLFEQKSMKGWWPCYAEKDGARVMAGKVEMTLEILNEKEADERPAGKGRDEPNMNPKLDLPNRPETSFLWFTNPCKTMKFIVWRRFKWVIIGLLFLLILLLFVGRAPLTLLPNYFVQWKIVKPNVLTKGKGFISRVIQQ

SEQ ID NO: 39394 - protein, 135 aa, Homo sapiens
  DOMAIN (22)..(76): Kinesin light chain repeat proteins domain identified by eMATRIX, accession number BL01160B, p-value=8.398e-09, raw score of 19.54
  DOMAIN (6)..(135): Intermediate filament proteins domain identified by PFam, accession name filament, E-value=1.2e-56, PFam score of 201.6
NAVETQYKLMAEQNRKDAEAWFTSRTEELNREVAGHTEQLQMSRSEVTDLRRTLQGLEIELQSQLSMKAALEDTLAETEARFGAQLAHIQALISGIEAQLGDVRADSERQNQEYQRLMDIKSRLEQEIATYRSLL

SEQ ID NO: 39395 - protein, 249 aa, Homo sapiens
  DOMAIN (193)..(240): Intermediate filaments proteins domain identified by eMATRIX, accession number BL00226D, p-value=3.308e-28, raw score of 19.10
  DOMAIN (1)..(239): Intermediate filament proteins domain identified by PFam, accession name filament, E-value=7.6e-75, PFam score of 262.1
  misc_feature (1)...(249): Xaa = X or * as defined in Table 2
SARPSHDYSHYYGTIEYLCYKILGDIIENSRIVLQINNACLAADDFXTKYEREQTLARTDLEMQTEGLKEELAYLKKNHEGEINALRGQVGGQISVEVDSALGADATNILSDMQSQYENRKDAERWFTSCTEELNWEVVGHMEQLQMNRSQVTDLRCNLQGLEIELQWQLSMKAALEARFGPQLAQIQALISSIEAQLGDVRADSERQNQEYQLLMDIKLWLEQELATYLSLLEGQEEHYNSLSTSKIL

SEQ ID NO: 39396 - protein, 674 aa, Homo sapiens
  misc_feature (1)...(674): Xaa = X or * as defined in Table 2
AGPWDRMGAMGSLVGGDLGLVWGCAGEGFAGIPFSPCALTQCEGNQGTRAKWVQTSTRILKGQVKQARGAQVTPYSPLWHGKLGRAAPTFNAPGRWLLPLLLPPPLLXITTCLLGKRTLQEALSLKLQELRKVCLQEAVRAWPXGYQAGRLGGGEELGPLGRPPTARAYPPPHPNQAHHSLCPAEVMQMGVESKRVGRGDRYRGVARRMALAPDLSTEQRRRRRQVQADALRRLHELEEQLRDVRARLGLPVLPLPQPLPLSTGSVITTQGVCLGMRLAQLSQGEHPLVRVGEWTLANGRGRAGMGDSYPPNLPPTPTSLXPIPFIHPVSGGSPERRTPWKPPPSDLYGDLKSRRNSVASPTRXEXAPPPLRRSWEWDSKPGLAEGPASDRASLFVARTRRSNSSEALLVDRAAGGGAGSPPAPLAPSASGPPVCKSSEVLYERPQPTPAFSSRTAGPPDPPRAARPSSAAPASRGAPRLPPVCGDFLLDYSLDRGLPRSGGGTGWGELPPAAEVPGPLSRRDGLLTMLPGPPPVYAADSNSPLLRTKDPHTRATRTKPCGLPPEAAEGPEVHPNPLLWMPPPTRIPSAGERSGHKNLALEGLRDWYIRNSGLAAGPQRRPVLPSVGPPHPPFLHARCYEVGQALYGAPSQAPLPHSRSFTAPPVSGRYGGCFY

SEQ ID NO: 39397 - protein, 45 aa, Homo sapiens
KGEGSWKHLWPGTEIWRAWLPPSSSLTLSLPGSSWDLDLRLLVLF

SEQ ID NO: 39398 - protein, 98 aa, Homo sapiens
  misc_feature (1)...(98): Xaa = X or * as defined in Table 2
TFLFIYFFFTETESHSVPRLECSGVISAHCNLHLLGSNNSATSASXVAVITGACHHAWLIFVFLVEAGFCHVGRRLVSNSXPQVIRLPWPPKVLGLQA

SEQ ID NO: 39399 - protein, 145 aa, Homo sapiens
EQTTWLRRNLEVISSPKIMVDGTNLESDVEDMLSPAMETANITPSVYSVHALTLLSEVLAHLLDMGFYSDEKERVIPLLVNIMHYVVPYLRNHSWRAIMDNLMTHDKTTFIDLMTRVAVAQSSSLNLFANRDVELEQRAMLLIRL

SEQ ID NO: 39400 - protein, 111 aa, Homo sapiens
MLLKRLAFAIFSSEIDQYQKYLPDIQVRPNVHTEVCSGRKEGVYLQGSKQRGSGSWCLNPDPTPLHGLQELSVGATIDSLSGTYQGDRIPTGGASSRFRLAREIESQLLST

SEQ ID NO: 39401 - protein, 2228 aa, Homo sapiens
MVNTYREVKEGPVILEDVLIEVFRTLYSQCKAELDLQTEPPFSKDHAQLSSKLRENKKTAELIKTANLLFNSFEPYYMWDYVARWFEECCRRTLHVRLQIGPGDSNDSSELQLTNFCLLVDFLLDIVSLETYIEIQTEHLPQLLLRMISALTSHLQTLHLSELTDSLRLCSKILSKVQPPLLSASTGGVLQFPSGQNNSVKEWEDKKVSSVSHENPTEVFEDGENPPSSRSSESGFTEFIQYQADRTDDIDRELSEGQGAAAIPIGSTSSETETASTVGSEETIIQTPSVVTQGTATRSRKTAQKTAMQCCLEYVQQFLTRLINLYIIQNNSFSQSLATEHQGDLGREQGETSKWDRNSQGDVKEKNISKQKTSKEYLSAFLAACQLFLECSSFPVYIAEGNHTSELRSEKLETDCEHVQPPQWLQTLMNACSQASDFSVQSVAISLVMDLVGLTQSVAMVTGENINSVEPAQPLSPNQGRVAVVIRPPLTQGNLRYIAEKTEFFKHVALTLWDQLGDGTPQHHQKSVELFYQLHNLVPSSSICEDVISQQLTHKDKKIRMEAHAKFAVLWHLTRDLHINKSSSFVRSFDRSLFIMLDSLNSLDGSTSSVGQAWLNQVLQRHDIARVLEPLLLLLLHPKTQRVSVQRVQAERYWNKSPCYPGEESDKHFMQNFACSNVSQVQLITSKGNGEKPLTMDEIENFSLTVNPLSDRLSLLSTSSETIPMVVSDFDLPDQQIEILQSSDSGCSQSSAGDNLSYEVDPETVNAQEDSQMPKESSPDDDVQQVVFDLICKVVSGLEVESASVTSQLEIEAMPPKCSDIDPDEETIKIEDDSIQQSQNALLSNESSQFLSVSAEGGHECVANGISRNSSSPCISGTTHTLHDSSVASIETKSRQRSHSSIQFSFKEKLSEKVSEKETIVKESGKQPGAKPKVKLARKKDDDKKKSSNEKLKQTSVFFSDGLDLENWYSCGEGDISEIESDMGSPGSRKSPNFNIHPLYQHVLLYLQLYDSSRTLYAFSAIKAILKTNPIAFVNAISTTSVNNAYTPQLSLLQNLLARHRISVMGKDFYSHIPVDSNHNFRSSMYIEILISLCLYYMRSHYPTHVKVTAQDLIGNRNMQMMSIEILTLLFTELAKVIESSAKGFPSFISDMLSKCKVQKVILHCLLSSIFSAQKWHSEKMAGKNLVAVEEGFSEDSLINFSEDEFDNGSTLQSQLLKVLQRLIVLEHRVMTIPEENETGFDFVVSDLEHISPHQPMTSLQYLHAQSITCQGMFLCAVIRALHQHCACKMHPQWIGLITSTLPYMGKVLQRVVVSVTLQLCRNLDNLIQQYKYETGLSDSRPLWMASIIPPDMILTLLEGITAIIHYCLLDPTTQYHQLLVSVDQKHLFEARSGILSILHMIMSSVTLLWSILHQADSSEKMTIAASASLTTINLGATKNLRQQILELLGPISMNHGVHFMAAIAFVWNERRQNKTTTRTKMRKEKIPHQGPFAIQAAQLLGRSIGAGLFAIRQLAKGGCAARRLSWVRQGFPSHDVVKRRPVPSLHACRSTLEDPLYLFSKVPIICYPYVALQLFGRSSELDRHQQLLLNKGLTSYIGTFDPGELCVCAAIQWLQDNSASYFLNRKLVYEPSTQAKPVKNTFLRMWIYSHHIYQQDLRKKILDVGKRLDVTGFCMTGKPGIICVEGFKEHCEEFWHTIRYPNWKHISCKHAESVETEGNGEDLRLFHSFEELLLEAHGDYGLRNDYHMNLGQFLEFLKKHKRGVATSRKPRRATSAVLRTGFGCRRCCLGASPLRVGEGGFLTEVIPAASEEQLLLVELVRSISVMRAETVIQTVKEVLKQPPAIAKDKKHLSLEVCMLQFFYAYIQRVLNEFIMKNPSLENKKDQRDLQDVTHKIVDAIGAIAGSSLEQTTWLRRNLEVKPSPKIMVDGTNLESDVEARVAVAQSSSLNLFANRDVELEQRAMLLKRLAFAIFSSEIDQYQKYLPDIQGIPVSKWVQLLTALSPAYRTSGPSVAGLETTYTGGNGFSTSYNSQRWLNLYLSACKFLDLALALPSENLPQFQMYRWAFIPEASDDSGLEVRRQGIHQREFKPYVVRLAKLLRKRAKDKEEDFKTVILEGLEMAKHQKNPEEDNSGRTLGWEPGHLLLTICTVRSMEQLLPFFNVLSQVFNSKVTSRCGGHSGSPILYSNAFPNKDMKLENHKPCSSKARQKIEEMVEKDFLEGMIKT

SEQ ID NO: 39402 - protein, 131 aa, Homo sapiens
PTAKVYIFSIFLTYHIVCCINTSSLFGFLQKNPEEDNSGRTLGWEPGHLLLTICTVRSMEQLLPFFNVLSQVFNSKVTSRCGGHSGSPILYSNAFPNKDMKLENHKPCSSKARQKIEEMVEKDFLEGMIKT

SEQ ID NO: 39403 - protein, 1387 aa, Homo sapiens
  misc_feature (1)...(1387): Xaa = X or * as defined in Table 2
IPMVVSDFDLPDQQIEILQSSDSGCSQSSAGDNLSYEVDPETVNAQEDSQMPKESSPDDDVQQVVFDLICKVVSGLEVESASVTSQLEIEAMPPKCSDIDPDEETIKIEDDSIQQSQNALLSNESSQFLSVSAEGGHECVANGISRNSSSPCISGTTHTLHDSSVASIETKSRQRSHSSIQFSFKEKLSEKVSEKETIVKESGKQPGAKPKVKLARKKDDDKKKSSNEKLKQTSVFFSDGLDLENWYSCGEGDISEIESDMGSPGSRKSPNFNIHPLYQHVLLYLQLYDSSRTLYAFSAIKAILKTNPIAFVNAISTTSVNNAYTPQLSLLQNLLARHRISVMGKDFYSHIPVDSNHNFRSSMYIEILISLCLYYMRSHYPTHVKVTAQDLIGNRNMQMMSIEILTLLFTELAKVIESSAKGFPSFISDMLSKCKVQKVILHCLLSSIFSAQKWHSEKMAGKNLVAVEEGFSEDSLINFSEDEFDNGSTLQSQLLKVLQRLIVLEHRVMTIPEENETGFDFVVSDLEHISPHQPMTSLQYLHAQPITCQGMFLCAVIRALHQHCACKMHPQWIGLITSTLPYMGKVLQRVVVSVTLQLCRNLDNLIQQYKYETGLSDSRPLWMASIIPPDMILTLLEGITAIIHYCLLDPTTQYHQLLVSVDQKHLFEARSGILSILHMIMSSVTLLWSILHQADSSEKMTIAASASLTTINLGATKNLRQQILELLGPISMNHGVHFMAAIAFVWNERRQNKTTTRTKVIPAASEEQLLLVELVRSISVMRAETVIQTVKEVLKQPPAIAKDKKHLSLEVCMLQFFYAYIQRIPVPNLVDSWASLLILLKDSIQLSLPAPGQFLILGVLNEFIMKNPSLENKKDQRDLQDVTHKIVDAIGAIAGSSLEQTTWLRRNLEVKPSPKIMVDGTNLESDVEDMLSPAMETANITPSVYSVHALTLLSEVLAHLLDMVFYSDEKERVIPLLVNIMHYVVPYLRNHSAHNAPSYRACVQLLSSLSGYQYTRRAWKKEAFDLFMDPSFFQMDASCVNHWRAIMDNLMTHDKTTFRDLMTRVAVAQSSSLNLFANRDVELEQRAMLLKRLAFAIFSSEIDQYQKYLPDIQERLVESLRLPQVPTLHSQVFLFFRVLLLRMSPQHLTSLWPTMITELVQVFLLMEQELTADEGYFTGLQGPSVGWVWETTYTGRVIGFFYFHINSQRWVXTSISLACKFLGFGLFGICPLENLPQFQMYRWGLLFPEASGDSGFGSSGRAGVLHQREFKPYVVRLAKLLRKRAKKNPEEDNSGRTLGWEPGHLLLTICTVRSMEQLLPFFNVLSQVFNSKVTSRCGGHSGSPILYSNAFPNKDMKLENHKPCSSKARQKIEEMVEKDFLEGMIKT

SEQ ID NO: 39404 - protein, 350 aa, Homo sapiens
  misc_feature (1)...(350): Xaa = X or * as defined in Table 2
FDLERVRNLTYMVTRREKIKRSVCKVQEQIFNLYTKLLEQERVSGVPSSCSSSSLENMLLFNSPSVGPDAPKIEDLKWPFCISSENKWVLPWVSFGXKRPIKSRILLQNXPWKXRQNPAEAARPVWXKGGDGGPRELFGFRKDLCRSTSHISTTEKWCGDARPWEKKRQSFSLXSHXRRLKGRIFXTESQASPGPQMCPRGIWTTQELPPPLEWGSQHLGTRKEIVPKCNGSLIKVNYNQTAVKVPTTPASPVKNWGGFRIPKKGERQQPGRGPRWGLPPALRLPIFGLRPSSTKERAKSKLKSDNENDGYVPDVEMSDSESEASEKKCIHTSSTISRRTDIIRRSILAS

SEQ ID NO: 39405 - protein, 378 aa, Homo sapiens
  misc_feature (1)...(378): Xaa = X or * as defined in Table 2
FDIPFPKIGKLIKSNVPELRGHFPLSITLVLRLMLLASKGDDPEDAKAKVLSVLKHSLLSFKQPRVMDMLKLYFLFSLQFLGGKRAIXIQEGXSYGVCWDLVFTFGIYPWNLSNLVFVSFLVNGLFHDLCQPTRKGSKHFSQDVMEKLVLVLAHLFGRRYFPPKFQDAHFEFYQSKVFLDDLPEDFSDALDEYNMKIMEDFTTFLRIVSKLADMNQEYQLPLSKIKFTGKECEDSQLVSHLMSCKEGRVAISPFVCLSGNFDDDLLRLETPNHVTLGTIGVNRSQAPVLLSQKFDNRGRKMSLNAYALDFYKHGSLIGLVQDNRMNEGDAYYLLKDFALTIKSISVSLHVTYCENEDDNVVLAFEQLSTTFWEKLNKV

SEQ ID NO: 39406 - protein, 173 aa, Homo sapiens
WPRTLAGITAYLQCTRNTHGSGIYPGNPQDERKAWRRCDRGGFWADDDYSRCQYANDVTRVLYMFNQVGIILHYSTLATVLWVGVTARNIYKQVTKKAKRCQDPDEPPPPPRPMLSSPQYQLPAAGAAWEDTALTAALASHGPVPNMRAVGQTSQPNHYTESSPGDLLLGKSA

SEQ ID NO: 39407 - protein, 360 aa, Homo sapiens
  DOMAIN (85)..(137): Latrophilin/CL-1-like GPS domain identified by PFam, accession name GPS, E-value=0.0012, PFam score of 25.4
  misc_feature (1)...(360): Xaa = X or * as defined in Table 2
FLLPFSHQSKKENSDQLMTLFTSFNSLHSAMESFFQATGNSTNLADDGKRRTVVTPVILTKIDGVNVDTHHIPVNVTLRRIAHGADAVAARWDFDLLNGQGGWKSDGCHILYSDENITTIQCYSLSNYAVLMDLTGSELYTQAASLLHPVVYTTAIILVLCLLAVIVSYIYHHSLIRISLKSWHMLVNLCFHIFLTCVVFVGGITQTRNASICQAVGIILHYSTLATVLWVGVTARNIYKQGHXKSXKMPRIPDEPRTFNQDQWLRFYPDLVGGYPPSLVLRAXLAAANIKELRQSAKPHPYWLGWHGNPPWEAFYGPASFSTFVNCMYFLSIFIQLKRHPERKYELKEPTGQQQRLACQ

SEQ ID NO: 39408 - protein, 102 aa, Homo sapiens
TSHVSFSEPDIPSSKSTELPVDWSIKTRLLFTSSQPFTWADHLKAQEEAQGLVQHCRATEVTLPKSIQFTVLFRAAGLAGSDLITALISPTTRGLREAMRNE

SEQ ID NO: 39409 - protein, 95 aa, Homo sapiens
RKEKHEVQMDHRPESVVLVKGINTFTLLNFLINSKSLVATSGPQAGLPPTLLSPVAFRGATMQMLKSGSFSAVLYPHEPTAVFNICLQMDKVLDM

SEQ ID NO: 39410 - protein, 392 aa, Homo sapiens
  misc_feature (1)...(392): Xaa = X or * as defined in Table 2
EKDLLWEEKFPDRTTVTELPQTSHVSFSEPDIPSSKSTELPVDWSIKTRLLFTSSQPFTWADHLKAQEEAQGLVQHCRATEVTLPKSIQDPKLSSELRCTFQQSLIYWLHPALSWLPLFPRIGADRKMAGKTSPWSNDATLQHVLMSDWAVSFTSLYNLLKKNFSPYFYVCTYQFTVLFRAAGLAGSDLITALISPTTRGLREAMRNEGIEFSLPLIKESGHKKETASGTSLGYGEYVIKITLSSSTDLWTHEIDLHRNSLXNRDSNCSNFLREQAISDEDEEESFSWLEEMGVQDKIKKPDILSIKLRKEKHEVQMDHRPESVVLVKGINTFTLLNFLINSKSLVATSGPQAGLPPTLLSPVAFRGATMQMLKARSVNVKTQALSGIQRPI

SEQ ID NO: 39411 - protein, 138 aa, Homo sapiens
  misc_feature (1)...(138): Xaa = X or * as defined in Table 2
MAADKRKKGSDLLVKKPETGSGLGXXXXXXXXXXXXXXXXXXXXXXXXXXXXXXXXXXXXXXXXXXXXXXXXXXXXXXXXXXXXXXXXXXXXXXXXXXXXXXXXXXXXXXXXXXXXXXXXXXXXXXXXXXXXXVPSME

SEQ ID NO: 39412 - protein, 108 aa, Homo sapiens
  misc_feature (1)...(108): Xaa = X or * as defined in Table 2
MNRLKKEWMLEHIVENNSGMESQDIKGHFHAADKDLLEMGYLQKRGLIGLTVLHGWGGLTIMAEGXKRSGCLSTLWKITPAWNLKTLKAIFMLLIKTYLKWAIYKREV

SEQ ID NO: 39413 - protein, 338 aa, Homo sapiens
  DOMAIN (141)..(196): Sialyltransferase family domain identified by eMATRIX, accession number PF00777C, p-value=1.000e-26, raw score of 18.60
  DOMAIN (66)..(326): Sialyltransferase family domain identified by PFam, accession name Sialyltransf, E-value=5.4e-97, PFam score of 335.6
MGLPRGSFFWVLLLLTAACSGLLFALYFSAVQRYPGPAAGARDTTSFEAFFQSKASNSWTGKGQACRHLLHLAIQRHPHFRGLFNLSIPVLLWGDLFTPALWDRLSQHKAPYGWRGLSHQVIASTLSLLNGSERNTPPKCIRCAVVGNGGILNGSRQGPNIDAHDYVFRLNGAVIKGFERDVGTKTSFYGFTVNTMKNSLVSYWNLGFTSVPQGQDLQYIFIPSDIRDYVMLRSAILGVPVPEGLDKGDRPHAYFGPEASASKFKLLHPDFISYLDRKVSAYGFITSNYWKFSDHYFERKMKPLIFYANHDLSLEAAPVEGPAQGRHPSAVPALTPMH

SEQ ID NO: 39414 - protein, 426 aa, Homo sapiens
  DOMAIN (370)..(381): SH3 DOMAIN SIGNATURE domain identified by eMATRIX, accession number PR00452A, p-value=3.250e-12, raw score of 10.48
  DOMAIN (371)..(423): SH3 domain identified by PFam, accession name SH3, E-value= 6.5e-15, PFam score of 63.0
  misc_feature (1)...(426): Xaa = X or * as defined in Table 2
INNTNTFRVLPHPSFVYTAKFHPAVRELVVTGCYDSMIRIWKVEMREDSAILVRQFDVHKSFINSLCFDTEGHHMYSGDCTGVIVVWNTYVKINDLEHSVHHWTINKEIKETEFKGIPISYLEIHPNGKRLLIHTKDSTLRIMDLRILVARKFVGAANYPGEDSXYFDVHGGTFLFAGSEDGIVYVWNPETGEQVAMYSDLPFKSPIRDISYHPFENMVAFCAFGQNEPILLYIYDFHVAQQEAEMFKRYNGTFPLPGIHQSQDALCTCPKLPHQGSFQIDEFVHTESSSTKMQLVNQRLETVTEVIRSCAAKVNKNLSFTWPPAVSSQQSKLKQSNMLTAQEILHQFGFTQTGIISIERKPCNHQVDTAPTVVALYDYTANRSDELTIHRGDIIRVFFKDNEDWWYGQHRERGQEGYFPSLIMWA

SEQ ID NO: 39415 - protein, 584 aa, Homo sapiens
  DOMAIN (150)..(165): DedA family domain identified by eMATRIX, accession number PF00597A, p-value=7.158e-12, raw score of 9.95
  DOMAIN (132)..(258): DedA family domain identified by PFam, accession name DedA, E -value=0.0017, PFam score of 23.7
  misc_feature (1)...(584): Xaa = X or * as defined in Table 2
MAVLIFLGCLLGGIAIGLPIAWALLLCGAALMFWLDMFDVQIMAQTLVNGADSFSLLAIPFFVLAGEIMNAGGLSKRIVDLPMKLVGHKPGGLGYVGVLAAMIMASLSGSAVADTAAVAALLVPMMRSANYPVNRAAGLIASGGIIAPIIPPSIPFIIFGVSSGLSISKLFMAGIAPGMMMGATLTLGKRARFTEDDTRERDAISVINHQRNAVLIRQRVKLQQLFVIRVLAMRIFVYGSLRHKQGNSHWMTNAQLLGDFSIDNYQLYSLGHYPGAVPGNGTVHGEVYRIDNATLAELDALRTRGGEYARQLIQTPYGSAWMYVYQRPVDGLKLIESGDWRVLRWLRVHSIDVPDPIFGLTVTGDRTDRAGKTSPAQAGCKLFLTNPLGIGVLTTAEKKSLLKPEHQGLATEVMCRMNIAGASFANIEGVKAMTDVTGFGLLGHLSEMCQGAGVQARVDYEAIPKLPGVEEYIKLGAVPGGTERNFASYGHLWLRXLALAPLEVVEANGSLXCSGERGCLYGQTTTIQLNFRPAFCPEHAIAGQKVAILRLNMQIDIKRVSSRTHGNHFTNFKFTVQHYRSCLT

SEQ ID NO: 39416 - protein, 647 aa, Homo sapiens
  DOMAIN (110)..(146): Orn/Lys/Arg decarboxylases family 1 pyridoxal-P attachment si domain identified by eMATRIX, accession number BL00703A, p-value= 9.679e-32, raw score of 21.99
  DOMAIN (108)..(152): Orn/Lys/Arg decarboxylase domain identified by PFam, accession name OKR_DC_1, E-value=4.4e-21, PFam score of 77.9
  misc_feature (1)...(647): Xaa = X or * as defined in Table 2
KMSKLKIAVSDSCPDCFTTQRECIYINESRNIDVAAIVLSLNDVTCGKLDEIDATGYGIPVFIATENQERVPAEYLPRISGVFENCESRREFYGRQLETAASHYETQLRPPFFRALVDYVNQGNSAFDCPGHQGGEFFRRHPAGNQFVEYFGAVPCRLVIPALKKQRKLSDLETAIVVVDRFSGEVRAMVGGSEPQFAGYNRAMQARRSIGSLAKPATYLTALSQPKIYRLNTWIADAPIALRQPNGQESVRVMLVDALTRSMNVPTVNLGMALGLPAVTETWIKLGVPKDQLHPVPAMLLGALNLTPIEVAQAFQTIASGGNRAPLSALRXTIAEHGKELYQSFPQAERAVPAQAAYLTLWTMQQVVQRGTGRKLGAKYPNLHLAGKTGTTNNNVDTWFAGIDGSTVTITWVGRDNNQPTKLYGASGAMSIYQRYLANQTPTPLNLVPPEDIADMGVDYDGNFVCSGGMRILPVWTSDPQSLCQQSEMQQQPSGNPFDQSSQPQQQPQQQPAQQEQKDSDGVAGWITDMFGSNEHLSGYELDSYPLSSARRRARFTEDDTRERDAISVINHQRNAVLIRQRVKLQQLFVSNHIACWIRRPGDANHPGFFANMQMLKIDVVFKLAFRQQFNIRTRRDKQIFFQSGVT

SEQ ID NO: 39417 - protein, 22 aa, Homo sapiens
MWLGFVSQWRQGIAPFFYYCTP

SEQ ID NO: 39418 - protein, 23 aa, Homo sapiens
MPLAPDTFLRGDCWAGGRGLEAE

SEQ ID NO: 39419 - protein, 158 aa, Homo sapiens
  DOMAIN (50)..(60): TYPE I ANTIFREEZE PROTEIN SIGNATURE domain identified by eMATRIX, accession number PR00308C, p-value=7.785e-10, raw score of 3.83
  misc_feature (1)...(158): Xaa = X or * as defined in Table 2
GRGRWGAPRLRGALXDPXGHFLGQQPRPQLHSPAPDRPAPTPTDAEGLPPAAAAAAAGATARVPGSRGGXGQAAEELHEAGEAQACRGGTEDEEHGXXHLCHGRASXCPGVSGSTGSPHPSPSMAPDDTSGLLEFVGVPLQTLFAWVSPAEAAEQQRL

SEQ ID NO: 39420 - protein, 97 aa, Homo sapiens
  misc_feature (1)...(97): Xaa = X or * as defined in Table 2
PTSMGHLYSFPGNXSHAHYHPIKTXSPLPHSTPISNPSAPLKGLKPVITRLLQHGLLKPINSPYHSPILPVLKPDKAYKLVQNLRLINQIVLPIHSM

SEQ ID NO: 39421 - protein, 191 aa, Homo sapiens; identical to SEQ ID NO: 32212
  DOMAIN (170)..(181): RNase H domain identified by eMATRIX, accession number PF00075B, p-value=9.182e-13, raw score of 12.56

SEQ ID NO: 39422 - protein, 65 aa, Homo sapiens
MAGSCPPPYNPSITSPPHTWSSLQFHSVTSPPPPAQQFPLKEVAGAKGIVKVNAPFSLSNLSHLS

SEQ ID NO: 39423 - protein, 467 aa, Homo sapiens
  DOMAIN (3)..(39): kw TRANSCRIPTASE REVERSE II ORF2 domain identified by eMATRIX, accession number DM01354F, p-value=4.682e-33, raw score of 14.56
MGDFNTPLSILDRSTREKINKDIQDLNSALDQVDLIDIYRTLHLQSTEYTFFSARHHTFSKINHMIRRNQKRARIAKALLSKKNKAGGIMLPDFKLHYKAMVTKTACDMDEAGNHHSQQTNTETETQTPRVLTHKWELDNEITWTQGGEHHTPGPVPQLHGCALYHSWGLPSIWTAESEETLELYAVLASHRQALGYYCSETKETRFIRGPKTPAPVTDWEGSLPLVFNHCRDASLIIHPRFKGVRPRRDACLGPSPFAASPAFLGKGKHALKGLKPVITRLLQHGLLKPINSPYNSPILPVVKPDKPYKLVQNLRLINQIVLPIHPVGEAPVPLETGGKSGKDCILWFECHLSHNTIEHQVSSSTFRIVVATGVLVSLHPQLYMAQNRERHAECLGESKGREQESLSGNPENSRFSLLTSRRYLYKSTRTIVLLGLAGPLKQKKLRSQHPSLYKYLQSFRNKDSYR

SEQ ID NO: 39424 - protein, 153 aa, Homo sapiens
  DOMAIN (14)..(58): Synapsins proteins domain identified by eMATRIX, accession number BL00415N, p-value=9.474e-09, raw score of 4.29
VGSGDLPWEGNPLSSCSLLHEKDPPTTSGPQTGPGPRNISPILNRAAPRQAQLGPNSSSASAPPPYNPFITSPPHTWSALQFRFVTSPPPPAQQLTLKKVAGAKGTVKEHFCHDLPASSMQSNYPVHDSGHLTTGPSLFKPTLNIEYSTGHAP

SEQ ID NO: 39425 - protein, 163 aa, Homo sapiens
MTSSPQTDQPKEHHTNFKSGCSSPAEPGPNSSSASAPPPYNPFITSPPHTWSGLQFHSTTSPPPPAQQFPLKKVAGAKGTVKVPDPVPSDWMRPPNRGPQPSTDALRLAIGQCPTGMQLQRKGQAAIFAVSQPSLVIPPGMGITEETRVWRALTENCSSTTEE

SEQ ID NO: 39426 - protein, 214 aa, Homo sapiens
MDAELRVTLIVEARFKRIKACYHSPATAWPFKAYKLSLQFPLFTCPRTRQALQEKKVNITSKQAYFSLRGGAKESSEQSRIREKCSDSHIDIWLGSMQSSQNVQQTPQKLSECWQWHREGSTKQNINISHSKQAFGALKWRWIPKKEQKRGKGEDKEREKEGGGKEENKKEEEEDEKEEERRRKRRGDKKGGRKSREGEASIRGPHKELNYTQS

SEQ ID NO: 39427 - protein, 170 aa, Homo sapiens
ETNPLSSCSLLRDKDPPTTSSPQTHQPKKHPPISNPAAPHQAELGPNPSSASAPPPYNLFITSPPHTWSGLPFRSVTSPPPPAQQFTLKKVAGAKGTVKTITDIELQVTLTVEARLRPGEINSHVAHTKPVWWSLHTDTCDIWCRRPGTGGLLQETSPLSSPSLCEEIHL

SEQ ID NO: 39428 - protein, 63 aa, Homo sapiens
  misc_feature (1)...(63): Xaa = X or * as defined in Table 2
WVSGSVQVKVERGWDEGCKGIVKKACLTYTNRIMHCVGRYXAXESIWVWHHGVNRQNNLVDKA

SEQ ID NO: 39429 - protein, 122 aa, Homo sapiens
  misc_feature (1)...(122): Xaa = X or * as defined in Table 2
SDVKANLSTGGPVGCGGDTLPVAEKPSDAVEAPGVXAPSAGGAGPAPSPGLEPSGAPPPPALPPRAVLDSGLAPGRPLPLASSNPPPAGRRLLLCTSPGRRGGAAGSGPRCPESKSIPLRCL

SEQ ID NO: 39430 - protein, 55 aa, Homo sapiens
  misc_feature (1)...(55): Xaa = X or * as defined in Table 2
CVKECLDVRHLRPFAYFTTRIIXILQDGKIQSAIFCVIWNYCRVCIGVKRHSRRK

SEQ ID NO: 39431 - protein, 2356 aa, Homo sapiens
  DOMAIN (240)..(260): ENDOPEPTIDASE LA (LON) SERINE PROTEASE (S16) SIGNATURE domain identified by eMATRIX, accession number PR00830A, p-value=9.571e- 11, raw score of 8.41
  DOMAIN (238)..(262): Bacterial type II secretion system protein domain identified by PFam, accession name GSPII_E, E-value=0.012, PFam score of 11.5
VRIMFEVQDLKYATLATVSRCGMVWFSEDVLSTDMIFNNFLARLRTSRWMKGRMRHSGGIQRDAATIMQPYFTSNGLVTKALEHAFQLEHIMDLTRLRCLGSLFSMLHQACRNVAQYNANHPDFPMQIEQLERYIQRYLVYAILWSLSGDSRLKMRAELGEYIRRITTVPLPTAPNIPIIDYEVSISGEWSPWQAKVPQIEVETHKVAAPDVVVPTLDTVRHEALLYTWLAEHKPLVLCGPPGSGKTMTLFSALRALPDMEVVGLNFSSATTPELLLKTFDHYCEYRRTPNGVVLAPVQLGKWLVLFCDEINLPDMDKYGTQRVISFIRQMVEHGGFYRTSDQTWVKLERIQFVGACNPPTDPGRKPLSHRFLRHVPVVYVDYPGPASLTQIYGTFNRAMLRLIPSLRTYAEPLTAAMVEFYTMSQERFTQDTQPHYIYSPREMTRWVRGIFEALRPLETLPVEGLIRIWAHEALRLFQDRLVEDEERRWTDENIDTVALKHFPNIDREKAMSRPILYSNWLSKDYIPVDQEELRDYVKARLKVFYEEELDVPLVLFNEVLDHVLRIDRIFRQPQGHLLLIGVSGAGKTTLSRFVAWMNGLSVYQIKVHRKYTGEDFDEDLRTVLRRSGCKNEKIAFIMDESNVLDSGFLERMNTLLANGEVPGLFEGDEYATLMTQCKEGAQKEGLMLDSHEELYKWFTSQVIRNLHVVFTMNPSSEGLKDRAATSPALFNRCVLNWFGDWSTEALYQVGKEFTSKMDLEKPNYIVPDYMPVVYDKLPQPPSHREAIVNSCVFVHQTLHQANARLAKRGGRTMAITPRHYLDFINHYANLFHEKRSELEEQQMHLNVGLRKIKETVDQVEELRRDLRIKSQELEVKNAAANDKLKKMVKDQQEAEKKKVMSQEIQEQLHKQQEVIADKQMSVKEDLDKVEPAVIEAQNAVKSIKKQHLVEVRSMANPPAAVKLALESICLLLGESTTDWKQIRSIIMRENFIPTIVNFSAEEISDAIREKMKKNYMSNPSYNYEIVNRASLACGPMVKWAIAQLNYADMLKRVEPLRNELQKLEDDAKDNQQKANEVEQMIRDLEASIARYKEEYAVLISEAQAIKADLAAVEAKVNRSTALLKSLSAERERWEKTSETFKNQMSTIAGDCLLSAAFIAYAGYFDQQMRQNLFTTWSHHLQQANIQFRTDIARTEYLSNADERLRWQASSLPADDLCTENAIMLKRFNRYPLIIDPSGQATEFIMNEYKDRKITRTSFLDDAFRKNLESALRFGNPLLVQDVESYDPVLNPVLNREVRRTGGRVLITLGDQDIDLSPSFVIFLSTRDPTVEFPPDLCSRVTFVNFTVTRSSLQSQCLNEVLKAERPDVDEKRSDLLKLQGEFQLRLRQLEKSLLQALNEVKGRILDDDTIITTLENLKREAAEVTRKVEETDIVMQEVETVSQQYLPLSTACSSIYFTMESLKQIHFLYQYSLQFFLDIYHNVLYENPNLKGVTDHTQRLSIITKDLFQVAFNRVARGMLHQDHITFAMLLARIKLKGTVGEPTYDAEFQHFLRGNEIVLSAGSTPRIQGLTVEQAEAVQFGIWLDSSSPEQTVPYLWSEETPATPIGQAIHRLLLIQAFRPDRLLAMAHMFVSTNLGESFMSIMEQPLDLTHIVGTEVKPNTPVLMCSVPGYDASGHVEDLAAEQNTQITSIAIGSAEGFNQADKAINTAVKSGRWVMLKNVHLAPGWLMQLEKKLHSLQPHACFRLFLTMEINPKVPVNLLRAGRIFVFEPPPGVKANMLRTFSSIPVSRICKSPNERARLYFLLAWFHAIIQERLRYAPLGWSKKYEFGESDLRSACDTVDTWLDDTAKASGRQNISPDKIPWSALKTLMAQSIYGGRVDNEFDQRLLNTFLERLFTTRSFDSEFKLACKVDGHKDIQMPDGIRREEFVQWVELLPDTQTPSWLGLPNNAERVLLTTQGVDMISKMLKMQMLEDEDDLAYAETEKKTRTDSTSDGRPAWMRTLHTTASNWLHLIPQTLSHLKRTVENIKDPLFRFFEREVKMGAKLLQDVRQDLADVVQVCEGKKKQTNYLRTLINELVKGILPRSWSHYTVPAGMTVIQWVSDFSERIKQLQNISLAAASGGAKELKNIHVCLGGLFVPEAYITATRQYVAQANSWSLEELCLEVNVTTSQGATLDACSFGVTGLKLQGATCNNNKLSLSNAISTALPLTQLRWVKQTNTEKKASVVTLPVYLNFTRADLIFTVDFEIATKEDPRSFYERGGGHAPRALLGTCLPVSGGSMGVRKGSAALGVWSSSAILESSGYVPSSLASRDTGPAGHFYDKNGLKGVLGSLHLHTEGRQGGWQEAEMGV

SEQ ID NO: 39432 - protein, 53 aa, Homo sapiens
  misc_feature (1)...(53): Xaa = X or * as defined in Table 2
LLKRELNFDFYKISTTKERHLQQSXPKDSVPSLLASQTPNAPFLAPQRRLCLA

SEQ ID NO: 39433 - protein, 49 aa, Homo sapiens
IRHSVNLLRAGRIFVFEPPPGLKANTQRTFESGMKHVRIIYMMEFHVFM

SEQ ID NO: 39434 - protein, 777 aa, Homo sapiens
QFGIWLDSSSPEQTVPYLWSEETPATPIGQAIHRLLLIQAFRPDRLLAMAHMFVSTNLGESFMSIMEQPLDLTHIVGTEVKPNTPVLMCSVPGYDASGHVEDLAAEQNTQITSIAIGSAEGFNQADKAINTAVKSGRWVMLKNVHLAPGWLMQLEKKLHSLQPHACFRLFLTMEINPKVPVNLLRAGRIFVFEPPPGVKANMLRTFSSIPVSRICKSPNERARLYFLLAWFHAIIQERLRYAPLGWSKKYEFGESDLRSACDTVDTWLDDTAKASGRQNISPDKIPWSALKTLMAQSIYGGRVDNEFDQRLLNTFLERLFTTRSFDSEFKLACKVDGHKDIQMPDGIRREEFVQWVELLPDTQTPSWLGLPNNAERVLLTTQGVDMISKMLKMQMLEDEDDLAYAETEKKTRTDSTSDGRPAWMRTLHTTASNWLHLIPQTLSHLKRTVENIKDPLFRFFEREVKMGAKLLQDVRQDLADVVQVCEGKKKQTNYLRTLINELVKGILPRSWSHYTVPAGMTVIQWGVPISARRIKQLQNISLAAASGGAKELKNIHVCLGGLFVPEAYITATRQYVAQANSWSLEELCLEVNVTTSQGATLDACSFGVTGLKLQGATCNNNKLSLSNAISTALSLTQLRWVKQTNTEKKASVVTLPVYLNFTRADLIFTVDFEIATKEDPRSFYERGGGHAPRALLGTCLPVSGGSMGVRKGSAALGVWSSSAILESSGYVPSSLASRDTGPAGHFYDKNGLKGVLGSLHLHTEGRQGGWQEAEMGV

SEQ ID NO: 39435 - protein, 2114 aa, Homo sapiens
  DOMAIN (36)..(56): ENDOPEPTIDASE LA (LON) SERINE PROTEASE (S16) SIGNATURE domain identified by eMATRIX, accession number PR00830A, p-value=9.571e- 11, raw score of 8.41
  DOMAIN (34)..(58): Bacterial type II secretion system protein domain identified by PFam, accession name GSPII_E, E-value=0.012, PFam score of 11.5
  misc_feature (1)...(2114): Xaa = X or * as defined in Table 2
HKVAAPDVVVPTLDTVRHEALLYTWLAEHKPLVLCGPPGSGKTMTLFSALRALPDMEVVGLNFSSATTPELLLKTFDHYCEYRRTPNGVVLAPVQLGKWLVLFCDEINLPDMDKYGTQRVISFIRQMVEHGGFYRTSDQTWVKLERIQFVGACNPPTDPGRKPLSHRFLRHVPVVYVDYPGPASLTQIYGTFNRAMLRLIPSLRTYAEPLTAAMVEFYTMSQERFTQDTQPHYIYSPREMTRWVRGIFEALRPLETLPVEGLIRIWAHEALRLFQDRLVEDEERRWTDENIDTVALKHFPNIDREKAMSRPILYSNWLSKDYIPVDQEELRDYVKARLKVFYEEELDVPLVLFNEVLDHVLRIDRIFRQPQGHLLLIGVSGAGKTTLSRFVAWMNGLSVYQIKVHRKYTGEDFDEDLRTVLRRSGCKNEKIAFIMDESNVLDSGFLERMNTLLANGEVPGLFEGDEYATLMTQCKEGAQKEGLMLDSHEELYKWFTSQVIRNLHVVFTMNPSSEGLKDRAATSPALFNRCVLNWFGDWSTEALYQVGKEFTSKMDLEKPNYIVPDYMPVVYDKLPQPPSHREAIVNSCVFVHQTLHQANARLAKRGGRTMAITPRHYLDFINHYANLFHEKRSELEEQQMHLNVGLRKIKETVDQVEELRRDLRIKSLELLGKNAAANDKLKKMVKDQQEAEKKKVMSQEIQEQLHKQQEVIADKQMSGKEDLDKVEPAVIEAQNAVKSIKKQHLVEVRSMANPPAAVKLALESICLLLGESTTDWKQIRFIIMRENFIPTIVNFSAEEISDAIREKMKKNYMSNPSYNYEIVNRASLACGPMVKWAIAQLNYADMLKRVEPLRNELQKLEDDAKDNQQKANEVEQMIRDLXARIGRYKEEYAVLISEAQAIKADLAAFEAKVNRSTALLKSLSAERERWEKTSETFKNQMSTIAGDCLLSAAFIAYPGYFDQQMRQNLFTTWSHHLQQANIQFRTDIARTEYLSNADERLRWQASSLPADDLCTENAIMLKRFNRYPLIIDPSGQATEFIMNEYKVRKITRTSFLDDAFRKNLESALRFGNPLFVVQDVESYDPVLNPVLNREVRRTGGRVLITLGDQDIDLSPSFVIFLSTRDPTVEFPPDLCSRVTFVNFTVTRSSLQSQCLKLKYLKQERPDVDEKRSDLLKLQGEFQLRLRQLEKSLLQALNEVKGRILDDDTIITTLENLKREAAEVTRKVEETDIVMQEVETVSQQYLPLSTACSSIYFTMESLKQIHFLYQYSLQFFLDIYHNVLYENPNLKGVTDHTQRLSIITKDLFQVAFNRVARGMLHQDHITFAMLLARIKLKGTVGEPTYDAEFQHFLRGNEIVLSAGSTPRIQGLTVEQAEAVVRLSCLPAFKDLIAKVQADEQFGIWLDSSSPEQTVPYLWSEETPATPIGQAIHRLLLIQAFRPDRLLAMAHMFVSTNLGESFMSIMEQPLDLTQIVGTEVKPNTPVLMCSVPGYDASGHVEDLAAEQNTQITSIAIGSAEGFNQADKAINTAVKSGRWVMLKNVHLAPGWLMQLEKKLHSLQPHACFRLFLTMEINPKVPVNLLRCGPASFVFEPPPGVKANMLRTFSSIPVSRICKSPNERARLYFLLAWFHAIIQERLRYAPLGWSKKYEFGESDLRSTLRLRWDTWLDDTAKGRQNISPDKIPVVCTXKTLMAQSIYGGRVDNEFDQRLLKNLSWKRLFKTKEFPTVSLSLACKVDGHKDIQMPDGIRREEFVQWVELLPDTQTPSWLGLPNNAERVLLTTQGVDMISKMLKMQMLEDEDDLAYAETEKKTRTDSTSDGRPAWMRTLHTTASNWLHLIPQTLSHLKRTVENIKDPLFRFFEREVKMGAKLLQDVRQDLADVVQVCEGKKKQTNYLRTLINELVKGILPRSWSHYTVPAGMTVIQWVSDFSERIKQLQNISLAAASGGAKELKNIRVCLGGLFVPEAYITATRQYVGPGQTDWSLEELCLEVNVTTFTGAPPLTSCSFSGVTGLKLQGGHVQPTNKLSLSQSHLQTAPSTXTQLRWGQARQNTEKEGPVWLTLPVYLELQPVPDLIFTVDFRNCLQKEDPRSFYERGVAVFVDRGELFLAAPFL

SEQ ID NO: 39436 - protein, 204 aa, Homo sapiens
  DOMAIN (7)..(22): WILM'S TUMOUR PROTEIN SIGNATURE domain identified by eMATRIX, accession number PR00049D, p-value=7.102e-09, raw score of 0.00
  misc_feature (1)...(204): Xaa = X or * as defined in Table 2
SWFQPPSGPPWPGAPPPPPLARVNPGVPSLTTSLMDVEPXAQVELPSHPRVPSPAPGPAPXVLEPPRSLLTSVVGPQGPSWAGGGMAVRQALEEAACRDPCIAISSWAGGDRPLWWLDGLLLRRVYPDSCPPCPSRIPAIFGASLQGSINPILQMRKLFPHDMDLLXGQDPFSCRRPESWNRDVGWLALGVFCLVPFSLVGSLN

SEQ ID NO: 39437 - protein, 234 aa, Homo sapiens
MAMGLFFIPFLNCTQQQWFLLGLLKTAGIWEKEHHRLSQHGNINLIPEKGRSPQSQKLGLLDRVRLSNPRGSNTKGKLFTPLNVDAIEESPSKEPKPVGLNNKERFRTAFRMKAYAFWQSSEDAGTGDPMAEDRGYGNDFPIEDMIPTLKAAIRAVRILQFRLYKKKFKETLRPYDVKDVIEQYSAGHLDMLSRIKYLQTRHQEAVQCGQQDREDKKLLADLLHLRSKWKSPSG

SEQ ID NO: 39438 - protein, 439 aa, Homo sapiens
  DOMAIN (175)..(198): POTASSIUM CHANNEL SIGNATURE domain identified by eMATRIX, accession number PR00169G, p-value=8.657e-11, raw score of 9.39
  DOMAIN (5)..(226): Ion transport protein domain identified by PFam, accession name ion_trans, E-value=8.7e-07, PFam score of -41.9
MTQRFLIVLGCLILAVLTTFKEYETVSGDWLLLLETFAIFIFGAEFALRIWAAGCCCRYKGWRGRLKFARKPLCMLDIFVLIASVPVVAVGNQGNVLATSLRSLRFLQILRMLRMDRRGGTWKLLGSAICAHSKELITAWYIGFLTLILSSFLVYLVEKDVPEVDAQGEEMKEEFETYADALWWGLITLATIGYGDKTPKTWEGRLIAATFSLIGVSFFALPAGILGSGLALKVQEQHRQKHFEKRRKPAAELIQAAWRYYATNPNRIDLVATWRFYESVVSFPFFRQVGTHLNAQGVTSHLSCEESNFDPEGNEKLDEPENDISRSTFQEDDSKECGGWIYGLKSKQEDQLANIAGFRVRGNEGLDQGKNSWRQHPDFSAYICEMKELKQMVPKACQGYYHGFRLSANNPELAPRLSFMWSHQLYEFNMNAEKEPNGN

SEQ ID NO: 39439 - protein, 877 aa, Homo sapiens
  DOMAIN (301)..(324): POTASSIUM CHANNEL SIGNATURE domain identified by eMATRIX, accession number PR00169G, p-value=8.657e-11, raw score of 9.39
  DOMAIN (123)..(356): Ion transport protein domain identified by PFam, accession name ion_trans, E-value=2.4e-05, PFam score of -64.0
  misc_feature (1)...(877): Xaa = X or * as defined in Table 2
MGLKARRAAGAAGGGGDGGGGGGGAANPAGGDAAAAGDEERKVGLAPGDVEQVTLALGAGADKDGTLLLEGGGRDEGQRRTPQGIGLLAKTPLSRPVKRNNAKYRRIQTLIYDALERPRGWALLYHALVFLIVLGCLILAVLTTFKEYETVSGDWLLLLETFAIFIFGAEFALRIWAAGCCCRYKGWRGRLKFARKPLCMLDIFVLIASVPVVAVGNQGNVLATSLRSLRFLQILRMLRDGPGEGGTWKLLGSAICAHSKELITAWYIGFLTLILSSFLVYLVEKDVPEVDAQGEEMKEEFETYADALWWGLITLATIGYGDKTPKTWEGRLIAATFSLIGVSFFALPAGILGSGLALKVQEQHRQKHFEKRRKPAAELIQAAWRYYATNPNRIDLVATWRFYESVVSFPFFRKEQLEAASSQKLGLLDRVRLSNPRGSNTKGKLFTPLNVDAIEESPSKEPKPVGLNNKERFRTAFRMKAYAFWQSSEDAGTGDPMAEDRGYGNDFPIEDMIPTLKAAIRAVRILQFRLYKKKFKETLRPYDVKDVIEQYSAGHLDMLSRIKYLQTRIDMIFTPGPPSTPKHKEVFRKGQHFTFPSQQSSRGLNHMXARPSTSEIEDQRHXWGKFVKSLKGQVQGLGRKLDFLVDMHMQHMERLQVQVTEYYPTKGTSSPAEAEKKEDNRYSDLKTIICNYSETGPPEPPYSFHQVTIDKVSPYGFFAHDPVNLPRGGPSSGKVQATPPSSATTYVERPTVLPILTLLDSRVSCHSQADLQGPYSDRISPRQRRSITRDSDTPLSLMSVNHEELERSPSGFSISQDRDDYVFGPNGGSSWMREKRYLAEGETDTDTDPFTPSGSMPLSSTGDGISDSVWTPSNKPI

SEQ ID NO: 39440 - protein, 41 aa, Homo sapiens
  misc_feature (1)...(41): Xaa = X or * as defined in Table 2
QNEILPQISKSNNEIXSRSPHXITRNLNNSNKMAHKMKFAN

SEQ ID NO: 39441 - protein, 46 aa, Homo sapiens
MALTKTYWFMFNNYVFIFQKGKGKAFHVAYLKSTSSTSRGMVAINP

SEQ ID NO: 39442 - protein, 283 aa, Homo sapiens
  DOMAIN (55)..(65): Eukaryotic  RNA-binding region RNP-1 proteins domain identified by eMATRIX, accession number BL00030B, p-value=9.400e- 10, raw score of 7.03
  DOMAIN (16)..(89): RNA recognition motif. domain identified by PFam, accession name rrm, E-value=3.4e-13, PFam score of 57.3
  misc_feature (1)...(283): Xaa = X or * as defined in Table 2
MSCGRPPPDVDGMITLKVDNLTYRTSPDSLRRVFEKYGRVGDVYIPREPHTKAPRGFAFVRFHDRRDAQDAEAAMDGAEXEGRALRIQVARYGRRDLPRSRQGPTPRGRSRGGGYGRRSRSYGRRSRSPRRRHRNRFFCPSCSRSRRRGRYRGSRYSRSPYSRSPYSRSRYSRSPYSRSRYRESRYGGSHYSSSGYSNSRYSRYHSSRSHSKPGSSTSSRSASTSKSSSARRSKSFSVSRSRSRSRSSSMTRSPPGVSKRKSKSRSRSKRPPKSPEEEGQMSS

SEQ ID NO: 39443 - protein, 57 aa, Homo sapiens
SCLNQLNYLEMWKLFRKAQEDHTLGRDISYVAEVRPGEAGGRAHTGDSLLTMNPSFL

SEQ ID NO: 39444 - protein, 122 aa, Homo sapiens
  misc_feature (1)...(122): Xaa = X or * as defined in Table 2
LQTILQGHSNQNSMVLVPKQRYRSMEQNRALRNNVTYLQLSDLXQAXEKQAMGKGFPISXMVLGKLASHMXKAESGSLPYTLYKNXFKMDXRLKHXTXNHKNPRRKPRHYHSGHRHGQGLHV

SEQ ID NO: 39445 - protein, 30 aa, Homo sapiens
ELLTLTVRVRGFILEVSETKNPPIPDTLGW

SEQ ID NO: 39446 - protein, 379 aa, Homo sapiens
MVTFYVVENVKISEEQNRLSTVYSVPTLDVPHITLLSQCRVLALKQLEGQRYQKLQKIMKPCFGDMLSFTLTAFVELMDHGIVSWDTFSVAFIKKIASFVNKSAIDISILQRSLAILESMVLNSHDLYQKVAQEITIGQLIPHLQGSDQEIQTYTIAVINALFLKAPDERRQEMANILAQKQLRSIILTHVIRAQRAINNEMAHQLYVLQVLTFNLLEDRMMTKMDPQDQAQRDIIFELRRIAFDAESEPNNSSGSMEKRKSMYTRDYKKLGFIKEETLDMSEHQKEQTLDTPSLRTVTLTVRVHGFILEVSKTKNPPIPDTFWPPRWDHRPSPGGGQARVQVFENVSIKATKSDLLGPPCGLGGKLVFLLLHQCLDYS

SEQ ID NO: 39447 - protein, 388 aa, Homo sapiens
LPPTPVQLLYPVSRFSNVKSLQHLCRFRIRQLVRIDHIPDLPLPKYNGVVRFGTGMSKGVVGRPLISYIRKFYYYDPQEEVYLSLKEAQLISKQKQEVEPSTPLSVEGHPGRGVAAEVADEKLGYMGDGAWEKAESEELEVQKPQVKLRRAVSEVARPASTPPIMASAIKDEDDEDRIIAELEVFERSSVSSLPPTPRRQLIPTLLSPQDLGPPGGSAPGPTRKRTQHPQGRRFNKLEGKKKRSKEESCKLTHVKGTTGKTHSVLLPYYLGLECLRQLAQASCLRGRTAGTIVKTQAPGGAPPPSSFHSLKLRSGSGLCTTTVWRRQLLRRRRVSGDSGRRRRTASMADAATPSRRRSASKREGREASAAAGGRSDSWLLDDAEPGAH

SEQ ID NO: 39448 - protein, 485 aa, Homo sapiens
  DOMAIN (283)..(306): PI3 KINASE P85 REGULATORY SUBUNIT SIGNATURE domain identified by eMATRIX, accession number PR00678H, p-value=4.960e-14, raw score of 9.13
  DOMAIN (277)..(330): Src homology domain 2 domain identified by PFam, accession name SH2, E-value=2.4e-16, PFam score of 50.8
  misc_feature (1)...(485): Xaa = X or * as defined in Table 2
ERGLETNSCSEEELSSPGRGGGGGGRLLLQPPGPELPPVPFPLQDLVPLGRLSRGEQQQQQQQQPPPPPPPPGPLRPLAGPSRKGSFKIRLSRLFRTKSCNGGSGGGDGTGKRPSGELAASAASLTDMGGSAGRELDAGRKPKLTRTQSAFSPVSFSPLFTGETVSLVDVDISQRGLTSPHPPTPPPPPRRSLSLLDDISGTLPTSVLVAPMGSSLQSFPLPPPPPPHAPDAFPRIAPIRAAESLHSQPPQHLQCPLYRPDSSSFAASLRELEKCGWYWGPMNWEDAEMKLKGKPDGSFLVRDSSDPRYILSLSFRSQGITHHTRMEHYRGTFSLWCHPKFEDRCQSVVEFIKRAIMHSKNGKFLYFLRSRVPELPPNSCQLIYPMSRFSIYESFQHLAKFRIRQLVRIDHIPDLPLPKPLISYIRKFYYYDPQEEVYLSLKEAQSVSKQKQEVEPSTXRGAPCWSPPRAFGCQAPALKNQIKLP

SEQ ID NO: 39449 - protein, 138 aa, Homo sapiens
KSPSKYLCYTFIISTAALVLLIMLPHESMPVYLGMACTLGFGAIVFTQRAVFFAPIGEAKIAENKTGAAMALGSFIGYAPAMFCFSLYGYILDLNPGIIGYKIVFGIMACFAFSGAVVSVMLVKRISQRKKEMLAAEA

SEQ ID NO: 39450 - protein, 51 aa, Homo sapiens
  misc_feature (1)...(51): Xaa = X or * as defined in Table 2
KPAHQCQVFFCPVVSAHQGEVLPYKSGVTSIESFVTIICKVIRRXLLSFLA

SEQ ID NO: 39451 - protein, 208 aa, Homo sapiens
  misc_feature (1)...(208): Xaa = X or * as defined in Table 2
FGTAALVLXIVLPPEISPSHXGMACTLGLGAIVLTQRAVFFAPIGEAKIAENKTGAAMALGSFIGYAPAMFCFSLYGYILDLNPGIIGYKIVFGIMACFAFSGAVVSVMLVKRISQRRIRRLRRIRQFHIRRNTSSRYGSGFARGGRKATRGISSQELGQGLSGEEQDGASGGVTAGDIATGDYFLLTPHLQICTGAKGGLGCVVEGR

SEQ ID NO: 39452 - protein, 250 aa, Homo sapiens
  DOMAIN (25)..(133): Bacterial regulatory helix-turn-helix protei domain identified by PFam, accession name HTH_1, E-value=6.5e-17, PFam score of 69.6
  misc_feature (1)...(250): Xaa = X or * as defined in Table 2
MSELPFAIASKRKEYVGIQLPRYTIQKLEENLNVVLFDRSGHRTKFTNVGRMLLERGRVLLQAADKLTTDAEALARGWETHLTIVTEALVPTPAFFPLIDKLAAKANTQLAIITXVLAGAWERLEQGRADIVIAPDMHFRSSSEINSRKLYTLMNVYVAAPDHPIHQEPEPLSEVTRVKYRGIAVADTARERPVLTVQLLDKQPRLTVSTIEDKRQALLAGLGVATMPYPMVEKDIAEGRLRVVSPESTS

SEQ ID NO: 39453 - protein, 124 aa, Homo sapiens
  misc_feature (1)...(124): Xaa = X or * as defined in Table 2
SWRIDVHPVXYTTRLFPFVLPYMQKGTSIRTSSRQLLDKQPRLTVSTIEDKRQALLAGLGVATMPYPMVEKDIAEGRLRVVSPESTSEIDIIMAWRVTKRTPKNXWTMMPENIGEYTKTTHILG

SEQ ID NO: 39454 - protein, 313 aa, Homo sapiens
  DOMAIN (79)..(121): Aldehyde dehydrogenases glutamic acid proteins domain identified by eMATRIX, accession number BL00687B, p-value=3.423e- 33, raw score of 17.54
  DOMAIN (1)..(312): Aldehyde dehydrogenase family domain identified by PFam, accession name aldedh, E-value=2.1e-39, PFam score of 144.4
  misc_feature (1)...(313): Xaa = X or * as defined in Table 2
MTAMERSRILRRAVDILRERNDELAKLETLDTGKAYSETSTVDIVTGADVLEYYAGLIPALEGSQIPLRETSFVYTRREPLGVVAGIGAWNYPIQIALWKSAPALAAGNAMIFKPSEVTPLTALKLAEIYSEAGLPDGVFNVLPGVGAETGQYLTEHPGIAKVSFTGGVASGKKVMANSAASSLKEVTMELGGKSPLIVFDDADLDLAADIAMMANFFSSGQAKRNGARVLCGGDGVRARDRPNLRRENLRGKYHSXQRHRRPDACXYRPRLXRCGGRYADDXVQAGAGSDGLXATGHGGRRECXPYVTGEAG

SEQ ID NO: 39455 - protein, 166 aa, Homo sapiens
  misc_feature (1)...(166): Xaa = X or * as defined in Table 2
DQQQNRQRLIDCFPHAQWAKEVDVSDKEARCGVRCATRDHLPMVCNVPDYEATLVEYASSAEHKDDAVSAPVFDDLFILGSRGLCSGPLCAEILATXISDEPMPMDASMLAALIPNRLWVRKLLKGKAVKAGAVHFRRSIIYFHPQQANALDFPSTHIIKYCTMLL

SEQ ID NO: 39456 - protein, 52 aa, Homo sapiens
  misc_feature (1)...(52): Xaa = X or * as defined in Table 2
YGFRWPDXAHPAINXASAASISFLRWLIRLTSITETTAPLNAKQAIMPNTIL

SEQ ID NO: 39457 - protein, 420 aa, Homo sapiens
  DOMAIN (364)..(391): Protamine P1 proteins domain identified by eMATRIX, accession number BL00048, p-value=7.300e-09, raw score of 6.39
MKRSNITTAKVEHGVDTAWLVDHHTEDFTASYAVQHWLDVAAQQKTVAITLRELAPFDKRLGTTQQAYEKAFAGVVNRILDEGYQVIALSTCTGIDSYNKDDRMVALNLRQHISDPARYHVVMDELNDLEMGKILGACELTVGTRLHSAIISMNFATPAIAINYEHKSAGIMQQLGLPEMGIDIRHLLDGSLQAMVADTLGQLPALNARLSEAVSRERQTGMQMVQSVLERIGEVKGRKAASRSSMKNRPYPLVDDLERFYGLLEQTLLATGFIRENHPGQVMNKLRRLFTRARPESQELNILRGILASIEQQNKGLREHECRPDKAFTPHPAVMRYINFSGANNGSSTHAEIRAVGRIVLCLLRYRNRRTVCRANVRRMGRGSYLDRERRLGRHHSRSTELPATLPPQFARAVVKYFQR

SEQ ID NO: 39458 - protein, 241 aa, Homo sapiens
  DOMAIN (180)..(212): 5 kw NUCLEOSIDE TRANSPORT DEPENDENT NA domain identified by eMATRIX, accession number DM01857C, p-value=4.600e-29, raw score of 15.62
  DOMAIN (74)..(241): Na+ dependent nucleoside transporter domain identified by PFam, accession name Nucleoside_tra2, E-value=5e-12, PFam score of -33.9
GAKNAREAIYHIEGDPDHPENRLRYPEYRAPGSDKWQRISWEEAFSRIAKLMKADRDANFIEKNEQGVTVNRWLSTVNKKKISLRTVGAALVLQVVIGGIMLWLPPGRWVAEKVAFGVHKVMAYSDAGSAFIFGSLVGPKMDTLFDGAGFIFGFRVLPAIIFVTALVSILYYIGVMGILIRILGGIFQKALNISKIESFVAVTTIFLGQNEIPAIVKPFIDRLNRNELFTAICSGMASIDG

SEQ ID NO: 39459 - protein, 553 aa, Homo sapiens
  DOMAIN (431)..(483): Respiratory-chain NADH dehydrogenase 75 Kd subunit proteins domain identified by eMATRIX, accession number BL00641F, p-value= 1.095e-09, raw score of 33.12
  misc_feature (1)...(553): Xaa = X or * as defined in Table 2
MAETAVINHKKRKNSPRIVQSNDLTEAAYSLSRDQKRMLYLFVDQIRKSDGTLQEHDGICEIHVAKYAEIFGLTSAEASKDIRQALKSFAGKEVVFYRPEEDAGDEKGYESFPWFIKLQELFSLMAIWAAVKMIAGSETKVSGLEPTFQVHGIEFKRLGFGLRNGPSPKTGFSPFAVEVHRPLIVEFLVPTGTTLNLSSGYLLIYKGFCRFRTHHQTGFSPAGANQRGPLAATLSGPGGEGQSAVARLTGEKKNHPGAQYANRLSPRVGRFINAAGTTGFPTGKRAVSATQLILPGYLTLPSEKQVDLQSYLEANTPKATLADQVNYWSNYPKFFVSLMKSFYGDAAQKENNWGYDWLPKWDQTYDVIKYFNMMDEGKVTGYFCQGFNPVASFPDKNKVVSCLSKLKYMVVIDPLVTETSTFWQNHGESNDVDPASIQTEVFRLPSTCFAEEDGSIANSGRWLQWHWKGQDAPGEARNDGEILAGIYHHLRELYQSEGGKGVEPLMKMSWNYKQPHEPQSDEVAKENNGYALEDLYDANGGXFRVQQSRHCKS

SEQ ID NO: 39460 - protein, 885 aa, Homo sapiens
  DOMAIN (586)..(638): GLYCINE DEHYDROGENASE DECARBOXYL domain identified by eMATRIX, accession number PD00545K, p-value=1.000e-40, raw score of 12.74
  DOMAIN (326)..(534): Pyridine nucleotide-disulphide oxidoreducta domain identified by PFam, accession name pyr_redox, E-value=3.6e-54, PFam score of 186.0
MVDCPSPTKPGAFQGGPSVLLVPGNEEFSKPLLRAYVEIQRRFAGFAANFSRQFRHQISRHQCQQLTHNLPCFVITHHKMRRALYFIEHMQVIRAYTGIEQRITQVYQRSRLLAYADVFNDVRRVAGNVLFQQVPHTARMSQCFIAFRIAVFIELIVPGRFIVLTFFSVVAAEQTVFESKIITHQQAGVGVMLNVFGVDFVVFDQVAQNARQERNVRTGTNRRVNIRHRSGTRKTGIDNDQGCVVVVFRFHRPAETDGMRFSSVTAHHHHDWLVIAPRPNVGARLATVGPCQTRAWLSTASIPRERSHVISQGQRADDLTRQTAGEFAEQFNLHLFPQTWVTDIDAEARVVKSQNNQWQYDKLVLATGASAFVPPVPGRELMLTLNSQQEYRACETQLRDARRVLIVGGGLIGSELAMDFCRAGKAVTLIDNAASILASLMPPEVSSRLQHRLTEMGVHLLLKSQLQGLEKTDSGIQATLDRQRNIEVDAVIAATGLRPETALARRAGLTINRGVCVDSYLQTSNTDIYALGDCAEINGQVLPFLQPIQLSAMVLAKNLLGNNTPLKLPAMLVICIPHGGGGPGAVSAAPFGSASILPISWMYIRMMGAEGLKKASQVAILNANYIASRLQDAFPVLYTGRDGRVAHECILDIRPLKEETGISELDIAKRLIDYGFHAPTMSFPVAGTLMVEPTESESKVELDRFIDAMLAIRAEIDQVKAGVWPLEDNPLVNAPHIQSELVAEWAHPYSRAGKRRTLAHLIEDIPTGIYTIPEINSMGKTEQQLTAMKVPYEVGHAQFKHLTRAQIVGMNVGTLKILFHRETKEILDIHYFSERATEIIHIRQAIIEPERCRHTFEYFVNTNFNDPTIAETYPGTTFNRCKPLF

SEQ ID NO: 39461 - protein, 841 aa, Homo sapiens
MNIYVPTVESGRSNYVGGTQWGGPTNGGATNAEPQKKVAAHQSSLQSVREATTASGVDNAASPDWQTPLNGIISPSGKTGRIRRLRRIRQFHIREILRPDTDLVLLAVDGGYRAGASRCFNSKKLSLFFWAFWERLCDKLGKKLRRCHDCSGGREKEKKEGKGKKRREEKREGRERGGEEKRKGTTGNTAKQRRNRGARHWLTIPTKVFGEPSWKRTSATLVTRRTAKRQGGCRAEHDGKGQASQGGTRRSRVASVVTSEKKSPPQPREIANHGPSLVGGVLAFTHNFSEKVFEKPERTRGNSIHPNCENTYGPIKQTGRFPEEYSQLNSKLNDVPPQQQGYFPLSVPALFFCFRRIDPHCVAGDLDTKGLTGRIKYTWTRMSGVTNFQIVRDSSTCPIISGTEPDITFVKRSISVGVTRFSAVGVQQRNEPDGHVCDPANCVVSVLGRLTPHTAGYSSETKIQRNDQTAAFAVHENLLSAATAADTQASRVQSGPLQTPTDLQLRVLSVRRKLTNRKDIHTGNPSVHAIIKDQNPWALIALHATRCHRGAIRCMYQPCTHRAIGIASHRTSTIPIAGENMRPSVSFCLGGSGTGRNHCSQSFADSGQRIKRNTIIIVVLFDSTRCFPASDVCQIVQFPNLTPSHVHSAQLLSRDRNRHFNRWRKRMRTSLRRCAAEKQFPNGLTRGDKLHLRFAKIIGGENTRQNCRETVLPQGHWGKQYSTTHRVAVVGGGGKPLVPQAKAGTSKSCKMQVVWEASPTLLLYQNPWSPSKSERARQSADLYRHVYKRGGTPTSHAHTPGKSTRVLTRTDAKRVTSAKRAQGNTRTLANAPQRVAGTPSL

SEQ ID NO: 39462 - protein, 54 aa, Homo sapiens
  misc_feature (1)...(54): Xaa = X or * as defined in Table 2
PYRLKQNIAGAXPIKLPNAIAAPVLFSAIFASTIGAKILLAVLRLSRPHPSVHA

SEQ ID NO: 39463 - protein, 70 aa, Homo sapiens
GSGCPGVVSRYGVLLGQNASCQPCRGLGLPPCPYWLGRGPPAGGGTRGARPGGPRAPASARGRGRSVGQA

SEQ ID NO: 39464 - protein, 146 aa, Homo sapiens
LPEDQTQRDKILMAIMGSGNDLEIDGIGGGNPLTSKVAIISRSSDPRADVDYLFAQVIVHEQRVDTTPNCGNMLSGVGAFAIENGLIAATSPVTRVRIRNVNTGTFIEAQGFNIVITHAKDDRTCRAAIVSNHAAIGVGEQQCQRG

SEQ ID NO: 39465 - protein, 382 aa, Homo sapiens
  DOMAIN (268)..(283): GLYCOSYL HYDROLASE FAMILY 1 SIGNATURE domain identified by eMATRIX, accession number PR00131A, p-value=1.563e-11, raw score of 12.98
  DOMAIN (182)..(370): Glycosyl hydrolase family 1 domain identified by PFam, accession name Glyco_hydro_1, E-value=1.3e-43, PFam score of 155.2
  misc_feature (1)...(382): Xaa = X or * as defined in Table 2
NMPKASSCRFSTATTYLRDRSCKXPWAGSXKKNSWRXCRRRTTSSHRTRLNATWGVSVKRRTKARCSMVCASRGSSNARGLELVKEGRAQACVSAGNTGALMGLAKLLLKPLEGQNHRMLLRWEAKLAALVRLQENTAQPVPFAPNNARPLTLEDDRLSCTVRGYNFAITFSKMSGKPTSWQLVASALATKIAHEVNPQNQVGCMLAGGNFYPYSCKPEDVWAALEKDRENLFFIDVQARGTYPAYSARVFREKGVTINKAPGDDEILKNTVDFVSFSYYASRCASAEMNANNSSAANVVKSLRNPYLQVSDWGWGIDPLGLRITMNMMYDRYQKPLFLVENGLGAKDEFAANGEINDDYRISYLREHIRCNGRSDCRQAFR

SEQ ID NO: 39466 - protein, 464 aa, Homo sapiens
  DOMAIN (190)..(231): Acyl-CoA dehydrogenases proteins domain identified by eMATRIX, accession number BL00072C, p-value=8.154e-28, raw score of 25.30
  DOMAIN (5)..(349): Acyl-CoA dehydrogenase domain identified by PFam, accession name Acyl-CoA_dh, E-value=8.1e-178, PFam score of 604.1
MDFNLNDEQELFVAGIRELMASENWEAYFAECDRDSVYPERFVKALADMGIDSLLIPEEHGGLDAGFVTLAAVWMELGRLGAPTYVLYQLPGGFNTFLREGTQEQIDKIMAFRGTGKQMWNSAITEPGAGSDVGSLKTTYTRRNGKIYLNGSKCFITSSAYTPYIVVMARDGASPDKPVYTEWFVDMSKPGIKVTKLEKLGLRMDSCCEITFDDVELDEKDMFGREGNGFNRVKEEFDHERFLVALTNYGTAICGAYANQRVQFGEAIGRFQLIQEKFAHMAIKLNSMKNMLYEAAWKADNGTITSGDAAMCKYFCANAAFEVVDSAMQVLGDRVSGESDEMQILTLGRLREHECRPDKAFTPHPAVMRYINYSGANNGSSTHAEIRAVGRIARCLLRYRNRRTVCRANVRRMGRGSYLDRERRLGRHHSRSTELPATLPPQFARAVARRTRITISGYKYASLR

SEQ ID NO: 39467 - protein, 591 aa, Homo sapiens
  DOMAIN (210)..(236): Prokaryotic molybdopterin oxidoreductases proteins domain identified by eMATRIX, accession number BL00551B, p-value=7.618e- 19, raw score of 23.29
  misc_feature (1)...(591): Xaa = X or * as defined in Table 2
TPYPDAITTHDIVDTYPVQGGAVRVLVFSAWSLRVVSSVLFSLVWGFVSFCRRFVPCRVCVLLCCLFWCFVFGVWLPRRHMSNHAAIGVGEQQCQRGNINGAPETFASMANTGTXQWQRISWEEAFSRIAKLMKADRDANFIEKNEQGVTVNRWLSTASLAPTFGRGAMTNHWVDIKNANVVMVMGGNAAEAHPVGFRWAMEAKNNNDATLIVVDPRFTRTASVADIYAPIRSGTDITFLSGVLRYLIENNKINAEYVKHYTNASLLVRDDFAFEDGLFSGYDAEKRQYDKSSWNYQLDENGYAKRDETLTHPRCVWNLLKEHVSRYTPDVVENICGTPKADFLKAPDRTTTFLYALGWTQHTVGAQNIRTMAMIQLLLGNMGMAGGGVNALRGHSNIQGLTDLGLLSTSLPGYLTLPSEKQVDLQSYLEANTPKATLADQVNYWSNYPKFFVSLMKSFYGDAAQKENNWGYDWLPKWDQTYDVIKYFNMMDEGKVTGYFCQGFNPVASFPDKNKVVSCLSKLKYMVVIDPLVTETSTFWQNHEAAVSGGKRPGRKRLNLLPMARLTTTIASATYANISAQWAKRLQTAFR

SEQ ID NO: 39468 - protein, 745 aa, Homo sapiens; identical to SEQ ID NO: 34211
  DOMAIN (220)..(265): kw TRANSCRIPTASE REVERSE II ORF2 domain identified by eMATRIX, accession number DM01354N, p-value=1.000e-40, raw score of 13.17
  DOMAIN (235)..(483): Reverse transcriptase domain identified by PFam, accession name rvt, E-value=6e-44, PFam score of 159.4

SEQ ID NO: 39469 - protein, 607 aa, Homo sapiens
  DOMAIN (143)..(188): kw TRANSCRIPTASE REVERSE II ORF2 domain identified by eMATRIX, accession number DM01354N, p-value=1.000e-40, raw score of 13.17
  DOMAIN (227)..(502): Reverse transcriptase domain identified by PFam, accession name rvt, E-value=1.9e-80, PFam score of 280.6
MGDFNTPLSTLDRSTRQKVNKDTQELNSALHQADLIDIYRTLHPKSTEYTFFSAPHHTYSKIDHTVGSKALLSKCERTEIITNYLSDHSAIKLELRIKKLTQNCSTTWKLNNLLLNDYWVHNEMKAEIKMFFETKIQTTIREYYKHLYANKLENLEEMDKFLDTYTLPRLNQEEVESLNRLITGSEIVAIINSLPTKKSPGPDGFTAEFYQRYKEELVPFLLKLFQSIEKEGILPNSSYEASIILIPKPGRDTTKKENFRPMSLMNIDAKILNKILANQIQQHIEKLVHHDQVGFIPGMQGWFNIRKSINIIQHINRTKDNNHMIISIDAEKAFDKIQQRCMLKTLNKLGIDGTYLKIIRAIYDKPTANIILNGQKLEALPLKTGTRQGCPLSPLLFNIVLEVLARAIRQEKEIKGIQLGKEEVKLSLFADDMIVYLENPIVSAQNLLKLISNFSKVSGYKINVQKSQAFLYTNNRQTESHIMSELPFTIASKRIKYLGIQLTRDVKDLFKENYKPLLKEIKEDTNKWKNIPCSWVGRINIVTMAILPKVIYRFNAIPIKLPMTFFTELEKTTLKFIWNQKRARITKSILSQKNNAGGITLPDFKLY

SEQ ID NO: 39470 - protein, 590 aa, Homo sapiens; identical to SEQ ID NO: 38993
  DOMAIN (219)..(264): kw TRANSCRIPTASE REVERSE II ORF2 domain identified by eMATRIX, accession number DM01354N, p-value=1.000e-40, raw score of 13.17
  DOMAIN (304)..(579): Reverse transcriptase domain identified by PFam, accession name rvt, E-value=5.4e-76, PFam score of 265.9
  misc_feature (1)...(590): Xaa = X or * as defined in Table 2

SEQ ID NO: 39471 - protein, 674 aa, Homo sapiens; identical to SEQ ID NO: 35784
  DOMAIN (109)..(154): kw TRANSCRIPTASE REVERSE II ORF2 domain identified by eMATRIX, accession number DM01354N, p-value=1.000e-40, raw score of 13.17
  DOMAIN (124)..(372): Reverse transcriptase domain identified by PFam, accession name rvt, E-value=1.2e-42, PFam score of 155.1

SEQ ID NO: 39472 - protein, 839 aa, Homo sapiens; identical to SEQ ID NO: 38202
  DOMAIN (124)..(165): kw TRANSCRIPTASE REVERSE II ORF2 domain identified by eMATRIX, accession number DM01354I, p-value=1.000e-40, raw score of 15.55
  DOMAIN (226)..(451): Reverse transcriptase domain identified by PFam, accession name rvt, E-value=8.5e-07, PFam score of 26.9

SEQ ID NO: 39473 - protein, 673 aa, Homo sapiens
  DOMAIN (25)..(70): kw TRANSCRIPTASE REVERSE II ORF2 domain identified by eMATRIX, accession number DM01354N, p-value=1.000e-40, raw score of 13.17
  DOMAIN (40)..(266): Reverse transcriptase domain identified by PFam, accession name rvt, E-value=2e-32, PFam score of 121.2
MDTIKNDKGDITTDPTEIQTTIREYYKHLYANKLENLEEMDKFLDTYTLPRLNQEEVESLNRPVRGSEIEAIINSLPTKKSPGPDEFTAEFYQRKAFDKIQQAFTLKTLNKLVIDGTYRKIIRAICDKPTANIILNGQKLEAFPLKTGTRQGCPLSPLLFNIVLEVLDRAIRQEKEITCIQLGKEEVKLSLFADDMIVYLENPIISAQNLLKLISNFSKVSGYKINVQKSQAFLYTNNRQTESQIMSELPFTIASKKIKYLGIQLTRDVKDLFKENYKPLLNEIKEDTNKWENIPCSWVGRINIMKMAILPKVIYRFNAIPIKLPVAFFTELEKTTLKFIWDQKRAYIAKSILSQKNKAGVIMLPDFKLYYKATVTKTAWYWYQNRDIDQWNRTEPSEIMLHIYNYLIFDKPDKDEQWGKDSLFNKWCWENWLDIWRKLKLDPFLTPYTKINSRWIKDLNVRPKTIKTLEENLGNTILDIGMGKDFMSKTPKAMATKAKIDNWDLIKLKSFCTAKETTIRVNRQPTKWEKIFTTYSSDKGLISRIYKELKQIYKKKTNNPMNKWAKDMNRHFSKEDIYAAKRHMKKCSSSLAIREMQIKTTMRYHLTPVRMVIIKKSGNNRPPLSKEQPPIFRLSIILATTRDGNPAAVENVLHIKATLSFQQTHKAFYFQPS

SEQ ID NO: 39474 - protein, 1159 aa, Homo sapiens; identical to SEQ ID NO: 34600
  DOMAIN (283)..(328): kw TRANSCRIPTASE REVERSE II ORF2 domain identified by eMATRIX, accession number DM01354N, p-value=1.000e-40, raw score of 13.17
  DOMAIN (369)..(559): Reverse transcriptase domain identified by PFam, accession name rvt, E-value=9.5e-10, PFam score of 45.8

SEQ ID NO: 39475 - protein, 820 aa, Homo sapiens
  DOMAIN (436)..(483): kw TRANSCRIPTASE REVERSE II ORF2 domain identified by eMATRIX, accession number DM01354V, p-value=1.000e-40, raw score of 12.97
  DOMAIN (160)..(450): Reverse transcriptase domain identified by PFam, accession name rvt, E-value=1.1e-05, PFam score of 11.4
MGDFNIPLSTSDRSTRQKVNKDTQELNSALHQADLIDIYRTLHPKSTEYTFFSAPHHTYSKIDHIVGSKALLSKCRRTEIITNCLSDHSAIKLEIRIKKLTQNCSTTWKLNNLLLNDYWVNNEMKAEIKMFFEINEDKDTTYQNRWDTFKAVCRGKFIALNAHKRKQERSKIDTLTSQLKELEKQEQTHSKASRRQEITEIRAELKEIETQKTLQKMNESRSWFFEKINNIDRLLARLIKKKREKNQIDAIKNHKGDITTNPTEIQTTIREYDKHLYANKLENLEETDKFLDTYILPRLNQEQVESLNRPITGAEIEAIINSLRTKKSPGPGGFTAEFYQRYKEEHVLEVLARAIRQEKEIKGIQLGKEEVKLSLFADDMTVYLENPTVSAQNLLKLISNFSKVSGYKINVQNPQAFLYTNNRQTESQIMSELPFTIASKRIKYLGIQLTRDMKELFKENYKPLLSEIKEDINKWKNIPCSWVGRINIVKMAILPKVIYRFNAIPIKLPMTFFTELEKTTFKFIWNQKRARIAKSILSQKNKAGGITLADFKLYYKATVTKTAWYWYQDRHIDQWNRTESSEIMPHIYNYLIFDKPDKNKKWGKDSLFNKWCWENWLAICRKLKLDPFLTPYTKINSRWIKDLNVRPKTIKTLEENLGITIQDTGMGKDFMSETPKAMATKDKIDKWDLIKLKSFCTAKETTIRVNRQPTEREKSFASYSSDKGLISRIYNELQQIYKKKTNNPINKWAKDMNRHFSKEDIYAAKRHTKKCSSSLAIRGIQIKTTRRYHLKPVRMAIIKKSGNNRCWRGCGEIGTLLHCW

SEQ ID NO: 39476 - protein, 463 aa, Homo sapiens
  DOMAIN (44)..(89): kw TRANSCRIPTASE REVERSE II ORF2 domain identified by eMATRIX, accession number DM01354N, p-value=1.000e-40, raw score of 13.17
  DOMAIN (59)..(338): Reverse transcriptase domain identified by PFam, accession name rvt, E-value=7.5e-54, PFam score of 192.3
VLLSFGTPLVLTTDLLQALSSLPFMESGLFQGEGDEIQITSIEYYKHLYANKLENLEEMDKLLDTYTLPRLNQEGVESLNRPITGSEIEAIINSLPTKKGPGPDGFTAKFCQRYKEELHIKKLIHHDQVGFIPGMQGWFNIRKSINVIEHINRTKDKNHMIILIDAEKAFDKIQQPFMLKTLNKLGIDGTYLKIIRAIYGKPTVNIILNRQKLEAFPLKTGTRQGCPLSPLLFNIVLEVLAKAIRQEKEIKGIQLGKEEVKLSLFADDMIVYLENPIISAQNLLKLTGNFSKVSGYKINVQKSQAFLYTNNRQTESQIMSELPFTIASKRIKYLGIQLTRDVKDLVKENYKPLLKEIKEDTNKWKNIPCSWVGRINILKMAILPKVIYRFNAIPIKLPMTFFTELEKTTLKFIWNQKRACIAKSILSQKNKAGGITLPDFKRCYKATVTKTAWYWYQNRDIDQ

SEQ ID NO: 39477 - protein, 552 aa, Homo sapiens; identical to SEQ ID NO: 35765
  DOMAIN (189)..(234): kw TRANSCRIPTASE REVERSE II ORF2 domain identified by eMATRIX, accession number DM01354N, p-value=1.000e-40, raw score of 13.17
  DOMAIN (204)..(452): Reverse transcriptase domain identified by PFam, accession name rvt, E-value=3.6e-48, PFam score of 173.5

SEQ ID NO: 39478 - protein, 571 aa, Homo sapiens
  DOMAIN (368)..(393): 7 kw REVERSE TRANSCRIPTASE RNA POLYMERASE domain identified by eMATRIX, accession number DM00895E, p-value=7.195e-12, raw score of 15.72
  DOMAIN (341)..(571): Reverse transcriptase domain identified by PFam, accession name rvt, E-value=5.9e-51, PFam score of 182.7
MVKGSIQQEELTMLNVYAPNTGAPRFIKQVLSDLQRDLDSHTLITGDFNTPLSTLDRSMRQKVNKDTQELNSALHQADLIDIYRILHPKSRDYTFFSAPLHTYSKIDHILGSKALLSKCKRTEIITNYLSDHSAIKLELRFKNLTQNGSTTWKLNNLLLNDYWIHIEMKAEIKMFFETNENKDTTYQDLWDIFKAVCRGKFITLNAHKRKINKIDRPLARLIKKKREKNQIDTIKNDKGDITPDPTEIQTTIREYYKHLYTNKLENLEEMDKFLDTYTLPRLNQEEVESLNRPITRGEIVEIINSLPTKKSPGPDGFTAEFYQRYKEELVPFLLKVFQSTEKEGIHPNSFYEASIILIPKPGRDTTKKENFRPISLMNIVAKILNKILANRIQQHIKKLIHHDQVGFIPGMQGWFNISKSINVIQHINRAKDKNHMIISIDAEKAFDKIQQRFMLKTLNKLGIDGMYLKIIRAIYDKPTANIILNGQKLETFPLKTGTRQGCPLSPLLFNIVLEILAREIRQEKEIKCIQLGKEEVKLSLFADNMIVYLENPIVSAQNLLKLISNFSKVSG

SEQ ID NO: 39479 - protein, 1056 aa, Homo sapiens; identical to SEQ ID NO: 38235
  DOMAIN (554)..(599): kw TRANSCRIPTASE REVERSE II ORF2 domain identified by eMATRIX, accession number DM01354N, p-value=1.000e-40, raw score of 13.17
  DOMAIN (158)..(378): AP endonuclease family 1 domain identified by PFam, accession name AP_endonucleas1, E-value=3.9e-65, PFam score of 229.8

SEQ ID NO: 39480 - protein, 984 aa, Homo sapiens
  DOMAIN (262)..(303): kw TRANSCRIPTASE REVERSE II ORF2 domain identified by eMATRIX, accession number DM01354I, p-value=1.000e-40, raw score of 15.55
  DOMAIN (465)..(729): Reverse transcriptase domain identified by PFam, accession name rvt, E-value=1.9e-72, PFam score of 254.1
MLLNQGRKLPRVFAEETLKFKGTSNKPQTLEQISTSIIAQKEATVMVPGSNQEIPSGAYAIRALGFKHKTGRLFEQTLNYLQEFLFTPQWHLECQQERTVHSPGKAAEAREPSVIDRHLIQESSNWHLVGAALGQSFQRKEQAAIFAVLQPLLVIPRQTGSGVDLQKTPTDLQQRGLIVRRKTNKQKGIVHNSTTREQNWTENEFDKLTEGGFKRWVITNSSELKEHVLTQCKEDKNLEKSAIKLELRIKNLIQNHSTTWKLNNLLLNDYWVHNEMKAEIKMFFETNENKDTTYQNLWDAFKAVCRGKFIALNAHKRKQERSKIDTLTSQLKQLEKINKIDRPLARLIKKKREKNQIDAIKNDKGDITTDPTEIQTTIREYYKHLYANKLENLEEMDKFLDTYTLPRLNQEEVEPLNRPITGSEIVAIINSLPTKKSPGPDGFTAEFYQGYKEELVPFLLKLFQSIEKERIHPNSLYEASIILVLKPARDTTKKENFRPISLMNIDAKILNKILANRIQQHIKKLIHHDQVGFIPGMRGWHINRTKDKNHMIISIDAEKAFDKIQQPFMLKTLNKLGIDGTYLKIIRAIYDKPTANIILNGQKLEAFPLKTGTRQGCLLSPLLFNIVLEVLARAIRQEKEIKGIQLGKEEVKLSLFADEMIVYLENPIVSAQNLLKLISKFSKVSGYKINVQKSQALLYTKNRQTESQIMSELPFTIASKRIKYLGIQLTRDVKDLFKANYKPLLSEIKEDTNKWKNITCSWVGIINIVKMAILPKIIYAFNAIPIKLPMTFFTELEKTTLKFIWNQKRARIAKSILSQKNKAGGITLPDFKLYYKATVTKTAWYWYQNRDIDQWSRTEPSEITPHIYNHLIFDNKPEKNKQWGKDSMFNKWCWENWLAICRKLKLDPFLTPYTKINSRWIKDLNFRPKTIKTLEENLGITIQDIGMGKGFMSKTKSFCTAKETTIRVNRQPTTWEKIFAIYSS

SEQ ID NO: 39481 - protein, 801 aa, Homo sapiens
  DOMAIN (74)..(119): kw TRANSCRIPTASE REVERSE II ORF2 domain identified by eMATRIX, accession number DM01354N, p-value=1.000e-40, raw score of 13.17
  DOMAIN (158)..(339): Reverse transcriptase domain identified by PFam, accession name rvt, E-value=1.5e-24, PFam score of 95.0
MGKKQSRKTGNSKKQSPSPPPKERSSSPATEQSWTENDFDELREEGFRRSNYPELREDIQTKGKEEIQTTIREYYKHLYANKLENLEEMDKFLNTYTLPRLNQEEVESLNRPITGSEIVAVINSLPTKKSPGPDGFTAEFHQRYKVELVPFLLKLFQSIEKEGILPNSFYEASIILIPKPGRDTIKKENFRPISLTNIDAKILNKILANRIQQHIKKLIHYDQVGFIPGMQDWFNIRKSINVIQHINRTKVKNHMIISIDAEKAFDKIQQRFMLKTLNKLAQNLLKLISNFSKVSGYKINVQKSQAFLYTNNRQTESQIMSELPFTIASKRIKYLGIQLTRDVKDLFKENYKPLLKEIKEDTNKWKNIPCSWVGRLNIVKMAILPKVIYRFNAIPIKLPMTFFTELEKTTVKFIWNQKRACITKSILSQKNKAGGITLPDFKLYYKSTVTKTAWYWYQNRDIDQWNRTEPSEIMPHIYNYLIFDKPEKNKQWGKDSLFNKWCWENWLAICRKLKLDPFLTPYTKINSRWIKDLNVRPKTIKTLEENLGITIQDIGVDKDFMTKTPKAMATKPKIDKWDLIKLKSFCTAKETTIRAFDELDDVHPHEEIEACRVWQNYGTHPPVPSQLPTGDGQWAVSARFIIHLQAKMKCVKSECKGQNNLNLNNCGRELIAIKLATAHGLDLNTITKEGHHSETNAGIPGPYFPRPKPQGVQRTAVVGVNWGPLFHANLHGMGQLDGNRRVALKGQLPPMPPPSRTQSQESENSKSKLDLSDCYNIIFVKVLLGARAPEAQAWQQHGAVM

SEQ ID NO: 39482 - protein, 769 aa, Homo sapiens; identical to SEQ ID NO: 36639
  DOMAIN (173)..(218): kw TRANSCRIPTASE REVERSE II ORF2 domain identified by eMATRIX, accession number DM01354N, p-value=1.000e-40, raw score of 13.17
  DOMAIN (257)..(438): Reverse transcriptase domain identified by PFam, accession name rvt, E-value=7.3e-21, PFam score of 82.7

SEQ ID NO: 39483 - protein, 924 aa, Homo sapiens
  DOMAIN (120)..(161): kw TRANSCRIPTASE REVERSE II ORF2 domain identified by eMATRIX, accession number DM01354I, p-value=1.000e-40, raw score of 15.55
  DOMAIN (366)..(592): Reverse transcriptase domain identified by PFam, accession name rvt, E-value=4.4e-52, PFam score of 186.5
QRDLDSHTLIMGDFNTPLSILDRSTRQKVNKDTQELNSALHQADLIDIYRTLHPKSTEYTFFSAPHHTYSKIDHILGSKALLSKCKRTEIITNCLSDHSAIKLELRIKTLTQSHSTTWKLNNLLLNDYWVHNEMKAEIKMFFETNENKDTTYQNLWDAFKAVCRGKFIALNAHKRKQERSKIDTLTSQLKELEKQEQTHSKASRRQEITKIRAELKEIETQKTLQKINESRSWFFERINKIDRPLARLIKKKREKNQIDTIKNDKGDITTDPTEIQTTIREYYKHLYANKLENLEEMDTFLDTYTLPRLNQEEVESLNRPITGAEIEAIINSLPTKKSPGPDGFTAEFYQRYNEELVPFLLKLFQSIEKEGILPNSFYEASIILIPKPGRDTTKKENFRPISLMNIDAKILNKILANRIQQHIKKLIHHDQVGFIPGMQGWFNIRKSINVIQHINKAKDKNHIIISMEAFPLKTGTRQGCPLSPLLFIVLEVLARAIRQKKEIKGIQLGKEEVKLSLFADDMIVYLENPIVSAQNLLKLISNFSKVSGYKINVQKSQAFLYTKNRQTESQIMSELPFTIASKRIKYLGIQLTRDVKDLFKENYKPLLKEIKEDTNKWKNIPCSWVGRINIVKMAILPKVIYRFNAIPIKLPMTFFTELEKTTLKFIWNQKRARIAKSILSQKNKVGGITLPDFKLYYKATVTKTAWYWYQNRVIDQWNRKEPSEITPHTYNYLIFDKPEKNKQWGKDSLFNKWCWENWLAICRKLKLDPFLTPYTKINSRWIKDLNVRPKTIKTLEENLGITIQDIGMGKDFMSKTPKAMATKAKIDKWDLIKLKSFCTAKETTIRVNRQPTTWEKIFTTYSSDKGLISRIYNELKQIYKKKTNNPIKKWVKDMNRHFSKEDIYAAKKHMKKCSSSLAIREMQI

SEQ ID NO: 39484 - protein, 1026 aa, Homo sapiens; identical to SEQ ID NO: 32690
  DOMAIN (110)..(151): kw TRANSCRIPTASE REVERSE II ORF2 domain identified by eMATRIX, accession number DM01354I, p-value=1.000e-40, raw score of 15.55
  DOMAIN (356)..(550): Reverse transcriptase domain identified by PFam, accession name rvt, E-value=8.6e-35, PFam score of 129.0

SEQ ID NO: 39485 - protein, 469 aa, Homo sapiens
  DOMAIN (173)..(219): kw TRANSCRIPTASE REVERSE II ORF2 domain identified by eMATRIX, accession number DM01354O, p-value=1.000e-40, raw score of 8.73
  DOMAIN (218)..(469): Reverse transcriptase domain identified by PFam, accession name rvt, E-value=7.5e-63, PFam score of 222.2
  misc_feature (1)...(469): Xaa = X or * as defined in Table 2
QNFGNFKDLLXRSLWXREKSWICMLXARNTASRQQRNKAGQRMTLMSXEKKASDDQTSPSXRQEVRTHRKEAKNLVKRLDKWLNRITSVEKSLNDLMELKTMRTRTTTXXMHKLQXPIXSFGRKEIQTTIREKHLYANKLENLEEMDKFLETYTLPRLNQEEVESLNRPITGSEIEAIINSLPTKNSPGPDRFTAKFYQMYKEELVPFFLKLFQSIEQEGILPNSFYEASIILIPKPGRDPTKKENFRPISLMNIDAKIFNKILANQIQQHIKKLIHHDQMGFIPGMQDWFNIRKSINVIQHINRTKDKNHTIISIDAEKAFDKIQQCFMLKTLNKLGIDGTYVKIIRAIYDKPTANIILDGQKLEAFPLKTSTIQGCPLSPLLFNIVLEVLARAVRQEKEIKGIQSGKEEVKLSLFADDMTVYLENPIISAQNLLKLKSNFSKVSGYKINVQKSQAFLYTNNREPNHE

SEQ ID NO: 39486 - protein, 505 aa, Homo sapiens; identical to SEQ ID NO: 37208
  DOMAIN (280)..(305): 7 kw REVERSE TRANSCRIPTASE RNA POLYMERASE domain identified by eMATRIX, accession number DM00895E, p-value=9.111e-11, raw score of 15.72
  DOMAIN (251)..(498): Reverse transcriptase domain identified by PFam, accession name rvt, E-value=1e-64, PFam score of 228.4

SEQ ID NO: 39487 - protein, 533 aa, Homo sapiens
  DOMAIN (166)..(191): 7 kw REVERSE TRANSCRIPTASE RNA POLYMERASE domain identified by eMATRIX, accession number DM00895E, p-value=4.333e-11, raw score of 15.72
  DOMAIN (138)..(374): Reverse transcriptase domain identified by PFam, accession name rvt, E-value=7.8e-49, PFam score of 175.7
  misc_feature (1)...(533): Xaa = X or * as defined in Table 2
ESRSXFFEKINKIDRLLARLIKKKREKNQIDAIKNDKGDITTDPTEIQTTIREYYKHLYTNKLENLEEMDKFLNTYTLPRLNQEEVESLNRLITGSEIEAIINSLPTKKSPGLDTFTAEFYQRYKEELVPFLLKLFQSIEKEGILPNSFYEAIIILIQKPGRDTTKKENFRPISLMSINAKILNKILANRIQQHIKKLIHHDQVGSIPGMKGWFNICKSINVMQHINRTKYKNHMIISIDEEKAFQKIQKRFMLKTLNKLSIDGTYLKIIRAIYDKPTANIILNGQKLEAFPLKNGTRQGCPLSPVLFNIVLEVLARAIRLISCFSKVSGYKINVQKSQAFLYTNNRQTESQIMSELPFTIASKRIKYLGIQLTRDVKDLFKENYKPLFNEIKEDTNKWKSIPCSRVGRINIVKTAILPKVIYRFNAIPIKLPMTFFTELEKTTLKFIWNQKRACIVKTILSKKNKAGGITLPDFKRYYKATVTKTAWSFHELGKTQLATRTTVSTFQQIPGIXVQLRFDFSRDITLLSLLCR

SEQ ID NO: 39488 - protein, 677 aa, Homo sapiens
  DOMAIN (297)..(352): kw TRANSCRIPTASE REVERSE II ORF2 domain identified by eMATRIX, accession number DM01354Q, p-value=1.000e-40, raw score of 9.23
  DOMAIN (250)..(525): Reverse transcriptase domain identified by PFam, accession name rvt, E-value=3.1e-84, PFam score of 293.3
MEDEMNEMKREGKFREKRIKRNEQSLQEIWDYVKRPNLHLIGVPESDVENGTKLENTLQDIIQENFPNLARQANVQIQEIQRTPQRYSSRRATPRHIIVRFTKVEMKEKMLRAAREKGHCNSGKSHRSLWEQNKGIFTTCICDDAEDLQSPSTAGPWFGVLYTKGGPYPQEDIFSEEVHTGPKLRKKIQEYQLTSKWSKSDVQVSVERRMAGGNPNQCHIGEVLLDGFTAEFYRRYKEELVPFLLKLFQSIEKEGILPNSFYEASIILIQKPGRDTTKKENFRPISLMNIDAKILNKILAKRIQQHIEKLIHHDQVGFIPVMQGWFNICKSINVIQHINRAKDKNHMIISIDAEKAFDKIQQPFMLKTLNKLGIDGMYFKIIRAIYDKPTANIILNGQKLAAFPLKTGTRQGCPLSPLLFNIVLEVLARAIRQEKEIKGIQLGKEEVKLSLFADDMIVYLENPIVSAQNLLKLISNFSKVSGYKINVQKSQAFLYTNNRQTESQIMSELPFTSASKRIKYLGIQLTRDVKDLFKENYKPLLKEIKEDTNKWKNIPCSWVGRINIVKMAILPKVIYRFNAIPIKLPMPFFTELEKTTLKFIWNQKRALITKLILSQKNKAGGITLPDFKLYYKATVTKTAWYWYQNRDKDQWNRTEPSEITPHIYNYLIFDKPEKNKQ

SEQ ID NO: 39489 - protein, 695 aa, Homo sapiens; identical to SEQ ID NO: 39338
  DOMAIN (295)..(338): kw TRANSCRIPTASE REVERSE II ORF2 domain identified by eMATRIX, accession number DM01354T, p-value=1.000e-40, raw score of 9.48
  DOMAIN (193)..(417): Reverse transcriptase domain identified by PFam, accession name rvt, E-value=4.8e-28, PFam score of 106.6

SEQ ID NO: 39490 - protein, 1186 aa, Homo sapiens
  DOMAIN (149)..(194): kw TRANSCRIPTASE REVERSE II ORF2 domain identified by eMATRIX, accession number DM01354N, p-value=1.000e-40, raw score of 13.17
  DOMAIN (235)..(1071): Reverse transcriptase domain identified by PFam, accession name rvt, E-value=2.8e-176, PFam score of 599.0
  misc_feature (1)...(1186): Xaa = X or * as defined in Table 2
MKAEIKMFFETNENKDTTYQNLWDTFKAVCRGKFIALNAHKRKQERSKIDTLTSPLKELEKQEQTHSKASRRQEITKIRAELKEIETQKTLQKINESRSWIFESINKIDRPLARLIKKKREKNQIDAIKNDKGDIITDPTEIQTTIREYYKHLYANKLENLEEMDKFLDTYTLPRLNKEEVESLNRPITGAEIVAIINSLPTKKSPGPDGFTAEFYQRYKEELVPFLLKLFQSIEKDGILPNSFYEASIILIPKPGRDTTKKENFRPISLMNIDAKILNKILANRIQQHIKKLIHHDQVGFIPGMQGWFNIRKSINVIQHINRAKDKNHMIISIDAEKAFDKIQQPFMLKTLNKLGIDGTYFKIIRAIYDKPTASVILNGQKLEAFPLKTGTRQGCPLSPLLFNRVLEVLARAIRQEKEIKGIQLGKEEVKLSLFADDMIVYLENPIISAQNLLKLISNFSKVSGYKINVQKSQAFLYTNNRQTESQIMSELPFTIASKRIKYLGIQLTRDVKDLFKENYKPLLKEIKEDANKWKNIPCSWVGRINIVKMTILPKVVRRFQYAPPLVPTXFFETNENKDTTYQNLWDTFKAVCRGKFIALNAHKRKQERSKIDTLTSPLKELEKQEQTHSKASRRQEITKIRAELKEIETQKTLQKINESRSWIFESINKIDRPLARLIKKKREKNQIDAIKNDKGDIITDPTEIQTTIREYYKHLYANKLENLEEMDKFLDTYTLPRLNKEEVESLNRPITGAEIVAIINSLPTKKSPGPDGFTAEFYQRYKEELVPFLLKLFQSIEKDGILPNSFYEASIILIPKPGRDTTKKENFRPISLMNIDAKILNKILANRIQQHIKKLIHHDQVGFIPGMQGWFNIRKSINVIQHINRAKDKNHMIISIDAEKAFDKIQQPFMLKTLNKLGIDGTYFKIIRAIYDKPTASVILNGQKLEAFPLKTGTRQGCPLSPLLFNRVLEVLARAIRQEKEIKGIQLGKEEVKLSLFADDMIVYLENPIISAQNLLKLISNFSKVSGYKINVQKSQAFLYTNNRQTESQIMSELPFTIASKRIKYLGIQLTRDVKDLFKENYKPLLKEIKEDANKWKNIPCSWVGRINIVKMTILPKSEKVSVCPSLGAHVIFKPYKDWPVCARTLTPARSPNLIKNRACHPSLLSKLFLDQLIILSYSPQKASL

SEQ ID NO: 39491 - protein, 470 aa, Homo sapiens
  DOMAIN (158)..(208): Sugar transport proteins domain identified by eMATRIX, accession number BL00216B, p-value=7.268e-11, raw score of 27.64
MSLRLLIGAWGNKHTRAKSPKRCPPSAKVLERTIRVPFNNALAGPPPPSGVGWNAQDRSATSQQPAGTWGHRADAGSDPHRAYRPEKAASQHQETVFHRPLFGRKNVLFATMAVQTGFSFLQIFSISWEMFTVLFVIVGMGQISNYVVAFILDYYFLSIGLVMLGKFGITSAFSMLYVFTAELYPTLVRNMAVGVTSTASRVGSIIAPYFVYLEIQTTIREYYKHLYTNKLENLEEMDKFLDTYSLPRLNQEEVESLIRPITGSEIEAVVNSPPTKNSPGPDRFTAKFYQRYRGAGLPSSPPTSLHPPSHPVFPEVWSLPFPRTGLQNWLCVSQQLSSQKGYSIRSSLLIRRSTVVLNTEIRKKCLLCTSSTKEPLCDAEDNVLENSPVLETIARFMRPPVTVLKCWPQATPNTALQKKNNSGQEVSALLLRHNPRINLRLYPEQDCLAWGSCMGFRRKGNESSKTVWPD

SEQ ID NO: 39492 - protein, 1332 aa, Homo sapiens
  DOMAIN (480)..(526): kw TRANSCRIPTASE REVERSE II ORF2 domain identified by eMATRIX, accession number DM01354O, p-value=1.000e-40, raw score of 8.73
  DOMAIN (513)..(788): Reverse transcriptase domain identified by PFam, accession name rvt, E-value=1.4e-76, PFam score of 267.8
MAFVPPIMGGCTKRCHLGSREHPSPDAKSASTLILDFTVSRTPFYKKKILKHKKAKQPDSNQTSSKLVELGIKGPPAPELKFFTTAVKCINRDSIGSLPMPAVTTTWLPLRLLKPLGSIIGRWQSQPGLYPSLQDDKFPQTVDSSRGAIQGPGSGVKHFNCLVFYCTAAELELKPHAHEKYFQSTGDVYLRPKGSSVGLWSKEGSLQTPELCRKSGQAAGPSHGLCLLQYYGDGQPLQCEPDLDFMREGGVGGREGGELEGVGGGGKPPDAVELLRGLCTKKVRAQNKEDAMCVTLVAGGQTRKTDTTVSRGKFIALNVHKRKQERSKIDTLTSQLKELEKQEQTQSKASRRQEITKIRAELKEIETQKTLQKINESRSWFFERINKIDRPLARLIKKKRKKNQKDAIKNDKGDITTAPTEIQTAIREYYKDLYANKLENLEEMDKFLDTYALPRLNQEEVESLNRPITGAGIVAIINSLQTKKSPEPDGFTAEFYQRYKEELVPFLLKLFQSIEKEGILPNSFDEASIILIPKPGRDTTKKENFRPISLINIDAKILNKILANQIQQHIKKLIHHDQVGFIPPMQGWFNIRKSINVIQHINRTKDKNHMIISIDAEKAFDIIQQPFMLKTLNKLGIDGKYLKIIRAIYDKPTANIILNGQKLEAFPLKTGTRQGCPLSPLLFNIVLEVLGRAIRQEKEIKGIQLGKEEVKLSLFADDMIVYLENPIVSAQNLLKLISNFSKVSEYKINVQKSQGFLYTNNRQTESQIVSELPFTIASKRIKYLGIQLTRDVKDLFKENYKPLLKEIKEDTNKWKNIQCSWVGRISIMKMAILPKVIYRFNAIPIKLPVTFFTELEKTTLKFIRNQKRARIAKSILSQKNKAGGITLPDFKLYYKATVTKTAWYWYQNRDIDQWNRTEPSEIMPHIYNYLIFDKPEKNKQWGKDSLFNKWCWENWLAICRKLKLDPFLTPYTKINSRWIKDLNVRSKTIKTLEENLGITIQDIGMGKDFMSKTPKAMATKAKTDKWDLIKLKSFCTAKETTIRVNRQPTKWEKIFTTYSSDKGLISRIYNELKQIYKKKTNNPIKKWAKDMNRHFSKEDIYAAKKHMKKCSPSLAIREMQIKTTMRYHLTPVRMAIIQKSGNNSWEHPITLISEVRTIYLVEIPFVIEDESCSANYFPAAGQQEYSGPPLSLPLSKISPWLKARQFNRNPTEQPLQSSLSGLPGIFTPTGKIARTHKAMLRSIGRQAQIVKVKQISLMGWTQASSRQVCNLGTVALPANEVLAQDPVHAKGTAKFSNQARTKSGTTLTLPSLHLPPQVIISTVELNLAIFRK

SEQ ID NO: 39493 - protein, 917 aa, Homo sapiens; identical to SEQ ID NO: 34351
  DOMAIN (204)..(250): kw TRANSCRIPTASE REVERSE II ORF2 domain identified by eMATRIX, accession number DM01354O, p-value=1.000e-40, raw score of 8.73
  DOMAIN (237)..(512): Reverse transcriptase domain identified by PFam, accession name rvt, E-value=5.3e-86, PFam score of 299.1

SEQ ID NO: 39494 - protein, 750 aa, Homo sapiens
  DOMAIN (80)..(135): kw TRANSCRIPTASE REVERSE II ORF2 domain identified by eMATRIX, accession number DM01354Q, p-value=1.000e-40, raw score of 9.23
  DOMAIN (37)..(308): Reverse transcriptase domain identified by PFam, accession name rvt, E-value=3.1e-70, PFam score of 246.7
MGKFLDTHTLARLNQEEIESLNRPITGSEIVAIINTLPTKKSPGPDGFTAKFYQSRAETQPKKNFRPISLMNIDAKILNKILANQIQQHIKKLIHHDQVGFIPGMQGWFNICKSINVIQHINRTKDKNHMIISIDAEKAFDKIQQPFMLKTLNKLGTDGTYLKIIRAIYDKPTANIILNGQKLEAFPLKTGTRQGCPLSPLLFNIMLEVLARAISQEKEIKGIQLGKEEVKLSLFADDMIVYLDNPVVSAQNLLKLISNFSKVSGYKINVQKSQAFLYTNNRQTESQIMRELPFTIASKRIKYLGIQLTRDVKDLFKENYEPLLNEIKEDTNKWKNVPCSWVGRINIVKMAIVPKVIYRFNVIPILLPMTFFTELEKTTLKFIWNQKRARIAKSILSQKNKAGGITLPDFKLYYKATVTKTAWYWYQNRDIYQWNRTQPSEITPHIYTYLIFDKPEKNKQWGKDSLFNKWCWENWLAICRKLKLDPFLTPYTKINSRWIKDLNVIPKTIKTLEENLGITIQDIGMGQDFMSKTPKAMATKAKIDKWDLIKLKSFCTAKETTIRVNRQPTKWEKIFATYSSDKGLISRMYNELKQIYKKKTNNSIKKWAKDMNRHFSKEDIYAAKKHMKKCSPSLAIREMQIKTTMRYHLTPVRMVIIKKSGNNSLGDKARPCLKKRKEKKMFLTVGTKSLEEKAEGIRGTSSSLVKEYLKVSKILPALEYWTPSSSVLELGLALLAPQPADGRLWDLVIL

SEQ ID NO: 39495 - protein, 712 aa, Homo sapiens
  DOMAIN (60)..(106): kw TRANSCRIPTASE REVERSE II ORF2 domain identified by eMATRIX, accession number DM01354O, p-value=1.000e-40, raw score of 8.73
  DOMAIN (93)..(368): Reverse transcriptase domain identified by PFam, accession name rvt, E-value=1.5e-79, PFam score of 277.7
RQWAGVVGRCSHLASWVSSNTSETGAIRSSTEVDAPDDSMLLSTCDIDLTAARRAWLGCLPTKKSPGPDGFTAEFYQRCKEELVPFLLKLFQSIEKEGILPNLFDEASIILIPKRGRDTTKKENFRPISLMNIDAKILNKILANRNQQHIKKLIHHDQVGFIPGMQGWFNICKSINVIQHINRTKDKNHMIISIDAEKAFDKIQQPFMLKTLNKLGIDGTYLKIIRAIYDKPTANIILNGQKLEAFPLKTGTRQGCPLSPLLFNIVLEVLARAIRQEKEIKGIQLGKEEVKLSLFADDMIVYLENPIVSAQNLLKLISNFSKVSAYKINVQKSQAFLYTNNRQTESQIMSVFPFTIASKRIKYLGIQLARNAKDLFKENYKPLLNEIKEDTKKWKNIPCSWVGRINIVKMAILPKVIYRFNAIPIKLPMTFFTELEKTTLKFIWNQKRARIAKSILSQKNKAGGITLPDFKLHYKITVTKTAWYWYQNRDIDQWNRTEPSEITPHIYNYLIFDKPEKNKQWGKDSLFNKWCWENWLAICRKLKLDPFLTPYTKIHPRWIKDLNVRPKTIKTLEENLGNTIQDIGMGKDFMSKTPKAMAAKAKIDKWDLIQLKSFCTAKETTIRVNRQPTKWEKIFATYSSDKGLISRIYKELKQIYKKKTNNPIKKWAKDMNRHFSKEDIYAANKHMKKCSPSLAIREMQIKTTMRYHLTPV

SEQ ID NO: 39496 - protein, 743 aa, Homo sapiens
  DOMAIN (246)..(291): kw TRANSCRIPTASE REVERSE II ORF2 domain identified by eMATRIX, accession number DM01354N, p-value=1.000e-40, raw score of 13.17
  DOMAIN (330)..(605): Reverse transcriptase domain identified by PFam, accession name rvt, E-value=5.1e-89, PFam score of 309.1
MGKKQNRKTGNSKTQSASPPPKERSSSPATEQSWMENDFDELREEGFRRSNYSELREDIQTKGKEVQNFEKNLEECITRITNTEKCLKELMELKTKARELREECRSLRSRCDQLEERVSAMEDEMNEMKREGKFREKRIKRNEQSLQEIWDYVKRPNLRLIGVPESDVENGTKLENTLQDIIQENFPNLARQANVQIQEIQRTPQRYSSRRATPRHIIVRFTKVEMKEKMLRAAREKEIQTTIREYYKHLYANKLENLEEMDTFLDTYTLPRLNQEEVESLNRPITGSEIVAIINSLPTKKSPGPDGFTAEFYQRYKEELVPFLLKLFQSIEKEGILPNSFYEASIILIPKPGRDTTKKENFRPISLMNIDAKILNKILANRIQQHIKKLIHHDQVGFIPGMQGWFNIRKSINVIQHINRAKDKNHMIISIDAEKAFDKIQQPFMLKTLNKLGIDGTYFKIIRAIYDKPTANIILNGQKLEAFPLKTGTRQGCPLSPLLFNIVLEVLARAIRQEKEIKGIQLGKEEVKLSLFADDMIVYLENPIVSAQNLLKLISNFSKVSGYKINVQKSQAFLYTNNRQTESQIMGELPFTIASKRIKYLGIQLIRDVKDLFKENYKPLLKEIKEDTNKWKNIPCSWVGRINIVKMAILPKIGKTTLKFIWNKKSRIAKSILSQKNKAGGITLLTQLYYKATVTKTAWYWYQNRDIDQWNRTEPSEIMPHIYNYLIFDKPEKNKQWGKDSLL

SEQ ID NO: 39497 - protein, 889 aa, Homo sapiens
  DOMAIN (173)..(219): kw TRANSCRIPTASE REVERSE II ORF2 domain identified by eMATRIX, accession number DM01354O, p-value=1.000e-40, raw score of 8.73
  DOMAIN (206)..(481): Reverse transcriptase domain identified by PFam, accession name rvt, E-value=5e-86, PFam score of 299.2
MNEMKREEKFREKRIKRNEQSLQEIWDYVKRPNLCLIGVPESDGENGTKLENTLQDIIQENFPNLARQADIQIQEIQRTPQRYSSRRATPRHIIVRVTKVEMKEEMLRAAREKEIQTTIREYYKHLYANKLESLEEMDKFLNTYTFPRLNHVEVESLNRPITGSEIEAIINSLPTKKSPGPDGFTAEFYQRYKEEQVPFILKLFQSIEKEGILPNSFYEASIILIPKPGRDTTKKENFRPISLMNIDAKILNKILANRIQEHIKKLIHHDQVGFIPGMQSWFNIQKSINVIQHINRTKDKNRMIISIDAEKAFDKIQQPFMLKTLNKLGIDGTYLKIVRAIYDKPTANIILNGQKLEAFPLKTGTRQGCPLSPLLFNIVLEVLARAIRQEKEIKGIQLGKEEVKLSLFADDMTLYLENPIVSAQNLLKLISNFSNISGYKINVQKSQAFLYTNNRQTERQIMSEFPFTIASKGIKYLGIQLTRYVKDLFKKNYKPLLNEIKEDTNKWSNIPCSWVGRINIVKMAILPKVIYRFNAIPIKLPMTFFTELEKTTLKFIWNQKRARITKSILSQKNKAGGITLPDFKLYYKATVTKTAWYWYQNRDIDQWNRTETSEIMPRIYNYLIFDKPEKNKPWGKDSLFNKWCWENWLAICRKLKLDPFLTRYTKINSRWIKHLHVRPKTIKTLEENLGITIQGIGMGKDFMSKTPKAMETKAKIDKWDLIKLKSFCTAKETTIRVNRQPTKWEKIFASYSSDKGLISRIYNELRQIYKKKSNNPIKKWVKDMNRHFSKEDIYAAKKHMKKCSSSLAIREMQIKTTMRYHLTPVRMAIIKKSGNDRCWRGCGEIGTLLHCWWDCKLVQPLWKSLCQAGSRIFFVSEVEAVEVTSAIGQ

SEQ ID NO: 39498 - protein, 1010 aa, Homo sapiens
  DOMAIN (233)..(279): kw TRANSCRIPTASE REVERSE II ORF2 domain identified by eMATRIX, accession number DM01354O, p-value=1.000e-40, raw score of 8.73
  DOMAIN (267)..(541): Reverse transcriptase domain identified by PFam, accession name rvt, E-value=2.6e-73, PFam score of 257.0
  misc_feature (1)...(1010): Xaa = X or * as defined in Table 2
MADMLTWESCLEESLQEESPLVTHCGPSCCISGQSPPSSARPSSVSSAISVLMLPQNRKLPPAWTSPGIFPTDLVVYSMSLPHALARYNCDVCKSMLPPRLYAPEEKARTSPLCGTWYSPSLPLCGAWCKKNEKKRERERERKRQREDILSGASSYKDTIHIQLRPPPYDVLQQIQTTIREYFKHLYANKLENLEEMDKLLDTYTLPRLNQEEVESLNRLITGSEIVAIINSLPTKKSPRPDGFTAEFYQRYKEELVPFLLKLFQSIEKGGLLPNSFYEASIILMPKLGRDTTKKENFRPISLMNIDAKILNKILANQIQQHIKKLIQHDQVGFIPGMQGWFNICKSINVIQHINRTKDKNHMTISIDAGKAFDKIQQLFMLKTLNKLGIDGTYLKIIRAIYDKPTANIILNGEKLEAFPLKTGTRQGCPLSPLLFNIVLEVLARAIRQEKEIKGIRLRKEEVKLSLFADDMIVYLENPIISAQNLLKLISNFSKISGYKINVQKSQAFLYTNNRQTESQIMSELLFTIASKRIKYLRIQLTKDVKDLFKKNYKPLLNEIKEDTKKWKNIPCSWVGRINIVKMAIRPKVIYRFNAIPIKLPMTFFTELEKTTFKFIWNQKRARIAKSILSQKNKAGGITLPDFKLYYKATVTKTAWYWYQNKDIDQWNRTEPSEIMPHIYNYLIFDKPDKNKQWGKDSLFNKWGWENWLAICRKLKLDPFLTPYTKINSRWIKDLNVRPKTIKTLEKNLGITIQDIGMGKDFMSKTPKAMATKAKIDKWDLIKLKSFCTAKETTIRVNRQPTKWEKIFATYSSDKGLISRIYNELKQIYKKKTNNPIKKWVKDMNRHFSKEDICAAKKHMKKCSSSLAIREMQIKTTMRYHLTPVRMAIIKKSGNNRLFTVAKTWIQPKCASMIHWMKKVXNIYTMKYNPAIKKEFTSFAAIWMELKATFLSKLMQEQKAKYCMFSLGFLLTHQLQLLKFMKMSTSQVPLVTLKQRRESQEPGKTKKHIY

SEQ ID NO: 39499 - protein, 316 aa, Homo sapiens
  DOMAIN (181)..(226): kw TRANSCRIPTASE REVERSE II ORF2 domain identified by eMATRIX, accession number DM01354N, p-value=1.000e-40, raw score of 13.17
MQAICTGQARALICMGGNFALAMPDREASAVPLTQLDLAVHVATKLNRSHLLTARHSYILPVLGRSEIDMQKNGAQAVTVEDSMSMIHASRGVLKPAGVMLKSECAVVAGIAQAALPQSVVAWEYLVEDYDRIRNDIEAVLPEFADYNQRIRHPGGFHLINAAAERRWMTPSEIQTTIREYYKHLYTNKLENLEEMDKFLDTYSLPRLNQEEVESLIRPITGSEIEAVVNSPPTKNSPGPDRFTAKFYQRYKEELVPFFLKLFLAAVPAPSSHGPFCCSRKALRGSKTGSAYPSSSALRRVTVSEVVCLFAEAQLF

SEQ ID NO: 39500 - protein, 1156 aa, Homo sapiens
  DOMAIN (514)..(539): 7 kw REVERSE TRANSCRIPTASE RNA POLYMERASE domain identified by eMATRIX, accession number DM00895E, p-value=3.333e-11, raw score of 15.72
  DOMAIN (486)..(761): Reverse transcriptase domain identified by PFam, accession name rvt, E-value=2.8e-87, PFam score of 303.4
MASVSSATFSGHGARSLLQFLRLVGQLKRVPRTGWVYRNVQRPESVSDHMYRMAVMAMVIKDDRLNKDRCVRLALVHDMAECIVGDIAPADNIPKEEKHRREEGNKCHKQKAMGKHLKEPHVLGQETKGLESTDVLLPLPAAGQDLGREKKIREEAMKQITQLLPEDLRKELYELWEDLEFESPSCLDSLSLCCSLKPQSESSPVLPEGCETLIQRLCAVGTGVTAALATRLCRASGLPAPHQWASELQRSRKKEEEEGKTSKDFQCFKKMLDFVVRHYQAFSKFGFQITTAKRKQERSKIDTLTSQLKELEKQEQTHSKASRRQEITKIRAELKEIETKKTLQKINESRSWFFERINKIDRPLARLIKRKREKNQIDTIKNDKGDITTDPTEIQTTIREYYKHLYANKLENLEEMDTFLDTYTLPRLNQEEVESLNRPITGSEIVAIINSLPTKKSPGPDGFTAEFYQRYKEELVPFLLKLFQSIEKEGILPNSFYEASIILIPKPGRDTTKKENFRPISLMNIDAKILNKILANRIQQHIKKLIHHDQVGFIPGMQGWFNIRKSINVIQHINRAKDKNHMIISIDAEKAFDKIQQPFMLKTLNKLGIDGTYFKIIRAIYDKPTANIILNGQKLEAFPLKTGTRQGCPLSPLLFNIVLEVLARAIRQEKEIKGIQLGKEEVKLSLFADDMIVYLENLIVSAQNLLKLISNFSKVSGYKIDVQKSQAFLYTNNRQTESQIMGELPFTIASKRIKYLGIQLTRDVKDLFKENYKPLLKEIKEDTNKWKNIPCSWVGRINIVKMAILPKVIYRFNAIPIKLPMTFFTELEKTTLKFIWNQKRARIAKSILSQKNKAGGITLPDFKLYYKATVTKTAWYWYQNRDIDQWNRTEPSEIMPHIYNYLIFDKPEKNKQWGKDSLFNKWCWENWLAICRKLKLDPFLTPYTKINSRWIKDLNVRPKTIKTLEENLGITIQDIGVGKDFMSKTPKAMATKAKIDKWDLIKLKSFCTAKETTMRVNRQPTTWEKIFTTYSSDKGLISRIYNELKQIYKKKTNNPIKKWAKDMNRHFSKEDIYAAKKHMKKCSSSLAIREMQIKTTMRYHLTPVTVQVPGTVEFPGQIAQSIPDLFRSFASSVLKVPCITGGPLIGPREDQRAGIL

SEQ ID NO: 39501 - protein, 1300 aa, Homo sapiens
  DOMAIN (627)..(652): 7 kw REVERSE TRANSCRIPTASE RNA POLYMERASE domain identified by eMATRIX, accession number DM00895E, p-value=3.333e-11, raw score of 15.72
  DOMAIN (598)..(873): Reverse transcriptase domain identified by PFam, accession name rvt, E-value=1.6e-88, PFam score of 307.5
MAAWNLLLKSYAYWGGLRKEDFHCLDRKTLRTVSFLAALLSYESIGGKGKLTTRKDIYTENPSVHHHHQRPKVDKTTKMGKKQNRKTGNSKMQSASPPPKERSSSPATEQSWMENDFEELREEGFRRSNYSELREDIQTKGKEVENFEKNLEECITRITNTEKCLKELMELKTKARELREECRSLRSRCDQLEERVSAMEDEMNEMKREGKFRDKRIKRNEQSLQEIWDYVKRPNLRLIGVPESDVENGTKLENTLQDIIQENFPSLARQANVQIQEIQRTPQRYSSRRATPRHIIVRFTKVEMKEKMLRAAREKGRVTLKGKPIRLTADLSAETLQARREWGPIFNILKEKNFQPRISYPAKLSFISEGEIKYFIDKQMLRDFVTTRPALKELLKEALNMERNNRRKQERSKIDTLTSQLKELEKQEQTHSKASRRQEITKIRAELKEIETQKTLQKINESRSWFFERINKIDRPLARLIKKKREKNQIDTIKNDKGDITTDPTEIQTTIREYYKHLYANKLENLEEMDTFLDTYTLPRLNQEEVESLNRPITGSEIVAIINSLPTKKSPGPDGFTAEFYQRYKEELVPFLLKLFQSIEKEGILPNSFYEASIILIPKPGRDTTKKENFRPISLMNIDAKILNKILANRIQQHIKKLIHHDQVGFIPGMQGWFNIRKSINVIQHINRAKDKNHMIISIDAEKAFDKIQQPFMLKTLNKLGIDGKYFKIIRAIYDKPTANIILNGQKLEAFPLKTGTRQGCPLSPLLFNIVLEVLARAIKQEKEIKGIQLGKEEVKLSVFADDMIVYLENPIVSAQNLLKLISNFSKVSGYKINVQKSQAFLYTNNRQTESQIMSELPFTIASKRIKYLGIQLTRDVKDLFKENYKPLLKEIKEDTNKWKNIPCSWVGRINIVKMAILPKVIYRFNAIPIKLPMTFFTELEKTTLKFIWNQKRARIAKSILSQKNKAGGITLPDFKLYYKATVTKTAWYWYQNRDIDQWNRTEPSEIMPHIYTILIFDKPEKNKHGGKASLFIKWCWENWLAICRKLKLDPFLTPYTKINSRWIKDLNVRPKTIKTLEENLGITIQDIGVGKDFMSKTPKVMATKAKIDKWDLIKLKSFCTAKETTIRVNRQPTTWEKIFATYSSDKGLISRIYNELKQIYKKKTNNPIKKWAKDMNRHFSKEDIYAAKKHMKKCSSSLAIREMQIKTTMRYHLTPVRMAIIQKSGNNRDNTKEALLCNNLVAEVLEAKQAQKLQGKAAVLSLSKIYAITETNAETPNRKMKIKLKRPMTKLHPSIQMLV

SEQ ID NO: 39502 - protein, 1065 aa, Homo sapiens
  DOMAIN (279)..(324): kw TRANSCRIPTASE REVERSE II ORF2 domain identified by eMATRIX, accession number DM01354N, p-value=1.000e-40, raw score of 13.17
  DOMAIN (363)..(638): Reverse transcriptase domain identified by PFam, accession name rvt, E-value=1.4e-88, PFam score of 307.7
FPSFKIAIPKNDHGHEQHFWGYRVPNNAMEDTAYQLVHQYPTRMQARRCRIALSQWSSSHPLPAKRDAPVTSGAHPRRRLSSRRYPPRQSRQARLPTWWPAVSEAAVPQPLLSCYSAPSAMFPVSPGARWGTTTGWKFFETNENKDTTYQNLWDAFKAVCRGKFIPLNAHKRKQERSKIDTLTSQLKELEKQEQTHSKASRRQEITKIRAELKEIETQKTLQKINESRSWFFERINKIDRPLARLIKKKREKNQIDTIKNDKGDITTNPTEIQTTIREYYKHLYAKKLENLEEMDTFLDTYTLPRLNQEEVESLNRPITGAEIVAIFNSLPTKKSPGPDGFTAEFYQRYKEELVPFLLKIFQSIEKEGILPNSFYEASIILIPKPGRDTTKKENFRPISLMNIDAKILNKILANRIQQHIKKLIHHDQVGFIPGMQGWFNIRKSINVIQHINRAKDKNHMIISIDAEKAFDKIQQPFMLKTLNKLGIDGTYFKIIRAIYDKPTANIILNGQKLEAFPLKTGTRQGCPLSPLLFNIVLEVLARAIRQEKEIKGIQLGKEEVKLSLFADDMIVYLENPIISAQNLLKLISNFSKVSGYKINVQKSQAFLYTNNRQTESQIMSELPFTIASKRIKYLGIQLTRDVKDLFKENYKPLLKEIKEDTNKWKNIPCSWVGRINIVKMAILPKVIYRFNAIPIKLPMTFFTELEKTTLKFIWNQKRARIAKSILSQKNKAGGITLPDFKLYYKATVTKTAWYWYQNRDIDQWNRTEPSEITPHTYNYLIFDKPEKNKQWGKDSLFNKWCWENWLAICRKLKLDPFLTPYTKINSRWIKDLNVRPKTIKTLEENLGSTIQDIGVGKDFMSKTPKAMATKAKIDKWDLIKLKSFCTAKETTIRVNRQPTTWEKIFATYSSDKRLISRIYNELKQIYKKKTNNPIKKWAKDMNRHFSKEDIYAAKKHMKKCSSSLAIREMQIKTTMRYHLTPVRMAIIKKSGNNSQRGFYDSIKSPTKESYAAIKRNEIMSFAGYGWSWTLLSLATNTGTENQTLHIFTYKWELNNESTWIHEGMG

SEQ ID NO: 39503 - protein, 1052 aa, Homo sapiens; identical to SEQ ID NO: 34359
  DOMAIN (383)..(408): 7 kw REVERSE TRANSCRIPTASE RNA POLYMERASE domain identified by eMATRIX, accession number DM00895E, p-value=3.333e-11, raw score of 15.72
  DOMAIN (354)..(629): Reverse transcriptase domain identified by PFam, accession name rvt, E-value=4.9e-88, PFam score of 305.9

SEQ ID NO: 39504 - protein, 1095 aa, Homo sapiens
  DOMAIN (122)..(162): G-protein coupled receptors proteins domain identified by eMATRIX, accession number BL00237A, p-value=7.097e-15, raw score of 27.68
  DOMAIN (328)..(603): Reverse transcriptase domain identified by PFam, accession name rvt, E-value=1.5e-85, PFam score of 297.6
MKVASQSSLLSDSVDQVNDSLVTAEAISWNESTSETNNSMVTEFIFLGLSDSQELQTFLFMLFFVFYGGIVFGNLLIVITVVSDSHLHSPMYFLLANLSLIDLSLSSVTAPKMITDFFSQRKVISFKGCLVQIFLLHFFGGSEMVILIAMGFDRYIAICKPLHYTTIMCGNACVGIMAVAWGIGFLHSVSQLAFAVHLPFCGPNEVDSFYCDLPRVIKLACTDTYRLDIMVIANSEIQTTIREYYKHLYANKLENLEEMDKFLDTYTLPRLNQEEVESLNRPITEAEIVAIINSLPTKKSPGPDGFTAEFYQRYKEELVPFLLKLFQSIQKEGILPNSFYEASIILIPKPGRDTTKKENFRPISLMNIDAKILNKILAKRIQQHIKKLIHQDQVGFIPGMQGWFNICKSINVIQHINRAKDKNHMIISIDAEKAFDKIQQRFMLKTLNKLGIDGTYFKIIRPVYDKPTANIILNGQKLEAFPLKTGTRQGCPLSPLLFNIVLEVLPRATRQEKEIKGIQLGKEEVKLSLFADDMIVYLENPIVSAQNLLKLISNFSKVSGYKINVQKSQAFLYTNNRQTESQIMSELPFTIASKRIKYLGIQLTRDVKDLFKENYKSLLKEIKEDTNKWKNIPCSWVGRINIVKMAILPKVIYRFNAIPIKLPMTFFTELEKTTLKFIWNQKRACIAKSILSQKNKAGGITLPDFKLYDKATVTKTAWYWYQNRDIDQWNRTEPSEIMPHIYNYLIFDKPEKNKQWGKDSLFNKWCWENWLAICRKLKLDPFLTPYTKINSRWIKDLNVRPKTIKTLEENLGFTIQDTGMGKDFMSKTPREALLCIVGENTKWSKDPSALSTPPTSCSRPQRRNKSVSHGSYPHPLLFTMNDRVNSVKTTILPKATYKFNAIPIKIPPSFFTELEKTRLKFTWNQKRAHTAKARLSKKNKSRGITLLDFKLYYKAIVTKTAWYWYKNRHIDQWNRIENPEIKPNTFSQLIFDKASKNIKWGKDTLFNKWCWYNWQATCRRMQLDPHLSPYKQINSRWFTDLNLRPETIKILEDKIGKTLLDIGLGKDFTIKNPKANTTKINRWDLIKLKAFCTSK

SEQ ID NO: 39505 - protein, 261 aa, Homo sapiens
  DOMAIN (108)..(153): kw TRANSCRIPTASE REVERSE II ORF2 domain identified by eMATRIX, accession number DM01354N, p-value=1.000e-40, raw score of 13.17
MGRNQLKKPENSKNQNASSTPKVHNSSPAREQNWTENEFDELTEVGFRRWVITNSSELKEHALTQCREARNLEKSYSKIGDDYFIRGTDINTGTQEAWKKIQTTIRECYKHLYANKLENLEEMDTFLDTYTLPRLNQEEVESLNRPITGSEIEAIINSLPTKKSPGPDGFTAKFYQRAIRQEKEIKGIQLGKEEVKLSLFADDMIRIKYLGIQLIRDMKDLFKENYKPLLNEIKEDTNKWKNIPCSWVGRINIVKMAILPK

SEQ ID NO: 39506 - protein, 935 aa, Homo sapiens
  DOMAIN (128)..(173): kw TRANSCRIPTASE REVERSE II ORF2 domain identified by eMATRIX, accession number DM01354N, p-value=1.000e-40, raw score of 13.17
  DOMAIN (215)..(488): Reverse transcriptase domain identified by PFam, accession name rvt, E-value=4.5e-83, PFam score of 289.4
  misc_feature (1)...(935): Xaa = X or * as defined in Table 2
RSFPRSRPSPFLLLSRYLRIHMVFSVLPFGLQNPKYLLSGSLQEKFRTPGINSHKTLDPNRVIIKVRRRLEKEKALRAYVGKSEVRNMHLRERCKLXKKREKNQIDTIKNDKGDITTDATEIQTTIREYYKHLYANKLENLEEMDKFLDTYILPRLNQEEVESLNRPITGSEIEAIINSLPTKRSPGPDGFTAEFYQTYKEELVPFPLKLFQSTEKEGILPNSFYEASIILIPKPGRDTTKKENFRPISLMNIDAKILNKILANRIQQHIKKLIHYDQVGFIPGMQGWFNKRKSINVIQHINRTNDKNHMIISIDAEKAFDKIQQPFMLKTLNKLGIDGTYLKVIRAIYDKPTANIILNGQKLEAFPLKTDTRQGCPLSPLLFNIVLEVLARAVRQEKEIEGIQLGKEEVKLSLFADDMIVYLENPIVSAQNLLKLISNFSKVSGYKINIQKSQAFLYTNNRQTESQIMSELPFTTASKKIKYLGIQLTRDVKDLFKENYKPLLNEIKEDTNKWKNIPCSWVGRINIMKMAILPKVICRFNAIPIKLPMPFFTELETTTLKFIWNQKRARIAKSILSQKNKAGGITLPDFKLYYKPTVTKTAWYWHQNRAIEQWNRTEPSEITTHIYNYLTFDKPEKNKQWGKDSLFNKWCWENWLAICRKLKLDPFLTPYTKISSKWIKDLNVRPKTIKTQEENLGITIQDIGMGKDFMSKTQKAMATKAKIDKGDLIKLKSFCTAKETSSSVNRQPTKWEKIFATYSSDKGLISRIYNELKQIHKKKTNNPIKKWAKDMNRHFSKEDIYAAKKHMKNCSPSLAIREMQIKTTMRYHLTPLRMAIIKKSGNNRRTATLSLLPAIRHEREAFHQREEEKEGGRILLLQNRVILCSCSLCPHLSPASKPKHRGLDRFKSQSTSMFSGVLSVRNSLHAPQVVSWLQR

SEQ ID NO: 39507 - protein, 1784 aa, Homo sapiens
  DOMAIN (297)..(338): kw TRANSCRIPTASE REVERSE II ORF2 domain identified by eMATRIX, accession number DM01354I, p-value=1.000e-40, raw score of 15.55
  DOMAIN (1246)..(1612): Voltage gated chloride channels domain identified by PFam, accession name voltage_CLC, E-value=1.1e-169, PFam score of 576.2
MGKKQNRKTGNSKMQSASPPPKERSSSPATDQSWMENDFDELREEGFRRSNYSELREDIQTKGKEVENFEKNLEECITRITNTEKCLKELMELKTKARELREECRSLRSRCDQLEERVSAMEDEMNEMKQEGKIKRDKEGHYIMVKGSIQQEELTILNIYAPNTGAPRFIKQVLSDLQRDLDSHTLIMGDFNTSLLTLDRSMRQKVNKDTQELNSSLHQADLIDIYRTLHPKSIEYTFFSAPHHTYSKIDHIVGSKALLSKCKRTEIITNYLSDHSAIKLELRIKNLTQSRSTTWKLNNLLLNDYWVHNEMKAEIKMFFETNENKDTTYQNLWDAFKAVCRGKFIALNAHKRKQERSKIDTLTSQLKELEKQEQTHSKASRRQEITKIRAELKEIETQKTLQKINESRSWFFERINKIDRPLARLIKKKREENQIDTIKNDKGDITTDPTEIQTTIREYYKHLYANKPENLEEMDKFLDTYTLPRLKQEEVESLNRPITGAEIVAIINSLPTKKSPGPDGFTAEFYQRYKEELVPFLLKLFQSIEKEGILPNSFYEASIILIPKPGRDTTKKENFRPISLMNIDAKILNKILANRIQQHIKKLIHHDQVGFIPGMQGWFNILLDVLARAIRQEKEIKGIQLGKEEVKLSLFADDMIVYLENPIVSAENLLKLISNFSKVSGYKINVQKSQAFLYTNNRQTDSQIMSEIPFTIASKRIKYLGIQLTRDVKDLFKENYKPLLKEIKEDTNKWKNIPCSWVGRINIMKMAILPKVIYRFNAIPIKLPMPFFTELEKTTLKFIWNQKKPRIAKSILSQKNKAGGITLPDFKLYYKATVTKTAWYWCQNRDIDQWNRTEPSEITPHIYNYLIFDIPEKNKQWGKDSLFNKWCWENWLAICRKLILDPFLTPYIKINSRWIKDLNVGPKTIKTLEENLGFTIQDIGMGKDFMSKTPKAMATKAKIDKWDLIKLKSFCTAKETTIRVNRQPTKWEKIFATYSSDKGLISRIYNELKQIYKKKTNNPIKKWVKDMNRHFSKEDIYAAKKHMKKCSSSLAIREMQIKTTVRYHLTPVRMAIMKKSGNNRCWRGCGEIGTLLHCWWDCKLVQPLWKSVWRFLRDLELEIPFDPAIPLLGIYPKDYKSCCYKDTCTPLKKHISFHLYQYDTDMIGNAGLVIQQPSILQSEDKSYNGGGIGSSNRIMDFLEEPIPGVGTYDDFNTIDWVREKSRDRDRHREGAFAYIVNYFMYVLWALLFAFLAVSLVKVFAPYACGSGIPEIKTILSGFIIRGYLGKWTLVIKTITLVLAVSSGLSLGKEGPLVHVACCCGNILCHCFNKYRKNEAKRREVLSAAAAAGVSVAFGAPIGGVLFSLEEVSYYFPLKTLWRSFFAALVAAFTLRSINPFGNSRLVLFYVEFHTPWHLFELVPFILLGIFGGLWGALFIRTNIAWCRKRKTTQLGKYPVIEVLVVTAITAILAFPNEYTRMSTSELISELFNDCGLLDSSKLCDYENRFNTSKGGELPDRPAGVGVYSAMWQLALTLILKIVITIFTFGMKIPSGLFIPSMAVGAIAGRLLGVGMEQLAYYHQEWTVFNSWCSQGADCITPGLYAMVGAAACLAKEEFAHKTLAMDVMKPRRNDPLLTVLTQDSMTVEDVETIISETTYSGFPVVVSRESQRLVGFVLRRDLIISIENARKKQDGVVSTSIIYFTEHSPPLPPYTPPTLKLRNILDLSPFTVTDLTPMEIVVDIFRKLGLRQCLVTHNGRLLGIITKKDVLKHIAQMANQDPDSILFN

SEQ ID NO: 39508 - protein, 828 aa, Homo sapiens
  DOMAIN (110)..(151): kw TRANSCRIPTASE REVERSE II ORF2 domain identified by eMATRIX, accession number DM01354I, p-value=1.000e-40, raw score of 15.55
  DOMAIN (283)..(563): Reverse transcriptase domain identified by PFam, accession name rvt, E-value=2.7e-74, PFam score of 260.3
  misc_feature (1)...(828): Xaa = X or * as defined in Table 2
MGDFNTPLSTLDRSTRQEVNKDTQELNSALHQVDLIDIYRTLHPKSTEYTFFSAPHYTYSKIDHIVGSKALLSKCKRTEIITNCLSDHSAIKLELRIKKLTQNHSTTWKLNNLLLNDYWVNNEVKAEIKMFFETNENKDTTYQNLWDTFKAINKIDRPLARLIKKKREKNQIDAIKNDKWDITTDPTEIQTTIREYYKHLYANKLENLEEMDKFLDTYTLPRLNQEEVESLNRPITGSEIEAITNSLTTKKSPGPDGFTAKFYQRYKEELVPFLLKLFQLIEKEGILPNSFYEASIILIPKPGRDTTKQKKNFRPISLMNIDAKILNKILANRIQQHIKKLIHHDQVGFIPGMQGLFNICKSINVIHHINRTKDKNYMIISIXDAEKAFDKIQQPFMLKTLNKLGIDGTYLKIIRAIYDKPTADIILNGQKLEAFSLKTGTRQGCPLSPLLFNIVLEVLARAVRQEKEIKGIRLGKEEVKLSLLADDMIVYLENPIVSAPNLLKLISNFSKVSGYKINVQKSQAFLYTNNRQTESQIMSELPFTIASKRIKYLGIQLTRDMKDLFKENYKPLLNEIKEDTNKWKNIPCSWVGRINIMKMAILPKVIYRFNAIPIKLPMTFFTELEKTTLKFIWNQKRARIAKSILSQKNKAGGITLPDFKLYYKATVTKTAWYWYQNRDIDQWNRTEPSEITPHIYNYLIFDKPEKMSIIDTGGWYEAPVSSFFKEGLCRTGTENQVNRQPPAASPFKVYVSCTGSLHPRPHYFLEHPYPSFLSFSSTSAATAADDIPGAFNELKPHLPKEASKVTDWFENSYVYGRIRRYSLNDVAV

SEQ ID NO: 39509 - protein, 1027 aa, Homo sapiens
  DOMAIN (246)..(291): kw TRANSCRIPTASE REVERSE II ORF2 domain identified by eMATRIX, accession number DM01354N, p-value=1.000e-40, raw score of 13.17
  DOMAIN (330)..(606): Reverse transcriptase domain identified by PFam, accession name rvt, E-value=3.4e-85, PFam score of 296.5
MGKKQNRKTGNSKTQSASPPPKERSSSPATEQSWMENDFDELREEGFRRSNYSELWEDIQTKGKEVENFEKNLEECITRITNTEKCLKELMELKTKARELREECRSLRSRCDQLEERVSAMEDEMNEMKREGKFREKRIKRNEQSLQEIWDYVKRPNLRLIGVPESDVENGTKLENTLQDIIQENFPNLARQANVQIQEIQRTPQRYSSRRATPRHIIVRFTKVEMKEKMLRAAREKEIQTTIREYYKHLYANKLENLEEMDTFLDTYTLPRLNQEEVESLNRPITGSEIVAIINSLPTKKSPGPDGFTAEFYQRYKEELVPFLLKLFQSIEKEGILPNSFYEASIILIPKPGRDTTKKENFRPISLMNIDAKILNKILANRIQQHIKKLIHHDQVGFIPGMQGWFNIRKSINVIQHINRAKDKNHMIISIDAEKAFDKIQQPFMLKTLNKLGIDGTYFKIIRAIYDKPTANIILNGQKLEAFPLKTGTRQGCPLSPLLFNIVLEVLARAIRQEKEIKGIQLGKEEVKLSLFADDMIVYLENPIVSAQNLLKLISNFSKVSGYKINVQKSQAFLYTNNRQTESQIMSELPFTLTTTRIKYLGIQLTRDVKDLFTENYKPLLNEIKEDTNKWKNIPCSWVGRINIVKMAILPKVIYRFNAIPIKLPMTFFTELEKTTLKFIWNQKRARIAKSILRQKNKAGGITLPDFKLYYKATVTKTAWYWYQNRDIDQWNRTEPSEIMPHIYNYLIFDKPEKNKQWGKDSLFNKWCWENWLAICRKLKLDPFLTPYTKINSRWIKDLNVRPKTIKTLEENLGITIQDIGVGKDFMSKTPKAMATKANIDKWDLIKLKSFCTAKETTIRVNRQPTTWEKIFATYSSDKGLISRIYNELKQIYKKKTNNPIKKWAKDMNRHFSKEDIYAAKKHMKKCSSSLAIREMQIKTTMRYHLTPVRMAVIKKSGNNRSHFNMRFGEDRHPNHSNGSQQAAPSAASDLSGRWQTWAIPALLKRDTLLSECSEAEEHLVQLKLSE

SEQ ID NO: 39510 - protein, 1400 aa, Homo sapiens
  DOMAIN (672)..(717): kw TRANSCRIPTASE REVERSE II ORF2 domain identified by eMATRIX, accession number DM01354N, p-value=1.000e-40, raw score of 13.17
  DOMAIN (699)..(935): Reverse transcriptase domain identified by PFam, accession name rvt, E-value=8.4e-47, PFam score of 168.9
MRKKQSRKTGNSKKQSTSPPPKERSSSPAMEQSWTENDFDELREEGFRRSNYSKLQEEIETKGQEVENLEKNLDKCITRITNIEKCLKELMELKAKARELHEECRSLRSRCDQLEERVSVMEDEMNEMKQEGKFREKRIKRNEQSLQEIWDYVKRPNLPPIDVPESDRENGTKLENTLQDVIQENFPNLARQANIQIQEIQRMPQRYSSRRATPRHIIVRFTKVEMKEKMLRAAREKAFKQASRREDDIAKVTSGMRVLFKPGTTEVQELALCYGGMANRTISALKTTQRQLSKLWKEELLQDVCAGLAEELHLPPDAPGGMVDFRCTLTLSFFFKFYLTVLQKLGQENLEDKCGKLDPTFASATLLFQKDPPADVQLFQEVPKGQSEEDMVGRPLPHLAADMQPLVRPCTVTTFLATRMSCLSGWSPAPGPTPRSSIEMKFKNMLFPMIVCPAWIPELNSVEHGPDGISFGAACPLSIVEKTLVDAVAKLPAQKTEVFRGVLEQLRWFAGKQVKSVASVGGNIITASPISDLNPVFMASGAKLTLVSRGELPEAEVQEEGLGGEKSHQIGHFLEKQSSKFSDPAFPVIWIQGSMENVPGLVDGKAGYFLCREFTAGTATCMPYLVGHQENCPDGPHLLPWLQKDPAEPGGDTALHRDPLQQGEIQTTIREYYKHLSANKLENLEEMDKFLDTYTLPRLNQKEVESLNRPITGAEIVPIINSLPTKKSSGLDGFTAEFYQRYKEELHINRTKDKNHMIISIDAEKAFDKIQQPFMLKTLNKLGIDGTYLKIIRAIYDKPTANIILNGQKLEAFPLKTGTRQGCPLSPLLFNIVLEVLARAIRQEKEIKGIQLGKEEVKLSLFADDMIVYLENPIVSAQNPLKLISNFSKVSGYKINVQKSQAFLYTNNRQTESQIMSELPFTIASKRIKYLGIQLTRDVKDLFKENYKPLLNEIKEDTNKWKNIPCSWVGRINIMKMAILPKVMYRFNAIPIKLPMPFFTELEKTTLKFIYWNQKRARIAKSILSQKNKAVGITLPDFKLYYKATVTKTAWYWYQNRDIDQWNRTEPSEIMPHIYYNYLIFDKPEKNKQWGKDTLFNKWCWENWLAICRKLKLDPFLTPYTKINSRWIKDLNVRPKTIKTLEENLGNTIQDIGMGKDFMSKTPKATATKAKIDKWDLIQLKSFCTAKETTIRVNRQPTEWEEIFATYSPDKGLISRIYNELKQIYKKKTKNPIKKWAKDVNRHFSKEDIYAAKKHMKKCSSSLAIREMQIKTTMRHHLTPVRMAIIKKSGNNTCWRGCGEIGTLLHCWWDCKLVQPLWKSVWRFLRDLELEIPFDPAIPLLGIYPNDYKSCCYKDTCTQLSADENCADSIWRGRDDCEHLCIPTGGQGFGDEQEVPAGND

SEQ ID NO: 39511 - protein, 1824 aa, Homo sapiens
  DOMAIN (886)..(931): kw TRANSCRIPTASE REVERSE II ORF2 domain identified by eMATRIX, accession number DM01354N, p-value=1.000e-40, raw score of 13.17
  DOMAIN (3)..(1227): Reverse transcriptase domain identified by PFam, accession name rvt, E-value=2.7e-149, PFam score of 509.4
GQHHPDTKAWQRHNKKKENFRPISLMNIDAKILNKMLANQIQQHIKKLIYHDQVGFIPGMQGWFNICKSINVIHHINRTKDKNHMIISIDAAKAFDKIQQPFMLKTLNKLGIDGTYLKIIRAIYDKPTASIILNGQKLEAFTLKTGTRQGCPLSPLLFNIVLEVLARAIRQEKEIKGIQLGKEEVKLSLFADDMIVYLENPIISAQNLLKLIGNFSKVSGYTINVQKSQAFLYTNNRQTESQIMSELPFTIASKRIKYLGIQLTRDVKDFFKENYKPLLNEIKEDKNKWKNIPCSWVGRINIVKMAILPKRTPLLSLPSTLYEELWRLRSYFPLCPQLYNMEQNTTDWVIYKEQCIWLTALETGESKSTAPAFGKGYPMAEYIIWGRLTPHMAGYSSETKLPEERSGSNICCSPISAVLQPLLLIPRQTGSGVDLQQTPTDLQLRVLTVRRKTNKQKGHPHQNPICTSPSSKTKGSNSHITILTLNVNGLNAPIKRHRLANWIKSQDPSVSCIQETHLTCRDTHRIKIKGWREIYQANGKQKKAGVAILVSDKTDFKPTKIKRDKEGHYMMVKGSIQQEELTTLNIYAPNTGAPRFIKQVLRDLQRDLDSHTLIMGDFNTPLSTLDRSTRQKVNKDIQDLNSALHQVDLIDIYRTLHPKSTEYTFFSALHHIYSKIDHIVGSKALLSKYKTTEIITNCLSDHSAIKLELRIKKLTQNRSTTWKLNNLLLNDYWVHNKMKAEINTLFETNENKDTTYQNLWDTFKAVCRGKFIALNAHKRKQERSKIDTLTSQLKELEKQEQTHSKASRRQEITKIRAKLKEIETQKTLQKINESRSWFFEQINKIDRLLARLIKKKREKNQIDTIKNDKGDITTDPTEIQTTIREYYKHLYANKLENLEEMDKFLDTYTLPRLNQEEVESLNRPITGSEIEAIINSLPTKKSPGPDGFIAEFYQRYKEELVPFLLKLFQSIGKEGILPNSFYEASIILIPKPGRDTTKKANFRPISLMNIDAKILNKILAKRIQQHIKKLIHHDQHINKAKDKNHMIISIDAEKAFDKIQQPFMLKTLNKLGIDGTYFKIIRAIYDKPTANIILNGQKLEAFPLKTGTRQGCPLSPLLFNIVLEVLARAIRQEKEIKGIQLGKEEVKLSLFADDMIVYLENPIVSAQNLLKLISNFSKVSGYKINVQKSQAFLYTNNRQTESQIMSELPFTIASKRIKYLGIQLTRDVKDLFKENYKPLLKEIKEDTNKWKNIPCSWVGRINIVKMAILPKVIYRFNAIPIKLLITFFTELEKTTLKFIWNQKRARIAKSILSQKNKAGGITLPDFKLYYKATVTKTAWYWYQNRDIDQWDRTEPSEIMPHIYNYLIFDKPEKNKQWGKDSLFNKWCWENWLAICRRKLKLDPFLTPYTKINSRWIKDLNVRPKTIKTLEENLGNTIQDIGMGKDFMSTTPKAMATKAKIDKWDLIKLKSFCTAKETTITVNRQPTEWEKIFTIYPSDKGLISRIYKELKQIYKKRTNNPINKWVKDMNRHFSKEDIYTAKRHMKKCSSSLAIREMQIKTTLRYHLIPVRMAIIKKSGNNRCWRGCGEIGTLLHCWWNCKLVQPLWKSVWRFLRDLELEIPFDPAIPLLGIYPKDYKSCCYKDTCTRMFIAALFTIAKAWNQAKCPTMINWIKKMWRIYTMEYYAAIKNDEFMSFVGTWMKLEIIILSKLSQEQKTKHCILSLIDRLDQRNFLLGSSGAFPLSHDLAERDQASGTGKASPHRQLNPSHPAQPSVDSGPLTANHNTASATFSLPCLWAKAPPAGHLEHGTFRVKSFLGHSPAINQ

SEQ ID NO: 39512 - protein, 1214 aa, Homo sapiens
  DOMAIN (383)..(429): kw TRANSCRIPTASE REVERSE II ORF2 domain identified by eMATRIX, accession number DM01354O, p-value=1.000e-40, raw score of 8.73
  DOMAIN (432)..(735): Reverse transcriptase domain identified by PFam, accession name rvt, E-value=2.7e-17, PFam score of 70.9
  misc_feature (1)...(1214): Xaa = X or * as defined in Table 2
KEGHYIMVKGSIQQEELTILNIYAPNTGAPRFIKQVLSDLQRDLESHTLIMGDFNTPLSTLDRSTRQKVNKDTQELNSALHQADLIDIYRTLHPKSTEYTFFSAPHHTYSKIDHILGSKALLSKCKRTEIITNCLSDHSAIKLELRIRKLTQNRSATWKVNNLPPGMTYWVHNGNEGQKLKMFFETQWEHKDTAYQNLWDTFKAGCRGKFIALNAHKRKAGKDPKLTPLTSQLKKLEKQEQTHSKASRRQEITKIRAELKEIETQKNPSFNPSKKLMNPRSWFFERINKIDRPLSKDLIKKKREKNQIDTIKNDKGNITTDPTEIQTTIREYYKHLYANKLENLGEMKDXFLDTYTLPRLNQEEVESLNRPITGAEIVAIINSLPTMHSPGPDGFTAEFYQRYKEELVPFLLRLFQSIEGRGILPNSFYEASIILIPKPGRDTTKKENFRPISLMNIGRQKSLNKNTDKTESQQHIKKLIHHDKVGFHPPGMQDWFNIHKSINLIQHINRTKDKNHMIISIDAEKVFDKIEQPFMLKTLNKLGTDGTLYFKIIRAILXQNPTANIILNGGQKLEAFPFEKLAQEQGCPSLTHSLFNIGVWEVLARAIRQEKEIQGILLGKEEVKSSLFADNMIVYLGNPIVSAQNLLKLIRNFSKVSGYKINVQKSQAFLYTNNRQTESQIMGVSELMSELPFTIASKRIKYLGIQLTRDVKDLFKENYKPLLNEIKEDTNKWKNIFIPCLWVGRISIMKMAILPKVIYRFNAIPIKLPMTFFTELEKTTLKFIWNQTRAWFAKSILSQKNKVGGITLPDFKLYYKATVTKTAWYWYQNRDIDQWNRTDPSEIMPHIYNYLIFDKPEKNRQWGKDSLFNKWCWENWLAICRKLKLDPFLTPYTKINSRWMKDLNVRPKTIKILEENLGITIQDIGMGKDFMSKTPKAMATKDKIDKWDLIKLKEFLHICTAKETTIRVNRQPTKWEKIFTTYSSDKGLISRIYNELKQIYKKKTNNPIKKWTKDMNRHFSKEDIYAAKKHMKKCSSSLAIREMQIKTTMRYHLSPVRMAIIKKSGNNRCWRGCGEIGTLLHCWWDCKLVQPLWKSVWRFLRDLELEIPFDPAIPLLGIYPKNSKSCCYKDTCTRMFIAALFTIAKTWNQPKCPTMIDWIKQMWHIYTMEYYAAIKNDEFMSFVGTWMKLESNILSKLSQEQKTKHRIFSLIGGN

SEQ ID NO: 39513 - protein, 165 aa, Homo sapiens
  misc_feature (1)...(165): Xaa = X or * as defined in Table 2
DSPCTIASTRSYSFICNRPLSVDIQLRCSCRNVRRLSTYCLYLRQLRIEGGNFVFTTKADNGPQQIITXTNSFPVGNNAQTVKVRHHILTFFINLFGKEIGGPDHFNNGFTQPLPSGGTQPQHLSCVTIDGGNVTMRIHRNQPFINRTKQRLLLTDHACDLLWLH

SEQ ID NO: 39514 - protein, 96 aa, Homo sapiens
  misc_feature (1)...(96): Xaa = X or * as defined in Table 2
ERSWSQLLFSTEQFWQQLPGTGSGRARQNISRKTPREHAGGYRRDNGNNWAVPHIQCNLVPRXXKRPPVRAHRAPETLCASKALQEQRYWVFELLR

SEQ ID NO: 39515 - protein, 1503 aa, Homo sapiens
MKSITRFIALRHALASSAPDADYCNHRSWVFQCFNNAGNRMYIHRIGSHPASCLAWKRAPQNAAWGTTIGKMCLCSPNCWRLHSPACHQHDGILVENSRQLADFPCANTTNLCCPFGGLRYSVMDRDTTTRGSTIVRKGGGKETSQLNKLDDPDCSTREANKDPQTSLTRGVPGGRPTGEAPTKKEGCELKPTRKIRTLFCGPRNGLQGNYHPGNPSWDRSVLHMGNPGGIPVLTPVNQLWKTVANQFQAEDRRRFVVKILSPGNVDKPIKSSKTSNLRCQLVNDEVPVAAPVAFTGQTLWNHQGFYFAVCPSVGGRQFEADNIDQMEAVGRYLGRMHQTGRKQLFIHRPTIGLNEYLIEPRKLFEDATLIPSGLKAAFLKATDELIAAVTAHWREDFTVLRLHGDCHAGNILWRDKPMFVFLDDAPHGPAVQDLWMLLNGDKAEQRMQLETIIEAYEEFSEFDTAEIGLIEPLRAMRLVYYLAWLMRRWLEHCQSDGALEKKVRHKARTPRPGNTEASERSGDNSGHREGRRDPRRSDGHTRDTRDTCESNTAHSLTQDCHAHVKLVRRREEHFAECQGTEQSPGILYETPDFSHGFWARIRLLDIQQKKVERRTGVYLPSYGGVVANSYLPSNGLSALGLYAWARVDESSDNNSLLNPAKKFTYQAPQNVEDTYVVFIIGETTRWDHMGIFGYERNTTPKLAQEKNLAAFRGYSCDTATKLVLRCMFVRQGGAEDNPQRTLKEQTIKKVLKLFGFSPALYAMQSEMWFYSNTMADNIAYREQIGAEPRNRGKPVDDMLLDVDHVYRQSCWPHEIFAYRALFPGVGLSWFPTTATMLFRIDLHMRVTEAIHCMEDGPVIAPRCRARNHNIRQFCNARIVIVIEFNDHFLRPQQPDSTIRCQCRCFNDGNINVAEETVIDHLRHFAQMQVNETHRALIDLFTYNQENRSHSSPIGEREEPSTGTGNGRQKNLPVSRAITAATPGPSRHRVPPINTVKLGGRDRDQRCQHKNGQFRRGSPVGGPRGRKSGHKTAVRHRPSKEAESQSMFGCDLQKQQYLRLSVVTKKHHDLRDDKEISTSVCQKTQQSYRMCPNTTLTCRVPSTSRQLDTDRDLETVSETTMDTMDTVKRRNFYRNHYGVPTIEEIRRAVKSQSGFSAARLSERHTTRIDVRNGIRNREGRARTNPKICRSMAIWEPSFGHRTWNQFLSSFTKFRMSGTQDGKQVPAQCDFRTRNRVADVMLCEFRSPSRTTLHRATASNTTVDLARRVTATSDSLTSYSTCTLAPSEHTHHEHQYHKFPKSTRLTLLSPINRHESSKNPECPHRHMERTSRVSKQIFHSAFFFYTGMGTALHLEHWTQRANWRLSLRDGTATQEWDHLTRTRSTAGIGTTALRMHLNMRTGTRTGSPTVSKAPEHRGGPGQSGTSREPGLPPAHKDRGRVVEWNELHVVASRPQQEPTRTQARGRTRTARDFEVPGAGERRNPTVQTLGELEKLATSESRKSL

SEQ ID NO: 39516 - protein, 169 aa, Homo sapiens
MCFVYYEKNLAAFRGYSCDTATKLSMRCMFVRQGGAEDNPQRTLKEQNIFAVLKQLGFSSDLYAMQSEMWFYSNTMADNIAYREQIGASEMWFYSNTMADNIAYREQIGAEPRNRGKPVDDMLLVDEMQQSIGRNPDGPNHYSEGYFRLKDTSISRELSNQQKLVSNMI

SEQ ID NO: 39517 - protein, 1162 aa, Homo sapiens
  DOMAIN (85)..(122): 3 kw RESISTANCE BENOMYL YLL028W CYCLOHEXIMIDE domain identified by eMATRIX, accession number DM00973A, p-value=1.913e- 11, raw score of 21.17
  DOMAIN (954)..(1138): Isochorismatase family domain identified by PFam, accession name Isochorismatase, E-value=1.4e-73, PFam score of 257.9
MEQYDQIGARLDRLPLARFHYRIFGIISFSLLLTGFLSYSGNVVLAKLVSNGWSNNFLNAAFTSALMFGYFIGSLTGGFIGDYFGRRRAFRINLLIVGIAATGAAFVPDMYWLIFFRFLMGTGMGALIMVGYASFTEFIPATVRGKWSARLSFVGNWSPMLSAAIGVVVIAFFSWRIMFLLGGIGILLAWFLSGKYFIESPRWLAGKGQIAGAECQLREVEQQIEREKSIRLPPLTSYQSNSKVKVIKGTFWLLFKGEMLRRTLVAITVLIAMNISLYTITVWIPTIFVNSGIDVDKSILMTAVIMIGAPVGIFIAALIIDHFPRRLFGSTLLIIIAVLGYIYSIQTTEWAILIYGLVMIFFLYMYVCFASAVYIPELWPTHLRLRGSGFVNAVGRIVAVFTPYGVAALLTHYGSITVFMVLGVMLLLCALVLSIFGIEHADRCRWTEISEVNQIFRMTFLNVVIGYGIIASVMTTDIDLSKEVVGLNFILWLIAVSALPLILIWNNRCRYTLLRQLRTPGQRIRSLAVVVLAANSYLAIKLGFLRWGCMPWARVDESSDNNSLLNPAKKFTYQAPQNVDDTYVVFIIGETTRWDHMGIFGYERNTTPKLAQEKNLAAFRGYSCDTATKLSLRCMFVRQGGAEDNPQRTLKEQNIFAVLKQLGFSSDLYAMQSEMWFYSNTMADNIAYREQIGAEPRNRGKPVDDMLLVDEMQQSLGRNPDGKHLIILHTKGSHFNYTQRYPRSFAQWKPECIGVDSGCTKAQMINSYDNSVTYVDHFISSVIDQVRDKKAIVFYAADHGESINEREHLHGTPRELAPPEQFRVPMMVWMSDKYLENPANAQAFAQLKKEADMKVPRRHVELYDTIMGCLGYTSPMVELTKTTTEYIAGPAMLFRFSSCLFAHRYLSPLFAVYALNHLLGLQPRVPVLCVNGPDDARTVNMGVMPPETVMPPRALLLVDLQNDFCAGGALPVPEGDSTVDVANRLIDWCQSRGEAVIASQDWHPANHGSFASQHGVEPYTPGQLDGLPQTFWPDHCVQNSEGAQFHPLLHQKAIAAVFHKGENPLVDSYSAFFENGRRQKTSLDYWLRDHEIDELIDMGLATDYWVKFTVLDALQLGYKVNVITDARRGVNIQRQDSAHAFMEMSAAGATLYTLADWEETQG

SEQ ID NO: 39518 - protein, 884 aa, Homo sapiens
  DOMAIN (15)..(58): Transcriptional regulatory protein C terminal. domain identified by eMATRIX, accession number PF00486C, p-value=6.700e- 31, raw score of 20.21
  DOMAIN (92)..(151): Transcriptional regulatory protein, C te domain identified by PFam, accession name trans_reg_C, E-value=2.5e-23, PFam score of 82.4
MLTRALRERSTVGIILVTGRSDRIDRIVGLEMGADDYVTKPLELRELVVRVKNLLWRIDLARQAQPHTQDNCYRFAGYCLNVSRHTLERDGEPIKLTRAEYEMLVAFVTNPGEILSRERLLRMLSARRVENPDLRTVDVLIRRLRHKLSADLLVTQHAGYLCEVKDPERGQGTVQYMASLGAPMPMLAAIIAVVMEVPAAILIVLGFFTRPLAVLFIFYTLEEIKRISFIKRRVGNKDEITRCRWRRFHDDGITFLRLLDAGLTIPSGKTIVHPLARQRRGLVKIQFLRDRHRCDVHTPDTNYHRCARHIATRPASHRRVDSAHPTQHSVAVDTHAPARQNDCRSPGLQMAPAENMRHRLTHRFFYQDVRAASYRARSLRLRRPGLTFSCICLLGGVVMLYVNPSVIGAFTMITTVSAILFMFVWTIILCSYLVYRKQRPHLHEKSIYKMPLGKLMCWVCMAFFVFVVVLLTLEDDTRQALLVTPLWFIALGLGWLFIGGAGFWRRCDVIGGVFNHFQQFARFIVLAFHYADWPHCLAAHALFDHREEDLLFFHHVAGKLFMQHGQAIFQTRYAHVTRIVRTYKDKLPLVIGGNMRRTTRQRRLCGKGQCAIVRGDTIRQDAKLRANTNIEITFVRADHHRLHLPRHIDNLCQRQCAFMIQIPDHFGKHVEHELGLECEWSWHDQVDIARGGNSKVNVDEMVRQQLFASKMAENMARLAALLHYFSGDGGDISVTGAFTEYVRNNRLPEPVIRVKQPALARFSPDVSPLFVHFRADDDVTARLYARGYRLRPEFFKWRKIVLRPTPIMRAVARHPTPFMAISMIFCNKRDRGNDGYYWHHNDHYRRNHDCYYHWWRGCWRCRHGDSCRCGNGCWCGDVGSCCSK

SEQ ID NO: 39519 - protein, 236 aa, Homo sapiens
LANISMPGAWRGARVCITFKSHYLAKGLVMNTLRYFDFGAARPVLLLIARIAVVLIFIIFGFPKMMGFDGTVQYMASLGAPMPMLAAIIAVVMEVPAAILIVLGFFTRPLAVLFIFYTLGTAVIGHHYWDMTGDAVGPNMINFWKNRNEITPFRAMMIIRRMAHRFQTEEIKRISFIKRRVGNKDEITRCRWRRFHDDGITFLRLLDAGLTIPSGKTIVHPLARQRRGLVKIQFLR

SEQ ID NO: 39520 - protein, 655 aa, Homo sapiens
  DOMAIN (561)..(603): Bacterial regulatory proteins iclR family proteins. domain identified by eMATRIX, accession number BL01051B, p-value=6.838e- 28, raw score of 27.53
  DOMAIN (501)..(643): Bacterial transcriptional regulator domain identified by PFam, accession name IclR, E-value=1.9e-12, PFam score of 54.8
MNNSQGIPTGRRNHSQTEIIEENHHAAHDWNTEELCGERGKTPGSQREELAEVDVDWLIAERPGKHPRKNKTAINIEYMKASIRARVEHPFRIIKRQFGFVKARYKGLLKNDNQLAMLFTLANLFRADQMIRLAQADDAAPAAGSTLDKIAKNGVIVVGHRESSVPFSYYDNQQKVVGYSQDYSNAIVEAVKKTLNKPDLQVKLIPITSQNRIPLLQNGTFDFDCGSTTNNVERQKQAAFSDTIFVVGTRLLTKKGGDIKDFANLKDKAVVVTSGTTSEVLLNKLNEEQNMNMRIISAKDHGDSFRTLESGRAVAFMLDDALLAGERAKAKKPDTWNIVGSRSPGGYGCICRHQDKGYDRVPLVVPLLFYHGENSPYPYSLNWLDEFDDPQLARQLYTEAFLLVDITIVPDDEIMQHRRIALLELIPKHIRERDLIGMVDRINTLLIAPSHKTRRRDHKNEQTQTTQAEGNNEAKPPQETKTTAKTQRPEPETPNRQNQQTARPQRSTTARTEKSNNQKHNSTKTPAMTTNAHYRQKRVVSVDQAAVQQSIIEGLVWEQATPTTITHPQQLHEELARIRRQGWSYDNGEDYADVRGVAAPVFNANNELTAAISVVGTRLQINEEYRDYLAGKAIACARDISRLLGWKSPFDLQAS

SEQ ID NO: 39521 - protein, 99 aa, Homo sapiens
  misc_feature (1)...(99): Xaa = X or * as defined in Table 2
LQGHLVGDYVSLSCLPFGIMGHGNWPLWVLTACLVLLLCXWSLRRQXIQQXAPSDQKRDFLVPHGAVFDRXISATCWSSINWPANCSRPSIAGWPKQAS

SEQ ID NO: 39522 - protein, 117 aa, Homo sapiens
  DOMAIN (1)..(115): Transposase domain identified by PFam, accession name Transposase_15, E-value=1.1e-06, PFam score of 7.9
MNFRHLLEQHQLARQLFKTINRWLAEAGVMMTQGTLVDATIIEAPSSTKNKEQQRDPEMHQTKKGNQWQCGDMWCKGLETPGQRKREEQDPVPIRGMEREKDPPVGPGNRNREPQSN

SEQ ID NO: 39523 - protein, 102 aa, Homo sapiens
  misc_feature (1)...(102): Xaa = X or * as defined in Table 2
YHWHQLLSMVRQLMVLSWKKISSWFMGPPIIRKSILAENSIXKNLVXVIILKLTEGISTLKXMAPQNTQYXMTVIKLFKWVARQTRLRSIMVCYSSTTTLLT

SEQ ID NO: 39524 - protein, 62 aa, Homo sapiens
SEMVLHPGPDAGFHVFDVDGRFVLAWMLFQGSYLAGALGDQPVHIHLGQLLALWRPLVAGIG

SEQ ID NO: 39525 - protein, 338 aa, Homo sapiens
  DOMAIN (60)..(251): Transposase domain identified by PFam, accession name Transposase_15, E-value=7.7e-83, PFam score of 288.6
  misc_feature (1)...(338): Xaa = X or * as defined in Table 2
MSHQLTFADSEFSSKRRQTRKEIFLSRMEQILPWQNMVEVIEPFYPKAGNGRRPYPLETMLRIHCMQHWYNLSDGAMEDALYEIASMRLFARLSLDSALPDRTTIMNFRHLLEQHQLARQLFKTINRWLAEAGVMMTQGTLVDATIIEAPSSTKNKEQQRDPEMHQTKKGNQWHFGMKAHIGVDAKSGLTHSLVTTAANEHDLNQLVQNELETAERFRRQEDTQSKCLLSSIMLYIKNLSGPDVSELISPLSEGFNLCSSVVVAVIAAVLRRAPIHMPSGWWRSWNAESGAYNVTRSGDSYIHGXLLYRSRKLPDPADEGALQKWWSVLPFFKRRLWF

SEQ ID NO: 39526 - protein, 78 aa, Homo sapiens
  misc_feature (1)...(78): Xaa = X or * as defined in Table 2
PGCGSGHSWHRHQCGPSCQSATDCLSWSDASPDRVAALCSWSSWVPQXWWHRHKVPXVIMTPASASQRLMVLNNWRAS

SEQ ID NO: 39527 - protein, 44 aa, Homo sapiens
KPASGPRTVTAAASHCGWCAAAWRNWMKVTGWPHSGRRCRKNSA

SEQ ID NO: 39528 - protein, 823 aa, Homo sapiens
  DOMAIN (553)..(570): HUPF/HYPC HYDROGENASE EXPRESSION/SYNTHESIS FAMILY SIGNATURE domain identified by eMATRIX, accession number PR00445C, p-value= 9.500e-19, raw score of 12.97
  DOMAIN (640)..(796): Transposase domain identified by PFam, accession name Transposase_15, E-value=1.4e-30, PFam score of 115.1
MEKKSPAYFCCRDMQVIHSDAALQRLLTRFNDPEGWSNLAKNQYLSTSMKQKIWQRALSHRKNNPKADSDAYETSADMILSELISHGEVDDQMLLNATALIRSDDWDFLESALISWDNLPAVVLKELQQNTPRNDIWAKFFLRQENSSRAQVDEALRVYYALDPDALAQLDVLAKRPYKTAAFRGEKTHRVPRRSVRQNIIDQADRLHGAQRLVINTNRTRVVDQLIEFLHHQHVNAHLAEIVRHHQPNRAGTSDRHLNAMVNSRLDVRTLLPPRPSVGSDHPNIPGFPTLNRSPTETPLNGEYQYVHNGGTASDTVVNSDGCQIVKNGGVAGNTTVNQKARLQVDAGGTATNVTLKQGGALVTSTAATVTGINRLGAFSVVEGKADNVVLENGGRLDVLTGHTATNTRVDDGGTLDVRNGGTATTVSMGNGGVLLADSGAAVSGTRSDGKAFSIGGGQADALMLEKGSSFTLNAGDTATDTTVNGGLFTASGGTLAGTTTLNKGAIINPSREHGQVLAVGEDIHQLAQVEVCGIKRDVNIALICEGNPADLLGQWVLVHVGFAMSIIDEDEAQATLDALRQMDYDITSAEFSSKRRQTRKEIFLSRMEQILPWQNMVEVIEPFYPKAGNGRRPYPLETMLRIHCMQHWYNLSDGAMEDALYEIASMRLFARLSLDSALPDRTTIMNFRHLLEQHQLARQLFKTINRWLAEAGVMMTQGTLVDATIIEAPSSNRRILALAKTQVAQWPKLFTNRFIPNPNWGPHSGPWPCPMPPQKWVPRGRMPSNGPVGERSLRGFQGLSGTTCAQFLGKANGNQPNTPLAS

SEQ ID NO: 39529 - protein, 252 aa, Homo sapiens
  DOMAIN (45)..(77): Amino acid permeases proteins domain identified by eMATRIX, accession number BL00218B, p-value=6.850e-26, raw score of 21.44
  DOMAIN (8)..(251): Amino acid permease domain identified by PFam, accession name aa_permeases, E-value=1.9e-10, PFam score of -57.7
MADNKPELQRGLEARHIELIALGGTIGVGLFMGAASTLKWAGPSVLLAYIIAGLFVFFIMRSMGEMLFLEPVTGSFAVYAHRYMSPFFGYLTAWSYWFMWMAVGISEITAIGVYVQFWFPEMAQWIPALIAVALVALANLAAVRLYGEIEFWFAMIKVTTIIVMIVIGLGNLLHAGQENLFSGLTALTAEFTVGEGPSAAGLLEFAGGPLQTLFSWVSPAEAAERQRLLPVPSSGSFVQEGHPPDASQSSPV

SEQ ID NO: 39530 - protein, 58 aa, Homo sapiens
  misc_feature (1)...(58): Xaa = X or * as defined in Table 2
PTAWSPPRPTSMTSISWVICFMERSNLSQPMPATKERHSARSWPRWMWTGXSPSVPAR

SEQ ID NO: 39531 - protein, 120 aa, Homo sapiens
  misc_feature (1)...(120): Xaa = X or * as defined in Table 2
FRGDGILVSCPLVFSSAFSWRAADGGKNRNVHPSVVRXAGALRPRTQSRIQSQRLNKVEKGGVKQFEHNQSCRQQVGVTIIKVVKQLADILPHGHFQFYAEVIGKLFRQRSARDAIRGSS

SEQ ID NO: 39532 - protein, 1220 aa, Homo sapiens
  DOMAIN (529)..(555): Prokaryotic molybdopterin oxidoreductases proteins domain identified by eMATRIX, accession number BL00551B, p-value=7.618e- 19, raw score of 23.29
  DOMAIN (692)..(962): Aminotransferases class-II domain identified by PFam, accession name aminotran_2, E-value=1.1e-38, PFam score of 142.0
  misc_feature (1)...(1220): Xaa = X or * as defined in Table 2
MKLMAIQEQARGEQCFRDSEWDLQFHIQVALATQNSALAAIVEKMWTQRSHNPYWKKLHEHIDSRTVDNWCDDHDQILKALIRKDPHAAKLAMWQHLENTKIMLFNETSDDFEFNADRYLFAENPVAIAKELELTASAEILLWDDYFAPGYGVPNDEGMEAVKLLPRLEGILLDPVYTGKAMRGLIDGISQKRFKDEGPILFIHTRRCACAVRLSSPRLAPETLMQESIQLVIDSLPFLLKGAGYTLQLSIGGMFFGLLLGFILALMRLSPIWPVRWLARFYISIFRGTPLIAQLFMIYYGLPQFGIELDPIPSAMIGLSLNTAAYAAETLRAAISSIDKGQWEAAASIGMTPWQTMRRAILPQAARVALPPLSNSFISLVKDTSLAATIQVPELFRQAQLITSRTLEVFTMYLAASLIYWIMATVLSTLHLTNGSALAGKKHSPQRNRDADPEICPLPRDAGGRQPGARLTRTNASLAPTFGRGAMTNHWVDIKNANVVMVMGGNAAEAHPVGFRWAMEAKNNNDATLIVVDPRFTRTASVADIYAPIRSGTDITFLSGVLRYLIENNKINAEYVKHYTNASLLVRDDFAFEDGLFSGYDAEKRQYDKSSWNYQLDENGYAKRDETLTHPRCVWNLLKEHVSRYTPDVVEKGSSRDQRSQWFKPSSANYPCLAAGGGQFGIGSGGSGHVSGYSVVHQALEEELAEWLGYWRALLNISGFVANQAVIAAMMAKEDRIAADRLSHASLLEAASLSPSQLRRFAHNDVTHLARLLASPCPGQQMVVTERVFSMDGDTAPLAEIQQVTQQHNRWLMVDDAHGTGVIGEQGRGSCWLQKPCVTTGRKTASARLLGHGDSPANRTRWYCATALNANPISTVCWRCCMATVNKQAIAAAFGRAAAHYEQHADLQRQRCDALLAMLPQRKYTHVLDAGCGPGWMSRHWRERHAQVTALDLSPPMLVQARQKDAADHYLAGDIESLPLATATFDLAWSNLAVQWCGNLSTALRELYRGGAVPQRIPNLRHLSEFSSKRRQTRKEIFLSRMEQILPWQNMVEVIEPFYPKAGNGRRPYPLEXHVRIHCMQHWYNLSDGAMEDALYEIASMRLFARLSLDSALPDRTTIMNFRHLLEQHQLARQLFKTINRWLAEAGVMMTQGTLVDATIIEHPARPRIMFSLSAFGLMRSITRTGFILSRVADYRYFAGWFGVRKALLNSQHCASRRAD

SEQ ID NO: 39533 - protein, 528 aa, Homo sapiens
  DOMAIN (100)..(127): Putative esterase domain identified by eMATRIX, accession number PF00756B, p-value=7.750e-26, raw score of 16.64
  DOMAIN (69)..(282): Putative esterase domain identified by PFam, accession name Esterase, E-value=6.9e-88, PFam score of 305.4
MELIEKHVSFGGWQNMYRHYSQSLKCEMNVGVYLPPKAANEKLPVLYWLSGLTCNEQNFITKSGMQRYAAEHNIIVVAPDTSPRGSHVADADRYDLGQGAGFYLNATQAPWNEHYKMYDYIRNELPDLVMHHFPATAKKSISGHSMGGLGALVLALRNPDEYVSVSAFSPIVSPSQVPWGQQAFAAYLAENKDAWLDYDPVSLISQGQRVAEIMVDQGLSDDFYAEQLRTPNLEKICQEMNIKTLIRYQRGAICSADAATRGAKRESCRSGCGLLIAERPAKVEPGTASRQDNTAINIEYMKASIRARVEHPFRIIKRQFGFVKARYKGLLKNETNWRCYSRWPHLFRADQMIRNPHDLYAPEVVHQKAKVTTSGYRFLPCCGFANTFWGKTTADGTLIEHFGRRCQGWFEDDDGHREQCDFRFRFKNCPQCNAENDIAARRCRECDTVLVDPDDMLKAALRLKDALVLRCSGMSLQHGHDEKGEWLKITYYDEDGADVSERFRLQTPAQRTAFEQLFIRPHTRTPGI

SEQ ID NO: 39534 - protein, 708 aa, Homo sapiens
  DOMAIN (42)..(70): Enterobacterial virulence outer membrane protein domain identified by eMATRIX, accession number BL00694B, p-value=2.964e- 19, raw score of 16.19
  DOMAIN (380)..(646): 3-hydroxyacyl-CoA dehydrogenase domain identified by PFam, accession name 3HCDH, E-value=7.6e-107, PFam score of 368.4
MTDIVVGLSTAGRPFSYAGDKNRQLTRYSDTRWHEDSVRNRWFSVMVGPSVRVNEWFSAYAMAGMAYSRVSTFSGDYLRVTDNKGRLASVNNIASWLSFFSSPLYLAFTKPNCRLMMRNGCSTLARMLAFMYSMLMAVLFLRGFCFQVFTLPDARGSAVHSPRAALRCGPWYRMVDPGLPKGSRLVAFARENQDCASLTPETFLPRIHVIKGVNISTATVCRQCEDAPCANVCPNGAISRDKGFVHVMQERCIGCKTCVVACPYGAMEVVVRPVIRNSGAGLNVRADKAEANKCDLCNHREDGPACMAACPTHALICVDRNKLEQLSAEKRRQYGAAVSATCDCGMRSCRVRQRGVRHPGVRDYSWRKPSCVSTGIRGQAGVGFAAFGVAHYSLAVRCRRVSAVERSDCVFYIAGRCLGDVVSHSVSVPSPPSVPLSSAPAPSPPVRRRPAKAVVENPKVKKAVLAETEQKVRQDTVLASNTSTIPISELANALERPENFCGMHFFNPVHRMPLVEIIRGEKSSDETIAKVVAWASKMGKTPIVVNDCPGFFVNRVLFPYFAGFSQLLRDGADFRKIDKVMEKQFGWPMGPAYLLDVVGIDTAHHAQAVMAAGFPQRMQKDYRDAIDALFDANRFGQKNGLGFWRYKEDSKGKPKKEEDAAVEDLLAEVSQPKRDFSERRDYRRMMIAMVTTCSLSGGRDFRHPGERI

SEQ ID NO: 39535 - protein, 638 aa, Homo sapiens
  DOMAIN (484)..(497): PROTEIN ZINC-FINGER METAL-BINDI domain identified by eMATRIX, accession number PD00066, p-value=2.800e-14, raw score of 13.92
  DOMAIN (60)..(261): Transposase domain identified by PFam, accession name Transposase_15, E-value=1.4e-109, PFam score of 377.5
MSHQLTFADSEFSTKRRQTRKEIFLSRMEQILPWQNMTAVIEPFYPKAGNGRRPYPLETMLRIHCMQHWYNLSDGAMEDALYEIASMRLFARLSLDSALPDRTTIMNFRHLLEQHQLARQLFKTINRWLAEAGVMMTQGTLVDATIIEAPSSTKNKEQQRDPEMHQTKKGNQWHFGMKAHIGVDAKSGLTHSLVTTAANEHDLNQLGNLLHGEKQFVSADAGYQGAPQREELAEVDVDWLIAERPGKRAAGLGFTYNVGALGGALAPIIGALIAQRLDLGTALASLSFSLTFVVILLIGLDMPSRVQRWLRPEALRTHDAIDGKPFSGAVPFGSAKNDLPVPDSPLDKPEIVAAMALAAEQAGAVAIRIEGVANLQATRAVVSVPIIGIVKRDLEDSPVRITAYIEDVDALAQAGADIIAIDGTDRPRPVPVETLLALLTEHQRLHTGVKPLRILHKKIHTDVKPYKCVRCGKTFRFGFYLTEHQRIHTGEKPYKCKECGKAFIRRGNLKEHLKIHSGLKPYDCKECGKSFSRRGQFTEHQKIHTGVKPYKCKECGKAFSRSVDLRIHQRIHTGEKPYECKQCGKAFRLNSHLTEHQRIHTGEKPYECKALSGKGNDIRICASITKSEAGFWKSILTL

SEQ ID NO: 39536 - protein, 176 aa, Homo sapiens
RAGAWASDPRQRGVVRNAALLPPDDRSDGRDAKTQSHRDGVISYRAFDETILASGIVPRTPPIDGIDHPKNEADDMLRMGFIEDVETIIGADPGRSSDRSVLCNHAGSDSSHYPPLYERAAGSAHSVQRDYPSGHQPELLDCLGYARTRSTDTGTPERWSSGHPDCDRRCSPWPGR

SEQ ID NO: 39537 - protein, 34 aa, Homo sapiens
LRWHLDLPYADAIRYNARTPLQGSLLPLTRLVWA

SEQ ID NO: 39538 - protein, 677 aa, Homo sapiens
  DOMAIN (57)..(73): FGGY family of carbohydrate kinases proteins domain identified by eMATRIX, accession number BL00933E, p-value=8.683e- 10, raw score of 13.80
MCSEIQAACRETAQPIPESDAELARCIFDSLALVYADVLHELAHLRGEDFSQLHIVGGGCQNTLLNQLCADACGIRVIAGPVEASTLGNIGIQLMTLDELNNVDDFRQVVSTTVNLTTFTPNPDNSLYTTDKGALRMTTQLEQAWELAKQRFAAVGIDVEEALRQLDRLPVSMHCWQGDDVSLHFVYSSRLHMPTCSRIGTCAASGNQCLMRRCRVLSGLQLLPTRRPDKALAPHPAVFTRGDSKFLSHKPARSPAIRYLLAYHRLPRQRFLLFQQCQTRSVIARRFQLAQLSGRFQQRTQQGFFHIACTNDPRGNAVDRGIEEVKADMHPVKQIVTHNLTGNCLGFIIQQHYVIAVPANLTADVQQHLRHIQHGGGNLVGNHFNRMGGVDLRLKFSGDSLGDLYELTGVLLPDTPPFETDGRLVAKIDTEKSSVFDYRGFNGRIGDSDIHGSLVYTTGKPRPKLEGDVESRQLRLADLGPLIGVDSGKGAEKSKRSEQKKGEKSVQPAGKVLPYDRFETDKWDVMDADVRFKGRRIEHGSSLPISDLSTHIILKNADLRLQPLKFGMAGGSIAANIHLEGDKKPMQGRADIQARRLKLKELMPDVELMQKTLGEMNGDAELRGSATQDTNRDLYYNTAQCRHPSSRIRYTRKKPRRRPDERRPENLQDKKSSEFDG

SEQ ID NO: 39539 - protein, 49 aa, Homo sapiens
NMLFSLIQPTFGFQPRQADKHHRRSDQKQHVYHQHHWNIPVRGTGFAGC

SEQ ID NO: 39540 - protein, 88 aa, Homo sapiens
  misc_feature (1)...(88): Xaa = X or * as defined in Table 2
WRCLLRQLKFIIKTVTSWICTGKLMLSTTSPLMMQMMVILLMPVLASKVKPKSTINXLVSVSGNMNSKATALNLKVPPKIKPVLPSLA

SEQ ID NO: 39541 - protein, 133 aa, Homo sapiens
  DOMAIN (2)..(129): Transposase domain identified by PFam, accession name Transposase_15, E-value=0.0008, PFam score of -30.8
  misc_feature (1)...(133): Xaa = X or * as defined in Table 2
FPATCWSSINWPANCSRPSIAGWPKPGVMMTQGTLVDATIIEAPSSTKNKEQQRDPEMHQTKKGNQWHFGMKAHIGVDAKSAXPTAWSPPRPTSMTSISWVICCMERSNLSQPMPATKGRHSARSWPRWMWTG

SEQ ID NO: 39542 - protein, 57 aa, Homo sapiens
  misc_feature (1)...(57): Xaa = X or * as defined in Table 2
RNVMIKRRVLSSTSASXLPPASAFCRLFSTPARWRSTACFTSGNRYRFLTVRLSGYW

SEQ ID NO: 39543 - protein, 89 aa, Homo sapiens
  misc_feature (1)...(89): Xaa = X or * as defined in Table 2
ASYWNRSFSPWGTYNRHPRXNRQCASRHCRGLHKQYQWPRIRSWLNCTPAPHARDVLLWRPSSLPAGNADGPIRWRPCCVFTACSIGTT

SEQ ID NO: 39544 - protein, 348 aa, Homo sapiens
  DOMAIN (85)..(116): Methylated-DNA--protein-cysteine methyltransferase active sit domain identified by eMATRIX, accession number BL00374B, p-value= 6.914e-23, raw score of 18.58
  DOMAIN (64)..(260): Transposase domain identified by PFam, accession name Transposase_15, E-value=6.7e-35, PFam score of 129.4
  misc_feature (1)...(348): Xaa = X or * as defined in Table 2
MCSFRSQTFCSSSRFTFARVSVIHSANHRVLNDRSTIMRTRGQDPTLPEMRRVRLLEMADAMDMFCQGLRYGPLPAPVRQQAAIIIPCHRVVRGDGTLSGYRWGVSRKAQLVRREAENEERPINRGWPKQPSDDPKHFVMPTIIEAPSSTKNKEQQRDPEMHQTKKGNQWHFGMKAHIGVDAKSGLTHSLVTTAANEHDLNQLGNLLHGEKQFVSADAGYQGAPQREELAEVDVDWLIAERPGKVKTLKQNPRKNKTAINIEYMKASIRARVEHPFRIIKRQFGFVKARYKGLLKNETNWRCYSPWPTCFGWTKXYPSIPTCLLTTRTASLLKPPGVRTSVCWQQLPR

SEQ ID NO: 39545 - protein, 831 aa, Homo sapiens
  DOMAIN (271)..(290): Domain of unknown function domain identified by eMATRIX, accession number PF00990B, p-value=7.900e-16, raw score of 12.15
  DOMAIN (393)..(589): Transposase domain identified by PFam, accession name Transposase_15, E-value=3.6e-112, PFam score of 386.1
MTQIFTGTLVEADPFHAVTLVANHDTQPLQALEAPVEPWFKPLAYALILLRENGVPSVFYPDLYGAHYEDVGGAGQTYPIDMPIIEQLDELILARQRFAHGVQTLFFDHPNCIAFSRSGTDEFPGCVVVMSNGDDGEKTIHLGENYGNKTWRDFLGNRQERVVTDENGEATFFCNGGSVSVWVIEEAANNRQYDYGAGHKIPVINYTDVHLRIERSCRFRADPRQQHELQLSSKLAVHDVLTNIYNRRYFFNSVESLLSRPVVKDFCVMLVDINQFKRINAQWGHRVGDKVLVSIVDIIQQSIRPDDILARLEGEVFGLLFTELNSAQAKIIAERMRKNVELLTGFSNRYDVPEQMTISIGTVFSTGDTRNISLVMTEADKALREAKSEGGNKHWYNLSDGAMEDALYEIASMRLFARLSLDSALPDRTTIMNFRHLLEQHQLARQLFKTINRWLAEAGVMMTQGTLVDATIIEAPSSTKNKEQQRDPEMHQTKKGNQWHFGMKAHIGVDAKSGLTHSLVTTAANEHDLNQLGNLLHGEEQFVSADAGYQGAPQREELAEVDVDWLIAERPGKVRTLKQHPRKNKTAINIEYMKASIRARVEHPFRIIKRQFGFVKARYKGLLKNETNWRCYSRWPHLFRADQMILCPVFVHHIPRFFGTFFGATDTQTFTLTESVIHQPLVLTNFIAIDGNDFARLRREITAQELAEFTFANEANADQDLQQSYALRFFQFADREQALRNLLMAERIKEVALVFIAVQTTQQAALAIDIGPTYVMTGSDIIGTYKEGFYTDWVKMIPGHTFLSEGRIFQGDIPYKPLTRRNECDGSDVSE

SEQ ID NO: 39546 - protein, 1032 aa, Homo sapiens
  DOMAIN (429)..(471): Bacterial regulatory proteins iclR family proteins. domain identified by eMATRIX, accession number BL01051B, p-value=2.385e- 16, raw score of 27.53
  DOMAIN (501)..(704): Transposase domain identified by PFam, accession name Transposase_15, E-value=2.4e-122, PFam score of 419.8
MQYWGKIIGVAVALLMGGGFWGVVLGLLIGHMFDKARSRKMAWFANQRERQALFFATTFEVMGHLTKSKGRVTEADIHIASQLMDRMNLHGASRTAAQNAFRVGKSDNYPLREKMRQFRSVCFGRFDLIRMFLEIQIQAAFADGSLHPNERAVLYVIAEELGISRAQFDQFLRMMQGGAQFGGGYQQQTGGAAWPLSILVIDKLIYRRPCCGTLQPDVIITPVLPVACISTWRHTEADPKETAKGWPPLLSDVLCVLEIPRLPLDDNGILFIENVGNLVCPASFDLGEKHKVAVLSVTEGEDKPLKYPHMFAAASLMLLNKVDLLPYLNFDVEKCIACARERRRDGPVAELAGDTAMCIGVPGQIRTIDGNQAKVDVCGIQRDVDLTLVGSCDENGQPRVGQWVLVHVGFAMSVINEAEARDTLDALQNMFDVEPDVGALFALAQTREQGYALDSEENEQGVRCVAVPVWNHESRVIDDLSLSTLTSRAGNGRRPYPLETMLRIHCMQHWYNLSDGAMEDALYEIASMRLFARLSLDSALPDRTTIMNFRHLLEQHQLARQLFKTINRWLAEAGVMMTQGTLVDATIIEAPSSTKNKEQQRDPEMHQTKKGNQWHFGMKAHIGVDAKSGLTHSLVTTAANEHDLNQLGNLLHGEEQFVSADAGYQGAPQREELAEVDVDWLIAERPGKVRTLKQHPRKNKTGINIEYMKASIRAQVEHPFRIIKRQFGFVKARFKGLLKNDNQMGDVFHAGQPVSGGPNDTQSIFRVEETSRWISLPANDYVRTFFRGVDISQVFSAKDIARRTPNGLIRKTPGFGPRSALKLLQDEDREYGYVIERGNKFVGAVSIDSLKTAAVPPVQLLTGWCVTAKAPPDISAISALTAVKHGNCSSLTPLLNPPGSDVIVCAEMDEQWGYVGAKSRQRWLFYAYDSLRKTVVAHVFGERTMATLGRLMSLLSPFDVVIWMTDGWPLYESRLKGKLHVISKRYTQRIERHNLNLRQHLARLGRKSLSFSKSVELHDKVIGHYLNIKHYQ

SEQ ID NO: 39547 - protein, 559 aa, Homo sapiens
  DOMAIN (452)..(504): ELEMENT TRANSPOSABLE INSERTION PROTEIN TRANSPOSITION DNA domain identified by eMATRIX, accession number PD02455C, p-value= 5.253e-11, raw score of 29.23
  DOMAIN (60)..(263): Transposase domain identified by PFam, accession name Transposase_15, E-value=4e-121, PFam score of 415.8
MSHQLTFADSEFSSKRRQTRKEIFLSRMEQILPWQNMVEVIEPFYPKAGNGRRPYPLETMLRIHCMQHWYNLSDGAMEDALYEIASMRLFARLSLDSALPDRTTIMNFRHLLEQHQLARQLFKTINRWLAEAGVMMTQGTLVDATIIEAPSSTKNKEQQRDPEMHQTKKGNQWHFGMKAHIGVDAKSGLTHSLVTTAANEHDLNQLGNLLHGEKQFVSADAGYQGAPQREELAEVDVDWLIAERPGKVKTLKQNPRKNKTAINIEYMKASIRARVEHPFRIIKRQFGFVKARYKGLLKNDNQLAMLFTLANLFRVDQMIQLPTYELSSGIGAVRRQAELDGTPAINSKRVYRIMRQNALLLERKPAVPPSKRAHTGRVAVKESNQRWCSDGFEFCCDNGERLRVTFALDCCDREALHWAVTTGGFNSETVQDVMLGAVERRFGNDLPSSPVEWLTDNGSCYRANETRQFARMLGLEPKNTAVRSPESNGIAESFVKTIKRDYISIMPKPDGLTAAKNLAEAFEHYNEWHPHSALGYRSPREYLRQRACNGLSDNRCLEI

SEQ ID NO: 39548 - protein, 93 aa, Homo sapiens
GWQTRSDWPHCGAGSCSRRLLSVPRRPKPNCRLMMRNGCSTVARMLAFMYSMLMAVLFLRGCCFKVLTLPGALGDQPVHIHLGPAPRRCDAPW

SEQ ID NO: 39549 - protein, 558 aa, Homo sapiens
  misc_feature (1)...(558): Xaa = X or * as defined in Table 2
MFARVSTTPVTRYEMYRKTRSTRLEDNNALSQSCKPLPFSEVTGSKGKADKEKVGDYVFCLKAQGRYNGEPLTGTGKIGGMLALRGEGTPFPVQADFRSGNTRVAFDGVVNDPMKMGGVDLRLKFSGDSLGDLYELTGVLLPDTPPFETDGRLVAKIDTEKSSVFDYRGFNGRIGDSDIHGSLVYTTGKPRPKLEGDVESRQLRLADLGPLIGVDSGKGAEKSKRSEQKKGEKSVQPAGKVLPYDRFETDKWDVMDADVRFKGRRIEHGSSLPISDLSTHIILKNADLRLQPLKFGMAGGSIAANIHLEGDKKPMQGRADIQARRLKLKELMPDVELMQKTLGEMNGDAELRGSGNSVAALLGNSNGNLKLLMNDGLVSRNLMEIVGLNVGNYIVGAIFGDDEVRVNCAAANLNIANGVARPQIFAFDTENALINVTGTASFASEQLDLTIDPESKGIRIITLRSPLYVRGTFKNPQSGXWSGTLLLSTKAKTIVAISITTLKVTVMASVSLLPMNTKDSVSVQLMRNLIVPTLKLMQGKFFLKYLLPVKMQKFGPQV

SEQ ID NO: 39550 - protein, 144 aa, Homo sapiens
  misc_feature (1)...(144): Xaa = X or * as defined in Table 2
GHVAHLQPRAGGRQPARLHHPQGTDRVLHGQRGQQPGPLLPSLSAWRPSTSTLKPASCGLRGPTSKRMSMQDGGLPHHRAGAQPPVHPGQEAVGXCEYWSASSRPVTQPGALMWRLWSAGRPRPYLLSHSQHDPHSGQGGGEHP

SEQ ID NO: 39551 - protein, 149 aa, Homo sapiens
MTKNNRTFRNDSKIPICTVVLKLKHASGSPGGPATRRFLGYTPTPEFLIEEPEVGLECAFITSSQMMLMLLTREYGYSATGRLESVRTLAPDLDIRIPYATDPAGNRLPDPELHPDSTLTVWDPIESACSHSSLCFRVTPTCHLLPEAF

SEQ ID NO: 39552 - protein, 139 aa, Homo sapiens
  misc_feature (1)...(139): Xaa = X or * as defined in Table 2
CGCDAETIILRINALAFIWKCGTEWICCFCRLALRELQQAVHAGLPQQAKILFDGGSEIGKIHXLRCAHCPLSSGKPVVPAALMNRPTRGERRFAYWAPGWFFFSPVRRATADCPSPPGPERVAASGPRWFAPAGENPV

SEQ ID NO: 39553 - protein, 247 aa, Homo sapiens
ANDGDLRSCVTLSCHMSHASEAADPPATTAFTDEHMSVKLRRTVGVACSVCPGWVTSGHPVNPAASGAKVLPGDTDIALPGPLPFILSRQLRDNTLILSDNGGRILYFELLFPGEDGYRRCESLWLVRGGVAKLDQGHRLAALWQALSEELRLTPHRYLATNSPQGPWWLLGWCERVPEADEVLPAPLPPYRVLTGLVDRIWRSEDVSAASGLHHDNRNAPSLSDQTRTDPPIRAHASRYQRQKPDG

SEQ ID NO: 39554 - protein, 157 aa, Homo sapiens
EAATEPKHLHQLRHAALAQHRQAPRPQGRPLARPHQGQDQPDRLHHLRGGGRHGARGHLHQAGAGESAPAPKGVTCPASPLGDVTGKPTSAWNTEKGRWAQHRGYPSPGPAAPLVLRSWPIPLFRPPPLLPLSSPAWILPSPLCHSLKAQSLVQATI

SEQ ID NO: 39555 - protein, 524 aa, Homo sapiens
  DOMAIN (468)..(489): RHS PROTEIN SIGNATURE domain identified by eMATRIX, accession number PR00394D, p-value=2.170e-28, raw score of 6.56
MGKDFLSNTPKAMATKAKIDKWDLIKLKNFCSAKETTIRVKRQPTEWEKIFTTYSSDKGLISRIYNELKQIYKKKTNNPIKKWVKDVNRHFSKEDIYAAKNHMKKCSPSLAIGEMQIKTTITKIDRPLARLIKKKLEKNQIDAINNDKGDITTDPTEIQTTIREYYKHLYTNKPENLEEMDKFLDTYTLPRLNQEEVESLNRPIKGSEIEAIINSLLTKKSPGPDGFTAKFYQRYKEELVPFLLKLFQSIEKEGILPNSFYEASIILILKPGRDTTKKENFRPISLMNIDAKSLNKYWPTESSNSSKAYPHDQVGFIPGMQTVYEPGSFTPLIRVETENGEREKAQRRSLAETLQQEGSENGHGVVFPAELVRLLDRLEEEIRADRVSSESRAWLAQCGLTVEQLARQVEPEYTPARKAHLYHCDHRGLPLALISEDGNTAWSAEYDEWGNQLNEENPHHVYQPYRLPGQQHDEESGLYYNRHRYYDPLQGRYITQDPMGLKGGWNLYQYPLNPLQQIDPIGIL

SEQ ID NO: 39556 - protein, 833 aa, Homo sapiens
  DOMAIN (420)..(488): Glycosyl transferases group 1 domain identified by PFam, accession name Glycos_transf_1, E-value=1.9e-12, PFam score of 49.3
MAWRNSVNWQCKQEPGFLHRRHGRRKLTNGTTRRSLQNKEEDFYTSQPGFPALALGCCLRVNLLLGHRGISAGSSYRPITSTPCHLCKLGQEVFAKPLNLQDQCQQNLVMQVLKLVLNCLNFDFIGSSADESADDLCTVQIPTTWRTMGLVGCDGVCCRTRWCQCLATAVVSGVGGGPWLLPACSSGPSMISKRKKFVHKWAKDLVEPRHGLENVWDLPRAMAGSYLMYKQRKWKIMEFGKWALQHKMTVKDIERLQLYNKVKEQPVQVEGSGRASTIFWVLKTFKGGKSPCGAPGECVAWTQCRILGWVQIHFKEHPADRVVGLIKMPGLDFYFAADVCYAEKVAQEKGFLYRLTSRYRHYAAFERATFEQGKSTKLMMLTDKQIADFQKHYQTEPERFQILPPGIYPDRKYSEQIPNSREIYRQKNGIKEQQNLLLQVGSDFGRKGVDRSIEALASLPESLRHNTLLFVVGQDKPRKFEALAEKLGSERASMEFKRYEYNAAGDLTAVITPDGNRSETQYDAWGKAVSTTQGGLTRSMEYDAAGRVISLTNENGSHSVFSYDALDRLEDEGLVILWYYDESDRITHRTVNGEPAEQCQYDGHGWLTDISHLSEGHRVAVHDGYDDKGRLTGECQTVENPETGELLWQHETKHAYNEQGLANRVTPDSLPPVEWLTYGSGYLAGMKLGGTPLVEYTRDRLHRETVRSFGSMAGSNAAYELTSTYTPAGQLQSQHLNSLVYDRDYGWSDNGDLVRISGPRQTREYGYSATGRLESVRTLAPDLYIRIPYATDPAGNRLPDKELHPGLVHSLMWGGTTYFCTEPVPSICLISLL

SEQ ID NO: 39557 - protein, 125 aa, Homo sapiens
PLAYLYRDPHVRRCVTASGPAPVYGIFQPGFSAPTGIRKSVHGDHSYCKYAHSCSRQYRAPEPRLSRTSQCLFSHRSARCPLLDLMGRRYRRPECRLSPLLPAAPVPGLPPWTIYPRRLYRNSPR

SEQ ID NO: 39558 - protein, 150 aa, Homo sapiens
  misc_feature (1)...(150): Xaa = X or * as defined in Table 2
GAGYSSARCGKHHARTGGAGRNILWRQLRRRGCRSTVDRSHHNQPGTWHRHQPGPRGPAKPARPWRAGTHLPTGTASVRHPCLGQPLRAEPRPAVPDAPRNQNLPFPAPQTDSALPGAVRGXRARXYHXSRTTTPPPDEHDHSWARACSP

SEQ ID NO: 39559 - protein, 889 aa, Homo sapiens
  DOMAIN (635)..(656): Molybdenum cofactor biosynthesis proteins domain identified by eMATRIX, accession number BL01078B, p-value=6.400e-23, raw score of 14.20
  DOMAIN (547)..(879): Molybdenum cofactor biosynthesis protei domain identified by PFam, accession name MoCF_biosynth, E-value=4.5e-91, PFam score of 316.0
MLVLPLFQPFMRILDHDDSSIDHRPDGNRNATQRHNIGIQSLEVHDNKSNTQPQRQRNNRHQRRAHMPEKQRTDYRRDPLESPKAAAACLFPAIADPNTPPVFTPPASLPTTGMLIRHHSEMTHRCLIRSMTVARAVIGVAICNKGLPATMMALAAQHNIATVLVPGGATLPAKDGEVNGKVQTIGARFANGELSLQDARRAGCKACASSVRRSCQFLGTAGTSQVVAEGLGLAIPHSALAPSGEPVWREIARASARAALNLSQKGITTREILTDKAIENAMTVHAAFGGSTNPLLHIPAIAHQAGCHIPTVDDWIRINKRVPRLVSVLPNGPVYHPTVNAFMAGGVPEVMLHLRSLGLLHEDVMTVTGSTLKENLDWWEHSERRQRFKQLLLDQEQINADEVIMSPQQAKARGLTSTITFPWQYAWILHPDLDPETLLKLLISLRRFWAETPVGKNRITQMTNARHRTGFQGVTIHHTGVQFMGFITRKDSANSGVKQWTLFQQTHRFRHHIQRTFARFQHFLPGFNNGRQRLDVASVFMEFTTGLMSLDTALNEMLSRVTPLTAQETLPLVQCFGRILASDVVSPLDVPGFDNSAMDGYAVRLADIASGQPLPVAGKSFAGQPYHGEWPAGTCIRIMTGAPVPEGCEAVVMQEQTEQMDNGVRFTAEVRSGQNIRRRGEDISAGAVVFPAGTRLTTAELPVIASLGIAEVPVIRKVRVALFSTGDELQLPGQPLGDGQIYDTNRLAVHLMLEQLGCDVINLGIIRDDPHALRAAFIEADSQADVNSGNVSKACKFMGVSRDTFYRYRELVAEAGVDAQINRSRRAPNLKNRTDEATEQAVVDYAVAFPTHGQHRASNELRKQGVFISDSGVRSVWLLHNLENLKRRY

SEQ ID NO: 39560 - protein, 301 aa, Homo sapiens
  DOMAIN (167)..(188): RHS PROTEIN SIGNATURE domain identified by eMATRIX, accession number PR00394B, p-value=1.276e-10, raw score of 10.76
  misc_feature (1)...(301): Xaa = X or * as defined in Table 2
VSRIHVLVWQPRMPAPPAVDWLTYGSGILSGNKLVGTPLVEYTRDSLHRETLRSFASMAGSNAAYXLTSTDTPAGQLQSQHLNSLVYDRDYGWSDNGDLVRISGPRQTREYGYSATGRLESVRTLAPDLDIRIPYATDPAGNRLPDPELHPDMRADGGATGQKVEPEYTPARKAHLYHWTTGDCRWRLSAKTAIRVERGIXXMGQPAYXGEPHHVYQPRXTWHWRWRQKGRKSASGRRYLRPINPNNVGRENQRPTSPDGTHMAPISLMAWQPIQLRYRGHVRQRLSAVGERIYRYLPPAG

SEQ ID NO: 39561 - protein, 469 aa, Homo sapiens
  DOMAIN (238)..(293): Sigma-54 interaction domain proteins ATP-binding region A proteins domain identified by eMATRIX, accession number BL00675B, p -value=5.966e-37, raw score of 24.07
  DOMAIN (153)..(384): Sigma-54 transcription factors domain identified by PFam, accession name sigma54, E-value=2.2e-142, PFam score of 486.4
  misc_feature (1)...(469): Xaa = X or * as defined in Table 2
MECDASALLRYDSRQFIPLAIDGLAKDVLGRRFALEGHPRLEAIARAGDVVRFPADSELPDPYDGLIPGQESLKVHACVGLPLFAGQNLIGALTLDGMQPDQFDVFSDEELRLIAALAAGALSNALLIEQLESQNMLPGDATPFEAVKQTQMIGLSPGMTQLKKEIEIVAASDLNVLISGETGTGKELVAKAIHEASPRAVNPLVYLNCAALPESVRKSELFGHVKGAFTGAISNRSGKFEMADNGTLFLDEIGELSLVLQAKLLRVGQYGDIQRVGDDRCLRVDVRVLAATNRDLREEVLAGRFRADLFHRLSVFPLSVPPLRERGDDVILLAGYFCEQCRLRQGLSRVVLSAGARNLLQHYSFPGNVRELEHAIHRAVVLARATRSGDEVILEAQHFAFPEVTLPTPEVAAVPVVKQSLREATXAFQRETIRQALAQNRRKWTACARMLETSVANVHRLGKRLVLKK

SEQ ID NO: 39562 - protein, 137 aa, Homo sapiens
  DOMAIN (3)..(88): Molydopterin dinucleotide binding dom domain identified by PFam, accession name Molydop_binding, E-value=6e-16, PFam score of 66.4
PQFLIPSVTPCMFIHPLDAKARDLRRGDKVKVVSRRGEVISIVETRGRNRPPQGLVYMPFFDAAQLVNKLTLDATDPLSKETDFKKCAVKLEKACPYDTLKLATLASGLSAGTPYFVARDIPCEMCEDIPCAKVCPS

SEQ ID NO: 39563 - protein, 304 aa, Homo sapiens
  DOMAIN (177)..(286): Molydopterin dinucleotide binding dom domain identified by PFam, accession name Molydop_binding, E-value=6.3e-29, PFam score of 109.5
  misc_feature (1)...(304): Xaa = X or * as defined in Table 2
RHPPIPAKIGLHAVAQDRANNMQAGPNINEERMPGWRDPRNFIIVSDPYPTVSALAADLTPEVSKFPGSELAEDQLNDESRELGFYLQKGLFEEYAWFGRGHGHDLAPFDDYHKARGLRWPVVNGKETQWRYSEGNDPYVKAGEGYKFYGKPDGKAVIFALPFEPAAEAPDEEYDLWLSTGRVLEHWHTGSMTLRVPXLHRAFPDAGLFIYPLDAKARDLRRGDKVKVVSRRGEVISIVETRGRNRPPQGLVYMPFFDAAQLVNKLTLDATDPLSKETDWPHFSSTYNGPLLQGANKGILVQQH

SEQ ID NO: 39564 - protein, 1058 aa, Homo sapiens
  DOMAIN (31)..(70): DNA mismatch repair proteins mutS family proteins domain identified by eMATRIX, accession number BL00486B, p-value=2.038e- 29, raw score of 26.86
  DOMAIN (301)..(715): MutS family, N-terminal putative DNA binding domain identified by PFam, accession name MutS_N, E-value=0.002, PFam score of -162.0
  misc_feature (1)...(1058): Xaa = X or * as defined in Table 2
MEREQDSIIMDAATRRNLEITQNLAGGAENTLASVLDCTVTPMGSRMLKRWLHMPVRDTRVLLERQQTIGALQDFTAGLQPVLRQVGDLERILARLALRTARPRDLARMRHAFQQLPELRAQLETVDSAPVQALREKMGEFAELRDLLERAIIDTPPVLSWMSGARWLTARPIICNYEVDRTIRHTKMNVGDVQRLSVAVVVNYKTLPDGKPLPLSNEQMKQIEDLTREAMGFSEKRGDSLNVVNSPFNSSDESGGELPFWQQQALLFVFAQADFHRIFHFLAGLRLLLYSFHRLSDRLRRLNQQERLPLSPGRAKNLLAHSQYAFLIQMWGAGPTFWRNCMMYHIPGVLSPQDVARFREQLEQPEWVDGRITTGAQGAQVKNNQQVDTRSTLYAALQNEVLNAVNQHALFFAAALPRTLSTPLFNRYQNNETYGFHVDGAVRSHPQNGWMRTDLSATLFLSDPQSYDGGELVVNDTFGQHRVKLPAGDLVSVSLQQPALRDTRNHAAYEWHHLCGSSRXSAMIKSAPCCLNWTTIFSRXKRWLHMPVRDTRVLLERQQTIGALQDFTAGLQPVLRQVGDLERILARLALRTARPRDLARMRHAFQQLPELRAQLETVDSAPVQALREKMGEFAELRDLLERAIIDTPPVLSWMSGARWLTARPIICNYEVDRTIRHTKMNVGDVQRLSVAVVVNYKTLPDGKPLPLSNEQMKQIEDLTREAMGFSEKRGDSLNVVNSPFNSSDESGGELPFWQQQALLFVFAQADFHRIFHFLAGLRLLLYSFHRLSDRLRRLNQQERLPLSPGRAKNLLAHSQYAFLIQMWGAGPTFWRNCMMYHIPGVLSPQDVARFREQLEQPEWVDGRITTGAQGAQVKNNQQVDTRSTLYAALQNEVLNAVNQHALFFAAALPRTLSTPLFNRYQNNETYGFHVDGAVRSHPQNGWMRTDLSATLFLSDPQSYDGGELVVNDTFGQHRVKLPAGDLVLYPSSSLHCVTPVTRGVRVASFMWIQSMIRDDKKRAMLFELDNNIQSLKSRYGESEEILSLLNLYHNLLREWSEI

SEQ ID NO: 39565 - protein, 106 aa, Homo sapiens
  misc_feature (1)...(106): Xaa = X or * as defined in Table 2
SCSIQLSPWILPRTVMCVPGFTCELLSTXWLAKEPLKTVSWITIRSFTAETSTFGPTMTASMTFLPTYCSIIASLLSSFKLAAAILNSLPQIGRYITIGSGVRRNA

SEQ ID NO: 39566 - protein, 284 aa, Homo sapiens
  DOMAIN (188)..(227): DNA mismatch repair proteins mutS family proteins domain identified by eMATRIX, accession number BL00486B, p-value=7.511e- 18, raw score of 26.86
  DOMAIN (8)..(70): Iron-containing alcohol dehydrogenases domain identified by PFam, accession name Fe-ADH, E-value=5.2e-23, PFam score of 83.5
  misc_feature (1)...(284): Xaa = X or * as defined in Table 2
MANRMILNETAWFGRGAVGALTDEVKRRGYQKALIVTDKTLVQCGVVAKVTDKMDAAGLAFAIYDGVVANQHYCRQDSSEDFAEMSLIEGRRGLRRRPLWEFEIDTARQQLNLQFGTRDLVGFGVENAPRGLCAAGCLLQYAKDTQRTTLPHIRSITMEREQDSIIMDAATRRNLEITQNLAGGAENTLASVLDCTVTPMGSRMLKRWLHMPVRDDPRVAXAPANYWRIAGFHRRATAGTASGRRPGTYSGTSGFTNCSPTRSGPYAPRFPATAGAACAVRNCR

SEQ ID NO: 39567 - protein, 124 aa, Homo sapiens
  DOMAIN (84)..(99): SYNTHETASE LIGASE PROTEIN ALANYL domain identified by eMATRIX, accession number PD01168L, p-value=2.154e-12, raw score of 9.47
  DOMAIN (46)..(113): DHHA1 domain identified by PFam, accession name DHHA1, E- value=2.4e-07, PFam score of 37.8
MTLDRASKADVQKRVLEKTKQFIDSNPNQPLVILEMESGASAKALNEALKLFKMHSPQTSAIALHANRGFKASEWVQQVSGLMDGKGGGKDVSAQATGKNVGCLQEALQLATSFAQLRLGDVKN

SEQ ID NO: 39568 - protein, 95 aa, Homo sapiens
  misc_feature (1)...(95): Xaa = X or * as defined in Table 2
PNLYLRFFFFFFLRQESHSVTQAGVQWCNLSSLQPLPPGFKQFSHLTGLPKCWDYRSKRPRPANQTSILDVKEDPYXLHWPRSNRDIKLNLVANP

SEQ ID NO: 39569 - protein, 86 aa, Homo sapiens
  misc_feature (1)...(86): Xaa = X or * as defined in Table 2
VQPGGCGLXRQHGSYRPESRTAGGRHRGXRRLRRAFIDGGANSSGTGICRDAFNRISHWTGRTGRPDVDSGEHRKTAEQRRDGAVR

SEQ ID NO: 39570 - protein, 58 aa, Homo sapiens
IRRVPVLPGRWRGSFRCTSRCAAGCKRCQNQPAFSPSRCAHRRGRAGRYLHVAGWYKR

SEQ ID NO: 39571 - protein, 708 aa, Homo sapiens
  DOMAIN (371)..(418): Initiation factor 2 proteins domain identified by eMATRIX, accession number BL01176E, p-value=1.000e-40, raw score of 25.77
  DOMAIN (351)..(502): Elongation factor Tu family domain identified by PFam, accession name GTP_EFTU, E-value=8.8e-12, PFam score of 42.4
  misc_feature (1)...(708): Xaa = X or * as defined in Table 2
MNALSKARQYVEEFDGNIASFIFSGKPGTGKNHLAAAICNELLLRERNLGESEIHTTSDHMVTATLPGETQTWPEDFRDVEQRQQVVIFQHLVGCVKVDGKYIQVCTFTVGGNYGGTCLRGDESLVIKKESDIEPLIVVTVVQQFHIGNGYVVITITPSEGERYQGVVGLEGRIRRTRRIRHKQSARCYNLRFKPTCAITQTTPTEVSPVLKKQLVLVPNPHYPGNKPNFKRVSVKIIGESASRRLQLSRGDIDIADALSDRFVSEAITAKVEAAIKNXLSQYGILPEEWGGESQFVHVSAKAGTGIDELLDAILLQAEVLELKAVRKGMASGAVIEFPSLDKGRGPVVTVLVREGTLHKGDIVLCGFEYGRVRAMRNELGQEVLEAGPSIPVEILGLSGVPAAGDEVTVVRDEKKAREVALYRQGKFREVKLARQQKSKLENMFANMTEGEVHEVNIVLKADVQGSVEAISDSLLKLSTDEVKVKIIGSGVGGITETDATLAAASNAILEGLFTLTSQDEFVIAPGFSTDPLEEQHSVVSGLLHKYHNRALLLVKGGCAVNCRYCFRRHFPYAENQGNKRNWQTALEYVAAHPELDEMIFSGGDPLMAKDHELDWLLTQVVHQHDVGRRVQRLPFIHDALFHQQFFNQHQTTFGQVHLARFFVHREVDSILFRRISVLKKMMSPHRVKDRCYCAQFICPWTRICVDV

SEQ ID NO: 39572 - protein, 478 aa, Homo sapiens
  DOMAIN (220)..(267): Initiation factor 2 proteins domain identified by eMATRIX, accession number BL01176E, p-value=1.000e-40, raw score of 25.77
  DOMAIN (337)..(470): Initiation factor 2 domain identified by PFam, accession name IF2, E-value=7.8e-82, PFam score of 285.3
  misc_feature (1)...(478): Xaa = X or * as defined in Table 2
GKGNDEKKLVSDQXMGTAXRQRIHPIPSIIPLLWYPEGPSVSRPEAGGYNSLLMVTHGKVINGGRGILIESDEPGDARXSSGSCARHGLVFWLCSCRRCMPQTIEAIQHPNAVAVNKIDRPEADPDRVKYVLSQYGILPEEWVGESQFVHGSAKAGTGIDELLDAILLQAEVLELKAVRKGMASGAVIESFLDKGRGPVATVLVREGTLHKGDIVLCGFEYGRVRAMRNELGQEVLEAGPSIPVEILGLSGVPAAGDEVTVVRDEKKAREVALYRQGKFREVKLARQQKSKLENMFANMTEGEVHEVNIVLKADVQGSVEAISDSLLKLSTDEVKVKIIGSGVGVIEAESLDLRYYSVIYNLIDEVKAAMSGMLSPELKQQIIGLAEVRDVFKSPKFGAIAGCMVTEGVVKRHNPIRVLRDNVVIYEGELESLRRFKDDVNEVRNGMECGIGVKNYNDVRTGDVIEVFEIIEIQRTIA

SEQ ID NO: 39573 - protein, 249 aa, Homo sapiens
  DOMAIN (94)..(139): Respiratory-chain NADH dehydrogenase subunit 1 proteins domain identified by eMATRIX, accession number BL00667C, p-value= 3.189e-28, raw score of 15.17
  DOMAIN (10)..(155): NADH dehydrogenases domain identified by PFam, accession name NADHdh, E-value=4.9e-20, PFam score of 75.3
MTDLYACGGDLITLIYLLALFRFFFALSGLDTGSPFAGVGASRELTLGILVEPMLILSLLVLALIAGSTHIEMISNTLAMGWNSPLTTVLALLACGFACFIEMGKIPFDVAEAEQELQEGPLTEYSGAGLALAKWGLGLKQVVMASLFVALFLPFGRAQELSLACLLTSLVVTLLKADKVAVTLTLVNVGDVALFGLVIDRVSTLILFVVVFLGLLVTIYSTGYLTALEIPGYRLSSIPASAIAISRFT

SEQ ID NO: 39574 - protein, 154 aa, Homo sapiens
  misc_feature (1)...(154): Xaa = X or * as defined in Table 2
PPNLARCSPSAMARQSPIRSPRRPLAPSPALRAPSPAPPHAARLAVPRQAXGLLLLALIAVSTHIEMISNTLAMGWNSPLTTVLALLACGFACFIEMGKIPFDVAASWIIMIWSQSSTCTAPTLKPLRSVTLMRLTPVSARDLVGYFATAVRLP

SEQ ID NO: 39575 - protein, 42 aa, Homo sapiens
  misc_feature (1)...(42): Xaa = X or * as defined in Table 2
CDPTQRKPLYWLQALRRGLPIWRNQRFRKAVRXMAMAPMFSR

SEQ ID NO: 39576 - protein, 252 aa, Homo sapiens
  DOMAIN (166)..(211): Respiratory-chain NADH dehydrogenase subunit 1 proteins domain identified by eMATRIX, accession number BL00667C, p-value= 3.189e-28, raw score of 15.17
  DOMAIN (16)..(205): NADH dehydrogenases domain identified by PFam, accession name NADHdh, E-value=5.5e-33, PFam score of 121.7
  misc_feature (1)...(252): Xaa = X or * as defined in Table 2
HTTGGNPLYGISRQIARXQSRVGPGFCQDYRDIHKLFKRQEVAPTSSGLMFRLMPWVLISSMLVLAMALPLFITVSPFAGGGDLITLIYLLALFRFFFALSGLDTGSPFAGVGASRELTLGILVEPMLILSLLVLALIAGSTHIEMISNTLAMGWNSPLTTVLALLACGFACFIEMGKIPFDVAEAEQELQEGPLTEYSGAGLALAKWGLGLKQVVMASLFVDLFLPFGRAQELSLACLLTSLVVTLLKRLL

SEQ ID NO: 39577 - protein, 209 aa, Homo sapiens
  DOMAIN (9)..(29): AROMATIC AMINO ACID PERMEASE SIGNATURE domain identified by eMATRIX, accession number PR00166G, p-value=7.366e-09, raw score of 9.11
CGSIIALVAIFKSFFGHYLGTLEGLNGLVLKFGYKGDKTKVSLGKLNTISMIFIMGSTWVVAYANPNILDLIEAMGAPIIASLLCLLPMYAIRKAPSLAKYRGRLDNVPHAITRVDLKEDGKGLKIVRQSLPYGTASGTHGLYFCAYCARLHNIEQQLLSMFGDTDAIKAYQSFLARSAFAVSQCIPVNTVYRAYSVIQNWIAITIRHV

SEQ ID NO: 39578 - protein, 142 aa, Homo sapiens
  DOMAIN (25)..(45): AROMATIC AMINO ACID PERMEASE SIGNATURE domain identified by eMATRIX, accession number PR00166G, p-value=7.366e-09, raw score of 9.11
LSRTGTKTTFAITLEYAASIIALVAIFKSFFGHYLGTLEGLNGLVLKFGYKGDKTKVSLGKLNTISMIFIMGSTWVVAYANPNILDLIEAMGAPIIASLLCLLPMYAIRKAPSLAKYRGRLDNVFVTVIGLLTILNIVYKLF

SEQ ID NO: 39579 - protein, 48 aa, Homo sapiens
  misc_feature (1)...(48): Xaa = X or * as defined in Table 2
VPLAVPYGRLWRTIFSPLPSSFRSTREXYESMLGRFFERTACLQQKQF

SEQ ID NO: 39580 - protein, 280 aa, Homo sapiens
  DOMAIN (162)..(182): AROMATIC AMINO ACID PERMEASE SIGNATURE domain identified by eMATRIX, accession number PR00166G, p-value=7.366e-09, raw score of 9.11
  misc_feature (1)...(280): Xaa = X or * as defined in Table 2
MSYLVWPFIASLVLISLSLIPYWNSAVIDQVDLGSLALTGHDGILITVWGGISTKVFPLNFPPNVFSFGVSKRKKXKKDFGRDFTERKCSQIISRASMLMVAVVMFFAFSCLFTLSPANMAEAKAQNIPVLSHLANHFASMTGTKTTFSITLEYAASIIALVAIFKSFFGHYLGTLEGLNGLVLKFGYKGDKTKVSLGKLNTISMIFIMGSTWVVAYANPNILDLIEAMGAPIIASLLCLLPMYAIRKAPSLAKYRGRLDNVFSTVIGLLTILNIVYQLF

SEQ ID NO: 39581 - protein, 121 aa, Homo sapiens
RAISMSFRMERPCCLSLPSSLCISSTRVTASSPLSGCSSCTLLWISWGRMVRNCSNTMQLQDLLLRAHLRPKPPMAKLLEPAEGFPGTSCLLEAEPSTIRDVVLIASQPASQPASQQGSQI

SEQ ID NO: 39582 - protein, 413 aa, Homo sapiens
MVNHLPVMMAAVVIAMAVMLLASKPLTRFVNQHPTVVVLCLSFLLMIGLSLVAEGFGFHIPKGYLYAAIGFSIIIEVFNQIARRNFIRHQSTLPLRARTADAILRLMGGKRQANVQHDADNPMPMPIPEGAFAEEERYMINGVLTLASRSLRGIMTPRGEISWVDANLGVDEIREQLLSSPHSLFPIQLYASLLLQVFFFAANIYGWYAWSRQTSQNEAELKIRWLPLPKALSWLAVCVVSIGLMTVFINPVFAFLTRVAVMIMQALGLQVVMPELQPDAFPFWDSCMMVLSIVAMILMTRKYVENWLLWVIINVISVVIFALQGVYAMSLEYIILTFIALNGSRMWINSALIHQVVLDLIQQGIVIVWRDHLHMQRLHRLLAYHPYMYLVHIADFRDFPAHTRLHFSDIQRY

SEQ ID NO: 39583 - protein, 535 aa, Homo sapiens
  DOMAIN (201)..(227): Orn/Lys/Arg decarboxylases family 1 pyridoxal-P attachment si domain identified by eMATRIX, accession number BL00703H, p-value= 4.522e-24, raw score of 15.34
  DOMAIN (3)..(325): Orn/Lys/Arg decarboxylase domain identified by PFam, accession name OKR_DC_1, E-value=3.8e-155, PFam score of 528.8
  misc_feature (1)...(535): Xaa = X or * as defined in Table 2
SRGFPRREFSGPSIKKKVDAPTQAQWPVHAVITNSTYDGLLYNTDWIKQTLDVPSIHLDSAWVPYTHFHPIYQGKSGMSGERGAGKVIFEPQXAHRMLAALSQGSLILIKGEYDQEAFSEAFMRHSPSSPSYPIGGSVETAAAMLRGNPGKRLINRSVERALHFRKEVQRLREESDGWFFDIWQPPQVDEAECWPVAPGEQWHGFNDADADHMFLDPVKVTILTPGMDEQGNMSEEGIPAALVAKFLDERGIVVEKTGPYNLLFLFSIGIDKTKAMGLLRGLTEFKRSYDLNLRIKNMLPDLYAEDPDFYRNMRIQDLAQGIHSRRVTASVSSGSQANQQVNFIGDQSTAALTLSVPSGDITVTNTAPQYMTATLQDKNGNPLKDKEITFSVPNDVASKFSISNGGKGMTDSNGVAIASLTGTLAGTHMIMARLANSNVSDAQPMTFVADKDRAVVVLQTSKAEIIGNGVDETTLTATVKDPSNHPVAGITVNFTMPQEGVYAMSLEYIILTFIALNGSRMWINSAREKRTQRND

SEQ ID NO: 39584 - protein, 200 aa, Homo sapiens
  misc_feature (1)...(200): Xaa = X or * as defined in Table 2
LRSAEDNDTREKNKQTNRSDSKLRLVETSGSPPTSSSQTPDPAFRYPKKYCVEDCSYRPEXPRITPDNRLLYGGGVVYGARDPDVVERLVVPKLLKTFPQLKGVKIDYRWTGNFLLTLSRMPQYGRLDTNIYYMQGYSGHGVTCNHLAGRLIAELLRGDAERFDAFANLPHYPFPGGRTLRVPFTTKSAAYYSLRDRLGV

SEQ ID NO: 39585 - protein, 161 aa, Homo sapiens
  DOMAIN (26)..(40): ubiH/COQ6 monooxygenase family proteins domain identified by eMATRIX, accession number BL01304A, p-value=6.921e-14, raw score of 8.05
  DOMAIN (27)..(72): Pyridine nucleotide-disulphide oxidoreducta domain identified by PFam, accession name pyr_redox, E-value=0.0017, PFam score of 14.5
  misc_feature (1)...(161): Xaa = X or * as defined in Table 2
RKPHRQRGEKAGRNRSVDGCCEKAMSVIIVGGGMAGATLALAISRLSHGALPVHLIEATAPESHAHPGFDGRAIALAAGTCQQLARIGVWQSLADCATAITTVHVSDRGHAGFGTLSRKITTWGLXQRSWARWIWYPFAKNYHLGALTTVVELQMGGKRLF

SEQ ID NO: 39586 - protein, 96 aa, Homo sapiens
IQRHGPHGAHFLFFIQWRTVDALTTVGEFHMGSSRVERKQQSSLEHNIQRLLASPTLENIGIILLGLGAGVTGIALEQPALIALGLVGGLYHLLNH

SEQ ID NO: 39587 - protein, 55 aa, Homo sapiens
TTRRSVMKLLLRNISMLVSLWPMQSIFWWKSTNWYVSITEIFVSTIWRILRYLRR

SEQ ID NO: 39588 - protein, 349 aa, Homo sapiens
  DOMAIN (38)..(59): GTP1/OBG GTP-BINDING PROTEIN FAMILY SIGNATURE domain identified by eMATRIX, accession number PR00326A, p-value=1.682e- 10, raw score of 8.75
  DOMAIN (35)..(221): ABC transporter domain identified by PFam, accession name ABC_tran, E-value=1.4e-66, PFam score of 234.6
MTTDQHQEILRTEGLSKFFPGVKALDNVDFSLRRGEIMALLGENGAGKSTLIKALTGVYHADRGTIWLEGQAISPKNTAHAQQLGIGTVYQEVNLLPNMSVADNLFIGREPKRFGLLRRKEMEKRATELMASYGFSLDVREPLNRFSVAMQQIVAICRAIDLSAKVLILDEPTASLDTQEVELLFDLMRQLRDRGVSLIFVTHFLDQVYQVSDRITVLRNGSFVGWGILRVTRRIELGNVGIPPVRIIFLWLPFDASIEEQRNLPPMVMANEFAPELELPTVHIDNLTAAFDALPQPLWIEFEADNKQHQHHPNLGKVQNRFGIGHQSQPPRANNAAGDQILSEALRIV

SEQ ID NO: 39589 - protein, 484 aa, Homo sapiens
MGKRYVQALGGSARVINLAQEANKQGDYRWSAELLKQVIAANPGDQVAKNLQANNFEQLGYQAESATWRGFYLTGAKELREGVHKFSHGTTGSPDTIRGMSVEMLFDFMAVRLDSAKAAGKNISLNFNMSNGDNLNLTLNDSVLNYRKTLQPQADASFYISREDLHAVLTGQAKMADLVKAKKAKIIGNGAKLEEIIACLDNFDLNGHQMTHVADKQQRASVQRNFRAIGGGVMTIVIQFTHDLPTVFLHFLLQSPLHQAQQVAVQQDFIFRINRRDRIFAVENGTDSSFDDNIVDVRRIVFANPPIGIDLQLNMQAVIFQQNAGRRSGIATRDSAEIVVKLHHAKAFRVHHLIAKNRRPFGARRNMTQLRTEALTEEDVIAQHQTRRFTIKEGFTDDKGLRQTVRAGLFGIFQLDTELTTIAQQALEITFIFRRSDDENFADTGQHQHRQRIVNHWLIVNRQQLLRYAARNRMQSGAGTARPG

SEQ ID NO: 39590 - protein, 44 aa, Homo sapiens
  misc_feature (1)...(44): Xaa = X or * as defined in Table 2
RCIALIAWLTLPVLRVTLKXRWRVARRXRAACWXSXWHHSALAP

SEQ ID NO: 39591 - protein, 119 aa, Homo sapiens
MKKKMLRAAREKGRVTLKGKPIRLTADLSAETLQARREWGPIFNILKEKNFQSRISYPAKLSFISEGEIKYFTDKQMLRDFVTTRPALKELLKEALNMGKGTTGTSHCKIMPNCKDHRG

SEQ ID NO: 39592 - protein, 1583 aa, Homo sapiens
  DOMAIN (1135)..(1172): FGGY family of carbohydrate kinases proteins domain identified by eMATRIX, accession number BL00933D, p-value=2.565e- 18, raw score of 24.01
  DOMAIN (1066)..(1273): FGGY family of carbohydrate kinases domain identified by PFam, accession name FGGY, E-value=1.1e-94, PFam score of 328.0
MAAVIEQIRRAVLALVTGVVHPGDIPVVWDIVWNATAAFIAVIIISLLLDESGFFEWAALHVLRWGYGPGRLPFNRIGLIRRITRRIRQRLLFGLVTFILLLNRSQNPAQDIQLLAFRARTGKQTAQFIHHLPRMVFTDKTGSSNGLAPQGQCSAQGELILNEKLAKQLVTAANWVKMQSDEGEINPVDILRWPGVMAAQEQDLDAIAAEILAALDGTLDDFIVARETEGQSGLKRVYHSPGAPDIREFTRDAIPDKDAQGGEVYLLSGPTMMMPGHGHGHMEHSNWRMINLPVGPLVDGKPIYTLYIALSIDFHLHYINDLTNKLIMTASVISILIVFIVLLAVHKGHAPIRSVSAQIQNITSKDLDVSLDPQTVPTELEQLVLSLNHTIERTEDALTRQPNLSADIAHEIRTPITNLTTQTEIALSQNLLIAGNLTCRIDSRHNRIACKDHAIGLIRHLTGEIILRQPLSDNIYGIYSCRRNVGNGHLRTVAMWINRQFFKPFSIACKYRSVSHSRLKPLPVANRDIPPAHCALMSEAQGLVHSPAPEQVIALLNKFAVFPSDYISDCANHSSGKSSAKLIWAAELSWMISISSTAFQNGTIEEELAWHYIMLAGRSCLQVRFHMAAYQSRPDANAVVHNHAVHCTAVSILNRSIPAIHYMIAAAGGNSIPCAPYATFGTRELSEHVALALKNRKATLLQHHGLIACEVNLEKALWLAHEVEVLAQLYLTTLAITDPVPVLSDEEIAVVLEKFKTYGLRIEEMILNETAWFGRGAVGALTDEVKRRGYQKALIVTDKTLVQCGVVAKVTDKMDAAGLAWAIYDGVVPNPTITVVKKGSVNTPETQTLFQSGWFVVGLLSQTLIVHMIRTRRVPFIQSCASWPLMIMTVIVMIVGIALPFSPLASYLQLQALPLSYFPWLVAILAGLNPGMIARISIKISDEQRSLRSQSSRLSADGQLQRKNVPGKLELQEKQGISYIYVTQHIGMMKHISDQVLVMHQGDGGTTANSASSANPENGSGTERISEQGLYAMRDVQVARLALFHGDPEKAKELTNEASALLSDDMTGLKAGTPVVGGLFDVVSTALCAGIEDEFTLNAVMGTWAVTSGITRGLRDGEAHPYVYGRYVNDGEFIVHEASPTSSGNLEWFTAQWGEISFDEINQAVASLPKAGGDLFFLPFLYGSNAGLEMTSGFYGMQAIHTRAHLLQAIYEGVVFSHMTHLNRMRERFTDVHTLRVTGGPAHSDVWMQMLADVSGLRIELPQVEETGCFGCPCARVGTGVYHNFSEAQRDLRHPAMPGGSPSLLMTICVESYSDVLWSVKTEQGPGYIYCLIEHQSTSNKLIAFRMMRYAIAAMQNHLDAGYKTLPMVVPLLFYHGIESPYPYSLCWLDCFADPKLARQLYASAFPLIDVTVMPDDEIMQHRRMALLELIQKHIRQRDLMGLTSCALPGCQKKEWLRRVSNPSCHFLPQVSTSSYDIVSTSSYDIVSTSSYDIVSTSSYDIVSTSSYDIVSTSSYDIVYTSSYDIVSTQPALWALSGVVSNAWPSPEVIVVGAGVAGLVAAKVLSDAGHKIRAGPIRLTGLP

SEQ ID NO: 39593 - protein, 1092 aa, Homo sapiens
  DOMAIN (1055)..(1081): Prokaryotic dksA/traR C4-type zinc finger domain identified by eMATRIX, accession number BL01102, p-value=7.980e-21, raw score of 15.99
  DOMAIN (1017)..(1087): Prokaryotic dksA/traR C4-type zinc finge domain identified by PFam, accession name zf_dskA_traR, E-value=5e-26, PFam score of 99.9
MVKQMVQTTDQAKSNQRRLFERDTRYASAQPQQDDADIFQGVVSQQALDVVLHQRIQTTDKRGDHAEHQQRDPPPQRKQRGSGAEAFALCGTHAVQRNNHRQQPKPITPSSQISEPSGSCSYAYPAGADPACRNVPQQTLEIPGTLVDPSPDSQKSDAFDARRNMTQLRTEALTQEDVIAQHQTRRFTIKEGFTDDKGLRQTVRAGLFGIFQLDTELTTIAQQALEITFIFRRSDDENFADTGQHQHRQRIVNHWLIVNRQQLLRYAAPLIVPIAVRLGLGSVLGYLIAGCIIGPWGLRLVTDAESILHFAEIGVVLMLTLETQRYSVRSRPADDLRDDEPGEKLRHRLDYRSGGYGGAGGYGFAVVLPDRAGFSAKQPVPATAKSCQIVETVEARKTLHQLTSKITSQQVAGRGRAGFVNDKFTIVNVATIDIRMRFTVTERRNSGARQIMPLTLKVNGKTEQLEVDTRTTLLDTLRENLHLIGTKKGCDHGQCGACTVLVNGRRLNACLTLAVMHQGAEITTIEGLGSPDNLHPMQAAFIKHDGFQCGYCTSGQICSSVAVLKEIQDGIPTHVTVDLVSKHRNNCRMPVISIAMLVGLMAMAALPPLNGFAGEWVIYQSFFKLSNSGAFVARLLGPLLAVGLAITGALAVMCMAKVYGVTFLGAPRTKEAENATCAPLLMSSIQYRRGGTGFRVTCWRSRVFADVFCVTGDSDWRGLGVIDSFGVHLPPVYHRLDAEAHFRPAPQQIDSMLEGFAPHIKPIKYCMVTVIMNGVMSEEDDFILRNGTNNAGGDLRVVKLTAMAAQHRPYGFDRIHFMPTVTTVFMRSVNIRQLYALSGQLKQPNITIYGITHRPHIVKTLLLYKPYRFPLPFADVYNHQRFDFFRLFHHAGGEVFVTGFGNHNVVFNTNADTAILFWHLCIRRNIQPWLYVAKAMHKERTMGVLSDQFINITFQDAEFYQAANHDAHHFTSDFQNGSSRTIQAQAGFERLQHNVVDFTLGLDHMNQPTFRDPVSRSAQKEELSLELCNRDRERKLIKKIEKTLNKVEEEDFGYCESSGVEIGIRRLEARPTADLCIACKPLPEIREKQMAG

SEQ ID NO: 39594 - protein, 179 aa, Homo sapiens
  misc_feature (1)...(179): Xaa = X or * as defined in Table 2
RQKYSDWSSALVPTAGEPTRHTQTTRAGIAHAEADFAADILFLLCGKDISTAGGFSFVXLADNKQHLMPVCFANHLTVKMPHQSPVPDHQALISHRIRSSRGSCSRYSADNSVSRTPLSPTPGRSTMVIKCSPICRRKRKGSRVQAATSLTGDTSPANRALQRLLFPAPVLPMMPITGS

SEQ ID NO: 39595 - protein, 87 aa, Homo sapiens
SHIFHMPLPPGAPPHPASSLLHDAGDTSRMSHPAGFDTAAAWLCDYRRRTDNRAFRLRYAVDHRPAAMPRLPPDAAPADPALPLLSR

SEQ ID NO: 39596 - protein, 42 aa, Homo sapiens
RITCTGRYIADRRYFTGKQGIAKATLSRPSFTHDADHWLVVG

SEQ ID NO: 39597 - protein, 262 aa, Homo sapiens
  DOMAIN (1)..(196): Dehydratase family domain identified by PFam, accession name ILVD_EDD, E-value=4.7e-08, PFam score of -153.9
  misc_feature (1)...(262): Xaa = X or * as defined in Table 2
MCSHAAGCTIPDVEHWTRINRKVPRLVSVLPNGPDYHPTVRAFLAGGVPEVMLHLRDLGLLHLDAMTVTGQTVGENLEWRPEPGAFRQCLREQDGVEPDDVILPPEKAKAKGLTSTVCFPTGNIAPEGSVIKATAIDPSVVGEDGVYHHTGRVRVFVSEAQAIKAIKRVVIVACGFSPTRTAHAASDIDITNTVDLRNRRSQLRRGEIVQFIPANKYRTSAXGSXLAHPTGSLCDXVGRLDIPLAANFVQRXSPPGISPTPV

SEQ ID NO: 39598 - protein, 86 aa, Homo sapiens; identical to SEQ ID NO: 39569
  misc_feature (1)...(86): Xaa = X or * as defined in Table 2

SEQ ID NO: 39599 - protein, 58 aa, Homo sapiens; identical to SEQ ID NO: 39570

SEQ ID NO: 39600 - protein, 707 aa, Homo sapiens
  DOMAIN (370)..(417): Initiation factor 2 proteins domain identified by eMATRIX, accession number BL01176E, p-value=1.000e-40, raw score of 25.77
  DOMAIN (257)..(499): Elongation factor Tu family domain identified by PFam, accession name GTP_EFTU, E-value=3.8e-17, PFam score of 60.4
  misc_feature (1)...(707): Xaa = X or * as defined in Table 2
MNALSKARQYVEEFDGNIASFIFSGKPGTGKNHLAAAICNELLLRERNLGESEIHTTSDHMVTATLPGETQTWPEDFRDVEQRQQVVIFQHLVGCVKVDGKYIQVCTFTVGGNYGGTCLRGDESLVIKKESDIEPLIVVTVVQQFHIGNGYVVITITPSEGERYQGVVGLEGRIRRTRRIRHKQSARCYNLRFKPTCAITQTTPTEVSPVLKKQLVLVPNPHYPGNKPNFKRVSVKIIGESASRRLQLSRGDIDIADALSDRFVSEAITAKVEAAIKNXLSQYGILPEEWGGESQFVHVSAKAGTGIDELLDAILLQAEVLELKAVRKGMASGAVIESFLDKGRGPVATVLVREGTLHKGDIVLCGFEYGRVRAMRNELGQEVLEAGPSIPVEILGLSGVPAAGDEVTVVRDEKKAREVALYRQGKFREVKLARQQKSKLENMFANMTEGEVHEVNIVLKADVQGSVEAISDSLLKLSTDEVKVKIIGSGVGGITETDATLAAASNAILEGLFTLTSQDEFVIAPGFSTDPLEEQHSVVSGLLHKYHNRALLLVKGGCAVNCRYCFRRHFPYAENQGNKRNWQTALEYVAAHPELDEMIFSGGDPLMAKDHELDWLLTQVVHQHDVGRRVQRLPFIHDALFHQQFFNQHQTTFGQVHLARFFVHREVDSILFRRISVLKKMMSPHRVKDRCYCAQFICPWTRICVDV

SEQ ID NO: 39601 - protein, 732 aa, Homo sapiens
  DOMAIN (264)..(275): POTATO INHIBITOR I SIGNATURE domain identified by eMATRIX, accession number PR00292C, p-value=1.000e-09, raw score of 7.18
MIAITGATGQLGHYVIESLMKTVPASQIVAIVRNPAKAQALAAQGITVRQADYGDEAALTSALQGVEKLLLISSSEVGQRAPQHRNVINAAKAAGVKFIAYTSLLHADTSPLGLADEHIETEKMLADSGIVYTLLRNGWYSENYLASARHGGLSMDCRCSHSKSILRGSLSSEFFCREKMVFGSDSAINMASQHINIHTTGVMSENVTTAGGKPGNVLTRMPVASGSSAPRVVVEEGQFRHDTQAHRFPQQAADETRSFLQRFDARFNRVFIFVVEERHIYFGIRQVARHFDTGNGGGRAVHVDLIRRASVTSGNPCRMQRKRLIPHGTLKTLSNGTLDLDDFEYFDHIASADVVVVLNADTTFHTVTDFVNVIFEAAQGLQLAFVDNHVVTQNADRVVTFNHTFGNHTACDGTKFRRFEHVTNFRQTDNLLFQFRRQHTAHRRFHFVNQVIDDGVVTQIQAFRFNHTYARTDDLHFNFVSRQFQQGVGDRFDRTLYVCLQDDIHFVNFAFGHVGEHVLEFRFLLTRQFNFAEFTLTIECNFTRFLLVTYNGNFITRSRYAGQAEDFHRNGRTRFQHFLTQFVTHRTNTTVFEATQNDIALVQSTFTYQNGSNRTTTFIEEGFDNRTARHTFTYRFQLQNFRLQQDSVQQFIDTGTRFRRSVYELAFTDPLFRQDAVLGEYVLNAIRISFWSIDLVHCAAFGCWIASMVCGIHRRQEHNQNTSPCLAHEPLD

SEQ ID NO: 39602 - protein, 272 aa, Homo sapiens
  DOMAIN (136)..(184): kw DIHYDROFLAVONOL YOL151W YDR541C YGL157W domain identified by eMATRIX, accession number DM00934A, p-value=3.143e-10, raw score of 20.07
  misc_feature (1)...(272): Xaa = X or * as defined in Table 2
ITQYCDSFTICLSKGLGTPVGSLLVGNRDYIKRAIRWRKMTGGGMRQSGILAAAGIYALKNNVARLQEDHDNAAWMAEQLRETGADVMRQDTNMLFVRVGEENAAALGEITXKPRNVLINASPIVRLERDVPQRILVLGASGYIGQHLVRTLSQQGHQILAAARHVDRLAKLQLANVSCHKVDLSWPDNLPALLQDIDTVYFLVHSMGEAAIYRSSAGVASVSSVFRYCLRPSYDPRVFPCFLCCRALLVLPCRLIYSPLSFALVLSLAPIK

SEQ ID NO: 39603 - protein, 86 aa, Homo sapiens
  misc_feature (1)...(86): Xaa = X or * as defined in Table 2
SRMCVAIRSRNQRSCEITIAQPGNSSRAFSSARRVSISRSLVGSSSSSMLPPTCSSFARCRRPRSPPESSPTRLPXSTPLKLKRPT

SEQ ID NO: 39604 - protein, 169 aa, Homo sapiens
  misc_feature (1)...(169): Xaa = X or * as defined in Table 2
VATRCSRSPSPSLSPSLSLRVMIPTTSAYSFMITAKSSPAVLKLSNASERVNVSGTISVLRICTPLFSARLWLASTRFSRSLESTXPMMWSISSLQTRNLECGCSATLFFRLCSSSWRSNTNDVFTAVTLITERDGIPAQRRFQSARVPVYVTRPPAHRLPLPRRCHQK

SEQ ID NO: 39605 - protein, 316 aa, Homo sapiens
  DOMAIN (1)..(185): Domain of unknown function DUF21 domain identified by PFam, accession name DUF21, E-value=5.8e-10, PFam score of 46.5
MSEISLAASRKIKLKLLADEGNINAQRVLNMQENPGMFFTVVQIGLNAVAILGGIVGDAAFSPAFHSLFSRYMSAELSEQLSFILSFSLVTGLFILFADLTPKSIVWPRCVLFTAGNNFGLTDSEVRKTTVKNRGKTTPEVFMKSTINWPRRYTTQAFGSSFGADTTLSKELKDSGAKKKSLQETDKHWQWLTWRTLEIFTMKGSRRPRSPSDSCTESKSDHAGESGRVTSGLMNMRLGIADTKVLGHATGYGHRCVTNDTDMEMTRKWICRGICELRRIGMPNASAVSCRRPYVLTVAKLPPFAPIIAHRYCLTG

SEQ ID NO: 39606 - protein, 221 aa, Homo sapiens
MHSLQCLAHPSQTWGRNSQSHQFLLTNPLAPPPADSVQDSPKSSVVRASSTCRWPQPRRYTTQAFGSSFGADTTLSKELKDSGAKKKSLQETDKHWQWLTWRTLEIFTMKGSRRPRSPSDSCTESKSDHAGESGPAPEMEVSTPVTGLCSVIPALEALYHPPRELGPTHSPDPGTGLCPISLALQAWYGLSRFPAFSPDPELISAHNQPRTHNTNNRNNKP

SEQ ID NO: 39607 - protein, 133 aa, Homo sapiens
  misc_feature (1)...(133): Xaa = X or * as defined in Table 2
IILGSMAIFTILILPIHEQGMFFHLFVTSFILLSSGLXFSLKRSFTSLVSCIPRYFILFVAIVNGSSLVIWLSVFLLFVYRNACDFCTLILYPETLLKLLISLRRFWAETLGFSKYTIMSSANRDNLTSSFPN

SEQ ID NO: 39608 - protein, 26 aa, Homo sapiens
LDRDGTEFINYLGQYGHFHDIDSSYP

SEQ ID NO: 39609 - protein, 137 aa, Homo sapiens
  DOMAIN (35)..(78): kw TRANSCRIPTASE REVERSE II ORF2 domain identified by eMATRIX, accession number DM01354T, p-value=3.800e-16, raw score of 9.48
MDKFLDTYTLPRLNQEEVESLNRPITRSEIEAITNSLPTKKVQDQMDSQPNSTRVLEVLARAIRQEKEIKGIQLVKEEVKLSLFADDMIVYLENPIVSAQNLLKLIGNFSKVSGYKIMCKNHKHSYTPITDKQRAKS

SEQ ID NO: 39610 - protein, 33 aa, Homo sapiens
  misc_feature (1)...(33): Xaa = X or * as defined in Table 2
LLPLFQNLLLVYSGIXLLPGLVWKGCMHPGIYP

SEQ ID NO: 39611 - protein, 1046 aa, Homo sapiens
  DOMAIN (655)..(681): SYNTHETASE BETA CHAIN LIGASE PHENYLALANYL-TRNA domain identified by eMATRIX, accession number PD02410A, p-value=6.786e- 25, raw score of 12.66
  DOMAIN (39)..(341): Cytosol aminopeptidase family domain identified by PFam, accession name Peptidase_M17, E-value=1.5e-23, PFam score of 76.0
MLLGLHSLAAFLQRESFSGKQSWGCQLAALLQRRITKMTEAMKITLSTQPADARWGEKATYSINNDGITLHLNGADDLGLIQRAARKIDGLGIKHVQLSGEGWDADRCWAFWQGYKAPKGTRKVVWPDLDDAQRQELDNRLMIIDWVRDTINAPAEELGPSQLAQRAVDLISNVAGDRVTYRITKGEDLREQGYMGLHTVGRGSERSPVLLALDYNPTGDKEAPVYACLLGDIITYRNGKKVEVMNTDAEGRLVLADGLSDYRAERGSTRGTRLTLACHALLDCKTLTLTELGRNLPTKARTKHNIKRIDRLLGNRHLHKERLAVYRWHASFICSGNTMPIVLVDWSDIREQKRLMVLRASVALHGRSVTLYEKAFPLSEQCSKKAHDQFLADLASILPSNTTPLIVSDAGFKVPWYKSVEKLGWYWLSRPVHNTVCRLTTFGNSGHHQIGTTDDIAASKDFRVAGLEGVVAASGAMMRLVNPARRCVLPAHSNVLWTETNAMITASAGTICSEPATMLRAATAFGVRFAHFGTHHFYAADFAVTVHFNTQRLDVEFELYAFFPRVFHFAAGTRHVLFITTIGTGNVLRSWRTDVRTQSIAVSPPPRTTTRLPSMLTNAPVAFSELGISDDHSGIIELPADAPIGTDIREYLKLDDNTIEISVTPNRADCLGIIGVARDVAVLNQLPLVQPEIVPVGATIDDTLPITVEAPEACPRYLGRAYAYWSMELEDMISTDDAYVTGNADPISAQVSVSVTVVNHKRYELRSTQCRSRFSTYSVSPSLEDYNRRVPLAKHGGYFKETLEHTKDTLISSQAALNAAIQAYKANKALVMNTPLNRQPQVVEAADATKEAWLALKRTDIKSPVTGYIAQRSVQVGETKHYSRMYGLSIVLYSRGDPLVLHAGTDEVIMSPQQAKARGLTSTITFPVGNIAPEGSVIKSTAIDPSMIDEQGIYYHKGVAKVYLSEKSAIYDIKHDKIKAGDILVIIGVGPSGTGMEETYQVTSALKHLSYGKHVSLITDARFSGVSTGACIGHVGPEALAEAPIG

SEQ ID NO: 39612 - protein, 328 aa, Homo sapiens
  DOMAIN (160)..(185): ACRIFLAVIN RESISTANCE PROTEIN FAMILY SIGNATURE domain identified by eMATRIX, accession number PR00702E, p-value=6.000e- 13, raw score of 7.83
  DOMAIN (1)..(315): AcrB/AcrD/AcrF family domain identified by PFam, accession name ACR_tran, E-value=6.6e-95, PFam score of 328.7
  misc_feature (1)...(328): Xaa = X or * as defined in Table 2
MVRASGYLQTLDDFNHIVLKASENGVPVYLRDVAKVQIGPEMRRGIAELNGEGEVAGGVVILRSGKNAREVIAAVKDKLETLKSSLPEGVEIVTTYDRSQLIDRAIDNLSGKLLEEFIVVAVVCALFLWHVRSALVAIISLPLGLCIAFIVMHFQGLNANIMSLGGIAIAVGAMVDAAIVMIENARXTAGRVAAPASXRHAGXXNALAGQEGRLFGPLALHQNVCDGGCGAAGDRSDPDPDGLLDPWQNSAGKQXPAQSLFDSCLSSAVAESTALAENHAAGGGAFGADGSLAAQXSSPGEFLPQINEGDLLYMPCDAAQGIPQQRRR

SEQ ID NO: 39613 - protein, 24 aa, Homo sapiens
IALIILRYVLSIPSFLRVFSMKGC

SEQ ID NO: 39614 - protein, 35 aa, Homo sapiens
KLLQLPQPSATTSLISQQPSTMRQGSPPAKKMTAC

SEQ ID NO: 39615 - protein, 293 aa, Homo sapiens
MLKTDARQNLRLWVLEDESRMIGSNHLPECLRERMTQAAIAVVEDPFEIRLERLNEEYFLRMHHDFTHAYGDEQGWQEYCEYLHHGLSAIKRRLGLQRYNELAARLDAALTTQLTTGSTDGHLAWLVPLLEEYYDPMYRYQLEKKAEKVVFREVTLMLHTANPVIKHKAGLLNLAEELSNVSKACKIMGVSRDTFYRYRELVAEGGVDAQINRSRRAPNLKNRTDEATEQAVVDYAVAFPTHESQKTILNKFYQVTFRKKLYGVLDAVGATISTPAEPGLSAAVLGHGYRARL

SEQ ID NO: 39616 - protein, 273 aa, Homo sapiens
  DOMAIN (197)..(244): kw TRANSCRIPTASE REVERSE II ORF2 domain identified by eMATRIX, accession number DM01354V, p-value=1.273e-24, raw score of 12.97
  DOMAIN (7)..(210): Reverse transcriptase domain identified by PFam, accession name rvt, E-value=0.00019, PFam score of -6.4
MAYHFHVRKNKGLSLSGIIAAITGVRPQGPWGKLVDLMFLIATVGATRRATVGKDGGGEDGDCRMMTMRLPWMKIALQQVPAHLLETGCAASTSQNTLASIVGLGPELLEVLARAIRQEKEIKGVQLGKEKVKLSLFADDMIVYLENPIVSAQNLLKLISNFSKVSGYKINVQKSQAFLYTNNRQTESQIMSELPFTIASKRIKYLGIQLTRDVKDLFKENYKPLLNEIKEGVFMSVFDLMENINIDEKVGWLHVYAIEYLAADINIDALVSL

SEQ ID NO: 39617 - protein, 52 aa, Homo sapiens
  misc_feature (1)...(52): Xaa = X or * as defined in Table 2
VNSHSQLLQREXNTXESNLQGMXRTSSRRTTNHCSRKXKRIQTNGRTFHAHG

SEQ ID NO: 39618 - protein, 181 aa, Homo sapiens
  DOMAIN (120)..(150): Flocculin repeat proteins domain identified by eMATRIX, accession number PF00624I, p-value=4.189e-09, raw score of 9.10
  misc_feature (1)...(181): Xaa = X or * as defined in Table 2
LPRIPTVLTSGVRRDGWYRRFGRRPSGXPGNWSSSPVEKSATRTLRITGTSAIPSEAITGSSAVVRRVPAGKTTAPTEIKSTPVSANSRSVLSVTLPDTSSSALPLVRLTASRICSVSKLSSMMISAPAFRASSSSSRFSTSTSTGASGCSQDAFSTAWRTEPEAIIWFSLIRKASESPRR

SEQ ID NO: 39619 - protein, 1148 aa, Homo sapiens
  DOMAIN (539)..(564): ACRIFLAVIN RESISTANCE PROTEIN FAMILY SIGNATURE domain identified by eMATRIX, accession number PR00702E, p-value=6.000e- 13, raw score of 7.83
  DOMAIN (378)..(588): AcrB/AcrD/AcrF family domain identified by PFam, accession name ACR_tran, E-value=8.6e-107, PFam score of 368.2
MVDCFISLQIAGGGDDLQGIKKGLMEVADLIVINKDDGDNHTNVAIARHMYESALHILRRQYDEWQPRVLTCSALDKRGIDEIWHAIIDFKTALTASGRLQQVRQQQSVEWLRKQTEEEVLNHLFANEDFDRYYRQTLLALTADLMTGKRPQPAANPRPSAAPKWSKSPQGIFTDPQSYITYATALAYRGEKARLQHYLIENKPLFTTDAQEKSWLYLLSKYSANPVQALANYTVQFADNRQYVVGATLPVLLKEGQYDAAQKLLATLPANEMLEERYAVSVATRNKAEALRLARLLYQQEPANLTRLDQLTWQLMQNEQSREAADLLLQRYPFQGDARVSQTLMARLASLLESHPYLATPAKVAILSKPLPLAEQPEYMVRASGYLQTLDDFNHIVLKASENGVPVYLRDVAKVQIGPEMRRGIAELNGEGEVAGGVVILRSGKNAREVIAAVKDKLETLKSSLPEGVEIVTTYDRSQLIDRAIDNLSGKLLEEFIVVAVVCALFLWHVRSALVAIISLPLGLCIAFIVMHFQGLNANIMSLGGIAIAVGAMVDAAIVMIENAHKRLEEWQHQHPDATLDNKTRWQVLKAGLAALTLSGMSQAIAKDELLKTSNGHSKPKAKKSGGKRVVVLDPGHGGIDTGAIGRNGSKEKHVVLAIAKNVRSILRNHGIDARLTRSGDTFIPLYDRVEIAHKHGADLFMSIHADGFTNPKAAGASVFALSNRGASSAMAKYLSERENRADEVAGKKATDKDHLLQQVLFDLAAGPGKPNRSWWRVICANTSTEDDYRHRTRERAQILADEVGAEVIALSDIDERLREADIIISSTASPLPIIGKGMVERALKSRRNQPMLLSDDYPHNPNTEDLSQFSYTVRNNDYSLVYTVENNQLGLYKLTDLQQKDNLAAANPQVVKEMQGVVREFIDSSQPPLSEGRPLAPEAKEPVKLAQTMADMALRYVVITSVDRDDLRDGGAQHFADCITAIREKSPQIKIETLVPDFRGRMDRALDILTATPPDVFNHNLENVPRIYRQVRPGADYNWSLKLLERFKEAHPEIPTKSGLMVGLGETNEEIIEVMRDLRRHGVTMLTLGQYLQPSRHHLPVQRYVSPDEFDEMKAEALAMGFTHAACGPFVRSSYHADLQAKGMEVK

SEQ ID NO: 39620 - protein, 25 aa, Homo sapiens
LPWPELPTHKLPENMDYSYLLKNHI

SEQ ID NO: 39621 - protein, 84 aa, Homo sapiens
  misc_feature (1)...(84): Xaa = X or * as defined in Table 2
RPPPHRLSGCYHPSHRRPVHGFHHAXRQRQFRRXTVDTLPADAPLPSPHPAHFRPLTSIFCPVSTMADNASMXRNSCCRLSARG

SEQ ID NO: 39622 - protein, 823 aa, Homo sapiens
  DOMAIN (778)..(801): Dihydroxy-acid and 6-phosphogluconate dehydratases proteins domain identified by eMATRIX, accession number BL00886F, p-value= 2.552e-22, raw score of 13.15
  DOMAIN (378)..(811): Dehydratase family domain identified by PFam, accession name ILVD_EDD, E-value=2.4e-209, PFam score of 708.9
  misc_feature (1)...(823): Xaa = X or * as defined in Table 2
MTRLVGGPAFQLLTLFRDDRFRCAGDKAFVRQFVLDTADFTFNLRHFFRQTRQLIFFVDEASHRDQKLCTVDDLRTGNRTFVIRQACTVILFLTPPRFAGSHRVLINTTALHTALDPRSISFQRFAPAEVLPRRALRTALIATYGRDRDPGRPLWLGSVKSNIGHTQAAAGVAGVIKMVMAMRHGQLPRTLHVESPSPEVDWSAGTVQLLTENTPWPRSGRVRRVGVSSFGISGTNAHVILEQPPGVPSQSAGPGTEDSGFGVHPALLDAALHATAVRDMDDARLPFQWEGVSLHAKAAPALRVRVVPAGDDAKSLAGCDGTGRPCSGNRAAGADATEYSFPHRQFAHGVFRIALMNIQHLIHQRSVENPRQIFRRPAANAGNAAALFRLQADNGTTGMFDSLPYRNDASMVMRRLIRSLPDAKAVIGVASCDKGLPATMMALAAQHNIATVLVPGGATLPAKDGEDNGKVQTIGARFANGELSLQDARRAGCKACASSGGGCQFLGTAGTSQVVAEGLGLAIPHSALAPSGEPVWREIARASARAALNLSQKGITTREILTDKAIENAMTVHAAFGGSTNLLLHIPAIAHQAGGVPEVMLHLRSLGLLHEDVMTVTGSTLKENLDWWEHSERRQRFKQLLLDQEQINADEVIMSPQQAKARGLTSTITFPVGNIAPEGSVIKSTAIDPSMIDEQGIYYHKGVAKVYLSEKSAIYDIKHDKIKAGDILVIIGVGPSGTGMEETYQVTSALKHLSYGKHVSLITDARFSGVSTGACIGHVGPEALAGGPIGKLRTGDLIEIKIDCRELHGEVNRLALLPRVSGX

SEQ ID NO: 39623 - protein, 75 aa, Homo sapiens
  misc_feature (1)...(75): Xaa = X or * as defined in Table 2
SSFFQFCEEIHWXLDGDGIESINYLRQXGHFHKIDPSYPXAWNVLPFVCVLFHFIEQWFVVLLEEVLHIPCKLYS

SEQ ID NO: 39624 - protein, 893 aa, Homo sapiens
  DOMAIN (638)..(659): Molybdenum cofactor biosynthesis proteins domain identified by eMATRIX, accession number BL01078B, p-value=6.400e-23, raw score of 14.20
  DOMAIN (80)..(467): Dehydratase family domain identified by PFam, accession name ILVD_EDD, E-value=1.5e-91, PFam score of 317.6
  misc_feature (1)...(893): Xaa = X or * as defined in Table 2
MLVLPLFQPFMRILDHDDSSIDHRPDGNRNATQRHNIGIQSLEVHDNKSNTQPQRQRNNRHQRRAHMPEKQRTDYRRDPLESPKAAAACLFPAIADPNTPPVFTPPASLPTTGMFDSPPFRNDAXMVMRSLIRSMTVARAVIGVAICNKGLPATMMALAAQHNIATVLVPGGATLPAKDGEVNGKVQTIGARFANGELSLQDARRAGCKACASSVRRSCQFLGTAGTSQVVAEGLGLAIPHSALAPSGEPVWREIARASARAALNLSQKGITTREILTDKAIENAMTVHAAFGGSTNPLLHIPAIAHQAGCHIPTVDDWIRINKRVPRLVSVLPNGPVYHPTVNAFMAGGVPEVMLHLRSLGLLHEDVMTVTGSTLKENLDWWEHSERRQRFKQLLLDQEQINADEVIMSPQQAKARGLTSTITFPWQYAWILHPDLDPETLLKLLISLRRFWAETPVGKNRITQMTNARHRTGFQGVTIHHTGVQFMGFITRKDSANSGVKQWTLFQQTHRFRHHIQRTFARFQHFLPGFNNGRQRLDVASVFMEFTTGLMSLDTALNEMLSRVTPLTAQETLPLVQCFGRILASDVVSPLDVPGFDNSAMDGYAVRLADIASGQPLPVAGKSFAGQPYHGEWPAGTCIRIMTGAPVPEGCEAVVMQEQTEQMDNGVRFTAEVRSGQNIRRRGEDISAGAVVFPAGTRLTTAELPVIASLGIAEVPVIRKVRVALFSTGDELQLPGQPLGDGQIYDTNRLAVHLMLEQLGCDVINLGIIRDDPHALRAAFIEADSQADVNSGNVSKACKFMGVSRDTFYRYRELVAEAGVDAQINRSRRAPNLKNRTDEATEQAVVDYAVAFPTHGQHRASNELRKQGVFISDSGVRSVWLLHNLENLKRRY

SEQ ID NO: 39625 - protein, 640 aa, Homo sapiens
  DOMAIN (387)..(433): kw TRANSCRIPTASE REVERSE II ORF2 domain identified by eMATRIX, accession number DM01354O, p-value=1.000e-40, raw score of 8.73
  DOMAIN (1)..(595): Reverse transcriptase domain identified by PFam, accession name rvt, E-value=1.7e-17, PFam score of 71.5
MNIDAEILDKILANRIQQDIKKLIHHDQVGFIPGMQGWFNICKSINVIQHINRTNDENHMTISIDAEKAFDKIQQRFMLKTLNKLVLEVLARAIRQEKEIKGIQLGKEEVKLSLFADDMIVYLENPIVSAQNLLKLISNFSKVSGYKISVQKSQAFLYTNNRQTESQIMSKLPFTIASKQIKYLGIQLTRDVKDLFKENYKPLLNEIKEDTNKWKNIPCSWVGRINIMKMAILPKERSSSPATEQSWMENDFDELREEGFRRSNFSELKEKVRTHHKQDKNLEKRSWFFEKINKIDRPLARLIKKKREKSQINAIKNDKGDITADPTEIQTTITEYYKHLYANKLENLEAMDKFLDTYTLPRINQEEVESLNRPITGSETEAIINSLPTKKSPGPDGLTAEFYQRYKEELVPFLLKLFQSIEKERILPNSFYEGIILLIPKPGRDNTKKDNFKPISLMNMDAKILNKILANRIQQHIKKLIHHDQVGFIPGMQGWFQHMQINESNPSRKQNQMGIRIRREKVKLSLFADDMVVYLENPIVSAQNLLKLISNFSKVSGYKISVQKSQAFLYTNNRQTESQIMSELPFRIATKDNKIPRNPIYKGCEGPLPGELQTTVQRNKRGHKQMEEHSMLMDKKNQYP

SEQ ID NO: 39626 - protein, 256 aa, Homo sapiens
  DOMAIN (103)..(146): Cys/Met metabolism enzymes pyridoxal-phosphate attachment sit domain identified by eMATRIX, accession number BL00868D, p-value= 9.727e-29, raw score of 24.35
  DOMAIN (1)..(256): Cys/Met metabolism PLP-dependent enzy domain identified by PFam, accession name Cys_Met_Meta_PP, E-value=6.4e-72, PFam score of 252.4
  misc_feature (1)...(256): Xaa = X or * as defined in Table 2
AFGASLAQDKPNTGTGXKSPSHPLLRVLDIGKICHLARKVGAVSVVDNPFIRPALQNPLALRADLVLHSCTKYLNGHSDVVAGVVIAKDPDVVTELAWWANNIGVTGGAFDSYLLLRGLRTLVPRMELAQRNAQAIVKYLQTQPLVKKLYHPSLPENQGHEIAARQQKGFGAMLSFELDGDEQTLRRFLGGLSLFTLAESLGGVEKLISHAATMTHAGMAPKARAAAGISETLLRISTGIENGENLIADLENGFPA

SEQ ID NO: 39627 - protein, 597 aa, Homo sapiens
  DOMAIN (77)..(89): ABC transporters family proteins domain identified by eMATRIX, accession number BL00211A, p-value=2.385e-11, raw score of 12.23
  DOMAIN (72)..(248): ABC transporter domain identified by PFam, accession name ABC_tran, E-value=3.7e-12, PFam score of 53.8
  misc_feature (1)...(597): Xaa = X or * as defined in Table 2
MPEGRTTPAGNSHHYGALAHIQCRRAAVNDAIPRPQAKTRKALTPLLEIRNLTKSYDGQHAVDDVSLTIYKGEIFALLGASGCGKSTLLRMLAGFEQPSAGQIMLDGVDLSQVPPYLRPINMMFQSYALFPHMTVEQNIAFGLKQDKLPKAEIASRVNEMLGLVHMQEFAKRKPHQLSGATTCGPGPKPCEAPRNYYWSMSRWARSDKKLQARMQESRVGSRPRRSTVQLGDAAWRHASITLIPIYIGYEHVMEVELPGATKEKESRPQIVRGLSKLRNVGQGYVNFGEPMPLMTYLNQHVPDWRESIDPIEAVRPAWLTPTVNNIAADLMVRINNAGAANAMNLCCTALLASRQRSLTREQLTEQLNCYLDLMRNVPYSTDSTVQSASASELIDHALQMNKFEVEKDTIGDIIILPREQAVLMTYYRNNIAHMLVLPSLMAAIVTQHRHISRDVLMEHVNVLYPMLKAELFLRWDRDELPDVIDALANEMQPXWRRRAETLQRYAITFWLLSANPSIKRESRTVAQRLSVLHGINAPEFFDKAVFSSLVLTLRDEGYISDSGDAEPAETMKVYQLLAELITSDVRLTIESATQGEG

SEQ ID NO: 39628 - protein, 212 aa, Homo sapiens
MTDELREEGFRRSNYSELREDIQTKGKEVENFEKNLEECITRITNTEKCLKELMELKTKARELLRQANVQIQEIQRTPQRYSSRRATPRHIIVRFTKVEMKEKMLRAAREKGRVTLKGKPIRLTADLSAETLQARREWGPIFNILKEKNFQPRISYPAKLSFISEGEIKYFTDKQMLTDFVTTRPALKELLKEALNMERNNRYQPLQNHAKM

SEQ ID NO: 39629 - protein, 314 aa, Homo sapiens
MGKKQSRKTGNSKNQSASPPPKECSSSPATEQSWTENDSDKLREEGFRRSNYSELKEEVRNHGKEVKNLEKKLDEWLTRIINAENSLKDLMELKTKARELRDKCTSLSSQFDQLEERVSVMENQMNEMKREEKCREKRIKRNEQSLQEMWDYVKRPNLRLIGVPETKQANIQIQEIQRTPKRYSSRRLTPRHVIVRFTKVEMKEKMLRAAREKGRVTHKGKPIRLTADLSAETLQARREWGPIFHILKEKNFQPRISYPAKLSFISEGEIKSLTDEQMLRDFVTTRPALKELLKEALNMERNNRYQPLQKHAKL

SEQ ID NO: 39630 - protein, 164 aa, Homo sapiens
  misc_feature (1)...(164): Xaa = X or * as defined in Table 2
MPSTSQXIISEDFVELNAARYRDEEIQRTPQRYSSRRPTQRHIIVRFTKVEIKEKMLRAAREKGGVAHKRKPIRLTADLSAETLQARREWGPTFNILKEKNFQPRISYPTKLSFISEGETKSFTDKQMLRDFGTTRPPLKELLKEALNMERNNRYQPQQKHTKL

SEQ ID NO: 39631 - protein, 533 aa, Homo sapiens
  misc_feature (1)...(533): Xaa = X or * as defined in Table 2
MGKKQSRKTGNSKNQSASPPPKERSSSRAMEQSWTENDFDELREEGFRRSNYSELKEEVQTHGKEDKNLEKKLDEWLARIINAEKSLKDLMELKTKARELCDECTSLSSRFDQLEDGVSVMEDEMNEMKSEGKFREKRIKRNEQSLQEIWDYVKKPNLCLIGVPESDRKNGTKLENTLQDIIQENFPNLSGQANIHIQEIQRTPQRYSLRRATPRHLIVRFTKVEMKEKMLRAAREKGRVTHKGKPIRLTTADLSAETLQARRTEWGPIFNILKEKNFQPRISYPAKLSFISEGEIKYFIDKQMLRDFCHHQGLPLKELLERKALKHGKGNNQXPPPKERSSSRAMEQSWTENDFDELREEGFRRSNYSELKEEVQTHGKEDKNLEKKLDEWLARIINAEKSLKDLMELKTKARELCDECTSLSSRFDQLEDGVSVMEDEMNEMKSEGKFREKRIKRNEQSLQEIWDYVKKPNLCLIGVPESDRKNGTKLENTLQDIIQENFPNLSGQANIHIQEIPENATKILLEKSNSKHT

SEQ ID NO: 39632 - protein, 77 aa, Homo sapiens
  misc_feature (1)...(77): Xaa = X or * as defined in Table 2
VFLIRWGGKPLKRKLYFLHCSITQALVXACQGKYLGXIVGAKNIKYIDFFITASRYLRMLAQVFEXILLLREVTRYS

SEQ ID NO: 39633 - protein, 359 aa, Homo sapiens
  DOMAIN (128)..(147): TYROSINE KINASE CATALYTIC DOMAIN SIGNATURE domain identified by eMATRIX, accession number PR00109B, p-value=7.055e-11, raw score of 12.27
  DOMAIN (20)..(274): Eukaryotic protein kinase domain identified by PFam, accession name pkinase, E-value=3.9e-76, PFam score of 266.3
KQESLLHHSSTLDKLVVSKSGQFAIVKKCREKSTGLEYAAKFIKKRQSRASRRGVSREEIEREVSILRQVLHHNVITLHDVYENRTDVVLILELVSGGELFDFLAQKESLSEEEATSFIKQILDGVNYLHTKKIAHFDLKPENIMLLDKNIPIPHIKLIDFGLAHEIEDGVEFKNIFGTPEFVAPEIVNYEPLGLEADMWSIGVITYILLSGASPFLGDTKQETLANITAVSYDFDEEFFSQTSELAKDFIRKLLVKETRKRLTIQEALRHPWITPVDNQQAMVRRESVVNLENFRKQYVRRRWKLSFSIVSLCNHLTRSLMKKVHLRPDEDLRNCESDTEEDIARRKALHPRRRSSTS

SEQ ID NO: 39634 - protein, 348 aa, Homo sapiens
  DOMAIN (91)..(110): Eukaryotic  RNA-binding region RNP-1 proteins domain identified by eMATRIX, accession number BL00030A, p-value=1.429e- 09, raw score of 14.39
  DOMAIN (91)..(162): RNA recognition motif. domain identified by PFam, accession name rrm, E-value=0.00022, PFam score of 28.0
  misc_feature (1)...(348): Xaa = X or * as defined in Table 2
MHRSDMSCPDKVDILDTTAFRIAINEVKHSKLTSVTVTKVLDMFISRSSLFPIDDGLLDDGHSDQVGVLNSPTCYSAHQNGERIERFSRKVFVGGLPPDIDEDEITASFRRFGPLVVDWPHKAESKSYFPPKGYAFLLFQEESSVQALIDACIEEDGKLYLCVSXPLLSKDKPSSKYVPWNLSDSDFVMDGSQPLDPRKTIFVGGVPRPLRAVELAMIMDRLYGGVCYAGIDTDPELKYPKAPGRVAFSNQQSYIAAISARFVQLQHGDIDKRVEVKPYVLDDQMCDECQGARCGGKFAPFFCANVTCLQYYCEFCWANIHSRAGREVHIPLVTESAVAAPRIHIPWT

SEQ ID NO: 39635 - protein, 41 aa, Homo sapiens
RIFNSVLQNKFSPPSPLPQAVFSTSSRVHGSQEVGWCGGVL

SEQ ID NO: 39636 - protein, 441 aa, Homo sapiens
  DOMAIN (83)..(98): TEA DOMAIN SIGNATURE domain identified by eMATRIX, accession number PR00065C, p-value=1.000e-19, raw score of 4.96
  DOMAIN (2)..(436): TEA domain identified by PFam, accession name TEA, E-value= 3.3e-231, PFam score of 781.5
  misc_feature (1)...(441): Xaa = X or * as defined in Table 2
IASNSWNASSSPGEAREDGPEGLDKGLDNDAEGVWSPDIEQSFQEALAIYPPCGRRKIILSDEGKMYGRNELIARYIKLRTGKTRTRKQVSSHIQVLARKKVREYQVGIKAMNLDQVSKDKALQSMASMSSAQIVSASVLQNKFSPPSPLPQAVFSTSSRFWSSPPLLGQQPGPSQDIKPFAQPAYPIQPPLPPTLSSYEPLAPLPSAAASVPVWQDRTIASSRLRLLEYSAFMEVQRDPXTRTSKHLFVHIRHTDRNPRRFFRTPPLGPVDVRQIYDPNFPEKKGGLKELYEKGPPNAFFLVKFWADLNSTIQEGPGAFYGVSSQYSSADSMTISVSTKVCSFGKQVVEKVETEYARLENGRFVYRIHRSPMCEYMINFIHKLKHLPEKYMMNSVLENFTILQVVTSRDSQETLLVIAFVFEVSTSEHGAQHHVYKLVKD

SEQ ID NO: 39637 - protein, 112 aa, Homo sapiens
  DOMAIN (10)..(36): FAD-DEPENDENT PYRIDINE NUCLEOTIDE REDUCTASE SIGNATURE domain identified by eMATRIX, accession number PR00368C, p-value=6.438e- 12, raw score of 15.74
  DOMAIN (1)..(112): Pyridine nucleotide-disulphide oxidoreducta domain identified by PFam, accession name pyr_redox, E-value=1.3e-25, PFam score of 89.4
LREVLQPERSVVIIGAGTIGLELAASATQRRCKVTVIELAATVMGRNAPPPVQRYLLQRHQQAGVRILLNNAIEHVVDGEKVELTLQSGETLQADVVIYGIGISANEQLARE

SEQ ID NO: 39638 - protein, 123 aa, Homo sapiens
  misc_feature (1)...(123): Xaa = X or * as defined in Table 2
TYGCASPSRKPRVMPLVTAQVPITALRVNSSSIPAQSAVETTSNRPPTTGVPAFRPVRAAVXAVISPQISADPTTGGRAXLISAIPSQSVRHGSYSPRLMLXRLDSEILLSSQPLTPVKHQRR

SEQ ID NO: 39639 - protein, 570 aa, Homo sapiens
  DOMAIN (182)..(224): ATP synthase Delta/Epsilon chain. domain identified by eMATRIX, accession number PF00401A, p-value=8.286e-12, raw score of 26.03
  DOMAIN (90)..(171): ATP synthase ab C terminal domain identified by PFam, accession name ATP-synt_ab_C, E-value=8.1e-49, PFam score of 175.6
MGVLQERITSTKTGSITSVQAVYVPADDLTDPSPATTFAHLDATVVLSRQIASLGIYPAVDPLDSTSRQLDPLVVGQEHYDTARGVQSILQRYQELKDIIAILGMDELSEEDKLVVARARKIQRFLSQPFFVAEVFTGSPGKYVSLKDTIRGFKGIMEGEYDHLPEQAFYMGDMAMTYHLDVVSAEQQMFSGLVEKIQVTGSEGELGIYLATHRCSPPIKPAWLLLKASLETALTAGLWNAGSLNGLTWAKTSPSAPIIILMLIAAALLVRRMRLLEMGDDTACALGVSVERSRLLMMLVALHAGHGRVLVCPLCNVVRQPPVRERPTRNFSRCVTGIIDAATSHASSQQTDNLGLNSGSATYRPAAPVTKEVRVASPAIVEAKPVKTIKDKVRAMRELLLSDEYAEQKRAVNRFMLLLSTLYSLDAQAFAEATESLHGRTRVYFAADEQTLLKNALWHNGQHNTLTRQREKKNFAMKLNIRAQTAQNQHNNSPIVLVHGLFGSLDNLGVLARDLVNDHNIIQVDMRNHGLSPRDPVMNYPAMAQDLVDTLDAQQIDKAHYRHSWRSRLE

SEQ ID NO: 39640 - protein, 397 aa, Homo sapiens
  DOMAIN (121)..(163): ATP synthase Delta/Epsilon chain. domain identified by eMATRIX, accession number PF00401A, p-value=9.719e-25, raw score of 26.03
  DOMAIN (29)..(110): ATP synthase ab C terminal domain identified by PFam, accession name ATP-synt_ab_C, E-value=8.1e-49, PFam score of 175.6
MITCYVQETVKHQGNQEHYDTARGVQSILQRYQELKDIIAILGMDELSEEDKLVVARARKIQRFLSQPFFVAEVFTGSPGKYVSLKDTIRGFKGIMEGEYDHLPEQAFYMGDMAMTYHLDVVSAEQQMFSGLVEKIQVTGSEGELGIYTGHAPLLTAIKPGMIRIVKQHGHEEFIYLSGGILEVQPGNVTVLADTAIRGQDLDEARAMEAKRKAEEHITALTRRRLRSGVCGQPGLKDIQNAANPGHASPSHMLGLHGFVAAEVLCAHLSARCDNGVGNGSTLCLDIKGSCVNQGIDIRTGILVPVDSVIVYFTTLLTDELTIGPIRAVPMDITPKYVGIASGLMNAGSAVADIISPIAFGIIIDKTGNWSLPFYGSVALLVIGIFLTFFMRPDKSL

SEQ ID NO: 39641 - protein, 176 aa, Homo sapiens
  DOMAIN (22)..(64): ATP synthase Delta/Epsilon chain. domain identified by eMATRIX, accession number PF00401A, p-value=8.500e-26, raw score of 26.03
  DOMAIN (16)..(142): ATP synthase, Delta/Epsilon chain domain identified by PFam, accession name ATP-synt_DE, E-value=2.4e-53, PFam score of 190.6
  misc_feature (1)...(176): Xaa = X or * as defined in Table 2
STETLSPLPATPGEVTLRHLDVVSAEQQMFSGLVEKIQVTGSEGELGIYPGHAPLLTAIKPGMIRIVKQHGHEEFIYLSGGILEVQPGNVTVLADTAIRGQDLDEARAMEAKRKAEEHISSSHGDVDYAQASAELAKAIAQLRVIELTKKAMXHRLEKHKSQSGNRLAFFCACDPS

SEQ ID NO: 39642 - protein, 199 aa, Homo sapiens
  DOMAIN (28)..(66): ATP synthase alpha and beta subunits proteins domain identified by eMATRIX, accession number BL00152E, p-value=8.105e- 33, raw score of 22.68
  DOMAIN (104)..(199): ATP synthase ab C terminal domain identified by PFam, accession name ATP-synt_ab_C, E-value=1.7e-43, PFam score of 157.9
MLSAVGYQPTLAEEMGVLQERIPSTKTGSITSVQAVYVPADDLTDPSPATTFAHLDATVVLSRQIASLGIYPAVDPLDSTSRQLDPLVVGQEHYDTARGGQFILARYQELESLLAILGMNDLSEEDKLVVARARKIQRFLSQPFFVAEVFTGSPGKYVSLKDTIRGFKGIMEGEYDHLPEQAFYMVGSIEEAVEKAKKL

SEQ ID NO: 39643 - protein, 131 aa, Homo sapiens
  DOMAIN (31)..(49): Fumarate reductase / succinate dehydrogenase FAD-binding site proteins domain identified by eMATRIX, accession number BL00504D, p-value=3.000e-20, raw score of 10.43
  DOMAIN (13)..(124): FAD binding domain identified by PFam, accession name FAD_binding_2, E-value=1.3e-61, PFam score of 218.1
  misc_feature (1)...(131): Xaa = X or * as defined in Table 2
MTQLELWGCPWSRRPDGSVNVRRFGGMKIERTWFAADKTGFHMLHTLFQTSLQFPQIQRFDEHFVLDILVDDGHVRGLVAMNMMEGTLVQIRANAVVMATGGAGRVYRYNTNGGIVTGDGMGMAVIHRGSX

SEQ ID NO: 39644 - protein, 661 aa, Homo sapiens
  DOMAIN (357)..(399): ATP synthase Delta/Epsilon chain. domain identified by eMATRIX, accession number PF00401A, p-value=9.719e-25, raw score of 26.03
  DOMAIN (360)..(458): ATP synthase, Delta/Epsilon chain domain identified by PFam, accession name ATP-synt_DE, E-value=6.5e-43, PFam score of 156.0
  misc_feature (1)...(661): Xaa = X or * as defined in Table 2
VASSARRGLPVHGPAPLQGPGNSQDRLESGTNRCGLRGPLVKGGKGGRFPSARLIQTVKKGGTPSRDHAIEPSGYSVSAGVGERTRKGSVFAHEMPDCNVIDKVSLVYGQMTEPPGNCMRVALSGLTMAEKFRDEGRDVLLFVDNIYRYALAGXERFATVGRXASNAVGIQPTLAEKMGVLQERITSTKTGSITSVQAVYVPANDLTDPSPATTFAHLDATVVLSRQIASLGIYPAVDPLDSTSRQLDPLVVGQEHYDTARGGXSILQRFQELKDFMALPGLSDELSEEDKLVVARARKIQRFLSQPFFVAEVFTGSPGKYVSLKDTIRGFKGIMEGEYDHLPEQAFYMGDMAMTYHLDVVSAEQQMFSGLVEKIQVTGSEGELGIYSGHAPLLTAIKPGMIRIVKQHGHEEFIYLSGGILEVQPGNVTVLADTAIRGQDLDEARAMEAKRASGKVKPSIMQSLTPEKIAAILPLQFFPQPADFTGPYVMLTSRRNNRALSRCDDQTLMPGLAIRGIRHRHQQAGVRILLNNAIEHVVDGEKVELTLQSGDTLQADVVIYGIGISADEPLAREANLDTANGIVIDEACRTCDPAIFAGGDVPITSSLINVVDEIIHDILLTQPVATRYCIVKVIFEAVMILRDSGGAPFCSNGMATHRVYF

SEQ ID NO: 39645 - protein, 862 aa, Homo sapiens
  DOMAIN (167)..(192): Bacterial regulatory proteins deoR family proteins. domain identified by eMATRIX, accession number BL00894B, p-value=2.800e- 18, raw score of 17.92
  DOMAIN (116)..(316): Bacterial regulatory proteins, deoR family domain identified by PFam, accession name deoR, E-value=6.4e-69, PFam score of 242.4
  misc_feature (1)...(862): Xaa = X or * as defined in Table 2
SRQAQWKGVPSTFSVINYHSLQKRTTNLTHRQLLNLLSTVLYCSCPSIQKLLLMLQTGQPSGVGLVDLPLKAMSRPALPNATAALPTGTRTQPPSTPLLTRLPSSHRLLLHSGFXAAALLGVSEMTIRRDLNNHSAPVVLLGGYIVLEPRSASHYLLSDQKSRLVEEKRRAAKLAATLVEPDQTLFFDCGTTTPWIIEAIDNEIPFTAVCYSLNTFLALKEKPHCRAFPCGATPFSNPSIFSKRVNNFCRDIAFYYSAGVHVSKGVTCFNLKRWPVKQWAMSMAQKHVLVVDHSKFGEVGPVCMGDLKRFDIVVRECCPEDEYVKYAQTQRIKPDKVSRHPVIIRLREPGLEPVMEFHHPVLPQRTTESAVVHIAHTRKSWRPEHSAPVLIQTSPVERGPQYIQCYQLSLTSEENNQPDTQTTTKPAQYSSILFLSKYPKVIVDAPDRSTQRGWSSGLATQSNEQACTTKCNSCTANWHQNTTTFNSTANPSTFKPPTSAALRVLSLWTGNHCDWCFIRYWRLTPNWQRFRRVGRTERATTHNRLQAFGGHTQGLSPGPRRWLHEQRFPTTSDTGGHTADDFRKLDPCIQGPYGSHRHSVKSEVNFKEKRYAFAPAASFRYTVLIRFCAPPNTGRFLLTGTPLPMLSYRHSFHAGNHADVLKHTVQSLIIESLKEKDKPFLYLDTHAGAGRYQLGSEHAERTGEYLEGIARIWQQDDLPAELEAYINVVKHFNRSGQLRYYPGSPLIARLLLREQDSLQLTELHPSDYPLLRSEFQKDSRARVEKADGFQQLKAKLPPVSRRGLILIDPPYEMKTDYQAVVSGIAEGYKRFATGWYCVLMQLFMVGLNWHVCSGWYWCFFPV

SEQ ID NO: 39646 - protein, 165 aa, Homo sapiens
  DOMAIN (45)..(86): kw MANNOSE GUANYLYLTRANSFERASE ISOMERASE PYROPHOSPHORYLASE domain identified by eMATRIX, accession number DM01257A, p-value= 9.234e-30, raw score of 20.93
  DOMAIN (12)..(159): Nucleotidyl transferase domain identified by PFam, accession name NTP_transferase, E-value=2.6e-08, PFam score of 9.4
YSGIIMAQSKLYPVVMAGGSGSRLWPLSRVLYPKQFLCLKGDLTMLQTTICRLNGVECESPVVICNEQPRFIVAHQMRQLNELSENIILEPAGRTTAPTIAPAALAANRHSPESAPLMLVLATDHVIANEDAVRAPVKNAIPYPKKGKLVTFGIGLDGRVPRYNM

SEQ ID NO: 39647 - protein, 145 aa, Homo sapiens
  misc_feature (1)...(145): Xaa = X or * as defined in Table 2
LECPGRSTANCSPRARATSLLLLTHVHGESRDRAQEMVDLLAQYEQHGLQLNSRELPDHLPLYLEYLAQLPQSEAVEGLKDIAPILALLSARLQQRESRYAVLFDLLLKLANTAIDSDKVAEKIAVRSARXYAAGAGCCLGRRAG

SEQ ID NO: 39648 - protein, 60 aa, Homo sapiens
  misc_feature (1)...(60): Xaa = X or * as defined in Table 2
HLSPQYGSIPRVISRMGGKLIIMDHFHYGRDSILLSMEXTLALDANLQFLYVVLLPNYYL

SEQ ID NO: 39649 - protein, 466 aa, Homo sapiens
  DOMAIN (311)..(348): kw MANNOSE GUANYLYLTRANSFERASE ISOMERASE PYROPHOSPHORYLASE domain identified by eMATRIX, accession number DM01257F, p-value= 1.000e-40, raw score of 15.24
  DOMAIN (352)..(466): Mannose-6-phosphate isomerase domain identified by PFam, accession name MannoseP_isomer, E-value=1.2e-58, PFam score of 208.3
MSAVVAAELARVQDTHRERSLVTTRERILISGNGAYQAQHAFGTESTGLDAGHPYTRQYDLDLLAELRRDNQAMRVIAIAAESSDIVAAGPHIILPPSRHFIDVEQAFCFLMYAQTFALMQSLHMGNTPDTPSASGTVNRVRSGRGRHAVQSRAVRCWPCPVLVGSHRSLRPDVRVGVLTGWSVEWVEVGEAMWGGGGVDVSVVCGRGCGGVGSVFCVGCRCGLVVCRRPESETAQAYVASGEYYWNSGMFLFRAGRYLEELKKYRPDILDACEKAMSAVDPDLNFIRVDEEAFLACPEESVDYAVMERTADAVVVPMDAGWSDVGSWSSLWEISAHTAEGNVCHGDVINHKTENSYVYAESGLVTTVGVKDLVVVQTKDAVLIADRNAVQDVKKVVEQIKADGRHEHRVHREVYRPWGKYDSIDAGDRYQVKRITVKPGEGLSVQMHHHRAEHWVVVDGNGKSHH

SEQ ID NO: 39650 - protein, 659 aa, Homo sapiens
  DOMAIN (45)..(86): kw MANNOSE GUANYLYLTRANSFERASE ISOMERASE PYROPHOSPHORYLASE domain identified by eMATRIX, accession number DM01257A, p-value= 1.000e-40, raw score of 20.93
  DOMAIN (12)..(247): Nucleotidyl transferase domain identified by PFam, accession name NTP_transferase, E-value=5e-54, PFam score of 192.9
YSGIIMAQSKLYPVVMAGGSGSRLWPLSRVLYPKQFLCLKGDLTMLQTTICRLNGVECESPVVICNEQHRFIVAEQLRQLNKLTENIILEPAGRNTAPAIALAALAAKRHSPESDPLMLVLAADHVIADEDAFRAAVRNAMPYAEAGKLVTFGIVPDLPETGYGYIRRGEVSAGEQDMVAFEVGKRSRPTPAYKPNSGSAPTHHGPGPPSPAGPKQHDIHKLTPATPPDTYGIHAANHRVSTNVREIDECLNDHHALFTIRQIAFDIFGGDFNRPGVIGFWRTGEPNDIVVAIHQIITAACKATPCSDFIRVKLFLHCAARLPGKIDGKTGVIFALFTLALLRAEGHQREGGIGQFIAINTGHRPVYRQGAASGVASFLRVHPSQLAGVLHNRCPVQNKKQKQKQKQEEEEEEEEEEEEEEEEEEEEEEEEEEEEEGEGEREGGEGEREGEEGEHDRFSTHKPQAKDETMKYIRSKPDNRIPERHYIAGRPRELVSTHRYVSARYYEATTYKDNDAPRTKTKRMKKKKKKKKKKSKKNKKTQTRRYITVDIEAASTACTANSNGEMNRKVNSSGSVIPTSMAVKVAGISKPATFTRFSGAAVKYIAKEMPTAPKIFELPCRAKPPSGNNDFSGSALKLNSCRCAPSTSECRLQQLPDQR

SEQ ID NO: 39651 - protein, 294 aa, Homo sapiens
MDPLDAQAQYSELFDRGRATSLLLFEHVHGESRDRGQAMVDLLAQYEQHGLQLNSRELPDHLPLYLEYLAQLPQSEAVEGLKDIAPILALLSARLQQRESRYAVLFDLLLKLANTAIDSDKVAEKIADEARDDTPQALDAVWEEEQVKFFADKGCGDSAITAHQRRFAAGAVFLIGSWLRYDYGQYTWRAASSQMLDRKGMNLASNLFHIGILGIFVGHFFGMLTPHWMYEAWLPIEVKQKMAMFAGGASGVLCLIGGVLLLKRRLFSPRVRATTTGADILILSLLVIHARWAC

SEQ ID NO: 39652 - protein, 665 aa, Homo sapiens
  DOMAIN (25)..(68): DNA mismatch repair proteins mutS family proteins domain identified by eMATRIX, accession number BL00486C, p-value=1.000e- 40, raw score of 18.37
  DOMAIN (8)..(203): DNA mismatch repair proteins, mutS family domain identified by PFam, accession name MutS_C, E-value=2.1e-144, PFam score of 493.1
  misc_feature (1)...(665): Xaa = X or * as defined in Table 2
MDDNITYTTFICNPLNLSPQRRMLIITGPNMGGKSTYMRQTALIALMAYIGSYVPAQKVEIGPIDRIFTRVGAADDLASGRSTFMVEMTETANILHNATEYSLVLMDEIGRGTSTYDGLSLAWACAENLANKIKALTLFATHYFELTQLPEKMEGVANVHLDALEHGDTMAFMHSVQDGAASKSYGLAVAALAGVPKEVIKRARQKLRELESISPNAAATQVDGTQMSLLSVPEETSPAVEALENLDPDSLTPRQALEWIYRLKSLGKTMPSTRYQKINAHHYRHIWVVGDIHGEYQLLQSRLHQLSFFPKIDLLISVGDNIDRGPESLDVLRLLNQPWFTSVKGNHEAMALEAFETGDGNMWLASGGDWFFDLNDSEHQEAIDLLLKFHHLPHIIEITNDNIIYAITTCVGNARRAHAVHFCGDVARLLTCQINIYRGQFRRLPRTFHRRLLTKLRDLILRLSAGNLQCCPDRAWRDNIHPNTFLRDLFCQATAVVQNRRLRSRIGDRFLGAVERRFGNDLPSSPVEWLTDNGSCYRANETRQFARMLGLEPKNTAVRSPESNGIAESFVKTIKRDYISIMPKPDGLTAAKNLAEAFEHYNEWHPHRANPITYQAVCANHYRTLNNGTMTNTGXQYNVYHIYLQPAESVAAAPHVDHHRSEHGR

SEQ ID NO: 39653 - protein, 38 aa, Homo sapiens
  misc_feature (1)...(38): Xaa = X or * as defined in Table 2
PRFVPILAPYAPVRSVCLRXVXTDLPEYGHILFQPADR

SEQ ID NO: 39654 - protein, 777 aa, Homo sapiens
  DOMAIN (213)..(256): kw MANNOSE GUANYLYLTRANSFERASE ISOMERASE PYROPHOSPHORYLASE domain identified by eMATRIX, accession number DM01257H, p-value= 1.000e-40, raw score of 22.31
  DOMAIN (168)..(298): Mannose-6-phosphate isomerase domain identified by PFam, accession name MannoseP_isomer, E-value=1.3e-80, PFam score of 281.3
METRREERIGQLLQELKRSDKLHLKDAAALLGVSEMTIRRDLNNHSAPVVLLGGYIVLEPRSASHYLLSDQKSRLVEEKRRAAKLAATLPGESDGPSIRISMYSREKKRFSPARKSRWITRSWNVRQMLLWCRWMRAWSDVGSWSSLWEISAHTAEGNVCHGDVINHKTENSYVYAESGLVTTVGVKDLVVVQTKDAVLIADRNAVQDVKKVVEQIKADGRHEHRVHREVYRPWGKYDSIDAGDRYQVKRITVKPGEGLSVQMHHHRAEHWVVVAGTAKVTIDGDIKLLENDVVRFADDLDGGEGRRQRNGRCRVSPCRFENNVLGKFVQLTQLFRDNKAVLLIANHHRAFALHAVQAADGGLQHENPSDGKDLEDATQTVLLPGDLSDEKFARSLVHEAHKALGGLDIMALVAGKQVAIPDIADLTSEQFQKTFAINVFALFWLTQEAIPLLPKGASIITTSSIQAYQPSPHLLDYAATKAAILNYSRGLAKQVAEKGIRVNIVAPGPIWTALQISGGQTQDKIPQFGQQTPMKPSLCRCRRAAISEYHHRRTALMQFLNMFFFDIYPYIAGAVFLIGSWLRYDYGQYTWRAASSQMLDRKGMNLASNLFHIGILGIFVGHFFGMLTPHWMYEAWLPIEVKQKMAMFAGGASGVLCLIGGVLLLKRRLFSPRVRATTTGANIRILSLLVIQCALALLTIPFSAQHMDGSEYDETGWLGAVGGDLPRGASQHMDVYHTMDVMWDEHSDYTAMLKWSCDTQLRTASTEQYTEQQAEFN

SEQ ID NO: 39655 - protein, 164 aa, Homo sapiens
  DOMAIN (4)..(164): FAD binding domain identified by PFam, accession name FAD_binding_4, E-value=3.2e-25, PFam score of 97.2
  misc_feature (1)...(164): Xaa = X or * as defined in Table 2
RSVTPVTDIVKLLEFTRLRLPGYTKSIEXTNITFQCAIAAAXKNSVSTPRGGGTGTNGQALNQGIIVDMSRHMNRIIEINPEEGWVRVEAGVIKDQLNQYLKPFGYFFAPELSTSNRATLGGMINTDASGQGSLGVRAVLLGGDILDTQPLPVELAETLGKSAE

SEQ ID NO: 39656 - protein, 1550 aa, Homo sapiens
  DOMAIN (1021)..(1035): Response regulator receiver domain proteins domain identified by eMATRIX, accession number PF00072A, p-value=5.875e-11, raw score of 9.42
  DOMAIN (528)..(683): Peroxidase domain identified by PFam, accession name peroxidase, E-value=2.2e-47, PFam score of 170.9
MVTGILPLLISLLVIMNALINFIGQHRIERFAQRCAGNPVSRYLLLPCIGTFVFCNPMTLSLGRFMPEKYKPSYYAAASYSCHSMNGLFPHINPGELFVYLGIASGLTTLNLPLGPLACSSCWRSHYGIVARIFQRNATVEERWHHHFIVKDLRNTGTEANGFGGFHQERRVDQGVSAHAEVRLRRQGKGTKARSPRYVRSRLTRRAVRYSDHPTERCPVAGRKFRRKKVAERFQVLIELIFYHPGLNAHPALFRVNFDDAVHMAGHINNNPLVERLTVSAGAAAAGGRYTILSGCCNSALKGDVCLLYGFRVAGRRQASELQELTIAERVRAELARFLENPADPRYLAASWQAGHTGSGLHYRRYPFFAALRERAGPVTWVMMIACVVVFIAMQILGDQEVMLWLAWPFDPTLKFEFWRYFTHALMHFSLMHILFNLLWWWYLGGAVEKRLGSGKLIVITLISALLSGYVQQKFSGPWFGGLSGVVYALMGYVWLRGERDPQSGIYLRRGVIIFAPIWIVRRWFEMTPTQWSNYFFENLFKYEWVQTRSPAGAIQFEAVDAPEIIPDPFDPSKKRKPTMLVTDLTLRFDPEFEKISRRFLNDPQAFNEAFARAWFKLTHRDMGPKSRYIGPEVPKEDLIWQDPLPQPIYNPTEQDIIDLKFAIADSGLSVSELVSVAWASASTFRGGDKRGGANGARLALMPQRDWDVNAAAVRALPVLEKIQKESGKASLADIIVLADLCQETAWLPPSGGGAAGSTWIWGPSIAFWEQEAGSHLIDIKVCQLHKFGGSSLADVKCYLRVAGIMAEYSQPDDMMVVSAAGSTTNQLINWLKLSQTDRLSAHQVQQTLRRYQCDLISGLLPAEEADSLISAFVSDLERLAALLDSGINDAVYAEVVGHGEVWSARLMSAVLNQQGLPAAWLDAREFLRAERAAQPQVDEGLSYPLLQQLLVQHPGKRLVVTGFISRNNAGETVLLGRNGSDYSATQIGALAGVSRVTIWSDVAGVYSARPRKVLNREKVDLVISDLRMDEMDGMQLFAEIQKVQPGMPVIILTAHGSIPDAVAATQQGVFSFLTKPNAACCCRSRGSPKSGIQLAELDELAAAVAELPRLRLRGLMAIPAPESEYVRQFEVARQMAVAFAGLKTRYPHIDTLSLGMSDDMEAAIAAGSTMVRIGTAIFDVIVIKGGNTVKIHRLPLSVKRKVVMKPARVPQTVVAPDCWGDLPWGKLYRKALERQLNPWFTKMYGFHLLKIGNLSAEINCEACAVSHQVNVSAQGMPVQVQADPLHLPFADKSVDVCLLAHTLPWCTDPHRLLREADRVLIDDGWLVISGFNPISFMGLRKLVPVLRKTSPYNSRMFTLMRQLDWLSLLNFEVLHASRFHVLPWNKHGGKLLNAHIPALGCLQLIVARKRTIPLTLNPMKQSKNKPRIRQALSYSLRHNNIEIRPINNPIMASKCSNGKKCHTSLTLNHKLEMIKLSDEGILKAEITVSGNQSPSDFSSLEMGNRLKGAGLIFAHLLFHVSNGLLDTRHRLMVTTSPLVIIIQTTENIS

SEQ ID NO: 39657 - protein, 78 aa, Homo sapiens
MIPQISQAPGVVQLVLNFLQELEQQGFTGDTATSYADRLTMSTDNSIYQLLPDAVVFPRSTADVALIARLAAQERYSS

SEQ ID NO: 39658 - protein, 287 aa, Homo sapiens
  misc_feature (1)...(287): Xaa = X or * as defined in Table 2
MQEWGRYTILSGCCNSALKGDVCLLYGFRVAGRRQASELQELTIGYRAQKNRVSSWCYCHFRQMAKAQHIKGFLNRLRKTAKKXGFQLVLLPFSANGKAQHIKGFLNRLRKTAKKTRDFLTRMPKLGMTMVGVDPALVLCYRDEYKLALGEERGEFNVLLANEWLASALESQPVATVSGESWYFFGHCTEVTALPGAPAQWAAIFARFGAKLENVSVGCCGMAGTYGHEAKNHENSLGIYELSWHQAMQRLPRNRCLATGYSCRSQVKRVEGTGVRHPVQALLEIIK

SEQ ID NO: 39659 - protein, 570 aa, Homo sapiens; identical to SEQ ID NO: 39639
  DOMAIN (182)..(224): ATP synthase Delta/Epsilon chain. domain identified by eMATRIX, accession number PF00401A, p-value=8.286e-12, raw score of 26.03
  DOMAIN (90)..(171): ATP synthase ab C terminal domain identified by PFam, accession name ATP-synt_ab_C, E-value=8.1e-49, PFam score of 175.6

SEQ ID NO: 39660 - protein, 111 aa, Homo sapiens
  misc_feature (1)...(111): Xaa = X or * as defined in Table 2
IFRASLNQLLFCGLLAGRNHRQRSVRALSQRKMVPTDRKXRCARRAARXPSARVLXSGEXTDRQHADXPTIRXRRSWYLRPAVYASVRQSDRLYSDEYHWXPVRLQRYVRR

SEQ ID NO: 39661 - protein, 363 aa, Homo sapiens
  DOMAIN (189)..(227): ATP synthase alpha and beta subunits proteins domain identified by eMATRIX, accession number BL00152E, p-value=8.105e- 33, raw score of 22.68
  DOMAIN (271)..(363): ATP synthase ab C terminal domain identified by PFam, accession name ATP-synt_ab_C, E-value=2.3e-42, PFam score of 154.2
  misc_feature (1)...(363): Xaa = X or * as defined in Table 2
VASSARRGLPVHGPAPLQGPGNSQDRLESGTNRCGLRGPLVKGGKGGRFPSARLIQTVKKGGTPSRDHAIEPSGYSVSAGVGERTREGNDFYHEMTDSNVIDKVSLVYGQMNEPPGNRLRVALTGLTMAEKFRDEGRDVLLFVDNIYRYTLAGXERFATVGRXASNAVGYQPTLAEEMGVLQERITSTKTGSITSVQAVYVPADDLTDPSPATTFAHLDATVVLSRQIASLGIYPAVDPLDSTTRQLDPLVVGQEHYHTARGGXSILQRFQELKDFMALPGLSDELSEEDKLVVARARKIQRFLSQPFFVAEVFTGSPGKYVSLKDTIRGFKGIMEGEYDHLPEQAFYMVGSIEEAVEKAKKL

SEQ ID NO: 39662 - protein, 169 aa, Homo sapiens
  misc_feature (1)...(169): Xaa = X or * as defined in Table 2
MPVEASQLSASWQNFGPTLEAHDIRAELKDGGEFSVKRVTLALDVWQSLLHMRWQFRDLTFWQLRFRTNTPITSGGSDDSLEASHISDLFLRQFDHFDLRDSEHGVMQVRMDLRDDEGLLSNGRVWLQADDIDLKPWLGKWMQDNIALETAQFSLEGWMTIDKGDVTGX

SEQ ID NO: 39663 - protein, 62 aa, Homo sapiens
  misc_feature (1)...(62): Xaa = X or * as defined in Table 2
TMVASGSRRMTSTXSRGSVNGCRTILRWKRHSSPLKIKRKQKSLXTMPSFXRLPAENSLFEI

SEQ ID NO: 39664 - protein, 502 aa, Homo sapiens
  DOMAIN (281)..(308): PROTEIN TRANSMEMBRANE TRANSPORT INNER MEMBRANE R domain identified by eMATRIX, accession number PD01612B, p-value=1.794e- 21, raw score of 11.68
  DOMAIN (3)..(346): AcrB/AcrD/AcrF family domain identified by PFam, accession name ACR_tran, E-value=6.4e-131, PFam score of 448.4
  misc_feature (1)...(502): Xaa = X or * as defined in Table 2
SVAVLREXAPKIRIQLATMPELADASSDQQDNGAEMNLVYDRDTMARLGIDVLAANSLLNNAFGQRQISTIYQPMNQYKVVMEVDPRYTQDISALEKMFVINNEGKAIPLSYFAKWQPANAPLSVNHQGLWRALTIWFTLPTGKSLCDPSAAIDRAMTQLGVPSTVRGSFAGTAQVFQETMNSQVILIIAAIATVYIVLGILYESYVHPLTILSTLPSAGVGALLALELFNAPFSLIALIGIMLLIGIVKKNAIMMVDFALEAQRHGNLTPQEAIFQACLLRFRPIMMTTLAALFGALPLVLSGGDGSELRQPLGITIVGGLVMSQLLTLYTTPVVYLFFDRLRLRFSRKPKQTVTDTRWQLWIVAFGFFMQSLDTTIVNTALPSMAQSLGESPLHMHMVIVSYVLTVAVMLPASGWLADKVGVRNIFFTAIVLFTLGSLFCALSSTIRIILRFVSLLHMRWQFRDLTFWQMRFRTNTPITSGGSDDSLMNQSHQRSVSSSI

SEQ ID NO: 39665 - protein, 39 aa, Homo sapiens
PAAWTICSTNVCGVRVMPRPRAIWQGPTISPVPGRIRGI

SEQ ID NO: 39666 - protein, 173 aa, Homo sapiens
  DOMAIN (58)..(91): Prokaryotic-type carbonic anhydrases proteins domain identified by eMATRIX, accession number BL00704C, p-value=7.000e- 30, raw score of 11.98
  DOMAIN (39)..(122): Prokaryotic-type carbonic anhydrases domain identified by PFam, accession name Pro_CA, E-value=2.1e-31, PFam score of 111.8
  misc_feature (1)...(173): Xaa = X or * as defined in Table 2
RRCQILLSGSLHSSWRTLPGHVXQLASAHRPRFRXLPGLEPGELFVHRNVANLVIHTDLNCLSVVQYAVDVLEVEHIIICGHYGCGGVQAAVENPELGLINNWLLHIRDIIHGWAYGIHDGLLRDLDVTATNRETLEQRYRHGISNLKRDVHFTTGRFIQQRTNRQRLRFAQA

SEQ ID NO: 39667 - protein, 75 aa, Homo sapiens
MPDATHPATSHLLVQQNHFADIRQMTVTLCVINAVTHHKLIRDRETDKFYRDVHFTTGRFIQQRTNRQRLRFAQA

SEQ ID NO: 39668 - protein, 293 aa, Homo sapiens
  DOMAIN (14)..(56): Methylated-DNA--protein-cysteine methyltransferase active sit domain identified by eMATRIX, accession number BL00374A, p-value= 9.591e-11, raw score of 26.39
  DOMAIN (5)..(107): 6-O-methylguanine DNA methyltransferas domain identified by PFam, accession name Methyltransf_1, E-value=9e-16, PFam score of 65.8
MPAGLPQEEKMEKEDSFPQRVWQIVAAIPEADVTTYGDVAKLAGSPRRAMVGCVLKRLPEGSTLPWHRVVNRHGTISLTGPDLQRQFRHYWQKTYLHPLLLRIIALLPANRQRNPTAKPCHVTSFINSPITIPTANFLPKVVTNLLTSYRDTIEINVDPLVGKPGTWVNNRSSMNAGSGSTIIDKINRIKIGPARICHCVDFSARASGGASSVGDVIFSANFPNAQRDQPCTFSDHFRGAHFVFRLLERYRIVASGLLTIDLRFWHIGPYPTPCSSSLHLTDPPFNMRVTSPC

SEQ ID NO: 39669 - protein, 31 aa, Homo sapiens
  misc_feature (1)...(31): Xaa = X or * as defined in Table 2
LTVIHGVSAKTVILSSAVPIQXKTVRRVSRR

SEQ ID NO: 39670 - protein, 402 aa, Homo sapiens
  misc_feature (1)...(402): Xaa = X or * as defined in Table 2
LAADHRRRNAVQRPCNGGQSVQSTDEAAGRLSHADTHPGRPARALPGDCRPETLLRTAGVAEXTKALYTLRSEKTRERPMDKQQASDEKHRRFHDKESDFLAFVNLWNYLGEQQKALSSNAFRRLCRTDYLNYLRVREWQDIYTQLRQVVKELGIPVNSEPAEYREIHIALLTGLLSHIGMKDADKQEYTGARNARFSIFPGSGLFKKPPKWVMVAELVETSRLWGRIAARIDPEWVEPVAQHLIKRTYSEPHWERAQGAVMATEKVTVYGLPIVAARKVNYSQIDPALLHDTIELGTSPAFLITRWGFGRNLSRTSGGPRQEPRRKEIAMELVLKDAQSALTVSETTFGRDFNEALVHQVVVAYAAGARQGTRAPKTRAAVTGGMPTLYAVGRLSRIPMDT

SEQ ID NO: 39671 - protein, 46 aa, Homo sapiens
  misc_feature (1)...(46): Xaa = X or * as defined in Table 2
TLSPGSINPFEKPNSXDSVPMTLRRFIEVRVFQQIHHMRQRPAHLW

SEQ ID NO: 39672 - protein, 219 aa, Homo sapiens
  misc_feature (1)...(219): Xaa = X or * as defined in Table 2
THWERAQGAVMATEKVTVYGFRIVAARKVNYSQIDPALCRELFIRHALVEGDWQTRHAFFRENLKLRAEVEELEHKSRRRDILVDDETLFEFYDQRISHDVISARHFDSWWKKVSRETPDLLNFEKSMLIKEGAEKISKLDYPNFWHQGNLKLRLSYQFEPGADADGVTVHIPLPLLNQVEESGFEWQIPGLRRELVMPDXSCQTVTEFVPANSHSYVF

SEQ ID NO: 39673 - protein, 691 aa, Homo sapiens
  DOMAIN (500)..(527): RHODOPSIN-LIKE GPCR SUPERFAMILY SIGNATURE domain identified by eMATRIX, accession number PR00237G, p-value=2.543e-11, raw score of 19.63
  DOMAIN (14)..(132): Leucine Rich Repeat domain identified by PFam, accession name LRR, E-value=7.6e-18, PFam score of 72.7
  misc_feature (1)...(691): Xaa = X or * as defined in Table 2
MDIQEFPDLKGTTSLEILTLTRAGIRLLPSGMCQQLPRLRVLELSHNQIEELPSLHRCQKLEEIGLQHNRIWEIGADTFSQLSSLQALDLSWNAIRSIHPEAFSTLHSLVKLDLTTSQLTTLPLAGLGGLMHLKLKGNLALSQAFSKDSFPKLRILEVPYAYQCCPYGMCASFFKASGQWEAEDLHLDDEESSKRPLGLLARQAENHYDQDLDELQLEMEDSKPTPSVQCSPTPCPFKPCEYLFESWGIRLAVWAIVLLSVLCNGLVLLTVFAGGPAPLPPVKFVVGAIAGANTLTGISCGLLASVDALTFGQFSEYGLARWETGLGCRATGFLAVLGSEASVLLLTLAAVQCSVSVSCVRAYGKSPSLGSVRAGVLGCLALAGLAAALPLASVGEYGASPLCLPYAPPEGQPAALGFTVALVMMKLLLFSWFVGPLPYHQNWYCDLPRGDFEAVWDCAHGEATWAWPHLRKTGLLYCPVAFLSFASMLGLFPVTPEAVKSVLLVVLPLPACLNPLLYLLFNPHFRDDLRRLRTPRRRTQGPPXPLCCGREDAGERASCDSYPQALVAPSLMWISFCEASXSWAGPLELETYGFPSVTLISCQQPGAPRLEGTHCVEPEGNHFGNPQPSLDGELLLRAEGSTPASGGLSGGWRLSALWLGLWLHTCKYPSPFFSSPLFPFLSPPSVNDGCF

SEQ ID NO: 39674 - protein, 169 aa, Homo sapiens
  DOMAIN (4)..(47): Ribosomal protein L19e proteins domain identified by eMATRIX, accession number BL00526A, p-value=9.514e-36, raw score of 19.50
  DOMAIN (2)..(122): Ribosomal protein L19e domain identified by PFam, accession name Ribosomal_L19e, E-value=7.8e-55, PFam score of 195.6
MSMLRLQKRLASSVLRCGKKKVWLDPNKTNEIANANSHQQIWKLIKDGLIIRKPVTVHSRARCQKNTLAHWKGRHIGIDKRYCESKKIDRHMYHSLYLKVQGNVFTNKPILMEHSHKLKADKAHKKLLADQAEARRPKTKEARKRSEERLQAKKEEIIKTLFKEEDTKK

SEQ ID NO: 39675 - protein, 53 aa, Homo sapiens
  misc_feature (1)...(53): Xaa = X or * as defined in Table 2
TPMRPMKSPMPTPVSRSGSSSKMGXSSASLXRSIPGLDAGKTPWPAGRSGTWA

SEQ ID NO: 39676 - protein, 117 aa, Homo sapiens
  misc_feature (1)...(117): Xaa = X or * as defined in Table 2
AEGYSQCPNAREGHVDEENEDSAPAAQKIPXIXEDXSPHVSQPVPEGEEECVKKQGRFSWNTSTSXRQTTARKKLLADQAEARRSKTKEAHKSYEEHLQAKKEEIIKTLSKEEETKK

SEQ ID NO: 39677 - protein, 637 aa, Homo sapiens
  DOMAIN (38)..(84): Dihydropyridine sensitive L-type calcium channel (Beta subuni domain identified by eMATRIX, accession number PF00774A, p-value= 1.000e-40, raw score of 16.47
  DOMAIN (264)..(549): Dihydropyridine sensitive L-type calcium domain identified by PFam, accession name Ca_channel_B, E-value=2.2e-201, PFam score of 596.2
MSRGPYPPSQEIPMEVFDPSPQGKYSKRKGRFKRSDGSTSSDTTSNSFVRQGSAESYTSRPSDSDVSLEEDREALRKEAERQALAQLEKAKTKPVAFAVRTNVGYNPSPGDEVPVQGVAITFEPKDFLHIKEKYNNDWWIGRLVKEGCEVGFIPSPVKLDSLRLLQEQKLRQNRLGSSKSGDNSSSSLGDVVTGTRRPTPPASGNEMTNLAFELDPLELEEEEAELGEQSGSAKTSVSSVTTPPPHGKRIPFFKKTEHVPPYDVVPSMRPIILVGPSLKGYEVTDMMQKALFDFLKHRFDGRISITRVTADISLAKRSVLNNPSKHIIIERSNTRSSLAEVQSEIERIFELARTLQLVALDADTINHPAQLSKTSLAPIIVYIKITSPKVLQRLIKSRGKSQSKHLNVQIAASEKLAQCPPEMFDIILDENQLEDACEHLAEYLEAYWKATHPPSSTPPNPLLNRTMATAALAASPAPVSNLQGPYLASGDQPLERATGEHASMHEYPGELGQPPGLYPSSHPPGRAGTLRALSRQDTFDADTPGSRNSAYTELGDSCVDMETDPSEGPGLGDPAGGGTPPARQGSWEDEEEDYEEELTDNRNRGRNKARYCAEGGGPVLGRNKNELEGWGRGVYIR

SEQ ID NO: 39678 - protein, 306 aa, Homo sapiens
  DOMAIN (102)..(149): Ribosomal protein L19e proteins domain identified by eMATRIX, accession number BL00526B, p-value=8.846e-15, raw score of 26.53
  DOMAIN (154)..(221): Dihydropyridine sensitive L-type calci domain identified by PFam, accession name Ca_channel_B, E-value=9.1e-16, PFam score of 47.6
  misc_feature (1)...(306): Xaa = X or * as defined in Table 2
MWRSIFLDSRYLLSSRRKILILLIHVTFSGIRALAVPFRLPVEKMSFIFMGDVIHRMLTATQYVAPLMANFNPGYSDNSTVVYFDNGQQIRKLIKDGLIIRKPVTVHSRARCRKNTLARRKGRHMGIEFACFCCVFLTPALICMVCAVRLLTRDPYLASGDQPLERATGEHASMHEYPGELGQPPGLYPSSHPPGRAGTLRALSRQDTFDADTPGSRNSAYTELXDSCVDMETDPSEGPGLGDPCEGTPPARQGSWEDEEEDYEEELTDNRNRGRNKARYCAEGWGPVLGRNKNELEGWGRGVYIR

SEQ ID NO: 39679 - protein, 245 aa, Homo sapiens
  misc_feature (1)...(245): Xaa = X or * as defined in Table 2
ELFPFAAAAAAMSMLRLQKRLASSVLRMWQRTNGLGXTPMRPMXSPMPTPRQQIPEAHQRWADHPLSLVTGPFPGSMPEKTPLAAGEGAGQHGALGKAGRGTSQMPGMPGEGQHGLRRIEDFGAGLLQKDTGEIXRRSDRPHVFTACYLEGEGGMLFQKQGGFFMGTLPQGXRQDKGPQRSFLADQAXRPQGLRTKESTESASEERLPGQRKEEINQRLYSKEGRRPRNKNLPLGSVHTWPLVIT

SEQ ID NO: 39680 - protein, 743 aa, Homo sapiens
  DOMAIN (439)..(461): SpoU rRNA Methylase family domain identified by eMATRIX, accession number PF00588B, p-value=3.077e-18, raw score of 17.18
  DOMAIN (318)..(459): SpoU rRNA Methylase family domain identified by PFam, accession name SpoU_methylase, E-value=1.3e-60, PFam score of 214.8
MQIPRSPRQIVMLQRKASKPGQGLGKTTGWIHRTTLLSRGVKMIPGVSYQKIDDDGLHVVINGETQVLAVDNVVICAGQEPNRALAQPLIDSGKTVHLIGGCDVAMELDARRAIAQGTRLADLQAASQGTCIDDQDITIDTYEFTTDYLENPTCGEKVVEETLVSHLLKSNCLITHQPDWGSLQIQYRGRQIDREKLLRYLVSFRHHNEFHEQCVERIFNDLLRFCQPEKLSVYARYTRRGGLDINPWRSNSDFVPSTTRLLEVDMLKRTASSDLYQLFRNCSLAVLNSGSLTDNSKELLSRFENFDINVLRRGGGSMLNIVLYDPEIPPNTGNIIRLCANTGFRLHIIEPMGFAWDDKRLRRAGLDYHEFTAVTRHHDYRAFLEAENPQRLFALTTKGTPAHSAVSYQDGDYLMFGPETRGLPASILDALPAEQKIRIPMVPDSRSMNLSNAVSVVVYEAWRQLGYPGADTGAYHIIPWSSITTFANFVRGIVSVVANYDVDRHEDADKANQALKDAVAELMENEEIRGLIIGEPNFAGIVGLSNTAFTLRVSFTTLPLKQWTSDLQAHCLGRKSKRISHSKTTRAVTSVWWFVILKAGWSGGHGTLSRMPVKVLTAISAPQASVQTRPPADREAFTRIHLPEHTLYPHTPAIAAGVFIDGDIPMTTQTQHDLAPANQPEFELTVTPVPDEQRIDFWPQYFGAIPQWLLLEPHIFAWMDRFCEGYSGVSGRSTGSSRGDLQA

SEQ ID NO: 39681 - protein, 519 aa, Homo sapiens
  misc_feature (1)...(519): Xaa = X or * as defined in Table 2
SGPNSLKFYDWGETVPQPWPIFGLSPAFGFPLCFPRGLGETIFSSRPHIRRNYPELQKRLNGWLSAALKTARILTVCVAVMLLLSAWGLFDFWNWLQNGAGQKNPXNIPDLRIRNSILFLLSAVGWTVLASLIENRLASDIHGRPLPSARTRTLLTLFRNALAVIISTITIMIVLSEIGVNIAPLLAGAGALGLAISFGSQTLVKDIITGVFIQFENGMNTGDLVTIGPLTGTVERMSIRSVGVRQDTGAYHIIPWSSITTFANFVRGIGSVGANYDVDRHEDADKANQALRDAVEDDETRFTSESSPILRCCQREGLGLKAVVQILLSHGRNGLPGEPASSQGLSAASSTPVFHLALQIDSAPDNIDWVEMLFNKNMVTERLQNVMVLEQCFSDSSSLYRFLTYSYLLAFNVWLLLAPVTLCYDWQVGSIPLVETIWDMRNLATIFLAVVMALLSLHCLAAFKSRVTASIPGCIKAHAVENVLTTKSKTRIYPEVVVQSGLQKQKGKGSVMFIEAAGL

SEQ ID NO: 39682 - protein, 92 aa, Homo sapiens
VRQYRLGNMHQQRMAEMIDARQQQAFGEEGACWGGCPKHRVMLDASGKPGLNDLCAGYQRDVRHLPRYLKAMADLLAHGRPASDIMHAHLLV

SEQ ID NO: 39683 - protein, 271 aa, Homo sapiens
  misc_feature (1)...(271): Xaa = X or * as defined in Table 2
RSLLAIFNHWXKRDLGKFLVWNIKWAFAKFCRSAGQTSGRSVIVEHNGEIYACDHYVYPQYRLGNMHRQRMAEMIDSRQQQAFGEDKFKQLPAQCRSCNVLKACWGGCPKHRFMLDASGKPGLNYLCAGYQRYFRHLPPYLKAMADLLAHGRPASDIMHAHKKVFKRGTACSGFQKGGPLFRSRTGYCPTLRKKAPCPKTGLLGKKWTPQRRNSSGKSCAKRRGDPPLLENRFNGSRVQRKPQWNSCTGHPENNFFPNYGGTPYPQRMWPL

SEQ ID NO: 39684 - protein, 272 aa, Homo sapiens
  DOMAIN (109)..(135): NOL1/NOP2/sun family proteins domain identified by eMATRIX, accession number BL01153D, p-value=8.322e-14, raw score of 19.69
  DOMAIN (59)..(121): NOL1/NOP2/sun family domain identified by PFam, accession name Nol1_Nop2_Sun, E-value=0.0015, PFam score of 15.2
  misc_feature (1)...(272): Xaa = X or * as defined in Table 2
SIFISIGNLAANDLSPSRIARLQKILHSYVPEEIRDGNQVRVTSWDGRKWGELEGDTYDRVLVDVPCTTDRHSLHEEENNIFKRSRKKERQILPVLQVQLLAAGLLATKPGGHVVYSTCSLSHLQNEYVVQGAIELLPINTASRYRWKIXLTSEGFSWTHFVSSQSCPGWGAGNTKTSLAILALCTSAKCVGWTXYPPQSLKQEYQRVYSVGCTRNWKLGPVAEMHSRSCLHPVRVFLQFSAIRSRRFAVLLSNCGASAWFPTSLINPYPIS

SEQ ID NO: 39685 - protein, 98 aa, Homo sapiens
  misc_feature (1)...(98): Xaa = X or * as defined in Table 2
MVQSLKVACWVEGGRSCAGQGGHQRGCCLLHIQPPATPQSGCITFTRLCXXXXXXXXXXXXXGGPLFKNPWGGPIFPGEKXXXXXXXXXGFLNPRGGF

SEQ ID NO: 39686 - protein, 236 aa, Homo sapiens
  DOMAIN (78)..(123): Synaptophysin / synaptoporin proteins domain identified by eMATRIX, accession number BL00604F, p-value=9.027e-09, raw score of 5.96
  misc_feature (1)...(236): Xaa = X or * as defined in Table 2
ARPQQYEQVPGKAEASEWERGSSAPTGPGGHAAAAAGGVGGGEGSPPALHGRGARAGGAGICMGLRQQLNRXAMDLTGAGGPARAGAAGAVARGGGRHQGPGAGGRGRGLGFAAGTAEPRGAPHRPLQRALPPIRREPGERHRAPRAGAAPQCGSARPRQPRAPQSLRAGALPEAHAQGQGPARTHPAEPGPAARRAQQSLCRHWDXGRGRPGPPDALRGGAASDFRLSARTPICR

SEQ ID NO: 39687 - protein, 423 aa, Homo sapiens
  DOMAIN (68)..(303): TPR Domain domain identified by PFam, accession name TPR, E- value=2.5e-12, PFam score of 54.4
VSGVPNCLFFSQALFRSLVRHLRGTMAMESTATAAVAAELVSADKIEDVPAPSTSADKVESLDVDSEAKKLLGLGQKHLVMGDIPAAVNAFQEAASLLGKKYGETANECGEAFFFYGKSLLELARMENGVLGNALEGVHVEEEEGEKTEDESLVENNDNIDETEGSEEDDKENDKTEEMPNDSVLENKSLQENEEEEIGNLELAWDMLDLAKIIFKRQETKEAQLYAAQAHLKLGEVSVESENYVQAVEEFQSCLNLQEQYLEAHDRLLAETHYQLGLAYGYNSQYDEAVAQFSKSIEVIENRMAVLNEQVKEAEGSSAEYKKEIEELKELLPEIREKIEDAKESQRSGNVAELALKATLVESSTSGFTPGGGGSSVSMIASRKPTDGASSSNCVTDISHLVRKKRKPEEESPRKDDAKKAKQ

SEQ ID NO: 39688 - protein, 435 aa, Homo sapiens
MECVCVKEKEREEKEGKEEEEEDEAVAERGGKGERRGERRGERKREKETYTEKNRYRDTKRDRDRERKEPYEIPSSLIGHGDPKDELDRNLALKQVKTYWVIQFSKSIEVIEKRMAVLNEQVKEAEGSSAEYKKEIEELKELLPEITEKTEDAKESQTTGNVAELALKATLGGGSSVSSIASRKPTDGASSSNCVTDISHFVRKKRKPEEQSPWKDDAKKVKQELEVNGGSGDAVPSGNEVLENMEEEAENRVESRAAVEGTVEAGATAESTAYMYDIPAMYQENTAVSKTDEVSDLIHKLAQTDLLAQERAGKRASPQDGGSAEGQAQSDRQEATKQRHKQEAGDRHYDKQMLEYQGAHELYSSREKRKEKKKKPPHGRLPPTPVALHGAKRRLLTKRLFNASPNKPKGHSTQFSVMSQAEQQPVLKHADIFHK

SEQ ID NO: 39689 - protein, 130 aa, Homo sapiens
WDMANSGCKDVTGPDEESFLYFAYGSNLLTERIHLRNPSAAFFCVARLQQEGVKSGMYVVIEVKVATQEGKEITCRSYLMTNYESAPPSPQYKKIICMGAKENGLPLEYQEKLKAIEPNDYTGKGSEENE

SEQ ID NO: 39690 - protein, 190 aa, Homo sapiens
WDMANSGCKDVTGPDEESFLYFAYGSNLLTERIHLRNPSAAFFCVARLQDFKLDFGNSQGKTSQTWHGGIATIFQSPGDEVWGVVWKMNKSNLNSLDEQEGVKSGMYVVIEVKVATQEGKEITCRSYLMTNYESAPPSPQYKKIICMGAKENGLPLEYQEKLKAIEPNDYTGKVSEEIEDIIKKGETQTL

SEQ ID NO: 39691 - protein, 243 aa, Homo sapiens
MANSGCKDVTGPDEESFLYFAYGSNLLTERIHLRNPSAAFFCVARLQLLIESPRMSRLAKFWPRTHAVILSKTERTSFWPLKPQKWESGSDTPYSQTRKDFKLDFGNSQGKTSQTWHGGIATIFQSPGDEVWGVVWKMNKSNLNSLDEQEGVKSGMYVVIEVKVATQEGKEITCRSYLMTNYESAPPSPQYKKIICMGAKENGLRLKYQEKLKAIEPNDYTGKVSEEIEDIIKKGGTTKLFRT

SEQ ID NO: 39692 - protein, 98 aa, Homo sapiens
  DOMAIN (9)..(55): DEAD-box subfamily ATP-dependent helicases proteins domain identified by eMATRIX, accession number BL00039D, p-value=6.607e- 18, raw score of 21.67
MFCNTDLGTLLCTDVVARGLDIPQVNWIVHYDHPDDPKEYIHRVVPAFVDLNVNGNEGKQKKRGGGGGFDYQKIKKVEKSKIFKHISKKSSDSRQLSH

SEQ ID NO: 39693 - protein, 615 aa, Homo sapiens; identical to SEQ ID NO: 38143
  DOMAIN (423)..(469): DEAD-box subfamily ATP-dependent helicases proteins domain identified by eMATRIX, accession number BL00039D, p-value=7.750e- 31, raw score of 21.67
  DOMAIN (137)..(348): DEAD/DEAH box helicase domain identified by PFam, accession name DEAD, E-value=2.5e-68, PFam score of 219.0

SEQ ID NO: 39694 - protein, 902 aa, Homo sapiens
  DOMAIN (73)..(107): Armadillo/beta-catenin-like repeat proteins domain identified by eMATRIX, accession number PF00514C, p-value=5.250e-17, raw score of 24.37
MAQQATLCSMKGCMRALVAQLKSESEDLQQTVQAKREVPKSKVPAAEKRESGPKQAAVNAAVQRVQVLPDVDTLLHFATESTPDGFSCSSSLSALSLDEPFIQKDVELRIMPPVQENDNGNETESEQPEESNENQDKEVEKPDSEKDLLDDSDDDDIEILEECIISAMPTKSSRKAKKLAQTASKLPPPVARKPSQLPVYKLLPAQNRLQAQKHVSFTPGDDVPRVYCVEGTPINFSTATSLSDLTIESPPNELATGDGVRASIQSGKSHKPFRVKKIMDQVQQASSTSSGANKNQVDTKKKKPTSPVKPMPQNTEYRTRLPNNEDRVRGSFALDSPHHYTPIEGTPYCFSRNDSLSSLDFDDDDVDLSREKAELRKGKESKDSEAKVTCRPEPNSSQQAASKSQASIKHPANRAQSKPVLQKQPTFPQSSKDGPDRGAATDEKLQNFAIENTPVCFSRNSSLSSLSDIDQENNNNKESEPIKEAEPANSQGEPSRQLSQQNLTKQASLSKNASSIPRSESASKGLNQMSNGNGSNKKVELSRMSSTKSSGSESDRSERPALVRQSTFIKEAPSPTLRRKLEESASFESLSPSSRPDSPTRSQAQTPVLSPSLPDMSLSTHPSVQAESSEKAKSEDERHVSSMPAPRQMKENQVPTKGTWRKIKESDISPTGMASQSASSGAASGAESKPLIYQMAPPVSKTEDVWVRIEDCPINNPRSGRSPTGNTPPVIDSVSEKGSSSIKDSKDTHGKQSVGSGSPVQTVGLETRLNSFVQVEAPEQKGTEAKPGQSNPVSIAETAETCIAERTPFSSSSSSKHSSPSGTVAARVTPFNYNPSPRKSSADSTSARPSQIPTPVSTNTKKRDSKTDSTESSGAQSPKRHSGSFCVSFMSSASKLFSTSSS

SEQ ID NO: 39695 - protein, 63 aa, Homo sapiens
  misc_feature (1)...(63): Xaa = X or * as defined in Table 2
QSSEXNIQGPCNVWSSRXRWERSKGRRHLSSASRPLSALSTLRFTSVSQHAAKRVVVIRPQGQ

SEQ ID NO: 39696 - protein, 122 aa, Homo sapiens
SMQKKPRPIAHRQRCRAAMAAGQQPQIPITTGTGVVYPGAITMATTTPSPQMTSDCSSTSASPEPSLPVIQSTYGMKTDGGSLAGNQMINGEDEMAMYDDYEDDPKSDYSSENEAPEAVSAN

SEQ ID NO: 39697 - protein, 158 aa, Homo sapiens; identical to SEQ ID NO: 34786
  DOMAIN (98)..(132): TRANSCRIPTION PROTEIN FACTOR BTF3 REGULATION NUCL domain identified by eMATRIX, accession number PD02749C, p-value=3.739e- 34, raw score of 13.96
  DOMAIN (50)..(104): NAC domain identified by PFam, accession name NAC, E-value=2e -14, PFam score of 61.4

SEQ ID NO: 39698 - protein, 237 aa, Homo sapiens
  DOMAIN (74)..(110): TRANSCRIPTION PROTEIN FACTOR BTF3 REGULATION NUCL domain identified by eMATRIX, accession number PD02749B, p-value=4.900e- 23, raw score of 12.75
  misc_feature (1)...(237): Xaa = X or * as defined in Table 2
LSGARSSQGRLPWGRGDAVSTSTSRRNPRTGASDERNNHEPGKNSPYLQAQVRIGGKGTARRKKKVVHRTATADDKKLQFSLKKLGVNHISGIEEVNMFTNQGTSGSTFNNPXKVQAISWAANTFHPLPGPCWRPKPADKKWLPQPSLNPSLGAGXSXLRFKGRLARSFLPPNNPVDGKATHLPTGKDDDDKVPRSLWRILMRLPKNEGKLELRSTSXRXNLEEVTGSRYFKIMTAF

SEQ ID NO: 39699 - protein, 103 aa, Homo sapiens
GAASLLRAGPGSSGSDPPLSSRFVERRGALYRSPMNQENPPPYPGPGPTAPYPQYGWQGGPQEPPKTTVYVVEDQRRDELGPSTCLTACWTALCCCCLWDMLT

SEQ ID NO: 39700 - protein, 139 aa, Homo sapiens
  misc_feature (1)...(139): Xaa = X or * as defined in Table 2
LLLPALVTSAPLPPAGLATCPCPRLAQLGIGRAAPQKRSPRRRNPEASRGRPPDGVWRAPLRVPPTPRETEPQRRGDPGLRNPCLSQASPGAPQFSGPPPGSPGTRPVRAXSPPGPSWVGPGPLHLTSPLPNRLDNGRV

SEQ ID NO: 39701 - protein, 177 aa, Homo sapiens
  DOMAIN (60)..(104): Synapsins proteins domain identified by eMATRIX, accession number BL00415N, p-value=3.562e-09, raw score of 4.29
SGARLLLTCSETGAASLLRAGPGSSGSDPPLSSRFVESRGALYRSPMNQENPPPYPGPGPTAPYPPYPPQPMGPGPIGGPYPPPQGYPYPRIPTVRLAGWTSGSLLKTTVLLWVGRPKEEMKLGTIHLPSQPAGTGLCLLLSLGTWFTLTRTRPRPFLFLASSAANLLTGVPCPHLF

SEQ ID NO: 39702 - protein, 155 aa, Homo sapiens
  DOMAIN (93)..(126): Ribosomal protein L23 proteins domain identified by eMATRIX, accession number BL00050A, p-value=5.500e-26, raw score of 23.71
  DOMAIN (74)..(153): Ribosomal protein L23 domain identified by PFam, accession name Ribosomal_L23, E-value=2.3e-32, PFam score of 113.0
PKAKKEAPAPPKAEAKAKALKAKKAVLKGVHNHTQKKKIHTPLTFQRPKSLRLRRQPKYPRKSAPRRNKLDHYAIIKFPLTTESAMKKIEDNNTLVFIVDVKANKHQIKQAVQKLYDIDVAKVNTLIRPDGEKKAYVRLAPDYDALDVANKIGII

SEQ ID NO: 39703 - protein, 380 aa, Homo sapiens
  DOMAIN (123)..(134): TNFR/NGFR family cysteine-rich region proteins domain identified by eMATRIX, accession number BL00652B, p-value=5.615e- 09, raw score of 12.02
  DOMAIN (112)..(187): TNFR/NGFR cysteine-rich region domain identified by PFam, accession name TNFR_c6, E-value=0.00088, PFam score of 26.0
MLYQVLMVDTCGTRGEGAFLKYRKPACPTALGFMFPRSHGLTADTVLVSSLSRWFLWRRLLLLLLLLLLNLPLQKAVHRKATPESAIADCSGPRDCAPWVKFAMLELHSFKCPAGEYWSKDVCCKNCSAGTFVKAPCEIPHTQGQCEKCHPGTFTEKDNYLDACILCSTCDKGDFYGKKTAVHEALCDNIDTRTVMEEMRALVSQCNLYMAARKAERRRPNRALLENIAMYLTHMLKIFGAIEEESPLGFPVGGPGTNLNPIENGGMDKFLTTVSVLRKTHRVSNGQNSVCRSVSYWKPKCTFCSLTHITYIRYLELRLTLESTVMPYLQVLSEFREGVRKIAREKKVLEVLQLSDALRVTSCLSLGSGLKTMKEPCLLF

SEQ ID NO: 39704 - protein, 213 aa, Homo sapiens
  DOMAIN (47)..(96): kw TRANSCRIPTASE REVERSE II ORF2 domain identified by eMATRIX, accession number DM01354Z, p-value=3.169e-17, raw score of 9.06
MDGDEKTSFICAVHNGIFREWKQTGTCSPIKKGQLLLRVECHGKIKAQGGQMYIKAALFTRAKTWNQPKCPSMIDWIKKMWVHIYTCEYYTAIKKKIMSSVETWMELEAIILSKLTQEQKSKFRTFSLYSSRVFQRTQDVPYHNKLNEEADKPTTNKKGLILNLRLVNTPIGRKNTGKLSAIKEKLLKRPKRKHLSKIYTLKNDSDLIKDKNI

SEQ ID NO: 39705 - protein, 274 aa, Homo sapiens
  DOMAIN (50)..(76): Translation initiation factor IF-3 domain identified by PFam, accession name IF3, E-value=0.00048, PFam score of 15.1
MIEFGFNYVPIKITKKQIRSLEIVIPNEDVKAPGLWIDGNGTVEGPTLRKELILSSNIGQHDLDTKTKQIQQWIKKKHLVQITIKKGKNVDVSENEMEEIFHQILQTMPGIATFSSRPQAVQGGKALILSFLIHAKAFSTAEDTQNEGKKTKKNKTAFSNVGRKISQRVIHLFDEKGNDLGNMHRANVIRLMDERDLRLVQRNTSTEPAEYQLMTGLQILQERQRLREMEKANPKTGGCLTRDFASLSDCHRKTFAYGSGDNGVNLHRVHIPQD

SEQ ID NO: 39706 - protein, 95 aa, Homo sapiens
  DOMAIN (8)..(22): C2H2-TYPE ZINC FINGER SIGNATURE domain identified by eMATRIX, accession number PR00048A, p-value=4.240e-09, raw score of 10.52
HEENRPFVCEHAGCGKTFANKPSLTSDAVVHDPGKKKMKLKVKKSREKRSLASHLSGYIPPKRKQGQGLSLCQNGESPNCVEDKMLSAVPVLTLG

SEQ ID NO: 39707 - protein, 113 aa, Homo sapiens
PFVGVFWFLFFFFSVFVFTFVPPEYYVLPAPPPHRSVFLVFGKRVVFFFPLPCCDFRSRLTPPFVCAPPPPPLPFVSVPCVPSLSCGDVCAADKKNKKKFLNTTRWKKKTKKF

SEQ ID NO: 39708 - protein, 37 aa, Homo sapiens
  DOMAIN (14)..(37): Glutathione peroxidases domain identified by PFam, accession name GSHPx, E-value=8.3e-07, PFam score of 29.0
MCAARLAAVAVAQSVYAFSARPLAGGEPVSLGSLRGK

SEQ ID NO: 39709 - protein, 44 aa, Homo sapiens
  misc_feature (1)...(44): Xaa = X or * as defined in Table 2
MSGSMSMVWXRGVGXKXGXVVAGSWQGLPQLXLVASWRGCASDP

SEQ ID NO: 39710 - protein, 248 aa, Homo sapiens
  DOMAIN (103)..(121): Glutathione peroxidases selenocysteine proteins domain identified by eMATRIX, accession number BL00460B, p-value=4.600e- 21, raw score of 9.73
  DOMAIN (49)..(167): Glutathione peroxidases domain identified by PFam, accession name GSHPx, E-value=3.5e-64, PFam score of 226.6
  misc_feature (1)...(248): Xaa = X or * as defined in Table 2
VWWNSRRRPVKRRRLLASPYSACSGRSAGFLDNCAMCAARLAAAAAAQSVYAFSARPLAGGEPVSLGSLRGKVLLIENVASLXGTTVRDYTQMNELQRRLGPRGLVVLGFPCNQFGHQENAKNEEILNSLKYVRPGGGIEPNFMLFHKSEVNGAGAHPLFAFLREALPAPSDDATALMTDPKLITWSPVCRKDPGKIKFFLGPPGNFFEKFLGGPCTVLPLRRYSRRFQTIDIEPDIEALLSQGPSCA

SEQ ID NO: 39711 - protein, 376 aa, Homo sapiens
MEYYAAVKKDEFLSFAGTWVKLETIILSILTQEQKTKHLMFALISGRNLFNPGNGKIPPTPNPGFYTDTESHPEFLWRQTLKSTGASTSLRPWSSPVSAAISPKEAAAVVPGSRSTLTVDQTTPPIHTVPSAGKAMPAGANSTVGLLLPELCWQAQPHDFPGSTWMVDWLWLLHEGALQTRTPNKGNAGMESVIRGALQGPGADKTINSKERADMTKQHFMEELEIEGNLEIRTRHPLPHGYVLTKRQQACVSIRYSVNSRDYFCCSADFCIGKQQKRTDVSPYWLLMHADADATCGCSHLQGPRISFARGRGRCQEQWGLCGVDVTSALVTNSSGQLIGPCLNLGDTLSDGCTQIACHRDWLFLQNNVEAASLEG

SEQ ID NO: 39712 - protein, 124 aa, Homo sapiens
  misc_feature (1)...(124): Xaa = X or * as defined in Table 2
ARCDHPTAFVVCYRFYPWPAGHVDAAVHXYVCARATDSFIAVWRTLLKGTIIILHESSIHDNFNLTSQKLWAFVPNKAPRTSGIICWPEIQSAFQGGGNLYFTIPIVDRNSTNYVLRQVRLLGN

SEQ ID NO: 39713 - protein, 99 aa, Homo sapiens
  misc_feature (1)...(99): Xaa = X or * as defined in Table 2
DPAGFPGCWKPLFYDLHYRSQLHQLCLQAGRTPGQFGHQHRFWWQFCTXELPSALQPLPEGNLVSCNEQSFGAPATGTNPGEPVHPAALGTWLYLLPPC

SEQ ID NO: 39714 - protein, 47 aa, Homo sapiens
MEYYAVIKKDEFMSFAGTWMKLETIILSKLTQEQKPTPLMFSLISGS

SEQ ID NO: 39715 - protein, 684 aa, Homo sapiens; identical to SEQ ID NO: 33768
  DOMAIN (245)..(257): RNase H domain identified by eMATRIX, accession number PF00075C, p-value=5.622e-12, raw score of 11.58
  DOMAIN (115)..(331): Reverse transcriptase domain identified by PFam, accession name rvt, E-value=4.9e-16, PFam score of 66.7

SEQ ID NO: 39716 - protein, 116 aa, Homo sapiens; identical to SEQ ID NO: 33770
  misc_feature (1)...(116): Xaa = X or * as defined in Table 2

SEQ ID NO: 39717 - protein, 249 aa, Homo sapiens; identical to SEQ ID NO: 33777
  DOMAIN (121)..(133): RNase H domain identified by eMATRIX, accession number PF00075C, p-value=1.000e-12, raw score of 11.58
  DOMAIN (28)..(207): Reverse transcriptase domain identified by PFam, accession name rvt, E-value=2.3e-16, PFam score of 67.8
  misc_feature (1)...(249): Xaa = X or * as defined in Table 2

SEQ ID NO: 39718 - protein, 19 aa, Homo sapiens
TVHITGLCADNPQYQPRAR

SEQ ID NO: 39719 - protein, 814 aa, Homo sapiens
  DOMAIN (246)..(295): kw TRANSCRIPTASE REVERSE II ORF2 domain identified by eMATRIX, accession number DM01354Z, p-value=1.000e-40, raw score of 9.06
  DOMAIN (331)..(540): Reverse transcriptase domain identified by PFam, accession name rvt, E-value=8.1e-18, PFam score of 72.6
RKLKLDPFLTPYTKINSRWIKDLTVRPKTIKTLEENLGNTIQAIGMGKDFMTKTPKAMATKAKIDKWDLIKLKSFCTAKETTIRVNRQPTAWEKIFTIYSSDKGLISRIYKELKQIYKKKTNNPIKKWAKDMNRHFSKEDIYAAKKHMKKFSSSLAIREMQIKTTMRYHLTPVRMVIIKKSGNNRCWRGCGEIGTLLHCWWDCKLVQPLWKSVWQLLRDLELEIPFDPAIPLLGIYPNDYKSCCYKDTCTRMFIAVLFTIAKTWNQAKCPTMIDWIQKMWHIYTMEYYAAIKKDEFMSFVGTWMKLEIIILSKLSQEQKTKHRIFSLIASNRAVTLITWPKIPFLGIREAKNPRSENTRLATILEVAHRHLGSGSPPSWELCEQGPPVTFWRSQRDLQSAVPSPYTLLSQIPEEAEWFTVLDVKDAFFCIPVHPDSQFLFAFEDPSNPTSQLTWTVLPQGFKDSPHLFGQALAQDLSQFSYMDTLVLWYGDDLILATHSETLCHQATQVLLNFLTTCGYKVSKRKAQLCSQQVKYLGLKLSKGTTALSEECIQPKLAYPHPRTLKQLRAFLGITGFCQMWIPRYSKIARPLYTLIKETQKANTHLVRWTPEAEAAFHTLKKALTQAPVLSLPTGQDFSLYVTEEKGIALGVLIQVRGTSLQPVAYLNKENDVVAKGTSAQLAELIALTRALELGEGKSVNIYTDSKYAYLVLHAKEAIWREREFLTSKETPIKHQEAIRRLLLAVQKPKEVTVLHCPGHQKGKEKEIGRNHQADIEAKRATRQDSPLEMLIEGPLVWGNPLQETKPQYSEEEIE

SEQ ID NO: 39720 - protein, 551 aa, Homo sapiens
  DOMAIN (167)..(179): RNase H domain identified by eMATRIX, accession number PF00075C, p-value=5.622e-12, raw score of 11.58
  DOMAIN (371)..(516): RNase H domain identified by PFam, accession name rnaseH, E- value=1e-24, PFam score of 95.5
TFRLTEPTQMRRNQKTNPHNMTKQGSSIPPQKNHTSSPAMDPNQEEIPDLPEKNSGVNKIPRNPTYEGCEGPFQGELQTTAQQNKGGHKQTEDHSMLMDRKNQYCENGHTAQAVPNPYTLLSQIPEDAEWFTVLDPKHAVFCIPVHPDSQFLFAFEDPSNPMSQLIWTVLPQGFRNSPHLFGQALAQDLSQFSYLDTLVLRYMDDLLLATHSETLCHQATQALLNFLATCGYKVSKPKAQLCSQQVKYLGLKLSKGTRTLSEERIQPILGYPHPKTLKQLTAFLGITGFCQIWIPSILTAKGDLWLSDNHLLKYQVLLLEGPVLQLRTCATLNPATFLPDNEEKIEHNCQQVIAQTYATRGDLLEVPLTDPDLNLYTDGSSFVQKGLQKAGYAVVSDNGILESNPFTPGTSTQLAELVALTWALEFGEGKRVNINTGSKYAYLVLHAHASIWREREFLTSEGTPIKHQEAIRRLLLVVQKPEEVAVLHCWGHPKGKEREIEGNCQADIEAKRASRQDPPLEMLIERHLVWGNPLWETNPQYSAEEIEWGTS

SEQ ID NO: 39721 - protein, 122 aa, Homo sapiens
RCCPCPRVHHMHISARAEIRPPPRPPPFLLLLVFLFQTGPCSHPGCSPPPAHPSCSSWPQWPGCSSPVSVLLAKPAACLIAAAVSANPRLLFKPCCRTASNWAHRQVTLCQWSELSSCFWPE

SEQ ID NO: 39722 - protein, 394 aa, Homo sapiens
EWPEGGGRYSSVPSAVHHARTCLAAELSGTSRPQEPRALPPETGVATAEAEKSNQPAAISKPNGQGAPLQRRSPRLSPSPGAAQVPALPMQDMSEGSSSPSPPGGHIWLASLTPCSLALWNSCCQSPGSQPRGRDEGDCLVRATEPSATGPDPRRTRLCSISASLVVRNTPDPGISDRRPGISDRRPGTSDRRPGTSDRRPGISDRRPGTSDRRPGTSDRRPGTSDRRPGTSDRRPGISDRRPGTSDRRPGISDRRPGTSDRRPGISDRRPGTSDRRPGTSDRRPGISRLPRDWIPAAAASRENSNSADARNRCSSPSRKCQTPTSHRMRGSAGSVGSSAGHTAGGTGLPTPSRCSQALQVFPAVLGKRGFLSWERSLKQRDIRGPDFSSTALI

SEQ ID NO: 39723 - protein, 173 aa, Homo sapiens
  DOMAIN (26)..(152): Cyclin domain identified by PFam, accession name cyclin, E- value=2.3e-46, PFam score of 166.3
KFTIEYLVMKFLKAVSHAISKSKKWKLILKELKFEVGGPLPLHFLRQASKARKADVEQHTLAKYLMELTLIDYDMMHYHPSKAATAASCLSQKVLGQGKWNLKQQCYTGYTQNEVLEVMQHVAKNVLKVNENLTKFIAIKNKYASNKFLKISMIPQLNSKAIKDLAFPLMGGS

SEQ ID NO: 39724 - protein, 282 aa, Homo sapiens
  DOMAIN (105)..(262): Cyclin domain identified by PFam, accession name cyclin, E- value=1.1e-56, PFam score of 201.8
MLCDFQDGSTSRHVNEPSNNPSPQPWSEDQGQASATVPCAKSVMHRLKKFTIEYLVMKFLKAVSHAIQMEMLAPKGPSPIPEDASVKEENICRAFSDALLYKIEDIDNKDWNNPQLCSDYVKDNAYTSFQIQEMETILKELKFEVGGPLPLHFLRQASKAGKADVEQHTLAKYLMELTLIDYDMMHYHPSKAATAASCLSQKVLGQGKWNLKQQCYTGYTQNEVLEVMQHVAKNVLKVNENLTKFIAIKNKYASNKFLKISMIPQLNSKAIKDLAFPLMGGS

SEQ ID NO: 39725 - protein, 421 aa, Homo sapiens
  DOMAIN (187)..(221): Cyclins proteins domain identified by eMATRIX, accession number BL00292A, p-value=7.000e-27, raw score of 22.87
  DOMAIN (141)..(404): Cyclin domain identified by PFam, accession name cyclin, E- value=2.9e-123, PFam score of 422.9
CPPFSVRVPPWAGLALLPSPSLMALLRRPTVSSDLENIDTGVNSKVKSHVTIRRTVLEEIGNRVTTRAAQVAKKAQNTKVPVQPTKTTNVNKQLKPTASVKPVQMEKLAPKGPSPTPEDVSMKEENLCQAFSDALLCKIEDIDNEDWENPQLCSDYVKDIYQYLRQLEVLQSINPHFLDGRDINGRMRAILVDWLVQVHSKFRLLQETLYMCVGIMDRFLQVQPVSRKKLQLVGITALLLAPKYEKMFSPNIEDFVYITDNAYPSSQIREMETLILKELKFELGRPLPLHFLRRASKAGEVDVEQHTLAKYLMELTLIDYDMVHYHPSKVAAAASCLSQKVLGQGKWNLKQQYYHKDTQENEVLEVMQHMAKNVVKVNENLTKFIAIKNKYASSKLLKISMIPQLNSKAVKDLASPLIGRS

SEQ ID NO: 39726 - protein, 625 aa, Homo sapiens
  DOMAIN (214)..(244): Flocculin repeat proteins domain identified by eMATRIX, accession number PF00624I, p-value=1.000e-09, raw score of 9.10
EPEKQQLYDIPASPKKAGLHPPDSQASGQGVPLISVTTLRRGGYSTLPNPQKSEWIYDTPVSPGKASVRNTPLTSFAEESRPHALPSSSSTFYNPPSGRSRSLTPQLNNNVPMQKKLSLPEIPSYGFLVPRGTFPLDEDVSYKVPSSFLIPRVEQQNTKPNIYDIPKATSSVSQAGKELEKAKEVSENSAGQIPHGSPDGQRSPSPEPDRLSGSSSDSRASIVSSCSTTSTDDSSSSSSEESAKELSLDLDVAKETVMALQHKVVSSVAGLMLFVSRKWRFRDYLEANIDAIHRSTDHIEESVREFLDFARGVHGTACNLTDSNLQNRIRDQMQTISNSYRILLETKESLDNRNWPLEVLVTDSVQNSPDDLERFVMVARMLPEDIKRFASIVIANGRLLFKRNCEKEETVQLTPNAEFKCEKYIQPPQRETESHQKSTPSTKQREDEHSSELLKKNRANICGQTLPNLEEKDKPILEQRLDENKDLGTMNPGPLIPQPSSQQTPERKPRLSEHCRLYFGALFKAISAFHGSLSSSQPAEIITQSKLVIMVGQKLVDTLCMETQERDVRNEILRGSSHLCSLLKDVALATKNAVLTYPSPAALGHLQAEAEKLEQHTRQFRGTLG

SEQ ID NO: 39727 - protein, 671 aa, Homo sapiens
  DOMAIN (286)..(316): Flocculin repeat proteins domain identified by eMATRIX, accession number PF00624I, p-value=1.000e-09, raw score of 9.10
MGLKSWGGMGLGTAFGKGLRGEKAWCVSGRYHWRYSQWSGTLTQGPWVWRVHSLSDRVYDVPTQHRGPVVLKEPEKQQLYDIPASPKKAGLHPPDSQASGQGVPLISVTTLRRGGYSTLPNPQKSEWIYDTPVSPGKASVRNTPLTSFAEESRPHALPSSSSTFYNPPSGRSRSLTPQLNNNVPMQKKLSLPEIPSYGFLVPRGTFPLDEDVSYKVPSSFLIPRVEQQNTKPNIYDIPKATSSVSQAGKELEKAKEVSENSAGQIPHGSPDGQRSPSPEPDRLSGSSSDSRASIVSSCSTTSTDDSSSSSSEESAKELSLDLDVAKETVMALQHKVVSSVAGLMLFVSRKWRFRDYLEANIDAIHRSTDHIEESVREFLDFARGVHGTACNLTDSNLQNRIRDQMQTISNSYRILLETKESLDNRNWPLEVLVTDSVQNSPDDLERFVMVARMLPEDIKRFASIVIANGRLLFKRNCEKEETVQLTPNAEFKCEKYIQPPQRETESHQKSTPSTKQREDEHSSELLKKNRANICGQNPGPLIPQPSSQQTPERKPRLSEHCRLYFGALFKAISAFHGSLSSSQPAEIITQSKLVIMVGQKLVDTLCMETQERDVRNEILRGSSHLCSLLKDVALATKNAVLTYPSPAALGHLQAEAEKLEQHTRQFRGTLG

SEQ ID NO: 39728 - protein, 215 aa, Homo sapiens
  DOMAIN (2)..(40): Ribosomal protein S17e proteins domain identified by eMATRIX, accession number BL00712B, p-value=8.147e-26, raw score of 12.56
  DOMAIN (1)..(96): Ribosomal S17 domain identified by PFam, accession name Ribosomal_S17e, E-value=9.6e-39, PFam score of 142.1
DFHTNKRVCEEIPIILSKKLHNRRAGCVTHLTNQIQRGPVRGISIKLQEEEKERRDNYVPKVSALDQEIIEVDPDTKEMLKLLDFGSLSNLQQQKATRVYAVVQISAPMFLLWALPLSVAPLITDFKMFVTTSYLISLFLIINSSANPIIYFFVGSLRKKRLKESLRVILQRALADKPEVGRNKKAAGIDPMEQPHSTQHVENLLPREHRVDVET

SEQ ID NO: 39729 - protein, 128 aa, Homo sapiens
  DOMAIN (21)..(59): Ribosomal protein S17e proteins domain identified by eMATRIX, accession number BL00712B, p-value=8.147e-26, raw score of 12.56
  DOMAIN (7)..(115): Ribosomal S17 domain identified by PFam, accession name Ribosomal_S17e, E-value=9.8e-50, PFam score of 178.7
LTPAPRKNVTEKYYMCLGNDFHTNKRVCEEIPIILSKKLHNRRAGCVTHLTNQIQRGPVRGISIKLQEEEKERRDNYVPKVSALDQEIIEVDPDTKEMLKLLDFGSLSNLQVTRPTVGMNFKMPRGAV

SEQ ID NO: 39730 - protein, 126 aa, Homo sapiens
KDPALNTSLPQKVLGTTEEISGKKHTEDTISVASSLHSSPPASPQGSPHKVGSIISDHSSKISGQSCPGIGGAYLQKKILQITRSTAKRTDSTEKATEENRDRTSCENTTRKRMTSPFRRLRERML

SEQ ID NO: 39731 - protein, 519 aa, Homo sapiens
RMLEATSKMRKGVPSSIQSSQGNSYTLIPSAKSDNLSDSSHSEISSRSSIVSNCSVDSMSAALQDERCSSQALAVPESTGALEKTEHASGIGDHSQHGPGWTLLKPSLIKCLAVSSSVSNEEISQEHIIIEAADSGSWEVGTSCSSSSHDNFQSLPNPKSWDFLNSYRHTHLDDPIAEVEPTDSEPYSCSKSCSRTCGQCKGSLERKSWTSSSSLSDTYEPNYGTVKRRVLESTPAESSEGLDPKDATDPVYKTVTSSTEKGLIVYCVTSPKKDDRYREPPPTPPGYLGISLADLKEGPHTHLKPPDYSVAVQRSKMMHNSLSRLPPASLSSNLVACVPSKIVTQPQRHNLQPFHPKLGDVTDADSEADATLGNKCKLLYMSDVRNPVPAVKDVLVQKYTSFNFFHPQEALDRRREELALPEGASGEACLSTRSLKRSGVQALAQQTHSRNFLPEKQPFSAQAAGILHGSINHNTRGPCLLEGTKMMTGVLYRAYLLCIAYSRDLIVDEQIMNGLRKAI

SEQ ID NO: 39732 - protein, 857 aa, Homo sapiens
  DOMAIN (95)..(110): Ribosomal protein L5 proteins domain identified by eMATRIX, accession number BL00358D, p-value=8.116e-09, raw score of 14.26
  DOMAIN (43)..(542): ribosomal L5P family C-terminus domain identified by PFam, accession name Ribosomal_L5_C, E-value=0.0054, PFam score of 3.0
MTFKNPKYPFVSNLAKQKGMSVIKVNGKLQQSNPNRTTNGPDPSGMKVWVSPQGKNPQPTEVLAEGKGNTEWVVEEDTRNFGFGIQKHTDIGIKYDSSTGIYDLDFNVVLDRRASEEGITLTAALAADRETPSENCLPSPVNPTAQGEEGIHPDPIIVLEQEDPTTAPHPQRLCQQQQCQRPLCRLQPVWPHIVDLTPLTEIGSEEPVGELNFKHIRFEVSEDNMTFDASDQGPFFENYWQLVLSATPGDVTWNGALGLHTPKSSSPDTCSAQQASQCWELSPGGRRIGTLLLPQESGASWLPPGVTSSLAAVRVIMNCGDKATPRNGGVRTLKKLSSLPLSKAGGKVLYGEINPEQEVQASLSFAALLESYGIFMETEFLVACLISQGGQLRNQDFSSSIYSLAPGPLDPSSVRAGAQRTAPPWGISPRSCPVIKVNGKLQQSNPNRTTNGPDPSGMKVWVSPQGKNPQPTEVLAEGKGNTEWVVEEDTRNFGFGIQKHTDIGIKYDSSTGIYDLDFNVVLDRRASEEGITLTAALAADRETPSENCLPSPVNPTAQGEEGIHPDPIIVLEQEDPTTAPHPQRLCQQQQCQRPLCRLQPVWPHIVDLTPLTEIGSEEPVGELNFKHIRFEVSEDNMTFDASDQGPFFENYWQLVLSATPGDVTWNGALGLHTPKSSSPDTCSAQQASQCWELSPGGRRIGTLLLPQESGASWLPPGVTSSLAAVRVIMNCGDKATPRNGGVRTLKKLSSLPLSKAGGKVLYGEINPEQEVQASLSFAALLESYGIFMETEFLVACLISQGGQLRNQDFSSSIYSLAPGPLDPSSVRAGAQRTAPPWGISPRSCHYISNGRNYFPGE

SEQ ID NO: 39733 - protein, 59 aa, Homo sapiens
YPDRCVPGSQNQSFQYLRSCFFLTHTPAPLDPSPRFLLPWPLELCSGQQSFHFSGCQRI

SEQ ID NO: 39734 - protein, 171 aa, Homo sapiens
DAFSSADFSSMLSEEEKEELKAELVQLEDEITTLRQVLSAKERHLVEIKQKLGMNLMNELKQNFSKSWHDMQTTTAYKKTHETLSHAGQKATAAFSNVGTAISKKFGDMRNSPTFKSFEERVETTVTSLKTKVGGTNPNGGSFEEVLSSTAHASAQSLAGGSRRTKEEELQ

SEQ ID NO: 39735 - protein, 229 aa, Homo sapiens
AWAQLPSALGSTRVSPPPSARSQPPWRRRHKCLLETEPLQGTDEDAVASADFSSMLSEEEKEELKAELVQLEDEITTLRQVLSAKERHLVEIKQKLGMNLMNELKQNFSKSWHDMQTTTAYKRTHDTLSHAGQKATAAFSNVGTAISKKFGDMSYSIRHSISMPAMRNSPTFKSFEERVETTVTSLKTKVGGTNPNGGSFEEVLSSTAHASAQSLAGGSRRTKEEELQC

SEQ ID NO: 39736 - protein, 124 aa, Homo sapiens
LLETEPLQGTDEDALASADFSSMLYEEEKEEVKAELVQLEDEITTLRQVLSAKERHLVEIKQKLGMNLMNELKQNFSKSWHDMQTTTAYKKTHETLSHAGQKATAAFSNVGTAISKKFGDMRRK

SEQ ID NO: 39737 - protein, 116 aa, Homo sapiens
  DOMAIN (78)..(116): SUBUNIT HYDROGEN ION TRANSPORT T domain identified by eMATRIX, accession number PD02199J, p-value=1.000e-40, raw score of 11.42
MALISVPWMLLIKPFILRASHRKSQLQASRIQEDATENIEGDSSSPSSRSGQRTSADTHGALDDHGEEFNFGDVFVHQAIHTIEYCLGCISNTASYLRLWGLHLAHAQLSEVLWTM

SEQ ID NO: 39738 - protein, 190 aa, Homo sapiens
  DOMAIN (17)..(59): SUBUNIT HYDROGEN ION TRANSPORT T domain identified by eMATRIX, accession number PD02199F, p-value=1.000e-40, raw score of 15.02
RGGIHERRLLSQKTDNEIWNTFFHGRYLILLMGIFSIYTGLIYNDCFSKSLNIFGSSWSVQPMFRNGTWNTHVMEESLYLQLDPAIPGVYFGNPYPFGIDPIWNLASNKLTFLNSYKMKMSVILGIVQMVFGVILSLFNHIYFRRTLNIILQFIPEMIFILCLFGYLVFMIIFKWCCFDVHVSQHAPSIL

SEQ ID NO: 39739 - protein, 558 aa, Homo sapiens
  DOMAIN (150)..(191): SUBUNIT HYDROGEN ION TRANSPORT T domain identified by eMATRIX, accession number PD02199D, p-value=1.000e-40, raw score of 13.18
  DOMAIN (1)..(550): V-type ATPase 116kDa subunit family domain identified by PFam, accession name V_ATPase_sub_a, E-value=3.2e-167, PFam score of 568.9
MLESVNVRLEDLITGPCWEAGWNAGYAFLVVAVEDFTIGKLFDKLEGTKLCLKNALPRVITQTESHRQRLLQEAAANWHSWLIKVQKMKAVYHILNMCNIDVTQQCVIAEIWFPVADATRIKRALEQGMELSGSSMAPIMTTVQSKTAPPTFNRTNKFTAGFQNIVDAYGVGSYREINPAPYTIITFPFLFAVMFGDCGHGTVMLLAALWMILNERRLLSQKTDNEIWNTFFHGRYLILLMGIFSIYTGLIYNDCFSKSLNIFGSSWSVQPMFRNGTWKTGTHDPHLAVLFKMGHVEGRDCVLRIVLAKIGYRNGFLRKIWNLASNKLTFLNSYKMKMSVILGIVQMVFGVILSLFNHIYFRRTLNIILQFIPEMIFILCLFGYLVFMIIFKWCCFDVHVSQHAPSILIHFINMFLFNYSDSSNAPLYKHQFNFGDVFVHQAIHTIEYCLGCISNTASYLRLWALSLAHAQLSEVLWTMVMNSGLQTRGWGGIVGVFIIFAVFAVLTVAILLIMEGLSAFLHALRLHWVEFQNKFYVGDGYKFSPFSFKHILDGTAEE

SEQ ID NO: 39740 - protein, 310 aa, Homo sapiens
  DOMAIN (225)..(272): Intermediate filaments proteins domain identified by eMATRIX, accession number BL00226D, p-value=6.438e-23, raw score of 19.10
  DOMAIN (56)..(272): Intermediate filament proteins domain identified by PFam, accession name filament, E-value=1.7e-51, PFam score of 184.5
GTWPVSSAASIYAGTGGLGSQISMSCSTSFWGGLGSGGLATEMAGGLAEMGGIQNEKETMQSLNDHLDYLDRVRNLETENWRLESKIQEYLEKRPHVRDWGHYFKTIKELRAQIFANTVDNVHIILQIDNAQSSMRQELAMRQSVESNIHGLCKVIDDTNVTLLQLETEMGALKEELLLMKKNHEEEVKGLQVQIANSGLAVEVDAPKSQVLAKMEQLNRILLYLESKLAQNWAEGQRKVQEYKDLLNIRVKLEAEIATYRRLLEDSEGLNLGDALDSSNSMQTIQKTTTRQIVDSKVVSEISDTKVLRH

SEQ ID NO: 39741 - protein, 231 aa, Homo sapiens
  DOMAIN (106)..(154): Intermediate filaments proteins domain identified by eMATRIX, accession number BL00226B, p-value=8.393e-31, raw score of 23.86
  DOMAIN (7)..(205): Intermediate filament proteins domain identified by PFam, accession name filament, E-value=2.6e-99, PFam score of 343.4
GMGGIQNEKETMQSLNDRLASYLDRVRSLETENRRLESKIREHLEKKGPQVRDWSHYFKIIEDLRAQIFANTVDNARIVLQIDNARLAADDFRVKYETELAMRQSVENDIHGLRKVIDDTNITRLQLETEIEALKEELLFMKKNHEEEVKGLQAQIASSGLTVEVDAPKSQDLAKIMADIRAQYDELARKNREELDKYWSQQVREGRGWLPRCGREADGMRGLMDCPHPAD

SEQ ID NO: 39742 - protein, 159 aa, Homo sapiens
  DOMAIN (73)..(120): Intermediate filaments proteins domain identified by eMATRIX, accession number BL00226D, p-value=4.764e-20, raw score of 19.10
  DOMAIN (2)..(120): Intermediate filament proteins domain identified by PFam, accession name filament, E-value=1.5e-42, PFam score of 154.8
PRVRESTTVVTTQSAEVGAAETTLTELRRTVQSLEIDLDSMRNLKASLENSLREVEARYALQMEQLNGILLHLESELAQTRAEGQRQAQEYEALLNIKVKLEAEIATTYRRLLEDGEDFNLGDALDSSNSMQTIQKTTTRRIVDGKVVSETNDTKVLRH

SEQ ID NO: 39743 - protein, 205 aa, Homo sapiens
AEHLLKPLPADKQIETGPFLEAVSHLPPFFDCLGSPVFTPIKADISGNITKIKAGYDTNQPRFRTLKTILEGEKEMYGAKGPKVGATLALMWLKRGLRFIQVFLQSICDGERDENHPNLIRVNATKAYEMALKKYHGWIVQKIFQAALYAAPYKSDFLKALSKGQNVTEEECLEKIRLFLVNYTATIDVIYEMYTQMNAELNYKV

SEQ ID NO: 39744 - protein, 523 aa, Homo sapiens
MACGGPEKSLLLRISICLLILSPDCLGSPVFTPIKADISGNITKIKAVYDNQPKPSSRTLQNILEVEKEMYGAEWPKVGATLALMWLKREGAEQLIWGPQWDSEGQQRKEPAGACGGHVDTEMDKAGPDPPLVDLTASVTCHGPAPGLEERRGLRFIQVFLQSICDGERDENHPNLIRVNATKAYEMALKKYHGWIVQKIFQLPLPAHPGGHENEGLTGPVQCSCGVQSASRLGQKPVWFQRGRAGHREVIWGHDPSVLLVGWWMGSRVHAGPTALRLRIERLRLSPCSSHGPERSLWLQSGKDWRSSDREAGPKAGEVIQALSGERQLEGDVGGKETHKTEPHVPGTYPFLSIGFPFLPRALATAGCVTPRRLHHFSEHVSSSQPPAGGPEPQSLLEMGLGELLSASTCFECECLQHDWLFGTAGFGLVHSYSNQNSRAWDYEWQDAAAPSLDRVVSKEASSDNVALEYRLEGGQALCQTLMALPFRSPCGSPVLQKRSDVQGVECQAGVTNKCLERTDGRD

SEQ ID NO: 39745 - protein, 52 aa, Homo sapiens
  misc_feature (1)...(52): Xaa = X or * as defined in Table 2
ERNSLSQLQWDNPTPPATRRPSHSSLRGEHAQXGLLSFFERLSCTLSRFMPI

SEQ ID NO: 39746 - protein, 89 aa, Homo sapiens
QQALLSVLPSETGVRGSSGTACPEDSATAFCGSFASYRGQVCALVSSVLLWSLGSWWCWIIPLKLGQLFLSHSDNLGLLSSKERETYTS

SEQ ID NO: 39747 - protein, 304 aa, Homo sapiens
  DOMAIN (156)..(203): AAA-protein family proteins domain identified by eMATRIX, accession number BL00674D, p-value=4.500e-38, raw score of 23.41
  DOMAIN (223)..(261): Histidine acid phosphatase domain identified by PFam, accession name acid_phosphat, E-value=3.3e-08, PFam score of 30.1
MKNYNCWRRVFLFVVTPIPMGHIKHRQGPNKQQRGQKRDEQRMRKENRGHRKGCTWCGGGTEGTGWGKYEKSEVERGLVRYERKRRAYSGIQQYAAAALPTVYNQNLLTQQSIGAAGSQKEACAYAVMSLASRAPVYRSFDSEKAGDREVQRTMLELLNQLDGFQPNTQVKVIAATNRVDILDPALLRSGRIDRKIEFPMPNEEARARIMQIHSRKMNVSTDTTLVALQMALNVYNGKQAPYASCHIFELYQEDNGFLLEHTGFVSYDNPVSAQAAIQSMNGFQIGMKRLKVQLKRSKNDSKPY

SEQ ID NO: 39748 - protein, 145 aa, Homo sapiens
PECDCAFEPDYAVPPLSVSECMQHIRIMEGRSRSLPSSPLLTHQSISVRLQPVKKLTGDAEQELGPPPSVDEAANTLMTRLGFLLGEKVTEVQPGDQYSMEVQDENQTSAITQRISPCSTLTSSTASPPASSPLLYTPTHQYKCN

SEQ ID NO: 39749 - protein, 81 aa, Homo sapiens
AIAAIDSDSSDGSRQSEWKFWKGFTILDAIKNIYDSWEEVKMSTLTEVWKKLIPTLMDSFEDFIEEVTVDVWECTVLQTQI

SEQ ID NO: 39750 - protein, 209 aa, Homo sapiens
TSLGLSLCPRQCKRCPHLSLQQEEPDPANLEVDHDFFQDKVWPHLALRVPAFETLKVQSAWAGYYDYNTFDQNGVVGPHPLVVNMYFATAFSGHGLQQAPGIGRAVAEMVLKGRFQTIDLSPFLFTRFYLGEKIQENNIILRHVCSGIGLPLACNPWLCLKSLVCWLPIFPKVLCPGLLSPSPVSSSSQAGHWHPIWAGQGTGSEAEGQ

SEQ ID NO: 39751 - protein, 283 aa, Homo sapiens
  DOMAIN (28)..(82): Ribosomal protein S2 proteins domain identified by eMATRIX, accession number BL00962B, p-value=6.029e-32, raw score of 36.15
  DOMAIN (18)..(167): Ribosomal protein S2 domain identified by PFam, accession name Ribosomal_S2, E-value=4.5e-70, PFam score of 246.2
MSGALDVLQMKEEDVLKFHAAGTHLGGTNLDFQMEQYIYKRKSDGIYIINLKRTWEKFLLAARAVVAIENPADVSVISSGNTGQRAVLKFAAATGATPIAGHFTPGTFTNQIQAAFREPRLLVVTDPRADHQPLTESSYVNLPTIALCNTDSPLRYVDICNNKGAHSDPEEIEKEEQAAAEKAVTKEEFQGEWTAPAPEFTATQPEVADLSEGVQVPSVPIQQFPTDDWSTQPATENWSAAPTAQATEWKMQQQSTILEAESSPHQTPNLPAPWSRTSQPPEL

SEQ ID NO: 39752 - protein, 525 aa, Homo sapiens
  DOMAIN (127)..(142): ADENOSINE KINASE SIGNATURE domain identified by eMATRIX, accession number PR00989B, p-value=1.563e-18, raw score of 7.71
  DOMAIN (250)..(418): Ribosomal protein S2 domain identified by PFam, accession name Ribosomal_S2, E-value=1e-74, PFam score of 261.6
MAEGKGEERHLLYKAARMGNAEQREPEPLGLLIDTSGLRSETVHQNEGTKLTSEVSSTVREKPPTQASVIADAPPPTKPNGPRSISDCCAGSENVKPVVLSLLGSVGVGPSKQDHWMIQQPHKAATFFGCIGIDKFGEILKRKAAEAHVDAHYYEQNEQPTGTCAACITGDNSDIVEMIWDSKIGEKSSVSKSLSKFWKLIQLDQLFWIGPVTFAATIKNSEIGRLKAKLFTMSGALDVLQMKEEDVLKFLAAGTCLGGTNLDFQMEQYISIRKSDGIHIVNLKRTWEKLLLAACAIVAIENPADVSVISSRNIGQRAVLKFAAATGATPIVGHFTPGTFTNHIQAAFQEPRLLVVTDPRADHQPLTEASYVNLSTVALCNTDSPLHFVDIAILCNNKGAHSMGLMWWMPAREGLRACGTISHEHPWEFMPDLYRDPKETEKAEQPAAEKAVTKEEFQGEWTAPAPELTATQPEVADWSEGVQVPSAPIHQFPTEDWSAEPATEGWSTAPNAQAIEWVGANTERS

SEQ ID NO: 39753 - protein, 775 aa, Homo sapiens
  DOMAIN (186)..(230): Ribosomal protein S2 proteins domain identified by eMATRIX, accession number BL00962D, p-value=7.000e-33, raw score of 22.51
  DOMAIN (85)..(253): Ribosomal protein S2 domain identified by PFam, accession name Ribosomal_S2, E-value=6.9e-82, PFam score of 285.5
METEIVVMMPQGTSGPPEAGREEEGSPLELSEEVQLADTLISDFQPPELGVHTAFWIPIVTSRKTFTMCGALDVLQMKKKDVLKFLAAGTHLGGTNLDFQMKQYIYKRKSYGTYITNLKRTWEKLLLAAHAIVAIEYPADVSVIFSRNTGQRAVLKFAAATGATPIAGRFTPATFTNQIQATFREPRLLVVTDPRADHQPLTEASYVNLPTIALCNTDSPLHCVDIAIPCNNKGAPSVGQIWWMPAREVLHMRGTISCEHPWEVMPDLYFYRDPEEIEKEEQAAAEKAVTKEEFQGEWTALAPEFTATQPEIADWFEEIQTTIREYYKHLYANKLENLEEMDKFLDTYILPRLNQEEVESLNRPITGFEIQAIINSLPTKKSPGPDGFTAEFYQRAIRQKKEIKVIQLGKEEVKLSLFADDMMVYLENPIVSAQNLLKLVGNFSKVSGYKINVQKSQVFLYTNNRQTESQIMSELPFTIASKRIKYLGIQPTRDMKDLFKENYKSLLNEIKEDTNKWKNIPCSWVGRINIVKMAILTKVIYRFTAIPIKLPMTSFTELEKTTLKFIWNQKRAHIAKSILSQKNKARGITLPDFKLYYKATVTKTGWYWYQNRDIEQWNRTEPSEIMPHIYDCLISDKNKKWGKDSLFNEWCWENWLAICRKLKLDPFLTPYTKINSRWIKNLNVRPKTVKTLEENLGNTIQDIGMGKDFVSKTPKAMATKAKIDKWDLIKLKSFCTAKETTIRMNRQPTEWEKIFAIYSSDKGLISRIYNELKQI

SEQ ID NO: 39754 - protein, 383 aa, Homo sapiens
  DOMAIN (160)..(214): Ribosomal protein S2 proteins domain identified by eMATRIX, accession number BL00962B, p-value=7.075e-28, raw score of 36.15
  DOMAIN (150)..(275): Ribosomal protein S2 domain identified by PFam, accession name Ribosomal_S2, E-value=3e-44, PFam score of 160.2
MLTMMMPTGTGVLVPFGCSVVLTNGDNEDKEEESPLGPLARRRLRNAEGQHGHARPLEPAPRRRVTVSGPRRPRRADPGRLHSGSEAAAARMPGFHEALPARQARRSHGHGRRRGNRRARPARRRRPREIFTVSGALDVLQMKKEDVLKFLAAGTQLGGSNLDFQVEQYVYKRKSDGIYIINLTRTWKKLLLAARAIVAIENAAAVSVISSRNTGQRVVLKFAAATGATPIAGPFTPGTFTNQIQAAFWEPRLLVGARSVGLMWWMLAREALCMRGSISREHPWEVMPDLYFYRDPEEIEKEQAAAENTVTKEEFQGEWTAPAPEFTATQPEVADWPDGVQVPSVPIQQLPTEDWSTQPATEDWSAAPTAQATEGVGATTEWS

SEQ ID NO: 39755 - protein, 314 aa, Homo sapiens
  DOMAIN (33)..(87): Ribosomal protein S2 proteins domain identified by eMATRIX, accession number BL00962B, p-value=2.364e-33, raw score of 36.15
  DOMAIN (23)..(187): Ribosomal protein S2 domain identified by PFam, accession name Ribosomal_S2, E-value=4.2e-22, PFam score of 82.0
  misc_feature (1)...(314): Xaa = X or * as defined in Table 2
REIVTMSGALDVLQMKEEDVLKFLAAGTHLGGTNLDFQMEQYIYKRKSDGIYIINLKRTWEKLLLAARAIVAIENPADVSVISSQEILGQKGCAESFAAATGATPICWARFTPWNLSLTQIQGSPSGEPRAFLLVTDPQGLNHQPSHGGNLNVXPTLPLALVNPDSPLRRYVDIAIPCNNQGSSLQWGLMWWMLASGSFCAMRGTISREHPWEVMPDLYFYRDPEEIEKEEPGCCLRSQVTKEEFQGEWTAPAPEFTVTQPEVADWSEGVQVPSVPIQQFPTTEDWSAQPATEDWSAAPTAQATEWVGATTDWS

SEQ ID NO: 39756 - protein, 254 aa, Homo sapiens
  DOMAIN (149)..(167): GLYCERALDEHYDE-3-PHOSPHATE DEHYDROGENASE SIGNATURE domain identified by eMATRIX, accession number PR00078D, p-value=5.500e- 19, raw score of 11.49
  DOMAIN (3)..(254): glyceraldehyde 3-phosphate dehydrogenases domain identified by PFam, accession name gpdh, E-value=2.1e-147, PFam score of 495.1
MGKVKVGVNGFGCIGRLVIRTACNSGKVDIIAINDPFIDLSYMVYMFQYDPTHGKFHGTVKAENGKLVINGNPITIFQEPDPSKIKWGDAGTEYVMESTGIFTTMENAGAHLQWGAKRPQGLQNIIPATTGAAKAVRKVIPELNGKLTGMALRVPTANVSVVDLTYHLEKPAKYDDIKKVVKQASEGPLKGILGYTGHQVVSSDFNSDTHSSTFNAGAGTALNDHFVKLISWYDNEFGYNNRVVDLMAHMASKE

SEQ ID NO: 39757 - protein, 186 aa, Homo sapiens
  DOMAIN (151)..(170): GLYCERALDEHYDE-3-PHOSPHATE DEHYDROGENASE SIGNATURE domain identified by eMATRIX, accession number PR00078B, p-value=3.250e- 24, raw score of 7.45
  DOMAIN (5)..(180): glyceraldehyde 3-phosphate dehydrogenases domain identified by PFam, accession name gpdh, E-value=2.4e-71, PFam score of 241.0
DTMGKVKVGVNGFGRIGRLVTRAAFNSGKVDIVAINDPFIDLNYMVYMFQYDSTHGKFHGTVKAENGKLVINGNPITIFQERDPSKIKWGDAGAEYVVESTGVFTTMEKALGAHLQGGSQKGHSSLAPSCLMPPMFVMGVNHEKDDNSLKIISNASCTTNCLAPLAKVIHDTLVSGEGLKDHRALP

SEQ ID NO: 39758 - protein, 53 aa, Homo sapiens
  misc_feature (1)...(53): Xaa = X or * as defined in Table 2
MGFPRELRPPGITQXPARRHKREGERPSLAWGVPADTQFPHHTESSPPSQFAM

SEQ ID NO: 39759 - protein, 92 aa, Homo sapiens
RRVGVWRRPQFQQSRCSHGPNQGSAPWLNPTGAFGKETDLLLDDSLVSIFGKRRLKRFSMVGDRMASKNALNAQPDGPGLTCSLAPNIISQL

SEQ ID NO: 39760 - protein, 285 aa, Homo sapiens
  misc_feature (1)...(285): Xaa = X or * as defined in Table 2
GTRMGLAGVCALRRSAGYILVGGAGWSVLAPRAAAARRCSEGEWASGGVRSFSRAAAAMAPIKVGDAIPAVEVFEGEPGNKVKPGKSLFKGKKGVLFGVPGGPPPLGCSKTHLAKGLWEQGXRLCKAKGKSRVVALFXVVNDALCDWAQWGQAPQGGKARFGLLAESPLGPFGKETDLLLDESLVSHLLGIRRLKRFSMVVQDGIVKALNVEPDGTGLHLAAWAPNIIFTALEALGPDLLPLPPPYSSPCPALCLGPLQFGNVGQISAINTLWVLRPKQKKKKKS

SEQ ID NO: 39761 - protein, 79 aa, Homo sapiens
  DOMAIN (30)..(79): Actins proteins domain identified by eMATRIX, accession number BL00406E, p-value=7.000e-33, raw score of 8.44
  DOMAIN (4)..(79): Actin domain identified by PFam, accession name actin, E- value=3e-35, PFam score of 117.0
QCCSGGTHGNPAIGDRMQKQILPWAPAQMKIRFMAPPERKYSVWIAAPILASLSTSSRMWISKQEYDESGPSIVHRKCF

SEQ ID NO: 39762 - protein, 416 aa, Homo sapiens
  DOMAIN (31)..(66): Actins proteins domain identified by eMATRIX, accession number BL00406A, p-value=1.000e-40, raw score of 9.95
  DOMAIN (24)..(412): Actin domain identified by PFam, accession name actin, E- value=6.6e-219, PFam score of 719.6
  misc_feature (1)...(416): Xaa = X or * as defined in Table 2
ASAPRAQSLAFADPPPVHTRRQLTMDDDIAALVVDNGSGMCKAGFAGDDAPRAVFPSIVGRPRHQGVMVGMGQKDSYVGDEAQSKRGILTLKYPIEHGIVTNWDDMEKIWHHTFYNELRVAPEEHPVLLTEAPLNPKANREKMTQIMFETFNTPAMYVAIQAVLSLYASGRTTGIVMDSGDGVTHTVPIYEGYALPHAILRLDLAGRDLTDYLMKILTERGYSFTTTAEREIVRDIKEEAVLRRPGLRARDGHGASSSSLEKSYELPDGQVITIGNERFRCPEALFQPSFLGMESCGIHETTFNSIMKCDVDIRKDLYANTVLSGGTHQFPLPCRPGCXKKITALEPATMKIRIIAPPEAQSTPLWNRGAPILASLVHLPAKMWDQKSREYDESGPLPFVHRKCFQLLPGEELRAA

SEQ ID NO: 39763 - protein, 34 aa, Homo sapiens
EPVRIPHWERGEESAVWAVVSYVVADMEEMLPRS

SEQ ID NO: 39764 - protein, 474 aa, Homo sapiens
  DOMAIN (297)..(337): Peptidase family M20/M25/M40 domain identified by PFam, accession name Peptidase_M20, E-value=0.088, PFam score of 9.4
MKFLIFAFFGGVHLLSLCSGKAICKNGISKRTFEEIKEEIASCGDVAKAIINLAVYGKAQNRSYERLALLVDTVGPRLSGSKNLEKAIQIMYQNLQQDGLEKVHLEPVRIPHWERGEESAVMLEPRIHKIAILGLGSSIGTPPEGITAEVLVVTSFDELQRRASEARGKIVVYNQPYINYSRTVQYRTQGAVEAAKVGALASLIRSVASFSIYSPHTGIQEYQDGVPKIPTACITVEDAEMMSRMASHGIKIVIQLKMGAKTYPDTDSFNTVAEITGSKYPEQVVLVSGHLDSWDVGQGAMDDGGGAFISWEALSLIKDLGLRPKRTLRLVLWTAEEQGGVGAFQYYQLHKVNISNYSLVMESDAGTFLPTGLQFTGSEKARAIMEEVMSLLQPLNITQVLSHGEGTDINFWIQAGVPGASLLDDLYKYFFFHHSHGDTMTVHGIQTQMECLLLLFWAVVSYVVADMEEMLPRS

SEQ ID NO: 39765 - protein, 209 aa, Homo sapiens
SSNRSHIVKLPVNRQLKFMHTPHQFLLLSSPPAKESNFRAAKKLFGSTFAFHGSHIENWHSILRNGLVVASNTRLQLHGAMYGSGIYLSPMSSISFGYSGMNKKQKVSAKDEPASSSKSSNTSQSQKKGQQSQFLQSRNLKCIALCEVITSSDLHKHGEIWVVPNTDHVCTRFFFVYEDGQVGDANINTQEGGIHKEILRVIGNQTATG

SEQ ID NO: 39766 - protein, 135 aa, Homo sapiens
PTVCERELCVFAFQTLGVMNEAADEIATGAQVVDLLVSMCRSALESPRKVVIFEPYPSVVDPNDPQMLAFNPRQLKFMHTPHQFLLLSSPPAKESNFRAAKKLFGSTFAFHLHGAMYGSGIYLSPMSSISFGYSA

SEQ ID NO: 39767 - protein, 83 aa, Homo sapiens
  DOMAIN (6)..(58): Intermediate filament proteins domain identified by PFam, accession name filament, E-value=9.8e-20, PFam score of 78.0
IRGRVDAYMNKVELESRLEGLTDEINFLRQLYEEEIRELQSQISDTSVVLSMDNSRSSRAVVVKKIETRDGKLVSESSDVLPK

SEQ ID NO: 39768 - protein, 216 aa, Homo sapiens
  DOMAIN (143)..(191): Intermediate filaments proteins domain identified by eMATRIX, accession number BL00226B, p-value=9.036e-31, raw score of 23.86
  DOMAIN (86)..(216): Intermediate filament proteins domain identified by PFam, accession name filament, E-value=4.6e-44, PFam score of 159.8
VTQKSFKVSNSGPRAFSSHSYMCGPSACISSSSFSRMGSSSFRGSLGGDFGRASGRGGITPVTVNQSLLSPLNLEVDPNIQAVCTQVKEQIKTLNNKFASFIDKLYTLGQEKLKLEVELDNMQGLVEDFKNKYEDDIKKHTEMENEFVLIKKDMDEAYKNKVELESHLEGLTEEISFLRQLYEEEIRELQSQISDTSVVLSIDNSRSLDMNSIIAE

SEQ ID NO: 39769 - protein, 186 aa, Homo sapiens
  DOMAIN (124)..(171): Intermediate filaments proteins domain identified by eMATRIX, accession number BL00226D, p-value=7.000e-38, raw score of 19.10
  DOMAIN (1)..(169): Intermediate filament proteins domain identified by PFam, accession name filament, E-value=4.3e-71, PFam score of 249.6
MQPLVEDFKNKYEDEINKRTEMENEFVLIKKDADEASMNKVELGSRLEGLTDEINFLMQLYEEEIRELQSQISDTSVVLSMDNSCSLDMDSIIAERASLEAAITDAELHGDLVVKDANAKLSELEAALQRAKQDMAWQLREYQELMNVKLALDIEIATYRKLLEGKESRLESGMQNRSIHRRPPVA

SEQ ID NO: 39770 - protein, 347 aa, Homo sapiens
  DOMAIN (180)..(228): Intermediate filaments proteins domain identified by eMATRIX, accession number BL00226B, p-value=1.643e-31, raw score of 23.86
  DOMAIN (77)..(342): Intermediate filament proteins domain identified by PFam, accession name filament, E-value=1.1e-78, PFam score of 274.8
EQAGQALSTAPVGDGHELLCEVGSSSFRDVLGTSMGLCGGYGGASGMGGITAVTVNQNVLSPLNLEVDPNMQGMHTQEKEQVKTLNKSASFVDKVLFLEQQNKMLETNWSLLQQQKPAQSNMDNMFESYINNLLGQLEILGQEKLKLEAELGNMQGLCMFFVKEDFKKKYEDEINKPTEMENEFVLIKKDVDDAYMNKVELEFRLEGLTDEINFLRQLYEEEIPELQSQILDTSVVLSMDNSRSLDMDSIIAEIKYEELQTLAGKHWDDRRLTKTKISEMNRNISRLQAEIEGLPQRPEQRASLESVIADAEQRGELAIKDAKTKLSELEAAQQRAKQDMAHGTAAA

SEQ ID NO: 39771 - protein, 139 aa, Homo sapiens
  misc_feature (1)...(139): Xaa = X or * as defined in Table 2
LSCSLFSGFAGTRFFGTSILRLPLMYCPVNDSGTAIIASSGPSATTSPPXTPAPGPMSITWSAARIASSSCSTTITVLPRSRRWISVPNRRSLSRWCRPIDGSSSTYITPTRPAPIWLARRIRCASPPESVSAERESVR

SEQ ID NO: 39772 - protein, 929 aa, Homo sapiens
  DOMAIN (161)..(208): Intermediate filaments proteins domain identified by eMATRIX, accession number BL00226D, p-value=2.125e-19, raw score of 19.10
  DOMAIN (1)..(688): Intermediate filament proteins domain identified by PFam, accession name filament, E-value=1.8e-84, PFam score of 294.0
EFVLIKKDVDEAYINKVELESRLEGLTDEINFLRQLYEEEIRELQSWISDTSVVLSMDNSRSLDMNSVIAEVKAQYEEIANRSQAEAESMYQIKDEELQSLAGKHGDNLRCTKTKISEMNRNISRLQAENEGLKGQRAFLEAAIADAEQCGELAIKDANAKLSELEAALQRAKQDMAWQLRLMNVRLALDIEIATYKKLLEGEESRLESGMQNMSIHTKTTSGYASGLSSACGGLTSPGLSYGLGASSFSRTSYSRAVVVKIETRDGKLVSESSDVLPKDIVAVLNEEGGYHQIGPAEYCTDSFIMSVTIAFATQLEQIHLCCGDQSLGSTEIPLTGLLKKGSTEINQHPVTVEGAFTLDPPNRAKQKLAPIPVELAPTSLIELKTQNEHEPEHSKKKVLTPIKEKTLTGPKSPTVSPVPSHNQSPPTKDDATESEVESLQYDKDTKPNPKASSSVPASLAQLVTTSNASEVASGQKIAVPATSHHFCFSIDLRSIHALEIGFPINCILRYSYPFFGSAAPIMTNPPVEVRKNMEVFLPQSYCAFDFATMPHQLQDTFLRIPLLVELWHKDKMSKDLLLGIARIQLSNILSSEKTRFLGSNGEQCWRQTYSESVPVIAAQGSIDCFNESIIQGDEKLNDAENKYKILEKEFQQFKDQQNNKPEIRLQSEINLLTLEKVELERKLESATKSKLHYKQQWGRALKELARLKQGVSAVQQKPSSLPPAPCPSEIQTEPRETLEYKAALELEMWKEMQEDIFENQLKQKELAHMQALAEEWKKRDRERESLVKKKLQREKKELQSERQRNLQELQDSIRRAKEDCIHQVELERLKIKQLEEDKHRLQQQLKQKELAHMQALAEEWKKRDRERESLVKKKSFMSPRQTVRVGLDHPSVLTVTRLEPSVGSGNCGDLQGAGNGPTIREPRGIKGF

SEQ ID NO: 39773 - protein, 500 aa, Homo sapiens
  DOMAIN (202)..(250): Intermediate filaments proteins domain identified by eMATRIX, accession number BL00226B, p-value=5.295e-22, raw score of 23.86
  DOMAIN (102)..(429): Intermediate filament proteins domain identified by PFam, accession name filament, E-value=6.8e-112, PFam score of 385.1
  misc_feature (1)...(500): Xaa = X or * as defined in Table 2
SAIPTSTPASTMSIRVTQKSYKVSTSGPRAFSSRSYTSGPGSRISSSSFSRVGSSNFRGGLGGGYGGASGMGGITAVTVNQSLLSPLVLEVDPNIQAVRTQEKEQIKTLNNKFASFIDKVRFLEQQNKMLETKWSLLQQQKTARSNMDNMFESYINNLRRQLETLGQEKLKLETELGNMQGLVEDFKNKYEDEINKRTEMENEFVLIKKDVDVDEAYMNKVELESRLEGLTDEINFLRQLYEEEIRELQSQISDTSVVLSMDNSRSLDMDSIIAEVKAQYEDIANRSRAEAESMYQIKYEELQSLAGKHGDDLRRTKTXDLLRXTRNISRLQAEIEGLKGQRASLEAAIADAEQRGELAIKDANAKLSELEAALQRAKQDMARHLRXVTRELDXTFKLGPGTFEIATYRKLLEGEESRLESGMQNMSIHTKTTGGYAGGLSSAYGGLTSPGLSYSLGSSFGSGAGSSSFSRTSSSRAVVVKKIETRDGKLVSESSDVLPK

SEQ ID NO: 39774 - protein, 611 aa, Homo sapiens
  DOMAIN (221)..(238): Zinc finger C2H2 type, domain proteins. domain identified by eMATRIX, accession number BL00028, p-value=4.706e-14, raw score of 16.07
  DOMAIN (165)..(610): Zinc finger, C2H2 type domain identified by PFam, accession name zf-C2H2, E-value=3.6e-60, PFam score of 213.3
  misc_feature (1)...(611): Xaa = X or * as defined in Table 2
PPCRRSHPRPPLRGEQKPRPSQPPFAVPAAPAPQVXPQMIDLCNVGFQFYRSLEHFGGKPVKQEPIKPSAVWPQPTPTPFLPTPYPYYPKVHPGLMFPFFVPSSSPFPFSRHTFLPKQPPEPLLPRKAEPQESEETKQKVERVDVNVQIDDSYYVDVGGSQKRWQCPTCEKSYTSKYNLVTHILGHSGIKPHACTHCGKLFKQLSHLHTHMLTHQGTRPHKCQVCHKAFTQTSHLKRHMMQHSEVKPHNCRVCGRGFAYPSELKAHEAKHASGRENICVECGLDFPTLAQLKRHLTTHRGPIQYNCSECDKTFQYPSQLQNHMMKHKDIRPYICSECGMEFVQPHHLKQHSLTHKVLRGLWWGGRGLGKRSGALSRALGSRTPVPLCTLPRGGLQGEIQAQESEFSPVCNHSPGVIQAELKQGPSGVPEILPQLNSCPTKGTCRYYPEGSRLPSAGTINKGPRLGFSRKGDHSLTSGAPLYVGKESKVHFRAYEDPGVKEHKCGICGREFTLLANMKRHVLIHTNIRAYQCHLCYKSFVQKQTLKAHMIVHSDVKPFKCKLCGKEFNRMHNLMGHMRLARNGKPLKRLYCPSKFTLKGNLTRHMKVKHGVM

SEQ ID NO: 39775 - protein, 436 aa, Homo sapiens
  DOMAIN (363)..(380): Zinc finger C2H2 type, domain proteins. domain identified by eMATRIX, accession number BL00028, p-value=7.000e-10, raw score of 16.07
  DOMAIN (333)..(383): Zinc finger, C2H2 type domain identified by PFam, accession name zf-C2H2, E-value=8.4e-12, PFam score of 52.6
MRIQQLCGHLWQQKKISLELMSSFHKILKNKMGCGVTPDSKELLKYLSYCNSYPLTGSPQEAPVSDVPLPVSKCSHCSVQLIMCLRPEHIPNSPGIKGQGIKQHEEKHPTLLHLDASHLMTCFVVEMTLYVLIAGFKSLCSIHSYPPRTLRHLCEKVWDSLLENERRHEKRGPANFLHRLPAEHQWGIVQSSNIMAGLSARLQLFLEHRPFPVFELTANGCPTKGLQGEIQAQESEFSPVCNHSPGVIQAELKQGPSGVPEILPQLNSCPTKGTCRYYPEGSRLPSAGTINKGPRLGFSRKGDHSLTSGAPLYVGKESKVHFRAYEDPGVKEHKCGICGREFTLLANMKRHVLIHTNIRAYQCHLCYKSFVQKQTLKAHMIVHSDVKPFKCKKSFTAQGNSAPQEDAGSQGEPVCLLCPNWGQRKGRAWRHLRHLP

SEQ ID NO: 39776 - protein, 1600 aa, Homo sapiens
  DOMAIN (329)..(376): AAA-protein family proteins domain identified by eMATRIX, accession number BL00674D, p-value=1.783e-34, raw score of 23.41
  DOMAIN (766)..(1587): RNase H domain identified by PFam, accession name rnaseH, E- value=7.5e-62, PFam score of 218.9
KRLENIQKTLEVAFSEAVWMQPSVVLLDDLDLIAGLPAVPEHEHSPDAVQSQRLAHALNDMIKEFISMGSLVALIATSQSQQSLHPLLVSAQGVHIFQCVQHIQPPNQEQRCEILCNVIKNKLDCDINKFTDLDLQHVAKETGGFVARDFTVLVDRAIHSRLSRQSISTREKLVLTTLDFQKALRGFLPASLRSVNLHKPRDLGWDKIGGLHEVRQILMDTIQLPAKYPELFANLPIRQRTGILLYGPPGTGKTLLAGVIARESRMNFISVKGPELLSKYIGASEQAVRDIFIRAQAAKPCILFFDEFESIAPRRGHDNTGVTDRVVNQLLTQLDGVEGLQGVYVLAATSRPDLIDPALLRPGRLDKCVYCPPPDQDGSSSSDSDLSLSSMVFLNHSSGSDDSAGDGECGLDQSLVSLEMSEILPDESKFNMYRLYFGSSYESELGNGTSSDLEDESMNQPGPIKTRLAISQSHLMTALGHTRPSISEDDWKNFAELYESFQNPKRRKNQSGTMFRPGQKFFDEITELTYLPSFHHKAAPHQAEPGPNSSSASAPPPYNPFITSSPHTQSGLQFRSVTSPPPSAQQFPLKEVAGAKGIVKTALETAPTLALPVSSQPFSLHTAEVQGCAVGILTQGPGPCPVAFLSKQLDLTVLGSPSCLHAVASAALILLEALKITNYAQLTLYSSHNFQNLFSFSHLTHILSAPRLLQLYSLFVESPTITILPGPDFNLASHIILDTTPDPDDCMSLIYLTFTPFPHISFFSVPHVDHIWFTDGSSTRPDRHSPAKAGYAIESSTSIIEATALPPSTTSQQAELIALTRAFTLAKGLHVNIYTDSKYAFHILHHHAVIWAERGFLTTQGSSIINASLIKTLLKAALLPKEAGVTHCKGHQKASDPITLGNAYADKDRTIDGSSQVIEEKNHNGYSVIDTGTLVEAELEKLPNNWSPQTCELFALSQALKYLQNQKTISILIQKEPSPALGLTPERKGNVGHAGKGPLESSSPDPFLCGQERREKGCRTATSVSITNPINRGPWVVTHPGKELTPEHKGNVGHAGRDILAKAGAIIHLNIGEGTPVCCPLLEEGINPEVWATEGQYGRAKNARPVQVKLKDSTSFPYQRQYPLRPKAQQGLQKIVKDLKAQGLVKPCSNPCSTPILGVQKPNRQWRTLCHQATQALFNFLATCGYMVSKPKAQLCSQQRYLGLKLSKGTRALSEEHIQPILAYPHPKTLKQLRGFLGVIGFCRKWIPRYGEIARSLNTLIKETQKANTHLVRWTTEVEVAFQALTQAPVLSLPTGQDFSSYVTEKTGIALGVLTQIRGMSLQPVAYLTKEIDVVAKVVAVAVLVSEAVKIIQGRDLTVWTSHDVNGILTAKGDLWLSDNCLLKCQALLLEGPVLRLCTCATLNPATFLPDNEEKIKHNCQQVISQTYATRGDLLEVPLTDPDLNLYTDGSSFVEKGLRKVGYAVVSDNGILESNPLTPGTSAQLAELIALTWALELGEEKRANIYTDSKYAYLVLHAHAAIWKEREFLTSERTPIKHQEAIRKLLLAVQKPKEVAVLHCRGHQKGKEREIEENCQADIEAKRAARQDPPLEMLIKQPLV

SEQ ID NO: 39777 - protein, 614 aa, Homo sapiens
  DOMAIN (102)..(119): RNase H domain identified by eMATRIX, accession number PF00075A, p-value=4.060e-12, raw score of 14.44
  DOMAIN (82)..(267): Reverse transcriptase domain identified by PFam, accession name rvt, E-value=3.1e-38, PFam score of 140.4
IGGKYWAPVCQLKMVSVATGLKIQETSPDLGLTPESKGNVGHAGKGPLESSSQDHFLCGQERQYPLRPKAQQGLQKTVKDLKAQGLVKPCSSPCNTPTVGVQKPNGQWRLVQNLRIINETVVPLYPAEPNPYTLLSQIPEEAEWYIVLDLKDAFFCIPVHPDSQFLFAFEDPSNSTSQLTWTVLRQGFRDSPHLFGQALAQDLSQFSYLDTLVLWYVDDLLLATCSETLCHQATQVLLNFLTTCGYKVSKPKAQLCSQQVKYLGLKLSKGLRALSEEHIQPILAYPLPKTLKQLRGFLGITGFYRMWIPRYSKIGRSLYTLIKETQKANTHLVVVAVAVLVSEVVKMIQGRDLTVWTSHDVNAILTAKGDLWLSDNRLLKYQALLLEGPVLQLRTCVTLNPVTFLPDNEEKIEHNCQQVIAQTYAARGDFLEVPLTDPHLNLYTDGSSFVEKGLQKVGYAVVSDNGILESNPLTPGTSAQLAELIALTRVLESGEGKRVNIYTDSKCAYLVLHAHAAIWREREFLTSEGTPIKHQEAIRKLLLAVQKPKEVAVLHCRGHQKGKEREIQGSHQVDIEVKRATRLDPPLEMLIGGPLVWGNPLREAKPQYSAGEIE

SEQ ID NO: 39778 - protein, 256 aa, Homo sapiens
  DOMAIN (22)..(33): RNase H domain identified by eMATRIX, accession number PF00075B, p-value=7.366e-10, raw score of 12.56
  DOMAIN (1)..(140): Reverse transcriptase domain identified by PFam, accession name rvt, E-value=3.9e-06, PFam score of 17.5
VPNPYTLLSQIPEEAEWFTVLDLKDVFFCIPVHPDSQFLFAFEDPLNPMSQLTCTVLPQGFRDSPHLFGQALAQDLSQLSYLDTLVLQYVDDLLLAACSETLCHQATQALLNFLATCGYKVSKEKAQLCSQQVKYLGLKLSKGTKALSEECIQPILAYPHLKTLKQLREFLGITGFCRIWNFQALLLERPVLQLCTCATLNPVTFLPDNEEEYNCQQIISQTYATRGDLLEVPLTDPDLNLYTDGSSFVEKGPQKA

SEQ ID NO: 39779 - protein, 2168 aa, Homo sapiens
  DOMAIN (762)..(782): ENDOPEPTIDASE LA (LON) SERINE PROTEASE (S16) SIGNATURE domain identified by eMATRIX, accession number PR00830A, p-value=7.429e- 11, raw score of 8.41
  DOMAIN (475)..(949): ATPases associated with various cellular act domain identified by PFam, accession name AAA, E-value=1.5e-66, PFam score of 234.5
MWGSDRLAGAGGGGAAVTVAFTNARDCFLHLPRRLVAQLHLLQNQAIEVVWSHQPAFLSWVEGRHFSDQGENVAEINRQVGQKLGLSNGGQELHAVSLEQHLLDQIRIVFPKAIFPVWVDQQTYIFIQIVALIPAASYGRLETDTKLLIQPKTRRAKENTFSKADAEYKKLHSYGRDQKGMMKELQTKQLQSNTVGITESNENESEIPVDSSSVASLWTMIGSIFSFQSEKKQETSWGLTEINAFKNMQSKVVPLDNIFRVCKSQPPSIYNASATSVFHKHCAIHVFPWDQEYFDVEPSFTVTYGKLVKLLSPKQQQSKTKQNVLSPEKEKQMSEPLDQKKIRSDHNEEDEKACVLQVVWNGLEELNNAIKYTKNVEVLHLGKVWPKDISEEDIKTVFYSWLQQSTTTMLPLVISEEEFIKLETKDGPSRSYGKRRKQGVNSLGVSSLEHITHSLLGRPLSRQLMSLVAGLRNGALLLTGGKGSGKSTLAKAICKEAFDKLDAHVERVDCKALRGKRLENIQKTLEVAFSEAVWMQPSVVLLDDLDLIAGLPAVPEHEHSPDAVQSQRLAHALNDMIKEFISMGSLVALIATSQSQQSLHPLLVSAQGVHIFQCVQHIQPPNQEQRCEILCNVIKNKLDCDINKFTDLDLQHVAKETGGFVARDFTVLVDRAIHSRLSRQSISTREKLVLTTLDFQKALRGFLPASLRSVNLHKPRDLGWDKIGGLHEVRQILMDTIQLPAKYPELFANLPIRQRTGILLYGPPGTGKTLLAGVIARESRMNFISVKGPELLSKYIGASEQAVRDIFIRAQAAKPCILFFDEFESIAPRRGHDNTGVTDRVVNQLLTQLDGVEGLQGVYVLAATSRPDLIDPALLRPGRLDKCVYCPPPDQDGSSSSDSDLSLSSMVFLNHSSGSDDSAGDGECGLDQSLVSLEMSEILPDESKFNMYRLYFGSSYESELGNGTSSDLEDESMNQPGPIKTRLAISQSHLMTALGHTRPSISEDDWKNFAELYESFQNPKRRKNQSGTMFRPGQKFFDEITELTYLPSFHHKAAPHQAEPGPNSSSASAPPPYNPFITSSPHTQSGLQFRSVTSPPPSAQQFPLKEVAGAKGIVKTALETAPTLALPVSSQPFSLHTAEVQGCAVGILTQGPGPCPVAFLSKQLDLTVLGSPSCLHAVASAALILLEALKITNYAQLTLYSSHNFQNLFSFSHLTHILSAPRLLQLYSLFVESPTITILPGPDFNLASHIILDTTPDPDDCMSLIYLTFTPFPHISFFSVPHVDHIWFTDGSSTRPDRHSPAKAGYAIESSTSIIEATALPPSTTSQQAELIALTRAFTLAKGLHVNIYTDSKYAFHILHHHAVIWAERGFLTTQGSSIINASLIKTLLKAALLPKEAGVTHCKGHQKASDPITLGNAYADKGVRCAPDPARRPLPLPIGLKACHCSCTAKIGGKYRALVGQLKTISVATGLKTQDRTIDGSSQVIEEKNHNGYSVIDTGTLVEAELEKLPNNWSPQTCELFALSQALKYLQNQKTISILIQKEPSPALGLTPERKGNVGHAGKGPLESSSPDPFLCGQERREKGCRTATSVSITNPINRGPWVVTHPGKELTPEHKGNVGHAGRDILAKAGAIIHLNIGEGTPVCCPLLEEGINPEVWATEGQYGRAKNARPVQVKLKDSTSFPYQRQYPLRPKAQQGLQKIVKDLKAQGLVKPCSNPCSTPILGVQKPNRQWRTLCHQATQALFNFLATCGYMVSKPKAQLCSQQRYLGLKLSKGTRALSEEHIQPILAYPHPKTLKQLRGFLGVIGFCRKWIPRYGEIARSLNTLIKETQKANTHLVRWTTEVEVAFQALTQAPVLSLPTGQDFSSYVTEKTGIALGVLTQIRGMSLQPVAYLTKEIDVVAKVVAVAVLVSEAVKIIQGRDLTVWTSHDVNGILTAKGDLWLSDNCLLKCQALLLEGPVLRLCTCATLNPATFLPDNEEKIKHNCQQVISQTYATRGDLLEVPLTDPDLNLYTDGSSFVEKGLRKVGYAVVSDNGILESNPLTPGTSAQLAELIALTWALELGEEKRANIYTDSKYAYLVLHAHAAIWKEREFLTSERTPIKHQEAIRKLLLAVQKPKEVAVLHCRGHQKGKEREIEENCQADIEAKRAARQDPPLEMLIKQPLV

SEQ ID NO: 39780 - protein, 552 aa, Homo sapiens
  DOMAIN (40)..(57): RNase H domain identified by eMATRIX, accession number PF00075A, p-value=4.060e-12, raw score of 14.44
  DOMAIN (20)..(205): Reverse transcriptase domain identified by PFam, accession name rvt, E-value=3.1e-38, PFam score of 140.4
QYPLRPKAQQGLQKTVKDLKAQGLVKPCSSPCNTPTVGVQKPNGQWRLVQNLRIINETVVPLYPAEPNPYTLLSQIPEEAEWYIVLDLKDAFFCIPVHPDSQFLFAFEDPSNSTSQLTWTVLRQGFRDSPHLFGQALAQDLSQFSYLDTLVLWYVDDLLLATCSETLCHQATQVLLNFLTTCGYKVSKPKAQLCSQQVKYLGLKLSKGLRALSEEHIQPILAYPLPKTLKQLRGFLGITGFYRMWIPRYSKIGRSLYTLIKETQKANTHLVVVAVAVLVSEVVKMIQGRDLTVWTSHDVNAILTAKGDLWLSDNRLLKYQALLLEGPVLQLRTCVTLNPVTFLPDNEEKIEHNCQQVIAQTYAARGDFLEVPLTDPHLNLYTDGSSFVEKGLQKVGYAVVSDNGILESNPLTPGTSAQLAELIALTRVLESGEGKRVNIYTDSKCAYLVLHAHAAIWREREFLTSEGTPIKHQEAIRKLLLAVQKPKEVAVLHCRGHQKGKEREIQGSHQVDIEVKRATRLDPPLEMLIGGPLVWGNPLREAKPQYSAGEIE

SEQ ID NO: 39781 - protein, 205 aa, Homo sapiens
  DOMAIN (62)..(187): RNase H domain identified by PFam, accession name rnaseH, E- value=8.7e-15, PFam score of 62.6
MCSWTAPVSSILTHPNWPVLRMAGLTGCASVAMKKKIEHNCQQVIAQTFTTRGDLLEIPLTDPGLNLYTDGSSFVEKGLRKAGYAVVSDNGILESNPLTPGTSAQLAELIALTWAPELEEGKRVKRKKAIWREREFLTSEGTPIKHQEAIRRLLLAVQKPKEVAVLHCRGHQEGNCQVDIEAKRATRSQVARGHKICDFPSCSYR

SEQ ID NO: 39782 - protein, 42 aa, Homo sapiens
MSVKIKRFVFVKLDYWGKPSQIISGDDRSHNYFGKFQSLFWN

SEQ ID NO: 39783 - protein, 57 aa, Homo sapiens
  DOMAIN (18)..(42): Ribosomal protein S26e proteins domain identified by eMATRIX, accession number BL00733C, p-value=6.940e-24, raw score of 10.40
  DOMAIN (2)..(55): Ribosomal protein S26e domain identified by PFam, accession name Ribosomal_S26e, E-value=0.072, PFam score of 5.0
LAYVLPKLYVKLHDCVSCAIHSKVVRNRSREARKDQHPPLRFSPAVSILKGEWKPGE

SEQ ID NO: 39784 - protein, 466 aa, Homo sapiens
  DOMAIN (1)..(44): Ribosomal protein S26e proteins domain identified by eMATRIX, accession number BL00733A, p-value=1.000e-40, raw score of 11.62
  DOMAIN (1)..(114): Ribosomal protein S26e domain identified by PFam, accession name Ribosomal_S26e, E-value=8e-74, PFam score of 258.7
MTKKRRNNGRAKKGRGHVQPIRCTNCARCVPKDNAIKKFVIRNIVEAAAVRDISEASVFDAYVLPKLYVKLHYCVSCAIHSKVVRNRSREARKDRTPPPRFRPAGAAPRPPPKPMSGAGRGRSHLDEGREGAGDEVGELSLQQEIDKDPLGGALGAGSRGTKTTGMQAGIGGGEQVLVFWDSSLPAVVDSCFHPVPSPDTSAALSWCLLSFSRTPQQPSPGNFRPEHLPLLFLSTVLPQSVAQTQASGKYLPSRWSQDRCGESREAPLPSKTLEGETPEGVGAELRCVRLPGPEWNSVLKPGFSLQLDSSSARMALVFVYGTLKRGQPNHRVLRDGAHGSAAFRARGRTLEPYPLVIAGEHNIPWLLHLPGSGRLVEGEVYAVDERMLRFLDDFESCPALYQRTVLRVQLLEDRAPGAEEPPAPTAVQCFVYSRATFPPEWAQLPHHDSYDSEGPHGLRYNPRENR

SEQ ID NO: 39785 - protein, 383 aa, Homo sapiens
  DOMAIN (1)..(44): Ribosomal protein S26e proteins domain identified by eMATRIX, accession number BL00733A, p-value=1.000e-40, raw score of 11.62
  DOMAIN (1)..(114): Ribosomal protein S26e domain identified by PFam, accession name Ribosomal_S26e, E-value=1.4e-68, PFam score of 241.2
MTKKRRNNGRAKKGRGHVQPIRCTNCARCVPKANAIKKFVIRNIVEAAAVRDISEASVFDAYVLPKLYVKLHYCVSCAIHSKVVRNRSREARKDRTPPLDLANEKKVDQPPEAKKPKIKVVNVELPIEANLVWQLGKDLLNMYIETEGKMIMQDKLEKERNDAKNAVEEYVYEFRDKLCGPYEKFICEQDHQNFLRLLTETEDWLYEEGEDQAKQAYVDKLEELMKIGTPVKVRFQEAEERPKMFEELGQRLQHYAKIAADFRNKDEKYNHIDESEMKKVEKSVNEVMEWMNNVMNAQAKKSLDQDPVVRAQEIKTKIKELNNTCEPVVTQPKPKIESPKLERTPNGPNIDKKEEDLEDKNNFGAEPPTSGMVNVTPNEENFC

SEQ ID NO: 39786 - protein, 79 aa, Homo sapiens
  DOMAIN (5)..(48): Ribosomal protein S26e proteins domain identified by eMATRIX, accession number BL00733A, p-value=1.000e-40, raw score of 11.62
  DOMAIN (5)..(79): Ribosomal protein S26e domain identified by PFam, accession name Ribosomal_S26e, E-value=4e-20, PFam score of 80.3
RASKMTKIRRNNGRAKKGRGHVQPIRCTNCARCVPKDKAIKKFVIRNIVEAAAVRDISEASVFDGKWVTGANCVRIPVS

SEQ ID NO: 39787 - protein, 110 aa, Homo sapiens
  misc_feature (1)...(110): Xaa = X or * as defined in Table 2
MLYRRALPGTVFLSSVRSFKIAKEKEGTIGRAQKRARGPRQGXAXLKIFXXGXXPPNCAPMPCVKGQGPLRNSVIPKHSGGRSSSGTFLKRASSMPXXLPKLVCEATFTV

SEQ ID NO: 39788 - protein, 30 aa, Homo sapiens
TAVLCDKARGVTEDATGSRQVGERSWGGGR

SEQ ID NO: 39789 - protein, 75 aa, Homo sapiens
KHSKSSLLAIKLFCNLCNILVKRPKLGSYFLISRILLMPDALGRSSLPSWKDAECGDEEAILPGTAKAESVGQPT

SEQ ID NO: 39790 - protein, 107 aa, Homo sapiens
RRSLALSPRPDCGLQWHNLGSLQAPLPGFTPFSCLSLPSSWDYRRPPPRPANFLYFLVETGFHLVSQSGLDLLTSDPPASASQSAGITGVSHRARPQNLFFKVRCPE

SEQ ID NO: 39791 - protein, 94 aa, Homo sapiens
  misc_feature (1)...(94): Xaa = X or * as defined in Table 2
LGLQWRNLGSLQAPLPGFTPFSCLSLPSSWDYRRPQPRPANFFFFVFFLVKTGFHLVSQGGLDLLTSXSHPASAFQSAGIIGVSHRRPAITLQF

SEQ ID NO: 39792 - protein, 138 aa, Homo sapiens
MGRSFLGGGSTLMLLGGGQLHILTPSFPSWTETGNYTCEFCGKQYKYYTPYQEHVALHAPIRNSAKDDHRSASILSENRGSHQSHASCHHHYHCHYYHQHHHCLHHHSYHHHHCHHHRGMWRNWDTVLWIHQTQPVQD

SEQ ID NO: 39793 - protein, 177 aa, Homo sapiens
  DOMAIN (35)..(69): Amyloidogenic glycoprotein extracellular domain proteins domain identified by eMATRIX, accession number BL00319C, p-value= 1.500e-10, raw score of 17.12
GRRQRRSRHLLHRRQDRQSAPGSGSKIPQKKVKLAADEDDDDDDEEDDFDDEETEEAPVKKSIQDTPARNAQKSDQNGKVSKPSSTPRSKGQESFKKQEKTPKTPKGPRSVEDIKTKMQASIEKAHGTVLGTTVGNIPLRGGNQEKFHGAAGVWFGKFGVQRKIQQKQLQKDVTSGS

SEQ ID NO: 39794 - protein, 135 aa, Homo sapiens
  DOMAIN (52)..(86): Amyloidogenic glycoprotein extracellular domain proteins domain identified by eMATRIX, accession number BL00319C, p-value= 5.500e-10, raw score of 17.12
HIVSVEEDAESEDEEEEDVKLLSIFGKRSAPGGGSKVPQKKVKLAVDEDDGDDDEEDDDEDDDDDDFDDEEAEEKAPVTEIYTRYSSQKCSESQIRMEKTPKTIINTKIKRTRILQRNRKKLLKPPKGPKFCRRH

SEQ ID NO: 39795 - protein, 718 aa, Homo sapiens
MTTFTEPEVVFLQSRGNEVSCHRWSGEKVTYLQVCRKIWLGLFDARTSLVPDSRDPQKVKEFLQEKYEKKRWYVPPDQVKGPTYTKGSASTPVQGSIPEGKPLRTLLGDPAPSLSVAASTSSQPVSQSHARTSHARSTQPPPHSSVKKASTDLLADIGGDPFAAPQMAPAFAAFPAFGGQTPSQGGFANFDAFSSGPSSSVFGSLPPAGQASFQAQPTPAASRMLTESYSFGSSQGTPFGATPLAPASQPNSLADVGSFLGPGVPAAGVPSSLFGMAGQVPPLQSVTMGGGGGSSTGLAFGAFTNPFTAPAAQSPLPSTNPFQPNGLAPGPGFGMSSAGPGFPQAVPPTGAFASSFPAPLFPPQTPLVQQQNGSSFGDLGSAKLGQRPLSQPAGISTNPFMSSGDHLPVGISMGLGDGGGANALLGAYSSSLGLARQRCAPHGRERSGEAHKDSSLLAGESWMSSKKLTPGTMLCRQQSSSMAPAFSQSVTCGPSPCVRKQESATKCLHIGACGTQGSVTQGGLELVTVIAAVISQGRVLQGDLVDGEWEGEGIKRSSSGTLLALGDISGSSKVPPGVTCWFVWCTFTPIPLEGTRDPAVSASSAATLLPSPLNEARRRRPRGEPGMAAVPLSQPLPWACPADVRFCGHLRADPPRPECSESEQKFRACRARLQRSLSLAGACTTSKCADARQHHLIVLYTRDSSLRVAAAGEAEQQA

SEQ ID NO: 39796 - protein, 429 aa, Homo sapiens
  DOMAIN (61)..(79): HIV REV INTERACTING PROTEIN SIGNATURE domain identified by eMATRIX, accession number PR00405B, p-value=4.000e-15, raw score of 11.83
  DOMAIN (28)..(150): Putative GTP-ase activating protein for Arf domain identified by PFam, accession name ArfGap, E-value=3.3e-35, PFam score of 130.4
MAANKGPGPGGGVSGGKAEAEAASEVWCRRVRELGGCSQAGNRHCFECAQRGVTYVDITVGSFVCTTCSGLLRGLNPPHRVKSISMTTFTEPEVVFLQSRGNEVCRKIWLGLFDARTSLVPDSRDPQKVKEFLQEKYEKKRCQPVSQSHARTSQARSTQPPPHSSVKKASTDLLADIGGDPFAAPQMAPAFAAFPAFGGQTPSQGGFANFDAFSSGPSSSVFGSLPPAGQASFQAQPTPAGSSQGTPFGATPLAPASQPNSLADVGSFLGPGVPAAGVPSSLFGMAGQVPPLQSVTMGGGGGSSTGLAFGAFTNPFTAPAAQSPLPSTNPFQPNGLAPGPGFGMSSAGPGFPQAVPPTGAFASSFPAPLFPPQTPLVQQQNGSSFGDLGSAKLGQRPLSQPAGISTNPFMTGPSSSPFASKPPTTNPFL

SEQ ID NO: 39797 - protein, 59 aa, Homo sapiens
KIFNNELRPSSMLSCCRRDGSLLLGDGQGSSVQAAIEVVSAGSVPTKARVFPVHLYSDA

SEQ ID NO: 39798 - protein, 514 aa, Homo sapiens
  DOMAIN (29)..(74): kw TRANSCRIPTASE REVERSE II ORF2 domain identified by eMATRIX, accession number DM01354N, p-value=2.775e-28, raw score of 13.17
EKIQINTIKNDKGILPLDPTEIQITIREYYEHLYAHKLENLEEIDKFLDIYTLPRLNQEELESLNRKPNTACSNLRDGSLLLGDGHGSSIQAAIEVVGAGSVATKGRGRQDDTDPSNRYHRPPYSQEEKEQCITLLLSWCLGDSQGPQCRPQLSLQELRREFTVSLHLARKLLSEVRGQAHRFVSPPNAAGAGDGQTPNPFWPPLTDLAPQAESHLPGVNLYLLPLGEQLPDVSLTFQAWRRLSVKCTAVRAYQTTRVVETSSCRLHVKGASNASTHRSPKEVTQGTNKSERRTRETQRAIRERNMAGCCTCATDVLVTLQSLMEGLALQPQRTRALLLGSASIKASCAVTIILMSENLGKGCSKKSEGMVRRYAKHKKQEIKPYYQRKSPSLERGQEEKKVGREDREGSENQYLYGPSNISEARNRLPECGRMGLGYVARLFLGDRRSSTPSFASYDPSSLVTYGHRRSCRVSDIRVPRLGPNVGGPCKGTGIDLQCEREKKNEEYSARTLQL

SEQ ID NO: 39799 - protein, 697 aa, Homo sapiens
  DOMAIN (266)..(283): Zinc finger present in dystrophin CBP/p300. domain identified by eMATRIX, accession number PF00569, p-value=2.703e-15, raw score of 13.42
  DOMAIN (248)..(293): Zinc finger present in dystrophin, CBP/p300 domain identified by PFam, accession name ZZ, E-value=3.3e-07, PFam score of 37.4
KVHAVPSLNFRMIEDSGKRGNTMAERRQLFAEMRAQDLDRIRLSTYRTACKLRFVQKKCNLHLVDIWNVIEALRENALNNLDPNTELNVSRLEAVLSTIFYQLNKRMPTTHQIHVEQSISLLLNFLLAAFDPEGHGKISVFAVKMALATLCGGKIMDKLRYIFSMISDSSGVMVYGRYDQFLREVLKLPTAVFEGPSFGYTEQSARSCFSQQKKVTLNGFLDTLMSDPPPQCLVWLPLLHRLANVENVFHPVECSYCHSESMMGFRYRCQQCHNYQLCQDCFWRGHAGGSHSNQHQMKEYTSWKSPAKKLTNALSKSLSCASSREPLHPMFPDQPEKPLNLAHIVDTWPPRPVTSMNDTLFSHSVPSSGSPFITRSMLESSNRLDEEHRLIARYAARLAAESSSSQPPQQRSAPDISFTIDANKQQRQLIAELENKNREILQEIQRLRLEHEQASQPTPEKAQQNPTLLAELRLLRQRKDELEQRMSALQESRRELMVQLEGLMKLLKTQGSGTHRSSRSHSISRPIPMPIRSASACSTPTHTPQDSLTGVGGDVQEAFAQSSRRNLRNDLLVAADSITNTMSSLVKELNSEVGSETESNVDSEFARTQFEDLVPSPTSEKAFLAQIHARKPGYIHSGATTSSMRGDMVTEDADPYVQPEDENYENDSVRQLENELQMEEYLKQKLQDEAYQVSLQG

SEQ ID NO: 39800 - protein, 303 aa, Homo sapiens
MSTLKGLIIKIIISVMIASEFILEERIKTGLNAAKHCFAAPSQAASHTISRPIPMPIRSASACSTPTHTPQDSLTGVGGDVQEAFAQSSRRNLRNDLLVAADSITNTMSSLVKELNSEVGSETESNVDSEFARTQFEDLVPSPTSEKAFLAQIHARKPGYIHSGATTSTMRGDMVTGDANPYVQPEDENYENDSVRQLENELQMEEYLKQKLQDEAYQMPLVPTKKEIHMEDFLSSLPEGAIAQCPRTFIPDCRRKGASYSQTDDESNMKTGDDGEPCGHTEEEDSSLAAASPKRGTTTPSSS

SEQ ID NO: 39801 - protein, 743 aa, Homo sapiens
  DOMAIN (255)..(272): Zinc finger present in dystrophin CBP/p300. domain identified by eMATRIX, accession number PF00569, p-value=2.703e-15, raw score of 13.42
  DOMAIN (237)..(282): Zinc finger present in dystrophin, CBP/p300 domain identified by PFam, accession name ZZ, E-value=3.3e-07, PFam score of 37.4
MIEDSGKRGNTMAERRQLFAEMRAQDLDRIRLSTYRTACKLRFVHKKCNLHLVDIWNVIEALRENALNNLDPNTELNVSRLEAVLSTIFYQLNKRMPTTHQIHVEQSISLLLNFLLAAFDPEGHGKISVFAVKMALATLCGGKIMDKLRYIFSMISDSSGVMVYGRYDQFLREVLKLPTEVLEGPSFGYTEQSARSCFSQQKKVTLNGFLDTLMSDPPPQCLVWLPLLHRLANVENVFHPVECSYCHSESMMGFRYRCQQCHNYQLCQDCFWRGHAGGSHSNQHQMKEYTSWKSPAKKLTNALSKSLSCASSREPLHPMFPDQPEKPLNLAHIVDTWPPRPVTSMNDTLFSHSVPSSGSPFITRSSPPKDSEVEQNKLLARAAPAFLKGKGIQYSLNVADRLADEHVLIGLYVNMLRNNPSCMLESSNRLDEEHRLIARYAARLAAESSSSQPPQQRSAPDISFTIDANKQQRQLIAELENKNREILQEIQRLRLEHEQASQPTPEKAQQNPTLLAELRLLRQRKDELEQRMSALQESRRELMVQLEGLMKLLKTQGAGSPRSSPSHTISRPIPMPIRSASACSTPTHTPQDSLTGVGGDVQEAFAQSSRRNLRNDLLVAADSITNTMSSLVKELNSEVGSETESNVDSEFARTQFEDLVPSPTSEKAFLAQIHARKPGYIHSGATTSTMRGDMVTEDADPYVQPEDENYENDSVRQLENELQMEEYLKQKLQDEAYQVSLQG

SEQ ID NO: 39802 - protein, 86 aa, Homo sapiens
MDPKRIRKHRTMRMPKKINNRIPKTNVIFCSRDMLESADTFPRGTRDEGMGCPPSMVQGSQSTGYPGFLFFHHQSAEVMVAALWRG

SEQ ID NO: 39803 - protein, 248 aa, Homo sapiens
  DOMAIN (2)..(86): Integrase core domain identified by PFam, accession name rve, E-value=1.7e-10, PFam score of 40.3
  misc_feature (1)...(248): Xaa = X or * as defined in Table 2
GQATHFMAKEVXQWAHAHGIHWSYRVPHHPEAAGLIEWWDCLLKSRLQCQLGDNTLQAWGKVLQKAVYALNQCPIYGTVSPIDRIHGSRNQRVEVEVEVAPLTITPSDPLAKFLLPGLTTLCSAGLQVLVPEGGMLPPGDTTTIPLNRKLRLPPGHFGLFLPLSKQAKMRVTALAVVIDLDYQDEISLPLHNGDKEEYARSTGDPLERLLVLPCPVIEVNGKLQQHNLGRTTNGPDPLGMKVWVSPPG

SEQ ID NO: 39804 - protein, 154 aa, Homo sapiens
  DOMAIN (14)..(82): Integrase core domain identified by PFam, accession name rve, E-value=1.7e-07, PFam score of 29.9
HVALLMPLQNSRSFSGYGFAYPARNTFSKTTIHGLKECLIHHHGIPSSIASDQGTRFLPKEVRKWAHAHGIHWSYHVPHYPEAASPHSDPLAKFLLPVPTTLCSAGLAVLVPEGGMLPPGDATMIPLNLSSRSHLGMPTTSLKVVRMCSKDKYV

SEQ ID NO: 39805 - protein, 119 aa, Homo sapiens
CVPEPRTPSLGFQTHPAAHAPGAQAPGSAHDRLSSAGPGSRAAPRAPWRPWTIGYSESQPTVLRPGQPWPGRGVSGSSAPSVPSALRGPPRSSRPSCCTWWCLWRCRHRDLGRDINFTL

SEQ ID NO: 39806 - protein, 205 aa, Homo sapiens
  DOMAIN (131)..(162): HMG14 and HMG17 proteins domain identified by eMATRIX, accession number BL00355, p-value=8.427e-09, raw score of 5.97
  misc_feature (1)...(205): Xaa = X or * as defined in Table 2
SSCAFSHRSSRPSRCHTVRRSTAPCAASXHSSRAPKRHWALPGSSGXSWRETPSTHWXPXTLPRWRTALRPSQXPRPRVFRVRKPCSSRPPTITRCALASAQXSCAAPTSSLAQRKSSRSPRRTATTWGTARRSRAHAVPAGRSPAPSASPAPPQAPRAWSAAAPASPSRLSSAGRGRQAAPRAPWRLRGPPRSCRPTCCTWWCP

SEQ ID NO: 39807 - protein, 79 aa, Homo sapiens
  misc_feature (1)...(79): Xaa = X or * as defined in Table 2
XDREDVSTELYRALEAVRLQNNHVGRGAGPLRRCQRTSGDVGGLGEQDFLSRDTSAREYWIGRRAVQHLRKVQGYSWVD

SEQ ID NO: 39808 - protein, 389 aa, Homo sapiens
MGAANRVSGFHARNSQGLGAGGHSGASPEGLGACTAIDTTRYSNWGGSYEEVPGGHWGRWVHWSPRPLFLAMAVLVASTVGCDSEYPIVQGHACAHGVHVCVRVPTRLSPIGVCAHSVRYMPACPPALWSRVGGPRTPRAREGFPSPWPCLQEPLSAASTERAALLGCQDLLRTNGSGTQALLQTTSAELGEAQAKLMEQERALRELRERVTHGLAEAGRDREDVSTELYRALEAISASVSENPEPCKEKAVIQARLQQKSEKNLIRPLARYPEEDKNSWDSLNLPRNLEGSEDRKMWKSLEIPRDLLNGFDQNADSDMDNEVQADMVSDEYGELFGNWGNGDSCYAKRLAAFCCCPRDLWNFELEKDNLWYLVEETSKWQSIQEEAEH

SEQ ID NO: 39809 - protein, 152 aa, Homo sapiens
  misc_feature (1)...(152): Xaa = X or * as defined in Table 2
MENPXRPTRPGWRCLDVQYHFRCHGKVRHQKTEGVERPVDAPLLFETSLAYNKWVNLCTXXXXXXXXXXXXXXXXXXXXXXXXXXXXXXXFKKKFGGGPKYPGGEKXXXXXXGGGKKNPRGVFGEKLLFXXXXFWAPHPPHKIILLGGEYKF

SEQ ID NO: 39810 - protein, 79 aa, Homo sapiens
  DOMAIN (9)..(79): Ribosomal L37ae protein family domain identified by PFam, accession name Ribosomal_L37ae, E-value=1.9e-38, PFam score of 141.2
ESGTSGDMAKRTKKVGIVGKYGTRYGASLRKMVKKIEISQHAKYTCSFCGKTKMKRRAVGIWHCGSCMKTVAGGAWTYK

SEQ ID NO: 39811 - protein, 108 aa, Homo sapiens
  DOMAIN (17)..(108): Ribosomal L37ae protein family domain identified by PFam, accession name Ribosomal_L37ae, E-value=2.5e-56, PFam score of 200.6
GRVGGRVGSDLGRGDMAKRTKKVGIVGKYGTRYGASRVRKMVKKIEISQHAKYTCSFCGKTKMKRRAVGIWCCGSCMKTVAGGAWTYNTTSAVTVKSAIRRLKELKDQ

SEQ ID NO: 39812 - protein, 373 aa, Homo sapiens
  DOMAIN (198)..(229): Receptor tyrosine kinase class V proteins domain identified by eMATRIX, accession number BL00790I, p-value=8.763e-10, raw score of 20.01
  DOMAIN (135)..(221): Fibronectin type III domain identified by PFam, accession name fn3, E-value=3.7e-07, PFam score of 37.2
RVGRPPLPPRPTHPRRKPLPPNNVTGKPGSAGIISSGPITTPPLRSTPRPTGTPLERIETDIKQPTVPASGEELENITDFSSSPTRETDPLGKPRFKGPHVRYIQKPDNSPCSITDSVKRFPKEEATEGNATSPPQNPPTNLTVVTVEGCPSFVILDWEKPLNDTVTEYEVISRENGSFSGKNKSIQMTNQTFSTVENLKPNTSYEFQVKPKNPLGEGPVSNTVAFSTESADPRVSEPVSAGRDAIWTERPFNSDSYSECKGKQYVKRTWYKKFVGVQLCNSLRYKIYLSDFLTGKFYNIGDQRGHGEDHCQFVDSFLDGRTGQQLTSDQLPIKEGYFRAVRQEPVQFGEIGGHTQINYVQWYECGTTIPGKW

SEQ ID NO: 39813 - protein, 124 aa, Homo sapiens
REAGSGGNDNFARRRNFSGRGGFGGSRGGVWIWVAVGDGYNGFGNDGSNFGGGGSYNDFWENTNKSGLQNFGPHEGGEIFGGQKLLAPYGGWRPNTFAKPTKPQGGYGGSSSSSSYGKWPEDFN

SEQ ID NO: 39814 - protein, 457 aa, Homo sapiens
  DOMAIN (156)..(186): AN1-like Zinc finger domain identified by PFam, accession name zf-AN1, E-value=0.058, PFam score of 8.0
  misc_feature (1)...(457): Xaa = X or * as defined in Table 2
TRVLLESRAGSQQSEGEASWQRGYARPSCQAAISFPEHRRALRALWAGDCRVADAGPGSSSSTPPSPPSLPKTSVSLGFLCFKKSLAASCASGRERQLEAXVWASQPLSPTQWSEGQLGVRVWASQPLSPTQWSEGQPGGPSVGISTSLTYPVEGRTGWGPECYVFCMLHRLPEQHDCTFDHMGRGREEAIMKMVKLDRKVGRSCQRIGEGGQEDDVVASILVSMQPHSPRTPSPHLPYSKFKDFSSCNCARQGWKEMGACVQRPSAVLGGTRPVSVQAKQPLPCFLLGASALGSCGTGLGVKDRDIDRIVVMSVMKILRGNQRPSGDEQARGQRAREGLGGLGVRRACREQWAVLCPLVHRNWVCVSSFLIASQSNSPQQQHNCCYANNSPQQEEGMVGRQAETFLLGGVRNRKPWVGVGRGLQGSHQQHIQGAVSSPSSPKKGVSKREGPRWAQQ

SEQ ID NO: 39815 - protein, 226 aa, Homo sapiens
  DOMAIN (51)..(73): A20-like zinc finger domain identified by PFam, accession name zf-A20, E-value=0.0019, PFam score of 24.9
RPPRAPRRRRHRLLRAGPGPSRRHRCRRRAPPPPSTMGDAGSERSKAPSLPPRCPCGFWGSSKTMNLCSKCFADFQKKQPDDDSAPSTSNSQSDLFSEETTSDNNNTSITTPTLSPSQQPLPTELNVTSPSKEECGPCTDTAHVSLITPTKRSCGTDSQSENEASPVKRPRLLENTERSEETSRSKQKSRRRCFQCQTKLELVQQELGIVSLRSEAADLRGECYRL

SEQ ID NO: 39816 - protein, 166 aa, Homo sapiens
  DOMAIN (120)..(164): AN1-like Zinc finger domain identified by PFam, accession name zf-AN1, E-value=0.00021, PFam score of 27.8
RIRLEGLWGSSKTMNLCSKCFADFQKKQPDDDSAPSTSNSQSDLFSEETTSDNNNTSITTPTLSPSQQPLPTELNVTSPSKEEYSQSENEASPVKRPRLLENTERSEETSRSKQKSRRRCFQCQTKLELVQQELGMCRCGYVFCMLHRLPEQHDCTFDPHGAVAGR

SEQ ID NO: 39817 - protein, 213 aa, Homo sapiens
SDYITRDGASFTKALLTWKNPVPNFFWKKDTFKLWGEVIRSTMWKTDQSPSAAWMGGFGAQPPQGQAPPPVIPPPNQAGYGMASYQTQILPSPHILAVFMLPERGPNPDPKRGFLDLARKNLGNWVSTITFLSRFPGVQVLQEFVVPGTMPLLRPLELPMHFNPHFSTALASLIADELYLLPQLSVSQMGESFPSFDMMAICAQASTNRLWMP

SEQ ID NO: 39818 - protein, 375 aa, Homo sapiens
  DOMAIN (11)..(30): Eukaryotic  RNA-binding region RNP-1 proteins domain identified by eMATRIX, accession number BL00030A, p-value=7.500e- 10, raw score of 14.39
  DOMAIN (11)..(272): RNA recognition motif. domain identified by PFam, accession name rrm, E-value=1.5e-75, PFam score of 264.4
MMEDDGQPRTLYVGNLSRDVTEVLILQLFSQIGPCKSCKMITEHTSNDPYCFVEFYEHRDAAAALAAMNGRKILGKEVKVNWATTPSSQKKDTSNHFHVFVGDLSPEITTEDIKSAFAPFGKISDARVVKDMATGKSKGYGFVSFYNKLDAENAIVHMGGQWLGGRQIRTNWATRKPPAPKSTQENNTKQLRFEDVVNQSSPKNCTVYCGGIASGLTDQLMRQTFSPFGQIMEIRVFPEKGYSFVRFSTHESAAHAIVSVNGTTIEGHVVKCYWGKESPDMTKNFQQVDYSQWGQWSQVLGNPKPSDRYMANGWQVPPYELYGQPWNQQAFGVDQSPSAAWMSGFGAQPPQGQAPPPVIPPPNQAGYGMASYQTQ

SEQ ID NO: 39819 - protein, 403 aa, Homo sapiens
  DOMAIN (246)..(298): Ribosomal protein S5 proteins domain identified by eMATRIX, accession number BL00585A, p-value=1.800e-25, raw score of 28.43
  DOMAIN (249)..(386): Ribosomal protein S5 domain identified by PFam, accession name Ribosomal_S5, E-value=5.3e-62, PFam score of 219.4
MSEYGRLHFPKNGHNSITGPTCFPPCCGLAFLNAVIPLAMASISSHSTWASLCDFLETRIWWKCHGVTCKTGFKKRRTLSFCEEPDRHVVRKPRHLNKGHMQVFWLIAPTRAPSQPLASIIRHIDNDVGSRNSHFPLNTKENNSANVMMYDNGQLGSYGVGMETCCRYQAIQREHGSFRGCGELEQPKLVVNGSLEERNPQRKRGFGSGIRHQGCGCGQGQGQGRGVRGGKAEYKEWMTVTKLGHLDEVLKIMLVQKQTHTSQCTRFKAFVATGDYNGHISLGIKCSKEVATAICGAIILAKLSIVPACRGYWGNKISKPHTIPCKVAGCCGSVLVCLISVPRGTGIVLAPVPKKLLMMTGINDCYTSARGCTATLGNFAKATFDAISKTYSYLTPDPGRRLY

SEQ ID NO: 39820 - protein, 344 aa, Homo sapiens
  DOMAIN (155)..(207): Ribosomal protein S5 proteins domain identified by eMATRIX, accession number BL00585A, p-value=7.300e-35, raw score of 28.43
  DOMAIN (158)..(295): Ribosomal protein S5 domain identified by PFam, accession name Ribosomal_S5, E-value=3e-79, PFam score of 276.7
MATDIAQRYRISKYPTLKLFRNGMMMKREYRGQRSVKALADYIRQQKSDPIQEIRDLAEITTLDDFDFQVPATIISKLCLSFFSLKVHPNNKIEKQRPSRTSEMVCLTGGEEKGHRYLWKERMDMKIKSLEEICLFSLPINESEIIDFFLGASLKDEILKVTPVQKQTRAGQSTRFKAFVAIGDYNGHVGLGVKCSKEVATTIRKAIILAKLSIVPVHRGYWGNKIGKPHTVPCKVTGRCGSVLVCLIPAPRGTGIVSAPVPKKLLMMAGIDDCYTSARGCNATLGNFAKATFDAISKTYSYLTPDLWKIVFTKSPCQEFTDQLVKTHTRVSVQRTQAPAVATT

SEQ ID NO: 39821 - protein, 317 aa, Homo sapiens
  DOMAIN (205)..(242): Ribosomal protein S5 proteins domain identified by eMATRIX, accession number BL00585B, p-value=3.038e-16, raw score of 18.78
  DOMAIN (182)..(265): Ribosomal protein S5 domain identified by PFam, accession name Ribosomal_S5, E-value=9.7e-16, PFam score of 59.8
  misc_feature (1)...(317): Xaa = X or * as defined in Table 2
SGRPGGPGGPGMGKPRCFRGEVFGIVIRGPGFPPGGRGRGRGRGARGGKGPRIKGLGCPSTKLGRLVKDHXRSKFPWRRSIYSYSGPLKESEIIDFFLGGLLSKDEVFERLCQVQEPEPVPGQRHQGSRHFVAIGNYQWPTVGSGVLKCSQEVWPTAHPVGPIILAKLLHSSPCAEGYWGEQSIGKAPHTVPCQVWTGRCGSVLVRPHPWHPRGSGIVSAPVAKKLLMMAGIDDCYTSARGCTATLGNFAKATFDAISKTYSYLTPDLWKETVFTKSPYQEFTDHLVKTHTRVSVQQTQAPAVAYNIGFLYKKNKVN

SEQ ID NO: 39822 - protein, 288 aa, Homo sapiens
  DOMAIN (42)..(87): RNA polymerases D / 30 to 40 Kd subunits proteins domain identified by eMATRIX, accession number BL00446A, p-value=1.000e- 40, raw score of 18.52
TAEQTRRLVALGEMPYANQPTVRITELTDENVKFIIENTDLAVANSIRRVFIAEVPIIAIDWVQIDANSSVLHDEFIAHRLGLIPLISDDIVDKLQYSRDCTCEEFCPECSVEFTLDVRCNEDQTRHVTSRDLISNSPRVIPVTSRNRDNDPNDYVEQDDILIVKLRKGQELRLRAYAKKGFGKEHAKWNPTAGVAFEYDPDNALRTTVYPKPEEWPKSEYSELDEDESQAPYDPNGKPERFYYNVESCGSLRPETIVLSALSGLKKKLSDLQTQLSHEIQSDVLTIN

SEQ ID NO: 39823 - protein, 596 aa, Homo sapiens
  DOMAIN (350)..(395): RNA polymerases D / 30 to 40 Kd subunits proteins domain identified by eMATRIX, accession number BL00446A, p-value=1.000e- 40, raw score of 18.52
MAAAAVSGALGRAGWRLLQLRCLPVARCRQALVPRAFHASAVGLRSSDEQKQQPPNSFSQQHSETQGAEKPDPESSHSPPRYTDQGGEEEEDYESEEQLQHRILTAALEFVPAHGWTAEAIAEGAQSLGLSSAAASMFGKDGSELILHFVTQCNTRLTRVLEEEQKLVQLGQAEKRKTDQFLRDAVETRLRMLIPYIEHWPRALSILMLPHNIPSSLSLLTSMVDDMWHYAGDQSTDFNWYTRRAMLAAIYNTTELVMMQDSSPDFEDTWRFLENRVNDAMNMGHTAKQVKSTGEALVQGLMGAAVTSPRSRRGGWWPLGEMPYANQPTVRITELTDENVKFIIENTDLAVANSIRRVFIAEVPIIAIDWVQIDANSSVLHDEFIAHRLGLIPLISDDIVDKLQYSRDCTCEEFCPECSVEFTLDVRCNEDQTRHVTSRDLISNSPRVIPVTSRNRDNDPNDYVEQDDILIVKLRKGQELRLRAYAKKGFGKEHAKWNPTAGVAFEYDPDNALRHTVYPKPEEWPKSEYSELDEDESQAPYDPNGKPERFYYNVESCGSLRPETIVLSALSGLKKKLSDLQTQLSHEIQSDVLTIN

SEQ ID NO: 39824 - protein, 57 aa, Homo sapiens
  misc_feature (1)...(57): Xaa = X or * as defined in Table 2
FFFFFAETNSKXITYQNIHIMVEIFQNSIFWDLYTKDKQIRGQEAARREKRGLGRPL

SEQ ID NO: 39825 - protein, 64 aa, Homo sapiens
  misc_feature (1)...(64): Xaa = X or * as defined in Table 2
RVGDAGHDDPGKPGPPGAGHRPEGXTGAHSLRAGLPACRAEPAGPGRAREGSKAPGHCAEELLQ

SEQ ID NO: 39826 - protein, 77 aa, Homo sapiens
FFFFETESCSVAQAGVQWCDLGSLQTLPTGSSRHSPASAFRVARITGARYHVRLIFVFLVQTGLHHLGQADFDLLTS

SEQ ID NO: 39827 - protein, 801 aa, Homo sapiens
GTLVTKVAPVSAPPKVSSGPRLPAPQIVAVKAPNTTTIQFPANLQLPPGTVLIKSNSGPLMLVSPQQTVTRAETTSNITSRPAVPANPQTVKICTVPNSSSQLIKKVAVTPVKKLAQIGTTVVTTVPKPSSVQSVAVPTSVVTVTPGKPLNTVTTLKPSSLGASSTPSNEPNLKAENSAAVQINLSPTMLENVKKCKNFLAMLIKLACSGSQSPEMGQNVKKLVEQLLDAKIEAEEFTRKLYVELKSSPQPHLVPFLKKSVVALRQLLPNSQSFIQQCVQQTSSDMVIATCTTTVTTSPVVTTTVSSSQSEKSIIVSGATAPRTVSVQTLNPLAGPVGAKAGVVTLHSVGPTAATGGTTAGTGLLQTSKPLVTSVANTVTTVSLQPEKPVVSGTAVTLSLPAVTFGETSGAAICLPSVKPVVSFCWDHICKPVIGTPVQIKLAQPGPVLSQPAGIPTGSSSKQLFSLFHVVQQPSGGNEKQVTTISHSSTLTIQKCGQKTMPVNTIIPTSQFPPASILKQITLPGNKILSLQASPTQKNRIKENVTSCFRDEDDINDVTSMAGVNLNEENACILATNSELVGTLIQSCKDEPFLFIGALQKRILDIGKKHDITELNSDAVNLISQATQERLRGLLEKLTAIAQHRMTTYKASENYILCSDTRSQLKFLEKLDQLEKQRKDLEEREMLLKAAKSRSNKEDPEQLRLKQKAKELQQLELAQIQHRDANLTALAAIGPRKKRPLESGIEGLKDNLLASGTSSLTATKQLHRPRITRICLRDLIFCMEQEREMKYSRALYLALLK

SEQ ID NO: 39828 - protein, 210 aa, Homo sapiens
MLSNVKRGRKLPNGTWAHDLVTPPTASLLLLLTEPAMPSVAFCHSILIVTKGGVKRTRVPPPNNSSGARTGNPLKVKHISFKTGDELIFLDPHTTQTFVDTEENGTGNDQTFHCLQSPQRMNILNLDPSVALGFFCKEEKDFDNWCSLVQKEILKENLRMFELVQKHPSHWPPFVPPAKPEVTTTGAEFIDSTEQLEEFDLEEDFEILSV

SEQ ID NO: 39829 - protein, 57 aa, Homo sapiens
HEATFDAISKTYNYLTGDLWKETVFTKSPYREFTDHLVKTHTRVSVQRTRAPAVATT

SEQ ID NO: 39830 - protein, 263 aa, Homo sapiens
  DOMAIN (66)..(118): Ribosomal protein S5 proteins domain identified by eMATRIX, accession number BL00585A, p-value=1.800e-25, raw score of 28.43
  DOMAIN (69)..(206): Ribosomal protein S5 domain identified by PFam, accession name Ribosomal_S5, E-value=5.3e-62, PFam score of 219.4
MKQCLAPAFLSLIFASIVQRILLEGFGSGIRHQGCGCGQGQGQGRGVRGGKAEYKEWMTVTKLGHLDEVLKIMLVQKQTHTSQCTRFKAFVATGDYNGHISLGIKCSKEVATAICGAIILAKLSIVPACRGYWGNKISKPHTIPCKVAGCCGSVLVCLISVPRGTGIVLAPVPKKLLMMTGINDCYTSARGCTATLGNFAKATFDAISKTYSYLTPDLWKETVFTKSPYQEFTDHLVKTHTRVSGQGLRLQLGLQHRGFNTEK

SEQ ID NO: 39831 - protein, 160 aa, Homo sapiens
  DOMAIN (60)..(97): Ribosomal protein S5 proteins domain identified by eMATRIX, accession number BL00585B, p-value=3.250e-30, raw score of 18.78
  DOMAIN (1)..(110): Ribosomal protein S5 domain identified by PFam, accession name Ribosomal_S5, E-value=1.1e-64, PFam score of 228.3
  misc_feature (1)...(160): Xaa = X or * as defined in Table 2
NGHVGLGVKCSKEVATAIRGAIILAKLSIVPVRRGYWGNKIGKPHTVPCKVTGRCGSVLVRLIPAPRGTGIVSAPVPKKLLMMAGIDDCYTSARGCTATLGNFAKATFDAISKTYSYLTPDLLKETVFTKSPXQELTDHLVKTHTRVSVQRTQAPAVATT

SEQ ID NO: 39832 - protein, 996 aa, Homo sapiens
  DOMAIN (733)..(777): PROTEIN NONSTRUCTURAL RNA EDITING V POLYM domain identified by eMATRIX, accession number PD01224A, p-value=2.179e-09, raw score of 29.77
MAQFKTPGVWEKEAKGAALKDFTGTRLQREWRPRPRWGRDLSSPGAHVLVQWGFLWGGSVCTELVAYDVLSVHWSRMLIWLCGPLSPSWSRMLTGLCRPFSPSWSRMLIWLCGPLTVLVTDAHRAVRTTLTILLGSVCLSQNVTTAADASRSQGAGGVPRQSPSRPVRNSTKKRDWLLSFKENVPQYQLMWYQENLCDLGGKTDDQIINWLLEFRSSIMYLTKDFEQLISIILRLPWLNRSQTVVEEYLAFLGNLVSAQTVFLRPCLSMIASHFVPPRVIIKEGDVDVSDSDDEDDTTETVAIILAAVGDTGSSRVGSTDWGPGLRIQADGIPAPRGVGHLASTARPSSSLFVENHAEGGSKYFDSTAHGHPKSPRRKESDAMEMGVRTWRPAPSSARSQGVQDEIKADPGLARLLLTGSWGPFQEEPQDTENAQSPGCPRQARGPGGGGNPGDTVLTPLSAPADPNTHPPAPGTQPALPPLARPCRVSTLCGSRALRTWGPSPAAAVQCHLQAVWPEQAVSSPGLQSLVCRKRMISSPALKNPGCGLMKQVPLKSAALETAESGNEGTERPCTGSVSPASSLVCLAGGQRHQTKDPPLFPCVHCLPLRKDTESPWLWASHLPFLPPIVSVYEGLPRARRRGNGAGSEAEPAYWGDRSGEWPHTPQEGMEEPRKEALGGTPILVPGACYETLSLGKRSWEAPPSWSPEPAMCLSHGSRACADGTEQGASRWVQLIHGGTWNGNERTLGPTGGQDSQSLTLSTPGPEPEPEQPPAALGKLLGCVQPLLYVENARLVSASQCSHHMTGVGNKLSCLPRRPGCNPRRRRAIGPHHAPHKLLLFLCKCPGLDVKPQSVIGGGTFPGMASQGMVDQPLKAWGIEKLLRCKRHERHYVHISSMFAFIKHKRSQALTADKMTDRTKPPDRIFGKLCITSRNPTGAQGIHLLLIRNRFCQVTRLQACKLWRSICVYRLSGVYCAMAFNKVCMLQPAYRAKFGYV

SEQ ID NO: 39833 - protein, 87 aa, Homo sapiens
KHENWSTARQSLHACSRVTWQNRLRLSNKWMPSHVLCLLPSHMTLQPANLSSLLITPPEFGPKIASPICTSCSVNFPRTLISPFSHC

SEQ ID NO: 39834 - protein, 59 aa, Homo sapiens
LLIFCVPPLIMVFVAFPATSITPPLSIRVASALALVKTDIVPLSLIIVLFAEPYAFMSK

SEQ ID NO: 39835 - protein, 307 aa, Homo sapiens
  DOMAIN (137)..(203): ParA family ATPase domain identified by PFam, accession name ParA, E-value=0.068, PFam score of -9.4
MVSDPRVQVQPMLKSRGEWVDEQKEHSGGREQVDSRGSPMEEFSDDEAAFQRAEQKDVKGAQKWTEDLALKGLRVLLVEGNDPQGTASMYHGWVPDLHIHAEDTLLPFYLGEKDDVTYAIKPTCWPGLDIIPSCLALHRIETELMGKFDEGKLPTDPHLMLRLAIETVAHDYDVIVIDSAPNLGIGTINVGIHLLLNRNRFCQVTRLQACKLWRAVDQFSCLTAYHRISAIHPLKLAYLQVDSRGSPVPLFILPIEHQFPGTINTYLITAGRVGYRARIPTTTIEDPLRLTTPITDAPLLTKAYIIS

SEQ ID NO: 39836 - protein, 279 aa, Homo sapiens
  misc_feature (1)...(279): Xaa = X or * as defined in Table 2
WKNCLEKRSMLTMHRILESXDXRQEILERHDAKYHSPKAEEKQMKHKAGSQIVKKEEAKLALALEGFCRFRNHHQTGFSPAGATQRGPLVAILSGPGGEGQSAVARLTGEKKNHPGAQYANRLSPRVGRFINAAGTTGFPTGKRAWPPFRLFLPHKGFADWGPTINQDFRLLGQPSVARFLNFSQGPAGEGQSAVARLPGHPFITQPYPILPGYAAAGMQALARRRPILMFDSLSSNFCHSSAYYHLFRRSNQAFKGTNNCLKKITPRPATHRSTVVIH

SEQ ID NO: 39837 - protein, 378 aa, Homo sapiens
APAPSPVGSGSCCLSHMFFHPPSRANRAFVDYAPMDEIQNAEINSQVRRYLEGTLDEIDVRNPSVTTMLSQPGPPSPGHTPTHALLASEPHVNGCKTVSTVHEDYSGSSESSNDESDSEDTDSDDSSIPRNRLQSVVAVPKNSTLPMEETSPCSSRSSQSYRHYSDHWEDERLESRRHLYEEKFESIASKACPQTDKFFLHKGTEKNPEISFTQSSRKQIDNRLPELSHPQSDGVDSTSHTDVKSDPLGHPNSEETVKAKIPSRQQEELPIYSSDFEDVPNKSWQQTTFQNRPDSRLGKTELSFSSSCEIPHVDGLHSSEELRNLGWDFSQEKPSTTYQQPDSSYGACGGHKYQQNAEQYGGTRDYWQANGLLGSKIR

SEQ ID NO: 39838 - protein, 619 aa, Homo sapiens
  DOMAIN (207)..(217): Probable rabGAP domain proteins domain identified by eMATRIX, accession number PF00566A, p-value=7.333e-10, raw score of 12.64
  DOMAIN (139)..(574): TBC domain identified by PFam, accession name TBC, E-value= 3.7e-23, PFam score of 90.4
MRSVAAEPQRVACDPASPLARREYEDKAGRPSKPPSPKQNVRKNLDFEPLSTTALILEDRPANLPAKPAEEAQKHRQQYEEMVVQAKKRELKEAQRRKKQLEERCRVEESIGNAVLTWNNEILPNWETMWCSRKVRDLWWQGIPPSVRGKVWSLAIGNELNITHELFDICLARAKERWRSLSTGGSEVENEDAGFSAADREASLELIKLDISRTFPNLCIFQQVLIFVDFRVGLQKSFQKRKERESTKLQQLWSWCLGGPYHDMLHSILGAYTCYRPDVGYVQGMSFIAAVLILNLDTADAFIAFSNLLNKPCQMAFFRVDHGLMLTYFAAFEVFFEENLPKLFAHFKKNNLTPDIYLIDCDSGSLLGADSSVKAQIRNRLGSREEAKGKNRLYIRPVLEAAISEALVTVVFSVQEQVYLFLGTEEVTEAHGPGALISRQGRGQFCSVDAVFLLHDSPELPSSLPHGASLPLASSDKQAEQTWLGAVGSVQCTSITACPRDLEDRPHLTEHPPAGIHCGQNPCPCHLIFTLYSKSLPLDLACRIWDVFCRDGEEFLFRTALGILKLFEDILTKMDFIHMAQFLTRLPEDLPAEELFASIATIQMQSRNKKWAQRSRQVA

SEQ ID NO: 39839 - protein, 329 aa, Homo sapiens
MEDWKVRGHQEKTLAFEVQSFSCSERETTLVLLLRSPAVPQLLLHGLCGPDLSTKAAQCHFKAIWQSLGNTLGAVSDQATPGHVKSLPPGALISRQGRGQFCSVDAVFLLHDSPELPSSLPHGASLPLASSDKQAEQTWLGAVGSVQCTSITACPRDLEDRPHLTEHPPAGVHCGQNPCPCHLIFTLYSKSLPLDLACRIWDVFCRDGEEFLFRTALGILKLFEDILTKMDFIHMAQFLTRLPEDLPAEELFGPSIATIQMQSRNKKWAQEPGHELEWPDRSFRPRVLACPMGSREHRLQPACSGSTGQGHTKALFPETCCQSPIFQDA

SEQ ID NO: 39840 - protein, 85 aa, Homo sapiens
GPRSKGSEDLAHVPGTGCLILLRCGGKMAGFEGNTQDPDSLFWGYRQQDTGHLGPYPWLLGQWNKSLTWKPGPAFFRLGDPRCSW

SEQ ID NO: 39841 - protein, 246 aa, Homo sapiens
LQRAGPTSGFLAQEMWVGQGAPAMGSGLPALCPFQDDTISINHNWVNGFNLANMWRFLQQELCAVQEEVSEWRDSMPDWHHHCQVGWLRMEATLLGEAFRLHGSDSLGHRAASQCLCLNGPFFVLGDWAHVGSFAGWTVSMVLAHWPLPSAQVIMRSCSGINFEEFYHFLKVIAEKRLLVLRESAAEHGAGLGFEQAAFDVGRITEVLASLVAHSDFQRVDTSAFSPQPKELLQQLREAVDAAAAP

SEQ ID NO: 39842 - protein, 266 aa, Homo sapiens
SVLSNKQNHCSQTAPPPPPPAASGSRGWVWGLFWGLAAILEGSTGADWSQLPHSCCPSLLVPHVLSVVPLRPPHRDFPVEDVFTLPVYFSSDWLNEFWDALDVDDYRFVYAGPAGSWSPFHADIFRSFSWSVNVCGRKKWLLFPPGQEEALRDRHGNLPYDVTSPALCDTHLHPRNQLAGPPLEITQEAGEMVFVPSGWHHQVHNLDDTISINHNWVNGFNLANMWRFLQQELCAVQEEVSEWRDSMPDWHHHCQVIMRSCSGIKL

SEQ ID NO: 39843 - protein, 295 aa, Homo sapiens
  DOMAIN (282)..(294): RIBOSOMAL PROTEIN P2 SIGNATURE domain identified by eMATRIX, accession number PR00456F, p-value=4.094e-10, raw score of 5.86
  DOMAIN (186)..(295): 60s Acidic ribosomal protein domain identified by PFam, accession name 60s_ribosomal, E-value=5.2e-20, PFam score of 66.8
MKRRAVMGPPQVQAWKALDLWESSQVMEGKAVVPMGRNPMMRKATQGQLENSPALEKLLPPLQGNVGFAFTKEDLTEVRDLLLANKVPAATRAGAIGPCEVTVPAQNTGLGPEKISFFQALGITTKISRGTTEILSDVQLIKTGDRVGASEATLLNTPNISPFSFGLVIQQVFNNGSIYNPEVLDITEETLYSGFLEGVRNVASCLQTGYPPVASVPPSIINGYKGCLALSVETDYTFPPAEKIKTFLADPSAFVAAAPVATTATAAPAAAAAPTKFENEESEELDEDMGFGLFD

SEQ ID NO: 39844 - protein, 307 aa, Homo sapiens
  DOMAIN (9)..(111): Ribosomal protein L10 domain identified by PFam, accession name Ribosomal_L10, E-value=3.3e-48, PFam score of 173.6
RTAVMPREDRATWKSNYFLKIIQLLDDYPKCFIVGADNVGSKQMQQIRMSLRGKAVVLMGKNTMMRKAIRGHLENNPALEKLLPHIRGNVGFVFTKEDLTEIRDMLLANKVPAAARAGAIAPCEVTVPAQNTGLGPEKTSFFQALGITTKISRGTIEILSDVQLIKTGDKVGASEATLLNMLNISPFSFGLVIQQVFDNGSIYNPEVLDITEETLHSRFLEGVRNVASVCLQIGYPTVASVPHSIINGYKRVLALSVETDYTFPLAEKVKAFLADPSAFVAAAPVAAATTAAPAAAAAPAKVEAKEE

SEQ ID NO: 39845 - protein, 328 aa, Homo sapiens
  DOMAIN (265)..(319): Tubulin subunits alpha beta, and gamma proteins. domain identified by eMATRIX, accession number BL00227F, p-value=1.000e- 40, raw score of 21.16
  DOMAIN (50)..(323): Tubulin/FtsZ family domain identified by PFam, accession name tubulin, E-value=9.7e-120, PFam score of 411.2
MREIALTQTRQCGKKIGAKVGIRGSEVPAPAYWVAREDVGSGSGLGGGWYVPCAVLVDLEPVTMDSLRSGPFGLIFRPTTSSLKLIENADKTFCIDNEALYDIYSRTLKLPTPTYGDMNHLLSATMSGVTMCLGFPGQLNADLQKLSVNMVPFPRLHFFMPGFAPLTSRGSQHYQALTVAELTQQMFYAKNMMAARDPRHGRYLTAAAIFQGRMPMREVDEQMFNIQDKNSSYFADWFPDNVKTAVCDIPPRGLKMSGSFIGNNAAIQELFQCVSEQFTAMFRRKAFLHWYTGEGMDEMEFTEAESNMNDLVSEYQQYQDATAQGGGG

SEQ ID NO: 39846 - protein, 216 aa, Homo sapiens
SSLSGTKVGSLPFRLLHWMPVSYSSVTTRYYHRAGAEEGKDRIIFVTKKDHETPSSAELVADDPNDPYEEHGLILPNGNINWNCPCLGGMASGPCGEQFKSAFSCFHYSTEEIKGSDCVDQFRAMQECMHKYPDLYPQEDEDEEEEREKKPAQQAEETAPIEATATKEEEDQVNEGHKALSTSPFGVDLLQKALSSPSKKVSFCCPVHYNIQNNLF

SEQ ID NO: 39847 - protein, 268 aa, Homo sapiens
MGKLRTMWVYTEQPGKLVRNAGMRRNWGDIGTQWVTYWGQRAAISGEFMESLQDPDLNVRRATLAFFNSAVHNKPSLVRDLLDDILPLLYQETKIRRDLIREVEMGPFKHTVDDGLDVRKAAFECMYSLLESCLGQLDICEFLNHVEDGLKDHYDIRMLTFIMVARLATLCPAPVLQRVDRLIEPLRATCTAKVKAGSVKQEFEKQDELKRSAMRAVAALLTIPEVGKSPIMADFSSQIRSNPELAALFESIQKDSASAPSTDSMELS

SEQ ID NO: 39848 - protein, 1111 aa, Homo sapiens
SSLLEKMTSSDKDFRFMATSDLMSELQKDSIQLDEDSERKVVKMLLRLLEDKNGEVQNLAVKWLGVPLGAFHASLLHCLLPQLSSPRLAVRKRAVGALGHLATACSTDLFVELADHLLDRLPGPRVPTSPTAIRTLIQCLGSVGRQAGHRLGAHLDRLVPLVEDFCNLDDDELRESCLQAFEAFLRKCPKEMGPHVPNVTSLCLQYIKHDPNYNYDSDEDEEQMETEDSEFSEQESEDEYSDDDDMSWKVRRAAAKCIAALISSRPDLLPDFHCTLAPVLIRRFKEREENVKADVFTAYIVLLRQTRPPKGWLEAMEEPTQTGSNLHMLRGQVPLVVKALQRQLKDRSVRARQGCFSLLTELAGVLPGSLAEHMPVLVSGIIFSLADRSSSSTIRMDALAFLQGLLGTEPAEAFHPHLPILLPPVMACVADSFYKIAAEALVVLQELVRALWPLHRPRMLDPEPYVGEMSAVTLARLRATDLDQEVKERAISCMGHLVGHLGDRLGDDLEPTLLLLLDRLRNEITRLPAIKALTLVAVSPLQLDLQPILAEALHILASFLRKNQRALRLATLAALDALAQSQGLSLPPSAVQAVLAELPALVNESDMHVAQLAVDFLATVTQAQPASLVEVSGPVLSELLRLLRSPLLPAGVLAAAEGFLQALVGTRPPCVDYAKLISLLTAPVYEQAVDGGPGLHKQVFHSLARCVAALSAACPQEAESTASRLVCDARSPHSSTGVKVLAFLSLAEVGQVAGPGPQRELKAVLLEALGSPSEDVRAAASYALGRVGAGSLPDFLPFLLEQIEAEPRRQYLLLHSLREALGAAQPDSLKPYAEDIWALLFQRCEGAEEGTRGVVAECIGKLVLVNPSFLLPRLRKQLAAGRPHTRSTVITAVKFLISDQPHPIDPLLKSFIAVHNKPSLVRDLLDDILPLLYQETKIRRDLIREVEMGPFKHTVDDGLDVRKAAFECMYSLLESCLGQLDICEFLNHVEDGLKDHYDIRMLTFIMVARLATLCPAPVLQRVDRLIEPLRATCTAKVKAGSVKQEFEKQDELKRSAMRAVAALLTIPEVGKSPIMADFSSQIRSNPELAALFESIQKDSASAPSTDSMELS

SEQ ID NO: 39849 - protein, 1056 aa, Homo sapiens
MGVKLLVHGHTARAHLDRLVPLVEDFCNLDDDELRESCLQAFEAFLRKYVWCPKEMGPHVPNVTSLCLQYIKHDPNYNYDSDEDEEQMETEDSEFSEQESEDEYSDDDDMSWKVRRAAAKCIAALISSRPDLLPDFHCTLAPVLIRRFKEREENVKADVFTAYIVLLRQTQPPKGWLEAMEEPTQTGSNLHMLRGQVPLVVKALQRQLKDRSVRARQGCFSLLTELAGVLPGSLAEHMPVLVSGRLDCNQVSAVLGHFQNPDPTPELSPQFLRQSETQSQAQSLVKSLQWPPTTSSENKAGSSIIFSLADRSSSSTIRMDALAFLQGLLGTEPAEAFHPHLPILLPPVMACVADSFYKIAAEALVVLQELVRALWPLHRPRMLDPEPYVGEMSAVTLARLRATDLDQEVKERAISCMGHLVGHLGDRLGDDLEPTLLLLLDRLRNEITRLPAIKALTLVAVSPLQLDLQPILAEALHILASFLRKNQRALRLATLAALDALAQSQGLSLPPSAVQAVLAELPALVNESDMHVAQLAVDFLATVTQAQPASLVEVSGPVLSELLRLLRSPLLPAGVLAAAEGFLQALVGTRPPCVDYAKLISLLTAPVYEQAVDGGPGLHKQVFHSLARCVAALSAACPQEAASTASRLVCDARSPHSSTGVKVLAFLSLAEVGQVAGPGHQRELKAVLLEALGSPSEDVRAAASYALGRVGAGSLPDFLPFLLEQIEAEPRRQYLLLHSLREALGAAQPDSLKPYAEGHLCLARCEGAEEGTRGVVAECIGKLVLVNPSFLLPRLRKQLAAGRPHTRSTVITAVKFLISDQPHPIDPLLKSFIGEFMESLQDPDLNVRRATLAFFNSAVHNKPSLVRDLLDDILPLLYQETKIRRDLIREVEMGPFKHTVDDGLDVRKAAFECMYSLLESCLGQLDICEFLNHVEDGLKDHYDIRMLTFIMVARLATLCPAPVLQRVDRLIEPLRATCTAKVKAGSVKQEFEKQDELKRSAMRAVAALLTIPEVGKSPIMADFSSQIRSNPELAALFESIQKDSASAPSTDSMELS

SEQ ID NO: 39850 - protein, 58 aa, Homo sapiens
  DOMAIN (25)..(35): Oxysterol-binding protein family proteins domain identified by eMATRIX, accession number BL01013C, p-value=8.586e-09, raw score of 9.97
  misc_feature (1)...(58): Xaa = X or * as defined in Table 2
LNAQPGTRRLWPAEIRPPPRRLGKGGQQVSHHPPISCFYCECEEKRLCVNTHVWTKXT

SEQ ID NO: 39851 - protein, 72 aa, Homo sapiens; identical to SEQ ID NO: 36298

SEQ ID NO: 39852 - protein, 484 aa, Homo sapiens
  DOMAIN (308)..(352): Oxysterol-binding protein family proteins domain identified by eMATRIX, accession number BL01013D, p-value=8.594e-17, raw score of 26.81
  DOMAIN (200)..(308): ParA family ATPase domain identified by PFam, accession name ParA, E-value=0.00014, PFam score of 15.8
MKLMETLNQCINAGHEMTKAIAIAQFNDDSPKARKITRRWRIGEAADLVGVSSQAIRDAEKAGRLPHPDMEIRGRVEQRVGYTIEQINHMRDVFGTRLRRAEDVFPPVIGVAAHKGGVYKTSVSVHLAQDLALKGLRVLLVEGNDPQGTASMYHGWVPDLHIHAEDTLLPFYLGEKDDVTYAIKPTCWPGLDIIPSCLALHRIETELMGKFDEGKLPTDPHLMLRLAIETVAHDYDVIVIDSAPNLGIGTINVVLSSRNAQLLLIRFDSQNLRALRKACCLVQAESRTNTEVELGSPGFKSRLSGSLRNLWREVTRYLRLGDIDAATEQKRHLEEKQRVEERKRENLRTPWKPKYFIQEFATSCPRFGETTVNRRDKVAPRACCLQMTLLWHPFSRVSLQCAASGADEGFQCHPVFSHMPHSCSVSACDEFPAAVPSEKCLPRWGYTFHREVWIDELLPTGQKGRKNGDRGTVSPHETDLHRQA

SEQ ID NO: 39853 - protein, 332 aa, Homo sapiens
  DOMAIN (256)..(300): Oxysterol-binding protein family proteins domain identified by eMATRIX, accession number BL01013D, p-value=4.938e-17, raw score of 26.81
  DOMAIN (5)..(331): Oxysterol-binding protein domain identified by PFam, accession name Oxysterol_BP, E-value=6.6e-07, PFam score of -47.0
ITAGATPEERVICFVEYYLTAFHEGRKGALAKKPYNPIIGETFHCSWEVPKDRVKPKRTASRPLLPAVMNTQWPMTLPKSYKLRFVAEQVSHHPPISCFYCECEEKRLCVNTHVWTKSKFMGMSVGVSMIGEGVLRLLEHGEEYVFTLPSAYARSILTIPWVELGGKVSINCAKTGYSATVIFHTKPFYGGKVHRVTAEVKHNPTNTIVCKAHGEWNGTLEFTYNNGETKVIDTTTLPVYPKKIRPLEKQGPMESRNLWREVTRYMRLGDIDAATEQKRHLEEKQRVEERKRENLRTPWKPKYFIQEGDGWGILQSPLESTLMGLEVQSFPV

SEQ ID NO: 39854 - protein, 238 aa, Homo sapiens
  DOMAIN (121)..(144): GLYCOSYL HYDROLASE FAMILY 29 SIGNATURE domain identified by eMATRIX, accession number PR00741H, p-value=4.169e-13, raw score of 10.32
  DOMAIN (3)..(187): Alpha-L-fucosidase domain identified by PFam, accession name Alpha_L_fucos, E-value=1.6e-08, PFam score of -70.7
HFFLYKKLIPFVLKNCMFHFSPVRGTVVTNDRWGAGSICKHGGFYTCSDRYNPGHLLPHKWENCMTIDKLSWGYRREAGISDYLTIEELVQPLVETVFSAGNPLMDIGPHLDGTISVVFEERLRQMGSWLKVNGEAIYETYTWRSQNDTVTPDVWYTSKPKEKLVYAIFLKWPTSGQLFLGHPKAILGATEVKLLGHGQPLNWIFFGDKMGIMVELPQLTIHQMPCKWGWALALTNVI

SEQ ID NO: 39855 - protein, 208 aa, Homo sapiens
  DOMAIN (67)..(119): Ubiquitin domain proteins domain identified by eMATRIX, accession number BL00299, p-value=7.857e-38, raw score of 28.84
  DOMAIN (52)..(126): Ubiquitin family domain identified by PFam, accession name ubiquitin, E-value=2e-50, PFam score of 160.4
MQTVLNLRAWHGLDAAPLTRDQGGPGCRFADHSLSSKGFPFTAICGEAATKLQIFVKTLRGKTITLEVEPSDAIENVKAKIQDKEGIPPDQQRLIFAGKQLEDGRTLSDCNIQKEPTLHLLLRLCGVAKKRKKSYPTPKKNKHKRKKVKLDVLKCYKVDENDKISALLTNVELECFCHTECASFLFAFCHDCSNLLGLIKDRTNSYSD

SEQ ID NO: 39856 - protein, 34 aa, Homo sapiens
VEPPPKCRFFVKNTLRGKTHHPSRLNPSDTIAKC

SEQ ID NO: 39857 - protein, 126 aa, Homo sapiens
VDLVREFIERQHAKNRYYYYHRQYRRVPDITECKEEDIMCMYEAEMQWKRDYKVDQEIINIMQDRLKAFQQQSYRATQQGHPQAASGGGSWRPLLQIFSLAASSASVRPGTSWQNCRPPGPDLGKQ

SEQ ID NO: 39858 - protein, 39 aa, Homo sapiens
MPDSWDKDVYPEPPRRTPVQPNPIVYMMKAFRPHRGPTP

SEQ ID NO: 39859 - protein, 386 aa, Homo sapiens
GEITSKPMVLFLGPWSVGKSTMINYLLGLENTRYQLYTGAEPTTSEFTVLMHGPKLKTIEGIVMAADSARSFSPLEKFGQNFLEKLIGIEVPHKLLERVTFVDTPGIIENRKQQERGYPFNDVCQWFIDRADLIFVVFDPTKLDVGLELEMLFRQLKGRESQIRIILNKADNLATQMLMRVYGALFWSLAPLINVTEPPRVYVSSFWPQEYKPDTHQELFLQEEISLLEDLNQVIENRLENKIAFIRQHAIRVRIHALLVDRYLQTYKDKMTFFSDGELVFKDIVEDPDKFYIFKTILAKTNVSKFDLPNREAYKDFFGINPISSFKLLSQQCSYMGGCFLEKIERAITQELPGLLGSLGLGKNPGALNCDKTGCSETPKNRYRKH

SEQ ID NO: 39860 - protein, 80 aa, Homo sapiens
  misc_feature (1)...(80): Xaa = X or * as defined in Table 2
MHQSDNNSENREFLTRGXXXXXXXXANWLTLPDLRVPLPLXAFPLSWVQDHFLVXSWCVLVTAKWERNTGQLVPARVGGP

SEQ ID NO: 39861 - protein, 170 aa, Homo sapiens
LLPHKPLAGFFKAYLPSEPPRVYVSSFWPQEYKPDTHQELFLQEEISLLEDLNQVIENRLENKIAFIRQHAIRVRIHALLLARGLDPFIGPRRDWLVYPAVTGAVAFGFVEGLDPSQEHPRFQGTQDNVSKDESTRKEQSVRLVGCGADDRKPRDLQILDRDRKGPELVQ

SEQ ID NO: 39862 - protein, 455 aa, Homo sapiens; identical to SEQ ID NO: 38887
  DOMAIN (56)..(154): Gag P30 core shell protein domain identified by PFam, accession name Gag_p30, E-value=5.1e-18, PFam score of 66.6

SEQ ID NO: 39863 - protein, 256 aa, Homo sapiens
  DOMAIN (101)..(164): Gag P30 core shell protein domain identified by PFam, accession name Gag_p30, E-value=0.054, PFam score of 10.4
PRPLSLWSREAGKGVQDCYIDNSQLCRKCDLCPTGSPQSLPPYASIPPTPSPTIKDPPSTQMVQKETDKGVNNEPKSGNIPQLCRLQAVGGGEFGPARVRVPFSLSDLKQIKIDLGKFSDNPDGYIDVLQGLGQCFDLTWRDIMLLLNQTLTPNEKSAVITAAREFGNLLYLSQLRHWPVTLQPSAVPTPDSGTYDTKECKIVQSVEMSMEVMIAVMSVQRQQGKQTQQQPLLVVVRSAEPAEESVPHKSSTRGAS

SEQ ID NO: 39864 - protein, 82 aa, Homo sapiens
  misc_feature (1)...(82): Xaa = X or * as defined in Table 2
PXNXXPSTLTTGTGSTTTXQIRMKVNXMGNDSPQGKNTPKMYSGEFSPVRVHVPFSLSDLKQIKIDLGKFSDDPDGYIDVLQ

SEQ ID NO: 39865 - protein, 128 aa, Homo sapiens
AITLTAWPKIPFLGIREAKSPRSENTRLATILEAGHRHLGTSVSKDHPVTFWRPRRDLQSDLKQIKIDLGKFSDNPDGYIDVLQELGQSFDLTWRDIMLLLNQTLTPNERSATITAAREFGDLWYISQ

SEQ ID NO: 39866 - protein, 256 aa, Homo sapiens; identical to SEQ ID NO: 39863
  DOMAIN (101)..(164): Gag P30 core shell protein domain identified by PFam, accession name Gag_p30, E-value=0.054, PFam score of 10.4

SEQ ID NO: 39867 - protein, 43 aa, Homo sapiens
  misc_feature (1)...(43): Xaa = X or * as defined in Table 2
RQWKGXKFVFQKMXDLGKYLQRQLFCLSSLVQPPWPVPTEIYP

SEQ ID NO: 39868 - protein, 780 aa, Homo sapiens; identical to SEQ ID NO: 32464
  DOMAIN (265)..(277): RNase H domain identified by eMATRIX, accession number PF00075C, p-value=5.622e-12, raw score of 11.58
  DOMAIN (166)..(347): Reverse transcriptase domain identified by PFam, accession name rvt, E-value=1.1e-21, PFam score of 85.5

SEQ ID NO: 39869 - protein, 591 aa, Homo sapiens
  DOMAIN (110)..(151): kw TRANSCRIPTASE REVERSE II ORF2 domain identified by eMATRIX, accession number DM01354I, p-value=1.000e-40, raw score of 15.55
MGYFNTPLSTLDRSTRQKVNKDTQELNSALHQADLIDIYRTLHPKSTEYTFFSAPHHTYSKIDHIVGSKALLSKCKRTQIITNCLSDHRAIKLELRIKKLTQNCSTTWKLNNLLLNDYWVHNKMKAEIKMFFETNENKDTTYQNLWDTFKAVCRGKFIALNAHKRKQERSKIDTLTSHLKELEKQEQTHSKASRRQEITKIRAELKEIETQKTLQKINESRSWFFEKINKIDRPLARLIKKKREKNQIDALKNDKGDITTNPTEIQTTIREYYKHLYANKLENLEEMDKFLDTYTLPRLNQEEVDSLNRPITGSEIVAIINSLPTKKSPGPDGFTAEFYERYKKELIQQGVRCAPDPVRHPLPLPIRLKSRHCSCAAKCPGMQLSTWAVMWDPFPTTLARALELITQYFNNWNWVYNIIYQDENELSKLKGGTYSYSGKWGQQVNDPPLCFQNPPTETERRETERDREVGVVDGKCSPQGKKAPKIYSGEFGPVRVHVTLSLSDLKQIKIDLGKFSDNPDGYIDVLQGIEAVKLQTVLQMDPQMQSMTKTYHGPLDRLASPCSDVNDIEATLSKEISTAQPLLCPNSAGSS

SEQ ID NO: 39870 - protein, 449 aa, Homo sapiens
  DOMAIN (94)..(290): Gag P30 core shell protein domain identified by PFam, accession name Gag_p30, E-value=1.7e-14, PFam score of 54.3
MRQIQMRKRKTSVKIELQILNEPSPALGLTPEHKGNVGHTGKGPLESSSPDPFLCGQERGKQVQDCYIDGKCSPQGKNALKMYSGEFDPVRVCVPFSLSDLKQLKIDLGRFSDNPDGYIDVLQGLGQSFDLTWRDIMLLLDQTLTPNERNATITAAREFGDLWCLSQVNDRMTTEQRERFPTGQQAVPSVDPRWDTESEHGDGCHRHLLTCMLEGLRKTKKKPMNYSMMSTITQGKEKNPNAFLERLRQALRKHTSLSPDSIEGQLILKDKCITLSAADIRKNFKNLETLLNLATLVFHNRDKEKQAEQDKRDLKKATALVMALRQADFGGSGTRKGWANPMPNRACFQCGLQGHFKKIVQIQISHPLIHAPYVKGINGRPTAPGDKGFQTKAQLCSEQAKYLGLKLSKGTRALSEERIQPILAYPHPKTLKQLRGFFGIPGFCRIWIP

SEQ ID NO: 39871 - protein, 221 aa, Homo sapiens
MTFTNGSGEASQQEESCLSEAITLTTWPKIPFLGIREAKTPGQRTQGLPPSWKWPAAILEAAHHHLGSSGRKDPPLTFGDHEGTSKAEPSPALGLTPEHKGNVGHAARIQQPGPLSLWSRKAGKGVQDCYIDLKQIKIDLDKFSDNPDGYIDVLQGLGQSFDLTWRNIMLLLNQTLTPNERSATITAAREFGDLWYLSQVNDRIAAEKREKFLTGQQAVPS

SEQ ID NO: 39872 - protein, 571 aa, Homo sapiens
  DOMAIN (217)..(234): RNase H domain identified by eMATRIX, accession number PF00075A, p-value=4.400e-13, raw score of 14.44
  DOMAIN (197)..(382): Reverse transcriptase domain identified by PFam, accession name rvt, E-value=5.6e-36, PFam score of 132.9
LEAESVVSLGTWAVTQGVLSLVSLLIQVCSSRHGQLCGTRSPLPLPGPQVQFPTGQQAVPSVDPHWDTESEHGNWCRRHLLTCVLGLRKTRKKPMNYAMMSTITQGKEENPTAFLVRLREALRKHTSLSPDSIEGQLIRQADFGVSGKGKSWANRMPNMACFQCGLQGHFKKDCPSRSKLPPRPCPLCQGNHWKAHCPRGLVKPCNSPCNTPVLGVQKPNGQWRLVQDLRIINEAVLPLYPAIPNPCTLLSQKPQKAEWFTVLDLKDAFFCIPVHPDSQFLFAFEDPLNPMSQLTWTVLPQGFKHSAHLFGQALAQDLSQFSYLDTLVLQYGDDLILATRSETWCHQATQALLNFLATCGYKVSKQNAQLCSQQVKNLGLKLSKGTRALSEERIQPILAYPHPKTLKQLRGFLGITSFCRIWIPRYSEIARSLYTLIRKTQKANAHLVRWTPEAEVAFQALKKALNQAPVKFANGARLFFICHRKNRNSSRRPYTGLKDELATCGIPEIEAVNLKIVLQMEPQMQSMAKIYRRPLDWPASPCFDVNDIEGTPLEEISTAQPLVCPNSAGSS

SEQ ID NO: 39873 - protein, 372 aa, Homo sapiens
  DOMAIN (168)..(358): Gag P30 core shell protein domain identified by PFam, accession name Gag_p30, E-value=1.2e-14, PFam score of 54.8
  misc_feature (1)...(372): Xaa = X or * as defined in Table 2
HFGNHERTSKVMGNVPRKTKTPLRRILENWEQFDPQTLRKKRLIFFCSAAWPPEGSINYNTILQLDLFCRKGKWSEVPXVQTFFSLRDNSQLCKKCDLCPTGSLQSLPPYPSIPTPSPLNKDPPSTQMVQKEIDKRVNSEPKSANIPQLXPLQAVGGREFGPARVHVPFSLPDLKQIKTDLGKFSDNPDGYIGVLQGLGQFFDLTWRDIMSLLNQTLTPNERSATITAARELGDLWYLSQVNDRMTTEERERFPTGQQAVPSADPHXDTESEHGDWCCRHLLTCVLEGLRKTRKKAVNFSVMSTVTQGKEENPTAFLERLREALRKHTSLSPDSIEGQLILKIKFITRSAADIRKQTSKVHLRPGAKLKTPY

SEQ ID NO: 39874 - protein, 54 aa, Homo sapiens
IEFNAIMRNFYSSGNRTLNSSTGSPLQNGKTLLSVLRSTLAWNGLQILWAWPVG

SEQ ID NO: 39875 - protein, 274 aa, Homo sapiens
  misc_feature (1)...(274): Xaa = X or * as defined in Table 2
RQLGTRNFLNGTKAKAFELSYLEKVPEGKDTVHKQSLLHHVGTMGGENFPDSSDLYSEIGAITRSAKDDFDQLQDNLCQMERRCIASWDHLKAIAKHEMKPLLKQRMSELLKDCAERIIILKIVHTRIINRFHSFLLFMGHPPYAIREVNINKFCRIISEFALEYRTTRERVLQQKQKRANHRERNKTRGKMITDSGKFSGSSPAPPSQPQGLSYAEDAAEHGEHEGCAENLVPLQESPAHTFSIVSAVFLLIPXHPVYXFKSVTPFLGKEQPL

SEQ ID NO: 39876 - protein, 223 aa, Homo sapiens
EEASSPGLGCSKPHLEKLTLGITRILESSPGVTEVTIIEKPPAERHMISSWEQKNNCVMPEDVKNFYLMTNGFHMTWSVKLDEHIIPLGSMAINSISKLTQLTQSSMYSLPNAPTLADLEDDTHEASDDQPEKPHFDSRSVIFELDSCNGSGKVCLVYKSGKPALAEDTEIWFLGQSCYTGIFSQTPLLPITGLLITPPGPCPSGQYCLSPAMALAHRPRIPR

SEQ ID NO: 39877 - protein, 809 aa, Homo sapiens
MPKPSLEAGSCPRLEFPVEDAQPVIKGEEFTPPPPNSYLALGDISTEEWDLEVAQEYQERMPPQRAALICVFSWNLGRSLPAPAMRRPCQNFCVALSTFAGDPEPESEAEPEAEAGAGQVADEAGQDIASAHEGAETEVEQALEQEPEERASLSEKERQNEGVNERDNCSASSVSSSSSTLEREEKEDKLSRDRTTGLWPAGVQDAGVNGQCGDILTNKRFMLDMLYAHNRKSPDDEEKGDGEAGRTQQEAEAVASLATRISTLQANSQTQDESVRRVDVGCLDNRGSVKAFAEKFNSGDLGRVFNAPQGLGWSQVPRGQPTFTKKKKTIRLFWNRNVGLLTGHGKNNRRCREFLWSKLEPIKVDTSRLEHLFESKSKELSVSKASKLVRPLFILTSACPFLSFPWKAPLHSSTRQLHRGLSAQERWRCSGIRGMECLNGKGPLESRNPAYRKSEGTRQTGAGDMKDGVWQGVPATPDTPQGMCTVCTVSFAIMDGLNVNSVGPLPFHEVAEPLLDLKEGIDQLDYTLGFFFLVSMLSGGGLLGGSASAKAFELSYLEKVPEVKDTVHKQSLLHHVCTMVVENFPDSSDLYSEIGAITRFHSFLLFMGHPPYAIREVNINKFCRIISEFALEYRTTRERVLQQKQKRANHRERNKTRGKMITNCVRHCVRMFSGSSPAPPSQPQGLSYAEDAAEHENMKAVLITYAPLRGGRHPRAGRPHTQPSKPRMPLVPGTMGTDDSPNVTDDAADEIMGPHRQVQPPKCPVQRVVPRERKRARANRKSLRRTLKSGLTPEEARALGLVGTSELQL

SEQ ID NO: 39878 - protein, 61 aa, Homo sapiens
MPAVQLDTQHMGTDVVIVKNGRRICGTGGCLASAPLHQNKSYFEFKNPSTGIWGIGGATQK

SEQ ID NO: 39879 - protein, 59 aa, Homo sapiens
MPAVQLDTQHMGTDVVIVKNGRRICGTGGCLASAPLHQNKSYFEFKIQSTGIWGIGVAT

SEQ ID NO: 39880 - protein, 52 aa, Homo sapiens
  misc_feature (1)...(52): Xaa = X or * as defined in Table 2
SFPSVVLWKDLQNLKIQVPGLILLGVGLISVPGGRIXLLRTGSRKPISQVCP

SEQ ID NO: 39881 - protein, 45 aa, Homo sapiens
MCADMCILQHPMYLMSLTLNASTPQHTGFAPNVRQSFRSGRAYLP

SEQ ID NO: 39882 - protein, 183 aa, Homo sapiens
ADRRGAVYPRSRDGGGVRGPCAMATSVLCCLRSCKDRGTGHIPLKDMLSVHMDTQHMGTDVVIVKNGRKIFGTGGCLASAPLHQNKSYFEFKIQSTGIWGIGVATQKVNLNQIPLGRDMHSLVMKNDGALYHNNEEKNRLPANSLPQEGDVVDDSAILDCQFSEFYHTPPPGFEKILFEQQIF

SEQ ID NO: 39883 - protein, 217 aa, Homo sapiens
ERRGAVSPRSRHGGGVGGPCAMATSVLCCLRCCRDGGTGHIPLKEMPAVQLDTQHMGTDVVIVKNGRRICGTGGCLASAPLHQNKSYFEFKIQSTGIWGIGVATQKVNLNQIPLGRDMHSLVMRNDGALYHNNEEKNRLPANSLPQEGDVVGITYDHVELNVYLNGKNMHCPASGIRGTVYPVVYVDDSAILDCQFSEFYHTPPPGFEKILFEQQIF

SEQ ID NO: 39884 - protein, 312 aa, Homo sapiens
  DOMAIN (148)..(199): Neuromodulin (GAP-43) proteins domain identified by eMATRIX, accession number BL00412D, p-value=1.964e-12, raw score of 16.54
SHSSSAAAHPLGLLPIAAQSLAVFIEPWSQASSRGQLQVSAPGIWGIGVATQKVNLNQIPLGRDMHSLVMRNDGALYHNNEEKNRLPANSLPQEGDVVLCWSNNGHSLCKEESLSPILPTSDGEERRRKRKKRKRKKRKQKQQQQQEAAAPAEADAEATAAEAAVEEAAARKEEEEEGEEGEGNGEEEEEKAAAAARGDWSQQEKACKSSLQAILFGHAKLEPGRLPRPTQCRVEATVLVGTNSPLDNPLWSISWSLWQKPVGTSQQQPLGLWTREFPLEGHLLTRNETFTEATPLIPEIGMLSQMMSEEHI

SEQ ID NO: 39885 - protein, 786 aa, Homo sapiens
  DOMAIN (207)..(251): SUBUNIT E V-ATPASE VACUOLAR ATP SYNTHASE HYDROL domain identified by eMATRIX, accession number PD02102A, p-value=4.869e- 09, raw score of 16.74
  DOMAIN (37)..(646): Spectrin repeat domain identified by PFam, accession name spectrin, E-value=2.5e-12, PFam score of 49.8
ELQRDIEKHSTGVASVLNLCEVLLHDCDACATDAECDSIQQATRNLDRRWRNICAMSMERRLKIEETWRLWQKFLDDYSRFEDWLKSSERTAAFPSSSGVIYTVAKEELKKFEAFQRQVHECLTQLELINKQYRRLARENRTDSACSLKQMVHEGNQRWDNLQKRVTSILRRLKHFIGQREEFETARDSILVWLTEMDLQLTNIEHFSECDVQAKIKQLKAFQQEISLNHNKIEQIIAQGEQLIEKSEPLDAAIIEEELDELRRYCQEVFGRVERYHKKLIRLPLPDDEHDLSDRELELEDSAALSDLHWHDRSADSLLSPQPSSNLSLFASLQPLRSERSGRDTPGSVDSIPLEWDHDYDLSRDLESAMSRALPSEDEEGQDDKDFYLRGAVGLSDVMIPESPEAYVKLTENAIKNTSGDHSALESQIRQLGKALDDSRFQIQQTENIIRSKTPTGPELDTSYKGYMKLLGECSSSIDSVKRLEHKLKEEEESLPGFVNLHSTETQTAGVIDRWELLQAQALSKELRMKQNLQKWQQFNSDLNSIWAWLGDTEEELEQLQRLELSTDIQTIELQIKKLKELPESCWDHRKAIILSINLCSPEFTQADSKESRDLQDRLSQMNGRWDRVCSLLEEWRGLLQDALMQCQGFHEMSHGLLLMLENIDRRKNEIVPIDSNLDAEILQDHHKQLMQIKHELLESQLRVASLQDMSCQLLVNAEGTDCLEAKEKVHVIGNRLKLLLKEVSRHIKELEKLLDVSSSQQVSNKQTSSCSISYWRPKKHHLHAF

SEQ ID NO: 39886 - protein, 1080 aa, Homo sapiens
  DOMAIN (420)..(464): SUBUNIT E V-ATPASE VACUOLAR ATP SYNTHASE HYDROL domain identified by eMATRIX, accession number PD02102A, p-value=4.869e- 09, raw score of 16.74
  DOMAIN (33)..(942): Spectrin repeat domain identified by PFam, accession name spectrin, E-value=1.5e-23, PFam score of 90.3
ENAVGSWTDDLTQLSLLKDTLSAYISADDISILNERVELLQRQWEELCHQLSLRRQQIGERLNEWAVFSEKNKELCEWLTQMESKVSQNGDILIEEMIEKLKKDYQEEIAIAQENKIQLQQMGERLAKASHESKASEIEYKLGKVNDRWQHLLDLIAARVKKLKETLVAVQQLDKNMSSLRTWLAHIESELAKPIVYDSCNSEEIQRKLNEQQELQRDIEKHSTGVASVLNLCEVLLHDCDACATDAECDSIQQATRNLDRRWRNICAMSMERRLKIEETWRLWQKFLDDYSRFEDWLKSSERTAAFPSSSGVIYTVAKEELKKFEAFQRQVHECLTQLELINKQYRRLARENRTDSACSLKQMVHEGNQRWDNLQKRVTSILRRLKHFIGQREEFETARDSILVWLTEMDLQLTNIEHFSECDVQAKIKQLKAFQQEISLNHNKIEQIIAQGEQLIEKSEPLDAAIIEEELDELRRYCQEVFGRVERYHKKLIRLPLPDDEHDLSDRELELEDSAALSDLHWHDRSADSLLSPQPSSNLSLSLAQPLRSERSGRDTPASVDSIPLEWDHDYDLSRDLESAMSRALPSEDEEGQDDKDFYLRGAVALSGDHSALESQIRQLGKALDDSRFQIQQTENIIRSKTPTGPELDTSYKGYMKLLGECSSSIDSVKRLEHKLKEEEESLPGFVNLHSTETQTAGVIDRWELLQAQALSKELRMKQNLQKWQQFNSDLNSIWAWLGDTEEELEQLQRLELSTDIQTIELQIKKLKELQKAVDHRKAIILSINLCSPEFTQADSKESRDLQDRLSQMNGRWDRVCSLLEEWRGLLQDALMQCQGFHEMSHGLLLMLENIDRRKNEIVPIDSNLDAEILQDHHKQLMQIKHELLESQLRVASLQDMSCQLLVNAEGTDCLEAKEKVHVIGNRLKLLLKEVSRHIKELEKLLDVSSSQQDLSSWSSADELDTSGSVSPTSGRSTPNRQKTPRGKCSLSQPGPSVSSPHSRSTKGGSDSSLSEPGPGRSGRGFMFRVLRAALPLQLLLLLLIGLACLVPMSEEDYSCALSNNFARSFHPMLRYTNGPPPL

SEQ ID NO: 39887 - protein, 63 aa, Homo sapiens
CSTSLMIREMQIKTTVRYHLTSARMAIIKKSKNSRCWHGCGEHGTLLHCCNLWKERNVSYVSA

SEQ ID NO: 39888 - protein, 36 aa, Homo sapiens
MENWELPWNLQGRAEEKKNGIHAVPILQMKTRGLFL

SEQ ID NO: 39889 - protein, 68 aa, Homo sapiens
MNSHFLKEDIQMANKHMEKCSTLLMIREMQIKPTVRYHLTSARMPIIKKSKNSRCWHGCGEHGTLLHC

SEQ ID NO: 39890 - protein, 44 aa, Homo sapiens; identical to SEQ ID NO: 39709
  misc_feature (1)...(44): Xaa = X or * as defined in Table 2

SEQ ID NO: 39891 - protein, 73 aa, Homo sapiens
  DOMAIN (12)..(30): Glutathione peroxidases selenocysteine proteins domain identified by eMATRIX, accession number BL00460B, p-value=4.600e- 21, raw score of 9.73
  DOMAIN (1)..(61): Glutathione peroxidases domain identified by PFam, accession name GSHPx, E-value=1.1e-35, PFam score of 131.9
MNELQRRLGPRGLVVLGFPCNQFGHQENAKNEEILNSLKYVRPGGGFEPNFMLFEKCEVNGAPTQVQPPLPDH

SEQ ID NO: 39892 - protein, 183 aa, Homo sapiens
  DOMAIN (50)..(68): Glutathione peroxidases selenocysteine proteins domain identified by eMATRIX, accession number BL00460B, p-value=4.600e- 21, raw score of 9.73
  DOMAIN (15)..(110): Glutathione peroxidases domain identified by PFam, accession name GSHPx, E-value=1.3e-54, PFam score of 194.9
MCAARLAAAAAAAQSVYAFSARPLAGGEPVSLGSLRGKMNELQRRLGPRGLVVLGFPCNQFGHQENAKNEEILNSLKYVRPGGGFEPNFMLFEKCEVNGAGAHPLFAFLREALPAPSDDATALMTDPKLITWSPVCRNDVAWNFEKFLVGPDGVPLRRYSRRFQTIDIEPDIEALLSQGPSCA

SEQ ID NO: 39893 - protein, 198 aa, Homo sapiens
  DOMAIN (58)..(76): Glutathione peroxidases selenocysteine proteins domain identified by eMATRIX, accession number BL00460B, p-value=4.326e- 17, raw score of 9.73
  DOMAIN (58)..(127): Glutathione peroxidases domain identified by PFam, accession name GSHPx, E-value=3.1e-09, PFam score of 37.7
  misc_feature (1)...(198): Xaa = X or * as defined in Table 2
GVCLLGAPAGRRGSLLSLGSLRGQGSYLSKNVAVPSEATTVRELHPXXTSLQRPPSDPGGWVVLGFPCNQFGHQENRQNEEILNSLKVRSGPGGGFEAQLHGSSRKCEVNGSGAHPLFAFLREALPVPSDDGPRALXPTPKLITWFSGVFATIVAWNFFEKFLVGPDGVPLRRYSRAFQTIDIEPDIEALLSQGPSCA

SEQ ID NO: 39894 - protein, 43 aa, Homo sapiens
YLKWQQLKFMHTPHQFLLLSSPPAKESNFRAAKKLFGSTFAFQ

SEQ ID NO: 39895 - protein, 135 aa, Homo sapiens; identical to SEQ ID NO: 39766

SEQ ID NO: 39896 - protein, 210 aa, Homo sapiens
SSNRSHIVKLPVNRRLKFMHTPHQFLLLSSPPAKESNFRAAKKLFGSTFAFHGSHIENWHSILRNGLVVASNTRLQLHGAMYGSGIYLSPMSSISFGYSGMNKKQKVSAKDEPASSSKSSNTSQSQKKGQQSQFLQSRNLKCIALCEVITSSDLHKHGEIWGCPPISDHVCTRFFFVYEDGQVGDANINTQEGGIHKEILRVIGNQTATG

SEQ ID NO: 39897 - protein, 1206 aa, Homo sapiens
  DOMAIN (132)..(178): Glycosyl hydrolases family 38 domain identified by eMATRIX, accession number PF01074B, p-value=1.000e-40, raw score of 19.97
  DOMAIN (24)..(835): Glycosyl hydrolases family 38 domain identified by PFam, accession name Glyco_hydro_38, E-value=1.9e-259, PFam score of 875.3
  misc_feature (1)...(1206): Xaa = X or * as defined in Table 2
FGVCARGCLDSAGPWTMSRALRPPLPPLCFFLLLLAAAGARAGGYETCPTVQPNMLNVHLLPHTHDDVGWLKTVDQYFYGIKNDIQHAGVQYILDSVISALLEDPTRRFIYVEIAFFSRWWHQQTNATQEVVRDLVRQGRLEFANGGWVMNDEAATHYGAIVDQMTLGLRFLEDTFGNDGRPRVAWHIDPFGHSREQASLFAQMGFDGFFFGRLDYQDKWVRMQKLEMEQVWRASTSLKPPTADLFTGVLPNGYNPPRNLCWDVLCVDQPLVEDPRSPEYNAKELVDYFLNVATAQGRYYRTNHTVMTMGSDFQYENANMWFKNLDKLIRLVNAQSVKHDDFFPYADGPHQFWTGYFSSRPALKRYERLSYNFLQVCNQLEALVGLAANVGPYGSGDSAPLNEAMAVLQHHDAVSGTSRQHVANDYARQLAAGWGPCEVLLSNALARLRGFKDHFTFCQQLNISICPLSQTAARFQVIVYNPLGRKVNWMVRLPVSEGVFVVKDPNGRTVPSDVSPNNEYSPAGTPPPVGISSSPPWISPASMNTSHSCISLPPSCIFSLCPLISVSPWEHMPPVSGPPFFFFFXDGVSLCHPGWSAVARSWLTSNSACWIIGMSHRAWLVLHFNTPLPQENLLLFMDISFIPENVLPQTSSSPENLPQGFLPLLPPSLPRLHGLSTLPVGFFFHLVNLLCNHFLGIXLSPHHTHLHFLSPSQDSFPSLSFLSPCMYSFPWVLLTQFPSSFIRGVIFPSSDSQAHPPELLFSASLPALGFSTYSVAQVPRWKPQARAPQPIPRRSWSPALTIENEHIRATFDPDTGLLMEIMNMNQQLLLPVRQTFFWYNASIGDNESDQASGAYIFRPNQQKPLPVSRWAQIHLVKTPLVQEVHQNFSAWCSQVVRLYPGQRHLELEWSVGPIPVGDTWGKEVISRFDTPLETKGRFYTDSNGREILERRRDYRPTWKLNQTEPVAGNYYPVNTRIYITDGNMQLTVLTDRSQGGSSLRDGSLELMVHRRLLKDDGRGVSEPLMENGSGAWVRGRHLVLLDTAQAAAAGHRLLAEQEVLAPQVVLAPGGGAAYNLGAPPRTQFSGLRRDLPPSVHLLTLASWGPEMVLLRLEHQFAVGEDSGRNLSAPVTLNLRDLFSTFTITRLQETTLVANQLREAASRLKWTTNTGPTPHQTPYQLDPANITLEPMEIRTFLASVQWKEVDG

SEQ ID NO: 39898 - protein, 1168 aa, Homo sapiens
  DOMAIN (152)..(198): Glycosyl hydrolases family 38 domain identified by eMATRIX, accession number PF01074B, p-value=1.000e-40, raw score of 19.97
  DOMAIN (66)..(651): Glycosyl hydrolases family 38 domain identified by PFam, accession name Glyco_hydro_38, E-value=2e-285, PFam score of 961.6
MSRALRPPLPPLCFFLLLLAAAGARAGGYEARSGLSESLTSRSRLTLQPPTSGVIDKVCVFGVPVQTCPTVQPNMLNVHLLPHTHDDVGWLKTVDQYFYGIKNDIQHAGVQYILDSVISALLADPTRRFIYVEIAFFSRWWHQQTNATQEVVRDLVRQGRLEFANGGWVMNDEAATHYGAIVDQMTLGLRFLEDTFGNDGRPRVAWHIDPFGHSREQASLFAQMGFDGFFFGRLDYQDKWVRMQKLEMEQVWRASTSLKPPTADLFTGVLPNGYNPPRNLCWDVLCVDQPLVEDPRSPEYNAKELVDYFLNVATAQGRYYRTNHIVMTMGSDFQYENANMWFKNLDKLIQLVNAQQAKGSSVHVLYSTPACYLWELNKANLTWSVKHDDFFPYADGPHQFWTGYFSSRPALKRYERLSYNFLQVCNQLEALVGLAANVGPYGSGDSAPLNEAMAVLQHHDAVSGTSRQHVANDYARQLAAGWGPCEVLLSNALARLRGFKDHFTFCQQLNISICPLSQTAARFQVIVYNPLGRKVNWMVRLPVSEGVFVVKDPNGRTVPSDVVIFPSSDSQAHPPELLFSASLPALGFSTYSVAQVPRWKPQARAPQPIPRRSWSPALTIENEHIRATFDPDTGLLMEIMNMNQQLLLPVRQTFFWYNASIGDNESDQASGAYIFRPNQQKPLPVSRWAQIHLVKTPLVQEVHQNFSAWCSQVVRLYPGQRHLELEWSVGPIPVGDTWGKEVISRFDTPLETKGRFYTDSNGREILERRRDYRPTWKLNQTEPVAGNYYPVNTRIYITDGNMQLTVLTDRSQGGSSLRDGSLELMVHRRLLKDDGRGVSEPLMENGSGAWPRLQAAGHRLLAEQEVLAPQVVLAPGGGAAYNLGAPPRTQFSGLRRDLPPSVHLLTLASWGPEMVLLRLEHQFAVGEDSGRNLSAPVTLNLRDLFSTFTITRLQETTLVANQLREASLQDSAFFDLGRKKGKKWNEFSAFVAHMGGQMNMSSCPLKALEGCPKFVANKVHGKKLWQKMASHIPGAASTPSTSSASNKMLSCAGAEQAPKQAMRRCLWERPQGTVARVHIGPSYHVHSAPRLQNKEHVNEGPAQGQSSSFLAAKKIHIFKEVGVHQVSMLMNFEDMVAEKRLIPDGCGGQVTSPSRGPSGTSWRAPATP

SEQ ID NO: 39899 - protein, 170 aa, Homo sapiens [sequence omitted]

SEQ ID NO: 39900 - protein, 77 aa, Homo sapiens
KQELNEPPKQSTSFLVLQEILESENKGDPNKPSGFRSVKAPVTKVAASIGNAQKLPMCDKCGTVLQQASAAAFSLSV

SEQ ID NO: 39901 - protein, 155 aa, Homo sapiens
LTVARSEHKVWSPLVTGEGKRHPYKMNLASEPQEVLHIGSAHNRSAMPFNASPASSTTARVITNQYNNPAGLYSSENISNFNNASSLVIDKESEVYKMLQEKQELNEHPKQSTSFWVLQEILESEEKGDPNKPSGFRSVKAPVTKVAASIGNAQK

SEQ ID NO: 39902 - protein, 376 aa, Homo sapiens
  DOMAIN (3)..(84): PDZ domain (Also known as DHR or GLGF) domain identified by PFam, accession name PDZ, E-value=5.7e-25, PFam score of 96.4
  misc_feature (1)...(376): Xaa = X or * as defined in Table 2
MTTQQIDLQGPGPWGFRLVGRKDFEQPLAISRVTPGSKAALANLCIGDVITAIDGENTSNMTHLEAQNRIKGCTDNLTLTVARSEHKKVWSPLVTEEGKRHPYKMNLASEPQEVLHIGSAHNRSAMPFTASPASSTTARVITNQYNNPAGLYSSENISNFNNCALESKDWLPAGVEANSRPLDHAQPPSSLVIDKRILKVYKMLQEKQELNEPPKQSTSFLGFCQEILESEEKGDPNKPSGFRSVKAPVTKVAASIGKCSRKFAFCVDKCWHLGFLGVFLKLRDRHRHPXVFMCCTDCGHQTXKQKGPFLLWMDQIYCEESMAPGSEVNTHPEGYESGSTVFPPSGAQQDLDPLFLPAGLLLKLFLLKCSGPLSLS

SEQ ID NO: 39903 - protein, 96 aa, Homo sapiens
FVSSSFLNHVFLPFLGYRYQPLASTASDNDFVTPEPRRTTRRHPNTQQRASKKKPKVVFSSDESSEEGMMLPPVPGREGTQLGCRGLVSIGPAAGA

SEQ ID NO: 39904 - protein, 658 aa, Homo sapiens
MNGVPVGAQKRVDKEEVKNGAIAELFSEDWSDCAYKANEVSRIRPLEESELLYPILGQSKLFVLSGEWSQSSEEASEEVAVTLIYQLAESPTVICAQIWQGCAKQALEKLEEKRTSQGDPKESPTMLPTFLLMNLLSLAGDVALQQLVHLEQAVSGELCQRRVLREEQEHKTKDPKEKNTSFETTMEEELGLVGAADDTEAELIRGFCKMELLDGKQTLAAFVPLLLKVYNNSGLYSNPDLSAAASPTLGKFCMISTTFCNSQPHLLFTMLEKSPLPIVRSNLIVATGDLAIHFPNLVDPWTPHLYAHLQDPAQPVWKTVGLVMTHLILKDMVKVKGQSKALRKMLGNFDCFGDKLSDESIFSSFLSVMGKLQHGAKPEGKAIIDEFEQKLQACHARGLDGIEELEINQAGSQRAPTAKKPSTVCRHQPLASAASDNDFVTPEPRRTTHRHPNTQQRASEKKPKVVFSSDESSIKTEVEGLGYNIKLRVATQRLSFVWVMNIAEGESAVLVTVAWPECEVAVMGSLGSAARGTGKRLQGEGNLQLNFVTIATKLEVSWTELGGGCVSALFASVGTKREKAGFYQGCSFASNIMKRGRVKEVEDVQKRLIKMTVEFNLAWSSLPPHMAMNGDQGGDRVTHESFLRCMTLMRAKGVERLS

SEQ ID NO: 39905 - protein, 1417 aa, Homo sapiens
  misc_feature (1)...(1417): Xaa = X or * as defined in Table 2
ACRSRMAPQMYEFHLPLSPEELLKSGGVNQYVVQEVLSIKHLPPQLRAFQAAFRAQGPLAMLQHFDTIYSILHHFRSIDPGLKEDTLEFLIKGVYGSGVVSRHSQELPAILDDTTLSGSDRNAHLNALKMNCYALIRLLESFETMASQTNLVDLDLGGKGKKARTKAAHGFDWEEERQPILQLLTQLLQLDIRHLWNHSIIEEEFVSLVTGCCYRLLENPTINHQKNRPTREAITHLLGVALTRYNHMLSATVKIIQMLQHFEHLAPVLVAAVSLWATDYGMKSIVGEIVREIGQKCPQELSRDPSGTKGFAAFLTELAERVPAILMSSMCILLDHLDGENYMMRNAVLAAMAEMVLQVLSGDQLEAAARDTRDQFLDTLQAHGHDVNSFVRSRVLQLFTRIVQQKALPLTRFQAVVALAVGRLADKSVLVCKNAIQLLASFLANNPFSCKLSDADLAGPLQKETQKLQEMRAQRRTAAASAVLDPEEEWEAMLPELKSTLQQLLQLPQGEEEIPEQIANTETTEDVKGRIYQLLAKASYKKAIILTREATGHFQESEPFSHIDPEESEETRLLNILGLIFKGPAASTQEKNPRESTGNMVTGQTVCKNKPNMSDPEESRGNDELVKQEMLVQYLQDAYSFSRKITEAIGIISKMMYENTTTVVQEVIEFFVMVFQFGVPQALFGVRRMLPLIWSKEPGVREAVLNAYRQLYLNPKGDSARAKAQALIQNLSLLLVDASVGTIQCLEEILCEFVQKDELKPAVTQLLWERATEKVACCPLERCSSVMLLGMMARGKPEIVGSNLDTLVSIGLDEKFPQDYRLAQQVCHAIANISDRRKPSLGKRHPPFRLPQEHRLFERLRETVTKGFVHPDPLWIPFKEVAVTLIYQLAEGPEVICAQILQGCAKQALEKLEEKRTSQEDPKESPAMLPTFLLMNLLSLAGDVALQQLVHLEQAVSGELCRRRVLREEQEHKTKDPKEKNTSSETTMEEELGLVGATADDTEAELIRGICEMELLDGKQTLAAFVPLLLKVCNNPGLLXQPQTSSAAASLCLWQVFCMISATFCDSQLWSLLFTMLEKSPLPFVRSNLMVATGDLAIRFSNLVDPWTPHLYARLRDPAQQVRKTAGLVMTHLILKDMVKVKGQVSEMAVLLIDPEPQIAALAKNFFNELSHKGNAIYNLLPDIISRLSDPELGVEEEPFPHHSLKQLLSYIHQGTRQTESLVEKLCQRFRTSQTERQQRDLAYCVSQLPLTERGLRKMLDNFDCFGDKLSDESIFSAFLSVVGKLRRGAKPEGKAIIDEFEQKLRACHTRGLDGIKELEIGQAGSQRAPSAKKPSTGSRYQPLASTASDNDFVTPEPRRTTRRHPNTQQRASKKKPKVVFSSDESSEEDLSAEMTEDETPKKTTPILRASARRHRS

SEQ ID NO: 39906 - protein, 82 aa, Homo sapiens; identical to SEQ ID NO: 32362

SEQ ID NO: 39907 - protein, 39 aa, Homo sapiens
KIAAPQLHVFLPFLFFCMRPFAFWQPLPEPLELRPRLSD

SEQ ID NO: 39908 - protein, 243 aa, Homo sapiens
MGNDFMTKTPKAMATKAKIETHDLIKLKSFCTAKETTIRVNRQPTEWEKIFAIYPSGKGLISRIYKELKQIYKKKIKQPHQKVGKEYEQTLFKRRHLCSQQTHEKVLIITGHQRNANQNHSNDIYLSPLSSDFQLDMTISSHGKIWRASEAIGQCQSSAAKPRRSGQESVRQPWTRVPGALEVAASLVSVHIPSWKRLLLRSSYKLFQPIANKEIFESTYYLEVFHFKLSCLYGLNQCPSYTY

SEQ ID NO: 39909 - protein, 139 aa, Homo sapiens; identical to SEQ ID NO: 30816

SEQ ID NO: 39910 - protein, 272 aa, Homo sapiens; identical to SEQ ID NO: 32370

SEQ ID NO: 39911 - protein, 288 aa, Homo sapiens
  DOMAIN (200)..(243): 1 kw MIND INHIBITOR DIVISION CONTROL domain identified by eMATRIX, accession number DM01756B, p-value=4.822e-15, raw score of 22.91
  DOMAIN (165)..(270): ParA family ATPase domain identified by PFam, accession name ParA, E-value=3.6e-23, PFam score of 90.4
  misc_feature (1)...(288): Xaa = X or * as defined in Table 2
MKLMETLNQCINAGHEMTKAIAIAQFNDDSPEARKITRRWRIGEAADLVGVSLRLSEMPRKQGDYRTRIWKFEDGLSNVLVIQLNKLIICVMCLDLALKGLRVLLVEGNDPQGTASMYHGWVPDLHIHAEDTLLPFYLGEKDDVTYAIYFTCWPGLDIIPSCLALHRIETELMGKFDEGKLPTDPHLMLRLAIETVAHDYDVIVIDSAPNLGIGTINVVCAADVLIVPTPAELFDYTSALQFFDMLRDLLKNVDLKGFEPDDPTGNRTVQLTWQPLPEPLELCXRLSD

SEQ ID NO: 39912 - protein, 28 aa, Homo sapiens
RHTTATELTTLVSWQPLPEPLELWPKVL

SEQ ID NO: 39913 - protein, 170 aa, Homo sapiens
MPGHQKAPLRPAVSKKVVNVGERQNQVIIETGGDFADFGTTIKQDFRLLGQTSVDRLLQLSQGQAVKGNQLLPVSLVKRKTTLAPNTQTASPRALADSLMQLARQVSRLESGQGLPRRSGSVSLQPLSREDLRRSQSESFGPEFQGLWEWLPGELNSPIFSGVPHRWDAA

SEQ ID NO: 39914 - protein, 296 aa, Homo sapiens; identical to SEQ ID NO: 33725
  DOMAIN (16)..(35): Eukaryotic  RNA-binding region RNP-1 proteins domain identified by eMATRIX, accession number BL00030A, p-value=1.000e- 12, raw score of 14.39
  DOMAIN (16)..(153): RNA recognition motif. domain identified by PFam, accession name rrm, E-value=5.7e-33, PFam score of 123.0

SEQ ID NO: 39915 - protein, 95 aa, Homo sapiens
PTDESSEPPRNFRGDPRVRPRVRPRVRNFGGGGSYNDFGNYNNQTSNFGPMKGGNFGGRSSGPYGGGGQYFAKPRNQGGYGGSSSSSSYGSGRRF

SEQ ID NO: 39916 - protein, 558 aa, Homo sapiens; identical to SEQ ID NO: 34621
  DOMAIN (426)..(471): kw TRANSCRIPTASE REVERSE II ORF2 domain identified by eMATRIX, accession number DM01354N, p-value=6.550e-34, raw score of 13.17
  DOMAIN (62)..(132): RNA recognition motif. domain identified by PFam, accession name rrm, E-value=1.4e-23, PFam score of 91.8

SEQ ID NO: 39917 - protein, 72 aa, Homo sapiens
  DOMAIN (10)..(20): Eukaryotic  RNA-binding region RNP-1 proteins domain identified by eMATRIX, accession number BL00030B, p-value=1.900e- 11, raw score of 7.03
  misc_feature (1)...(72): Xaa = X or * as defined in Table 2
MTDRGSGKKRGFAFVTFDDHDSVDKIVIQKYHTVNGHNCEVRKALSKQEMASASSSQRGRSGSGNFGGGRGX

SEQ ID NO: 39918 - protein, 271 aa, Homo sapiens
YNRAMFHPHAVNKIALSLNNKNPRSKVLFLELLAAVCLVRGGHKLFYLAFDNFKEVCGEKQRFEKLMEHFRNEDNNIDFMVASMQFINIVVHSVEDMNFRVHLQYEFTKLGLDEYLDKLKHTESDKLSVQIQAYLDNVFDVGALLEDAETKNAALERVEELEENISHLSEKLQDTENEAMSKIVELEKQLMQRNKELDVVREIYKDANTQVHTLRKMVKEKEEAIQRQSTLEKKIHELEKQGTIKIHKKGDGDIAILPVVASAHCPWGQKW

SEQ ID NO: 39919 - protein, 476 aa, Homo sapiens
  DOMAIN (16)..(378): Formin Homology 2 Domain domain identified by PFam, accession name FH2, E-value=2.8e-07, PFam score of -18.9
MALLTLKQQQNEDLQDISHFTTTRTPRQGTPVQKEKSEETRLEWARRMLRRDQHSTKGKVVKRMRGFLVGLVYCDKQSGALESLLCLWNVSGNTTLSSLVEIGSKAALGLVCGEKQRFEKLMEHFRNEDNNIDFMVASMQFINIVVHSVEDMNFRVHLQYEFTKLGLDEYLDLLDTKSTDRKQTLLHYISNVVKEQYHQVSLFYNELHYVEKAAAVSLENVLLDVKELQRGMDFTKREYTMHDHNTLLKEFILNNEGKLKKLQDDAKIAQDAFDDVVKYFGENPKTTPPSVFFPVFVRFVKAYKQAEEENMELRKKQEQALMEKLLEQEALMEQQDPKSPSHKSKRQQQELIAELRKRQVKDNRHVYEGKDGAIEDIITVSLENVLLDVKELQRGMDFTKREYTMHDHNTLLKEFILNNEGKLKKLQDDAKIAQDAFDDVVKYFGENPKTTPPSVFFPVFVRFVKAYKQAEEEKWS

SEQ ID NO: 39920 - protein, 80 aa, Homo sapiens
  misc_feature (1)...(80): Xaa = X or * as defined in Table 2
MQLRAGQLQDGAVPXAXTPVXPGYACPHYXNSRDRRRXPRRFQYRSTPCPSVKHGDEWGEPHAAMAATAASIAXPARAVV

SEQ ID NO: 39921 - protein, 141 aa, Homo sapiens
PGRRFRNAVGFESGGSGAERVPPADGEADPLQHKCAQHRPFTCFHWHFLNQRRRRPLRRRDGTFNYSPDVYCSKYNEATGVCPDGDECPYLHRTTGDTERKYHLRYYKTGTCIHETDARGHCVKNGLHCAFAHGPLDLRPL

SEQ ID NO: 39922 - protein, 671 aa, Homo sapiens
  DOMAIN (402)..(413): Zinc finger C-x8-C-x5-C-x3-H type (and similar) domain identified by eMATRIX, accession number PF00642, p-value=2.575e-11, raw score of 11.59
MPSVSKAAAAALSGSPPQTEKPTHYRYLKEFRTEQCPLFSQHKCAQHRPFTCFHWHFPQTRRRRRPLGRRDGTFNYSPDVYCSKYNEATGVCPDGDECPYLHRTTGDTERKYHVRYYKTGTCIHETDARGHCVKNRLHCAFAHGPLDLRPPVCDVRELQAQEALQNGQLGGGEGVPDLQPGVLASQAMIEKILSEDPRWQALLPVALLRHRVAHFSDANFVLGSYKTEQCPKPPRLCRQGYACPHYHNSRDRRRNPRRFQYRSTPCPSVKHGDEWGEPSRCDGGDGCQYCHSRTEQQFHPEGPVRESGVRGVFCVQSRRPWLQTPVSGTQLKWSWHHVGHSRTINPEGDKPSRLGPAPENIKRGNDFACDGRADAAGMAPHVCVFPIYKSTKCNDMRQTGYCPRGPFCAFAHVEKSLGMVNEWGCHDLHLTSPSSTGSGQPGNAKRRDSPAEGGPRGSEQDSKQGVRAHGVYVFEQNHLAVFAAVHPPAPSVSSSVASSLASSAGSGSSSPTALPAPPARALPLGPASSTVEAVLALEPTPSSPTSSAVQGVAGELGMGSGGQGCWSHVVGALAAVPAWTHSGDLEWDPSTIRTRVNVGGGPAARPAMTLAREPQLLVVGGCPTRNCSGPAASPQQLLDDAGQGGRGERDSSQRPLRPQTTHRQDTRPVPS

SEQ ID NO: 39923 - protein, 203 aa, Homo sapiens
  DOMAIN (36)..(87): Clathrin adaptor complexes small chain proteins domain identified by eMATRIX, accession number BL00989B, p-value=1.225e- 13, raw score of 26.51
IHSLCVSPCLSPCHCLSLSPASLLVSFFCCLFLMTLFPSLCVCGSLPVHLLPSLHFLSQVLNEYFHNVCELDLVFNFYKVECFPLKSPVVPESKEIGSQVDGQSRMEQRSPAHTNRENDIAREGGSEETHSKPGKGNLEFRFRCSHLQLGECPIPPWQKERTIAQGPEPEARAAVPAGRHDTRHAVNAGCALIGSLRRPWGGA

SEQ ID NO: 39924 - protein, 72 aa, Homo sapiens
NFFIRSTNLSSQIVCGNSTCCSSFLSVVNHQRHNLGRGRFCFTDRCDHYCSVTCLYYSRAICKSGQLSRRYF

SEQ ID NO: 39925 - protein, 130 aa, Homo sapiens
  DOMAIN (5)..(19): Clathrin adaptor complexes small chain proteins domain identified by eMATRIX, accession number BL00989A, p-value=4.000e- 12, raw score of 11.66
  DOMAIN (1)..(130): Clathrin adaptor complex small chain domain identified by PFam, accession name Clat_adaptor_s, E-value=2.7e-42, PFam score of 153.9
MIRFILIQNRAGKTRLAKWYMQFDDDEKQKLIEEVHAVVTVRDAKHTNFVEFRNFKIIYRRYAGLYFCICGDVNDNKPGLPGGHSQLRGGLKRNISTMSVNWTWCSTSNKVYTVVDEMFLAGEIRETRAS

SEQ ID NO: 39926 - protein, 91 aa, Homo sapiens
  DOMAIN (2)..(37): Prion protein domain identified by eMATRIX, accession number BL00291A, p-value=7.398e-10, raw score of 4.49
GGGQGRPGAGGQGRSDGGGQGSPGGGSQGSPGGSGGVGQGSRGGQGKPGGGGGQGSPDGGGRPLAGGASGRRGSRGQAQCPISVSATHLAF

SEQ ID NO: 39927 - protein, 109 aa, Homo sapiens
NAHSLPIEWAFCKIENLCGKCVYMCMCSQNKNNQLKFSFIPGRWCASLKMYSKGQRSLMYPCRYHQRMLLVSRYLDTVLLDWDPPGPLPEGRQHSPGRRQRDLASALLC

SEQ ID NO: 39928 - protein, 170 aa, Homo sapiens
MLMPGLSACVRDCVAFLQAVVLGDPSPAAQCQDTWTLAASADGTCKAVGTEDGSVYFISVYDKESPQVVHKAFLSESSVQHVVYDQQGIFLLVGTAEGKVFIINANSSSSFQIIGFTDGGQRHFTDIHSVSFRNRHSGSDGAFLASRSREKQVGDVHTAYITATSFHNLC

SEQ ID NO: 39929 - protein, 274 aa, Homo sapiens
  DOMAIN (92)..(115): TAILLESS COMPLEX POLYPEPTIDE 1 (CHAPERONE) SIGNATURE domain identified by eMATRIX, accession number PR00304D, p-value=4.240e- 21, raw score of 11.04
  DOMAIN (1)..(255): TCP-1/cpn60 chaperonin family domain identified by PFam, accession name cpn60_TCP1, E-value=8.9e-87, PFam score of 301.7
MKLGVQVVITDHEKLDQIRQRESDITKERIQKILATGANVILTTGGIDDMCLKYFVEAGAMAVRRVLKRIAKASGATILSTLANSKAHTSASIILRGANDIMCGEMERSLHDALCVVKRVLESKSMVPGGGAVEAALSIYLENYATSMGSQKELAIAEFARSLLVIPNTLAVNAAQDSTDLVTKFRAFHNEAQVNPEHKNLKWIGLDLSNGERGDNKQAGMFEPTIVKVKSLKFATEAAITILRIDDLTKLHPESKDDKHGGYEDAVHSGALND

SEQ ID NO: 39930 - protein, 292 aa, Homo sapiens
  DOMAIN (82)..(102): TAILLESS COMPLEX POLYPEPTIDE 1 (CHAPERONE) SIGNATURE domain identified by eMATRIX, accession number PR00304C, p-value=7.429e- 23, raw score of 8.69
  DOMAIN (28)..(291): TCP-1/cpn60 chaperonin family domain identified by PFam, accession name cpn60_TCP1, E-value=5.9e-118, PFam score of 405.3
MEGPLSVFGDRSTGETIRSQNVMAAASIANIVKSSLGPVGLDKMLVDDIGDVTITNDGATILKLLEVEHPAAKVLCELADLQDKEVGDGTTSVVIIAAELLKNADELVKQKIHPTSVISGYRLACKEAVRYINENLIVNTDELGRDCLINAAKTSMSSKIIGINGDFFANMVVDAVLAIKYTDIRGQPRYPVNSVNILKAHGRSQMESMLISGYALNCVVGSQGMPKRIVNAKIACLDFSLQKTKMKLGVQVVITDPEKLDQIRQRESDITKERIQKILATGANVILTTGGN

SEQ ID NO: 39931 - protein, 67 aa, Homo sapiens
RRVLHTHTGCFTVFCKISRSSSESDESLNFASKLWQERRGFQHGDPSRLPLDSREPRGPLRSPAATK

SEQ ID NO: 39932 - protein, 100 aa, Homo sapiens
  misc_feature (1)...(100): Xaa = X or * as defined in Table 2
SAGGYPDGQGVHPGPPELFAALGRLGHTLREHGHHLLRYHRPGHMGRRPLPCRMGHREPGSLHXQDCPRAWQWCWPHRPGHLQDVPPPGIHLQRLSQPGP

SEQ ID NO: 39933 - protein, 474 aa, Homo sapiens
  DOMAIN (257)..(276): RHO PROTEIN GDP DISSOCIATION INHIBITOR SIGNATURE domain identified by eMATRIX, accession number PR00492B, p-value=8.141e- 09, raw score of 9.77
SWNTPYNHWATKQLSSHYSRGGAKYEGEAVKQSLVESYTHPNSNETERSANIDTVMNWFTKEDFDFVTLCYREPDNVGHRFRPEAENRKLMIQQIDRTIRPWDDHREEETQCQQDPLSNYIKFMDLVKFDIVGYGGFGMPLPKLGQEEALYQALKNAYPHLHIYKKEGFPEHFHLAKHDRVLPIVMYANFGYSINGISLLYFYTHLCDKYFNVHFFHEPLSLWRAQTTPSLSHRYISLVRHMDATNLDASEAQLPGSPYPDSAPGPANLDSTQDLPQRRLSWPYPRPRPPNAHPGPALQPAPRTLLLTLPPGPAPSLPPRTALGPPPLQSRPGFRPVSRQRCGPAHFMAPEENAGTELLLQSFERRFLAARTLRSFPWQGGGGRAERPAGLAGVQGQTGWVSVLKPPALLPREFLGSPRSGPRDPVPVPGAWPKSLAPLLPRELAAEDEGVSTALGGQTRARCGVQFTIIFTTF

SEQ ID NO: 39934 - protein, 379 aa, Homo sapiens
MAPEENAGTKLLLQSFERRFLAARTLRSFPWQVGGGASGEACGACGSPGADGMGLPAETPGAPATEGSHSALPTHSIACFNVPVNAPLRFLSLPSTRSLEAKLRDSSDSELLRDILQKHEAVHTEPLDELYEVLTETLMAKESTQGHRSYLLPRYPSCTDKVKTPRKARSHSPSTAIISHGTTGLVTWDAARYLAEWAIKNLAAFTNRTVLELGSGAGLTGLSICKMCHPRTYIFSDCHSRVLEQLRGNVLLNGLSLEADITANLDSPRVTVAQLDWDVATVHQLSAFQPDVVITADVLYCPEAIVSLVGVLRRLAACWEHQWAPEVYMAFTVRNPETCQLFTTELCWTGIRWEAEAHHDQKLFPYREHLEMAKLNLTL

SEQ ID NO: 39935 - protein, 94 aa, Homo sapiens
  DOMAIN (53)..(74): RIBOSOMAL PROTEIN L7A FAMILY SIGNATURE domain identified by eMATRIX, accession number PR00882G, p-value=8.500e-25, raw score of 10.27
RHEDKKAQLVVIAHDVDPTCPSSRKTCTTVAFTQVNSEDKGALAKLVEAIRTNYNDRYDEIRRHWGGNVLGPKSVARIAKLEKAKAKEPATKLG

SEQ ID NO: 39936 - protein, 236 aa, Homo sapiens
  DOMAIN (122)..(162): Ribosomal protein L7Ae proteins domain identified by eMATRIX, accession number BL01082, p-value=4.696e-19, raw score of 20.37
  DOMAIN (90)..(188): Ribosomal protein L7Ae domain identified by PFam, accession name Ribosomal_L7Ae, E-value=2.5e-27, PFam score of 104.2
MPKGKEAKGKKLALAPAFVKKQEAKKVVNPLFEKRPKNFGIGQDIQPKRDLTCFVKWPRYIRLQWQRSILYKQLKPETKQEKKWRLLAQAESVGKGDLPMKRLPVFRAGVNTVTTFVDNKKAPLVVTTHDMDPIELTVFLPVLCHKMGATCCIIKGKARLGCLVHRKTYTTVDFTQVNSEDKGALAKLVEAIGTNYNARYDETHCHWDGNVLGPKSVAHIAKLEKAKAKELATKLG

SEQ ID NO: 39937 - protein, 274 aa, Homo sapiens
  DOMAIN (160)..(200): Ribosomal protein L7Ae proteins domain identified by eMATRIX, accession number BL01082, p-value=2.969e-31, raw score of 20.37
  DOMAIN (133)..(238): Ribosomal protein L7Ae domain identified by PFam, accession name Ribosomal_L7Ae, E-value=2.8e-23, PFam score of 90.8
GTRPKMPKGKKAKGKKVAPAPAVVKKQEAKKVVNPLFEKRPKNFGIGQDIQPKRDLTRFVKWPRYIRLQRQRAILYKRLKEPPAINQFTQALDRQTATQLLKLAHKYRPETKQEKKQRLLARAEKKAAGKGDVPTKRPPVLFRAGVKQPSPPLVENKESFSLVVISHDVDPIELVVFLPALCRKMGVPYCIIKGKARLGRLSHKKTCTTVAFTQVNSEDKGALAKLVEAIRTNYNDRYDEIRRHWGGNVLGPKSVARIAKLEKAKAKELATKLG

SEQ ID NO: 39938 - protein, 38 aa, Homo sapiens
AGMVWYSILKDTKITCEEKMVSMARNTYYLTLSKVSPF

SEQ ID NO: 39939 - protein, 236 aa, Homo sapiens
MKNFCSMKDNVKIMRIQAKDWEKVFAKDTSNKGLLSKIYKELLKLNNKKIAQIKKWAEDFNIHVTKEDRHMANKHMKRCCKSSADNDSEPQEFLFIAETTELGSKKELKSMPFITYLSGLLTAQMLSDDQLISGVEIRCEEKGRCPSTCHLCRRPGKEQLSPTPVLLEINRVVPLYTLIQDNGTKELLPVPTITTTMTTTATTMLHHYYHYQHHPRYSPITVIILHWLPTVCQILC

SEQ ID NO: 39940 - protein, 281 aa, Homo sapiens
MKISLSGRLDTSALETLSYQNGSNWLAGELAVCGEGGKRAFESRTHSGRVIELVLNQLLVQGSLCCIHLDFEDKTVPPLAEKSLLSDTQEDRGRWVLESSTREQQVGYNGGIVQMLGLPLASQLFPAAMKLIHPTNSLEASPYSSWSPTWMMRSSPASIAPNLLLSLAFHIPVTLSAAALSLVPQPAHRKKNRKRMLETWTNLGEAEAAAWVLGGFYHKPLTRYQGGRSRGLPGEFLSFADDLLSGLGTSCVAAGRSHGEVPEVSIYSVIFKCLEPDGLYK

SEQ ID NO: 39941 - protein, 196 aa, Homo sapiens
MKNDSLKTVTLEWSIDRRDVERQRGKAAQKTTELGSKKELKSMPFITYLSGLLTAQMLSDDQLISGVEIRCEEKGRCPSTCHLCRRPGKEQLSPTPVLLEINRVVPLYTLIQDNGTKEEARETVGRKGSLKPDKEKWHCSRSYEKSQALGTAEKPLNKPPKTNGQLYKDARTRDRKASWVTLEQDLNLSKPPFPHL

SEQ ID NO: 39942 - protein, 343 aa, Homo sapiens
  DOMAIN (265)..(284): TYPE III EGF-LIKE SIGNATURE domain identified by eMATRIX, accession number PR00011B, p-value=6.548e-09, raw score of 13.08
MRVPREEQGWRRQPESSDPKEKSSKPASSGALLLAPPPQDAAKENQSTLFSKPEPGAIPEARMWSQERRGIQRAWETLGENNQLVSTSQRDSQSGFLSSLRWVRTSSFSSEKFGFLKPSSLNSSKSFSVQLCSVAGEELRSFGGGENSLTQDPMLVDSQIPKRIGADGCLNLVPESSRFTLYAVDTRGRHSELSTVTLRTACPLVDDNKAEEIADKIYNLYNGYTSGKEQQMAYNTLMERNSAYTLVNTVFGATEEFLCSGSKVCDSRSGQCPPEPGSYDHRLLQTAAQRRRTDTQLSPDIRKAHLILRRLERVSSHCSSILRSAYIQSRVETVPYLFCRSEE

SEQ ID NO: 39943 - protein, 343 aa, Homo sapiens
  DOMAIN (166)..(220): Membrane attack complex components / perforin proteins domain identified by eMATRIX, accession number BL00279C, p-value=6.531e- 09, raw score of 31.64
MADQKEARHSASQWKCFVGFLSFRGHMQVAWEADRCKGPGRPLLAEALQDLWPSPRRSQRDPVPERPCRRPQQSPLPRFGSLSAPLHRENNFIKDFPQLADGLLVIPLPVEEQCRGVLSEPLPDLQLLTGDIRYDEAMGYPMVQQWRVRSNLYRVKLSTITLAAGFTNVLKILTKESSREELLSFIQHYGSHYIAEALYGSELTCIIHFPSKKVQQQLWLQYQKGFLGEPKKILGSSLPRRTQFLWKNNHLITKQTVSILSCGEAFILRKGQQISFSSDSQLLSELEFLRPGAGDQSLPTHLVKVIPFPPQFSLLCEMGTFILFCNINCAWGRGRGERYSQSC

SEQ ID NO: 39944 - protein, 1359 aa, Homo sapiens
  DOMAIN (859)..(913): Membrane attack complex components / perforin proteins domain identified by eMATRIX, accession number BL00279C, p-value=6.156e- 09, raw score of 31.64
FASASAVSAAASSSSFATAATAAAARSTAAPPAMAAAGARLSPGPGSGLRGRPRLCFHPGPPPLLPLLLLFLLLLPPPPLLAGATAAASREPDSPCRLKTVTVSTLPALRESDIGWSGARAGAGAGTGAGAAAAAASPGSPGSAGTAAESRLLLFVRNELPGRIAVQDDLDNTELPFFTLEMSGTAADISLVHWRQQWLENGTLYFHVSMSSSGQLAQATAPTLQEPSEIVEEQMHILHISVMGGLIALLLLLLVFTVALYAQRRWQKRRRIPQKSASTEATHEIHYIPSVLLGPQARESFRSSRLQTHNSVIGVPIRETPILDDYDCEEDEEPPRRANHVSREDEFGSQVTHTLDSLGHPGEEKVDFEKKGGISFGRAKGTSGSEADDETQLTFYTEQYRSRRRSKGLLKSPVNKTALTLIAVSSCILAMVCGSQMSCPLTVKVTLHVPEHFIADGSSFVVSEGSYLDISDWLNPAKLSLYYQINATSPWVRDLCGQRTTDACEQLCDPETGECSCHEGYAPDPVHRHLCVRSDWGQSEGPWPYTTLERGYDLVTGEQAPEKILRSTFSLGQGLWLPVSKSFVVPPVELSINPLASCKTDVLVTEDPADVREEAMLSTYFETINDLLSSFGPVRDCSRNNGGCTRNFKCVSDRQVDSSGCVCPEELKPMKDGSGCYDHSKGIDCSDGFNGGCEQLCLQQTLPLPYDATSSTIFMFCGCVEEYKLAPDGKSCLMLSDVCEGPKCLKPDSKFNDTLFGEMLHGYNNRTQLVNHGQVFQMTFRENNFIKDFPQLADGLLVIPLPVEEQCRGVLSEPLPDLQLLTGDIRYDEAMGYPMVQQWRVRSNLYRVKLSTITLAAGFTNVLKILTKESSREELLSFIQHYGSHYIAEALYGSELTCIIHFPSKKGSSRQLWLQYQKETTELGSKKELKSMPFITLPLQVWLTAQMLSDDQLISGVEIRCEEKGRCPSTCHLCRRPGKEQLSPTPVLLEINRVVPLYTLIQDNGTKEAFKSALMSSYWCSGKGDVIDDWCRCDLSAFDANGLPNCSPLLQPVLRLSPTVEPSSTVVSLEWVDVSASYLGTKVFRLLFLQHKKVDEYTDTDLYTGEFLSFADDLLSGLGTSCVAAGRSHGEVPEVSIYSVIFKCLEPDGLYKFTLYAVDTRGRHSELSTVTLRTAFPLVDDNKAEEIADKIYNLYNGYTSGKEQQMAYNTLMEVSASMLFRVQHHYNSHYEKFGDFVWRSEDELGPRKAHLILRRLERVSSHCSSLLRSAYIQSRVETVPYLFCRSEEVRPAGMVWYSILKDTKITCEEKMVSMARNTYREFQGPVKGGYCPPVSTETLHGRGSIILLDPWGLGGLGDS

SEQ ID NO: 39945 - protein, 132 aa, Homo sapiens
  misc_feature (1)...(132): Xaa = X or * as defined in Table 2
SDARVDALNKIKIWERIKKHLEGHSTNLSLDIAKLKEQIFEASQAHLTLMPGTGVLEGAADRLSASNPLKWIKTLGSSVISMMIVLLICVVCLCVVCRCRSXLLREVAHRDKAAFAFIALQIKEGEHVGNST

SEQ ID NO: 39946 - protein, 99 aa, Homo sapiens
WKKTLMPGTGVLEGAANGLAAINPLKWIKTLGDSVISMMIVLLICVCLCIVCRCRSRLLREVAHCDKATFAFIISEKMWYFGFCFCNNSLRVIASSCIH

SEQ ID NO: 39947 - protein, 134 aa, Homo sapiens
  DOMAIN (75)..(119): Ribosomal protein S2 proteins domain identified by eMATRIX, accession number BL00962D, p-value=6.815e-13, raw score of 22.51
  DOMAIN (1)..(134): Ribosomal protein S2 domain identified by PFam, accession name Ribosomal_S2, E-value=2.8e-37, PFam score of 135.6
GIYILHQKKTWEKLLLAACAIVAIENPADVSVISSRKTGQKATPLFAAVTGATLVAGCFTPRTFSNQISAAFREPQLLVVTDPRADHQPLTEASYINLPTIALCTDSPLHYVGLAIQCNNKGAHSGGLTCNLSY

SEQ ID NO: 39948 - protein, 145 aa, Homo sapiens
  DOMAIN (9)..(53): Ribosomal protein S2 proteins domain identified by eMATRIX, accession number BL00962D, p-value=5.500e-35, raw score of 22.51
  DOMAIN (1)..(76): Ribosomal protein S2 domain identified by PFam, accession name Ribosomal_S2, E-value=2.4e-43, PFam score of 157.0
QIQAAFREPRLLVVTDPRADHQPLTEASYVNLPTIALCNTDSPLRYVDIAIPCNNKGAHSVGLMWWMLAREVLRMRGTISREHPWEVMPDLYFYRDPEEIEKEEQAAAEKAVTKEEFQGEWTAPAPEFTATQPEVADWSEGVQVP

SEQ ID NO: 39949 - protein, 67 aa, Homo sapiens
SFRPLSVLGDCVVRGPTKPSGKCSPASRSLFVRRHILLLHPQGLHNLDQNKATPPPQPLGHQTCACH

SEQ ID NO: 39950 - protein, 129 aa, Homo sapiens
MNSRQAWRLLLSQGRGDRWVSRPRGHFSPALRREFFTTTTKEGYDRRPVDITPLEQRKLTFDTHALVQDLETHGFDKTQAETIVSALTALSNVSLDTIYKEMVTQAQQEITVQQLMAHLDAIRKDMVHP

SEQ ID NO: 39951 - protein, 69 aa, Homo sapiens
SPSTTAVCCPPRPSIDFHSSGSSRVSAALLIQQRFPLPLWIGLKARHCSCGLRQRQVSWQETEEDGKAG

SEQ ID NO: 39952 - protein, 299 aa, Homo sapiens
  DOMAIN (63)..(288): Galactosyltransferase domain identified by PFam, accession name Galactosyl_T, E-value=1.6e-08, PFam score of 31.5
PEAGTRSWREPDPEDLRRFLLSAACRSFPQWLPGGGGGQVSSCSDTDVPYLLLAVKSEPGRFAERQAVRETRRKPTSGIRLLFLLGSPVGEAGPDLNSLVAWESRRYSDLLLWDFLDVPFNQTLKEPVLWLPGWAGPCPTGSFVLRAQDDAFVHTPALLAHLRALPPASARSLYLGEVFTQAMPLRKPGGPFYVPESFFEGGYPAYASGGGYVIAGRLAPWLLRAAARVAPFPFEDVYTGLCIRALGLVPQAHPGFLTAWPADRTADHCAFRNLLLVRPLGPQASIRLWKQLQDPRLQC

SEQ ID NO: 39953 - protein, 536 aa, Homo sapiens
  DOMAIN (146)..(167): PROTEIN INTERGENIC REGION ABC1 PRECURSOR MITOCHONDRION T domain identified by eMATRIX, accession number PD01823C, p-value= 5.909e-14, raw score of 16.13
MIFVVIILMVVLSPEGGSGLDSSPFLSEANAERIVQTLCTVRGAALKPYPPTGPNFRYSHGVPPHLFAYFPPGSTVSQDNSFISPQLQHIFERVRQSADFMPRWQMLRVLEEELGRDWQAKVASLEEVPFAAASIGQVHQGLLRDGTEVAVKIQYPGIAQSIQSDVQNLLAVLKMSAALPAGLFAEQSLQALQQELAWECDYRREAACAQNFRQLLANDPFFRVPAVVKELCTTRVLGMELAGGVPLDQCQGLSQDLRNQICFQLLTLCLRELFEFRFMQTDPNWANFLYDASSHQVTLLDFGASREFGTEFTDHYIEVVKAAADGDRDCVLQKSRDLKFLTGFETKAFSDAHVEAVMILGEPFATQGPYDFGSGETARRIQDLIPVLLRHRLVSPPEGDLWPWHRKLAGAFLACAHLRDHIACRDHKPGHLPPLLGQSPARRSHCRQPPHQRGTPGWIPHDSLHGGFSPQSRPYPAVVPLIPSPSALGQRSPLGLPSLAWLSSLAQELRIPGAGELPTSCPRSCTSPLESEVSEN

SEQ ID NO: 39954 - protein, 64 aa, Homo sapiens
  misc_feature (1)...(64): Xaa = X or * as defined in Table 2
GVRRDGSSASVTVGQPCRDTSLAFETVAGPYLAXKTXTSGKPGSDXRASKVAGGVQNGTRTTAT

SEQ ID NO: 39955 - protein, 209 aa, Homo sapiens
WLNRLNLKAKWNWIALSTRWLAIRAEIDQVKAGVWPLEDNPLVNAPHIQSELVAEWAHPYSREIAVFPAAGLTLFTGWSWVTIAEKLGGWILNILTFASNRTRRDDTWVDEDEYEDDEEYEDENHGKQHESRRARILRGALARRKRLAEKFINPMGRQTDAALFSGKRMDDDEEITYTARGVAADPDDVLFSGNRATQPEYDEYDPLLN

SEQ ID NO: 39956 - protein, 273 aa, Homo sapiens
  DOMAIN (72)..(105): Bacterial extracellular solute-binding proteins family 3 sig. domain identified by eMATRIX, accession number BL01039B, p-value= 1.000e-24, raw score of 20.00
  DOMAIN (1)..(235): Bacterial extracellular solute-binding prot domain identified by PFam, accession name SBP_bac_3, E-value=5.9e-55, PFam score of 196.0
MKKVLIAALIAGFSLSATAAETIRFATEASYPPFESIDANNQIVGFDVDLAQALCKEIDATCTFSNQAFDSLIPSLKFRRVEAVMAGMDITPEREKQVLFTTPYYDNFALFVGQQGKYTSVDQLEGKKVGVQNGPTHQKFIMDKHPEITYVSDESYQNAKLDLQNGCAARAAPGSRRYGGWTIQASTARPSDVLLTADSVSFAVRSRGAAATAYHRCCLSGVMVNAATACEHSTASQGRASRTVTDSADPHPRSVRRRASFRRSGRGFCGTVR

SEQ ID NO: 39957 - protein, 49 aa, Homo sapiens
TLNGHLDGILSVILLGTGSAGVQDGAMEEDTVEHMKNSSQVGCLKSSCQ

SEQ ID NO: 39958 - protein, 35 aa, Homo sapiens; identical to SEQ ID NO: 38298

SEQ ID NO: 39959 - protein, 56 aa, Homo sapiens; identical to SEQ ID NO: 38299
  DOMAIN (1)..(43): Nucleoside diphosphate kinases domain identified by PFam, accession name NDK, E-value=2.1e-14, PFam score of 57.9

SEQ ID NO: 39960 - protein, 272 aa, Homo sapiens
  DOMAIN (141)..(196): Nucleoside diphosphate kinases proteins domain identified by eMATRIX, accession number BL00469, p-value=7.240e-14, raw score of 22.22
  DOMAIN (67)..(213): Nucleoside diphosphate kinases domain identified by PFam, accession name NDK, E-value=7.6e-47, PFam score of 169.0
MGGLFWRSALRGLRCGPRAPGPSLLVRHGSGTIMGVFVAVGTIPVPSRVPCIEADTLKPGGPSWTRERTLVAVKPDGVQRRLVGDVIQRFERRGFTLVGMKMLQAPESVLAEHYQDLRRKPFPPCPSSRYMSSGPVVAMVWEGYNVVRASRAMIGHTDSAEAAPGTIKGVDFSVHISRNVIHASDSVEGAQREIQLWFQSSELVSWADGGQHSSIHPGLRLRAALTTPSPTQDPTYPPLARTPSPTSKPALSPNPLTSPVSPLAPPQAQREF

SEQ ID NO: 39961 - protein, 502 aa, Homo sapiens
  DOMAIN (263)..(279): GAMMA G-PROTEIN (TRANSDUCIN) SIGNATURE domain identified by eMATRIX, accession number PR00321A, p-value=7.097e-09, raw score of 11.91
  DOMAIN (261)..(288): GGL domain identified by PFam, accession name G-gamma, E- value=3.1e-05, PFam score of 23.2
NCETTTKGSAILRNVDPSTLLPLRRAGSSPGLMPVEEEMEIDEEKQMKGFLDDSERMAFLVSLHLGAAERWFILQMEVGEPLSHENKSFLRRSQGIYDSLSEIDILSAVLCHPKQGQKSVRQYATDFLLLARHLSWSDAILRTRFLEGLSEAVTTKMGRIFLKVAGSLKELIDRSLYTECQLAEEKDSPGNSSQVLPTACKRNNEEAMGNELSSQQQTEEHQHVSKRCYYLKEHGDPQEGLHDHLGQSTGHHQKAHTNNVAATKKVVQQLQLEAGLNSVKVSQAATEPQTIISPPNALQEPSGIEWEQFPKAQIPSEPQENLCPFVSTMNSIKGLHEDYQGNAGKVLSTVPGRRYALQNLGTAIVQGEERKQSSLCPGEEGKRHELRSGSHSLVMKHAMVLFNVGFETKDQIHLPTRLGMAEVETLCIYAKQLPHKLIAKLRLLKGTRPLSLNNEHILTHPGLEGWLHTEFFRILSINNKYHLSAYLVQSIVLHVMGFHRKT

SEQ ID NO: 39962 - protein, 144 aa, Homo sapiens
  misc_feature (1)...(144): Xaa = X or * as defined in Table 2
VFERSTPPTLETVRSKQEWETRLNGVRIMKKNVRDQFNSHIQLVRNGAKLSSLPQIPTPTLPPPPSETSCFRCFNPVPLWLLGCPSPLGRQTGEDPGEAADPVPTVQXGPDDQHSSADQDSTYHHGRPDHGGTYPVGCCTTGRT

SEQ ID NO: 39963 - protein, 100 aa, Homo sapiens
  misc_feature (1)...(100): Xaa = X or * as defined in Table 2
MISSRRKKLYAKLSSLPQIPTPTLPPPPSETDFMLQVFQPSPSLAPRMPFSIGQAWAVLRLLLKTPRPQPVGQTGRKDPGXKAGXTRFPQXQXRAQDGPT

SEQ ID NO: 39964 - protein, 61 aa, Homo sapiens
ASGESAPSAIKAASAKERRGNEESPGDIKGYSGCDNKAGRNKEEDREREEGVFAEGAGSES

SEQ ID NO: 39965 - protein, 313 aa, Homo sapiens
MAHYSLDLLCSSDPSTSASVDETTVGFSADLQRAQGKCSFGPCSTTGPQVLSVVVVVTGASLDQSCIVELHSGHSKGQTVAGASSTYRDLRKGVYVPYTQGKWEGELGTDLVSIPHGPNVTVRANIAAITESDKFFINGSNWEGILGLAYAEIAREPARFQTEELSPGSPIFTSSLSPRPHSSASRSLARERASGPPPRSLPSPPPNPSLDEVLNYPPPRKAPGEAPGEALGEAQLPQRHPTPTRSPSFQGRRGVALQRATNTSGKGPQFPPTLPMAAPMLQPDEAGRLGNCCHTQTCSEHLPNLQSSWPHQM

SEQ ID NO: 39966 - protein, 63 aa, Homo sapiens
  misc_feature (1)...(63): Xaa = X or * as defined in Table 2
NDGPDWGGRRRETDVNRKRGFKISKTLYLYSDIYSCHVHFYYIGNVCIESLYSNVRKXNYVYY

SEQ ID NO: 39967 - protein, 239 aa, Homo sapiens
  DOMAIN (189)..(199): Eukaryotic and viral aspartyl proteases proteins domain identified by eMATRIX, accession number BL00141C, p-value=2.286e- 10, raw score of 9.74
  DOMAIN (138)..(223): Eukaryotic aspartyl protease domain identified by PFam, accession name asp, E-value=0.00029, PFam score of 17.6
MESGEEEHFMKKSVNCEILEFAREIGIDPIKEPELMWLAREGIVAPLPGEWKPCTTGPQVLSVVVVVTGASLDQSCIVELHSGHSKGQTVAGASSTYRDLRKGVYVPYTQGKWEGELGTDLVSIPHGPNVTVRANIAAITESDKFFINGSNWEGILGLAYAEIARLCGAGFPLNQSEVLASVGGSMIIGGIDHSLYTGSLWYTPIRREWYYEVIIVRVEINGQDLKMDCKEILMYVKLE

SEQ ID NO: 39968 - protein, 90 aa, Homo sapiens
GLTPCLFLPKPDDSLEPFFDSLVKQTHVPNLFSLQLCGAGFPLNQSEVLASVGGSMVSRSSERGGPGIEGEMGAILFPFPESYTTVFGSR

SEQ ID NO: 39969 - protein, 153 aa, Homo sapiens
  misc_feature (1)...(153): Xaa = X or * as defined in Table 2
SYPVSEERSQAEQPSSNPYSHFTSTPIRDRLHASGVSTQSLSGSSDALLHWAGHNAHGYAQCRSPLLVFPNPEPCPFPAQPAFLTPSWLPWQKXPWLGFPCQPPRSTHAPCRLHPTSPGLGGVKASAETPRPQPVDETGEDPGEAADPVPTVQ

SEQ ID NO: 39970 - protein, 969 aa, Homo sapiens
  DOMAIN (81)..(102): PEPSIN (A1) ASPARTIC PROTEASE FAMILY SIGNATURE domain identified by eMATRIX, accession number PR00792A, p-value=1.250e- 13, raw score of 11.54
  DOMAIN (75)..(922): Eukaryotic aspartyl protease domain identified by PFam, accession name asp, E-value=1.6e-23, PFam score of 83.8
MAQALPWLLLWMGAGVLPAHGTQHGIRLPLRSGLGGAPLGLRLPRETDEEPEEPGRRGSFVEMVDNLRGKSGQGYYVEMTVGSPPQTLNILVDTGSSNFAVGAAPHPFLHRYYQRQLSSTYRDLRKGVYVPYTQGKWEGELGTDLVSIPHGPNVTVRANIAAITESDKFFINGSNWEGILGLAYAEIARPDDSLEPFFDSLVKQTHVPNLFSLQLCGAGFPLNQSEVLASVGGSMIIGGIDHSLYTGSLWYTPIRRESYYEVIIVRVEINGQDLKMDCKEYNYDKSIVDSGTTNLRLPKKVFEAAVKSIKAASSTEKFPDGFWLGEQLVCWQAGTTPWNIFPVISLYLMGEGTNQSFRITILPQQYLRPVEDVATSQDDCYKFAISQSSTGTVMGAVIMEGFYVVFDRARKRIGLLVSACHVHDEFRTAAVEGPFVTLDMEDCGYNIPQTDESTLMTIAYVMAAICALFMLPLCLMVCQWRCLRCLRQQHGMTLPDDISLLKEVWEMELDRLKNQDGEINRNIMEETERAWKAEVRRGADILKVLVSGFQMVSTFGIVIGEPILSLESRKELLVLKLEEAEKEAELHLTYLKSTPPTLETVRSQQEWETRLNGVRIMKKNVRDQFNSHIQLVRNGAKLSSLPQIPTPTLPPPPSETDFMLQVFQPSPSLAPRMPFSIGQVTMPMVMPSLGGVKASAETPRPQPVDKLEKILEKLLTRFPQCNKAQMTNILQQIKTARTTMAGLTMEELIQLVAARLAEHERVAASTQPLGRIRALFPAPLAQISTPMFLPSAQVSYPGRSSHVRLFFFEHCDMEKLELNILVDTGSSNFAVGAAPHPFLHRYYQRQLSSTYRDLRKGVYVPYTQGKWEGELGTDLVSIPHGPNVTVRANIAAITESDKFFINGSNWEGILGLAYAEIARCSQCPSEGPSQWSPGSETGKGSRLETEFKLGTVVCTYSPGYLGGPGRRIA

SEQ ID NO: 39971 - protein, 300 aa, Homo sapiens
  DOMAIN (12)..(33): HIGH MOBILITY GROUP (HMG1/HMG2) PROTEIN SIGNATURE domain identified by eMATRIX, accession number PR00886B, p-value=2.189e- 18, raw score of 9.88
  DOMAIN (44)..(108): HMG (high mobility group) box domain identified by PFam, accession name HMG_box, E-value=4.2e-10, PFam score of 47.0
MSAKEKGKFENMAKADKVHYVREMKTYIPPKQETKKKFKDPNAPKRPPFSSEYCPKIKGEHPGQSTGDVAKKLGEMRTNSAADDKWPYEKKAAKLKEKYRKDTAVYRAKGKPDAAKKGDVKAEKSKKRKNEKDEEDEEEDEEEDEEDDDNEYADNECTGFSGFVYKTFNSPVHNSLFLNVEIHALGFDELLESIFCILLVVEVFSLQKGVAMLEEVVVNGERSGRSLPWLPAAPSLPVPVPLGLRHPPSQSDNHSLQLTFLTALRLLRPRLGAVLEETVEDGRTKTNLPDENSVPFSPET

SEQ ID NO: 39972 - protein, 195 aa, Homo sapiens
  DOMAIN (4)..(53): HMG1/2 proteins domain identified by eMATRIX, accession number BL00353A, p-value=1.000e-40, raw score of 9.60
  DOMAIN (8)..(173): HMG (high mobility group) box domain identified by PFam, accession name HMG_box, E-value=8.6e-33, PFam score of 122.4
LNMGKGDPKKPRGKMSSYAFFVQTCREEHKKKHPDASVNFSEFSKKCSERWKTMSAKEKGKFEDMAKADKARYEREMKTYIPPKGEDTKKKFKDPNAPKRPPSAFFLFCSEYRAPKIKGEHPGLSIGDVAEETGEEMWNNTAADDKQPYEKKAAKLKEKYEKDIAAYRAKGKPDAAKKGVVKAEKRSTRPRIPDL

SEQ ID NO: 39973 - protein, 109 aa, Homo sapiens
  DOMAIN (58)..(69): RNase H domain identified by eMATRIX, accession number PF00075D, p-value=8.364e-11, raw score of 10.71
IDIHVRVAEFYPESGVTTQYTWTQLPQRFKNSPTIFGEALARDLQKFPTRDLGCVLLQYVDDLLLGHPTAVGCAKGTDALLRHLEDCGYKVSKKKSSDLPIAGHFNSES

SEQ ID NO: 39974 - protein, 45 aa, Homo sapiens
MESQCSLMKQAQILYLTVVLGPWLGKRQEESVAWRLTRNNNSKSS

SEQ ID NO: 39975 - protein, 390 aa, Homo sapiens
  DOMAIN (274)..(285): RNase H domain identified by eMATRIX, accession number PF00075B, p-value=6.276e-12, raw score of 12.56
  DOMAIN (27)..(183): Gag P30 core shell protein domain identified by PFam, accession name Gag_p30, E-value=1.7e-51, PFam score of 184.1
  misc_feature (1)...(390): Xaa = X or * as defined in Table 2
MPLREQRYTGIDEDGHMAERRVFVCQPFTSADLLNWKNNTPSCTEKPQALIDLLQTIIQTHNPTWADCHQLLMFLFNTDERRRVLQAATKWLGEHAPADYQNPQEYGKEESPAQFYERLCEAYHMYTPFDPDSPENQRMINMALVSQSAEDIRRKLQKQAGFAGMNTSQLLEIANQVFVNRDAVSHTGAEHSVVTGPVAPLSKKTIDIIGAMGVSAKQAFCLPRTCTPGTKDYRLVQDLRLVNQATVTLHPTVPNPYILLGLLPAEDSWFTCLDLKDAFFSIRLAPERQKLFAFQWEDPESGVTTQYTWTWLPQGFKNSPTIFGEALARDLQKFPTRDLGCVLLQYVDDLLLGHPTAVGCAKRTDALLRHLEDCGYKVSKKKSSDLPTAX

SEQ ID NO: 39976 - protein, 569 aa, Homo sapiens
  DOMAIN (410)..(432): OLFACTORY RECEPTOR SIGNATURE domain identified by eMATRIX, accession number PR00245A, p-value=2.373e-13, raw score of 18.03
  DOMAIN (93)..(158): Gag P30 core shell protein domain identified by PFam, accession name Gag_p30, E-value=2.3e-20, PFam score of 74.8
  misc_feature (1)...(569): Xaa = X or * as defined in Table 2
MVLEKLDFHMQKNEGGLYVTPAPGDYIRINITGWVYNYCDIGRNIMLSPSLDIRSNITAPLRPKTGIQMSPREQRYTGIDEDGHVVERRVFGYQPFTSVDLLNWKSNTPPYTEKPQALIDLLQTVIQTHNHTWADWHQLLMFLFNSEERRRVLQAATKWLEEHAPADYQNPQEYVDDLLLGHPTAVGCTKGTDALHRHLEDCGYKVSKKKAQICRQQPWASVDWELYVDGNSFFNPQGERGAGCAVVTLDTVVEARSLPQATAAQKAELIAFIGALELSEDLIPRFRLPLRIGSHNGPAFLAAMVQKTAKEMTNKVTGECTPPAILAVISSSPNLDVSDKITEGVYTPCDIGSNMILSPPGYWERYHSAEDPELQPILAGLSLSMYLVTVLRNLLISLAVSSDSHLHTPMCFFLSNLCWADIGFTSATVPKMIVDMRSHSGVISYADCLTRMSFLVLFACVEDMLLTVMAYDCFVAICRPLHYPVIVNPHLCVFLVSVSFSLACIGVYLTSAVAPPLRNGVVASVTYAVVTPMLNPFIYSLRNRDIQSALWRLRSRTVKSHDLFHPFSX

SEQ ID NO: 39977 - protein, 53 aa, Homo sapiens
  misc_feature (1)...(53): Xaa = X or * as defined in Table 2
XSILVLWMLQGSQAALYIQKIPEQPQKNQDLLLSVQGVPDTFQDFNWYLGEET

SEQ ID NO: 39978 - protein, 404 aa, Homo sapiens
  DOMAIN (62)..(107): CARCINOEMBRYONIC ANTIGEN PRECURSOR AMINO-TERMINAL DOMAIN domain identified by eMATRIX, accession number DM00372B, p-value= 3.148e-11, raw score of 20.31
IIVLPKMSMPVVSAQLTITSIPPWAVEWGNVTLSVQGIPQNLISYNWLRGATTNQVTRILNFNFFSHGYTLGPAHTGRETGRADGSLIIIDVRASDNGIYTLHLISSGEKVAIMLCYLSLLVAPWHFHKTPRWRFPWGPRAASQRASCSQPQSWSSGCSKVSQAALYIQKIPEQPQKNQDLLLSVQGVPDTFQDFNWYLGEETYGGTRLFTYIPGIQRPQRDGSAMGQRDIVGFPNGSMLLRRAQPTDSGTYQVAITINSEWTMKAKTEVQVAEKNKELPSTHLPTNAGILAATIIGSLAAGALLISCIAYLLVTRNWRGQSHRMATTEKPELGPAHDAGDNNIYEVMPSPVLLVSPISDTRSINPARPLPTPPHLQAEPENHQYQQDLLNPDPAPYCQLVPTS

SEQ ID NO: 39979 - protein, 185 aa, Homo sapiens
  misc_feature (1)...(185): Xaa = X or * as defined in Table 2
EGGLRTPSNPYHVDISQTKPCHXTNHCIQKEYSKNYGKYEEGNEMFFKEFNQYLTSALNITLESSILLQIKHIIRNCLLSVEPAISTKHLPYQSFQLFGFDFMVDEELKVWLIEVNGAPACAQXACTSLCFYKWEVGSAVGIVCGYKCSHFDCCEGGCHSDRRPLGGLYLAGGFAESLPFLFPRV

SEQ ID NO: 39980 - protein, 178 aa, Homo sapiens
MVGVDVTFKVISREERQTQRLGSSSPKRCPLEQEFEHEYSSFFGRNCLLSVEPAISTKHLPYQSFQLFGFDFMVDEELKVWLIEVNGAPACAQSPAKSLCATSSSLFLSPPPWTCQQHSRQPTALAELLSCHGWTRGAGQACLWAFVLSVTCVWNPHHHYHHHHQPYRGWLLLYQNIL

SEQ ID NO: 39981 - protein, 60 aa, Homo sapiens
SGGHPGHWLPPNPMASPGATTPVGEGELQYASLSFQMVKPWDSRGQEATDTECSEIKIHR

SEQ ID NO: 39982 - protein, 331 aa, Homo sapiens
MENRRKVKGEWIAVPQPVKELRGVLNAATTLSKTREILRGKCFQLTSPTGNEPSHLSWTPRKRSRDGHPGCPDPLAASGARPLRSSSAFAAAAADSGSTVQVWDKGVLRVADVWSTIEPVTHVNLGWAAKVGPIISHGSAVISAFSKEGMFRIFSERKTLLAKLRDFQNTQLRKLFSEMEKAAGRSQSGVSFGQKGLGDRACEEMSENPQKGRKKPKAPQEVSFRENGNWKTPSIFFSPKTPRKKKSFSKEELMSSDLEETRWQAPSIPKRKKSTPKEETVNDPLEAGHKSGSKKKRKFSKEEPVSSGPEEAAGKSSSKKKKKFHKASQED

SEQ ID NO: 39983 - protein, 914 aa, Homo sapiens
  DOMAIN (145)..(174): kw REPLICATION REPB REPA INITIATION domain identified by eMATRIX, accession number DM00653A, p-value=7.207e-27, raw score of 20.40
  DOMAIN (129)..(171): Initiator RepB protein domain identified by PFam, accession name RepB_protein, E-value=0.0091, PFam score of 12.3
MLLETQDQVVSSPKRKTYQEMPGVILYTKLDSCRKSGKRPPEDYAGNQDMTQSRERPALRLCLELHSAAEIFGLTSAEASKDIRQALKSFAGKEVVFYRPEEDAGDEKGYESFPWFIKRAHSPSRGLYSVHINPYLIPFFIGLQNRFTQFRLSETKEITNPYAMRLYESLCQYRKPDGSGIVSLKIDWIIERYQLPQSYQRMPDFRRRFLQHAIVTGDAVGMDDIPQEARQYRHNQAYAYSIQGDGAEDDDERIVRFHTRVTVDSDTLASDAARLTCRHGLGNQVFCPHNRAQKVGILYILKGGAAGRCQNAQGTVAENNGYHVVFAPAGSPKDADATSIYMFYQKVGDNSIDSWKNAGRVFKDSDKFDANDPILKDQTQEWSGSATFTSDGKIRLFYTDYSGKHYGKQSLTTAQVNVSKSDDTLKINGVEDHKTIFDGDGKTYQNVQQFIDEGNYTSGDNHTLRDPHYVEDKGHKYLVFEANTGTENGYQGEESLFNKAYYGGGTNFFRKESQKLQQSAKKRDAELANGALGIIELNNDYTLKKVMKPLITSNTVTDEIERANVFKMNGKWYLFTDSRGSKMTIDGINSNDIYMLGYVSNSLTGPYKPLNKTGLVLQMGLDTNDVTFTYSHFAVPQAKGNNVVITSYMTNRGFFEDKKATFAPSFLMNIKGNKTSVVKNSILEQGLLTPAVGERLSESRPIERGAQLTAFALLQAQLRGQDAAGRLQDLAAGPVGSLCRRAERFRDAFTQELRRGLRGRSGPPPENLEETDKFLDTYTFPRLNQEEVECLNRPITNSEIEAVINSLPTTKSPGPDGFTAKFYQRYKEELDLSWRKQRLSIHKKRKNSPRIVQSNDLTEAAYSLSRDQKRMLYLFVDQIRKSDGTLQEHDGICEIHVAKYAEIFGVTSAKASNE

SEQ ID NO: 39984 - protein, 134 aa, Homo sapiens
MADIPQEARQYRHKQAYAYSIQGEGVEDDDERIVRFHTRWPLQNADGTVAEYNGYHVVFALAGSPKDADDTSIYMFYQKVGDNSIDSWKNAGRVLKDSDKFDANDPILKDQTQEWSGSATFTGSVFLAFGCYSK

SEQ ID NO: 39985 - protein, 213 aa, Homo sapiens
GKGLFDDEDEESDLFMEAPQDRQAGASVKEESSSSKPGKKIPAGAVSVFLGDTDVFGAASVPSLKEPQKPEQPTPRKSPYGPPPTGLFFFSAPHSKPSKTRKVQSTADIFGDEEGDLFKEKAVASPEATVSQTDENKARAEKKVTLSYSKNLKPSSETKTQKGLFSDEEDSEDLFSSQSASNLKGASLLPGKLPTSVSWFDDEDEEDNLLGVQ

SEQ ID NO: 39986 - protein, 415 aa, Homo sapiens
MGRGHRLPFLMGVWGSPPLFPTPFGGIQAPSTDTARYNKYNRTRSPYARTTLTVSRIDQCFSSTPTAVRLHLSSNLSAIERSKKETVSEAPPLLFSDEEEKEAQLGVKSVDKKVESAKESLKFGRTDVAESEKEGLLTRSAQETVKHSDLFSSSSPWDKGTKPRTKTVLSLFDEEEDKMEDQNIIQAPQKEVGKGCDPDAHPKSTGVFQDEELLFSHKLQKDNDPDVDLFAGTKKTKVQEKKRVVKKDHSVNSFKNQKHPESIQGSKEKGIWKPETPQANLAINPAALLPTAASQISEVKPVLPELAFPSSEHRRSHGLESVPVLPGSGEAGVSFDLPAQADTLHSANKAHQVPLPEHTWSVLLLPKAPAASSPGMPLSVHSCASTSPLLSLCPALPAPSSHSSDTVSWDLLNGL

SEQ ID NO: 39987 - protein, 1032 aa, Homo sapiens
  DOMAIN (841)..(859): HIV REV INTERACTING PROTEIN SIGNATURE domain identified by eMATRIX, accession number PR00405B, p-value=8.744e-14, raw score of 11.83
  DOMAIN (811)..(931): Putative GTP-ase activating protein for Arf domain identified by PFam, accession name ArfGap, E-value=7.1e-48, PFam score of 172.5
MVTHQQPAARKPNMTSKKPKPMGPKAHGIFSGTRKNNLEIYMDQTRTGIAKTKLSKNNKSGGMTLPDFKLYYKAIVAKIACGGSMYNSDTDEDEETEPSSSGQQIIENSITMNKMKLLKAKMKNMNLSKKHITQVSDEEEDDDGCDLFADSEKEEKDIEDIEENTRPKRSRPTSFADELAARIKGDAVGRVDEEPTTVSYEDDRRGKNQDAYTEGGLSTIKTVNCSSSLPSGEAKLRKTLKEKKERRTPSDDEEDNLFAPPKLTDEDFSPFGSGGGLFSGGKGLFDDEDEEDIEESSNPLWSGYSLRWAREPPQQPETHTVVSTNEKPEQWLKGENWGSVSTPLQKRSRPTSFADELAARIKGDAMGRVDEEPTNEEDNLFAPPKLTDEDFSPFGSGGGLFSGGKGLFDDEDEESDLFTEAPQDRQAGASVKEGKLGLGSCVSVCRVPKLSFSLGDGTLRRHGCAASVPSLKEPQKPEQPTPRKSPYGPPPTGLFDDDDGDDDNDFFSTPHSKPSKTGTEKPFRKIGMDCDLGDTSSYHTKVSTVHITKNRNGGGSLNNYSSSIPSTPSTSQEDPQFSVPPTANTPTPVCKRSMRWSNLFTSEKGSDPDKERKAPENHADTIGSGRAIPIKQGMLLKRSGKWLKTWKKKYVTLCSNGVLTYYSSLGDYMKNIHKKEIDLQTSTIKVPGKWPSLATSACAPISSSKSNDLSKDMDTGLGDSICFSPSISSTTGPKLNPPPSPHANKKKHLKKKSTNNFMIVSATGQTWHFEATTYEERDAWVQAIQSQILASLQSCESSKSKSQLTSQSEAMALQSIQNMRGNAHCVDCETQNPKWASLNLGVLMCIECSGIHRSLGTRLSRVRSLELDDWPVELRKVMSSIGNDLANSIWEGSSQGQTKPSEKSTREEKERWILSKYEEKLFLAPLPCTDLSLGQQLLRATADEDLQTAILLLAHGSREEVNETCGEGDGCTALHLACRKGNVVLAQLLIWYGVDVMARDAHGNTALTYARQASSQECINVLLQYGCPDECV

SEQ ID NO: 39988 - protein, 975 aa, Homo sapiens
  DOMAIN (257)..(312): kw TRANSCRIPTASE REVERSE II ORF2 domain identified by eMATRIX, accession number DM01354Q, p-value=1.000e-40, raw score of 9.23
  DOMAIN (212)..(448): Reverse transcriptase domain identified by PFam, accession name rvt, E-value=8.5e-51, PFam score of 182.2
MKAEIKMFFETNENKDTTHQNLWDTFKAVCTGKFIALNAHKRKQERSKIDTLKSQLKELEKQEQTNSKASRRQEITKIRAELKEIETQKSLQKINESESWFFEKINKIDRLLVRLKNQIDAIKKDKGDITSDPTEIQTTIREYHKHLYTNKLENLEEIDKFLDTYTFPGLNQEEVESLKKPITGSEIEAIINSLPTKKVQVQMDSQPNSTREKEGILPNSFYEASIILIPKPGRHTTKKENFRPVSLMNIYAKILNKILAHRIQQHIKKLIHYDQVGLIPGMQGWFNTGKSINIIHHINRANDKNHMIILIDAEKAFDKIQQLFMLKTLNKLGIDGTYLKIIRAIYDKLTANIIVNGQKLEAFPLKTGTRQGCPLSPLLFNTVLEVLARAIRQETEIKDIQLGKEEVKLSLFADDMIIHLENPIVPTQNLLKLINNLSKVSGPTGLNLEDSSPRDNSDSEISTRRESRVPVEAGVTPKGTNARACVLGKGGPPLRSPGSSGRRQAARRGAGTGLYPAAQRRAPAPLRPCAIPAPRRPAAAARLGSAARSPGAPPAGRSLAQPHPQSCPLARSPAYRSTGPNDPASNFTEGTGRQRSAAAAPRPFVTPPTNRWTALSLPSNQRGRGQAWPPDVGGCRGARALGPSWHSLEVRVYDEEVEEPVLKAEAEKTEQEKTREQKEVDLIPKVQEAVNYGLQVLDSAFEQLDIKAGNSDSEEDDANGRVELILEPKDLYIDRPLPYLIGSKLFMEQEDVGLGELSSEEGSVGSDRGSIVDTEEEKEEESDLFTEASQDRQAGASVKEGDTDVFGAASVPSLKEPQKPEQPTPRKSPYGPPPTGLFDDDDGDDDDDFFSAPHSKPSKTRKVQSTADIFGDEEGDLFKEKAVASPEATVSQTDENKARAEKKHVVREAGPLTYWLRAVGESPQREPDGGHVAFCVPALEVNGGPFPSFVGQDGHNGPSRFMGRGHRLPFLMVGV

SEQ ID NO: 39989 - protein, 229 aa, Homo sapiens
  DOMAIN (91)..(129): Synapsins proteins domain identified by eMATRIX, accession number BL00415O, p-value=7.513e-09, raw score of 3.44
PTGLNLEDSSPRDNSDSEISTRRESRVPVEAGVTPKGTNARACVLGKGGPPLRSPGSSGRRQAARRGAGTGLYPAAQRRAPAPLRPCAIPAPRRPAAAARLGSAARSPGAPPAGRSLAQPHPQSCPLARSPAYRSTGPNDPASNFTEGTGRQRSAAAAPRPFVTPPTNRWTALSLPSNQRGRGQAWPPDVGGCRGARALGPSWHSLEVRVYDEEVEEPVLKAEAEKTEQ

SEQ ID NO: 39990 - protein, 335 aa, Homo sapiens
MARPALGSSSNRMGGLVVAVCEAPSECRIDGPPRTAVIPPLCRDQRRDACDLTCTRLGRRGTLPSVPATQWAFRAHQRDTASFLRGQGGSFSPPRAARLATTLISIQQDLFSSQSASNLKGASLLPGKLPTSVSLFDDEDEEDNLFGGTAAKKQTLSLQAQREEKAKASELSKKKASALLFSSDEEDQWNIPASQTHLASDSRSKGEPRDSGTLQSQEAKAVKKTSLFEEDKEDDLFAIAKDSQKKTQRVSLLFEDDVDSGGSLFGSPPTSVPPATKVLEETEAQHLYQSILPDMVKIALCLPNICTQVLNIHIKASNVISIDASEFAWKLDGQR

SEQ ID NO: 39991 - protein, 195 aa, Homo sapiens
MGYRHVGAAGLELLTSGKVQSTADIFGDEEGDLFKEKAVASPEATLVPPLSTVCLIMSCPGCETLTFSCRPPKAQHSEPDNADGCAVIKEYCRTQAVLLTETHSRYLKGKGSSSVALDFFVFERPGDTDVFGAASVPSLKEPQKPEQPTPRKSPYGPPPTGLFDDDDGDDDDDFFSAPHSKPSKTRKVQSTVIFC

SEQ ID NO: 39992 - protein, 921 aa, Homo sapiens
  DOMAIN (730)..(748): HIV REV INTERACTING PROTEIN SIGNATURE domain identified by eMATRIX, accession number PR00405B, p-value=8.744e-14, raw score of 11.83
  DOMAIN (699)..(819): Putative GTP-ase activating protein for Arf domain identified by PFam, accession name ArfGap, E-value=7.1e-48, PFam score of 172.5
MATAPSPPKLTLAPAWLCPATTTPRDHSEASLEALPGDPPAHPAAAATAAAVIPALEPPHTPVYAIFVNHSLLDLYIDRPLPYLIGSKLFMEQEDVGLGELSSEEGNADEQSSGLEGACKVNLELLLTNADKGLKAPEQHLKHVAGVLNGESVETSVLNYRELSPHKNRLLSPLRCSAPMSLHNSLVKPERQSKCFEFGKLQPSSSQSLDVQNITDSSFSRTTCFQGVKVDSLGKRSDVISKVEARDITEMTNKASKEPVGCVNNISFLASLAGSTSRNRLQSTRGAGRLQNSGTGLSTNLQHFQEENFRKSSPQLEHTGVFLASCKRRQTVQDLKASVLERVAICLHHGAERVREPRRVLPPRGLLIAMVQQMIELKVTLIRAQKEKRRAREKASIFLQNTYIIINRMFVGMMDFKGPSGEVLGRNAEQVSTVHITKNRNGGGSLNNYSSSIPSTPSTSQEDPQFSVPPTANTPTPVCKRSMRWSNLFTSEKGSDPDKERKAPENHADTIGSGRAIPIKQGMLLKRSGKWLKTWKKKYVTLCSNGVLTYYSSLGDYMKNIHKKEIDLQTSTIKVPGKWPSLATSACAPISSSKSNDLSKDMDTGLGDSICFSPSISSTTGPKLNPPPSPHANKKKHLKKKSTNNFMIVSATGQTWHFEATTYEERDAWVQAIQSQILASLQSCESSKSKSQLTSQSEAMALQSIQNMRGNAHCVDCETQNPKWASLNLGVLMCIECSGIHRSLGTRLSRVRSLELDDWPVELRKVMSSIGNDLANSIWEGSSQGQTKPSEKSTREEKERWILSKYEEKLFLAPLPCTDLSLGQQLLRATADEDLQTAILLLAHGSREEVNETCGEGDGCTALHLACRKGNVVLAQLLIWYGVDVMARDAHGNTALTYARQASSQECINVLLQYGCPDECV

SEQ ID NO: 39993 - protein, 355 aa, Homo sapiens
  misc_feature (1)...(355): Xaa = X or * as defined in Table 2
NSDEELLFSHKLQKDNDPDVDLFAGTKKTKLLEPSVGSLFGDDEDDDLFSSAKSQPLVQEKKRVVKKDHSVDSFKNQKHPESIQGSKEKGIWKPETPQAHQVSLHLKPNEPSTRIGKIQANLAINPAALLPTAASQISEVKPVLPELAFPSSEHRRSHGLESVPVLPGSGEAGVSFDLPAQADTLHSANKSRVKMRGKRRPQTRAARRLAAQESSEAEDMSVPRGPIAQWADGAISPNGHXPQLRAASGEDSTEEALAAAAAPWEGGPVPGVDTSPFAKSLGHSRGEADLYDSGDIFSRAPGSQSVERPNPRQRSRDLPPPGWKQRPRSGKQPRKRPSPXQPKHPLPKGRTSSPW

SEQ ID NO: 39994 - protein, 1357 aa, Homo sapiens
  DOMAIN (287)..(307): Elongation factor 1 beta/beta'/delta chain proteins domain identified by eMATRIX, accession number BL00824B, p-value=8.419e- 09, raw score of 9.21
VTPRAAWLGLGFRGSAVLGLCWQPRSPPSRAAGMMNRTTPDQELVPASEPVWERPWSVEEIRRSSQSWSLAADAGLLQFLQEFSQQTISRTHEIKKQVDGLIRETKATDCRLHNVFNDFLMLSNTQFIENRVYDEEVEEPVLKAEAEKTEQEKTREQKEVDLIPKVQEAVNYGLQVLDSAFEQLDIKAGNSDSEEDDANGRVELILEPKDLYIDRPLPYLIGSKLFMEQEDVGLGELSSEEGSVGSDRGSIVDTEEEKEEEESDEDFAHHSDNEQNQHTTQMSDEEEDDDGCDLFADSEKEEEDIEDIEENTRPKRSRPTSFADELAARIKGDAMGRVDEEPTTLPSGEAKPRKTLKEKKERRTPSDDEEDNLFAPPKLTDEDFSPFGSGGGLFSGGKGLFDDEDEESDLFTEASQDRQAGASVKEESSSSKPGKKIPAGAVSVFLGDTDVFGAASVPSLKEPQKPEQPTPRKSPYGPPPTGLFDDDDGDDDDDFFSAPHSKPSKTRKVQSTADIFGDEEGDLFKEKAVASPEATVSQTDENKARAEKKVTLSSSKNLKPSSETKTQKGLFSDEEDSEDLFSSQSASNLKGASLLPGKLPTSVSLFDDEDEEDPLFVGSAAKKQTLCLQAQREEKAKASELSKKKASALLFSSDEEDQWNIPASQTHLASDSRSKGEPRDSGTLQSQEAKAVKKTSLFEEDEEDDLFAIAKDSQKKTQRVSLLFEDDVDSRGSLFGSPPTSVPPATKKKETVSEAPPLLFSDEEEKEAQLGVKSVDKKVESAKESLKFGRTDVAESEKEGLLTRSAQETVKHSDLFSSSSPWDKGTKPRTKTVLSLFDEEEDKMEDSKPLSQAPQKEVGKGCDPDAHPKSTGVFQDEELLFSHKLQKDNDPDVDLFAGTKKTKLLEPIVGSLFGDDEDDDLFSSAKSQPLVQEKKRVVKKDHSVDSFKNQKHPESIQGSKEKGHMWKPETPQANLAINPAALLPTAASQISEVKPVLPELAFPSSEHRRSHGLESVPVLPGSGEAGVSFDLPAQADTLHSANKSRVKMRGKRRPQTRAARRLAAQESSETEDMSVPRGPIAQWADGAISPNGHRPQLRAASGEDSTEEALAAAAAPWEGGPVPGVDRSPFAKSLGHSRGEADLFDSGDIFSTGTGSQSVERTKPKAKIAENPANPPVGGKAKSPMFPALGEASSDDDLFQSAKPKPAKKTNPFPLLEDEDDLFTDQKVKKNETKSSSQQDVILTTQDIFEDDIFATEAIKPSQKTREKEKTLESNLFDDTLDTLAELTCKTKRKVPKKKVEAKSIFDDDMDDILPPSGIQAKTTKPKSRSAQAAPEPRFEHKVSNIFDDPLNAFGGQ

SEQ ID NO: 39995 - protein, 1284 aa, Homo sapiens; identical to SEQ ID NO: 36412
  DOMAIN (422)..(467): kw TRANSCRIPTASE REVERSE II ORF2 domain identified by eMATRIX, accession number DM01354N, p-value=1.000e-40, raw score of 13.17
  DOMAIN (17)..(247): AP endonuclease family 1 domain identified by PFam, accession name AP_endonucleas1, E-value=2.8e-89, PFam score of 310.0
  misc_feature (1)...(1284): Xaa = X or * as defined in Table 2

SEQ ID NO: 39996 - protein, 1218 aa, Homo sapiens; identical to SEQ ID NO: 36413
  DOMAIN (56)..(111): kw TRANSCRIPTASE REVERSE II ORF2 domain identified by eMATRIX, accession number DM01354Q, p-value=1.000e-40, raw score of 9.23
  DOMAIN (1)..(284): Reverse transcriptase domain identified by PFam, accession name rvt, E-value=8.2e-52, PFam score of 185.6

SEQ ID NO: 39997 - protein, 1709 aa, Homo sapiens; identical to SEQ ID NO: 32700
  DOMAIN (797)..(842): kw TRANSCRIPTASE REVERSE II ORF2 domain identified by eMATRIX, accession number DM01354N, p-value=1.000e-40, raw score of 13.17
  DOMAIN (391)..(621): AP endonuclease family 1 domain identified by PFam, accession name AP_endonucleas1, E-value=7e-83, PFam score of 288.8

SEQ ID NO: 39998 - protein, 1221 aa, Homo sapiens; identical to SEQ ID NO: 35785
  DOMAIN (387)..(432): kw TRANSCRIPTASE REVERSE II ORF2 domain identified by eMATRIX, accession number DM01354N, p-value=1.000e-40, raw score of 13.17
  DOMAIN (473)..(746): Reverse transcriptase domain identified by PFam, accession name rvt, E-value=1.8e-87, PFam score of 304.0

SEQ ID NO: 39999 - protein, 1070 aa, Homo sapiens; identical to SEQ ID NO: 36416
  DOMAIN (154)..(195): kw TRANSCRIPTASE REVERSE II ORF2 domain identified by eMATRIX, accession number DM01354I, p-value=1.000e-40, raw score of 15.55
  DOMAIN (400)..(594): Reverse transcriptase domain identified by PFam, accession name rvt, E-value=8.6e-35, PFam score of 129.0

SEQ ID NO: 40000 - protein, 1357 aa, Homo sapiens; identical to SEQ ID NO: 36418
  DOMAIN (272)..(317): kw TRANSCRIPTASE REVERSE II ORF2 domain identified by eMATRIX, accession number DM01354N, p-value=1.000e-40, raw score of 13.17
  DOMAIN (287)..(535): Reverse transcriptase domain identified by PFam, accession name rvt, E-value=1.3e-45, PFam score of 164.9

SEQ ID NO: 40001 - protein, 1078 aa, Homo sapiens; identical to SEQ ID NO: 36419
  DOMAIN (479)..(524): kw TRANSCRIPTASE REVERSE II ORF2 domain identified by eMATRIX, accession number DM01354N, p-value=1.000e-40, raw score of 13.17
  DOMAIN (563)..(838): Reverse transcriptase domain identified by PFam, accession name rvt, E-value=4.7e-88, PFam score of 306.0

SEQ ID NO: 40002 - protein, 1099 aa, Homo sapiens; identical to SEQ ID NO: 34343
  DOMAIN (22)..(67): kw TRANSCRIPTASE REVERSE II ORF2 domain identified by eMATRIX, accession number DM01354N, p-value=1.000e-40, raw score of 13.17
  DOMAIN (71)..(341): Reverse transcriptase domain identified by PFam, accession name rvt, E-value=7.5e-70, PFam score of 245.5

SEQ ID NO: 40003 - protein, 854 aa, Homo sapiens; identical to SEQ ID NO: 36422
  DOMAIN (50)..(96): kw TRANSCRIPTASE REVERSE II ORF2 domain identified by eMATRIX, accession number DM01354O, p-value=1.000e-40, raw score of 8.73
  DOMAIN (83)..(358): Reverse transcriptase domain identified by PFam, accession name rvt, E-value=1.5e-87, PFam score of 304.3

SEQ ID NO: 40004 - protein, 1139 aa, Homo sapiens
  DOMAIN (336)..(377): kw TRANSCRIPTASE REVERSE II ORF2 domain identified by eMATRIX, accession number DM01354I, p-value=1.000e-40, raw score of 15.55
  DOMAIN (582)..(857): Reverse transcriptase domain identified by PFam, accession name rvt, E-value=5.3e-88, PFam score of 305.8
  misc_feature (1)...(1139): Xaa = X or * as defined in Table 2
MGKKQNRKTGNSKTQSASPPPKERSSSPATEQSWMENDFDELREEGFRRSNYSELREDIQTKGKEVENFEKNLEECITRITNTEKCLKELMELKTKARKLREECRSLRSRCDQLEERVSAMEDEMNEMKREGKFREKRIKRNEQSLQEIWDYVKRPNLRLIGVPESDVENGTKLENTLQDIIQENFPNLARQANVQIQEIQRTPQRYSSRRATPRHIIVRFTKVEMKEKMLRAAREKDRSTRQKVNKDTQELNSALHQADLIDIYRTLHPKSTEYTFFSAPHHTYSKIDHIVGSKALLSKCKRTEIITNYLSDHSAIKLELRIKNLTQSRSTTWKLNNLLLNDYWVHNEMKAEIKMFFETNENKDTTYQNLWDALKAVCRGKFIALNAHKGKQERSEIDTLTSQLKELEKQEQTHSKASRRQEITKIRAELKEIETQKTLQKINESRSWFFERINKIDRPLARLIKKKREKNQIDTIKNDKGDITTDPTEIQTTIREYYKHLYANKLENLEEMDTFLDTYTLPRLNQEEVESLNRPITGSEXVAIINSLPTKKSPGPDGFTAEFYQRYKEELVPFLLKLFQSIEKEGILPNSFYEASIILIPKPGRDTTKKENFRPISLMNIDAKILNKILANRIQQHIKKLIHHDQVGFIPGMQGWFNIRKSINVIQHINRAKDKNHMIISIDAEKAFDKIQQPFMLKTLNKLGIDGTYFKIIRAIYDKPTANIILNGQKLEAFPLKTGTRQGCPLSPLLFNIVLEVLARAIRQEKEIKAIQLGKEEVKLSLFADDMIVYLENPIVSAQNLLKLISNFSXLSGYKINVQKSQAFLYTNNRQTESQIMGELPFTIASKRIKYLGIQLTRDVKDLFKENYKPLLKEIKEETNKWKNIPCSWVGRINIVKMAILPKVIYRFNAIPIKLPMTFFTELEKTTLKFIWNQKRARIAKSILSQKNKAGGITLPDFKLYYKATVTKTACGYQKQGADTSEPAGAVRGNLPNFPSPQECRDARSTAMAWLAAAVPKKGKTHILLPNSTRLASDILGAGLEKRCWGFTIQYELCVQYSLSPSLCLVSQCQTAVVQAPKHRGHVQWCLIPSAQSLASQEAPQSRVNRVSDARPHQLTDVSESPFHSGHTYIHSSLLNIR

SEQ ID NO: 40005 - protein, 1192 aa, Homo sapiens; identical to SEQ ID NO: 36424
  DOMAIN (412)..(453): kw TRANSCRIPTASE REVERSE II ORF2 domain identified by eMATRIX, accession number DM01354I, p-value=1.000e-40, raw score of 15.55
  DOMAIN (660)..(933): Reverse transcriptase domain identified by PFam, accession name rvt, E-value=5.3e-84, PFam score of 292.5

SEQ ID NO: 40006 - protein, 1457 aa, Homo sapiens; identical to SEQ ID NO: 36425
  DOMAIN (154)..(195): kw TRANSCRIPTASE REVERSE II ORF2 domain identified by eMATRIX, accession number DM01354I, p-value=1.000e-40, raw score of 15.55
  DOMAIN (400)..(675): Reverse transcriptase domain identified by PFam, accession name rvt, E-value=1.2e-87, PFam score of 304.6

SEQ ID NO: 40007 - protein, 607 aa, Homo sapiens; identical to SEQ ID NO: 36426
  DOMAIN (154)..(195): kw TRANSCRIPTASE REVERSE II ORF2 domain identified by eMATRIX, accession number DM01354I, p-value=1.000e-40, raw score of 15.55
  DOMAIN (400)..(585): Reverse transcriptase domain identified by PFam, accession name rvt, E-value=3.3e-11, PFam score of 50.7

SEQ ID NO: 40008 - protein, 1483 aa, Homo sapiens; identical to SEQ ID NO: 36427
  DOMAIN (970)..(1011): kw TRANSCRIPTASE REVERSE II ORF2 domain identified by eMATRIX, accession number DM01354I, p-value=1.000e-40, raw score of 15.55
  DOMAIN (1218)..(1483): Reverse transcriptase domain identified by PFam, accession name rvt, E-value=1.8e-74, PFam score of 260.8

SEQ ID NO: 40009 - protein, 957 aa, Homo sapiens; identical to SEQ ID NO: 36428
  DOMAIN (267)..(312): kw TRANSCRIPTASE REVERSE II ORF2 domain identified by eMATRIX, accession number DM01354N, p-value=1.000e-40, raw score of 13.17
  DOMAIN (351)..(626): Reverse transcriptase domain identified by PFam, accession name rvt, E-value=1.7e-88, PFam score of 307.4

SEQ ID NO: 40010 - protein, 953 aa, Homo sapiens
  DOMAIN (110)..(151): kw TRANSCRIPTASE REVERSE II ORF2 domain identified by eMATRIX, accession number DM01354I, p-value=1.000e-40, raw score of 15.55
  DOMAIN (356)..(597): Reverse transcriptase domain identified by PFam, accession name rvt, E-value=6.8e-65, PFam score of 229.0
MGDFNTPLSTLDRSTRQKVNKDTQELNSALHQADLIDIYRTLQPKSTEYTFFSAPHHTYSKIDHIVGSKALLSKCKRTEIITNYLSDHSAIKLELRIKNLTQSRSTTWKLNNLLLNDYWVHNEMKAEIKMFFETNENKDTTYQNLWDAFKAVCRGKFIALNAHKRKQERSKIDTLTSQLKELEKQEQTHSKASRRQEITKIRAELKEIETQKTLQKINESRSWFFERINKIDRPLARLIKKKREKNQIDTIKNDKGDITTDPTEIQTTIREYYKHLYANKLENLDEMDKFLHTYTLPRLNQEEVESLNGPITGAEIVAIIDSLPTKKSPGPDGFTAEFYQRYKEELVPFLLKLFQSIEKEGILPNSFYEASIILIPKLGRDTTKKENFRPLSLMNIDAKILNKILAKRIQQHIKKLIHHDQVGFIPGMQGWFNIRKSINVIQHINRGKDKNHMIISIDAEKAFDKIQQPFMLKTLNKLGIDGTYFKIIRAIYDKPTANIILNGQKLEAFPLKTGTRQGCPLSPLLFNIVLEVLARAIRQEKEIKLISNFSKVSGYKINVQKSQAFLYTNNRQTESQIMSQLPFTIASKRIKYLGIQLTRDVKDLFKENYKPLLKEIKEDTNKWKNIPCSWVGRINIMKMAILPKVIYRFNAIPIKLPMTFFTELEKTTFKFIWNQKRACITKSILSQKNKAGGITLPDFKLYYKATVTKTAWYWYQNRDIDQWNRTEPSEIMLHIYNYLIFDKPEKNKQWGKDSLFNKWCWENWLAICRKLKLDPFLTPYTKINSRWIKDLNVRPKTIKTLEENLGITIQDIGMGKDFMSKTPKAMATKAKIDKWDLIKLKSFCTAKETTIRVNRQPTKWEKIFATYSSDKGLISRIYNELKQIYKKKTNNPIKKWAKDMNRHFSKEDIYAAKKHMKKCSSSLAIREMQIKTTMRYHLTPVRMAIIKKSGNNS

SEQ ID NO: 40011 - protein, 1118 aa, Homo sapiens
  DOMAIN (191)..(232): kw TRANSCRIPTASE REVERSE II ORF2 domain identified by eMATRIX, accession number DM01354I, p-value=1.000e-40, raw score of 15.55
  DOMAIN (437)..(662): Reverse transcriptase domain identified by PFam, accession name rvt, E-value=7e-52, PFam score of 185.8
MYQANGKQKKAGVAILVSDKTDFKPTKIKRDKEGHYIMVKGSIQQEELTILNIYAPNTGAPTFIQQVLSDLQRDLDSHTLIIGDFNTPLSTSDRSTRQKVNKDTQELNSALHQADLIDIYRTLHPKSTEYTFFSAPHHTYSKIDHILGSKALLSKCKRTEIITNYLSDHSAIKLELMIKNLTQNHSTIWKLNNLLLNDYWVHKEMKAEIKMFFETNENKDTTYQNLWDTFKAVCRGKFIALNAHKRKQERSKIDTLTSQLKELEKQEQTLSKASRRQEITKIRAELKEIETQKTLQKINESRSRFFERINKIDSLLARLIKKKREKNQIDAIKNDKGDITTNPTEIQTTIREYYKHLYANKLENLEEMDKFLDTYTLPRLNQEEVESLNRPITGAEIVAIINSLPTKKSPGPDGFTAEFYQRYKEEQVPFLLKLFQSIEKEGILPNSFYVSSIILIPKPGRDTTKRENFRPISLMNIDAKILNKILANRIQQHIKKLIHHDQVGFIPGMQGWFNICKSINVIQHINRTKDKNHMIISIDAEKAFDKIQQPFMLKTLNKLVLEVLARAIRQEKEIKGIQLGKEEVKLSLFADDMIVYLENPIVSAQNLLKLISNFSKVSGYKINVQKSQAFLYTNNRQTESQIMSELPFTIASKRIKYLGIQLTRDVKDLFKENYKPLLKEIKEDTNKWKNIPCSWVGRINIVKMAILPKVIYRFNAIPIKLPMTFFTELGKTALKFIWNQKRARITKSILSQKNKAGGITLPDFQLYCKATVTKTAWFPSGDVGLEADFSPSHTLKTQFFSCLAEFAAASCFFQRMNGFGMAMTTTYSTGAAESPLPSCSIDQGDDTKLHRARSPGRTFPAAAGIPAAAAPDGPPLSLLHKLWFPVELGGRALPRAEESHGEVAALGVMVVAQGGKNQGEEARSTPWLRPTSHLPPCSSSSAWWTEQTDAHPLLFLLCLGIYLLNALSNLSMVALVRSDGALRSPMYYFLGHLSLVDVCFTTVTVPRLLAGLLHPGQAISFQACFAEMYFFVALGITESYLPAAMSYDRATAACRPLRYGALVTPWALRLAARYDRLASVVYAVITPTLNPFINSLRNKEVKGALKRGLRWRAAPQEA

SEQ ID NO: 40012 - protein, 1005 aa, Homo sapiens
  DOMAIN (316)..(361): kw TRANSCRIPTASE REVERSE II ORF2 domain identified by eMATRIX, accession number DM01354N, p-value=1.000e-40, raw score of 13.17
  DOMAIN (378)..(653): Reverse transcriptase domain identified by PFam, accession name rvt, E-value=2.5e-74, PFam score of 260.3
MVKGSIQQEELTTLNIYAPNTGAPRFIKQVLRDLQRDLDSHTLIMGDFNTPLSTLDRSTRQKVNKDIQDLNSALHQVDLIDIYRTLHPKSTEYTFFSALHHIYSKIDHIVGSKALLSKYKTTEIITNCLSDHSAIKLELRIKKLTQNRSTTWKLNNLLLNDYWVHNKMKAEINTLFETNENKDTTYQNLWDTFKAVCRGKFIALNAHKRKQERSKIDTLTSQLKELEKQEQTHSKASRRQEITKIRAKLKEIETQKILQKINESRSWFFEKINKIDRPLARPIKKKREKNQIDAIKNDKGDITTDPTEIQTTIREYYKHLYANKLENLEEMDKFLNTYTLPRLNQEEVESLNKPITGSEIEAIINSLPIKKSPGPDGFIAKFHQRYKEELEASIILIPKPGRDTTKKENFRPIPLMNIDAKILNKILANRIQQHIKKLIHHDQVGFIPGMQGSFNICKSINVIQDINRTNDKNHMIISIDAEKAFDKIQQPFILKTLNKLGIDGTYLKIIRAIYDKPTANIILNGQKLEAFPLKTGTRQGCPLSPLLFNIVLEVLARAIRQEKEIKGIQLGQEEVKLSLFADDMIVYRENPIVSTQNLHKLISNFSKVSGYKINVQKSQAFLYTNNRQTESQIMSELPFTIASKRIKYLGIQLTRDVKDLFKENYKPLLKEIKEDTNKWKNIPCSWVGRINIVKMAILPKVIYRFNAIPIKLPMTFFTELEKTTLKFIWNQKRARIAKSILSQRNKAGGITLPDFKLYYKATVTKTAWYWYQNRDIDQWNRTEPSEIMPHIYNHLIFDKPDKNKKWGNDSLFNKWCWENWLAICRRKLKLDPFLTPYTKINSRWIKDLNVRPKTIKTLEENLGNTIQDIGMGKDFMSTTPKAMATKAKIDKWDLIKLKSFCTAKETTITVNRQPTEWEKIFTIYPSDKGLISRIYKELKQIYKKRTNNPINKWVKDMNRHFSKEDIYTAKRHMKKCSSSLAIREMQIKTTLRYHLIPVRMAIIKN

SEQ ID NO: 40013 - protein, 1152 aa, Homo sapiens; identical to SEQ ID NO: 36432
  DOMAIN (154)..(195): kw TRANSCRIPTASE REVERSE II ORF2 domain identified by eMATRIX, accession number DM01354I, p-value=1.000e-40, raw score of 15.55
  DOMAIN (400)..(675): Reverse transcriptase domain identified by PFam, accession name rvt, E-value=1.2e-87, PFam score of 304.6

SEQ ID NO: 40014 - protein, 1598 aa, Homo sapiens; identical to SEQ ID NO: 36977
  DOMAIN (154)..(195): kw TRANSCRIPTASE REVERSE II ORF2 domain identified by eMATRIX, accession number DM01354I, p-value=1.000e-40, raw score of 15.55
  DOMAIN (400)..(675): Reverse transcriptase domain identified by PFam, accession name rvt, E-value=3.6e-89, PFam score of 309.6

SEQ ID NO: 40015 - protein, 1127 aa, Homo sapiens; identical to SEQ ID NO: 36435
  DOMAIN (154)..(195): kw TRANSCRIPTASE REVERSE II ORF2 domain identified by eMATRIX, accession number DM01354I, p-value=1.000e-40, raw score of 15.55
  DOMAIN (400)..(675): Reverse transcriptase domain identified by PFam, accession name rvt, E-value=5.1e-89, PFam score of 309.1

SEQ ID NO: 40016 - protein, 1115 aa, Homo sapiens; identical to SEQ ID NO: 36436
  DOMAIN (154)..(195): kw TRANSCRIPTASE REVERSE II ORF2 domain identified by eMATRIX, accession number DM01354I, p-value=1.000e-40, raw score of 15.55
  DOMAIN (400)..(675): Reverse transcriptase domain identified by PFam, accession name rvt, E-value=2.8e-87, PFam score of 303.4

SEQ ID NO: 40017 - protein, 1260 aa, Homo sapiens; identical to SEQ ID NO: 36437
  DOMAIN (272)..(317): kw TRANSCRIPTASE REVERSE II ORF2 domain identified by eMATRIX, accession number DM01354N, p-value=1.000e-40, raw score of 13.17
  DOMAIN (356)..(631): Reverse transcriptase domain identified by PFam, accession name rvt, E-value=2.6e-81, PFam score of 283.5

SEQ ID NO: 40018 - protein, 1240 aa, Homo sapiens; identical to SEQ ID NO: 36438
  DOMAIN (110)..(151): kw TRANSCRIPTASE REVERSE II ORF2 domain identified by eMATRIX, accession number DM01354I, p-value=1.000e-40, raw score of 15.55
  DOMAIN (356)..(631): Reverse transcriptase domain identified by PFam, accession name rvt, E-value=8.3e-88, PFam score of 305.1

SEQ ID NO: 40019 - protein, 1298 aa, Homo sapiens; identical to SEQ ID NO: 36439
  DOMAIN (154)..(195): kw TRANSCRIPTASE REVERSE II ORF2 domain identified by eMATRIX, accession number DM01354I, p-value=1.000e-40, raw score of 15.55
  DOMAIN (400)..(675): Reverse transcriptase domain identified by PFam, accession name rvt, E-value=5.1e-89, PFam score of 309.1

SEQ ID NO: 40020 - protein, 1111 aa, Homo sapiens; identical to SEQ ID NO: 36440
  DOMAIN (154)..(195): kw TRANSCRIPTASE REVERSE II ORF2 domain identified by eMATRIX, accession number DM01354I, p-value=1.000e-40, raw score of 15.55
  DOMAIN (400)..(675): Reverse transcriptase domain identified by PFam, accession name rvt, E-value=2.8e-88, PFam score of 306.7

SEQ ID NO: 40021 - protein, 1260 aa, Homo sapiens; identical to SEQ ID NO: 36441
  DOMAIN (154)..(195): kw TRANSCRIPTASE REVERSE II ORF2 domain identified by eMATRIX, accession number DM01354I, p-value=1.000e-40, raw score of 15.55
  DOMAIN (400)..(675): Reverse transcriptase domain identified by PFam, accession name rvt, E-value=1.8e-88, PFam score of 307.4

SEQ ID NO: 40022 - protein, 1284 aa, Homo sapiens; identical to SEQ ID NO: 36442
  DOMAIN (627)..(652): 7 kw REVERSE TRANSCRIPTASE RNA POLYMERASE domain identified by eMATRIX, accession number DM00895E, p-value=3.333e-11, raw score of 15.72
  DOMAIN (598)..(873): Reverse transcriptase domain identified by PFam, accession name rvt, E-value=1.6e-88, PFam score of 307.5

SEQ ID NO: 40023 - protein, 1115 aa, Homo sapiens; identical to SEQ ID NO: 36443
  DOMAIN (323)..(369): kw TRANSCRIPTASE REVERSE II ORF2 domain identified by eMATRIX, accession number DM01354O, p-value=1.000e-40, raw score of 8.73
  DOMAIN (356)..(631): Reverse transcriptase domain identified by PFam, accession name rvt, E-value=3.2e-86, PFam score of 299.8

SEQ ID NO: 40024 - protein, 1132 aa, Homo sapiens
  DOMAIN (277)..(322): kw TRANSCRIPTASE REVERSE II ORF2 domain identified by eMATRIX, accession number DM01354N, p-value=1.000e-40, raw score of 13.17
  DOMAIN (361)..(636): Reverse transcriptase domain identified by PFam, accession name rvt, E-value=2.6e-88, PFam score of 306.8
TWKGTTSTSRCKIMPKYRSTRQKVNKDTQELNSALHQADLIDIYRTLHTKSTEYTFFSAPHHTYSKIDHIVGSKALLSKCERTEIITNYLSDHSAMKLELRIKNLTQNCSTTWKLNNLLLNDYWVHNEMKAEIKMFFETNENKDTTNQNLWDAFKAVCRGKFIALNAHKRKQERSKIDTLTSQLKELEKQEQTHSKASRRQEITKIRAELKEIETQKTLQKINESRSWFFERINKIDRPLARLIKKKREKNQIDTIKNDKGDITTDPTEIQTTIREYYKHLYANKLENLEEINKLLDTYTLPRLNQEEVESLNRPITGAEIGAIINSLPTKKSPGPDGFTAEFYQRYKEELVPFLLKLFQSIEKEEILPNSFYEASIILIPKPGRDTTKKENFRPISLMNIDAKILNKILANRIQQHIKKLIHHDQVGFFPGMQGWFNIRKSINVIQHINRAKDKNHMIISIDAEKAFDKIQQPFMLKTLNKLGIDGTYFKIIRAIYDKPTANIILNGQKLEAFPLKTGTRQGCPLSPLLFNIVLEVLARAIRQEKEIKGIQLGKEEVKLSLFADDMIVYLENPIVSAQNLLKLISNFSKVSGYKINVQKSQAFLYTSNRQTESQIMSELPFTIASKRIKYLGIQLTRDVKDLFKENYKPLLKEIKEDTNKWKNIPCSWVGRINIVKMAILPKVIYRFNAIPIKLPMTFFTELEKTTLKFIWNQKRARIAKSILSQKNKAGGITLPDFKLYYKATVTKTAWYWYQNRAIDQWNRTEPSEITPHTYNYLIFDKPEKNKQWGKDSLFNKWCWENWLAICRKLKLDPFLTPYTKINSRWIKDLNVRPKTIKTLEENLGITIQDIGMGKDFMSRTPKAMATKAKIDKWDLIKLKSFCTAKETTIRVNRQPTTWEKIFATYSSDKGLISRIYNELKQIYKKKTNNPIKKWEKDMNRHFSKEDIYAAKKHMKKCSSSLAIREMQIKTTMRYHLTPVRMAIIKKSGNNRLLRKCPRISTVQIKLSWPWVSHCSPTCHGLQEEQSSVWRRPDYAQKPLSRCSIDSPAGAGSHLGGTVSTRRAAKQGYGISEPLRSRVSHFRASAVKGMAFPSLCGQGYGVSEPLQSRAQRWVVGAAVGASQMWVPTCLMT

SEQ ID NO: 40025 - protein, 1307 aa, Homo sapiens; identical to SEQ ID NO: 36445
  DOMAIN (294)..(335): kw TRANSCRIPTASE REVERSE II ORF2 domain identified by eMATRIX, accession number DM01354I, p-value=1.000e-40, raw score of 15.55
  DOMAIN (540)..(815): Reverse transcriptase domain identified by PFam, accession name rvt, E-value=7.7e-89, PFam score of 308.6

SEQ ID NO: 40026 - protein, 1328 aa, Homo sapiens
  DOMAIN (252)..(293): kw TRANSCRIPTASE REVERSE II ORF2 domain identified by eMATRIX, accession number DM01354I, p-value=1.000e-40, raw score of 15.55
  DOMAIN (8)..(238): AP endonuclease family 1 domain identified by PFam, accession name AP_endonucleas1, E-value=1.6e-91, PFam score of 317.5
MTGSNSHITILTLNINGLNSAIKRHRLASWIKSQDPSVCCIQETHLMCRDTHRLKIKGWRKIYQANGKQKKAGVAILVSDKTDFKPTKIKRDKEGHYIMVKGSIQQEELTILNIYAPNTGAPRFIKQVLSDLQRDLDSHTLIMGDFNTPLSILDRSTRQKVNKDTQELNSALHQADLIDIYRTLHPKSTEYTFFSAPHHTYSKIDHIVGSKALLSKCKRTEIITNYLSDHSAIKLELRIKNLTQSRSTTWKLNNLLLNDYWVHNEMKAEIKMFFETNENKDTTYQNLWDAFKAVCRGKFIALNAYKRKQERSKIDTLTSQLKELEKQEQTHSKASRRQEITKIRAELKEIETQKTLQKINESRSWFFERINKIDRPLARLIKKKREKNQIDTIKNDKGDITTDPTEIQTTIREYYKHLYANKLENLEEMDTFLDTYTLPRLKQEEVESLNGPITGSEIVAIINSLPTKKSPGPDGFTAEFYQRYKEELVPFLLKLFQSIEKEGILPNSFYEASIILIPKPGRDTTKKENFRPISLMNIDAKILNKILANRIQQHIKKLIHHDQVGFIPGMQGWFNIRKSINVIQHINRAKDKNHMIISIDAEKAFDKIQQPFMLKTLNKLGIDGTYFKIIRAIYDKPTANIILNGQKLEAFPLKTGTRQGCPLSPLLFNIVLEVLARAIRQEKEIKGIQLGKEEVKLSLFADDMIVYLENPIVSAQNLLKLISNFSKVSGYKINVQKSQAFLYTNNRQTESQIMGELPFTIASKRIKYLGIQLTRDVKDLFKENYKPLLKEIKEDTNKWKNIPCSWVGRINIVKMAILPKVIYRFNAIPIKLPMTFFTELEKTTLKFIWNQKRARIAKSILSQKNKARIKLEASLFKLYYKATVTETAWYWYQNRDIDQWNRTEPSEIMPHIYNYLIFDKPEKNKQWGKDSLFNKWCWENWLAICRKLKLDPFLTPYTKINSRWIKDLNVRPKAIKVLEENLGNTIQDIGMGKDFMTKTPKAMATKAKIDKWDIINLKSFCTAEETTIRVNRQPTEWEKNFAIYPSDKGLISRFYKELKQIYKKKTNNPIKKWAKDMNRHFSKEDIYAAKKHMKKCSSSLAIREMQIKTTMRYHLTPVRMAIIKKSGNNRCWRGYGEIGTLLHCWWDCKLVQPLWKSVWRSLRDLELEIPFDPAIPLLGIHPKDYKSCCYKDTCTQLRGGGGAQASCRYGHHGGRSGVLEPSSGSSSTSRHKHFSDEGRDGERLCSLKTPCRNCLSSECPLVSGIGGFLISLTSRMKPQTLAVSVTVLKDGVSGVCSFRCSDVSGASSFQWVRGLADFRSKAVLTPQM

SEQ ID NO: 40027 - protein, 184 aa, Homo sapiens
  DOMAIN (99)..(149): Ribosomal protein S6e proteins domain identified by eMATRIX, accession number BL00578D, p-value=4.656e-29, raw score of 16.68
  DOMAIN (1)..(62): Ribosomal protein S6e domain identified by PFam, accession name Ribosomal_S6e, E-value=0.024, PFam score of -19.4
GPHGAFTHGRRRFGRDPYEGPRRTGKRKQKSARGCIVDANLSILNLVIVKKGEKDIPGLTDTMVPCHLGPKRASRICKLFSLSEDDDVHQCVVRKALNKEGKKPRTKAPTTKYLVTPHVLQHEWWHIALKKQRIKENKEVAAEYAKLLAKRMKEAKEKHQEQIAKRRRLSSLRASTSKSESSQK

SEQ ID NO: 40028 - protein, 95 aa, Homo sapiens
  DOMAIN (25)..(42): Zinc finger, CCHC class domain identified by PFam, accession name zf-CCHC, E-value=5e-05, PFam score of 30.1
SRGVGNFKTPELQQPGVPPGLPPPGSCFKCRKSGHWAKECPQPGIPPKPCPICAGPHWKLDCPTRLAATPRSPGTLAQGSLTDSFPDIRGLAVED

SEQ ID NO: 40029 - protein, 216 aa, Homo sapiens
  misc_feature (1)...(216): Xaa = X or * as defined in Table 2
MGLKGQGVEGGLLRQSGSVSLQPLSREDLGRSQSESLGPEFQGLWEWLPVERVERENLSDYCVLGQRPMHLPNMNQLASLGKTNEQSPHSQIHHSTPIRNQVPALQPIMSPGLLSPQLSPQLVRQQIAMAHLINQQIASXPAPGSPASSSHQPAVPEPSIPSPEQLSQSQPTLPWKSLQISTSKSEMSXRGPVCPKLSLQEWHSTAHRNLKTWKKD

SEQ ID NO: 40030 - protein, 85 aa, Homo sapiens
  DOMAIN (15)..(32): Zinc finger, CCHC class domain identified by PFam, accession name zf-CCHC, E-value=0.0007, PFam score of 26.3
  misc_feature (1)...(85): Xaa = X or * as defined in Table 2
KPQWPGIPSGPPPPGSCFKCXKSGHWAKECLQPRIPPKPCPICAGPHWKSDCSTHLAATPRAPGTLAQGSLTDSFPDLLGLAAEG

SEQ ID NO: 40031 - protein, 146 aa, Homo sapiens
  DOMAIN (64)..(81): Zinc finger, CCHC class domain identified by PFam, accession name zf-CCHC, E-value=0.0033, PFam score of 23.8
VQPADLLRPLHTDTCNIWCQRPGTEGLLRETGPLSSPLTPMRRSTYDLRSSDQPKEHLTDFKSGSCFKCRKSGHWTKECQQPRIPPKPCPICAGPHWKSDCPSCPAATPRAPGTLAQDSLTDSFPTDPKGSLIDYFPDLLCLVAED

SEQ ID NO: 40032 - protein, 188 aa, Homo sapiens
  DOMAIN (96)..(148): Phosphoglycerate mutase family phosphohistidine proteins domain identified by eMATRIX, accession number BL00175D, p-value= 2.091e-32, raw score of 27.67
  DOMAIN (22)..(158): Phosphoglycerate mutase family domain identified by PFam, accession name PGAM, E-value=1.7e-46, PFam score of 167.9
GRLQTGADPAWRVHGTWRSTSAADAIDQMWPPVMRTWRLNERHYGGLTDLGKAETAAKHGEAQVKIWSNISKDRRYADLTDDQLSSCESLKDTIASALPFWNKEIVPQIKEGKWVLIAAHGNSLRGIVKHLEGLSEEAIMELNLLTGIPIVCKLDKSSKPIRCMEFLGDEGTLCKAMEAVAAQGKAKK

SEQ ID NO: 40033 - protein, 265 aa, Homo sapiens
  DOMAIN (173)..(225): Phosphoglycerate mutase family phosphohistidine proteins domain identified by eMATRIX, accession number BL00175D, p-value= 1.000e-39, raw score of 27.67
  DOMAIN (17)..(237): Phosphoglycerate mutase family domain identified by PFam, accession name PGAM, E-value=3.3e-112, PFam score of 386.2
GGVPHPQPAAMAAYKLVLIRHGESAWNLENRFSGWYDADLSPAGHEEAKRGGQALRDAGYEFDICFTSVHLYAIRTLWTVLEMPLSEMWLPVVRTWRLNERHYGGLTGLNKAETAAKNGEAQVKIWRRSYDVPPPPMEPDHPFYSNISKDRRYADLTEDQLPSCDRLKDTIATALPFWNEEIVPQIKEGKRVLIAAHGNSLRGIVKHLEGLSEEAIMELNLPTGIPIVYELDKNLKPIKPMQFLGDEETVRKAMEAVAAQGKAKK

SEQ ID NO: 40034 - protein, 190 aa, Homo sapiens
  DOMAIN (42)..(60): KINASE TYPE RESISTANCE ANTIBIOTIC TRANSFERASE AM domain identified by eMATRIX, accession number PD01929D, p-value=7.344e- 11, raw score of 9.28
VAPVVQVWKEMHKLLPFSPDSVVTHGDISIDSGIFDQDKLIGRIDVGRVGIACGCQDVAIVWNYLAACSVDRNTCRIMRPNCRPEVEETPGLKEEKELSQPKEGEATDLKKEVEKISSSEEEETVNLKEEVEKIPPPEEETMDLKEEKEEIPPPELRDQKLMHVLKDLEPVSAVPHKDSLFHGQLTTVPV

SEQ ID NO: 40035 - protein, 228 aa, Homo sapiens
  DOMAIN (11)..(64): Band 41 family domain proteins. domain identified by eMATRIX, accession number BL00660A, p-value=1.196e-26, raw score of 31.50
  DOMAIN (4)..(95): FERM domain (Band 4.1 family) domain identified by PFam, accession name Band_41, E-value=1.1e-39, PFam score of 125.9
TLYCRVFLLDGTEVSVDLPKHAKGQDLFDQIVYHLDLVETDYFGLQFLDSAQVAHWLDHAKPIKKQMKIGPAYALHFRVKYYSSEPNNLREEFTRPKITKMDFKKSKLTLVVVEDDDQGREQEHTFVFRLDSARTCKHLWKCAVEHHAFFRLRTPGNSKSNRSDFIRLGSRFRFSCFSERENAHSTGNSPALRERPGDGSVSREGRWVDEGWPQRPGGRGQNALCSVP

SEQ ID NO: 40036 - protein, 139 aa, Homo sapiens
  DOMAIN (20)..(56): Ribosomal protein L11 proteins domain identified by eMATRIX, accession number BL00359A, p-value=5.860e-20, raw score of 20.66
  DOMAIN (20)..(134): Ribosomal protein L11 domain identified by PFam, accession name Ribosomal_L11, E-value=2.8e-26, PFam score of 98.7
MSKFGRATRGLRKPEVGDVIRTIVRAGLAMPGPPLGPVLGQRRASINQFCKEFNERTKDIKEGIPLLTKIFLKPDGTFEIKIGQPTVSYFVKAAAGIEKGARPTDLSSEEFAAFQKEQAIFLAAQKKADLATQEEAAKK

SEQ ID NO: 40037 - protein, 240 aa, Homo sapiens
  DOMAIN (26)..(62): Ribosomal protein L11 proteins domain identified by eMATRIX, accession number BL00359A, p-value=1.360e-20, raw score of 20.66
  DOMAIN (26)..(165): Ribosomal protein L11 domain identified by PFam, accession name Ribosomal_L11, E-value=4.6e-29, PFam score of 108.6
SQLPRIMSKLGRAARGLRKPEVGGVIRAIVRAGLAMPGPPLGNVLGQRGVSINQFCKEFNERTKDIKEGIPLPTKILVKPDRTFEIKIGQPTVSYFLKAAAGIEKGARQTGKEVAGLVTLKHVYEIARIKASGLRAFALQDVPLSSVVRSIIGSARSLGTSRGERTSSSEELAAFQKERAIFLAAQKEADFGLPKKEAAKEIDPLPHQLPDFQKEVSLQKLCPRGGRRSHQYDDGFHDFE

SEQ ID NO: 40038 - protein, 49 aa, Homo sapiens
  DOMAIN (29)..(44): WILM'S TUMOUR PROTEIN SIGNATURE domain identified by eMATRIX, accession number PR00049D, p-value=9.017e-11, raw score of 0.00
MRKRWMALSAAVIAASARELSIAAAPGALKPSPPLPPPPPPPPDRGIRR

SEQ ID NO: 40039 - protein, 498 aa, Homo sapiens
  DOMAIN (81)..(99): Ubiquitin carboxyl-terminal hydrolases family 2 proteins domain identified by eMATRIX, accession number BL00972A, p-value= 3.160e-18, raw score of 11.93
  DOMAIN (80)..(111): Ubiquitin carboxyl-terminal hydrolases famil domain identified by PFam, accession name UCH-1, E-value=3.1e-13, PFam score of 57.4
RRRRFQASGAAAMLSSRAEAAMTAADRAIQRFLRTGAAVRYKVMKNWGVIGGIAAALAAGIYVIWGPITERKKRRKGLVPGLVNLGNTCFMNSLLQGLSACPAFIRWLEEFTSQYSRDQKEPPSHQYLSLTLLHLLKALSCQEVTDDEVLDASCLLDVLRMYRWQISSFEEQPHFQDGLVQLRVGVVCRHYPEKWEAASWTSQNCGADDAHELFHVITSSLEDERDRQPRVTHLFDVHSLEGHPLTLDHCLHHFTQSESVRDVVCDNCTKIEAKGTLNGEKVEHQRTTFVKQLKLGKLPQCLCIHLQRLSMVQPGTPLKRHEHVQFNEFLMMDIYKYHLLGHKPSQHNPKLNKNPGPTLEHAGWAGSPHTSSESARGPQNTDFYEWRLLPIFIANAVSADALPSPSCSRLQLLHIPLPADGQLSSTMGDMALWDTLFIYRRSPPSARNPLSTSNQWLWVSDDTVRKASLQEVLSSSAYLLFYERVLSRMQHQSQECKV

SEQ ID NO: 40040 - protein, 464 aa, Homo sapiens
PLQLQPRHIGAQIQLGPLLQRVQAIRLGSFHMVLSLWVMQSARVEILEPPPRLQRMYGKAWRISLCPQGLSTVMRSELTASSTPQVQEILPPQSPEYLGPKGITERIHKIMHVKGLAKLPANRNQPSPGVSGKRLVNCVSASAVDSEPAAVPEPDVCAGIVIKKQCFPVIARCNKTKQVDSIPHRAYAKPSPFFPAVVVVTSESKDPRVKQNPTHPLLAEGSNAAHFHKTKISQSLKWLPVGYLNSTTYEYRDLTKGLSLLCSLLLGVEADIPSMAGLHVRHLMQVPQQPCIAFAVSSPLHQGGKETEDAWSFHIPSTIHRWPTSPSVQLSSLRASTQLLCLHINLAKCFIWGILAQVLSCHHHRITQFVGMLTFVCAGDSSKLSPDIRTLVRRLTSYLVSASVLLKSKQMALCSASRILDVSVSPGDHVASEARARCAPDLVAPRPMPHQNQGSLEWTEEGEN

SEQ ID NO: 40041 - protein, 80 aa, Homo sapiens
  DOMAIN (7)..(80): Ribosomal protein L6e domain identified by PFam, accession name Ribosomal_L6e, E-value=0.074, PFam score of -84.0
FSCLILHDAFPCLILHDAFPCSLCSVTGSLVLSRVPLRGTHQKSAIATSTKIALSNMKILKHHTDAYFKKQQLFFDVSKK

SEQ ID NO: 40042 - protein, 126 aa, Homo sapiens
  DOMAIN (65)..(98): NNMT/PNMT/TEMT family of methyltransferases proteins domain identified by eMATRIX, accession number BL01100F, p-value=1.435e- 17, raw score of 14.30
  DOMAIN (1)..(122): NNMT/PNMT/TEMT family domain identified by PFam, accession name NNMT_PNMT_TEMT, E-value=0.0053, PFam score of -107.0
EQQGQRSQWWRGAARVSRTVKRVLCEVVECPLKSACPDVDMYWAALQRLASLLKADGNLVTMAALHSHYMVGSKKFFGLHPEKETVEKAMQEAGCQVQRCASISCSETCSINDGICFVAACKGPSV

SEQ ID NO: 40043 - protein, 69 aa, Homo sapiens
  DOMAIN (23)..(47): HMW KININOGEN SIGNATURE domain identified by eMATRIX, accession number PR00334B, p-value=6.940e-10, raw score of 8.69
CRHSTQHCVSHHGHSQYKDSHQHYSHYHHHNHPHHHHQSPYLHHHHYDCHLHHHHHNDHYHRHISVYDI

SEQ ID NO: 40044 - protein, 1050 aa, Homo sapiens
  DOMAIN (226)..(239): PROTEIN ZINC-FINGER METAL-BINDI domain identified by eMATRIX, accession number PD00066, p-value=1.000e-14, raw score of 13.92
  DOMAIN (96)..(1036): Zinc finger, C2H2 type domain identified by PFam, accession name zf-C2H2, E-value=3.1e-235, PFam score of 794.9
RVVQTDMIKGMLETSLLKISLDQAFIRICLNSTCFRPKGKLVIKCEKSINSASLVSTSQRISCRPKTHISKNYGNNFLNSSLLTQKQEVHMREKSFQCNESGKAFNYSSVLRKHQIIHLGAKQYKCDVCGKVFNQKRYLACHRRCHTGKKPYKCNDCGKTFSQELTLTCHHRLHTGEKHYKCSECGKTFSRNSALVIHKAIHTGEKSYKCNECGKTFSQTSYLVYHRRLHTGEKPYKCEECDKAFSFKSNLERHRKIHTGEKPYKCNECSRTFSRKSSLTRHRRLHTGEKPYKCNDCGKTFSQMSSLVYHRRLHTGEKPYKCEECDEAFSFKSNLERHRRIHTGEKPYKCNDCGKAFTSHSHLIRHQRIHTGQKSYKCEECDEAFSFKSNLERHRIIHTGEKLYKCNECGKTFSRKSSLTRHCRLHTGEKPYQCNECGKAFRGQSALIYHQAIHGIGKLYKCNDCHQVFSNATTIANHWRIHNEERSYKCNRCGKFFRHRSYLAVHWRTHSGEKPYKCEECDEAFSFKSNLQRHRRIHTGEKPYRCNECGKTFSRKSYLTCHRRLHTGEKPYKCNECGKTFGRNSALIIHKAIHTGEKPYKCNECGKAFSQKSSLTCHLRLHTGEKPYKCEECDKVFSRKSSLEKHRRIHTGEKPYKCKVCDKAFGRDSHLGKHTRIHTGEKPYKCNECGKNFRHNSALVIHKAIHSGEKPYKCNECGKTFRHNSALEIHKAIHTGEKPYKCSECGKVFNRKANLSRHHRLHTGEKPYKCNKCGKVFNQQAHLACHHRIHTGEKPYKCNECGKTFRHNSVLVIHKTIHTGEKPYKCNECGKVFNRKAKLARHHRIHTGKKHYKCNECGKTYSHNSVLVIHKTIHTGEKPYKCNECGKTFHHNSVLVIHKTIHTGEKQANATTIVNHWRSHNEERSYKCNNCGKFFRHRSYIAVHWRTHAGEKSYKCHDCGKVFSQASSFARHRRIHTGEKPHKCDDRGKAFTSHSHLIRHQRIHTGQKSYKCHQCGKVFSPTSLLAEYQKIHFSGNCSQCNEYSKPSSID

SEQ ID NO: 40045 - protein, 635 aa, Homo sapiens
  misc_feature (1)...(635): Xaa = X or * as defined in Table 2
MAGACWLMAFQYWVLKLLVVKSASWPRQSSLKWNWNFKGCQDLETWGKKETRKFYGYRRNEEAQKYSCRIPRKPDXWCHCWQWXXWLMAFQYWVLKLLVVKSAYGLVKALSNGIGISKVAKTWKPGGKKRLENFMAIEEMKKHRSTHVGFPENLTNGATAGNGDDGLIPPRKSRTPESQQFPDTENEEYHRDFSKLCLGSAANGVVHVEVKMCVYNGKGERQEEKMKGLISMNLVVEEEMKKHESNNVGLLENLTNGVTAGNGDNGLIPQRKSRTPENQQFPDNESEEYHSLGDKSKTSFQNSNNNNNKQQEQQQQNPTFSNTRKLTKLYKAPIPPSIILSGCPNINDSNWQEIEHGMQTAGLPTRPLSHGLQQKGAAFRCLGCKCSEPFTGSLILQKAKTNTQKWQATYPKSQNEQLVPSVGKSYRCSTPAQPMKTAVGHKPCKATGAELPKALGAQPLHPCALDVGQGFKKGNFGAVGLNGLLGLEFHGVSGVLLVGPGDGGLISEGVVREDLMCGVWSAGTWSVGTAERCLEKPGALHVIEGPLDSWDGPVMPNGPVKSRQSSCLDGPGRCCSEILTGQSHGNKKPARASSKSSQSINDRPLAVLTNQYQCEQLASERQPSSNSCSIRIDSA

SEQ ID NO: 40046 - protein, 231 aa, Homo sapiens
  misc_feature (1)...(231): Xaa = X or * as defined in Table 2
RRTARGPQQTSTDGLGTSPCRNASEHTADILELSTLIVXRRQXICLCLDFLYYLIPEGRCFCRACDLVHNFDTIILQQHRTLTSQGVDDFLKAKATFKASDFIDALVLSKVASPRILIQGGRMGAXDQVSDQASVYGRCSSSGAEAAKRPKSAWLLLGYDSRASGLYXILYNLTKHPDYRECCQPVMQESXSXRRTARGPQQTSTDGLGTSPCRNASEHTADILELSTLIV

SEQ ID NO: 40047 - protein, 168 aa, Homo sapiens
MVIVGLAAGVLLVGPGDGGLISEGVVREDLMCGVWSAGTWSVGTAERCLEKPGALHVIEGPLDSWDGPVMPNGPVKNHKGEQQEVPSKHPQMALEICLCLDFLYYLIPEGRCFCRACDLVHNFDTIILQQHRTLTSQGVDDFLKAKATFKASDFIDALVLSKVASPGS

SEQ ID NO: 40048 - protein, 126 aa, Homo sapiens
KFSRPSVNMLRIVKPCITRGYPNLKSVNKLIYKHGRGKINKKRIALTDNTLIDQSHGQYGIICIEDLIHELYLWPFKLSSPQSGMKKKTTHFVENGAAANREGQIHRLLIRMNCGVYRDYFSNLVS

SEQ ID NO: 40049 - protein, 91 aa, Homo sapiens; identical to SEQ ID NO: 34981

SEQ ID NO: 40050 - protein, 52 aa, Homo sapiens
  misc_feature (1)...(52): Xaa = X or * as defined in Table 2
XQHTFCKRCGVQSFYTPRSNPGGFGIAPHCLDEGTVRSMVTEEFNGSDWEKA

SEQ ID NO: 40051 - protein, 133 aa, Homo sapiens
  DOMAIN (68)..(101): PROLINE-RICH PROTEIN 3 domain identified by eMATRIX, accession number DM00215, p-value=9.237e-09, raw score of 19.43
CGDRGALRPPSCAGRSGPGPPRPPRPPRPLPWHPAPPAHGAPLARPGARARRSEKPPSEKPRLRRSSPRAQEEGPGEPPPPELALLPPPPPPPPTPAPRRPRRPPGPGRAAGALGDVPEAAEAYLERVPPSSC

SEQ ID NO: 40052 - protein, 220 aa, Homo sapiens
MVQAIGPQCRPQARRDNRSNSSQQSIVTGLTCCCQSGLHPPIEGPSYDSYGRGSTTKPVPGLDGPPGGSGAARNTSHGAGGNRYPMGQNMADYIMRAGGRQRQLRPPADKLAAVAAEVEVERSLFESAWKKEKDIVSKEIEKLRTSIQTLCKSALPLGKIMDYIQEDVDAMQNELQMWHSENRQHAEALQQEQSSVPHEEGAVSTDDWHTRASCPLAAEM

SEQ ID NO: 40053 - protein, 345 aa, Homo sapiens
MVAFLSLLKVIRMTGFMKGLYTDAEMKSDNVKLSSDDAVRRVLAGEKGEVKGRASLTSRSQELDNKNVREEESRVHKNTEVNSKSHIFENEIDRGDAEIKERSTSRDRKQKEELKEDRKPREKDKDKEKAKENGGNRHREGERERAKARARPDNERQKDRGNRERDRDSERKKETERKSEGGKEKERLRDRDRERDRDKGKDRDRRRVKNGEHSWDLDREKNREHDKPEKKSASSGEMSKKLSDGTFKDSKAETETEISTRASKSLTTKTSKRRSKNSVEVLLRHADFDGRKTKTLMTSEMVLVIAWSCHSADLGSLSSQLQVLPCTGHGLTFGIQSLLAVVTVP

SEQ ID NO: 40054 - protein, 858 aa, Homo sapiens
  DOMAIN (164)..(180): Ank repeat proteins domain identified by eMATRIX, accession number PF00023A, p-value=4.857e-09, raw score of 16.03
  DOMAIN (159)..(789): Ank repeat domain identified by PFam, accession name ank, E- value=5e-17, PFam score of 70.0
  misc_feature (1)...(858): Xaa = X or * as defined in Table 2
MRAAGGAMLCGKQGRWDPEGEGAHPGFIPKLACSSQGVFRQLHLRTAVTAAVSRHFPQPSWRYDPGPQFLGEKSGFKPRCPGVAVCQFQSMNAFIHWFRNKAWASSCDRIKIPVPPEATFVEPNCLPGEIGQLLRQLQSGRNLKEWLREQFCDHPLEHCEDTRLHDAAYVGDLQTLRSLLQEESYRSRINEKSVWCCGWLPCTPLRIAATAGHGSCVDFLIRKGAEVDLVDVKGQTALYVAVVNGHLESTQILLEAGADPNGSRHHRSTPVYHASRVGRADILKALIRPAACDRSVSITADTHFRYLIKVVPAMFRSRKAIPFLSSCTAWRCADELQFIQPVPLVDTSGSGKTVSNVITESHNSDNEEDDQFVVEAAPQLSEMSEIEMVTAVELEEEEKHGGLVKKILETKKDYEKLQQSPKPGEKPSATGWHGECLGTRNRAQGALVGWGWLYSERHSGMLRAITLKYKGGGRQGIQAAWKSETFRSRAAPENPLGRWGFALLSKIISXRQVLKLHFSLSPQARVNSRFPGSGKAGLGLWMEGARPSGHVPKERVVAGKRPQVPTKAHHTCVRETAGNQEGNGEGALQQEQRLGVAEAGSNGEGALQQEHRITDCAVEPLKAELAELEQLIKDQQDKICAVKANILKNEEKIQKMERSLFESAWKKEKDIVSKEIEKLRTSIQTLCKSALPLGKIMDYIQEDVDAMQNELQMWHSENRQHAEALQQEQRYGADVDVNHHLTPDVQPRFSRRLTSLVVCPLYISAAYHNLQCFRLLLLAGANPDFNCNGPVNTQGFYRGSPGCVMDAVLRHGCEAAFVSLLVEFGANLNLVKWESLGPESRGRRKVDPEALQVFKEAR

SEQ ID NO: 40055 - protein, 577 aa, Homo sapiens
  DOMAIN (401)..(441): Involucrin proteins domain identified by eMATRIX, accession number BL00795B, p-value=7.931e-09, raw score of 12.41
MKGLYTDAEMKSDNVKDKDAKISFLQKAIDVVVMVSGEPLLAKPARIVAGHEPERTNELLQIIGKCCLNKLSSDDAVRRVLAGEKGEVKGRASLTSRSQELDNKNVREEESRVHKNTEDRGDAEIKERSTSRDRKQKEELKEDRKPREKDKDKEKAKENGGNRHREGERERAKARARPDNERQKDRGNRERDRDSERKKETERKSEGGKEKERLRDRDRERDRDKGKDRDRRRVKNGEHSWDLDREKNREHDKPEKKSASSGEMSKKLSDGTFKDSKAETETEISTRASKSLTTKTSKRRSKNSVEGDSTSDAEGDAGPAGQDKSEVPETPEIPNELSSNIRRIPRPGSARPAPPRVKRQDSMEALQMDRSGSGKTVSNVITESHNSDNEEDDQFVVEAAPQLSEMSEIEMVTAVELEEEEKHGGLVKKILETKKDYEKLQQSPKPGEKERSLFESAWKKEKDIVSKEIEKLRTSIQTLCKSALPLGKIMDYIQEDVDAMQNELQMYHSENRQHAEALQQEQRITDCAVEPLKAELAELEQLIKDQQDKICAVKANILKNEEKIQKMVYSINLTSRR

SEQ ID NO: 40056 - protein, 238 aa, Homo sapiens
  DOMAIN (48)..(66): Kringle domain proteins domain identified by eMATRIX, accession number BL00021B, p-value=5.320e-16, raw score of 13.33
  DOMAIN (22)..(207): Trypsin domain identified by PFam, accession name trypsin, E- value=7e-62, PFam score of 197.5
RANLPTQPYCHCGLAPAALTRIVGGSAAGRGEWPWQVDLWLRRREHRCGAVLVAERWLLSAAHCFDVYGDPKQWAAFLGTHVPERRGGAVERVARIYKHPFYNLYTFDYDVALLELAGPVRRTSLVRPICLPEPAHATPDGTRCVITGWGYGSTGAQLQKAAVRLLSEQTCRALYPVQISSRMLCAGFLQGGVDSCSGDAGGPLACREPSGAPVPGQPRTCTAPARWPRRSALSPAPL

SEQ ID NO: 40057 - protein, 91 aa, Homo sapiens
  misc_feature (1)...(91): Xaa = X or * as defined in Table 2
NLVPXLRSGDSPLGDQSPVLLIFTPXERSTYNLKSSDXPAQETSPPISNPDPTENPDCSTHLAATPRAPGTLAQGSLTDSFPDLLSLAAED

SEQ ID NO: 40058 - protein, 95 aa, Homo sapiens
AVISTVERGAGRGRPQAKPIPEAEEAQRPEPVGTSSNADSASPDLGPRGPDLAVLQAEREVDILNHVFDDVESFVSRLQKSAEAARVLEHRERGR

SEQ ID NO: 40059 - protein, 138 aa, Homo sapiens
  misc_feature (1)...(138): Xaa = X or * as defined in Table 2
GTQSCNQKVLNSANNLQELGIGPKFQMRLKPQLAPMQPNRGTSLGRSIPCPPVLCSMRKIHLRPQVLRPTSPRNISPILNRVSEVSDHAGTPALVLHPXRQVPLFWGRGKYPNPFSLCLYPFSAFLGGKKHPTPSPSP

SEQ ID NO: 40060 - protein, 310 aa, Homo sapiens; identical to SEQ ID NO: 31184

SEQ ID NO: 40061 - protein, 764 aa, Homo sapiens
  misc_feature (1)...(764): Xaa = X or * as defined in Table 2
MLPNRLGSSETITDAELRVTLTVEELNGLRAVQDMFVKQILKAARSLRVITIPNLKYPGTQTLRKAAAPDPNTTGLIFLEKLCEIAAAIASYVAVPSLEINHRKKANPNLLLRRSGSGSVSLQLLAEKIWEGVREPWARVLVLWEWLPDQNPLSGLTKSNSTSRHELPHGRAIQLHLSGWELWSEPSNLLDLVVTGDIENTSLAPEDPTFLTMPSGSHCPESPSDGPGLSSLVALVWFLVEDWLSRKRLESEPAELPLGKAGEVVFDTLPLPSRRTHFSGFLGHFCYSFSDGYSTNRAAPDGSSTKAEKHGSCRKQPPYTLQCRDKAGLRVHGNSPVSAYGWLFSEERPGKPTRTPFSWEGDPPGLLTADETSLVVHLELPVFPSFLKRAGNSRHSGMGSPLEAEEAYSTVVMADVSQYPVNEPLVAAVVCQEPERAQPDVHFFQCLRLGGHAGGVAARPLPAAETPPLQRRPSVRAXSAPXSGARAADDPRRTHSQAEEAQRPEPDILNHVFDDVESFVSRLQKSAEAARVLEHRKRGRRSRRRAAGEGLLTLRAKPPSEAEYTDVLQKIKHAFSLLARLRGNIADPSSSELLHFLFGPLQMIVQPSGGPEFASSVRRPHLTRDAVALLRDNVTPRERRLWTSLGDSWTRPGLELSPEEGPPYIPEFFSGWEPPVTDPQSAPGRTQLRNSYSTSGGAAAKRPPGRCQWRWSFFRVIPGEKGRHYRPVAVWQWDSKMAQVGPLSLSVKPRLGTKKDVDKVLDEK

SEQ ID NO: 40062 - protein, 309 aa, Homo sapiens
MERIGRKGGRGKDGGEGGEEKEKEEEEEEGRGKRWGKKKNGEAKGEPGSYSAHLHPGEINSHVAHTKPVWWSLHTDAHEIWCHDSYRGTSLGRSIPCPSALCSLRKIHLRPQVLRPTSPRNISPISNPAAPRQTELGPNSSSASAPPPYNPFIASPPHTWSGLQFPSMTSPPPPAQQFTLKKVAGAKGIVKDLINLTFKVYNNRKKLQFLASTVRQTPATSPAHKNFQTPELQQPGVPPEPPPRGACYKFQKSGHRAKECLQPRIPPKPHPICVGPHWKSDCPTHLAATPRAPGTLAQGSLTPSQIFLA

SEQ ID NO: 40063 - protein, 57 aa, Homo sapiens
  misc_feature (1)...(57): Xaa = X or * as defined in Table 2
QLKTDTAQLPRKLFVESHNYHCSWPGLQSGLPHYSGYHTSSSXLYLSDPADIHPISP

SEQ ID NO: 40064 - protein, 68 aa, Homo sapiens
  misc_feature (1)...(68): Xaa = X or * as defined in Table 2
MSQCFSALVLLPSXXXXXXXXXXXXXXXXXXXXXXXXXXXXXXXXXXXXXXXXXXXWRAKSPSRELLG

SEQ ID NO: 40065 - protein, 64 aa, Homo sapiens
  misc_feature (1)...(64): Xaa = X or * as defined in Table 2
DILNHVFDDVESFVSRLQKSAERPGCWRRRTRPQKPAPGVAGXRGTWRGIXTPPDLFQMSPLSP

SEQ ID NO: 40066 - protein, 65 aa, Homo sapiens
  DOMAIN (19)..(30): GUANYLIN PRECURSOR SIGNATURE domain identified by eMATRIX, accession number PR00774C, p-value=5.418e-09, raw score of 11.76
  DOMAIN (1)..(18): Zinc finger, CCHC class domain identified by PFam, accession name zf-CCHC, E-value=0.00019, PFam score of 28.2
  misc_feature (1)...(65): Xaa = X or * as defined in Table 2
XACYKCQKSGHQAKECLQPGIPPKLRPICAGPHWKSDCPTHLAATPRAPGTLAQGSLTASQIFLA

SEQ ID NO: 40067 - protein, 181 aa, Homo sapiens
AAPRQTELGPNSSSASAPPPYNPFIASPPHTWSGLQFPSMTSPPPPAQQFTLKKVAGAKGIVKDLINLTFKVYNNRKKLQFLASTVRQTPATSPAHKNFQTPELQQPGVPPEPPPRGACYKFQKSGHRAKECLQPRIPPKPHPICVGPHWKSDCPTHLAATPRAPGTLAQGSLTPSQIFLA

SEQ ID NO: 40068 - protein, 46 aa, Homo sapiens
LDDFVGRMLTLMGCPIPECPRVPSPLREGRKTQAALSVRRGRSHRR

SEQ ID NO: 40069 - protein, 139 aa, Homo sapiens; identical to SEQ ID NO: 30816

SEQ ID NO: 40070 - protein, 66 aa, Homo sapiens
  misc_feature (1)...(66): Xaa = X or * as defined in Table 2
YLPHLSLRLLPCPPPLPLSKPNSLPXLRPSLLQRDYLSIFILILNMPSISSTTMLLYGQKEISSLH

SEQ ID NO: 40071 - protein, 287 aa, Homo sapiens
  DOMAIN (109)..(161): RECEPTOR CELL NK GLYCOPROTEIN IMMUNOGLOB domain identified by eMATRIX, accession number PD01652B, p-value=9.824e-19, raw score of 8.50
  DOMAIN (42)..(192): Immunoglobulin domain identified by PFam, accession name ig, E-value=0.00017, PFam score of 19.6
MSFTLPALLCVGLCLSQRISAQQQTLPKPFIWAEPHFMVPKEKQVTICCQGNYGAVEYQLHFEGSLFAVDRPKPPERINKVKFYIPDMNSRMAGQYSCIYRVGELWSEPSNLLDLVVTEMYDTPTLSVHPGPEVISGEKVTFYCRLDTATSMFLLLKEGRSSHVQRGYGKVQAEFPLGPVTTAHRGTYRCFGSYNNHAWSFPSEPVKLLVTGDIENTSLAPEDPTFPDHALWDHTAQNLLRMGLAFLVLVALVWFLVEDWLSRKRTRERASRASTWEGRRRLNTQTL

SEQ ID NO: 40072 - protein, 93 aa, Homo sapiens
  DOMAIN (35)..(71): 072 RIBONUCLEASE INHIBITOR domain identified by eMATRIX, accession number DM00315G, p-value=3.100e-11, raw score of 15.85
MAAAISQSFSKKNQCLLCLDLGLIHIGVKGMKFLCEALRKPLCNLRCLWLWGCSIPPFSCEDLCSALSCNQSLVTLDLGSESLGVLVGVKMLF

SEQ ID NO: 40073 - protein, 305 aa, Homo sapiens
  DOMAIN (241)..(258): Zinc finger, CCHC class domain identified by PFam, accession name zf-CCHC, E-value=0.0025, PFam score of 24.5
RLMLPDRLGSPIDHHRRRASGNSHSGGSLNSSEVMEYRAGERTEGVCESTRQKLEYTSAGTSWLLWHWQERTPCTLTCYVPPLMGGSMQPLSLSLNHFLLSTLQSLPSLNFNSFHFLGETKETRFIRGPKTPVPVTDWEGSLPLVFNHCRDTSLIIHPRFTGVRPRRDACLGPSPLAASPAFLREGQDLTNLAFKVYNNRKKLQFLVPTVRQTPAASPAHKNFQTPEPQRPGVPPEPPPPGACYKCQKRGHQAKECLQPRIPPKPRPICAGPHWKSDCPTHLAATPRAPGTLAQGSLTASQIFLA

SEQ ID NO: 40074 - protein, 549 aa, Homo sapiens
  DOMAIN (266)..(281): WILM'S TUMOUR PROTEIN SIGNATURE domain identified by eMATRIX, accession number PR00049D, p-value=2.831e-09, raw score of 0.00
  DOMAIN (197)..(256): SH3 domain identified by PFam, accession name SH3, E-value= 0.0012, PFam score of 17.1
RGRRSRRRAAGEGLLTLRAKPPSEAEYTDVLQKIKYAFSLLARLRGNIADPSSPELLHFLFGPLQMIVNTSGGPEFASSVRRPLVTSDAVALLGNNVTPRENELWTSLGDSWTRLRAEELSPEEGPPYRPEFFSGWEPPVTDPQSRAWEDPVEKQLQHERRRRQQSAPSGRCQWVTGDLEPESEPQLESETAGKWVLCNYDFQARNSSEAVRSSSGDVLEVLDDSRKWWKVRDPAGQEGYVPYNILTPYPGPRLHHSQSPARSHDSTPPPPPAPAPVPLPPALARPRWDRPRWDSCDSLNGLDPSEKEKFSQMLIVNEELQARLAQGRSGPSRAVPGPRAPEPQLSPGSDASEVRAWLQAKGFSSGTVDALGVLTGAQLFSLQKEELRAVSPEGGARVYSPVTVQRSLLEDKRESSELEAVMEKQKEEGGRRGGNGGHLTCQAPFAKSDEAPWENGPPQTLPNSGSRSSEGWPICSGPGLPPLPVDRLNDPCCSPSGEDLDWLGVGRAWRQSTESASRPPRGCSGALSIVILRPSPINMPPCLAKKKKK

SEQ ID NO: 40075 - protein, 65 aa, Homo sapiens
MGVLPIVYFFLHRQGNHPISQSFPPPFPPFYSTKPPLSSWPVLNELLDTPPRQGGGRAESLLTSQ

SEQ ID NO: 40076 - protein, 133 aa, Homo sapiens
SPLRPLLLALALASEPCAQGACPASADLKHSDGTRTCAKLYDCSDPYYENCCGGAELSLESGADLPYLPSNWANTASSLVVAPRCELTVWSRQGKAGKTHKFSAGTYPRLEEYRRGILGDWSNAISALYCRCS

SEQ ID NO: 40077 - protein, 495 aa, Homo sapiens
  DOMAIN (50)..(87): S-100/ICaBP type calcium binding protein domain identified by eMATRIX, accession number BL00303B, p-value=1.400e-16, raw score of 26.15
  DOMAIN (4)..(47): S-100/ICaBP type calcium binding domain identified by PFam, accession name S_100, E-value=2.9e-09, PFam score of 44.2
MPQLLQNINGIIEAFRRYARTEGNCTALTRGELKRLLEQEFADVIVKPHDPATVDEVLRLLDEDHTGTVEFKEFLVLVFKVAQACFKTLSESAEGACGSQESGSLHSGASQELGEGQRSGTEVGRAGKGQHYEGSSHRQSQQGSRGQNRPGVQTQGQATGSAWVSSYDRQAESQSQERISPQIQLSGQTEQTQKAGEGKRNQTTEMRPERQPQTREQDRAHQTGETVTGSGTQTQAGATQTVEQDSSHQTGRTSKQTQEATNDQNRGTETHGQGRSQTSQAVTGGHAQIQAGTHTQTPTQTVEQDSSHQTGSTSTQTQESTNGQNRGTEIHGQGRSQTSQAVTGGHTQIQAGSHTETVEQDRSQTVSHGGAREQGQTQTQPGSGQRWMQVSNPEAGETVPGGQAQTGASTESGRQEWSSTHPRRCVTEGQGDRQPTVVGEEWVDDHSRETVILRLDQGNLHTSVSSAQGQDAAQSEEKRGITARELYSYLRSTKP

SEQ ID NO: 40078 - protein, 1010 aa, Homo sapiens
  DOMAIN (546)..(593): 1 kw CHROMO BROMODOMAIN SHADOW GLOBAL domain identified by eMATRIX, accession number DM00547F, p-value=8.385e-36, raw score of 23.43
  DOMAIN (139)..(426): SNF2 and others N-terminal domain identified by PFam, accession name SNF2_N, E-value=3.7e-98, PFam score of 339.5
SYLHCKWATMEELEKDPRIAQKIKRFRNKQAQMKHIFTEPDEDLFNPDYVEVDRILEVAHTKDAETGEEVTHYLVKWCSLPYEESTWELEEDVDPAKVKEFESLQVLPEIKHVERPASDSWQKLEKSREYKNSNQLREYQLEGMNWLLFNWYNRKNCILADEMGLGKTIQSITFLSEIFLRGIHGPFLIIAPLSTITNWEREFRTWTEMNAIVYHGSQISRQMIQQYEMVYRDAQGNPLSGVFKFHVVITTFEMILADCPELKKIHWSCVIIDEAHRLKNRNCKLLEGLKLMALEHKVLLTGTPLQNSVEELFSLLNFLEPSQFPSETAFLEEFGDLKTEEQVKKLQSILKPMMLRRLKDDVEKNLAPKQETIIEVELTNIQKKYYRAILEKNFSFLTKGANQHNMPNLINTMMELRKCCNHPYLINGAEEKILEDFRKTHSPDAPDFQLQAMIQAAGKLVLIDKLLPKLIAGGHKVLIFSQMVRCLDILEDYLIQRRYTYERIDGRVRGNLRQAAIDRFCKPDSDRFVFLLCTRAGGLGINLTAADTCIIFDSDWNPQNDLQAQARCHRIGQSKAVKVYRLITRNSYEREMFDKASLKLGLDKAVLQDINRKGGTNGVQQLSKMEVEDLLRKGAYGALMDEEDEGSKFCEEDIDQILQRRTHTITIQSEGKGSTFAKASFVASGNRTDISLDDPNFWQKWAKIAELDTEAKNEKESLVIDRPRVRKQTKHYNSFEEDELMEFSELDSDSDERPTRSRRLNDKARRYLRAECFRVEKNLLIFGWGRWKDILTHGRFKWHLNEKDMEMICRALLVYCVKHYKGDEKIKSFIWELITPTKDGQAQTLQNHSGLSAPVPRGRKGKKTKNQLLIPELKDADWLATCNPEVVLHDDGYKKHLKQHCNKVLLRVRMLYYLKAEILGEAAEKAFEGSPARELDVPLPDIDYMEIPVDWWDAEADKSLLIGVFKHGYERYNAMRADPALCFLEKVGMPDEKSLSAEQGVTDGTSDIPE

SEQ ID NO: 40079 - protein, 98 aa, Homo sapiens
  misc_feature (1)...(98): Xaa = X or * as defined in Table 2
TAVSLPAPLFSDLQIPPRKRSLKETVMAPENLTNXRAPPQSSARVFQXEALYVPGPXALDPPEVCSSYSSVCGLHQLSHSSSESSSTLGSLLGSFQML

SEQ ID NO: 40080 - protein, 49 aa, Homo sapiens
  misc_feature (1)...(49): Xaa = X or * as defined in Table 2
ESRPNTTTRLRKTSSWSFQSXTATQTKGPRDPGASMTKPGATSERSASG

SEQ ID NO: 40081 - protein, 485 aa, Homo sapiens
  DOMAIN (305)..(316): PROTEIN REPEAT NEUROFILAMENT TRIPL domain identified by eMATRIX, accession number PD01351A, p-value=4.938e-09, raw score of 8.69
RSAQKEKTAAKEQQGEKTEVLSSDDDAPDSPVILEIPSLPPSTPPSTPTYKKSLRLSSDQIRRLNLQEGANDVVFSVTTQYQGTCRCKATIYLWKWDDKVVISDIDGTITKSDALGHILPQLGKDWTHQGITSLYHKIQLGQLVMPLDARPERPMDGMKVRAFMERLLFVRRGTDKRWSVRMYVTCSQSSNLNEEIYINQVVIQANMKLQLWAMRTDDARGLSSLGDTEPSPCPSVVPGLQPKPAPVCAGDALLQAQIPGVLLGTLFSGAAFYSGLYGGSEQFLDHLLHPARAAPPPPLVGPGPAPRVPGSPSAPELAGPAVWRFAAAASRGVVVAASGWGRGGEASQTFQTGKEPGGTRHPTRMPLGSTGCIFPGTLEKSQGYERYNAMRADPALCFLEKVGMPDEKSLSAEQGVTDGTSDIPERARQNEEQLTSFGLLWPTPQGSTDHIDNHPRERYPEMRWELDVPLPDIDYMEIPVDWWDA

SEQ ID NO: 40082 - protein, 1600 aa, Homo sapiens; identical to SEQ ID NO: 39776
  DOMAIN (329)..(376): AAA-protein family proteins domain identified by eMATRIX, accession number BL00674D, p-value=1.783e-34, raw score of 23.41
  DOMAIN (766)..(1587): RNase H domain identified by PFam, accession name rnaseH, E- value=7.5e-62, PFam score of 218.9

SEQ ID NO: 40083 - protein, 299 aa, Homo sapiens; identical to SEQ ID NO: 33771
  DOMAIN (117)..(134): RNase H domain identified by eMATRIX, accession number PF00075A, p-value=4.400e-13, raw score of 14.44
  DOMAIN (97)..(282): Reverse transcriptase domain identified by PFam, accession name rvt, E-value=2e-33, PFam score of 124.5

SEQ ID NO: 40084 - protein, 105 aa, Homo sapiens
  misc_feature (1)...(105): Xaa = X or * as defined in Table 2
CLQLSWLSLGQAQVHWLGRAVHTAFCMDXVLLFGESFGFLVRLTPGILLGLLXPXKQGHCHSVSLGEVRICGIISXTFITSWAFSVLQGKASAQPVKVSTQNSRY

SEQ ID NO: 40085 - protein, 55 aa, Homo sapiens
MVLQMEPQMQSMTKIYCGPLDRPASPAPTLMTSKAPLPRKSQLHDTYYAPIQQEA

SEQ ID NO: 40086 - protein, 2168 aa, Homo sapiens; identical to SEQ ID NO: 39779
  DOMAIN (762)..(782): ENDOPEPTIDASE LA (LON) SERINE PROTEASE (S16) SIGNATURE domain identified by eMATRIX, accession number PR00830A, p-value=7.429e- 11, raw score of 8.41
  DOMAIN (475)..(949): ATPases associated with various cellular act domain identified by PFam, accession name AAA, E-value=1.5e-66, PFam score of 234.5

SEQ ID NO: 40087 - protein, 1807 aa, Homo sapiens
  DOMAIN (48)..(62): Fusion glycoprotein F0 domain identified by eMATRIX, accession number PF00523D, p-value=7.188e-10, raw score of 11.39
  DOMAIN (941)..(950): Helper component proteinase domain identified by PFam, accession name Peptidase_C6, E-value=0.0056, PFam score of 7.9
GSPQRLCDLAGPSSTESESRKRSISKRKSHLDLLKLIMDGMTEACIKGGIEACYAAVSCVCTLLGALDELSQGKGLSEGQVQLLLLRLEELKDGAEWSRDSMEINEADFRWQRRVLSSEHTPWESGNERSLDISISVTTDTGQTTLEGELGQTTPEDHSGNHKNSLKSPAIPEGKETLSKVLETEAVDQPDVVQRSHTVPYPDITNFLSVDCRTRSYGSRYSESNFSVDDQDLSRTEFDSCDQYSMAAEKDSGRSDVSDIGSDNCSLADEEQTPRDCLGHRSLRTAALSLKLLKNQEADQHSARLFIQSLEGLLPRLLSLSNVEEVDTALQNFASTFCSGMMHSPGFDGNSSLSFQMLMNADSLYTAAHCALLLNLKLSHGDYYRKRPTLAPGVMKDFMKQVQTSGVLMVFSQAWIEELYHQVLDRNMLGEAGYWGSPEDNSLPLITMLTDIDGLESSAIGGQLMASAATESPFAQSRRIDDSTVAGVAFARYILVGCWKNLIDTLSTPLTGRMAGSSKGLAFILGAEGIKEQNQKERDAICMSLDGLRKAARLSCALGVAANCASALAQMAAASCVQEEKEEREAQEPSDAITQVKLKVEQKLEQIGKVQGVWLHTAHVLCMEAILSVGLEMGSHNPDCWPHVFRVCEYVGTLEHNHFSDGASQPPLTISQPQKATGSAGLLGDPECEGSPPEHSPEQGRSLSTAPVVQPLSIQDLVREGSRGRASDFRGGSLMSGSSAAKVVLTLSTQADRLFEDATDKLNLMALGGFLYQLKKASQSQLFHSVTDTVDYSLAMPGEVKSTQDRKSALHLFRLGNAMLRIVRSKARPLLHVMRCWSLVAPHLVEAACHKERHVSQKAVSFIHDILTEVLTDWNEPPHFHFNEALFRPFERIMQLELCDEDVQDQVVTSIGELVEVCSTQIQSGWRPLFSALETVHGGNKSEMKEYLVGDYSMGKGQAPVFDVFEAFLNTDNIQVFANAATSYIMCLMKFVKGLGEVDCKEIGDCAPAPGAPSTDLCLPALDYLRRCSQLLAKIYKMPLKPIFLSGRLAGLPRRLQEQSASSEDGIESVLSDFDDDTGLIEVWIILLEQLTAAVSNCPRQHQPPTLDLLFELLRDVTKTPGPGFGIYAVVHLLLPVMSVWLRRSHKDHSYWDMASANFKHAIGLSCELVVEHIQSFLHSDIRYESMINTMLKDLFELLVACVAKPTETISRVGCSCIRYVLVTAGPVFTEEMWRLACCALQDAFSATLKPVKDLLGCFHSGTESFSGEGCQVRVAAPSSSPSAEAEYWRIRAMAQQVFMLDTQCSPKTPNNFDHAQSCQLIIELPPDEKPNGHTKKSVSFREIVVSLLSHQVLLQNLYDILLEEFVKGPSPGEEKTIQVPEAKLAGFLRYISMQNLAVIFDLLLDSYRTAREFDTSPGLKCLLKKVSGIGGAANLYRQSAMSFNIYFHALVCAVLTNQETITAEQVKKVLFEDDERSTDSSQQCSSEDEDIFEETAQVSPPRGKEKRQWRARMPLLSVQPVSNADWVWLVKRLHKLCMELCNNYIQMHLDLENCMEEPPIFKGDPFFILPSFQSESSTPSTGGFSGKETPSEDDRSQSREHMGESLSLKAGGGDLLLPPSPKVEKKDPSRKKEWWENAGNKIYTMAADKTISKLMTEYKKRKQQHNLSAFPKEVKVEKKGEPLGPRGQDSPLLQRPQHLMDQGQMRHSFSAGPELLRQDKRPRSGSTGSSLSVSVRDAEAQIQAWTNMVLTVLNQIQILPDQTFTALQPAVFPCISQLTCHVTDIRVRQAVREWLGRVGRVYDIIV

SEQ ID NO: 40088 - protein, 50 aa, Homo sapiens
MVLTVLNQIQILPDQTFTALQPAVFPCISQLTCHVTDIRVRQAAREWLGR

SEQ ID NO: 40089 - protein, 136 aa, Homo sapiens
  misc_feature (1)...(136): Xaa = X or * as defined in Table 2
IHANNCSXLXKAALNFVLLLLQKRLXGEKHLTLSETGREGNKVGGVGSXVTGTGQETELGSLGRCHSPLSVLHLLPFFSILLGRTHLNALLIRDYFASSCKYLXEVLLSLSDGSGXNLMSVWMAGNSSAEYVRTEL

SEQ ID NO: 40090 - protein, 1982 aa, Homo sapiens
  DOMAIN (11)..(25): Fusion glycoprotein F0 domain identified by eMATRIX, accession number PF00523D, p-value=7.188e-10, raw score of 11.39
  DOMAIN (1065)..(1074): Helper component proteinase domain identified by PFam, accession name Peptidase_C6, E-value=0.0056, PFam score of 7.9
MDGMTEACIKGGIEACYAAVSCVCTLLGALDELSQGKGLSEGQVQLLLLRLEELKDGAEWSRDSMEINEADFRWQRRVLSSEHTPWESGNERSLDISISVTTDTGQTTLEGELGQTTPEDHSGNHKNSLKSPAIPEGKETLSKVLETEAVDQPDVVQRSHTVPYPDITNFLSVDCRTRSYGSRYSESNFSVDDQDLSRTEFDSCDQYSMAAEKDSGRSDVSDIGSDNCSLADEEQTPRDCLGHRSLRTAALSLKLLKNQEADQHSARLFIQSLEGLLPRLLSLSNVEEVDTALQNFASTFCSGMMHSPGFDGNSSLSFQMLMNADSLYTAAHCALLLNLKLSHGDYYRKRPTLAPGVMKDFMKQVQTSGVLMVFSQAWIEELYHQVLDRNMLGEAGYWGSPEDNSLPLITMLTDIDGLESSAIGGQLMASAATESPFAQSRENLMTSTSGRRWQFARYILVGCWKNLIDTLSTPLTGRMAGSSKGLAFILGAEGIKEQNQKERDAICMSLDGLRKAARLSCALALAQMAAASCVQEEKEEREAQEPSDAITQVTTGGPEPTWCLGCSMHTPAQAYTRQPTLVPVLCVMPVKLKVEQKLEQIGKVQGVWLHTAHVLCMEAILSVGLEMGSHNPDCWPHVFRVHDGLPPPDGTNPALGNLEWAVAEHQSGLSMMLFTSKQTYSEMRDLANHLRPRVCEYVGTLEHNHFSDGASQPPLTISQPQKATGSAGLLGDPECEGSPPEHSPEQGRSLSTAPVVQPLSIQDLVREGSRGRASDFRGGSLMSGSSAAKVVLTLSTQADRLFEDATDKLNLMALGGFLYQLKKASQSQLFHSVTDTVDYSLAMPAILGVGSIIPRFTDEIIKEENLWPSITQLLNGARIRIQTVGLLGPPTEPLPHSLLSSSFDHTCHVPGEVKSTQDRKSALHLFRLGNAMLRIVRSKARPLLHVMRCWSLVAPHLVEVSTGKAACHKERHVSQKAVSFIHDILTEVLTDWNEPPHFHFNEALFRPFERIMQLELCDEDVQDQVVTSIGELVEVCSTQIQSGWRPLFSALETVHGGNKSEMKEYLVGDYSMGKGQAPVFDVFEAFLNTDNIQVFANAATSYIMCLMKFVKGLGEVDCKEIGDCAPAPGAPSTDLCLPALDYLRRCSQLLAKIYKMPLKPIFLSGRLAGLPRRLQEQSASSEDGIESVLSDFDDDTGLIEVWIILLEQLTAAVSNCPRQHQPPTLDLLFELLRDVTKTPGPGFGIYAVVHLLLPVMSVWLRRSHKDHSYWDMASANFKHAIGLSCELVVEHIQSFLHSDIRYESMINTMLKDLFELLVACVAKPTETISRVGCSCIRYVLVTAGPVFTEEMWRLACCALQDAFSATLKPVKDLLGCFHSGTESFSGEGCQVRVAAPSSSPSAEAEYWRIRAMAQQVFMLDTQCSPKTPNNFDHAQSCQLIIELPPDEKPNGHTKKREIVVSLLSHQVLLQNLYDILLEEFVKGPSPGEEKTIQVPEAKLAGFLRYISMQNLAVIFDLLLDSYRTAREFDTSPGLKCLLKKVSGIGGAANLYRQSAMSFNIYFHALVCAVLTNQETITAEQVKKVLFEDDERSTDSSQQCSSEDEDIFEETAQVSPPRGKEKRQWRARMPLLSVQPVSNADWVWLVKRLHKLCMELCNNYIQMHLDLENCMEEPPIFKGDPFFILPSFQSESSTPSTGGFSGKETPSEDDRSQSREHMGESLSLKAGGGDLLLPPSPKVEKKDPSRKKEWWENAGNKIYTMAADKTISKLMTEYKKRKQQHNLSAFPKEVKVEKKGEPLGPRGQDSPLLQRPQHLMDQGQMRHSFSAGPELLRQDKRPRSGSTGSSLSVSVRDAEAQIQAWTNMVLTVLNQIQILPDQTFTALQPAVFPCISQLTCHVTDIRVRQAVLCCTFISVFLKEESSFLAGFEVCGLSACDTEYPVKVAVLTYSALELPAIHTDIRFQPEPSLSDSSTSQRYLQLDAK

SEQ ID NO: 40091 - protein, 739 aa, Homo sapiens; identical to SEQ ID NO: 33776
  DOMAIN (442)..(453): RNase H domain identified by eMATRIX, accession number PF00075B, p-value=7.517e-12, raw score of 12.56
  DOMAIN (375)..(560): Reverse transcriptase domain identified by PFam, accession name rvt, E-value=2.4e-37, PFam score of 137.5

SEQ ID NO: 40092 - protein, 453 aa, Homo sapiens
  DOMAIN (155)..(166): RNase H domain identified by eMATRIX, accession number PF00075B, p-value=6.276e-12, raw score of 12.56
  DOMAIN (88)..(277): Reverse transcriptase domain identified by PFam, accession name rvt, E-value=1.2e-28, PFam score of 108.6
MPEIATPLLGRDILAKTGAIIHLNIGEGTPVCCPLLEVWVTEGQYGRAKNARPVRVKLKDSASFPYQRQYPLRPEAQQGLQKIVKDLKAQGLVKPCSSPCNTTILGVQKPNGQWRLVQDFGIINEAIVHLHPAVPNPYTLLSQIPEEAEWFTVLDLKDAFFCIPVHPDSQFLFAFEDPLNPTSQLTWTVLPQGFRDSSHLFGQALTRDLSQFSYLDTLVLWYMDDLLLAAHSETLCHQATQALLNFLAACDYKVSKPKVQLCSQQGRDFTVWTSHDVNGILTAKGDLWLSDNRLLKYQALLLEGPVLRLRICATLNPVPFLPDNEEKIEHNCQQVIAQTYTARGGPFRAIWREGEFLISEGTPIKHQEAIRRLLFAVQQPKEVTVLHCRGHQKGKEREIEGNRQEDIEAKRAARQDPPLEMLIKGPVVWGNPLRETKPQYSEEEIEWGTPRGP

SEQ ID NO: 40093 - protein, 259 aa, Homo sapiens
MNIKNPIAAQHLDNLPIVKASSIGMTWGLVRNGVSAPTQKSCIRIHILARCTGAVAFEKLYFKSPANQAHARKVGKQVQDCYIGRDIVAKAGAIIHLNVGKGTPVCCPLLEEGINSEVWTTEGQYGRAKNARPVQVKLKDSTSFPYQRQYPLRPKALTKGFQKIVKDLKAQGLVKPCSNPCSTPILGVQKPNRQWRIEALKLQIVLQMEPQMQSMTKIYHGPLGRPASPCSDVNDIEGNPTKEISTAPPLLCPNSAGSS

SEQ ID NO: 40094 - protein, 138 aa, Homo sapiens
PRVRPRVRLAFQAAESVGIKSTLDINEMVRTERPDWQNVMLYVTAIYKYFETCRPVAAGVFLLKRILNYTGASWDGGVGVPRIFWRKVAMDGWAVSVFSLWESHGSSIRPEVSNRERGWARGGLGPAYLEACLGPLLG

SEQ ID NO: 40095 - protein, 149 aa, Homo sapiens
  DOMAIN (62)..(92): Actinin-type actin-binding domain proteins domain identified by eMATRIX, accession number BL00019D, p-value=8.138e-14, raw score of 15.33
  DOMAIN (40)..(149): Calponin homology (CH) domain identified by PFam, accession name CH, E-value=0.0015, PFam score of 24.4
MVHFISRLLYSDGLDVPGDPIQDSDDAALSVSPHCSPDSRVSTTKHLWVSPRLLRVAVRVKNIDITNFSSSWNDGLAFCALLHTYLPAHIPYQELNSQDKRRNFMLAFQAAESVGIKSTLDINEMVRTERPDWQNVMLFVIAIYKYFET

SEQ ID NO: 40096 - protein, 201 aa, Homo sapiens
DEWPPERIIQYNEPTTWHEDGLWGYRTRFYMINQIIWLQAILEIITNKTDRALTILAQQETQMRNAINQNRLALDYLPAAEGGICGKFNLTNCCLHVDDQGQVVEDIVRDMIKLSHVPMQVWHGFDPGAMFGKWFPVLGGFKTLIIGVILVIGTCLLLPCLLPVLLQMIKSFIATLVHQNASEQLYYMNHYRSVLQEYMGS

SEQ ID NO: 40097 - protein, 291 aa, Homo sapiens
  DOMAIN (116)..(132): DNAJ PROTEIN FAMILY SIGNATURE domain identified by eMATRIX, accession number PR00625F, p-value=7.107e-12, raw score of 11.48
  DOMAIN (48)..(133): DnaJ central domain (4 repeats) domain identified by PFam, accession name DnaJ_CXXCXGXG, E-value=4.3e-32, PFam score of 120.0
GAGGGFGSPMDIFDMFFGGGGRMHRERRGKNVVHQLSVTLEDLYNSATRKLALQKNAICDKCEDRGGKKGGVEYCPNCRGTGMQIRIHQIGPGKVQQIQSVCVECQGHGEQISPKDRCESCNGRKILREKKILEFHIDKGMKYGQKITFHGEGYQEPGLEGEDIIIVLDQKDDAVFTRQGEDLFMCQIVKHGDIKCVINEGMPIYPRPYEKGRLIIEFKVNLPENDFLSPDKLSLLEKLLPKRKEVEETDEMDQVELVDFDPNQERWHHYNGEAYEDDEHHPRGGVRCQTS

SEQ ID NO: 40098 - protein, 70 aa, Homo sapiens
GSSFIILCHILYSAFSTNKIQHLKQICNEKYFVLGKNVVHQLSVTLEDLYNGATRKLALQKNVICDKCEG

SEQ ID NO: 40099 - protein, 408 aa, Homo sapiens
  DOMAIN (22)..(39): Nt-dnaJ domain proteins domain identified by eMATRIX, accession number BL00636A, p-value=8.615e-20, raw score of 8.07
  DOMAIN (125)..(216): DnaJ central domain (4 repeats) domain identified by PFam, accession name DnaJ_CXXCXGXG, E-value=1e-29, PFam score of 112.2
KMVKETTYYDVLGVKPNATQEELKKAYRKLALKYHPDKNPNEGEKFKQISQAYEVLSDAKKRELYDKGGEQAIKEGGAGGGFGSPMDIFDMFFGGGGRMQRERRGKNVVHQLSVTLEDLYNGATRKLALQKNVICDKCEGRSGRFKEQGAVRSACPNCRGTGMQIRIHQIGPGMVQQIQSVCMECQGHGERIRPKDRCKSCNGRKIVREKKILEVHIDKGMKDGQKITFHGEGDQEPGLEPGDIIIVLDQKDHAVFTRRGEDLFMCMDIQLVEALCGFQKPISTLDNRTIVITSHPGQIVKHGDIKCVLNEGMPIYRRPYEKGRLIIEFKVNFPENGFLSPDKLSLLEKLLPERKEVEETDEMDQVELVDFDPNQERRRHYNGEAYEDDEHHPRGGVQCSDLLMGPVE

SEQ ID NO: 40100 - protein, 111 aa, Homo sapiens
GYSQAPRKRGGECSSLSQPFSKAQPDAASLEPPSLETPAGRTPATLTQGSPPAAVREPLSPGHNAKARLRSRPARPPWIPDPDPPGHFVTDFCAPESLQGETRTSRSFQLL

SEQ ID NO: 40101 - protein, 55 aa, Homo sapiens
  misc_feature (1)...(55): Xaa = X or * as defined in Table 2
SGSXQLQMCSGLPAHTQDETHISSCGQLDLALPPLLPPLPPSPLNTLPPQGLCTC

SEQ ID NO: 40102 - protein, 368 aa, Homo sapiens
MEGEEAAGAAGPDPVGHRKKCGFHPVCEREAPSTFAAVMIHLVVQYIGEICRYLLKQPVREAERRHRVRLAVGNGLRPAIWEEFTERFGVRQIGEFYGATECNCSIANMDGKVGSCGFNSRILPHVYPIRLVKVNEDTMELLRDAQGLCIPCQAGEPGLLVGQINQQDPLRRFNGYVSESATSTKIAHSVFSKGDSAYLSRDALMMDELGYMYYRDRSGDTFRWRGENVSTTDVEGELSRLLGQTDVAVYGVAVPGKLGLQGVVLRHGVEGKAGMAAVADPHSLLDPNAIYQELQKVLAPYARPIFLRLLPQVDTTGTFKIQKTRLQREGFDPRQTSDRLFFLDLKQGHYLPLNEAVYTRICSGAFAL

SEQ ID NO: 40103 - protein, 137 aa, Homo sapiens
  DOMAIN (77)..(95): Ribosomal protein L2 proteins domain identified by eMATRIX, accession number BL00467D, p-value=3.919e-21, raw score of 11.39
  DOMAIN (1)..(137): Ribosomal Proteins L2 domain identified by PFam, accession name Ribosomal_L2, E-value=1.5e-71, PFam score of 251.1
MPEGTIVCCLEEKPGDRGKLARASGNYATVISHNPETKKTPNRAVVGVVAGGGRIDKPILKAGRAYHKYKAKRNCWPRVRGVAMNPVEHPFGGGNHQHMRKPSTIRRDAPAGRKVGLIAARRTGRLRGTKTVQEKEN

SEQ ID NO: 40104 - protein, 153 aa, Homo sapiens
  DOMAIN (43)..(76): Ribosomal protein L2 proteins domain identified by eMATRIX, accession number BL00467B, p-value=4.414e-28, raw score of 19.54
  DOMAIN (8)..(115): Ribosomal Proteins L2 domain identified by PFam, accession name Ribosomal_L2, E-value=7e-58, PFam score of 205.7
  misc_feature (1)...(153): Xaa = X or * as defined in Table 2
VRQCRGIRDPYRFKKRTELFIAAEGIHTGQFVYCGKKAQLNIGNVLPVGTMPEGTIVCCLEEKPGDRGKLARASGNYATVISHNPETKKTRVKLPSGSKKVISSANRAVVGVVSGSSXMLRAVGEHAVSAGGQPVARLGPWNSITCCSKTWVL

SEQ ID NO: 40105 - protein, 233 aa, Homo sapiens
  DOMAIN (118)..(164): Ribosomal protein L2 proteins domain identified by eMATRIX, accession number BL00467C, p-value=2.000e-29, raw score of 31.86
  DOMAIN (38)..(233): Ribosomal Proteins L2 domain identified by PFam, accession name Ribosomal_L2, E-value=6.5e-90, PFam score of 312.1
MQEVPGMFERNYPHPAITFKPSVPVSRSLDYAPLPGGVFRDPYWFKKRTELFIAAEGIHTGQFVYCGKKAQLNIGSVLPVGTMPEGMIVCCLEEKPGGRSKLSWASGNYATAISHNPETKKTRVKLPSGSKKVVSSANRAVVGVVAGGGRTDKPILKACQAYHKYKAKRNWWPRVWDVAMNPMEHPFGGGNHQHIGIPSAISRDDPAGCKMGLIAARQTGRLWGTKTVQEKEN

SEQ ID NO: 40106 - protein, 296 aa, Homo sapiens
  DOMAIN (179)..(225): Ribosomal protein L2 proteins domain identified by eMATRIX, accession number BL00467C, p-value=5.755e-20, raw score of 31.86
  DOMAIN (26)..(296): Ribosomal Proteins L2 domain identified by PFam, accession name Ribosomal_L2, E-value=4.8e-69, PFam score of 242.8
  misc_feature (1)...(296): Xaa = X or * as defined in Table 2
QCGGIRRTGPVAMGRVIRGQRKGAFSVFRAHVKHRRGAARLRAVDFAERHGYIKGIVKDAERWPGREGKGRPAGTPHSRRLCPQDIIHDRGRGAPLARVVFRDPYRFKKRTELFIAAEGIHTGQFVYCGKKAQLNIGNVLPVGTMPXGTIVCCLEEKPGDRGKLARASGNYATVISHNPETKKTRVKLPSGSKKVISSANRAVVGVVAGGGRIDKPIFEGWPGRYHKYKAKRNCXPRIRGVAMNPVEHPFGGGNHQHIGKPSTIRRDAPAGRKVGLIAARRTGRLRGTKTVQEKEN

SEQ ID NO: 40107 - protein, 134 aa, Homo sapiens; identical to SEQ ID NO: 36181

SEQ ID NO: 40108 - protein, 77 aa, Homo sapiens
QESTLSHSRMERSVFMPRPQAVGSSNYASTSAGLKYPGSGADLPPPQRAAGDSGEDSDDSDYENLIRTNQIYLLLSA

SEQ ID NO: 40109 - protein, 140 aa, Homo sapiens
MKVIGWYRFRRNTQQQMSYREQVLHKQLTRILGVPDLVFLLFSFISTANNSTHALEYVLFRPNRSANSNADHVGAGPPAAPAGGFQPLSQAGARGQAGTSCGSPPGHQGRPEELVTRAAPAPGCRGGAASETVAVTTDTC

SEQ ID NO: 40110 - protein, 420 aa, Homo sapiens
EISIMAASISGYTFSAVCFHSANSNADHEGFLLGEVRQEETFSISDSQISNTEFLQVIEIHNHQPCSKLFSFYDYASKVNEESLDRILKDRRKKVIGWYRFRRNTQQQMSYKEQVLHKQLTRILGVPDLVFLLFSFISTANNSTHALEYVLFRPNRRYNQRISLAIPNLGNTSQQEYKVSSVPNTSQSYAKVIKEHGTDFFDKDGVMKDIRAIYQVYNALQEKVQAVCADVEKSERVVESCQAEVNKLRRQITQRKNEKEQERRLQQAVLSRQMPSESLDPAFSPRMPSSGFAAEGRSTLGDAEASDPPPPYSDFHPNNQESTLSHSRMERSVFMPRPQAVGSSNYASTSAGFEVFLGSGADLPPPQRAAGDSGEDSDDSDYENLIDPTEPSNSEYSHSKDSRPMAHPDEDPRNTQTSQI

SEQ ID NO: 40111 - protein, 170 aa, Homo sapiens
GAYGGGYGACDNYNGYGYGFGSDRFGRDLNYCFSGMSDHKYGDGGSTFQSTTGHCIYVHIEIGPDGRVTGEADVEFATHEDAVAAMSKDKANMQHSYVEPFLNCAAGASGTAYGSQMMGGMGLSIQSSYGGPASPQLSGGYGGGYGGHSSMSGFDQVLQENSCDFQSDIA

SEQ ID NO: 40112 - protein, 192 aa, Homo sapiens
  DOMAIN (106)..(125): Eukaryotic  RNA-binding region RNP-1 proteins domain identified by eMATRIX, accession number BL00030A, p-value=9.143e- 09, raw score of 14.39
  DOMAIN (106)..(174): RNA recognition motif. domain identified by PFam, accession name rrm, E-value=3.3e-05, PFam score of 30.7
  misc_feature (1)...(192): Xaa = X or * as defined in Table 2
XYIEIFKSSRAEVRTHYDPPRKLMAMQRPGPYDRPGAGRGYNSIGRGAGFERMRRGAYGGGYGGYDDYNGYNDGYGFGSDRFGRGMSDHRYGDGGSTFQSTTGHCVHMRGLPYRATENDIYNFFSPLNPVRVHIEIGPDGRVTGEADVEFATHEDAVAAYVKRQSKYATQICRTLLEFYSRSQAVVLTNTDM

SEQ ID NO: 40113 - protein, 1216 aa, Homo sapiens
  DOMAIN (637)..(650): Laminin-type EGF-like (LE) domain proteins domain identified by eMATRIX, accession number BL01248, p-value=6.914e-12, raw score of 11.02
  DOMAIN (210)..(1193): Laminin B (Domain IV) domain identified by PFam, accession name laminin_B, E-value=3.8e-110, PFam score of 379.3
  misc_feature (1)...(1216): Xaa = X or * as defined in Table 2
MRVRHVGQAALELLTSVRESRATSAFQVSPYEDEPCRPCNCDPVGSLSSVCIKDDLHSDLHNGKQPGQCPCKEGYTGEKCDRCQLGYKDYPTCVSCGCNPVGSASDEPCTGPCVCKENVEGKACDRCKPGFYNLKEKNPRGCSECFCFGVSDVCSSLSWPVGQVNSMSGWLVTDLISPRKIPSQQDALGGRHQVSINNTAVMQRLAPKYYWAAPEAYLGNKLTAFGGFLKYTVSYDIPVETVDSNLMSHADVIIKPYEEYLNVVRLVPENFQDFHSKRQIDRDQLMTVLANVTHLLIRATYNSAKMALYRYVLKLEEKLMVKRQCTCTENLFAGLWVVFGFMFLRKPATVGYEGSDILDPGPPCWLFLMGQSVSSTVSECLKEVNGKHRVNFLPQTAKRIWTHLPSLCDTHLHFSSXNCTVWKWCAGNIFAFWCPXXXFSGKEHSTRGXRAVIXSVLFRNGYGGSKKKXTXEIRDXERRLCFNXIXCSENQIWLNXSRRSVCXRHEENPPSLSDXIDCLFCAFGIQLKRNKTEKVKGRETFIHIDSPVCHIEILPICLWLWFDCXVEWPWTPWREVEHGPVXLLPALPSSGXACRRLCGIRSGQGWVRVGPGNRCTPLDLCLILDALPLHRDSGNVDPSEAGHCDSVTGECLKCLGNTDGAHCERCADGFYGDAVTAKNCRDRGCSXRNSRPLPLSKPSCDFPLCRKSKHPQSPSSLCWSHICPGAVPGWSSDTVALGXAKHPHVRLQRPDLLHGSSEPSRLRCAPAARGPPPLHVXPWQRQNKGLSPCTAQXWQVAHGQDRLCXKKRLHNCRRPRVSHGDCGGRWNHAGCGGFVLPRRPALPVPGQENWKYHPQHPCLHWGCDGXQQTAGQGQHRCLPSRXTGATQCPGRNILXRKRICSSCQRGLQSPVRCEPSHCEFRTSSQNGVLLEDQHCQSGCHWTRACDGKENVFGPQCNECRDGTFALRADNPLGCSPCFCSGLSHLCSELEDYVRTPVTLGSDQPLLRVVSQSNLRGTTEGVYYQAPDFLLDAATVRQHIRAEPFYWRLPQQFQGDQLMAYGGKLKYSVAFYSLDGVGTSNFEPQVLIKGGRIRKQVIYMDAPAPENGVRQEQEVAMRENFWKYFNSVSEKPVTREDFMSVLSDIEYILIKASYGQGLQQSQDCAPGYHRGKLPAGSDRGPRPLVAPCVPCSCNNHSDTCDPNTGKCLVCWFVGVLA

SEQ ID NO: 40114 - protein, 33 aa, Homo sapiens
  misc_feature (1)...(33): Xaa = X or * as defined in Table 2
XGNVDPSEAGHCDSVTGECLKCLGNTDGAHCES

SEQ ID NO: 40115 - protein, 67 aa, Homo sapiens
  DOMAIN (20)..(49): TYPE III EGF-LIKE SIGNATURE domain identified by eMATRIX, accession number PR00011C, p-value=7.136e-15, raw score of 24.25
NGVLLGISTAKVDAIGLELVDGKENVFGPQCNECRDGTFALRADNPLGCSPCFCSGLSHLCSELEDY

SEQ ID NO: 40116 - protein, 110 aa, Homo sapiens
  DOMAIN (1)..(83): Laminin B (Domain IV) domain identified by PFam, accession name laminin_B, E-value=0.024, PFam score of -14.4
PYEEYLNVVRLVPENFQDFHSKRQIDRDQLMTVLANVTHLLIRATYNSAKMALYRYVLKLEEKLMVKRQCTCTENLFAGLWVVFGFMFLRKPATVGYEGSDILDPGPPCW

SEQ ID NO: 40117 - protein, 264 aa, Homo sapiens
  DOMAIN (14)..(33): TYPE III EGF-LIKE SIGNATURE domain identified by eMATRIX, accession number PR00011B, p-value=9.100e-20, raw score of 13.08
  DOMAIN (2)..(101): Laminin EGF-like (Domains III and V) domain identified by PFam, accession name laminin_EGF, E-value=1.7e-12, PFam score of 54.9
ACNCSLVGSTHHRCDVVTGHCQCKSKFGGRACDQCSLGYRDFPDCVPCDCDLRGTSGDACNLEQGLCGCVEETGACPCKFLTGYTSTAQGMGTPVLVHLDCSNKIPYTEWLISNRNLEDGKFRIKAPADLVSSKDLLPPRQPSSSCVLTGSHDPYDGEGTDELRTQGLQPRHRATGPAVRHIPISLGQATVLEDSKAALPGLGPTLMAVTVVTTEAAVAMVVGDRGEERGGTLVAPGTRVGGQFAHQSPEPVPIESAQIFNSMT

SEQ ID NO: 40118 - protein, 60 aa, Homo sapiens
  DOMAIN (16)..(29): Laminin-type EGF-like (LE) domain proteins domain identified by eMATRIX, accession number BL01248, p-value=5.886e-12, raw score of 11.02
TERELTTKGGKLQCQCEHNTCGESCNRCCPGYHQQPWRPGTVSSGNTCEATCADMERARV

SEQ ID NO: 40119 - protein, 178 aa, Homo sapiens
ITLFGQSSNASFYFNQIRSSVVLGGWGNTATNPNNPITQDKRGKNERFQDFRLGEPGGRYAFSQEKESLFPAILNLASNAHISTNATCGEKGPEMFCKLVEHVPGLFPAILNLASNAHISTNATCGEKGPEMFCKLVEHVPGRPVRNPQCRICDGNSANPRGKCRAFISEIPMGMYTL

SEQ ID NO: 40120 - protein, 147 aa, Homo sapiens
  DOMAIN (93)..(140): SEX HORMONE-BINDING GLOBULIN domain identified by eMATRIX, accession number DM01077A, p-value=7.523e-10, raw score of 16.30
  DOMAIN (1)..(146): Laminin G domain identified by PFam, accession name laminin_G, E-value=2.1e-20, PFam score of 75.7
MRRSFHGCIKNLIFNLELLDFNSAVGHEQVDLDTCWLSERPKLAPDAEDSKLLPEPRAFSEQCVVDAALEYVPGAHQFGLTQNSYSILPFNQSAVRKKLSVELSIRTFSSSGLIYYMAHQNQADYAVLQLHGGRLHFMFDLGKGRTK

SEQ ID NO: 40121 - protein, 696 aa, Homo sapiens
  DOMAIN (14)..(440): Laminin G domain identified by PFam, accession name laminin_G, E-value=8.7e-83, PFam score of 288.4
MSSNQKSPTKTSKSPGTANVLDVNNSTLMFVGGLGGQIKKSPAVKVTHFKGCLGEAFLNGKSIGLWNYIEREGKCRGCFGSSQNEDPSFHFDGSGYSVVEKSLPATVTQIIMLFNTFSPNGLLLYLGSYGTKDFLSIELFRGRVKVMTDLGSGPITLLTDRRYNNGTWYKIAFQRNRKQGVLAVIDAYNTSNKETKQGETPGASSDLNRLDKDPIYVGGLPRSRVVRRGVTTKSFVGCIKNLEISRSTFDLLRNSYGVRKGCLLEPIRSVSFLKGGYIELPPKSLSPESEWLVTFATTNSSGIILAALGGDVEKRGDREEAHVPFFSVMLIGGNIEVHVNPGDGTGLRKALLHAPTGTCSDGQAHSISLVRNRRIITVQLDENNPVEMKLGALVESRTINVSNLYVGGIPEGEGTSLLTMRRSFHGCIKNLIFNLDHGFVDSVEQKRFCGVPSCARESARGRAQAQDTAQELQSESACDKRSPQPPGKGKHMYGGVLQPQSLFQKNLLLFYDEVLDLQPNGKEKEFSVGANHNAFMVVHWGVCGFCLFPSGEWLASPFCVHPQITIHPPDRFQASVTDEGYLFLAKPTQPAPACPLDPIRPLLLGHAQQPLLTDQHTDAAVTPSSAVTARAANYCAGGRNERKKTGREKRHLTGGPCVALRTFTVLHISSHHQVDGIRAGYVQRDGLQPTNRQIVM

SEQ ID NO: 40122 - protein, 2901 aa, Homo sapiens
  DOMAIN (479)..(493): LAMININ CHAIN EGF-LIKE DOMAIN P domain identified by eMATRIX, accession number PD00320A, p-value=3.045e-11, raw score of 14.49
  DOMAIN (270)..(1554): Laminin EGF-like (Domains III and V) domain identified by PFam, accession name laminin_EGF, E-value=9.5e-232, PFam score of 783.3
MRGGVLLVLLLCVAAQCRQRGLFPAILNLASNAHISTNATCGEKGPEMFCKLVEHVPGRPVRNPQCRICDGNSANPRERHPISHAIDGTNNWWQSPSIQNGREYHWVTITLDLRQVFQVAYVIIKAANAPRPGNWILERSLDGTTFSPWQYYAVSDSECLSRYNITPRRGPPTYRADDEVICTSYYSRLVPLEHGEIHTSLINGRPSADDLSPKLLEFTSARYIRLRFERIRTLNADLMTLSHREPKELDPMLPRRYYYSIKDISVGGMCICYGHASSCPWDETTKKLQCQCEHNTCGESCNRCCPGYHQQPWRPGTVSSGNTCEACNCHNKAKDCYYDESVAKQKKSLNTAGQFRGGGVCINCLQNTMGINCETCIDGYYRPHKVSPYEDEPCRPCNCDPVGSLSSVCIKDDLHSDLENGKQPGQCPCKEGYTGEKCDRCQLGYKDYPTCVSCGCNPVGSASDEPCTGPCVCKENVEGKACDRCKPGFYNLKEKNPRGCSECFCFGVSDVCSSLSWPLGQVNSMSGWLVTDLISPRKIPSQQDALGGRHQVSINNTAVMQRLAPKYYWAAPEAYLGNKLTAFGGFLKYTVSYDIPVETVDSNLMSHADVIIKGNGLTLSTQAEGLSLQPYEEYLNVVRLVPENFQDFHSKRQIDRDQLMTVLANVTHLLIRATYNSAKMALYRLESVSLDIASSNAIDLVVAADVEHCECPQGYTGTSCESCLSGYYRVDGILFGGICQPCECHGHAAECNVHGVCIACAHNTTGVHCEQCLPGFYGEPSRGTPGDCQPCACPLTIASNNFSPTCHLNDGDEVVCDWCAPGYSGAWCERCADGYYGNPTVPGESCVPCDCSGNVDPSEAGHCDSVTGECLKCLGNTDGAHCERCADGFYGDAVTAKNCRACECHVKGSHSAVCHLETGLCDCKPNVTGQQCDQCLHGYYGLDSGHGCRPCNCSVAGSVSDGCTDEGQCHCVPGVAGKRCDRCAHGFYAYQDGSCTPCDCPHTQNTCDPETGECVCPPHTQGVKCEECEDGHWGYDAEVGCQACNCSLVGSTHHRCDVVTGHCQCKSKFGGRACVQCSLGYRDFPDCVPCDCDLRGTSGDACNLEQGLCGCVEETGACPCKENVFGPQCNECREGTFALRADNPLGCSPCFCSGLSHLCSELEDYVRTPVTLGSDQPLLRVVSQSNLRGTTEGVYYQAPDFLLDAATVRQHIRAEPFYWRLPQQFQGDQLMAYGGKLKYSVAFYSLDGVGTSNFEPQVLIKGGRIRKQVIYMDAPAPENGVRQEQEVAMRENFWKYFNSVSEKPVTREDFMSVLSDIEYILIKASYGQGLQQSRISDISMEVGRKAEKLHPEEEVASLLENCVCPPGTVGFSCQDCAPGYHRGKLPAGSDRGPRPLVAPCVPCSCNNHSDTCDPNTGKCLNCGDNTAGDHCDVCTSGYYGKVTGSASDCALCACPHSPPASFSPTCVLEGDHDFRCDACLLGYEGKHCERCSSSYYGNPQTPGGSCQKCDCNPHGSVHGDCDRTSGQCVCRLGASGLRCDECEPRHILMETDCVSCDDECVGVLLNDLDEIGDAVLSLNLTGIIPVPYGILSNLENTTKYLQESLLKENMQKDLGKIKLEGVAEETGQPAKRSSTRMLASTQKVNRATERIFKESQDLAIAIERLQMSITEIMEKTTLNQTLDEDFLLPNSTLQNMQQNGTSLLEIMQIRDFTQLHQNATLELKAAEDLLSQIQENYQKPLEELEVLKEAASHVLSKHNNELKAAEALVREAEAKMQESNHLLLMVNANLREFSDKKLHVQEEQNLTSELIVQGRGLIDAAAAQTDAVQDALEHLEDHQDKLLLWSAKIRHHIDDLVMHMSQRNAVDLVYRAEDHAAEFQRLADVLYSGLENIRNVSLNATSAAYVHYNIQSLIEESEELARDAHRTVTETSLLSESLVSNGKAAVQRSSRFLKEGNNLSRKLPGIALELSELRNKTNRFQENAVEITRQTNESLLILRAIPEGIRDKGAKTKELATSASQSAVSTLRDVAGLSQELLNTSASLSRVNTTLRETHQLLQDSTMATLLAGRKVKDVETQANLLFDRLKPLKMLEENLSRNLSEIKLLISQARKQAASIKVAVSADRDCIRAYQPQISSTNYNTLTLNVKTQEPDNLLFYLGSSTASDFLAVEMRRGRVAFLWDLGSGSTRLEFPDFPIDDNRWHSIHVARFGNIGSLSVKEMSSNQKSPTKTSKSPGTANVLDVNNSTLMFVGGLGGQIKKSPAVKVTHFKGCLGEAFLNGKSIGLWNYIEREGKCRGCFGSSQNEDPSFHFDGSGYSVVEKSLPATVTQIIMLFNTFSPNGLLLYLGSYGTKDFLSIELFRGRVKVMTDLGSGPITLLTDRRYNNGTWYKIAFQRNRKQGVLAVIDAYNTSNKETKQGETPGASSDLNRLDKDPIYVGGLPRSRVVRRGVTTKSFVGCIKNLEISRSTFDLLRNSYGVRKGCLLEPIRSVSFLKGGYIELPPKSLSPESEWLVTFATTNSSGIILAALGGDVEKRGDREEAHVPFFSVMLIGGNIEVHVNPGDGTGLRKALLHAPTGTCSDGQAHSISLVRNRRIITVQLDENNPVEMKLGTLVESRTINVSNLYVGGIPEGEGTSLLTMRRSFHGCIKNLIFNLELLDFNSAVGHEQVDLDTCWLSERPKLAPDAEDSKLLPEPRAFPVGAASFTISQVQSAKEGLGQRELKWGLAVKVPAKAGAGAGAGAVLKIRAGTGRERMYGGVLQPQSLFQKNLLLFYDEVLDLQPNGKEKEFSVGANHNAFMVVHWGVCGFCLFPSGEWLASPFCVHPQITIHPPDRFQASVTDEGYLFLAKPTQPAPACPLDPIRPLLLGHAQQPLLTDQHTDAAVTPSSAVTARAANYCAGG

SEQ ID NO: 40123 - protein, 186 aa, Homo sapiens
  DOMAIN (9)..(64): APOLIPOPROTEIN PLASMA LIPID TRANSPORT H domain identified by eMATRIX, accession number PD01733B, p-value=5.840e-10, raw score of 20.44
MGDLEDKLVPFIGELPRHLDQNSEQLKQVVQRELKELHETCQQHQLCQASTSGEPKERDKEEGKDSKPRSLRFTWSMKTTSSMDPNDMMREIRKVLDANNCDYEQKERFLLFCVHGDARQDSLPCQWGDGKSCQVGPRLSLNGVRFKRISGTSYCPLKNIASKIANELKPVKKSQIYQVQGRYIHI

SEQ ID NO: 40124 - protein, 149 aa, Homo sapiens
  DOMAIN (25)..(57): ABC transporters family proteins domain identified by eMATRIX, accession number BL00211B, p-value=7.750e-29, raw score of 13.37
  DOMAIN (1)..(99): ABC transporter domain identified by PFam, accession name ABC_tran, E-value=7.7e-06, PFam score of 6.4
ANAHGFIMELQDGYSTETGEKGAQLSGGQKQRVAMARALVRNPPVLILDEATSALDAESEYLIQQAIHGNLQKHTVLIIAHRLSTVEHAHLIVVLDKGRVVQQGTHQQLACPRAGFYGKLVQRQMLGLQPAADFTAGHNEPVANGSHKA

SEQ ID NO: 40125 - protein, 167 aa, Homo sapiens
MVKYYLGQGVLRSSWDQVVPAFWQRYRNPVQRYLTEDIVHRENQTMTTFTWNINHARPMVVEERCVYCVNSDNSGWTEIRREAWVSSSLCGVSRAVWEFGLAQFKSNVTKTLKGFEYILAKLQGEAASKTLIKTAREAKEKAKETALAATEKAKDLASKAATKKQQQ

SEQ ID NO: 40126 - protein, 75 aa, Homo sapiens
TLARVSGQLSILPILISCQEFGLARFKSNVTKTMKGFEYILAKLQGEFLGMWIFLIGRGSFSLAGVESGLVIALL

SEQ ID NO: 40127 - protein, 94 aa, Homo sapiens
KFIADGCKEALLEEKRRFCFLVDKHCGFANHIHYYHLQSAELLNSKLPRWQETCVDAIKAPEKIMNMIEEIKTPASTPVSGTPQASPMIERSNV

SEQ ID NO: 40128 - protein, 131 aa, Homo sapiens
DQDQVLIGDVLLLLSLVRDTEDVWGLVVRHYLTRAVSFLGLSPTPVRSISTVNLSENSSVVIPPPDYLECLSMGAAADRRADSARTTSTFKAPASKPETAAPNDANGTAKPPFLSGENPFATVKLRPTVTN

SEQ ID NO: 40129 - protein, 415 aa, Homo sapiens
  DOMAIN (338)..(396): SH3 domain identified by PFam, accession name SH3, E-value= 0.00011, PFam score of 26.4
DRQNVMEQFNPGLRNLINLGKNYEKAVNAMILAGKAYYDGVAKIGEIATGSPVSTELGHVLIEISSTHKKLQRESLMENFKKFHKEIIHELEKKIELDVKYMNATLKRYQTEHKNKLESLEKSQAELKKIRRKSQGSRNALKYEHKEIEYVETVTSRQSEIQKSIADGCKEALLERERGASCFPGLNKHCGFANTHIHYYHLQSAELLNSKLPRWQETCVDAIKVPEKIMNMIEEIKTPASTPVSGTPQASPMIERSNVVRKDYDTLSKCSPKMPPAPSGRAYTSPLIDMFNNPATAAPNSQRVNNSTGTSEDPSLQRSVSVATGLNMMKKQKVKTIFPHTAGSNKTLLSFAQGDVITLLIPEEKDGWLYGEHDVSKARGWFPSSYTKLLEENETEAVTVPTPSPTPVRSFSGEA

SEQ ID NO: 40130 - protein, 375 aa, Homo sapiens
  DOMAIN (206)..(264): SH3 domain identified by PFam, accession name SH3, E-value= 0.00011, PFam score of 26.4
MLRLHFGKIPGICEEGHVLIEISSTHKKLNESLDENFKKFHKEIIHELEKKIELDVKYMNYVETVTSRQSEIQKFIADGCKEALLEEKRRFCFLVDKHCGFANHIHYYHLQSAELLNSKLPRWQETCVDAIKVPEKIMNMIEEIKTPASTPVSGTPQASPMIERSNVSLFLLGNDQSEEIGQGTSEDPSLQRSVSVATGLNMMKKQKVKTIFPHTAGSNKTLLSFAQGDVITLLIPEEKDGWLYGEHDVSKARGWFPSSYTKLLEENETEAVTVPTPSPTPVRSISTVNLSENSSVVIPPPDYLECLSMGAAADRRADSARTTSTFKAPASKPETAAPNDANGTAKPPFLSGENPFATVKLRPTVTNDRSAPIIR

SEQ ID NO: 40131 - protein, 144 aa, Homo sapiens
  DOMAIN (93)..(106): Aminotransferases class-III pyridoxal-phosphate attachment si domain identified by eMATRIX, accession number BL00600F, p-value= 8.105e-12, raw score of 8.77
  DOMAIN (59)..(132): Aminotransferases class-III pyridoxal-pho domain identified by PFam, accession name aminotran_3, E-value=6.3e-17, PFam score of 50.3
PNFRAAHASGPEKASHCPRSPPYCWQSQGAKPRDLLGPDLIPLNHSPRVSHLLCHRHIRKAGRVFVADEIQVGFGRVGKHFWAFQLQGKDFVPDIVTMGKSIGNGHPVACVAATQPVARAFEATGVEYFNTGCWALHWCGSDQR

SEQ ID NO: 40132 - protein, 75 aa, Homo sapiens
  misc_feature (1)...(75): Xaa = X or * as defined in Table 2
SIPPYPIPPPVDRKEIDXLEGMQTSGLFQQTSGXEEGVGSIMASGRPPHPEPLKADFICKREVRLAFSIACIWMR

SEQ ID NO: 40133 - protein, 283 aa, Homo sapiens
  DOMAIN (105)..(216): Aminotransferases class-III pyridoxal-pho domain identified by PFam, accession name aminotran_3, E-value=5.7e-09, PFam score of 27.4
MDADISFTQNCQNLEAANMSFSRQELGVILMPCSPNPSQQPPNPGQPVSKMSLEPLRCPKLSAKAHTRRASQGAWGLGERTVWTVPQDRRLFFPEDPVKIVRAQGQYMYDEQGPEYIDCISNVAHGLTPEFSGANGKPDFDVTLFRFFNVGNKQKSPKPSKTQRHERGPVSCAVGLAVLNVLEKEQLQDHATSVGSFLMQLLGQQKIKHPIVGDVRHQCLKPLGLVGCQRPLREHRKRYRKAHEQNQVLNTNSRYLHDNIVDYAQRLSETLPEQLCVFYFLNS

SEQ ID NO: 40134 - protein, 26 aa, Homo sapiens
  misc_feature (1)...(26): Xaa = X or * as defined in Table 2
LVIFSIFNLVGXNISDCIILICQLKV

SEQ ID NO: 40135 - protein, 246 aa, Homo sapiens
  DOMAIN (106)..(125): Aminotransferases class-III pyridoxal-phosphate attachment si domain identified by eMATRIX, accession number BL00600G, p-value= 2.125e-12, raw score of 12.43
  DOMAIN (43)..(217): Aminotransferases class-III pyridoxal-pho domain identified by PFam, accession name aminotran_3, E-value=1.1e-40, PFam score of 118.5
YCWQSQGAKPRDLLGPDLIPLNHSPRVSHLLCHRHIRKAGGVFVADEIQVGFGRVGKHFWAFQLQGKDFVPDIVTMGKSIGNGHPVACVAATQPVARAFEATGVEYFNTFGGSPVSCAVGLAVLNVLEKEQLQDHATSVGSFLMQLLGQQKIKHPIVGDVRGVGLFIGVDLIKDEATRTPELKRHVYLVSRLKENYVLLSTDGPGRNILKFKPPMCFSLDNARQVVAKLDAILTDMEEKVRSCENR

SEQ ID NO: 40136 - protein, 197 aa, Homo sapiens
RQEVCRILKQVFLIFPHFCLGRGLIDMVRNQAMADAFERLGDRQFQSPLRWEVVGKNLLAMVIQGPLFLLFTLLLQHRSQLLPQPRVRSLPLLGEEDEDVARERERVVQGATQGDVLVLRNLTKVYRGQRMPAVDRLCLGIPPGEVSPGVEARCRDSEWLPYCMPCPSSFTEHLLCIHHLLLGTYCMPIFVLLFLFY

SEQ ID NO: 40137 - protein, 1092 aa, Homo sapiens
  DOMAIN (886)..(918): ABC transporters family proteins domain identified by eMATRIX, accession number BL00211B, p-value=8.500e-18, raw score of 13.37
  DOMAIN (781)..(962): ABC transporter domain identified by PFam, accession name ABC_tran, E-value=2.4e-39, PFam score of 144.2
MGFHHVGQAGLKLLTSGTPQLLALVQHWVPGARLVEELPHELVLVLPYTGAHDGSFATLFRELDTRLAELRLTGYGISDTSLEEIFLKVVEECAADTDMEDGTLRAAPMHRHCWPRRNPTAQDAATGDSAGDGEPAGSAPETDQGSGPDAVGRVQGWALTRQQLQALLLKRFLLARRSRRGLFAQIVLPALFVGLALVFSLIVPPFGHYPALRLSPTMYGAQVSFFSEDAPGDPGRARLLEALLQEAGLEEPPVQHSSHSALECAQPIVCRFSAPEVPAEVAKVLASGNWTPESPSPACQCSRPGARRLLPDCPAAAGGPPPPQAVTGSGEVVQNLTGRNLSDFLVKTYPRLVRQGLKTKKWVNEVRYGGFSLGGRDPGLPSGQELGRSVEELWALLSPLPGGALDRVLKNLTAWAHSLDAQDSLKIWFNNKGWHSMVAFVNRASNAILRAHLPPGPARHAHSITTLNHPLNLTKEQLSEGALMASSVDVLVSICVVFAMSFVPASFTLVLIEERVTRAKHLQLMGGLSPTLYWLGNFLWDMCNYLVPACIVVLIFLAFQQRAYVAPANLPALLLLLLLYGWSITPLMYPASFFFSVPSTAYVVLTCINLFIGINGSMATFVLELFSDQKLQEVSRILKQVFLIFPHFCLGRGLIDMVRNQAMADAFERLGENFLSGDRQFQSPLRWEVVGKNLLAMVIQGPLFLLFTLLLQHRSQLLPQPRVRSLPLLGEEDEDVARERERVVQGATQGDVLVLRNLTKVYRGQRMPAVDRLCLGIPPGECFGLLGVNGAGKTSTFRMVTGDTLASRGEAVLAGHSVAREPSAAHLSMGYCPQSDAIFELLTGREHLELLARLRGVPEAQVAQTAGSGLARLGLSWYADRPAGTYSGGNKRKLATALALVGDPAVVFLDEPTTGMDPSARRFLWNSLLAVVREGRSVMLTSHSMEECEALCSRLAIMVNGRFRCLGSPQHLKGRSQPAAAFVAAEFPGAELREAHGGRLRLPSCRREGAAPLARVFGELAGARRRARVEDFSVSQTSLEEVFLYFSKDQGKDEDTEEQKEAGVGVDPAPGLQHPKRVSQFLDDPSTVETVL

SEQ ID NO: 40138 - protein, 227 aa, Homo sapiens
  misc_feature (1)...(227): Xaa = X or * as defined in Table 2
RTRGPPPQSRSGGRRRRIPLYLPTSCIKELVAGGVAVESWPGRDAAQLLLCSCLLSPPPVMTETREPAETGGYASLEEDDEDLSPGPEHSSDSEYTLSEPDSEEEEDEEEEEEETTDDPEYDPGYKVKXRLGGGRGGPSRRAPRAAQPPAQPCQLCGRSPLGEAPPGTPRCTGTSCCMPGVRCRQSPHTGSLAEGVGWEEGAEEIGVVTVVMGDGVLPVCVVLEVDV

SEQ ID NO: 40139 - protein, 222 aa, Homo sapiens
MESDIGRKGGKDPEAGPEHSSDSEYTLSEPDSEEEEDEEEEEEETTDDPEYDPGYKVKQRLGGGRGGPSRRAPRAAQPPAQPCQLCGRSPLGEAPPGTPPCRLCCPATAPQEAPAPEGRALGEEEEEPPRAGEGRPAGREKEEEEEEEGTYHCTECEDSFDNLGELTGTSCCMPGVRCRQSPHTGSLAEGVGWEEGAEEIGVVTVVMGDGVLPVCVVLEVNV

SEQ ID NO: 40140 - protein, 169 aa, Homo sapiens
QELREAYTSINSHIYQAEERISEIEDQLNEIKQENKIREKRMKRNEQSLQEVGDYVKRPNLRLIGVSESDGENGTELENTLQDINQENFPNLARQANIQIQEIQRAPQRYSSKRATPRHIIVRFTKASLTRTPEGSTKRGKEQPVPATAKTYQIVKTIDATKKLQQRAK

SEQ ID NO: 40141 - protein, 270 aa, Homo sapiens
MLYSRGPQPMGHGPVLVCGLLGTGCTAGAQELREAYTSISSQIDQAEERISEIEDKLNEIKREDKITEKRMKRNEQSLQEIWDYVKRPNLRLIGVPKSDVENGTKLENTLQDIIQENFPNLARQANVQIQEIQRTPQRYSSRRATPRHIIVRFTKVEMREKMLRAAREKGRVTHKGKPVRLTADLSAETVQARREWGPIFNILKGKNFQPRISYPAKLSFISEGEIKYFTDKQMLKDFVTTRPALKELLKEALNMERNNWYQPLQKHAKL

SEQ ID NO: 40142 - protein, 186 aa, Homo sapiens
  DOMAIN (2)..(17): GLYCOSYL HYDROLASE FAMILY 56 SIGNATURE domain identified by eMATRIX, accession number PR00846B, p-value=9.597e-09, raw score of 13.97
MVNGRIPQAPSQFSHLARLHPAPSPNSDPSPFLAELLLMPSVIGLTPSYPSRFSSESTFLQEAFPDLCQAEDPVYANGGLNYSYRGYGALSSNLQPPASLQTGNHSNGPTDLSMKGGAFTTSTTPTPTPSSTSTSRPVPTAQLSPTEISAVRQLIAGYRESAAFLLRSADELENLILQQNRPRRHL

SEQ ID NO: 40143 - protein, 74 aa, Homo sapiens
  misc_feature (1)...(74): Xaa = X or * as defined in Table 2
KGVQFQFSSYGXPVFPTPFIKXGVLSPLFVFLRFLKDQMVVDVXHYFXGLCSVPLVYISVLVLVPCCFFFTVAL

SEQ ID NO: 40144 - protein, 116 aa, Homo sapiens; identical to SEQ ID NO: 33770
  misc_feature (1)...(116): Xaa = X or * as defined in Table 2

SEQ ID NO: 40145 - protein, 50 aa, Homo sapiens
MYLLLLPGGPCSQSSQDGGRLLPRRWQASCSLTWGSWPHGFQGMESWAMR

SEQ ID NO: 40146 - protein, 641 aa, Homo sapiens
  DOMAIN (121)..(133): RNase H domain identified by eMATRIX, accession number PF00075C, p-value=1.000e-12, raw score of 11.58
  DOMAIN (324)..(469): RNase H domain identified by PFam, accession name rnaseH, E- value=1e-24, PFam score of 95.5
MNQSDQEMTGAFVHMKSYTGLISGVAVKMERHIYQDRRIAIEKEFNSCRTGCMGDWSFTITQIRLLENTGIRVFKDNLVEEAEWFTVLDLMDAFFCIPVHPDSQFLFAFEDPSNPASQLTWTVLPQRFKNSPHLFGQALAQDLSQFSYLDTLVLRYMDDLLLAAYSETLCHQATEALLNFLATCGYKVSKPKAQLCSQQVKYLGLKLSKGTRAPSEECIQPILAYPHPKTLKQLRAFLGITGFCRIWIPSILTAKGDLWLSDNHLLKYQVLLLEGPVLQLRTCATLNPATFLPDNEEKIEHNCQQVIAQTYATRGDLLEVPLTDPDLNLYTDGSSFVQKGLQKAGYAVVSDNGILESNPFTPGTSTQLAELVALTWALEFGEGKRVNINTGSKYAYLVLHAHASIWREREFLTSEGTPIKHQEAIRRLLLVVQKPEEVAVLHCWGHPKGKEREIEGNCQADIEAKRASRQDPPLEMLIERHLVWGNPLWETNPQYSAEEIEWGISRGHSFLPSGWQATEQGKIPLPAANQWKLLKTTHQNFHLCIDSTHQMAKLLFTGPGLFKTLKQIVGACKFVSSRIKAVKLQIILQMEPQMQSMTKIYRGPLDHPDSPCSNVNDIEGTPPEEISTAQPLLHPRPAGSS

SEQ ID NO: 40147 - protein, 697 aa, Homo sapiens
  DOMAIN (245)..(257): RNase H domain identified by eMATRIX, accession number PF00075C, p-value=5.622e-12, raw score of 11.58
  DOMAIN (115)..(331): Reverse transcriptase domain identified by PFam, accession name rvt, E-value=4.9e-16, PFam score of 66.7
MVLVVVAVVVVVLVVAVIVVVVVVVAAVVVGAVVVVVVVVMVVVVVVVVVEEDNQHKTGAINNNNTAKNPQQSPFHSPATSTGAEATQMRRNQKTNPHNMTKQVSLTPPKITLAHQQWIQTKKKYLIYLKKHSGVNKIPRNPTYEGCEGPFQGELQTTAQQNKGGHKQTEDHSMLMDRKNQYCENGHTAQAVPNPYTLLSQIPEDAEWFTVLDPKHAVFCIPVHPDSQFLFAFEDPSNPMSQLIWTVLPQGFRNSPHLFGQALAQDLSQFSYLDTLVLRYMDDLLLATHSETLCHQATQALLNFLATCGYKVSKPKAQLCSQQVKYLGLKLSKGTRTLSEERIQPILGYPHPKTLKQLTAFLGITGFCQIWIPRYSKIARPLNTRIKETQKANTHLVRWTPEAEVAFQALKKALTHAPVLSLPVGQNFSLYVTEKTGIALGVLTPGTSAQLAELIALTRAPELGEGKRVNIYANSIGREREFLTSKGTLVKHQEAIKRLLLAVQKPKEVAVLHCWGHQKGKEREIEENRQADIEARRAARQDPPLEMLTEGPLAFELAMATARAELSLAIHHCCLPPPPQTRCWLPSLRIRQGVCCIPDPARAITLTAWPKIPFLGIRKAKNPQVREHEACHHLGSGLPPFWKWPTTILGALGARTPGNTGSTYTFIGYTYTSPVIFILSWQYVYFHGLYYFKIIFY

SEQ ID NO: 40148 - protein, 428 aa, Homo sapiens
  DOMAIN (211)..(231): DNAJ PROTEIN FAMILY SIGNATURE domain identified by eMATRIX, accession number PR00625A, p-value=5.245e-14, raw score of 12.84
  DOMAIN (199)..(261): DnaJ domain identified by PFam, accession name DnaJ, E-value= 1.8e-05, PFam score of 30.5
MITNSSSVPPEPGGYLSCGNAVTLKCSRKAVYRFSHTELLWEKPQLCLQWWTSGFFALCVGVPRSLIVDSCSKLEQHSTLSRAILLIYKGFCRFRNHHQTGFSPAGANQRGPLAATLSGPGGAECGVNADVEKHLELGKKLLAAGQLADALSQFHAADRECEDNVKTHKEKKAIYEPRRVRLCYILSSQPSEGINPVDTFILDFQLPELNAKKQEIIKAYRKLALQWHPDNFQNEEEKKKAEKKFIDIAAAKELRSFLLEGNLTTRKDIPTKNPSVHHHHQRPKVDKPTKMGKKQNRKTGNSKKQSASPPLKERSSSPATEQSWMENDFDELREEGFRRSNYSELREDIQTKGKEVENFEKNLEECITRITNTEKCLKELMELKTKAQECRSLRSQYDQLEERVSAMEDEMNEMKREGKFRRKKNKKK

SEQ ID NO: 40149 - protein, 504 aa, Homo sapiens
  DOMAIN (405)..(425): DNAJ PROTEIN FAMILY SIGNATURE domain identified by eMATRIX, accession number PR00625A, p-value=5.245e-14, raw score of 12.84
  DOMAIN (37)..(378): TPR Domain domain identified by PFam, accession name TPR, E- value=2.3e-25, PFam score of 97.7
MVAPGSVTSRLGSVFPFLLVLVDLQYEGAECGVNADVEKHLELGKKLLAAGQLADALSQFHAAVDGDPDNYIAYYRRATVFLAMGKSKAALPDLTKVIQLKMDFTAARLQRGHLLLKQGKLDEAEDDFKKVLKSNPSENEEKEAQSQLIKSDEMQRLRSQALNAFGSGDYTAAIAFLDKILEVCVWDAELRELRAECFIKEGEPRKAISDLKAASKLKNDNTEAFYKISTLYYQLGDHDCSFSEFRDVLNLDQDHKRCFAHYKQVKKLNKLIESAEELIRDGRYTDATSKYESVMKTEPSIAEYTVRSKERICHCFSKDEKPVEAIRVCSEVLQMEPDNVNALKDRAEAYLIEEMYDEAIQDYETAQEHNENDQQIREGLEKAQRLLKQSQKRDYYKILGVKRNAKKQEIIKAYRKLALQWHPDNFQNEEEKKKAEKKFIDIAAAKEVLSDPEMRKKFDDGEDPLDAESQQGGGGNPFHRSWNSWQGFNPFSSGGPFRFKFHFN

SEQ ID NO: 40150 - protein, 172 aa, Homo sapiens
  DOMAIN (98)..(145): HMG1/2 proteins domain identified by eMATRIX, accession number BL00353C, p-value=1.000e-40, raw score of 14.83
  DOMAIN (3)..(133): HMG (high mobility group) box domain identified by PFam, accession name HMG_box, E-value=2.8e-26, PFam score of 100.7
LTCQEEHKKKHPDSSVNFVEFSKKCLERWKTTSAKEKSKFEEKAKSDKARCDREIKNYIPPKCKKGRPPSAFFLFCSEHRPKIKSGHPGLFVVETAKKLGEMWSGQSAKDKQPYEQKAVKLQERYEKGIAAYRAKGKSEAGKKGSKKNKPEDEEEEEEKEDEDEEEEGEDEE

SEQ ID NO: 40151 - protein, 1046 aa, Homo sapiens
  DOMAIN (839)..(888): HMG1/2 proteins domain identified by eMATRIX, accession number BL00353A, p-value=1.000e-40, raw score of 9.60
  DOMAIN (843)..(1000): HMG (high mobility group) box domain identified by PFam, accession name HMG_box, E-value=3.2e-50, PFam score of 180.3
YSIATVLAAEEKLDPRRDEAKRLRPQRNFNITFTHGTVFRPLTLESTFFNSALLFTTIKQDLPPLPKTIITNAFHRFRNHHQTGFKLSAANQRGPLAATLSGPGGEGQSAVARLTGEKKNHPGAQYANRLSPRVGRFINAAGTTGFPTGKRARSDSSLAKENNQKAYKETYGVSHITRHDMLQIPKQQQNEKYQVPQFDQSTIKNIESAKGLDVWDSWPLQNADGTVAEYNGYHVVFALAGSPKDADDTSIYMFYQKVGDNSIDSWKNAGRVFKDSDKFDANDPILKDQTQEWSGSATFTSDGKIRLFYTDYSGKHYGKQSLTTAQVHNKPSEDLQTCSLNLGHILPIIKFNDDSPEARKITRRWRIGEAADLVGVSSQAIRDAEKAGRLPHPDMEIRGRVEQRVGYTIEQINHMRDVFGTRLRRAEDVFPPFNDDSPEARKITRRWRIGEAADLVGVSSQAIRDAEKAGRSTATRILEIRGRVEQRVGYTIEQINHMRDVFGTRLRRAEDVFPPVIGVAAHKELNNDYTSKKVMKPLITSNTVTDEIERANVLKMNGKWYLFTDSRGSKMTIDGINSNDIYMLGYVSNSLTGPYKPLNKTGLVLQMALDPNDVTFTYSHFAVPQTKGNNVVITSYMTNRGFFEDKKATFAPSFLMNIKGNKTSVVKNSILEQGQLTWLQVAKRAGLGGGQSGRTVLRERVRIEIASTHIALAARHSDWRCCRNGRYPARGPAVACQFPEKNDFRFSGFLSTKSDCHIVGPQPIFAEHNQAEGCRLEHFCSTPTLVSMLNFLGRRTKKPGTSSENKKLLHYGALAKLQPYFGAGRRDHQKGGRGSVNMGKGDPNKPRGKMSSYAFFVQTCREEHKKKHPDSSVNFAEFSKKCSERWKTMSAKEKSKFEDMAKSDKARYDREMKNYVPPKGDKKGKKKDPNAPKRPPSAFFLFCSEHRPKIKSEHPGLSIGDTAKKLGEMWSEQSAKDKQPYEQKAAKLKEKYEKDIAAYRAKGKSEAGKFGPGWPTGSKKKNEPEDEEEEEEEEDEDEEEEDEDEE

SEQ ID NO: 40152 - protein, 199 aa, Homo sapiens
  misc_feature (1)...(199): Xaa = X or * as defined in Table 2
FLELPPAAAAAVLSASPGALEREARSPRSPQTADTSPRPRAPACAPSRARAMPSDRPFKQRRSFADRCKEVQQIRDQHPSKIPVIIERYKGEKQLPVLDKTKFLVPDHVNMSELVKIIRRRLQLNPTQAFFLLVNQHSMVSVSTPIADIYEQEKDEDGFLYMVYASQETFGFXASSPCLSAHLPLTHPRLCPPPGPAHP

SEQ ID NO: 40153 - protein, 99 aa, Homo sapiens
RDQHPSKIPVIIERYKGEKQLPVLDKTKFLVPDHVNMSELVKIIRRRLQLNPTQAFFLLVNQHSMVSVSTPIADIYEQEKDEDGFLYMVYGLPGKPFGF

SEQ ID NO: 40154 - protein, 618 aa, Homo sapiens
  DOMAIN (219)..(505): Phosphatidylinositol-4-phosphate 5-Kinase domain identified by PFam, accession name PIP5K, E-value=6.5e-159, PFam score of 541.3
AGPGAGSTCLREARRGRGGGPQNAGSVKRRWEDSIPRRGRTGLKESQAAEGEGAAKMASASSGPSSSVGFSSFDPAVPSCTLSSAASGIKRPMASEVLEARQDSYISLVPYASGMPIKKIGHRSVDSSGETTYKKTTSSALKGAIQLGITHTVGSLSTKPERDVLMQDFYVVESIFFPSEGSNLTPAHHYNDFRFKTYAPVAFRYFRELFGIRPDDYLYSLCSEPLIELCSSGASGSLFYVSSDDEFIIKTVQHKEAEFLQKLLPGYYMNLNQNPRTLLPKFYGLYCVQAGGKNIRIVVMNNLLPRSVKMHIKYDLKGSTYKRRASQKEREKPLPTFKDLDFLQDIPDGLFLDADMYNALCKTLQRDCLVLQSFKIMDYSLLMSIHNIDHAQREPLSSETQYSVDTRRPAPQKALYSTAMESIQGEARRGGTMETDDHMGGIPARNSKGERLLLYIGIIDILQSYRFVKKLEHSWKALVHDGDTVSVHRPGFYAERFQRFMCNTVFKKIPLKPSPSKKFRSGSSFSRRAGSSGNSCITYQPSVSGEHKAQVTTKAEVEPGVHLGRPDVLPQTPPLEEISEGSPIPDPSFSPLVGETLQMLTTSTTLEKLEVAESEFTH

SEQ ID NO: 40155 - protein, 556 aa, Homo sapiens
  DOMAIN (206)..(492): Phosphatidylinositol-4-phosphate 5-Kinase domain identified by PFam, accession name PIP5K, E-value=6.5e-159, PFam score of 541.3
AGPGAGSTCLREARRGRGGGPQNAGSVKRRWEDSIPRRGRTGLKESQAAEGEGAAKMASASSGPSSSVGFSSFDPAVPSCTLSSASGIKRPMASEVPYASGMPIKKIGHRSVDSSGETTYKKTTSSALKGAIQLGITHTVGSLSTKPERDVLMQDFYVVESIFFPSEGSNLTPAHHYNDFRFKTYAPVAFRYFRELFGIRPDDYLYSLCSEPLIELCSSGASGSLFYVSSDDEFIIKTVQHKEAEFLQKLLPGYYMNLNQNPRTLLPKFYGLYCVQAGGKNIRIVVMNNLLPRSVKMHIKYDLKGSTYKRRASQKEREKPLPTFKDLDFLQDIPDGLFLDADMYNALCKTLQRDCLVLQSFKIMDYSLLMSIHNIDHAQREPLSSETQYSVDTRRPAPQKALYSTAMESIQGEARRGGTMETDDHMGGIPARNSKGERLLLYIGIIDILQSYRFVKKLEHSWKALVHDGDTVSVHRPGFYAERFQRFMCNTVFKKIPCVHLGRPDVLPQTPPLEEISEGSPIPDPSFSPLVGETLQMLTTSTTLEKLEVAESEFTH

SEQ ID NO: 40156 - protein, 61 aa, Homo sapiens; identical to SEQ ID NO: 35028

SEQ ID NO: 40157 - protein, 514 aa, Homo sapiens
  DOMAIN (150)..(437): Phosphatidylinositol-4-phosphate 5-Kinase domain identified by PFam, accession name PIP5K, E-value=8e-143, PFam score of 487.9
MASASSQPSLAVGFSSFDPGAPSCTASSASGILSPTASEVPYASGMPIKKTGHRGVDSSGETTYKKTTSTALKGAIQLGITYTVGSLSTKPERDVLMQDFYVVESIFFPSEGSNLTPAHHYNAFRFKTYAPVAFRYFRELFGIPPDDYLCSLCSEPLIELCSSGASGSLFYVSSDDELIIKTLQHKEAEFLQKLLPGYYLNLSQNPRTLLPKFFGLYCVQTGGKNIRIVVMNNLLPRSVKMHIKYDLKGSTYKRRASQKEREKPLPTFKDLDFLQDIPDGLFLDADTYNALCKTLQRDCLVLQSFKIMDYSLWLSIHNIDHAQREPLSSDTLQVSIDTQRLAPQKALYSTAMEFIQGEARLGDTMEADDHMGGIPAQNSKGERLLLYIGIIDILQSYTFLKKLEHSWKAVVHDGDAVSVHRPGFYAERFQHFMCNAVFKKIPLKPSPSKKFRSGLSFSLHTGSSGNSCITYQPLVSEEHKSQVIKVQVEPGVHLGRSDVLPQTSEPPLEEITAH

SEQ ID NO: 40158 - protein, 605 aa, Homo sapiens
  DOMAIN (206)..(493): Phosphatidylinositol-4-phosphate 5-Kinase domain identified by PFam, accession name PIP5K, E-value=7.4e-159, PFam score of 541.2
AGPGAGSTCLREARRGRGGGPQNAGSVKRRWEDSIPRRGRTGLKESQAAEGEGAAKMASASSGPSSSVGFSSFDPAVPSCTLSSASGIKRPMASEVPYASGMPIKKIGHRSVDSSGETTYKKTTSSALKGAIQLGITHTVGSLSTKPERDVLMQDFYVVESIFFPSEGSNLTPAHHYNDFRFKTYAPVAFRYFRELFGIRPDDYLYSLCSEPLIELCSSGASGSLFYVSSDDEFIIKTVQHKEAEFLQKLLPGYYMNLNQNPRTLLPKFYGLYCVQAGGKNIRIVVMNNLLPRSVKMHIKYDLKGSTYKRRASQKEREKPLPTFKDLDFLQDIPDGLFLDADMYNALCKTLQRDCLVLQSFKIMDYSLLMSIHNIDHAQREPLSSETQYSVDTRRPAPQKALYSTAMESIQGEARRGGTMETDDHMGGIPARNSKGERLLLYIGIIDILQSYRFVKKLEHSWKALVHDGDTVSVHRPGFYAERFQRFMCNTVFKKIPLKPSPSKKFRSGSSFSRRAGSSGNSCITYQPSVSGEHKAQVTTKAEVEPGVHLGRPDVLPQTPPLEEISEGSPIPDPSFSPLVGETLQMLTTSTTLEKLEVAESEFTH

SEQ ID NO: 40159 - protein, 89 aa, Homo sapiens
EPFIFLFIYLFIYLFFETESRPVIQAGVQWCNLSSLQPLPTGFKQFSCLSPLTSWDYRHPPPCPANFCSFSRDGVSPCWPGWSQTPDLR

SEQ ID NO: 40160 - protein, 311 aa, Homo sapiens
  DOMAIN (142)..(181): Phosphatidylinositol 3- and 4-kinases proteins domain identified by eMATRIX, accession number BL00915C, p-value=1.409e- 39, raw score of 22.43
  DOMAIN (40)..(258): Phosphatidylinositol 3- and 4-kinases domain identified by PFam, accession name PI3_PI4_kinase, E-value=6.7e-113, PFam score of 388.5
NSRVDDFVAEVCVEQCTFMDSKMKPLWIMYSNEEAGSGGSVGIIFKNGDDLRQDMLTLQMIQLMDVLWKQEGLDLRMTPYGCLPTGDRTGLIEVVLRSDTIANIQLNKSNMAATAAFNKDALLNWLKSKNPGEALDRAIEEFTLSCAGYCVATYVLGIGDRHSDNIMIRESGQLFHIDFGHFLGNFKTKFGINRERVPFILTYDFVHVIQQGKTNNSEKFERFRGYCERAYTILRRHGLLFLHLFALMRAAGLPELSCSKDIQYLKDSLALGKTEEEALKHFRVKFNEALRESWKTKVNWLAHNVSKDNRQ

SEQ ID NO: 40161 - protein, 221 aa, Homo sapiens
  DOMAIN (101)..(140): Phosphatidylinositol 3- and 4-kinases proteins domain identified by eMATRIX, accession number BL00915C, p-value=1.321e- 35, raw score of 22.43
  DOMAIN (54)..(207): Phosphatidylinositol 3- and 4-kinases domain identified by PFam, accession name PI3_PI4_kinase, E-value=3.7e-48, PFam score of 173.4
LGMAGRLFTVNLQSPLNPSTLLAEVCVEQCTLMDSKMKPLWIMYSNEEAGSGGRVSVSLKRDDDLWQDMLTMQTIRLMDVPDTIANIQLNNRNMDGGNEEFTLSCAGYCVATYVLGIGDRHSDNIMIRASGQLFHIDFCHFRQRVPFILTYDFVHVIEQGKTNNSEKFERFRGYCERAYTILRRHGLLFLHLFALMQAAGLPELSCSKDIRYLKDSLVHPL

SEQ ID NO: 40162 - protein, 263 aa, Homo sapiens
  misc_feature (1)...(263): Xaa = X or * as defined in Table 2
VEELSKKLADSDQASKVQQQKLKVGQLGEWVWPLDKGGKLFSKLWGRGGLVYKWFLLIYKISYATGIVGYMAVMFTLFGLNLLFKIKPEDAMDFGISLLFYGLYYGVLERDFAEMCADYMASTIGFYSESGMPTKHLSDSVCAVCGQQIFVDVSEEEDHXEHRCSCFHEFCIRGWCIVGKKQTCPYCKEKVDLKRMFSNPYPLLGSLLGVGCGKKVLASVTCIWVLLGPSLLPPTRTCQTMNNKKIMKVMMRIKRMMTDTMAS

SEQ ID NO: 40163 - protein, 334 aa, Homo sapiens
FRGRAVKMAAVVEVEVVGGAAGERELDEVDMSDLSPEEQWRVEHARMHAKHRGHEAMHAEMVLILIATLVVAQLLLVQWKQRHPRSYNMVTLFQMWVVPLYFTVKLHWWRFLVIWILFSAVTAFVTFRATRKPLVQTTPRLVYKWFLLIYKISYATGIVGYMAVMFTLFGLNLLFKIKPEDAMDFGISLLFYGLYYGVLERDFAEMCADYMASTIGFYSESGMPTKHLSDSVCAVCGQQIFVDVSEEGDHETTYRLSCNHVSHEFCIRGWCIVGKKQTCPYCKEKVDLKRMFSNPWERPHVMYGQLLDWLRYLVAWQPVIIGVVQGINYILGLE

SEQ ID NO: 40164 - protein, 80 aa, Homo sapiens
  DOMAIN (4)..(53): HMG1/2 proteins domain identified by eMATRIX, accession number BL00353A, p-value=2.678e-39, raw score of 9.60
  misc_feature (1)...(80): Xaa = X or * as defined in Table 2
LNIGKGDSKKPRGKMSSYAFFVQTCREEHKKQHPDASVNFSEFSYKKDIAAYXAKGKPDAAKKGFIKAEKSKKKKEEEED

SEQ ID NO: 40165 - protein, 64 aa, Homo sapiens
  DOMAIN (40)..(63): HIGH MOBILITY GROUP (HMG1/HMG2) PROTEIN SIGNATURE domain identified by eMATRIX, accession number PR00886A, p-value=5.959e- 20, raw score of 10.08
  DOMAIN (13)..(63): HMG (high mobility group) box domain identified by PFam, accession name HMG_box, E-value=0.057, PFam score of -7.0
MGKGDPKKLRGKMSSYAFFVQTCQEEHKKQQPDASVNFSEFSKKCSERWKTMSAKEKSEDMAKL

SEQ ID NO: 40166 - protein, 237 aa, Homo sapiens
  DOMAIN (16)..(65): HMG1/2 proteins domain identified by eMATRIX, accession number BL00353A, p-value=3.758e-36, raw score of 9.60
  DOMAIN (127)..(191): HMG (high mobility group) box domain identified by PFam, accession name HMG_box, E-value=7.4e-14, PFam score of 59.5
  misc_feature (1)...(237): Xaa = X or * as defined in Table 2
HQIFILFFRKITKHGQRRSLRSPRGKMSSFAFFVQTCREEHKKRHPDASVNFSEFSKKCSQRGWKTMSSKEKGKFXRYGQKRDKARYEREMKTYYPSKGGDQKRSFKDPNAPQGGPPFGPSFLFCSEYRPKIKREDHPGLSIGDVAKKLGEMWELTLLQSDKQPYEKKAAKLKEKYEKDIAAYRAKGKPDAAKKGVVKAEKSKKKKEEEEDEEDEEDEEEEEDEEDEEDEEEDDDDE

SEQ ID NO: 40167 - protein, 124 aa, Homo sapiens
  misc_feature (1)...(124): Xaa = X or * as defined in Table 2
KSGVPGSRFSSSDKSDTGVTGLFSTYFLKSDFQLQLIDISASTASKSLFSAVLFQEYILSFGLSEIISILSSAVCWREAPKLSMVGCLAAGGKLTGCXAAGCLATDGRTETLDAAPAAAALSAV

SEQ ID NO: 40168 - protein, 583 aa, Homo sapiens
KCTICLRNSIAVCCGCGQGLSGYLNGEGADGAERGGGGSGVECLRAPVCGQAASSLAASQLAAGGQAANHAQLRCLSPADCALMLFIQVEVLTNSIAMVSVHLEKQPLKLVLGELGFRSPAGEEQATPVVGGEGLGCIEDSAAVAEGGIAIGGIVGINTALQEVLKPHTIKMQRNNAQLSRRKEPKEGLCGERGQDRMSRAKGSSSKGKELPPGCRRVTMKPLLVRETQEGQAAERGAEEQLQTLGPFAVYRDSPSKNFYKRDKMLKGLEEAKVNFVWRTNEGFLEEDAGQEFGIQKAVTPALCPSRKAEVPLSCLTLKLSEDGKAKKAPYNTGPLGLLHLSMCSHSRKGFEQLWQLNSGKLLQGPRDSVEGSARRAETAVHCPAVLHFAPALLLAALRCQRDLESAAAPSHTRSCQHPRLLSGAVQTAGFSNPPKVVIQIKWNFLVMLLNFPGSTKLIARLKQQMNYKEMASQRLTQSMLPHRSRLIGAGPCNRCVHPEPVIVTLFGQKVFARIIKKNQTCLLCSQIWCAHYQQGWICAWLAGFGKIYIFSTIGVIDTLSSGHIHLQPNCTARDSASWESPA

SEQ ID NO: 40169 - protein, 223 aa, Homo sapiens
  misc_feature (1)...(223): Xaa = X or * as defined in Table 2
MWRLVIQDAKDENGVLVGNRVLAHSSLAVLSCLALNNRRISGWTPCGPSGSPPGFMGRRGTSTRLPTGXXCPEGQPPRCPCGXASGCASSPAECRMPATHLPGNSGRVPFPPGPVNYSPLRLQAPEQVTGSSPWPFSRPVLGPLPLEGSPPPFRLPPRPRPAGVAAGSSWGHSAASVRRSPGRRPEGESIHPRPPASRLPWLRATREEEAGAPKLGEDSYPNF

SEQ ID NO: 40170 - protein, 207 aa, Homo sapiens
FMGRRGTSTPFPLADNAPRGSPPGAHVVGGWDPDLRRAPVTGFSCSGSCSQRGAADWESFPRSPPCRASGCASSPAECRMPATHLPGNSGRVPFPPGPVNYSPLRLQAPEQVTGSSPWPFSRPVLGPLPLEGSPPPFRLPPRPRPAGVAAGSSWGHSAASVRRSPGRRPEGESIHPRPPASRLPWLRATREEEAGAPKLGEDSYPNF

SEQ ID NO: 40171 - protein, 57 aa, Homo sapiens
RLGPDSCGANPPWGALFNFSACSLIFPFGVHNKDIFSFEEVTLLHPLKFVCFEFPFL

SEQ ID NO: 40172 - protein, 91 aa, Homo sapiens
  misc_feature (1)...(91): Xaa = X or * as defined in Table 2
AFAAIPTNTLLLEQKALDEPAETESVSKDNTLXPPVETPTTLPRAAGRETKYANLSSPTSTVSESQPDXAWSNSPSTCKIQNITEKRGGSL

SEQ ID NO: 40173 - protein, 147 aa, Homo sapiens
  misc_feature (1)...(147): Xaa = X or * as defined in Table 2
QTNFKGCSKVTSSKLNMSLLWTPTGRXGCDRKVEQGPPGDLGTAAVRPKSLAISSSLVSACSASKTQGTDLKTSSHPEMLHGMAPQQKHGQQYKTKSSYKAFASIPYKHIAFGTEDSSTTLPRAAGRETKYANLSSPTSTVSESQAD

SEQ ID NO: 40174 - protein, 97 aa, Homo sapiens
  misc_feature (1)...(97): Xaa = X or * as defined in Table 2
SLDLDLFTVSGLLSLDSSGILTRNLEVSANXVWVGSLLTVGTNVKIRGLASEPPAETVSFSSKFLFNKLLFSRFSSSILKENEKERKNERHRGSNSV

SEQ ID NO: 40175 - protein, 490 aa, Homo sapiens
TTRRKSMNPTLSGKYLEDNSDLFSEQALDEPAKTESVSKDNTLEPPVELYFPAQLRQQTEELCATIDKVLQDSLSMAPSLSPTKQASSSLAYMNVERTPSPTLKSNTMLSLLQTSTSSSVGLPPVPPSSSLSSLKSKQDGDLRGPENPRNIHTYPSTLASSALSSLSPPINQRATFSSSEKCFHPSPALSSLINRSKRASSQLSGQELNPSALPSLPVSSADFASLPNLRSSSAPSCQSAHPGAPAQSLSSAPTCGSGTLPSRLGKSESTTPNHRSPVSTPSLSISLTRTEELISPCALSMSTGPKNKKSKTPTTLPRAAGRETKYSKSNDYLTLNAGSQQERDQAKLTCPSEVSGTILQEREFEANKLQGMQQSDLFKAEYVLIVDSEGEDEAASRKVEQGPPGGIGTAAVRPKSLAISSSLVSDVVRPKTQGTDLKTSSHPEMLHGMAPQQKHGQASAYKGEESNEEDWTILKSSRMTNPRKLSDNKI

SEQ ID NO: 40176 - protein, 254 aa, Homo sapiens
  DOMAIN (169)..(219): ENV polyprotein (coat polyprotein) domain identified by eMATRIX, accession number PF00429, p-value=4.724e-11, raw score of 31.08
  DOMAIN (162)..(202): ENV polyprotein (coat polyprotein) domain identified by PFam, accession name ENV_polyprotein, E-value=9.9e-12, PFam score of 41.6
SEIARPLYTLIKETRRANTHLVEWEPEAETAFKTLKQALVQAPALSLPTGQNFFLYITERAGIALGILTQTRETTPQPVAYLSKEVDVVAKVWLHCLRDGEPIKHDCQQIIVQIYAARDDLLEVPLANPDLNLYIDGSSFVENGIRRAGYAIVSDVTVLENSLAAVTLQNRQGLDLLTAEKGGLCTFSGKECCFYTNQSGISSPLEDTTTAGPFLHPIQQEVARAIIGQFPTAFGVSCLEGRLRGEASWTSWVE

SEQ ID NO: 40177 - protein, 179 aa, Homo sapiens
  DOMAIN (129)..(173): PHD-finger domain identified by PFam, accession name PHD, E- value=0.019, PFam score of 5.9
MARPLYTLIKETQKANTHLVEWEPEAETAFKTLKQALVEAPSLSLPTGQNFSLYVTERAGIALGVLTQTRGTTPQPVAYEPGDQKIQIKSQRVELVESLTRQVDSHVEPFHPQQEQGDAARRRQDLPIDPSEPSYWEMIRCDNECPIEWFRFSCVSLNHKPKRKWYCSRCRGKNDGQSP

SEQ ID NO: 40178 - protein, 64 aa, Homo sapiens
  misc_feature (1)...(64): Xaa = X or * as defined in Table 2
MGLVLLHVGKLGSSWLRNGSQETAGQIISPLSSWHDTGAGAALDFSPGLSCLPVRXGSRRAAPH

SEQ ID NO: 40179 - protein, 90 aa, Homo sapiens
MSNSHPLRPFTAGGEIDHVHILSEHIGALLIGEEYGDVTFVVEKKRFPAHRVILAARCQYFRALLYGGMRESQPEAEIPLQDTTAEAFTM

SEQ ID NO: 40180 - protein, 955 aa, Homo sapiens
  DOMAIN (804)..(819): RIBOSOMAL PROTEIN P2 SIGNATURE domain identified by eMATRIX, accession number PR00456E, p-value=3.392e-09, raw score of 3.06
  DOMAIN (213)..(398): Reverse transcriptase domain identified by PFam, accession name rvt, E-value=3.1e-37, PFam score of 137.1
MLPAFEHQTPSSSAFGLLNLQQWFVRGSRAFGHRLKAALSGSLLLKFSDSDWLPCSSACRGPIVGLHLVIVYVKSHQNAYRHKNIQLKQTLLSCNTTKVRSFIIEVSETRNPPAGTNSGHILGTCPGYRYAKGKETGKEIIKGPQNPPGYRLCPLQAVGGGEFGPTQVHVPFSLSDLKQIRVDLGKFSDDPDRQYPLRPEAHEGLQDILRYLKVQGLVRKCSSPCNTRILGVQKPKGQWRLVQDLRFINEAVIPLHSVVPNSYTLLSQIPEEVEWFTVLDLKDAFFCIPLHSVCQFLFAFEDPTDHTSQFTWTVLPQGFRDSPHLFGQILAQDLGHFSSPGTLVLQYVDDLLLATSLEASCQQATLDLLNLLANQGYKASKPKAQLCLQQVKYLDLSLARVTRALSKERIQPILACPRPKTLKQLRGFLGITNFCQLWIPGYSEMARPLYTLIKETQRANSHLVEREREAETAFKTLKQALVQALALSLPTGQNFSLYARERAGIALGILTQTHGTTPQPVTYLRKLIYSFVENGMRRAGYAIVSDVTVPESKPLPPGTSTQLAELVVLTQALELRKKKRINVNTDSKYAYLILHAHAAIWKEREFLTSGGTPNKYHKEIMELLHAVQKPKEVAVIPCQSHQKGEEKEAEGNRRADAEAKIAARRNLPTEIPMEGPLVWNNPVQEIKPQYSLTKTEWGLSQGHSFLPLGWLTTLEGKAGRATPNPRNVYFPLHLRGLRTGRLPLSQSTRAQEMTLVRPRPSSSPPPEKAAEGRGRRCSSETKLRHRRLFRPLRTPLCATAPLAASVAAVLAAAPAAAARVRFHALRRGRARATARWRHLATDRQRAAGSGDAGPESRLRQLPRLFRIGPTLCPSRTGGPRVWLPCRHLAPVTTRHCMASPAHVTTDEKVLGACGVTSSRPPQTRSASSWRCRKVLQGVGPERDESASAVNVEAAK

SEQ ID NO: 40181 - protein, 57 aa, Homo sapiens
HEGKSGPMTGVVLVAVGEVAMKILLLCLCLILLRVRSCRRKAARAALGMEAADAVTD

SEQ ID NO: 40182 - protein, 348 aa, Homo sapiens
  DOMAIN (303)..(348): Involucrin proteins domain identified by eMATRIX, accession number BL00795C, p-value=3.800e-09, raw score of 17.06
AAVFPLWCWRTRGKCHSLEWRPCTVCSWPDSPPKVSAGQALCGSETLPLTQTPDIQVPATLESGHPANLLVSAAWKSRKSLIFSWTWGTVISLGPRTPHFSEITIIPLPWSHGSSITFQVTFPRFHVTTEMTIQLNVSSPVALENATSLSVLKNQSLRFVYVTDSNPPARLSWTWEGQALNLSQSSESAVLELPPVESCDGGEFVCQAQHPLGSQHVSISLSVQSDSVISIEEGVLQTLGFTLIRGILMGTSCTFICGFTWICCTSPVIPKPGTQSCFSTRDSATLPDACGSPGPKRVWMCSESHQPLCAVPDEDEQELHYAVLHFHKVQPQEPKVTDTEYSEIKIHK

SEQ ID NO: 40183 - protein, 119 aa, Homo sapiens
ASTTTGSGTSTAAARCTAWSPGPLVTAVEKFEAEAAALGQRISTLQKGSPDPLQVRMLNDQLMLLERTFLNPRAFPEERYYSHVLWAPSHGLRSHIPGLSNACSRARDTASGSEAWAEG

SEQ ID NO: 40184 - protein, 107 aa, Homo sapiens
LLDIAQEVGVHRGTARLGGIAGGVAALLPRAAVHGESPLAGVAALGLANTLFVQEPHLAAGFSSHQAVARTAGSVILRLSDSFFLPFKVSDYSETLRSFLPPTALHK

SEQ ID NO: 40185 - protein, 138 aa, Homo sapiens
GLDHGWAGDRWRTRPVVGAGEGRAPRLNSPSGQIRSPGPGDLSIYDNWIRYFNRSSPVYGLVPGFSSHQAVARTAGSVILRLSDSFFLPLKVSDYSETLRSFLQAAQQDLGALLEQHSISLGPLVTAVEKFEAKAAAL

SEQ ID NO: 40186 - protein, 332 aa, Homo sapiens
MALSKERSTVTRTQWARKTMLQGETIQISESVSTYLRPYSVSGTVLGTNMSKTSARIYPTYHTAFDTFDYVDKFLDPGFSSHQAVARTAGSVILRLSDSFFLPLKVSDYSETLRSFLQAAQQDLGALLEQHSISLGPLVTAVEKFEAEAAALGQRISTLQKGSPDHVLWAPSHGLRSHIPGLSNACSRARDTASGSEAWAEVQRQLSIVVTALEGSVEALHEVLQLPAALRACPPLRKALAVDAAFREGNAARLFRLLQTLPYLPSCAVQCHVGHARREALARFARAFSTPKGQTLPLGFMVNLLAWMDSGKHGTCARPTGCPWTERRELCS

SEQ ID NO: 40187 - protein, 226 aa, Homo sapiens
RAHEDRERSGVQIRTQSWNGGKREKDFLHQSGLETLLMKGCWRKSKTSARIYPTYHTAFDTFDYVDKFLDPGFSSHQAVARTAGSVILRLSDSFFLPLKVSDYSETLRSFLQAAQQDLGALLEQHSISLGMHSPDPEVRMLNDQLMLLERTFLNPRAFPEERYYSHVLWAPSHGLRSHIPGLSNACSRARDTASGSEAWAEVQRQLSIVVTALEGAAATLRPVADL

SEQ ID NO: 40188 - protein, 745 aa, Homo sapiens
  DOMAIN (167)..(259): PA domain identified by PFam, accession name PA, E-value=5.8e -21, PFam score of 83.1
PRVRRMQWTKVLGLGLGAAALLGLGIILGHFAIPKKANSLAPQDLDLEILETVMGQLDAHRIRENLRELSREPHLASSPRDEDLVQLLLQRWKDPESGLDSAEASTYEVLLSFPSQEQPNVVDIVGPTGGIIHSCHRTEENVTGEQGGPDVVQPYAAYAPSGTPQGLLVYANRGAEEDFKELQTQGIKLEGTIALTRYGGVGRGAKAVNAAKHGVAGVLVYTDPADINDGLSSPDETFPNSWYLPPSGVERGSYYEYFGDPLTPYLPAVPSSFRVDLANVSGFPPIPTQPIGFQDARDLLCNLNGTLAPATWQGALGCHYRLGPGFRPDGDFPADSQVNVSVYNRLELRNSSNVLGIIRGAVEPDRYVLYGNHRDSWVHGAVDPSSGTAVLLELSRVLGTLLKKGTWRPRRSIVFASWGAEEFGLIGSTEFTEEFFNKLQERTVAYINVDISVFANATLRVQGTPPVQSVVFSATKEIRSPGPGDLSIYDNWIRYFNRSSPVYGLVPSLGSLGAGSDYAPFVHFLGISSMDIAYTYDRSKTSARIYPTYHTAFDTFDYVDKFLDPGFSSHQAVARTAGSVILRLSDSFFLPLKVSDYSETLRSFLQAAQQDLGALLEQHSISLGPLVTAVEKFEAEAAALGQRISTLQKGSPDPLQVRMLNDQLMLLERTFLNPRAFPEERYYSHVLWAPSHGLRSHIPGLSNACSRARDTASGSEAWAEVQRQLSIVVTALEGAAATLRPVADL

SEQ ID NO: 40189 - protein, 654 aa, Homo sapiens
  DOMAIN (57)..(100): kw TRANSCRIPTASE REVERSE II ORF2 domain identified by eMATRIX, accession number DM01354T, p-value=1.000e-40, raw score of 9.48
  DOMAIN (1)..(179): Reverse transcriptase domain identified by PFam, accession name rvt, E-value=1.2e-10, PFam score of 48.8
MIISTDAEKAVNKIQQPFMLKTLNKFGIDGTYLKRIRAIYDKPTANIILNGQKLEAFPLKTGTTQGCPLSPLLFNIVLEVLARAIRQEKERKGIQLGKEEVKLSLFADDMIVYLENPIVSAQNLLKLISNFSKLSGYKINVQKSQAFFYTNNRQTESQIMSELPFTIASKRIKYLGIQLTRDVKDLFKENYKPLLNEIKKDTNKWKNIPCSLIGRINIVKMAIMPKFIWNQKRACIAKTILSQKNKAGGIMLPDFKLYYKATVTKTAWYWYQNRDIDQWNRIEPSEIIPHIYNSLIFDKPDKNKQWVNDSLFNKWCWENWLAICRQLKLDPFLTPYTKINSRWIKDLNVRLKTIKTLEENLGNTIQDIGMGKDFMSKTTKAMATKAKIDKWDLIKLKSFCTVKETTIRVNRQPTEWENIFAIYSSDKGLISRVYKELKQIYKKKNNPIKKWAKHMNRHFSKEDIYAAKRHMKKCSSSQAIREMQIKTTMRYHLKPVRMAIIKKSGNNRCWRGCGEIGTLSHCWWDGKLVQPLWKTVWRFLKDLELEIPFDPVIPLLGIYPQDYKSCCYKDTCTHMFIVAPFTIAKTWNQHKCPSMIDWIKKMWHIYTMEDYAAIKNDEFMSFVGTWMKLETIILSKLSQGQKSKHHMFSLIGEN

SEQ ID NO: 40190 - protein, 54 aa, Homo sapiens
MEYYAALKKDEFMSFVGTWMKLETIILSKVCQGQKVKHHMFSLTGALLVRGPWA

SEQ ID NO: 40191 - protein, 126 aa, Homo sapiens
MEYYAAIKKDEFMFFVGTWMKVEAIILSKLLQGQKTKHSIFSLIALSEFAWTPSRARWPTRSIHQTASGRENAALRPLPQYVDPGARLFYLGAVLTRPRLADAKSQTLHDSVMRQRERPGGCPLHL

SEQ ID NO: 40192 - protein, 227 aa, Homo sapiens
MEYYAAIKNDEFMSFVGTWMKLETIILSKLSQGQKTKHHIFSLIEAQAQVSPPPPYPAPQELTQPLLQQPRAPEAPAQQPQAASSLPQSDFQLLPAQGSSLTNFFPDVGFDQQSMRPGPAFPQQLPAVNHHLKIESAGQQHAVDWMPRSGYCKEARERQGVLVTGDSPCPGSIRISSEHQPHEMFQTKDSGDSLRSADYHADLLEMGWRFKDLKKSFSADMSSLFLQ

SEQ ID NO: 40193 - protein, 1057 aa, Homo sapiens
  DOMAIN (250)..(297): kw TRANSCRIPTASE REVERSE II ORF2 domain identified by eMATRIX, accession number DM01354V, p-value=1.000e-40, raw score of 12.97
  DOMAIN (9)..(901): Reverse transcriptase domain identified by PFam, accession name rvt, E-value=2.9e-35, PFam score of 130.6
MEYYAAIKNDEFMSFVGTWMKLETIILSKLLQGQKTKHRMFSLIGSIIVKVPSSLQAHLQLSGKEVDVNSEVHVQEMAEARKDDVVTVTDAEKALDKIQHLFMVKTLSKIGIQGTYLNVIKAIYDKPTANIILNGEKLKAFPLRNETRQGCPLSPLLFNTVLKVLARAVRQEKEIKGIQIGKEEVILSLFADDMIVHLENPIVSAQNLLKLIDNFSKVSGYKINVQKSQAFLYTNNRQTESQIMSELPFTIASERIKYLGIQLTRDVKDLFKENYKPLLNDIKEDTNKWKNTPRSWVGRINIMKMAILPKVIYRFNAIPIKLPMTFFTELEKTTLKFIWNQKGARIAKSILIYRFNAQELEKTTLKFIWNQKGARIAKSILSQKNKAGGITLPDFKLYYKATVIKTAWYWYQNRDIDQWNRTEPSEIMPHIYNHLIFDKPDKNKKWGNDSLFNKWCWENWLAICRKLKLDPFLIPYTKINSRWIKDLNVRPKTIKTLEENLGNTIQDIAMGKDFMSKTPKAMATKAKIDKWDLINLKSFCTAKETTIRVNRQPIEWEKIFAIYSSDKGRISRIYNELKQIYKKKTNNPIKKWAKDMNRHFSKEDIYAAKRHMKKCSSSLAIREMHIKTTMRHHLTSVRMAIIKKLGNDWCWRGCGEIGRLLHCWWDCKLVQPLWKSVWRFLRDLELETPFDPASPLLGIHPKDYRSCCYKDTCTTLFIEALFTIAKTWNQPKCPSMRDWIKKMWHIYTMEYYAAIKKDEFMSFVGTWMKLETIILSKLTKLTQEQKTKHRMFSLIVLEVLARAIRQEKEIKGIQLGKEEVKLSLFADDMIVYLENPIMSAPNLLKLISNFSKVSGYKINVQKSQAFLYTNIRQIESQIMSELPFTIATKRIKYLGIQLSRNVKELFKENYKPLLKEIKEDTNDWKNIPCSWIGRVNIVKMAMLPKVIYRFSAIPIKLPMTFFTELEKTTLKFIWNQKRACIAKTILSKKNKAGGITLPDFKLYCKATVTKTAWYWVPKQIYRPMEQNRDLRNNTTHLQPSDLSQTRQKQATRKGFPI

SEQ ID NO: 40194 - protein, 118 aa, Homo sapiens
  DOMAIN (41)..(81): Ribosomal protein L10e proteins domain identified by eMATRIX, accession number BL01257D, p-value=7.319e-28, raw score of 18.80
  DOMAIN (1)..(80): Ribosomal L10 domain identified by PFam, accession name Ribosomal_L10e, E-value=0.00062, PFam score of -25.4
  misc_feature (1)...(118): Xaa = X or * as defined in Table 2
MYVHVFDLALRQCRLQADIRGAFEKLQGTVARVHIGQVIMSICNKLQNKEHVIESLLRAKFKFPGCQKIHISKKWGFTKFTADEFEDMVAEKRLIADDCGVKYIPIMALWTSGVPCPX

SEQ ID NO: 40195 - protein, 142 aa, Homo sapiens
FFFFLPVAGLRRPRPRLGPVPPRPRVPPPQDRAATMKKFFQEFKADIKFKSAGPGQKLKESVGEKAHKEKPNQPAPRPPRQGPTNEGTDGSRCCPQPWLEQKQSRAWGPHIAGHHPKPGEKGTSSRSHRQREPRGPRDQRGI

SEQ ID NO: 40196 - protein, 354 aa, Homo sapiens
MKKFFQEFKADIKFKSAGPGQKLKESVGVWGRPNGLMSVKGNCECGNLWLLYPEVAALAAEAEGPEVGSVEDQRRQQGYFVRLGSLSARIRHLAYEHSVGKLRQSKHRAQDTLAQLQETLELVDHMPCGVTPTAPARPGKVHELWGEWRQRPPREPPPEQAELETLVLARSLTHELQGTVEALEFSVWGLPAGAQEKVAEVRRSVDALQTAFADARCFRDVPAAALAEGRGRVAHAHACVDELLELVVQAVPLPWLVGPFAPILVERPEPLPDLADLVDEVIGGPDPRWAHLDWPAQQRAWEAEHRDGSGNGDGDRMGVAGDICEQEPETPSCPVKHNPDARAGLLTHGPVEAG

SEQ ID NO: 40197 - protein, 91 aa, Homo sapiens
LPSRGAGLGTCSPPSLSLPPAPWAPVRPEPPRRAPPPAPRRPVPSTTQGLRSAGARHQDWQAAPPAALVRDPLGEASWAPESGGDVENLCI

SEQ ID NO: 40198 - protein, 45 aa, Homo sapiens
  misc_feature (1)...(45): Xaa = X or * as defined in Table 2
FFFLGFHVFYSIPLIPRDNSFXGVFSSLDLITAVFVTLAELRSVT

SEQ ID NO: 40199 - protein, 730 aa, Homo sapiens
  DOMAIN (72)..(124): FAD-dependent glycerol-3-phosphate dehydrogenase proteins domain identified by eMATRIX, accession number BL00977A, p-value= 1.000e-40, raw score of 20.76
  DOMAIN (68)..(628): FAD-dependent glycerol-3-phosphate dehyd domain identified by PFam, accession name FAD_Gly3P_dh, E-value=1.1e-286, PFam score of 965.7
EMAFQKAVKGTILVGGGALATVLGLSQFAHYRRKQMNLAYVKAADCISEPVNREPPSREAQLLTLQNTSEFDILVIGGGATGSGCALDAVTRGLKTALVERDDFSSGTSSRSTKLIHGGVRYLQKAIMKLDIEQYRMVKEALHERANLLEIAPHLSAPLPIMLPVYKWWQLPYYWVGIKLYDLVARKANCLKSSYVLSKSRALEHFPMLQKDKLVGAIVYYDGQHNDARMNLAIALTAARYGAATANYMEVVSLLKKTDPQTGKVHVSGARCKGCPSTGQEFDVRAKCVINATGPFTDSVRKMDDKDAAAICQPSAGVHIVMPGYYSPESMGLLDPATSDGRVIFFLPWQKMTIAGTTDTPTDVTHHPIPSEEDINFILNEVRNYLSCDVEVRRGDVLAAWSGIRPLVTDPKSADTQSISRNHVVDISESGLITIAGGKWTTYRSMAEDTINAAVKTHNLKAGPSRTVGLFLQGGKDWSPTLYIRLVQDYGLESEVAQHLAATYGDKAFEVAKMASVTGKRWPIVGVHLVSEFPYIEAEVKYGIKEYACTAVDMISRRTRLAFLNVQAAEEALPRIVELMGRELNWDDYKKQEQLETARKFLYYEMGYKSRSEQLTDRSEISLLPSDIDRYKKRFHKFDADQKGFITIVDVQRVLESINVQMDENTLHEILNEVDLNKNGQVELNEFLQLMSAIQKGRVSGSRLAILMKTAEENLDRRVPIPVDRSCGGL

SEQ ID NO: 40200 - protein, 672 aa, Homo sapiens
  DOMAIN (262)..(280): FAD-dependent glycerol-3-phosphate dehydrogenase proteins domain identified by eMATRIX, accession number BL00977C, p-value= 1.000e-22, raw score of 12.84
  DOMAIN (7)..(453): FAD-dependent glycerol-3-phosphate dehyd domain identified by PFam, accession name FAD_Gly3P_dh, E-value=8.4e-147, PFam score of 501.1
MLKPLMGGGAHRRAAAGARKWDGTAIIASTSGLEVLWVTTSRSKTVESVGLAKPGQHNDARMNLAIALTAARYGAATANYMEVVSLLKKTDPQTGKVRVSGARCKDVLTGQEFDVRAKCVINATGPFTDSVRKMDDKDAAAICQASAGVHIVMPGYYSPESMGLLDPATSDGRVIFFLPWQKMTIAGTTDTPTDVTHHPIPSEEDINFILNEVRNYLSCDVEVRRGDVLAAWSGIRPLVTDPKSADTQSISRNHVVDISESGLITIAGGKWTTYRSMAEDTINAAVKTHNLKAGPSRTVGLFLQGGKDWSPTLYIRLVQDYGLESEVAQHLAATYGDKAFEVAKMASVTGKRVWPIVGVRLVSDFPYIEAEVKYGIKEYACTAVDMTSRRTRLAFLNLQAAEEALPRLLELMGRELNWDDYKKQEQLETARKFLYYEMGYKSRSEQLTDRSEISLLPSDIDRYKRRCHKFDADQRGFMTVVEVQRVLESINVQMDENTLHEILNEVDLNKNGQVELNEFLQLMSAIQKGRVSGSRLAILMKTAEENLDRRVPIPVDRSCGGLYFCVRNWWVLGLTDFKNEAADPSGVKLQTFTVSVTALKVARLELFVSPGGLVVLLGSGVKLQIFAPNMAMHNKAAPPQIPDTRRELAELVKRKQELAATLAKFGATDLCF

SEQ ID NO: 40201 - protein, 197 aa, Homo sapiens
ISSAVEFETSQLSGLWTEQSAARSRGENIVCGPQGPRGGPWVPAEPTGSPVVSEEPLDLLPTLDLRQEMPPPRVFKSFLSLLFQGLSVLLSLAGDVLVSMYREVCSIRFLFTVVSLLNLFLSAFWLGLLYLVSPLENEPKEMLTLSEYHERVRSQGQQLQQLQAELDKLHKEVSTVRAANSERGAKLVFQRLNEGFV

SEQ ID NO: 40202 - protein, 368 aa, Homo sapiens
MRRSSRPGSASSSRKHTPNFFSENSSMSITSEDSKGLRSAEPGPGEPEGRRARGPSCGLLFQGLSVLLSLAGDVLVSMYREVCSIRFLFTAVSLLSLFLSAFWLGLLYLVSPLENEPKEMLTLSEYHERVRSQGQQLQQLQAELDKLHKEVSTVRAANSERVAKLVFQRLNEDFVRKPDYALSSVGASIDLQKTSHDYADRNTAYFWNRFSFWNYARPPTVILEPHVFPGNCWAFEGVQGQVVIQLPGHECTLSDITLQHPPPSVEHTGGANSAPRDFAVFFLLSFFTHQGLQVYDETEVSLGKFTFDVEKSEIQTFHLQNDPPAAFPKVKIQILSNWGHPRFTCLYRVRAHGVRTSEGAEGSAQGPH

SEQ ID NO: 40203 - protein, 128 aa, Homo sapiens
VEPGKRLIDRIVETICSCFQGPQTDEGVQLQIIKALLTAVTSPHIEIHEGTILQTVRTCYNIYLASKNLINQTTAKATLTQMLNHARSDSGKVSTENGDAPRERGSSLSGTNDGAQEVVKDILEDVVT

SEQ ID NO: 40204 - protein, 841 aa, Homo sapiens
  DOMAIN (690)..(745): Beta-lactamase class-A proteins domain identified by eMATRIX, accession number BL00146C, p-value=1.000e-40, raw score of 25.08
  DOMAIN (583)..(841): Beta-lactamase domain identified by PFam, accession name beta -lactamase, E-value=2.4e-122, PFam score of 419.9
  misc_feature (1)...(841): Xaa = X or * as defined in Table 2
MLGTSVEDIAQFLHQEERLDSTQVGDFLGDSARFNKEVMYAYVDQLDFCEKEFVSALRTFLEGFRLPGEAQKIDRLMEKFAARYIECNQGQTLFASADTAYVLAYSIIMLTTDLHSPPDLEMHQPAGARSADRNRCEDALPVWIWAXKRREPEGPHIGRRRVHGPWPRXFGEWRSGXKTDGQLPRIGWXDQLAECGCSCGQDFYWVYQTGWKCNSXLCPLAVCCVHGXTGFPPPSSHVQLAEDCGDIILQHESDPTTVVSNMACDWRSLQXDKLXMLGTSVEDIAQFLHQEERLDSTQVGDFLGDSARFNKEVMYAYVDQLDFCEKEFVSALRTFLEGFRLPGEAQKIDRLMEKFAARYIECNQGQTLFASADTAYVLAYSIIMLTTDLHSPQILKCISQLELAQLIGTGVKTRYLSGSGREREGSLKGHTLAGEEFMGLGLGNLVSGGVDKRQMASFQESVGETSSQSVVVAVDRIFTGSTRLDGNAIVDFVRWLCAVSMDELASPHHPRMFSLQKIVEISYYNMNRIRLQWSRIWHVIGDHFNKTSCDRLRELHVSEVFTVITETRETKGPRDTPIFIETLVKVKDAEDQLGARVGYIELDLNSGKILESFRPEERFPMMSTFKVLLCGAVLSRIDAGQEQLGRRIHYSQNDLVEYSPVTEKHLTDGMTVRELCSAAITMSDNTAANLLLTTIGGPKELTAFLHNMGDHVTRLDRWEPELNEAIPNDERDTTMPVAMATTLRKLLTGELLTLASRQQLIDWMEADKVAGPLLRSALPDGWFIADKSGAGERGSRGIIAALGPDGKPSRIVVIYTTGSQATMDERNRQIAEIGASLIKHW

SEQ ID NO: 40205 - protein, 164 aa, Homo sapiens
ESDAQGHQVAARFSHVLQKDAFLVFRSLCKLSMKPLGEGPPDPNSPVGPTLPAVPTKARVPLLPSQELSLRKKGLECLVSILKCMVEWSKDLYVNPNHQTSLGQERLTDQEIGDGKGLDMARRCSVTSMESTVSSGTQTTVQDDPEQFEVIKQQKEIIEHGIEL

SEQ ID NO: 40206 - protein, 1185 aa, Homo sapiens
MHYVLNSSSMETFVGEQNYEGSSRLCVCKRTREADDPSARDSVCEGVRARFNICGINQIVLKCPIWGCENPAQMGCPPVGKADRCGLLANSATCEKGMFCHADLVGITPTVFPSHPRCKTTASAKLACQQDVDLDRQSLSSIDKNPSERGQSQLSNPTDDSWKGRPYANQKLFASLLIKCVVQLELIQTIDNIVFYPATSKKEDAEHMVAAQQDTLDADIHIETEDQGMYKYMSSQHLFKLLDCLQESHSFSKAFNSNYEQRTVLWRAGFKGKSKPNLLKQETSSLACCLRILFRMYVDENRRDSWEEIQQRLLTVCSEALAYFITVNSESHREAWTSLLLLLLTKTLKINDEKFKAHASMYYPYLCEIMQFDLIPELRAVLRKFFLRIGVVYKIWIPEEPSQARCRAILPGFECEAERRQERVVPATVRGWGSLLRFCIPTSSYNKCLLNMYCVPDPIAMELSDANLQTLTEYLKKTLDPDPAIRRPAEKFLESVEGNQNYPLLLLTLLEKSQDNVIKVCASVTFKNYIKRNWRIVEDEPNKICEADRVAIKANIVHLMLSSPEQIQKQLSDAISIIGREDFPQKWPDLLTEMVNRFQSGDFHVINGVLRTAHSLFKRYRHEFKSNELWTEIKLVLDAFALPLTNLFKICDNAALYAQKYDEEFQRYLPRFVTAIWNLLVTTGQEVKYDLLVSNAIQFLASVCERPHYKNLFEDQNTLTSICEKVIVPNMEFRAADEEAFEDNSEEYIRRDLEGSDIDTRRRAACDLVRGLCKFFEGPVTGIFSGYVNSMLQEYAKNPSVNWKHKDAAIYLVTSLASKAQTQKHGITQANELVNLTEFFVNHILPDLKSANAIMRSFSLLQEAIIPYIPTLITQLTQKLLAVSKNPSKPHFNHYMFEAICLSIRITCKANPAAVVNFEEALFLVFTEILQNDVQVNQLTNIGNKSSFCYSRDFRIPKQPSLSRVSKIIWMFYRSNERRMFGMVLEKIIIPEIQKVSGNVEKKICAVGITKLLTECPPMMDTEYTKLWTPLLQSLIGLFELPEDDTIPDEEHFIDIEDTPGYQTAFSQLAFAGKKEHDPVGQMVNNPKIHLAQSLHKLSTACPGRSCGSSPVEDGVCIGAPRSPTASVCFPSLVGSINGPAPAPPPPTVRTTSSGWHCGGACARKARRGPSGRSALSRLDRSGPS

SEQ ID NO: 40207 - protein, 1380 aa, Homo sapiens
MFVLKVGCPSLLLRDPRRSLLHYTCFTSVPVLVQVGCNPNEDVAIFAVDSLRQLSMKFLEKGELANFRFQKDFLRPFEHIMKKNRSPTIRDMAIRCIAQMVNSQAANIRSATIFQHHFPAAIDSFQDAVKCLSEFACNAAFPDTSMEAIRLIRFCGNYLSERPRVLLEYTSDDMNVAPGDRVWVRGWFPILFELSCIINRCKLDVRTRGLTVMFEIMKSYGHTFEKHWWQDLFRIVFRIFDNMKLPEQLSEKSEWMTTTCNHALYAICDGFTQFYEALNEVLLSDVFAQLQWCVKQDNEQLARSGTNCLENLVISNGEKFSPEVWDETCNCMLDIFKTTIPHVLLTWRPVGMEEDSSEKHLDVDLDRQSLSSIDKNPSERGQSQLSNPTDDSWKGRPYANQKLFASLLIKCVVQLELIQTIDNIVFYPATSKKEDAEHMVAAQQDTLDADIHIETEDQGMYKYMSSQHLFKLLDCLQESHSFSKAFNSNYEQRTVLWRAGFKGKSKPNLLKQETSSLACCLRILFRMYVDENRRDSWEEIQQRLLTVCSEALAYFITVNSESHREAWTSLLLLLLTKTLKINDEKFKAHASMYYPYLCEIMQFDLIPELRAVLRKFFLRIGVVYKIWIPEEPSQARCRAILPGFECEAERRQERVVPATVRGWGSLLRFCIPTSSYNKCLLNMYCVPDPIAMELSDANLQTLTEYLKKTLDPDPAIRRPAEKFLESVEGNQNYPLLLLTLLEKSQDNVIKVCASVTFKNYIKRNWRIVEDEPNKICEADRVAIKANIVHLMLSSPEQIQKQLSDAISIIGREDFPQKWPDLLTEMVNRFQSGDFHVINGVLRTAHSLFKRYRHEFKSNELWTEIKLVLDAFALPLTNLFKICDNAALYAQKYDEEFQRYLPRFVTAIWNLLVTTGQEVKYDLLVSNAIQFLASVCERPHYKNLFEDQNTLTSICEKVIVPNMEFRAADEEAFEDNSEEYIRRDLEGSDIDTRRRAACDLVRGLCKFFEGPVTGIFSGYVNSMLQEYAKNPSVNWKHKDAAIYLVTSLASKAQTQKDTGETERGKEKRGTARTEKRTNKTQNPPAQKGGRDAKHANGGTKGRKTEAANKRKRKPNTKQGEEKVGGGNDARGEHEDEKRGRGTRAKRKRRQEEGEARQTNNAKQERERRGNKTQGGEPNRKKKRKTDEAGKQRERRRGGQAPEIPGAQEAETEEQLEPDRLTDQEIGDGKGLDMARRCSVTSMESTVSSGTQTTVQDDPEQFEVIKQQKEIIEHGIELLGTAAPPKANFIEADKYFLPFELACQSKSPRVVSTSLDCLQKLIAYGHITGNAPDSGAPGKRLIDRIVETICSCFQGPQTDEGVQLQIIKALLTAVTSPHKRNS

SEQ ID NO: 40208 - protein, 1825 aa, Homo sapiens
  DOMAIN (680)..(867): Sec7 domain identified by PFam, accession name Sec7, E-value= 1.8e-79, PFam score of 277.4
MQESQTKSMFVSRALEKILADKEVKRPQHSQLRRACQVALAWKLLLIAPLAVGKATPVKMWSNKVEQLTVMNMHSAEQETDEIKAEIEKQRLGTAAPPKANFIEADKYFLPFELACQSKSPRVVSTSLDCLQKLIAYGHITGNAPDSGAPGKRLIDRIVETICSCFQGPQTDEGVQLQIIKALLTAVTSPHIEIHEGTILQTVRTCYNIYLASKNLINQTTAKATLTQMLNVIFTRMENQVLQEARELEKPIQSKPQSPVIQAAAVSPKFVRLKHSQAQSKPTTPEKTDLTNGEHARSDSGKVSTENGDAPRERGSSLSGTDDGAQEVVKDILEDVVTSAIKEAAEKHGLTEPERVLGELECQECAIPPGVDENSQTNGIADDRQSLSSADNLESDAQGHQVAARFSHVLQKDAFLVFRSLCKLSMKPLGEGPPDPKSHELRSKVVSLQLLLSVLQNAGPVFRTHEMFINAIKQYLCVALSKNGVSSVPDVFELSLAIFLTLLSNFKMHLKMQIEVFFKEIFLNILETSTSSFEHRWMVIQTLTRICADAQCVVDIYVNYDCDLNAANIFERLVNDLSKIAQGRSGHELGMTPLQELSLRKKGLECLVSILKCMVEWSKDLYVNPNHQTSLGQERLTDQEIGDGKGLDMARRCSVTSMESTVSSGTQTTVQDDPEQFEVIKQQKEIIEHGIELFNKKPKRGIQFLQEQGMLGTSVEDIAQFLHQEERLDSTQVGDFLGDSARFNKEVMYAYVDQLDFCEKEFVSALRTFLEGFRLPGEAQKIDRLMEKFAARYIECNQGQTLFASADTAYVLAYSIIMLTTDLHSPQVKNKMTKEQYIKMNRGINDSKDLPEEYLSSIYEEIEGKKIAMKETKELTIATKSTKQNVASEKQRRLLYNLEMEQMAKTAKALMEAVSHAKAPFTSATHLDHVRPMFKLVWTPLLAAYSIGLQNCDDTEVASLCLEGIRCAIRIACIFGMQLERDAYVQALARFSLLTASSSITKMKQKNIDTIKTLITVAHTDGNYLGNSWHEILKCISQLELAQLIGTGVKTRYLSGSGREREGSLKGHTLAGEEFMGLGLGNLVSGGVNKRQMASFQESVGETSSQSVVVAVDRIFTGSTRLDGNAIVDFVRWLCAVSMDELASPHHPRMFSLQKIVEISYYNMNRIRLQWSRIWHVIGDHFNKVGCNPNEDVAIFAVDSLRQLSMKFLEKGELANFRFQKDFLRPFEHIMKKNRSPTIRDMAIRCIAQMVNSQAANIRSGWKNIFAVFHQAASDHDGNIVELAFQTTCHIVTTIFQHHFPAAIDSFQDAVKCLSEFACNAAFPDTSMEAIRLIRFCGKYVSERPRVLQEYTSDDMNVAPGDRVWVRGWFPILFELSCIINRCKLDVRTRGLTVMFEIMKSYGHTFEKHWWQDLFRIVFRIFDNMKLPEQLSEKSEWMTTTCNHALYAICDVFTQFYEALNEVLLSDVFAQLQWCVKQDNEQLARSGTNCLENLVISNGEKFSPEVWDETCNCMLDIFKTTIPHVLLTWRPVGMEEDSSEKHLDVDLDRQSLSSIDKNPSERGQSQLSNPTDDSWKGRPYANQKLFASLLIKCVVQLELIQTIDNIVFYPATSKKEDAEHMVAAQQDTLDADIHIETEDQGMYKYMSSQHLFKLLDCLQESHSFSKAFNSNYEQRTVLWRAGFKGKSKPNLLKQETSSLACCLRILFRMYVDENRRDSWEEIQQRLLTVCSEALAYFITVNSESHREAWTSLLLLLLTKTLKINDEKFKAHASMYYPYLCEIMQFDLIPELRAVLRKFFLRISVVYKIWIPEEPSQVPAALSPVW

SEQ ID NO: 40209 - protein, 246 aa, Homo sapiens
  DOMAIN (93)..(107): Bacterial-type phytoene dehydrogenase proteins domain identified by eMATRIX, accession number BL00982B, p-value=9.167e- 09, raw score of 8.77
  misc_feature (1)...(246): Xaa = X or * as defined in Table 2
TGWEGRAEAEVPQDDRREPRHSIEVEEEDQKLVSASLEPIGGPPDCPQKPQPQCPLSPSKKWGCDLCLXQHKLAQKWRREISTSVPSQPGLGPGRTADTGPSLPTTPAGQEAGRTPAPPAWSAFDLDSTVVKMEKGWICSXKYTRSQASCSELPRRLGRAGPTEELGMPTQEVAPLPARGXGPESLPLASRQEFLSGRTVRVKLGLPLPLTEGKIVLPGGEGGSPHVCPSPWIIERRTADQGVVAE

SEQ ID NO: 40210 - protein, 458 aa, Homo sapiens
MPSSSVGPARPSLRGSSEQLAWLRGIFSYRSSPPPSPQQSSPNQTRSRQHYAPSVFEKYTASVTVGSKEVTLNLYDTAALAGPWPALHSWRPLRGAGCGALEAKPYTKQWAALGPPMVPGLLRYLLWSLQTLATPGQRPREGPHAHTPRAEATAGQEPARDPKGSARNPEPQRPRGKGVRAAPKQGVRGMSIPAQPHASTRAGSERRSEQRRLLSSFTGSCDSDLLKFNQLKFRKKKLKFCKSHIHDWGLFAMEPSGDPLESAWIHARNAPTTTPSQTPHPPPREAGNPNPPPRAPEARGPGHDKAAQKACVHGGPNTQHPRPQPEPAVPPAALAPPPKHQLSSQASSPSRLGRAAERPHKTQQRQTPTHTGPRAAATAEHAPQALPPPAPAPHYNRTRPAQLRNPPTPKKGSEEPAQPTKHTPATPAKRDPKGGGARRRPARPLQPHSGGEEDEKES

SEQ ID NO: 40211 - protein, 450 aa, Homo sapiens
  DOMAIN (218)..(450): Myosin head (motor domain) domain identified by PFam, accession name myosin_head, E-value=1.9e-97, PFam score of 337.2
KLCPCLYHFFHTNVQRHAPFVANPFLLTHIQISTKHPAIVGTTELLLCVGGVQRVLQLAPQRLQLLAQVPALLLRLGPGHTLRLQVLLGLGQGCLSLPQGFQQLGPGPTLVFCPLPELLEEDAVGEALATDADALQDPVAAKLVQHQPWLQLPGLGKQPPPLPVSQLEVGRAVPLHHPQGALLLLALLEGLQSLLPRVHSPFLHDTFRRHRPVPASLQLNSFEQLCITTPQKLQQLFNHTMFVSPPAVNVQANPAGLLALLDEECWFPKATDKSFVEKVAQEQGGHPKFQRPRHLRDQADFSVLHYAGKVDYKANEWLMKNMDPLNDNVAALLHQSTDRLTAEIWKDVEGIVGLEQVSSLGDGPPGGRPRRGMFRTVGQLYKESLSRLMATLSNTNPSFVRCIVPNHEKRAGKLEPRLVLDQLRCNGVLEGIRICRQGFPNRILFQEFRQ

SEQ ID NO: 40212 - protein, 159 aa, Homo sapiens
  DOMAIN (22)..(57): Ribosomal protein L10e proteins domain identified by eMATRIX, accession number BL01257C, p-value=4.343e-22, raw score of 11.43
  DOMAIN (4)..(95): Ribosomal L10 domain identified by PFam, accession name Ribosomal_L10e, E-value=5.5e-06, PFam score of 5.0
  misc_feature (1)...(159): Xaa = X or * as defined in Table 2
VGCMGCSKGPWRQAFQVDVHVSDLALPQCRLQTGMRGAFGKPQGTVARVHIGQVIMSIRTKLQNKEHVIEALRRAKFKFPGRQKVCSAAAPFSHLCPRPPDSVLSIAPXIHISKKWGFTKFNADEFEDMVAEKRLIPDGCGVKYIPSRGPLDKWRALHS

SEQ ID NO: 40213 - protein, 161 aa, Homo sapiens
  DOMAIN (84)..(124): Ribosomal protein L10e proteins domain identified by eMATRIX, accession number BL01257D, p-value=1.000e-40, raw score of 18.80
  DOMAIN (1)..(124): Ribosomal L10 domain identified by PFam, accession name Ribosomal_L10e, E-value=1.3e-45, PFam score of 165.0
SDEYDQLCSEALVGAQICAKKYIVKCCGKNGFHIRVRLHPFHVICINRMLACAGTDRLQTGMGGAIGKPQGTVARILIGQVIMSIRTKLQNKEHVIEALRRAKFKFPGRQKIHISKKWGFTKFNADEFEDMVAEKRLIPDGCGVKYIPSRGPLDKWRALHS

SEQ ID NO: 40214 - protein, 64 aa, Homo sapiens
  misc_feature (1)...(64): Xaa = X or * as defined in Table 2
DYYLEGLINHIVHHDHFLNLQNHSSNLPVAEICYRXRYRKKVQQRIIIAKDYTTELFSNRXLFN

SEQ ID NO: 40215 - protein, 655 aa, Homo sapiens
  DOMAIN (185)..(207): 1 kw CHROMO BROMODOMAIN SHADOW GLOBAL domain identified by eMATRIX, accession number DM00547C, p-value=1.667e-19, raw score of 17.30
  DOMAIN (139)..(426): SNF2 and others N-terminal domain identified by PFam, accession name SNF2_N, E-value=3.7e-98, PFam score of 339.5
SYLHCKWATMEELEKDPRIAQKIKRFRNKQAQMKHIFTEPDEDLFNPDYVEVDRILEVAHTKDAETGEEVTHYLVKWCSLPYEESTWELEEDVDPAKVKEFESLQVLPEIKHVERPASDSWQKLEKSREYKNSNQLREYQLEGMNWLLFNWYNRKNCILADEMGLGKTIQSITFLSEIFLRGIHGPFLIIAPLSTITNWEREFRTWTEMNAIVYHGSQISRQMIQQYEMVYRDAQGNPLSGVFKFHVVITTFEMILADCPELKKIHWSCVIIDEAHRLKNRNCKLLEGLKLMALEHKVLLTGTPLQNSVEELFSLLNFLEPSQFPSETAFLEEFGDLKTEEQVKKLQSILKPMMLRRLKDDVEKNLAPKQETIIEVELTNIQKKYYRAILEKNFSFLTKGANQHNMPNLINTMMELRKCCNHPYLINGAEEKILEDFRKTHSPDAPDFQLQGMIQAAGKLVLIDKLLPKLIAGGHKVLIFSQMVRCLDILEDYLIQRRYTYERIDGRVRGNLRQAAIDRFCKPDSDRFVFLLCTRAGGLGINLTAADTCIIFDSDWNPQNDLQVPEGRIQKVWEQMSWPRAQPQDNAAAACLQDFGSQLGVQSEETGPFHNRQKQDSGNSHTAPRGRESFIKPPSSRDLLPLKIQKEGPATNYNS

SEQ ID NO: 40216 - protein, 60 aa, Homo sapiens
MGFRLGTCGDESDQVELGSGKRSLSHWHLEACPRFLGRLADTLEPWGATGKIFWNGAGFL

SEQ ID NO: 40217 - protein, 571 aa, Homo sapiens
MFEKAARQEWIQVAKSVTRVAMSSYTFQKNPDLISVGEDVEKKLELSYAAVTMAWGQYGDYGYPYQQYHDYSDDGWVNLNRQGFSYQCPQGQVIVAVRSIFSKKEADSVSRASATGPDSGQFFLLERVGTCKTTAEAQPQRDDPYLVTRTVEGLSRTVEGVGRGLTQAAAGEGAGAVEAAWNSLCGPFSSTPMASDEETEAIRGHETRPDDTAKNSGAIQQHSQCSWPLYYRAPHSVKRYQTCSNNGLVAGFQSRYFESVLDREWQFYCCRYSKRCPYSCWLSLAADQTLMTPGVGEAPRKCSSFRKGNRTIEPALTGPKSPTYSVGMPSLKLRPNDSHPSAVLLLPNFWLTTEYPGHYGEEMDMISYNYDYYIRGATTTFSAVERKEERRERKGIGDKKHTEPTVLVWAAIPHYLRLGNLRTIEIYFHSSGSWKVQDQVDPEEEPARQNHRDRVPCHTPPLGGQEGDSQPVVMRAKDHYELEKQKALGQVEDEEDLCQQQRLPEQTYGSEEAPQEAKKNLGSPEPNSQAGAQKPISMATNRAVFDVTCNFSPHWLQCLQSRSLSPEDPGL

SEQ ID NO: 40218 - protein, 136 aa, Homo sapiens
VIVAVRSIFSKKEGSDRQWNYACMPTPQSLGEPPRSAGGRRSTGLAWNGTRTCSNNGLVAGFPEPLLRVSAGSGVAVLLLSPTAKRCPYSCWPNNQNISGHFGEEMDMISYNYDYYIRGATTHFLCSGKGSPSGSS

SEQ ID NO: 40219 - protein, 206 aa, Homo sapiens
  DOMAIN (125)..(157): GTP-binding elongation factors proteins domain identified by eMATRIX, accession number BL00301B, p-value=5.500e-31, raw score of 20.09
  DOMAIN (40)..(172): Elongation factor Tu family domain identified by PFam, accession name GTP_EFTU, E-value=9.9e-61, PFam score of 207.3
NLSDRHRGSHLESQHFQRLKQEDLLSPRIQDQPGQHWETLSHINIVVIGHVDSGKSTTTGHLIYKCGGIDKRTIEKFEKEAAEMGKGSFKYAWVLDKLKAERERGITIDISLWKFETSKYYVTIIDAPGHRDFIKNMITGTSQADCAVLIVAAGVGEFEAGISKNGQTREHALPGYSQKRYEEIVKEVSTYIKKIGYTPDTVACVP

SEQ ID NO: 40220 - protein, 253 aa, Homo sapiens
  DOMAIN (55)..(66): GTP-BINDING ELONGATION FACTOR SIGNATURE domain identified by eMATRIX, accession number PR00315C, p-value=3.625e-12, raw score of 13.85
  DOMAIN (33)..(208): Elongation factor Tu family domain identified by PFam, accession name GTP_EFTU, E-value=1.6e-33, PFam score of 115.6
VVQTQISKTADELISYWGTSFPPPFAASLTLYELEYCITIDISLWKFETSKYYATVIDAPGHRDFIKNMITGTSQADCAVLIFAAGVGEFEAVTFAPVNVTTEVKSVEMHHEVLSEALPGDNVDFDVKNVSVKEVHHGNVAGQISAGCAPVLDCHMAHIACKFAKLKKKTGSTSGKKLEDGPTFLKSGDAAIVDMVPGKPMCVESFSVYPPLSRFAVCDMRQTVAVGVIEAMDKMAAGAGKVTMSAQKAHNAK

SEQ ID NO: 40221 - protein, 205 aa, Homo sapiens
  DOMAIN (120)..(138): SENR ORPHAN RECEPTOR SIGNATURE domain identified by eMATRIX, accession number PR00647G, p-value=7.545e-09, raw score of 6.17
MVQARPGAHPTLLPGPTAAWVSGFSGGGSDLTGAREAQERGRWSPTESSSASVSPVAKVSKFTLSSELEGGDYPKERERTGGGPGRPPDWTPHGTGALQSPHPRTAPAPHPTPCPGRPRDAGQRSPGAPAWSPRVHRPTPSLLPPRRWTAAALWAAWQRPLPASQPGRGTSPGNPGPGRTPPSPQEVGSPGHIHISLRTGFPPTL

SEQ ID NO: 40222 - protein, 134 aa, Homo sapiens
  misc_feature (1)...(134): Xaa = X or * as defined in Table 2
MNKPCSETPKRPISPNKKDLGVXXXXXXXXXXXXXXXXXXXXXXXXXXXXXXXLXXXXRGGPPNTPGKKKKXXXXXGGKKKPPGGGXXXXXFXXXXXKPPPPXXXXYRGXXXXXFLXXXXKKNIFFCGXXXXKQ

SEQ ID NO: 40223 - protein, 237 aa, Homo sapiens
NGGGCGAARGGAAPGEGTRRGACWATRGLPGTGRSAAAPARRGERQQLAMDVFLMIRRHKTTIFTDAKESSTVFRELKRIRRGQSSKRPPDEQRLYKDDQLLDDGKTLGECGFTSQNRHRPQAPATVGSGLPASSAASSTDDTFEALCIEPFSSPPELPDVDGRPQGFGEGSAQLNKAVQVETPQEGPIFPQLKGDLGSLPGCCLFFPPLPGMGPTPCGLLLGLVLGSSCAVLSPRS

SEQ ID NO: 40224 - protein, 231 aa, Homo sapiens
  DOMAIN (169)..(178): BCL2-like apoptosis inhibitors (spans part of BH3 BH1 and BH. domain identified by eMATRIX, accession number BL50062C, p-value= 1.794e-09, raw score of 6.66
  DOMAIN (97)..(177): Apoptosis regulator proteins, Bcl-2 family domain identified by PFam, accession name Bcl-2, E-value=4.9e-26, PFam score of 99.9
MAHAGRTGYDNREIVMKYIHYKLSQRGYEWDAGDVGAAPPGAAPAPGIFSSQPGHTPHPAASRDPVARTSPLQTPAAPGAAAGPALSPVPPVVHLALRQAGDDFSRRYRGDFAEMSSQLHLTPFTARGRFATVVEELFRDGSVNREMSPLVDNIALWMTEYLNRDLHTWIQDNGGWPWDFLIGATTPVTIPYLPYHSTEECQLINVKGTAEFKIPFAKPDEMIQAKIIDGC

SEQ ID NO: 40225 - protein, 140 aa, Homo sapiens
CSLKNWREVLALLLTYSGTEKFPELCDLMEKVMVLNRSLEQLRGPHGGSAVLGQQSPPFPFPRIVVGATLHSKETSSYRLGSQPSHQVPTPSPRPRVFTPQSSPAMPLAPSHPSPYQGPRTQNISDYRAPGPQAIQPLPL

SEQ ID NO: 40226 - protein, 283 aa, Homo sapiens
GDVQRTLIQVDFGDGIAVSYVNLSSMEDGIKHVYQNVGIFRVTVQALVRLPPHISQCDEVFRFFEARPEDVNPPKDQALLLGELGPAVELCLKEERFADAIILAQAGGTDLLKQTQERYLAKKKTKISSLLACVVQKNWKDVVCTCSLKNWREALALLLTYSGTEKFPELCDMLGTRMEQEGSRALTSEARLCYVCSGSVERLVECWAKCHQALSPMALQDMHVISTDENQVFAAVQEWNQNDTYNLYISDTRGVYFTLALENVQSSRGPEGNIMIDLYEVTI

SEQ ID NO: 40227 - protein, 289 aa, Homo sapiens
  misc_feature (1)...(289): Xaa = X or * as defined in Table 2
NSSPPFPFPRIVVGATLHSKETSSYRLGSQPSHQVPTPSPRPRVFTPQSSPAMPLAPSHPSPYQGPRTQNISDYRAPGPQAIQPLPLSPGVRPGPQDSWKEAPAPRGNLQRNKLPETFMPPAPITGPSIMRPHPXATRDSSLTAPLSPVXVMLPQEFQENSPAGDKDNVFPSLGKPPSPPCVQVMVDGPHSSRPCAEGDWVQVPGVLTAEKGRLLISPTLLXWEQCDCESLGTSPXGSHEKDSLPLWPFSLLLYQQLQHLPPEKMERKELPPEHQSLKSSFEALLQRCS

SEQ ID NO: 40228 - protein, 784 aa, Homo sapiens
  misc_feature (1)...(784): Xaa = X or * as defined in Table 2
MKLKELERPAVQAWSPASQYPLYLATGTSAQQLDSSFSTNGTLEIFEVDFRDPSLDLKHRGVLSALSRFHKLVWGSFGSGLLESSGVIVGGGDNGMLILYNVTHILSSGKEPVIAQKQKHTGAVRALDLNPFQPPEDIKALSWNRQAQHILSSAHPSGKAVVWDLRKNEPIIKVSDHSNRMHCSGLAWHPDIATQLVLCSEDDRLPVIQLWDLRFASSPLKVLESHSRGILSVSWSQADAELLLTSAKDSQILCRNLGSSEPCPRLVFISQVTTESEFLMRSAELQEALGSGNLLNYCQNKSQQALLQSEKMLWQFLKVTLEQDSRMKFLKLLGYSKDELQKKVATWLKSDVGLGESPQPKGNDLNSDRQQAFCSQASKHTTKEASASSAFFDELVPQNMTPWEIPITKDIDGLLSQALLLGELGPAVELCLKEERFADAIILAQAGGTDLLKQTQERYLAKKKTKISSLLACVVQKNWKDVVCTCSLKNWREALALLLTYSGTEKFPELCDMLGTRMEQEGSRALTSEARLCYVCSGSVERLVECWAKCHQALSPMALQDLMEKVMVLNRSLEQLRGPHGVSPGPATTYRVTQYANLLAAQGSLATAMSFLPRDCAPAARDIYAPSTNYCSSYEPHPXATRDSSLTAPCLQSASAPATXEDGKEGAAPRASVLEEQLXGASPTLLPVCNXLKDKKEAGRGSPASGVSIXEALXGDTLTSCRGWAPXGCPMCGCRKLXAGPCSACPGGGLXQLQRGVQLHAYPEGCPHHRSXAAGTMACLFYTM

SEQ ID NO: 40229 - protein, 916 aa, Homo sapiens
SVSWSQADAELLLTSAKDSQILCRNLGSSEVVYKLPTQSSWCFDVQWCPRDPSVFSAASFNGWISLYSVMGRSWEVQHMRQADKISSSFSKGQPLPPLQVPEQVAQAPLIPPLKKPPKWIRRPTGVSFAFGGKLVTFGLPSTPAHLVPQPCPRLVFISQVTTESEFLMRSAELQEALGSGNLLNYCQNKSQQALLQSEKMLWQFLKVTLEQDSRMKFLKLLGYSKDELQKKVATWLKSDVGLGESPQPKGNDLNSDRQQAFCSQASKHTTKEASASSAFFDELVPQNMTPWEIPITKDIDGLLSQALLLGELGPAVELCLKEERFADAIILAQAGGTDLLKQTQERYLAKKKTKISSLLACVVQKNWKDVVCTCSLKNWREALALLLTYSGTEKFPELCDMLGTRMEQEGSRALTSEARLCYVCSGSVERLVECWAKCHQALSPMALQDLMEKVMVLNRSLEQLRGPHGVSPGPATTYRVTQYANLLAAQGSLATAMSFLPRDCAQPPVQQLRDRLFHAQGSAVLGQQSPPFPFPRIVVGVTLHSKETSSYRLGSQPSHQVPTPSPRPRVFTPQSSPAMPLAPSHPSPYQGPRTQNISDYRAPGPQAIQPLPLSPGVRPASSQPQLLGGQRVQVPNPVGFPGTWPLPGSPLPMACPGIMRPGSTSLPETPRLFPLLPLRPLGPGRMVSHTPAPPASFPVPYLPGDPGAPCSSVLPTTGILTPHPGPQDSWKEAPAPRGNLQRNKLPETFMPPAPITAPVMSLTPELQGILPSQPPVSSVSHAPPGVPGELSLQQLQHLPPEKMERKELPPEHQSLKSSFEALLQRCSLSATDLKTKRKLEEAAQRLEYLYEKLCEGTLSPHVVAGLHEVARCVDAGSFEQGLAVHAQVAGCSSFSEVSSFMPILKSVLIIAHKLLV

SEQ ID NO: 40230 - protein, 60 aa, Homo sapiens
CRVCLPSSPVAGSFSCTMKFTVRDCDPNTGVPDEDGYDDEYVVSLPSIETFFDTFTTLSD

SEQ ID NO: 40231 - protein, 242 aa, Homo sapiens
EAETEYFVRCIKHMFTNHIVFQLFHLLTFQFDCTNTLNDQLLEKVTVQMEPSESYEVLSCIPAPSLPYNQPGICYTLVRLPDDDPTAVAGSFSCTMKFTVRDCDPNTGVPDEDGNDDEYVLEDLEVTVSDHIQKVLKPNFAAAWEEVGDTFEKEETFALSSTKTLEEAVNNIITFLGMQPCERSDKVPENQDSHSLYLAGIFRGGYDLLVRARLALADGVTMQVTVRCKHRTPVDIILASVG

SEQ ID NO: 40232 - protein, 46 aa, Homo sapiens
  misc_feature (1)...(46): Xaa = X or * as defined in Table 2
GSPTTRPAKPLTLSSGHLRSRPRWAEGPQYHLPXISAPRAKLGVMM

SEQ ID NO: 40233 - protein, 391 aa, Homo sapiens; identical to SEQ ID NO: 34243

SEQ ID NO: 40234 - protein, 84 aa, Homo sapiens
TGKFPSCCLLSFYGTGLIAGHGFTSPERTPGVFILFDEDRFGFVWLELKSFSLYSRVQATFRNADAPSPQAFDEMLKNIQSLTS

SEQ ID NO: 40235 - protein, 1217 aa, Homo sapiens
  DOMAIN (654)..(689): CORE POLYPROTEIN PROTEIN GAG CONTAINS: P domain identified by eMATRIX, accession number PD02059B, p-value=1.000e-09, raw score of 24.48
VVMEQLPGVPPGPPHPVRPPPPPPPPMPLQLEAHLRSHGLEPAAPSPRLRPEESLDPPGAMQELLGALEPLPPAPGDTGVGPPNSEGKDPAGAYRSPSPQGTKAPRFVPLTSICFPDSLLQDEERSFFPTMEEMFGGGAADDYGKAGPPEDEGDPKAGAGPPPGPPAYDPYGPYCPGRASGAGPETPGLGLDPNKPPELPSTVNAEPLGLIQSGPHQAAPPPPPPPPPPPAPASEPKGGLTSPIFCSTKPKKLLKTSSFHLLRRRDPPFQTPKKLYAQEYEFEADEDKADVPADIRLNPRRLPDLVSSCRSRPALSPLGDIDFCPPNPGPDGPRRRGRKPTKAKRDGPPRPRGRPRIRPLEVPTTAGPASASTPTDGAKKPRGRGRGRGRKAEEAGGTRLEPLKPLKIKLSVPKAGEGLGTSSGDAISGTDHNSLDSSLTREKIEAKIKEVEEKQPEMKSGFMASFLDFLKSGKRHPPLYQAGLTPPLSPPKSVPPSVPARGLQPQPPATPAVPHPPPSGAFGLGGALEAAESEGLGLGCPSPCKRLDEELKRNLETLPSFSSDEEDSVAKNRDLQESISSAISALDDPPLAGPKDTSTPDGPPLAPAAAVPGPPPLPGLPSANSNGTPEPPLLEEKPPPTPPPAPTPQPQPPPPPPPPQPALPSPPPLVAPTPSSPPPPPLPPPPPPAMPSPPPPPPPAAAPLAAPPEEPAAPSPEDPELPDTRPLHLAKKQETAAVCGETDEEAGESGGEGIFRERDEFVIRAEDIPSLKLALQTGREPPPIWRVQKALLQKFTPEIKDGQRQFCATSNYLGYFGDAKNRYQRLYVKFLENVNKKDYVRVCARKPWHRPPVPVRRSGQAKNPVSAGGSSAPPPKAPAPPPKPETPEKTTSEKPPEQTPETAMPEPPAPEKPSLLRPVEKEKEKEKVTRGERPLRGERATSGRQTRPERSLATGQPATSRLPKARPTKVKAEPPPKKRKKWLKEAGGNATAGGGPPGSSSDSESSPGAPSEDERAVPGRLLKTRAMREMYRSYVEMLVSTALDPDMIQALEDTHDELYLPPMRKIDGLLNEHKKKVLKRLSLSPALQDALHTFPQLQVEQSGEGSPEEGAVRLRPAGEPYNRKTLSKLKRSVVRAQEFKVELEKSGYYTLYHSLHHYKYHTFLRCRDQTLAIEGGAEDLGQEEVVQQCMRNQPWLEQLFDSFSDLLAQAQAHSRCG

SEQ ID NO: 40236 - protein, 1239 aa, Homo sapiens
  DOMAIN (1179)..(1196): Acyltransferases ChoActase / COT / CPT family proteins domain identified by eMATRIX, accession number BL00439A, p-value=4.750e- 13, raw score of 9.40
MEEMFGGGAADDYGKAGPPEDEGDPKAGAGPPPGPPAYDPYGPYCPGRASGAGPETPGLGLDPNKPPELPSTVNAEPLGLIQSGPHQAAPPPPPPPPPPPAPASEPKGGLTSPIFCSTKPKKLLKTSSFHLLRRRDPPFQTPKKLYAQEYEFEADEDKADVPADIRLNPRRLPDLVSSCRSRPALSPLGDIDFCPPNPGPDGPRRRGRKPTKAKRDGPPRPRGRPRIRPLEVPTTAGPASASTPTDGAKKPRGRGRGRGRKAEEAGGTRLEPLKPLKIKLSVPKAGEGLGTSSGDAISGTDHNSLDSSLTREKIEAKIKEVEEKQPEMKSGFMASFLDFLKSGKRHPPLYQAGLTPPLSPPKSVPPSVPARGLQPQPPATPAVPHPPPSGAFGLGGALEAAESEGLGLGCPSPCKRLDEELKRNLETLPSFSSDEEDSVAKNRDLQESISSAISALDDPPLAGPKDTSTPDGPPLAPAAAVPGPPPLPGLPSANSNGTPEPPLLEEKPPPTPPPAPTPQPQPPPPPPPPQPALPSPPPLVAPTPSSPPPPPLPPPPPPAMPSPPPPPPPAAAPLAAPPEEPAAPSPEDPELPDTRPLHLAKKQETAAVCGETDEEAGESGGEGIFRERDEFVIRAEDIPSLKSYGADRGVEDLRASEVLFAFVSVHALPVYKLALQTGREPPPIWRVQKALLQKFTPEIKDGQRQFCATSNYLGYFGDAKNRYQRLYVKFLENVNKKASVRVCARKPWHRPPVPVRRSGQAKNPVSAGGSSAPPPKAPAPPPKPETPEKTTSEKPPEQTPETAMPEPPAPEKPSLLRPVEKEKEKEKVTRGERPLRGERATSGRQTRPERSFATGQPATSRLPKARATKVKAEPPPKKRKKWLKEAGGNATAGGGPPGSSSDSESSPGAPSEDERAVPGRLLKTRAMREMYRSYVEMLVSTALDPDMIQALEDTHDELYLPPMRKIDGLLNEHKKKVLKRFSLSPALQDALHTFPQLQVEQSGEGSPEEGAVRLRPAGEPYNRKTLSKLKRSVVRAQEFKVELEKSGYYTLYHSLHHYKYHTFLRCRDQNLAIEGGAEDLGQEEVVQQCMRNQPWLEQLFDSFSDLLAQAQAHSRCGLGQHIEDALLDVASLFQAGQHFKRRFRGSGKENSRHRAGVEEALVRIFSGRHPMLFSYQRSLPRQPVPSVQDTVRKYLESVRPILSDEDFDWTAVLAQEFLRLQASLLQWYLRLKSWWASNY

SEQ ID NO: 40237 - protein, 78 aa, Homo sapiens
  misc_feature (1)...(78): Xaa = X or * as defined in Table 2
QGWRRRRPISKISESRNMQNFLHALSNCLPEGGAXDRCSSRLEEGRQLPPLLLGSLQVAKKSGGTGWMVRCSQCLFLG

SEQ ID NO: 40238 - protein, 382 aa, Homo sapiens
MGGKGDDSWVISATPLGKCCAAVPLGGNPTLRVDQLWRKQRPPLQQCTASAPGGWVTSLMGAGTHAANTGFQLVWSSKRPMYKVLQAFFGVQRSDRSAMNGQGFSKCVGMPITHTRQQADLGRGPEETEDKKQQSRGSDELRSEGEEPEPYLLRTSKVKDKERILKAAREMKQIIYNGAPIHLAADFSVETLQAKKEWCDIFKVLKKKTFYPKMVLTAGPSHPQSVISVSFTGLANAASLTMSPDLHGQPGFAGLSSVAAVDWQWALLRPSPPQGRMGLLPICQATQGPQLCVASPSDKEGFLLLFGKEIARLTNKGGARLYKCDIVQGVCCEDPLATLDWELRPDLEQGERPTPERHKPFLLGKSFSAPLIKICRYEWQMF

SEQ ID NO: 40239 - protein, 118 aa, Homo sapiens
  misc_feature (1)...(118): Xaa = X or * as defined in Table 2
NSFLTCILPPVSIXTDLLQPSAQWKQLSLARRNVHSTRLAGARRCAASGPSPVAAHCYHPVSGHSRLLHGCQHGHWGSWQVPEVPPGSPFSLAPVWKRRQTALPAILHLPVEHYYPEL

SEQ ID NO: 40240 - protein, 283 aa, Homo sapiens
PLTSPEAFSNRCGLRGPPPCVPVGRLQFNDVSSLGICLPDSSCCSSWHGPHSLHHHVQACKASIRASGTAASANCAFSRYHVHCSIAFQIKVLHNLIVLTVIIPAAEHMAWGPGIAQPNPPHRASGHSSWGPEVGPKLSTTAILVGTYPQVPPVGLETGPPSLFQPLPISTHTAWNTENCPANATVIAHPTLAAQGTKNPPTLLVHHCHYQHLSLKDDGTRRENSLKLGEGKVILQTEGIQKGMDPTMEYATNYWKKLQLWKRRQTALPAILHLPVEHYYPEL

SEQ ID NO: 40241 - protein, 207 aa, Homo sapiens
MESLDTETSTWGECHRKIRGMVPQVKELAEEEEAPPDGAVAEYRREKQKYEALRKQQSKKGTSREDQQIIIKNLPCTNHCIWQSTHEHIPALSDLSGKRAKQVIPVKGGEHYERTLALLNQFKSKLTQAIAETPENDIPETEVEDDEGWMSHVLQFEGKSRKSGKVPSMQDSDTFEIYDPRNPLVNKRREGKKAKSLMREKKERRLK

SEQ ID NO: 40242 - protein, 123 aa, Homo sapiens
PMRPAFTRVEMARVLMERNQYKERLMELQEAVRWTEMIRASREHPSVQEKKKSTIWQFFSRLFSSSSSPLRPKRPYPSVNIHYKSPTEGCSVAAGFSPPPCHLHCDVCPLPRLFPQDLEVTPG

SEQ ID NO: 40243 - protein, 61 aa, Homo sapiens
VKSEAIIARREPKEEAEDDKIPMAQRRRFTRVEMARVLMERNQYKERLMELQEAVRWTEMI

SEQ ID NO: 40244 - protein, 99 aa, Homo sapiens
  misc_feature (1)...(99): Xaa = X or * as defined in Table 2
MCPSSGSAWSSSSAGTAWTIPRHSCGPRSQLRCSPPPWAGCAKSHRLFSAFAAGPLLGLPVWLLRVFFAKINPSSXXXXXXAAVLKNPWGGPSLPGHAR

SEQ ID NO: 40245 - protein, 60 aa, Homo sapiens
MFVFLSSAGNMPVTCWCWEAPRCNQKCTDPAARRPDPQTCASQDRLRCAPCTCHQPLASR

SEQ ID NO: 40246 - protein, 45 aa, Homo sapiens
MYHRYNSRATTRALVRQRPLSSLFSKSHDSVKVILPIIGRVGGRV

SEQ ID NO: 40247 - protein, 73 aa, Homo sapiens
MEWAVVARMASHPAQRPGEDHPEGLCRGLEATQRGTHVFVGDAQLIKQSPVMGGGWSGARGLAHSSCQLSPPC

SEQ ID NO: 40248 - protein, 61 aa, Homo sapiens
  misc_feature (1)...(61): Xaa = X or * as defined in Table 2
MFANVXXXXYWKKKYSVGSHTGLRMSFTELIKKMKPXXXXXGGAVLKDPWGGQSLPGHARK

SEQ ID NO: 40249 - protein, 65 aa, Homo sapiens
  misc_feature (1)...(65): Xaa = X or * as defined in Table 2
YNPAPYKEKTITLPCPRKLGPPQGSSXNGPPSSSSSSQCSVSFNDPHLPEGQVQAARXWAPPGIL

SEQ ID NO: 40250 - protein, 59 aa, Homo sapiens
MSHTPPTPTHAQPSPLSIAPNRGIHLLTTDEPTYHYHPKSTVYIIPSGEFSNTEIPLPG

SEQ ID NO: 40251 - protein, 135 aa, Homo sapiens
  misc_feature (1)...(135): Xaa = X or * as defined in Table 2
TVVPHDPCGTDAHVCETHMDMCPSHSVMLCGWLTFAEFRGAMGEGGRESFLLNQASFCYXCSQAGFSSNLWRCSRAGRGNTADELWCHMTLVAQMPTYVKHTWTCVPATVLCSVAGSPLLSSGVQWGREGGKASS

SEQ ID NO: 40252 - protein, 66 aa, Homo sapiens
MCFQRKSYFHIQTLYCPLICISALRYSTGPAPAMWKCHTAPVQKDWLTPLPITLISSPNFLTLINL

SEQ ID NO: 40253 - protein, 52 aa, Homo sapiens
  misc_feature (1)...(52): Xaa = X or * as defined in Table 2
MQGNSFFLIGSRIKTYLGIFGXXXXXXXXXXXXXXXXXXXXXXXXXXXXXXX

SEQ ID NO: 40254 - protein, 8 aa, Homo sapiens
MTSGNLPL

SEQ ID NO: 40255 - protein, 62 aa, Homo sapiens
  misc_feature (1)...(62): Xaa = X or * as defined in Table 2
LFYTMEXIMAFLLSSSSSPGRPFXRILGGAKVYAGMQRYSFFLIGSRIITYLGIFGRELYFC

SEQ ID NO: 40256 - protein, 192 aa, Homo sapiens
RPYPSVNIHYKSPTTAGFSQRRNHAMCPISAGSRPLEFFPDDGELGCFGSTVFGSGCPLAEAVPTNSQGAVLGSTVASAARSRFRRLSSRESLVMPVPRRHSRTSLGHCGGRSPWTETSPIILPLSDCTSSARREQKREQYRQVREHVRNDDGRLQACGWSLPAKYKQLSPNGGQEDTRMKNVPVPVYCRPL

SEQ ID NO: 40257 - protein, 210 aa, Homo sapiens
  DOMAIN (35)..(193): Metallo-beta-lactamase superfamily domain identified by PFam, accession name lactamase_B, E-value=0.043, PFam score of -12.2
MVPCTGPALLGVFCHTDLRKNLTVDEGTMKVEVLPALTDNYMYLVIDDETKEAAIVDPVQPQKVVDAARKHGVKLTTVLTTHHHWHCYDPRLADLTIQRYPCLLQILKASPSVLAKEALEGLHIMPVIHLQEIGWAYLAYSYLPGPLHSCLGGPYEGSPAPAPTPNQRSTDLGELPHKPPLATEGCSRCAAGFSPPPCHLHCDDLEVTPG

SEQ ID NO: 40258 - protein, 260 aa, Homo sapiens
MSVRFVADRGYPHRHDQRSRYQSFQAGWLQPRISKDEIISPVVQFCWWIEHADGPSLSPAASDSDYPPGEMFLDSDVNPEDPGADGVLAGITLVGCATRCNVPRSNCSSRGDTPVLDKGQGEVATIANGKVNPSQSTEEATEATEHPVALLFAADACLVASSFEADADDADDAAELADDAAAVFEDSALVSDAFAFVSDVFAAEADLAAALACSVASPAFVVAVEADDAALSADFPAAVALAEACPALVDAALADDPQTP

SEQ ID NO: 40259 - protein, 225 aa, Homo sapiens
  misc_feature (1)...(225): Xaa = X or * as defined in Table 2
MHGLGRWDACPQDEMSESGQSSAAATPSTTGTKSNTPTSSVPSAAVTPLNESLQPLGDYGVGSKNSKRAREKRDSRNMEVQVTQEMRNVSIGMGSSDEWSDVQDIIDSTPELDMCPETRLDRTGSSPTQGIVNKAFGINTDSLYHELSTAGSXVIGDVDEGADLLGNNDRKKVYTSVQTRPPQACTFSVRLVESTHAELVGIEGRLYHKIHPLRVHGAVGYSVLT

SEQ ID NO: 40260 - protein, 54 aa, Homo sapiens
  misc_feature (1)...(54): Xaa = X or * as defined in Table 2
MECPMGHLLCTYCLRFPQTVIFLNTINYFEXXXXXGAPVLKDPWGGPSLPGHAR

SEQ ID NO: 40261 - protein, 809 aa, Homo sapiens
  DOMAIN (107)..(144): Ribosomal protein L3 proteins domain identified by eMATRIX, accession number BL00474D, p-value=4.960e-32, raw score of 29.47
  DOMAIN (22)..(203): Ribosomal protein L3 domain identified by PFam, accession name Ribosomal_L3, E-value=1.7e-96, PFam score of 334.0
MKEGGWGCDPVGRGVTSGHVLQMKLLPFRQKKAHIMEIQLNGGTVAEKVAWAQARLEKQVPVHSVFSQSEVIDVIAVTKGRGVKGVTSRWHTKKLPRKTHKGLRKVACIGAWHPARVGCSIARAGQKGYHHRTELNKKIFRIGRGPHMEDGKLVKNNASTSYDVTAKSITPLGGFPHYGEVNNDFVMLKGCIAGTKKRVITLRKSLLVHHSRQAVENIELKFIDTTSKFGHGRFQTAQEKRAFMADGLSLSPAASDSDYPPGEMFLDSDVNPEDPGADGVLAGITLVGCATRCNVPRSNCSSRGDTPVLDKGQGEVATIANGKVNPSQSTEEATEATEVPDPGPSEPETATLRPGPLTEHVFTDPAPTPSSGPQPGSENGPEPDSSSTRPEPEPSGDPTGAGSSAAPTMWLGAQNGWLYVHSAVANWKKCLHSIKLKDSVLSLVHVKGRVLVALADGTLAIFHRGEDGQWDLSNYHLMDLGHPHHSIRCMAVVYDRVWCGYKNKVHVIQPKTMQIEASAGQGPGEGKRLLLASSSPASSIRKSTRPTHDSTKSFDAHPRRESQVRQLAWIGDGVWVSIRLDSTLRLYHAHTHQHLQDVDIEPYVSKMLGTGKLGFSFVRITALLVAGSRLWVGTGNGVVISIPLTETVVLHRGQLLGLRANKTSPTSGEGARPGGIIHVYGDDSSDRAASSFIPYCSMAQAQLCFHGHRDAVKFFVSVPGNVLATLNGSVLDSPAEGPGPAAPASEVEGQKLRNVLVLSGGEGYIDFRIGDGEDDETEEGAGDMSQVKPVLSKAERSHIIVWQVSYTPE

SEQ ID NO: 40262 - protein, 148 aa, Homo sapiens
  misc_feature (1)...(148): Xaa = X or * as defined in Table 2
KIKVLSKNSQVTDFPVPTLLNDGQCLGYNSTPYKEKAITLPCPRKLGPPQGSFKTAAPSSSSPSFNFFNGSQNSVTNFWSSCFHXKVLILKTNNLKLPHAKKKTKVVLQNILLSFXRFYDALLSLTSLLLLNLNGQLKQTVMRPFFHH

SEQ ID NO: 40263 - protein, 1069 aa, Homo sapiens
  DOMAIN (163)..(217): Kinesin light chain repeat proteins domain identified by eMATRIX, accession number BL01160B, p-value=1.153e-09, raw score of 19.54
ATATPSTTGTKSNTPTSSVPSAAVTPLNESLQPLGDYGVVSKNSKRAREKRDSRNMEVQVTQEMRNVSIGMGSSDEWSDVQDIIDSTPELDMCPETRLDRTGSSPTQGIVNKAFGINTDSLYHELSTAGSEVIGDVDEGADLLGEFSGMGKEVGNLLLENSQLLETKNALNVVKNDLIAKVDQLSGEQEVLRGELEAAKQAKVKLENRIKELEEELKRVKSEAIIARREPKEEAEDVSSYLCTESDKIPMAQRRRFTRVEMARVLMERNQYKERLMELQEAVRWTEMIRASREHPSVQEKKKSTIWQFFSRLFSSSSSPPPAKRPYPSVNIHYKSPTTAGFSQRRNHAMCPISAGSRPLEFFPDDDCTSSARREQKREQYRQVREHVRNDDGRLQACGWSLPAKYKQLSPNGGQEDTRMKNVPVPVYCRPSVGKDPTLTLCVAPAANLSGWRPNEDDAGNGVKPAPGHGPLTSDREGDGEPKSAHTSPEKKKAKELPEMDATSSRVWILTSTLTTSKVVIIDANQRGTVVDQFTVCNAHVLCISSIPAASDSDYPPGEMFLDSDVNPEDPGADGVLAGITLVGCATRCNVPRSNCSSRGDTPVLDKGQGEVATIANGKVNPSQSTEEATEATEVPDPGPSEPETATLRPGPLTEHVFTDPAPTPSSGPQPGSENGPEPDSSSTRPEPEPSGDPTGAGSSAAPTMWLGAQNGWLYVHSAVANWKKCLHSIKLKDSVLSLVHVKGRVLVALADGTLAIFHRGEDGQWDLSNYHLMDLGHPHHSIRCMAVVYDRVWCGYKNKVHVIQPKTMQIEKSFDAHTRRESQVRQLAWIGDGVWVSIRLDSTLRLYHAHTHQHLQDVDIEPYVSKMLGTGKLGFSFVRITALLVAGSRLWVGTGNGVVISIPLTETVVLHRGQLLGLRANKTSPTSGEGARPGGIIHVYGDDSSDRAARSFIPYCSMAQAQLCFHGHRDAVKFFVSVPGNVLATLNGSVLDSPAEGPGPAAPASEVEGQKLRNVLVLSGGEGYIDFRIGDGEDDETEEGAGDMSQVKPVLSKAERSHIIVWQVSYTPE

SEQ ID NO: 40264 - protein, 100 aa, Homo sapiens
MKSLGPLTEILEGVLQADQQLMEKTKAKVFSAFITVLQMKEMKVSDIPQYSQLVLNVCETLQEEVIALFDQTRHSLALGSATEDKDSMETDDCPHAADAP

SEQ ID NO: 40265 - protein, 1889 aa, Homo sapiens
AGGPCVRSSRELWTILLGRSALRELSQIEAELNKHWRRLLEGLSYYKPPSPSSAEKVKANKDVASPLKELGLRISKFLGLDEEQSVQLLQCYLQEDYRGTRDSVKTVLQDERQSQALILKIADYYYEERTCILRCVLHLLTYFQDERHPYRVEYADCVDKLEKELVSKYRQQFEELYKTEAPTWETHGNLMTERQVSRWFVQCLREQSMLLEIIFLYYAYFEMAPSDLLVLTKMFKEQGFGSRQTNRHLVDETMDPFVDRIGYFSALILVEGMDIESLHKCALDDRRELHQFAQDGLICQDMDCLMLTFGDIPHHAPVLLAWALLRHTLNPEETSSVVRKIGGTAIQLNVFQYLTRLLQSLASGGNDCTTSTACMCVYGLLSFVLTSLELHTLGNQQDIIDTACEVLADPSLPELFWGTEPTSGLGIILDSVCGMFPHLLSPLLQLLRALVSGKSTAKKVYSFLDKMSFYNELYKHKPHDVISHEDGTLWRRQTPKLLYPLGGQTNLRIPQGTVGQVMLDDRAYLVRWEYSYSSWTLFTCEIEMLLHVVSTADVIQHCQRVKPIIDLVHKVISTDLSIADCLLPITSRIYMLLQRLTTVISPPVDVIASCVNCLTVLAARNPAKVWTDLRHTGFLPFVAHPVSSLSQMISAEGMNAGGYGNLLMNSEQPQGEYGVTIAFLRLITTLVKGQLGSTQSQGLVPCVMFVLKEMLPSYHKWRYNSHGVREQIGCLILELIHAILNLCHETDLHSSHTPSLQFLCICSLAYTEAGQTVINIMGIGVDTIDMVMAAQPRSDGAEGQGQGQLLIKTVKLAFSVTNNVIRLKPPSNVVSPLEQALSQHGAHGNNLIAVLAKYIYHKHDPALPRLAIQLLKRLATVAPMSVYACLGNDAAAIRDAFLTRLQSKIEDMRIKVMILEFLTVAVETQPGLIELFLNLEVKDGSDGSKEFSLGMWSCLHAVLELIDSQQQDRYWCPPLLHRAAIAFLHALWQDRRDSAMLVLRTKPKFWENLTSPLFGTLSPPSETSEPSILETCALIMKIICLEIYYVVKGSLDQSLKDTLKKFSIEKRFAYWSGYVKSLAVHVAETEGSSCTSLLEYQMLVSAWRMLLIIATTHADIMHLTDSVVRRQLFLDVLDGTKALLLVPASVNCLRLGSMKCTLLLILLRQWKRELGSVDEILGPLTEILEGVLQADQQLMEKTKAKVFSAFITVLQMKEMKVSDIPQYSQLVLNVCETLQEEVIALFDQTRHSLALGSATEDKDSMETDDCSRSRHRDQRDGVCVLGLHLAKELCEVDEDGDSWLQVTRRLPILPTLLTTLEVSLRMKQNLHFTEATLHLLLTLARTQQGATAVAGAGITQSICLPLLSVYQLSTNGTAQTPSASRKSLDAPSWPGVYRLSMSLMEQLLKTLRYNFLPEALDFVGVHQERTLQCLNAVRTVQSLACLEEADHTVGFILQLSNFMKEWHFHLPQLMRDIQVNLGYLCQACTSLLHSRKMLQHYLQNKNGDGLPSAVAQRVQRPPSAASAAPSSSKQPAADTEASEQQALHTVQYGLLKILSKTLAALRHFTPDVCQILLDQSLDLAEYNFLFALSFTTPTFDSEVAPSFGTLLATVNVALNMLGELDKKKEPLTQAVGLSTQAEGTRTLKSLLMFTMENCFYLLISQAMRYLRDPAVHPRDKQRMKQELSSELSTLLSSLSRYFRLGSPQLPVPLGVLPSAGRAKSTSLSPKAKPLESQEPLIQLVQAFVGHMQKIGQCCSAQPTPLHQPTLHPWLAGVPAWLLGPYTNGGHPPCQPPLPEVAHDSQPTHPTDVIFILNEKVPPQPWEPESSVLRSSRCRRPLEELSFLSSIPHMHCRPGERRQPSRGLYARVSNLFSTLCLCSFGNSVVYLYRY

SEQ ID NO: 40266 - protein, 133 aa, Homo sapiens
MVDQEAIFGCKNRNNCSHLEPPVSRLEGGAFVRDLLSPTQYLLASCPYQYDGSFVIQQIPSSNLFMVVVDSSCLCESVAPITMAPIEIRYILLCEVHSLPRKPENARECGGAPSLQAQTVLLLLPLLLMLFSR

SEQ ID NO: 40267 - protein, 458 aa, Homo sapiens
  DOMAIN (51)..(67): Galactokinase proteins domain identified by eMATRIX, accession number BL00106F, p-value=3.250e-14, raw score of 11.85
  DOMAIN (157)..(246): DEAD/DEAH box helicase domain identified by PFam, accession name DEAD, E-value=8.9e-11, PFam score of 36.9
MVVHVCDPSQATAITACWSSQASGPQAVRRRLLTPLSSPAARDLVSKEGFRRARHVVGEIRRTAQAAAALRRGDYRPLAASWESHRSLRSTTAGLPPSTSLKQPMEPRCCACEAPPGQHTVRVRAAGQSHGSVPGAIFHIRVLNKLVPPMWYLPPLEDQVDHLLTLKVRVSSLNSKLSAQERKELLADLEREKPQTKILYITPEMAASSSFQPTLNSLVSRHLLSYLVVDEAHCVSQWGHDFRPDYLRLATPQVQEDVFAALHLKKPVAIFKTPCFRANLFYDVQFKELISDPMNLKDFSLRLLDRRLIKGTREACEQLAIELSCRGVNAKAYHADPGYQVTHHLIADTQAELKAEGSERTLVQNDWMEEKVPVIVATISFGMGVDKANVRVDCLVLCPKDQVHVLLRGLEGKEVRRESLEYSLNADSSCAACSQELFKALPPPLTLADSEDLSWKER

SEQ ID NO: 40268 - protein, 34 aa, Homo sapiens
MLTAPVRPAPRSCLKLCRHLSHLLTQKTSPGRSG

SEQ ID NO: 40269 - protein, 508 aa, Homo sapiens
MVPDAAVLAQLAIRARVNRRWPTGLSAPHLCGAACSRCRHAAIAKYFGDALPACAKGCDHCQNPTAVRRRLEALERSSSWSKTCIGPSQGNGFDPELYEGGRKGYGGFSRYDEGSGGSGDEGRDEAHKREWNLFYQKQMQLRKGKDPKIEEFVPPDENCPLKEASSRRIPRLTVKAREHCLRLLEEALSSNRQSTRTADEADFRAKAVELEHETFRNAKVANLYKASVLKKVADIHRASKDGQPYDMGGSAKSCSAQAEPPEPNEYDIPPASHVYSLKPKRVGAGFPKGSCPFQTATELMETTRIREQAPQPERGGEHEPPSRPCGLLDEDGSEPLPGPRGEVPGGSAHYGGPSPEKKAKSSSGGSSLAKGRASKKQQLLATAAHKDSQSIARFFCRRVESPALLASAPEAEGACPSCEGVSGTPDWPQRSTQGRKMEPGDIRLPLPRLRSASGRGQAPARPETRAPLKSSPPLQRTHGKGKRPRFPARRTQRASLRRGHAPQPIPPS

SEQ ID NO: 40270 - protein, 32 aa, Homo sapiens
EFERVTAEAVKPRETSEPIASAQRFCEKFPFL

SEQ ID NO: 40271 - protein, 414 aa, Homo sapiens
  misc_feature (1)...(414): Xaa = X or * as defined in Table 2
ENGQLHMVNLALDGVRSSLQKPRPFRLFPKGFSVELCMNREDDTARKEKTDHFIFTYTREGNLRYSAKSLFSLVLGFISDNVDHIDSLIGFPEQIAEKLFSAAEARQKFTEPGAGLRALQKFTGGLWEVWVLCSLCFLLWKLPDICCKLGDEHELLEHLTNEALSRYXPVTTCRXIVSVLFXRLIQQDYRVMKRGLENLTLLDLSCKFSSKLXIILMLEEWPXRSCSSFSGTGLKVRLLVPSLIFLDSTIXYFACANWEFDHSNCKTEGWADQVLQIFLPCGXCSFSSXFQVSYPTSRETAESCFRSTLSLVQNMHDEAAQRFCEKFPFLXSFLPFICILKAVRLFXKLQFYKEKAPDCHGPVLKHEAISSQESKKSKKRPFEESETEQNNSSQPSKQKYVCLAVEDWDLLNSY

SEQ ID NO: 40272 - protein, 336 aa, Homo sapiens
DNVDHIDSLIGFPEQIAEKLFFAAEARQKFTEPGAGLRALQKFTEAYGSLVLCSLCLRNRYLVISEKLEEIKSFRELTCLDLSCCKLGDEHELLEHLTNEALSSVTQLHLKDNCLSDAGVRKMTAPVRVMKRGLENLTLLDLSCNPEITGGRALGYPLFLFRGNLNCFRDISGDRGSRDIKTLKHKLQTHIGLVHSKVPLKEFDHSNCKTEGWADQIVLQWERVTAEAVKPRETSEPIAAAQRFYGKRSRAEAPLKCPLADTHMNSSEKLQFYKEKAPDCHGPVLKHEAISKPRSPKKSKKRPFEESETEQNNSSQPSKQKYVCLAVEDWDLLNSY

SEQ ID NO: 40273 - protein, 96 aa, Homo sapiens
  misc_feature (1)...(96): Xaa = X or * as defined in Table 2
VKHCLHRPILWDPWKTSGIQQVLTPLXKAMEKLEAILLIICSLEAIGLITLPSLSMTQFLQLHVECCYVSPDQTPYFIDVETEAMKDEVTVHNPHG

SEQ ID NO: 40274 - protein, 346 aa, Homo sapiens
  DOMAIN (134)..(148): LEUCINE-RICH REPEAT SIGNATURE domain identified by eMATRIX, accession number PR00019B, p-value=5.950e-10, raw score of 11.36
  DOMAIN (12)..(158): Leucine Rich Repeat domain identified by PFam, accession name LRR, E-value=0.00023, PFam score of 27.9
  misc_feature (1)...(346): Xaa = X or * as defined in Table 2
MVVPPNIAELKNLEVLNFLNNQIEKLPTQISRLQKLKHLNLGFLSPCNSMNRLNISPQGFGSLPALEVLDLTYNNLNENYLPGNFFYLTTLCALYLSDNDFEILPPDIGKLTKLQILSNRDNNLISLPKEIRVLTQLKELHIQGNRLTVLPPELGSRGGSGSRFSAETATGGAQNAPPSVLGSAGTIFKQRRNPSPAALRGGSVAAXPSPAAAKYGKDQREHLPTAAGDGVGWEPTRDIQVGSATAQALSQANAARGRLSTAQAAGSLHVECCYVSPGQTLYFTDVEIEAMKDESRGISILYKHRHLKVPLDQKLPKSKGHQPDGYGQHDHKPQMTSLTRNIATLR

SEQ ID NO: 40275 - protein, 205 aa, Homo sapiens
  DOMAIN (85)..(99): LEUCINE-RICH REPEAT SIGNATURE domain identified by eMATRIX, accession number PR00019B, p-value=5.950e-10, raw score of 11.36
  DOMAIN (16)..(109): Leucine Rich Repeat domain identified by PFam, accession name LRR, E-value=1.7e-06, PFam score of 35.1
MNRLNISPQGFGSLPALEVLDLTYNNLNENYLPGNFFYLTTLCALYLSDNDFEILPPDIGKLTKLQILSNRDNNLISLPKEIRVLTQLKELHIQGNRLTVLPPELASSSRCGPLSHPYAGKRIPRNAVFKFEQNTPWHTPPKKAGREMLLDVTGFPEAATSKPPAFLHRRRGRGSWNPRSRSSSLQRTPWPPGSREAEYPPASGA

SEQ ID NO: 40276 - protein, 284 aa, Homo sapiens
  DOMAIN (185)..(199): LEUCINE-RICH REPEAT SIGNATURE domain identified by eMATRIX, accession number PR00019B, p-value=5.950e-10, raw score of 11.36
  DOMAIN (47)..(217): Leucine Rich Repeat domain identified by PFam, accession name LRR, E-value=5.7e-18, PFam score of 73.1
  misc_feature (1)...(284): Xaa = X or * as defined in Table 2
GLPSVTMSKSLKKLVEESREKNQPEVDMSDRGISNMLDVNGLFTLSHITQLVLSHNKLTMVPPNIAELKNLEVLNFFNNQIEELPTQISSLQKLKHLNLGMNRLNTLPRGFGSLPALEVLDLTYNNLSENSLPGNFFYLTTLRALYLSDNDFEILPPDIGKLTKLQILSLRDNDLISLPKEIGELTQLKELHIQGNRLTVVPPELGNLGFXLGQKQVFKAENNPWVTPIADQFQLGVSHVFEYIRSETYKYLYGRHMQANPEPPKKNNDKSKKISRKPLAANNR

SEQ ID NO: 40277 - protein, 75 aa, Homo sapiens
MSWLFPATILFEEKICFSLFPRKLVGQHGHYSSCAVTPAPRCLELSVLTFMHDCKASWSIFYGASVCFRPMTFVR

SEQ ID NO: 40278 - protein, 3338 aa, Homo sapiens
  DOMAIN (1090)..(1137): Intermediate filaments proteins domain identified by eMATRIX, accession number BL00226D, p-value=5.500e-09, raw score of 19.10
LCVSPVTAGRPARSLREMEVEQEQRRRKVEAGRTKLAHFRQRKTKGDSSHSEKKTAKRKGSAVDASVQEESPVTKEDSALCGGGDICKSTSCDDTPDGAGGAFAAQPEDCDGEKREDLEQLQQKQVNDHPPEQCGMFTVSDHPPEQHGMFTVGDHPPEQRGMFTVSDHPPEQHGMFTVSDHPPEQRGMFTISDHQPEQRGMFTVSDHTPEQRGIFTISDHPAEQRGMFTKECEQECELAITDLESGREDEAGLHQSQAVHGLELEALRLSLSNMHTAQLELTQANLQKEKETALTELREMLNSRRAQELALLQSRQQHELELLREQHAREKEEVVLRCGQEAAELKEKLQSEMEKNAQIVKTLKEDWESEKDLCLENLRKELSAKHQSEMEDLQNQFQKELAEQRAELEKIFQDKNQAERALRNLESHHQAAIEKLREDLQSEHGRCLEDLEFKFKESEKEKQLELENLQASYEDLKAQSQEEIRRLWSQLDSARTSRQELSELHEQLLARTSRVEDLEQLKQREKTQHESELEQLRIYFEKKLRDAEKTYQEDLTLLQQRLQGAREDALLDSVEVGLSCVGLEEKPEKGRKDHVDELEPERHKESLPRFQAELEESHRHQLEALESPLCIQHEGHVSDRCCVETSALGHEWRLEPSEGHSQELPWVHLQGVQDGDLEADTERAARVLGLETEHKVQLSLLQTELKEEIELLKIENRNLFEKLQHETRLKDDLEKVKHNLIEDHQKELNNAKQKTELMKQEFQRKETDWKVMKEELQREAEEKLTLMLLELREKAESEKQTIINKLELREAEMRQLQDQQAAQILDLERSLTEQQARLQQLEQDLTSDDALHCSQCGREPPTAQDGELAALHVKEDCALQLMLARSRFLEERKEIAEKFSAEQDAFLQLLQERHQQQLLSVTAELEARHQAALGELTASLESKQGALLAARVAELQTKHAADLGALETRHLSTLDSLESCYLSEFQTIREEHRQALELLRADFEEQLWKKDSLHQTILTQELEKLKRKHKGELQSVRDHLRTEASTELAGTVAHELQGVHQGEFGSEKKTALHEKEETLRLQSAQAQPFHQEEKESLSLQLQKKNHQVQQLKDQVLSLSHEIEECRSELEVLQQRRERENREGANLLSMLKADVNLSHSERGALQDALRRLLGLFGETLRAAVTLRSRIGERVGLCLDDAGAGLALSTAPALEETWSDVALPELDRTLSECAEMSSVAEISSHMRESFLMSPESVRECEQPIRRVFQSLSLAVDGLMEMALDSSRQLEEARQLHSRFEKEFSFKNEETAQVVRKHQELLECLTEESAAKAELALELHKTQGTLEGFKVETADLKEVLAGKEDSEHRLVLELESLRRQLQQAAQEQAALREECTRLWSRGEATATDAEAREAALGKEVEDLTKEQSETRKQAEKDRSALLSQMKILESELEEQLSQHRGCAKQAEAVTALEQQVASLDKHLRNQRQFMDEQAAEREHEREEFQQEIQRLEGQLRQAAKPQPWGPRDSQQAPLDGEVELLQHKLREKLDEFNELAIQKESADRQVLMQEEEIKRLEEMNINIRKKVAQLQEEVEKQKNIVKGLEQDKEVLKKQQMSSLLLASTLQSTLDAGRCPEPPSGSPPEGPEIQLEVTQRALLRRESEVLDLKEQLEKMKGDLESKNEEILHLNLKLDMQNSQTAVSLRELEEENTSLKVIYTRSSEIEELKATIENLQENQKRLQKEKAEEIEQLHEVIEKLQHELSLMGPVVHEVSDSQAGSLQSELLCSQAGGPRGQALQGELEAALEAKEALSRLLADQERRHSQALEALQQRLQGAEEAAELQLAELERNVALREAEVEDMASRIQEFEAALKAKEATIAERNLEIDALNQRKAAHSAELEAVLLALARIRRALEQQPLAAGAAPPELQWLRAQCARLSRQLQVLHQRFLRCQVELDRRQARRATAHTRVPGAHPQPRMDGGAKAQVTGDVEASHDAALEPVVPDPQGDLQPVLVTLKDAPLCKQEGVMSVLTVCQRQLQSELLLVKNEMRLSLEDGGKGKEKVLEDCQLPKVDLVAQVKQLQEKLNRLLYSMTFQNVDAADTKSLWPMASAHLLESSWSDDSCDGEEPDISPHIDTCDANTATGGVTDVIKNQAIDACDANTTPGGVTDVIKNWDSLIPDEMPDSPIQEKSECQDRSLSSPTSVLGGSRHQSHTAEAGPRKSPVGMLDLSSWSSPEVLRKDWTLEPWPSLPVTPHSGALSLCSADTSLGDRADTSLPQTQGPGLLCSPGVSAAALALQWAESPPADDHHVQRTAVEKDVEDFITTSFDSQETLSSPPPGLEGKADRSEKSDGSGFGARLSPGSGGPEAQTAGPVTPASISGRFQPLPEAMKEKEVRPKHVKALLQMVRDESHQILALSEGLAPPSGEPHPPRKEDEIQDISLHGGKTQEVPTACPDWRGDLLQVVQEAFEKEQEMQGVELQPRLSGSDLGGHSSLLERLEKIIREQGDLQEKSLEHLRLPDRSSLLSEIQALRAQLRMTHLQNQEKLQHLRTALTSTEARGSQQEHQLRRQVELLAYKVEQEKCIAGDLQKTLSEEQEKANSVQKLLAAEQTVVRDLKSDLCESRQKSEQLSRSLCEVQQEVLQLRSMLSSKENELKAALQELESEQGKGRALQSQLEEEQLRHLQRESQSAKALEELRASLETQRAQSSRLCVALKHEQTAKDNLQKELRIEHSRCEALLAQERSQLSELQKDLAAEKSRTLELSEALRHERLLTEQLSQRTQEACVHQDTQAHHALLQKLKEEKSRVVDLQAMLEKVQQQALHSQQQLEAEAQKHCEALRREKEVSATLKSTVEALHTQKRELRCSLEREREKPAWLQAELEQSHPRLKEQEGRKAARRSAEARQSPAAAEQWRKWQRDKEKLRELELQRQRDLHKIKQLQQTVRDLESKDEVPGSRLHLGSARRAAGSDADHLREQQRELEAMRQRLLSAARLLTSFTSQAVDRTVNDWTSSNEKAVMSLLHTLEELKSDLSRPTSSQKKMAAELQFQFVDVLLKDNVSLTKALSTVTQEKLELSRAVSKLEKLLKHHLQKGCSPSRSERSAWKPDETAPQSSLRRPDPGRLPPAASEEAHTSNVKMEKLSLHYLRAESFRKALIYQKKYLLLLIGGFQDSEQETLSMIAHLGVFPSKAERKITSRPFTRFRTAVRVVIAILRLRFLVKKWQEVDRKGALAQGKAPRPGPRARQPQSPPRTRESPPTRDVPSGHTRDPARGRRLAAAASPHSGGRATPSPNSRLERSLTASQDPGHSLTEYIHHLEVIQQRLGGYYQILLQRNPATR

SEQ ID NO: 40279 - protein, 1731 aa, Homo sapiens
  misc_feature (1)...(1731): Xaa = X or * as defined in Table 2
APLDGEVELLQQKLREKLDEFNELAIQKESADRQVLMQEEEIKRLEEMNINIRKKVAQLQEEVEKQKNIVKGLEQDKEVLKKQQMSSLLLASTLQSTLDAGRCPEPPSGSPPEGPEIQLEVTQRALLRRESEVLDLKEQLEKMKGDLESKNEEILHLNLKLDMQNSQTAVSLRELEEENTSLKVIYTRSSEIEELKATIENLQENQKRLQKEKAEEIEQLHEVIEKLQHELSLMGPVVHEVSDSQAGSLQSELLCSQAGGPRGQALQGELEAALEAKEALSRLLADQERRHSQALEALQQRLQGAEEAAELQLAELERNVALREAEVEDMASRIQEFEAALKAKEATIAERNLEIDALNQRKAAHSAELEAVLLALARIRRALEQQPLAAGAAPPELQWLRAQCARLSRQLQVLHQRFLRCQVELDRRQARRATAHTRVPGAHPQPRMDGGAKAQVTGDVEASHDAALEPVVPDPQGDLQPVLVTLKDAPLCKQEGVMSVLTVCQRQLQSELLLVKNEMRLSLEDGGKGKEKVLEDCQLPKVDLVAQVKQLQEKLNRLLYSMTFQNVDAADTKSLWPMASAHLLESSWSDDSCDGEEPDISPHIDTCDANTATGGVTDVIKNQAIDACDANTTPGGVTDVIKNWDSLIPDEMPDSPIQEKSECQDMSLSSPTSVLGGSRHQSHTAEAGPRKSPVGMLDLSSWSSPEVLRKDWTLEPWPSLPVTPHSGALSLCSADTSLGDRADTSLPQTQGPGLLCSPGVSAAALALQWAESPPADDHHVQRTAVEKDVEDFITTSFDSQETLSSPPPGLEGKADRSEKSDGSGFGARLSPGSGGPEAQTAGPVTPASISGRFQPLPEAMKEKEVRPKHVKALLQMVRDESHQILALSEGLAPPSGEPHPPRKEDEIQDISLHGGKTQEVPTACPDWRGDLLQVVQEAFEKEQEMQGVELQPRLSGSDLGGHSSLLERLEKIIREQGDLQEKSLEHLRLPDRSSLLSEIQALRAQLRMTHLLNXEKLQHLRTGLRSAEARGSHHEHQLRRQVELVAYKVEQEKCIAGDLQKTLSEEQEKANSVQKLLAAEQTVVRDLKSDLCESRQKSEQLSRSLCEVQQEVLQLRSMLSSKENELKAALQELESEQGKGRALQSQLEEEQLRHLQRESQSAKALEELRASLETQRAQSSRLCVALKHEQTAKDNLQKELRIEHSRCEALLAQERSQLSELQKDLAAEKSRTLELSEALRHERLLTEQLSQRTQEACVHQDTQAHHALLQKLKEEKSRVVDLQAMLEKVQQQALHSQQQLEAEAQKHCEALRREKERELELQRQRDLHKIKQLQQTVRDLESKDEVPGSRLHLGSARRAAGSDADHLREQQRELEAMRQRLLSAARLLTSFTSQAVDRTVNDWTSSNEKAVMSLLHTLEELESDLSRPTSSQKKMAAELQFQFVDVLLKDNVSLTKALSTVTQEKLELSRAVSKLEKLLKHHLQKGCSPSRSERSAWKPDETAPQSSLRRPDPGRLPPAASEEAHTSNVKMEKLYLHYLRAESFRKALIYQKKYLLLLIGGFQDSEQETLSMIAHLGVFPSKAERKITSRPFTRFRTAVRVVIAILRLRFLVKKWQEVDRKGALAQGKAPRPGPRARQPQSPPRTRESPPTRDVPSGHTRDPARGRRLAAAASPHSGGRATPSPNSRLERSLTASQDPEHSLTEYIHHLEVIQQRLGGYYQILLQRNPATR

SEQ ID NO: 40280 - protein, 2757 aa, Homo sapiens
  DOMAIN (36)..(90): Kinesin light chain repeat proteins domain identified by eMATRIX, accession number BL01160B, p-value=3.212e-09, raw score of 19.54
GEFGSEKKTALHEKEETLRLQSAQAQPFHQEEKESLSLQLQKKNHQVQQLKDQVLSLSHEIEECRSELEVLQQRRERENREGANLLSMLKADVNLSHSERGALQDALRRLLGLFGETLRAAVTLRSRIGERVGLCLDDAGAGLALSTAPALEETWSDVALPELDRTLSECAEMSSVAEISSHMRESFLMSPESVRECEQPIRRVFQSLSLAVDGLMEMALDSSRQLEEARQIHSRFEKEFSFKNEETAQVVRKHQELLECLKEESAAKAELALELHKTQGTLEGFKVETADLKEVLAGKEDSEHRLVLELESLRRQLQQAAQEQAALREECTRLWSRGEATATDAEAREAGFFRVFSGTSLTSCIALSIFALAVLLHLGVRCRCFSDAFSACPLLSGGSLMCLRAQPAGAGPHPAGGDHLVFHHLEPLDFSQSLRLSGLRADKGVCGLHSVERPALRKEVEDLTKEQSETRKQAEKDRSALLSQMKILESELEEQLSQHRGCAKQAEAVTALEQQVASLDKHLRNQRQFMDVRILNNTFFCITKSCRYSMNFFPDRYEQAAEREHEREEFQQEIQRLEGQLRQAAKPQPWGPRDSQVELLQQKLREKLDEFNELAIQKESADRQVLMQEEEIKRLEEMNINIRKKVAQLQEEVEKQKNIVKGLEQGGPLSITCTWSGVVPLAGHCTHFSDSCSRAASPLLPSLSERLLSLVDARDKEVLKKQQMSSLLLASTLQSTLDAGRCPEPPSGSPPEGPEIQLEVTQRALLRRESEVLDLKEQLEKMKGDLESKNEEILHLNLKLDMQNSQTAVSLRELEEENTSLKVIYTRSSEIEELKATIENLQENQKRLQKEKAEEIEQLHEVIEKLQHELSLMGPVVHEVSDSQAGSLQSELLCSQAGGPRGQALQGELEAALEAKEALSRLLADQERRHSQALEALQQRLQGAEEAAELQLAELERNVALREAEVEDMASRIQEFEAALKAKEATIAERNLEIDALNQRKAAHSAELEAVLLALARIRRALEQQPLAAGAAPPELQWLRAQCARLSRQLQVLHQRFLRCQVELDRRQARRATAHTRVPGAHPQPRMDGGAKAQVTGDVEASHDAALEPVVPDPQGDLQPVLVTLKDAPLCKQEGVMSVLTVCQRQLQSELLLVKNEMRLSLEDGGKGKEKVLEDCQLPKVDLVAQVKQLQEKLNRLLYSMTFQNVDAADTKSLWPMASAHLLESSWSDDSCDGEEPDISPHIDTCDANTATGGVTDVIKNQAIDACDANTTPGGVTDVIKNWDSLIPDEMPDSPIQEKSECQDMSLSSPTSVLGGSRHQSHTAEAGPRKSPVGMLDLSSWSSPEVLRKDWTLEPWPSLPVTPHSGALSLCSADTSLGDRADTSLPQTQGPGLLCSPGVSAAALALQWAESPPADDHHVQRTAVEKDVEDFITTSFDSQETLSSPPPGLEGKADRSEKSDGSGFGARLSPGSGGPEAQTAGPVTPASISGRFQPLPEAMKEKEVRPKHVKFSRSFYGKTIDKNLAKQALLQMVRDESHQILALSEGLAPPSGEPHPPRKEDEIQDISLHGGKTQQALVVCERQPGWHSGGSLVLHAAPGDQREVPTACPDWRGDLLQVVQEAFEKEQEMQGVELQPRLSGSDLGGHSSLLERLEKIIREQGDLQEKSLEHLRLPDRSSLLSEIQALRAQLRMTHLQNQEKLQHLRTALTSAEARGSQQEHQLRRQVLDSVKGNGLAVQPTALVPAPMPFVLSGAGGRRCAHALELLAYKVEQEKCIAGDLQKTLSEEQEKANSVQKLLAAEQTVVRDLKSDLCESRQKSEQLSRSLCEVQQEVLQLRSMLSSKENELKAALQELESEQGKGRALQSQLEEEQLRHLQRESQSAKALEELRASLETQRAQSSRLCVALKHEQTAKDNLQKELRIEHSRCEALLAQERSQLSELQKDLAAEKSRTLELSEALRHERLLTEQLSQRTQEACVHQDTQAHHALLQKLKEEKSRVVDLQAMLEKVQQQALHSQQQLEAEAQKHCEALRREKEVSATLKSTVEALHTQKRELRCSLEREREKPAWLQAELEQSHPRLKEQEGRKAARRSAEARQSPAAAEQWRKWQRDKEKLRELELQRQRDLHKIKQLQQTVRDLESKDEVPGSRLHLGSARRAAGSDADHLREQQRELEAMRQRLLSAARLLTSFTSQAVDRTVNDWTSSNEKAVMSLLHTLEELKSDLSRPTSSQKKMAAELQFQFVDVLLKDNVSLTKALSTVTQEKLELSRAVSKLEKLLKHHLQKGCSPSRSERSAWKPDETAPQSSLRRPDPGRLPPAASEEAHTSNVKMEKLYLHYLRAESFRKALIYQKKYLLLLIGGFQDSEQETLSMIAHLGVFPSKAERKITSRPFTRFRTAVRVVIAILRLRFLVKKWQEVDRKGALAQGKAPRPGGTPAAVDRWTHKPFFLLLFFIHFGSFFSVDGDVIKHVYICGFTGRSLGPVDRRRKNTGLFYQRIHTALNQLPRPSSIAHGSMYILTLGYFFHKKVDDQELCLKFCLLRGYALITIFQEWFLQKQTLRLSLGYEDVDMVSTPVKGRGRKQDWAEEEGYAPRAATKQPARLKPATLKQAQRRACRERRSPASPNGSPERHRRVFGANGSEALVLLGGAGRAARARDPLRTRARYPPFPPRTRSRGRPGAQERAGQRRRGGAIRARARAASARTLAGLAMADRGCPLEAAPLPAEVRESLAELELELSEGWKKKLNSDKDAVFNRNW

SEQ ID NO: 40281 - protein, 131 aa, Homo sapiens
MNQEDLDPDSTTDVGDVTNTEEELIRECEEMWKDMEEHYQGEEIRIREPVCRSKWKADTIGVSSLSGVPARGRSEPSLMGESSSSESTVQFMGRTINYAGVHKTGVKGASIDSHEHITPRCEYPVAHNKQH

SEQ ID NO: 40282 - protein, 50 aa, Homo sapiens
EMWKDMEECQNKLSLIGTETLTDSNAQLSLLIMQVKCLTAELSQWQKKTP

SEQ ID NO: 40283 - protein, 202 aa, Homo sapiens
KFTKHISMNQEDLDPDSTTDVGDVTNTEEELIRECEEMWKDMEECQNKLSLIGTETLTDSNAQLSLLIMQVKCLTAELSQWQKKTPETIPLTEDVLITLGKEEFQKRGQDLEMVLSTKESKNEKLKEDLEREQRWLDEQQQIMESLNVLHSELKNKVETFSESRIFNELKTKMLNIKEYKEKLLSTLGEFLEDHFPLPDRSV

SEQ ID NO: 40284 - protein, 64 aa, Homo sapiens [sequence omitted]

SEQ ID NO: 40285 - protein, 25 aa, Homo sapiens
SCPTKIRHVPLPSGPLQLGLIIASD

SEQ ID NO: 40286 - protein, 950 aa, Homo sapiens
MQPRGLELCLGSSFHQSEYQIYIVRFPGGVGALDSAIIVNKNLAARAMGGLYDVMDAKILYKIDSVHRRHKDDQSDGFLSDYRATHRLFSNPVVTPRAHRSHLSEGNLEITARRQWKHIYDELGGNPGSTSAATCTRRHYERSVEKVRSYILATNSDIYGGRLILPYERFIKGEEDKPLPPIKPRKQENSSQENENKTKVSGTKRIKHEIPKSKKEKENAPKPQDAAEVSSEQEKEQETLISQKSIPEPLPAADMKKKIEGYQEFSAKPLASRVDPEKDNETDQGSNSEKVAEEAGEKGPTPPLPSAPLAPEKDSALVPGASKQPLTSPSALVDSKQESKLCCFTESPESEPQEASFPSFPTTQPPLANQNETEDDKLPAMADYIANCTVKVDQLGSDDIHNALKQTPKVLVVQSFDMFKDKDLTGPMNENHGLNYTPLLYSRGNPGIMSPLAKKKLLSQVSGASLSSSYPYGSPPPLISKKKLIARDDLCSSLSQTHHGQSTDHMAVSRPSVIQHVQSFRSKPSEERKTINDIFKHEKLSRSDPHRCSFSKHHLNPLADSYVLKQEIQEGKDKLLEKRALPHSHMPSFLADFYSSPHLHSLYRHTEHHLHNEQTSKYPSRDMYRESENSSFPSHRHQEKLHVNYLTSLHLQDKKSAAAEAPTDDQPTDLSLPKNPHKPTGKVLGLAHSTTGPQESKGISQFQVLGSQSRDCHPKACRVSPMTMSGPKKYPESLSRSGKPHHVRLENFRKMEGMVHPILHRKMSPQNIGAARPIKRSLEDLDLVIAGKKARAVSPLDPSKEVSGKEKASEQESEGSKAAHVLEKPDCAFSTHAAPGFPLACDAKRNFYITDKFSAAVQTLGCGYTSVIRAPQYKTVGSALPSSPKRHGPPSFTPYPGGAGLIELEVSFSSNLRVGTKVIAVFAIESNGKNRDYFCTNLTLRVPDTWHLGR

SEQ ID NO: 40287 - protein, 341 aa, Homo sapiens
  DOMAIN (109)..(220): ARID DNA binding domain identified by PFam, accession name ARID, E-value=1.3e-12, PFam score of 55.4
HPHQVETSRDVAGEQSHAVAFMSTGISQADVCRLEWFSAPNLKGRPRKKKPCPQRRDSFSGVKDSNNNSDGKAVAKVKCEARSALTKPKNNHNCKKVSNEEKPKVAIGEECRADEQAFLVALYKYMKERKTRIERIPYLGFNQINLWTMFQAAQKLGGYETITARRQWKHIYDELGGNPGSTSAATCTRRHYERLILPYERFIKGEEDKPLPPIKPRKQENSSQENENKTKVFGTKRIKHEIPKSKKEKENAPKPQDAAEVSSEQEKEQETLISQKSIPEPLPAADMKKKIEGYQEFSAKPLASRVDPEKDNETDQGSNSEKVAEEAGEKGPTPPLPSAPL

SEQ ID NO: 40288 - protein, 997 aa, Homo sapiens
  misc_feature (1)...(997): Xaa = X or * as defined in Table 2
XSVEKVRSYILATNSDIYGGRLILPYERFIKGEEDKPLPPIKPRKQENSSQENENKTKVSGTKRIKHEIPKSKKEKENAPKPQDAAEVSSEQEKDQESLISQKSIPEPLPAADMKKKIEGPPLANQNETEDDKLPAMADYIANCTVKVDQLGSDDIHNALKQTPKVLVVQSFDMFKDKDLTGPMNENHGLNYTPLLYSRGNPGIMSPLAKKKLLSQVSGASLSSSYPYGSPPPLISKKKLIARDDLCSSLSQTHHGQSTDHMAVSRPSVIQHVQSFRSKPSEERKTINDIFKHEKLSRSDPHRCSFSKHHLNPLADSYVLKQEIQEGKDKLLEKRALPHSHMPSFLADFYSSPHLHSLYRHTEHHLHNEQTSKYPSRDMYRESENSSFPSHRHQEKLHVNYLTSLHLQDKKSAAAEAPTDDQPTDLSLPKNPHKPTGKVLGLAHSTTGPQESKGISQFQVLGSQSRDCHPKACRVSPMTMSGPKKYPESLSRSGKPHHVRLENFRKMEGMVHPILHRKMSPQNIGAARPIKRSLEDLDLVIAGKKARAVSPLDPSKEVSGKEKASEQESEGSKAAHGLYSGSLCNSGLNSRLPAGYSHSLQYLKNQTVLSPLMQPLAFHSLVMQRGIFTSPTNSQQLYRHLAAATPVGSSYGDLLHNSIYPLAAINPQAAFPSSQLSSVHPSTKLCPGTSRSFTSHVGLVKGFVNIQEELRGPHLSSDGEDQEKTNVIVLSYPPVCRYRSMLKRIQDKPSSILTDQFALALGGIAVVSRNPQILYCRDTFDHPTLIENGEYMRLSLRQILKADHGKKEPCPQRRDSFSGVKDSNNNSDGKAVAKVKCEARSALTKPKNNHNCKKVSNEEKPKVAIGEECRADEQAFLVALYKYMKERKTPIERIPYLGFKQKMEKIAGVILEATRAEDGIAFVSIGLCYGLDLYHLPNLMSNRNPQCWRRRLVGDDWIMVIDFPLAVLVIAKRENESRLVVVCAFESVVAALSGVIV

SEQ ID NO: 40289 - protein, 103 aa, Homo sapiens
VKQTSEPSYPDVILIAINRHGVLLIHPKTKDLLTTYPFTKISSWSSGSTYFHMALGSLGRGSRLLCETSLGYKMDDLLTSYVQQLLSAMNKQRGSKAPALAST

SEQ ID NO: 40290 - protein, 673 aa, Homo sapiens
  DOMAIN (164)..(270): Domain in Myosin and Kinesin Tails domain identified by PFam, accession name MyTH4, E-value=1.2e-38, PFam score of 141.8
MGGGSWAPTGLCPLQSLLAMSPEKRKLAAQEGQFTEPRPEEPPKEKLHTLEEFSYEFFRAPEKDMVSMAVLPLARARGHLWAYSCEPLRQPLLKRVHANVDLWDIACQIFVDILPHQPACTSAVVGVSVYPQSVSAWSCPSTVLLDSHTILRYMGDYPSRQAWPTLELTDQIFTLALQHPALQDEVYCQILKHLTHNSDRHSEERGWQLLWLCTGLFPPSKGLLPHAQKFIDTRRGKLLAPDCSRRIQKVLRTGPRKQPPHHVEVEAAEQNVSRICHKIYFPNDTSEMLEVVANTRVRDVCDSIATRLQLASWEGCSLFIKISDKVISQKEGDFFFDSLREVSDWVKKNKPQKEGEEASVELGEGVAGWVEGALAASVRPMPIHPSIRSRVSLGCGNNQALGPGGAPVTLPYQVYFMRKLWLNISPGKDVNADTILHYHQELPKYLRGFHKCSREDAIHLAGLIYKAQFNNDRSQLASVPKILRELVPENLTRLMSSEEWKKSILLAYDKHKDKTVEEAKVAFLKWICRWPTFGSAFFEGEGKPCPTPGPPTQAASAQPSPSRPSVNQHTSWQTSEPSYPDVILIAINRHGVLLIHPKTKDLLTTYPFTKISSWSSGSTYFHMALGSLGRGSRLLSETSLGYKMDDLLTSYVQQLLSAMNKQRGSKAPALAST

SEQ ID NO: 40291 - protein, 692 aa, Homo sapiens
VSKEIVYNKLLPYAERLDAESDLQLAQIKCNLGRAVQLQELWPGGLFWTRKLSTRAGPLALSSLELSPSGDPRVVTEPVKYSSRPPCHFPTGLPGSLPSLYVLRICFSRSVRVVVFPPGGPWVAQGPRPRGRETWGFTMLLRYIRLYGRKFSKEDHVLFIKLLYELVSIPKLEISMMQGFARLLINLLKYFPADATAEMLEEWRPLMCPFDVTMQKAITYFEIFLPTSLPPELHHKGFKLWFDELIGLWVSVQNLPQWEGQLVNLFARLATDNIGYIDWDPYVPKGGPSKLVQKHLAGLFNSITSFYHPSNNGRWLNKLMKLLQRLPNSVVRRLHRERYKKPSWLTPVPDSHKLTDQDVTDFVQCIIQPVLLAMFSKTGSLEAAQALQNLALMRPELVIPPVLERTYPALETLTEPHQLTATLSCVIGVARSLVSGGRWFPEGPTHMLPLLMRALPGVDPNDFSKCMITFQFIATFSTLVPLVDCSSVLQERNDLTEVERELCSATAEFEDFVLQFMDRCFGLIESSTLEQTREETETEKMTHLESLVELGLSSTFSTILTQCSKEIFMVALQKVFNFSTSHIFETRVAGRMVADMCRAAVKDWGKPGDLWNLGIQWHVPSSEEVSFAFYLLDSFLQPELVKLQHCGDGKLEMSRDDILQSLTIVHNCLIGSGNLLPPLKGEPVTNLMYLFD

SEQ ID NO: 40292 - protein, 1798 aa, Homo sapiens
  DOMAIN (880)..(928): Intermediate filaments proteins domain identified by eMATRIX, accession number BL00226B, p-value=8.849e-09, raw score of 23.86
AESDLQLAQIKCNLGRAVQLQELWPGGLFWTRKLSTYIRLYGRKFSKEDHVLFIKLLYELVSIPKLEISMMQGFARLLINLLKKKELLSRADLELPWRPLYDMVERILYSKTEHLGLNWFPNSVENILKTLVKSCRPYFPADATAEMLEEWRPLMCPFDVTMQKAITYFEIFLPTSLPPELHHKGFKLWFDELIGLWVSVQNLPQWEGQLVNLFARLATDNIGYIDWDPYVPKIFTRILRSLNLPVGSSQVLVPRFLTNAYDIGHAVIWITAMMGGPSKLVQKHLAGLFNSITSFYHPSNNGRWLNKLMKLLQRLPNSVVRRLHRERYKKPSWLTPVPDSHKLTDQDVTDFVQCIIQPVLLAMFSKTGSLEAAQALQNLALMRPELVIPPVLERTYPALETLTEPHQLTATLSCVIGVARSLVSGGRWFPEGPTHMLPLLMRALPGVDPNDFSKCMITFQFIATFSTLVPLVDCSSVLQERNDLTEVERELCSATAEFEDFVLQFMDRCFGLIESSTLEQTREETETEKMTHLESLVELGLSSTFSTILTQCSKEIFMVALQKVFNFSTSHIFETRVAGRMVADMCRAAVKCCPEESLKLFVPHCCSVITQLTMNDDVLNDEELDKELLWNLQLLSEITRVDGRKLLLYREQLVKILQRTLHLTCKQGYTLSCNLLHHLLRSTTLIYPTEYCSVPGGFDKPPSEYFPIKDWGKPGDLWNLGIQWHVPSSEEVSFAFYLLDSFLQPELVKLQHCGDGKLEMSRDDILQSLTIVHNCLIGSGNLLPPLKGEPVTNLVPSMVSLEETKLYTGLEYDLSRENHREVIATVIRKLLNHILDNSEDDTKSLFLIIKIIGDLLQFQGSHKHEFDSRWKSFNLVKKSMENRLHGKKQHIRALLIDRVMLQHELRTLTVEGCEYKKIHQDMIRDLLRLSTSSYSQVRNKAQQTFFAALGAYNFCCRDIIPLVLEFLRPDRQGVTQQQFKGALYCLLGNHSGVCLANLHDWDCIVQTWPAIVSSGLSQAMSLEKPSIVRLFDDLAEKIHRQYETIGLDFTIPKSCVEIAELLQQSKNPSINQILLSPEKIKEGIKRQQEKNADALRNYENLVDTLLDGVEQRNLPWKFEHIGIGLLSLLLRDDRVLPLRAIRFFVENLNHDAIVVRKMAISAVAGILKQLKRTHKKLTINPCEISGCPKPTQIIAGDRPDNHWLHYDSKTIPRTKKEWESSCFVEKTHWGYYTWPKNMVVYAGVEEQPKLGRSREDMTEAEQIIFDHFSDPKFVEQLITFLSLEDRKGKDKFNPRRFCLFKGIFRNFDDAFLPVLKPHLEHLVADSHESTQRCVAEIIAGLIRGSKHWTFEKVEKLWELLCPLLRTALSNITVETYNDWGACIATSCESRDPRKLHWLFELLLESPLSGEGGSFVDACRLYVLQGGLAQQEWRVPELLHRLLKYLEPKLTQVYKNVRERIGSVLTYIFMIDVSLPNTTPTISPHVPEFTARILEKLKPLMDVDEEIQNHVMEENGIGEEDERTQGIKLLKTILKWLMASAGRSFSTAVTEQLQLLPLFFKIAPVENDNSYDELKRDAKLCLSLMSQGLLYPHQVPLVLQVLKQTARSSSWHARYTVLTYLQTMVFYNLFIFLNNEDAVKDIRWLVISLLEDEQLEVREMAATTLSGLLQCNFLTMDSPMQIHFEQLCKTKLPKKRKRDPGSVGDTIPSAELVKRHAGVLGLGACVLSSPYDVPTWMPQLLMNLSAHLNDPQPIEMTVKKTLSNFRRTHHDNWQEHKQQFTDDQLLVLTDLLVSPCYYA

SEQ ID NO: 40293 - protein, 158 aa, Homo sapiens
VREFPGRRFRGCCGALRPRYKRLVDNIFPEDPGYVCIAMEALDQLLMACHCQSINLFVESFLKMVAKLLESEKSNLQILGTNSFVKFANIEEDTPSYHRSYDFFVSRFSEMCHSSHDDLEIKTKIRMSGIKSLQGVVRKTVNDELQANIWDPQHMDKI

SEQ ID NO: 40294 - protein, 789 aa, Homo sapiens
AGGARLRPARGRPPRLLPPRPGPCRPPPVPAPTVNERRAPPRAGWERRSDAGLSRGARPAEMYGVCGCCGALRPRYKRLVDNIFPEDPEDGLVKTNMEKLTFYALSAPEKLDRIGAYLSERLIRDVGRHRYGYVCIAMEALDQLLMACHCQSINLFVESFLKMVAKLLESEKPNLQILGTNSFVKFANIEEDTPSYHRSYDFFVSRFSEMCHSSHDDLEIKTKIRMSGIKGLQGVVRKTVNDELQANIWDPQHMDKIVPSLLFNLQHVEEAESRSPSPLQAPEKEKESPAELAERCLRELLGRAAFGNIKNAIKPVLIHLDNHSLWEPKVFAIRCFKIIMYSIQPQHSHLVIQQLLGHLDANSRSAATVRAGIVEVLSEAAVIAATGSVGPTVLEMFNTLLRQLRLSIDYALTGSYDGAVSLGTKIIKEHEERMFQEAVIKTVGSFASTLPTYQRSEVILFIMSKVPRPSLHQAVDTGRTGENRNRLTQIMLLKSLLQVSTGFQCNNMMSALPSNFLDRLLSTALMEDAEIRLFVLEILISFIDRHGNRHKFSTISTLSDISVLKLKVDKCSRQDTVFMKKHSQQLYRHIYLSCKEETNVQKHYEALYGLLALISIELANEEVVVDLIRLVLAVQDVAQVNEENLPVYNRCALYALGAAYLNLISQLTTVPAFCQHIHEVIETRKKEAPYMLPEDVFVERPRLSQNLDGVVIELLFRQSKISEVLGGSGYNSDRLCLPYIPQLTDEDRLSKRRSIGETISLQVEVESRNSPEKEEVSVRATVLGQPHLL

SEQ ID NO: 40295 - protein, 221 aa, Homo sapiens
  DOMAIN (184)..(194): Protein phosphatase 2C proteins domain identified by eMATRIX, accession number BL01032C, p-value=3.195e-12, raw score of 6.14
  DOMAIN (144)..(211): Protein phosphatase 2C domain identified by PFam, accession name PP2C, E-value=9.2e-09, PFam score of 34.3
IPGSTISWSPAAARGLSVCRCCRLHPASAMDLFGDLPEPERSPRPAAGKEAQKGPLLFDDLPPASSTDSGSSLQALPGSGGPLLFDDLPPASSGDSGSLATSISQMVKTEGKGAKRKTSEEEKNGSEELVEKKVCKASSVIFGLKGYVAERKGEREEMQDAHVILNDITEECRPPSSLITRVSYFAVFDGHGGIRASKFAAQNLHQNLIRKFPKGDVISVE

SEQ ID NO: 40296 - protein, 378 aa, Homo sapiens
  DOMAIN (129)..(139): Protein phosphatase 2C proteins domain identified by eMATRIX, accession number BL01032C, p-value=3.195e-12, raw score of 6.14
  DOMAIN (91)..(375): Protein phosphatase 2C domain identified by PFam, accession name PP2C, E-value=5.6e-46, PFam score of 165.2
KEAQKGPLLFDDLPPASSTDSAVAALGTTPSPVTLWFLQTRRGSKIWRNSLDYQSKVGAEPWCHERQQKADRFLGKRGRVPASSVIFGLKGYVAERKGEREEMQDAHVILNDITEECRPPSSLITRVSYFAVFDGHGGIRASKFAAQNLHQNLVRKFPKGDVISVEKTVKRCLLDTFKHTDEEFLKQASSQKPAWKDGSTATCVLAVDNILYIANLGDSRAILCRYNEESQKHAALSLSKEHNPTQYEERMRIQKAGGNVRDGRVLGVLEVSRSIGDGQYKRCGCHLCAPTSRRCQLTPNDRFILVWPCDGLFKVFTPEEAVNFILSCLEDEKIQTREGKSAADVRLRSSPATRLANKAVAAGARPDNVTVMVVRIGH

SEQ ID NO: 40297 - protein, 139 aa, Homo sapiens
  DOMAIN (81)..(108): Protamine P1 proteins domain identified by eMATRIX, accession number BL00048, p-value=1.829e-10, raw score of 6.39
IVQPAEEEEDQETPFRNLRARAHRNLKTEEEQQEEEEEELALAKGITEECLKQPSLEQKEGRRASHTLLPSHRLKQSADSSSSRPSSSSSSSSRSRSRSPDSSGSRSHSPLRSKQRDVAQARTHANPRGRPKMGSRSTS

SEQ ID NO: 40298 - protein, 614 aa, Homo sapiens
  DOMAIN (511)..(546): Troponin domain identified by eMATRIX, accession number PF00992A, p-value=8.388e-11, raw score of 16.67
CLRLIAAAPPIAIEPATTSSLALFLLLQRDQSSRTRGLPEEKEEVTMDTSENRPENDVPEPPMPIADQVSNDDRPEGSVEDEEKKESSLPKSFKRKISVVSATKGVPAGNSDTEGGQPGRKRRWGASTATTQKKPSISITTESLKSLIPDIKPLAGQEAVVDLHADDSRISEDETERNGDDGTHDKGLKICRTVTQVVPAEGQENGQREEEEEEKEPEAEPPVPPQVSVEVALPPPAEHEVKKVTLGDTLTRRSISQQKSGVSITIDDPVRTAQVPSPPRGKISNIVHISNLVRPFTLGQLKELLGRTGTLVEEAFWIDKIKSHCFVTYSTVEEAVATRTALHGVKWPQSNPKFLCADYAEQDELDYHRGLLVDRPSETKTEEQGIPRPLHPPPPPPVQPPQHPRAEQREQERAVREQWAEREREMERRERTRSEREWDRDKVREGPRSRSRSRDRRRKERAKSKEKKSEKKEKAQEEPPAKLLDDLFRKTKAAPCIYWLPLTDSQIVQKEAERAERAKEREKRRKEQEEEEQKEREKEAERERNRQLEREKRREHSRERDRERERERERDRGDRDRDRERDRERGRERDRRDTKRHSRSRSRSTPVRDRGGRR

SEQ ID NO: 40299 - protein, 519 aa, Homo sapiens
  DOMAIN (416)..(451): Troponin domain identified by eMATRIX, accession number PF00992A, p-value=8.388e-11, raw score of 16.67
RSQSSLPKSFKRKISVVSATKGVPAGNSDTEGGQPGRKRRWGASTATTQKKPSISITTESLKEAVVDLHADDSRISEDETERNGDDGTHDKGLKICRTVTQVVPAEGQENGQREEEEEEKEPEAEPPVPPQVSVEVALPPPAEHEVKKVTLGDTLTRRSISQQKSGVSITIDDPVRTAQVPSPPRGKISNIVHISNLVRPFTLGQLKELLGRTGTLVEEAFWIDKIKSHCFVTYSTVEEAVATRTALHGVKWPQSNPKFLCADYAEQDELDYHRGLLVDRPSETKTEEQGIPRPLHPPPPPPVQPPQHPRAEQREQERAVREQWAEREREMERRERTRSEREWDRDKVREGPRSRSRSRDRRRKERAKSKEKKSEKKEKAQEEPPAKLLDDLFRKTKAAPCIYWLPLTDSQIVQKEAERAERAKEREKRRKEQEEEEQKEREKEAERERNRQLEREKRREHSRERDRERERERERDRGDRDRDRERDRERGRERDRRDTKRHSRSRSRSTPVRDRGGRR

SEQ ID NO: 40300 - protein, 87 aa, Homo sapiens
MILAFYRERQAGPYVHQWQAAAITPPNTWNPGDDSRVPFSSACNWGGGPLTEWDHGASDEGSLGVGEYPRTWQTFSSKVRILLFGEL

SEQ ID NO: 40301 - protein, 66 aa, Homo sapiens
  DOMAIN (19)..(53): SAP domain identified by PFam, accession name SAP, E-value= 1.5e-09, PFam score of 45.2
STSRKMTELEEVTLNGKPLQALRVTDLKAALEQRGLAKSGQKSALVKRLKGVRSRRCWGVGGERTR

SEQ ID NO: 40302 - protein, 1342 aa, Homo sapiens
  DOMAIN (38)..(56): MUSCARINIC M1 RECEPTOR SIGNATURE domain identified by eMATRIX, accession number PR00538F, p-value=5.235e-10, raw score of 10.59
  DOMAIN (72)..(106): SAP domain identified by PFam, accession name SAP, E-value= 1.4e-11, PFam score of 51.9
  misc_feature (1)...(1342): Xaa = X or * as defined in Table 2
MWRRKHPRTSGGTRGVLSGNRGVEYGSGRGHLGTFEGRWRKLPKMPEAVGTDPSTSRKMAELEEVTLDGKPLQALRVTDLKAALEQRGLAKSGQKSALVKRLKGALMLENLQKHSTPHAAFQPNSQIGEEMSQNSFIKQYLEKQQELLRQRLEREAREAAELEEASAESEDEMIHPEGVASLLPPDFQSSLERPELELSRHSPRKSSSISEEKGDSDDEKPRKGERRSSRVRQARAAKLSEGSQPAEEEEDQETPSRNLRVRADRNLKTEEEEEEEEEEEEDDEEEEGDDEGQKSREAPILKEFKEEGEEIPRVKPEEMMDERPKTRSQEQEVLERGGRFTRSQEEARKSHLARQQQEKEMKTTSPLEEEEREIKSSQGLKEKSKSPSPPRLTEDRKKASLVALPEQTASEEETPPPLLTKEASSPPPHPQLHSEEEIEPMEGPAPPVLIQLSPPNTDADTRELLVSQHTVQLVGGLSPLSSPSDTKAESPAEKVPEESVLPLVQKSTLADYSAQKDLEPESDRSAQPLPLKIEELALAKGITEECLKQPSLEQKEGRRASHTLLPSHRLKQSADSSSSRSSSSSSSSSRSRSRSPDSSGSRSHSPLRSKQRDVAQARTHANPRGRPKMGSRSTSESRSRSRSRSRSASSNSRKSLSPGVSRDSSTSYTETKDPSSGQEVATPPVPQLQVCEPKERTSTSSSSVQARRLSQPESAEKHVTQRLQPERGSPKKCEAEEAEPPAATQPQTSETQTSHLPESERIHHTVEEKEEVTMDTSENRPENDVPEPPMPIADQVSNDDRPEGSVEDEEKKESSLPKSFKRKISVVSATKGVPAGNSDTEGGQPGRKRRWGASTATTQKKPSISITTESLKSLIPDIKPLAGQEAVVDLHADDSRISEDETERNGDDGDPXQRGLKICRTVTQVVPAEGQENGQREEEEEEKEPEAEPPVPPQVSVEVALPPPAEHEVKKVTLGDTLTRRSISQQKSGVSITIDDPVRTAQVPSPPRGKISNIVHISNLVRPFTLGQLKELLGRTGTLVEEAFWIDKIKSHCFVTYSTVEEAVATRTALHGVKWPQSNPKFLCADYAEQDELDYHRGLLVDRPSETKTEEQGIPRPLHPPPPPPVQPPQHPRAEQREQERAVREQWAEREREMERRERTRSEREWDRDKVREGPRSRSRSRDRRRKERAKSKEKKSEKKEKAQEEPPAKLLDDLFRKTKAAPCIYWLPLTDSQIVQKEAERAERAKEREKRRKEQEEEEQKEREKEAERERNRQLEREKRREHSRERDRERERERERDRGDRDRDRERDRERGRERDRRDTKRHSRSRSRSTPVRDRGGRR

SEQ ID NO: 40303 - protein, 2097 aa, Homo sapiens
  DOMAIN (1449)..(1497): Cadherins extracellular repeat proteins domain proteins domain identified by eMATRIX, accession number BL00232B, p-value= 4.808e-39, raw score of 32.79
  DOMAIN (1378)..(1905): Cadherin domain identified by PFam, accession name cadherin, E-value=7.9e-88, PFam score of 305.2
ELEEVTLDGKPLQALRVTDLKAALEQRGLAKSGQKSALVKRLKGALMLENLQKHSAPHAAFQPNSQIGEEMSQNSFIKQYLEKQQELLSSRLEREAREAAELEGKSSSISEEKGDSDDDKPRKGERRSSRVRQARAAKLAEGSQPAEEEEDQETPSRNLRVRADRNLKTEEEEEEEEEEEEDDEEEEGDDEGQKSREAPILKEFKEEGEEIPRVKPEEMMDERPKTRSQEQEVLERGGRFTRSQEEARKSHLARQQQEKEMKTTSPLEEEEREIKSSQGLKEKSKSPSPPRLTEDRKKASLVALPEQTASEEETPPPLLTKEASSPPPHPQLHSEEEIEPMEGPAPAVLIQLSPPNTDADTRELLVSQHTVQLVGGLSPLSSPSDTKAESPAEKVPEESVLPLVQKSTLADYSAQKDLEPESDRSAQPLPLKIEELALAKGITEECLKQPSLEQKEGRRASHTLLPSHRLKQSADSSSSRSSSSSSSSSRSRSRSPDSSGSRSHSPLRSKQRDVAQARTHANPRGRPKMGSRSTSESRSRSRSRSRSRSASSNSRKSLSPGVSRDSSTSYTETKDPSSGQEVATPPVPQLQVCEPKERTSTSSSSVQARRLSQPESAEKHVTQRLQPERGSPKKCEAEEAEPPAATQPQTSETQTSHLPESERIHHTVSHPPPSTPNPQPFSPCWCLQILRISRPLLIKQLIKHSEEKEEVTMDTSENRPENDVPEPPMPIADQVSNDDRPEGSVEDEEKKELESLRRCQPQLSEEKYSDLAAECLPGPGVFTYPQATFIRGSMIPLAATKGVPAGNSDTEGGQPGRKRRWGTSTATTQKKPSISITTESLKSLIPDIKPLAGQEAVVDLHADDSRISEDETERNGDDGTHDKGLKICRTVTQVVPAEGQENGQREEEEEEKEPEAEPPVPPQVSVEVALPPPAEHEVKKVTLGDTLTLRRSISQQKSGVSITIDDPVRTAQVPFPPRGKISNIVHISNLVRPFTLGELKELLGRTGTLVEEAFWIDKIKSHCFVTYSTVEEAVATRTALHGVKWPQSNPKFLCADYAEQDELDYHRGLLVDRPSETKTEEQGIPRPLHPPPPPPVQPPQHPRAEQREQERAVREQWAEREREMERRERTRSEREWDRDKVREGPRSRSRSRDRRRKERAKSKEKKSEKKEKAQEEPPAKLLDDLFRKTKAAPCIYWLPLTDSQIVQKEAERAERAKEREKRRKEQEEEEQKEREKEAERERNRQLEREKRREHRWEKRQERERERERDRGDRDRDRERDRERGRERDRRDTKRHSRSRSRSTPVRDRDLQRSAAPAPIGSGLCPGTRRQARLWRFPRPGPLAVPGSREHPGPALLRTRRSWVWNQFFVIEEYAGPEPVLIGKLHSDVDRGEGRTKYLLTGEGAGTVFVIDEATGNIHVTKSLDREEKAQYVLLAQAVDRASNRPLEPPSEFIIKVQDINDNPPIFPLGPYHATVPEMSNVGTSVIQVTAHDADDPSYGNSAKLVYTVLDGLPFFSVDPQTGVVRTAIPNMDRETQEEFLVVIQAKDMGGHMGGLSGSTTVTVTLSDVNDNPPKFPQSLYQFSVVETAGPGTLVGRLRAQDPDLGDNALMAYSILDGEGSEAFSISTDLQGRDGLLTVRKPLDFESQRSYSFRVEATNTLIDPAYLRRGPFKDVASVRVAVQDAPEPPAFTQAAYHLTVPENKAPGTLVGQISAADLDSPASPIRYSILPHSDPERCFSIQPEEGTIHTAAPLDREARAWHNLTVLATELDSSAQASRVQVAIQTLDENDNAPQLAEPYDTFVCDSAAPGQLIQVIRALDRDEVGNSSHVSFQGPLGPDANFTVQDNRDGSASLLLPSRPAPPRHAPYLVPIELWDWGQPALSSTATVTVSVCRCQPDGSVASCWPEAHLSAAGLSTGALLAIITCVGALLALVVLFVALRRQKQEALMVLEEEDVRENIITYDDEGGGEEDTEAFDITALQNPDGAAPPAPGPPARRDVLPRARVSRQPRPPGPADVAQLLALRLREADEDPGVPPYDSVQVYGYEGRGSSCGSLSSLGSGSEAGGAPGPAEPLDDWGPLFRTLAELYGAKEPPAP

SEQ ID NO: 40304 - protein, 77 aa, Homo sapiens
MSCFEAQGFKWNLYEVVRVPLKATDVARLPYQLSISCATSPGFQLSCCIPSTNLAYTAAWSPGEGSKAAAGRPGQSC

SEQ ID NO: 40305 - protein, 78 aa, Homo sapiens
YIFTILNTLQGVFILLFGCLMDRKIQEALRKRFCRAQAPSSHHLPGELLPSDPQLCIQEHVRRHSMALLRGHGHSQKL

SEQ ID NO: 40306 - protein, 904 aa, Homo sapiens
  DOMAIN (600)..(653): Latrophilin/CL-1-like GPS domain identified by PFam, accession name GPS, E-value=2.7e-13, PFam score of 57.6
MVCSAAPLLLLATTLPLLGSPVAQASQPLWPMAKGQTMWAQTSTLTLTEEELGQSLFSLASDSQQSVMSTTRGISIVLASLATSGTPASASITLLVKASTTIQPCGCLVFSHPEPGYCQLLPPVPGILNLNSQLQMPGDTLSLTLHLSQEATNLSWFLRHPGSPSPILLQPGTQVSVTSSHGQAALSVSNMSHHWAGEYMSCFEAQGFKWNLYEVVRVPLKATDVARLPYQLSISCATSPGFQLSCCIPSTNLAYTAAWSPGEGSKASSFNESGSQCFVLAVQRCPMADTTYACDLQSLGLAPLRVPISITIIQDGDITCPEDASVLTWNVTKAGHVAQAPCPESKRGIVRRLCGADGVWGPVHSSCTDARLLALFTRTKLLQAGQGSPAEEVPQILAQLPGQAAEASSPSDLLTLLSTMKYVAKVVAEARIQLDRRALKNLLIATDKVLDMDTRSLWTLAQARKPWAGSTLLLAVETLACSLCPQDHPFAFSLPNVLLQSQLFGPTFPADYSISFPTRPPLQAQIPRHSLAPLVRNGTEISITSLVLRKLDHLLPSNYGQGLGDSLYATPGLVLVISIMAGDRAFSQGEVIMDFGNTDGSPHCVFWDHSLFQGRGGWSKEGCQAQVASASPTAQCLCQHLTAFSVLMSPHTVPEEPALALLTQVGLGASILALLVCLGVYWLVWRVVVRNKISYFRHAALLNMVFCLLAADTCFLGAPFLSPGPRSPLCLVPPSSVISSTWPPFSGCGAGPGVGPPAALCLSPAGKAPSSPPHGAPGLPVPTGVGRCHPGALPTSRAIPEGGGMLVGWEGRGVIHLRGPVLAIIGVNGLVLAMAMLKLLRPSLSEGPPAEKRQALLGIQEALRKRFCRAQAPSSTISLATNEGCILEHSKGGSDTARKTDASE

SEQ ID NO: 40307 - protein, 167 aa, Homo sapiens
  misc_feature (1)...(167): Xaa = X or * as defined in Table 2
RASSAAWGPSRKTSASSSAFSSSCWSSSXQSXSYSSSSLSHGQGERERQEGPEGRPAAVPHREQRGAEERLEHHPGXDAMLWCHXLHRLVPSAGGEHGSRPLLHGELPGLRAQRHHAFVENGLLXKGEDVVRXQXARAGHGGDVHPHHADPGHGLLHDPLPAHPPDW

SEQ ID NO: 40308 - protein, 491 aa, Homo sapiens
  DOMAIN (465)..(483): NEUTROPHIL CYTOSOL FACTOR 2 SIGNATURE domain identified by eMATRIX, accession number PR00499A, p-value=9.413e-09, raw score of 10.66
GRALTSRRRACQGASEAAGSPAQVTTSTGHHQHRSHQHRSPPAQVTTSTGHHQHRSPAQATTSTGHHQHRPPPAQVTTSTGHHQHRSPAQATTSTGHHQHRSHHTGHHQHRSHTSTGHHQHRSPAQATTSTGHHQHRPPPAQVTTSTGHHQHGHQHRPPPAHGHHQHSSPPAHGHHQHRPPPAHGHHQHGHHQHSSPPAHGHHQHRHHQPGHHQHRSPHSTAHHQHGHHQHSSPPAHGHHQHHQHGHHQHSSPYQHGHHQHRPPPAHGHHQHRSHHTAHHQHRSHQHGHHQPGHHQHRSPAQATTSTGHTSTGHHQHRPHTSTGHHHTGHHQHRSHQHRSPPAQATTSTAHHQHSSHTSTGHHQHRSPHSTGHHQHSSPPAHGHHQHSSPPAQATTSTGHHQHRESPAVAAAADPSALSAARRGSPGPAAAPQSRGTRGGGAPAKWWGSALGLGWAGRARARLGRPLRPILGAMPPAPRTPRERREHGEVE

SEQ ID NO: 40309 - protein, 112 aa, Homo sapiens
PPRRRGQKRRQKREEGERERGERKRPRDRKEERKGRRTKRQGGTETRESRPNGDGPQAKRKKQTAGQREREEGEQRSSRQRGAAERERGRETTHITCLLVPCWWEPNGRLCL

SEQ ID NO: 40310 - protein, 193 aa, Homo sapiens
  misc_feature (1)...(193): Xaa = X or * as defined in Table 2
MLAQRGGRSVVQCIAVSKLSVTQRSFVTLIMDEEALGNCGGSSGSQTCEKAVCIHNLPFLTSHAFQSGFPPHQSPEASLPKMVSDAQTARLSLESMRELGFHISESAGFPAPVSGYEHSNPSRPGVMPSGTSHWKQRSQKVEDNRTEMVKGIQGDTVKHQQHLPRINGNXLAYMTAKSRTWLPVQQDPGPQTI

SEQ ID NO: 40311 - protein, 110 aa, Homo sapiens
MEYYAAIKNDEFMSFVGTWMKLETIILSKLSQGQKTKHHIFSLIEAQAQVSPPPPYPAPQELTQPLLQQPRAPEAPAQQPPGSLLTATVRLSASPGPGLIFDQLLPRCGF

SEQ ID NO: 40312 - protein, 368 aa, Homo sapiens
  DOMAIN (184)..(228): Synapsins proteins domain identified by eMATRIX, accession number BL00415N, p-value=5.401e-09, raw score of 4.29
MLAQRGGRSVVQCIAVSKLSVTQRSFVTLIMDEEALGNCGGSSGSQTCEKAVCIHNLPFLTSHAFQSGFPPHQSPEASLPKMVSDAQTARLSLESMRELGFHISESAGFPAPVSGYEHSNPSLSTTNLSGPSRRRQPPVSPLTLSPGPEAHQGFSRQLSSTSPLAPYPTSQMVSSDRSQLSFLPTEAQAQVSPPPPYPAPQELTQPLLQQPRAPEAPAQQPQAASSLPQSDFQLLPAQGSSLTNFFPDVGFDQQSMRPGPCLSSTGASGATGSRELQDSFHLRPSPYSNCGSLPNTILPEDSSTSLFKDLNSALAGLPEVSLDVDTPFPLEEELQIEPLSLDGRHMLSDSSMGLLDPSVEETFRADRL

SEQ ID NO: 40313 - protein, 232 aa, Homo sapiens
  DOMAIN (39)..(53): OXYTOCIN RECEPTOR SIGNATURE domain identified by eMATRIX, accession number PR00665E, p-value=8.024e-09, raw score of 5.60
MRERARPPRGCLAPPLPPGESGADGQPAPRGRGTAGGELAAAGCGARAAMHRGAVPSAEPVPASPDGRWQWAGEGRPCNAAGGSRTGAGCGWPAPAGWGPAPSSAASCPASGGATHRGASAAPGGGGGGRAPGPDALEQRRAGAPPNAPGTPGSPEESSLRMRRESAAGAPAVGMAAATSLGQALGPRVPRSPYRTAVVLSSRSAFGYFSLITLARYTLGCLSHSDITLFEC

SEQ ID NO: 40314 - protein, 356 aa, Homo sapiens
  DOMAIN (188)..(229): Nuclesosome assembly protein (NAP) domain identified by eMATRIX, accession number PF00956B, p-value=8.085e-24, raw score of 23.14
  DOMAIN (193)..(332): Nucleosome assembly protein (NAP) domain identified by PFam, accession name NAP_family, E-value=1.4e-28, PFam score of 105.7
MADKRAGTPEAAARPPPGLAREGDARTVPAARAREAGGRGSLHPAAGPGTAFPSPGRGEAASTATTPSLENGRVRDEAPETCGAEGLGTRAGASEKAEDANKEEGAIFKKEPAEEVEKQQEGEEKQEVAAEAQEGPRPPEPWCPNCMDPLEAIQWEAEAVSAQADRAYLPLERRFGRMHRLYLARRSFIIQNIPGFWVTAFLNHPQLSAMISPRDEDMLCYLMNLEVRELRHSRTGCKFKFRFWSNPYFQNKVIVKEYECRASGRVVSIATRIRWHWGQEPPALVHRNRDTVRSFFSWFSQHSLPEADRVAQIIKDDLWPNPLQYYLLGDRPCRARGGLARWPTETPSRPYGFQSG

SEQ ID NO: 40315 - protein, 144 aa, Homo sapiens
GALKATLSLLERVLMKDIVTPVPQEEVKTVIRKCLEQAALVNYSRLSEYAKIEENVGRLITPAKKLEDTIRLAELVIEVLQQNEEHHAEAFAWWSDLMVEHAETFLSLFAVDMDAALEVQPPDTWDSFPLFQLLNDFLRTDYNL

SEQ ID NO: 40316 - protein, 54 aa, Homo sapiens
TRKSGCLKIRFHVFLFLYRNPGMDVADAYVTFVRHSQDVLRDKVNEEMYIERLF

SEQ ID NO: 40317 - protein, 258 aa, Homo sapiens
  DOMAIN (37)..(83): kw TRANSCRIPTASE REVERSE II ORF2 domain identified by eMATRIX, accession number DM01354O, p-value=1.000e-40, raw score of 8.73
  DOMAIN (70)..(236): Reverse transcriptase domain identified by PFam, accession name rvt, E-value=0.028, PFam score of -37.1
MDTFLDTYTLPRLNQEEVESLNRPITGAEIVAIINSLPTKKSPGPDGFTAEFYQRYKEELVPFLLKLFQSIEKEGILPNSFYEASIILIPKPGRDTAKKENCRPISLMNIDAKILNKILANRIQQHIKKLIHHDQVNAEYKSLFPDDTVANRTATGLVLLFPLEQWFTEISKQQLQTVKDRFQAFLNGETQIMADEAFMNAVQSYYEVRITVQKNAKTTQALCLGSLSCRAMGTVVLVYYSIILPKANGLVIRYNVKK

SEQ ID NO: 40318 - protein, 583 aa, Homo sapiens
MTLHPVLLNPFSHKDKGQKLCSGDSSVLLTSACSTLYSRQALMRYKKHLHILGLMLHTEHKDYCTCEHEHVAGWPSNSEQVILHPTPNSPKQSEWHKMTVSKNCPDQDLKIKLAVRMDKPQNMKHSGTIQNFPSSMLGDSSLERSYRLRVPCRRHPDHSNSAYDSLAPQSATHIFEVPDGIGTVTVEEKERFEEIKERLRVLLENQITHFRYCFPFGRPEGALKATLSLLERVLMKDIVTPVPQEEVKTVIRKCLEQAALVNYSRLSEYAKIEGLEGGRAFFNAVKEGDTVIFASDDEQDRILWVQAMYRATGQSHKPVPPTQVQKLNAKGGNVPQLDAPISQFLRKWFAENLKGEFRRCPPCQIRYSLLWLKRLISGSSDGPQWHLECGPRTSSTSSTSKLVRNASSQPLPPSSTESATLGDQPIQVVTSKYQVSPVLRVSVDMVPTFKGAHRLVEKPQNEQDMCDEIYEENINSKMVSSEGNETLHFKRDNDLQGSVSPRVAFGPPASVSPGVPFISTEYWAPPQTYCIRVFWMAPWGLHFKQHLMQMVQAPIYRHSLIAQECLNLCHRSSSQLLHSLHSW

SEQ ID NO: 40319 - protein, 392 aa, Homo sapiens
  misc_feature (1)...(392): Xaa = X or * as defined in Table 2
MFASCYMRNIPKRVIEFGTCLWRTCKNCLSSLEFKMPFPPHPRSVTYNLKQERCRLSLDASLSCMLSIEDSQIPNTRLECCKGLSRCTSVASTCPLVTFSFCLFSPKMEQYSKDDSEKTLKGWFSPGQVFVLDEYCARNGVRGCHRHLCYLRDLLERAENGAMIDPTLLHYSFAFCASHVHGNSQQMHVYLSGLPPNTDPEGSKTPSPPEPEAKKDTKKESKKRKDSKTQANQELKRSLTSNLPICEPTQWXTFPKYQIYQLTSLXASHKCLLFRHRHGWLLYIDADNGSGTSEDLFWKLDALQTFIRDLHWPEEEFGKHLEQRLKLMASDMIESCVKRTRIAFEVKLQKTSSIQQIFRVPQFNMAPCFNVMGLMAKGSIQPKLCSMEMGQE

SEQ ID NO: 40320 - protein, 1315 aa, Homo sapiens
  DOMAIN (102)..(132): H-NS histone family domain identified by eMATRIX, accession number PF00816B, p-value=9.284e-09, raw score of 13.84
  DOMAIN (522)..(624): PH domain identified by PFam, accession name PH, E-value=1e- 11, PFam score of 46.9
MLDPSSSEEESDEIVEEESGKEVLGSAPSGARLSPSRTSEGSAGSAGLGGGGAGAGAGVGAGGGGGSGASSGGGAGGLQPSSRAGGGRPSSPSPSVVSEKEKEELERLQKEEEERKKRLQLYVFVMRCIAYPFNAKQPTDMARRQQKISKQQLQTVKDRFQAFLNGETQIMADEAFMNAVQSYYEVFLKSDRVARMVQSGGCSANDSREVFKKHIEKRVRSLPEIDGLSKETVLSSWMAKFDAIYRGEEDPRKQQARMTASAASELILSKEQLYEMFQNILGIKKFEHQLLYNACQLDNPDEQAAQIRRELDGRLQMADQIARERKFPKFVSKEMENMYIEELKSSVNLLMANLESMPVSKGGEFKLQKLKRSHNASIIDMGEESENQLSKSDVVLSFSLEVVIMEVQGLKSLAPNRIVYCTMEVEGGEKLQTDQAEASKPTWGTQGDFSTTHALPAVKVKLFTESTGVLALEDKELGRVILHPTPNSPKQSEWHKMTVSKNCPDQDLKIKLAVRMDKPQNMKHSGYLWAIGKNVWKRWKKRFFVLVQVSQYTFAMCSYREKKAEPQELLQLDGYTVDYTDPQPGLEGGRAFFNAVKEGDTVIFASDDEQDRILWVQAMYRATGQSHKPVPPTQVQKLKPREEMYLSMDAPISQFSGLKDADRAQKHGMDEFISSNPCNFDHASLFEMVQRLTLDHRLNDSYSCLGWFSPGQVFVLDEYCARNGVRGCHRHLCYLKDLLERAENGAMIDPTLLHYSFAFCASHVHGNRPDGIGTLLTVEEKERFLKEIKERLRVLLENQITHFRYCFPFGRPEGALKATLSLLERVLMKDIVTPVPQEEVKTVIRKCLEQAALVNYSRLSEYAKIEENQKDAENVGRLITPAKKLEDTIRLAELVIEVLQQNEEHHAEGKEAFAWWSDLMVEHAETFLSLFAVDMDAALEVQPPDTWDSFPLFQLLNDFLRTGLLICGNGKFHKHLQDLFAPLVVRYMWDLDGSSPIAQSIHRGLLSRESWEPVNNGSGTSEDLFWKLDALQTFIRDLHWPEEEFGKHLEQRLKLMASDMIESCVKRTRIAFEVKLQKTSRSTDFRVPQSICTMFNVMVDAKAQSTKLCSMEMGQEFAKMWHQYHSKIDELIEETVKEMITLLVAKFVTILEGVLAKLSRYDEGTLFSSFLSFTVKAASKYVDVPKPGMDVADAYVTFVRHSQDVLRDKVNEEMYIERLFDQWYNSSMNVICTWLTDRMDLQLHIYQLKTLIRMVKKTYRDFRLQGALDSTLNSKTYEPIRNRLTVEEATASVSEGGGLQGISMKDSDEEDEEDD

SEQ ID NO: 40321 - protein, 150 aa, Homo sapiens
VAAVAATALKGGGARNARVLRGIFAGATANKASHNRTRALQNHTASPEGKEEPEPLIPGTGKYIPQKRGAKNPHENCGNLPWAIGFPCGILLFDPSPKRRKLDKDRVKQMKARQNMRVSNTGEYESQRFRASSQSAPSPDVGSGVSGVQT

SEQ ID NO: 40322 - protein, 133 aa, Homo sapiens
  DOMAIN (89)..(127): Lipoxygenases iron-binding region proteins domain identified by eMATRIX, accession number BL00711I, p-value=7.916e-09, raw score of 18.56
  misc_feature (1)...(133): Xaa = X or * as defined in Table 2
TPAAVESSPSIPLAPRLLYTGXPLQPGPRGQGCVPRIVPCCPKPVCAPRPPWPRRSQRLRSAGLSPLCAAAAPPVPAGSHGTPGRVWAPLSNSACCTCCRHPSXLHPGTLDPGRWQARXGPALPRGPLPGSPP

SEQ ID NO: 40323 - protein, 97 aa, Homo sapiens
PKILVGASKVVLLSAHKLGFIGDTLSRQAKAVDVASRVTHYSNLLCDFLQGIVATTKAAALQYPIAFPGPKDMVERVKELGHSTQQFRRVLGQLAAA

SEQ ID NO: 40324 - protein, 98 aa, Homo sapiens
ARIVFAIISFYFMPCCPLTASSFYLLSGLLDAFDGHALALLIKFCVRGSESHKMIDLSGNPVLRIYYTSRVGSVGLFRMGLWVTAPIALLKSLISVIT

SEQ ID NO: 40325 - protein, 113 aa, Homo sapiens
VLIRARLSDNPAVRGSESHKMIDLFCYPVLRIYYTSRPALFTLCAGNELFYCLLYLFHFSEGPLVGSVGLFRMGLWVTAPIALLKSLISVIHLITAARNMAALGRQQDRAKKK

SEQ ID NO: 40326 - protein, 155 aa, Homo sapiens
  DOMAIN (27)..(70): 'Homeobox' domain proteins domain identified by eMATRIX, accession number BL00027, p-value=7.171e-14, raw score of 26.43
MVRSCFVDDRRKRCNFNRQASEVLNEYFYSHVSNPYHSEEAKEELAKKCGITVSQVSNRFGNKKIRYKKNIGEFQEEANIYAVKTAVSVTQGGHSSTSSPTPPSCAGCGGSFNISGSGDMFLGMPGLNGDSYSASQALESGDASPAQSEMPKMGT

SEQ ID NO: 40327 - protein, 498 aa, Homo sapiens
  DOMAIN (281)..(324): 'Homeobox' domain proteins domain identified by eMATRIX, accession number BL00027, p-value=5.500e-15, raw score of 26.43
  DOMAIN (266)..(312): Homeobox domain identified by PFam, accession name homeobox, E-value=0.00024, PFam score of 23.7
  misc_feature (1)...(498): Xaa = X or * as defined in Table 2
PGGGRGGAGRGPQGPPPAMDERLLGPPPPGGGRGGLGLVSGEPGGPGEPPGGGDPGGGSGGVPGGRGKQDIGDILQQIMTITDQSLDEAQGQKTPPLNCPRKKPVLFSGRGEIKEKTGLSIRSSQEEEPVDPQLMRLDNMLLAEGVAGPEKGGGSAAAAAAAAASGGGVSPDNSIEHSDYRSKLAQIRHIYHSELEKYEQACNEFTTHVMNLLREQSRTRPVAPKEMERMVSIIHRKFSAIQMQLKQSTCEAMMMLRSRFLDARRKRRNFSRQATEVLNEYFYSHLSNPYPSEEAKEELAKKCGITVSQVSNRFGNKKIRYKKNIGKFQEEANIYAVKTAVSVTQGGHSSTSSPTPPSSAGSGGSFNISGSGDMFLGMPGLNGDSYSASQVWESLRHSMGARGVIGGXTFGGRARCYSPREMRANGSWQEAVTPSSVTSPTEGPGSVHSDTSNLILPLRVTGVGALTRRLEEDAGFQRTNPNTGEAQDREGPMGSSPP

SEQ ID NO: 40328 - protein, 165 aa, Homo sapiens
  DOMAIN (1)..(100): Fz domain identified by PFam, accession name Fz, E-value=4e- 20, PFam score of 80.3
IPRLPGSIQLSFVGAFGQTSKSLFFLCVFILLLFQFFLCSVYVPMCTERRINIPIGPCGGMCLSVKGRCEPVLKEFGFAWPESLNCSKFPPQNDHNHMCMEGPGDEEVPLPHKTPIQPGEECHSVGTNSDQYIWVKRSLNCVLKCGYDACLYSRSAQEVTDIWMA

SEQ ID NO: 40329 - protein, 518 aa, Homo sapiens
  DOMAIN (307)..(332): FRIZZLED PROTEIN SIGNATURE domain identified by eMATRIX, accession number PR00489C, p-value=2.250e-28, raw score of 9.29
  DOMAIN (217)..(518): Frizzled/Smoothened family membrane region domain identified by PFam, accession name Frizzled, E-value=1.7e-202, PFam score of 680.5
MAWRGAGPSVPGAPGGVGLSLGLLLQLLLLLGPARGFGDEEERRCDPIRISMCQNLGYNVTKMPNLVGHELQTDAELQLTTFTPLIQYGCSSQLQFFLCSGYVPMGTEKINIPIGPCGGMCLSVKRRCETPSLKEFGFAWPESLNCSKYPHPQNDHNPHVPWKGPGDEEVPLPHKTPIQPGEECHSVGTNSDQYIWVKRSLNCVLKCGYDAGLYSRSAKEFTDIWMAVWASLCFISTAFTVLTFLIDSCRFSYPERPIIFLSMCYNIYSIAYIVRLTVGRERISCDFEEAAEPVLIQEGLKNTGCAIIFLLMYFFGMASSIWWVILTLTWFLAAGLKWGHEAIEMHSSYFHIAAWAIPPVKTIVILIMRLVDADELTGLCYVGNQNLDALTGFVVAPLFTYLVIGTLFIAAGLVALFKIRSNLQKDGTKTDKLERLMVKIGVFSVLYTVPATCVIACYFYEISNWALFRYSADDSNMAVEMLKIFMSLLVGITSGMWIWSAKTLHTWQKCSNRLVNYT

SEQ ID NO: 40330 - protein, 56 aa, Homo sapiens
  misc_feature (1)...(56): Xaa = X or * as defined in Table 2
FYKAVPSIHQLDVPQTHQPXSTGLVQKVYSRSKHVSLXPKYYYVQLVPKLDHLIFY

SEQ ID NO: 40331 - protein, 318 aa, Homo sapiens
  DOMAIN (6)..(51): Inosine-uridine preferring nucleoside hydrolase family signat domain identified by eMATRIX, accession number BL01247B, p-value= 3.625e-39, raw score of 27.94
  DOMAIN (1)..(191): Inosine-uridine preferring nucleoside hy domain identified by PFam, accession name IU_nuc_hydro, E-value=1.7e-52, PFam score of 187.8
MRAPEPVTLVAIGPLTNIALLLSQCPECKPYIRRLVIMGGSAGRGNCTPNAEFNIAADPEAAACVFRSGIEIVMCGLDVTNQAILTPDYLSTLPQLNRTGKMLHALFSHYRSGSMQSGLRMHDLCAIAWLVRPDLFTLKPCFVAVETQGEFTSGTTVVDIDGCLGKPANVQVALDLDVKGFQHYDDVKAYTPAWAEQITGVSRSQIIRIAREFADNADKTHGRSMIIVGAGLNHWYHLDIHNQTWGTQTRTGGQARGAELRWSVRDAIIAIAQNRLCHGNLSIIRCPSTGANTGMMQIYGERNMQLRFAGIEIGGDAR

SEQ ID NO: 40332 - protein, 118 aa, Homo sapiens
GRTREATWRVYSVAVGVSRSQIIRIAREFADNADKTHGRSMIIVGAGLNHWYHLDMNYRGLINMLIFCGCVGQSGGGWAHYVGQEKLRPQTGWQPGVCLDWQRPARHMNSTSYFLLVP

SEQ ID NO: 40333 - protein, 25 aa, Homo sapiens
MVAQAAAAFGPSERLWQPLCFMEQP

SEQ ID NO: 40334 - protein, 65 aa, Homo sapiens
DDFLDLAESPNASDTESSDEIPLKAGPGTLIMATGVQDFNRTEFDRLNAIKGHLEIALLEKHFFT

SEQ ID NO: 40335 - protein, 139 aa, Homo sapiens
LRTHLLPRLSQSSPVSSLPRALLRPPGQLELWAVPAGPGPLLAADASQNLTQHMEALASQSRGRVDMSDGHLAVLSPIEEELRKLREETNAEMLRQELDRERQRRMELEQKVQEVLKARTEEQMAQQPPKGQAQASNGA

SEQ ID NO: 40336 - protein, 573 aa, Homo sapiens
  DOMAIN (359)..(376): D12 CLASS N6 ADENINE-SPECIFIC DNA METHYLTRANSFERASE SIGNATURE domain identified by eMATRIX, accession number PR00505A, p-value= 7.128e-09, raw score of 14.15
DKIRFRGHKRDDFLDLAESPNASDTECSDEIPLKVPRTSPRDSEELRDPAGPGTLIMATGVQDFNRTEFDRLNEIKGHLEIALLEKHFLQEELRKLREETNAEMLRQELDRERQRRMELEQKVQEVLKARTEEQMAQQPPKGQAQASNGAERRSQGLSSRLQKWFYERFGEYVEDFRFQPEENTVETEEPLSARRLTENMRRLKRGAKPVTNFVKNLSALSDWYSVYTSAIAFTVYMNAVWHGWAIPLFLFLAILRLSLNYLIARGWRIQWSIVPEVSEPVEPPKEDLTVSEKFQLVLDVAQKAQNLFGKMADILEKIKNLFMWVQPEITQKLYVALWAAFLASCFFPYRLVGLAVGLYAGIKFFLIDFIFKRCPRLRAKYDTPYIIWRSLPTDPQLKERSSAAVSRRLQTTSSRSYVPSAPAGLGKEEDAGRFHSTKKGNFHEIFNLTENERPLAVCENGWRCCLINRDRKMPTDYIRNGVLYVTENYLCFESSKSGSSKRNKVIKLVDITDIQKYKVLSVLPGSGMGIAVSTPSTQKPLVFGAMVHRDEAFETILSQYIKITSAAASGGDS

SEQ ID NO: 40337 - protein, 185 aa, Homo sapiens
  DOMAIN (36)..(57): PROTEIN REPEAT DOMAIN TPR NUCLEA domain identified by eMATRIX, accession number PD00126A, p-value=7.517e-09, raw score of 22.53
  DOMAIN (29)..(130): TPR Domain domain identified by PFam, accession name TPR, E- value=6e-18, PFam score of 73.1
VDDFVEGERTECAEPPRDEPPADGALKRAEELKTQANDYFKAKDYENAIKFYSQAIELNPSNAIYYGNRSLAYLRTECYGYALGDATRAIELDKKYIKGYYRRAASNMALGKFRAALRDYETVVKVKPHDKDAKMKYQECNKIVKQKAFERAIAGERGWPEGLLPGQIGRRRSSWGWGHSLGILW

SEQ ID NO: 40338 - protein, 44 aa, Homo sapiens
  misc_feature (1)...(44): Xaa = X or * as defined in Table 2
MCDLVLXQIHSQQNGGSNQQXGVSCQFGPDVTKAFLEEKQLGMM

SEQ ID NO: 40339 - protein, 17 aa, Homo sapiens
MVGLGWGSPPSPAILCL

SEQ ID NO: 40340 - protein, 88 aa, Homo sapiens
LYFNIFNYRHKIAGEGGEPQPSPCLSGGGAMQMRGAGQPLGPTPPRGRPPHRMPRLCPQPQLLHLLLLCPGSRPSGQPLTLPLPPLQT

SEQ ID NO: 40341 - protein, 63 aa, Homo sapiens
LTLFGLKLLYPEGLLTGQRGRRWSSWVWGHSLRILWGARPRGGMGPSGCPAPLICMARPPLKQ

SEQ ID NO: 40342 - protein, 45 aa, Homo sapiens
  DOMAIN (1)..(44): Ser/Thr protein phosphatase domain identified by PFam, accession name STphosphatase, E-value=2e-09, PFam score of 35.6
MNQIYGFEGEVKAKYTAQMYELFSEVFEWLPLAQCINGKVTCRHE

SEQ ID NO: 40343 - protein, 15 aa, Homo sapiens
MQMRGAEKTVTQRPP

SEQ ID NO: 40344 - protein, 97 aa, Homo sapiens
  DOMAIN (25)..(80): Serine/threonine specific protein phosphatases proteins domain identified by eMATRIX, accession number BL00125D, p-value= 1.333e-39, raw score of 33.11
  DOMAIN (2)..(86): Ser/Thr protein phosphatase domain identified by PFam, accession name STphosphatase, E-value=1e-37, PFam score of 133.5
  misc_feature (1)...(97): Xaa = X or * as defined in Table 2
XPMCDLLWSDPQPQNGRSISKRGVSCQFGPDVTKAFLEENNLDYIIRSHEVKAEGYEVAHGGRCVTVFSAPNYCDQMGNKASYIHLQGSDLRPQFHH

SEQ ID NO: 40345 - protein, 140 aa, Homo sapiens
RKNLVAKFQRLAEPSMEAVVKVKPHDKDAKMKYQECNKIVKQKAFERAIAGDEHKRSVVDSLDIESMRRSIRSPKLRLMIPNGRVAVVADSRVSPVHMPAIEGEYSGPKLEDDKVTITFMKGLMQWYKDQKKLHQKCAYQ

SEQ ID NO: 40346 - protein, 295 aa, Homo sapiens
  DOMAIN (102)..(148): Serine/threonine specific protein phosphatases proteins domain identified by eMATRIX, accession number BL00125B, p-value= 5.091e-36, raw score of 21.48
  DOMAIN (60)..(154): Ser/Thr protein phosphatase domain identified by PFam, accession name STphosphatase, E-value=6.5e-45, PFam score of 158.4
ISHFSPGLLVFVCVPCVCLVHDSSWSTVNSYPSPHLCPLPTSLSRPLPLRWPLFFQTEKITVCGDTHGQFYDLLNIFELNGLPSETNPYIFNGDFVDRGSFSVEVILTLFGFKLLYPDHFHLLRGNHETDNMNQIYGFEGEVKAKYTAQMYELFRRGVRVGSRWAQCINGQSADSLHGGPTRAIELDKKYIKGYYRRAASNMALGKFRAALRDYETVVKVKPHDKDAKMKYQECNKIVKQKAFERAIAGDEHKRSVVDSLDIESMTIEDEYSGPKLEDGKVTISFMKELMQWYKD

SEQ ID NO: 40347 - protein, 714 aa, Homo sapiens
  DOMAIN (356)..(384): SERINE/THREONINE PHOSPHATASE FAMILY SIGNATURE domain identified by eMATRIX, accession number PR00114A, p-value=4.600e- 25, raw score of 14.44
  DOMAIN (321)..(696): Ser/Thr protein phosphatase domain identified by PFam, accession name STphosphatase, E-value=4.6e-92, PFam score of 319.3
MAMAEGERTECAEPPRDEPPADGALKRAEELKTQANDYFKAKDYENAIKFYSQAIELNPSNAIYYGNRSLAYLRTECYGYALGDATRAIELDKKYIKGYYRRAASNMALGKFRAALRDYETGGATRELGAASLQLVAGLRSTSLQSVEPAQTLSWLLAAGLGWRVDFRPENGDKRSGRLRMAVAVMTWLSKGHELQGSVMSNQGQSVLGWGRAPAITLVHDTDGILLIGPSEHEAATLYLLVVKVKPHDKDAKMKYQECNKIVKQKAFERAIAGDEHKRSVVDSLDIESMTIEDEYSGPKLEDGKVTISFMKELMQWYKDQKKLHRKCAYQILVQVKEVLSKLSTLVETTLKETEKITVCGDTHGQFYDLLNIFELNGLPSETNPYVSFSAEPPSPHLHPQPQPQVCTEWEEPLPGKDVTLERRGLAMLGHQGQIFNGDFVDRGSFSVEVILTLFGFKLLYPDHFHLLRGNHETDNMNQIYGFEGEVKAKYTAQMYELFSEVFEWLPLAQCINGKVLIMHGGLFSEDGVTLDDIRKIERNRQPPDSALPRRMGFVPLARNSGSEPQFPHLRLGPVHLLHGAVMASTVVTMVRGEGTVTAEHTCPYLFNGRSISKRGVSCQFGPDVTKAFLEENNLDYIIRSHEVKAEGYEVAHGGRCVTVFSAPNYCDQMGNKASYIHLQGSDLRPQFHQFTAVPHPNVKPMAYANTLLQLGMM

SEQ ID NO: 40348 - protein, 500 aa, Homo sapiens
  DOMAIN (405)..(460): Serine/threonine specific protein phosphatases proteins domain identified by eMATRIX, accession number BL00125D, p-value= 7.517e-37, raw score of 33.11
  DOMAIN (207)..(468): Ser/Thr protein phosphatase domain identified by PFam, accession name STphosphatase, E-value=1.4e-106, PFam score of 367.5
  misc_feature (1)...(500): Xaa = X or * as defined in Table 2
FPGRRFRAEGERTECAEPPRDEPPADGALKRAEELKTQANDYFKAKDYENAIKFYSQAIELNPSNAIYYGNRSLVYLRTECYGYSLXDATRAIELDKKYIMGYYRRAASNMALGKFRAALRDYETVVKVKPHDKDAKMKYQECNKIVKPKAFERAIAGDEHKRSVVDSLDIESMTIEDEYSXPKLEDGKVTISFMKELMQWYKDQKKLHRKCAYQILVQVKEVLSKLSTLVETTLKETEKITVCGDTHGQFYDLLNIFELNGLPSETNPYIFNGDFVDRGSFSVEVILTLFGFKLLYPDHFHLLRGNHETDNMNQIYGFEGEVKAKYTAQMYELFSEVFEWLPLAQCINGKVLIMHGGLFSEDGVTLDDIRKIERNRQPPDSGPMCDLLWSDPQPQNGRSISKRGVTCQFGPDVTKAFLEENNLDYIIRSHEVKAEGYEVAHGGRCVTVFSAPNYCDQMGNKASYIHLQGSDLRPQFHQFTAVPHPNVKPMAYANTLSAA

SEQ ID NO: 40349 - protein, 31 aa, Homo sapiens
VIEHLVSQDGLDFLNLVICPPRPPKVLGLQA

SEQ ID NO: 40350 - protein, 25 aa, Homo sapiens
  misc_feature (1)...(25): Xaa = X or * as defined in Table 2
EPTNENSPIALSRXVNSQKISMKAV

SEQ ID NO: 40351 - protein, 88 aa, Homo sapiens
EMESRSIARMECSGSISAHCKLRLPGSHHSPASVSRVAGTTGTCHHARLIFLYFLLETGFHCVSHDGLHLLNLVICPPRPPKVLGLQA

SEQ ID NO: 40352 - protein, 235 aa, Homo sapiens
  misc_feature (1)...(235): Xaa = X or * as defined in Table 2
ADAWAWPHCCTVLLXCLGFAGVLFGWPSLVFVFKNEDYFKDLCGPDAGPIGNATGQADCKAQDERFSLIFTLGSFMNNFMTFPTGYIFDRFKTTVARLIAIFFYTTATLIIAFTSAGSAVLLFLAMPMLTIGGILFLITNLQIGNLFGQHRSTIITLYNGAFDSSSAVFLIIKLLYEKGISLRVLLHLHLCLQYLACSTHFPPDAPGAHPIPTAPQLQLWPVPWEWHHKGREGNS

SEQ ID NO: 40353 - protein, 470 aa, Homo sapiens
MKRGNGSRRRRRLLSENNGVFHIESFAQHPKDEKSRKLLGPIEHWTFVVEKGKGKPEETGTVSMVLEDGEVEADIKQGSVVGCCNVPPDAARERAEKAYMDGEQPTLILLLWDLKKQIPVHKGTHSVGRHQTELLPNNGGGVVRFFYTTATLIIAFTSAGSAVLLFLAMPMLTIGGILFLITNLQIGNLFGQHRSTIITLYNGAFDSSSAVFLIIKLLYEKGISLRASFIFISVCSTWHVARTFLLMPRGHIPYPLPPNYSYGLCPGNGTTKEEKETAEHENRELQSKEFLSAKEVSTYTNAFAFTQFGVLCAPWNGLLMDRLKQKYQKEARKTGSSTLAVALCSTVPSLALTSLLCLGFALCASVPILPLQYLTFILQVISRSFLYGSNGRFLTLAFPSEHFGKLFGLVMALSAVVSLLQFPIFTLIKGSLQNDPFYVNVMFMLAILLTFLPPLSGISGMPYLERKSLW

SEQ ID NO: 40354 - protein, 26 aa, Homo sapiens
  misc_feature (1)...(26): Xaa = X or * as defined in Table 2
XERRRRFNINDRIKGVGLLIPKANDL

SEQ ID NO: 40355 - protein, 538 aa, Homo sapiens
  DOMAIN (11)..(29): GLIADIN AND LMW GLUTENIN SUPERFAMILY SIGNATURE domain identified by eMATRIX, accession number PR00208A, p-value=6.671e- 09, raw score of 12.59
  misc_feature (1)...(538): Xaa = X or * as defined in Table 2
RMQQQAVMHYMQQQQQQQQQQLGGPPTPAINTPVHFQSPPPVPGEVLKVGPVLACPPPCPHXSQPPLEPLPYLSETYGNKFAAHISPAQALRNPHQPPPQGCELDTCCPPPLATVLPISPMAMLHIGSNPEREVSEELASGHAACRARAHCCASETMPNTVLLARVGWVCKGSREGGTHCGSEPGESGVTSSSCPADLTQKRELTGTASLYPCAFEYPTPPSFSPSLPAAPLPASLFLVLTWAGXKANDLXVRFLRGRVMGLGGQQLTRLSALLQKSRELENHSRRLEMTNKQLWLRIQVWSXTWTSLVTLTLNLAPGPKGQYFRMFCFGNKQSSASLSNTYQLEVLFCETLILAPTLLAPSSLMAHLELALKAIVTLKVPHVTSVQWAWPMQAHSTSTLTSLAQQVVKQELPSEEGPGEALMLGAEVPDPEPLPALPPQAPLPLPTQPPSPFHHLDFSHSLSFGGREDEGPPGYPEPLAPGHGSPFPSLSKKDLDLMLLDDSLLPLASDPLLSTMSPEASKASSRRSSFSMEEGDVL

SEQ ID NO: 40356 - protein, 548 aa, Homo sapiens
  DOMAIN (369)..(390): Myc-type 'helix-loop-helix' dimerization domain proteins. domain identified by eMATRIX, accession number BL00038B, p-value= 8.091e-11, raw score of 16.97
  DOMAIN (338)..(391): Helix-loop-helix DNA-binding domain identified by PFam, accession name HLH, E-value=6.7e-07, PFam score of 36.4
GGVTAGARAPARGSVTAEAAARAGRGSGRGADGGREGRTGRASLVARGRSRPGAGGGHSLRARHPNLRQVAGAGGARAADRLTFRAREPAPAATMASRIGLRMQLMREQAQQEEQRERMQQQAVMHYMQQQQQQQQQQLGGPPTPAINTPVHFQSPPPVPGEVLKVQSYLENPTSYHLQQSQHQKVREYLSETYGNKFAAAHISPAQALRNPHQPPPQGCELDTCCPPPLATVLPISPMAMLHIGSNPERELDDVIDNIMRLTMSLGYINPEMQMPNTVLLARLPLSSSHLNVYSSDPQVTASLVGVTSSSCPADLTQKRELTDAESRALAKERQKKDNHNLIERRRRFNINDRIKELGMLIPKANDLDVRWNKGTILKASVDYIRRMQKDLQKSRELENHSRRLEMTNKQLWLRIQELEMQARVHGLPTTSPSGMNMAELAQQVVKQELPSEEGPGEALMLGAEGPDPEPLPALHRQAPLPLPTQAPSPFHSHWDFSHSLSFGGRVDDWSPGLPRTPGAGAWLPIPQPVQEGSGPHAPGRLTATAGL

SEQ ID NO: 40357 - protein, 24 aa, Homo sapiens
  misc_feature (1)...(24): Xaa = X or * as defined in Table 2
TPLAPPPKPVRRRLKSRRXIKARS

SEQ ID NO: 40358 - protein, 67 aa, Homo sapiens
SWSGSRDVTGALLVAAAVASEAVGSLRVAEGGPNTLLLQVCRGSKGTSATCPFRPFPPLWSLLGTGR

SEQ ID NO: 40359 - protein, 164 aa, Homo sapiens
MPRAEPRATLGEQEKAGLPLGAWRLYLLRHFRKQTELRRSGSRDVTGALLVAAAVASEAVGSLRVAEGGPNTLFFQVLRSWPWCNKELKTMEERKVKRRSPKSFSAHCTQVVNAKKNAIPKGHNQRQEKIWKKYSNEYQMINSSFEDFLRINYQNGVFVMEEFN

SEQ ID NO: 40360 - protein, 794 aa, Homo sapiens
  DOMAIN (594)..(768): RhoGEF domain identified by PFam, accession name RhoGEF, E- value=3.4e-11, PFam score of 50.6
KQTELRRSGSRDVTGALLVAAAVASEAVGSLRVAEGGPNTLLLQVLRSWPWCNKATQTMEERKVKRRSPKSFSAHCTQVVNVQKKMSIPVSKSTGFSNPASQVNFTSRPKVKKEVMKEKTKPQGLEEGQRHSSQLPIQHSFLTDVSRCSRKMERGLLSLLNDFHSWKTFKHFGNECSIEQMEHVSGELQEKLARLNLELYGELEELPEDKRKTASDSNLDRLLSDCREMIPAFRTFLKRHDKTIVTKMLSLPELLLYPSRRFEEYLNLLYAVRLHTPAEHVDRGDLTTAIDQIKKYKGYIDQTLSEVNRYLIRVQDVAQLHCCDEEISFSLSVACRSVDSASPESLPEMQNSQATLALLNQNLHFNKITRLYEHIHDLSLFLFNDALLVSSRGTSHTPFERTSKTTYQFIASVALHRLLIENIPDSKYVKNAFILQGPKYKWICATEIEDDKFLWLSVLRNAIKSSMEKACGLVFTGQFMFDTMGMTNILNNQDTAQALADGLMELSKEDSKCGKKIKDVEGNVIPTKCDPKTTFSLFMKERNVVEDNSWDTKSRLSKNDLNFEALINLERILQKDSAEKRARVVRELLQSERKYVQILEIVRDVYVAPLKAALSSNRAILSAANIQIIFCDILQILSLNRQFLDNLRDRLQEWGPAHCVGEIVTKFGSQLNTYTNFFNNYPVILKTIEKQWETFSERSSSSQTLTQFDSNIAPADPDTAIVHPVPIRMTPSKIHMQEMELKRTGSESMVPASASCEASGNLESWQKAKWEPVCHMSKGTTPLAPPPKTCSEED

SEQ ID NO: 40361 - protein, 98 aa, Homo sapiens
LTNSAREKIKKANQLLKVKSLELEQPPASQHQKSMHKDLAAILEEKKQGGPAIGRRNRMDRFSRLLRVGLAALPGACSRCCAEGGAPYSPAETLEHLY

SEQ ID NO: 40362 - protein, 122 aa, Homo sapiens
LCGNLMLVEVIPKEPLSFSVFHYKNPKLQHTVQVAAGPWPLRKAPLCNDECCVPCGFLRAFWPHGHFPSHQRVLLVVESSCLTVYISSWQAKSQQDKRLWVLHLKRLILENHAAKIPAKVGH

SEQ ID NO: 40363 - protein, 679 aa, Homo sapiens
MISVLRAGGALRNIWTDHQIRQALFPSRRSPQENEDDEDDYQMFVPSFSSSDLNSTRLCEDSTSSRPCSWHMGQMESTETSSSGHRIVRRASSAGESNTCPPEIGTSDRTRELQNSPKTEGQEEMTPFGSSIELTIDDIDHVYDNISYEDLKLMVAKREEAESTPSKSARDSVRPKSTPELAFTKRQAGHNSLQLSEDEAPYHQATPDHGYLSLLYDSPSGNLSMPHKPVSDKLSEEVDEIWNDLENYIKKNEDKARDRLLAAFPVSKDDVPDRLHAESTPELSRDVGRSVSTLSLPESQALLTPVKSRAGRASRANCPFEEDLISKEGSFMSLNRLSLASEMPLMDNPYDLANSGLSQTDPENPDLGMEATDKTKSRVFMMARQYSQKIKKANQLLKVKSLELEQPPWLPSWKRRSKEGPPLDVVIEWTDSPDFSVWALPLCQELALGAVRKEEHLIHLPKKSTPRQLSAACSVPSLQTSDPLPGSVQRCSVVVSQPNKENWCQDHLYNSLGRKGISAKSQPYHRSQSSSSVLINKSMDSINYPSDVGKQQLLSLHRSSRCESHQDLLPDIADSHQQGTEKLSDLTLQDSQKVVVVNRNLPLNAQIATQNYFSNFKETDGDEDDYVEIKSEEDESELELSHNRRRKSDSKFVDADFSDNVCSGNTLHSLNSPRTPKKP

SEQ ID NO: 40364 - protein, 1113 aa, Homo sapiens
  DOMAIN (52)..(144): PH domain identified by PFam, accession name PH, E-value=1.2e -06, PFam score of 28.8
YDVVLDAIDTMQRVAWHINDMKRKHEHAVRLQEIQSLLTNWKGPDLTSYGELVLEGTFRIQRAKNERTLFLFDKLLLITKKRDDTFTYKAHILCGNLMLVEVIPKEPLSFSVFHYKNPKLQHTVQAKSQQDKRLWVLHLKRLILENHAAKIPAKAKQAILEMDAIHHPGFCYSPEGGTKALFGSKEGSAPYRLRRKSEPSSRSHKVLKTSETAQDIQKVSREEGSPQLSSARPSPAQRNSQPSSSTMISVLRAGGALRNIWTDHQIRQALFPSRRSPQENEDDEDDYQMFVPSFSSSDLNSTRLCEDSTSSRPCSWHMGQMESTETSSSGHRIVRRASSAGESNTCPPEIGTSDRTRELQNSPKTEGQEEMTPFGSSIELTIDDIDHVYDNISYEDLKLMVAKREEAESTPSKSARDSVRPKSTPELAFTKRQAGHSKGSLYAQTDGTLSGGEASSQSTHELQAVEENIYDTIGLPDPPSLGFKCSSLKRAKRSTFLGLEADFVCCDSLRPFVSQDSLQLSEDEAPYHQATPDHGYLSLLYDSPSGNLSMPHKPVSDKLSEEVDEIWNDLENYIKKNEDKARDRLLAAFPVSKDDVPDRLHAESTPELSRDVGRSVSTLSLPESQALLTPVKSRAGRASRANCPFEEDLISKEGSFMSLNRLSLASEMPLMDNPYDLANSGLSQTDPENPDLGMEATDKTKSRVFMMARQYSQKIKKANQLLKVKSLELEQPPASQHQKSMHKDLAAILEEKKQGGPAIGARIAEYSQLYDQIVFRESPLKIQKDGWASPQESSLLRSVSPSQVHHGSGDWLLHSTYSNGELADFCLPPEQDLRSRYPTFEINTKSTPRQLSAACSVPSLQTSDPLPGSVQRCSVVVSQPNKENWCQDHLYNSLGRKGISAKSQPYHRSQSSSSVLINKSMDSINYPSDVGKQQLLSLHRSSRCESHQDLLPDIADSHQQGTEKLSDLTLQDSQKVVVVNRNLPLNAQIATQNYFSNFKETDGDEDDYVEIKSEEDESELELSHNRRRKSDSKFVDADFSDNVCSGNTLHSLNSPRTPKKPVNSKLGLSPYLTPYNDSDKLNDYLWRGPSPNQQNIVQSLREKFQCLSSSSFA

SEQ ID NO: 40365 - protein, 150 aa, Homo sapiens
  misc_feature (1)...(150): Xaa = X or * as defined in Table 2
LKGHADAVLAAGTEAVKCHLLLGRHLLRLMASSGIHHKIVNXRQYAKFSHGXIQKFXXWQHRQQFRGKETEMASAVDLPVTLTETEANFPPEYEKFWKTVENNPQDFTGWVYLLQYVEQENHLMAARKAFDRFFIHYPYCYGYWKKYADL

SEQ ID NO: 40366 - protein, 364 aa, Homo sapiens
  misc_feature (1)...(364): Xaa = X or * as defined in Table 2
MRQKRKEEKELFHNKDCEKKEKNSWERMRHTGTEKMASESETPTGAISQYKERMPSVTHSPEIMDLSELRPFSKPEIALTEALRLLADEDWDKQLHALEQLLASCYSGTRHTTSSFHCGHQGMWWHPEAWRCLATAEPQREPGKSTISSHSSLWNXQLHSHKLQSVPGLKVKNLRSGVSRAAVVCLSDLFTYLKKSMDQELDTTVKVLLHKAGESNTFIREDVDKALRAMVNNVTPARAVVSLINGGQSHLHIAVRRCTAQHLSDVLEFMEPERILSAAKDMAERILPAAAKFAQDSSQETRYYGRKMLFFMMCHPNFEKMLEKYVPSKDLPYIKDSVRNLQQKVCGKSLFYKQLYKQSLFLHP

SEQ ID NO: 40367 - protein, 55 aa, Homo sapiens
QRAGSPHGRRSLSAPRLPGLPLWRHLRSPSARRCTCGSPFLGWASSCCAQFLPGP

SEQ ID NO: 40368 - protein, 267 aa, Homo sapiens
  misc_feature (1)...(267): Xaa = X or * as defined in Table 2
MKFQYKEDHPFEYRKKEGEKIRKKYPDRVPVIVEKAPKARRAXSGQEEVPSALXPYCCLPDGAGLGTCSHAMPEPPTHSMGTCAARASPTSTTPCSTAPSPIDREEQTTQGLRNASARRGTGRQLHLQSPVWDPLGEASWAPESSGNVESISSSGIVNIPISTLCLAQGFSRFVNAPIDTLYLAALVGPWRTFMSSSGIVNTPIGTLYLAQGMVHYHKSPFPTCLVQMSKIESLPKEKGAQGVAAGLPSSLAPTCPPPDPSMKLHNN

SEQ ID NO: 40369 - protein, 146 aa, Homo sapiens
  misc_feature (1)...(146): Xaa = X or * as defined in Table 2
ALLKQHLRTVHRSAPPIRGHCCVSSSWTXGAGKLSLEHTEEPSDVPSHLLYRWSISSAITEVFQALASSIPPRSQXMSTPRRNESTRHSPGPSIEEVKECMQDDNXYLQGTSYAPAGSQSYSAKLCFQVLKRNTCPPEKPNPASER

SEQ ID NO: 40370 - protein, 826 aa, Homo sapiens
  DOMAIN (15)..(61): kw TRANSCRIPTASE REVERSE II ORF2 domain identified by eMATRIX, accession number DM01354O, p-value=1.000e-40, raw score of 8.73
  DOMAIN (48)..(324): Reverse transcriptase domain identified by PFam, accession name rvt, E-value=8.4e-80, PFam score of 278.5
  misc_feature (1)...(826): Xaa = X or * as defined in Table 2
RPITGAEIVAIINSLPTKKSPGLDGFTAEFYQRYKEELVPFLLKLFQSIEKEGILPNSFYEASIILIPKPGRDTTKKENFRPISLMNIDAKILNKILANRIQQHIKKLIHHDQVGFIPGMQGWFNIRKSINVIQHINRTKDKNHMIISIDAEKAFDKIQQRLHAKNSRINXVLMETYFKIIRAIYDKPIANIILNGQKLEAFPLKTGTRQGCPLSPLLFNIVLEVLARAIRQEKEIKGIQLGKEEVKLSLFADDMIVYLENPIVSAQNLLKLISNFSKVSGYKINVQKSQAFLYTNNRQTESQIMSELPFTIASKRIKYLGIQLTRDVKDLFKENYKPLLKEIKEDTNKWKNIPCSWVGRINIVKMAILPKVIYRFNAIPIKLPMTFFTELEKTTLKFIWNQKRAHIAKSILSQKNKAGGITLPDFKLYYKATITKTAWYWYQNRDIDQWNRTEPSEITPHTYNCLIFDKPEKNKKWGKDSLFNKWCWENWLAICRKLKLDPFLTPYTKINSRWIKDLNVRPKTIKTLEENLGITIQNIGMGKDFMSKTPKAMATKDKIDKWDLIKLKSFCTAKETTIRVNRQPTKWEKIFATYSSDKGLISRIYNELNQIYKKKTNNPIKKWAKDMNRHFSKEDIYAAKKHMKKCSSSLAIREMQIKTTMRYHLTPVRMAIIKKSGNNRCWRGCGEIGTLLHCWWDCKLVQPLWKSVWRFLRDLELEIPFDPAIPLLGIYPNDYKSCCYKDTCTRMFIAALFTIAKTWNQPKCPTMIDWIKKMWHIYTMEYYAAIKNDEFMSFVGTWMKLEIIILSKLSQEQKTKHRIFSLIGGN

SEQ ID NO: 40371 - protein, 88 aa, Homo sapiens
  misc_feature (1)...(88): Xaa = X or * as defined in Table 2
STVCCFLLRFIGGGFRHIPLSVDLWIHYIKILKETLDPGDPETNNTIRGYVEHXYXNVFYDINNYSDVDNRAHESXAGSLTSIPLLKK

SEQ ID NO: 40372 - protein, 131 aa, Homo sapiens
  DOMAIN (54)..(73): INHIBIN BETA B CHAIN SIGNATURE domain identified by eMATRIX, accession number PR00671A, p-value=9.160e-10, raw score of 8.36
  misc_feature (1)...(131): Xaa = X or * as defined in Table 2
GDLQPTAALWEPLSGLAKAGARSLSLQGGVGGEARARTRAARGACGPAAAPGGHGLGGHALGAAGRRLLALGRLGTCSLPCLSLPPSPWAPVPPEPPRXVPPHAPGRPVPSATQRLRSAGAQRRTGRQLHL

SEQ ID NO: 40373 - protein, 131 aa, Homo sapiens
  misc_feature (1)...(131): Xaa = X or * as defined in Table 2
LRDCKYTHRHCVSSSRFINTPINTLCLAQGLXVHQSTLCIXLLWVGGLGGNFCVQYSVSNXSDGDVENLCIXLRDCKCTNQHPVKTGHFGSTNQQDVGWGQIKRIKAGLPEPASGNSLGSPSTLWELCSLQ

SEQ ID NO: 40374 - protein, 134 aa, Homo sapiens
  DOMAIN (67)..(94): Protamine P1 proteins domain identified by eMATRIX, accession number BL00048, p-value=6.513e-09, raw score of 6.39
  misc_feature (1)...(134): Xaa = X or * as defined in Table 2
IPQGNYRVIARNAKTQRGGNLTLTKPSGIGRRGENSSISSWQRQQKGKKETGSQRKRQRGRDKKLERKRDRHRSQREGKKERKRQRRSQRERWKXXRKNSVPIPLKARVNFSLPTQGNSLLDLNPYLPLKQLKK

SEQ ID NO: 40375 - protein, 1677 aa, Homo sapiens
MRGEKNYYFRGAAGDHGSCPTTTSPLASALLMPSEAVSSSWSESGGGLSGGDEEDTRLLQLLRTARDPSEAFQALQAALPRRGGRLGFPRRKEALYRALGRVLVEGGSDEKRLCLQLLSDVLRGQGEAGQLEEAFSLALLPQLVVSLREENPALRKDALQILHICLKRSPGEVLRTLIQQGLESTDARLRASTALLLPILLTTEDLLLGLDLTEVIISLARKLGDQETEEESETAFSALQQIGERLGQDRFQSYISRLPSALRRHYNRRLESQFGSQVPYYLELEASGFPEDPLPCAVTLSNSNLKFGIIPQELHSRLLDQEDYKNRTQAVEELKQVLGKFNPSSTPHSSLVGFISLLYNLLDDSNFKVVHGTLEVLHLLVIRLGEQVQQFLGPVIAASVKVLADNKLVIKQEYMKIFLKLMKEVGPQQVLCLLLKHLKHKHSRVREEVVNICICSLLTYPSEDFDLPKLSFDLAPALVDSKRRVRQAALEAFAVLASSMGSGKTSILFKAVDTVELQDNGDGVMNAVQARLARKTLPRLTEQGFVEYAVLMPSSAGGRSNHLAHGADTDWLLAGNRTQSAHCHCGDHVRDSMHIYGSYSPTICTRRVLSAGKGKNKLPWENEQPGIMGENQTSTSKDIEQFSTYDFIPSAKLKLSQGMPVNDDLCFSRKRVSRNLFQNSRDFNPDCLPLCAAGTTGTHQTNLSGKCAQLGFSQICGKTGSVGSDLQFLGTTSSHQEKVYASLNFGSKTQQTFGSQTECTSSNGQNPSPGAYILPSYPVSSPRTSPKHTSPLIISPKKSQDNSVNFSNSWPLKSFEGLSKPSPQKKLVSQKSSDPTGRNHGENSQEKPPVQLTPALVRSPSSRRGLNGTKPVPPIPRGISLLPDKADLSTVGHKKKEPDDIWKCEKDSLPIDLSELNFKDKDLDQEEMHSSLRSLRNSAAKKRAKLSGSTLDLESPDSAMKLDLTMDSPSLSSSPNINSYSESGVYSQESLTSSLSTTPQGKRIMSDIFPTFGSKPCPTRLSSAKKKISHIAEQSPSAGSSSNPQQISSFDFTTTKALSEDSVVVVGKGVFGSLSSAPATCSQSVISSVENGDTFSIKQSIEPPSGIYGRSVQQNISSYLDVENEKDAKVSISKSTYNKMRQKRKEEKELFHNKDCEKKEKNSWERMRHTGTEKMASESETPTGAISQYKERMPSVTHSPEIMDLSELRPFSKPEIALTEALRLLADEDWEKKIEGLNFIRCLAAFHSEILNTKLHETNFAVVQEVKNLRSGVSRAAVVCLSDLFTYLKKSMDQELDTTVKVLLHKAGESNTFIREDVDKALRAMVNNVTPARAVVSLINGGQRYYGRKMLFFMMCHPNFEKMLEKYVPSKDLPYIKDSVRNLQQKGLGEIPLDTPSAKGRRSHTGSVGNTRSSSVSRDAFNSAERAVTEVREVTRKSVPRNSLESAEYLKLITGLLNAKDFRDRINGIKQLLSDTENNQDLVVGNIVKIFDAFKSRLHDSNSKVNLVALETMHKMIPLLRDHLSPIINMLIPAIVDNNLNSKNPGIYAAATNVVQALSQHVDNYLLLQPFCTKAQFLNGKAKQDMTEKLADIVTELYQRKPHATEQKVLVVLWHLLGNMTNSGSLPGAGGNIRTATAKLSKALFAQMGQNLLNQAASQPPHIKKSLEELLDMDNFK

SEQ ID NO: 40376 - protein, 315 aa, Homo sapiens
ECPIIYMRSSFYAVKLARHLFKIQKNLPKSRKVLLEAIERDKENTKLYLNLLEMEYSGDLKQNEENILNCFDKAVHGSLPIKMRITFSQRKVEFLEDFGSDVNKAVTEVREVTRKSVPRNSLESAEYLKLITGLLNAKDFRDRINGIKQLLSDTENNQDLVVGNIVKIFDAFKSRLHDSNSKVNLVALETMHKMIPLLRDHLSPIINMLIPAIVDNNLNSKNPGIYAAATNVVQALSQHVGDTSRMFRRTKSYDSLLTTLIGAGIRILFSSCQEETADLLKELSLVEQRKNVGIHVPTVVNSNKTHFKKSPCMHK

SEQ ID NO: 40377 - protein, 1047 aa, Homo sapiens
MNFMKTAQDCVSGQKSGRRTSLWANVRYYGRKMLFFMMCHPNFEKMLEKYVPSKDLPYIKDSVRNLQQKGLGEIPLDTPSAKGRRSHTGSVGNTRSSSVSRDAFNSAERAVTEVREVTRKSVPRNSLESAEYLKLITGLLNAKDFRDRINGIKQLLSDTENNQDLVVGNIVKIFDAFKSRLHDSNSKVNLVALETMHKMIPLLRDHLSPIINMLIPAIVDNNLNSKNPGIYAAATNVVQALTILHKSSVFKWKSKTGHDRKSLLDIVTELYQRKPHATEQKVLVVLWHLLGNMTNSGSLPGAGGNIRTATAKLSKALFAQMGFVNAPIDTLYLATLVGPWRTFMSSSGIVNTPIGTLYLAQGTLTHAHRALDQAAVARVAAAVLAVGTEAVKCHLRLGRHRLRLMASSGIHHKIWSNPRSLTEDNMQNSHMDEYRNSSNGSTGNSSEVVVEHPTDFSTEIMNVTEMEQSPDDSPNVNASTEETEMASAVDLPVTLTETEANFPPEYEKFWKTVENNPQDFTGWVYLLQYVEQENHLMAARKAFDRFFIHYPYCYGYWKKYADLEKRHDNIKPSDEVYRRGLQAIPLSVDLWIHYINFLKETLDPGDPETNNTIRGTFEHAVLAAGTDFRSDRLWEMYINWENEQGNLREVTAIYDRILGIPTQLYSHHFQRFKEHVQNNLPRDLLTGEQFIQLRRELASVNGHSGDDGPPGDDLPSGIEDITDPAKLITEIENMRHRIIEIHQEMFNYNEHEVSKRCVISCALYEEFWIKYAKYMENHSIEGVRHVFSRACTIHLPKKPMVHMLWAAFEEQQGNINEARNILKTFEECVLGLAMVRLRRVSLERRHGNLEEAEHLLQDAIKNAKSNNESSFYAVKLARHLFKIQKNLPKSRKVLLEAIERDKENTKLYLNLLEMEYSGDLKQNEENILNCFDKAVHGSLPIKMRITFSQRKVEFLEDFGSDVNKLLNAYDEHQTLLKEQDSLKRKAENGSEEPEEKKAHTEDTTSSSTQMIDGDLQANQAVYNYSAWYQYNYQNPWNYGQYYPPPPT

SEQ ID NO: 40378 - protein, 151 aa, Homo sapiens
  DOMAIN (63)..(78): WILM'S TUMOUR PROTEIN SIGNATURE domain identified by eMATRIX, accession number PR00049D, p-value=1.153e-09, raw score of 0.00
PPTGCGTGPIGCSGPGTGPVPVPVAPPFPQEGARTQPGSAGAPGARGLRRAETLVALGAVGPGLPTPPPPPPPAPQSQAPGGPEAQPFGSRVCVLASCCAHRPRPAPSAPPAPPAPPESTVRPAPPTRPGESSYSSISHAFTATNFPFGTA

SEQ ID NO: 40379 - protein, 170 aa, Homo sapiens
MATLAGEGRPAGWVPWISLLAVGVLIIWKLWPAPPIGGELQFAFVCFLLGNVYEAFEHWKRLLNLLCRSEAAMKKHATRLWINLISILHHQLGEIPADFFVDIVSQHNFLTSTLQVFFSSACSIAVDATLRKKAEKFQAHLTKKFRWDFAEEPEDCAPVVEELPEGIEMG

SEQ ID NO: 40380 - protein, 546 aa, Homo sapiens
  DOMAIN (250)..(275): FRIZZLED PROTEIN SIGNATURE domain identified by eMATRIX, accession number PR00489C, p-value=2.250e-28, raw score of 9.29
  DOMAIN (119)..(475): Frizzled/Smoothened family membrane region domain identified by PFam, accession name Frizzled, E-value=7.6e-226, PFam score of 758.6
MDYIRTDLTTAAPSPPRRLGPPPPGEQPPSGSGHVRPPGARPPHRGGGRGGGGGDPAAPPARGGGGGGKARPPGGGAAPCEPGCQCRAPMVSVSSERHPLYNRVKTGQIANCALPCHNPFFSQDERAFTVFWIGLWSVLCFVSTFATVSTFLIDMERFKYPERPIIFLSACYLFVSVGYLVRLVAGHEKVACSGGAPGAGGAGGAGGAAAGAGAAGAGAGGPGGRGEYEELGAVEQHVRYETTGPALCTVVFLLVYFFGMASSIWWVILSLTWFLAAGMKWGNEAIAGYSQYFHLAAWLVPSVKSIAVLALSSVDGDPVAGICYVGNQSLDNLRGFVLAPLVIYLFIGTMFLLAGFVSLFRIRSVIKQQDGPTKTHKLEKLMIRLGLFTVLYTVPAAVVVACLFYEQHNRPRWEATHNCPCLRDLQPDQARRPDYAVFMLKYFMCLVVGITSGVWVWSGKTLESWRSLCTRCCWASKGAAVGGGAGATAAGGGGGPGGGGGGGPGGGGGPGGGGGSLYSDVSTGLTWRSGTASSVSYPKQMPLSQV

SEQ ID NO: 40381 - protein, 157 aa, Homo sapiens
  DOMAIN (91)..(139): Intermediate filaments proteins domain identified by eMATRIX, accession number BL00226B, p-value=7.136e-36, raw score of 23.86
  DOMAIN (8)..(157): Intermediate filament proteins domain identified by PFam, accession name filament, E-value=6.7e-72, PFam score of 252.3
  misc_feature (1)...(157): Xaa = X or * as defined in Table 2
HSSLNSVDKARALEADNGELEVNIRDWYQKQGPGASRDYSHYYTTIQDLRDKILGATIENSRIVLQIDNARLAADDFRTKFETEHALRMSVEADINGLRRVLDELTLARTDLEMHIEGLKEELAYLKKNHEEEISTLRGQVGGQVTVXVDSAPGTDL

SEQ ID NO: 40382 - protein, 428 aa, Homo sapiens
  DOMAIN (82)..(130): Intermediate filaments proteins domain identified by eMATRIX, accession number BL00226B, p-value=5.235e-19, raw score of 23.86
  DOMAIN (56)..(275): Intermediate filament proteins domain identified by PFam, accession name filament, E-value=6e-75, PFam score of 262.4
NGMWSNWNPLIPQRWEEKFQSPSRHRGSSSRGVSLSSSGGYSGILSGSNGLLAGNEKLTMHNLNNCLASYLDKVHALEAANSKLEFGLSVWVLDEVTLARTDLEAQIKGLKEELAYLKKKHEEEINALRGQVGDQVHILSDRQSQYEIMAKQNWKDAEAWFTSWTEELNQEVTGHIEQLQISRSEVTDLQCTLQGLEIELHSQLSVKAPLEGTLAETEACFGAQLVQIQALISSIEAQLGDVRADGEWQNQEYQRLLEQEIATYRSLLEGQEDHYNNLSTSKVQIPECTVSNVPVASVCLQTLEPHSLASNPGSSTYSVTFGQYINLSVSPFLLLEATIAGAKKAATGNNSTQFSPPAERQLCIFTCPRTIPLTTASHAGSYGPKLVKYTSLRPLPMAAPTESNPALPSSRATAHRLLPAPGHFPSGL

SEQ ID NO: 40383 - protein, 66 aa, Homo sapiens
  misc_feature (1)...(66): Xaa = X or * as defined in Table 2
XSPLVTFSFQLGPGFFRDALEPCLVEPGGVSGGEKLHSHLVQHIGYGKAAAQVLRAGTGRRNVERL

SEQ ID NO: 40384 - protein, 724 aa, Homo sapiens
MSVDKAELCGSLLTWLQTFHVPSPCASPQDLSSGLAVAYVLNQIDPSWFNEAWLQGISEDPGPNWKLKVSNLKMVLRSLVEYSQDVLAHPVSEEHLPDVSLIGEFSDPAELGKLLQLVLGCAISCEKKQDHIQRIMTLEESVQHVVMEAIQELMTKDTPDSLSPETYGNFDSQSRRYYFLSEEAEEGDELQQRCLDLERQLMLLSEEKQSLAQENAGLRERMGRPEGEGTPGLTAKKLLLLQSQLEQLQEENFRLESGREDERLRCAELEREVAELQHRNQALTSLAQEAQALKDEMDELRQSSERAGQLEATLTSCRRRLGELRELRRQVRQLEERNAGHAERTRQLEDELRRAGSLRAQLEAQRRQVQELLGQRQEEAMKAEKWLFECRNLEEKYESVTKEKERLLAERDSLREANEELRCAQLQPRGLTQADPSLDPTSTPVDNLAAEILPAELRETLLRLSLLENKRLCRQEAADRERQEEKLQRHLEDANRARHGLETQHRLNQQAAYSELRAQVEDLQKALQEQGGKTEDAISILLKRKLEEHLQKLHEADLELQRKREYIEELEPPTDSSTARRIEELQHNLQKKDADLRAMEERYRRYVDKARMVMQTMEPKQRPAAGAPPELHSLRTQLRERDVRIRHLEMDFEKSRSQREQEEKLLISAWYNMGMALQQRAGEEPAPAPCPSHFLAQQRAGNQILARGPLGRLASLNLRPTDKH

SEQ ID NO: 40385 - protein, 229 aa, Homo sapiens
ASFLTKKLNIGGKRVNLAIWKKIMRGGEQARLPALPNPKPDGSPQVKSGTPAHPLWKNPVPTGNPKISRQLRQAGSGESGLQKRKSRCSSSKSDQQVIYLKEQKVKGHGCCVHIPTLLWNTESGNAEPQTLAPAQNAKSSLLSEALSSNVMVYMLLNLHSYESGGQHLNRDTATRKFKPEILMNSWRPTRGQLQNVKLLEGPIKGGLPLPAPPWAFPPGNPRGSHRVKG

SEQ ID NO: 40386 - protein, 368 aa, Homo sapiens
  DOMAIN (235)..(278): 1 kw MIND INHIBITOR DIVISION CONTROL domain identified by eMATRIX, accession number DM01756B, p-value=4.822e-15, raw score of 22.91
  DOMAIN (200)..(304): ParA family ATPase domain identified by PFam, accession name ParA, E-value=1.8e-23, PFam score of 91.4
MKLMETLNQCINAGHEMTKAIAIAQFNDDSPEARKITRRWRIGEAADLVGVSSQAIRDAEKAGRLPHPDMEIRGRVEQRVGYTIEQINHMRDVFGTRLRRAEDVFPPVIGVAAHKGGVYKTSVSVHLAQDLALKGLRVLLVEGNDPQGTASMYHGWVPDLHIHAEDTLLPFYLGEKDDVTYAIKPTCWPGLDIIPSCLALHRIETELMGKFDEGKLPTDPHLMLRLAIETVAHDYDVIVIDSAPNLGIGTINVVCAADVLIVPTPAELFDYTSALQFFDMLRDLLKNVDLKGYAESVGAKHYHTSAKQNKGIEELFLDLCKRMIETAQVDERAKGNGSSQPGTARRGVQIIDDEPQAQTSGGGCCSSG

SEQ ID NO: 40387 - protein, 225 aa, Homo sapiens
  DOMAIN (20)..(64): GTP-binding nuclear protein ran proteins domain identified by eMATRIX, accession number BL01115A, p-value=3.559e-12, raw score of 10.22
  DOMAIN (21)..(225): Ras family domain identified by PFam, accession name ras, E- value=4.4e-81, PFam score of 282.8
MAAAGGGGGGAAAAGRAYSFKVVLLGEGCVGKTSLVLRYCENKFNDKHITTLQASFLTKKLNIGGKRVNLAIWDTAGQERFHALGPIYYRDSNGAILVYDITDEDSFQKVKNWVKELRKMLGNETCLCIVGNKIDLEKERHVSIQEAESYAESVGAKHYHTSAKQNKGIEELFLDLCKRMIETAQVDERAKGNGSSQPGTARRGVQIIDDEPQAQTSGGGCCSSG

SEQ ID NO: 40388 - protein, 489 aa, Homo sapiens
  DOMAIN (215)..(258): 'Homeobox' domain proteins domain identified by eMATRIX, accession number BL00027, p-value=9.400e-29, raw score of 26.43
  DOMAIN (201)..(257): Homeobox domain identified by PFam, accession name homeobox, E-value=3.8e-22, PFam score of 87.0
MALVCLGADITRTRRPTAGRGGKRDRSSPRFRTARRVARRLGQEPVASPGDLPGERRGWGVCGHIAGTQSRALQRPHGAPQGREAEVQEPEPPLVPQALLLVRGPAAAREEAVQPPKEEVTQRPGGHSSPDVFAHLKGPRPVVEIRIEAGVWLLVFSAISPESSTGPATQVLSKYVLKSEWMGECPSPGRGSATKRKKKQRRNRTTFNSSQLQALERVFERTHYPDAFVREELARRVNLNEARVQVWFQNRRAKFRRNERAMLASRSASLLNTVPPYSPGSSGPATPGVNMANSIASLRLKAKEFSLHHSQVRGLGWQDPTSPDGAFRAAFWMQWRHGDLSGGTELLPWLDSEETGHIPVLQMRKLTQRGETPCPGTHSKQVAQEDPRTRLEVAVGGEGCLRKERNRSSGSPHSLQGLEEVQMPLEASSFDIHEGRPRSLPEEKAALPVASERVFGSVGKRLESLPKALYPGAKEETLASSSCWDCAGL

SEQ ID NO: 40389 - protein, 81 aa, Homo sapiens
TVPPYSPGSSGPATPGVNMANSIASLRLKAKEFSLHHSQVRGLGWQDPTSPDGAFRAAFWMQWRHGDLSGGTELLPWLDSE

SEQ ID NO: 40390 - protein, 85 aa, Homo sapiens
MWSIRTVECDSAFRRKETLTHATRVSPVDVTLSEIRRSQNGKYCRIPLTYEIPRMQALHLPKSLENESTWDPKVSPAVNPGVFQS

SEQ ID NO: 40391 - protein, 186 aa, Homo sapiens
  DOMAIN (116)..(159): 'Homeobox' domain proteins domain identified by eMATRIX, accession number BL00027, p-value=8.200e-29, raw score of 26.43
  DOMAIN (102)..(158): Homeobox domain identified by PFam, accession name homeobox, E-value=3.4e-22, PFam score of 87.2
AAAAFALDKPALGPGPPPPPPALGPGDCAQARKNFSVSHLLDLEEVAAAGRLAARPGARAEAREGAAREPSGGSSGSEAAPQDGECPSPGRGSAAKRKKKQRRNRTTFNSSQLQALERVFERTHYPDAFVREELARRVNLSEGRVQVWFQNRRAKFRRNERAMLASRSASLLKSYSQEAAIEQPVA

SEQ ID NO: 40392 - protein, 129 aa, Homo sapiens
  DOMAIN (65)..(104): 'Homeobox' antennapedia-type protein domain identified by eMATRIX, accession number BL00032B, p-value=2.080e-10, raw score of 10.83
  DOMAIN (62)..(122): Homeobox domain identified by PFam, accession name homeobox, E-value=2.9e-12, PFam score of 54.2
MWSIRTVECDSAFRRKETLTHATRVSPVDVTLSEIRRSQNGKYCECPSPGRGSAAKRKKKQRRNRTTFNSSQLQALERVFERTHYPDAFVREELARRVNLSEARVQAPAYLENEDHVWFQNRGAKVPQE

SEQ ID NO: 40393 - protein, 197 aa, Homo sapiens
  DOMAIN (79)..(134): Domain present in ZO-1 and Unc5-like netrin receptors domain identified by eMATRIX, accession number PF00791B, p-value=1.578e- 09, raw score of 28.49
MEKEKGNDDGIPDQGNFLDFSEHFNQLEFLETHGHLIPTGAQSLWVGNSEEDEEQDEKNEEWYQLQEKTMEKDPSKLLLWAAEKNRLTTVQRLLSEKAAHVNTRDEDEYTPLHRAAYSGHHDADINAQTKGLLAPLHLAAGNRDSKDTLELLLVNCYIKPGLKNNLEETAFDIARRTSVYHYLFEIVEGCANSSPQS

SEQ ID NO: 40394 - protein, 240 aa, Homo sapiens
  DOMAIN (142)..(152): Ank repeat proteins domain identified by eMATRIX, accession number PF00023B, p-value=2.500e-10, raw score of 14.20
  DOMAIN (109)..(209): Ank repeat domain identified by PFam, accession name ank, E- value=1.3e-24, PFam score of 95.2
KMEKEKGNDDGIPDQENSLDFSEHFNQLELLETHGHLIPTGTQSLWVGNSDEDEEQDDKNEEWYRLQEKKMEKDPSRLLLWAAEKNRLTTVRRLLSEKATHVNTRDEDEYTPLHRAAYSGHLDIVQELIAQGADVHAVTVDGWTPLHSACKWNNTRVASFLLQHDADINAQTKGLLTPLHLAAGNRDSKDTLELLLMNRYVKPGLKNNLEETAFDIARRTSIYHYLFEIVEGCTNSSPQS

SEQ ID NO: 40395 - protein, 87 aa, Homo sapiens; identical to SEQ ID NO: 38944
  misc_feature (1)...(87): Xaa = X or * as defined in Table 2

SEQ ID NO: 40396 - protein, 153 aa, Homo sapiens; identical to SEQ ID NO: 35668
  DOMAIN (69)..(80): RNase H domain identified by eMATRIX, accession number PF00075F, p-value=8.159e-09, raw score of 12.87
  DOMAIN (19)..(144): RNase H domain identified by PFam, accession name rnaseH, E- value=9.8e-08, PFam score of 33.0

SEQ ID NO: 40397 - protein, 249 aa, Homo sapiens
  DOMAIN (205)..(244): Integrase Zinc binding domain identified by PFam, accession name Integrase_Zn, E-value=4.5e-14, PFam score of 50.8
GDPSLTSHWQLTKEAEAELQLIEKQVHKAQINRIDPEKIPDLLIFSTQHSTGVIVQEQGLVEWLFLPHTNSRTLTPYVDQIATMIGNGRTQIVKLHGYYPGKIIVPLMKAQIQQAFINSLTWQTHLADFVVILDNHFPKMKLFQFLKLTNWILPKITKFKPIKGAENVFTDGSSNGKASYSELKGLLTEGNQVAEHLVATAISNARHFHNLTHVNAAGLKRRYSITWKEAKAIIQQCPTCQMLYSSSFT

SEQ ID NO: 40398 - protein, 358 aa, Homo sapiens
  DOMAIN (293)..(304): RNase H domain identified by eMATRIX, accession number PF00075F, p-value=3.864e-09, raw score of 12.87
  DOMAIN (243)..(357): RNase H domain identified by PFam, accession name rnaseH, E- value=8e-17, PFam score of 69.3
MGQVWVLVHSTLEPFHTNNEEEAKYNEVTEEVTEQVCLPAKANAAKEKEVHPYPSAPLNYFEEKEWPDPPDLSFLEDTGGDPSLTSHWQLTKEAEAELQLIEKQVHKAQINRIDPEKIPDLLIFSTQHSPTGVIVQEQDLVEWFFLPHTDSWTLTPYLDQITTMIGIGRTRIVKLHGYDPGKIIVPLMKAQIQQAFINSLTWQTHLADFVGILDNHFPKMKLFQFLKLTNCILPKITKFKPIEGAENVFTDGSSNGKASYFGSKRKVFQTPYTSAQKVELVAVIELLTAFDMPINVISDSSYVVHSTQLIENAQLRFHTEEKLMTLFTQLQTAVRSRMHRFYITHIRARSYTSSRTFD

SEQ ID NO: 40399 - protein, 370 aa, Homo sapiens
  DOMAIN (183)..(201): RNase H domain identified by eMATRIX, accession number PF00075J, p-value=9.308e-13, raw score of 15.78
  DOMAIN (254)..(305): Integrase DNA binding domain identified by PFam, accession name integrase, E-value=1.2e-13, PFam score of 58.8
MPQNSLEECALELGKKSLQENVNNFPKTKLFQFLKLTNWILPKITKFKPIEGAENVFTDGSSNGKASYFGLKGKVFQTPYTAAQKVELVAVIEVLTAFDMPVSMISDSTYVVHSTQLTENAQLRLHTDEQLMTLFSQLQTAVRCFAVMGIPASRKTDNVPGYTIQTLATFFSMWNIKHITGIPYNSQGQAIVGRINLSLKQRLQKQKEGNREYRTPQMQLNLALLALIFLSLSKGQMLSAAEQHLQKPPAKTEAEQLIWWRDTKTRSWEIGKIITCGRGYACVSPGQNQQPIWTPSRHLKPYHEPDAKKRFREDPEDPPSCSHVKTDAEEDPNCHEQHPSNTAIHLRSDQEAVTDGRRKPEESGTTSHNE

SEQ ID NO: 40400 - protein, 181 aa, Homo sapiens
  DOMAIN (121)..(143): RECOVERIN FAMILY SIGNATURE domain identified by eMATRIX, accession number PR00450C, p-value=6.400e-10, raw score of 12.22
  DOMAIN (41)..(178): EF hand domain identified by PFam, accession name efhand, E- value=9.9e-17, PFam score of 69.0
RRAPGTAPDAGPELRSLHNLLGPACIFLRKGFAENRQPVQLREAFREFDKDKDGYINCRDLGNCMRTMGYMPTEMELIELSQQINMNLGGHVDFDDFVELMGPKLLAETADMIGVKELRDAFREFDTNGDGEISTSELREAMRKLLGHQVGHRDIEEIIRDVDLNGDGRVDFEAPFPGSSN

SEQ ID NO: 40401 - protein, 101 aa, Homo sapiens
HKARLTVNVLPSFTKRSHDITIRTTTMARLECAATGHPNPQIAWQKDGGTDFPAARERRMHVMPDDRTAPRETEGATAVGTKKLGFVYLSSCHTNLYGKER

SEQ ID NO: 40402 - protein, 50 aa, Homo sapiens
FFFFLSTLPVSLSFPGLNFWMFGNYRTLFGNKIKSVAKRAFSGLEGLEHL

SEQ ID NO: 40403 - protein, 43 aa, Homo sapiens
  misc_feature (1)...(43): Xaa = X or * as defined in Table 2
XETVVPPDVPSYLSSQGTLSDRQETVVRTEGGPQANGHIESNX

SEQ ID NO: 40404 - protein, 445 aa, Homo sapiens
  DOMAIN (98)..(133): RECEPTOR INTERLEUKIN-1 PRECURSOR domain identified by eMATRIX, accession number PD02870D, p-value=9.330e-09, raw score of 15.74
  DOMAIN (6)..(115): Immunoglobulin domain identified by PFam, accession name ig, E-value=7.3e-14, PFam score of 49.7
MPDDDVFFITDVKIDDAGVYSCTAQNSAGSISANATLTVLETPSLVVPLEDRVVSVGETVALQCKATGNPPPRITWFKGDRPLSLTERHHLTPDNQLLVVQNVVAEDAGRYTCEMSNTLGTERAHSQLSVLPAAGCRKDGTTVGIFTIAVVSSIVLTSLVWVCIIYQTRKKSEEYSVTNTDETVVPPDVPSYLSSQGTLSDRQETVVRTEGGPQANGHIESNGVCPRDASHFPEPDTHSVACRQPKLCAGSAYHKEPWKAMEKAEGTPGPHKMEHGGRVVCSDCNTEVGLLLQGTSLPPPACVQRQHTAKCAKWPGAGWGVTKSIFPHSPVAAGLPLGPAPECQGSLYPSNHDRMLTAVKKKPMASLDGKGDSSWTLARVYHPDSTELQPASSLTSGSPERAEAQYLLVSNGHLPKACDASPESTPLTGQLPGKQRVPLLLAPKS

SEQ ID NO: 40405 - protein, 810 aa, Homo sapiens
  DOMAIN (28)..(42): LEUCINE-RICH REPEAT SIGNATURE domain identified by eMATRIX, accession number PR00019B, p-value=6.850e-10, raw score of 11.36
  DOMAIN (183)..(439): Immunoglobulin domain identified by PFam, accession name ig, E-value=1.4e-28, PFam score of 97.1
LAELSSLSVLRLSHNSISHIAEGAFKGLRSLRVLDLDHNEISGTIEDTSGAFSGLDSLSKLTLFGNKIKSVAKRAFSGLEGLEHLNLGGNAIRSVQFDAFVKMKNLKELHISSDSFLCDCQLKWLPPWLIGRMLQAFVTATCAHPESLKGQSIFSVPPESFVCDDFLKPQIITQPETTMAMVGKDIRFTCSAASSSSSPMTFAWKKDNEVLTNADMENFVHVHAQDGEVMEYTTILHLRQVTFGHEGRYQCVITNHFGSTYSHKARLTVNVLPSFTKTPHDITIRTTTMARLECAATGHPNPQIAWQKDGGTDFPAARERRMHVMPDDDVFFITDVKIDDAGVYSCTAQNSAGSISANATLTVLETPSLVVPLEDRVVSVGETVALQCKATGNPPPRITWFKGDRPLSLTERHHLTPDNQLLVVQNVVAEDAGRYTCEMSNTLGTERAHSQLSVLPAAGCRKDGTTVGIFTIAVVSSIVLTSLVWVCIIYQTRKKSEEYSVTNTDETVVPPDVPSYLSSQGTLSDRQETVVRTEGGPQANGHIESNGKASVTVKQSSAVTVSLGAGGGLQVFTGQVPGIRWGKLGEVEGGVCPRDASHFPEPDTHSVACRQPKLCAGSAYHKEPWKAMEKAEGTPGPHKMEHGGRVVCSDCNTEVDCYSRGQAFHPQPVSRDSAQPSAPNGPEPGGSDQEHSPHHQCSRTAAGSCPECQGSLYPSNHDRMLTAVKKKPMASLDGKGDSSWTLARLYHPDSTELQPASSLTSGSPERAEAQYLLVSNGHLPKACDASPESTPLTGQLPGKQRVPLLLAPKS

SEQ ID NO: 40406 - protein, 54 aa, Homo sapiens
RNQGQARTNSTSAQKNERESIRQKLALGSFFDDGPGIYTSCSKSGKPSLSSRLE

SEQ ID NO: 40407 - protein, 66 aa, Homo sapiens
WPRNFIPAVAKVGSQAFPPGLNEELVQLLLIRDELHTEQDAMLVDIEDLTRHAESQQKHMAEKMPA

SEQ ID NO: 40408 - protein, 383 aa, Homo sapiens
RDQRGYRDDRSPAREPGDVSARTRSGGGGGRSATTAMPPPVPNGNLHQHDPQDLRHNGNVVVAGRPSCSRGPRRAIQKPQPAGGRRSGRGPAAGGLCLQPPDGGTCVPEEPPVPPMDWEALEKHLAGLQFREQEVRNQGQARTNSTSAQKNERESIRQKLALGSFFDDGPGIYTSCSKSGKPSLSSRLQSGMNLQICFVNDSGSDKDSDADDSKTETSLDTPLSPMSKQSSSYSDRDTTEEESESLGWTWDFLYKGKRNLQAEAKMALAMAKPMAKMQVEVEKQNRKKSPVADLLPHMPHISECLMKRSLKPTDLRDLIMGQLQVIVNDFISQIKSLNEEWVQLLLIQDELHTEQDAMLVDIEDLTRHAESQQKHMAEKMPAK

SEQ ID NO: 40409 - protein, 168 aa, Homo sapiens
RGPRTEPQDPCCPRAAAGARPSGPGQDLPRLRLPGSPGAPGAGGGAGTAAGRKGPGLPEEAAADGAWRLGEGWAAASEEPAPPGPHTSQRGASPPQPGWARAAGLSNQPTKDRIFGGSHKAAPQASADSPTSLQCGAAGHCPKASRRALGDNPETEATSSLSPTEWLQ

SEQ ID NO: 40410 - protein, 120 aa, Homo sapiens
  DOMAIN (58)..(109): Neuromodulin (GAP-43) proteins domain identified by eMATRIX, accession number BL00412D, p-value=9.775e-13, raw score of 16.54
  misc_feature (1)...(120): Xaa = X or * as defined in Table 2
MGSRLNWMEVIPEQCTYLHVLIKCMFFWNRQHRGGIQEKAALKQRTPRIFHEKNTPCYLLVQEXHRSNAFGEEEEEEEEEEEEEEEEEEEEEEEEEEEEEEEEEEEEEEEEEEETLFSNM

SEQ ID NO: 40411 - protein, 39 aa, Homo sapiens
QKKKKKKKKKKKKKKKKKKKKKKKKKEKKKKEEEEEANL

SEQ ID NO: 40412 - protein, 189 aa, Homo sapiens
  DOMAIN (53)..(81): 303 kw ACTIVATING RAN GTPASE ISOZYME domain identified by eMATRIX, accession number DM01269A, p-value=1.969e-09, raw score of 23.35
ILVWSIVPEGKILWGTKQQRRDSRTQRLLKKSPWRAKQSVWEEERKKKNKEEKEEKEKKEKEKKEKEKEKKRKKKRKKKKKKKKKKKKKKKKKKKKKKEEEEEEEEDEEEEEEEEEKKKKEKEEKVKEKKKEEKKQEEKEEENEEEEKEEEEKEEKSSSSKYSLLDSVPTLLISLWVILNTLPELLQPA

SEQ ID NO: 40413 - protein, 620 aa, Homo sapiens
  DOMAIN (126)..(171): kw TRANSCRIPTASE REVERSE II ORF2 domain identified by eMATRIX, accession number DM01354N, p-value=1.000e-40, raw score of 13.17
  DOMAIN (210)..(485): Reverse transcriptase domain identified by PFam, accession name rvt, E-value=2.2e-81, PFam score of 283.8
DAFKAVCRGKFIALNAHKRKQERSKIDTLTSQLKELEKQEQTHSKASRRQEITKIRAELKEIETQKTLQKINESRSWFFERINKIDRPLARLIKKKREKNQIDTIKNDKGDITTDPTEIQTTIREYYKHLYANKLENLEEMDTFLDTYTLPRLNQEEVESLNRPITGAEIVAIINSLSTKKSPGPDGFTAEFYQRYKEELVPFFLKLFQSIEKEGILPNSFYEASIILIPKPGRDTTKKENFRPISLMNIDAKILNKILANQIQQHIKKLIHHDQVGFIPGMQGWFNIRKSINVIQHINRAKDKNHMIVSIDAEKAFDKIQQPFMLKTINKIGIDGMYFKIIRAIYDKTTANIILNGQKLEAFPLKTGTRQGCPLSPLLFNIVLEFLARAIRQEKEIKGIQLGKEEVKLSLFADDMIVDLENPIVSAQNLLKLISNFSKLSGYKINVQKSQAFLYTNNRQTESQIMSELPFTIASKRIKYLGIQLTRDVKDLFKENYKPLLKEIKEDTKKWKNTPCSWVGRINIVKMAILPKVIYRFNAIPIKLPMTFFTELEKTTLKFIWNQKRARIAKSILSQKNKAGGITLPDFKLYYKATVTKTAWYWYQNRDIDQWNRTEPSEIT

SEQ ID NO: 40414 - protein, 506 aa, Homo sapiens
  DOMAIN (106)..(153): kw TRANSCRIPTASE REVERSE II ORF2 domain identified by eMATRIX, accession number DM01354V, p-value=1.000e-40, raw score of 12.97
KLAQDRDALSHRSYSIVLEVLARAIRQKKEIKGIQLGKEEVKLSLFADDMIVYLENPIVSAQNLLKLISNFSKVSGYKINVQKSQAFLYTKNRQTESQIMSELPFTIASKRIKYLGIQLTRDVKDLFKENYKPLLKEIKEDTNKWKNIPCSWVGRINIVKMAILPKVIYRFNAIPIKLPMTFFTELEKTTLKFIWNQKRARIAKSILSQKNKVGGITLPDFKLYYKATVTKTAWYWYQNRVIDQWNRKEPSEITPHTYNYLIFDKPEKNKQWGKDSLFNKWCWENWLAICRKLKLDPFLTPYTKINSRWIKDLNVRPKTIKTLEENLGITIQDIGMGKDFMSKTPKAMATKAKIDKWDLIKLKSFCTAKETTIRVNRQPTTWEKIFTTYSSDKGLISRIYNELKQIYKKKTNNPIKKWVKDMNRHFSKEDIYAAKKHMKKCSSSLAIREMQIKSFQRKDQAAIFAILQPPLVITRQTGSGVDLKQTPTDLKLRDLTVRRKMNKQKE

SEQ ID NO: 40415 - protein, 497 aa, Homo sapiens
  DOMAIN (23)..(68): kw TRANSCRIPTASE REVERSE II ORF2 domain identified by eMATRIX, accession number DM01354N, p-value=1.000e-40, raw score of 13.17
  DOMAIN (107)..(382): Reverse transcriptase domain identified by PFam, accession name rvt, E-value=3.7e-87, PFam score of 303.0
AIKNDKGDITTNPTEIQTTIREYYKHLYANKLENLEEMDKFLDTCTFPRLNQEEVEYLKRPITGSEIVAIISSLPTKKSPGPDGFTAEFYQRYKEELVPFLLKLFQSIEKEGILPNSFYEASIILIPKPGRDTTKKENFRPISLMNIDAKILNKILANRIQQHIKKLIHHEQVGFNPGMQGWFNIRKSTNVIQHINRTKDKNHMIISIDAEEAFDKIQQPFMLKTLNKLGIDGTYFKIIRAIYDKPTANIILNGQKLEAFPLKTGTRQGCPLSPLLFNIVLEVLARAIRQEKEIKGIQLGKEEVKLSLFADDMTVYLENPIVSAQNLLKLISNFSKVSGYKINVQKSQAFLYTNNRQTESQIMSELPFTIASKRIKYLGIQLTRDVKDLFKENYKPLLEEIKEDPNKWKNIPCSWVGRIYIVKMAILPKCSSSAKGQTASASGSLTPLPPDGERPPKTGRQTPHTGELRLASGQYPAGMELPEEGAGSNLCCSAATT

SEQ ID NO: 40416 - protein, 205 aa, Homo sapiens
  DOMAIN (145)..(192): kw TRANSCRIPTASE REVERSE II ORF2 domain identified by eMATRIX, accession number DM01354V, p-value=1.000e-40, raw score of 12.97
LSLMHTFKNRLGNIIQDIGMGKDFTTKTAKAMATKAKIDKWDLIKLKSFCRAKETTIRVNRKPTEWEKIFAIYPSDKGLISRIYKEFKQIYKKKTTPSKAQNLLKLISNFSKVSGYKINVQKSQAFLYTNNRQTESQIMSELPFTIASKRIKYLGIQLTRDVKDLFKENYKPLLKEIKEDTNKWKNIPCSWVGRINIVKMAILPK

SEQ ID NO: 40417 - protein, 380 aa, Homo sapiens
  DOMAIN (91)..(136): kw TRANSCRIPTASE REVERSE II ORF2 domain identified by eMATRIX, accession number DM01354N, p-value=1.000e-40, raw score of 13.17
  DOMAIN (175)..(333): Reverse transcriptase domain identified by PFam, accession name rvt, E-value=1.5e-05, PFam score of 9.2
LEKQELTHSKASRRQEITKIRAELKEIETQKTLQKINESRSWFFEKINKIDRPLARLIKKKREKNQTDTIKNDKGDIITDPTEIQTTIREYYKHLYTNKLENLEEMDKFLDTYVLPRLNQEEVESLNRPITGSEIEAIINSLPTKKSPGPDGFTAEFYQRYKEELVPFLLKLSQSIEKERILPNSSYEASIILIPKPGRDTTKKENFRPISLMNIDAKILNKILANRTQQHIKKLIHHEQVGCIPGMQGWFNIRKSINVIQHINRTKDKNHMIISIDAEKLISKFSKVSGHKINVQKSQAFLYTDNRQTESQIMSELPFTIASKRIKYLGIQLTRDVKDLFKENYKPLLNEIKEDTNKWKNIPCSWVGRINIVKMALLPK

SEQ ID NO: 40418 - protein, 716 aa, Homo sapiens; identical to SEQ ID NO: 34824
  DOMAIN (37)..(83): kw TRANSCRIPTASE REVERSE II ORF2 domain identified by eMATRIX, accession number DM01354O, p-value=1.000e-40, raw score of 8.73
  DOMAIN (70)..(345): Reverse transcriptase domain identified by PFam, accession name rvt, E-value=5.1e-89, PFam score of 309.1

SEQ ID NO: 40419 - protein, 486 aa, Homo sapiens; identical to SEQ ID NO: 38995
  DOMAIN (234)..(281): kw TRANSCRIPTASE REVERSE II ORF2 domain identified by eMATRIX, accession number DM01354V, p-value=1.000e-40, raw score of 12.97
  DOMAIN (1)..(247): Reverse transcriptase domain identified by PFam, accession name rvt, E-value=1.8e-06, PFam score of 22.1

SEQ ID NO: 40420 - protein, 416 aa, Homo sapiens; identical to SEQ ID NO: 35763
  DOMAIN (141)..(188): kw TRANSCRIPTASE REVERSE II ORF2 domain identified by eMATRIX, accession number DM01354V, p-value=1.000e-40, raw score of 12.97
  DOMAIN (1)..(154): Reverse transcriptase domain identified by PFam, accession name rvt, E-value=0.0044, PFam score of -25.8

SEQ ID NO: 40421 - protein, 540 aa, Homo sapiens
  DOMAIN (35)..(78): kw TRANSCRIPTASE REVERSE II ORF2 domain identified by eMATRIX, accession number DM01354T, p-value=1.000e-40, raw score of 9.48
  DOMAIN (2)..(157): Reverse transcriptase domain identified by PFam, accession name rvt, E-value=1.4e-06, PFam score of 23.8
LNKLGIDGTYLKIIRAIYDKPTANIILNGQKLEAFPLKTGTRQGCPLSPLLFNIVLEVLARAIRQEKEIKGIQLGKEEVKLSLFADDMIVYLENPIVSAQNLLKLISNFSKVSGYKINVQKSQAFLYTNNRQTESQIMGELPFTIASKRIKYLGIQLTRDVKDLFKENYKPLLKEIKEDTNKWKNIPCSWVGRINIVKMAILPKVIYRFNAIPIKLPMTFFTELEKTTLKFIWNQKRARIAKSILSQKNKAGGITLPDFKRYYKATVTKTAWYWYQNRDIDQWNRTEPSEIMPHIYNYLIFDKPEKNKQWEKDSLFNKWCCENWLAICRKLKLDPFLTPYTKINSRWIKDLNFRPKTIKTLEENLGITIQDIGVGKDFMSKTPKAMATKAKIDKWDLIKLKSFCTAKETTIRVNRQPTTWEKIFATYSSDKGLISRIYNELKQIYKKKTNNPIKKWAKDMNRHFSKEDIYAAKKHMKKCSSSLAIREMQIKTTMRYHLTPVRMAIIKKSGNNRCWRGCGEIGTLLHCWWDCKLVPAYSHS

SEQ ID NO: 40422 - protein, 472 aa, Homo sapiens
  DOMAIN (57)..(100): kw TRANSCRIPTASE REVERSE II ORF2 domain identified by eMATRIX, accession number DM01354T, p-value=1.000e-40, raw score of 9.48
  DOMAIN (1)..(179): Reverse transcriptase domain identified by PFam, accession name rvt, E-value=1.3e-14, PFam score of 62.0
MIILIDAEKAFDKIQQPFMLKTLSKLGTDGTYLKIIRAIYDKPTANIILNGQKLEAFPLKTGTRQGCPLSPLLFNIGLEDLARAIRQEKEIKGIQLGKEEVKLSLFADDMIVYLENPIVSAQNLLKLISNFSKVSGYKINVQKSQAFLYTNNRQTESQIMSELPFTIASKRIKYLGIQLTRDVKDLFKENYKPLLKEIKEDTNKWKNIPCSWVGRINIVKMAILPKRYRSMERTEPSEIMPHTYNYLIFDKPEKNKQWGKDSLFHKWCWENWLAVCRKLKLDPFLTPYTKINSRWIKDLNIRPKTIKTLEENLGITIQDIGVGKDFMSKAPKAMATKAKIDKWDLIKLKSFCTAKETTIRVNRQPTTWEKIFATYSSDKGLISGIYNELKQIYKKKTNNPIKKWAKDMNRHFSKEDIHAAKKHMKKCSSSLAIREMDIKTTMRYHLTPVRMAIIKKSGNNRCWRGCGEIGTL

SEQ ID NO: 40423 - protein, 754 aa, Homo sapiens; identical to SEQ ID NO: 32653
  DOMAIN (208)..(254): kw TRANSCRIPTASE REVERSE II ORF2 domain identified by eMATRIX, accession number DM01354O, p-value=1.000e-40, raw score of 8.73
  DOMAIN (241)..(418): Reverse transcriptase domain identified by PFam, accession name rvt, E-value=6.7e-11, PFam score of 49.6

SEQ ID NO: 40424 - protein, 597 aa, Homo sapiens; identical to SEQ ID NO: 38209
  DOMAIN (217)..(264): kw TRANSCRIPTASE REVERSE II ORF2 domain identified by eMATRIX, accession number DM01354V, p-value=1.000e-40, raw score of 12.97

SEQ ID NO: 40425 - protein, 499 aa, Homo sapiens
  DOMAIN (189)..(234): kw TRANSCRIPTASE REVERSE II ORF2 domain identified by eMATRIX, accession number DM01354N, p-value=1.000e-40, raw score of 13.17
  DOMAIN (204)..(452): Reverse transcriptase domain identified by PFam, accession name rvt, E-value=3.6e-48, PFam score of 173.5
MGDFNTPLSTLDRSTRQKVNKDTQELNSALHQADLIDIYRSLHAKSTEYTFFSAPHHTYSKIDHILGSKALLSKCKRTEIITNYLSDHSAIKLELRIKNLTQNRSTTWKLNNLLLNDYWIHDEMKAEIKMFFETNENKDTTYQNLWDAFKATASKTNKEKEKNQIDTIKNDKGDITTDPTEIQTTIREYYKHLYANKLENLEEMDKFLDTYTLPRLNQEEVESLNRPITGAEIVAIINSLPTKKSPGPDGFTAEFYQRYKEELHINRAKDKNHMIISIDAEKAFDKIQQPFMLKTLNKLGIDGTYFKIIRAIYDKPTANIILNGQKLEAFPLKTGTRQGCPLSPLLFNIVLEVLARAIRQEKEIKGIQLGKEEVKLSLFADDMTVYLENPIVSAQNLLKLISNFSKVSGYKINVQKSQAFLYTNNRQTESQIMSELPFTIASKRIKYLGIQLTRDVKDLFKENYKPLLKEIKEDTNKWKNIPCSWVGRINIMKMAILPK

SEQ ID NO: 40426 - protein, 532 aa, Homo sapiens; identical to SEQ ID NO: 39317
  DOMAIN (365)..(412): kw TRANSCRIPTASE REVERSE II ORF2 domain identified by eMATRIX, accession number DM01354V, p-value=1.000e-40, raw score of 12.97
  DOMAIN (105)..(378): Reverse transcriptase domain identified by PFam, accession name rvt, E-value=2e-07, PFam score of 35.6

SEQ ID NO: 40427 - protein, 574 aa, Homo sapiens
  DOMAIN (410)..(457): kw TRANSCRIPTASE REVERSE II ORF2 domain identified by eMATRIX, accession number DM01354V, p-value=1.000e-40, raw score of 12.97
  DOMAIN (185)..(423): Reverse transcriptase domain identified by PFam, accession name rvt, E-value=1.6e-06, PFam score of 23.1
MELKTKARELREECRSLRSRCDQLEERPNLRLIGVPESDGENGTKLENTLQDIIQENFPNLAKQVNVQIQEIQRTPQRYSLRRATPRHIIVRFTKVEMKEKMLRAAREKGRVTLKGKPIRLTADLSAETLQARREWGPIFNILKEKNFQPRISYPAKLSFISEGEIKSFTDKQMLRDFVTTRPALQELLKEALNMERNNRSWFFEKINKIDRPLARVIKKKREKNQIDAIKNDKEDITTNPTEIQTIIREYYKHLYPNKLENLEEMDTFLDTYTFPRLNQEEVESLNTSITGSEIVAIISIAYQPKKVQDQMDPQPNSTRVLEVLARAIRQEKEIKGIQLGKEEVKLSLFADDMIVYLENPIVSAQNLLKLISNFSKVSGYKINVQKSQAFLYTNNRQTESQIMSELPFTIASKRIKCLGIQLTRDVKDLFKENYKPLLKEIKEDTNKWKNIPCSWVGRINIVKMAILPKVIYRFNAIPIKLPMTFFTDLEKTTLNFIWNQKRARITKSILSQKNKAGGITLPDFKLYYTATVTKTAWYWYQNSMVLVPKQRYRSMEQNRALRNNAACLQLSDL

SEQ ID NO: 40428 - protein, 1056 aa, Homo sapiens; identical to SEQ ID NO: 38235
  DOMAIN (554)..(599): kw TRANSCRIPTASE REVERSE II ORF2 domain identified by eMATRIX, accession number DM01354N, p-value=1.000e-40, raw score of 13.17
  DOMAIN (158)..(378): AP endonuclease family 1 domain identified by PFam, accession name AP_endonucleas1, E-value=3.9e-65, PFam score of 229.8

SEQ ID NO: 40429 - protein, 361 aa, Homo sapiens
  DOMAIN (215)..(262): kw TRANSCRIPTASE REVERSE II ORF2 domain identified by eMATRIX, accession number DM01354V, p-value=1.000e-40, raw score of 12.97
  DOMAIN (40)..(228): Reverse transcriptase domain identified by PFam, accession name rvt, E-value=3.9e-05, PFam score of 3.3
MKRNEQNLKELWNYVKDQTYDCLDYLKETRRMEPRWENTLQDIIQENFPNLARQANIQIQEIQRTPVRYSTRKSTLKTHSHQILQDQNEGKNVKGSQRQGQVTYKGKPVRLTVGLSAETLQARRQLVLEVLARAIRQEKEIKGIQLGKEEVKLSLFADDMIVYLENPIVSAQNLLKLISNFSKVSGYKINVQKSQAFLYTNRQTESQIMSELPFTIASNRIKYLGIQLTRDVKDLFKENYKPLLKEIKEDTNKWKNIPCSWVGRINIVKMAILPKVIYRFNAIPIKLPMTFFTELEKTTLKFIWNQKRAHIAKAILSQKNKAGGITLPDFKLYYKATVTKTAWYRYQNRDIDQWNRTEPQK

SEQ ID NO: 40430 - protein, 195 aa, Homo sapiens
  DOMAIN (22)..(65): kw TRANSCRIPTASE REVERSE II ORF2 domain identified by eMATRIX, accession number DM01354T, p-value=1.000e-40, raw score of 9.48
  DOMAIN (1)..(144): Reverse transcriptase domain identified by PFam, accession name rvt, E-value=0.001, PFam score of -17.0
MGAIYDKPTANIILNGQKLEAFPLKTGIRQGCPLSLLLFNIVLEVLARAIRQEKEIKVIQVGKEEVKLSLFADDMIVYLEDPIISAPNLLKLISNFSKVSGYKINVQKSQAFLYTNNRQTESQIMSELPFTIASKRIKYLGIQLTRDVKDLFKENYKPLLKEKEDTNKWKNIPCSWVGRINIVKMAILPKPYVES

SEQ ID NO: 40431 - protein, 522 aa, Homo sapiens
  DOMAIN (95)..(142): kw TRANSCRIPTASE REVERSE II ORF2 domain identified by eMATRIX, accession number DM01354V, p-value=1.000e-40, raw score of 12.97
MDKFLDTYTLPRLNQEEVESLNRPITGAEIVAIINSLPTKKSPGPDGFTAEFYQRLISNFSKVSGYKINVQKSQAFLYTNNRQTESQIMSELPFTIASKRIKYLGIQLTRDVKDLFKENYKPLLNEIREDTNKWKNIPCSWVGRINIVKMAILPKVIYRFNAIPIKLPMTFFTELEETTLKFIWNQKRARIAKSILSQKNKAGGITLPDFKLYYKATVTKTAWYWYQNRDRDQWNRTEPSEIMPHIYNYLIFDKPEKNKQWGKDSLFNKWCWENWLAICRKLKLDPFLTPYTRINSRWIKDLHVRRKTIKTLEENLGNTIQDIGMGKDFMSKTPKAMATKAKIDKWDLIKLKSFCTAKETTIRVNRQPTKWEKIFATYSSDKGLISRIYNELKQIYKKKTNNPIKKWAKDMNRHFSKEDIYAAKKHMKKCSSSLAIREMQIKTTMRYHLTPVRMAIIKKSGNNRCWRRCGEIGTLLHCWWDCKPVQPLWKSVWRFLRDLELEIPFDPAIPLLGIYPKGYKSC

SEQ ID NO: 40432 - protein, 801 aa, Homo sapiens; identical to SEQ ID NO: 39481
  DOMAIN (74)..(119): kw TRANSCRIPTASE REVERSE II ORF2 domain identified by eMATRIX, accession number DM01354N, p-value=1.000e-40, raw score of 13.17
  DOMAIN (158)..(339): Reverse transcriptase domain identified by PFam, accession name rvt, E-value=1.5e-24, PFam score of 95.0

SEQ ID NO: 40433 - protein, 826 aa, Homo sapiens; identical to SEQ ID NO: 34822
  DOMAIN (465)..(511): kw TRANSCRIPTASE REVERSE II ORF2 domain identified by eMATRIX, accession number DM01354O, p-value=1.000e-40, raw score of 8.73
  DOMAIN (498)..(773): Reverse transcriptase domain identified by PFam, accession name rvt, E-value=3e-80, PFam score of 280.0

SEQ ID NO: 40434 - protein, 396 aa, Homo sapiens
  DOMAIN (144)..(191): kw TRANSCRIPTASE REVERSE II ORF2 domain identified by eMATRIX, accession number DM01354V, p-value=1.000e-40, raw score of 12.97
  DOMAIN (1)..(157): Reverse transcriptase domain identified by PFam, accession name rvt, E-value=0.001, PFam score of -16.8
MDKFLDTYTLPRLNQEAVESLNRPITGSEIEAIINSLQPKKVQDQMNSKPNSTRVLEVLARAIRQEKEIKCIRLGKEEVKLSLFADDMIVYLENPIVSAQNLLKLISNFSKVSGYKINVQKSQAFLYTNTRQTESQIMSELPFTIASKRIKYLGIQLTRDVEDLFKENYKPLLNEIKEDPNKWKNIPCSWIGRISILKMAILPKVIDRFNAIPIKLPMTFFTELEKTTLKFIWNQKRAHIAKTILSQKNKAGGIMLPDFKQYYKATVTKTAWYWYQNRDRDQWNRTEPSEIIPHIYNHLVFDKPDKNKQWGKDSLFNKWCWENWLAMCRKLKLDSFLTPYTKINSRWIKDLNVRPKTIKTLEENLGNTIQDIGMGKDFMSKTPKAMATKPKLTNGI

SEQ ID NO: 40435 - protein, 257 aa, Homo sapiens
  DOMAIN (90)..(137): kw TRANSCRIPTASE REVERSE II ORF2 domain identified by eMATRIX, accession number DM01354V, p-value=1.000e-40, raw score of 12.97
  misc_feature (1)...(257): Xaa = X or * as defined in Table 2
XVDVPARAIRQEKEIKGIQLGKEEAKLSLFADDMNVYLKIPIVSVQNLLKLISNFSKVSGYKINVQKSQAFLYTNNRQTESQIMSELPFTIASKRIKYLGIQLTRDVKDLFKENYKPLLNEIKEDTNKWKNIPCSWIGRINIMKMAILPKVIYRFNAIPIKLPMTFFTELEKTALKFIWNQKRACIAKTILSQKNKAGGITLPDFKLYYKATVAKTAWYWYQNSMVLVPKQRYRPVEQNRALGNNTIHLQPSDLRKT

SEQ ID NO: 40436 - protein, 374 aa, Homo sapiens
  DOMAIN (210)..(257): kw TRANSCRIPTASE REVERSE II ORF2 domain identified by eMATRIX, accession number DM01354V, p-value=1.000e-40, raw score of 12.97
  DOMAIN (5)..(223): Reverse transcriptase domain identified by PFam, accession name rvt, E-value=3.6e-05, PFam score of 3.8
SWFFEKINKIDRPLARVIKKKREKNQIDAIKNDKEDITTNPTEIQTIIREYYKHLYPNKLENLEEMDTFLDTYTFPRLNQEEVESLNTSITGSEIVAIISIAYQPKKVQDQMDPQPNSTRVLEVLARAIRQEKEIKGIQLGKEEVKLSLFADDMIVYLENPIVSAQNLLKLISNFSKVSGYKINVQKSQAFLYTNNRQTESQIMSELPFTIASKRIKCLGIQLTRDVKDLFKENYKPLLKEIKEDTNKWKNIPCSWVGRINIVKMAILPKVIYRFNAIPIKLPMTFFTDLEKTTLNFIWNQKRARITKSILSQKNKAGGITLPDFKLYYTATVTKTAWYWYQNSMVLVPKQRYRSMEQNRALRNNAACLQLSDL

SEQ ID NO: 40437 - protein, 686 aa, Homo sapiens; identical to SEQ ID NO: 35791
  DOMAIN (92)..(137): kw TRANSCRIPTASE REVERSE II ORF2 domain identified by eMATRIX, accession number DM01354N, p-value=1.000e-40, raw score of 13.17
  DOMAIN (176)..(384): Reverse transcriptase domain identified by PFam, accession name rvt, E-value=6.1e-47, PFam score of 169.4

SEQ ID NO: 40438 - protein, 188 aa, Homo sapiens
  DOMAIN (65)..(112): kw TRANSCRIPTASE REVERSE II ORF2 domain identified by eMATRIX, accession number DM01354V, p-value=1.000e-40, raw score of 12.97
  misc_feature (1)...(188): Xaa = X or * as defined in Table 2
TLMQKSSAKYWQTESSSTSKSLSTMIKWASSLGCKAGSIYANQXMXSSIYTNNRQTESQIMSELPFTIASKRIKYLGIQLTRDVKDLFKENYKPLLKEIKEDTNKWKNIPCSWVGRINIVKMAILPKVIYRFNAIPIKLPMTFFTELEKTTLKFIRNQKRACIAKSILSQTKLEASRYLTSNYTTRLQ

SEQ ID NO: 40439 - protein, 504 aa, Homo sapiens
  DOMAIN (235)..(260): 7 kw REVERSE TRANSCRIPTASE RNA POLYMERASE domain identified by eMATRIX, accession number DM00895E, p-value=3.333e-11, raw score of 15.72
  DOMAIN (206)..(441): Reverse transcriptase domain identified by PFam, accession name rvt, E-value=0.0062, PFam score of -28.0
MLFETKENKDTTYQNLRDAFKAVCRGKFIALNAHKRKQERSKIDTLTSQFKELEKQEPIHSKASRRQEITKIRAELKINKIDRLLARLIKKKREKNQIDAIKNDKGDITTDPTEIQTTIREYYKHLYANKLENLEEMDKFLNTYTLPRLNQEEVESLNRPITGSEIVAIINSLPTKKSPGPDGFTAEFYQRYKEELVPFLLKLFQSIEKEGILPNSFYEAGIILIPKLGRDTTKKENFRPISLMNIDAKILNKILANRIQQHIKKLIHHDQLISTFSKVSGYKINVQKSQAFLCTNNRQTESQIMSELPFTIASKRIKYLGIQLTRDVKDPFKENYKPLLKEIKEETNKWKNIPCSWVGRINIVKMAILPKKYLRLGNLQRKEVLLAHGSAGYTGRKAASARLLGKPQKTFTQGEGKARAVTSHGPSRKEKKSGGCTGSVVSPSHEGLRKLTIIQEAKGGASVLDGESGSKREKRSSQGCFNNQLSCELRKNPLVTKEIVLNDS

SEQ ID NO: 40440 - protein, 330 aa, Homo sapiens
  DOMAIN (10)..(65): kw TRANSCRIPTASE REVERSE II ORF2 domain identified by eMATRIX, accession number DM01354Q, p-value=1.000e-40, raw score of 9.23
  DOMAIN (1)..(238): Reverse transcriptase domain identified by PFam, accession name rvt, E-value=2.4e-49, PFam score of 177.4
MNIDAKILNKILAKRIQQHIKKLIHHDPVGFIPGIQGWFNICKSINVIQHINRTKDKNHMIISIDAEKAFDKIQKPFMLKTLNKLGIDGTYFKIIRAIYDKPTANIILNGQKLEAFPLKTGTRQGCPLSPLLFNIVLEVLARAIRQEKEIKGIQLGKEEVKLSLFADDMIVYLENPTVSAQNLLKLISNFSKVSGYKINVQKSQAFFYTNNRQTESQIMSELPFTIASKRIKYLGIQLTRDVKDLFKENYKPLLKEIKEDTNKWKNIPCSWVGRINIVKMAILPKVLLYDPLFDWTMNPLKALYLQQRPEDETELHPTLNADDQECKRNL

SEQ ID NO: 40441 - protein, 672 aa, Homo sapiens
  DOMAIN (357)..(404): kw TRANSCRIPTASE REVERSE II ORF2 domain identified by eMATRIX, accession number DM01354V, p-value=1.000e-40, raw score of 12.97
  DOMAIN (10)..(101): Sema domain identified by PFam, accession name Sema, E-value= 5.2e-23, PFam score of 88.7
MTLLRNSSGCEARRDEYRTEFTTALQRVDLFMGQFSEVLLTSISTFIKGDLTIANLGTSEGRFMQVVVSRSGPSTPHVNFLLDSHPVSPEVIVEHTLNQNGYTLVITGKKITKIPLNGLGCRHFQSCSQCLSAPPFVQCGWCHDKCVRSEECLSGTWTQQICLPAIYKMRLKIISRGEVGKASGGSTPMGGCESSFSVPRKKSKGSTDDYTNIYTSRAANPPAQCSSSAKGQIASSSGPLTPVPPDWETPPSRGRQTPHTGELWLASVLEFLARTNRQEKEIKGIQLGKEEVKLSLFADDMIVYLENSIVSAQSLLKLISNFSKVSGYKFNVQKSQAFLYTNNRQTESQIMSELPFTIASKRIKYLGIQLTRDVKDLFKENYKPLLKEIKEDTNKWKNIPCSWIGRINIMKMAILPKVIYRFNAIPIKLPMTFFTELEKTTLTFIWTQKRACIVKSILSQKNKAGGIMLPDFKLYYKATVTKTAWYWHQNRDIDQWNRTEPSEIIPHIYNYLIFDKPDKNKVWGKDSLFNKWCWENWLAIWRKLKLDPFLTPYTKIYSRWIKDVNVRPKTIKTLEENLGNTIQDIGVGKDFMSKTPKAMATKAKIDKWDLIKLKSFCTAKETTIRVNRQPTEWEKIFAIYSSDKGLISRIYKELKPIYKKNLTTPSTSRQRI

SEQ ID NO: 40442 - protein, 401 aa, Homo sapiens; identical to SEQ ID NO: 34254
  DOMAIN (263)..(310): kw TRANSCRIPTASE REVERSE II ORF2 domain identified by eMATRIX, accession number DM01354V, p-value=1.000e-40, raw score of 12.97
  DOMAIN (18)..(276): Reverse transcriptase domain identified by PFam, accession name rvt, E-value=0.00093, PFam score of -16.3

SEQ ID NO: 40443 - protein, 526 aa, Homo sapiens
  DOMAIN (32)..(78): kw TRANSCRIPTASE REVERSE II ORF2 domain identified by eMATRIX, accession number DM01354O, p-value=1.000e-40, raw score of 8.73
  DOMAIN (65)..(339): Reverse transcriptase domain identified by PFam, accession name rvt, E-value=6.1e-84, PFam score of 292.3
DTYTLPRLNQEEVESLNRPITGSEIVAIINSLPTKKSPGPDGFTAEFYQRYKEELVPFLLKLFQSIEKEGILPNSFYEASIILIPKPGRDTTKKENFRPISLMNIDAKILNKILANRIQQHIKKLIHHDQVGFIPGMQGWFNIRKSINVIQHINRTKDKNHMIISTDAEKAFDKIHQPFMLKTLNKLGIDGTYFKIITAIYDKPTANIILNGQKLEAFPLKTGTRQGCPLSPLLFNIVLEVLARAIRQEEIKGIHLGKEEVKLSLSADDMIVYLENPTVSAQNLLKLISNFSKVSGYKINVQKSQAFLYTNNRQTESQIMSELPSTIASKRIKYLGIQLTRDVKDLFKENYKPLLKEIKEDTNKWKNIPCSWVGRINIVKMAMLPKVIYRFITQALFRPKDKDPYGGVEHPSGSQYQRLDTDKPCLEPTSSRCQTTKGSSESMILPHSPGVLSSRHVAHQCNSTPTPMHLRAVLPLLPEYSPQKLASPRAPGRSNGSLKSFSLYFSVKGCMEEGKSQGLESQRNLG

SEQ ID NO: 40444 - protein, 985 aa, Homo sapiens
  DOMAIN (81)..(122): kw TRANSCRIPTASE REVERSE II ORF2 domain identified by eMATRIX, accession number DM01354I, p-value=1.000e-40, raw score of 15.55
  DOMAIN (327)..(577): Reverse transcriptase domain identified by PFam, accession name rvt, E-value=3.3e-77, PFam score of 269.9
MHQADLIDIYRTLHPKSTEYTFFSAPHHTYSKIDHIVGSKALLSKCNRTEIITNCLSDHSAIKLELRIKNLTQSRSTTWKLNNLLLNDYWVHNEMKAEIKMFFETNENKDTTYQNLWDAFKAVCRGKFIALNAHKRKQERSKIDTLTSQLKELEKQEQTHSKASRRQEITKIRAELKEIETQKTLQKINESRSWFFERINKIDRPLARLIKKKREKNQIDTIKNDKGDITTNPTEIQTTIREYYKHLYANKLENLEEMDTFLDTYTLPRLNQEEVESLNRPITGAEIVAIINSLPTKKSPGPDGFTAEFYQRYKEELVPFLLKLFQSIEKEGILPNSFYEASIILTPKPGRDTTKKENFRPISLMNIDAKILNKILANRIQQHIKKLIPHDQSQRQKHMIISIDAEKAFDKIQQHFMLKTLNKLGIDGTYFKIIRAIYDKPTANIILNGQKLEAFPLKTGTRQGCPLSPLLFNIVLEVLARAIRREKEIKGIQLGKEEVKLSLFADDMIVYLENPIVSAQNLLKLISNFSKVSGYKINVQKSQAFLYTNNRQTESQIMSELPVTIASKRIKYLGIQLTRDVKDLFKENYKPLLKEIKEDTNKWKNIPCSWVGRINIVKMAILPKVIYRFNAIPIKLPMTFFTELEKTTLKFIWNQKRARIAKSILSQKNKTGGITLPDFKLYYKATVTKTAWYWYQNRDIDQWNRTEPSEITPHIYNYLIFDKREKNKQWGKDSLFNKWCWENWLAICRKLKLDPFLTPYTKINSRWIKDLNVRPKTIKTLEENLGITIQDIGVGKDFMSKTPKAMATKAKIDKWDLIKLKSFCTAKETTIRVNRQPTTWEKIFATYSSDKGLISRIYNELKQIYKKKTNNPIKKWAKDMNRQFSKEDIYAAKKHMKKCSSSLAIREMQIKTTMRYHLTPVRMAIIKKSGNNRRWQWHKSLGSQDHPLHLVSSYISEEQRTEPGTNRHYCITCKDFKEVFLAWRK

SEQ ID NO: 40445 - protein, 661 aa, Homo sapiens; identical to SEQ ID NO: 34819
  DOMAIN (235)..(260): 7 kw REVERSE TRANSCRIPTASE RNA POLYMERASE domain identified by eMATRIX, accession number DM00895E, p-value=3.333e-11, raw score of 15.72
  DOMAIN (206)..(481): Reverse transcriptase domain identified by PFam, accession name rvt, E-value=4.6e-82, PFam score of 286.0

SEQ ID NO: 40446 - protein, 1052 aa, Homo sapiens
  DOMAIN (272)..(317): kw TRANSCRIPTASE REVERSE II ORF2 domain identified by eMATRIX, accession number DM01354N, p-value=1.000e-40, raw score of 13.17
  DOMAIN (356)..(631): Reverse transcriptase domain identified by PFam, accession name rvt, E-value=7.2e-87, PFam score of 302.0
MGDFNTPLSTLDRSMRQKVNKDTQELNSALHQADLIDIYRTLHPKSTEYTFFSAPHHTYSKTDHIVGSKALLSKCKRTEIITNCLSDHSAIKLELRIKNLTQNRSTTWKLNNQLLNDYWAHNEMKAEIKMFFETNENKDTTYQNLWDTFKAVCRGKFIALNAHKRKQERSKIDTLTSQLKELEKQEQTHSKASRRQEITKIRAELKEIETQKILQKINESRSWFFERINKIDRPLARLIKKKREKNQIDAIKNDKGDITTDPTEIQNTIREYYKHLYTNKLENLEEMDKFLDTYTLPRLNQEEVESLNRPITGPEIVAIINSLPTKKSPGPDGFTAKFYQRYKEELVPFLLKLFQSIEKEGILPNSFYEASIILIPKPGRDTTKKENFRPISLMNIDAKILNKILAKRIQQHIKKLIHHDQVGFIPGMQGWFNIHKSINVIQHINRPKDKNHMIISIDAEKAFDKIQQPFMLKTLNKLGIDGTYFKIISAIYDKPTANIILNGQKVEAFPLKTGTRQGCPLSPLLFNIVLEVLARAIRQEKEIKGIQLGKEEVKLSLFADDMIVYLENPIVSAQNLLKLISNFSKVSGYKINVQKSQAFLYTNNRQTESQIMSELPFTIASKRIKYLGIQLTRDVKDLFKENYKPLLKEIKEDTNKWKNIPCSWVGRINIVKMAILPKVIYRFNAIPIKLPMTFFTELEKTTLKFIWNALITKSILSQKNKAGGITLPDFKLYYKATVTKTAWYWYQNRDIDQWNRTEPSEITPHIYNYLIFDKPEKNKQWGKDSLLNKWCWENWLAICRKLKLDPFLTPYTKINSRWIKDLNVRPKTIKTLEENLGITIQDIGMGKDFMSKTPKAMATKAKIDKWDLIKLKSFCTAKQTTIRVNRQPTKWEKIFATYSSDKGLISRIYNELKQIYKKKTNNPIKKWAKDMNRHFSKEDIYAAKKHMKKCSSSLAIREMQIKTTMRYHLTPVRMAIIKKSGNNRTWEYNILCSLVPLLCSLLWLHLTDHHLKEDRTKHLTASDNLEKTELSRWKERALLYEHRVLRPAIDSQ

SEQ ID NO: 40447 - protein, 1108 aa, Homo sapiens
  DOMAIN (272)..(317): kw TRANSCRIPTASE REVERSE II ORF2 domain identified by eMATRIX, accession number DM01354N, p-value=1.000e-40, raw score of 13.17
  DOMAIN (356)..(631): Reverse transcriptase domain identified by PFam, accession name rvt, E-value=2.6e-81, PFam score of 283.5
MGDFNTPLSTLDRSTRQKVNKDTQELNLALHQADLIDIYRTLHPKSTEYTFFSAPHHTYSKIDRIVGSKALLSKCKRTEIITNYLSHHSAIKLELRIKNLTQNRSTTWKLNNLLLNDYWVHSEMKAEIKMFFETNENKDTTYQNLWDTFEAVCRGKFIALNGHKRKQERSKIDTLTSQLKELEKQEQTHSKASRRQEITKIRAELKEIEIQKTLQKINESRSWFFERINKIDRPLARLIKKKREKNLIDAIKTDKGDITTNPTEIQTTIREYYKHLYANKLENREEMDKFLDTYTLPRLNQEEVESLNRTITGSEIVARINSLPTKKSPGPDGFTAEFYQRYKEELVPFLLKLFQSIEKEGILPNSFYEASIILIPKPGRDTTKKENFRPISLMNIDAKILNKILAKGIQQHIKKLIHHDQVGFIPGMQGWFNIHKSINVIQHINRAKDKNHMIISIDAEKAFDKIQQPFMLKTLNKLGIDGTYFKIIRAIYDKPTASIILNGQKLEAFRLKTGTRQGCPLSPLLFNIVFEILARAIRQEKEIKGIQLGKEEVKLSLFAGDMIVYLENPIVSAQNLLKLISNFSKVSGYKINVQKSQAFLYTNNRQTESQIMSELPFTIASKRIKYLGIQLTRDVKDLFKENYKPLLKEIKEDTNKWKNIPCSWVGRINIVKMAILPKVIYRINAIPIKLPMPFFTELEKSTLKFIWNQKRARIAKSILSQKNKAGSITLPDFKLYYKATVTKTAWYWYQNRDIDQWNRTEPSEITPHIYNYLIFDKPEKNKQWGKDSLFNKWCWENWLAICRKLKLDPFLTPYTKINSRWIKDLNVRPKTIKTLEENLGITIQDIGIGDDFMSKTPKTMAAKDKIDKWDLIKLKSFCTAKETTIRVNRQPTKWEKIFATYSSDKGLISRIYNELKQIFKKKTNNPIKKWVKDMNRHFSKGDIYAAKKHMKKCSSSLAIREMQIKTTMRYHLTPVRMAIIKKSGNNRCWRGCGEIGTLLHCWWDCKLVQPLWKSVWRFLRDLELEIPFDPAIPLLGIYPKDYKSCCYKDTCTLTWMELEAIILSEVLRNGKTKNRMFSLISGNQDTGMQRHTEFYDGLWRLRRGRVEG

SEQ ID NO: 40448 - protein, 623 aa, Homo sapiens
  DOMAIN (149)..(194): kw TRANSCRIPTASE REVERSE II ORF2 domain identified by eMATRIX, accession number DM01354N, p-value=1.000e-40, raw score of 13.17
  DOMAIN (235)..(508): Reverse transcriptase domain identified by PFam, accession name rvt, E-value=2.6e-87, PFam score of 303.5
MKAEIKMFFETNENKDTTYQNLWDTFKAVCRGKFIALNAHKRKQERSKIDTLTSPLKELEKQEQTHSKASRRQEITKIRAELKEIETQKTLQKINESRSWIFESINKIDRPLARLIKKKREKNQIDAIKNDKGDIITDPTEIQTTIREYYKHLYANKLENLEEMDKFLDTYTLPRLNKEEVESLNRPITGAEIVAIINSLPTKKSPGPDGFTAEFYQRYKEELVPFLLKLFQSIEKDGILPNSFYEASIILIPKPGRDTTKKENFRPISLMNIDAKILNKILANRIQQHIKKLIHHDQVGFIPGMQGWFNIRKSINVIQHINRAKDKNHMIISIDAEKAFDKIQQPFMLKTLNKLGIDGTYFKIIRAIYDKPTASVILNGQKLEAFPLKTGTRQGCPLSPLLFNRVLEVLARAIRQEKEIKGIQLGKEEVKLSLFADDMIVYLENPIISAQNLLKLISNFSKVSGYKINVQKSQAFLYTNNRQTESQIMSELPFTIASKRIKYLGIQLTRDVKDLFKENYKPLLKEIKEDANKWKNIPCSWVGRINIVKMTILPKSEKVSVCPSLGAHVIFKPYKDWPVCARTLTPARSPNLIKNRACHPSLLSKLFLDQLIILSYSPQKASL

SEQ ID NO: 40449 - protein, 482 aa, Homo sapiens
  DOMAIN (197)..(244): kw TRANSCRIPTASE REVERSE II ORF2 domain identified by eMATRIX, accession number DM01354V, p-value=1.000e-40, raw score of 12.97
MASPGPAPTASPKIHSELLTATREAQRHHPVPRGQDLVTSESFSLSFCFSAAIFIFELLGSNSEGVTDLRLWLCQPAPRCGEWTYNPLEQCCDDGVILDLNQTRLCGSSCTFWPCFQHCCLESLGSQNQTVVRFKVPGMKPDCKSSPITRICAQAGVQISNFSKVSGYKINVQKSQAFLYTNNRQTESQIMSELPFTIASQRIKYLGIQLTRDVKDLFKENYKPLLKEIKEDTNKWKNIPCSWVGRINIVKMAILPKVIYRFNAIPIKLPMTFFTELEKTTLKFIWNQKRALIAKSILSQKNKAGGITLPDFKLYYKATVTKTAWYWYQNRDIDQWNRTEPSEITPHIYNYLIFDKPEKNKQWGKDSLFNKWCWENWLAICRKLKLDPFLTPYTKINSRWIKDLNVRPKTIKTLEENLGITIQDIGMSKDFMSKTPKAMATKDKIDKWDLIKLKSFCTAKETTIRVEQATYKMGENFCNLLI

SEQ ID NO: 40450 - protein, 770 aa, Homo sapiens
  DOMAIN (8)..(47): PROTEIN ZINC FINGER ZINC-FINGER METAL-BINDING NU domain identified by eMATRIX, accession number PD01066, p-value=8.326e-31, raw score of 19.43
  DOMAIN (174)..(538): Zinc finger, C2H2 type domain identified by PFam, accession name zf-C2H2, E-value=9e-82, PFam score of 285.1
MFQDPVAFDDVAVNFTQEEWALLDISQRKLYKEVMLETFRNLTSVGKSWKDQNIEYEYQNPRRNFRSLIEKKVNEIKDDSHCGETFTQVPDDRLNFQEKKASPEIKSCDSFVCGEVGLGNSSFNMNIRGDIGHKAYEYQEYGPKPCKCQQPKKAFRYHPSFRTPQRDHTGEKPYACKECGKTFISHSSIQRHVVMHSGDGPYKCKFCGKAFHCLSLYLIHERIHTGEKPYECKQCGKSFSYSATLRIHERTHTGEKPYECQQCGKAFHSPRCYRRHERIHTGEKAYQCKECGKAFTCPQYVRIHERTHSRKKPYECTQCGKALSSLTSFQTHIRMHSGERPYECKICGKGFCSANSFQRHEKTHSGEKPYKCKQCGKAFIHSSSLRYHERIHTGEKPYECKQCGKAFRSSSHLQLHGRTHTGEKPYECQECGKAFRSMKNLQSHERTQTHVRIHSGERPYKCKLCGKGFYCPKSLQRHEKTHTGEKLYECKQCGEAFSSSSSFRYHERTHTGEKPYKCKQCGKAFRAASVLRMHGRTHPEDKPYELLEVLARAIRKDKELKGIQVGKEEVKLSLFADDMIVYLENPIISAQNLLKLISNFSKVSGYKINVQKSQAFLYTNNRQTESQIMSELPFTIASKRIKYLGIQLTRDVKDLFKENYKPLLNEIKEDTNKWKNIPCSWIGRINIMKMAILPKVICRFHAIPIKLPMTFFTELEKTTLKFIWNQRRAHIAKTILSQKNKAQGIRLPDFKLYYKATVTKTAWYWYQTEI

SEQ ID NO: 40451 - protein, 431 aa, Homo sapiens; identical to SEQ ID NO: 35797
  DOMAIN (198)..(245): kw TRANSCRIPTASE REVERSE II ORF2 domain identified by eMATRIX, accession number DM01354V, p-value=1.000e-40, raw score of 12.97
  DOMAIN (1)..(211): Reverse transcriptase domain identified by PFam, accession name rvt, E-value=3.7e-06, PFam score of 17.8

SEQ ID NO: 40452 - protein, 346 aa, Homo sapiens; identical to SEQ ID NO: 35798
  DOMAIN (201)..(248): kw TRANSCRIPTASE REVERSE II ORF2 domain identified by eMATRIX, accession number DM01354V, p-value=1.000e-40, raw score of 12.97

SEQ ID NO: 40453 - protein, 571 aa, Homo sapiens
  DOMAIN (149)..(194): kw TRANSCRIPTASE REVERSE II ORF2 domain identified by eMATRIX, accession number DM01354N, p-value=1.000e-40, raw score of 13.17
  DOMAIN (200)..(427): Reverse transcriptase domain identified by PFam, accession name rvt, E-value=1.6e-31, PFam score of 118.2
MKAEIKMFFETNENKDTTYQNLWDTFKAVCRGKFIALNAHNRKQERSKIDTLTSQLKELEKQEQTYSKASRRQEITKIRAELKEIETQKTLQKINESRSWFFERINKIDRPLARLIKKKRQKNQMDTIKNDKGDITTDPTEIQTTVREYYKHLYTNKLENLEEMDKFLDTYTLPRLNQEEVESLNRPITGAEIVAIINSLPTKKSPGPDGFTAEFYQRYKEELPGRDTTKEENFRPISLMNIDAKILNKILANQIQQHIKKIIHHDQVGFIPGMQGWFNIRKSINVIQHINRAKDKNHMIMSIDAEKAFDKIQQPFMLKTLNKLVLEVLARAIRREKEIKGIQLGKEEVKLSLFADHMIVYLENPIVSAQNLLKLISNFSKVSGYKINVQKSQAFLYTNNRQTESQIMSELPFTIASKRIKYLGIQLTRDVKDLFRENYKPLLKEIKEDTNKWKNIPCSWVGRINIVKVAILPKVIYSFNAIPIKIPMPFFTELEKTTLKFIWNQKRARIAKSILSQKNKAGAITLPDFKLYYKPTVTKTAWYSYQNRDNRSMEQNRALRNNAAYLQLSDI

SEQ ID NO: 40454 - protein, 757 aa, Homo sapiens
  DOMAIN (347)..(394): kw TRANSCRIPTASE REVERSE II ORF2 domain identified by eMATRIX, accession number DM01354V, p-value=1.000e-40, raw score of 12.97
  DOMAIN (120)..(360): Reverse transcriptase domain identified by PFam, accession name rvt, E-value=2.5e-05, PFam score of 5.9
MVLSGFVVPFLEHKHTRFRILLKGPRIFRMVPTLAALEEPFSPLLHCGSHSLGWPKPEPTPSACEGVGKDRYLREPGLCPGRTRGTREFGVGILSTDPTLGAACRRHWPQAASAASLKSRTQGLQPAMPEPLRLPPVGSWAAGASPVGAVPCSVVPSPIDRPGAEQCRPARKASKAPESGGDLENFYVWLEDCICTNQHSVSSSGFMYAPISTLCLANLVGTWRTFVSNSGIVNALISTPSKRTNQLSVKWTNQQDVVLEVLARAIRQEKEIKGIQLGKEEVKLSLFADDMIVYLENPIVSAQNLLKLISNFSKVSGYKINAQKSQAFLYTNNRQTESQIMSELPFTIASKRIKYLGIQLTRDVKDLFKENYKPLLKEITEDTNKWKNIPCSWVGRINIVKMAILPKVIYRFNAIPIKLPMTFFTELEKTTLKFIWNQKRARMAKSILSQKNKAGGITLPDFKLYYKATVTKTAWYWYQNRDVDQWNRTEPSEITPHIYNYLIFDKPDKNKQWGKDSLFNKWGWENWLAICRKLKLDPFLTPYTRINSRWIKDLNVRPKTIKTLEENLDITIQDIGMGKDFMSKTPKAMATKAKIDKWDLIKLKSFCIAKETTIRVNRQPTKWEKIFATYSPDKGLISRIYNELKQIYKKKTNNPIKKWAKDMNRHFSKEDIYAAKKHMKRCSSSLAIREIQIKTTMRYHLTPVRMAIIKKSGNNSFLMAEAWPIWLSSPFLEGGHSRDFIRGDESMSNEEKYKDLN

SEQ ID NO: 40455 - protein, 1218 aa, Homo sapiens; identical to SEQ ID NO: 36413
  DOMAIN (56)..(111): kw TRANSCRIPTASE REVERSE II ORF2 domain identified by eMATRIX, accession number DM01354Q, p-value=1.000e-40, raw score of 9.23
  DOMAIN (1)..(284): Reverse transcriptase domain identified by PFam, accession name rvt, E-value=8.2e-52, PFam score of 185.6

SEQ ID NO: 40456 - protein, 186 aa, Homo sapiens
  DOMAIN (86)..(133): kw TRANSCRIPTASE REVERSE II ORF2 domain identified by eMATRIX, accession number DM01354V, p-value=1.000e-40, raw score of 12.97
IQCHPHQATNDFLHRIGKEEVKLSLFADDMIVYLENPIISAQNLLKLISNFSKVSAYKINVQKSQAFRYTNNRQTESQIMSELPFTIASKRIKYLGIQLTRDVKDLFKENYRPLLNEIKEDTNKWKNIPCSWVGRINIVIMAILSKVIYRFNANPIKLPMTFFTELEKTTLKVIWNQKRARIAKSI

SEQ ID NO: 40457 - protein, 415 aa, Homo sapiens; identical to SEQ ID NO: 35821
  DOMAIN (100)..(147): kw TRANSCRIPTASE REVERSE II ORF2 domain identified by eMATRIX, accession number DM01354V, p-value=1.000e-40, raw score of 12.97

SEQ ID NO: 40458 - protein, 628 aa, Homo sapiens
  DOMAIN (272)..(317): kw TRANSCRIPTASE REVERSE II ORF2 domain identified by eMATRIX, accession number DM01354N, p-value=1.000e-40, raw score of 13.17
  DOMAIN (287)..(485): Reverse transcriptase domain identified by PFam, accession name rvt, E-value=3.4e-09, PFam score of 44.0
MGDFNNPLSTLDRSRRQKVNKGTQELNSALHQADLIDIYRTLHPKSTEYTFFSAPHHTYSKIDHILGSKALLSKCKRTEIITNYLSDYSAIKLELRIKNLTQNCSTTWKLNNLLLNDYWVHNKVKAEIKMFFEANQNKDTTCQNLWDTFKAVCRGKIIVLNAHKRKQERSKIDTLTSQLKELEKQEQTHSKASRRQEITKIRAELKEIETHKTLQKINESRSWFFERINKTDRTLARLIKKKREKNQIDTIKNDKGDITTDPTEIQSTIREYYKHLYANKLENLEEMDKFLDTYTLPRLNQEEVESLNRPITGSEIVAIINSLPTKKSPGPDGFTAEFYQKYKEELHINRTKDKNHMIISIDAEKAFDKIQQCFMLKTLNKLVLEVLARAIRQEKEIKGIQVGKEDVKFSLFADDMVVYLENPIVSAQNLLKLISNFSKVSGYKINVQKSQAFLYTNNRQTESQIMSELPFTIASKRIKYLGIQLTRDVKDLFKENYKPLLKEIKEDTNKWKNIPCSWVGRINIVKMAILPKVIYRFNAIPIKLAMTFFTGLEKTPLKFIWNQKRAHITKSILSQKNKAGGITLPDFKLYYKATVTKTAWSWYQNRYRSMEQNRALRNNTAYLQLSDL

SEQ ID NO: 40459 - protein, 380 aa, Homo sapiens; identical to SEQ ID NO: 35822
  DOMAIN (159)..(206): kw TRANSCRIPTASE REVERSE II ORF2 domain identified by eMATRIX, accession number DM01354V, p-value=1.000e-40, raw score of 12.97
  DOMAIN (1)..(172): Reverse transcriptase domain identified by PFam, accession name rvt, E-value=0.00011, PFam score of -3.0

SEQ ID NO: 40460 - protein, 514 aa, Homo sapiens
  DOMAIN (207)..(254): kw TRANSCRIPTASE REVERSE II ORF2 domain identified by eMATRIX, accession number DM01354V, p-value=1.000e-40, raw score of 12.97
  DOMAIN (40)..(220): Reverse transcriptase domain identified by PFam, accession name rvt, E-value=2.7e-05, PFam score of 5.6
MGKKQNRKTGNSKKQSASPPPKERSSSPAKEQSWMENDFEELREEGFRLSNYSELREDIQTKGKEVENFEKNLAVCITRITNTENCLKELMELKTKARELREECRSLRSRCDQLEERWLEVLARAIRQEKEIKGIQLGKEEVKLSLFADDMIVYLENPIVSAQNLLKLISNFSKVSGYKINVQKSQAFLYTNNRQTESQIMSELPFTIASKRIKYLGIQLTRDVKDLFKENYKPLLKEIKEDTNKWKNIPCSWVGRINIVKMAILPKVIYRFNAIPIKLPMTFVTELEKTTLKFIWNQKRARIAKSILSQKNKAGGITLPDFKVYYKASVTKTACALRKPNIDSGTGRRRMRLESVAKFHSPKSPMMSDSPRATASDSLSGTDVMAAMGMAQSQAGFGMAAFCGKHELSQNDKQKAINYLMQFAHKVSGKYRGVAKLEGNTKAKVLQVLATFAYADYCRSAATPGARCRDCHGTGRAVDIAKTELWGEKLSRKSAEDAKASAIQGCQQAQHIAL

SEQ ID NO: 40461 - protein, 1100 aa, Homo sapiens
  DOMAIN (491)..(538): kw TRANSCRIPTASE REVERSE II ORF2 domain identified by eMATRIX, accession number DM01354V, p-value=1.000e-40, raw score of 12.97
  DOMAIN (238)..(504): Reverse transcriptase domain identified by PFam, accession name rvt, E-value=9.2e-05, PFam score of -2.0
LESKGLTLNSNAWMNDTVIIDSTVGKDTFFLITWNSLPPSISLWDPSGTIMENFTVDATSKMAYLSIPGTAKVGTWAYNLQAKANPETLTITVTSRAANSSVPPITVNAKMNKDVNSFPSPMIVYAEILQGYVPVLGANVTAFIESQNGHTEVLELLDNGAGADSFKNDGVYSRYFTAYTENGRYSLKVRAHGGANTARLKLRPPLNRAAYIPGWVVNGEIEANPPRPEIDEDTQTTLEDFSRTASGGAFVVSQVPSLPLPDQYPPSQITDLDATVHEDKIILTWTAPGDNFDVGKVQRYIIRISASILDLRDSFDDALQVNTTDLSPKEANSKESFAFKPENISEENATHIFIAIKSIDKSNLTSKVSNIAQVTLFIPQANPDDIDPTPTPTPTPTPDKSHNSGVNISTLIMLDIKGIQLGKEEVKLSLFADDMIVYLENPIVSAQNLLKLISNFSKVSGYKINVQKSQAFLYTNNRQTESQIMSELPFTIASKRIKYLGIQLTRDVKDLFKENYKPLLKEIKEDTNKWKNISCSWIGRINIVKMAILPKREITGRCTAMGPFKSSVFILILHLLEGALSNSLIQLNNNGYEGIVVAIDPNVPEDETLIQQIKGEYTSQDEEGRVREKLSLPPSNIHTHTPHAQARVHTHTPMHTRRHTRTHARQKDMVTQASLYLLEATGKRFYFKNVAILIPETWKTKADYVRPKLETYKNADVLVAESTPPGNDEPYTEQMGNCGEKGERIHLTPDFIAGKKLAEYGPQGRAFVHEWAHLRWGVFDEYNNDEKFYLSNGRIQATASFEGGPEQKALQQIQAAVQAALPLGPYDPANPMVLEVSVADRDTVWSLWQVPIGESQLGFWSKALPSSADNYSPFERQLLACYWALVETEYLTMGHEVTMLPELPIMTWVLSDPSSYKKWPDVQLYTDSWAVANGLAGWSGTWKKHDWKIGDKEIWGRGMWMELSEWSKTVKVFVSHVSAHQRVTSAEEDFNNQVDPVTHSVDTTQPLSPATSVIAQWIHEQSGHGGRDGGYSWAQQHGLPFTKADLAMATAECPICQQKRPTLSPPYGTIPWGDQPATWWQIDYIGPLLSWKEQRFFLPG

SEQ ID NO: 40462 - protein, 608 aa, Homo sapiens; identical to SEQ ID NO: 35804
  DOMAIN (152)..(199): kw TRANSCRIPTASE REVERSE II ORF2 domain identified by eMATRIX, accession number DM01354V, p-value=1.000e-40, raw score of 12.97
  DOMAIN (1)..(165): Reverse transcriptase domain identified by PFam, accession name rvt, E-value=0.02, PFam score of -35.1

SEQ ID NO: 40463 - protein, 341 aa, Homo sapiens
  DOMAIN (133)..(180): kw TRANSCRIPTASE REVERSE II ORF2 domain identified by eMATRIX, accession number DM01354V, p-value=1.000e-40, raw score of 12.97
MSSRWARAWRALPSERLSSAATLGCEGLSTWASSCRGAGLRTCSRSCRSLSPTPTGARLVLTEKPPAPRRAFLRVDRICVNGSVFGGAQNLLKLISNFSKVSGYKINVQKSQAFLYTNNRQAESQIMSELPFTIASKRIKYLGIQLTRDVKDLFKENYKPLLKEIKEDTNKWKNIPCSWVGRINIVKMAILPKVIYRFNAIPIKLPMTFFTELEKTTLKFIWNQKRARITKSILSQKNKAGGITLPDFKLYYKETVTKTAWDFADFGTTIKQDFRLLGQTSVDRLLQLSQGQAVKGNQLLPVSLVKRKTTLAPNTQTASPRALADSLMQLARQVSRLESGQ

SEQ ID NO: 40464 - protein, 723 aa, Homo sapiens; identical to SEQ ID NO: 32661
  DOMAIN (317)..(363): kw TRANSCRIPTASE REVERSE II ORF2 domain identified by eMATRIX, accession number DM01354O, p-value=1.000e-40, raw score of 8.73
  DOMAIN (352)..(625): Reverse transcriptase domain identified by PFam, accession name rvt, E-value=3.8e-86, PFam score of 299.6

SEQ ID NO: 40465 - protein, 887 aa, Homo sapiens
  DOMAIN (156)..(201): kw TRANSCRIPTASE REVERSE II ORF2 domain identified by eMATRIX, accession number DM01354N, p-value=1.000e-40, raw score of 13.17
  DOMAIN (221)..(496): Reverse transcriptase domain identified by PFam, accession name rvt, E-value=2.9e-78, PFam score of 273.4
MELKTKARELREECRSLRSRCDQLEERVSAMEDEMNEMKREGKFREKRIKRNEQSLQEIWDYVKRPNLHLIGVPETDGENGTKLENTLQDIIQENFPNLARQANVQIQEIQRTPQRYSSRRATPRHIIVRFTKVEMKEKMLRAAREKEIQTTIREYYKHLHANKLENLEEMDKFLDTYTLPRLNQEKVESLNRPITGAEIVAIINIYQPKRVQDQMDSQPNFTREGILPNSFYEASIILIPKLGRDTAKKENFRPISLMNIDAKILNKILAKRIQQHIKKLIHHDQVGFIPGMQGWFNIRKSINVIQHVNRTKDKNHMIISIDEEKAFDKIQQPFMLKTLNKLGIDGMYFIIIRAIYDKPTAHIILNGKKLEAFPLKTGMRQGCPLSPLLFNIVFKVLARAIRQEKEIKGIQLGKEEFKLSLFADDMIVYLENPIVSAQNLLKLISNFSKVSGYKINVQKSQTFLYTNNRQTESQIMSELPFTIASKRIKYLGIQLTRDVKDLFKENYKPLLKEIKEDTNKWKNIPCSWVGRINIVKMAILPKVIYRFNAIPIKVPMTFFTELEKTTLKFIWNQKRACIAKSILSQKNKAGGITLPDFKLYYKATVTKTAWYWYQNRDIDQWNRTEPSEITPHIYNYLIFDKPEKNKQWGKDSLFNKWCWENWLAICRKLKLDPFLTPYTKINSRWIKDLNVRPKTIKTLEENLGITIQDIGVGKDFMSKTPKAMATKAKIDKWDLIKLKSFCTAKETTIRVNRQPTTWEKIFATYSSDKGLISRIYNELKQIYKKKARSPVPRGEGRAPHKESTPWDKRISTAALESQIFPLTQSTHMRRNEKNISGNVTKRDSLTPPKDHTSSPAMDPNQDKISESSEKEFRMSTIKLIKKAPEK

SEQ ID NO: 40466 - protein, 368 aa, Homo sapiens
  DOMAIN (100)..(147): kw TRANSCRIPTASE REVERSE II ORF2 domain identified by eMATRIX, accession number DM01354V, p-value=1.000e-40, raw score of 12.97
  DOMAIN (90)..(291): Reverse transcriptase domain identified by PFam, accession name rvt, E-value=0.00013, PFam score of -4.3
MDKFLDTYTLPKLNQEEVESLNRPITGSEIVAIINSLPTKKSPGPDGFTAEFYQRYKEELLISNFSKLSGYKINVQKSQAFLYTNNRQTESQIMSELPFTIASKRIKYLGIQLTRDVKDLFKENYKPLLKEIKEDTNKWKNIPCSWVGRINIVKMAILPKDKTSKYIDVDENEGSHCGKRKYKYGMEKALEILARAIRQEKEIKGIQLGKEEVKLSLFADDMIVHLENPIISAQNLLKLISNFSKVSGHKINVQKSQTFLYTNNRQTESQIMSGLPFKIATKRIKYLGIQLTRDVRDLFKNYKPLLNELKEGTNKWKKNILSSWIGRINIVKMAILPKVIYRFNAILINLPMTFFTELEKTTLKFIWN

SEQ ID NO: 40467 - protein, 556 aa, Homo sapiens
  DOMAIN (151)..(198): kw TRANSCRIPTASE REVERSE II ORF2 domain identified by eMATRIX, accession number DM01354V, p-value=1.000e-40, raw score of 12.97
  DOMAIN (8)..(164): Reverse transcriptase domain identified by PFam, accession name rvt, E-value=0.0013, PFam score of -18.3
MESFQCALKEVGLDEPLRLAGFRGDSAHYQLWWLQGKSKEAKAEAKVKATLSCTLGTKTATVLEVLARAIRQEKEIKGIQLGKEEVKLSLFADDMIVYLENPIVSAQNLLKLISNFSKVSGYKINVQKSQAFLYTNNRQTESQIMSELPFTIASKRIKYLGIQLTRDVKDLFKENYKPLLKEIKEDTNKWKNIPCSWVGRINIVKMAILPKGIYRFNAIPIKLPMIFFTELEKTTLKFIWNQKRARIAKSILSQKNKSGGITLPDFKLYYKATVTKTAWYWSQNRDIDQWNRTEPSEITPRIYNYLIFDKPEKNKQWGKDSLFNKWCWENWLAICRKLKLDPFLTPYTKINSRWIKDLNVRPKTIKTLEENLGITIQDIGVGKDFMSKTPKAMATKAKIDKWDLIKLKSFCTAKETTIRVNRQPTTWEKIFATYSSDKGLISRIYNELKQIYKKKTNNPIKKWAKDMNRHFSKEDIYAAKNHTKKCSSSLAIREMPIKTTMRYHLTPVIISPYLALPLNRPWQLNTKDRNFWDLSGPTHCLKHQKTSPGNIRQAQI

SEQ ID NO: 40468 - protein, 648 aa, Homo sapiens
  DOMAIN (28)..(73): kw TRANSCRIPTASE REVERSE II ORF2 domain identified by eMATRIX, accession number DM01354N, p-value=1.000e-40, raw score of 13.17
  DOMAIN (12)..(199): Reverse transcriptase domain identified by PFam, accession name rvt, E-value=0.00019, PFam score of -6.5
MKVIFASITLDLNQGSIHSEIQTTIREYYKHLHANKLENLEEMDKFLDTYTLPRLNQEKVESLNRPITGAEIVAIINIYQPKRVQDQMDSQPNFTRVFKVLARAIRQEKEGEGIQLGKVEFKLSLFADDMIVYLENPIVSAQNLLKLISNFSKVSGYKINVQKSQTFLYTNNRQTESQIMSELPFTIASKRIKYLGIQLTRDVKDLFKENYKPLLKEIKEDTNKWKNIPCSWVGRINIVKMAILPKVIYRFNAIPIKLPMTSFTELEKTTLKFIGNQKRARIAKSILSQKNKAGGITLPDFKLYYKATVTKTAWYWYQNRDIDQWNRTEPSEITPHIYNYLIFDKPEKNKQWGKDSLFNKWDSLCVLINHVSPASSSTVAAALVGMPGFMLKVSGNPPWGRHTVVIKHPLREVPGNVCPCPWSQGTQLTLQQEGTRLTLQQEGTRLTLQQEGTRLTLQQEGTRLTLQQEGTRLTLQQEGTRLTLQQEGTRLTLQQEGTRLTLQQEGTRLTLQQEGTRLTLQQEGTRLTLQQEGTRLTLQQEGTRLTLQQEGTRLTLQQEGTRLTLQQEGTRLTLQQEGTRLTLQQEGTRLTLQQEGTRLTLQQEGTRLTLQQEGCVDPLTYHLLHSAARVTPHHANKPSVLAKSSPGV

SEQ ID NO: 40469 - protein, 1101 aa, Homo sapiens
  DOMAIN (110)..(151): kw TRANSCRIPTASE REVERSE II ORF2 domain identified by eMATRIX, accession number DM01354I, p-value=1.000e-40, raw score of 15.55
  DOMAIN (356)..(631): Reverse transcriptase domain identified by PFam, accession name rvt, E-value=2.3e-81, PFam score of 283.7
MGDFNTPLSTLDRSTRQKVNKDTQELNSALHQGDLIDIYRTLHPKSTEYTFFSAPHHTYSKIDHIVGSKALLSKWKRTEIITNYLSDHSAIKLELRIKNLTQSRSTTWKLNNLLLNDYWVHNEMKAEIKMFFETNENKDTTYQNLWDAFKAVCRGKFIALNAHKRKQERSKIDTLTSQLKELEKQEQTHSKASRRQEITKIRAELKEIETQKTLQKINESRSWFFERINKIDRPLARLIKKKREKNQIDTIKNDKGDITTDPTEIQTTIREYYKHLYSNKLENLEEMDKFLDTYTLPRLNQEEVESLNRPITGAEIVAIINSLPTKKIPGPDGFTAEFYQRYKEELVPFLLKLFQSIEKEGILPNSFYEASIILIPKPGRDTTKKENFRPISLMNIDAKILNKILAKRIQQHIKKLIHHDEVGFIPGMQGWFNIHKSINVIQHINRAKDKNHMIISIDAEKAFDKIQQPFMLKTLNKLGIDGMYFKIIRAIYDKPTANIMLNGQKLEVFPLKSSTRQGCPLSPLLFNMVLNVLARAIRQEKAIKGIQIGREEVKLSLFADDVIVYLENPIVSAQNLLKLISNFSKVSGYKINVQKSQAFLYTNNRQTESQIMSELPFTIASKRIKYLGIQLTRDVKDLFKENYKPLLKEIKEDTNKWKNIPCSWVGRINIVKMAILPKVIYRFNAIPINLPMTFFTELEKTTLKFIWNQKRARIAKSILSQKNKAGGITLPDFKLYYKATVTKTAWYWYQNRDIDQWNRTEPSEIMLHTYNYLIFDKPEKNKQWGKDSLFNKWCWENWLAICRKLKLDPFLTPYTKINSRWIKDLNVRPKTIKTLEENLGITIQDIGVGKDFMSKTPKAMATKAKIDKWDLIKLKSFCTAGETTIRVNRQPTTWEKIFATYSSDKGLISRIYNELKQIYKKKTNNPIKKWARDMNRHFSKEDIYAAKKHMKKCSSSLAIREMQIKTTMRYHLTPVRMAIIEKSGNNRCWRGCGEIGTLLHCWWDCKLVQPLWKSVWRFLRDLELEIPFDPAIPLLGIYPKDYKSCCYKDTCTHSQTILQKVWTNDVKFAILSPECVANITSQLLSSFLLSVPVSYCQLILE

SEQ ID NO: 40470 - protein, 460 aa, Homo sapiens
  DOMAIN (171)..(214): kw TRANSCRIPTASE REVERSE II ORF2 domain identified by eMATRIX, accession number DM01354T, p-value=1.000e-40, raw score of 9.48
  DOMAIN (46)..(293): Reverse transcriptase domain identified by PFam, accession name rvt, E-value=2.4e-49, PFam score of 177.4
MELKTKARELREECRSLRSRCDQLEERVSAMEDEMNEMKREGKFREKRIKRNEQSLQEIWDYVKRPNLRLIGVPESDGENGTKLENTLQDIIQENFPNLARQANHINRAKDKTHMIISIDAEKAFDKIQQLFMLKTLNKLGIDGTYFKIIRAIYDKPTANIILNGQKLEAFPLKTGTRQGCPLSPLLFNIVLEVLARAIRQEKEIKGIQLAKEEVKLSLFADDMIVYLENPIVSAQNLLKLISNFGKVSGYKINVQKSQAFLYTNTRQTESQIMSELPFTIASKRIKYLGIQLTRDVKDLFKENYKPLLKEIKEDTNKWKNIPCSWVGRINIVKMAILPKVIYRFNAIPIKLPMTFFTELEKTTLKFIQNQKGACIAKSILSQKTKAGGITLPDFKLYCKGYSNQNSMVHRKAAKCCVNPGAVDLRDFGPTLLSGHLSWLSHSLHALTLRLAALMLFDLS

SEQ ID NO: 40471 - protein, 132 aa, Homo sapiens
  DOMAIN (68)..(115): kw TRANSCRIPTASE REVERSE II ORF2 domain identified by eMATRIX, accession number DM01354V, p-value=8.875e-16, raw score of 12.97
MPPVDASRDLRELNPLSSYKAKPNEYLLLVQVLFLNRNTKEGLIRLLARYPDDLQQTESQIMSELPFTIASKRIKYPGIQLTKDVEDLFKENYKPLLSKKEDANKWKNIPCSWIGRINIVKMAVLPKKKIWV

SEQ ID NO: 40472 - protein, 739 aa, Homo sapiens
  DOMAIN (297)..(352): kw TRANSCRIPTASE REVERSE II ORF2 domain identified by eMATRIX, accession number DM01354Q, p-value=1.000e-40, raw score of 9.23
  DOMAIN (250)..(527): Reverse transcriptase domain identified by PFam, accession name rvt, E-value=1.2e-79, PFam score of 278.0
MEDEMNEMKREGKFREKRIKRNEQSLQEIWDYVKRPNLHLIGVPESDVENGTKLENTLQDIIQENFPNLARQANVQIQEIQRTPQRYSSRRATPRHIIVRFTKVEMKEKMLRAAREKGHCNSGKSHRSLWEQNKGIFTTCICDDAEDLQSPSTAGPWFGVLYTKGGPYPQEDIFSEEVHTGPKLRKKIQEYQLTSKWSKSDVQVSVERRMAGGNPNQCHIGEVLLDGFTAEFYRRYKEELVPFLLKLFQSIEKEGILPNSFYEASIILIQKPGRDTTKKENFRPISLMNIDAKILNKILAKRIQQHIEKLIHHDQVGFIPVMQGWFNICKSINVIQHINRAKDKNHMIISIDAEKAFDKIQQPFMLKTLNKLGIDGMYFKIIRAIYDKPTANIILNGQKLAAFPLKTGTRQGCPLSPLLFNIVLEVLARAIRQEKEIKGIQLGKEEVKLSLFADDMIVYLENPIVSAQNLLKLISNFSKVSGYKKKINVQKSQAFLYTNNRQTESQIMSKLPFTIASKRIKYLGIQLTRDVKDLFKENYKPLLKEIKEDTNKWKNIPCSWVGRINIVKMAILPKVIYRFNAIPIKLPVTFFTELEKTTLKFIWNQKRARIAKSILSQKNKAGGITLPDFKLYYKATVTKTACSQSAPMELGFRPIPVDSGTRTIPEPGLTPWTQASGWTPKTCASGFFLQIQLTSPLWWTPVLGLHHKPRIQVYTEGPSPRPAPLDSDASSTHLLTQAS

SEQ ID NO: 40473 - protein, 853 aa, Homo sapiens; identical to SEQ ID NO: 32659
  DOMAIN (262)..(287): 7 kw REVERSE TRANSCRIPTASE RNA POLYMERASE domain identified by eMATRIX, accession number DM00895E, p-value=3.333e-11, raw score of 15.72
  DOMAIN (233)..(456): Reverse transcriptase domain identified by PFam, accession name rvt, E-value=1.8e-51, PFam score of 184.4

SEQ ID NO: 40474 - protein, 1056 aa, Homo sapiens
  DOMAIN (123)..(164): kw TRANSCRIPTASE REVERSE II ORF2 domain identified by eMATRIX, accession number DM01354I, p-value=1.000e-40, raw score of 15.55
  DOMAIN (369)..(644): Reverse transcriptase domain identified by PFam, accession name rvt, E-value=4.2e-89, PFam score of 309.4
MSSEWEWLRCSEVKGQRDVRPGCLGWDFRVYIVEDTQDEDRTWSVKEACELVLRVQEMIITRVVDAAPHHTYSKIDHIVGSKALLSKCKRTEIITNCLSDHSAIKLELRIKNLTQSRSTTWKLNNLLLNDYWVHNEMKAEIKMFFETNENKDTTYQNLWDAFKAVCRGKFIALNAYKRKQERSKIDTLTSQLKELEKQEQTHSKASRRQEITKIRAELKEIETQKTLQKINESRSWFFERINKIDRPLARLIKKKREKNQIDAIKNDKGDITTDPTEIQTTIREYYKQLYANKLENLEEMDTFLDTYTLPRLNQEEVESLNRPITGSEIVAIINSLPTKKSPGPDGFTAEFYQRYKEELVPFLLKLFQSIEKEGILPNSFYEASIILIPKPGRDTTKKENFRPISLMNIDAKILNKILANRIQQHIKKLIHHDQVGFIPGMQGWFNIRKSINVIQHINRAKDKNHMIISIDAEKAFDKIQQPFMLKTLNKLGIDGTYVKIIRAIYDKPTANIILNGQKLEAFPLKTGTRQGCPLSPLLFNIVLEVLARAIRQEKEIKGIQLGKEEVKLSLFADDMIVYLENPIVSAQNLLKLISNFSKVSGYKINVQKSQAFLYTNNRQTESQIMGELPFTIASKRIKYLGIQLTRDVKDLFKENYKPLLKEIKEDTNKWKNIPCSWVGRINIVKMAILPKVIYRFNAIPIKLPMTFFTELEKTTLKFIWNQKRARIAKSILSQKNKAGGITLPDFKLYYKATVTKTAWYWYQNRDIDQWNRTEPSEITPHIYNYLIFDKPEKNKQWGKDSLSNKWCWENWLAICRKLKLDPFLTPYTKINSRWIKDLNVRPKTIKTLEENLGNTIQDIGMGKDFMSKTPKAMATKDKIDKWDLIKLKCFCTAKETTIRVNRQPTKWEKIFATYSSDKGLISRIYDELKQIYKKKTNNPIKKWAKDMNRHFSKEDIYAAKKHMKKCSSSLAIREMQIKTTMRYYLIPVRMAIIKKSGNNRRTATLSLLPAIRHEREAFHQREEEKEGGRILLLQNRVILCSCSLCPHLSPASKPKH

SEQ ID NO: 40475 - protein, 701 aa, Homo sapiens
  DOMAIN (262)..(287): 7 kw REVERSE TRANSCRIPTASE RNA POLYMERASE domain identified by eMATRIX, accession number DM00895E, p-value=3.586e-10, raw score of 15.72
  DOMAIN (233)..(487): Reverse transcriptase domain identified by PFam, accession name rvt, E-value=2e-79, PFam score of 277.3
MKAEIKMFFETNENKDTTYQNLWDAFKAVCRGKFIALNAHKRKQERSKIDNLTSQLKELEKQEQTHSKASRRQEITKIRAELKEIETQKTLQKINESRSWFFERINKIDRPLARLIKKKREKNQIDTIKNDKWDITTDPTEIQTTIREYYKHLYANKLENLEEMDKFLDTYTLPRLNQEEVESLNRPITGSEIVAIINSLPTKKSPGPDGFTAEFYQRYKEELVPFLLKLFQSIGKEGILPNSFYEASIILIPKPGRDTTKKANFRPISLMNIDAKILNKILAKRIQQHIKKLIHHDQHINKAKDKNHMIISIDAEKAFDKIQQPFMLKTLNKLGIDGTYFKIIRAIYDKPTANIILNGQKLEAFPLKTGTRQGCPLSPLLFNIVLEVLARAIRQEKEIKGIQLGKEEVKLSLFADDMIVYLENPIVSAQNLLKLISNFSKVSGYKINVQKSQAFLYTNNRQTESQIMSELPFTIASKRIKYLGIQLTRDVKDLFKENYKPLLKEIKEDTNKWKNIPCSWVGRINIVKMAILPKGFCRFRNHHQTGFSPAGANQRGPLAATLSGPGGEGQSAVARLTGEKKNHPGAQYANRLSPRVGRFINAAGTTGFPTGKRAVSATQLMDFADFGTTIKQDFRLLGQTSVDRLLQLSQGQAVKGNQLLPVSLVKRKTTLAPNTQTASPRALADSLMQLARQVSRLESGQ

SEQ ID NO: 40476 - protein, 563 aa, Homo sapiens
  DOMAIN (173)..(218): kw TRANSCRIPTASE REVERSE II ORF2 domain identified by eMATRIX, accession number DM01354N, p-value=1.000e-40, raw score of 13.17
  DOMAIN (105)..(300): Reverse transcriptase domain identified by PFam, accession name rvt, E-value=0.0067, PFam score of -28.4
MVRKYREVWWHLRGQGHSSTKGSRNFCRLKHPCLTALKRVVVLPAWSLRSENGQTASSSGSLTPEKPNWEAPPSRGQLTTHTAGCPSEMKLSEKRSGSNICCSAVSAVLQPLLVIPRQTGSGVDLQQTPTDLQLRVLTVRRKTNKQKGHPHQNLICTSPSSNTKEIQTTIREYYKQLYANKLENLEEMDKFLDTYTLPRLNQEEVESVNRPITGSEIEAIIKSLPTKKSPAPDGFTAEFYQRYKEELLISNFSKVSGYKINVQKSQAFLYTNNRQTESQIMSELPFTIASKRIKYLGIQLTRDVKDLFKENYKSLLNEIKEDANKWKNIPCSWIGRINIVKMAILPKNWKKLLLWFIWNHKRACIAKTILSQKNKAGGITLPDFKLYYKATVTKTAWYWYQNIDIDQWNRTEPSKIIPRIYNNLIFDKPDKNKKWGKYSLFNKWCLENWLAICRKLKLDPFLTSYTKINSRWIKDLNVRPKTIKTLEGNLGNTIQDIGMGKDFMSKTPKAMATKAKIDKWDLNNLKSFCTAKETTIRVNMQPTEWEKIFAIYPSDKGLISTIY

SEQ ID NO: 40477 - protein, 302 aa, Homo sapiens
  DOMAIN (21)..(64): kw TRANSCRIPTASE REVERSE II ORF2 domain identified by eMATRIX, accession number DM01354T, p-value=1.000e-40, raw score of 9.48
  DOMAIN (1)..(143): Reverse transcriptase domain identified by PFam, accession name rvt, E-value=1.9e-05, PFam score of 7.9
ELFMIKPPRNIILNQQKLEAFPLKTGTRQGCPLSPLLFNIVLEVLARAIRQEKEIKGIQLGKEEVKLSLFADDMIVYLENPIVSAQNLLKLISNFSKVSGYKINVQKSQAFLYTNNRQTESQIMSELPFTIASKRIKYLGIQLTRDVKDLFKENYKPLLKEIKEDTNKWKNIPCSWVGRINIVKMAILPKVIYRFNAIPIKLPMTFFTELEKTTLKFIWNQKRARIAKSILSQKNKSGGITLPDFKLYYKATVTKTACSPHSIVLPATMMEQNRALRNNTTHHGRGSDPAGQAAAAAGATCQ

SEQ ID NO: 40478 - protein, 758 aa, Homo sapiens; identical to SEQ ID NO: 35813
  DOMAIN (106)..(149): kw TRANSCRIPTASE REVERSE II ORF2 domain identified by eMATRIX, accession number DM01354T, p-value=1.000e-40, raw score of 9.48
  DOMAIN (1)..(228): Reverse transcriptase domain identified by PFam, accession name rvt, E-value=2.9e-37, PFam score of 137.2

SEQ ID NO: 40479 - protein, 1276 aa, Homo sapiens
  DOMAIN (272)..(317): kw TRANSCRIPTASE REVERSE II ORF2 domain identified by eMATRIX, accession number DM01354N, p-value=1.000e-40, raw score of 13.17
  DOMAIN (308)..(575): Reverse transcriptase domain identified by PFam, accession name rvt, E-value=3e-48, PFam score of 173.7
MGDFNTPLSTLDRATRQKVNKDTQELNSALHQADLIDIYRTLHPKSTEYTFFSAPHHTYSKIDHILGSKALLSKCKRTEIITNYLSDHSAIKLELRIKNLTQNRSITWKLSNLLLNDYWVHNEMKADIKMFFETNENKDTTYQNLWDTFKAVCRGKFLALNAHKKKQERSKIDTLTSQLKELEKQEQTHSKASRRQEITKIGAELKEIETQKTLQKINESRSWFFERINKIDKPLARLIKKKREKNQIDAIKNDKGDITTDPTEIQTTIREYNKHLYANKLENLEEMDKFLDTYSLPRLNQEEVESLNRPITGAEIVAIINSLPTKKSPGPDGFTAKFYQRYKEECKILANQIQQHIKKLTHQDQVDFIPGMQGWFNIRKSINVIQHINRSKDKNHMIISIDAEKAFDKIQQPFMLKTLNKLRIDGTYLKIIRAIYDKPTANIILNGQKLEAFPLKTGTRQGCSLSPLLFNIVLEVLARAIRQEKEIKGIQLGKEEVKLSLFADNIIVYLENPIVSAQNLLKLISNFSKVSGYKINVQKSQAFLYTNNRQTESQIMSELPFTIASKRIKYLGIQLTRDVKDLFKENYKPLLKEIKEDTNKWKNIPCSWVGRINIVKMAILPKIIYRFNAIPIKLPMTFFTELEKTTLKFIWNQKRARIAKAILSQKNKAGGITLLDFKLYYKATVTKTAWYWYQNRDIDQWNRTEPSEITLHIYNFLIFDKPEKNEQWGKDSLFNKWCWENWLAICRKLKLDPFLTPYTKINSRWIKDLNVRPKTIKTLEENLGITIQDIGMGKDFMSKTPKAMATKAKIDKWDLIKLKNFCTAKETTIRVNRQPTKWEKIFTTYSSDKGLISRIYNELQQIYKKKTNNPIKKWAKDMNRHFSKEDIYGAKKHMKKCSPSLAIREMQIKTTMRYHVTPVRMATIKKSGNNRTKLNDSPRLEKQLLGKPSEAAVGYPSPSSSPYLGPLPTTPPALLPPPSPKFPTPRPSLLPLQEMHNGGDVTREPGGEPGERKEEKGRTEALIAALKPGKVQDPQGASTSCYQCGKSGHFKKECPGTSAQLTELTALTLELSKGKVRNAPSKLDLSPFEMLYGWPFLTNDFLLDQETSELGKHVNSLARFQQELTQVAEAQPQEVGPPLFNPGYLVLPKQGGPYTILLSMPSAVKVTGIDSWIHHAQVKAWKTERAIPGSPAECLGYQCEEIRDLKLKIKRDKKMSKGYSSYSVPVIHSVIQSSSLCTTEQVLVSMAARPEDGSHHGTPCRHPQVLAQSLVASLGS

SEQ ID NO: 40480 - protein, 1042 aa, Homo sapiens
  DOMAIN (162)..(205): kw TRANSCRIPTASE REVERSE II ORF2 domain identified by eMATRIX, accession number DM01354T, p-value=1.000e-40, raw score of 9.48
  DOMAIN (48)..(284): Reverse transcriptase domain identified by PFam, accession name rvt, E-value=3.5e-44, PFam score of 160.2
VNRHLIQESSSWHLEGVPLGRSFQRKEQAAIFAVLQPPLVIPWQTGSGVDLLQTPPDLQKRVLTVRRKTNNQKAIASTSTKRTPTQKPHPKVTNIKDQRTNDKNQMIISIDAEKPFNKIQLPFMLKTLNKLGIDGTYFKIIRAIYDKPTANIILNGQKLEAFPLKTGTRQGCPLSPLLFNIVLEVLARAIRQEKEIKGIQLGKEEVKLSLFADDMTVYLENPIVSAQNLLKLISNFSKVSGYKINVKKSQAFLYTSNRQTESQIMSELPFTIASKRIKYLGIQLTRDVKDLFKENYKPLLKEIKEDTNKWKNIPCSWVGRINIVKMAILPKVIYRFNAIPIKLPMTFFTELEKTTLKFIWNQKRACIAKSTLSQKNKAGGITLPDFKLYYKATVTKTAWYWYQNRDIDQWNRTEPSEITPHTYNYLIFDKPEKNKQWGKDSLFNKWCWENWLAICRKLKLDPFLTPYTKINSRWIKDLNVRPKTIKTLEENLGITIQDIGMGKDFMSKTPKAMATKDKIDKWDLIKLKSFCTAKETTIRANRQPTTWEKIFATYSSDKGLISRIYNELKQIYKKKTNNPIKKWAKDMNRHFSKEDIYAAKKHMKKCSSSLAIREMQIKTTMRYHLTPVRMAIIKKSGNNRCWRGCGEIGTLLHCWWDCKLVQPLWKSVWRFLRDLELEIPFDPAIPLLGIYPNDYKSCCYKDTCTRKIRTNGRNCASKKGNINKEARSLFNHWPLQRPRRVYSLHVLCGDTAFRHGLRPAHHHPSLDCLSSTHHGEQAFLREGHLQDKMGKEEEHHSCLVSPAWFIIASGLQPAASGNRCPTEGRRVKILCIIRGIQEKHLPGGKALATPEEAAAGKEAAREQFLSGQQSEILSQKKEEEEKKKKKKKKKKKKEEEEEEEEEEEEEEERRGGGKERVRKEGRKERMNEGRQAGREGGERKREERRRRKEEEEGRGGGGRGEEEEKEEDMLRELRKELPLGPLQLGKDGGMGCALGELCSGLLHLGEDGRVGCALGGHSIEHHADGAPPHDPQHQSCALMACR

SEQ ID NO: 40481 - protein, 320 aa, Homo sapiens
  DOMAIN (182)..(229): kw TRANSCRIPTASE REVERSE II ORF2 domain identified by eMATRIX, accession number DM01354V, p-value=1.000e-40, raw score of 12.97
  DOMAIN (22)..(195): Reverse transcriptase domain identified by PFam, accession name rvt, E-value=4.6e-05, PFam score of 2.2
MDSMSGGGQYRKINGNPTSVKCPLLLLPAILTPEPVNRWRQSCKAFARHSPLAFRVTISTSTFFDGLLVTGLYTSTSVQASQSIGGSSAFGFVLEVLARAIRQEKEIKGIQLGKEEIKLSLFAGDMIVYLENPIVSAQNLLKLISNFSKVSGYKINVQKSQAFLYTNNRQTESQIMSELPFTIASKRIKYLGIQLTRDVKDLFKENYKPLLKEIKEDTNKWKNIPCSWVGRINIVKMAILPKVSESLRREGSSSLQLVIPQSVCPLLWLSPRLIMDLTGEEVHANQSLGSHRQAWKRNHMSPLRSSGLAAQPPAFRPYLA

SEQ ID NO: 40482 - protein, 574 aa, Homo sapiens
  DOMAIN (115)..(158): kw TRANSCRIPTASE REVERSE II ORF2 domain identified by eMATRIX, accession number DM01354T, p-value=1.000e-40, raw score of 9.48
  DOMAIN (7)..(237): Reverse transcriptase domain identified by PFam, accession name rvt, E-value=2.4e-46, PFam score of 167.4
TLMQKSSIKYWQNESSSTSKSLSTMIKWASSLGCKAWFNIRKSIKVIQHINRAKDKNHMIISIDAEKAFDKIQQPFMLKTLNKLGIDGTYFKIIRAIYDKPTANIILNGQKLEAFPLKTGTRQGCPLSPLLFNIVLEVLARAIRQEKEIKGIQLGKEEVKLSLFADDMIVYLENPIVSAQNLLKLIRNFSKVSGYKINVQKSQAFLYTNNRQTESQIMSELPFTIASKRIKYLGIQLTRDVKDLLKENYKPLLKEIKEDTNKWKNIPCSWVGRINIVKMAILPKNWKKTTLKFIWNQKRAHITKSILSQKNKAGGITLPDFKLYYKATVTKTAWYWYQNRDIDQWNRTEPSEIMLHTYNYLIFDKPEKNKQWGKDSLFNKWCWENWLAICRKLKLDPFLTPYTKINSKWIKDLNVRPKTIKTLEENLGITIQDIGMGKDFMSKTPKAMATKAKIDKWDLIKLKSFCTAKEATIRVNRQPTKWEKIFATYSSDKGLISRIYNELKQIYKKKTNNPIKKWVKDMNRHFAKEDIYAAKKHMKKCSPSLAIREMQIKTTMRYHLTPVRMAIIKKSGNN

SEQ ID NO: 40483 - protein, 1164 aa, Homo sapiens
  DOMAIN (1066)..(1102): Ribosomal protein L11 proteins domain identified by eMATRIX, accession number BL00359A, p-value=3.250e-18, raw score of 20.66
  DOMAIN (1059)..(1129): Ribosomal protein L11 domain identified by PFam, accession name Ribosomal_L11, E-value=6.1e-24, PFam score of 90.3
MKEEDGLLGAASVWALMEKNGRGEEIQQPQLKYPGTGIGTNQGNKFTQGEGRKARQDDGPPGAAWSQGNLPYLGKWGCKSDSVASRLAATFRQGRHSCKITSKEKEATPFLAVMASPAESLVVAMELQVKVIDATIMGHPRVAETMWQHLSTRDTGSVTEMTEERVQIWRTEKGYNERREEILEWWEFVGRESVGERNRSLHHAVTAGYGEGVALVIQYCFSYLFDTSFSDAKLKPDTMSAHLCFDSHERTSLENIFFQLEKNKQILKVKSRSFLPGAHMRASTDSLLEVLARAIWPEKEIKGIQLGKKEVILSLFADDMIVYLENPIVSAQNLLKLISNFSKVSGYKINVQKSQAFLYTNNRQTESQIMSELPFTIVSKRIKYLGIQLTRDVKDLFKENYKPLLKEIKEDTNKWKNIPCSWVGRINIVKMAILPKVMYRFNAIPIKLPMPFFTELEKTTLKFIWNQKRARIAKSILSQKNKAGGITLPDFKLYCKATVTKTAWYWYQNRDIDQCNRTEPSEMRPHIYNYLIFDKPDKNKQWGKDSLFNKWCWENWLAICRKLKLDPFLTPYTKINSRWIKDLNVRPKTIKTLGENLGITIQDIGMGKDFLSKTPKAMATEAKIDKWDLIKLKSFCTPKETTIRVNRQPTQWEKIFATYSSDKGLISRIYNALRQIYKKKTNNPIKKDMDETGNHHSQHTIARTKNQTPHVLTHSEETVAQEDDVPLTRSWLLKALKPQEVQSRAKSPDGQYKEEEKEKDSRGCSLLDFPSMPASHCADKAKSDRSGEEVGSGSRSTSWYASKSFQTPPPHKPSELQIINLLNSIAETSAAGVLEVLARAIRQEKEIKGIQLGKEEFKLSLFADDMIVYLENPIVSAQNLLKLISNFSKVSGYKINVQKSQAFLYTNNRQTESQIMSELPFTIASKRIKYLGIQLTRDLKDLFKENYKPLLNEIKEDTNKWKNIPCSWVGRINIVKMAILPKRDVTANCPGSWRFEQRIGQNTQQRKNEATKERKQLSRLSARRRPRCNFLRSSRIRVHPTPAASTMPPKFHPNEIKVVYFTCTGVEVGATSALAPKIGPAGLSPKEVGDDIAKVTGDWKGLRITVKLTIQNRQAQIEVVPSASALIIKRNYQETERNRKTLNTGGISLFMRSSTLLDRCSTDP

SEQ ID NO: 40484 - protein, 1046 aa, Homo sapiens
  DOMAIN (627)..(652): 7 kw REVERSE TRANSCRIPTASE RNA POLYMERASE domain identified by eMATRIX, accession number DM00895E, p-value=3.333e-11, raw score of 15.72
  DOMAIN (598)..(873): Reverse transcriptase domain identified by PFam, accession name rvt, E-value=1.6e-88, PFam score of 307.5
MAAWNLLLKSYAYWGGLRKEDFHCLDRKTLRTVSFLAALLSYESIGGKGKLTTRKDIYTENPSVHHHHQRPKVDKTTKMGKKQNRKTGNSKMQSASPPPKERSSSPATEQSWMENDFEELREEGFRRSNYSELREDIQTKGKEVENFEKNLEECITRITNTEKCLKELMELKTKARELREECRSLRSRCDQLEERVSAMEDEMNEMKREGKFRDKRIKRNEQSLQEIWDYVKRPNLRLIGVPESDVENGTKLENTLQDIIQENFPSLARQANVQIQEIQRTPQRYSSRRATPRHIIVRFTKVEMKEKMLRAAREKGRVTLKGKPIRLTADLSAETLQARREWGPIFNILKEKNFQPRISYPAKLSFISEGEIKYFIDKQMLRDFVTTRPALKELLKEALNMERNNRRKQERSKIDTLTSQLKELEKQEQTHSKASRRQEITKIRAELKEIETQKTLQKINESRSWFFERINKIDRPLARLIKKKREKNQIDTIKNDKGDITTDPTEIQTTIREYYKHLYANKLENLEEMDTFLDTYTLPRLNQEEVESLNRPITGSEIVAIINSLPTKKSPGPDGFTAEFYQRYKEELVPFLLKLFQSIEKEGILPNSFYEASIILIPKPGRDTTKKENFRPISLMNIDAKILNKILANRIQQHIKKLIHHDQVGFIPGMQGWFNIRKSINVIQHINRAKDKNHMIISIDAEKAFDKIQQPFMLKTLNKLGIDGKYFKIIRAIYDKPTANIILNGQKLEAFPLKTGTRQGCPLSPLLFNIVLEVLARAIKQEKEIKGIQLGKEEVKLSVFADDMIVYLENPIVSAQNLLKLISNFSKVSGYKINVQKSQAFLYTNNRQTESQIMSELPFTIASKRIKYLGIQLTRDVKDLFKENYKPLLKEIKEDTNKWKNIPCSWVGRINIVKMAILPKVIYRFNAIPIKLPMTFFTELEKTTLKFIWNQKRARIAKSILSQKNKAGGITLPDFKLYYKATVTKTASVLVPKQRYRSMEQNRALRNNAAYLHYSDPLDKPEKNKHGGKASLIYKMAAGENWLAHM

SEQ ID NO: 40485 - protein, 708 aa, Homo sapiens
  DOMAIN (126)..(173): kw TRANSCRIPTASE REVERSE II ORF2 domain identified by eMATRIX, accession number DM01354V, p-value=1.000e-40, raw score of 12.97
TLMQKSSIKYWQNESSSTSKSLSTMIKWASSLGCKAVLEVLARAIRQEKEIKGIQLGKEEVKLSLFADDMIVYLENPIVSAQNLLKLISNFSKVSGYKINVQKSQAFLYTNNRQTESQIMSELPFTIASKRIKYLGIQLTRDVKDLFKENYKPLLNEIKEDTNKWKNIPCSWVGRINIVKMAILPKVIYRFNAIPIKLPMTFFTELEKTTLKFIWNQKRSCIAKSILSQKNKAGGITLPDFKLYYKATVTKTAWYWYQNGDIDQWNRTEPSEITPHIYNYLIFDKPEKNKQWGKDSLFNKWCCENWLAIYRKLKLDPFFTPYTKINSRWTKDLNVRPKTIKTLEENLGITIQDIGMGKDFMSKTPKATAAKAQIDKWDLIKLKSFCTAKETTIRVNRQPTKWEEIFATYSSDKGLISRIYNELKQIYKKKTNNPIKKWAKDMNRHFSKQDIYAAKKHMKKCSSSLAIREMQIKTTMRYHLTPVRMAIIKKSGNNSQTVKPQNKAHFAKMDRQCVHGLSPRLEHSPRGRSSPRCAECCLYSCLHAQTSNGAVKINLMTESQELGKRRKLISKEEEHTPKLLVLVMNPDPTQKPLSVQCASVSCCIRRDDDSTDFMDLLGEFKEMKPARHLGQHLTLRFTPVIWAHLTTMAFAIPGACIRSHTPAPTPTVQTALSIRVIAAHNDISTSLFVQEGAFREAKDLSHGHVNTV

SEQ ID NO: 40486 - protein, 1310 aa, Homo sapiens
  DOMAIN (998)..(1043): kw TRANSCRIPTASE REVERSE II ORF2 domain identified by eMATRIX, accession number DM01354N, p-value=1.000e-40, raw score of 13.17
  DOMAIN (236)..(1176): Reverse transcriptase domain identified by PFam, accession name rvt, E-value=7.1e-83, PFam score of 288.7
AIKLELRIKNLTQNRSTTWKLNNLLLNDYWVHSEMKAEIKMFFETNENKDTTYQNLWDTFEAKSKSKQHSKASRRQEITKIRAELKEIEIQKTLQKINESRSWFFERINKIDRPLARLIKKKREKNLIDAIKTDKGDITTNPTEIQTTIREYYKHLYANKLENREEMDKFLDTYTLPRLNEEEVESLNTPITGSEIVAIINSLPTKKSPGPDGFTAELYQRYKEELVPFLLKLFQSIEKEGILPNSFYEASIILIPKPGRDTTKKENFRPISLMNIDAKILNKILAKGIQQHIKKLIHHDQVGFIPGMQGRFNIRKSINVIQHINRTKDKNHMIISIDAEKAFDKIQQPFMLKTLNKLGIDGTYFKIIRAIYDKPTASIILNGQKLEAFRLKTGTRQGCPLSPLLFNIVFEILARAIRQEKEIKGIQLGKEEVKLSLFAGDMIVYLENPIVSAQNLLKLISNFSKVSGYKINVQKSQAFLYTNNRQTESQIMSELPFTIASKRIKYLGIQLTRDVKDLFKENYKPLLKEIKEDTNKWKNIPCSWVGRINIVKMAILPKLIGNCSKISGYKINVQKSQAFLYTNNRQTESQIMSELAFTIASKKIKYLGIQLTRDVKDLFKENYKPLLNEIKEDTNKWKNIPCSWVGRINIVKMAILPKVVVAPIVCDIFIYSPSYWSYDCVSRVGSFRWVRGLADFKNEAADPHGVKLQTFTVSVTALKVARLELFVPPGGLVVSLASGVKLQIFTVSVTAHKSSVDPKTEQKQDLLQRAKEQSFHSAEGDPTRYKGSPRPHQTQEPSWLHLVDPAPELQVELPASPGAVRLHSSALGWSMGLGAVEQGVAVVGNLRPHRSPWSGWEAQAWRAAGPQPCPAGRQLRPETLKQNIILSLIQCIGASLVPTGTAELEPSPSLQLRGTTDAAQAIKNEFARVQKRNLCRRGPICFEGDALSWFFEKINKIDRRLARRIKKKREKNQIEAIKNDKGDITTDPTEIQTTIREYYKHLYANKLENLEEMDKFLDPYTLPRISQEEVESLNRPITGSEIEAIINSLPTKKSPAPDGFTAEFYQRYKEKLIVLEVLARAIRQEKEIKGIQLGKEELKLSLFADDMIVYLENPIVSAQNLLKLISNFSKVSGYKINVQKSQAFLYSNNRQTESQIMSELPFTIASKRIKYLGIQLTRDVKDLFKENYKPLLNEVKEDTNKWKNIPCSWIGRINIVKMAILPKTAKNGPVLPPLHSEEKIPFNSPLIIPLNNYGNQSLTKAQVNVSKSDDTLKINGVEDHKSIFDGDGKTYQTVQQFIDEGNYTSGDNHT

SEQ ID NO: 40487 - protein, 621 aa, Homo sapiens
  DOMAIN (212)..(257): kw TRANSCRIPTASE REVERSE II ORF2 domain identified by eMATRIX, accession number DM01354N, p-value=1.000e-40, raw score of 13.17
  DOMAIN (296)..(477): Reverse transcriptase domain identified by PFam, accession name rvt, E-value=2.5e-26, PFam score of 100.9
MENDFDELREEGFRQSNYSELREDIQTKGKEVENFEKNLEECITRITNTEKCLKELMELKTKAQELREEWRSLRSRCDQLEERVSAMEDEMNEMKGEGKFREKRIKRNEQSLQEIWDYVKRPNLCLIGVPERDGQNGTKLENTLQDVIQENFPNLARQANVQIQEIQRTPQRYSSRRATPRHIIVRFTKVEMKEKMLRAAREKEIQTTISEYYKHLYTNKLENLEEMDKFLDTYTLPTLNQEEVESLNRPITGAEIVAIINSLPTKKSPGPDGFTAEFYQRYKEELVPFLLKLFQSIEKEGILPNSFYEASIILIPKSGRDTTKKENFRPISLMNIDAKILNKILANRIQQHIKKLIHHDQVGFIPGMQGWFNIRKSINIIQHINRAKDKNHMIISIDAEKAFDKIQQPFMLKTLNKLGQNLLKLINNFSKFSGYKINVQKSQAFSYTNNRQTESQIMSELPFTIASKRIKYLGIQLTRDVKDLFKENYKPLLNEIKEDTNKWKNIPCSWVGRINIVKMAILPKAIYRFNAIPIKLPMTFFTELEKTTLKFIWNQKRARIAKSILSQKNKAGGITLPDFKLYYKATVTKTAWYWYQNMCYRSMEQNRALSYYVAYLQPSDL

SEQ ID NO: 40488 - protein, 2764 aa, Homo sapiens
  DOMAIN (436)..(477): kw TRANSCRIPTASE REVERSE II ORF2 domain identified by eMATRIX, accession number DM01354I, p-value=1.000e-40, raw score of 15.55
  DOMAIN (682)..(1803): Reverse transcriptase domain identified by PFam, accession name rvt, E-value=9.6e-87, PFam score of 301.6
MGKKQNRKTGNSKTQSASPPPKERSSSPATEKSWMENDFDELREEGFRRSNYSELREDIQTKGKEVENFEKNLEECITRITNTEKCLKELMELKTKARELREECRSLRSRCDQLEERVSAMEDEMNEMKREGKFREKRIKRNEQSLQEIWDYVKRPNLRLTGVPESDGENGTKLENTLQDIIQENFPNLARQVNVQIQEIQRTPQRYSSRRATPRHIIVRFTKVEVKEKMLRAAREKGRVTLKGKPIRLTADLSAETLQARREWGPIFNILKEKNFQPRISYPAKLSFISEGEIKHFTDKQMLRDFVTTRPALKELLKEVLNMERNNQYQPLQNHAKIQINETESQQGYPGIELSSAPSGPNRHLQNSPHQINRIYFFSAPHHTYSKIDHIVGSKALLSKCKRTEIITNYLSDHSAIKLELRIKNLNQSRSTTWKLNNLLLNDYWVHNEMKAEIKMFFETNENKDTTYQNLWDAFKAVCRGKFIALNAHKRKQERSKIDTLTSQLKELEKQEQTHSKASRRQEITKIRAELKEIETQKTLQKINESRSWFFERINKIDRPLARLIKKKREENQIDTIKNDKGDITTDPTEIQTTIREYYKHLYANKLENLEEMDKFLDTYTLPRLNQEEVESLNRPITGAEIVAIINSLPTKKSPGPDGFTAEFYQRYKEELVPFLLKLFQSIEKEGILPNSFYEASIILIPKPGRDTTKKENFRPISLMNIDAKILNKILANRIQQHIKKLIHHDQVGFIPGMQGWFNIRKSINVIQHINRAKDKNHMIISIDAEKAFDKIQQPFMLKTLNKLGIDGTYFKIIRAIYDKPTANIILNGKKLEAFPLKTGTRQGCPLSLLLFNIVLEVLARAIRQEKEIKGIQLGKEEVKLSLFADDMIVYLENPIVSAQNLLKLISNFSKVSGYKINVQKSQAFLYTNNRQTESQIMSELPFTIASKRIKYLGIQLTRDVKDLFKENYKPLLKEIKEDTNKWKNIPCSWVGRINIVKMAILPKVIYRFNAIPIKLPMTFFTELEKTTLKFIWNQKRARIAKSILSQKNKAGGITLPDFKLYYKATVTKTAWYWYQNRDIDQWNRIEPSEITPHTYNYLIFDKPEKNKQWGKDSLFNKWCWENWLAICRKLKLDPFLTPYTKINSRWIKDLNVRPKTIKTLEENLGITIQDIGVGKDFMSKTPKAMATKAKIGKWYLIKLKSFCTAKETTIRVNRQPTTWEKIFATYSSDKGLISRIYNELKQIYKKKTNNPIKKWAKDMNRHFSKEDIYAAKKYVKKCSSSLAIREMQIKTTMRYHLTPVRMAIIKKSGNNSKKNKAGGIMPADFKLYYKAMGTKTAWDMDETENHHAQQTNTRTEKQTPHVLTHKWELNNENTWTQGGEHHTPGPVRGTLGQLTFARLNLSPISYKSLEASAVTSVSMETQIRLPKMRFWYQDDAGLIKCVGEELLFFYCLEPFQKEWYQLLSVPLVEFGCESVWSWAFFGWDMDEAGNHHSQQTNTPTENRTAHLLTHKWELNNENTWTHGGKHHTPGPVGGCSLIQVEIRWFIEMVCKREVYRYDHSWWWQLQQQQQDPQGRLQASGGWALRRVPGHSQNAQAEARWLYCEPREGRSPLAGTVKARVLNVLAPLPCSSSSRDTHFWASSGMSQISDTLSLKLQETLTFLNILLFQRKGEGKNSMSTTLSKEFLTLSFFDFNLFQNSMLEVLARAIRQEKEIKGIQLGKEEVKLSLFADDMIVYLENPIVSAQNLLKLISNFSKVSGYKINVQKSQAFLYTNNRQTESQIMSELPFTIASKRIKYLGIQLTRDVKDLFKENYKPLLKEIKEDTNKWKNIPCSWVGRINIVKMAILPKVIYRFNAIPIKLPMTFFTELEKTTLKFIWNQKRARIAKSILSQKNKAGGITLPDFKLYYKATVTKTAWYWYQNRDIDQWNRIEPSEITPHTYNYLIFDKPEKNKQWGKDSLFNKWCWENWLAICRKLKLDPFLTPYTKINSRWIKDLNVRPKTIKTLEENLGITIQDIGVGKDFMSKTPKAMATKAKIGKWYLIKLKSFCTAKETTIRVNRQPTTWEKIFATYSSDKGLISRIYNELKQIYKKKTNNPIKKWAKDMNRHFSKEDIYAAKKYVKKCSSSLAIREMQIKTTMRYHLTPVRMAIIKKSGNNSKKNKAGGIMPADFKLYYKAMGTKTAWDMDETENHHAQQTNTRTEKQTPHVLTHKWELNNENTWTQGGEHHTPGPVRGTLGQLTFARLNLSPISYKSLEASAVTSVSMETQIRLPKMRFWYQDDAGLIKCVGEELLFFYCLEPFQKEWYQLLSVPLVEFGCESVWSWAFFGWDMDEAGNHHSQQTNTPTENRTAHLLTHKWELNNENTWTHGGKHHTPGPVGGCSLIQVEIRWFIEMVCKREVYRYDHSWWWQLQQQQQDPQGRLQASGGWALRRVPGHSQNAQAEARWLYCEPREGRSPLAGTVKARVLNVLAPLPCSSSSRDTHFWASSGMSQISDTLSLKLQETLTFLNILLFQRKGEGKNSMSTTLSKEFLTLSFFDFNLFQNSMLEVLARAIRQEKEIKGIQLGKEEVKLSLFADDMIVYLENPLVSAQNLLKLISNFSKVSEYKINVQKSQAFLHTNNRQTESQIMSELPFTIASKRIKYLGIQLTRDVKDLFKENYKPLLNEIKEDTNKWKNIPCSWVGRINIVKMAILPKVIYRFNAILIKLPMTFFTELEKTTLKFIWNQKRAHVAKSILSQKNKAGGITLPDFKYKATVTKTAWYI

SEQ ID NO: 40489 - protein, 218 aa, Homo sapiens
  DOMAIN (117)..(164): kw TRANSCRIPTASE REVERSE II ORF2 domain identified by eMATRIX, accession number DM01354V, p-value=1.000e-40, raw score of 12.97
SIAYQPKKSPGPDGFTAELYQRYKEGAVLEVLARAIRQEKEIKGIQLGKEEVKLSLFAGDMIVYLENPIVSAQNLLKLISNFSKVSGYKINVQKSQAFLYTNNRQTESQIMSELPFTIASKRIKYLGIQLTRDVKDLFKENYKPLLNEIKEDTNKWKNIPCSWVGRINIVKMAILPKVIYGFNAIPIKLPMTFFTELEKNYLKVHMEPKKEPTSPSQS

SEQ ID NO: 40490 - protein, 3207 aa, Homo sapiens
  DOMAIN (73)..(114): kw TRANSCRIPTASE REVERSE II ORF2 domain identified by eMATRIX, accession number DM01354I, p-value=1.000e-40, raw score of 15.55
  DOMAIN (285)..(2795): Reverse transcriptase domain identified by PFam, accession name rvt, E-value=5.9e-235, PFam score of 793.9
STELSTPNQQQYTFFSAPHHTYSKIDHILGSKALLSKCERTEIITNYLSDHSAIKLELRIKNLTQNRSTTWKLNNLLLNDYWVHNEMKAEIKMFFETNENKDTTYQNLWDAFKAVCRGKFIALNAHKRKQERSKIDTLTSQLKELEKQEQTHSKASRRQEITKIRAELKEIETQKTFQKINESRSWFFERINKIDRPLARLIKKKREKNQIDTIKNDKGDITTNPTEIQTTIREYYKHLYANKLENLEEMDKFLDTNTLPRLNQEEVESLNRPITGSEIVAIINSLLTKKSPGPDGFTAEFYQRYKEELLGRDTTKKENFRTISLVNIDAKILNKILAKRIQQHVKKLIHYDQVGFIPGMQSWFNIRKSINVIQHIKRAKDRNHMIISIDAEKAFDKIQQPFMLKTLNKLGIDGTYFKIIRVIYDKPTANIILNGQQLEAFPLKTGTRQGCPPSPLLFNIVLEVLARAIRQEKEIKGIQLGKEEVKLSLFADHMIVYLENPIVSAQNLLKLISNFSKVSGYKINVQKSQAFLYTNNRQTESQIMSELPFTIASKRIKYLGIQLTRDVKDLFKENYKPLLKEIKEDTNKWKNIPCSWVGRINIVKMAILPKVIYRFNAIPIKLPMPFFTELEKTTLRFIWNQKRACIAKAILSQKNKAGGITLPDFKLYYKATVTKTAWYWYQNRDIDQCNRTEPSEITLHICNYLIFDKPEKNKQWGKDSLFNKWCWENWLAICRKLKLDPFLTPYTKINSRWIKDLNVRPKTIKTLEENLGITIQDIGMGKDFMSKTPKAMATKDKIDKWDLIKLKSFCTAKETTIRVNRQPTEWEKTFATYSSDKGLISRIYNELKLIYKKKTNNPIKKWAKDMNRHFSKEDIYAAKKHMKKCSSSLAIREMQIKTTVRYHLTPVRMAIIKKSGNNRCWRGCGEIGTLLHCWWDCKLVQPLWKSVWRFLRDLELEIPFDPAIPLLGIYPNDYKSCCYKDTCTLSLPEIRNCPTKSVPVPFSVDETQYHVEDTSPVSWQVKVLGKHIHQGSSYEDVWLPQRMQGKLTNRKDIHTKNPSVHHHHQRPKVDKTTKMGKKQNRKTGNSKKQSASPPPKERSSSPAMQQSWTENDFDELREEGFRRSNYSELREDIQTKGKEVENFEKNLEECITRITNTEKCLKELMELKTKARELREECRSLRSRCDQLEERVSVMEDEMNEMKREGKFRDKRIKRNEQSLQETWDYVKRPNLRLIGVPESDGENGTNLENTLQDIIQENFPNLARQANVQIQEIQRTPQRYSSRRATPRHIIVRFTKVEMKEKMLRAAREKEIQTTIREYYKYLYTNKLENLEEMDKFLDTYTLLRLNQKEVETLNRPITGAEIVAIINSLPTKESPGPDGFTAKFYQRYKEELVPFLLKLFQSIEKEGILPNSFYEASIILIPKPGRDTTKKENFRPISLMNIDAKILNKILADRIQQHIKKLIHHDQVGFIPGMQGWFNICKSINVIQHINRAKDKNHMIISIDAEKAFDKIQQPFMLKTLNKLGIDGTYFKIIRAIYDKPTANIILNGQKLEAFPLKTGTRQGCSLSPLLFNIVLEVLARAIRQEKEIKGIQLGKEEVKLSLFADHMIVYLENPIVSAQNLLKLISNFSKVSGYKINVQKSQAFLYTNNRQTESQIMSELPFTIASKRIKYLGIQLTRDVKDLFKENYKPLLKEIKEDTNKWKNIPCSWVGRINIVKMAILPKVIYRFNAIPIKLPMPFFTELEKTTLRFIWNQKRACIAKAILSQKNKAGGITLPDFKLYYKATVTKTAWYWYQNRDIDQCNRTEPSEITLHICNYLIFDKPEKNKQWGKDSLFNKWCWENWLAICRKLKLDPFLTPYTKINSRWIKDLNVRPKTIKTLEENLGITIQDIGMGKDFMSKTPKAMATKDKIDKWDLIKLKSFCTAKETTIRVNRQPTEWEKTFATYSSDKGLISRIYNELKLIYKKKTNNPIKKWAKDMNRHFSKEDIYAAKKHMKKCSSSLAIREMQIKTTVRYHLTPVRMAIIKKSGNNRCWRGCGEIGTLLHCWWDCKLVQPLWKSVWRFLRDLELEIPFDPAIPLLGIYPNDYKSCCYKDTCTLSLPEIRNCPTKSVPVPFSVDETQYHVEDTSPVSWQVKVLGKHIHQGSSYEDVWLPQRMQGKLTNRKDIHTKNPSVHHHHQRPKVDKTTKMGKKQNRKTGNSKKQSASPPPKERSSSPAMQQSWTENDFDELREEGFRRSNYSELREDIQTKGKEVENFEKNLEECITRITNTEKCLKELMELKTKARELREECRSLRSRCDQLEERVSVMEDEMNEMKREGKFRDKRIKRNEQSLQETWDYVKRPNLRLIGVPESDGENGTNLENTLQDIIQENFPNLARQANVQIQEIQRTPQRYSSRRATPRHIIVRFTKVEMKEKMLRAAREKEIQTTIREYYKYLYTNKLENLEEMDKFLDTYTLLRLNQKEVETLNRPITGAEIVAIINSLPTKESPGPDGFTAKFYQRYKEELVPFLLKLFQSIEKEGILPNSFYEASIILIPKPGRDTTKKENFRPISLMNIDAKILNKILADRIQQHIKKLIHHDQVGFIPGMQGWFNICKSINVIQHINRAKDKNHMIISIDAEKAFDKIQQPFMLKTLNKLGIDGTYFKIIRAIYDKPTANIILNGQKLEAFPLKTGTRQGCSLSPLLFNIVLEVLARAIRQEKEIKGIQLGKEEVKLSLFADDMIVYLENPIVSAQNLLKLISNFSKVSGYKINVQKSQAFLYTNNRQTESQIMSELPFTIASKRIKYLGIQLTRDVKDLFKENYKPLLKEIKEDTNKWKNIPCSWIGRINIVKMAILPKVIYRFNAISIKLPMTFFTELEKTTLKFIWNQKRACIAKSILSQKNKAGGIMLPDFKLYYKATVTKTAQYWNQNRDRDQWNRTEPSEIMPHIYDHLIFDKPDKNKKWGNNSLFNKWCWENWLAIWRKLKLDPFLTPYTKINSRWIKDLHVRPKIIKTLEENLGNTIQDIVMGKDFMSKTPKAMATKAKIDKWDLIKLKSFCTAKETTIRVNRQPTKWEKIFGIYSSDKGLISRIYNELQQIYKKKTNNPIKKWVKDMNRYFSKEDIYAAKRHMKKCSSSLAIREMQIKTTMRYYLTPLRMAIIKKFGNNRQETVREMACLLSGTMDFRHRACFVLSKPDFSTRWPGADAQRPPVLVVVALDSSLPF

SEQ ID NO: 40491 - protein, 1105 aa, Homo sapiens
  DOMAIN (279)..(324): kw TRANSCRIPTASE REVERSE II ORF2 domain identified by eMATRIX, accession number DM01354N, p-value=1.000e-40, raw score of 13.17
  DOMAIN (363)..(638): Reverse transcriptase domain identified by PFam, accession name rvt, E-value=1.4e-88, PFam score of 307.7
FPSFKIAIPKNDHGHEQHFWGYRVPNNAMEDTAYQLVHQYPTRMQARRCRIALSQWSSSHPLPAKRDAPVTSGAHPRRRLSSRRYPPRQSRQARLPTWWPAVSEAAVPQPLLSCYSAPSAMFPVSPGARWGTTTGWKFFETNENKDTTYQNLWDAFKAVCRGKFIPLNAHKRKQERSKIDTLTSQLKELEKQEQTHSKASRRQEITKIRAELKEIETQKTLQKINESRSWFFERINKIDRPLARLIKKKREKNQIDTIKNDKGDITTNPTEIQTTIREYYKHLYAKKLENLEEMDTFLDTYTLPRLNQEEVESLNRPITGAEIVAIFNSLPTKKSPGPDGFTAEFYQRYKEELVPFLLKIFQSIEKEGILPNSFYEASIILIPKPGRDTTKKENFRPISLMNIDAKILNKILANRIQQHIKKLIHHDQVGFIPGMQGWFNIRKSINVIQHINRAKDKNHMIISIDAEKAFDKIQQPFMLKTLNKLGIDGTYFKIIRAIYDKPTANIILNGQKLEAFPLKTGTRQGCPLSPLLFNIVLEVLARAIRQEKEIKGIQLGKEEVKLSLFADDMIVYLENPIISAQNLLKLISNFSKVSGYKINVQKSQAFLYTNNRQTESQIMSELPFTIASKRIKYLGIQLTRDVKDLFKENYKPLLKEIKEDTNKWKNIPCSWVGRINIVKMAILPKVIYRFNAIPIKLPMTFFTELEKTTLKFIWNQKRARIAKSILSQKNKAGGITLPDFKLYYKATVTKTAWYWYQNRDIDQWNRTEPSEITPHTYNYLIFDKPEKNKQWGKDSLFNKWCWENWLAICRKLKLDPFLTPYTKINSRWIKDLNVRPKTIKTLEENLGSTIQDIGVGKDFMSKTPKAMATKAKIDKWDLIKLKSFCTAKETTIRVNRQPTTWEKIFATYSSDKRLISRIYNELKQIYKKKTNNPIKKWAKDMNRHFSKEDIYAAKKHMKKCSSSLAIREMQIKTTMRYHLTPVRMAIIKKSGNNRIRRHFQPRSAMFFCCCPGGEGSGLQWELLLAAWTVLPYPCPAATVGRFLKQAQTADHSFLGHVWRVPSSRSWTDKEILSLVVNRQNQEVVQLIGGLCGTHTISPTQHPATG

SEQ ID NO: 40492 - protein, 1709 aa, Homo sapiens
  DOMAIN (272)..(317): kw TRANSCRIPTASE REVERSE II ORF2 domain identified by eMATRIX, accession number DM01354N, p-value=1.000e-40, raw score of 13.17
  DOMAIN (727)..(1621): Reverse transcriptase domain identified by PFam, accession name rvt, E-value=4.1e-82, PFam score of 286.2
MGDFNTPLSTLDRSMRQKVNKDTQELNSALHQADLIDIYRTLHPKSTEYTFFSAPHHTYSKIDHILGSKALLSKCKRTEIITNYLSDHSAIKLELRIKNLTQNHSTTWKLNNLLLSDYWVHNEMKAEIKMFFETNENKDTTYQNLWDAFKAVCRGKFIALNAHKRKQERSKIDTLTSQLKELEKQEQTHSKASRRQEITKIRAELKEIETQKTLQKINESRSWFFERINKIDRPLARLIKKKREKNQIDTIKNDKGDITTDPTEIQTTIREYYKHLYANKLENLEEMDKFLDTYTLPRLNQEEVESLNRPITGAENVAIINSLPTKKSPGPDGFTAEFYQRYKEELLISNFSKVSGYKINVRKSQAFLYTDNRQTESQIMSELPFTIASKRIKYLGIQLTRDVKDLFKENYKPLLKEIKEDTNKWKNIPWSWVGRINIVKMAILPKVIYRFNAIPIKLPMTFFTELEKTTLKFIWNQKRARIAKAILSQKNKAGGITLPDFKLYYKATVTKTAWYWYQNRDIGQWNRTEPSEITPHVYNYLIFDKPEKTKQWGKDSLFNKWCWENWLAICRKLKLDPFLTPYTKINSRWIKDLNVRPKTIKTLEENLGITIQDIGMGKDFMSKTPKAMATKDKIDKWDLIKLKSFCTAKETTIRVNRQPTEWEKTFATYSSDKGLISRIYNELKLIYKKKTNNPIKKWAKDMNRHFSKEDIYAAKKHMKKCSSSLAIREMQIKTTVRYHLTPVRMAIIKKSGNNRWDTTVMGCLSCPKPEADHMRAVASSWIQREVMEGLSDVASFATKLKNTLIQYHSIEEDKWRVAKKTHVNRTNDKNHVIISIDAEKASGKIQQPFMLKTLNKLGIDRTYLKIIRAIYDKPTDNIILNGQKLEAFPLKPGTRQGCPLSPLLFNIVLEVLARVIRQEKEIKGVQLGKEEVKLSLFADDMIVYLENPIVSPQNLLKLIGNFSKVSGYKINVQKSQAFLYTNKRQTESQIMSELPFTIASKRIKYLGIQLTRDVKDLFKENYKPLLKEIKEDTNKWKNIPCSWVGRINIMKMAILPKVIYRFNAIPIKLPMTFFTELEKTTLKFIWNQKRARIAKAILSQKNKAGGITLPDFKLYYKATVTKTAWYWYQNRDIGQWNRTEPSEITPHVYNYLIFDKPEKTKQWGKDSLFNKWCWENWLAICRKLKLDPFLTPYTKINSRWIKDLNVRPKTIKTLEENLGITIQDIGMGKDFMSKTPKAMATKDKIDKWDLIKLKSFCTAKETTIRVNRQPTEWEKTFATYSSDKGLISRIYNELKLIYKKKTNNPIKKWAKDMNRHFSKEDIYAAKKHMKKCSSSLAIREMQIKTTVRYHLTPVRMAIIKKSGNNRWDTTVMGCLSCPKPEADHMRAVASSWIQREVMEGLSDVASFATKLKNTLIQYHSIEEDKWRVAKKTHVNRTNDKNHVIISIDAEKASGKIQQPFMLKTLNKLGIDRTYLKIIRAIYDKPTDNIILNGQKLEAFPLKPGTRQGCPLSPLLFNIVLEVLARVIRQEKEIKGVQLGKEEVKLSLFADDMIVYLENPIVSPQNLLKLIGNFSKVSGYKINVQKSQAFLYTNKRQTESQIMSELPFTIASKRIKYLGIQLTRDVKDLFKENYKPLLKEIKEDTNKWKNIPCSWVGRINIMKMAILPKVIYRFNAIPIKLPMTFFTEMEKNYFKVHMEPKKEPASPRQS

SEQ ID NO: 40493 - protein, 765 aa, Homo sapiens
  DOMAIN (191)..(232): kw TRANSCRIPTASE REVERSE II ORF2 domain identified by eMATRIX, accession number DM01354I, p-value=1.000e-40, raw score of 15.55
  DOMAIN (437)..(665): Reverse transcriptase domain identified by PFam, accession name rvt, E-value=1.5e-52, PFam score of 188.0
MYQANGKQKKAGVAILVSDKTDFKPTKIKRDKEGHYIMVKGSIQQEELTILNIYAPNTGAPTFIQQVLSDLQRDLDSHTLIIGDFNTPLSTSDRSTRQKVNKDTQELNSALHQADLIDIYRTLHPKSTEYTFFSAPHHTYSKIDHILGSKALLSKCKRTEIITNYLSDHSAIKLELMIKNLTQNHSTIWKLNNLLLNDYWVHKEMKAEIKMFFETNENKDTTYQNLWDTFKAVCRGKFIALNAHKRKQERSKIDTLTSQLKELEKQEQTLSKASRRQEITKIRAELKEIETQKTLQKINESRSRFFERINKIDSLLARLIKKKREKNQIDAIKNDKGDITTNPTEIQTTIREYYKHLYANKLENLEEMDKFLDTYTLPRLNQEEVESLNRPITGAEIVAIINSLPTKKSPGPDGFTAEFYQRYKEEQVPFLLKLFQSIEKEGILPNSFYVSSIILIPKPGRDTTKRENFRPISLMNIDAKILNKILANRIQQHIKKLIHHDQVGFIPGMQGWFNICKSINVIQHINRTKDKNHMIISIDAEKAFDKIQQPFMLKTLNKLDIDGLEVLARAIRQEKEIKGIQLGKEEVKLSLFADDMIVYLENPIVSAQNLLKLISNFSKVSGYKINVQKSQAFLYTNNRQTESQIMSELPFTIASKRIKYLGIQLTRDVKDLFKENYKPLLKEIKEDTNKWKNIPCSWVGRINIVKMAILPKVIYRFNAIPIKLPMTFFTELEKTTLKFIWNQKKSPHCQDNPKQKEQSWRHHAT

SEQ ID NO: 40494 - protein, 331 aa, Homo sapiens
  DOMAIN (117)..(160): kw TRANSCRIPTASE REVERSE II ORF2 domain identified by eMATRIX, accession number DM01354T, p-value=1.000e-40, raw score of 9.48
  DOMAIN (7)..(243): Reverse transcriptase domain identified by PFam, accession name rvt, E-value=1.7e-34, PFam score of 128.1
TLMQKSSIKYWQTESSSTSKSLSTMIKWASSLGMQGWFNICKSINVIQHINRTKGKNHMIISIDAEKAFDKIQQPFLLKTLNKLGIDGTYLKIIRAIYDKPIANIILNGQKLTFEKFPLKIGTRQGCPLSPLLFNIVLEVLARAIRQEKEIKGIQLAKEEVKLSLFADDMIVYLENPIVSVQNLLKLISNFSKVSGYKIYKIDVQKSQAFLYTNNRQTESQIMSELPFTIASKRIKYLGIQLTRDVKDLFKENHKPLLKEIKEDTNKWKNIPCSWVGGRINLVKMAILPKVIYRFNAIPIKLPMTFFTELEKNYFKVHMEPKKEPVLPSQS

SEQ ID NO: 40495 - protein, 87 aa, Homo sapiens
SRRGLLPWNPSGCGAHGVLWRSRSLRPLFTVLMINGAGFPSCTTCSILSRIHLGAEKKQSVRDRGFSGYAEKQGMLKKGPEGRAYGD

SEQ ID NO: 40496 - protein, 51 aa, Homo sapiens
  DOMAIN (1)..(51): Neuromodulin (GAP-43) proteins domain identified by eMATRIX, accession number BL00412D, p-value=6.674e-10, raw score of 16.54
MQFPKTKTKKKEEEEEEEEEEEEEEEEEEEEEEEEEEEEEEEGEEEKEEII

SEQ ID NO: 40497 - protein, 482 aa, Homo sapiens
  DOMAIN (136)..(147): RNase H domain identified by eMATRIX, accession number PF00075B, p-value=2.636e-13, raw score of 12.56
  DOMAIN (70)..(253): Reverse transcriptase domain identified by PFam, accession name rvt, E-value=1.8e-32, PFam score of 121.3
MGKKLPICCPLLEEEINPEVWALEGESGKAKNARPVQIRLKDPTTFPYQRQYPLRSEAHKGLQNIVKHLKAQGLVRKCSSPCNTPILGVQKPNGQWRLVQDLRLIEAVIPLYPVVPNPYTLLSQIPEEAEWFIVLDIKDAFFCIPLHSDSQDPTDHTSQLMWTVLPQGFRDSPHLFGQALAQDLSYFSSPGTLVLQYVDDLLLATSSEASCQQAILDLLNFLANQGYKLSRSKAQLCLQQTLKQLKGFLGITGFCQLWIPGCSEIARLLYTPIKETQRANTHLVEWEPEAETAFKTLKQVLVQAPALSLPTGQNFSLYVTERARIALGVLTQTRGTTPQPVAYLSKEIDVVAKGWPHCLRVVAAVAILVSEAIKIIQGKDLTVWSTHDVNGTLGAKGSLWLSDNNLLRYQALLLEGPVLEICMCVALNPAPFLPEDGEPIEHDCQQIIVQTYAAQDDLLEVPLTNPDLNLYTNGSSFVENGI

SEQ ID NO: 40498 - protein, 817 aa, Homo sapiens
  DOMAIN (284)..(295): RNase H domain identified by eMATRIX, accession number PF00075B, p-value=3.793e-12, raw score of 12.56
  DOMAIN (221)..(402): Reverse transcriptase domain identified by PFam, accession name rvt, E-value=5.8e-38, PFam score of 139.5
  misc_feature (1)...(817): Xaa = X or * as defined in Table 2
ETSCPLVRVHYAEAITGRCTAPEDEGSLGQKPPARRSNNRTEGAWGKRQLMSSPSTEPRVCLTIEGQEIDFLLDTGAAFSVLISCPGRLSSTSVTIQGILGQPVTRYFSHLLSCNWETLLFSHAFLLMPERPTGLLGRDILAKAGAIIYMNMGNKLPICCPLLEEGINPEVWALEGQFGRAKNAHPVQIRLKDPTTFPYQRQYPLRPEAHKGLQNIVKHLKAQGLVRKCSSPCNTPILEVQRPRLVQDLRLINEAVISLYPVVPNPYTLLSQIPEEAEWFTVLDLKDAFFCVPLHSDSQFLFAFEDPTNHTSQLTWMVLPQGFRDSPHLFGQALAKDLGHFSSPGTLVLQYVDDLLLATSXEALCQQATLDLLNFLANQGYKVSMSKAQLCLQQVKYLGLILAKGTRALSKEXIQPILAYPRPKTLKQLREFLGITSFCRLWIPGYSETARPLYTLIKDTQRANTHLVEWESEAETAFKTLKQALVQAPGLSLPTGQNFSLYVTERAGIALGVLTQTRGTTPQPVAHLSKETDVVAKGWPHCLRVVAAVAVLVSEAIKIIQGKDLIVWTTHEVNGILGAKGSLWLSDNCLLRYQALLLEGPVLQICTCMALNPATFLPEDGEPIKHDCQQIIVQTYAARDDLLEVPLTNPDLNLYTDGSSFVENGIRKVSDVTILESKPLPPGTSAQLAELVALTWALELGKGKRINVYTDSKYAYLILHAHAAIWKEREFLTSVGTPIKYHKEIIELLHAMQKHKEVGILHXQSHQNRKERGEQQHKQLAEAAERKERDRKSKKETERKRQEVREKEGQTQKSKRG

SEQ ID NO: 40499 - protein, 843 aa, Homo sapiens
  DOMAIN (253)..(265): RNase H domain identified by eMATRIX, accession number PF00075C, p-value=9.786e-11, raw score of 11.58
  DOMAIN (534)..(676): RNase H domain identified by PFam, accession name rnaseH, E- value=8.8e-15, PFam score of 62.5
MTQEPSAIMREVPEMVNILKGTGDIHNTEIQNDNGKVGMTKCMAKPKDELRNLKLILSESLESAQRQGVSKQEKVLQCRRAQDLQPTMPEPPIPSMGSCAARASPTSATPCSRAPSPTDHPTAAKCRRMARYWQAAPPAALVLDQLGEASWAPESANLVGKWRTFVSSSGTANAPISTLSKQTTGLYQSAGCGWGQNLGAKYRAPVGQLKATSTAARLKTRVSGFLGKGSLTTPDSSELGPLDPTDHTSQLTWTVLPQGFRDSPHLFGQALAQDLGHFSSPGTLILQYVDDLLLATSLEALCQKATLDLLNFLANQGYKVSRLKAQLCLQSEIARPLYTLIKETQRANTHLVVSEPEAVIAFETLKQALVHAPALSLPIGQNFSLYITERAGIALGDLTQTCGTTPQPVAYLSKEIDVVAKGWPHCLRVVAAVAILVSEAIKIMQGKDLTVWTTHDVNGILGAKGSLWLSDNHLLRYQALLLEGLVLQICTCVALNTATFLPEDGEPIEHDCQQIIVQTYATRDDLLEVPLTNPDLNLYTDGSSVVENGIRRAGYAIVSDVTILESKPLVPGTSAQLAELVALTRALELGKGKIINVYTDSKYAYLILHAHAAIWKEWEFLTSGNPHGCHREVMELLHMVQETKEVGVLHYQSHQNGKERGEQQRKQLAEASAAFLWGRALDLQPTMPEPPIPSMGSCAARASPTSASPAPRRPVPSTTQRLRSAGAWHGTGRQLHLQPRCWINWVKPSGLLSLVGPRRTFMSSSGIVNTPVGTLSVAQEPLFAVYMAVSMDCGVTVVRQISRECISIVQLSLHAQSCTKQRGQKMQISLDRPGNSYFNSEPV

SEQ ID NO: 40500 - protein, 65 aa, Homo sapiens; identical to SEQ ID NO: 37354

SEQ ID NO: 40501 - protein, 86 aa, Homo sapiens
MEYYAAIKKNEIMSFAGTWMKLEAITLSKLTQEQKTKHCMFSLATKRICSALKTEIHIHRKNRPPPAAEKGASGTGQPGERKCIQS

SEQ ID NO: 40502 - protein, 98 aa, Homo sapiens
  DOMAIN (74)..(86): Small cytokines (intercrine/chemokine) C-C subfamily signatur domain identified by eMATRIX, accession number BL00472A, p-value= 3.368e-11, raw score of 7.45
MEYYAAIKRNEFMSVAGTWMKLEAITLSKLTQEQKTKHCMLSLAGRWARGAERLRPTQKPPPLTPKLTPSASNMKVSAALLWLLLIAAAFSPQGLAGP

SEQ ID NO: 40503 - protein, 146 aa, Homo sapiens; identical to SEQ ID NO: 37357

SEQ ID NO: 40504 - protein, 50 aa, Homo sapiens
LEIFTMDSCVGVGRRLSKQLLKAPSSPIILSKLTQEQKTKHCMFSLISGS

SEQ ID NO: 40505 - protein, 129 aa, Homo sapiens; identical to SEQ ID NO: 37362

SEQ ID NO: 40506 - protein, 99 aa, Homo sapiens
MDEAGNHHSQQTHTGTENQALHVLTHKWELNNENTWTQGGEHHTPGPVGDQNKERPTEKAKLHQGKFSLQMQISSIKDSFLDILTFPAFPNNHLEICRR

SEQ ID NO: 40507 - protein, 29 aa, Homo sapiens
WMKLEAIILSKLTQEQKTKHCMFSLISGS

SEQ ID NO: 40508 - protein, 416 aa, Homo sapiens
  DOMAIN (153)..(202): kw TRANSCRIPTASE REVERSE II ORF2 domain identified by eMATRIX, accession number DM01354Z, p-value=9.388e-10, raw score of 9.06
KTKVHRDYVTYSRLHRQYAAVLELEARAHPLNYPTTLPLQAEGERLENKKGCKGRSCHGQSDPSNSAASSSDITFSGRIKKLRHRKFSRLSKVMQLGQLQPVKFQHSSAKHRPDMASHTSELAAASFVTRQVFVAQMLLRTELCPPKIHVEASTSSAAVFSDRACKEVVRLDKNFNISMVDNFRGQGWLYTMEYYAAIKKNEFMSFAGTWMKLETILLSKLTQEQKTKHCRFSLIAPGSHHSAFCLYEFDSSRDFLDFADFGTTIKQDFRLLGQTSVDRLLQLSQGQAVKGNQLLPVSLVKRKTTLAPNTQTASPRALADSLMQLARQVSRLESGQDFADFGTTIKQDFRLLGQTSVDRLLQLSQGQAVKGNQLLPVSLVKRKTTLAPNTQTASPRALADSLMQLARQVSRLESGQ

SEQ ID NO: 40509 - protein, 26 aa, Homo sapiens
  misc_feature (1)...(26): Xaa = X or * as defined in Table 2
WMKLETSKLTXEQKTKHCMFSLISGS

SEQ ID NO: 40510 - protein, 31 aa, Homo sapiens
GTWMKLETIILSKLTQEQKTKHCMFSLISGS

SEQ ID NO: 40511 - protein, 61 aa, Homo sapiens
TPDLILEAMNLNRNWCSAGWQDAETWCCQAGTWMKLETIVLSKLTQEQKIKHCMFSLISGS

SEQ ID NO: 40512 - protein, 148 aa, Homo sapiens
MQNQEKFGELISEWAPYGRPRPQIAVGDHHISVYDGEVNWRMSSLQASAAGKDYANRGTEWGEEPSQMLRHELLSGEMCVSRNRGQPLANSERRSEALSPVTPKKLIPADGHKSDPGRTWMKLETIILSKLTQEQKTKHHMFSLISGS

SEQ ID NO: 40513 - protein, 120 aa, Homo sapiens
MRTHGHRDGEHHTPGPVGGSHFAPFWVVGFDSTFHPRGIPQMAGDPCLSAHIEEGDNKLTGSNRLIGVGFVDSGIPETAASLETPNISCQILHRIFSSPGWKHKPGYQHSDSQVGESAKH

SEQ ID NO: 40514 - protein, 298 aa, Homo sapiens
IYNHLIFDKPDKNKQWGKDSLFNKWCWENWLAICRKLKLDPFLTPYTKINSRWIKDLNVRPKTIKTLEENLGNTIQDIGMGKDFMTKTPEAMATKAKIDKWDLIQLKSFCTANETVIRVNRQPTEWEKIFAIIYPSDKGLISKIYKELYEKKTNNLIKKWAKDMNRHFSKEDFYEAKKHEKSSSLLGQGVTKGGCCLPMNLLGTYRSEENPSEYQRRQLIKTLRVCKPSSSYFLTSDFLDTPSFSCEPTQTNELQGCSLRFRVATAAGPVQVRGARLPSFAAPERGLAQIPRQMDSKI

SEQ ID NO: 40515 - protein, 115 aa, Homo sapiens
APGRRRRLCQPAGGPGAWPGSAVPGSVSPAPDARSPISGPSRALRRHLRPSAAGGPGLEIPTHDPHLPGVDYKEGRPPSGKAGRGGPPGKGSPSASGARALGVPAAAATPRASTL

SEQ ID NO: 40516 - protein, 170 aa, Homo sapiens
  DOMAIN (3)..(39): RECEPTOR CELL NK GLYCOPROTEIN IMMUNOGLOB domain identified by eMATRIX, accession number PD01652A, p-value=1.000e-40, raw score of 15.35
  DOMAIN (42)..(147): Immunoglobulin domain identified by PFam, accession name ig, E-value=3.9e-05, PFam score of 21.6
MEGVHRKPSFLALPGHLVKSEETVILQCWSDVMFEHFLLHREGTYRCYGSVPHSPYQLSAPSDPLDMVIIGLYEKPSLSAQPGPTVQAGENVTLSCSSRSSYDMYHLSREGEAHERRLPAVRSINGTFQADFPLGPATHGGTYRCFGSFRDAPYEWSNSSDPLLVSVTGN

SEQ ID NO: 40517 - protein, 85 aa, Homo sapiens
AELGRGRLLHRQHHVAHGRQHGVCCESLSCSSRSSYDIYHHQFSLFHGQGRQHGQAPGFMMLTLPRPATLQPSSPAVRHSTLYVH

SEQ ID NO: 40518 - protein, 323 aa, Homo sapiens
  DOMAIN (207)..(252): RECEPTOR CELL NK GLYCOPROTEIN IMMUNOGLOB domain identified by eMATRIX, accession number PD01652C, p-value=8.080e-30, raw score of 7.71
  DOMAIN (70)..(180): Immunoglobulin domain identified by PFam, accession name ig, E-value=1.1e-06, PFam score of 26.6
  misc_feature (1)...(323): Xaa = X or * as defined in Table 2
MWSTCKLHGQGAKYILCAAELSWGAASCLHGSTMSLTVVSMACVGAWPLMGGQDKPFLSARPSTVVPRGGHVAFRCHYRRGFNNFMLYKEDRSHVPIFHGRIFQESFIMGPVTPAHAGTYRCRGSRPHSLTGWSAPSNPLVIMVTGNHRKPSLLAHPGPLLKSGETVILQCWLSAPSDPLDIVITGWENPCLSHVLXSXSHSXELPADDGEKHGQMQREPKTGXNPSSSWPSPTEPSSKSGICRHLHVLIGTSVVIFLFILLLFFLLYRWCSNKKDSDEQDPQEVTYAQLNHCVFIQRKISRPSQRPKTPLTDTSVYTELPNA

SEQ ID NO: 40519 - protein, 95 aa, Homo sapiens
AWIGDMGLDWRYGLRVEISAWSGDMGLEWRYGLREGMFNDTLRLIGEHHDGVSKANFSISRMKQDLAGTYRCYGSVTHSPYQLSAPSDPLDIVII

SEQ ID NO: 40520 - protein, 438 aa, Homo sapiens [sequence omitted]

SEQ ID NO: 40521 - protein, 336 aa, Homo sapiens
  DOMAIN (185)..(237): RECEPTOR CELL NK GLYCOPROTEIN IMMUNOGLOB domain identified by eMATRIX, accession number PD01652B, p-value=1.000e-40, raw score of 8.50
  DOMAIN (30)..(271): Immunoglobulin domain identified by PFam, accession name ig, E-value=6.7e-21, PFam score of 72.4
MSLMVVSMACVGGQDKPFLSAWPSPVVSEGEHVALQCRSRLGFNEFSLSKEDGMPVPELYNRVFRNTVFIGPVTPAHAGTYRCRGSHPHFLTGWSAPSNPLVIMVTGPLVKSEETVILQCWSDVMFEHFLLHREGKFNDTLRLTGELHDGVSKANFSIGRMTQDLAGTYRCYGSVPHSPYQLSAPSDPLDIVITGLCGKPSLSAQPRPMVKAGESVTLSCSSRSSYDIYHLSRDGEAHELRFPAVPKVNGTFQANFPLGPATHGGTYRCFGSFRDSPYEWSDLSDPLLVSVTAKQSGSWTLSFGVQQNPKSIVGLNTAMLYILVSQQTLEENSLYS

SEQ ID NO: 40522 - protein, 358 aa, Homo sapiens
  DOMAIN (39)..(75): RECEPTOR CELL NK GLYCOPROTEIN IMMUNOGLOB domain identified by eMATRIX, accession number PD01652A, p-value=1.000e-40, raw score of 15.35
  DOMAIN (57)..(215): Immunoglobulin domain identified by PFam, accession name ig, E-value=1.8e-11, PFam score of 42.0
  misc_feature (1)...(358): Xaa = X or * as defined in Table 2
GQDKPLLSAWPSLVVPLGHVILRCHSYLGFNNFSLYKEGVHRKPSLLAHPGRLVKSEETVILQCWSDVRFEHFLLHREGKFKDTLHLIGEHHDGVSKANFSIGPMMQDLAGTYRCYGSVTHSPYQLSAPSDPLDIVITGLYEKPSLSAQPGPTVLAGESVTLSCSSRSSYDMYHLSREGEAHERRFSAGPKVNGTFQADFPLGPATHGGTYRCFGSFRDSPYEWSNSSDPLLVSVTGNSRYLHALIGTSVVIIPFAILLFFLLHRWCANKKNAAVMDQEPAGNRTVNSEDSDEQDHQEVSYAXLDHCVFTQREITRPSERPKTPPTDTSMYIELPNAEPRSKVVFCPRAPQSGLEGIF

SEQ ID NO: 40523 - protein, 458 aa, Homo sapiens
  DOMAIN (122)..(158): RECEPTOR CELL NK GLYCOPROTEIN IMMUNOGLOB domain identified by eMATRIX, accession number PD01652A, p-value=1.000e-40, raw score of 15.35
  DOMAIN (45)..(298): Immunoglobulin domain identified by PFam, accession name ig, E-value=3.3e-18, PFam score of 63.7
GSTMSLTVVSMACVGFFLLQGAWPLMGGQDKPFLSARPSTVVPRGGHVALQCHYRRGFNNFMLYKEDRSHVPIFHGRIFQESFIMGPVTPAHAGTYRCRGSRPHSLTGWSAPSNPVVIMVTGNHRKPSLLAHPGPLLKSGETVILQCWSDVMFEHFFLHREGISEDPSRLVGQIHDGVSKANFSIGPLMPVLAGTYRCYGSVPHSPYQLSAPSDPLDIVITGLYEKPSLSAQPGPTVQAGENVTLSCSSWSSYDIYHLSREGEAHERRLRAVPKVNRTFQADFPLGPATHGGTYRCFGSFRALPCVWSNSSDPLLVSVTGNPSSSWPSPTEPSSKSGICRHLHVLIGTSVVIFLFILLLFFLLYRWCSNKKNAAVMDQEPAGDRTVNRQDSDEQDPQEVTYAQLDHCVFIQRKISRPSQRPKTPLTDTSVYTELPNAEPRSKVVSCPRAPQSGLEGVF

SEQ ID NO: 40524 - protein, 491 aa, Homo sapiens
  DOMAIN (183)..(219): RECEPTOR CELL NK GLYCOPROTEIN IMMUNOGLOB domain identified by eMATRIX, accession number PD01652A, p-value=1.000e-40, raw score of 15.35
  DOMAIN (106)..(359): Immunoglobulin domain identified by PFam, accession name ig, E-value=2.4e-18, PFam score of 64.2
RVAFDAGSGLAMIASRARTRGCSRVRGSPPMMWSTCKLHGQGAKNILCAAELSSVAAACLPGSTMSLLVVSMACVGFFLVQRAGPHVGGQDKPFLSAWPSAVVPRGGHVTLRCHYRHRFNNFMLYKEDRIHVPIFHGRLFQESFNMSPVTTAHAGNYTCRGSHPHSPTGWSAPSNPVVIMVTGNHRKPSLLAHPGPLVKSGERVILQCWSDIMFEHFFLHKEGISKDPSRLVGQIHDGVSKANFSIGPMMLALAGTYRCYGSVTHTPYQLSAPSDPLDIVVTGPYEKPSLSAQPGPKVQAGESVTLSCSSRSSYDMYHLSRERGAHERRLPAVRKVNRTFQADFPLGPATHGGTYRCFGSFRHSPYEWSDPSDPLLVSVTGNPRHLHILIGTSVVIILFILLLFFLLHLWCSNKKNAAVMDQEPAGNRTANSEDSDEQDPEEVTYAQLDHCVFTQRKITRPSQRPKTPPTDTILYTELPNAKPRSKVVSCP

SEQ ID NO: 40525 - protein, 499 aa, Homo sapiens
  DOMAIN (163)..(199): RECEPTOR CELL NK GLYCOPROTEIN IMMUNOGLOB domain identified by eMATRIX, accession number PD01652A, p-value=1.000e-40, raw score of 15.35
  DOMAIN (86)..(339): Immunoglobulin domain identified by PFam, accession name ig, E-value=1.6e-20, PFam score of 71.2
  misc_feature (1)...(499): Xaa = X or * as defined in Table 2
MGLEWRYGPGGADMDLEWRYGPGVEMWVWSGDMGLEVEIRAWSGDMGLEWRYEPGDGDMGLEWRYGPGGGQDKPLLSTWPSLVVPPEHVTLRCHSNLGFNNFSLYKDDGVPVPELYNRIFWKSLFMGPVTPSHTGTYRCRGSHTHSPSGGSAPSNPLVIVVTGFRRKPSLLAHPGPLVKSEETVILQCWSDVMFEHFLLHREGTFNHTLRLIGEHIDGVSKGNFSIGRMTQDLAGTYRCYGSVTHSPYQLSAPSDPLDIVITGLYEKPSLSAQPGPTVLAGESVTLSCSSRSSYDMYHLSREGEAHERRLPAGPKVNRTFQADFPLDPATHGGTYRCFGSFRDSPYEWSKSSDPLLVSVTGNSSNSWPSPTEPSSETGNPRHLHVLIGTSVVKLPFTILLFFLLHRWCSNKKNASVMDQGPAGNRTVNREDSDEQDHQEVSYAXLDHCVFTQRKITPPSQRPKTPPTDSSMYIELPNAESRSKAVFCPRAPQSGLEGIF

SEQ ID NO: 40526 - protein, 388 aa, Homo sapiens
  DOMAIN (119)..(155): RECEPTOR CELL NK GLYCOPROTEIN IMMUNOGLOB domain identified by eMATRIX, accession number PD01652A, p-value=1.000e-40, raw score of 15.35
  DOMAIN (42)..(295): Immunoglobulin domain identified by PFam, accession name ig, E-value=2.9e-19, PFam score of 67.1
MSLMVVSMACVGLFLVQRAGPHMGGQDKPFLSAWPSAVVPRGGHVTLRCHYRHRFNNFMLYKEDRIHIPIFHGRIFQESFNMSPVTTAHAGNYTCRGSHPHSPTGWSAPSNPVVIMVTGNHRKPSLLAHPGPLVKSGERVILQCWSDIMFEHFFLHKEGISKDPSRLVGQIHDGVSKANFSIGPMMLALAGTYRCYGSVTHTPYQLSAPSDPLDIVVTGPYEKPSLSAQPGPKVQAGESVTLSCSSRSSYDMYHLSREGGAHERRLPAVRKVNRTFQADFPLGPATHGGTYRCFGSFRHSPYEWSDPSDPLLVSVTGNPSSSWPSPTEPSSKSGNPRHLHILIGTSVVIILFILLLFFLLHLWCSNKKKCCCNGPRACREQNSQQRGL

SEQ ID NO: 40527 - protein, 372 aa, Homo sapiens
  DOMAIN (36)..(72): RECEPTOR CELL NK GLYCOPROTEIN IMMUNOGLOB domain identified by eMATRIX, accession number PD01652A, p-value=1.000e-40, raw score of 15.35
  DOMAIN (54)..(212): Immunoglobulin domain identified by PFam, accession name ig, E-value=2.5e-10, PFam score of 38.3
  misc_feature (1)...(372): Xaa = X or * as defined in Table 2
AGARPPVCTGSTMSLMVIIMACVGFFLLQGAWPQEGVHRKPSFLALPGHLVKSEETVILQCWSDVMFEHFLLHREGKFNNTLHLIGEHHDGVSKANFSIGPMMPVLAGTYRCYGSVPHSPYQLSAPSDPLDMVIIGLYEKPSLSAQPGPTVQAGENVTLSCSSRSSYDMYHLSREGEAHERRLPAVRSINGTFQADFPLGPATHGGTYRCFGSFRDAPYEWSNSSDPLLVSVTGNPSNSWPSPTEPSSKTGNPRHLHVLIGTSVVKIPFTILLFFLLHRWCSDKKNAAVMDQEPAGNRTVNSEDSDEQDHQEVSYAXLDHCVFTQRKITRPSERPKTPPTDTSMYIELPNAEPRSKVVFCPRAPQSGLEGIF

SEQ ID NO: 40528 - protein, 444 aa, Homo sapiens
  DOMAIN (119)..(155): RECEPTOR CELL NK GLYCOPROTEIN IMMUNOGLOB domain identified by eMATRIX, accession number PD01652A, p-value=1.000e-40, raw score of 15.35
  DOMAIN (42)..(295): Immunoglobulin domain identified by PFam, accession name ig, E-value=2e-20, PFam score of 70.9
MSLMVVSMACVGLFLVQRAGPHMGGQDKPFLSAWPSAVVPRGGHVTLRCHYRHRFNNFMLYKEDRIHIPIFHGRIFQESFNMSPVTTAHAGNYTCRGSHPHSPTGWSAPSNPVVIMVTGNHRKPSLLAHPGPLVKSGERVILQCWSDIMFEHFFLHKEGISKDPSRLVGQIHDGVSKANFSIGPMMQDLAGTYRCYGSVTHSPYQLSAPSDPLDIVITGLYEKPSLSAQPGPTVLAGESVTLSCSSRSSYDMYHLSREGEAHERRFSAGPKVNGTFQADFPLGPATHGGTYRCFGSFRDSPYEWSNSSDPLLVSVTGNPSNSWPSPTEPSSETGNPRHLHVLIGTSVVIILFILLLFFLLHRWCSNKKNAAVMDQESAGNRTANSEDSDEQDPQEVTYTQLNHCVFTQRKITRPSQRPKTPPTDIIVYTELPNAESRSKVVSCP

SEQ ID NO: 40529 - protein, 147 aa, Homo sapiens
  misc_feature (1)...(147): Xaa = X or * as defined in Table 2
RARHRVTRPSIRKHSGHIRRILCLTCSSGVFLQGLRAGSRGTGPGLRTGWRLSPRAPRRRLHTPSASSPXCSQXRGPSAGTAAGARRRWRCRGQLRHPAGTSPPGRRWTGTACGPPAAPPAPWHSSWSCPHSGAGPPWSPACRTASL

SEQ ID NO: 40530 - protein, 1050 aa, Homo sapiens
  DOMAIN (402)..(431): MYOSIN HEAVY CHAIN SIGNATURE domain identified by eMATRIX, accession number PR00193D, p-value=3.571e-32, raw score of 14.36
  DOMAIN (34)..(704): Myosin head (motor domain) domain identified by PFam, accession name myosin_head, E-value=0, PFam score of 1087.0
QAEFAAASTTPALGSDGVRVTMDSALTARDRVGVQDFVLLENFTSEAAFIENLRRRFRENLIYTYIGPVLVSVNPYRDLQIYSRQHMERYRGVSFYEVPPHLFAVADTVYRALRTERRDQAVMISGESGAGKTEATKKLLQFYAETCPAPQRGGAVRDRLLQSNPVLEAFGNAKTLRNDNSSRFGKYMDVQFDFKGAPVGGHILSYLLEKSRVVHQNHGERNFHIFYQLLEGGEEETLRRLGLERNPQSYLYLVKGQCAKVSSINDKSDWKVVRKALTVIDFTEDEVEDLLSIVASVLHLGNIHFAANEDSNAQVTTENQLKYLTRLLSVEGSTLREALTHRKIIAKGEELLSPLNLEQAAYARNALAKAVYSRTFTWLVGKINRSLASKDVESPSWRSTTVLGLLDIYGFEVFQHNSFEQFCINYCNEKLQQLFIELPLKSEQEEYEAEGIAWEPVQYFNNKIICDLVEEKFKGIISILDEECLRPGEATDLTFLEKLEDTVKHHPHFLTHKLADQRTRKSLGRGEFRLLHYAGEVTYSVTGFLDKNNDLLFRNLKETMCSSKNPIMSQCFDRSELSDKKRPETVATQFKMSLLQLVEILQSKEPAYVRCIKPNDAKQPGRFDEVLIRHQVKYLGLLENLRVRRAGFAYRRKYEAFLQRYKSLCPETWPTWAGRPQDGVAVLVRHLGYKPEEYKMGRTKIFIRFPKTLFATEDALEVRRQSLATKIQAAWRGFHWRQKFLRVKRSAICIQSWWRGTLGRRKAAKRKWAAQTIRRLIRGFILRHAPRCPENAFFLDHVRTSFLLNLRRQLPRNVLDTSWPTPPPALREASELLRELCIKNMVWKYCRSISPEWKQHLQQKAVASEIFKGKKDNYPQSVPRLFISTRVGTDEINPRVLQALGSEPIQYAVPVVKYDRKGYKPRSRQLLLTAQRPFVIVEDAKVKQRIDYANLTGISVSSLSDSLFVLHVQRADNKQKGDVVLQSDHVIETLTKTALSANRVNSININQGSITFAGGPGRDGTIDFTPGSELLITKAKNGHLAVVAPRLNYR

SEQ ID NO: 40531 - protein, 935 aa, Homo sapiens
  DOMAIN (341)..(370): MYOSIN HEAVY CHAIN SIGNATURE domain identified by eMATRIX, accession number PR00193E, p-value=9.069e-22, raw score of 19.47
  DOMAIN (80)..(596): Myosin head (motor domain) domain identified by PFam, accession name myosin_head, E-value=7.7e-188, PFam score of 637.4
MLNGCAHAHPIFPTRILSECPRGMLRAGFHLNRREALPPSRSHISAAVLAPGALLSWGPDHPLELYGLHSHQDPPTGYEGVKGAPVGGHILSYLLEKSRVVHQNHGERNFHIFYQLLEGGEEETLRRLGLERNPQSYLYLVKGQCAKVSSINDKSDWKVVRKALTVIDFTEDEVEDLLSIVASVLHLGNIHFAANEESNAQVTTENQVKYLTRLLSVEGSTLREALTHRKIIAKGEELLSPLNLEQAAYARDALAKAVYSRTFTWLVGKINRSLASKGRRPAFPLSWSCVPTEPLWALLLPYSFEQFCINYCNEKLQQLFIELTLKSEQEEYEAEGIAWEPVQYFNNKIICDLVEEKFKGIISILDEECLRPGEATDLTFLEKLEDTVKHHPHFLTHKLADQRTRKSLGRGEFRLLHYAGEVTYSVTGFLDKNNDLLFRNLKETMCSSKNPIMSQCFDRSELSDKKRPETVATQFKMSLLQLVEILQSKEPAYVRCIKPNDAKQPGDSRQRQPADHGAPPTPGRFDEVLIRHQVKAGFAYRRKYEAFLQRYKSLCPETWPTWAGRPQDGVAVLVRHLGYKPEEYKMGRTKIFIRFPKTLFATEDALEVRRQSLAICIQSWWRGTLGRRKAAKRKWAAQTIRRLIRGFILRHAPRCPENAFFLDHVRTSFLLNLRRQLPQNVLDTSWPTPPPALREASELLRELCIKNMVWKYCRSISPEWKQQLQQKAVASEIFKGKKDNYPQSVPRLFISTRLGTDEISPRVLQALGSEPIQYAVPVVKYDRKGYKPRSRQLLVTPNAVVIVEDVKVPPVVGTVCPGPEPRTLSLHVFSPILLLSLVTMCVTQLRLIFYMGAMNNILKFLVSGDQKTVMATVGLYTSIFGVLQLLCLLTAPVIGYIMDWRLKECEDASEEPEEKDANQGEKKKKKRDRQIQKIT

SEQ ID NO: 40532 - protein, 138 aa, Homo sapiens
  DOMAIN (55)..(84): Serine hydroxymethyltransferase pyridoxal-phosphate attachmen domain identified by eMATRIX, accession number BL00096A, p-value= 2.875e-27, raw score of 20.32
  DOMAIN (38)..(138): Serine hydroxymethyltransferase domain identified by PFam, accession name SHMT, E-value=5.1e-65, PFam score of 218.6
FRGVARQLRTSAMTMPVNGAHKDADLWSSHDKMLAQPLKDSDVEVYNIIKKESNRQRVGLELIASENFASRAVLEALGSCLNNKYSEGYPGQGSPANFAVYTALVEPHGRIMGLDLPDGGHLTHGFMTDKKKISATSI

SEQ ID NO: 40533 - protein, 236 aa, Homo sapiens
  DOMAIN (139)..(177): Serine hydroxymethyltransferase pyridoxal-phosphate attachmen domain identified by eMATRIX, accession number BL00096G, p-value= 3.415e-24, raw score of 23.43
  DOMAIN (1)..(179): Serine hydroxymethyltransferase domain identified by PFam, accession name SHMT, E-value=7.1e-101, PFam score of 337.8
GSPANFAVYTALVETHGCIMGLDLPDGGHLTHGFMTDKKKISATSIFFESMPYKGGPHNHTIAGVAVALKQAMTLEFEVYQHHVVANCRALSEALTELGYQTVTGCSDKHLILVDLHSIKGTDGRRAEKVLEACSIACNKNTCPDDRNTLRPSGLRLGNPALTSLGLLEKGFQKVAHFIHRGIELTLQIQSNAGIRATLKEFKERLAGHKYQGCVQALQEEVESFTLFPLPGLPDF

SEQ ID NO: 40534 - protein, 450 aa, Homo sapiens
  DOMAIN (224)..(267): Serine hydroxymethyltransferase pyridoxal-phosphate attachmen domain identified by eMATRIX, accession number BL00096E, p-value= 1.000e-40, raw score of 17.77
  DOMAIN (32)..(394): Serine hydroxymethyltransferase domain identified by PFam, accession name SHMT, E-value=5.6e-266, PFam score of 886.5
  misc_feature (1)...(450): Xaa = X or * as defined in Table 2
QLRTSAMTMPVNGAHKDADLWSSHDKMLAQPLKDSDVEVYNIIKKESNRQRVGLELIASENFASRAVLEALGSCLNNKYSEGYPGQRYYGGTEFIDELETLCQKRALQAYKLDPQCWGVNVQPYSGSPANFAVYTALVEPHGRIMGLDLPDGGHLTRGLMTDKKKISATSIFFXSMPYKANPETGYINYGQLEENARLFHPKLIIAGTSCYSRNLEYARLRKIADENGAYLMADMAHISGLVAAGVVPSPFEHCHVVTTTTHKTLRGCRAGMIFYRKGVAVALKQAMTLEFKVYQHQVVANCRALSEALTELGYKIVTGGSDNHLILVDLRSKGTDGGRAEKVLEACSIACNKNTCPGDRSALRPSGLRLGTPALTSRGLLEKDFQKVAHFIHRGIELTLQIQSDTGVRATLKEFKERLAGDKYQAAVQALREEVESFASLFPLPGLPDF

SEQ ID NO: 40535 - protein, 79 aa, Homo sapiens
GTACNPAWPPPGLAPHLTHYADLLPGSPFHVALPPPESELWETPDVSLITGPRLGQTPVTEAVSGRRGIAIAYEDEGSG

SEQ ID NO: 40536 - protein, 398 aa, Homo sapiens
  DOMAIN (54)..(294): Putative diphthamide synthesis protei domain identified by PFam, accession name Diphthamide_syn, E-value=1.2e-12, PFam score of 55.5
  misc_feature (1)...(398): Xaa = X or * as defined in Table 2
MESMFSSPAEAALQRETGVPGLLTPLPDLDGVYELERVAGFVRDLGCERVALQFPDQLLGDAVAVAARLEETTGSKMFILGDTAYGSCCVDVLGAEQAGAQALIHFGPACLSPPARPLPVAFVLSSTFCGLGALCQGLXGPEPRPQSACGAAGEPACAHALDTGKTQDEGARAGRLRARRRYLVERARDARVVGLLAGTLGVAQHREALAHLRNLTQAAGKRSYVLALGRPTPAKLANFPEVDVFVLLACPLGALAPQLSGSFFQPILAPCELEAACNPAWPPPGLAPHLTHYADLLPGSPFHVALPPPESELWETPDVSLITGDLRPPPAWKSSNDHGSLALTPRPQLELAESSPAASFLSSRSWQGLEPRLGQTPVTEAVSGRRGIAIAYEDEGSG

SEQ ID NO: 40537 - protein, 132 aa, Homo sapiens
  DOMAIN (71)..(120): Eukaryotic RNA polymerase II heptapeptide repeat proteins domain identified by eMATRIX, accession number BL00115Z, p-value= 6.442e-10, raw score of 3.12
  misc_feature (1)...(132): Xaa = X or * as defined in Table 2
KEKRYLVYLGCCDLPEKXESVXTNPVQPIELSAMMAYPVAALSPHVARLNTXMTNVTEKLSFXSXLTXIXVXPHVFSGYCTGQCRSSXASSSSSSSSSSSSSSSSSSSSSSSSSSSSSASDKXWAEASPRVR

SEQ ID NO: 40538 - protein, 106 aa, Homo sapiens
RTQAPKLSQGGPRCIPPPKLCLMESMFSSPAEAALQRETGVPGLLTPLPDLGRSVALQFPDQLLGDAVAVAARLEETTGSKMFILGDTAYGSCCVDVLGAEQAGAQ

SEQ ID NO: 40539 - protein, 60 aa, Homo sapiens
  misc_feature (1)...(60): Xaa = X or * as defined in Table 2
XSPFHVALPPPESELWETPDVSLITGDLRPPPAWKSSNDHGSLALTPRPQLELAESSPAX

SEQ ID NO: 40540 - protein, 514 aa, Homo sapiens
  DOMAIN (77)..(412): Putative diphthamide synthesis protei domain identified by PFam, accession name Diphthamide_syn, E-value=9.8e-10, PFam score of 8.1
RTQAPKLSQGGPRCIPPPKLCLMESMFSSPAEAALQRETGVPGLLTPLPDLDGVYELERVAGFVRDLGCERVALQFPDQLLGDAVAVAARLEETTGSKMFILGVDTAYGSCCVDVLGAEQAGAQALIHFGPACLSPPARPLPVAFVLSSTFCGLGTLCQDLWGPKPRPQSACGAAGEPACAHALEALATLLRPRYLDLLVSSPAFPQPVGSLSPEPMPLERFGRRFPLAPGRRLEEYGAFYVGGSKASPDPDLDPDLSRLLLGWAPGQPFSSCCPDTGKTQDEGARAGGLRARRRYLVERARDARVVGLLAGTLGVAQHREALAHLRNLVQAAGKCSYVLALGRPTPAKLANFPEVDVFVLLACPLGALAPQLSGSFFQPILAPCELEAACNPAWPPPGLWVPHLTHYIADLLPGSPFHVALPPPESELWETPDVSLITGDLRPPPAWKSSNDHGSLALTPRPQLELAESSPAASFLSSRSWQGLEPRLGQTPVTEAVSGRRGIAIAYEDEGSG

SEQ ID NO: 40541 - protein, 201 aa, Homo sapiens
  misc_feature (1)...(201): Xaa = X or * as defined in Table 2
AAAREAAGRDMLAADLRCSLFASALQSYKRDSVLRPFPASYARGDCKDFEALLADASKLPNLKELLQSSGDNPQTGPGDLVSLDFYPQKVLTNPQVQWECRSFEKDSKSXLGLLTRLFLHRTSCLKLSTSDPANAKFYETKGERDLIYAFHGSRLENFHSIIHNGLHCHLNKTSLFGEGTYLTSDLSLALIYSPHGHGWQH

SEQ ID NO: 40542 - protein, 233 aa, Homo sapiens
LGLLTRLFLHRTSCLKLSTSDPANAKFYETKGERDLIYAFHGSRLENFHSIIHNGLHCHLNKTSLFGEGTYLTSDLSLALIYSPHGHGWQHSLLGPILSCVAVCEVIDHPDVKCQTKKKDSKEIDRRRARIKHSEGGDIPPKYFVVTNNQLLRVKYLLVYSQKPPKRASSQLSWFSSHWFTVMISLYLLLLLIVFCGLLALQDRGLPQVCPQIPCGWRPPSEGSQVFETQPGL

SEQ ID NO: 40543 - protein, 352 aa, Homo sapiens; identical to SEQ ID NO: 31174
  DOMAIN (306)..(317): GUANYLIN PRECURSOR SIGNATURE domain identified by eMATRIX, accession number PR00774C, p-value=5.418e-09, raw score of 11.76
  DOMAIN (288)..(305): Zinc finger, CCHC class domain identified by PFam, accession name zf-CCHC, E-value=0.00037, PFam score of 27.3

SEQ ID NO: 40544 - protein, 98 aa, Homo sapiens; identical to SEQ ID NO: 31006
  DOMAIN (36)..(53): Zinc finger, CCHC class domain identified by PFam, accession name zf-CCHC, E-value=4.6e-05, PFam score of 30.3

SEQ ID NO: 40545 - protein, 48 aa, Homo sapiens
  misc_feature (1)...(48): Xaa = X or * as defined in Table 2
LGSGNLPXEINPLSSCSLFREEDPPTTSGPQTNQPKEHLTNFKSAAED

SEQ ID NO: 40546 - protein, 98 aa, Homo sapiens; identical to SEQ ID NO: 31006
  DOMAIN (36)..(53): Zinc finger, CCHC class domain identified by PFam, accession name zf-CCHC, E-value=4.6e-05, PFam score of 30.3

SEQ ID NO: 40547 - protein, 84 aa, Homo sapiens
  misc_feature (1)...(84): Xaa = X or * as defined in Table 2
LQEFGTRKDPPTTSGPQTDQAREHLTNFKSSACQIPWNSGPRLSEXLLPRSSRLSSXRLTRAQSPWKPTGQSQMLWVTLTVEGT

SEQ ID NO: 40548 - protein, 129 aa, Homo sapiens
  DOMAIN (90)..(110): CORONAVIRUS NUCLEOCAPSID PROTEIN domain identified by eMATRIX, accession number DM01206B, p-value=6.053e-13, raw score of 10.69
MEARETGPWKEGNVERVASVLIKKGTGLPSTVRVTGSSASVMVYGASEAIGQHQSSAAKPRRSVKESVREPWARVPGALGVAASMKSHGHNRSGSRSRSKSRSRSQSRSRSKKEKSRSPSKDKSLQPQP

SEQ ID NO: 40549 - protein, 154 aa, Homo sapiens
MVYGASEAIGLCQSSAAKPRRSGKESVREPWARVPGALGVAARTAPSVLHSSLGQPFLLSSNPNESLLAPLPQKMGLFVLYLPFQVGLPSTVPWPLILPSKVPEEEGQLQSTLPCGIKLLPVFTSHHAFLGVFCNQWVSDVFLALFLMKLLGAQ

SEQ ID NO: 40550 - protein, 287 aa, Homo sapiens; identical to SEQ ID NO: 31761
  DOMAIN (200)..(243): 1 kw MIND INHIBITOR DIVISION CONTROL domain identified by eMATRIX, accession number DM01756B, p-value=4.822e-15, raw score of 22.91
  DOMAIN (165)..(270): ParA family ATPase domain identified by PFam, accession name ParA, E-value=3.6e-23, PFam score of 90.4

SEQ ID NO: 40551 - protein, 46 aa, Homo sapiens
MIWEGVSQRALGQSSSGSGSGCRDEPFQILSPFRILRNLEEDTGLP

SEQ ID NO: 40552 - protein, 590 aa, Homo sapiens
  DOMAIN (523)..(537): Phage integrase family domain identified by eMATRIX, accession number PF00589B, p-value=1.621e-11, raw score of 16.17
  DOMAIN (371)..(569): "Phage" integrase family domain identified by PFam, accession name Phage_integrase, E-value=2.6e-13, PFam score of 57.6
MALGISAPVALQGTAPLLAVLSGCSFPKHMLQTVNGSPFWGLENGGPLLRARLGSAPVETLELFSSLNKILHSYHSSVVKCDLILLGRWTKAWDPLSAGGGCHTGPLPLQVEGNHPTGSYRVPNRPQYRSVAWGLGTSGLVNYTFLLNSGETTYQFLRGNKDFLKNHIKLNYCFLLIEVDNLTLVFVIEKTLGQIFDIPKVELLFSYQCFPMVENRQKPEGEEDCVIQLSELSCTECSKKAWRMEVLHTNKTTNATQCGGPAQLQQFNAVLSEKVHIVPSLLRSWNIISHGRFPSFETFNTKNCIAYNPNGNALDESCEDKNRYIWLEKPQETYSNDRRESKHIPLRMAAERRRAEQKEKYPLIKSSDLGASEAIRQRQSSAAKLRKSGKESVREPWARVPGALGVAARALIAEDAGLSRVILFHYGESWNLLRADQRLIFAKSWPRASRYQQGHQDLFILRSDLPSQVFIRDKLMERRNRRTGRTEKARIWEVTDRTVRTWIGEAVAAAAADGVTFSVPVTPHTFRHSYAMHMLYAGIPLKVLQSLMGHKSISSTEVYTKVFALDVAARHRVQFAMPESDAVAMLKQLS

SEQ ID NO: 40553 - protein, 107 aa, Homo sapiens
  DOMAIN (77)..(92): TYPE I ANTIFREEZE PROTEIN SIGNATURE domain identified by eMATRIX, accession number PR00308A, p-value=7.152e-10, raw score of 5.90
MGAVCEALRQYSPEGDGLTLHCESYPKLGIRDGLGASEAIRQRQSSAAKLRRSGKESESLGPEFQGLWEWLPVRVTLAAAAAAAAAAAAATVVAAAVVAVAAEASWF

SEQ ID NO: 40554 - protein, 139 aa, Homo sapiens; identical to SEQ ID NO: 30816

SEQ ID NO: 40555 - protein, 70 aa, Homo sapiens
LGSGDLPWGINPLSSCSLLREKDPLTISGPQTHQPKEHLTNFKSGPTENRTVQLTWQPLPEPLELWPKAL

SEQ ID NO: 40556 - protein, 17 aa, Homo sapiens
DHWQPLPEPLELWPKAD

SEQ ID NO: 40557 - protein, 95 aa, Homo sapiens
  misc_feature (1)...(95): Xaa = X or * as defined in Table 2
XTKGDGLTFHCESYPKLGVREGLGGFRGDRAVSLQPLSPEDLGRSQSESLGPEFQGLWEWLPDKQKSGKAEKERRKGTSEPREEFGWGRSERRLA

SEQ ID NO: 40558 - protein, 110 aa, Homo sapiens
MVEEVGISLGPGDTLPVRKGGLLRRLGSVSLQPLSQDDLGRKESVREPWARVPGALEVAARTNTYKLLPAPRGRAEEGASVCNFSVRIGHLFLVCIKSLVRVGALLAIWT

SEQ ID NO: 40559 - protein, 371 aa, Homo sapiens
  DOMAIN (93)..(140): Bacterial regulatory proteins luxR family proteins. domain identified by eMATRIX, accession number BL00622, p-value=8.313e-27, raw score of 32.69
  DOMAIN (90)..(155): Bacterial regulatory proteins, luxR family domain identified by PFam, accession name GerE, E-value=2.8e-20, PFam score of 80.8
  misc_feature (1)...(371): Xaa = X or * as defined in Table 2
MPGDKYGDGITLIKYIKRHFPSLSIIVLTMNNNPAILSAVLDLDIEGIVLKQGAPTDLPKALAALQKGKKFTPESVSRLLEKISAGGYGDKRLSPKESEVLRLFAEGFLVTEIAKKLNRSIKTISSQKKSAMMKLGVENDIALLNYLSSVTLSQIRRVSVLSGICTDCRMRRKRLIRPTIPIISTNYIKVGQIRRVSVASGICAECRMRGKRFIVLGIPGFLDLSGYNAASGKRQSLHACSRVTWQNRLRLKRFPSIHGPFNEASQEAARRKSIEKELEWVRQGTKGRQSKGKARLARFEELNSTEYQITVLHTGGKSELGRGLPRRSGSVSLQPLSREDLGRSQSESLGPEFQGLWKWLPDESSVWPAPX

SEQ ID NO: 40560 - protein, 136 aa, Homo sapiens; identical to SEQ ID NO: 30815

SEQ ID NO: 40561 - protein, 352 aa, Homo sapiens
  DOMAIN (248)..(297): Eukaryotic RNA polymerase II heptapeptide repeat proteins domain identified by eMATRIX, accession number BL00115Z, p-value= 3.779e-09, raw score of 3.12
  misc_feature (1)...(352): Xaa = X or * as defined in Table 2
MLSDKCQHQIMHMDSMHDMTITIMITVKLLIGETDSIRFKLAIKPACDLVSLHHVYLDGCMVLGTGDAVTSRDFLPHVQVHKLAGVLLDFKTVPAATTLRNSSIPSALPEPMTASEAAARKSQIKARITDTIGPTETSIAPRQRPKANSATTATPSVLTIQSSATPVKVLAPGEFGNHRPKEYSVSPGGFHGLAVEYQQLFQAHVASCRIEQLHLNVGSRHSSIEYSSNYSREIGDYSNSIYSIVILTSSSSSSSSNSNSSSSNSNSSSSSSSSSTTTTTTTTYFKMLICSRSVADKEAIANFTNQKNISNPPDMSGWNPFGEDNFSKLTEEELLDREFDLLRSNSAHLHPX

SEQ ID NO: 40562 - protein, 58 aa, Homo sapiens
MPGLECIVSRGRAQRRKRGILRRSGSFSLQPLSPEDLGRSQSESLGPEFQGLWEWLPS

SEQ ID NO: 40563 - protein, 74 aa, Homo sapiens
MGAVCEALRQYGPEGDRLTFHCESYPKLGVHDGLGGFRGDPAVSVFSREAEKIWEGVNQRALGQSSRGSGSGCQ

SEQ ID NO: 40564 - protein, 347 aa, Homo sapiens
LLCSSACKCLMLGLHFVIVGNICATLKEKYSSMLHLDVTMKKNGEKRTRLQKRKKGMPPHPAYEDLNIAAITLPANVVLHQPSGFRTSGQLDPVWWSLDTDAHEIWCQDPGLGSGDFPWEITPLSSYSLLHEKDPPTTSGPQTDQPKKHLTNFKSKTKETGFIHGPKTPAPVTDWEGSLPLVFNHCRDTSLIIHPCFKGVRPRRDACLGPSPLAASPAFLEKGQDLINLAFKVYNNRKKLQFLASTVRQTAATSPAHKNFQMPEPQRPGVPPEPPPTGACYMCRKSGHWTRNAGSPGFLLSRVPSVWDPTENRTVQLTWQPLPEPLELWPKALCLTDSFPDLLGLAA

SEQ ID NO: 40565 - protein, 174 aa, Homo sapiens; identical to SEQ ID NO: 38194

SEQ ID NO: 40566 - protein, 648 aa, Homo sapiens; identical to SEQ ID NO: 35991
  DOMAIN (10)..(65): kw TRANSCRIPTASE REVERSE II ORF2 domain identified by eMATRIX, accession number DM01354Q, p-value=1.000e-40, raw score of 9.23
  DOMAIN (1)..(238): Reverse transcriptase domain identified by PFam, accession name rvt, E-value=2.7e-52, PFam score of 187.1
  misc_feature (1)...(648): Xaa = X or * as defined in Table 2

SEQ ID NO: 40567 - protein, 115 aa, Homo sapiens
  DOMAIN (45)..(90): kw TRANSCRIPTASE REVERSE II ORF2 domain identified by eMATRIX, accession number DM01354N, p-value=1.000e-40, raw score of 13.17
TNKIDRPLARLIKKKREKKQIDAIKNDKGDITTDPTETQTTIKEYYKHLYANKLENLEEMDKFFDTYTLPRLNQEEVESLNRPIAGSEIEAIINSLPTKKSPGPDGFTAKFYQRE

SEQ ID NO: 40568 - protein, 260 aa, Homo sapiens; identical to SEQ ID NO: 38197
  DOMAIN (186)..(231): kw TRANSCRIPTASE REVERSE II ORF2 domain identified by eMATRIX, accession number DM01354N, p-value=1.000e-40, raw score of 13.17

SEQ ID NO: 40569 - protein, 1203 aa, Homo sapiens; identical to SEQ ID NO: 34339
  DOMAIN (121)..(166): kw TRANSCRIPTASE REVERSE II ORF2 domain identified by eMATRIX, accession number DM01354N, p-value=1.000e-40, raw score of 13.17
  DOMAIN (211)..(387): Reverse transcriptase domain identified by PFam, accession name rvt, E-value=3.5e-23, PFam score of 90.5
  misc_feature (1)...(1203): Xaa = X or * as defined in Table 2

SEQ ID NO: 40570 - protein, 754 aa, Homo sapiens; identical to SEQ ID NO: 32653
  DOMAIN (208)..(254): kw TRANSCRIPTASE REVERSE II ORF2 domain identified by eMATRIX, accession number DM01354O, p-value=1.000e-40, raw score of 8.73
  DOMAIN (241)..(418): Reverse transcriptase domain identified by PFam, accession name rvt, E-value=6.7e-11, PFam score of 49.6

SEQ ID NO: 40571 - protein, 944 aa, Homo sapiens
  DOMAIN (700)..(745): kw TRANSCRIPTASE REVERSE II ORF2 domain identified by eMATRIX, accession number DM01354N, p-value=1.000e-40, raw score of 13.17
  DOMAIN (70)..(943): Reverse transcriptase domain identified by PFam, accession name rvt, E-value=8.6e-18, PFam score of 72.5
MDEFLNTYTLPRLNQEEVESLNRPITGSEIVAIINSLPRKKSPGPDGFTAEFYQRYKEELVPFLLKLFQSIEKEGILPNSFYEASIILIPKPGRDTTIKENFRPISLMNIDAKILNKIILANRIQQHIKKLIHHDQVGFIPGMQGWFNIRKSINVIQHINRTKDKNHMIISTDAEKAFDKIQQPFMLKTLKKFGIDGTYLKIRIKYLGIQLTRDVKDLFKENYKPLLNEIKEDTKKWKNIPCSWVGRINIMKMAILPKVIYRFNAIPIKLPMTFLTELEKTTLKFIWNQKRARIAKSILSQKNKAGGITLPDFKLYYKATVTKTAWYWYQKRDIHQWNTTEPSEITPHIYNHLIFDKPEKNKQWGKDSLFNKWCWENWLAIWRKLKLDPFLTPYTKINSRWIKDLNVRPKTIKTLEENLGITIQDIGMGKDFMSKTPKAMATKAKIDKWDLIKLKSFCTAKETTIRVNRQPTKWEKIFTTYSSDKGLISRIYNELKQIYKKKSDNPIKKWVKDMNRHFSKEDIYAAKKHMKKCSPSLAIREMQIKTTMRYHLTPPSLLIPRQTGSGVDLQQTPTDLQLKVLTVRRKTNKQKVHPHQNPICTSPSSKTKELEKQEQTHSKASRRQEITKIRAELKEIETQKNLQKINESRSWFLEKVNKIDRLLARLIKKKREKDQIDAIKNDKGDITTDPTEIQATIREHYKHLYANKLENLEEMDKFLDTYTLPRLNQEEVESLNRPITGSEIEAIINSLPTKKSPGPDGFTAKFYQRYKEELVPFLLKLFQSIEKEGILPNSFYESSIILIPKPGRDTTKKENFRPISLMNIDAKILSKILANRIQQHIKKLIHHDQVGYIPGMQGWFNICKSINVIQHINRTKDKNHMIISIDAEKAFDKIQQRFILKTLNELGIDGTYLKIIRAIYDKPTANIILNREKLEAFPLKTGKR

SEQ ID NO: 40572 - protein, 919 aa, Homo sapiens; identical to SEQ ID NO: 38227
  DOMAIN (110)..(151): kw TRANSCRIPTASE REVERSE II ORF2 domain identified by eMATRIX, accession number DM01354I, p-value=1.000e-40, raw score of 15.55
  DOMAIN (280)..(518): Reverse transcriptase domain identified by PFam, accession name rvt, E-value=7.5e-63, PFam score of 222.2

SEQ ID NO: 40573 - protein, 704 aa, Homo sapiens
  DOMAIN (149)..(204): kw TRANSCRIPTASE REVERSE II ORF2 domain identified by eMATRIX, accession number DM01354Q, p-value=1.000e-40, raw score of 9.23
  DOMAIN (107)..(624): Reverse transcriptase domain identified by PFam, accession name rvt, E-value=2.7e-08, PFam score of 41.0
MKEKMLRAAREKGRVTHKGKPIRLTADLSAETPQARREWGPIFNILKEKNFQPRISYPDKLSFISEGEIKYFTDKQMLRDFVTTRPVLKELLKEALNMERNNWYQPLQKHAKNMPNSIILIPKPGRDTTKKENFRPISLMNIDAKILNKILANRIQQHIKKLIHHDQVGFIPGMQGWFNIHKSINVIQHINRTIDKNHMIISIDAEKAFDKIQQLFMLKTLNKLGIDGTYLKIRIKYLGIQLTREVKDLFKENYKPLLNEIKEDTNKWKNIPCSWVGRINIMKMAILPKVIYRFNAISNKLPMTFFTELEKTTLNFIWNQKRARIAKSILSQKNKAGGITLPDFKQYYKATVTKTAWYWYQNRDIDQWNRTEPSEITPHIYTYLIFDKPEKNKQWGKDSLFNKWCWENWLAVCRKLKLDPFLTPYTKINSRWIKDLNVRPKTIKTLEEILGITIQDTGMGKDFMSKTPKAMATKAKIDKWDQIKLKSFCTAKETTIRVNRQPTKWEKIFATYSSDKGLIFRIYNELKQIYKKKTNNPIKKWAKDMNRPFSKEDIYAAKKYMKKCSPSLAIREMQIKTTMRYHLTPVRMAIIKKSGNNRQTESQIMSELPITIASKRIKYLGIQLTKDVKDLFKENYKPLLNEIKEDTNKWKNIPCSWIGRINIVKTWPYCPSPQMYMSPTWQPKTLQLWRQPKYPWKGTHRRKK

SEQ ID NO: 40574 - protein, 984 aa, Homo sapiens; identical to SEQ ID NO: 39480
  DOMAIN (262)..(303): kw TRANSCRIPTASE REVERSE II ORF2 domain identified by eMATRIX, accession number DM01354I, p-value=1.000e-40, raw score of 15.55
  DOMAIN (465)..(729): Reverse transcriptase domain identified by PFam, accession name rvt, E-value=1.9e-72, PFam score of 254.1

SEQ ID NO: 40575 - protein, 599 aa, Homo sapiens
  DOMAIN (193)..(236): kw TRANSCRIPTASE REVERSE II ORF2 domain identified by eMATRIX, accession number DM01354T, p-value=1.000e-40, raw score of 9.48
  DOMAIN (81)..(315): Reverse transcriptase domain identified by PFam, accession name rvt, E-value=4e-37, PFam score of 136.8
MARELRDECTSFSNRLDQLEERVSVMEDEMNEMKQDEKFREKRGKRNEQSLQEIWDYMKRPNLCLIGVPESDRENGTKLENTAGYYPGELPQPSRQATIQIQEIQRMPQRYSSRRATPRYIIVRFTKVEMKEKMLRAAREKDAEKAFDKIQQPFTLKTLNKLGIDGTYLKIIRAIYDKPTANVILNGQKLEAFPLKTGTRQGCPLSPLLFNIVLEVLARTIRQEKEIKGIQLGKEEVKLSLFADDMIVYLENPIVSAQNLLKLISSFSKVSGYKINVQKSQAFLHTNNRQTESQIMSELPFKIATKRIKYLGIQLTRDVKDLFQENYKPLLNEIKKDTNKWKNIPCSWIGRISIVKMAILPKVIYRFNAIPIKLPMTFFTELEKTTLKFIWNQKRACIAKTILSQKNKAGGIKLHDCKLYYKVIVTKTAWYWYQNRDIDQWNRTEPSEIMPLIYNYLIFDKPDKNKQWGKDSLFNKWCWENWLAICRKLKLDPFLTPYTKINSSWIKDLNVRPKTIKTLEENLGNTIQDIGMGKDFMSKTLKAMATKAKIDKWDLIKLKSFCTAKEPTIRVNRQPTEWEKIFAIYSSDKGLISRIYKEL

SEQ ID NO: 40576 - protein, 583 aa, Homo sapiens; identical to SEQ ID NO: 38212
  DOMAIN (57)..(100): kw TRANSCRIPTASE REVERSE II ORF2 domain identified by eMATRIX, accession number DM01354T, p-value=1.000e-40, raw score of 9.48
  DOMAIN (1)..(179): Reverse transcriptase domain identified by PFam, accession name rvt, E-value=8.5e-14, PFam score of 59.3
  misc_feature (1)...(583): Xaa = X or * as defined in Table 2

SEQ ID NO: 40577 - protein, 1576 aa, Homo sapiens; identical to SEQ ID NO: 38229
  DOMAIN (1385)..(1401): CHYMOTRYPSIN SERINE PROTEASE FAMILY (S1) SIGNATURE domain identified by eMATRIX, accession number PR00722A, p-value=6.087e- 16, raw score of 12.27
  DOMAIN (870)..(1571): Trypsin domain identified by PFam, accession name trypsin, E- value=2.6e-129, PFam score of 409.7

SEQ ID NO: 40578 - protein, 476 aa, Homo sapiens
  DOMAIN (110)..(151): kw TRANSCRIPTASE REVERSE II ORF2 domain identified by eMATRIX, accession number DM01354I, p-value=1.000e-40, raw score of 15.55
  DOMAIN (349)..(475): Reverse transcriptase domain identified by PFam, accession name rvt, E-value=0.0035, PFam score of -24.3
MGDFNTQLSTLDRSTRQKVNKDTQELNSALHQADLIDIYRTLHPESTEYTFFSAPHHTYSKIDHIVGSKALLSKCKRTEIITNCLSDHTAIKLELRIKKLTQNRSTTWKLNNLLLNDYWVHNKMKAEIKMFFETNENKDTTYQNLWDTFKAVCRGKFIALNAHKRKQERSKIATLTSQLKELEKQEQTHSKASRRQDITKIRAELKETETHESRSWFSERINKIDRLLARLIKKKREKNQIDAIKNDKGDITTDPTEIQTTIREYYKHLYANKLENLEEMDKFLNTYTLPRLNQEEVESLNRPITGSEIVAIINSLPTKKSPGPDGFTAEFYQRYKEELVPFLLKLFQSIEKEGILPNSFYEASIILIPKPGTGTTKKENFRPISLMNIDAKILNKILANQIQQHIKKLIHQDQVGFIPGMKAWFNIGKSINVIQHINRTKDKNHMIISIDAEKAFDKIQQCFMLKTLNKLGIDGT

SEQ ID NO: 40579 - protein, 906 aa, Homo sapiens
  DOMAIN (396)..(421): 7 kw REVERSE TRANSCRIPTASE RNA POLYMERASE domain identified by eMATRIX, accession number DM00895E, p-value=3.586e-10, raw score of 15.72
  DOMAIN (367)..(525): Reverse transcriptase domain identified by PFam, accession name rvt, E-value=1.5e-05, PFam score of 9.2
MALFRVGMTTRRLGHANKFTRDLLVKRLLLYEFVVEIIPGLRTKTTLVGPLETGYTSSDSVNSPHFMLDIALSHNVKSTQLLLRPWRNIDCSRNHKNAKKEEQMGDDEINRQQECSSSPAMEQSWTENDFDELREEVFRRSNYSELQEEIRTNGKEVKSFEKKLDEWITRITNAEKSLKHLTELKTKARELQLEKQELTHSKASRRQEITKIRAELKEIETQKTLQKINESRSWFFEKINKIDRPLARLIKKKREKNQTDTIKNDKGDIITDPTEIQTTIREYYKHLYTNKLENLEEMDKFLDTYVLPRLNQEEVESLNRPITGSEIEAIINSLPTKKSPGPDGFTAEFYQRYKEELVPFLLKLSQSIEKERILPNSSYEASIILIPKPGRDTTKKENFRPISLMNIDAKILNKILANRTQQHIKKLIHHEQVGCIPGMQGWFNIRKSINVIQHINRTKDKNHMIISIDAEKLISKFSKVSGHKINVQKSQAFLYTDNRQTESQIMSELPFTIASKRIKYLGIQLTRDVKDLFKENYKPLLNEIKEDTNKWKNIPCSWVGRINIVKMALLPRFSAIPIKLPMTFFTELEKTTLKFIWNQKRARIAKSFLSQKNKAGGITLPDFKLYYKATVPKTAWYCYQNRDIDQWNRTEPSEIMLLIYNYLIFDKPDKKKEWGKDSLFNKWCWENWLAICRKLKLDPFLTPYTKMNSRWIKDLHVRPKTIKTLEENLGNTIQDVGMGKDFMSKTPKAMGTKVKIDKWDLIKLKSFCTAKETTIRVNRQPTEWEKIFATYSSDKGLISRIYIELKQIYKKETNNPIKKWAKDMNRHFSKEDIYAAKKHMKKCSSSLAIREIQIKTTMRKHLIPVRMVIIKMSGNNRCWRGCGETGTLLRCWWNCKLVQPLWKSVW

SEQ ID NO: 40580 - protein, 277 aa, Homo sapiens
  DOMAIN (113)..(158): kw TRANSCRIPTASE REVERSE II ORF2 domain identified by eMATRIX, accession number DM01354N, p-value=1.000e-40, raw score of 13.17
  misc_feature (1)...(277): Xaa = X or * as defined in Table 2
SLGRNSTSQKRVGANIQHSXRKEFSTQNFISSQTTLHKXRRNKILYRQANAERFCHHQACPKTAPERSTKLERNNRLPARLIKKKREKNQIDATKNDKGDITTDPTEIQTTIREYYKHLYANKLENLEEMDKFPDTYTLPRLNQEEVESLNRPITGSEIEAIIKSLPTKKRPGPDRFTAEFYQRYKEELVPFLLKLFQSTEKEGILPNSFYEASIILIAKPGRDTTKKENFRPISLLNIDAKILNKILANRIQQHIKKLIHHDQVGFIPGMQGWFNI

SEQ ID NO: 40581 - protein, 722 aa, Homo sapiens
  DOMAIN (45)..(90): kw TRANSCRIPTASE REVERSE II ORF2 domain identified by eMATRIX, accession number DM01354N, p-value=1.000e-40, raw score of 13.17
  DOMAIN (129)..(367): Reverse transcriptase domain identified by PFam, accession name rvt, E-value=7.5e-63, PFam score of 222.2
INKIDRPLARLIKKKREKNQIDAIKNDKGDITTNPTEIQTTIREYYKHLYANKLENLEEMDKFLDTYILPRLNQEEVEPLNRPITGSEIEEIINSLPTKKTPGPDGFTAEFYQRYKEELVPILLKLFQSIEKEGILPNSFYEASIILIPKPDRDTTKKENFRPISLMNIDVKILNKILANRIQQHIKKLIHHDQVGFIPGMQGWFNIRKSINVIQHINRTKDKNHMIISIDAEKAFDKIQQPFMLKTLNKLGIDGTYLKIIRAIYDKPTADIILNGQKLEAFSLKTGTRQGCPLSPLLFNIVLEVLARAVRQEKEIKGIRLGKEEVKLSLLADDMIVYLENPIVSAPNLLKLISNFSKRIKYLGIQLTRDVKDLFKKNYKPLLNEIKEDTNKWKNIPCSWVGRINIVKMAILPKVIYRFNAIPIKLPMTFFTELEKTTLKFIWNQKRACIAKSILNQKNKAGGIMLPDFKLYYKATGTKTAWYWYQNRDIDQWNRTQPSEIMPHIYNYLIFDKPDKNKKWGKDSLFNKWCWENWLAICRKLKLDPFLTPYTKINSRWIKDLNVSPKTIKTLEENLGNTIQDIGMGKDVMSKTPKAMATKAKIDKWDLIKLKSFCTAKETTIRVNRQPTEWEKIFATYSSDKGLIFRIYNELKQIYKKKTNNLIKKWAKNMNRHFSKEDIYAAKKHMKKCSSSLAIREMQIKTTMRYHLTPVGMAIIKKSGNN

SEQ ID NO: 40582 - protein, 615 aa, Homo sapiens
  DOMAIN (57)..(100): kw TRANSCRIPTASE REVERSE II ORF2 domain identified by eMATRIX, accession number DM01354T, p-value=1.000e-40, raw score of 9.48
  DOMAIN (1)..(179): Reverse transcriptase domain identified by PFam, accession name rvt, E-value=2.6e-15, PFam score of 64.3
MIISIDAEKAFDKIQQPFMLKTLNKLGIDGTYLKIIRAIYDKPTANIILNGQKLEAFPLKTGTRQGCPLSPLLFNIVLEILARAIRQEKEIKGIQLGKEEVKLSLFADDMIVYLENPIVSAQYLLKLISNFSEVSGYKINVQKSQAFLYTNNRQTESQIMSELPFTIASKRIKYLGIQLTRDVKDLFKENYKPLLNEIQEDTNKWKNIPSSWIGRINIVKMAILPKVIYRFNAIPIKLPMTFFTELGKTTLKFIWNQKRARIAKTIPSQKNKAGGIMLPDLKLYYKATVTKTAWYWYQNRDIDQRNRTEPSEIIPHIYNHLIFDKPDKNKKWGKDSLFNKWCWENWLAICRKLKLDPFLTPYTKINSRWIKDLNVRPKTIKTLEENLGNTIQDIGMGKHFMSKIPKAMATKAKIDKWDLIKLKSFCTTKETTIRVNRQPTEWEKIFAIYPSDKQLISRIYKELKHIYNKKKKKNNPINKWAKDMNRHFSKEDIYAANRHMKKCSSSLAIREMQIETTIRYHLTPVRMAIIKKSGNNRIEHGEMMRVAGHFEMDLRVVFGVEKSPFSNHILATPATPPPQRYQRFVMSKPPQDYHWIGVPHSGQTKLKGGAPHYPG

SEQ ID NO: 40583 - protein, 959 aa, Homo sapiens
  DOMAIN (212)..(257): kw TRANSCRIPTASE REVERSE II ORF2 domain identified by eMATRIX, accession number DM01354N, p-value=1.000e-40, raw score of 13.17
  DOMAIN (296)..(471): Reverse transcriptase domain identified by PFam, accession name rvt, E-value=2.1e-20, PFam score of 81.2
MENDFDELREEGFRQSNYSELREDIQTKGKEVENFEKNLEECITRITNTEKCLKELMELKTKAQELREEWRSLRSRCDQLEERVSAMEDEMNEMKGEGKFREKRIKRNEQSLQEIWDYVKRPNLCLIGVPERDGQNGTKLENTLQDVIQENFPNLARQANVQIQEIQRTPQRYSSRRATPRHIIVRFTKVEMKEKMLRAAREKEIQTTISEYYKHLYTNKLENLEEMDKFLDTYTLPTLNQEEVESLNRPITGAEIVAIINSLPTKKSPGPDGFTAEFYQRYKEELVPFLLKLFQSIEKEGILPNSFYEASIILIPKSGRDTTKKENFRPISLMNIDAKILNKILANRIQQHIKKLIHHDQVGFIPGMQGWFNIRKSINIIQHINRAKDKNHMIISIDAEKAFDKIQQPFMLKTLNKLLISNFSEVSGYKISVQKSQAFLYTNNRQESQIMSELPFTIASKRIKYLGIQLTRDVKDLFKENYKPLLKEIKEDTNKWKNIPCSWVGRINIVKMAILPKAIYRFNAIPIKLPMTFFTELEKTTLKFIWNQKRARIAKSILSQKNKAGGITLPDFKLYYKATVTKTAWYWYQNRDIDQWNRTEPSEITPHIYNYLIFDKPEKNKQWGKDSLFNKWCWENWLAICRKLKLDPFLTPYTKINSRWIKDLNVGPNTIKTLEENLGITIQDIGTGKDFMSKTPKAMATKAKIDKRDLIKLNSFCTAKETTIRVNRQPTKWEKIFTTYSSDKGLISRIYNELKQIYKKKTNNPIKKWAKDMNRHFSKEHIYAAKKHMKKCSPSLAIREMQIKTTMRYHLTPVRMAIIKKSGNNRSSNLAVQKGRRKVLQSPQKTQARTEKHPPRDSEATHPLRASYQGGQLHPSKQTKAPVLQAKEKGMANRNKQEPLSAFIFRALPQQTPGNSFSICAMIEVLFVFSFIQKHTELGDGEQDGHKAFLSGKDLKIPS

SEQ ID NO: 40584 - protein, 563 aa, Homo sapiens
  DOMAIN (57)..(100): kw TRANSCRIPTASE REVERSE II ORF2 domain identified by eMATRIX, accession number DM01354T, p-value=1.000e-40, raw score of 9.48
  DOMAIN (1)..(179): Reverse transcriptase domain identified by PFam, accession name rvt, E-value=6.4e-14, PFam score of 59.7
MIFSIDAEKAFDKIQQPFMLKTLNKLGIDGMYLKIIRAMYDKPAANIILNGQKLEAFPLKTGTRQGCPLSPLLFNIVLEVLARAIRQEKEIKGIQLGKEEVKLSLFADDMIVYLENPITSAQNLLKLISNYSKVSGYKINVQKSQAFLYTNNRQTESQIMSELPFTIASKRIKYLGIQLTRDVKDLFKENYKPLLNKIKEDTNKWKNIPCSWVGRINIVKMAILPKVIYTFSAIPIKLPMTFFTELEKTTSKFIWNQKRARIAKSILSQKNKAGGITLPDFKLYYKATVTKTAWYWYQNRDIDQWNRTEPSEIMPHIYNYLIFDKPDKNKQWGKDSLFNKWCWENWLDIWRKLKLDPFLTPYTKINSRSIKDLHVRPKTIKTLEENLGDTIQDIGMGKDFMSKTSKAMATKAKIDKWDLIQLKSFCTAKETTIRVNRQPTEWEKIFAIYSSDKGLIFRIYKELKQIYKKKTNSPIKKWVKDMNRHFSKEAIYAAKRHMKKCSSSLAIREMQIKTTLSLPAQVSVVRHGLSFCWDSRGCGKSGLFLAYSINPFPQSHWDQEQVM

SEQ ID NO: 40585 - protein, 714 aa, Homo sapiens
  DOMAIN (39)..(82): kw TRANSCRIPTASE REVERSE II ORF2 domain identified by eMATRIX, accession number DM01354T, p-value=1.000e-40, raw score of 9.48
  DOMAIN (1)..(646): Reverse transcriptase domain identified by PFam, accession name rvt, E-value=5.9e-07, PFam score of 29.1
MLKTLNKLRIDGTYLKIIRAIYDKSTANIMLNGQKLEAFPLKTGTRQGCPLSTLLFNIVLEVLARAIRQEKEIKGIQLGKEEVKLSLFADDMIVYLENPIVSAQNLLKLIGNFSKVSGYKINVQKSQAFLYTNNRQTESQIMSELPFTIASKRIKYLGIHLIRDVKDLFKENYKPLLNEIKEDTNKWKNIPCSWIGRINIVKMAILPKVIYRFNAIPIKLPMTFFTELEKTTLKFIWNQKRARIAKSVLSQKNKAGGITLPDFKLYYKATVTKTARYWYQNRDIDQWNRTEPSEIMPHIYKYLIFDKLEKNKKWGKDSLFNQWCWENWLAICRKLKLDPFLTPYTTINSRWIKDLNVRSKTIKTLEENLRIAIQDTGMGKDFMSKTPKAMATKAKIDKWDLIKLKSFCTAKETTIRVNRQPTKWEKIFATYSSDKGLISRIYNELKQIYKKKTNNPIKKWAKDMNRHFSKEDIYAAKKHMKKCSPSLAIREMQIKTTMRYHLTPVRMAIIKKSGNNSTFDFGQHEFELHRSTYTRIVFSKITPILEVLARAIRQEKEIKGIQLGKEEVKLSLFADDMIVYLENPIVSAQNLLKLIGNFSKVSGYKINVQKSQAFLYTNNRQTESQIMSELPFTIASKRIKYLGIQLTRDVKDLFKENYKPLLNEIKEDTNKWKNIPCSWVGRINIVKMAILPKVIYRFNAIPIKLPMTFFTELE

SEQ ID NO: 40586 - protein, 573 aa, Homo sapiens
  DOMAIN (57)..(100): kw TRANSCRIPTASE REVERSE II ORF2 domain identified by eMATRIX, accession number DM01354T, p-value=1.000e-40, raw score of 9.48
  DOMAIN (1)..(179): Reverse transcriptase domain identified by PFam, accession name rvt, E-value=2.2e-10, PFam score of 47.9
  misc_feature (1)...(573): Xaa = X or * as defined in Table 2
MIISIDAEKAFDKIQQRFMLKTLNKLGIDGLYLKIIRAIYDKPTANIILNGQKLEALPLKTGTRQGCPLSPLQFNIVLEVLARAIRQEKEIKGIQLGKEEVKLSLLADDMIVYLENPIVSAQNLLKVISNFSKVSGYKINVQKSQAFLYTNNRQTESQIMSELPFTIASKRIKYLGIQLTRDVKDLFKENYKPLLNEIKEDTKKWKNIPCSWVGRINIVKMAILPKVIYRFNAIPIKLPMTFFTELEKTTLKFIWYQKRARITKSILSQRNKAGDITLPDFKLYYKATVNKTAWYWHQNRHIDQWNRTKPSEITLHIYNYLFFDNPDKNKKWGKDSLFNKWCWENWLAICRKLKLDPFLTPYTKINSRWIKDLNIRPKTIKTLEENLGITIQDIGMGKYFMTKTPKAMATKAKIDKWDLIKLKSFCTGKETTIRVNRQPTKWEKIFATYSSDKGLISRIYNELKQIYKKKTNNPIKKWAKDMNRHFSKEDIYAAKKHMKKCSPSLAIREMQIKTTMRYHLTPTRLIVIGIEECLRGKEKLETLYYWNSDTDHQVXWLGWPXWKSDHKKEQPSF

SEQ ID NO: 40587 - protein, 692 aa, Homo sapiens
  DOMAIN (37)..(83): kw TRANSCRIPTASE REVERSE II ORF2 domain identified by eMATRIX, accession number DM01354O, p-value=1.000e-40, raw score of 8.73
  DOMAIN (70)..(345): Reverse transcriptase domain identified by PFam, accession name rvt, E-value=1.7e-74, PFam score of 260.9
MDKFLNTYTIPRLNQEEVESLNRSITGSEIEAIINNLPTKRSPGPDGFTPEFYQRYKEELVPFLLKLFQSIVKEGFLPNSFYEGSIILITKSGRDTTKKENLRPISLMNINAKILNKILANQIQQHIKKLIHHEQVDFIPGMQGWFNIRKSINVIQHINRTNDKNHMIISIDAEKAFDKIQQLFMLKTLNKLGIDGTYLKIIRAIYDKHTANIILNGQKLEAFPLKTGTRQGCPLSPLLFNIVLEVLARAISQEKEIKGIQLGKEEVKLSLFADDMIVYLENPIVSAQNLLKLIGNFSKVSGYKISVQKSQAFLYTNKRQTESQIMSELPFTIVSKRIKYLGIQLTRDVKDLFKENYKPLLNEIQDETNKWKNCSWVGRINIVKMVILPKELEKTTLKFIWNQKRARIAKTILSQKNKAGGITLPDFELHYKATVTKTACYLYQNRDIDQRNRTEPSEIMPHIYNYLIFDKSDKNKKWGKDSLFNKWCWENWLAICRKLKLDPFLPPYTKINSRWIKDLNVRPKTIKTLEENLGNTIQDIGMGKDFMSKTPKAMSTKAKIDKWDLIKLKSFCTAKETAIRVNREPTEWEKIFAIYSSDKGLISRIYNEFKQIYKKKTNNPIKKWAKDMNRHFSKEDIYAANRHMKKCSSSLAIREMQIKTTQVGGSEEKSASELGNKLIELDQSEEWRGKED

SEQ ID NO: 40588 - protein, 894 aa, Homo sapiens; identical to SEQ ID NO: 38230
  DOMAIN (272)..(317): kw TRANSCRIPTASE REVERSE II ORF2 domain identified by eMATRIX, accession number DM01354N, p-value=1.000e-40, raw score of 13.17
  DOMAIN (203)..(434): Reverse transcriptase domain identified by PFam, accession name rvt, E-value=5.6e-06, PFam score of 15.2
  misc_feature (1)...(894): Xaa = X or * as defined in Table 2

SEQ ID NO: 40589 - protein, 665 aa, Homo sapiens
  DOMAIN (57)..(100): kw TRANSCRIPTASE REVERSE II ORF2 domain identified by eMATRIX, accession number DM01354T, p-value=1.000e-40, raw score of 9.48
  DOMAIN (1)..(179): Reverse transcriptase domain identified by PFam, accession name rvt, E-value=6e-15, PFam score of 63.1
MIISIDAEKAFDKIQQLFMLKTLNKLGIDGTYLKIIRAIYDKPTANIILNGQKLEAFPLKTGTRQGCPLSPLLFNIVLEVLARAIRQEKEIKGIQLGKEEVKLSLFADDMIVYLENPIVSAQNLLKLISNLSKVSGYKINLQKSQAFLYTNNRQTESQIMSELPFTIASKRIKYLGIQLTRDATDLFKENYKPLLNEIKEDTNKWKNIPCSWVGRINIVKMAILPKVIYRFNAIPIKLPMTSFTELEKTTLNFLWNHKRAHTAKSILSQKNKTGGIMLPDFKLYYKARVTKTAWYWYQNRDVDQWNRTEPSEIMLHIYNYLIFDKPEKNKQWGKDSLFNKWCWENWLAICRKLKLDPFLTPYTKINSRWIKDLNVRPKTIKTLEENLGNTIQDIGMGKDFMSKTPKAMATKTKIDKWDLIQLKSFFCTAKETTIRVNRQPTEWEKIFATYSSDKGLISRIYNELKQIYKKKTNNPIKKWTNDMNRHFSKEDIYAAKKHMKKCSSLPAIREMQIKTTMRYHLTPVRIAIIKKSGNNSKVDDIHAICSLLKDFLRNFKEPLLTFRLNKAFMEAAEITDEDNSISAMYQAVGELPQANRDTLVFLMIHLQRVAQSPYTKMNVANLAEVFGSTIVAHAVPNPEPVTMLQDIKCQPKVVERLPSLPLEYW

SEQ ID NO: 40590 - protein, 593 aa, Homo sapiens
  DOMAIN (166)..(213): kw TRANSCRIPTASE REVERSE II ORF2 domain identified by eMATRIX, accession number DM01354V, p-value=1.000e-40, raw score of 12.97
  DOMAIN (1)..(179): Reverse transcriptase domain identified by PFam, accession name rvt, E-value=1e-13, PFam score of 59.0
  misc_feature (1)...(593): Xaa = X or * as defined in Table 2
MIISIDAEKAFDKIQQPFMLKTLNKLGIDGTYLKIIRAIYDKPTANIIPNGQKLEAFPLKTGTTQGCPFSPLLFNIVLEVLARVIRQEKEIKGTQLGKEEVTLSLFADDMIVYLQNPIVSAQNLLKLIGNFSKVSGYKINVQKSQAFLYTNNRQTESQIMSELPFTIASKRIKYLGIQLTRDVKDLFKENYKPLLKEIKEDTNKWKNIPCSWVGRINIVKMAILPKVIYRFNAIPIKLPMTFFTELEKTTLKFKWNQKRACIAKSILSQKNKAGGIMLPDFKLYYKATVIKTAWYWYQNRDIDQWNRTEPSEIMPHIYNYLIFDKPDQNKQWGKDSLFNKWYWENCLAICRKLKLDPFLTPYTKINSRWIKDLNVRLKTIKALEENLGNTIQDIGMGKDFMSKTPKAMATKDKIDKWDLIKPKSFCTAKETTIRVNRQPTKWEKIFATYSSDKGLISRNYNELKQIYKKKTIGPIKKWAEDMNRHFSKEDTYAAKKHMKKCSSSLAIREMQIKTTMRYHLTPVRMVIIKKSGNNRCWRGCGETGTLSHCWWDCKLIQPLWRFLRDXGPKTGGDSXMIQVKYXPQQKKKGCPNA

SEQ ID NO: 40591 - protein, 957 aa, Homo sapiens
  DOMAIN (23)..(68): kw TRANSCRIPTASE REVERSE II ORF2 domain identified by eMATRIX, accession number DM01354N, p-value=1.000e-40, raw score of 13.17
  DOMAIN (263)..(377): ParA family ATPase domain identified by PFam, accession name ParA, E-value=1.8e-26, PFam score of 101.4
PIKNDKGDITTDPTEIQTTIREYYKHLYANKLENLEEMDKFLDTYTLPRLNQEEVESLNRPITGSEIEAIINSLPTKKSPGPDGFTSEFYQRYKETVVCRLSPPSFNGGLPLGSDLVFYAPGPQKIIWVMVHVGALALKDGFSPLDVGVHGFCRFRNHHQTGFSPAGANQRDPLAATLSGPGGEGQSAVARLTGEKKNHPGAQYANRLSPRVGRFINAAGTTGFPTGKRAVSATQLMVKDDVTYAIKLSCWPGLDIIPSCLALHRIETELMGKFDKGRLPTHPHLMLRLAIETVAHDYDVIVIDSAPNLGIGTINVVCAADVLIVPTPAELLDYTSALQFFDMLRDLLKNVDLKGFEPDVRILLTKYSNSNGSQSPWMEEQIRQAWGSMVLKNVEFCRFRTPHQPGFSPAGANQRGPLAATLSGPAGEGQSAVARLTGEKKNHPGAQYANRLSPRVGRFINAAGTTGFPTGKRAGIREISDLMIIGETVITRSPTGTRSPVGQFLAVWGGKLPSPAFGSGSRDFADFGTTIKQDFRLLGQTSVDRLLQLSQGQAVKGNQLLPVSLVKRKTTLAPNTQTASPRALADSLMQLARQVSRLESGQAWSLCTPIMWFYPRAFSRLRQLTRYSSSGGVAGCHSGKPSRKLSTLGFASLVQHSTLSRATLLIYKGFCRFRNPHQTGFSPAGANQRGPLAATLSGPGGEGQSAVARLTGEKKNHPGAQYANRLSPRVGRFINAAGTTGFPTGKRAVSATQLMDFADFGTTIKQDFRLLGQTSVDRLLQLSQGQAVKGNQLLPVSLVKRKTTLAPNTQTASPRALADSLMQLARQVSRLESGQDFADFGTTIKQDFRLLGQTSVDRLLQLSQGQAVKGNQLLPVSLVKRKTTLAPNTQTASPRALADSLMQLARQVSRLESGQLAGFPRQALNRGLPLGFRFSALRHLDPKKLDLGDGSRSGPSP

SEQ ID NO: 40592 - protein, 612 aa, Homo sapiens
  DOMAIN (57)..(100): kw TRANSCRIPTASE REVERSE II ORF2 domain identified by eMATRIX, accession number DM01354T, p-value=1.000e-40, raw score of 9.48
  DOMAIN (1)..(179): Reverse transcriptase domain identified by PFam, accession name rvt, E-value=7e-12, PFam score of 52.9
MIIPIDAEKAFDKIQQPFMLKTLNKLGIHGMYLKIIRAIYDKPTANIILNGQKLEAFPLKTGTRQGCPLPPLLFNIVLEILARAIRQEKEIKGIQLGKEEVKLSLFADDMIIYLENPIVSAQNLLKLISNFSKVSGYKINVQKSQAFLYTNNRQTESQILSELPFTIASKRIKYLGIQLTRDVKDLFKENYKPLLNEIKEDTNKWKNIPCLSIGKINIMKMAILPKVIYRFNAIPIKLPMTFFTELEKTTLKFIWNQKRARIAKTILSQKNKDGGITLPDFKLYYKATVTKTAWYQYQNRDIDQWNRTEPSEIIPHVYNHLIFDKPDKNKKWGKDSLFNKWCWENWLAICGKLKLDPFLTPYTKINSRWIKDLNVRPKTIKTLEENLGNTIQDIGMGKDFMSKIPKAMATKAKIDKWNLIELKSFCTAKETTISVNRQPTEWEKIFAICLSDKGLISRIYKELKQRHKKKTNNPIKKWAKDMNRHFSKEDIYAANRHMKKCSSSLAIREMPIKTTMRYHLTPVRMAIIKKSGNNRCWRGCGEIGTLSHCWWDCNLVQPLWKAVWRFLKDLELEIPFDPAISLLGIYPKDYKSCCYKDTCTQSTFTCRQHLPL

SEQ ID NO: 40593 - protein, 682 aa, Homo sapiens
  DOMAIN (75)..(118): kw TRANSCRIPTASE REVERSE II ORF2 domain identified by eMATRIX, accession number DM01354T, p-value=1.000e-40, raw score of 9.48
  DOMAIN (1)..(197): Reverse transcriptase domain identified by PFam, accession name rvt, E-value=6.9e-18, PFam score of 72.8
MEKFLDTYTLRRLNQEEVESLNRPITGSEIVAIINSLPTKKNPGPDGFTAEFYQRAIYDKPTASIILNGQKLEAFPLKTGTRQGCPLSPLLFNIVLEVLARAIRQEKEIKGIQLGKEEVKLSLFADDMIVYLENPTVSAQNLLKLISNFSKVSGYKINVQKSQAFLYTNNRQTESQIMSELPFTIASKRIKYLGIQLTRDVKDLFKENYKPLLKEIKEDTNKWKNIPCSWVGRINIVKMAILPKVMYRFNAIPIKLPVTFCTELEKTTLKFIWNQKRARITKSILSQKNKAGGITLPDFKLYYKATVTKTAWYWYQNRDIDQWNRTEPSEITPHMYNYLIFDKPEKNKQWGKDSLFNKWCWENWLAICRKLKLDPFLTHYTKINSSWIKDLNVRPKPIKTLEENLGITIQDIGMGKDFMSKTPKAMATKANIDKWDLIKLKSFCTAKETTIRVKRQLTKWEKIFATYSSDKGLISRIYNELKQIYKKKTNNPIKKWAKDMNRHFSKEDIYAAKRHMKKCSSSLAIREMQIKTTMRYHLTPVRMAIIKKSGNNRPALGPGAARNEASRPARGGRRSYPTSPVRAGDRRGRQQQRRNVSLSSQFAHTMAAPAQQTTQPGGGKRKGKAQYVLAKRARRCDAGGPRQLEPGLQGILITCNMNERKCVEEAYSLLNEYGDDMYGPEK

SEQ ID NO: 40594 - protein, 565 aa, Homo sapiens
  DOMAIN (126)..(171): kw TRANSCRIPTASE REVERSE II ORF2 domain identified by eMATRIX, accession number DM01354N, p-value=1.000e-40, raw score of 13.17
MEDEMNEMKQEGKFREKRIKRNEQSLQEIWDYVKRPNLRLIGVPESDGENGTKLENTLQDIIQENFPNLARQTNIQIQEIQRMPQRYSSRRATPRHIIVRFTKVEMKEKMSRAAREKEIQTTIREYYKHLYANKLENLEEMDKFLDTCTLPRLNQEEVESLNRTVTGSEIVAIINSLPTKKSPGPDGFTAEFYQRQSESQIMSEFPFTIASKRIKYLGIQLTRDVKDLFKENYKPLLNEIKEDTKKWKNIPCSWVGRINIVKMAILPKVIYTFNAIPIKLPMTFFTELEKTTFKFIWNQKRAHVAKSILSQKNKAGGITLPDFKLYYKATVTKTAWYWYQNRDIDQWNRTEPSEIMLHIYSYLIFDKPEKNKQWGKDSLFNKWCWENWLAICRKLKLDPFLTPYTKINSRWIKDLNIRPKTIETLEENLGITIQDIGMGKDFMSKTSKAMSTKAKIDKWDLIKLKSFCTAKETTIKVNRQPTKWEKIFATYSSDKGLISRIYNELKQIYKKKTNNPIKKWVKDMNRHFSKEDIYAAKRHMKKCSSSLAIREMQIKTTMRYHLTPV

SEQ ID NO: 40595 - protein, 1070 aa, Homo sapiens; identical to SEQ ID NO: 36416
  DOMAIN (154)..(195): kw TRANSCRIPTASE REVERSE II ORF2 domain identified by eMATRIX, accession number DM01354I, p-value=1.000e-40, raw score of 15.55
  DOMAIN (400)..(594): Reverse transcriptase domain identified by PFam, accession name rvt, E-value=8.6e-35, PFam score of 129.0

SEQ ID NO: 40596 - protein, 673 aa, Homo sapiens; identical to SEQ ID NO: 39473
  DOMAIN (25)..(70): kw TRANSCRIPTASE REVERSE II ORF2 domain identified by eMATRIX, accession number DM01354N, p-value=1.000e-40, raw score of 13.17
  DOMAIN (40)..(266): Reverse transcriptase domain identified by PFam, accession name rvt, E-value=2e-32, PFam score of 121.2

SEQ ID NO: 40597 - protein, 1048 aa, Homo sapiens
  DOMAIN (110)..(151): kw TRANSCRIPTASE REVERSE II ORF2 domain identified by eMATRIX, accession number DM01354I, p-value=1.000e-40, raw score of 15.55
  DOMAIN (356)..(535): Reverse transcriptase domain identified by PFam, accession name rvt, E-value=7e-24, PFam score of 92.8
MGDFNTPLSTLDRSSRQKVNKDTQELNSTLHHADLIDIYRTLHPKSTEYTFFSAPHHTYSKIDHVVGSKALLSKCKRTEIITNCLSDHSAIKPELRIKKLTQNRSTTWKLNNLLLNDYWVHNKMKAEIKMFFETNENKDTTYQNLWDTFKAVSRGKFIALNAHKRKQKRCKIDTLASQLKEVEKQEQTHSKASRRQEITKIRAELKEIETQKTLQKINESRSWFLERINKIDRPLARLIKKKREKNQIDVIKNDKGDITTDPTEIQTTIREYYKHLYANKLENLEELDKFLDTHTLQRLNQEEVESLNRPITGSEIVAIINSLPTKKSPGPDGSTAEFYQRYKEELLPFLLKLFQSIEKEGILPNSFYEASIILIPKPGRDTAKKENFRPISLMNIDAKILNKILANQIQQHIKKLIIHHDQVGFIPGMQGCLEVLARAIRQEKEIKGIQLGKEEVKLSLFADDMIVYLENPIVSAQNLLKLISNFSKVSGYKINVQKSQAFLYTNNRQTESQIMSEIPFTIVSKRIKYLGIQLTRDMKDLFKENYKPLLNEIKEDTNKWKNIPCSWLGRINMVKMAILPKVIYRFNAILIKLAMTFFTESEKTTLKFIWNQKRACIAKSILSQKNKVIGITLPDFKLYYKAIVNKTAWYWYQNRDIDQWNRTEPSEITPHIYNYLIFDKPEKNKQWGKDSLFNKWCWENWLAICRKLKLDPFLTPYTKINSRWIKDFHVRPKTIKTLEENLGITIQDIGMDKDFMSKTPKAMATKAKIDKWDLIKLKSFCRAKETTIRVNRPPTEWEKIFVTYSSDKGLISRIYNELKQIYKKKTNNPIKKWAKDMNRHFSKEYIYAAKRDMKKCSSSLAIREMQIKTTMRYHLTPVRMVIIKKSGNNRCWRGCGEIGTLLHCWWDCKLVHPLWKSVWRFLRDLELEIPFDPAILLLGIYPKDYKSCCYKDTCTHEKAEIQKSKGIRDYGEIGTRTEDMDSQFRPLSVVRAQIIPFEFPWEGIPLGGPFPRHSCSYPVGLALLYHSSSAAGPVRGHLSLQWNSRMTS

SEQ ID NO: 40598 - protein, 758 aa, Homo sapiens; identical to SEQ ID NO: 35813
  DOMAIN (106)..(149): kw TRANSCRIPTASE REVERSE II ORF2 domain identified by eMATRIX, accession number DM01354T, p-value=1.000e-40, raw score of 9.48
  DOMAIN (1)..(228): Reverse transcriptase domain identified by PFam, accession name rvt, E-value=2.9e-37, PFam score of 137.2

SEQ ID NO: 40599 - protein, 750 aa, Homo sapiens; identical to SEQ ID NO: 39494
  DOMAIN (80)..(135): kw TRANSCRIPTASE REVERSE II ORF2 domain identified by eMATRIX, accession number DM01354Q, p-value=1.000e-40, raw score of 9.23
  DOMAIN (37)..(308): Reverse transcriptase domain identified by PFam, accession name rvt, E-value=3.1e-70, PFam score of 246.7

SEQ ID NO: 40600 - protein, 274 aa, Homo sapiens
  DOMAIN (159)..(204): kw TRANSCRIPTASE REVERSE II ORF2 domain identified by eMATRIX, accession number DM01354N, p-value=1.000e-40, raw score of 13.17
MPHFHLKVDSPARRLHILHRYSRRCFRRLDARPLRSLSLILKLEETWCLVTSYSTRVREDSLTEACCDFSPAACCCYFGVARSIKAKLYWLRVSFLRPYICSTEADPGTSAGSLMTRRTRWLPGSHSQSADLPRHDSVSMSSSKREKRRLEIQTTIREYYKHLYANKLENLEEMDKFLDTYTLPRLNQEEVESLNRPITGSEIEAIINSLPIKKSPGPDGFTAKFYQRYKDELIVSSVGTLPRLVLFTNVLPVPGTVLNPSTPSLKLNRCLIER

SEQ ID NO: 40601 - protein, 868 aa, Homo sapiens
  DOMAIN (149)..(194): kw TRANSCRIPTASE REVERSE II ORF2 domain identified by eMATRIX, accession number DM01354N, p-value=1.000e-40, raw score of 13.17
  DOMAIN (200)..(477): Reverse transcriptase domain identified by PFam, accession name rvt, E-value=4.4e-68, PFam score of 239.6
  misc_feature (1)...(868): Xaa = X or * as defined in Table 2
MKAEIKMFFETNENKDTTYQNLWDAFKAVCRGKFIALNAYKRKQERSKIDTLTSQLKELEKQEQSHSKAGRRQEITKIRAELKEIETQKTLQKINESRSWFFERINKIDRPLARLIKKKREKNQIDTIKNDKGDITTNPTEIQTTIREYYKHLYANKLENLEEMDTFLDTYTLPRLNQEEVGSLNTPITGSEIVAIINSLPTKKSPGPDGFTAEFYQRYKEELPGRVPTKKENFRPISLMNIDAKILNKILANRIQQHIKKLIHHDQVGFIPGMQGWFNIRKSINVIQHINRAKDKNHMIISIDAEKAFDKIQQPFMLKTLNKLGIDGTYFRIIRAIYDKPTANIILNGQKLEAFPLKTGTRQGCPLSPLLFNIVLEVLARAIRQEKEIKGIQLGKEEVKLSLFADDMIVYLENPIVSAQNLLKLISNFSKVSGYNFYVQKSQAFLYTNNRQTESQIMSELPFTIASKRIKYLGIQLTRDVKDLFKENYKPLLKEIKEDTNKWKNIPCSWVGRINIVKMAILPKVIYRFNAIPIKLPMTFFTELEKTTLKFIWNQKRARIAKSILSQKNKAGGITLPDFKLYYKATVTKTAWYWYQNRDIDQWNRTEPSEIMPHIYNYLIFDKPEKNKQWGKDSLFNKWCWENWLAICRKLKLDPFLTPYTKINSRWIKDLNVRPKTIKTLEENLGITIQDIGVGKDFMSKTPKAMATKAKIDKWDLIKLKSFCTAKETTIRKLKGSAFPAFKVDASCETQRPEATHRPLRVSLHMLFSAIVEMRHPETSXPCARTWHPLLSSFFPRREALDWDHXHEQCSAASCPPVSSGLRLNGCHQKNKITTATTTKIECWXGCGEKEILILHSWAQYKMKMQAP

SEQ ID NO: 40602 - protein, 777 aa, Homo sapiens
  DOMAIN (9)..(54): kw TRANSCRIPTASE REVERSE II ORF2 domain identified by eMATRIX, accession number DM01354N, p-value=1.000e-40, raw score of 13.17
  DOMAIN (93)..(356): Reverse transcriptase domain identified by PFam, accession name rvt, E-value=1e-58, PFam score of 208.5
  misc_feature (1)...(777): Xaa = X or * as defined in Table 2
XIQTTIREYYKHLYANKLENLEEMDKFLDTYTLPRLNQEEVEPLNRPITGSEIVAIINSLPTKKSPGPDGFTAEFYQGYKEELVPFLLKLFQSIEKERIHPNSLYEASIILVLKPARDTTKKENFRPISLMNIDAKSSIKYWQTESSSTSKSLSTMIKWLHPWDARLHINRTKDKNHMIISIDAEKAFDKIQQPFMLKTLNKLGIDGTYLKIIRAIYDKPTANIILNGQKLEAFPLKTGTRQGCLLSPLLFNIVLEVLARAIRQEKEIKGIQLGKEEVKLSLFADEMIVYLENPIVSAQNLLKLISKFSKVSGYKINVQKSQALLYTKNRQTESQIMSELPFTIASKRIKYLGIQLTRDVKDLFKANYKPLLSEIKEDTNKWKNITCSWVGIINIVKMAILPKIIYAFNAIPIKLPMTFFTELEKTTLKFIWNQKRARIAKSILSQKNKAGGITLPDFKLYYKATVTKTAWYWYQNRDIDQWSRTEPSEITPHIYNHLIFDNKPEKNKQWGKDSMFNKWCWENWLAICRKLKLDPFLTPYTKINSRWIKDLNFRPKTIKTLEENLGITIQDIGMGKGFMSKTPKAMATKAKIDKWNLIQLKSFCTAKETTIRVNRQPTKWEKIFATYSSDKGLTSRIYNELKQIYKKKTNNPIKKWVKDMNRHFSKEDIYAAKKHMKKCSPSLAIREMQIKTTMRYHLTPVRMAIIKKSGNNSSLNNVMKGNDELGDSVSRFQKQTLSLKSAKIALCESLISCRERAKIVEKQTQALIMRVADLKQK

SEQ ID NO: 40603 - protein, 596 aa, Homo sapiens
  DOMAIN (57)..(100): kw TRANSCRIPTASE REVERSE II ORF2 domain identified by eMATRIX, accession number DM01354T, p-value=1.000e-40, raw score of 9.48
  DOMAIN (1)..(179): Reverse transcriptase domain identified by PFam, accession name rvt, E-value=3.7e-13, PFam score of 57.2
  misc_feature (1)...(596): Xaa = X or * as defined in Table 2
MIISIDAEKAFDKIQQPFMLKTLNKLSIDGTYFKIIRAIYDKPTANIILNGQKLEAFPLKTGTRQGCPLSPLLFNIVLEVLARAIRQEKEIKGIQLGKEEVKLSLFAHDMIVYLENPIVSAQNLLKLISNFSKVSGYKINVQKSQAFLYTNNRQTESQIMSELPFTIASKRIKYLGIQLTRDVKDLFKENYKPLLKEIKEDTNKWKNIPCSGVGRINIVKMAILPKVIYRFNAIPIKLPMTFFTELEKTTLKFIWNQKGACITKTILSQKNKVGGITLPDFKLYYKATVTKTAWYWYQNRDIDQWNRIKPSEIMPHIYNYLIFDKPEKNRQWGEDSLFNKWCWETWLAIWRKLKLDPFLTLYAKINXRWIKDLNVRPKTIKTLEENLGITIQDIGMGKDFMSKTPKAMATKAKIDKWDLIQLKSYCTAKENTIRVNRQPTKWEKIFATYSSDKGLITRIYNELKQIYKKKTNNPIKKWAKDMNRHFSKEDIYAAKKHMKKCSSSLAIREMQIKTTMRYHLTPVRMAIIQKSGNNRTKRTIYRRNDDDDDNDDNDDDSLMSLSRTEIPFSSYSELNVVLHKPRPEPSASTILLLHTA

SEQ ID NO: 40604 - protein, 950 aa, Homo sapiens
  DOMAIN (426)..(469): kw TRANSCRIPTASE REVERSE II ORF2 domain identified by eMATRIX, accession number DM01354T, p-value=1.000e-40, raw score of 9.48
  DOMAIN (309)..(548): Reverse transcriptase domain identified by PFam, accession name rvt, E-value=4e-40, PFam score of 146.7
MSGFLISPKHKHGTNSGIVSWADVQSQLRHIEAAFDQEAAAVLMARLGVFRAESEEGPDVLRWLDRQLIRLHSLLTTLDIVPAGKGEVVKGPMSISQQAKGCQKFGQYNKEDPTSFRLSDSFSLYPQFMFHLRRSPFLQVFNNSPDESSYYRHHFARQDLTQSLIMIQPILYSYSFHGPPEPVLLDSSSILADRILLMDTFFQIVIYLGETIAQWRKAGYQDMPEYENFKHLLQAPLDDAQEILQARFPMPRYINTEHGGSQKKREKNQIDAIKNDKGDITTEPTEIQTTIREYYKHLYANKLESLEEMNKFLDTYTLPRLNQEEVESLNRQITGSEIEAIINSLPTKKSPGPDRFTAKFYQRTNDQKHMIISIDAEKAFDKIQQPFMLKTLNKLGIDGTYFKIIRAIYDKPTANIILNGQKLEAFPLKTGTRQGCPLSLLLFNIMLEVLARAIRQEKEIKGIQFGKEEVKLSLFADDMIVYLENPIVLAQNLLKLISNFSKVSGYKINVQKSQAFLYTSNRQTESQIMSELPFTIASKRIKYLGIQLTRDVKDLFKENYKPLLNEIKEDTNKWKNIPCSWVGRINIVKMAILPKVIYRFNAIPIKLSMTFFTELEKTTLEFIWNQKRARITKSILSQKNKAEGITLPDFKLQYKATVTKTAWYSYQNRDIDQWNRTEPSEIVPCIYNYLIFDKPDKNKKWGKDSLFNKWCWENWLAICRKLKLDPFLTPYTKINSRRIKDLNVRPKTIKTLEENLGNTIQDIGMGKDFISKTPKAMATKAKIDKWDLIKLKSFCTAKETTIRVNRQPTTWEKIFTTYSSDKGLISRIYNELKQIYKKKTNNPIKKWVKDMNRHFSKEDIYAAKKHMIKCSASLAIREMQIKTTMRYHLTPVRMAIIKKSGNNSVLKREGQRIDISTVSFPICLSVVHSLKNRYSLYNITEAALANVPRE

SEQ ID NO: 40605 - protein, 874 aa, Homo sapiens
  DOMAIN (301)..(346): kw TRANSCRIPTASE REVERSE II ORF2 domain identified by eMATRIX, accession number DM01354N, p-value=1.000e-40, raw score of 13.17
  DOMAIN (381)..(678): Reverse transcriptase domain identified by PFam, accession name rvt, E-value=9.2e-72, PFam score of 251.8
MKREGSLEKKRIKRNEQSLQEICDYVKRANLRLIGGPESDGENGTKLENTLQDMQEKFPNLARQANIQIQEIQRTPQRYSSRRATPRHIIVRFTKVEMKEKMLRAAREKGQVTHKGKSIRLTADLSAETLQARREWGPIFNILKEKNFQPRISYPGKLSFISEGEIKSFTDKQMLRDFVTTRPALKELLKEALNMEKNKQYQPPQKHAKLTREARANTFKPSRRREITKIRAELKEIETPKTAQKINESRSWFSERINKIDRPLARLRKKKREKNQIDTIKNDEGDITTHPTEIHTIIREYYKHLYANKLENLEEMDKFLDTYTLPRPNQEEVESLNGPIAGSEIQAIINSLPTKKSPGPDGFYQRYKEELVPFRLKLFQSIEKEGILPNSFYEASIILIPKPGRDTTKKENFRPISLLNINAKILNKILANRIQQHIKKLMHHDQVGFIPGMQGWFNIRKSINVIQHINRTKDKNHMIISIDAEKAFDKIQQPFMLKTLNKLGIDGTYHKIIRANYDKPTANIILNGQKLEAFPLKTGTRQGCPLSPLLFNIVLEVLARAIRQEKETEGIQLGKEEVKLSLFADDMIVYLENPIVSAQNLLKLISNFSKVSGYKINVQKSQVFLYTDNRQTESQIISELPIHNCFKENKIPRNPTYKVREGPLQGELQTTAQMGKDFISKAPKATATKANIDKWDLIKLKSFCTAKATTIRVNRQPTEWEKIFAIYSSDKGLISRIYNELKQIYKKKTNNPIKKWAKDMNRHFSKEDIYAAKRHMKKCSSSLAIREMQIETTMRYHLTPVRMAIIKKSGNNRNIQTVLLLRIPFQGLVPSPSGQTHPVGDQPAAHVDSIDADTRLRGQNHIPEELGRGVVSNP

SEQ ID NO: 40606 - protein, 682 aa, Homo sapiens
  DOMAIN (169)..(214): kw TRANSCRIPTASE REVERSE II ORF2 domain identified by eMATRIX, accession number DM01354N, p-value=1.000e-40, raw score of 13.17
  misc_feature (1)...(682): Xaa = X or * as defined in Table 2
MENDFEELREEGFRRSNYSELREDIQTKGKEVENFEKNLEECITRITNTQKCLKELMELKTKARELREECRSLRSRCDQLEERVSAMEDEMNEMKREGKFREKRIQRNEQSLQEIWDYVKRPNLRLIGVPETLHPRDEAHLKNLIDAIKNDKGDITTDPTEIQTTIREYYKHLYANKLENLEETDKFLDTYTLPRLNQEEVESLNRPITGSEIVAIINSLPTKKSPGPDGFTAEFYQRYKEELPDKQLQQSLRIQNQCTKITSILIHQQQTNREPNHEXTPIHNCFKENKIPRNPTYKGCEGPLQGELQTTAQGNKRGYKQMEEHSMLMGRKNQYHENGHTAQGNLQIQCHPHXATNAFLHRIGKNYFKVHMEPKKSPHRQVNPKPKEQSWRHHTTXLQTILQGYSNQNSMVLVPKQRYRSMEQNRALRNNAAYLQLSDLXQTXEKQEMGKGFPIXXMVLGKLASHMXKAETGSLPYTLYKNQFKMDXRLKRXTXNHKNPRRKPRHYHSGHRHGQGLHVXNTKSNGNKSQNXQMGSNXTKELLHSKKKKNYXQTEQATCKMGENFHNLLIXQRANIQNLQXTQTNLQEKNKQPHQKVGKGHEQTLLKRRHLCSQKNHEKMVTITGHQRNANQNHNEIPSHASXNGNHXKVRKQVLERMCRNRNTFTLLVGLXTSSTIVEVSV

SEQ ID NO: 40607 - protein, 901 aa, Homo sapiens
  DOMAIN (223)..(266): kw TRANSCRIPTASE REVERSE II ORF2 domain identified by eMATRIX, accession number DM01354T, p-value=1.000e-40, raw score of 9.48
  DOMAIN (7)..(156): RNA polymerase alpha subunit domain identified by PFam, accession name RNA_pol_A, E-value=6.7e-96, PFam score of 270.1
MYSHVITVCRHVKNGDILLLNRQPTLHRPSIQAHRARILPEEKVLRLHYANCKAYNADFDGDEMNAHFPQSELGRAEAYVLACTDQQYLVPKDGQPLAGLIQDHMVSGASMTTRGCFFTREHYMELVYRGLTDKVGRVKLLSPSILKPFPLWTGKQHINRTKDKNHMIISIDAEKAFDKIQQPFMLKTLNKLGIDGTYLKIIRAIYDKPTASIILNGQKLEAFPLKTGTRQGCPLSPLLFNIVLEVLARAIRQEKEIKSIQLGKEEVKLSLFADDMIVYLENPTVSAQNLLKLMSNFSKVSGYKINVQKSQAFLYTNNRQTESQIMSGLPFTITSKRITYLGIQLTRDVKDLFKENYKPLLKEIKEDTNKWKNIPCSWVGRINIVKMAILPKVIYRFNTIPIKLPMTFLTELEKTTLKFIWNQKRAHIAKSILSQKNKAGGIMLPDFKLYYKATVTKTAWYWYQNRDIDQWNRTEPSEIMPHIYYNYLIFDKPEKNKQWGKDTLFNKWCWENWLAICRKLKLDPFLTPYTKINSRWIKDLNVRPKTIKTLEENLGNTIQDIGMGKDFMSKTPKATATKAKIDKWDLIQLKSFCTAKETTIRVNRQPTEWEEIFAIYSSDKGLISRIYNELKQIYKKKTNNPIKKWAKDMNRHFSEEDIYAAKKHMKKCSSSLAIREMQIKTTMRYHLTPVRMVIIKKSGNNRCWRGCGEIGTLLHCWWDCKLVQPLWKSVWQFLRDLELEIPFDPAIPLLGIYPEDYKPCCYKDTCTRMFIAALFTIAKTWNQPKCPTMIDGIKKMWHIYTMEYYAAIKKDEFMSFVGTWMKLETIILSKLSQGQKTKHRMFSLIVRTLSCRSVGVYSKSTPDPVCLSISSSGCRTADISVSQMLLPDCSSGSFVSEEYPK

SEQ ID NO: 40608 - protein, 1115 aa, Homo sapiens
  DOMAIN (361)..(404): kw TRANSCRIPTASE REVERSE II ORF2 domain identified by eMATRIX, accession number DM01354T, p-value=1.000e-40, raw score of 9.48
  DOMAIN (247)..(483): Reverse transcriptase domain identified by PFam, accession name rvt, E-value=3.5e-44, PFam score of 160.2
MAPASAPGEASGSLQLWRKVKEEQSCLLSKVAGPFRMGERRGNQSRHSDIHQPVLPSGGIAVLKAVVPHSHGAHALDPTPHLSSLRNIAIRGSTVGKHLGEISGCDPLLKASPLAIAKQKRLWLPSKADFPENSPGRPRGRNARPPGGRGGCGCIFSRLKRSCLLTLKRAVDFPTQHFSSAKGQAASSNGSLTPMPPDWVNRHLIQESSSWHLEGVPLGRSFQRKEQAAIFAVLQPPLVIPWQTGSGVDLLQTPPDLQKRVLTVRRKTNNQKAIASTSTKRTPTQKPHPKVTNIKDQRTNDKNQMIISIDAEKPFNKIQLPFMLKTLNKLGIDGTYFKIIRAIYDKPTANIILNGQKLEAFPLKTGTRQGCPLSPLLFNIVLEVLARAIRQEKEIKGIQLGKEEVKLSLFADDMTVYLENPIVSAQNLLKLISNFSKVSGYKINVKKSQAFLYTSNRQTESQIMSELPFTIASKRIKYLGIQLTRDVKDLFKENYKPLLKEIKEDTNKWKNIPCSWVGRINIVKMAILPKVIYRFNAIPIKLPMTFFTELEKTTLKFIWNQKRACIAKSTLSQKNKAGGITLPDFKLYYKATVTKTAWYWYQNRDIDQWNRTEPSEITPHTYNYLIFDKPEKNKQWGKDSLFNKWCWENWLAICRKLKLDPFLTPYTKINSRWIKDLNVRPKTIKTLEENLGITIQDIGMGKDFMSKTPKAMATKDKIDKWDLIKLKSFCTAKETTIRANRQPTTWEKIFATYSSDKGLISRIYNELKQIYKKKTNNPIKKWAKDMNRHFSKEDIYAAKKHMKKCSSSLAIREMQIKTTMRYHLTPVRMAIIKKSGNNRCWRGCGEIGTLLHCWWDCKLVQPLWKSVWRFLRDLELEIPFDPAIPLLGIYPNDYKSCCYKDTCTRKIRTNGRNCASKKGNINKEARSLFNHWPLQRPRRVYSLHVLCGDTAFRHGLRPAHHHPSLDCLSSTHHGEQAFLREGHLQDKMGKEEEHHSCLVSPAWFIIASGLQPAASGNRCPTEGRRVKILCIIRGIQEKHLPGGKALATPEEAAAGKEAAREQFLSGQQSEILSQKKEEEEKKKKKKKKKKKKEEEEEEEEEEEEEEERRGGGKER

SEQ ID NO: 40609 - protein, 791 aa, Homo sapiens
  DOMAIN (60)..(106): kw TRANSCRIPTASE REVERSE II ORF2 domain identified by eMATRIX, accession number DM01354O, p-value=1.000e-40, raw score of 8.73
  DOMAIN (93)..(368): Reverse transcriptase domain identified by PFam, accession name rvt, E-value=1.5e-79, PFam score of 277.7
  misc_feature (1)...(791): Xaa = X or * as defined in Table 2
RQWAGVVGRCSHLASWVSSNTSETGAIRSSTEVDAPDDSMLLSTCDIDLTAARRAWLGCLPTKKSPGPDGFTAEFYQRCKEELVPFLLKLFQSIEKEGILPNLFDEASIILIPKRGRDTTKKENFRPISLMNIDAKILNKILANRNQQHIKKLIHHDQVGFIPGMQGWFNICKSINVIQHINRTKDKNHMIISIDAEKAFDKIQQPFMLKTLNKLGIDGTYLKIIRAIYDKPTANIILNGQKLEAFPLKTGTRQGCPLSPLLFNIVLEVLARAIRQEKEIKGIQLGKEEVKLSLFADDMIVYLENPIVSAQNLLKLISNFSKVSAYKINVQKSQAFLYTNNRQTESQIMSVFPFTIASKRIKYLGIQLARNAKDLFKENYKPLLNEIKEDTKKWKNIPCSWVGRINIVKMAILPKVIYRFNAIPIKLPMTFFTELEKTTLKFIWNQKRARIAKSILSQKNKAGGITLPDFKLYLQGLQXPKTAWYWYQNRDIDQWNRTEPSEITPHIYNYLIFDKPEKNKQWGKDSLFNKWCWENWLATCRKLKLDPFLTPYTKINSRWIKDLNVRPKTIKTLEENLGITIQDIGVGKDFMSKTPKAMATKAKIDKWDLIKLKSFCTAKETAIRVNRQPTTWEKIFATYSSDKGLISRIYNELKQIYKKKTNNPIKKWAKDMNRHFSKEDIYAANKHMKKCSPSLAIREMQIKTTMRYHLTPVRMAVIKKSGNNRSHFNMRFGEDRHPNHSNGSQQAAPSAASDLSGRWQTWAIPALLKRDTLLSECSEAEEHLVQLKLSE

SEQ ID NO: 40610 - protein, 821 aa, Homo sapiens
  DOMAIN (437)..(484): kw TRANSCRIPTASE REVERSE II ORF2 domain identified by eMATRIX, accession number DM01354V, p-value=1.000e-40, raw score of 12.97
  DOMAIN (160)..(451): Reverse transcriptase domain identified by PFam, accession name rvt, E-value=2.2e-06, PFam score of 21.0
MGDFNIPLSTSDRSTRQKVNKDTQELNSALHQADLIDIYRTLHPKSTEYTFFSAPHHTYSKIDHIVGSKALLSKCRRTEIITNCLSDHSAIKLEIRIKKLTQNCSTTWKLNNLLLNDYWVNNEMKAEIKMFFEINEDKDTTYQNRWDTFKAVCRGKFIALNAHKRKQERSKIDTLTSQLKELEKQEQTHSKASRRQEITEIRAELKEIETQKTLQKMNESRSWFFEKINNIDRLLARLIKKKREKNQIDAIKNHKGDITTNPTEIQTTIREYDKHLYANKLENLEETDKFLDTYILPRLNQEQVESLNRPITGAEIEAIINSLRTKKSPGPGGFTAEFYQRYKEKLIVLEVLARAIRQEKEIKGIQLGKEELKLSLFADDMIVYLENPIVSAQNLLKLISNFSKVSGYKINVQKSQAFLYSNNRQTESQIMSELPFTIASKRIKYLGIQLTRDVKDLFKENYKPLLNEVKEDTNKWKNIPCSWIGRINIVKMAILPKVIYRFSAIPIKLPMTFFTELEKTTLKFIWNQKRSRIAKSILSQKNRAGGITLSDFKLYYKATVTKTAWYWYQNRDIDQWNKTEPSEIMPHIYNYLIFDKPDKNKKWGKDSLFNKWCWENWLAICRKLKLDPFLTPYTKINSRWIKDLNVRPKTIKTLEENLGITIQDTGMGKDFMSETPKAMATKDKIDKWDLIKLKSFCTAKETTIRVNRQPTEREKSFASYSSDKGLISRIYNELQQIYKKKTNNPINKWAKDMNRHFSKEDIYAAKRHTKKCSSSLAIRGIQIKTTRRYHLKPVRMAIIKKSGNNRCWRGCGEIGTLLHCW

SEQ ID NO: 40611 - protein, 826 aa, Homo sapiens
  DOMAIN (71)..(117): kw TRANSCRIPTASE REVERSE II ORF2 domain identified by eMATRIX, accession number DM01354O, p-value=1.000e-40, raw score of 8.73
  DOMAIN (106)..(379): Reverse transcriptase domain identified by PFam, accession name rvt, E-value=5.9e-86, PFam score of 299.0
QAMTLEGRWQQSQRSSTKQRDGTSFPMVEPTKTEEPFMSSLPPHPNQAAEWQSGRPRPKTGAEIVAITNSLPTKKSPGPDGFTAEFYQRYKEELVPFLLKLFQSVEKEGILPNSFYEASIILLPKPGRDKTKKENFRPISLMNIDAKILNKILANRIQQHIKKLIHHDQVGFVPGMQGWFNIRKSINAIQHINRTKDKNHMIISIDAEKAFDKIQQPFMLKTLNKLGIDGKYLKIIRAFYDKPTANIILNGQKLEAFPLKTGTRQGCPLSPLLFNIVLEVLDRAIRQEKEIKGIQLGKEEVKLSLFADDMIVYLENPIVSAQNLLKLISNFSKVSGYKINVQKSQAFLHTNNRQTESQIMSELPFTIASKRIKYLGIQITRDVKDLFKENYKPLLKEIKEDTNKWKNIPCSWVGRINIVKIAILPKIIYRLNAIPIKLLMTFFTELEKTTLKFIWNQKRARIAKSILSQKNKAGGITLPDFKLYYKPTVTKTAWYWHQNRAIEQWNRTEPSEITTHIYNYLTFDKPEKNKQWGKDSLFNKWCWENWLAICRKLKLDPFLTPYTKISSKWIKDLNVRPKTIKTQEENLGITIQDIGMGKDFMSKTQKAMATKAKIDKGDLIKLKSFCTAKETSSSVNRQPTKWEKIFATYSSDKGLISRIYNELKQIHKKKTNNPIKKWAKDMNRHFSKEDIYAAKKHMKNCSPSLAIREMQIKTTMRYHLTPLRMAIIKKSGNNRRTATLSLLPAIRHEREAFHQREEEKEGGRILLLQNRVILCSCSLCPHLSPASKPKHRGLDRFKSQSTSMFSGVLSVRNSLHAPQVVSWLQR

SEQ ID NO: 40612 - protein, 1597 aa, Homo sapiens
  DOMAIN (272)..(317): kw TRANSCRIPTASE REVERSE II ORF2 domain identified by eMATRIX, accession number DM01354N, p-value=1.000e-40, raw score of 13.17
  DOMAIN (1058)..(1424): Voltage gated chloride channels domain identified by PFam, accession name voltage_CLC, E-value=1.1e-169, PFam score of 576.2
MGDFNTPLSTLDRSTRQKVNKDTQELNSALHQADLIDIYRTLHPKSTEYTFFSAPHHTYSKIDHILGSKALLSKCKRAEIITNYLSDHSAIKLELRIKNLTQSRSTTWKLNNLLLNDYWVNNEMKAEIKMFFETKENKDTTYQNLWDAFKAVCRGKFIALNAHKRKQERSKIDTLTSQLKELEKQEQTHSKASRRQEITKIRAELKEIETQKTLQKINESRSWFFERINKIDRPLARLIKKKREKNQIDTIKNDKGDITTDPTEIQTTIREYYKHLYANKLENLEQMDAFLDTYTLPRLNQEEVESLNRPITGAEIVAIINSLPTKKSPGPDGFTAEFSQRYKEELVPFLLKLFQSIEKEGILPNSFYEASIILIPKPGRDTTKKENFRPISLMNIDAKILNKILANRIQQHIKKLIHHDQVGVIPGMQGWFSIRKSINVIQHINRAKDKNHMIISIDAEKAFDKIQQPFMLKTLNKLAQNLLKLISNFSKVSGYKINVQKSQAFLYTNNRQTESQIMSELPFTIASKRIKYLGIQLTRDVKDLFKENYKPLLKEIKEDTNKWKNIPCSWVGRINIVKMAILPQVIYRFNAIPIKLPMTFFTELEKTTFKFIWNQKRARIAKSILSQKNKAGGITLPDFKLYYKATVTKTAWYWYQNRDIDQWNRTEPSEITPLTYNYLIFDKPDKNKQWGKDSLFNKWCWENWLAICRKLKLDPFLMPYTKINSRWIKDLNIRPKTIKTLEENLGITIQDIGMGKDFMTKSAKGMATKAKIDKWDLIQLKSFCTAKETTIRVNRQPTEWEKIFGIYSSDKGLIYRIYKELKQIYKKKTNNPIKKWAKDMNRHFSKEDIYAAKKHMKKCSSSLAIREMQIKTTMRYHLTPVRMAIMKKSGNNRCWRGCGEIGTLLHCWWDCKLVQPLWKSVWRFLRDLELEIPFDPAIPLLGIYPKDYKSCCYKDTCTPLKKHISFHLYQYDTDMIGNAGLVIQQPSILQSEDKSYNGGGIGSSNRIMDFLEEPIPGVGTYDDFNTIDWVREKSRDRDRHREGAFAYIVNYFMYVLWALLFAFLAVSLVKVFAPYACGSGIPEIKTILSGFIIRGYLGKWTLVIKTITLVLAVSSGLSLGKEGPLVHVACCCGNILCHCFNKYRKNEAKRREVLSAAAAAGVSVAFGAPIGGVLFSLEEVSYYFPLKTLWRSFFAALVAAFTLRSINPFGNSRLVLFYVEFHTPWHLFELVPFILLGIFGGLWGALFIRTNIAWCRKRKTTQLGKYPVIEVLVVTAITAILAFPNEYTRMSTSELISELFNDCGLLDSSKLCDYENRFNTSKGGELPDRPAGVGVYSAMWQLALTLILKIVITIFTFGMKIPSGLFIPSMAVGAIAGRLLGVGMEQLAYYHQEWTVFNSWCSQGADCITPGLYAMVGAAACLAKEEFAHKTLAMDVMKPRRNDPLLTVLTQDSMTVEDVETIISETTYSGFPVVVSRESQRLVGFVLRRDLIISIENARKKQDGVVSTSIIYFTEHSPPLPPYTPPTLKLRNILDLSPFTVTDLTPMEIVVDIFRKLGLRQCLVTHNGRLLGIITKKDVLKHIAQMANQDPDSILFN

SEQ ID NO: 40613 - protein, 1440 aa, Homo sapiens
  DOMAIN (272)..(317): kw TRANSCRIPTASE REVERSE II ORF2 domain identified by eMATRIX, accession number DM01354N, p-value=1.000e-40, raw score of 13.17
  DOMAIN (212)..(997): Reverse transcriptase domain identified by PFam, accession name rvt, E-value=8.7e-40, PFam score of 145.6
MGDFNTPLSTLDRSMRQKVKKDTQELNSALHQADLIDIYRTLHPKSTEYTFFSAPHHTYSKIDHILGSKALLSKCKRTEIITNYLSDGSAIKLELRIKNLTQNRSTTWKLNNLLLNDYWVPNEMKAEIKMFFETNENKDTTYQNLWDAFKAVCRGKFIALNAHKRKQERSKIDTLTSQLKELEKQEQTHSKASRRQEITKIRAELKEIETQKTLQKINESRSWFFERINKIDRPLARLIKKKREKNQIDTIKNDKGDITTNPTEIQTTIREYYKHLYANKLENLEEMDKFLDTYTLPRLNQEEVESLNRPITGSEIVAIINSLPTKKSPGPDGFTAEFYQRYKEELVPFLLKLFQSIEKEGILLLEVLARAIRQEKEIKGIQLGKEEVKFSLFADDMIVYLENPIVSAQNLLKLISNFSKVSGYKINVQKSQAFLYTNNRQTESQIMSELPFTIASKRIKYLGIQLTRDVKDLFKENYKPLLKEIKEDTNKCKNIPCSWVGRINIVKMAILPKVIYRFNAIPIKLPMPFFTELEKTTLKFIWNQKRARIAKSILSQKNKAGGITLPDFKPYYKATVTKTAWYWYQKRDIDQWNRTEPSEITPHIYNYLIFDKPEKNKQWGKDSLFNKWCWENWLAICRKLKLDPFLTPYTKINSRWIKDLNVRPKTIKTLEENLGNTIQDIGMGKDFMSKTPKAMATKDKIDKWDLIKLKSFCTAKETTIRVNRQPTKWEKIFTTYSSDKGLISRIYNELKQIYKKKTNNPIKKWAKDMNRHFSKEDIYAAKKHMKKCSSSLAIREMQIKTTMRYHLTPVRMAIIKKSGNNSLASGLSIDKIQQPFMLKTLNKLGIDGTYFKIIRAIYDKPTANIILNGQKLEAFPLKTGTRQGCPLSPLLFNIVLEVLARAIRQEKEIKGIQLGKEEVKLSLFADDMIVYLENPIVSAQNLLKLISNFSKVSGYKINVQKSQAFLYTNNRQTESQIMSELPFTIASKRIKYLGIQLTRDVKDLFKENYKPLLKEIKEDTNKWKNIPCSWVGRINIVKMAILPKVIYRFNAIPIKLPMTFFTELEKTTLKFIWNQKRARIAKSILSQKNKAGGITLPDFKLYYKATVTKTAWYWYQNRDIDQWNRTEPSEITPLTYNYLIFDKPEKNKQWGKDSLFNKWCWENWLAICRKLKLDPFLTPYTKINSRWIKDLNVRPKTIKTLEENLRITIQDIGMGEDFMSKTPKAMATKAKIDKWDLIKLKSFCTAKETTIRVNRQPTKWEKIFATYSSDKGLISRIYNELKPIYKKKTNNPIKKWAKDMNRHFSKEDIYAAKKHMKKCSSSLAIREMQIKTTMRYHLTPVRMAIIKKSGNNRSKDIKDREDPLAYGVFAPVVRVESSLQEGSWWVSFWTERGRAMWENIQIELGFRKKQDPGCHLTWKCGYYFYDGRRGGSCLQMQLTL

SEQ ID NO: 40614 - protein, 1074 aa, Homo sapiens
  DOMAIN (110)..(151): kw TRANSCRIPTASE REVERSE II ORF2 domain identified by eMATRIX, accession number DM01354I, p-value=1.000e-40, raw score of 15.55
  DOMAIN (360)..(607): Reverse transcriptase domain identified by PFam, accession name rvt, E-value=1e-72, PFam score of 255.0
MGDFNTPLSTLDRSTRQKVNKDTQELNSALHQADLIDIYRTLQPKSTEYTFFSAPHHTYSKIDHIVGSKALLSKCKRTEIITNYLSDHSAIKLELRIKNLTQSRSTTWKLNNLLLNDYWVHNEMKAEIKMFFETNENKDTTYQNLWDAFKAVCRGKFIALNAHKRKQERSKIDTLTSQLKELEKQEQTHSKASRRQEITKIRAELKEIETKKTLQKINESRSWFFERIKKTDRPLARLIKKKREKNQIDTIKNDKGDITTDPTEIQTTIREYYKHLYANKLENLEEMDKFLDTYTLPRLNQEEVESLNRPITGAENVAIINSLPTKKGPGPDEFTAEFYQRYKEELVPFRLKLFQSIEKEGILPNSFYEASIILIPKPGRDTTKKENFRPISLMNIDAKILNKILAKRIQQHIEKLIHHDQVGFIPGMQGWFNIRKSINVIQHINRAKDKNHMIISIDAEKAFDKIQQPFMLKTLNKLGIDGTYFKIIRAIYDKPTANIILNGQKLEAFPLKTGTRQGCPLSPLLFNIVLEVLARAIRQEKEIKAQNLLKLISNFSKVSGYKINVQKSQAFLYTNNRQTESQIMSELPFIIASKRIKYLGIQLTRDVKDLFKENYKPLIKEIKEDTNKRKNIPCSRVGRINIVKMAILPKVIYRFNAIPIKLPMTFFTELEKTTLKFIWNQKRAHIAKSILSQKNKAGGITLPDFKLYYKATVTKTAWYSYQNRDIDQWNRTEPSEITPHIYNYLIFDKPEKNKQWGKDSLFNKWGWENWLAIWRKLKLDPFLTPYTKINSRWIKDLNVRPKTIKTLEENLGITIQDIGMGKDFMSKTPKAMATKDKIDKWDLMKLKSFCTAKETTIRVNRQPTEREKIFATYSSDKGLISRIYNELKLIYKKKTNNPIKKWAKDMNRHFSKEDIYAAKKHMKKCSSSLAIREMQIKTTVRYHLTPVRMAIIKKSGNNRDMDEVGNHHSQQTVTRTKNQTPHILTHTWELNNEITWTQEGEYHTLGTVTSELQVLWSLDSGTYSSGPLVFSGLGLESYTICCPESETLGLGLNHTTNFLSSPTCRQLNMGLLSF

SEQ ID NO: 40615 - protein, 1130 aa, Homo sapiens
  DOMAIN (110)..(151): kw TRANSCRIPTASE REVERSE II ORF2 domain identified by eMATRIX, accession number DM01354I, p-value=1.000e-40, raw score of 15.55
  DOMAIN (315)..(601): Reverse transcriptase domain identified by PFam, accession name rvt, E-value=4e-66, PFam score of 233.1
MGDFNTPLSTLDRSRRQKVNKNTQELNSALHQVQLIDIYRTLHPKSTEYTLFSAPHHTYSEIDHVVGSKALLSKCKRTEIITNCLSDHSAIKLELRIKKLTQNCSTTWKLNNLLLNDYWVHNEMKAEIKMFFETNENKDTTYPNLWDTFKAVCRGKFIALNAHKRKQERSEIDTLTSQLKELEKQEQTHSKASRRQEITKIRAELKEIETQKTLQKINESRSWFFEKINKIDRPLARLIKKKREKNQIDSIKNDKGDITTDPTEIQTTIREYYKHLYANKLENLEEMDKFLDTYILPRLNQEEVESLNRTITGSEIEAIINSLPTKKSPGPYGFTAEFYQRYKEELPGRDTTKKENFRPISFMNIDAKILNKILANQIQQHIKKLIHHDQVGFIPGMQGWFNIRKSINVIQHTNRTKDKNHMIISIDAEKAFDKIRQPFMLKTLKKLGIDGTYLKIIRAIYDRPTANIILNGQKLEAFPLKMGTRQGCPLSPLLFNIVLEVLARAIRQEKEIKCIQLGKEKVKSSLFADDMTVYLENPIISAQNLLKVISNFSKVSGYKINVQKSQPFLYTNNRQTESQIMSELPFTIASKRIKYLGIQLTRDVKDLFRENYKPLLKEIKEDTNKWKNIPRSWVGRINMVKMAILPKVIYRFNAIPIKLPMPFFTELEKTTLKFIWNQKRARIAKSILSQKNKAGGITPPDFKLYYKATVTKTAWCWYQNRDIDQWNRTEPSEITPHIYNYLIFDKPEKDKQWGKDSLFNKRCWENWLAICRKLKLDPFLTPYTKINSRWIKDLKVRPKTIKTLQENLGFTIQDIGMGKDFMSKTPTAMGTKDKIDKWDLIKLKSFCTAKETTIRVNRQPTKWEKIFTTYSSDNGLISRIYNELKQIYKKKTNNPIKQWAKDMNRHFSIEDIYAAKKHMKKCSSSLAIREMQIKTTMRYHLTPVRMAIIKKSGNNRCWRGCGEIGTLLHCWWDCKLVQPLWKSVWRFLRDLELEIPFDPAIPLLGIYPNDYKSCCYKDTCTPGHPRKQPTLGSIPQKSQDHCAEVLKDILFLAGTGGAQALLASFSLSQDVEFPAPSAVILENYKQKTEMSTTYWQSLTGPAGKQENCSQSQPQDPKYTVWMWGFRSKKQ

SEQ ID NO: 40616 - protein, 1379 aa, Homo sapiens
  DOMAIN (672)..(717): kw TRANSCRIPTASE REVERSE II ORF2 domain identified by eMATRIX, accession number DM01354N, p-value=1.000e-40, raw score of 13.17
  DOMAIN (699)..(935): Reverse transcriptase domain identified by PFam, accession name rvt, E-value=8.4e-47, PFam score of 168.9
  misc_feature (1)...(1379): Xaa = X or * as defined in Table 2
MGKKQNRKTGNSKKQRASPPPKEHSSSPATEQSWMENDFDELREEGFRRSNYSELREDIQTKGKEVENFEKNLEECITRITDIEKCLKELMELKTKARELHEECRSLRSRCDQLEERVSAMEDEMNEMKQEGKFREKRIKRNEQSLQEIWDYVKRPNLPPIDVPESDRENGTKLENTLQDVIQENFPNLARQANIQIQEIQRMPQRYSSRRATPRHIIVRFTKVEMKEKMLRAAREKAFKQASRREDDIAKVTSGMRVLFKPGTTEVQELALCYGGMANRTISALKTTQRQLSKLWKEELLQDVCAGLAEELHLPPDAPGGMVDFRCTLTLSFFFKFYLTVLQKLGQENLEDKCGKLDPTFASATLLFQKDPPADVQLFQEVPKGQSEEDMVGRPLPHLAADMQPLVRPCTVTTFLATRMSCLSGWSPAPGPTPRSSIEMKFKNMLFPMIVCPAWIPELNSVEHGPDGISFGAACPLSIVEKTLVDAVAKLPAQKTEVFRGVLEQLRWFAGKQVKSVASVGGNIITASPISDLNPVFMASGAKLTLVSRGELPEAEVQEEGLGGEKSHQIGHFLEKQSSKFSDPAFPVIWIQGSMENVPGLVDGKAGYFLCREFTAGTATCMPYLVGHQENCPDGPHLLPWLQKDPAEPGGDTALHRDPLQQGEIQTTIREYYKHLSANKLENLEEMDKFLDTYTLPRLNQKEVESLNRPITGAEIVPIINSLPTKKSSGLDGFTAEFYQRYKEELHINRTKDKNHMIISIDAEKAFDKIQQPFMLKTLNKLGIDGTYLKIIRAIYDKPTANIILNGQKLEAFPLKTGTRQGCPLSPLLFNIVLEVLARAIRQEKEIKGIQLGKEEVKLSLFADDMIVYLENPIVSAQNPLKLISNFSKVSGYKINVQKSQAFLYTNNRQTESQIMSELPFTIASKRIKYLGIQLTRDVKDLFKENYKPLLNEIKEDTNKWKNIPCSWVGRINIMKMAILPKVMYRFNAIPIKLPMPFFTELEKTTLKFIWNQKRARIIKSILSPKNKAGGITLPDFKLYCKATVTKTAWYWYQNRNIDQCNRTEPSEIMPHIYNYLIFDKPDKNKQWGKDPLFNKWCWENWLAICRKLKLDPFLTPYTKINSRWIKDLNIRPKTIKTLEESLGITIQDIGMGKDFMSKTPKAMATKDKIDKWDLIKLKSFCTAKETTIRVDRQPTEWEKIFTTYSSDKGLISRIYNELKQIYKKKSNNPIKKWAKHMNRCFSKEDIYAAKRHRLKDTPRKQLRFEGERVTMDTGLNPQGAAGPQGSAPXRQAGRGEHGDWXGPGRLPWGCQGVWGCFXVLLPILTSPXLYLPLHPIPLPHXLPGAHWKSLDTPVPAKAPSCGVPQACSAPCWMCDLRI

SEQ ID NO: 40617 - protein, 1728 aa, Homo sapiens
  DOMAIN (110)..(151): kw TRANSCRIPTASE REVERSE II ORF2 domain identified by eMATRIX, accession number DM01354I, p-value=1.000e-40, raw score of 15.55
  DOMAIN (291)..(1312): Reverse transcriptase domain identified by PFam, accession name rvt, E-value=7.3e-127, PFam score of 434.9
MGDFNTPLSTLDRSTRQKVNKDTQELNSALHQADLIHIYRTLHPKSTEYTFFSAPHHTYSKIDHIVGSKALLSKCKRTEIITNYLSDHSAIKLELRIKNLTQSRSTTWKLNNLLLNDYWVHNEMKAEIKMFFETNENKDTTYQNLWDAFKAVCRGKFIALNAHKRKQERSKIDTLTSQLKELEKQEQTHSKASRRQEIMKIRAELKEIETQKTLQKINESRSWFFERINKIDRPLARLIKKKREENQIDAIKNDKGDITTDPTEIQTTIREYYKHLYVNKLENLEEMNKFLDTCTLPRLNQEEVESLNRPITGAEIVAIINSLPTKKSPGPDGFTAEFYQRYKEELHINRTKDKNHMIISIDAEKAFDKIQQRFMLKTLNKLGIEGTYFKIIRAIYDKPTANIIMNGQKLEAFLLKTGTRQGCPLSPLLFNIVLEVLARAIRQDKEIKGIQLGKEEVKLSLFADDMILYLENPIVSAQNLLKLISNFSKVSGYKINVQKSQAFLYTNNRQTESQIMSELPFTIASKIIKYLGIQLTRDVKDLFKENYKPMLKETKEDTNKWKNIPCSWVGRINIVKMAILPKVIYRFNAIPIKLPMTFFTELEKTTLKFIWNQKRAHIAKSILSQKNKAGGITLPDFKLYYKATVTKTAWYWYQNRDIDQWNRTEPSEIMPHIYTILIFDKPEKNKHGGKASLFIKWCWENWLAICRKLKLDPFLTSYTKINSRWIKDLNVRPKTIKTSEENLGITIQDIGMGKDFMSKTPKAMPTKAKIDKWDLIKLKSFCTAKESTIRANRQPTKWEKIFATYSSDKGLISRIYNELQQIYKKKTNNPIKKWAKDMNRHFSKEDIYAAKKHVKKCSSSLAIREMQIKTTMRYHLTPVRMAIIKKSGNNRSWYFEKINKIDRLLARLIKKKREKNQIDAIKNDKGDITTDPTEIQTTTREYYKHLYANKLENLEEMDKFLDTYNLPRLKQEEVESLNRPIRGSEIVAIINSLPTKKSPGPDGFTAEFYHRYKEELVPLLLKLFQSIEKEVILPNSFYEASIILIPKPDRDTAKKENFRPISLMNIDAKILNKILANRIQQHIKKLIHHDQVGFIPGMQGWFNIRKSVNVIQHINRTKDKNHMIISIDAEKSFDKIQQHFMLKTLNKLGIDGSYLKIIRATYDKPTANIILNGQKLEAFPLKTGTRHGCPLSPLLFNIVLEVLARAIRQEKEIKGIQLGKEEVKLSLFIDDMIVYLENPIISAQNLLKLISNFSKVSGYKINVQKSQAFLYTNNRQTESQIMSELPFTIASKRIKYLGIQLTRDVKDLFKENYKPLLKEIKEDTNKWKNIPCSWVGRINIVKMAVLPKVIYRFDAIPIKLPMTFFTELEKTTLKFIWNQKRARIAKSILSQKNKAGGITLPDFKLYYKATVTKTAWYWYQNRDIDQWNRTEPSEIMPHIYNYLIFDKPEKNKQWGKDSLFNKWCWENWLAICRKLKLDPFLTPYTKINSRWIKDLNVRPKTIKTLEENLGITIQDIGVGKDFMSKTPKVMATKAKIDKWDLIKLKSFCTAKETTIRVNRQPTTWEKIFATYSSDKGLISRIYNELKQIYKKKTNNPIKKWAKDMNRHFSKEDIYAAKKHMKKCSSSLAIREMQIKTTMRYHLTPVRMAIIQKSGNNRDNTKEALLCNNLVAEVLEAKQAQKLQGKAAVLSLSKIYAITETNAETPNRKMKIKLKRPMTKLHPSIQMLV

SEQ ID NO: 40618 - protein, 979 aa, Homo sapiens
  DOMAIN (161)..(207): kw TRANSCRIPTASE REVERSE II ORF2 domain identified by eMATRIX, accession number DM01354O, p-value=1.000e-40, raw score of 8.73
  DOMAIN (194)..(484): Reverse transcriptase domain identified by PFam, accession name rvt, E-value=1.9e-51, PFam score of 184.3
  misc_feature (1)...(979): Xaa = X or * as defined in Table 2
MKQEGKFREKRIKRNEQSLQEIWDYVKRPNLHLIGVPESDRENGTKLENTLQDIIQEDFPNLARKANIQIQEIQRTPQRYSSRRATPRHTIVRFTKVEMKEKMLRAAREKGRVTHKGKPIRLTADLSAETLQARRELNQEEVESLNKPVTGSEVVAIINSLPTKKSPGPDGFTAEFYQKYKEEPVPFLLKLFQSIEKEGILPNSFYEASIILIPKPGRDTTKKENFRPISLMNIDAKILNKILANRIQQHIKKLIHHDQVGFIPGMQGWFNICKSINVIQHINKTKDKNHMIISIDAEKACDKIQQRFMLKTFNKFAIDGTYLKIIRAIYDKPTANIILNGQKLEAFPLKTGTRQGCPLSPLLFNIGVWEVLARAIRQEKEIKGIRLGKEEVKLSLFADDMIVYLENPIVSAQNLLKLISNFSKLNLQTQEYKINVQKSQAFLYTNNRQTESQIMSELPFTIASKRIKYLGIHLTRDVKDLFKENYKPLLNEIKEDINKWKNIFIPCLWVGRINIVKMAILPKGIYRFNAIPIKLPMTFFTVLEKTTLKFIWNQKRARIAKSILSKKNKAGGITLPDFKLYYKATVTKTALYLYQNRDVDQWNRTEPSEIMPLIYNYLIFDKPEKNKQWGKDSLFNKWCWENWLAICRKLKLDPFLTPYTKINSRWIKDLNVRPKTIKTLEENLGNTIQDIGMGKDFMFKTAKAMATKPKIDKWDLIQLKSFCTAKETTIRVNRQPTKXEKIFATYSSDKGLISRIYNELKQIYKKKTNNPIKKWAKHMNRHFSKEDTYAAKKHMKKCSSSLAIREMQIKTTMRYHLTPVRMAIIKKSGNNRCWXGCGEIGTLLHCWWDCKLVQPLWKSVWRFLRDLEPEIPFDPAIPLLGIYPKDSKSCCYKDTCTRMFIAALFTIAKTWNQPKCPTMIDWIKKMWHIYTMEYYASHIKNDEFMSSVGTWMKLETIILSKLSQEQKTKHRVFSLIGGN

SEQ ID NO: 40619 - protein, 824 aa, Homo sapiens
  DOMAIN (110)..(165): kw TRANSCRIPTASE REVERSE II ORF2 domain identified by eMATRIX, accession number DM01354Q, p-value=1.000e-40, raw score of 9.23
  DOMAIN (63)..(340): Reverse transcriptase domain identified by PFam, accession name rvt, E-value=7.7e-80, PFam score of 278.7
TDTSQKKTFYAAKRHMKKCSSSLAIREMQIKTTYHAGPDGFTAEFYQRYKEELVPFLLKLFQSIEKEGILPNSFYEASIILIPKPGRDTTKKENFRPISLMNIDAKILNKILAKRIQQHIKKLIHHDQVGFIPGMQGWFNIRKSINVIQHINRAKDKNHMIISIDAEKAFDKIQQPFMLKTLNKLGIDGTYFKIIRAIYDNPTANIILNGQKLEAFPLKTGTRQGCPLSPLLFNIVLEVLARAIRQEKEIKGIQLGKEEVKLSLFADNMIVYLENPIVSAQNLLKLISNFSKVSGYKINVQKSQAFLYTNNRQTESQIMSQLPFTIASKRIKYLGIQLTRDVKDLFKENYKPLLKEIKEDTNKWKNIPCSGEGRINIVKMAILPKNWKKTTLKFIWNQKRARIAKSILSQKNKAGGITVPDFQLYYKATVTKTAWYWYQNRDIDQWNRKEPSEIMPHIYDSLIFGKPDKNKQWGKDSLFNKWCWEDWLAICRKLKLDPFLTPCTKINSRWVKDLNIRPKTIKTLEENLGNTIQDIGMAKDFMSKTPKAMATKAKIDKWDLIKLKSFCTRIAKEPTIRVNRQPTKWEKIFATYSSDKGLISRIYNELKQIYKKKTNNPIKKWAKDMNRHFSKEDIYAAKKHMKKCSSSLAIREMQIKTTMRYHLTPVRMAIIKKSGNNRCWRGCGETGTLLHCWWDCKLAQPLWKSVWRFLRDLELEIPFDPAIPLLGIYPNDYKSCCYKDTCTRMFIAALFTIAKTWNQPKCPTIIDWIKKMWHIYTMEYYAAIKNDEFVSFVGTWMKLEIIILSKLSQEQKTTHRIFSLIGGN

SEQ ID NO: 40620 - protein, 1502 aa, Homo sapiens
  DOMAIN (271)..(316): kw TRANSCRIPTASE REVERSE II ORF2 domain identified by eMATRIX, accession number DM01354N, p-value=1.000e-40, raw score of 13.17
  DOMAIN (705)..(898): Reverse transcriptase domain identified by PFam, accession name rvt, E-value=0.0022, PFam score of -21.5
MGDFNTPLSTLDRSTRQKVNKDTQELNSALHQADLIDIYRTLHHKSTEHTFFAAPHHTYSKIDHILGSKALLSKCKRTEIITNYLSDHSAIKLELRIKNLTQNRSTTWKLNLLLNNYWVHNEMKAEIKMFFETNKNKDTTYQNLWDTFKAVCRGKFIALNAHKRKQERSKIDTLTSQLKQLEKQEQTHSKASRRQEITKIRGELKEIETQKTLHKINESRSWFFERINKIDRLLARLIKKKREKNQIDAIINDKGDITTDPTEIQTTFREYYKHLYANKLENLEEMDKFLDTYTLPRLNQEEVESLNRPITGAEIVAIINSLPTKKSPGPDGFTAKFYQRYKEELRIKYLGIQLTRDVKDLFKENYRPLLKEIKEDTNKWKNIPCSWVGRINIMKMAILPKVIYRFNAIPIKLPMTFFTELEKATLKFIWNQKRACIAKSILSQKNKAGGITLPDFKLYYKATVTKTAWYWYQNRDIDQWNRTEPTEITPHIYNYLIFDKPEKNKQWGKDSLFNKWCLENWLAICRKLKLDPFLTPYTKINSRWIKDLNVRPKTIKTLEENLGITIQDIGMGKDFMSKTPKAMATKAKIDKWDLIKLKSFCTAKETTIREFEQFNRRLNEVSKRVRIPLPVSNILWEHCIRLANRTIVEGYANVKKCSNEGRALMQLDFQQFLMKLEKLTDIRPIPDKEFVETYIKAYYLTENDMERWIKEHRLRGRRESVEKRDPELHLCVLLCILDSTWHRISAKMDEMQVLRPFELEFLPKLKELKYLRLGDLQTKEAYNGLTIPRGWGSFTIMVEGKEEQVMSYMDGSRQKENEEDTADDMIIYLENPIVSAQNLLKLISNFSKVSGYKIYKIDVQKSQAFLYTNNRQTESQIMSELPFTIASKRIKYLGIQLTRDVKDLFKENYKPLLKEIKEDTNKWKNIPCSWVGRINIMKMAILPKVIYRFNAIPIKLPMTFFTELEKTTLKFIWNQKRARIAQVQSLSPKEQKPGASTLPDFKLYYKATVTKTAWYWYQNRDIDQWNRTEPLRNKAHIPYNYLIFDKPDKNKQWGKDSLFNKWCWENWLAICRKLKLDPFLTPYTKISNSRWIKDLNVRPKTIKTLEENLGITIQDIGMGKDFMSNKTPKAMATKDKIDKWDLIKLKSFCTAKETTIRVNRQPTKWKKIFTTYSSEKGLISRIYNELKQIYKKKKTNNPIKKWAKDMNRHFSKEDTYAAKKHMKKCSTSLAIRVMQIKTTMRYHLTPVRMAIIKKSGNNRCWRGCGEIGTLLHCWLDCKLVQPLWKSVWRFLRDLELEIPFDPAIPLLGIYPNEYKSCCYKDTCTRMFIAALFTIAKTWNQPKCPTMIDWIKKMWHIYTMEYYAAIKNDEFMSFVGTWMKLETIILSKLSQEQKTKHRIFSLIDRLDQRNFLLGSSGAFPLSHDLAERDQASGTGKASPHRQLNPSHPAQPSVDSGPLTANHNTASATFSLPCLWAKAPPAGHLEHGTFRVKSFLGHSPAINQ

SEQ ID NO: 40621 - protein, 395 aa, Homo sapiens
MEDIKRTQNKLSEMKATLAEMKNTLDGINDHGRDSRRKIRKLQDNGGDDPTGNTQRKKNLINGPSLSVHIGEKRGGRRSWAETLTPLQTKALRLGPTTPSARRKCGIVPNLQTRKTEAYRYPDTHPGETPVGTAVLSIQKPKLESVIDVRVNMSSFHPEPELQPTQTSVLPDQDATVAGSTTKFPEEQEARQGRVRERPATRERPVPGGVSVPGLHHIHFLRGPSLPLASLTRITVLEAVVCFFSVWSIVGLSGFHTYLISSNQTTNEDIKGSWSNKRGKENYNPYSYGNIFTNCCVALCGPISPRTLSHTGQRPTPIECEPHLNLVTSAETLLASKPDPTEEGTSSPTRRSQQHPPMASPCTGPRSHRVTCTLEKREEEEGVGQRLSPLCKPRL

SEQ ID NO: 40622 - protein, 86 aa, Homo sapiens
  misc_feature (1)...(86): Xaa = X or * as defined in Table 2
GLLGPGPPTACXCGPHCGIHPESSPQSWCLCHSHRSSRAPPLARLSGDRHPGWRTWGGRDARSVARGQWWCLVEPVLPFSTRSAFW

SEQ ID NO: 40623 - protein, 726 aa, Homo sapiens
  DOMAIN (251)..(264): CHOLINESTERASE SIGNATURE domain identified by eMATRIX, accession number PR00878F, p-value=5.179e-12, raw score of 5.37
  DOMAIN (2)..(300): Carboxylesterases domain identified by PFam, accession name COesterase, E-value=3.1e-69, PFam score of 240.3
IRDPGKKPVMLFLHGGSYMEGTGNMFDGSVLAAYGNVIVATLNYRLGVLGFLSTGDQAAKGNYGLLDQIQALRWLSENIAHFGGDPERITIFGRYSQPGLSYHIAFGPVVDGDVVPDDPEILMQQGEFLNYDMLIGVNQGEGLKFVEDSAESEDGAFDFTVSNFVDNLYGYPEGKDVLRETIKFMYTDWADRDNGEMRRKTLLALFTDHQWVAPAVATAKLHADYQSPVYFYTFYHHCQAEGRPEWADAAHGDELPYVFGVPMVGATDLFPCNFSKNDVMLSAVVMTYWTNFAKTGDPNQPVPYDTKFIHTKPNRFEEVVWSKFNSKEKQYLHIGLKPRLWSRFRGVLYQVFHDTICEKEAPKSSLLRKQTQPPKKQSSPAVHLRCTMDPVMMTVSPPPAHRHRRRGSPTRCAHCPVAWAPDTDDEKPHQYPAICSYHWDVPEDWEGFQHTQGTWVPWSQDAPESPPQTIRFQPTVEERPLKTGIWSELGLRAYVYPVNPPPPSPEAPSHKNGRIVYDARDMRRRLRELTREVEALSGCYPLASGSSTAEETSKNWVYRSLTGSQKMSQLHRVPFFDQEDPDSYLEEEDNLPFPYPKYPRRGWGGFYQRAGLPSNVGLWGHQGGILASLPPPSLYLSPELRCMPKRVEARKCQDLGDSILLLLGSFILLNVWINVVTLLWKHLKSSLRILFRHFFPKGMRRKAQQAAEKEGPGPAYGAHTNDHQRK

SEQ ID NO: 40624 - protein, 69 aa, Homo sapiens
  misc_feature (1)...(69): Xaa = X or * as defined in Table 2
MSQLHRVPFFDQEDPDSYLEEEDNLPFQYPKYPRRGWGGFYQRAGLPPKWSPRQGSGCPHSLHPGPCAX

SEQ ID NO: 40625 - protein, 271 aa, Homo sapiens
  DOMAIN (201)..(212): Carboxylesterases type-B serine proteins domain identified by eMATRIX, accession number BL00122G, p-value=8.615e-13, raw score of 11.67
  DOMAIN (13)..(220): Carboxylesterases domain identified by PFam, accession name COesterase, E-value=4.6e-27, PFam score of 95.3
VDQDVQPARYHIAFGPVVDGDVVPDDHEILMQQGEFLNYDMLIGVNQGEGLKFVEDSAESEDGVSASAFDFTVSNFVDNLYGYPEGKDVLRETIKFMYTDWADRDNGEMRRKTLLALFTDHKWVAPAVATAKLHADYQSPVYFYTFYHHCQAEGRPEWADAAHGDELPYVFGVPMVGATDLFPCNFSKNDVMLSAVVMTYWTNFAKTGDPNQPVPQDTKFIHTKPNRFEEVVWSKFNSKEKQYLHIGLKPRLWSRFRGVLYQVFHDTICEK

SEQ ID NO: 40626 - protein, 314 aa, Homo sapiens
  DOMAIN (189)..(210): FILAGGRIN SIGNATURE domain identified by eMATRIX, accession number PR00487E, p-value=4.097e-09, raw score of 6.93
  misc_feature (1)...(314): Xaa = X or * as defined in Table 2
RAGGQGVGXGWGPPSVPCSVHGGKGLPPEEGPGQVTHLEFGRGDGLLTPWWPLTGDGRGPSASLASQRTCSQXGMWLPAAQPSPSHPGPAGTVGQSHLHLXGLLGPGPPHCLLMRPTLRDSSRVFTSKLVSVPQPQVQQGPTTRKTVWRSASWMENLGRKGCQVCSTWPMVVPGGACTSIWEWEADRVTPGGHRGSSCSHSAAGGANAAPHGPRGRPGGHAAAGGRHSTDGRSSCSPRPPDPGAARPQSAVHTDYRSPSLGTFPLAQPFGESKSDQSAPGIRGQKAPLAVARRGQQTPRPRGQARGRGRGTRPR

SEQ ID NO: 40627 - protein, 193 aa, Homo sapiens
  misc_feature (1)...(193): Xaa = X or * as defined in Table 2
SCPEEEESSLLSPGTSWPLHAWACSAAQVTGRERVVADWPGYHPGGPTAPHWRAGPLSDKTRPSRDVGTWDTGRAGCPPPPGRNPGPPDQRKALGVVVTSFGSQLGNGTPNSCLSPRQCWIQRLGGSSRTGPPPPGSVPEAAVSCPGHHTLFGLRSGAGKIQGXLLGPGWELGQAGTEPPLPLAPPPPHRSCG

SEQ ID NO: 40628 - protein, 165 aa, Homo sapiens
  DOMAIN (103)..(144): Carboxylesterases type-B serine proteins domain identified by eMATRIX, accession number BL00122E, p-value=2.929e-28, raw score of 22.02
  DOMAIN (9)..(165): Carboxylesterases domain identified by PFam, accession name COesterase, E-value=4.7e-55, PFam score of 191.5
AAATYVQNQSEDCLYLNLYVPTEDGPLTKKRDEATLNPPDTDIRDPGKKPVMLFLHGGSYMEGTGNMFDGSVLAAYGNVIVATLNYRLGVLGFLSTGDQAAKGNYGLLDQIQALRWLSENIAHFGGDPERITIFGSGAGASCVNLLILSHHSEGLFQKAIAQSGT

SEQ ID NO: 40629 - protein, 1434 aa, Homo sapiens
  DOMAIN (254)..(267): CHOLINESTERASE SIGNATURE domain identified by eMATRIX, accession number PR00878F, p-value=5.179e-12, raw score of 5.37
  DOMAIN (20)..(344): Carboxylesterases domain identified by PFam, accession name COesterase, E-value=5.6e-45, PFam score of 156.9
MLPVWFTDNLGAAATYVQNQSEDCLYLNLYVPTEDGPLTKKRDEATLNPPDTDIRDPGKKPVMLFLHGGSYMEGTGNMFDGSVLAAYGNVIVATLNYRLGVLGRYSQPGLSYHIAFGPVVDGDVVPDDPEILMQQGEFLNYDMLIGVNQGEGLKFVEDSAESEDGVSASAFDFTVSNFVDNLYGYPEGKDDWADRDNGEMRRKTLLALFTDHQWVAPAVATAKLHADYQSPVYFYTFYHHCQAEGRPEWADAAHGDELPYVFGVPMNDVMLSAVVMTYWTNFAKTGDPNQPVPQDTKFIHTKPNRFEEVVWSKFNSKEKQYLHIGLKPRVRDNYRANKVAFWLELVPHLHNLHTELFTTTTRLPPYATRWPPRPPRGAPGTTPPPPPATLPPEPEPEPSPRAYDRFPGDSRDYSTELSVTVAVGASLLFLNILAFAALYYKRDRRQELRCRRLSPPGGSGSGVPGRIVYDARDMRRRLRELTREVEALSGCYPLASGSSTAEETSKNWVYRSLTGRCCNQYQESPHDAEDILLLLLGLIVLVNIGINVATMMWHGLQNALDKMIDWATQKNEIQASESPPSGPPDKAQDVHIHCILDPVQVKMSRPTQYSSFACHHFSNHHSSSLLRCVRRRRRRHRRCRRRCCNHQQRPQNYRQIPHSHSVFRNPHRSQKMSQLHRVPFFDQEDPDSYLEEEDNLPFPYPNRNPGGNANYQVYDSLELKRQLWKHLKSFLRILFRHFFPKGFLLRRVNHLDSWIPDTNDEKVSACCCVPPKCGHAGVPRESARGLYKAGMMGGGEAPQARDIFPVPKDEQVGHGHDLSTGHVVYDARREKQNFFHMSSPQNPEYSRKDLATLFRPQEGQDLVSSGISEQTKQCSGDSAKLPAGSILGYLELRNMEWKNSDDAKDKFPQTKTSPYCSFHPCSSEKNTDSQAPFYPKFLAYSRDTACAKTCFHSATTAQSSVCTLPPPFTLSLPLVPPRSFVPPQPTNHQRPSTLIQTPTVLPTSKSPQSILTSQFPIPSLFATISQPLIQPQCPECHESLGLTQDSGLQRTPGPSKDSRVPRNLDLAQNPDLYKNPGLTQDPGLHENPGLAPNQGLHEFPGLPQDSYLCQNPSPSQDFGLHKNSGITQDSHPQKNTGLTQEAGILRSPCLTQSPGLHKKTPFTQTSDLQRSSGFTQDSGIYRNLEPNQETVIYKNQDLSQATDHQKNLGSSKDSGGHKNTGNVQDPGVCSTAGLTEDSGSQKGPYVPQDSEVNKSSGVIQESFLHKSPGLVQTSGLPKCSGLTQNSGDYKNPGLIQDCGGHKVKGLTQDSNLPSLTQATKVERRFSLPQDVGVYRSSEHSQDSNLHKCPGINQDPGPHKDPALVQDSGLPKISGLTQESGPYKSSCLIPDPSLYKNPSPALGSDFVQLLSLLQTPKSTLSLMKSSVPEKAAQKE

SEQ ID NO: 40630 - protein, 921 aa, Homo sapiens
  DOMAIN (630)..(772): DENN (AEX-3) domain identified by PFam, accession name DENN, E-value=7.1e-59, PFam score of 209.0
MDVGFSRTTVQTLSRSHCKNIKQKISQWEGRANGISNPEKWCPKDFGVRYNCHQEIRLKKNPIAERKSKNLDVTSRENVGLDINENTKSHDQSENENKKHEYDDTHFFKNESESNWVCSRVKEIESCKEDVLDPETSLPPGNFYTSQILWKKIEALPPDKLLNLALEHCDSSEKELNFRVLDSSYGITKSLENIYSEPEGQECGPSINPLPKPRRTFRYLSESGVTPYKERNCDKKYCENNSCAQSSLASSQEPEPKKYGGKIRGRSKRKSFEFEDIQHFRNRNSQTIREELGRNSGSALYYTQSEDNIYEDIIYPTKENPYEDIPVQPLPMWRSPSAWKLPPAKSAFKAPKLPPKPQFLHRKTMEVKNSQAYLRSKLTKDTTLPVTLTEWKLFRAGEVANTKRKNLPRLVLKIDDIFESKRGKKKVKLHSYTGKELPPTKGETSGNESDAEYLPKNRHKRLAQLQPSSKRNPHYQTLERDLIELQEKQLFEHFCGGVSTRKKPSGISYIPQVIQQFPGKDDHGYKQSKDMEERLKVIPKFCFPDSKDWMPTSELKSETFSFVLTGEDGSRWFGYCKKLLPVGKGKRLPEVYCMVSRLGCFNLFSKILDEVEKRREMSPALVYPFMRSVMEAPFPAPGRTITVKSYLPGAGDESIELCRPLDSRLEHVDFKCLFKCLSVCHLIRVCASLLLERRVIFVANSLSTLSKCGHAVVATLYPFTWQHTYIPVLPASMIDIVCSPTPFLIGILSCSLPQLQDLPIEEVLIVDLCADKFLQEVSDEDEILPPKLQAALMQILEERNEILTQEQNFSQADVTLNSLVSEAFVRFFVELVGHYSLNMTVTERGERVFQREPFRKSHTSRSVRHFLDLFMETQMFAGFIQDRELRKSGVKGLFEIRAIQYLETIPESEPSGMNRILRSLG

SEQ ID NO: 40631 - protein, 197 aa, Homo sapiens
  DOMAIN (129)..(140): Carboxylesterases type-B serine proteins domain identified by eMATRIX, accession number BL00122G, p-value=3.700e-14, raw score of 11.67
  DOMAIN (41)..(176): Carboxylesterases domain identified by PFam, accession name COesterase, E-value=2.1e-22, PFam score of 79.2
RWLIPKVMRIYDTQKKMDREASQAALQKMLTLLMLPPTFGDLLREEYIGDNGDPQTLQAQFQEMMADSMFVIPALQVAHFQCSRAPVYFYEFQHQPSWLKNIRPPHMKADHVKFTEEEEQLSRKMMKYWANFARNGNPNGEGLPHWPLFDQEEQYLQLNLQPAVGRALKAHRLQLWKKALPQKIQELEEPEERHTEL

SEQ ID NO: 40632 - protein, 583 aa, Homo sapiens
  DOMAIN (216)..(257): Carboxylesterases type-B serine proteins domain identified by eMATRIX, accession number BL00122E, p-value=1.000e-40, raw score of 22.02
  DOMAIN (29)..(574): Carboxylesterases domain identified by PFam, accession name COesterase, E-value=4.8e-155, PFam score of 528.5
PGQPLGEQQRVRRQRTETSEPTMRLHRLRARLSAVACGLLLLLVRGQGQDSASPIRTTHTGQVLGSLVHVKGANAGVQTFLGIPFAKPPLGPLRFAPPEPPESWSGVRDGTTHPAMCLQDLTAVESEFLSQFNMTFPSDSMSEDCLYLSIYTPAHSHEGSNLPVMVWIHGGALVFGMASLYDGSMLAALENVVVVIIQYRLGVLGFFSTGDKHATGNWGYLDQVAALRWVQQNIAHFGGNPDRVTIFGESAGGTSVSSLVVSPISQGLFHGAIMESGVALLPGLIASSADVISTVVANLSACDQVDSEALVGCLRGKSKEEILAINKPFKMIPGVVDGVFLPRHPQELLASADFQPVPSIVGVNNNEFGWLIPKVMRIYDTQKEMDREASQAALQKMLTLLMLPPTFGDLLREEYIGDNGDPQTLPKRKFQKMMADSMFVIPALQVAHFQCSRAPVYLPTSSQHQPSWLKNIRPPHMKADHGDELPFVFRSFFGGNYIKFTEEEEQLSRKMMKYWANFARNGNPNGEGLPHWPLFDQEEQYLQLNLQLAVGRALKAHRFQFWKKALPQKIQELEEPEERHTEL

SEQ ID NO: 40633 - protein, 145 aa, Homo sapiens
  DOMAIN (64)..(82): GLYCOSYL HYDROLASE FAMILY 47 SIGNATURE domain identified by eMATRIX, accession number PR00747E, p-value=9.571e-19, raw score of 15.13
  DOMAIN (1)..(145): Glycosyl hydrolase family 47 domain identified by PFam, accession name Glyco_hydro_47, E-value=0.0013, PFam score of -188.8
ILAEFGSLHLEFLHLTELSGNQVFAEKVRNIRKVLRKIEKPFGLYPNFLSPVSGNWVQHHVSVGGLGDSFYEYLIKSWLMSGKTDMEAKNMYYEALETHKLGPEAFWFNSGREAVATQLSESYYILRPEVVESYMYLWRQTHNTK

SEQ ID NO: 40634 - protein, 193 aa, Homo sapiens
  DOMAIN (38)..(56): GLYCOSYL HYDROLASE FAMILY 47 SIGNATURE domain identified by eMATRIX, accession number PR00747E, p-value=9.571e-19, raw score of 15.13
  DOMAIN (10)..(172): "Phage" integrase family domain identified by PFam, accession name Phage_integrase, E-value=1.4e-10, PFam score of 48.6
PIPGSVAAGEMPASYPYRHRAPEVRRVCEALPHHVSVGGLGDSFYEYLIKSWLMSGKTDMEAKNMYYEALEVFIRDKLMERRNRRTGRTEKARIWEVTDRTVRTWIGEAVAAAAADGVTFSVPVTPHTFRHSYAMHMLYAGIPLKVLQSLMGHKSISSTEVYTKVFALDVAARHRVQFAMPESDAVAMLKQLS

SEQ ID NO: 40635 - protein, 432 aa, Homo sapiens
  DOMAIN (237)..(262): GLYCOSYL HYDROLASE FAMILY 47 SIGNATURE domain identified by eMATRIX, accession number PR00747G, p-value=2.091e-24, raw score of 14.50
  DOMAIN (3)..(319): Glycosyl hydrolase family 47 domain identified by PFam, accession name Glyco_hydro_47, E-value=3.8e-13, PFam score of 33.5
MHLNQLPPILSRLGAVGFFGSMKAHLVSVSRQVRNIRKVLRKIEKPFGLYPNFLSPVSGNWVQLPIPGSVAAGEMPASYPYRHRAPEVRRVCEALPHHVSVGGLGDSFYEYLIKSWLMSGKTDMEAKNMYYEALEAIETYLLNVSPGGLTYIAEWRGGILDHKMGHLACFSGGMIALGAEDAKEEKRAHYRELAVQITKTCYESYARSDTKLGPEAFWFNSGREAVATQLSEEYTYILRPEVVESYMYLWRQTHNPSYREWGWEVVLALEKYCRTEAGFSGDSKTCYSRHPQPRTTSRQSFFLAETLNRCLVSACNGPDTGLEARDTAESETVISPAVKGSRGEKAMVRETDKPAKCIGKKSKNGKSDLKAASKMDAQFRSLCFEEVTPLWFEKVLEMNGPASPSVSPGGLSLEVWSLVMWHKDARPSVTNA

SEQ ID NO: 40636 - protein, 71 aa, Homo sapiens
MPGLGLGCPPAPLPDTRQPGLDSIPENEHSAVLPTHPPARIAACPQGREPTGNGDLPSHVYSAALWPWLWA

SEQ ID NO: 40637 - protein, 96 aa, Homo sapiens
AGPRAVPEPPHRVLESHWFVWITQMNHIPKEIGHEKHRDWVSSQLAATCNVEPSLFTNWVSGHLNFQIEHHLFPRMPRHNYSRVAPLVKSLCAKTA

SEQ ID NO: 40638 - protein, 90 aa, Homo sapiens
GKSGRRVGCLRSSSHPPGLQTSGHLETSRYRLCPPLQDLLWAASFYARFFLSYLPFYGVPGVLLFFVAVRYGREWRGHTQATGDPHCSPP

SEQ ID NO: 40639 - protein, 532 aa, Homo sapiens
  DOMAIN (27)..(79): Cytochrome b5 family heme-binding domain proteins. domain identified by eMATRIX, accession number BL00191H, p-value=2.098e- 15, raw score of 15.64
  DOMAIN (22)..(100): Heme-binding domain in cytochrome b5 and oxi domain identified by PFam, accession name heme_1, E-value=1.3e-06, PFam score of 32.0
MGGVGEPGPRKGPAQPGAPLPTFCWEQIRAHDQPGDKWLVIERRVYDISRWAQRHPGGSRLIGHHGAEDATDAFRAFHQDLQFCAQFLQPLLIGELAPEEPSQDGPLNAQLVEDFRALHQAAEDMKLFDASPTFFAFLLGHILAMEVLAWLLIYLLGSWHDLGHASIFKKSWWNHVAQKFVMGQLKGFSAHWWNFRHFQHHAKPNIFHKDPDVTVAPVFLLGESSVENLELPLTLGPSQPRDLAREKEVAWRAAVSSRRLSPQYGKKKRRYLPYNQQHLYFFLIGPPLLTLVNFEVENLAYMLVCMQWADLLWAASFYARFFLSYLPFYGVPGVLLFFVAVRVLESHWFVWITQMNHIPKEIGHEKHRDWVSSQLAATCNVEPSLFTNWFSGHLNFQIEHQMPRHNYSRVAPLVKSLCAKHGLSYEVKPFLTALVDIVSLHAHSENFWSTYCRLTNSSACVPRGRPEPAQAPNGIPSVHTLVEIAVRWLRGARQGDANTEDPRQLSLQRHPGAPGASAPVWGGPCSLLSLVS

SEQ ID NO: 40640 - protein, 446 aa, Homo sapiens
  DOMAIN (27)..(79): Cytochrome b5 family heme-binding domain proteins. domain identified by eMATRIX, accession number BL00191H, p-value=2.098e- 15, raw score of 15.64
  DOMAIN (22)..(100): Heme-binding domain in cytochrome b5 and oxi domain identified by PFam, accession name heme_1, E-value=4.2e-07, PFam score of 36.5
MGGVGEPGPREGPAQPGAPLPTFCWEQIRAHDQPGDKWLVIERRVYDISRWAQRHPGGSRLIGHHGAEDATDAFRAFHQDLNFVRKFLQPLLIGELAPEEPSQDGPLNAQLVEDFRALHQAAEDMKLFDASPTFFAFLLGHILAMEVLAWLLIYLLGPGWVPSALAAFILAISQAQSWCLQHDLGHASIFKKSWWNHVAQKFVMGQLKGFSAHWWNFRHFQHHAKPNIFHKDPDVTVAPVFLLGESSVEYGKKKRRYLPYNQQHLYFFLIGPPLLTLVNFEVENLAYMLVCMQWADLLWAASFYARFLSLSYLPFYGVPGVLLFFVAVRVLESHWFVWITQMNHIPKEIGHEKHRDWVSSQLAATCNVEPSLFTNWFSGHLNFQIEHHLFPRMPRHNYSPVAPLVKSLCAKHGLSYEVKPFLTALVDIVRSLKKSGDIVLDAYLHQ

SEQ ID NO: 40641 - protein, 119 aa, Homo sapiens
RRDAPQHRHGQSLPLAASGPGGTHGAVPDRRRRRRDSRSSEREESQSRNKDKYRNQESKSSHRKENSESEKRMYSKSRDHNSSNNSREKKADRDQSPFSKIKQSSQDNELKSSMLKNKE

SEQ ID NO: 40642 - protein, 737 aa, Homo sapiens
  DOMAIN (86)..(131): Cyclophilin-type peptidyl-prolyl cis-trans isomerase signatur domain identified by eMATRIX, accession number BL00170C, p-value= 7.480e-34, raw score of 18.49
  DOMAIN (62)..(165): Cyclophilin type peptidyl-prolyl cis-tr domain identified by PFam, accession name pro_isomerase, E-value=9.3e-40, PFam score of 140.1
FLKVCPQNNAETFGCLGTGEKGDRGNQTQKPLHYKSWSLFHRSCPRDFYGSKVGDFQGKENGRGGESIYGGFFEDEGVSLVKDHKEFLLSMANRGKDTNGSQFFITTKPTPHLDGHHVVFGQVISGQEVVREIENQKTDAASKPFAEVRILSCGELIPKSKVKKEEKKRHKSSSSSSSSSSDSDSSRYSQSSSDSSDSESATEEKSKKRKKKHRKNSRKHKKEKKKRKKSKKSASSESEAENLLEAQPPVLLFRPEEIPLPIPENRFLMRKSPPKADEKERKNRERERERECNPPNSQPASYQRRLLVTRSGRKLKGRGPRRYRTPSRSRSRDLFRRSETPPHWRQEMQRAQRMRVSSGERWIKGDKSELNEIKENQRSPVRVKERKITDHRNVSESPNRKNEKEKKVKDHKSNSKERDIRRNSEKEDKYKNKVKKRAKSKSRSKSKEKSKSKERDSKHNRNEEKRMRFKELKGRDHENVKEKEKQSDSKGKDQERSRSKEKSKQLESKSNEHDHSKSKEKDRRAQSRSRECDITKGKHSYNSRTRERSRRRDSSSRVRSRPHDRDRSMSKEYHRYRDQVYSRRVRSRSRERRTPPGRSRSRDRRRRRRDSRSSEREDSQSRNKDKYRNQESKSSHRKENSESEKRMYSKSRDHNSSNNSREKKADRDQSPFSKIKQSSQDDELKSSMLKNKEDEKIRSSVEKENQKSKGQENVHVHEKNKKFDHESSPGTDEDKSG

SEQ ID NO: 40643 - protein, 1120 aa, Homo sapiens
  DOMAIN (482)..(500): CADHERIN SIGNATURE domain identified by eMATRIX, accession number PR00205B, p-value=5.034e-16, raw score of 11.39
  DOMAIN (56)..(492): Cadherin domain identified by PFam, accession name cadherin, E-value=3.3e-57, PFam score of 203.5
EGAMARTRDRVRLLLLLICFNVGSGLHLQVLSTRNENKLLPKHPHLVRQKRAWITAPVALREGEDLSKKNPIAKIHSDLAEERGLKITYKYTGKGITEPPFGIFVFNKDTGELNVTSILDREETPFFLLTGYALDARGNNVEKPLELRIKVLDINDNEPVFTQDVFVGSVEELSAAHTLVMKINATDADEPNTLNSKISYRIVSLEPAYPPVFYLNKDTGEIYTTSVTLDREEHSSYTLTVEARDGNGEVTDKPVKQAQVQIRILDVNDNIPVVENKVLEGMVEENQVNVEVTRIKVFDADEIGSDNWLANFTFASGNEGGYFHIETDAQTNEGIVTLIKEVDYEEMKNLDFSVIVANKAAFHKSIRSKYKPTPIPIKVKVKNVKEGIHFKSSVISIYVSESMDRSSKGQIIGNFQAFDEDTGLPAHARYVKLEDRDNWISVDSVTSEIKLAKLPDFESRYVQNGTYTVKIVAISEDYPRKTITGTVLINVEDINDNCPTLIEPVQTICHDAEYVNVTAEDLDGHPNSGPFSFSVIDKPPGMAEKWKIARQESTSVLLQQSEKKLGRSEIQFLISDNQGFSCPEKQVLTLTVCEVLHGSGCREAQHDSYVGLGPAAIALMILAFLLLLLVPLLLLMCHCGKGAKAFTPIPGTIEMLHPWNNEGAPPEDKVVPSFLPVDQGGSLVGRNGVGGMAKEATMKGSSSASIVKGQHEMSEMDGRWEEHRSLLSGRATQFTGATGAIMTTETTKTARATGASRDMAGAQAAAVALNEEFLRNYFTDKAASYTEEDENHTAKDCLLVYSQEETESLNASIGCCSFIEGELDDRFLDDLGLKFKTLAEVCLGQKIDINKEIEQRQKPATETSMNTASHSLCEQTMVNSENTYSSGSSFPVPKSLQEANAEKVTQEIVTERSVSSRQAQKVATPLPDPMASRNVIATETSYVTGSTMPPTTVILGPSQPQSLIVTERVYAPASTLVDQPYANEGTVVVTERVIQPHGGGSNPLEGTQHLQDVPYVMVRERESFLAPSSGVQPTLAMPNIAVGQNVTVTERVLAPASTLQSSYQIPTENSMTARNTTVSGAGVPGPLPDFGLEESGHSNSTITTSSTRVTKHSTVQHSYS

SEQ ID NO: 40644 - protein, 808 aa, Homo sapiens
  DOMAIN (169)..(187): CADHERIN SIGNATURE domain identified by eMATRIX, accession number PR00205B, p-value=5.034e-16, raw score of 11.39
GCLQELSVLFARGEPRGPCHNLLHYMLALIGVPEVFWAFLFHCSLGLEEEKLAPLIKGEEKIVWLRSSFYFQHCLVDKSTLLPSSSVSLGIFHEEKNSGEFPIFAKAVRLALVPLRYVKLEDRDNWISVDSVTSEIKLAKLPDFESRYVQNGTYTVKIVAISEDYPRKTITGTVLINVEDINDNCPTLIEPVQTICHDAEYVNVTAEDLDGHPNSGPFSFSVIDKPPGMAEKWKIARQESTSVLLQQSEKKLGRSEIQFLISDNQGFSCPEKQVLTLTVCECLHGSGCREAQHDSYVGLGPAAIALMILAFLLLLLVPLLLLMCHCGKGAKGFTPIPGTIEMLHPWNNEGAPPEDKVVPSFLPVDQGGSLVGRNGVGGMAKEATMKRKVSSASIVKGQHEMSEMDGRWEEHRSLLSGRATQFTGATGAIMTTETTITARATGASRDVAGAQAAAVALNEEFLKNYFTDKAASYTEEDENHTAKDCLLVYSQEETESLNASIGCCSFIEGELDDRFLDDLGLKFKTLAEVCLGQKIDINKEIEQRQKPATETSMNTASHSLCEQTMVNSENTYSSGSSFPVPKSLQEANAEKVTQEIVTERSVSSRQAQKVATPLPDPMASRNVIATETSYVTGSTMPPTTVILGPSQPQSLIVTERVYAPASTLVDQPYANEGTVVVTERVIQPHGGGSNPLEGTQHLQDVPYVMERERESFLAPSSSVQPTLAMPNIAVGQNVTVTERVLAPASTLQSSYQIPTENSMTARNTTVSGAGVPGPLPDFGLEESGHSNSTITTSSTRVTKHSTVQHSYS

SEQ ID NO: 40645 - protein, 117 aa, Homo sapiens
  DOMAIN (34)..(89): Ferritin iron-binding regions proteins domain identified by eMATRIX, accession number BL00540B, p-value=1.000e-40, raw score of 18.82
  DOMAIN (38)..(107): Ferritins domain identified by PFam, accession name ferritin, E-value=3.3e-43, PFam score of 148.4
RPRLTSQDIKKPDCDGEDAIGRGFECDGLHLEKIVHFALHLEKNVNQSLLELHKLATDKNDPHLCDFIETHYLNEQVKAIKELGDHVTNMHEMGAPDSGVAEYLFDKHTLGDSDNES

SEQ ID NO: 40646 - protein, 674 aa, Homo sapiens
  DOMAIN (355)..(376): CAMP RESPONSE ELEMENT BINDING (CREB) PROTEIN SIGNATURE domain identified by eMATRIX, accession number PR00041E, p-value=5.598e- 10, raw score of 7.20
  DOMAIN (339)..(403): bZIP transcription factor domain identified by PFam, accession name bZIP, E-value=6.9e-15, PFam score of 57.9
GEALMYHTHFSELLDEFSQNVLGQLLNDPFLSEKSVSMEVEPSPTSPAPLIQAEHSYSLCEEPRAQSPFTHITTSDSFNDDEVESEKWYLSTDFPSTSIKTEPITDEPPPGLVPSVTLTITAISTPLEKEEPPLEIEQWGLIPRARPLFPKIKLEPHEVDQFLNFSPKEAKHLHIFPSWAACTCGSSGNSAIRIILAYSLALRVPTETKKPRDLFGKTGREKGKEETSREKLYVAERERKAPVDHLHLPPTPPSSHGSDSEGSLSPNPRLHPFSLPQTHSPSRAAPRAPSALSSSPLLTAPHKLQGSGPLVLTEEEKRTLIAEGYPIPTKLPLSKSEEKALKKIRRKIKNKISAQESRRKKKEYMDSLEKKVESCSTENLELRKKVEVLENTNRASHGELVIGVLGKGRRWDPLLTSPHAGDQCLGSVQGWAGECTPRQLDGSRTTLISEEDPGSPEMGGGEALGAIVSYAWRGREALHASRVGAVIQAPIAAGSDICLSDIRESATSSQTNISVTRTLLQQLQKLQTLVMGKVSRTCKLAGTQTGTCLMVVVLCFAVAFGSFFQGYGPYPSATKMALPSQHSLQEPYTASVVRSRNLLIYEEHSPPEESSSPGSAGELGGWDRGSSLLRVSGLESRPDVDLPHFIISNETSLEKSVLLELQQHLVSAKLEGNE

SEQ ID NO: 40647 - protein, 163 aa, Homo sapiens
MLTIKQPQAGFSGGISEEGTVIIEDDSSMHIIAPEDLSVGQEVEVEDSDVDDLDPIPRFYTMYFEEPDSSGHAGGPVSARVIKALQVVDHAFGMLMEGLKQRNLHNCVNIILLADHEITTATPAFSNHHFDQSAAINIEARPSTIKKDDNSLNAQRIIGILSN

SEQ ID NO: 40648 - protein, 885 aa, Homo sapiens
  DOMAIN (69)..(90): Somatomedin B domain proteins domain identified by eMATRIX, accession number BL00524A, p-value=1.692e-15, raw score of 9.65
  DOMAIN (140)..(510): Type I phosphodiesterase / nucleotide p domain identified by PFam, accession name Phosphodiest, E-value=2.7e-220, PFam score of 745.2
MESTLTLATEQPVKKNTLKKYKIACIVLLALLVIMSLGLGLGLGLRKLEKQGSCRKKCFDASFRGLENCRCDVACKDRGDCCWDFEDTCVESTRIWMCNKFRCGETRLEASLCSCSDDCLQKKDCCADYKSVCQGETSWLEENCDTAQQSQCPEGFDLPPVILFSMDGFRAEYLYTWDTLMPNINKLKTCGIHSKYMRAMYPTKTFPNHYTIVTGLYPESHGIIDNNMYDVNLNKNFSLSSKEQNNPAWWHGQPMWLTAMYQGLKAATYFWPGSEVAINGSFPSIYMPYNGSVPFEERISTLLKWLDLPKAERPRFYTMYFEEPDSSGHAGGPVSARVIKALQVVDHAFGMLMEGLKQRNLHNCVNIILLADHGMDQTYCNKMEYMTDYFPRINFFYMYEGPAPRIRAHNIPHDFFSFNSEEIVRNLSCRKPDQHFKPYLTPDLPKRLHYAKNVRIDKVHLFVDQQWLAVRSKSNTNCGGGNHGYNNEFRSMEAIFLAHGPSFKEKTEVEPFENIEVYNLMCDLLRIQPAPNNGTHGSLNHLLKVPFYEPSHAEEVSKFSVCGFANPLPTESLDCFCPHLQNSTQLEQVNQMLNLTQEEITATVKVNLPFGRPRVLQKNVDHCLLYHREYVSGFGKAMRMPMWSSYTVPQLGDTSPLPPTVPDCLRADVRVPPSESQKCSFYLADKNITHGFLYPPASNRTSDSQYDALITSNLVPMYEEFRKMWDYFHSVLLIKHATERNGVNVVSGPIFDYNYDGHFDAPDEITKHLANTDVPIPTHYFVVLTSCINKSHTPGNCPGWLDVLPFIIPHRPTNRGRSCPEGKPEALWVEERFTAHIARVRDVELLTLGFDFYQDKVQPVSEILQLKTYLPTFETHYLSLINGLP

SEQ ID NO: 40649 - protein, 104 aa, Homo sapiens
  misc_feature (1)...(104): Xaa = X or * as defined in Table 2
PLYSATVPSAFCSGQLVPHIKSFCRLNIFNRXLIELRHLVFFVLLLFRDLQHIMACNMRDAVRFFVCFLVIFFREGLSRSSCQKCSRKSQNCGLFYNFFDVHVH

SEQ ID NO: 40650 - protein, 268 aa, Homo sapiens
  DOMAIN (226)..(238): Phage integrase family domain identified by eMATRIX, accession number PF00589C, p-value=9.609e-10, raw score of 14.62
  DOMAIN (64)..(247): "Phage" integrase family domain identified by PFam, accession name Phage_integrase, E-value=0.0019, PFam score of -10.1
MNMNIKKIVKQATVLTFTTALLAGGATQAFAKENNQKAYKETYGVSHITRHDMLQIPKQQQNEKYQVPQFDQSTIKNIESAKGLDVWDSWPLQNADGTVAEYNGYHVVFALAGSPKDADDTSIYMFYQKVGDNSIDSWKNAGRVFKDSDKFDANDPILKDQTQEWSGSATFTSDGKIRLFYTDYSGKHYGKQSLTTAQTPHIRIRHSYAMHMLYAGIPLKVLQSLMGHKSISSTEVYTKVFALDVAARHRVQFAMPESDAVAMLKQLS

SEQ ID NO: 40651 - protein, 30 aa, Homo sapiens
TGSPSHLAAGLPVPLKIPVPWSHSDHISQR

SEQ ID NO: 40652 - protein, 89 aa, Homo sapiens
  misc_feature (1)...(89): Xaa = X or * as defined in Table 2
EDASCDEGSTARAVHSMEPAGARNRQKPHPFQVRGAEPHPPWXRCSHPAVAVDPGIHALSGKPLCSWRLGSDLPTVWPLPTPDPPVSVS

SEQ ID NO: 40653 - protein, 119 aa, Homo sapiens
  misc_feature (1)...(119): Xaa = X or * as defined in Table 2
QLPAGSGEGPYHLEGQLSYCHRGGEKALAALLSSPTSKTRSPSEPDPEQDEQKLRFCKRHLYGQQPRSPVEIRLQHVAIAYQTHHAYDXFVQLYNQHVAQPVLEFPYPGAVVALLSRHL

SEQ ID NO: 40654 - protein, 166 aa, Homo sapiens
  misc_feature (1)...(166): Xaa = X or * as defined in Table 2
SYVKYFPHQPAQKYFQQIHSAIGLHNADHVHKHLLGDNRYPIWIMQPSAHHPARQPEHDNHFRXVQQLYDGDSHRQFLXHQILFDRTPVSVDQSVEKKGXDHPVRPQXAAPGHVHYLTIPERSSQHYHPGALQEXTSHPDHIQARGSILASVLSGSDRWRRTYRCL

SEQ ID NO: 40655 - protein, 196 aa, Homo sapiens
MCQNLMTHSKSTEWKITKRFLTETEKHIRTFSSLSMKAIIHPAHNHTLRDPHYVEDKGHKYLVFEANTGTENGYQGEESLFNKAYYGGGTNFFRKESQKLQQSAKKRDAELANGALGIIELNNDYTSEKSNEAADHFKHVPQAKGNNVVITSYMTNRGFFEDKKATFAPSFLMNIKGNKTSVVKNSILEQGQLTVN

SEQ ID NO: 40656 - protein, 324 aa, Homo sapiens
  DOMAIN (131)..(218): ParB-like nuclease domain identified by PFam, accession name ParBc, E-value=0.0099, PFam score of 12.5
  misc_feature (1)...(324): Xaa = X or * as defined in Table 2
MNMNIKKIVKQATVLTFTTALLAGGATQAFAKENNQKAYKETYGVSHITRHDMLQIPKQQQNEKYQVPQFDQSTIKNIESAKGLDVWDSWPLQNADGTVAEYNGYHVVFALAGSPKDADDTSIYMFYQKVGDNSIDSWKNAGRVFKDSDKFDANDPILKDRRKMVXTPAFGRRVSGVIEIADGSRRRKAAALTESDYRVLVGELDDEQMAALSRLGNDYRPASAYERGQRYASRLQNEFAGNISALADAENISRKIITRCINTAKLPKSVVALFSHPGELSARSGDALQKAFTDKEELLKQQASNLHEQKKAGVIFEAEEISLF

SEQ ID NO: 40657 - protein, 360 aa, Homo sapiens
MNMNIKKIVKQATVLTFTTALLAGGATQAFAKENNQKAYKETYGVSHITRHDMLQIPKQQQNEKYQVPQFDQSTIKNIESAKGLDVWDSWPLQNADGTVAEYNGYHVVFALAGSPKDADDTSIYMFYQKVGDNSIDSWEKRGPVSLKTAISHTGTENGYQGEESLFNKANYGGGTNFFRKESQKLQQSAKKRDAELANGALGIIELNNDYTLKKVMKPLITSNTVTDEIERANVFKMNGKWYLFTDSRGSKMTIDGINSNDIYMLGYVSNSLTGPYKPLNKTGLVLQMGLDPNDVTFTYSHFAVPQAKGNNVVITSYMTNRGFFEDKKATFAPSFLMNIKGNKTSVVKNSILEQGQLTVN

SEQ ID NO: 40658 - protein, 357 aa, Homo sapiens
MNMNIKKIVKQATVLTFTTALLAGGATQAFAKENNQKAYKETYGVSHITRHDMLQIPKQQQNEKYQVPQFDQSTIKNIESAKGLDVWDSWPLQNADGTVAEYNGYHVVFALAGSPKDADDTSIYMFYQKVGDNSIDSWKNAGRVFKDSDKFDANDPILKDQTQEWSGSATFTSDGKIRLFYPDYSGKHSDNQSVTTAQVNVSKSDDTLKINGVEDHKTIFDGDGKTYQNVQQFIDEGNYTSGDNHTLRDPHYVEDKGHKYLVFEANTGTENGYQGEESLFNKAYYGGGTNFFRKESQKLQQSAKKRDAELANGALVPQAKGNNVVITSYMTNRGFFEDKKATFAPSFLMNIKGNKTS

SEQ ID NO: 40659 - protein, 342 aa, Homo sapiens; identical to SEQ ID NO: 34661

SEQ ID NO: 40660 - protein, 33 aa, Homo sapiens
LFQHRNRIRLRHRKLHPVPGSHIQRKNLRVDFR

SEQ ID NO: 40661 - protein, 543 aa, Homo sapiens
  DOMAIN (478)..(523): Receptor tyrosine kinase class II proteins domain identified by eMATRIX, accession number BL00239F, p-value=5.125e-24, raw score of 28.15
  DOMAIN (277)..(522): Eukaryotic protein kinase domain identified by PFam, accession name pkinase, E-value=4e-75, PFam score of 263.0
MGCIKSKENKSPAIKYRPENTPEPVSTSVSHYGAEPTTVSPCPSSSAKGTAVNFSSLSMTPFGGSSGVTPFGGASSSFSVVPSSYPAGLTGGVTIFVALYDYEARTTEDLSFKKGERFQIINNTEGDWWEARSIATGKNGYIPSNYVAPADSIQAEEWYFGKMGRKDAERLLLNPGNQRGIFLVRESETTKGAYSLSIRDWDEIRGDNVKHYKIRKLDNGGYYITTRAQFDTLQKLVKHYTEHADGLCHKLTTVCPTVKPQTQGLAKDAWEIPRESLRLEVKLGQGCFGEVWMGTWNGTTKVAIKTLKPGTMMPEAFLQEAQIMKKLRHDKLVPLYAVVSEEPIYIVTEFMSKGSLLDFLKEGDGKYLKLPQLVDMAAQIADGMAYIERMNYIHRDLRAANILVGENLVCKIADFGLARLIEDNEYTARQGAKFPIKWTAPEAALYGRFTIKSDVWSFGILQTELVTKGRVPYPGMVNREVLEQVERGYRMPCPQGCPESLHELMNLCWKKDPDERPTFEYIQSFLEDYFTATEPQYQPGENL

SEQ ID NO: 40662 - protein, 384 aa, Homo sapiens
  DOMAIN (276)..(303): Mrp family proteins domain identified by eMATRIX, accession number BL01215A, p-value=4.964e-11, raw score of 9.75
MNMNIKKIVKQATVLTFTTALLAGGATQAFAKENNQKAYKETYGVSHITRHDMLQIPKQQQNEKYQVPQFDQSTIKNIESAKGLDVWDSWPLQNADGTVAEYNGYHVVFALAGSPKDADDTSIYMFYQKVGDNSIDSWKNAGRVFKDSDKFDANDPILKDQTQEWSGSATFTSDGKIRLWCINAGHEMTKAIAIAQFNDDSPEARKITRRWRIGEAADLVGVSSQAIRDAEKAGRLPHPDMEIRGRVEQRVGYTIEQINHMRDVFGTRLRRAEDVFPPVIGVAAHKGGVYKTSVSVHLAQDLALKGLRVLLVEGNDPQGTASMYHGWVPDLHIHAEDTLLPFYLGEKDDVTYAIKPTCWPGLDIIPSCLALHRIETELMGKFDE

SEQ ID NO: 40663 - protein, 82 aa, Homo sapiens
  misc_feature (1)...(82): Xaa = X or * as defined in Table 2
LHIEKSNEAADHFKHVACHRXRXACTCHCNNPWFPRPLPQPDCPTSATVEPPLYPIRSRGRTRKPAEGSRAPGCCCCQRPGK

SEQ ID NO: 40664 - protein, 232 aa, Homo sapiens
MCQNLMTHSKSTEWKITKRFLTETEKHIRTFSSLSMKAIIHPAHNHTLRDPHYVEDKGHKYLVFEANTGTENGYQGEESLFNKAYYGGGTNFFRKESQKLQQSAKKRDAELANGALGIIELNNDYTLKKVMKPLITSNTVTDEIERANVFKMNGKWYLFTDSRGSKMTIDGINSNDIYMLGYVSNSLTGPYKPLNKTGLVLQMGLDPNDVTFTYSHFAVPQAKSNNVVNYGA

SEQ ID NO: 40665 - protein, 135 aa, Homo sapiens
  misc_feature (1)...(135): Xaa = X or * as defined in Table 2
SYVKYFPHQPAQKYFQQIHSAIGLHNADHVHKHLLGDNRYPIWIMQPSAHHPARQPEHDNHFRXVQQLYDGDSHRQFLXHQPAQKYFQQIHSAIGLHNADHVHKHLLGDNRYPIWIMQPSAHHPARQPEHDNHFR

SEQ ID NO: 40666 - protein, 376 aa, Homo sapiens
MNMNIKKIVKQATVLTFTTALLAGGATQAFAKENNQKAYKETYGVSHITRHDMLQIPKQQQNEKYQVPQFDQSTIKNIESAKGLDVWDSWPLQNADGTVAEYNGYHVVFALAGSPKDADDTSIYMFYQKVGDNSIDSWKNAGRVFKDSDKFDANDPILKDQTQEWIFACWGKPSVDALLHLSQGQAVMGNQLLAFSLVKRKTTLARNTQTASPRALARFINAAGTTGFPTGKRAVSATQLMDFADFGTTIKQDFRLLGQTSVDRLLQLSQGQAVKGNQLLPVSLVKRKTTLAPNTQTASPPRVGRFINAAGTTGFPTGKRAVSATQLMGTARDPQIETSHFFTLQSSSCREAVLQWRLQQTIKEQALLNAHVTQTQ

SEQ ID NO: 40667 - protein, 60 aa, Homo sapiens
LCLFLLLLKLLQHCFKFSLFLFCLLQCCLILFFISHGHHSQDQVHQIERTHKDDQDEEDH

SEQ ID NO: 40668 - protein, 455 aa, Homo sapiens
  DOMAIN (259)..(314): ELEMENT INSERTION TRANSPOSABLE SEQUENCE TRANSPOSASE FOR domain identified by eMATRIX, accession number PD02662D, p-value= 3.973e-10, raw score of 21.71
  DOMAIN (341)..(423): Chorismate synthase domain identified by PFam, accession name Chorismate_synt, E-value=3.3e-37, PFam score of 124.1
MNMNIKKIVKQATVLTFTTALLAGGATQAFAKENNQKAYKETYGVSHITRHDMLQIPKQQQNEKYQVPQFDQSTIKNIESAKGLDVWDSWPLQNADGTVAEYNGYHVVFALAGSPKDADDTSIYMFYQKPDYRACLAVDSRGSPTTPLIVSDAGFKVPWYKSVEKLGWYWLSRVRGKVQYADLGAENWKPISNLHDMSSSHSKTLGYKRLTKSNPISCQILLYKSRSKGRKNQRSTRTHCHHPSPKIYSASAKEPWVLATNLPVEIRTPKQLVNIYSKRMQIEETFRDLKSPAYGLGLRHSRTSSSERFDIMLLIALMLQLTCWLAGVHAQKQVDSRGSRIEIRGCLTQMGDIPLDIKDWSQVEQNPFFCPDPDKIDALDELMRALKKEGDSIGAKVTVVASGVPAGLGEPVFDRLDADIAHAGYRARIRNHGHSCFLCEIVIRSQFHTTYEPEA

SEQ ID NO: 40669 - protein, 275 aa, Homo sapiens
MCQILMTHSKSTEWIITKRFLTETEKHIRTFSSLSMKAIIHPAHNHTLRDPHYVEDKGHKYLVFEANTGTENGYQGEESLFNKAYYGGGTNFFRKESQKLQQSAKKRDAELANGALGIIELNNDYTLKKVMKPLITSNTVTDEIERANVFKMNGKWYLFTDSRGSKMTIDGINSNDIYMLGYVSNSLTGPYKPLNKTGLVLQMGLDPNDVTFTYSHFAVPQAKGNNVVITSYMTTRGFFEDKKATKAPSFLMNIKGNKASVVKNSILEQGQLAVN

SEQ ID NO: 40670 - protein, 886 aa, Homo sapiens
  DOMAIN (372)..(401): kw REPLICATION REPB REPA INITIATION domain identified by eMATRIX, accession number DM00653A, p-value=8.200e-26, raw score of 20.40
  DOMAIN (356)..(398): Initiator RepB protein domain identified by PFam, accession name RepB_protein, E-value=0.018, PFam score of 11.2
MNMNIKKIVKQATVLTFTTALLAGGATQAFAKENNQKAYKETYGVSHITRHDMLQIPKQQQNEKYQVPQFDQSTIKNIESAKGLDVWDSWPLQNADGTVAEYNGYHVVFALAGSPKDADDTSIYMFYQKIRRKNGAGSATFTSGPKIRLFYTDYSGKHYGKQASTPGRSGDTDSLPWVICEPAVILRDDHTDRERQRTRETTTDRMHDRSTKERTIEQRRKRGNKTRREGKTKGTKRSFGRVSSKCVADINCSPQSLTNNRYFGEENYYSMDEIRKSDGTLQEHDGICEIHVAKYAEIFGLTSAEASKDMREALKSFAGKEVVFYRPEEDAGDEKGYESFPWFIKRAHSPSRGLYSVHINPYLIPFFIGLQNRFTQFRLSETKDITNPYAMRLYESLCQYRKPDGSSIVSLKIDWIIERYQLPQSYQRMPDFRRRFLQVCVNEINSRTPCASYTLRKEGRQRLYRIFFANPFLQRISESIREDRNGRSQKTVHTEGDMNMNIKKIVKQATVLTFTTALLAGGATQAFAKENNQKAYKETYGVSHITRHDMLQIPKQQQNEKYQVPQFDQSTIKNIESAKGLDVWDSWPLQNADGTVAEYNGYHVVFALAGSPKDADDTSIYMFYQKTGGSFRVAQSEHSSPNSKRRRTEVAVWTVLAAGRVALSTHRVRPLTKNALLRDPYALRSVRHLIDNCAFRLYGHWVKKGEQQNRAALFQHRPPGPFPIMGPEEEGDSAAITEDEASDELGLQKKLRTEVIQLEDTLAQVRKEYEMLRIEFEQNLAANEQADLLPVAVEILPVSEKNLSLTPSAPSLTLEAGSIPNGQEQEAPDSAEGTTLTVLPEGTHTASPDPEGERTPLRGRTTAACSHQKSEWVSRGPSGPPVTEML

SEQ ID NO: 40671 - protein, 453 aa, Homo sapiens
  DOMAIN (351)..(380): kw REPLICATION REPB REPA INITIATION domain identified by eMATRIX, accession number DM00653A, p-value=7.207e-27, raw score of 20.40
  DOMAIN (335)..(377): Initiator RepB protein domain identified by PFam, accession name RepB_protein, E-value=0.0091, PFam score of 12.3
MNMNIKKIVKQATVLTFTTALLAGGATQAFAKENNQKAYKETYGVSHITRHDMLQIPKQQQNEKYQVPQFDQSTIKNIESAKGLDVWDSWPLQNADGTVAEYNGYHVVFALAGSPKDADDTSIYMFYQKVGDNSIDSWKNAGRVFKDSDKFDANDPILKDQTQEWSGSATFTSDGKNPVISTLDYFRLNITAKQSLTTAQGKCVKNLMTHWAVINHKKRKNSPRIVQSNDLTEAAYSLSRDQKRMLYLFVDQIRKSDGTLQEHDGICEIHVAKYAEIFGLTSAEASKDIRQALKSFAGKEVVFYRPEEDAGDEKGYESFPWFIKRAHSPSRGLYSVHINPYLIPFFIGLQNRFTQFRLSETKEITNPYAMRLYESLCQYRKAGWLRHRLSENDWIIKRSQLPQSAFYQPFMGLRRESFYFRWERRTLGPLKSFSVKRGTEAGKFRLAALLVRL

SEQ ID NO: 40672 - protein, 166 aa, Homo sapiens
  misc_feature (1)...(166): Xaa = X or * as defined in Table 2
ENFPHQPAQKYFQQIHSAIGLHNADHVHKHLLGDNRYPIWIMQPSAHHPARQPEHDNHFRXVQQLYDGDSHRQFLXHQILFDRTPVSVDQSVEKKGXDHPVRPQXAAPGHVHYLTIPERSSQHYHPGALQEXTSHPDHIQAKXWHYRGHYSYARNXRIHHRGSWCR

SEQ ID NO: 40673 - protein, 102 aa, Homo sapiens
TGARRVPWPRRGARLRGRARARSDESGSAGDQPPSFPPWWGWRWVTTAASPANLWPSVARSTMVDRAINLFFLKMKGDLALTEDKREQAQNEQSAWKFTPGR

SEQ ID NO: 40674 - protein, 101 aa, Homo sapiens
  DOMAIN (2)..(86): Ribosomal protein L31e domain identified by PFam, accession name Ribosomal_L31e, E-value=1.4e-41, PFam score of 151.5
CTINNPKSFHGVGFKQHAPQALTEIQKFAMKEMGTPDVRIDTRLIKAVWAKGIRNVPYRIRVRLSRKRNEDEDSPNKLYTLVTYVPVTTFKNLQTVNVDEN

SEQ ID NO: 40675 - protein, 51 aa, Homo sapiens
  DOMAIN (16)..(44): Granins proteins domain identified by eMATRIX, accession number BL00422C, p-value=4.255e-10, raw score of 16.18
  misc_feature (1)...(51): Xaa = X or * as defined in Table 2
HLILLFLKHKYCFAREEEEKXRGVGGEEEEEEEEEEEGEEEEEEIFKSIVY

SEQ ID NO: 40676 - protein, 325 aa, Homo sapiens
  DOMAIN (58)..(111): Clathrin light chain proteins domain identified by eMATRIX, accession number BL00224B, p-value=5.336e-09, raw score of 16.94
DIWDQTEHQSSGPWSYGTSTDPEPTSDLAVIVFEKRGGGEEEEEKEEEEGRREEEEKEEEEGRRREEEKEEEEEEEEGRRAQEEEEEKKEEEEEEEEEWCLGEEESQPGHAEEVPSPHKMGALTLRVEGVKEQEAKLLRSSDLMKGDFSSTSQHPPQCSKRTNSESNADAKSKKKERPIMTFRQRKTFRIRILPLPQGRIAGSNKLSAKLCTDGRGAGDVGVLTNVMLKRLHFTIDHFLFKIIQMSPSASWNLWSLLDQDSLKCQICLEGYAQGGKPDVQLLPPRLTADWKGHRWGQMMGLDEKLTPSSVMVTSVALFWFEVSAQ

SEQ ID NO: 40677 - protein, 148 aa, Homo sapiens; identical to SEQ ID NO: 40512

SEQ ID NO: 40678 - protein, 1266 aa, Homo sapiens
  DOMAIN (416)..(441): 7 kw REVERSE TRANSCRIPTASE RNA POLYMERASE domain identified by eMATRIX, accession number DM00895E, p-value=4.103e-10, raw score of 15.72
  DOMAIN (388)..(662): Reverse transcriptase domain identified by PFam, accession name rvt, E-value=1.4e-67, PFam score of 237.9
MNRQLSKEDIQMANKHEKMLNITNDQGNANQNHNAIQPYSCKNGHNRKIDVSMNMVNREHFYTAVHKASDLSFKPTSEKDLDTKLQANFPNLVKAPDKARICFCGKPYQPYVQGSPNSPVEIVENEPSQLLHFLCVGSSKEEIDLGNPKGSQHTGLGHSMGKCNYFYLPILLVHGWKSHLHPCVASMKVAGTQRTQDQDEAQEKEKRDKRKAEALVAALQTYKTQNPQGAPANCYKCGKLGHFKKDCHSSKRKPLDPVQPVVGTTGRQIVHGGIGPDGFTVKFYQRYKRELVLLLLKLLQRIEKKGLLPNSFYEASIILTLKLGRNTTVKTTKLQANIPGRRLVQKSSTKYWQIKCSSTSKNLSTTVKSASSLGCKTGSTYTSRNMDEAGSHHPQQTNTGRRKPNTTRSHSDTTKKENFRPISLMNIDAKILNKILAKRIQQHIKKLIHHDQVGFIPGMQGWFNICKSINVIQHINRAKDKNHMIISIDAEKAFDKIQQPFLLKTLNKLGIDGSYFKIIRAIYDKPTANIILNGQKLEAFPLKTGTRQRCPLSPLLFNIVLEVLARAIRQEKEIKGIQLGKEEVKLSLFADDMIVYLENPTVSAQNLLKLISNFSKVSGYKINVQKSQEFLYTNNIQTESQIMSELPFTIASKRIKYLGIQLTRDVKNLFKENYKPLLNEIKEDTNKWKNIPCSWVGRINIVKMAILPKVIYRFNAIPIKLPMPFFTELEKATLKFIWNQKRARIAKSILSQKNKAGGITLPDFKLYYKATVTKTAWLQHAVPANDGTTRSPSIDSIQKDPSEFAWRDPELPEVIHILQHQFPSVQANAAAYLQHLWFGDNNVKMKVCRLWGIKLLVYLLGHRVLEVQKNACDALRNLFFGKSTGENKITMKDVATLDLSFILSKLTQEQKTKYLIVLTHKWELNNENTGTRGGERHTLGPVRGWGPRGGMAFGEIPIVDDRLMDVSQNLKYNFKKKEGEEGEGEEEGEEEEEEEKKEGEEEEEASGGPITPSPRTSTKKTQWATLEAVLSKRALSSMFLCCLLKSKDKWEERWELLQGELPNSAPDTFPAPFTFAWGPAGSDLLVATKQPPPLCPSASPDPDLAPALFLFSNCKLSLGHRKEKRDAVACRGRKPLKVILVNFGQLTSYKELPSYALGLKPSPWDSTHAPLALPYHSPVFQEGKSTSLAMGIFQPGHFPSVKTLCAPAGTSCESLSGPGATGFANCRFLQEATDEVCQSAQSAQRPGSGKPNSMCWEKSQAIWAPV

SEQ ID NO: 40679 - protein, 328 aa, Homo sapiens
  DOMAIN (74)..(125): Neuromodulin (GAP-43) proteins domain identified by eMATRIX, accession number BL00412D, p-value=4.306e-09, raw score of 16.54
MTQKKNQTEQKEQKNEQKKQHNERKEHKKKQTEYKTHETNRPRKTERAEHDEQKRENEGKRRRHKKRTRERKKTNEETETRKGREKPEQARQARKEKQKRQRGERQKEEKKRKNNRQENEEEEANEQDRREQKEETRKRGPRKRREHKEEEGRRERKKRKRKTKEKGRRAQQKERREEEQQQRRRRRRGKRKKNESEDEEDKASNKHRQQERERQKRKGAERARRPAETGRRRRKRKRQRKAAKQRQERQGDGVLPCAPWTAHPRQPSQCWSARAPGGSAHRPRRYLLTGQANGSLAMWDLTTAIGRPRPGPCRWPDGARADGTAGTL

SEQ ID NO: 40680 - protein, 421 aa, Homo sapiens
KEAEGRALARLLGPSEERFAAHEGMRPMRAVFTRQGHIFTTGFTRMSQRELGLWDPNNFEEPVALQEMDTSNGVLLPFYDPDSSIVYLCGKVLTAGQGEQGTGWRCGGPCPGAPLNRLILQGDSSIRYFEITDEPPFVHYLNTFSSKEPQRGMGFMPKRGLDVSKCEIARFYKLHERKCEPIIMTVPRKVRAWDRDLGRRSDAVPRIRQGPEPALEADEWLSGQGRRNPCSFSLRDGYCCPPTHRDLRVTKRNILDVRPPSGPRRKPSRPATPPCRSSTPLETLLEEIKPLRERVQAQEQRITALENMLCELVDGPHYPRAPGRASGLPTDPFGGAVRRACPVPPPLVPLARAVRTLPLRYASSIAALVERMKAHMWAKGRATRDATAKRCSPMAQTTTQHLHVPCDREDESRWNYICCSS

SEQ ID NO: 40681 - protein, 119 aa, Homo sapiens
MINPNPERSDDLVFWGLFRAGGMWSAIIAPVMILLVGILLPLGLFPGDALSYERVLAFAQSFIGRVFLFLMIVLPLWCGLHRMHHAMHDLKIHVPAGKWVFYGLAAILTVVTLIGVVTI

SEQ ID NO: 40682 - protein, 59 aa, Homo sapiens
  DOMAIN (17)..(29): Phage integrase family domain identified by eMATRIX, accession number PF00589C, p-value=1.964e-09, raw score of 14.62
MHMLYAGIPLKVLQSLMGHKSISSTEGYTKVFALDVAARHRVQIAMPESDAAAMLKQLS

SEQ ID NO: 40683 - protein, 63 aa, Homo sapiens
  misc_feature (1)...(63): Xaa = X or * as defined in Table 2
LRWRSLPAFQSGNLSVPAALMNRANARGEAVCVLGRSSRFLAHXLAALGRSAAASGISSLKGG

SEQ ID NO: 40684 - protein, 52 aa, Homo sapiens
  misc_feature (1)...(52): Xaa = X or * as defined in Table 2
RAISCCPSHLVKRKTTLAPNTQTASPRALADSLMQLARQVSRLESGQXAQRN

SEQ ID NO: 40685 - protein, 129 aa, Homo sapiens
  DOMAIN (69)..(83): Phage integrase family domain identified by eMATRIX, accession number PF00589B, p-value=1.621e-11, raw score of 16.17
FSSGTVPGDRPDREFIGDTLMERRNRRTGRTEKARIWETANTLAITMLMSTAMPAAAADGVTFSVPVTPHTFRHSYAMHMLYAGIPLKGLQSLMGHKCIRSTGRLPQRFLGLEWGLPGHPGGRLAMAEV

SEQ ID NO: 40686 - protein, 138 aa, Homo sapiens
  misc_feature (1)...(138): Xaa = X or * as defined in Table 2
GHRSPLAIAGCPTIQNGAGPQCAAITRVRAARWCGYPPGSGIPTIPEDSFMLYPRALTTHQTGFSPAWGKPSVDRLLATLSGPGGEGQYSCCPSHLVKKKTTLAPNTQTASPRALADSLMQLARQVSRLESGQXAQRN

SEQ ID NO: 40687 - protein, 121 aa, Homo sapiens
  misc_feature (1)...(121): Xaa = X or * as defined in Table 2
SVQVFIRDKLMERRNRRTGRTEKARIWEVTDRTVRTCDCGGGLPAAAADGVTFFCSAPPNIRFRHSYAMHMLYARXYPLKGLLSPIGHKCIRSTGRLPQRFLGLEWGLPGHPGGRLAMAEV

SEQ ID NO: 40688 - protein, 77 aa, Homo sapiens
PMSPTASSDDMTLTSPSMDNSSAELLPSGDSPLNQRMTENLLASLSEHERAAILSVPAAQNPEDLRMFARLLHYFRG

SEQ ID NO: 40689 - protein, 99 aa, Homo sapiens
LEHSVYGPLLVASLAFNNQLLFRLVAKSEVNSQQCFFNKGLKRFMYNENTRRSKLLMLFDKFRSVLVVTTHEDPVIAVFKALLPWAPGGGRKAARPGNH

SEQ ID NO: 40690 - protein, 237 aa, Homo sapiens
MQHLSHGSRRHILISENFRGCQDQAVSQTLLTRPPLVSKEASFFLLPFDLHVLGLPPAFNLSHDQTLQFKSLTLVTSVRVPLEVARPGLSMLGLLRFMSSLLAVGDMGQGDQVEFQDTKGNSEGRASSQPPMTPLTPTRVRRCPGGPTWGAKAEGVGRAEAATADPGSEGDVVLSRTGLLLAGLLHYFRGRHHLEEIMYNENTRRSQLLMLFDKFRSVLVVTTHEDPVIAVFQALLP

SEQ ID NO: 40691 - protein, 42 aa, Homo sapiens
  misc_feature (1)...(42): Xaa = X or * as defined in Table 2
MRTWPCCRFSSLQLIWVYWGRPIIIYALCENNGLHAVSQCQX

SEQ ID NO: 40692 - protein, 777 aa, Homo sapiens
  DOMAIN (72)..(228): "Phage" integrase family domain identified by PFam, accession name Phage_integrase, E-value=4.4e-10, PFam score of 46.9
MVEWLHHRGLTLATAQSDDLQALLAERLEGGYKATSSARLLSAVRRLFQYLYREKFREDDPSAHLASPKLPQRLPKDLSEAQVERLLQAPLIDQPLELRDKAMLEVLYATGLRVSELVGLTMSDISLRQGVVRVIGKGNKERLVPLGEEAVYWLETIRKKGQAPTTWLAAPRAALIGFNQQAHQLASIPVFMRIKQQLLFISKMNVQLLAAWQELCQSDLSLDRQLTGLYDALLGAWHTQIQWATQGFRHGCKRNTIKPDVVIVLNTPEAGDVPGIDTIKYPLNLGQGRGLMLFDKRYFPNQKLVAALKSCAAHNDLPLQFSTMKTGATDGGRYNVMGGGRPVVALCLPTRYLHANSGMISKADYEALLTLIRGFLTTLTAEKVNAFSQFRQIVDLLEQQPRTPGELAQQTGVSGRTILRDIDYLNFTLNGKARIFASGSAGYQLEIFERRSFFQLLQKHDRVHHLKRYPLYMWKLPLIETQGKSTNVLQPGAMFVLIRRMFVSGEDGDYHNWTGCGNTLNLSHPAVVDYASACLRYWVVTCHVDGFRFDLAAVMGRTPEFRQDAPLFTAIQNCPVLSQVKLIAHPWDIAPGGNQAYNCCRPVGRIRRSRRIRQCLPAATQNFFLISPHALQPFATCWRIVTLAIHFPDRLPRQRFLLFQQCQTRSVIARRFQLAQLSGRFQQRTQQGFFHIACTNDPRGNAVDRGIEEVKADMHPVKQIVTHNLTGNCLGFIIQQHYVIAVPANRTADNTFIPVNPGKITKEYPMTFVGKECTELR

SEQ ID NO: 40693 - protein, 234 aa, Homo sapiens
  DOMAIN (25)..(198): "Phage" integrase family domain identified by PFam, accession name Phage_integrase, E-value=1.4e-27, PFam score of 105.1
MTTSRSDTRSQDDPSAHLASPKLPQRLPKDLSEAQVERLLQAPLIDQPLELRDKAMLEVLYATGLRVSELVGLTMSDISLRQGVVRVIGKGNKERLVPLGEEAVHWLETYLEHGRPWLLNGVPINVLFPSQRAQQITRQALWRRINHYDELAGIDSEKLSPHVVRHAFATYFAGSGGCIADFCGGSCAGSSAAESCLWFAGTGLYLHHAWVSGVWSRECSGAAWRDRRDVGGGE

SEQ ID NO: 40694 - protein, 56 aa, Homo sapiens
  misc_feature (1)...(56): Xaa = X or * as defined in Table 2
EPGTYVYNETDKSHSPCRPCVLLSXXGIYLGSVXRXNGITYGALLAHIPNKFQVDY

SEQ ID NO: 40695 - protein, 306 aa, Homo sapiens
  misc_feature (1)...(306): Xaa = X or * as defined in Table 2
AWTHAGILLKHKYSFLVGCASISDVIAQVVFVAILLHSHLECREPLLIPILSLYMGALVRCTTLCLGYYKNIHDIIPDRSGPELWGDATIRKMLSFWWPLALILATQRIRRPIVNLFVSRHLGGSSAATEAVAILTATYPVVHMPYGWLTEIRAVYPAFDKNNPSNKLVSTSNTVTAAHIKKFTFVCMALSLTLCFVMFWDTQRVXGKSLIDIIGSGLWPLQELCVVPLWIFSFFPVPVTVRAHLTGWLMTLKKTFVLAPSSVLRIIVLIASLVVLPYLGVHGATLGVGFLLAGFCGENSTMGRPL

SEQ ID NO: 40696 - protein, 459 aa, Homo sapiens
GDATIRKMLSFWWPLALILATQRISRPIVNLFVSRDLGGSSAATEAVAILTATYPVGHMPYGWLTEIRAVYPAFDKNNPSNKLVSTSNTVTAAHIKKFTFVCMALSLTLKDSVQKPDISLTGRLVQTLPTRMRHQRGESKDVAPLASWLSEPSTSSEASQTSSKLTINSQGEGKAKQKLECGTLSIVLRSCEKNQERIKAAEKRNRSWTTLCGLGAWRPLLFELPVIVQTPDQTNRFQFRYPAKTQSGLCSFFHSFDLLTLEAFVKVWFPGCLLILIEYASSKNRKSKMLQNLKLLSADMTLKLCFVMFWTPNVSEKILIDIIGVDFAFAELCVVPLRIFSFFPVPVTVRAHLTGFLMTLNYTFVLAPSSVLRIIVPHRPASWVLPYLGVHGATLGVGSLLAGFVGESTMVALATCYVYRKQKKKMENESATEGEDSAMTDMPPTEEVTDIVEMREENE

SEQ ID NO: 40697 - protein, 165 aa, Homo sapiens
  DOMAIN (1)..(146): Bacterial RNA polymerase, alpha chain domain identified by PFam, accession name RNA_pol_A_bac, E-value=9.1e-11, PFam score of -30.1
TGRCTCHDRHYWYSPVERIAYNVEAARVEQRTDLDKLVIEMETNGTIDPEEAIRRAATILAEQLEAFVDLRDVRQPEVKEEKPEFDPILLRPVDDLELTVRSANCLKAEAIHYIGDLVQRTEVELLKTPNLGKKSLTEIKDVLASRGLSLGMRLENWPPASIADE

SEQ ID NO: 40698 - protein, 84 aa, Homo sapiens
  misc_feature (1)...(84): Xaa = X or * as defined in Table 2
GRDXPDYAENAHVMPPVVIEDASDMLLAITQAGRMLMFPVSDLPQLSKGKGNKIINIPSAEAARGEDGLAQLYVLPPQSTLTIH

SEQ ID NO: 40699 - protein, 394 aa, Homo sapiens
  DOMAIN (26)..(60): DNA gyrase/topoisomerase IV subunit A. domain identified by eMATRIX, accession number PF00521G, p-value=9.719e-11, raw score of 18.47
  DOMAIN (34)..(92): DNA gyrase/topoisomerase IV, subunit A domain identified by PFam, accession name DNA_topoisoIV, E-value=4.5e-14, PFam score of 46.4
MAQPCEEAGDSTQDKKATHAKAVIPGVSLRCLEDAISELKLRHLAKLEEMKIRGEQSELEKERDQLQGILASERKMNNLLKKELQADAQASEREEAKAMSEHDMLPWAGYAALKAMISDAPGLNYKAGDSFKAAVKGKSNQPVVFVDSTGRSYAIDPITLPSARGQGEPLTGKLTLPPGATVDHMLMESDDQKLLMASDAGYGFVCTFNDLVARNRAGKALITLPENAHVMPPVVIEDASDMLLAITQAGRMLMFPVSDLPQLSKGKGNKIINIPSAEAARGEDGLAQLYVLPPQSTLTIHVGKRKIKLRPEELQKVTGERGRRASSQIWCVVRYPRRDGLRIDRTSTTSPVNLPNAVGGGDNVSTGLALNIHHNGLFFVRPRRSPASAKRAEH

SEQ ID NO: 40700 - protein, 82 aa, Homo sapiens
  DOMAIN (16)..(47): Orn/Lys/Arg decarboxylases family 1 pyridoxal-P attachment si domain identified by eMATRIX, accession number BL00703I, p-value= 4.226e-20, raw score of 14.40
  DOMAIN (1)..(70): Orn/Lys/Arg decarboxylase domain identified by PFam, accession name OKR_DC_1, E-value=1.4e-22, PFam score of 83.3
MNPQEANYAYLRGEVELVRLPDAEGRIAAEGALPYPPGVLALEEGINLLPGFAPELQGVYIEEHDGSGIIMLPTKLAEVGTI

SEQ ID NO: 40701 - protein, 270 aa, Homo sapiens
  DOMAIN (93)..(124): Orn/Lys/Arg decarboxylases family 1 pyridoxal-P attachment si domain identified by eMATRIX, accession number BL00703I, p-value= 3.000e-30, raw score of 14.40
  DOMAIN (1)..(165): Orn/Lys/Arg decarboxylase domain identified by PFam, accession name OKR_DC_1, E-value=3e-86, PFam score of 299.9
MAKLQQLVALLVRFEKLLESDAPLAEVLPSIYKQHEERYAGYTLRQLCQEMHDLYARHNVKQLQKEMFRKEHFPRVSMNPQEANYAYLRGEVELVRLPDAEGRIAAEGALPYPPGVLCVVPGEIWGGAVLRYFSALEEGINLLPGFAPELQGVYIEEHDGRIKKRASAPQWAITVSSVCHNERTQYRKRCGYTPPQTQSATKHTDRPTRIIIARCESSRGSRRSTSYISVTTAAASIQSSVRLRMTCNCARDTRRQRLTKLTPHPRAIRA

SEQ ID NO: 40702 - protein, 227 aa, Homo sapiens
  DOMAIN (10)..(29): Ribonucleotide reductase large subunit proteins domain identified by eMATRIX, accession number BL00089I, p-value=7.882e- 16, raw score of 15.71
  DOMAIN (1)..(21): Ribonucleotide reductase domain identified by PFam, accession name ribonucleo_red, E-value=4.8e-08, PFam score of 21.3
MQQLLKDLLTAYKFGVKTLYYQNTRDGAEDAQDDLVPSIQDDGCESGACLIRRASVASGSGCRMQRERLIRPTARICRPDKTRQRRIRHRMRRKMPYPALNSQQDTLMAYTTFSQTKNDQLKEPMFFGQPVNVARYDQQKYDIFEKLIEKQLSFFWQNWPLLLDALIPVANTCEMILMPACFGLADDKLWRWLNEKLPCSLMLLPTLPPSVLGIRLQNQLQRQFVRQ

SEQ ID NO: 40703 - protein, 35 aa, Homo sapiens
WNAKTFSLVWRRCVSVWVRVLRRCLSGFNHLPDAA

SEQ ID NO: 40704 - protein, 591 aa, Homo sapiens
  DOMAIN (120)..(138): PHOSPHORIBULOKINASE FAMILY SIGNATURE domain identified by eMATRIX, accession number PR00478A, p-value=7.245e-12, raw score of 13.44
  DOMAIN (113)..(321): ABC transporter domain identified by PFam, accession name ABC_tran, E-value=0.0012, PFam score of -21.5
MMQVILGASKLDPNNNHEEVLRRVFTRWGKGKWEYRPNTLEVDKGGEGEKRTLGYKIHHNHHDDAHESDTSSHEKRTAGQCAFVATWMAVRNLNFYYGKFHALKNINLDIAKNQVTAFIGPSGCGKSTLLRTFNKMFELYPEQRAEGEILLDGDNILNNSQDIALPGEYEPPPNRILSGSPGQVGDGGIKAGLWIFKCATAFTFVKGNAPAIFMWPGSTTTLYKPGETKADIEYKAQVKQLIEMNRITIANGDIGFNFTDGNLIKKIFVDKLTQAQLINGRLAIARLLVDNNSEGEYAIIPASVADKIAQRDASSIVLHSALSAEEQDEDDPYADFKVPDDLMWPTVYGRSVDRIRRSRRIRQSCAMPDATLCASYQAYGLRAKCRPDKAFTPNPAVVLLSTHIQFIGVSQPPPPLLLQFAPAPPCPARMLDRQMLPQFAAGGDASRTPSPLLPVNGKLRVDSQPTEEASCHTATMPTGKNQGATRNNHFFTGVAIISSLALRDFTGDKIIRHRYLLADSAAADGEFPGLADIQKREQQLANPIRFFQMRIARKHKTVDAKRGIFVDSRSDRRTIDHQRRPGTGAHSRCFY

SEQ ID NO: 40705 - protein, 451 aa, Homo sapiens
  DOMAIN (300)..(319): Ribonucleotide reductase large subunit proteins domain identified by eMATRIX, accession number BL00089I, p-value=7.882e- 16, raw score of 15.71
  DOMAIN (60)..(153): Transposase domain identified by PFam, accession name Transposase_8, E-value=3.2e-38, PFam score of 140.4
YFSPAAMKALDLLIKWTRSDQNLGGCNTGLIRPISPIVLIYKLVIGEQMIDVLGPEKRRRRTTQEKIAIVQQSFEPGMTVSLVARQHGVAASQLFLWRKQYQEGSLTAVAAGEQVVPASELAAAMKQIKELQRLLGKKTMENELLKEAVEYGRAKKWIAHAPLLPGDGDCTSFSDEPMTGWMAAAVVTLMIRMCFSVYTMLSESCQRMVIVGYGRRPDRQNLMIQGSKPSIFRQFCPDFEHLQEPYELLWEMYGNRGYLQLVSFMQKFIDQSIFANTQYDPSRFPSGKVPIQQLLKDLLTAYKFGVKTLYYQNTRDGAEDAQDDLVPSIQDDGCESGACLIRRASVASGSGCRMQRERLILATARICRPDKTRQRRIRHRMRRKMPYPALNSQQDTLMAYTTFSQTKNDQLKEPMFFGQPVNVARYDQQKYDIFEKLIEKQLFFLLASGRS

SEQ ID NO: 40706 - protein, 422 aa, Homo sapiens
MTLSCCSTDFENDSDFRPSRASAFTEYVRNNRLPEPVIRVKQPALARFSPDVSPLFVHFRADDDVTARLYARGYRLRPEFFKWRKIVLRPTPIMRAVARHPTPFMAISMIFCEGEYAIIPASVADKIAQRDASSIVLHSALSAEEQDEDDPYADFKVPDDLMWPTVYGRSVDRIRRSRRIRQSCAMPDATLCASYQAYGLRAKCRPDKAFTPHPAVVLLSTHIQFIGVRIPIADRELAALALKQASGDNVEAIFLLRAYRTTLAKLAVSEPLDTTGMRLERRISAVYKDIPGGQLLGPTYDYTHRLLDFTLLANGEAPTLTTADSEQQPSPHVFSLLARQGLAKFEEDSGAQPDDITRTPPVYPCSRSSRLQQLMRGDEGYLLALAYSTQRGYGRNHPFAGEIRSGYIDVSIVPACCFQNDE

SEQ ID NO: 40707 - protein, 635 aa, Homo sapiens
  DOMAIN (279)..(327): Ribonucleotide reductase large subunit proteins domain identified by eMATRIX, accession number BL00089H, p-value=5.500e- 38, raw score of 28.49
  DOMAIN (266)..(412): Ribonucleotide reductase domain identified by PFam, accession name ribonucleo_red, E-value=3.4e-84, PFam score of 224.8
MGFHHVAQAGFELLISSDLPALASQTARITAREARAPVEENKKAQLERDKQLSEQQKQAALAKEYKAQVKQLIEMNRITIANGDIGFNFTDGNLIKKIFVDKLTQAQLINGRLAIARLLVDNNSEGEYAIIPASVADKIAQRDASSIVLHSALSAEEQDEDDPYADFKVPDDLMWPTVYGRSVDRIRRSRRIRQSCAMPDATLCASYQAYGLRAKHPSFSSQGVPHCVPDVTLKIASEAPSPIVGGTLPVPMTSQLPSVTSMQLLLDLDTIPNEPLHYDWEALRESIKTHGLRNSTLSALMPSETSSQISNATNGIEPPRGYVSIKASKDGILRQVVPDYEHLHDAYELLWEMPGNDGYLQLVGIMQKFIDQSISANTNYDPSRFPSGKVPMQQLLKDLLTAYKFGVKTLYYQNTRDGAEDAQDDLVPSIQDDGCESGACLIRRASVASGSGCRMQRERLIRPTARICRPDKTRQRRIRHRMRRVLPGRATRRDFPSLEAGYQWLPGRGLVIEPQAQVMYQGVQQDDCTAASRARVSQSQGDDIQTRLGLHSEWRTAVHVIPTLDLNDYHDPHSTEIEEDGSTISDDAVKQRGEIKVGVTGNISQRVSLRGSVAWQKGSDDFAQTAGFLSMTVKW

SEQ ID NO: 40708 - protein, 442 aa, Homo sapiens
MRHVKPHGMLYNQAAKKHNWQTPSPERYTLAISIDSRRAGGKRADSCRKQYGLTTREEVFADRGFRLTARWCREANFPLPNAPRYPRTSTGRGICAFIKQRMIGSPEITCTSCGSLPVHSWRGSNGGRRFTFTDCISQLLSGIPRQRLNAPPRGKRQPRGVFTLMAHHRRTDAVSRCTFNRGDNQIRAMNCITTSKTFFRCVWVNTRRHRFNQAPFIEFNSAALQPRLACAWKPKAIIRTSAGNQTLNPLPDEDDGDHPARLTHGGTNQAPRHLSKHNPGAACKVWERLVTDTVPSTSPESSLGGCCTATCGLRSSRCAFFPPERCSPPKTANSSIGLIDPTHHLEPCCLINRCATSSRAATGKRRDLLSIADTGIRSNLQNGVEPQEESGRRRRRHGRKARPAPSWGSILDCNTVHTLLATDGCHPDHEVRCVRLRKFRRQ

SEQ ID NO: 40709 - protein, 123 aa, Homo sapiens
  DOMAIN (20)..(123): Aldehyde oxidase and xanthine dehydrogen domain identified by PFam, accession name Ald_Xan_dh_C, E-value=5.8e-42, PFam score of 140.3
  misc_feature (1)...(123): Xaa = X or * as defined in Table 2
ALTSVLPRPSVHWXSPKPRNVDWHIGRGVAIIMQKSGIPDIDQANCMIKLESDGTFIVHSGGADIGTGLDTVVTKLAAEVLHCPPQDVHVISGDTDHALFDKGAYASSGTCFSGNAARLAAEN

SEQ ID NO: 40710 - protein, 137 aa, Homo sapiens
  DOMAIN (11)..(110): Aldehyde oxidase and xanthine dehydrogen domain identified by PFam, accession name Ald_Xan_dh_C, E-value=3e-24, PFam score of 81.7
SMFPRIPFGYWHIGSRVAIICQKSGIPDIDQSNLHDQLESHGTFIVHSGGFDYGTGLDTVVLTKLAAEVLHCPPQDVHVISGDTDHALFDKGAYASSGTCFSGNAARLAAVNPRALAYSYGGGGGARVCIWGGWGRR

SEQ ID NO: 40711 - protein, 250 aa, Homo sapiens
MSIAYQEIPQNERLRLSDSSITSVVEYLLAVVARSVYTSPDMAIFREHHSYMSLSMAACRKIRPCPQELPRSIPHMISAMWSQSAPDHVVQHEREQQSGFGDGTESHSTSDSNTEVRQNCSPPIGGVRNHRALRGHQPAELEPENILKLLLMVAERKAHKGWYYSGDLCRMDEAGYIKITGRKKDIIVRGGENISSREVEDILLQHPKIPNACMGAMSDDRLGERSCAYVVLKAPHHSLSLEEVLCWRGC

SEQ ID NO: 40712 - protein, 331 aa, Homo sapiens
GSRILPGASITRSLEFIAGQAVKFNPLLPVSLVKRNTTLAPTTHTASPRALADSLMQLARQVSRLDSGQRSVVFVRWSRRSIIVDSHAGLITTQRALGQSDMYRGSLPISELRIIGPRHLRGVLRVVRLCPFSEPMLVECNPLLPSSLIIREPSLEPTLRFASRIALPDSTVLQIFSGVLPLSSGQAYIQFTYSETPRSTPREANSAHILSVHQWKCGHIVMAARVKVGYPQWTPISLSAGLSAVLYKPVERGGRCSHSCSTALSPQGFLSSLLRFISEGVFKSFTDKQMLRDFVTTRPALIVLLWQPLNVEGTSSTSHCIIMPTCNDHRD

SEQ ID NO: 40713 - protein, 54 aa, Homo sapiens
VKLIPAPPQPNDRAQRVSERGSGRAPNTQTASPRALADSLMQLARQVSRLESGQ

SEQ ID NO: 40714 - protein, 198 aa, Homo sapiens
  DOMAIN (58)..(87): kw REPLICATION REPB REPA INITIATION domain identified by eMATRIX, accession number DM00653A, p-value=7.207e-27, raw score of 20.40
  DOMAIN (42)..(84): Initiator RepB protein domain identified by PFam, accession name RepB_protein, E-value=0.0091, PFam score of 12.3
  misc_feature (1)...(198): Xaa = X or * as defined in Table 2
RVSRGRKVVFYRPEEDAGDEKGYESFPWFIKRAHSPSRGLYSVHINPYLIPFFIGLQNRFTQFRLSETKEITNPYAMRLYESLCQYRKPDGSGIVSLKIDWIIERYQLPQSYQRMPDFRRRFLQDFRLLGQTSVDRLLQLSQGQAVKGNQLLPVSLVKRKTTLAPNTQTASPRALADSLMQLARQVSRLESGQXAQRN

SEQ ID NO: 40715 - protein, 176 aa, Homo sapiens
  DOMAIN (1)..(146): Periplasmic binding proteins and suga domain identified by PFam, accession name Peripla_BP_like, E-value=3.5e-06, PFam score of 11.0
MRWKIDLARISKEIIDFYITQGVNRIGFIAGEDEPGKADIREVAFAEYGRLKQVVREEDIWRGGFSSSSGYELAKQILARKDYPKPLFVASDSIAIGVLRAIHERGLNIPQDISLISVNDIPTARFSFPPLSTVRIHSEMMGSQGVNLVYEKAPDGRALPLLVFVPSKLKLRGTTR

SEQ ID NO: 40716 - protein, 353 aa, Homo sapiens
  DOMAIN (3)..(24): Bacterial regulatory proteins lacI family proteins. domain identified by eMATRIX, accession number BL00356A, p-value=6.000e- 19, raw score of 12.51
  DOMAIN (59)..(316): Periplasmic binding proteins and suga domain identified by PFam, accession name Peripla_BP_like, E-value=1.2e-32, PFam score of 121.9
MATLKDIAIEAGVSLATVSRVLNDDPTLNVKEETKHRILEIAEKLEYKTSSARKLQTGAVNQHHILAIYSYQQELEINDPYYLAIRHGIETQCEKLGIELTNCYEHSGLPDIKNVTGILIVGKPTPALRAAASALTDNICFIDFHEPGSGYDAVDIDLARISKEIIDFYINQGVNRIGFIGGEDEPGKADIREVAFAEYGRLKQVGLRVLIKDDQNRNMFERGSAKIMPFFKTLLVELAPVFDSLDNKIIITGHTDAMAYKNNIYNNWNLSGDRALSARRVLEEAGMPEDKVMQVSAMADQMLLDSKNPQSAGNRRIEIMVLTKSASDTLYQYFGQHGDKVVQPLVQKLDKQQ

SEQ ID NO: 40717 - protein, 80 aa, Homo sapiens
HSRYQWLRFREYRLRQENPGQWRKNLHSAGPHESLSIGDDVYANGEKIDSPHRPALDALASNIALTAENFGDAHDSCNRQ

SEQ ID NO: 40718 - protein, 277 aa, Homo sapiens
MRPFGDYPDGGIDDLKISFSVPAAGVGPHFDQYDVFIIQGTERRRWRVGEKLQMKQHCPHPDLLQVDPFEAIIDEELEPGDILYIPPGFPHEGYALENAMNYSVGFRAPNTRELISGLPDYVLQRELGGNYYSDPDVPPRAHPADVLPQEMDKLREMMLELSTHPDPFKQWLGEFISQSRHDLDIAPPDPPYQPDEFSDALNQGKVLGALGGLRVLRMGDAVYPNGEKMDSPPRPALDALASTIALTAKNFGDALEDPSFLAMLAALVNSGYWFFEG

SEQ ID NO: 40719 - protein, 75 aa, Homo sapiens; identical to SEQ ID NO: 34209
  DOMAIN (28)..(75): kw TRANSCRIPTASE REVERSE II ORF2 domain identified by eMATRIX, accession number DM01354V, p-value=9.873e-21, raw score of 12.97
  misc_feature (1)...(75): Xaa = X or * as defined in Table 2

SEQ ID NO: 40720 - protein, 86 aa, Homo sapiens; identical to SEQ ID NO: 38987
  misc_feature (1)...(86): Xaa = X or * as defined in Table 2

SEQ ID NO: 40721 - protein, 61 aa, Homo sapiens
DFLPGIAYAREITGWLLHHVAGQRGRPSSPVQSSAEQLRSFPVWYAVCVSPALRHQSSVLQ

SEQ ID NO: 40722 - protein, 186 aa, Homo sapiens
  misc_feature (1)...(186): Xaa = X or * as defined in Table 2
MNGSLWSTQARISPAFLLKVNQTLMDYRTGRVQPAIPQSLPEALRLAADLAEQKQRLEQKMLMDAPKVEFAERVATASGVLIGNYAKVLGLGQNYLFTWLRDNGILIATGERRNVPKQDSISHAGHILSQCANLAATTSEYFIHKPHRLIAAETGYSQSTVVRAFREAVNKGILSVEIVIGDHREX

SEQ ID NO: 40723 - protein, 713 aa, Homo sapiens; identical to SEQ ID NO: 35792
  DOMAIN (50)..(96): kw TRANSCRIPTASE REVERSE II ORF2 domain identified by eMATRIX, accession number DM01354O, p-value=1.000e-40, raw score of 8.73
  DOMAIN (83)..(358): Reverse transcriptase domain identified by PFam, accession name rvt, E-value=1.5e-87, PFam score of 304.3

SEQ ID NO: 40724 - protein, 249 aa, Homo sapiens
  DOMAIN (170)..(222): ELEMENT TRANSPOSABLE INSERTION PROTEIN TRANSPOSITION DNA domain identified by eMATRIX, accession number PD02455C, p-value= 5.253e-11, raw score of 29.23
  DOMAIN (97)..(249): Integrase core domain identified by PFam, accession name rve, E-value=6.8e-27, PFam score of 97.0
MDQCPYKRGARELLCPFHHVETQREGAISEKVGPHQIPNLLDLGHDFDDWMDGRRSRHTDDTDVLLRIHHVIGELPTYGYRRVWALLRRQAELDEWTVKESNQRWCSDGFEFCCDNGERLRVTFALDCCDREALHWAVTTGGFNSETVQDVMLGAVERRFGNDLPSSPVEWLTDNGSCYRANETRQFARMLGLEPKNTAVRSPESNGIAESFVKTIKRDYISIMPKPDGLTAAKNLAEAFEHYNEWHPH

SEQ ID NO: 40725 - protein, 101 aa, Homo sapiens
  misc_feature (1)...(101): Xaa = X or * as defined in Table 2
RNRDRYKQWKQDFFHDSYNRQRCGCWRLYRRHHRXCRRYRRQQPHLCRLYESXKKSCFHCLYRSRFRLRVKYPRDMYSCLGTFLRSPVAIRIPLSRNQVKR

SEQ ID NO: 40726 - protein, 745 aa, Homo sapiens; identical to SEQ ID NO: 34211
  DOMAIN (220)..(265): kw TRANSCRIPTASE REVERSE II ORF2 domain identified by eMATRIX, accession number DM01354N, p-value=1.000e-40, raw score of 13.17
  DOMAIN (235)..(483): Reverse transcriptase domain identified by PFam, accession name rvt, E-value=6e-44, PFam score of 159.4

SEQ ID NO: 40727 - protein, 628 aa, Homo sapiens
  DOMAIN (87)..(132): kw TRANSCRIPTASE REVERSE II ORF2 domain identified by eMATRIX, accession number DM01354N, p-value=1.000e-40, raw score of 13.17
  DOMAIN (154)..(422): Reverse transcriptase domain identified by PFam, accession name rvt, E-value=3.2e-77, PFam score of 270.0
MGKDFMTKTPKAMATKAKIDKWDVIKLKSFCTAKETTIRVNRINKIDKPLARLIKKKREKNQIDTIKNDKGDITTDPTEIQTTIREYYKHLYTNKLENLQEMDKFLDTYTLPRLNQEEVETLNRPITGSEIVAIMNSLPTKKSPGPDGFTAEFYQRYKEELIILIPKPGQDTTKKENFRPISLMNIDAKILNKILAKRIQQHIKKLIHHDQVGFIPGMQGWFNIRKSINVIQHINRAKDKNHMTISIDAEKAFDKIQQPFMLKTLNKLGIDGTYFKIIRAIYDKPTANIILNGQKLEAFPLKTGTRQGCPLSPLLFNIVLEVLARAIRQEKEIKGIQLGKEEVKLSLFADDMIVYLENPTVSAQNLLKLISNFSKVSGYKINVQKSQAFLYTNKRQTESQIMSELPFTIASKRIKYLGIQLPRDVKDLFKENYKPLLKEIKEDTNKWKNIPCSWVGRINIVKMAILPKVTYRFNAIPIKLPMTFFTELEKTTLKFIWNQKRARIAKSILSQKNKAGGITLPDFKLYYKATVTKTAWYWYQNRDIDQWNRTEPSEITPHIYNYLIFDKPEKNKQWGKDSLFNKWCWENWLAICRKLKLDPFLTPYTKINSRWIKDLNVRPKTIKTLEET

SEQ ID NO: 40728 - protein, 274 aa, Homo sapiens
MQQVEGRGGGTFAHELLAVEYAGWISPAFRLKVNQTFIDYRTGRLQPAIPQSLPEALRLAADLAEQKQRLEQKMLMDAPKQWKQDFFHDSYNRQSAGHILSQCANLAATTSEYFIHKPHRLIAAETGYSQSTVVRAFREAVNKGILSVEIVIGDHRERRANLYRFTPSFLAFAQQAKNALIESKLKISSAATKTLNQRNYFHRKPNYHSDKLVSKSDRSFTPLQLGKVIGKGYDQGHSLDVAIEECGRQFEVNKARGKEISWVVVLELKLGAKQ

SEQ ID NO: 40729 - protein, 70 aa, Homo sapiens
ARACKIPNTASDRPIIVALQRKRSSPKMTQSAAGTCPTSCMIKKTVISAATIVMPRAHRKELTGLKALKG

SEQ ID NO: 40730 - protein, 378 aa, Homo sapiens
  DOMAIN (79)..(99): w LOW TRANSPOSASE SAPA 12K domain identified by eMATRIX, accession number DM00475B, p-value=1.300e-15, raw score of 12.12
  DOMAIN (12)..(105): Transposase domain identified by PFam, accession name Transposase_8, E-value=3.2e-38, PFam score of 140.4
MIDVLGPEKRRRRTTQEKIAIVQQSFEPGMTVSLVARQHGVAASQLFLWRKQYQEGSLTAVAAGEQVVPASELAAAMKQIKELQRLLGKKTMENELLKEAVEYGRAKKWIAHAPLLPGDGDRHTDDTDVLLRIHHVIGELPTYGYRRVWALLPRQAELDGMPAINAKRVYRIMRQNALLLERKPAVPPSKRAHTGRVAVKESNQRWCSDGFEFCCDNGERLRVTFALDCCDREALHWAVTTGGFNSETVQDVMLGAVERRFGNDLPSSPVEWLTDNGSCYRANETRQFARMLGLEPKNTAVRSPESNGIAESFVKTIKRDYISIMPKPDGLTAAKNLAEAFEHYNEWHPHSALGYRSPREYLRQRACNGLSDNRCLEI

SEQ ID NO: 40731 - protein, 706 aa, Homo sapiens
  DOMAIN (128)..(171): kw TRANSCRIPTASE REVERSE II ORF2 domain identified by eMATRIX, accession number DM01354T, p-value=1.000e-40, raw score of 9.48
  DOMAIN (14)..(250): Reverse transcriptase domain identified by PFam, accession name rvt, E-value=3.5e-44, PFam score of 160.2
MMPPLVIPWQTGSGVDLLQTPPDLQKRVLTVRRKTNNQKAIASTSTKRTPTQKPHPKVTNIKDQRTNDKNQMIISIDAEKPFNKIQLPFMLKTLNKLGIDGTYFKIIRAIYDKPTANIILNGQKLEAFPLKTGTRQGCPLSPLLFNIVLEVLARAIRQEKEIKGIQLGKEEVKLSLFADDMTVYLENPIVSAQNLLKLISNFSKVSGYKINVKKSQAFLYTSNRQTESQIMSELPFTIASKRIKYLGIQLTRDVKDLFKENYKPLLKEIKEDTNKWKNIPCSWVGRINIVKMAILPKVIYRFNAIPIKLPMTFFTELEKTTLKFIWNQKRACIAKSTLSQKNKAGGITLPDFKLYYKATVTKTAWYWYQNRDIDQWNRTEPSEITPHTYNYLIFDKPEKNKQWGKDSLFNKWCWENWLAICRKLKLDPFLTPYTKINSRWIKDLNVRPKTIKTLEENLGITIQDIGMGKDFMSKTPKAMATKDKIDKWDLIKLKSFCTAKETTIRANRQPTTWEKIFATYSSDKGLISRIYNELKQIYKKKTNNPIKKWAKDMNRHFSKEDIYAAKKHMKKCSSSLAIREMQIKTTMRYHLTPVRMAIIKKSGNNRASLLSGESSVVHHCIWTSASSKWEQNSVGPKPFLYLCDCTTLVTSSGQQSEILSQKKEEEEKKKKKKKKKKKKEEEEEEEEEEEEEEERRGGGKERGYVN

SEQ ID NO: 40732 - protein, 69 aa, Homo sapiens
  misc_feature (1)...(69): Xaa = X or * as defined in Table 2
SLETRKSAPCTIMFRICIAGCCWLPCGTPTSVLTKRWHXPXVIFLWSRRIHTASCLPSQRSITGHVHHQ

SEQ ID NO: 40733 - protein, 540 aa, Homo sapiens; identical to SEQ ID NO: 38201
  DOMAIN (35)..(78): kw TRANSCRIPTASE REVERSE II ORF2 domain identified by eMATRIX, accession number DM01354T, p-value=1.000e-40, raw score of 9.48
  DOMAIN (2)..(157): Reverse transcriptase domain identified by PFam, accession name rvt, E-value=1.4e-06, PFam score of 23.8

SEQ ID NO: 40734 - protein, 1229 aa, Homo sapiens
  DOMAIN (603)..(619): REGULATORY PROTEIN ROP SIGNATURE domain identified by eMATRIX, accession number PR00835B, p-value=8.554e-18, raw score of 11.52
  DOMAIN (1004)..(1224): Aminoglycoside phosphotransferase domain identified by PFam, accession name APH, E-value=1.9e-88, PFam score of 307.2
  misc_feature (1)...(1229): Xaa = X or * as defined in Table 2
MIESILEATRGLNADTTPFYLGAKKGSLGAQKLANTCFNEIEKQAQAADKMKEQEDLAKVVSKEESIYFDEPVELRSSSFSSWDDSSDSYWKKETSKDTETVLKTTGYSDRPTARRKPDYEPVENTDEAQKKFGNVKAISSDMYFGRQSQADYETRARLERLSASSSISSADLFEEPRKQPAENKDPLNFFDPVWMPNQPWFLAPRGHCKVHPGDRCRQRSGSFSAMDRFRWSATMIGLSLAVFGILHALAQAFVTGPATKRFGEKQAIIAGMAADALGYVLLAFATRGWMAFPIMILLASGGIGMPALQAMLSRQVDDDHQGQLQGSLAALTSLTSIIGPLIVTAIYAASASTWNGLAWIVGAALYLVCLPAFASRCMEPGHLDLNGSRRHLANGFTTPRIGANQFLRRTVNAQTNPWQNISIASAISSSRTRRISGSVGSWPRVRMIVLLSLRTRLGWRGCLTANVKRLLLQNVCDLSNNMNGLRFPCFVKSGNAEVSALHHYVPDLHRRMLLATLWNTYICINEALALTLSDFSLVPPHPYRQLFTLTTFHNRACSSSVTRIVSILSRFIGIITPMNRNPPYTEASVTKQEKTALNMARFIRSQTLSLLEKLNELDADEQADICESLHDHADELYRSCLARFGDDGNSYDPWIYAKLACLQVEGRGGGTFAHELLAVEYAGWISPAFRLKVNQTFIDYRTGRLQPAIPQSLPEALRLAADLAEQKQRLEQKMLMDAPKVEFXERVATASGVLIGNYAKVLGLGQNYLFTWLRDNGILIATGERRNVPKQEYISRGYFTLKETVIDTSNGSRISFTTRITGKGQQWLMKRLLDAGVLDDVAIKNKKSQVKKTKRSVSGGAGTTSLKKLTSWIAKAKAKADNLRLSKKRTQKHEFKQKVEAAARKYAYLKNKRSPDIGGISNFDNLPHCMTILYAGRIVAGITGATGAVAGAYIADITDGEDRARHFGLMSACFGVGDHVGQEITAEAIKVLKAISDVRSNVKFDFENHLIGGAAIDLQGGGGKPRATIYRLYGKPDAPELFLKHGKGSVANDVTDEMVRLNWLTEFMPLPTIKHFIRTPDDAWLLTTAIPGKTAFQVLEEYPDSGENIVDALAVFLRRLHSIPVCNCPFNSDRAQSRMNNGLVDASDFDDERNGWPVEQVWKEMHKLLPFSPDSVVTHGDFSLDNLIFDEGKLIGCIDVGRVGIADRYQDLAILWNCLETAFSKIWY

SEQ ID NO: 40735 - protein, 352 aa, Homo sapiens
  DOMAIN (99)..(124): 7 kw REVERSE TRANSCRIPTASE RNA POLYMERASE domain identified by eMATRIX, accession number DM00895E, p-value=3.556e-11, raw score of 15.72
  DOMAIN (70)..(238): Reverse transcriptase domain identified by PFam, accession name rvt, E-value=7e-19, PFam score of 76.2
MDKFLDTYTLPRLKQEEVESLYRPITGSEIEAIINSLPTKKSPGPDGFTAEFYQRYKEELVPFLLKLFQSIEKEGILPNSFYEASIILIPKPGRDTTKKENFRPISLMNIDAKILNKILTNRIQQHIKKLIHHDQVGFIPGMAIRQEKEIKGIQLGKEEVKLSLFADDMIVYLENPIVSAQNLLKLISNFSKVSGYKINVQKSQAFLYTNNRQTESQIMSELPFMIASKRIKYLGIQLTRDVKDLFKENYKPLLNEIKEDTNKWKNIPCSWVGRINIVKMAILPKVIYRFNAIPIKLPMTFFTELEKTTFKFIWNQKRARIAKSILSQKNKAEGIMLPDFKLYYKATVTKTA

SEQ ID NO: 40736 - protein, 754 aa, Homo sapiens; identical to SEQ ID NO: 32653
  DOMAIN (208)..(254): kw TRANSCRIPTASE REVERSE II ORF2 domain identified by eMATRIX, accession number DM01354O, p-value=1.000e-40, raw score of 8.73
  DOMAIN (241)..(418): Reverse transcriptase domain identified by PFam, accession name rvt, E-value=6.7e-11, PFam score of 49.6

SEQ ID NO: 40737 - protein, 679 aa, Homo sapiens
MELGPWLQEAPTADGGTATPAESFVTAQNCNRETSCDRLRELHVSEVFTVITETREAAAVKLISVVVKRFTDVCLFIRVQLVEFLQKHFTKHGNRRPFMLLLRSQTFCSSSRFTFARVSVIHSANHRVLNDRSTIMRTRGQDPTLPEMRRVRLLEMADAMDMFCQGLHGLQRGHPDAAGSEKNHNGEGHPASRRERQQDVAQRVGRHAGDNGLLLAETFGGGTSDEGLSEGVQDSEYRKRQADHRRAPAKAVLAENDPERCRHLSYELHDKEDSHKCGDDSHAPRPPEGADWDKVNFTLCSGPRLEAALASKDREILRLLKDVQHLQSSLQELEEASANQIADLERQLTAKSEAIEKLEEKLQAQSDYEEIKTELSILKAMKLASSTCSLPQGMAKPEDSLLIAKEAFFPTQKFLLEKPSLLASPEEDPSEDDSIKDSLGTEQSYPSPQQLPPPPGPEDPLSPSPGQPLLGPSLGPDGTRTFSLSPFPSLASGERLMMPPAAFKGEAGGLLVFPPAFYGAKPPTAPATPAPGPEPLGGPEPADGGGGGAAGPGAEEEQLDTAEIAFQVKEQLLKHNIGQRVFGHYVLGLSQGSVSEILARPKPWRKLTVKGKEPFIKMKQFLSDEQNVLALRTIQVRQRGECPRGPVPAGHHARSRASGLGAEDTRSGFKAQLYHHLAV

SEQ ID NO: 40738 - protein, 802 aa, Homo sapiens
  DOMAIN (204)..(245): kw TRANSCRIPTASE REVERSE II ORF2 domain identified by eMATRIX, accession number DM01354I, p-value=1.000e-40, raw score of 15.55
  DOMAIN (415)..(686): Reverse transcriptase domain identified by PFam, accession name rvt, E-value=2.5e-69, PFam score of 243.8
MELKTKARELREECRSLRSPCNQLEERVSAMEDEMNEMKREGKFRDKRIKRNEQSLQEIWDFVKRPNLRLIGVPESDGENGTKLENTLQDIIQENFPNLARQANIQIQEIQRTPQRYSSRRATPRHIIVRFTKVEMKEKMLRAAREKAPHHTYSKIDHILGSKVLLSKCKRTEIITNYLSDHSAIKLELRIKNLTQNHSTTWKLNSLLLNDYWVHNEMKAEIKMFFETNENKDTTYQNLWDTFKAVCRGKFIALNAHKRKQERSKIDTLTSQLKELEKQEQTHSKASRRQEITKIRGELKEIEAQKTLQKINEYRSWFFERINKIDRPLARLIKKKREKNQIDTIKNDKGDITTDPTEIQITIREYYKHLYANKLENLEEMDKFLDTYTLPRLNQEVVESLKRPITGAEIVAIINSLPTKKSPGPDGFTAEFYQRDITKKENFRPISLMNVDAKILNKILAKRIQQHIKKLIHHDQLGFIPGMQGWFNIPKSINVIQHINRAKDKNHMIISIDAEKAFDKIQQPFMLKTLNKLGIDGTYFKILRAIYDKPTANIILNGQKVEAFPLKTGTRQGCPLSPLLFNIVLEVLARAIRQEKEIKGIQLGKEEVKLSLFADDMIVYLENPIVSAQNLLKLISNFSKVSGYKINVQKSQAFLYTNNRQTESQIMSELPFTIASKRIKYLGIQFTRDVKDLFKENYKPLLKEIKEDTNKWKNIPCSWVGRNNIVKMAILPKVIYRFNAIPIKLPMPFFTELEKTTLKFLWNQKRARIAKSILSQKNKAGGITLPDFKLYYKATVTKTAWY

SEQ ID NO: 40739 - protein, 632 aa, Homo sapiens
  DOMAIN (10)..(65): kw TRANSCRIPTASE REVERSE II ORF2 domain identified by eMATRIX, accession number DM01354Q, p-value=1.000e-40, raw score of 9.23
  DOMAIN (1)..(238): Reverse transcriptase domain identified by PFam, accession name rvt, E-value=2.7e-52, PFam score of 187.1
MNIDAKILNKILANRIQQHIKKLIHHDQVGFIPGRQGWFNICKSINVIQHINRAKDKNHMIISIDAEKAFDKIQQLFMLKTLNKLGIDGTYFKIIRAIYDKPTANIILNGKKLEAFPLKTGTRQGCPLSPLLFNIVLEVLARAIRQEKEIKGIQLGKEEVKLSLFADDMIVYLENPIVSAQNLLKLISNFSKVSGYKINVQKSQAFLYTNNRQTESQIMSELPFTIASKRIKYLGIQLTRDVKDLFKENYKPLLKEIKEDANKWKNIPCSWVGRINIVKMAILPKVIYRFNAIPIKLPMTFFTELEKTTLKFIWNQKRAHITKAILSQKNKARGITLPDFKLYYKATVTKTAWYWYQNRDIDQWNRTQPSEITPHIYNYLIFDKPDKNKQWGKGSLFNKWCWENWLAICRKLKLDPFLTPYTKINSRWIKDLNVRPKTTKTLEENLGITIQDIGMGMDFMSKTPKAMATKDKIDKWDLIKLKSFCTAKETTIRVNRQPTKWEKIFTTYSSDKGLISRIYNELKQIYKKKTNNPIKKWAKDMNRHFSKEDIYAAKKHMKKCSPSLAIREMQIKTTMRYHLTPVRMAIIKKSGNNRCWRGCGEIGTLLHCWCDKLDEENMAHIHNGILCIHKKE

SEQ ID NO: 40740 - protein, 1356 aa, Homo sapiens
  DOMAIN (91)..(136): kw TRANSCRIPTASE REVERSE II ORF2 domain identified by eMATRIX, accession number DM01354N, p-value=1.000e-40, raw score of 13.17
  DOMAIN (175)..(450): Reverse transcriptase domain identified by PFam, accession name rvt, E-value=5.1e-89, PFam score of 309.1
LEKQEQTHSKASRRQQITKIRAELKEIETQKTLQKINESRSWFFERINKIDRPLARLIKKKREKNQIDTIKNDKGDITTDPTEIQTTIREYYKHLYANKLENLEEMDKFLDTYTLPRLNQEEVESLNRPITGSEIVAIINSLPTKKSPGPDGFTAEFYQRYKEELVPFLLKLFQSIEKEGILPNSFYEASIILIPKPGRDTTKKENFRPISLMNIDAKILNKILANRIQQHIKKLIHHDQVGFIPGMQGWFNIRKSINVIQHINRAKDKNHMIISIDAEKAFDKIQQPFMLKTLNKLGIDGTYFKIIRAIYDKPTANIILNGQKLEAFPLKTGTRQGCPLSPLLFNIVLEVLARAIRQEKEIKGIQLGKEEVKLSLFADDMIVYLENPIVSAQNLLKLISNFSKVSGYKINVQKSQAFLYTNNRQTESQIMGELPFTIASKRIKYLGIQLTRDVKDLFKENCKPLLKEIKEDTNKWKNIPCSWVGRINIVKMAILPKVIYRFNAIPIKLPMTFFTELEKTTLKFIWNQKRARIAKSILSQKNKAGGITLPDFKLYYKATVTKTAWYWYQNRDIDQWNRTEPSEIMPHIYNYLIFDKPEKNKQWGKDSLFNKWCWENWLAICRKLKLDPFLTPYTKINSRWIKDLNVKPKTIKTLEENLGITIQDIGVGKDFMSKTPKAMATKDKIDKWDLIKLKSFCTAKETTIRVNRQPTTWEKIFATYSSDKGLISRIYNELKQIYKKKTKNPIKKWAKDMNRHFSKEDIYAAKKHMKKCSSSLAIREMQIKTTMRYHLTPVRMAIIKKSGNNRNMDGAGGHYPKQTNEGTENQIPDVLTCKWELNDKNIWTQRGEQHTLEPVGGEGELRKDNHSTKNDQYDNRHFQLAVGNGLMAKTFMVSFFYKASAYVVPTGELPDLDIIQLKQFGNALSHLTVGTSVTQIQNLNTMGIIGSQDSRDQLATLKCQGKGDPKYQCDPPVKVGANGGQIINEVLAQVQLTVGPKTNGYWRMTVDYHKLNQDVTPIVAAVPDVVSLLEVISTLQKDFYCFFLLQNITLVHYIDGIMLTESSEQEVADTLDLLTSIRGLMECLIHHHGIPHSIASDQGPHFMAKELWEWAHAHGIHWSYHIPHHPEAAGLIEWRNDLLKSQLQHQLGDNALQGWGKVLQKAMYALNQHPIYVTVFPIARIHKSWNQGVEVEVASLTITPSDPLAKFLLSVPTTLHSPGLEVLVPAGGMLPPGDTTIPLNWKLILPPGHFGLLLPLSQQAKKAVTVLARVIDPDYQDEISLLLHNGGKEEYAWNSGDPLGVSWYYHALSLRSMRTTTVQSRQDYKWPRYLRNEDLGHVTREKKHNLLRCLLKAKGI

SEQ ID NO: 40741 - protein, 1057 aa, Homo sapiens
  DOMAIN (57)..(104): kw TRANSCRIPTASE REVERSE II ORF2 domain identified by eMATRIX, accession number DM01354V, p-value=1.000e-40, raw score of 12.97
  DOMAIN (660)..(753): Transposase domain identified by PFam, accession name Transposase_8, E-value=3.2e-38, PFam score of 140.4
MIVYLKNPIVSAQNLLKLISNFSKVSGYKINVEKSQAFLYTNNRQTESQIMSELPFTLASKRIKYLGIQLTSDVKDLFKENYKPLLKEIKEDTNKWKNIPCSWVGRINIVKMAILPKPPDNHLHQYHPKEADSWAPTSTTESEPLWKINPALPEETVMASPEAVARKDNVESPQDPSPTPLFASRPITGLKSQWAPRVPECIISTDILSNWQNPHIGSPTGGVRAVMVGKAKWKPLEVPLPRKIVNQKQCHIPGGIAEISAAIKALKDAGAMIPTISLFDSTQPVQKTGGFWRMTVDYCKLNQVVSPIAAAVPDVVSLLEQINTPSGVYQLSSLVFNLQRDLDRLSLPQDITLVHYIDNTILIGSSDREVANTLDLLRIYRVTGKAASFEWGLQQEKALQQVQAALPLAPYDPADPMVLEVSVADRDAVWSLWQPAIGESQWRPPGFWSKALFSADNCSPFEKQLLACYWALVETERLIMGQVTRGPELPIMNWVLSDPLAIKWVMNSNIPSSSGNGIYVVRHQQVLRAQGDQPATWWQVDYIGSLPSRKGQQLALTGIDTYSRYRFTYPVRNAFIKTTIRGLTECFIHHHASTACNSVCPDYAELHVRSSKDCDSAPVRIARMLILADKPARISSRSDSVRLVIGEQMIDVLGPEKRRRRTTQEKIAIVQQSFEPGMTVSLVARQHGVAASQLFLWRKQYQEGSLTAVAAGEQVVPASELAAAMKQIKELQRLLGKKTMENELLKEAVEYGRAKKWIAHAPLLPGDGDCTSFSDEPMTGWMAAAVVTLMIRMCFSVYNHVYRRAANVWLSSRYGDASQNRQNVNDMACESMPNRVLPESMPRDALLPEAKNLLYRPSRPGTYQAEWPVKEKQSSDGALTGSSSAVITERDCVVTFALDCCDLEWLTDNGSCYRANETRQFARMLGLEPKNTAVRSPESNGIAESFVKTIKRDYISIMPKPDGGKSTGELRSSVCYAIKTGVFDYAKQFPSSRNLEKFGEARQDLTIKELAEKFLALKETEVAKTSLNTYRAVIKNILSIIGEKNLASSINKEKLLE

SEQ ID NO: 40742 - protein, 514 aa, Homo sapiens; identical to SEQ ID NO: 40460
  DOMAIN (207)..(254): kw TRANSCRIPTASE REVERSE II ORF2 domain identified by eMATRIX, accession number DM01354V, p-value=1.000e-40, raw score of 12.97
  DOMAIN (40)..(220): Reverse transcriptase domain identified by PFam, accession name rvt, E-value=2.7e-05, PFam score of 5.6

SEQ ID NO: 40743 - protein, 336 aa, Homo sapiens
  DOMAIN (57)..(104): kw TRANSCRIPTASE REVERSE II ORF2 domain identified by eMATRIX, accession number DM01354V, p-value=1.000e-40, raw score of 12.97
  DOMAIN (1)..(220): Reverse transcriptase domain identified by PFam, accession name rvt, E-value=0.00018, PFam score of -6.3
MIVYLENPIVSAQNLLKLISNFSKVSGYKINVQKSQAFLYTNNRQTESQIMSELPFTIASKRIKYLGIQLTRDVKDLFKENYKPLLKEIKEDTNKWKNIPWLMGRKNQYRENGHTAQVLEVTARAIREEKERKDIHIGRAEVKLSLFADDMIVYLENPIVSAQNLLKLVSNFSKVSGYKINEQKSQAFLFTNNRQTESQIMSELPFTIATKRIKYLGIQFTRDVKDLFKENYKPLLKEIREGTNKWKNIPCSWIGRINIMKMAILPKVIYRFNIIPIKLPLTFFTELEKTTLNFRWNQKRAHIAKTILNKKNKAGGIMLPDFKLYYKATVTKTSWY

SEQ ID NO: 40744 - protein, 747 aa, Homo sapiens; identical to SEQ ID NO: 35787
  DOMAIN (322)..(368): kw TRANSCRIPTASE REVERSE II ORF2 domain identified by eMATRIX, accession number DM01354O, p-value=1.000e-40, raw score of 8.73
  DOMAIN (355)..(630): Reverse transcriptase domain identified by PFam, accession name rvt, E-value=1.4e-76, PFam score of 267.8

SEQ ID NO: 40745 - protein, 893 aa, Homo sapiens
  DOMAIN (57)..(100): kw TRANSCRIPTASE REVERSE II ORF2 domain identified by eMATRIX, accession number DM01354T, p-value=1.000e-40, raw score of 9.48
  DOMAIN (1)..(179): Reverse transcriptase domain identified by PFam, accession name rvt, E-value=4.8e-17, PFam score of 70.0
MIISIDAEKAFDKIQQHFMLKTLNKLGIDGTYLKIIRAIYDKPTANIILSGQKLEAFPLKTGTRQGCPLSPLLFNIVLEVLARAIRQEKEIKGIQLGKEEVKLSLYADDMIVYLENPIVSAQNLLKLISNFSKVSGYKINVQKSQAFLYTNNRQTESQIMSELPFTIASKRIKYLGIQLTRDVKDLFKENYKPLLNEIKEDTNKCKYIPCSWVGKINIMKMAILPKVIYRFNAIPIKLPMTFFTELEKTTLKFIWNHKGARITKSILSQKNKAGGIRLPDFKLYYKTTVNKTACYWYQNRDRDQWNRTEPSEITPHIYNYLIFDKPDKNKQWGKDSLFNKWCWENWLAICRKLKLDPFFTPYTKINSRWIKDLNVRPKTIKTLEENLGITIQDIGVGNDFMSKTPKAMATKAKIDKWNLIQLKSFCTAKETTIRVNRQPTKWEKIFATYSSDKGLTSRIYNELKQIYKKKTNNPIKKWVKDMNRHFSKEDIYAAKKHMKKCSPSLAIREMQIKTTMRYHLTPVRMAIIKKSGNNSSLNNVMKGNDELGDSVSRFQKQTLSLKSAKIALCESLISCRERAKIVEKQTQALIMRVADLKQKVHAQPCQAASFKWVPEQEKALQQVKAAVQAALPLGPYDPADPMVLEVSVADRGALWSLWQASMGESQRMSLGFWSKALPSSAYNYSSFKRQLLACYWVGTAIKWVLHSSIPSPNGSGIHVTGLQQVLKAQPALMVSLGIPYEQLTEEERTRACLTDGSVKYASTTRNGTAEALYPLSRITLSKADLAMAAAECPVSHQLKPTLSPQYGTIHQGDQPATWWQVDYIGTLPLWKGQRFVLTGIDTYFRYEFAYPVNNASVKPTICGLTECLTYHHGIPHGIASEQGIHFTAKEVWQ

SEQ ID NO: 40746 - protein, 101 aa, Homo sapiens
  misc_feature (1)...(101): Xaa = X or * as defined in Table 2
MRKPTLGRTYPSRPPSPAAARGASRAALGPGHGLETRKSAPCTIMFRICIAGCCWLPCGTPTSVLTKRWHXPXVIFLWSRRIHTASCLPSQRSITGHVHHQ

SEQ ID NO: 40747 - protein, 346 aa, Homo sapiens
  DOMAIN (209)..(229): w LOW TRANSPOSASE SAPA 12K domain identified by eMATRIX, accession number DM00475B, p-value=1.300e-15, raw score of 12.12
  DOMAIN (151)..(235): Transposase domain identified by PFam, accession name Transposase_8, E-value=1.7e-25, PFam score of 98.1
  misc_feature (1)...(346): Xaa = X or * as defined in Table 2
MARKDIQVLIIGTYEYYLVKGEKVLTILAIKLKVLKWSGYPGLCLPEYHLGEVEGEDDMEVTAMDGRCLEVKQGSERLQVADQECVGDGSGRLCPFDRCECEQRLQLVRPGLCNPRAIALTTKPQSPSPNIKRLVIGEQMIDVLGPEKRRRRTTQEKIAIVQQSFEPGMTVSLVARQHGVAASQEGSLTAVDAGEQVVPASELAAAMKQIKELQRLLGKKTMENELLKEAVEYGRAKKWIAHAPLLPGDGERTDDWMDGRRSRHTDDTDVLXSASWRQQVQRQEQPVLRRRQQXDFLLGWLLHHVAGQRGRPSSPVQSSAEQLRSFPVWYAVCVSPALRHQSSVLQ

SEQ ID NO: 40748 - protein, 927 aa, Homo sapiens; identical to SEQ ID NO: 39008
  DOMAIN (491)..(536): kw TRANSCRIPTASE REVERSE II ORF2 domain identified by eMATRIX, accession number DM01354N, p-value=1.000e-40, raw score of 13.17
  DOMAIN (576)..(851): Reverse transcriptase domain identified by PFam, accession name rvt, E-value=5.7e-86, PFam score of 299.0

SEQ ID NO: 40749 - protein, 815 aa, Homo sapiens
  DOMAIN (10)..(65): kw TRANSCRIPTASE REVERSE II ORF2 domain identified by eMATRIX, accession number DM01354Q, p-value=1.000e-40, raw score of 9.23
  DOMAIN (1)..(562): Reverse transcriptase domain identified by PFam, accession name rvt, E-value=8.6e-48, PFam score of 172.2
MNIDAKILNKVLANQIQQHIGQLIHHDQVGFIPRMQGWFNICKSINVIQHVNRINDKNHMIISLDLEKAFDKIQQPFMLKTLNKLGIDGKYLKTIRAIYDKPTANIILNGQKLEAFPLKTGTRQGCPLSPLLFNIVLEVLARAIRQEKEIKGIQLRKEEVKLSLFADDMIVYLENPIISAPNLLKLISNFSKVSGYKINVQKSQAFLYTNKRQTESQIMSELPLKTASKRIKYLGIQVTRVVKDLFKENYKPLLSEIKEDTNKWKSIPCSWVGRIGIVKMAKLPKSLNAVLREPLLSSGLSGTFKSAEAVCCLLFYYALPSEVESIEAVGLAELWWALPSLYFQATLFTLPITRLKYQQAPRVKLEAYGGQVINEALAQVGLTVGLLGPWAYPVVISPVSEYIIGIDIVSSWQNPHIGFLTAAVPDVVSLLEQINTSPGTWYAAIDLVNAFFSIVVHKAHQKKFAFSWQSQQYTFTLLPQGYINSQALCHNLIWRELDRFLLPQDITVVHYIEDIMLIGSSEQEIANTLDLLVRHLCVRGWETNLTKIKGTSTSVKFLGAQWCGVCLDIPSKVKNNLLHLALPTTKKEAQHLVGLFGFWRRYILHLVTMQPELPIMNWVLSDPSSHKVGYAQQHSIIKWKWYKHDRAQAGPEGTNELATATAECPVCQQQRPTLRPSYGTIPWGDHPATWWQVNYTGPIPSWKGPRFVLTGIDTYSGYGFIYPACNAYAKTTIYGLMESVIHRHGIPHSIAFEQGTHFMAKEFGSGLTLMKFTGLNHVSHHLEAAGLIEWWNGLLKSQLQCQIGDNALQGWGKVL

SEQ ID NO: 40750 - protein, 476 aa, Homo sapiens
  DOMAIN (234)..(281): kw TRANSCRIPTASE REVERSE II ORF2 domain identified by eMATRIX, accession number DM01354V, p-value=1.000e-40, raw score of 12.97
  DOMAIN (371)..(441): Ribosomal protein L11 domain identified by PFam, accession name Ribosomal_L11, E-value=6.1e-24, PFam score of 90.3
MDEAGNYHSKQTITRTENQTQHVLTHSEETVAQEDDVPLTRSWLLKALKPQEVQSRAKSPDGQYKEEEKEKDSRGCSLLDFPSMPASHCADKAKSDRSGEEVGSGSRSTSWYASKSFQTPPPHKPSELQIINLLNSIAETSAAGVLEVLARAIRQEKEIKGIQLGKEEFKLSLFADDMIVYLENPIVSAQNLLKLISNFSKVSGYKINVQKSQAFLYTNNRQTESQIMSELPFTIASKRIKYLGIQLTRDLKDLFKENYKPLLNEIKEDTNKWKNIPCSWVGRINIVKMAILPKRDVTANCPGSWRFEQRIGQNTQQRKNEATKERKQLSRLSARRRPRCNFLRSSRIRVHPTPAASTMPPKFHPNEIKVVYFTCTGVEVGATSALAPKIGPAGLSPKEVGDDIAKVTGDWKGLRITVKLTIQNRQAQIEVVPSASALIIKRNYQETERNRKTLNTGGISLFMRSSTLLDRCSTDP

SEQ ID NO: 40751 - protein, 826 aa, Homo sapiens; identical to SEQ ID NO: 34822
  DOMAIN (465)..(511): kw TRANSCRIPTASE REVERSE II ORF2 domain identified by eMATRIX, accession number DM01354O, p-value=1.000e-40, raw score of 8.73
  DOMAIN (498)..(773): Reverse transcriptase domain identified by PFam, accession name rvt, E-value=3e-80, PFam score of 280.0

SEQ ID NO: 40752 - protein, 581 aa, Homo sapiens; identical to SEQ ID NO: 37441
  DOMAIN (65)..(110): kw TRANSCRIPTASE REVERSE II ORF2 domain identified by eMATRIX, accession number DM01354N, p-value=1.000e-40, raw score of 13.17
  DOMAIN (108)..(360): Reverse transcriptase domain identified by PFam, accession name rvt, E-value=9.2e-53, PFam score of 188.7

SEQ ID NO: 40753 - protein, 180 aa, Homo sapiens
AGHILSQCANLAATTSEYFIHKPHRLIAAETGYSQSTVVRAFREAVNKGILSVEIVIGDHRERRADLYRFTPSFLVFAQQAKNALIESKSKILFSGNQGAVAGAYIADITDGEDRARHFGLMSACFGVGMVAGPVAGGLLGAISLHAPFLAAAVLNGLNLLLGCFLMQESHKGERRGELL

SEQ ID NO: 40754 - protein, 510 aa, Homo sapiens
  DOMAIN (459)..(498): BIR repeat proteins domain identified by eMATRIX, accession number BL01282B, p-value=7.500e-36, raw score of 30.49
  DOMAIN (213)..(273): Rop protein domain identified by PFam, accession name Rop, E- value=4.5e-44, PFam score of 159.9
MPLRAFNPVSSFRWARGMTIVAALMTVFFIMQLVGQVPAALWVIFGEDRFRWSATMIGLSLAVFGILHALAQAFVTGPATKRFGEKQAIIAGMAADALGYVLLAFATRGWMAFPIMILLASGGIGMPALQAMLSRQVDDDHQGQLQGSLAALTSLTSIIGPLIVTAIYAASASTWNGNRACSSSVTRIVSILSRFIGIITPMNRNPPYTEASVTKQEKTALNMARFIRSQTLTLLEKLNELDADEQADICESLHDHADELYRSCLARFGDDGNSYDHDYAKLACLQVEGRGGGTFAHELLAVEYAGWISPAFRLKVNQTFIDYRTGRLQPAIPQSLPEALRLAADLAEQKQRLEQKMLMDAPKVEFAERVATASGVLIGNYAKVLGLGQNYLFTWLRDNGILIATGERRNVPKQEYISRGYFTLKETVIDTSNGSRISFTTRITGKEISTEEQLRRLQEEKLCKICMDRNIAIVFVPCGHLVTCKQCAEAVDKCPMCYTVITFKQKIFMS

SEQ ID NO: 40755 - protein, 238 aa, Homo sapiens
  misc_feature (1)...(238): Xaa = X or * as defined in Table 2
LVTSYSLLPRHPDRGRGYHFDMGVWIKNXIKPMSXREQLXPWLPLKRSLICFLSAHFWLVVRRPKRWCKPVQVSATFTVIADNNLYRQNSFVYSFTECTNDGXLAITSFCRDQAVRLVNEVFTGCCREICTCATGYARRYGIDRSVLQSRPIHSQKKXNRSSLYSSGKXLXPALQCWWFCTTSLPVIRVVKEILLPLLVSITVSLRVKYPRDMYSCLGTFLRSPVAIRIPLSRNQVKR

SEQ ID NO: 40756 - protein, 238 aa, Homo sapiens; identical to SEQ ID NO: 40755
  misc_feature (1)...(238): Xaa = X or * as defined in Table 2

SEQ ID NO: 40757 - protein, 238 aa, Homo sapiens; identical to SEQ ID NO: 40755
  misc_feature (1)...(238): Xaa = X or * as defined in Table 2

SEQ ID NO: 40758 - protein, 238 aa, Homo sapiens; identical to SEQ ID NO: 40755
  misc_feature (1)...(238): Xaa = X or * as defined in Table 2

SEQ ID NO: 40759 - protein, 752 aa, Homo sapiens
  DOMAIN (645)..(674): kw REPLICATION REPB REPA INITIATION domain identified by eMATRIX, accession number DM00653A, p-value=7.207e-27, raw score of 20.40
  DOMAIN (200)..(307): ParA family ATPase domain identified by PFam, accession name ParA, E-value=5.2e-23, PFam score of 89.9
MKLMETLNQCINAGHEMTKAIAIAQFNDDSPEARKITRRWRIGEAADLVGVSSQAIRDAEKAGRLPHPDMEIRGRVEQRVGYTIEQINHMRDVFGTRLRRAEDVFPPVIGVAAHKGGVYKTSVSVHLAQDLALKGLRVLLVEGNDPQGTASMYHGWVPDLHIHAEDTLLPFYLGEKDDVTYAIKPTCWPGLDIIPSCLALHRIETELMGKFDEGKLPTDPHLMLRLAIETVAHDYDVIVIDSAPNLGIGTINVVCAADVLIVPTPAELFDYTSALQFFDMLRDLLKNVDLKGFEPDGTQAKMTQGERRNVPKQEYISRGYFTLKETVIDTSNGSRISFTTRITGKDVVRTTSIVMLAKVTFLSCITMSDFTFSGYELACFVTHSGLSRSAGHILSQCANLAATTSEYFIHKPHRLIAAETGYSQSTVVRAFREAVNKGILSVEIVIGDHRERRANLYRFTPSFLAFAQQAKNALIESKLKISSAATKCDNLKTCHTSHGSVMAETAVINHKKRKNSPRIVQSNDLTEAAYSLSRDQKRMLYLFVDQIRKSDGTLQEHDGICEIHVAKYAEIFGLTSAEASKDIRQALKSFAGKEVVFYRPEEDAGDEKGYESFPWFIKRAHSPSRGLYSVHINPYLIPFFIGLQNRFTQFRLSETKEITNPYAMRLYESLCQYRKPDGSGIVSLKIDWIIERYQLPQSYQRMPDFRRRFLQVCVNEINSRTPMRLSYIEKKKGRQTTHIVFSFRDITSMTTG

SEQ ID NO: 40760 - protein, 228 aa, Homo sapiens
  DOMAIN (79)..(99): w LOW TRANSPOSASE SAPA 12K domain identified by eMATRIX, accession number DM00475B, p-value=1.300e-15, raw score of 12.12
  DOMAIN (12)..(105): Transposase domain identified by PFam, accession name Transposase_8, E-value=3.2e-38, PFam score of 140.4
MIDVLGPEKRRRRTTQEKIAIVQQSFEPGMTVSLVARQHGVAASQLFLWRKQYQEGSLTAVAAGEQVVPASELAAAMKQIKELQRLLGKKTMENELLKEAVEYGRAKKWIAHAPLLPGDGDCTSFSDEPMTGWMAAAVVTLMIRMCFSVYTMLSESCQRMVIVGYGRCFADRQNLMGCLRSMPNVFTGSCAKMALLLERKPVGPPSFGNSTLGPGDQRFHLKKKKEKA

SEQ ID NO: 40761 - protein, 473 aa, Homo sapiens
  DOMAIN (151)..(198): kw TRANSCRIPTASE REVERSE II ORF2 domain identified by eMATRIX, accession number DM01354V, p-value=1.000e-40, raw score of 12.97
  DOMAIN (8)..(164): Reverse transcriptase domain identified by PFam, accession name rvt, E-value=0.0013, PFam score of -18.3
MESFQCALKEVGLDEPLRLAGFRGDSAHYQLWWLQGKSKEAKAEAKVKATLSCTLGTKTATVLEVLARAIRQEKEIKGIQLGKEEVKLSLFADDMIVYLENPIVSAQNLLKLISNFSKVSGYKINVQKSQAFLYTNNRQTESQIMSELPFTIASKRIKYLGIQLTRDVKDLFKENYKPLLKEIKEDTNKWKNIPCSWVGRINIVKMAILPKGIYRFNAIPIKLPMIFFTELEKTTLKFIWNQKRARIAKSILSQKNKSGGITLPDFKLYYKATVTKTAWYWSQNRDIDQWNRTEPSEITPRIYNYLIFDKPEKNKQWGKDSLFNKWCWENWLAICRKLKLDPFLTPYTKINSRWIKDLNVRPKTIKTLEENLGITIQDIGVGKDFMSKTPKAMATKAKIDKWDLIKLKSFCTAKETTIRVNRQPTTWEKIFATYSSDKGLISRIYNELKQIYKKKTNNPIKKWAKDMNRHFSK

SEQ ID NO: 40762 - protein, 154 aa, Homo sapiens
  DOMAIN (79)..(99): w LOW TRANSPOSASE SAPA 12K domain identified by eMATRIX, accession number DM00475B, p-value=1.300e-15, raw score of 12.12
  DOMAIN (12)..(105): Transposase domain identified by PFam, accession name Transposase_8, E-value=3.1e-34, PFam score of 127.2
MIDVLGPEKRRRRTTQEKIAIVQQSFEPGMTVSLVARQHGVAASQLFLWRKQYQEGSLTAVAAGEQVVPASELAAAMKQIKELQRLLGKKTMENELLKEDDEFGRAKKWIAQRALIGRGWRVSLVTGLSCCGRATHVGIPRPRGCPKFRVSGLQ

SEQ ID NO: 40763 - protein, 305 aa, Homo sapiens
  DOMAIN (167)..(203): ELEMENT TRANSPOSASE FOR TRANSPOSON TRANSPOSABLE domain identified by eMATRIX, accession number PD02712A, p-value=4.176e- 24, raw score of 23.03
  DOMAIN (140)..(305): Transposase domain identified by PFam, accession name Transposase_7, E-value=1.9e-85, PFam score of 297.3
MIDVLGPEKRRRRTTQEKIAIVQQSFEPGMTVSLVARQHGVAASQLFLWRKQYQEGSLTAVAAGEQVVPASELAAAMKQIKELQRLLGKKTMENELLKEAVEYGRAKKWIAHAPLLPGDGDCTSFSDERLQVLSGSTPDMPVDFLTSDQKQNYGCYAAEPNDVQLARYFHLDERDLAFINQRRGKHNRLGIALQLTTARFLGTFLTDLTQVLPGVQHFVAVQLNIHRPEVLSRYAERDTTLREHTALIKEYYGYHEFGDFPWSFRLKRLLYTRAWLSNERPGLMFDFATAWLLQNKVLLPGATTL

SEQ ID NO: 40764 - protein, 552 aa, Homo sapiens
  DOMAIN (445)..(497): ELEMENT TRANSPOSABLE INSERTION PROTEIN TRANSPOSITION DNA domain identified by eMATRIX, accession number PD02455C, p-value= 5.253e-11, raw score of 29.23
  DOMAIN (372)..(537): Integrase core domain identified by PFam, accession name rve, E-value=2.1e-31, PFam score of 112.6
MARFQLSERFALMLPYELFLRHCQYEVYPGGQLGRLLIFCQCSKIWYIKMLVKSYKVPYGAVLAKGDGEQVAGGETVANWDPHTMPVITEVSGFVRFTDMIDGQTITRQTDELTGLSSLVVLDSAERTAGGKDLRPALKIVDAQGNDVLIPGTDMPAQYFLPGKAIVQLEDGVQISSGDTLARIPQESGGTKDITGGLPRVADLFEARRPKEPAILAEVSGIIPSVKQNVTSLWTRTRITTMNKSGKYLVWTVLSVMGAFALGYIALNRGEQINALWIVVASVCIYLIAYRFYGLYIAKNVLAVDPTRMTPAVRHNDGLDYVPTDKKVLFGHHFAAIAGAGPLVGPVLAAQMGYLPGMIWLLAGVVLAARVAVKESNQRWCSDGFEFCCDNGERLRVTFALDCCDREALHWAVTNGGFNSEPVQDVMLGAVERRFGNDLPSSPVEWLTDNGSCYRANETRQFARMLGLEPKNTAVRSPESNGIAESFVKTIKRDYISIMPKPDGLTAAKNLAEAFEHYNEWHPHSALGYRSPREYLRQRACNGLSDNRCLEI

SEQ ID NO: 40765 - protein, 553 aa, Homo sapiens
MELPRLDLAQRRPLLNQHEWADAFWQLLHLHQAPAGRGFLAGIHTSALCLRKSKLSNLREYQNRIADIAKRSKAVLGWASTAQFGTDNQFIKDDAARAASILEAARKDPGFAGIFDNATAQIATAWASALADYAAAHKSMPRPEILASCHQTLENCLIESTRNSMDATNKAMLESVAAEMMSVSDGVMRLPLFLAMILPVQLGAATADACTFIPVTRDQSDIYEVFNVAGSSFGSYAAGDVLDMQSVGVYSQLRRRYVLVASSDGTSKTTTFKMEDFEGQNVPIRKGRTNINVNRSKSANDVSSSNVAKRAGHYRSCICIRVSHSSHYKPHRLIAAETGYSQSTVVRAFREAVNKGILSVEIVIGDHRERRANLYRFTPSFLAFAQQAKNALIESKLKISSAATKVKAVLAKTLALFNFLSTPPCQNDTPSPCQDDVAIKNKKSQVKKTKRSVSGGAGTTSLKKLTSWIAKAKAKADNLRLSKKRTQKHEFKQKVEAAARKYAYLKNKRSPDIGGISNFDNLPHCMTVNEALNAVLAKNKDNEQWGIPAGFRG

SEQ ID NO: 40766 - protein, 407 aa, Homo sapiens
  DOMAIN (57)..(104): kw TRANSCRIPTASE REVERSE II ORF2 domain identified by eMATRIX, accession number DM01354V, p-value=1.000e-40, raw score of 12.97
  misc_feature (1)...(407): Xaa = X or * as defined in Table 2
MIVYLENPIVSAQNLLKLISNFSKVSGYKINVQKSQAFLYTNNRQTESQIMSELPFTIASKRIKYPGIQLTRDVKDLFKENYKPLLKEIKEDTNKWKNIPCSWVERINIVKMAILPKTAKNGPVLPPLHSEEKIPFNFHXLFRXTITATKAXQKRRXMCQNLMTHQNQRSGRSQIYFXRRRKNISDRSAVYRXRQLYIRRQPYAERPSHVEDKGHKYLVFEANTGTENGYQGEESLFNKAYYGGGTNFFCKESQKLQQSAKKRDAELANGALGIIELNNDYTLKKVMKPLITSNTVTDEIERANVFKMNGKWYLFTDSRGSKMTIDGILPISDPTIKQDFRLLGQTSVDRLLQLSQGQAVKGNQLLPVSLVKRKTTLAPNTQTASPRALADSLMQLARQVSRLESGQ

SEQ ID NO: 40767 - protein, 746 aa, Homo sapiens
  DOMAIN (266)..(311): kw TRANSCRIPTASE REVERSE II ORF2 domain identified by eMATRIX, accession number DM01354N, p-value=1.000e-40, raw score of 13.17
  DOMAIN (353)..(626): Reverse transcriptase domain identified by PFam, accession name rvt, E-value=3.8e-86, PFam score of 299.6
MEDEMNEMKQEEKFREKRIKRNEQTLQEIWDYVKRPNLHLIGVPESDGENGTKLENTLQDIIQENFPNLARQANVQIQEIQRMPQRYSSRRATPRHIIVRFTKVEMKEKMLRAAREKDRSMRQKVNKDTQELNSALHQADLIDIYRTLHPKSTEYTFFSAPHHTYTKIDHILGSKALLRKCKRTEIITNYLSDHSAIKLELRIKNLTQNRSTTWKLNNLLLNDYWVHNKMKAEIKMFFETNENKDTTYQNLWDAFKAEIQTTIKEYYKHLYANKLENLEEMDKFLDTYTLPRLNQEEVESLNRPITGAEIVAIINSLPTKKSPGPDGFTAEFYQRYKEELVPFLLKLFQSIEKQGILPNSFYEASTILIPKPGRDTTEKENFRPISLMNIDAKILNKILAKRIQQHIKKLIHHDQVGFIPGMQGWFNIHKSINVIQHINRAKDKNHMIISIDAEKAFDKIQQRFMLKTLNKLGIDGTYFKIIRAIYDKPTANIILNGQKLEAIPLKAGTRQGCPLSPLLFNIVLEVLARVIRQEKEIKGIQLGKEEVKLSLFADDMIVYLENPIVTAQNLLKLISNFSKVSGYKINVQKSQAFLYTNNRQTESQIMSELPFTIASKRIKYLGIQLTRDVKDLFKENYKPLLKEIKEDTNKWKNIPCSWVGRINIMKMAILPKVIYRFNAIPIKLPMTFFTELEKTKFIWNQKSAHITKGILSQKNKAGGITLPDFKLYYKATVTKTAWYWYQNRDI

SEQ ID NO: 40768 - protein, 417 aa, Homo sapiens
  DOMAIN (351)..(372): Isocitrate and isopropylmalate dehydrogenases proteins domain identified by eMATRIX, accession number BL00470A, p-value=2.500e- 18, raw score of 16.25
  DOMAIN (350)..(399): Isocitrate and isopropylmalate dehydrogenase domain identified by PFam, accession name isodh, E-value=5.5e-18, PFam score of 62.8
  misc_feature (1)...(417): Xaa = X or * as defined in Table 2
MSELPFTIASKRIKYLGIQLTRDVKDLFKENYKPLLKEIKEDTKKWKNIPCSWVGRINIVKMAILPKADICESLHDHADELYRSCLARFGDDGENSDTCSSRRRSQLVCKRMPGADKPVRLFTGCWRTFIDYRTGRLQPAIPQSLPEALRLAADLAEQKQRLEQKMLMDAPKVEFXERVATASGVLIGNYAKVLGLGQNYLFTWLRDNGILIATGERRNVPKQEYISRGYFTLKETVIDTSNGSRISFTTRITGKGQQWLMKRLLDAGAVAGAYIADITDGEDRARHFGLMSACFGVGMVAGPVAGGLLGAISLHAPFLAAAVLNGLNLLLGCFLMQESHKGERRGELLKIVVLPGDHVGQEITAEAIKVLKAISDVRSNVKFDFENHLIGGAAIDLQGGGGKPRCVSKSLMLHCTR

SEQ ID NO: 40769 - protein, 105 aa, Homo sapiens
  misc_feature (1)...(105): Xaa = X or * as defined in Table 2
SIQHWSRISSRLVYRSKAVAAALLPMNCSLWSTQAGFLPRFGXRXTRHLSTIEPEDYNLLFRRVSLKLSVWLPTWQSKSNGWSQKCLWMHLKFDSLNALLPPTGF

SEQ ID NO: 40770 - protein, 994 aa, Homo sapiens
  DOMAIN (279)..(304): 7 kw REVERSE TRANSCRIPTASE RNA POLYMERASE domain identified by eMATRIX, accession number DM00895E, p-value=4.103e-10, raw score of 15.72
  DOMAIN (250)..(525): Reverse transcriptase domain identified by PFam, accession name rvt, E-value=3.1e-84, PFam score of 293.3
  misc_feature (1)...(994): Xaa = X or * as defined in Table 2
MEDEMNEMKREGKFREKRIKRNEQSLQEIWDYVKRPNLHLIGVPESDVENGTKLENTLQDIIQENFPNLARQANVQIQEIQRTPQRYSSRRATPRHIIVRFTKVEMKEKMLRAAREKGHCNSGKSHRSLWEQNKGIFTTCICDDAEDLQSPSTAGPWFGVLYTKGGPYPQEDIFSEEVHTGPKLRKKIQEYQLTSKWSKSDVQVSVERRMAGGNPNQCHIGEVLLDGFTAEFYRRYKEELVPFLLKLFQSIEKEGILPNSFYEASIILIQKPGRDTTKKENFRPISLMNIDAKILNKILAKRIQQHIEKLIHHDQVGFIPVMQGWFNICKSINVIQHINRAKDKNHMIISIDAEKAFDKIQQPFMLKTLNKLGIDGMYFKIIRAIYDKPTANIILNGQKLAAFPLKTGTRQGCPLSPLLFNIVLEVLARAIRQEKEIKGIQLGKEEVKLSLFADDMIVYLENPIVSAQNLLKLISNFSKVSGYKINVQKSQAFLYTNNRQTESQIMSELPFTSASKRIKYLGIQLTRDVKDLFKENYKPLLKEIKEDTNKWKNIPCSWVGRINIVKMAILPKVIYRFNAIPIKLPMPFFTELEKTTLKFIWNQKRALITKLILSQKNKAGGITLPDFKLYYKATVTKTAWYWYQNRDKDQWNRTEPSEITPHIYNYLIFDKPEKNKQWGKDSLFNKWCWENGLAICRKLKLDPFLTPYTKINSRWIKDLNVRPKTRKTLEENLGITIQDIGMGKDFMSKTPKAMATKDKIDKWDLIKLKSFCTAKETTIRVNRQPTKWEKIFATYSSDKGLISRIYNELKQIYKKKTNNPIKKWAKDMNRHFSKEDIYAAKKHMKKCSSSLAIREMQIKTTMRYHLTPVRMAIIKKSGNNRLFTVAKTWIQPKCASMIHWMKKVXNIYTMKYNPAIKKEFTSFAAIWMELKATFLSKLMQEQKAKYCMFSLGFLLTHQLQLLKFMKMSTSQVPLVTLKQRRESQEPGKTKKHIY

SEQ ID NO: 40771 - protein, 758 aa, Homo sapiens; identical to SEQ ID NO: 35813
  DOMAIN (106)..(149): kw TRANSCRIPTASE REVERSE II ORF2 domain identified by eMATRIX, accession number DM01354T, p-value=1.000e-40, raw score of 9.48
  DOMAIN (1)..(228): Reverse transcriptase domain identified by PFam, accession name rvt, E-value=2.9e-37, PFam score of 137.2

SEQ ID NO: 40772 - protein, 354 aa, Homo sapiens
  DOMAIN (104)..(154): COMPONENT PHOSPHOTRANSFERASE SYSTEM SUGA domain identified by eMATRIX, accession number PD02253, p-value=8.500e-11, raw score of 21.79
  DOMAIN (148)..(258): Integrase core domain identified by PFam, accession name rve, E-value=1e-22, PFam score of 82.6
MKTLLIIDANLGTRLYGEDPAGAAARKAKLEIIDNPNDAEMAIVLGDSIPNDSALNGKNVWLGDISRAVAHPELFLSERKGHAKPYTAPVAATAPVGASGPKRVVAVTACPTGVAHTFMALKPLKPKRKNVAGIPDTGQYCETVQTSCWERWKRRFGNDLPSSPVEWLTDNGSCYRANETRQFARMLGLEPKNTAVRSPESNGIAESFVKTIKRDYISIMPKPDGLTAAKNLAEAFEHYNEWHPHSALGYRSPREYLRQRACNGRAGVLSSGTLEIPDTELRFESIRCPVQIISASDNLLVPTACSSELHAALPDSQKMVMPYAGHACNVTDPETFNALLLNGLASLLHHREAA

SEQ ID NO: 40773 - protein, 608 aa, Homo sapiens; identical to SEQ ID NO: 35804
  DOMAIN (152)..(199): kw TRANSCRIPTASE REVERSE II ORF2 domain identified by eMATRIX, accession number DM01354V, p-value=1.000e-40, raw score of 12.97
  DOMAIN (1)..(165): Reverse transcriptase domain identified by PFam, accession name rvt, E-value=0.02, PFam score of -35.1

SEQ ID NO: 40774 - protein, 50 aa, Homo sapiens
  misc_feature (1)...(50): Xaa = X or * as defined in Table 2
ATKMVRLSVAALVQRMKEFCAAKFPAVITCWWSVWAQSAXWRXCWRKTKI

SEQ ID NO: 40775 - protein, 663 aa, Homo sapiens
  DOMAIN (69)..(100): Isocitrate and isopropylmalate dehydrogenases proteins domain identified by eMATRIX, accession number BL00470D, p-value=7.882e- 28, raw score of 21.75
  DOMAIN (1)..(163): Isocitrate and isopropylmalate dehydrog domain identified by PFam, accession name isodh, E-value=1.2e-91, PFam score of 309.3
MAAFMALQHEPPLPIWSLDKANVLASSRLWRKTVEETIKNEFPTLKVQHQLIDSAAMILVKNPTHLNGIIITSNMFGDIISDEASVIPGSLGLLPSASLASLPDKNTAFGLYEPCHGSAPDLPKNKVNPIATILSAAMMLKLSLNLPEEGKAIEDAVKKVLDAVFRLVIGEQMIDVLGPEKRRRRTTQEKIAIVQQSFEPGMTVSLVARQHGVAASQLFLWRKQYQEGSLTAVAAGEQVVPASELAAAMKQIKELQRLLGKKTMENELLKEAVEYGRAKKWIAHAPLLPGDGERTDDWMDGRRSRHTDDTDVLLRIHHVIGELPTYGYRRVWALLRRQAELDGMPAINAKRVYRIMRQNALLLERKPAVPPSKRAHTGRVAVKESNQRWCSDGFEFCCDNGERLRVTFALDCCDREALHWAVTTGGFNSETVQDVMLGAVERRFGNDLPSSPVEWLTDNGSCYRANETRQFARMLGLEPKNTAVRSPESNGIAESFVKTIKRDYISIMPKPDGLTAAKNLAEAFEHYNEWHPHSALGYRSPREYLRQRACNGQAPCMKSNNALIVILGTVTLDAVGIGLVMPVLPGLLRDIVHSDSIASHYGVLLALYALMQFLCAPVLGALSDRFGRRPVLLASLLGATIDYAIMATTPVLWIYPLVNSPSC

SEQ ID NO: 40776 - protein, 144 aa, Homo sapiens
  misc_feature (1)...(144): Xaa = X or * as defined in Table 2
RVRVTAVITERDCVSRSRWTAVIVRHCTGRSLPAASTVKQYRTSCWERWNCRFGNDLPSSPVEWLTDNEFMLPGXXNTPVRPDVGLEPTXTRAACQESRCNRLTPGIVLEIIGVWMQRWSLECRLAIPCIFGWLPRVVGEESGA

SEQ ID NO: 40777 - protein, 553 aa, Homo sapiens
  DOMAIN (31)..(44): CYTIDINE DEAMINASE HYDROLASE ZINC AMINOHY domain identified by eMATRIX, accession number PD02269C, p-value=1.621e-16, raw score of 16.36
  DOMAIN (154)..(315): Integrase core domain identified by PFam, accession name rve, E-value=2.2e-28, PFam score of 102.1
MQQTVHAEQSAISHAWLSGEKALAAITVNYTPCGHCRQFMNELNSGLDLRIHLPGREAHALRDYLPDAFGPKDLEIKTLLSSTMMKRMCFSVYSICQTYGYRRVWELIRRQAELNGMLAINAKRVYRIMRQNAMLLERKLAVPPSKRAHTGRVAVKESNQRWCSDGFEFCCDNGERLRVTFALDCCDREALHWAVTTGGFNSETVQDVMLGAVERRFGNDLPSSPVEWLTDNGSCYRANETRQFARMLGLEPKNTAVRSPESNGIAESFVKTIKRDYISIMPKPDGLTAAKNLAEAFEHYNEWHPHRRAGAQRFHAQPLSANDTLKNILLAALPFKPTGAQARVVAEIERDMALDVPMMRLVQGDVGSGKTLVAALAALRAIAHGKQVALMAPTELLAEQHANNFRNWFAPLGIEVGWLAGKQKGKARLAQQEAIASGQVQMIVGTHAIFQEQVQFNGLALVIIDEQHRFGVHQRLALWEKGQQQGFHPHQLIMTATPIPRTLAMTAYADLDTSVIDELPPGRTPVTTVAIPDTRRTDIIDRVHHAMHIVTEK

SEQ ID NO: 40778 - protein, 329 aa, Homo sapiens
  DOMAIN (131)..(183): ELEMENT TRANSPOSABLE INSERTION PROTEIN TRANSPOSITION DNA domain identified by eMATRIX, accession number PD02455C, p-value= 5.253e-11, raw score of 29.23
  DOMAIN (83)..(223): Integrase core domain identified by PFam, accession name rve, E-value=2.3e-25, PFam score of 91.8
MLSESCQRMVIVGYGRCFSDRQNLMVCLRSMPIRVYRIMRQNALLLERKPAVPPSKRAHTGRVAVNESNQRCSAVITDRSLRVTFALDCCDREALHWAVTTGGFNSETVQDVMLGSVERRFGNDLPSSPVEWLTDNGSCYRANETRQFARMLGLEPKNTAVRSPESNGIAESFVKTIKRDYISIMPKPDGLTAAKNLAEAFEHYNEWHPPSALGYRSPREYLGQRVVLGMPSVADHLQRFSAHRYAGFHAHRSQQKHVHAACCNRARRDTPPTGSPAVDLPPGRQHALTVPRWLSRRDIDRDAAGQRFHSSLPQLQVLREQPFVQREQK

SEQ ID NO: 40779 - protein, 426 aa, Homo sapiens
  DOMAIN (146)..(198): ELEMENT TRANSPOSABLE INSERTION PROTEIN TRANSPOSITION DNA domain identified by eMATRIX, accession number PD02455C, p-value= 5.253e-11, raw score of 29.23
  DOMAIN (95)..(238): Integrase core domain identified by PFam, accession name rve, E-value=1e-21, PFam score of 79.1
MGGLGGAVVRRLGVALQDCCSLPATAQSLTADEFDELTAVGFSSVVRRVGSGLWSYVLEGFCGERLVKCEKCVVIREMGCVAKVVNLHLNDNGERLRVTFALDCCDREALHWAVTTGGFNSETVQDVMLGAVERRFGNDLPSSPVEWLTDNGSCYRANETRQFARMLGLEPKNTAVRSPESNGIAESFVKTIKRDYISIMPKPDGLTAAKNLAEAFEHYNEWHPHTRLLELTSERQDLLENMQQIKELKELLKSKDQKCGAGDPAGLQLLRVDRTPYQPPGSTSTGEGQLPKADWGSMTRKWGAIGQAKRCLPHPFMQPTLMPIRGSPRKSAGGDTMVLIYQRMMLQSLSNEGVLYYEGALDNLSEELSLSLDEDVEKIQMTLAFFSKYGLIQIDEEQNAEMLQVHAIVDQETDWARYKRNQSYFA

SEQ ID NO: 40780 - protein, 484 aa, Homo sapiens
  DOMAIN (88)..(108): w LOW TRANSPOSASE SAPA 12K domain identified by eMATRIX, accession number DM00475B, p-value=1.300e-15, raw score of 12.12
  DOMAIN (28)..(114): Transposase domain identified by PFam, accession name Transposase_8, E-value=5.2e-24, PFam score of 93.2
  misc_feature (1)...(484): Xaa = X or * as defined in Table 2
MKRQRYPTVSVSASILVNNLTNTLFNGRLLVKLADASMHACRSVSRQHGVAPSQLFLWRKQYQEGSLTAVAAGEQVVPASELAAAMKQIKELQRLLGKKTMENELLKEAVEYGRAKKWIAHAPLLPGDGDCTSFSDEPMTGWMAAAVVTLMIRMCFSVYAMLSGSCQRMVIVGYGRCFAHRQNLIGRVAVKESNQRWCSDGFEFCCDNGERLRVTFALDCCDREALHWAVTTGGFNSETVQDVMLGAVERRFGNDLPSSPVEWLTDNGSCYRANETRQFARMLGLEPKNTACYYGPRDPQPVRSAAATRTAPQDHRSSADTRRRLSPRRQPPRSYFGIVRDQEPRRAKRPRLHRARVDARGHGKGAQRPRQPSLHIGLPRREPAAARGQNGGPRDPNAAGENTGRPRHQPQTKSQSTRRAHTKAPANGVHLTRCRAVAIQSDESQNFRPDHSSPPPLPPSRLTSGYNAKSGGATAYLSLGTWPX

SEQ ID NO: 40781 - protein, 635 aa, Homo sapiens
  DOMAIN (37)..(83): kw TRANSCRIPTASE REVERSE II ORF2 domain identified by eMATRIX, accession number DM01354O, p-value=1.000e-40, raw score of 8.73
  DOMAIN (70)..(251): Reverse transcriptase domain identified by PFam, accession name rvt, E-value=4.5e-22, PFam score of 86.7
MDKFLDTYILPRLNQEEVESLNRPITGSEIEAIINSLPTKKSPGPDGFTAEFYQSYKEELVPFLLKLFQSIEKEGILPNSFYEASIILIPKPGRDTTKKEKFRPISLMNIDVKILNKILADQIQQHIKKLIHHDQVGFIPGMQGWFNILLEVLARAIRQEKEIKGIQLGKEKVKLSLFADDMIVYLENPIVSAPNLLKLISKFSKVSGYKINVQKSQAFLYTNNRQTESQIMSELPFTTASKRIKYLGIQLTRDVKDLFKENYKPLLNEIKEDTKKWKNIPCSWVGRINIVKMAILPKVIYRFNAIPIKLPMTFFTELEKTTLKFIWNQKRARLAKSILSQKNKAGGITLPDFKLYYKATVTKTAWYRYQNRDIDQWNRTEPSELMPHIYNYLIFDKPEKNKQWGKDSLFKNWCWENWLAICRKLKLDPFLTPYTKINSRWIKDLNVRPKTIKTLEENLGITIQDIGIGKDFMSKTPKAMAAKAKIDKWDLIKLKSFCTAKETTIRVNRQPTKWEKSFAIYSSDKGLISRIYNEHKQIYKKKTNNPIKKWAKVMNRHFSKEDIYAAKKHMKKCSSSLAIREMQIKTTMRYHLTAVRMAIIKTSGNNRYSVLRAYAKESQSAYIEKKLAFGNLGYT

SEQ ID NO: 40782 - protein, 101 aa, Homo sapiens; identical to SEQ ID NO: 40746
  misc_feature (1)...(101): Xaa = X or * as defined in Table 2

SEQ ID NO: 40783 - protein, 405 aa, Homo sapiens
  DOMAIN (182)..(229): kw TRANSCRIPTASE REVERSE II ORF2 domain identified by eMATRIX, accession number DM01354V, p-value=1.000e-40, raw score of 12.97
  DOMAIN (22)..(404): Reverse transcriptase domain identified by PFam, accession name rvt, E-value=3.4e-07, PFam score of 32.4
MDSMSGGGQYRKINGNPTSVKCPLLLLPAILTPEPVNRWRQSCKAFARHSPLAFRVTISTSTFFDGLLVTGLYTSTSVQASQSIGGSSAFGFVLEVLARAIRQEKEIKGIQLGKEEIKLSLFAGDMIVYLENPIVSAQNLLKLISNFSKVSGYKINVQKSQAFLYTNNRQTESQIMSELPFTIASKRIKYLGIQLTRDVKDLFKENYKPLLKEIKEDTNKWKNIPCSWVGRINIVKMAILAKKTDGSWRMTVDYRKLNLVVSPVAAAVPDVVVLLEQINTSPGTRYAVIDLANAFFSIPGHKAHRKQFAFSWQSQQYTFTVLPHGYINSLPWCHNLFLRDLDRFSLPQDITLVHDIDDIMLIGSSEQEVTSTLDLLMRYFCARGWEINPTKIQGTSMSVKFLRVW

SEQ ID NO: 40784 - protein, 350 aa, Homo sapiens
  DOMAIN (209)..(261): ELEMENT TRANSPOSABLE INSERTION PROTEIN TRANSPOSITION DNA domain identified by eMATRIX, accession number PD02455C, p-value= 5.253e-11, raw score of 29.23
  DOMAIN (161)..(299): Integrase core domain identified by PFam, accession name rve, E-value=4e-23, PFam score of 84.0
LSRAVIGRPLLIASALIARGWGVSLVSRVSGCRVRSCTSFSDEPMTGWMAAAVVTLMIRMCFSVYNHVYRRAANVWLSSRYGDASQNRQNVNDMACESMPNRVLPESMPRDALLPEAKNLLYRPSRPGTYQAEWPVKEKQSSDGALTGSSSAVITERDCVVTFALDCCDREALHWAVTTGGFNSETVQDVMLGAVERRFGNDLPSSPVEWLTDNGSCYRANETRQFARMLGLEPKNTAVRSPESNGIAESFVKTIKRDYISIMPKPDGLTAAKNLAEAFEHYNEWHPHSGTRGRRARFSVRATYAAGRLATIPGYRGGPLGLMCGQPNRKPTDGANERLTMIRAATAMSE

SEQ ID NO: 40785 - protein, 52 aa, Homo sapiens
GRLTGSVTYLSGLILSEAWHQQTLTISSGRFLSISKTRRVTSGLLWETAGAT

SEQ ID NO: 40786 - protein, 869 aa, Homo sapiens
  DOMAIN (801)..(822): Isocitrate and isopropylmalate dehydrogenases proteins domain identified by eMATRIX, accession number BL00470A, p-value=2.500e- 18, raw score of 16.25
  DOMAIN (213)..(273): Rop protein domain identified by PFam, accession name Rop, E- value=4.5e-44, PFam score of 159.9
  misc_feature (1)...(869): Xaa = X or * as defined in Table 2
MPLRAFNPVSSFRWARGMTIVAALMTVFFIMQLVGQVPAALWVIFGEDRFRWSATMIGLSLAVFGILHALAQAFVTGPATKRFGEKQAIIAGMAADALGYVLLAFATRGWMAFPIMILLASGGIGMPALQAMLSRQVDDDHQGQLQGSLAALTSLTSIIGPLIVTAIYAASASTWNGNRACSSSVTRIVSILSRFIGIITPMNRNPPYTEASVTKQEKTALNMARFIRSQTLTLLEKLNELDADEQADICESLHDHADELYRSCLARFGDDGNSYDHDYAKLACLQVEGRGGGTFAHELLAVEYAGWISPAFRLKVNQTFIDYRTGRLQPAIPQSLPEALRLAADLAEQKQRLEQKMLMDAPKVEFAERVATASGVLIGNYAKVLGLGQNYLFTWLRDNGILICNRXTQERPQTRIHISWVFHLLKKPXSIQAMEAGLSFTTRITGKGQQWLMKRLLDARNRDRYKQWKQDFFHDSYNRQSAGHILSQCANLAATTSEYFIHKPHRLIAAETGYSQSTVVRAFREAVNKGILSVEIVIGDHRERRANLYRFTPSFLAFAQQAKNALIESKLKISSAATKVKAVLAKTLALFNFLSTPPCQNDTPSPCQDDVAIKNKKSQVKKTKRSVSGGAGTTSLKKLTSWIAKAKAKADNLRLSKKRTQKHEFKQKVEAAARKYAYLKNKRSPDIGGISNFDNLPHCMTVNEALNAVLAKNKDNEQWGAVAGAYIADITDGEDRARHFGLMSACFGVGMVAGPVAGGLLGAISLHAPFLAAAVLNGLNLLLGCFLMQESHKGERRGELLKIVVLPGDHVGQEITAEAIKVLKAISDVRSNVKFDFENHLIGGAAIDLQGGGGKPRCVSKSLMLHCTR

SEQ ID NO: 40787 - protein, 853 aa, Homo sapiens; identical to SEQ ID NO: 32659
  DOMAIN (262)..(287): 7 kw REVERSE TRANSCRIPTASE RNA POLYMERASE domain identified by eMATRIX, accession number DM00895E, p-value=3.333e-11, raw score of 15.72
  DOMAIN (233)..(456): Reverse transcriptase domain identified by PFam, accession name rvt, E-value=1.8e-51, PFam score of 184.4

SEQ ID NO: 40788 - protein, 711 aa, Homo sapiens
  DOMAIN (596)..(617): Isocitrate and isopropylmalate dehydrogenases proteins domain identified by eMATRIX, accession number BL00470A, p-value=2.500e- 18, raw score of 16.25
  DOMAIN (595)..(644): Isocitrate and isopropylmalate dehydrogenase domain identified by PFam, accession name isodh, E-value=5.5e-18, PFam score of 62.8
  misc_feature (1)...(711): Xaa = X or * as defined in Table 2
MLNGEKLAVKQEALLAAISEKDANIALLELSSSKKKTQEEVAALKREKDRLVQQLKQQVEGRGGGTFAHELLAVEYAGWISPAFRLKVNQTFIDYRTGRLQPAIPQSLPEALRLAADLAEQKQRLEQKMLMDAPKVEFAERVATASGVLIGNYAKVLGLGQNYLFTWLRDNGILIATGERRNVPKQEYISRGYFTLKETVIDTSNGSRISFTTRITGKGQQWLMKRLLDADVVRTTSIVMLAKVTFLSCITMSDFTFSGYELACFVTHSGLSRSAGHILSQCANLAATTSEYFIHKPHRLIAAETGYSQSTVVRAFREAVNKGILSVEIVIGDHRERRANLYRFTPSFLAFAQQAKNALIESKLKISSAATKVKAVLAKTLALFNFLSTPPCQNDTPSPCQDDVAIKNKKSQVKKTKRSVSGGAGTTSLKKLTSWIAKAKAKADNLRLSKKRTQKHEFKQKVEAAARKYAYLKNKRSPDIGGISNFDNLPHCMTVNEALNAVLAKNKDNEQWGAVAGAYIADITDGEDRARHFGLMSACFGVGMVAGPVAGGLLGAISLHAPFLAAAVLNGLNLLLGCFLMQESHKGERRGELLKIVVLPGDHVGQEITAEAIKVLKAISDVRSNVKFDFENHLIGGAAIDLQGGGGKPRCVSKSLMLHCWHSCRLEPRWRXQRVQRIRLXVHPXAFFAPAVAFALPGRQPNGELQGDSAE

SEQ ID NO: 40789 - protein, 1071 aa, Homo sapiens
  DOMAIN (123)..(164): kw TRANSCRIPTASE REVERSE II ORF2 domain identified by eMATRIX, accession number DM01354I, p-value=1.000e-40, raw score of 15.55
  DOMAIN (369)..(644): Reverse transcriptase domain identified by PFam, accession name rvt, E-value=4.2e-89, PFam score of 309.4
MSSEWEWLRCSEVKGQRDVRPGCLGWDFRVYIVEDTQDEDRTWSVKEACELVLRVQEMIITRVVDAAPHHTYSKIDHIVGSKALLSKCKRTEIITNCLSDHSAIKLELRIKNLTQSRSTTWKLNNLLLNDYWVHNEMKAEIKMFFETNENKDTTYQNLWDAFKAVCRGKFIALNAYKRKQERSKIDTLTSQLKELEKQEQTHSKASRRQEITKIRAELKEIETQKTLQKINESRSWFFERINKIDRPLARLIKKKREKNQIDAIKNDKGDITTDPTEIQTTIREYYKQLYANKLENLEEMDTFLDTYTLPRLNQEEVESLNRPITGSEIVAIINSLPTKKSPGPDGFTAEFYQRYKEELVPFLLKLFQSIEKEGILPNSFYEASIILIPKPGRDTTKKENFRPISLMNIDAKILNKILANRIQQHIKKLIHHDQVGFIPGMQGWFNIRKSINVIQHINRAKDKNHMIISIDAEKAFDKIQQPFMLKTLNKLGIDGTYVKIIRAIYDKPTANIILNGQKLEAFPLKTGTRQGCPLSPLLFNIVLEVLARAIRQEKEIKGIQLGKEEVKLSLFADDMIVYLENPIVSAQNLLKLISNFSKVSGYKINVQKSQAFLYTNNRQTESQIMGELPFTIASKRIKYLGIQLTRDVKDLFKENYKPLLKEIKEDTNKWKNIPCSWVGRINIVKMAILPKVIYRFNAIPIKLPMTFFTELEKTTLKFIWNQKRARIAKSILSQKNKAGGITLPDFKLYYKATVTKTAWYWYQNRDIDQWNRTEPSEITPHTYNYLIFDKPEKNKQWGKDSLFNKWCWENWLAICRKLKLDPFLTPYTKINSRWIKDLNVRPKTIKTLEENLGITIQDIGVGKDFMSKTPKAMATKAKIDKWDLIKLKSFCTAKETTIRVNRQPTTWEKIFATYSSDKGLISRIYNELKQIYKKKTNNPIKKWAKDMNRHFSKEDIYAAKKHMKKCSSSLAIREMQIKTTMRYHLTPVRMAIIKKSGNNSQRGFYDSIKSPTKESYAAIKRNEIMSFAGYGWSWTLLSLATNTGTENQTLHIFTYKWELNNESTWIHEGMG

SEQ ID NO: 40790 - protein, 94 aa, Homo sapiens
CWAYPGCSRAPFRCCRPEIHRCSSRPTPNRCSWSRIRHCAAPAGSGRFRSWLGSRCVPGCADVGTSWTPRSAGVCHATSVEDSVWKWATTAPGH

SEQ ID NO: 40791 - protein, 82 aa, Homo sapiens
  misc_feature (1)...(82): Xaa = X or * as defined in Table 2
TTTLVRLPCRSPKRRIKALRSQLRRKSILKPLLSXSRXSTTKXRNTPCSQVSSLSRLSTRYRRRMKHSVNLVWTWVPYSSAP

SEQ ID NO: 40792 - protein, 754 aa, Homo sapiens
  DOMAIN (71)..(117): kw TRANSCRIPTASE REVERSE II ORF2 domain identified by eMATRIX, accession number DM01354O, p-value=1.000e-40, raw score of 8.73
  DOMAIN (106)..(379): Reverse transcriptase domain identified by PFam, accession name rvt, E-value=5.9e-86, PFam score of 299.0
QAMTLEGRWQQSQRSSTKQRDGTSFPMVEPTKTEEPFMSSLPPHPNQAAEWQSGRPRPKTGAEIVAITNSLPTKKSPGPDGFTAEFYQRYKEELVPFLLKLFQSVEKEGILPNSFYEASIILLPKPGRDKTKKENFRPISLMNIDAKILNKILANRIQQHIKKLIHHDQVGFVPGMQGWFNIRKSINAIQHINRTKDKNHMIISIDAEKAFDKIQQPFMLKTLNKLGIDGKYLKIIRAFYDKPTANIILNGQKLEAFPLKTGTRQGCPLSPLLFNIVLEVLDRAIRQEKEIKGIQLGKEEVKLSLFADDMIVYLENPIVSAQNLLKLISNFSKVSGYKINVQKSQAFLHTNNRQTESQIMSELPFTIASKRIKYLGIQITRDVKDLFKENYKPLLKEIKEDTNKWKNIPCSWVGRINIVKIAILPKIIYRLNAIPIKLLMTFFTELEKTTLKFIWNQKRARIAKSILSQKNKAGGITLPDFKLYYKPTVTKTAWYWHQNRAIEQWNRTEPSEITTHIYNYLTFDKPEKNKQWGKDSLFNKWCWENWLAICRKLKLDPFLTPYTKISSKWIKDLNVRPKTIKTQEENLGITIQDIGMGKDFMSKTQKAMATKAKIDKGDLIKLKSFCTAKETSSSVNRQPTKWEKIFATYSSDKGLISRIYNELKQIHKKKTNNPIKKWAKDMNRHFSKEDIYAAKKHMKNCSPSLAIREMQIKTTMRYHLTPLRMAIIKKSGNNSWSYPEDFRTLATCYPEDDR

SEQ ID NO: 40793 - protein, 96 aa, Homo sapiens
RFAIDQRSLTGCIGIDHPTERCPVAGRKFRRKKVAERFQVLIELIFYHPGLNAHPALFRVNFDDAVHMAGHINNNPLVERLTVSAGAAAAGGKDQR

SEQ ID NO: 40794 - protein, 83 aa, Homo sapiens
  misc_feature (1)...(83): Xaa = X or * as defined in Table 2
SLETRKSAPCTIMFRICIAGCCWLPCGTPTSVLTKRWHXPXVIFLWSRRIHTASCLPSQRSSNRACSSSVTRIVSILSRFIGI

SEQ ID NO: 40795 - protein, 246 aa, Homo sapiens
TGDQFGDGKHGEYSEDSAHGHPLPHGQPLPRVHGLRHQQHRPHPPAEDHSGFCLWHLLHTIGLVIGGVVPMAWYCWSCPSSGHWWSCPRSGHCWSFPRSGHWWSCLRSGHWWTCPRSGHWWTCPRPVIGGVVPRSGHWWSCPRSGHWWSCPRLVIGGVAPRLVIGGVVPRPGHWWSCPRSGIGGVAPGLVIGGVAPGWSLVELHTRSGHWWTCSRSGHWWSCHQAGHWWSCPRSGHWWSCHQAGHW

SEQ ID NO: 40796 - protein, 63 aa, Homo sapiens
  misc_feature (1)...(63): Xaa = X or * as defined in Table 2
WTVPLGAVPPVRMHEGLGCWCKLNGEVCMSGMCLLCWWDCDXRHDLKANLDRLMNVCQDGRKR

SEQ ID NO: 40797 - protein, 1039 aa, Homo sapiens
  DOMAIN (1008)..(1020): GALACTOKINASE FAMILY SIGNATURE domain identified by eMATRIX, accession number PR00473B, p-value=1.931e-12, raw score of 14.66
  DOMAIN (599)..(692): Transposase domain identified by PFam, accession name Transposase_8, E-value=3.2e-38, PFam score of 140.4
MKGLMNYKSQGTAFSLGCCFEKKKTRKFEDTMPGEVVENRYNEQGLCHPGTLYPRKQVEQIKRFILTEEYKTIRQKNFPESSSKEKENVREICWEYCQQTAPSRIASGSESLLAHGYVPSLGALTVETTVTQLQHLNTVGIIGFRGGRGQVAAVNCQKRDIQPFTRVTVHWGKRNDQTFQALVDTGLELTLIPGDPKHHCDPPVKVGAYGHQVINGVLAQIQITVGPVGPWTHPVVIFTVPKCIIDIDILRWQNSHTGSLTGRMKAIMVGRAKWKPLELPLPRKTVNQKPYHTPVGTAEISATMKDLKDAGVVIPTTTLFNSPIWSVQKTGGSWRMTVDYCMLNQVVSAVEAIVLDVVSLLEQINTSPAIEWVMHSSIPSSNGSGTYMIGLKQVLKAQPAPMASWGVSYDQWTEEEKTTAWFTDGSSRYASTTRNWTAAALQSLSRISLKDSCEGKSSHHPCHGGKDGGYAWAQQHGLSLTKVDLAMATAECPICQQQRPTLSPRYGTIPQGDQPATWWQVDYMGPLPSWKGQSTINLRGSSNLSCYGPSLNQSLGKEVSDWLSLGYTSTVVEGLEGERRLLVIGEQMIDVLGPEKRRRRTTQEKIAIVQQSFEPGMTVSLVARQHGVAASQLFLWRKQYQEGSLTAVAAGEQVVPASELAAAMKQIKELQRLLGKKTMENELLKEAVEYGRAKKWIAHAPLLPGDGERTDDWMDGRRSRHTDDTDVLLRIHHVIGELPTYGYRRVWALLRRQAELDGMPAINAKRVYRIMRQNALLLERKPAVPPSKRAHTGRVAVKESNQRWCSDGFEFCCDNGERLRVTFALDCCDREALHWAVTTGGFNSETVQDVMLGAVERRFGNDLPSSPVEWLTDNGSCYRANETRQFARMLGLEPKNTAVRSPESNGIAESFVKTIKRDYISIMPKPDGLTAAKNLAEAFEHYNEWHPHSALGYRSPREYLRQRACNGGKSSCAPRDDRKVRVMAADYENQLDEFSLDAPIVAHENYQWANYVRGVVKHLQLRNNSFGGVDMRSAAMCRR

SEQ ID NO: 40798 - protein, 409 aa, Homo sapiens
  DOMAIN (350)..(374): Cyclic nucleotide-binding domain proteins domain identified by eMATRIX, accession number BL00888B, p-value=2.969e-12, raw score of 14.79
  DOMAIN (179)..(339): Integrase core domain identified by PFam, accession name rve, E-value=2.3e-27, PFam score of 98.7
MEAAQTLEVKSNEPLCVPVLALVSEELSLRCPYLGAHIVASWLLQVDSSFEPWLMRVTPATDVIVFYRLSRPPSAEVNPHTPRDPSVALGSAARTTVPPARKTPSNPDPCASRIHHVIGELPTYGYRRVWALLRRQAELDGMPAINAKRVYRIMRQNALLLERKPAVPPSKRAHTGRVAVKESNQRWCSDGFEFCCDNGERLRVTFALDCCDREALHWAVTTGGFNSETVQDVMLGAVERRFGNDLPSSPVEWLTDNGSCYRANETRQFARMLGLEPKNTAVRSPESNGIAESFVKTIKRDYISIMPKPDGLTAAKNLAEAFEHYNEWHPHNPTLEWFLSHCHIHKYPSKSTLIHQGEKAETLYYIGKGSVAVLIKDEEGKEMILSYLNQGDTIGDLGLFEEGQERSAW

SEQ ID NO: 40799 - protein, 667 aa, Homo sapiens
  DOMAIN (60)..(261): Transposase domain identified by PFam, accession name Transposase_15, E-value=3.1e-106, PFam score of 366.3
  misc_feature (1)...(667): Xaa = X or * as defined in Table 2
MSHQLTFADSEFSSKRRQTRKEIFLSRMEQILPWQNMVEVIEPFYPKAGNGRRPYPLETMLRIHCMQHWYNLSDGAMEDALYEIASMRLFARLSLDSALPDRTTIMNFRHLLEQHQLARQLFKTINRWLALGVMMTQGTLFDATIIEAPSSTKNKEQQRDPEMHQTKKGNQWHFGMKAHIGVDAKSGLTHSLVTTAANEHDLNQLGNLLHGEKQFVSAMPATKEPQREELAEVDVDLLIAERPGKVKTLKQNPRKNKTAINIEYMKASIRARVEHPFRIIKRQFGFVKARYKGLLKNDNQLAMLFTLANLFRVDQMIQLPTYELSSGIGAVRRQAELDGTPAINSKRVYRIMRQNALLLERKPAVPPIETGTYRQSGRERKQSAMVLLTGSSSAVITERDCVSRSRWTAVIALHWAVTTGGFNSETVQDVMLGAVERRFGNDLPSSPVEWLTDNGSCYRANETRQFARMLGLEPKNTARRSSIITNGIRIVFDLFVNLDATDEQLDFPIVYASALNGIAGLDHEDMAEDMTPLYQAIVDHVPAPDVDLDGPFQMQISQLDYNSYVGVIGIGRIKRGKVKPNQQVTIIDSEGKTRNAKVGKVLGHLGLERIETDLAEAGDIVAITGLGELNISDTVCDTQNVEALPALSVDEPTVSMFFCVNTSPFCX

SEQ ID NO: 40800 - protein, 69 aa, Homo sapiens; identical to SEQ ID NO: 40732
  misc_feature (1)...(69): Xaa = X or * as defined in Table 2

SEQ ID NO: 40801 - protein, 938 aa, Homo sapiens
  DOMAIN (154)..(195): kw TRANSCRIPTASE REVERSE II ORF2 domain identified by eMATRIX, accession number DM01354I, p-value=1.000e-40, raw score of 15.55
  DOMAIN (1)..(140): AP endonuclease family 1 domain identified by PFam, accession name AP_endonucleas1, E-value=9e-08, PFam score of 1.9
  misc_feature (1)...(938): Xaa = X or * as defined in Table 2
MVKGSIQQEELTILNIYAPNTGAPRFIKQVLSDLQRDLDSHTLIMEDFNTPLSTLDRSTRQKVNKNTQELNSALHQADLIDIYRTLHPKSTEYTFFSAPHHTYSKIDHIVGSKALLSKCKRTEIITNYLSDHSAIKLELRIKNLTQSRSTTWKLNNLLLNDYWVHNEMKAEIKMFFETNENKDTTYQNLWDAFKAVCRGKFIALNAYKRKQERSKIDTLTSQLKELEKQEQTHSKASRRQEITKIRAELKEIETQKTLQKINESRSWFFERINKIDRPLARLIKKKREKNQIDTIKNDKGDITTDPTEIQTTIRESYKHLYANKLENLEEMDTFLDTYTLPRLNQEEVESLNRPITGSEIVAIINSLPTKKSPGPDGFTAEFYHESYLXQTHRQYHTEWAKTASIPFENWHKTGMPSLTTPIQHSVGSSGQGNQPGEGNKGYSIRKRGSQIVPVCRRHDCLSRKPHRLSPKSPXADKQLQQSLRIQNQCTKITSILIHQQQTNREPNHEXTPIHNCFKENKIPRNPTYKGCEGPLQGELQTTAQGNKRGHKQMEEHSMLMGRKNQYRENGHTSQGNLQIQCHPHQATNDFLHRIGKNYFKVHMEPKKSPHRQVNPKPKEQSWRHHTTXLQTILQGYSNQNSMVLVPKQRYRSMEQNRALRNNAAYLHYSDLXQTXEKQAWGKGIPIYKMALGKLASPMXEAETGSLPYTLYKNQFKMDXRFKRXTXNHKNPRRKPRHYHSGHRRGQGLHVQNTKSNGNKSQNXQMGSNXTKELLHSKRNYHQSEQATYNMGENFCNLLIXQRANIQNLQXTQTNLQEKNKQPHQKVGEGHEQTLLKRRHLCSQKTHEEMLIITGHQRNANQNHYEISSHTSXNGNHXKVRKQQNQKAFPAKISHVLLLLPWGRGLRAAVGAAAGSMDCAPLPLPCSHSWEIPQAGTDC

SEQ ID NO: 40802 - protein, 53 aa, Homo sapiens
WMKLETIILIKLTQEQKIKHRMFSLISGSCTMRTHGHREGKITLRTVGGCGEE

SEQ ID NO: 40803 - protein, 101 aa, Homo sapiens; identical to SEQ ID NO: 40746
  misc_feature (1)...(101): Xaa = X or * as defined in Table 2

SEQ ID NO: 40804 - protein, 980 aa, Homo sapiens
  DOMAIN (914)..(935): Isocitrate and isopropylmalate dehydrogenases proteins domain identified by eMATRIX, accession number BL00470A, p-value=2.500e- 18, raw score of 16.25
  DOMAIN (344)..(404): Rop protein domain identified by PFam, accession name Rop, E- value=4.5e-44, PFam score of 159.9
MPLRAFNPVSSFRWARGMTIVAALMTVFFIMQLVGQVPAALWVIFGEDRFRWSATMIGLSLAVFGILHALAQAFVTGPATKRFGEKQAIIAGMAADALGYVLLAFATRGWMAFPIMILLASGGIGMPALQAMLSRQPNFDHWTADRHGDLCRLGEHMERVGMDCRRRPIPCLPPRVASRCMEPGHLDLNGSRRHLANGFTTPRIGANQFLRRTVNAQTNPWQNISIASAISSSRTRRISGSVGSWPRSGNAEVSALHHYVPDLHRRMLLATLWNTYICINEALALTLSDFSLVPPHPYRQLFTLTTFHNRACSSSVTRIVSILSRFIGIITPMNRNPPYTEASVTKQEKTALNMARFIRSQTLTLLEKLNELDADEQADICESLHDHADELYRSCLARFGDDGNSYDHDYAKLACLQVNQTFIDYRTGRLQPAIPQSLPEALRLAADLAEQKQRLEQKMLMDAPKVEFAERVATASGVLIGNYAKVLGLGQNYLFTWLRDNGILIATGERRNVPKQEYISRGYFTLKETVIDTSNGSRISFTTRITGKDVVRTTSIVMLAKVTFLSCITMSDFTFSGYELACFVTHSGLSRSAGHILSQCANLAATTSEYFIHKPHRLIAAETGYSQSTVVRAFREAVNKGILSVEIVIGDHRERRANLYRFTPSFLAFAQQAKNALIESKLKISSAATKVKAVLAKTLALFNFLSTPPCQNDTPSPCQDDVAIKNKKSQVKKTKRSVSGGAGTTSLKKLTSWIAKAKAKADNLRLSKKRTQKHEFKQKVEAAARKYAYLKNKRSPDIGGISNFDNLPHCMTVNEALNAVLAKNKDNEQWGAVAGAYIADITDGEDRARHFGLMSACFGVGMVAGPVAGGLLGAISLHAPFLAAAVLNGLNLLLGCFLMQESHKGERRGELLKIVVLPGDHVGQEITAEAIKVLKAISDVRSNVKFDFENHLIGGAAIDLQGGGGKPRCVSKSLMLHCTR

SEQ ID NO: 40805 - protein, 1158 aa, Homo sapiens
  DOMAIN (1092)..(1113): Isocitrate and isopropylmalate dehydrogenases proteins domain identified by eMATRIX, accession number BL00470A, p-value=2.500e- 18, raw score of 16.25
  DOMAIN (60)..(263): Transposase domain identified by PFam, accession name Transposase_15, E-value=2.4e-122, PFam score of 419.8
MSHQLTFADSEFSSKRRQTRKEIFLSRMEQILPWQNMVEVIEPFYPKAGNGRRPYPLETMLRIHCMQHWYNLSDGAMEDALYEIASMRLFARLSLDSALPDRTTIMNFRHLLEQHQLARQLFKTINRWLAEAGVMMTQGTLVDATIIEAPSSTKNKEQQRDPEMHQTKKGNQWHFGMKAHIGVDAKSGLTHSLVTTAANEHDLNQLGNLLHGEEQFVSADAGYQGAPQREELAEVDVDWLIAERPGKVRTLKQHPRKNKTAINIEYMKASIRARVEHPFRIIKRQFGFVKARYKGLLKNDNQLAMLFTLANLFRADQMILPSVEKLPSMKLVRDAKKVGDHWSRTYPENSAKWNYWVKGNVNLSKVDGSVNEKANQLECSGAHASHCDTAGEPRATAVGMTALFLLKSDLSKKHSSSRDVAIVIRITLKHKDFNLKPDYIFEIAGVPDFSFLAEMPAECAHSTGGRWQTRHLTAAGKELLLRAYSLDSAKADRHHTKREDRLQFGGFVIIRWMEAGRDSPSSCDSAMQAPPPVVAPCQYVASQVEGRGGGTFAHELLAVEYAGWISPAFRLKVNQPFIDYRTGRLQPAIPQSLPEALRLAADLAEQKQRLEQKMLMDAPKVEFAERVATASGVLIGNYAKVLGLGQNYLFTWLRDNGILIATGERRNVPKQEYISRGYFTLKETVIDTSNGSRISFTTRITGKGQQWLMKRLLDAGVLVPVAATLTDVVRTTSIVMLAKVTFLSCITMSDFTFSGYELACFVTHSGLSRSAGHILSQCANLAATTSEYFIHKPHRLIAAETGYSQSTVVRAFREAVNKGILSVEIVIGDHRERRANLYRFTPSFLAFAQQAKNALIESKLKISSAATKVKAVLAKTLALFNFLSTPPCQNDTPSPCQDDVAIKNKKSQVKKTKRSVSGGAGTTSLKKLTSWIAKAKAKADNLRLSKKRTQKHEFKQKVEAAARKYAYLKNKRSPDIGGISNFDNLPHCMTVNEALNAVLAKNKDNEQWGAVAGAYIADITDGEDRARHFGLMSACFGVGMVAGPVAGGLLGAISLHAPFLAAAVLNGLNLLLGCFLMQESHKGERRGELLKIVVLPGDHVGQEITAEAIKVLKAISDVRSNVKFDFENHLIGGAAIDLQGGGGKPRCVSKSLMLHCTR

SEQ ID NO: 40806 - protein, 87 aa, Homo sapiens
  misc_feature (1)...(87): Xaa = X or * as defined in Table 2
KKELVNLTTDXSLENRWIDVLGPEKRRRRTTQEKIAIVQQSFGTGDDGLPRCPATWCSSQPVISLAXAIPGRKSYCCRRRRTGCSCL

SEQ ID NO: 40807 - protein, 2484 aa, Homo sapiens
  DOMAIN (466)..(491): 7 kw REVERSE TRANSCRIPTASE RNA POLYMERASE domain identified by eMATRIX, accession number DM00895E, p-value=3.889e-11, raw score of 15.72
  DOMAIN (437)..(1901): Reverse transcriptase domain identified by PFam, accession name rvt, E-value=2.1e-90, PFam score of 313.8
  misc_feature (1)...(2484): Xaa = X or * as defined in Table 2
MYQANGKQKKAGVAILVSDKTDFKPTKIKRDKEGHYIMVKGSIQQEELTILNIYAPNTGAPTFIQQVLSDLQRDLDSHTLIIGDFNTPLSTSDRSTRQKVNKDTQELNSALHQADLIDIYRTLHPKSTEYTFFSAPHHTYSKIDHILGSKALLSKCKRTEIITNYLSDHSAIKLELMIKNLTQNHSTIWKLNNLLLNDYWVHKEMKAEIKMFFETNENKDTTYQNLWDTFKAVCRGKFIALNAHKRKQERSKIDTLTSQLKELEKQEQTLSKASRRQEITKIRAELKEIETQKTLQKINESRSRFFERINKIDSLLARLIKKKREKNQIDAIKNDKGDITTNPTEIQTTIREYYKHLYANKLENLEEMDKFLDTYTLPRLNQEEVESLNRPITGAEIVAIINSLPTKKSPGPDGFTAEFYQRYKEEQVPFLLKLFQSIEKEGILPNSFYVSSIILIPKPGRDTTKRENFRPISLMNIDAKILNKILANRIQQHIKKLIHHDQVGFIPGMQGWFNICKSINVIQHINRTKDKNHMIISIDAEKAFDKIQQPFMLKTLNKLVLEVLARAIRQEKEIKGIQLGKEEVKLSLFADDMIVYLENPIVSAQNLLKLISNFSKVSGYKINVQKSQAFLYTNNRQTESQIMSELPFTIASKRIKYLGIQLTRDVKDLFKENYKPLLKEIKEDTNKWKNIPCSWVGRINIVKMAILPKVIYRFNAIPIKLPMTFFTELEKTTFKFIWNQKRAHIAKSNLSQKNKAGGITLPDFKLYYKATVTKTTXYWYQNRDIDQWNRTEPSEITPHIYNYLIFDKPEKKKQWGKDSLFNKWCWENWLAICRKLKLDPFLTPYTKINSRWIKDLNVRPKTIKTLEENLGNTIQNIGMGKDFMSKTPKAMATKDKIDKWDLIKLKSFCTAKETTIRVNRQPTKWEKIFATYSSDKGLISRIYNELKQIYKKKTNNPIKKWTKDMNRYFSKEDIYAAKKHMKKCSSSLAIREMQIKTTMRYHLTPVRMAIIKKSGNNSLASGLSIDKIQQPFMLKTLNKLGIDGTYFKIIRAIYDKPTANIILNGQKLEAFPLKTGTRQGCPLSPLLFNIVLEVLARAIRQEKEIKGIQLGKEEVKLSLFADDMIVYLENPIVSAQNLLKLISNFSKVSGYKINVQKSQAFLYTNNRQTESQIMSELPFTIASKRIKYLGIQLTRDVKDLFKENYKPLLKEIKEDTNKWKNIPCSWVGRINIVKMAILPKVIYRFNAIPIKLPMTFFTELEKTTLKFIWNQKRARIAKSILSQKNKAGGITLPDFKLYYKATVTKTAWYWYQNRDIDQWNRTEPSEITPLTYNYLIFDKPEKNKQWGKDSLFNKWCWENWLAICRKLKLDPFLTPYTKINSRWIKDLNVRPKTIKTLEENLRITIQDIGMGEDFMSKTPKAMATKAKIDKWDLIKLKSFCTAKETTIRVNRQPTKWEKIFATYSSDKGLISRIYNELKPIYKKKTNNPIKKWAKDMNRHFSKEDIYAAKKHMKKCSSSLAIREMQIKTTMRYHLTPVRMAIIKKSGNNSTFDFGQHEFELHRSTYTRIVFSKITPILEVLARAIRQEKEIKGIQLGKEEVKLSLFADDMIVYLENPIVSAQNLLKLIGNFSKVSGYKINVQKSQAFLYTNNRQTESQIMSELPFTIASKRIKYLGIQLTRDVKDLFKENYKPLLNEIKEDTNKWKNIPCSWVGRINIVKMAILPKVIYRFNAIPIKLPMTFFTELEKTTLKFIWNQERARIAKSILSQKNKAGGIMLPDFKLYYKATVTKTACLASGLSILSRAIRQEKETKGTQLGKEEVKLSLFADDMIVYLKNPIVSAQNLLKLISNFSKVSGYKINVEKSQAFLYTNNRQTESQIMSELPFTLASKRIKYLGIQLTSDVKDLFKENYKPLLKEIKEDTNKWKNIPCSWVGRINIVKMAILPKPPDNHLHQYHPKEADSWAPTSTTESEPLWKINPALPEETVMASPEAVARKDNVESPQDPSPTPLFASRPITGLKSQWAPRVPECIISTDILSNWQNPHIGSPTGGVRAVMVGKAKWKPLEVPLPRKIVNQKQCHIPGGIAEISAAIKALKDAGAMIPTISLFDSTQPVQKTGGFWRMTVDYCKLNQVVSPIAAAVPDVVSLLEQINTPSGVYQLSSLVFNLQRDLDRLSLPQDITLVHYIDNTILIGSSDREVANTLDLLRIYRVTGKAASFEWGLQQEKALQQVQAALPLAPYDPADPMVLEVSVADRDAVWSLWQPAIGESQWRPPGFWSKALFSADNCSPFEKQLLACYWALVETERLIMGQVTRGPELPIMNWVLSDPLAIKWVMNSNIPSSSGNGIYVVRHQQVLRAQGDQPATWWQVDYIGSLPSRKGQQLALTGIDTYSRYRFTYPVRNAFIKTTIRGLTECFIHHHGIPHSIASDQGTHFMAKVVWQWAHTHGIHWSYHVPHHPEAARLIEQWNGLLKSQLQCHLGDNTL

SEQ ID NO: 40808 - protein, 80 aa, Homo sapiens
WPLRGRGGHRAAPGRHLHLQQRLLLRLHLTACLLQDALDGGPPRCWRGSCRWRCSAGPPRSWARRPSATRSPSWPALECS

SEQ ID NO: 40809 - protein, 1505 aa, Homo sapiens
  DOMAIN (390)..(435): kw TRANSCRIPTASE REVERSE II ORF2 domain identified by eMATRIX, accession number DM01354N, p-value=1.000e-40, raw score of 13.17
  DOMAIN (1)..(214): AP endonuclease family 1 domain identified by PFam, accession name AP_endonucleas1, E-value=2.1e-62, PFam score of 220.8
HRLANWIKSQDPSVCYIPETHLTCRDTHRLKIKGWRKIYQANGKQKQAGVAIHISDKTDFKPTKIKRDKEGHYIMVKGSIQQEKLTILNVYAPNTGAPRFIMQVLSDLQRDLDSHTLIMGDFNTPLSTLDRLTRQKVNKDTQELNSALHQVDLIDIYRTLQPKSTEYTLFSAPHHTYSKIDHILGSKALLSKCKRTEIITNYLSDHSAIKLELRIKKLTQIRSTAWKLNNLLLNDYWVHNEMKAEIKMFFKNNENKDATCQNLWDTFKAVCRGKFLALNAHKRKQERSKINTLTSQLKELEKQEQTHSKASRRQEITKIRAELKEIETQKTLQKINESRSWFFERINKIDRPLARLIKKKREKNQIDTIKNDKGDITTDPTEIQTTVREYYKHLYANKLENLEEMDKFLDTYTLPRLNQEEFESLNRPVTGSEIVAIINSLPTKKSPGPDGFTAEFYRRYKEELHINRAKDKNHMIISIDAEKAFDKIQQPFMLKTLNKLGTAGTYFKIIRAIYDKPTANIILNGGQKLEAFPFEKLAQEQGCPSLTHSLFNIVLEVLARAIRQDKEIKGIQLGKEEVKLSLFADDMTVCIENPIVSAQNLLKLISNFSKVSGYKINVQKSQAFLYTDNRQTESQIMSQLPFTIASKRIKYLGIQLTRDVKDLFKENYKPLLKEIKEDTNKWKNIPCSWVGRINIVKMAILPKVIYRFNAIPIKLPMTFFTELEKTTLKFIWNQKRARIAKSILSQKNKAGGITLPDFKLYYKATVTKTAWYWYQNRDIDQWNKTEPSEITPHIYNYLIFDKPEENKQWGKDSLFNKWCWENWLAICRKLKLDPFLTPYTKINSRWIKDLNVRPKTIKTLEEKLGITIQDIGIGKDFMSKTPKAMATKDKIDKWDLIKLKSFCTAKETTIRVNRQPTKWEEIFATYSSDKGLISRIYNGLKQIYKKKTNNPIKKWAKDMNRHFSKEDIYAAKKHVKKCSSSLAIREMQIKTTMRYHLTPVRMAIIKKSGSNRCWRGCGEIGTLLHCWWDCKLVQPLWKSVWRFLRDLELEIPFDPAIPLLGIYPNDYKSCCYKDTCTLSLPEIRNCPTKSVPVPFSVDETQYHVEDTSPVSWQVKVLGKHIHQGSSYEDVWLPQRMQGKLTNRKDIHTKNPSVHHHHQRPKVDKTTKMGKKQNRKTGNSKKQSASPPPKERSSSPAMQQSWTENDFDELREEGFRRSNYSELREDIQTKGKEVENFEKNLEECITRITNTEKCLKELMELKTKARELREECRSLRSQCDQLEERVSAMEDEMNEMKQEGKFREKRIKRNEQSLQEIWDYVKRPNLRLIGVPESDAENGTKLENTLQDIIQETFPNLARQANVQIQEIQRTPQRYSSRRATPRHIIVRFTKVEMKEKMLRAAREKGRVTLKGKPIRLTADLSAETLQARREWGPILNILKEKNFQPRISYPAKLSFISEGEIKYFTDKQMLTDFVTSRPALKELLKEALNMERNNRYQPLQNHAKM

SEQ ID NO: 40810 - protein, 137 aa, Homo sapiens
  DOMAIN (55)..(69): Phage integrase family domain identified by eMATRIX, accession number PF00589B, p-value=4.724e-11, raw score of 16.17
  DOMAIN (1)..(101): "Phage" integrase family domain identified by PFam, accession name Phage_integrase, E-value=0.011, PFam score of -18.9
VFIRFIFLERRNRRTRRTEKARIWEGTDRTVKTWIGEAVAAAAADGVTFSVPVTPHTFRHSYAMHMLDAGIPLKVLPSLMGHKSISSTGVYTKVFALEVAARHRVQFAMPESDAVAMLNNYPENKCLGPYMEMPQLS

SEQ ID NO: 40811 - protein, 323 aa, Homo sapiens
  DOMAIN (227)..(273): DEAD-box subfamily ATP-dependent helicases proteins domain identified by eMATRIX, accession number BL00039D, p-value=5.179e- 36, raw score of 21.67
  DOMAIN (188)..(269): Helicases conserved C-terminal domain identified by PFam, accession name helicase_C, E-value=3.3e-35, PFam score of 130.4
MWALFMIRNVKKQRPVNLDLQTIRFPITAIASILHRVSGVITFVAVGILLWLLEYRLSYLKGSSKLRDYGQLLTLEIPAALLPIHTGIVNQNINCTETLTASSDNLLRRAFCGDTHLHEVHLNTLFFNHFLCFAVIFDETRNKDICATSGQHAHFVDKKRKRELLSHMIGKGNWQQVLVFTRTKHGANHLAEQLNKDGIRSAAIHGNKSQGARTRALADFKSGDIRVLVATDIAARGLDIEELPHVVNYELPNVPEDYVHRIGRTGRAAATGEALSLVRSFFDWCDDCAAAGGMGNRNAQLADGIYHLRCIELYLGDGMADFL

SEQ ID NO: 40812 - protein, 732 aa, Homo sapiens
  DOMAIN (20)..(59): DEAD-box subfamily ATP-dependent helicases proteins domain identified by eMATRIX, accession number BL00039A, p-value=4.150e- 30, raw score of 18.44
  DOMAIN (517)..(684): Enoyl-CoA hydratase/isomerase family domain identified by PFam, accession name ECH, E-value=1.1e-86, PFam score of 301.5
MSFDSLGLSPDILRAVAEQGYREPTPIQQQAIPAVLEGRDLMASAQTGTGKTAGFTLPLLQHLITRQPHAKGRRPVRALILTPTRELAAQIGENVRDYSKYLNIRSLVVFGGVSINPQMMKLRGGVDVLVATPGRLLDLEHQNAVKLDQVEILVLDEADRMLDMGFIHDIRRVLTKLPAKRQNLLFSATFSDDIKALAEKLLHNPLEIEVARRNTASDQVTQHVHFVDKKRKRELLSHMIGKGNWQQVLVFTRTKHGANHLAEQLNKDGIRRAAKHGNKCKCAYSKFQKPSPHIFTMLIGVCGVNQSAITNVSNVSNMAKISGSGSHRLTKRVIKRDMRPIINHPVAYSDRRRLQTELLFWHARWLNHTRRQFRIKEGDNGGQCFLFLWTGRFNFNLPSFGRIQHQQRNNAVGFSLGAFVITFIAGRACMPSLFVISTVCLTVMVYVFPAYDGVTGRFYRASGSSLPVALQYTPNGASRRYNQWRPSRMLSSLKKQKWRKGMSESLHLTRNGSILEITLDRPKANAIDAKTSFEMGEVFLNFRDDPQLRVAIITGAGEKFFSAGWDLKAAAEGEAPDADFGPGGFAGLTEIFNLDKPVIAAVNGYAFGGGFELALAADFIVCADNASFALPEAKLGIVPDSGGVLRLPKILPPAIVNEMVMTGRRMGAEEALRWGIVNRVVSQAELMDNARELAQQLVNSAPLAIAALKEIYRTSQRPAGRQKRIAIFAAAC

SEQ ID NO: 40813 - protein, 55 aa, Homo sapiens
MCEKNLAYAHKVKAALEKGASPGDFPREDYETNWEGRFTLADLNIHGKRALGMDV

SEQ ID NO: 40814 - protein, 1286 aa, Homo sapiens
  DOMAIN (1183)..(1215): ABC transporters family proteins domain identified by eMATRIX, accession number BL00211B, p-value=4.857e-20, raw score of 13.37
  DOMAIN (1)..(436): Adenine deaminase domain identified by PFam, accession name Adenine_deam, E-value=6.9e-158, PFam score of 537.9
MMTPVTFEPATLRRALTTVICDPHEIVNVMGEAGFAWFARCAEQARQNQYLQVSSCVPALEGCDVNGASFTLEQMLAWRDHPQVTGLAEMMDYPGVISGQNALLDKLDAFRHLTLDGHCPGLGGKELNAYITAGIENCHESYQLEEGRRKLQLGMSLMIREGSAARNLNALAPLINEFNSPQCMLCTDDRNPWEIAHEGHIDALIRRLIEQHNVPLHVAYRVASWSTARHFGLNHLGLLAPGKQADIVLLSDARKVTVQQVLVKGEPIDAQTLQAEESARLAQSAPPYGNTIARQPVSASDFALQFTPGKRYRVIDVIHNELITHSHSSVYSENGFDRDDVSFIAVLERYGPRLAPACGLLGGFGLNEVPGSCCQNCSVLNKSCDQDRSSLALSAARVSGIPIAITQRTCVQQFCQAGRCVFCSHLRCSRSFTRSTATHTILVVRVTGTCRDQTTHDNVLFQAAQFVAFARNGCFGQHASGLLERCRGDEGLGCQRRFGDTQQIAGVSCTHFAVRFQFAVCDLDARVFNLFAFQEVGATRVNDGSFTQHLTNDNFDVFIVNLNALQTVYVLYFVNDVTSNSMNTTQTQNVVRRFRTVGNYVTTFYTFTFEHVELTPFRNHLFVRIATVYRGDNQTTFTFGFFTEGNDTADFSQDCRLFRTTCFEQVRNARQTTGDVLGTAGFLRKRARVSPDIASPDVVEFSAFYHCPLCCLFCVSVLTFIFFKPLVEAMKTFFRTVLFGSLMAVCANSYALSESEAEDMADLTAVFVFLKNDCGYQNLPNGQIRRALVFFAQQNQWDLSNYDTFDMKALEILTVHPRSMLAIMLRPFFTGVNKGGINPWPKKNSGMKRYTTSLGSTLRRYVRSRLLYVYGRTARIGRLTWWGKDACYRGTAGKVCAGNKIPGLKFPHGQKNCAQCCRIAESDPFGHELGALHGASAQRIGRFELADKSSLFLDEVGDMPLELQPKLLRVLQEQEFERLGSNKIIQTDVRLIAATNRDLKKMVADREFRSDLYYRLNVFPIHLPPLRERPEDIPLLAKAFTFKIARRLGRNIDSIPAETLRTLSNMEWPGNVRELENVIERAVLLTRGNVLQLSLPDIVLPEPETPPAATVVALEGEDEYQLIVRVLKETNGVAGNSAPDTAYRLVSLRRTHIYPAAFARKQTTPRNAPLRYACGTDLTCAYVIGGMKRRLMIARALMHEPKLLILDEPTAGVDIELRRSMWGFLKDLNDKGTTIILTTHYLEEAEMLCRNIGIIQHGELVENTSMKALLAKLKSETFILDLARGI

SEQ ID NO: 40815 - protein, 2469 aa, Homo sapiens
  DOMAIN (905)..(921): PYRIDINE NUCLEOTIDE DISULPHIDE REDUCTASE CLASS-I SIGNATURE domain identified by eMATRIX, accession number PR00411B, p-value= 1.450e-19, raw score of 12.74
  DOMAIN (874)..(993): Pyridine nucleotide-disulphide oxidor domain identified by PFam, accession name pyr_redox, E-value=3.1e-23, PFam score of 81.3
MPHPGCKTNGLTTYPNCLRALRKMRIHGPSSPQFSGCQELLTVRKTRSGCGIIMVTRPLSVVTAVIPFGEPFGLAGDFAEVIDIAQCHQPFAFQCRQMRRITHFHAPFTMRDSNRHLRAQHPLQQQRRALGYFNQAETRFKAIGGIAHKTWPQLTTWDQFTQIRHHLATVTYPQRQRLRTVEEGCKLIAYTHITVGETTARDQGVEIFQARASGQQVTHMHVDSIKACTVESCRHFNMRVHALLTQYGNFRTCASGNIRCCHIFVDIERQFYIQARIGVVRFRLMLLIGTLRVVTQALHLPGSFCPPDTQRGAAFAEYSLPVGGNHKTVTGNRLPYIMDTISKPMLCQYGLDRFTVSGTNLNHRTQFFVKQRRQAIVTQSGDIRVNATMTSKGHFRQRYQQAAIRAVVIRQQLTLCNQRLNRVIEAFQLRDIAYICRFVAKLTINLRQRRCAQRVIAFAQINQQQCVSSVESCGVMASAEPEHYEALFVYAQKRLDKCVFGEEKPAYARYRADLTGEKIRPNTSSTSASGWQRFSQVYGAPCATTRSTFSRQSFNALVTAGTTCSGRILENGGNSKGVSNGFVIRAVLVKESLIIESLKEKDKPFLYLDTHAGAGRYQLGSEHAERTGEYLEGIARIWQQDDLPAELEAYINVVKHFNRSGQLRYYPGSPLIARLLLREQDSLQLTELHPSDYPLLRSEFQKDSRARVEKADGFQQLKAKLPPVSRRGLILIDPPYDMKTDYQAVVSGIAEGYKRFATGIYALWYPVVLRQQIKRMIHDLEATGIRKILQIELAVLPDSDRRGMTASGMIVINPPWKLEQQMNNVLPWLHSKLVPAGTGHATLDRAGVIAAIAGTYYVSRYNRGHFVMTKHYDYIAIGGGSGGIASINRAAMYGQKCALIEAKELGGTCVNVGCVPKKVMWHAAQIREAIHMYGPDYGFDTTINKFNWETLIASRTAYIDRIHTSYENVLGKNNVDVIKGFARFVDAKTLECDPFYIFSALLFFIPFALMMAEMGAAYRKEEGGIYSWMNNSVGPRFAFIGTFMWFSSYIIWMVSTSAKVWVPFSTFLYGSDMTQHWRIAGLEPTQVVGLLAVAWMILVTVVASKGINKIARITAVGGIAVMCLNLVLLLVSITILLLNGGHFAQDINFLASPNPGYQSGLAMLSFVVFAIFAYGGIEAVGGLVDKTENPEKNFAKGIVFAAIVISIGYSLAIFLWGVSTNWQQVLSNGSVNLGNITYVLMKSLGMTLGNALHLSPEASLSLGVWFARITGLSMFLAYTGAFFTLCYSPLKAIIQGTPKALWPEPMTRLNAMGMPSIAMWMQCGLVTVFILLVSFGGGTASAFFNKLTLMANVSMTLPYLFLALAFPFFKARQDLDRPFVIFKTHLSAMIATVVVVLVVTFANVFTIIQPVVEAGDWDMVSARYLQHIVVRHFSFQRVRVEIAVRAFLHAPRDVNVETQRSVQQQFQRLTTVGNGALFFAGQFGGGFPFGRYEEDWIITKATSARWFTSNHARPATVAYQRSGIFRVTQIYQHAVETRLTLVVRYVFHCFQQFLQILLIGRVFTGITRGVNARRAAKHIYRQTRVVGNCRTGEGVDVLRNHLKQSMGFDTNMEGGFLARRRHLQALEQAAEHLQQGKAQLLGAWAGELLAEELRLAQQNLSEITGEFTSDDLLGRIFSSFCIEAIIKSGMNPFLLDSEDVFIDLLTDSGTGAVTQSMQAAMMRGDEAYSGSQTNNDNAAHELESQAATSVTNGAHIYPFKTSHIGELATVNPGTDLTVVDASGKQPIVLLQGYQMQGSENTLYLAAGQRLALATLSEEGIKALTVNGEWQADEYGNQWRQASLQGALTDPALADRKPLWQYAEKLDDTYCAGCHAPIAADHYTVNAWPSIAKGMGARTSMSENELDILTRYFQYNAKDITEKHGIAAGALVVTSAAPLPAWAEEKGGKILTAGRWGAMNVEVKDGKIVSSTGALAKTIPNSLQSTAADQVHTTARIQHPMVRKSYLDNPLQPAKGRGEDTYVQVSWEQALKLIHEQHDRIRKANGPSAIFAGSYGWRSSGVLHKAQTLLQRYMNLAGGYSGHSGDYSTGAAQVIMPHVVGSVEVYEQQTSWPLILENSQVVVLWGMNPLNTLKIAWSSTDEQGLEYFHQLKKSGKPVIAIDPIRSETIEFFDDNATWIAPNMGTDVALMLGIAHTLMTQGKHDKVFLEKYTTGYPQFEEYLTGKSDNTPKSAVWAAEITGVPEAQIVKLAELMAANRTMLMAGWGIQRQQYGEQKHAGFIQRPAIRHPYHHVKGAFTEYVRNNRLPETVIRVKQPALARFSPDIAPLFVHFRADDDVTARLPDVSRTYVEYLADKVADREEDAEEYLEAIMEARVTVAGMGLVMEVQDYFDGEADRLAKAWLAEYTPQIKSLKDERKEAYRQIVEMSTEPQDVDLRFIETGINNKMAIIAQPQLFCAGADIVCECAGTQ

SEQ ID NO: 40816 - protein, 124 aa, Homo sapiens
  DOMAIN (3)..(67): Glycosyl hydrolases family 31 domain identified by PFam, accession name Glyco_hydro_31, E-value=0.00028, PFam score of 16.0
QPLPEGRWTHLWHNDELDGSRWHKQQHGFLSLPVYVRDNTLRALGNNDQRPDYVWHEGTAFHLFNLKAARTGNTITAIDASEANNWTLCLRNGVKVNGLQDGSQAESEQGLVVKPQGNALTITL

SEQ ID NO: 40817 - protein, 169 aa, Homo sapiens
  misc_feature (1)...(169): Xaa = X or * as defined in Table 2
KFHFMSPFPAHSMVQALEXLYALGGLDKDCRLTEPLGMRIAEFPLNPMFAKMLLESGNFGCSQEILSIAAMMQIQNIFVVPPNHKSHAIRVHRKFAVEEGDHLTMLNIYEAFIKHNKDSKWCQEHFLNYKGLVRAATVREQLKKLLVKFQVPRKSSEGDPDLVLRCIVS

SEQ ID NO: 40818 - protein, 639 aa, Homo sapiens
  DOMAIN (68)..(78): DEAH-box subfamily ATP-dependent helicases proteins domain identified by eMATRIX, accession number BL00690C, p-value=3.250e- 10, raw score of 7.51
  DOMAIN (124)..(223): Helicases conserved C-terminal domain identified by PFam, accession name helicase_C, E-value=3.1e-05, PFam score of 30.8
MIWGRAWWLTPVIPALWAAKVAGRVAEERGAVLGHEVGYCIRFDDCTDQLATRIKRLTESFSLILSVIMLDEAHERTLYTDIAIGLLKKIQKKRGDLRLIVASATLDADEEVETVVSMLIEQARALARTGMKRHLRVLPMYAGLPSFEQMKVFERVSRSVRKVIVATNVAETSITISGIVYVIDCGFVKLRAYNPRTAIECLVVVPVSQASANQRAGRGGRSRSGKCYRLYTEEAFDKLPQSTVPEMQRSNLAPVILQLKALGIDNVLRFHFMSPPPAQSMVQALELLYALGSLDKDCRLTEPLGMRIAEFPLNPMFAKMLLESGNFGCSQEILSIAAMMQIQNIFVVPPNQKSHAIRVHRKFAVEEGDHLTMLNIYEAFIKVSTTTARSAASTHHPLEHNKDSKWCQEHFLNYKGLVRAATVREQLKKLLVKFQVPRKSSEGDPDLVLRCIVSGFFANAARFHSTGAYRTIRDDHELHIHPASVLYAEKPPRWVIYNELLQTSKYYMRDVTAIESAWAVGSWLHTFYSTRERTCSLESQKGPRSRDPLRREPTVYSCRDCWRPLLHAAAPGPRWGELAPAPVECLVALKWAAACSLVLSSRCPQHLHPCWDPGGLCAWAGILLCCSGQSGSWLTQHAH

SEQ ID NO: 40819 - protein, 137 aa, Homo sapiens
GTCPFYLCPPETWVSRPFLLTSNRGNDLLLKLLQHRYPRVMAEEGLRVVRQWLEASSQLEEASIYSRWEVEEDWCLSVLRSYQAEHGPDFPWSVGEDMSADGRRQLALFLARKHLHNFEGTYWNPIPKPKTFKRPWH

SEQ ID NO: 40820 - protein, 298 aa, Homo sapiens
  DOMAIN (113)..(294): alpha/beta hydrolase fold domain identified by PFam, accession name abhydrolase, E-value=0.091, PFam score of -7.1
  misc_feature (1)...(298): Xaa = X or * as defined in Table 2
XDTLLNRVKKLPCQITSYLVAHTLGRRMLYPGSVYLLQKALMPVLLQGQARLVEECNGRRAKLLACDGNEIDTMFVDRRGTAEPQGQKLVICCEGNAGFYEVGCVSTPLEAGYSVLGWNHPGFAGSTGVPFPQNEANAMDVVVQFAIHRLGFQPQDIIIYAWSIGGFTATWAAMSYPDVSAMILDASFDDLVPLALKVMPDSWMRTFMLGKGFVSAIPSPLSHSRGPGDQDREAASQSKQRGSLCRYQGPVLLIRRTKDEIITTTVPEDIMSNRGNDLLLKLLPASYPRVMAEEGLRV

SEQ ID NO: 40821 - protein, 458 aa, Homo sapiens
MGTSSIFLCVLFLCGALGLTMSPARGRLRCYICGFTKPCHPVPTECRDDEACGISIGTSGCRGIFQVPDGQRDSRSHFPADVTKITWACGQSPPGFKPLFPSCSSPKTGQMDVLIDLDFGFELRNRGIWGEGAIRDTEEKSADNLEPCSSPPPLEEVICCEGNAGFYEVGCVSTPLEAGYSVLGWNHPGFAGSTGVPFPQNEANAMDVVVQFAIHRLFFHPQDIIIYALAIGGFTATWAAMSYPDVSAMILDASFDDLVPLALKVMPDSWRGLVTRTVRQHLNLNNAEQLCRYQGPVLLIRKTQDGNLTPTVPKDICSNRANCLLVKALQHRYPGVMAEEGLLVARQWLEASSQLEEASIYSRWEVEEDWCLSVLRSYQAEHGADFPWSVGEDMSADGRRQLALFLARKHLHNFEATHCTPLPAQNFPRCPWHPLGTQLGLIMEEWGERRHEERPSYL

SEQ ID NO: 40822 - protein, 506 aa, Homo sapiens
  DOMAIN (168)..(208): RECEPTOR FC IMMUNOGLOBULIN AFFIN domain identified by eMATRIX, accession number PD01270A, p-value=1.964e-11, raw score of 17.22
  DOMAIN (34)..(423): Immunoglobulin domain identified by PFam, accession name ig, E-value=6.9e-32, PFam score of 107.8
MGFLPKLLLLASFFPAGQASWGVSSPQDVQGVKGSCLLIPCIFSFPADVEVPDGITAIWYYDYSGQRRVFMGNPEHRVCNLLLKDLQPEDSGSYNFRFEISEVNRWSDVKGTLVTVTARSLSPPGRHLETLHMAMSWQDHGRILRCQLSVANHRAQSEIHLQVKYAPRGVKILLSPSGRNILPGELVTLTCQVNSSYPAVSSIKWLKDGVRLQTKTGVLHLPQAAWSDAGVYTCQAENGVGSLVSPPISLHIFMAEVQVSPAGPILENQTVTLVCNTPNEAPSDLRYSWYKNHVLLEDAHSHTLRLHLATRADTGFYFCEVQNVHGSERSGPVSVVVNHPPKTPTMMVFVEPEGGLRGILDCRVDSEPLASLTLHLGSRLVASSQPQGAPAEPHIHVLASPNALRVDIEALRPSDQGEYICSASNVLGSASTSTYFGVRALHRLLSVPAAALGPGTAVWASCSCCWAWGPATPGGTGYYLTGTYKSGGQTQMLSASLFLLQMHLCS

SEQ ID NO: 40823 - protein, 204 aa, Homo sapiens
  DOMAIN (16)..(188): Immunoglobulin domain identified by PFam, accession name ig, E-value=5.7e-10, PFam score of 37.2
PPDRPKLSALLDMGQGHMALFICTVDSRPLALLALFHGEHLLATSLGPQVPSHGRFQAKAEANSLKLEVRELGLGDSGSYRCEATNVLGSSNTSLFFQVRDAPRHVTLTTLMDTGPGRLGLLLCRVDSDPPAQLRLLHGDRLVASTLQGVGGPEGSSPRLHVAVAPNTLRLEIHGAMLEDEGVYICEASNTLGQASASADFDAQ

SEQ ID NO: 40824 - protein, 86 aa, Homo sapiens
  misc_feature (1)...(86): Xaa = X or * as defined in Table 2
SGGPDTDVVSIPYSCSRMHLCSXLCELLSFSWETLCRAVKENELPKKEXRAPANQGPTGESSLSGLSDSPLQPGGDGVEERRALLF

SEQ ID NO: 40825 - protein, 1839 aa, Homo sapiens
  DOMAIN (384)..(424): RECEPTOR FC IMMUNOGLOBULIN AFFIN domain identified by eMATRIX, accession number PD01270A, p-value=1.536e-11, raw score of 17.22
  DOMAIN (179)..(1756): Immunoglobulin domain identified by PFam, accession name ig, E-value=5.8e-113, PFam score of 369.0
MANRFRSGEDSGGAIWQDCVEEGASELGFLESLLYTQGNDRKQCSLTNQGRQVFALLMLRKGHLHVFVILFGPAGPAPPQPLPSVEQVPLSLVPGPKGVAVSRTPPFFHQVHDCPFQDPKWEEQGSWDKIAALAIAELTLTSPVARDTSDPQCAQQAAFLHGQASWGVSSPQDVQGVKGSCLLIPCIFSFPADVEVPDGITAIWYYDYSGQRQVVSHSADPKLVEARFRGRTEFMGNPEHRVCNLLLKDLQPEDSGSYNFRFEISEVNRWSDVKGTLVTVTEEPRVPTIASPVELLEGTEVDFNCSTPYVCLQEQVRLQWQGQDPARSVTFNSQKFEPTGVGHLETLHMAMSWQDHGRILRCQLSVANHRAQSEIHLQVKYAPKGVKILLSPSGRNILPGELVTLTCQVNSSYPAVSSIKWLKDGVRLQTKTGVLHLPQAAWSDAGVYTCQAENGVGSLVSPPISLHIFMAEVQVSPAGPILENQTVTLVCNTPNEAPSDLRYSWYKNHVLLEDAHSHTLRLHLATRADTGFYFCEVQNVHGSERSGPVSVVVNLLTAFLETQAGLVGILHCSVVSEPLATLVLSHGGHILASTSGDSDHSPRFSGTSGPNSLRLEIRDLEETDSGEYKCSATNSLGNATSTLDFHANAARLLISPAAEVVEGQAVTLSCRSGLSPTPDARFSWYLNGALLHEGPGSSLLLPAASSTDAGSYHCRARDGHSASGPSSPAVLTVLYPPRQPTFTTRLDLDAAGAGAGRRGLLLCRVDSDPPARLQLLHKDRVVATSLPSGGGCSTCGGCSPRMKVTKAPNLLRVEIHNPLLEEEGLYLCEASNALGNASTSATFNGQATVLAIAPSHTLQEGTEANLTCNVSREAAGSPANFSWFRNGVLWAQGPLETVTLLPVARTDAALYACRILTEAGAQLSTPVLLSVLYPPDRPKLSALLDMGQGHMALFICTVDSRPLALLALFHGEHLLATSLGPQVPSHGRFQAKAEANSLKLEVRELGLGDSGSYRCEATNVLGSSNTSLFFQVRGAWVQVSPSPELQEGQAVVLSCQVHTGVPEGTSYRWYRDGQPLQESTSATLRFAAITLTQAGAYHCQAQAPGSATTSLAAPISLHVSYAPRHVTLTTLMDTGPGRLGLLLCRVDSDPPAQLRLLHGDRLVASTLQGVGGPEGSSPRLHVAVAPNTLRLEIHGAMLEDEGVYICEASNTLGQASASADFDAQAVNVQVWPGATVREGQLVNLTCLVWTTHPAQLTYTWYQDGQQRLDAHSIPLPNVTVRDATSYRCGVGPPGRAPRLSRPITLDVLYAPRNLRLTYLLESHGGQLALVLCTVDSRPPAQLALSHAGRLLASSTAASVPNTLRLELRGPQPRDEGFYSCSARSPLGQANTSLELRLEGVRVILAPEAAVPEGAPITVTCADPAAHAPTLYTWYHNGRWLQEGPAASLSFLVATRAHAGAYSCQAQDAQGTRSSRPAALQVLYAPQDAVLSSFRDSRARSMAVIQCTVDSEPPAELALSHDGKVLATSSGVHSLASGTGHVQVARNALRLQVQDVPAGDDTYVCTAQNLLGSISTIGRLQVEGARVVAEPGLDVPEGAALNLSCRLLGGPGPVGNSTFAWFWNDRRLHAEPVPTLAFTNVARAQAGMYHCLAELPTGAAASAPVMLRVLYPPKTPTMMVFVEPEGGLRGILDCRVDSEPLASLTLHLGSRLVASSQPQGAPAEPHIHVLASPNALRVDIEALRPSDQGEYICSASNVLGSASTSTYFGVRALHRLHQFQQLLWVLGLLVGLLLLLLGLGACYTWRDWVLPYWPLQEWRADTDVVSILIPAPDASLFMTV

SEQ ID NO: 40826 - protein, 383 aa, Homo sapiens
  DOMAIN (136)..(150): C2H2-TYPE ZINC FINGER SIGNATURE domain identified by eMATRIX, accession number PR00048A, p-value=7.750e-16, raw score of 10.52
  DOMAIN (85)..(351): Zinc finger, C2H2 type domain identified by PFam, accession name zf-C2H2, E-value=3.7e-32, PFam score of 120.2
MVRRFRRLSQTYLRVAFTQHLRNCARDEHSEVWEVDEQIKKQQETLGLEHNLDLLRYEKGCVREKQSNEFGKPFYHCASYVVTPFKCNQCGQDFSHKFDLIRHERIHAGEKPYECKECGKAFIFIIHMRSHTGEKPYVCSECGKAFSQSSSLTVHTRNHTAEKPYELCGKAFSQKSNLTEHEKIHTGEKPYHCNQCGKAFSQRQNLLEHEKIHTGEKPFKCNECDWEFGRETKNLSPKENIYEIRSPQQEKARVIREIRCQVERQQGQQEGHFRPAVIPFTSMQCTAHREYQWLHTGEKSCECRKCKNAFRYQSCPIQHEIIHNKEKEPECGECRKIFNSGSDLIKHQTLHESKKHSENNKCTFNHDSGITQPQSINTGEKPH

SEQ ID NO: 40827 - protein, 86 aa, Homo sapiens
  misc_feature (1)...(86): Xaa = X or * as defined in Table 2
SHRRSLGEAARHPSFRPAGTAFEXVSQKVVHPRDLEDRSACVPVGCSLTRESFFRLNNQPHGTRFLPIPSNPESSRRAVPSAHLTV

SEQ ID NO: 40828 - protein, 73 aa, Homo sapiens
EGTWIQGRGAGFVERGDCGRPRAGPPGVLSSRPPCADFYRWRRSFRAPARVSGLLFRFWISPTLGLLQEDTAF

SEQ ID NO: 40829 - protein, 104 aa, Homo sapiens
  DOMAIN (63)..(76): PROTEIN ZINC-FINGER METAL-BINDI domain identified by eMATRIX, accession number PD00066, p-value=8.000e-13, raw score of 13.92
  DOMAIN (17)..(95): Zinc finger, C2H2 type domain identified by PFam, accession name zf-C2H2, E-value=1.9e-22, PFam score of 88.0
ISQISQHQRMHLGEKPYKCRECGKAFPSTAQLNLHQRIHTDEKYYECKECGKAFTRPSHLFRHQRIHTGEKPHKCKECGKAFRYDTQLSLHQIIHTGERRYECR

SEQ ID NO: 40830 - protein, 471 aa, Homo sapiens
  DOMAIN (75)..(92): Zinc finger C2H2 type, domain proteins. domain identified by eMATRIX, accession number BL00028, p-value=1.000e-13, raw score of 16.07
  DOMAIN (17)..(263): Zinc finger, C2H2 type domain identified by PFam, accession name zf-C2H2, E-value=5.7e-67, PFam score of 235.9
ASQLSLHQRIHAGENPHECKECGKAFISDSHLIRHQSVHTGEKPYKCKECGKSFRRGSELTRHQRAHTGEKPYECKECGKAFTCSTDLVRHQKVRTGERPHKCKECGKAFIRRSELTHHERSHSGEKPYECKVCGKAFTKSSQLFLHLRIHTGEKPYECKECGKAFTQHSRLIQHQRMHTGEKPYECKQCGKAFNSASTLTNHHRIHAGEKLYECEECRKAFIQSSELIQHQRIHTDEKPYECNECGKAFNKGSNLTRHQRIHTVWKRLIHKPGVLNQGPFRFSYLHPSRHLAMSRVIFGFQYEGWVLLASGGYGDLRKKAKEKQITPGNQERAYAGEQAHSGRPTGGGERFLQTVSVPQRPPSHLTRLNNQPHGTRFLPIPSNPESEQKSSPECPPHGIEGNYVNIIKVLCEKPTVDSTLGERLKAFSPRSGTKEEGLLSPCSFSRVLKVLATEMWQKKQQPASKLKTMK

SEQ ID NO: 40831 - protein, 97 aa, Homo sapiens
  DOMAIN (72)..(89): Zinc finger C2H2 type, domain proteins. domain identified by eMATRIX, accession number BL00028, p-value=7.750e-15, raw score of 16.07
  DOMAIN (1)..(92): Zinc finger, C2H2 type domain identified by PFam, accession name zf-C2H2, E-value=3.5e-05, PFam score of 30.6
CGKAFTQHSRLIQHQRMHTGEKPYEYWEFGEKPRIYLQRKTFMKLDTTTGEGQSYQRNQMPECPYGEKPCKCKECGKSFRRSSELTRHQRAHTGEKP

SEQ ID NO: 40832 - protein, 109 aa, Homo sapiens
GDFSPQKPPMAPHGCLTYLAFQKVKEGKKEEKKEKKKRKKERKKERKKERKKERKKERKRKEKKEEGKEGRKEGRKEGRKEGRKEKKEISKKEIVAPTSLNPLKCSVLP

SEQ ID NO: 40833 - protein, 82 aa, Homo sapiens
MKEKKERRKKEKEEKERKKERKKERKKERKKERKKERKKEVVVIVGGLTPFPKQTVEAVTGWVFTGCNSNSQSEQPEPPLAA

SEQ ID NO: 40834 - protein, 82 aa, Homo sapiens
  misc_feature (1)...(82): Xaa = X or * as defined in Table 2
NKEMHWPCTGLCSHQPWGFKDCSLLEXRLPGQQEQNSIERKKRKKEKKEKKEKRKKRKKGKKEERKKERKYHFILLLGMPTS

SEQ ID NO: 40835 - protein, 83 aa, Homo sapiens
LEVPVQCLETACIHMFVLGESFPKDMVLCLRLCRKDGKKDQDSRSAPEPKKPEENPASVSVEGCSQFFILRKILRILSILTKN

SEQ ID NO: 40836 - protein, 236 aa, Homo sapiens
  misc_feature (1)...(236): Xaa = X or * as defined in Table 2
EPGNPERLKGFSYPEFEDLDALFSTLGLNEESVDSFDDYLPRRGVDSFGDKYQDRCNSDQYHDGCQDRFRDGSHQDMGQCGGRDXDDDXGSRDYDRGYDSATGSCRRAFGSGYLRDDDYWESSETEQQPPTGSEGKVPPVQPSEERPAKKDENKVDGMNAPKVQSGNSGRGPGDGGNKDCWRESDRKDGKKDQVCRSAPESKKPEENPASKFSSASKCAAVSVDGEDEKEGADYTK

SEQ ID NO: 40837 - protein, 182 aa, Homo sapiens
MQRSENDILGMDLRPLICIKDEKEEVGEKEEGEKEEEECEEQEEEGGKEWEEPGNYHLGQSLSHDWQSSETEQQPPTGSEGKVPPVQPSEERPAKKDENKVDGMNAPKVQSGNSGRGPGDGGNKDCWRESDRKDGKKDQVCRSAPESKKPEENPASKFSSASKCAAVSVDGEDEKEGADYTK

SEQ ID NO: 40838 - protein, 84 aa, Homo sapiens
  misc_feature (1)...(84): Xaa = X or * as defined in Table 2
MENSSIIACYNELIQIEHGEVRSQFKLRACNSVFTALDHCHEAIEITSDDHVIQEXQGVYYARRKSGDSIQQHXKITPVIGQGG

SEQ ID NO: 40839 - protein, 354 aa, Homo sapiens
  DOMAIN (7)..(54): kw TRANSCRIPTASE REVERSE II ORF2 domain identified by eMATRIX, accession number DM01354V, p-value=1.000e-40, raw score of 12.97
  DOMAIN (204)..(235): 3'5'-cyclic nucleotide phosphodiesterase domain identified by PFam, accession name PDEase, E-value=5.7e-05, PFam score of 15.8
MSELPFTIASKRIKYLGIQLTRDGKDLFKENYKPLLNEIKEDTNKWKNIPCSWVGRINIVKMAILPKLLIHPENELPFRSEPHKAEGHFALFPIITEYIIAVKELLVGNPVPNSRVPVPVCGLGVGDSYLKGTCEDAVQADVQIGCGSMWSRSKSYGVEENKTENGNFETAAISAEKALRKIAPKNAREEGIFKRNGKRPGVTDEEKRQGLPVVMPVFDRNTCSIPKSQISFIDYFITDMFDAWDGVKCQHYVYGPYPQEDSEKQIIIETIKKLSSKSTLTGNHSLSSLTQQGDQQPFDSGHKQKEGRFMRNIKIGTMLSIPNLKIQNLKCSKIQDLLSTDVMPQVENLIPDIM

SEQ ID NO: 40840 - protein, 659 aa, Homo sapiens
  DOMAIN (462)..(478): 3'5'-CYCLIC NUCLEOTIDE PHOSPHODIESTERASE SIGNATURE domain identified by eMATRIX, accession number PR00387C, p-value=8.920e- 13, raw score of 14.62
  DOMAIN (357)..(613): 3'5'-cyclic nucleotide phosphodiesterase domain identified by PFam, accession name PDEase, E-value=6.7e-52, PFam score of 150.2
MREFELDSLFLEQNLKGTVFFPVRAQWRLKSMQVCNGCCTSSGGTPELAAQSSGYTASSLGLKVMELQKLGLGDLGETPSLQNRRYPSMARIHSMTIEAPITKVINIINAAQENSPVTVAEALDRVLEILRTTELYSPQLGTKDEDPHTSDLVGGLMTVSDEAKPEKQESSCTAVAEGLLLAERGYPMGSVPLVAAQRQHCTHLYTYFSLHANEGAVFADISRMRVVTSGLLPWKGWKGLDVVMATVNCRGMLDGLRRLSGNEYVFTKNVHQSHSHLAMPITINDVPPCISQLLDNEESWDFNIFELEAITHKRPLVYLGLKVFSRFGVCEFLNCSETTLRAWFQVIEANYHSSNAYHNSTHAADVLHATAFFLGKERVKITDSTVKRCCMSEAASPHLGQKAQLAKNVLKISNPLTRPSAQTRMDVGLQDPVGNAQPCLPISQGSLDQLDEVAALIAATVHDVDHPGRTNSFLCNAGSELAVLYNDTAVLESHHTALAFQLTVKDTKCNIFKNIDRNHYRTLRQAIIDMVLATEMTKHFEHVNKFVNSINKPMAAEIEGSDCECNPAGKNFPENQILIKRMMIKCADVANPCRPLDLCIEWAGRISEEYFAQFAGSRTCTKTEKSSIHSLGYSWVSTWRVMGTQALVKTSRPRGVPVQ

SEQ ID NO: 40841 - protein, 680 aa, Homo sapiens
  DOMAIN (415)..(456): 3'5'-cyclic nucleotide phosphodiesterases proteins domain identified by eMATRIX, accession number BL00126C, p-value=7.857e- 24, raw score of 22.07
  DOMAIN (391)..(637): 3'5'-cyclic nucleotide phosphodiesterase domain identified by PFam, accession name PDEase, E-value=4.4e-61, PFam score of 176.5
LPLLHAGFNRRFMENSSIIACYNELIQIEHGEVRSQFKLRACNSVFTALDHCHEAIEITSDDHVIQYVNPAFERMMGYHKGELLGKELADLPKSDKNRADLLDTINTCIKKGKEWQGVYYARRKSGDSIQQHVKITPVIGQGGKIRHFVSLKKLCCTTDNNKQIHKIHRDSGDNSQTEPHSFRYKNRRKESIDVKSISSRGSDAPSLQNRRYPSMARIHSMTIEAPITKVINIINAAQENSPVTVAEALDRVLEILRTTELYSPQLGTKDEDPHTSDLVGGLMTDGLRRLSGNEYVFTKNVHQSHSHLAMPINHSMDVPPCISQLLDNEESWDFNIFELEAITHKRPLVYLGLKVFSRFGVCEFLNCSETTLRAWFQVIEANYHSSNAYHNSTHAADVLHATAFFLGKERVKGSLDQLDEVAALIAATVHDVDHPGRTNSFLCNAGSELAVLYNDTAVLESHHTALAFQLTVKDTKCNIFKNIDRGNHYRTLRQAIIDMVLATEMTKHFEHVNKFVNSINKPMAAEIEGSDCECNPAGKNFPENQILIKRMMIKCADVANPCRPLDLCIEWAGRISEEYFAQTDEEKRQGLPVVMPVFDRNTCSIPKSQISFIDYFITDMFDAWDAFAHLPALMQHLADNYKHWKTLDDLKCKSLRLPSDRLKPSHRGGLLTDKGHCESQ

SEQ ID NO: 40842 - protein, 147 aa, Homo sapiens
  DOMAIN (37)..(54): Zinc finger C2H2 type, domain proteins. domain identified by eMATRIX, accession number BL00028, p-value=5.304e-12, raw score of 16.07
  DOMAIN (4)..(113): Zinc finger, C2H2 type domain identified by PFam, accession name zf-C2H2, E-value=5.5e-15, PFam score of 63.2
ERTFNCCYPGCHFKTVHGMKDLDRHLRIHTGDKPHKCEFCDKCFSRKDNLTMHMRCHTSVKPHKCHLCDYAAVDSSSLKKHLRIHSDERPYKCQLCPYASRNSSQLTVHLRSHTGPGPADLLEHSRLHQADHPEKCPECSYSCSSAA

SEQ ID NO: 40843 - protein, 319 aa, Homo sapiens
  DOMAIN (194)..(211): Zinc finger C2H2 type, domain proteins. domain identified by eMATRIX, accession number BL00028, p-value=5.304e-12, raw score of 16.07
  DOMAIN (80)..(270): Zinc finger, C2H2 type domain identified by PFam, accession name zf-C2H2, E-value=5.5e-15, PFam score of 63.2
MSRRKQAKPQHLNSEEPRPARRECAEVAPQVAGEPASELDDDVPKANCLSTESTDTPKAPVITLPSEAREQMATLGERTFNCCYPGCHFKTVHGMKDLDRHLRIHTVPFCFSKVYWNGFQLGMISPPKGTMSGDIFDCYNWRRKGSTGICIWTGGGGTPICPGYHLGQIFVAILTKKPLTLTPYVFEGDKPHKCEFCDKCFSRKDNLTMHMRCHTSVKPHKCHLCDYAAVDSSSLKKHLRIHSDERPYKCQLCPYASRNSSQLTVHLRSHTATLSKRNRECLQESDEIPRDFTTLFDLSIFQLDTTSFHSVIESVPVGL

SEQ ID NO: 40844 - protein, 478 aa, Homo sapiens
  DOMAIN (194)..(211): Zinc finger C2H2 type, domain proteins. domain identified by eMATRIX, accession number BL00028, p-value=5.304e-12, raw score of 16.07
  DOMAIN (80)..(470): Zinc finger, C2H2 type domain identified by PFam, accession name zf-C2H2, E-value=1.2e-37, PFam score of 138.5
MSRRKQAKPQHLNSEEPRPARRECAEVAPQVAGEPASELDDDVPKANCLSTESTDTPKAPVITLPSEAREQMATLGERTFNCCYPGCHFKTVHGMKDLDRHLRIHTVPFCFSKVYWNGFQLGMISPPKGTMSGDIFDCYNWRRKGSTGICIWTGGGGTPICPGYHLGQIFVAILTKKPLTLTPYVFEGDKPHKCEFCDKCFSRKDNLTMHMRCHTSVKPHKCHLCDYAAVDSSSLKKHLRIHSDERPYKCQVCPYASRNSSQLTVHLRSHTAGDTPFQCWLCSAKFKISSDLKRHMIVHSGEKPFKCEFCDVRCTMKANLKSHIRIKHTFKCLHCAFQGRDRADLLEHSRALHQADHTEKCPECSYSCSSAAALRVHSRVHCKDRPFKCDFCSFDTKRPSSLAKHVDKVHRDEAKTENRAPLGKEGLREGSSQHVAKIVTQRAFRCETCGASFVRDDSLRCHKKQHSDQSEKQNLTLG

SEQ ID NO: 40845 - protein, 475 aa, Homo sapiens
  DOMAIN (427)..(470): PROTEIN NUCLEAR RIBONUCLEOPROTEIN domain identified by eMATRIX, accession number PD02784B, p-value=8.981e-09, raw score of 26.46
  DOMAIN (171)..(464): RNA recognition motif. domain identified by PFam, accession name rrm, E-value=7e-19, PFam score of 76.2
MIAFDSMSHIQVMLMQEESTAPATLEHILGHSQLCGSDGLAHAAVWVLAHLHYWFTGLSPGPMDVLPLHPAISSSFHLWRVAFISKAGKPRAAGHLLKRFLRCQFQRAASSLLFTTVEAMLGTESGTEKVMRGAGTWYHIIIENWPSAECVWTEEYQQGRGQEDSAEDRKLFVGMLNKQQSEDDVRRLFEAFGNIEECTILRGPDGNSKGCAFVKYSSHAEAQAAINALHGSQTMPGASSSLVVKFADTDKERTMRRMQQMAGQMGMFNPMAIPFGAYGAYAQALMQQQAALMASVAQGGYLNPMAAFAAAQMQQMAALNMNGLAAAPMTPTSGGSTPPGITAPAVPSIPSPIGVNGFTGLPPQANGQPAAEEIFANGIHPYPAQSPTAADPLQQAYAGVQQYAGPAAYPAAYGQISQAFPQPPPMIPQQQREGFVSFDNPASAQTAIQAMNGFQIGMKRLKVQLKRPKDANRPY

SEQ ID NO: 40846 - protein, 180 aa, Homo sapiens
AAAPMTPTSGGSTPPGITAPAVPSIPSPIGVNGFTGLPPQANGQPAAEAVFANGIHPYPAQSPTAADPLQQAYAGVQQYAGPAAYPAAYGQISQAFPQPPPMIPQQQREGPEGCNLFIYHLPQEFGDSELMQMFLPFGFRERFDNPASAQTAIQAMNGFQIGMKRLKVQLKRPKDANRPY

SEQ ID NO: 40847 - protein, 329 aa, Homo sapiens
WFKCYGCNSSRDWQRSTYLLSWEVRGRPVPDSGCKAVVALCSQPAHPSNICKGVGGCLTKHLLLMGAMGIRVACLEVWRDGEERGGEEATFFTSLAERQVGTAHRHLHQPALYIQIRKVPAALHMCVVQKPSLFQADSRAPLEQGLRQQASLATARPIVSGANAGPAGLKVPQAAQLQLSPYLHRGVGDEACRYGRSQPTRKAFALCICAAPALPCPALDGSWMVCGLGQETRTSLANVQSFTQRPQQQPLTVWMLNRGRKPAQGTLTVICPIGPGHLLTSTITESVCVPRRNKYHSRTLPAAQHCQWLVTAVPTALGLVIRAGSKKLC

SEQ ID NO: 40848 - protein, 130 aa, Homo sapiens
PGTWLPCAAPWAPFANATSGPTCRKDLKSWVQGNLTACGRSLFLFDEMDKMPPGLMEVLRPFLGSSWVVYGTNYRKAIFIFIRWGPALQWAQCGGHFSEVQLYSLSLCSQQNPVPHGLSWAFPVPSATLR

SEQ ID NO: 40849 - protein, 36 aa, Homo sapiens
  misc_feature (1)...(36): Xaa = X or * as defined in Table 2
FFWSHSXVYYTCFLLQNXKHLKPGPSGSLSPSISGN

SEQ ID NO: 40850 - protein, 324 aa, Homo sapiens
  DOMAIN (227)..(242): TRANSCRIPTION FACTOR NF-KB SIGNATURE domain identified by eMATRIX, accession number PR00057B, p-value=3.418e-09, raw score of 11.81
MAAATRGCRPWGSLLGLLGLVSAAAAAWDLASLRCTLGAFCECDFRPDLPGLECDLAQHLAGQHLAKALVVKALKAFVRDPAPTKPLVLSLHGWTGTGKSYVSSLLAHYLFQGGLRSPRVHHFSPVLHFPHPSHIERYKNDLKSWVQGNLTACGRSLFLFDEMDKMPPGLMEVLRPFLGSSWVVYGTNYRKAIFIFISNTGGEQINQVALEAWRSRRDREEILLQELEPVISRAVLDKPAPLPSPNSGHHWKERLLDAVVPFLPLQRHHVRHCVLNELAQLGPGAKGMRVVQAVLDSTTFFPEDEQLFSSNGCKTVASRIAFFL

SEQ ID NO: 40851 - protein, 186 aa, Homo sapiens
ATSPHQSQQSTVDVGQLHDPQPYPQHAIQVQHIQVSEPTASAPSSAQGSSSTQGQGLQQQQQQQQNSSVQHTYLPSAWNSFRGYSSEIQMMTLPPGQFVITDSGVATPVTTGQVKAVTSGHYVLSESQSELEEKQTSALSGGVQVEPPAHSDSLDPQTNKQQQTTQYIITTTTNGNGSSEVHITKP

SEQ ID NO: 40852 - protein, 67 aa, Homo sapiens
FSNDSSFIADLGQTHKGLCQLLTVSVPRGLPPRCRVFWVSKKVSCSSQRRSQAAQRKLDSKQPQQQP

SEQ ID NO: 40853 - protein, 115 aa, Homo sapiens
  DOMAIN (71)..(89): GLIADIN AND LMW GLUTENIN SUPERFAMILY SIGNATURE domain identified by eMATRIX, accession number PR00208A, p-value=7.485e- 10, raw score of 12.59
  misc_feature (1)...(115): Xaa = X or * as defined in Table 2
ADQARGKPTEWAVSATQFQLDFPITXCYGLLXQRVSRRHIGALQGKPVPLLHVLLYPITPREGGLGDRARLCLKQQQQQQQQQQQQQLLLLLLLLLLLLLLLQQCEGTEGRPFPD

SEQ ID NO: 40854 - protein, 382 aa, Homo sapiens
  DOMAIN (94)..(146): Phosphoglycerate mutase family phosphohistidine proteins domain identified by eMATRIX, accession number BL00175D, p-value= 6.932e-24, raw score of 27.67
  DOMAIN (7)..(156): Phosphoglycerate mutase family domain identified by PFam, accession name PGAM, E-value=1.8e-41, PFam score of 151.2
MVTYKLVLIRCGESTWNLENHFSSWQKRAIRILWTVLDAIDQMRLPVVRTWCLKEWHYGSLAGLNKAETSAKHGEAQSNISKGCRYADLTEDQLSSGESLKEIVPQIKEGKWVLTAAHGNSLRGIVKHLEGLSEEAIMELNLPTGIPIVYELDKNLKPIKPMQFLGDEVTLCKAMEAVAAQSKAKKRRPAGMLLSPGTPSLAIPSSAPAPCTCHTDHIWNSPVYSDLAILRANPFCVHISKANYLVNELHTAVNVAGLYIGWRCPHYLWDCFRIGDESRCFCGHLLREHRIISDISVPCKVSQCRCFMFCFIPSRPEEVGCCCGCFESNFLCAACDRRWEEHETFFDTQKTRQRGGRPRGADYVPFAEMAVLREAILSNSDF

SEQ ID NO: 40855 - protein, 170 aa, Homo sapiens
  DOMAIN (78)..(130): Phosphoglycerate mutase family phosphohistidine proteins domain identified by eMATRIX, accession number BL00175D, p-value= 9.400e-34, raw score of 27.67
  DOMAIN (2)..(139): Phosphoglycerate mutase family domain identified by PFam, accession name PGAM, E-value=2.8e-71, PFam score of 250.2
GRLNERHYGGLTGLNIAETAAKHGEAQVKIWRRSYDVPPPPKEPDHPFYRNIRMDRRYADLTEDQLPSCESLKDTIARALPFWNEEIGPQIKEGKRVLIATHGNSLRGIVKPWEGLSEEAIMELNLPTGIPIVYELDKNLKPIKPMQFLGDEETVRKAMEAVAAQGKAKK

SEQ ID NO: 40856 - protein, 78 aa, Homo sapiens
  misc_feature (1)...(78): Xaa = X or * as defined in Table 2
XIKNDDGKKALVLDCHYPEDEVGQEDEAESDIFSIREVSFQSTGESEWKDTNYTLNTALEHQEYITFLEDLKSFVKSQ

SEQ ID NO: 40857 - protein, 314 aa, Homo sapiens
PAAPQVAGRLGLGCPLHLHVFAVVSAMLPLLRCVPRVLGSSVAGLRAAAPASPFRQLLQPAPRLCTRPFGLLSVRAGSERRPGLLRPRGPCACGCGCGSLHTDGDKAFVDFLSDEIKEERKIQKHKTLPKMSGGWELELNGTEAKLVRKVAGEKIPVPFNINNSIPPTFYGEKDPSQSQKVEDREPELTSLPKFVVEVIKNDDGRKALVLDCHYPEDEVGQEDEAESDIFSIREVSFQSTGESEWKDTNYTLNTDSLDWALYDHLMDFLADRGVDNTFADELVELSTALEHQEYITFLEDLQEVLSRAHRADRC

SEQ ID NO: 40858 - protein, 291 aa, Homo sapiens
  DOMAIN (45)..(80): SYNTHASE I PSEUDOURIDYLATE PSEUDOURIDINE LYASE TR domain identified by eMATRIX, accession number PD02906C, p-value=7.070e- 22, raw score of 24.17
  DOMAIN (7)..(188): tRNA pseudouridine synthase domain identified by PFam, accession name PseudoU_synth_1, E-value=2e-24, PFam score of 94.6
AAGCRKENSLDLRSQFPRGRDSEDFNVKEEANAAAEEIRYTHILNRVLPPDIRILAWAPVEPSFSARFSCLERTYRYFFPRADLDIVTMDYAAQKYVGTHDFRNLCKMDVANGVINFQRTILSAQVQLVGQSPGEGRWQEPFQLCQFEVTGQAFLYHQVRCMMAILFLIGQGMEKPEIIDELLNIEKNPQKPQYSMACEFPLVLYACKFENVKWIYDQELRSSNITHLQQLWANHAVKTHMLYSMLQGLDTVPVPCGMGPKMDGMTEWGNVKPSVIKQTQCLCRRSEDAHI

SEQ ID NO: 40859 - protein, 42 aa, Homo sapiens
LGSCGRGHREALGCAWLLLLEEVFTSQESQSVSGPRWEKNWL

SEQ ID NO: 40860 - protein, 105 aa, Homo sapiens
FFFLNTNVLLRKPHVGPRLRGLPYSPHWSLAPSLLLALCPPWKARISYGVCRCPRVYRCAGLLGCRHSGMVAALRERQVFGERCPHLPRLKESQGSAQSFLLWNT

SEQ ID NO: 40861 - protein, 361 aa, Homo sapiens
MAAPTPARPVLTHLLVALFGMGSWAAVNGIWVELPVVVKELPEGWSLPSYVSVLVALGNLGLLVVTLWRRLAPGKDEQVPIRVVQVLGMVGTALLASLWHHVAPVAGQLHSVAFLALAFVLALACCASNVTFLPFLSHLPPRFLRSFFLGQGLSALLPCVLALVQGVGRLECPPAPINGTPGPPLDFLERFPASTFFWALTALLVASAAAFQGLLLLLPPPPSVPTGELGSGLQVGAPGAEEEVEESSPLQEPPSQAAGTTPGPDPKAYQLLSARSACLLGLLAATNALTNGVLPAVQSFSCLPYGRLALPPGLWCWAVLPIPWACFLGHGCCCAGPWQGWGGLLSAGRVLWGLPDGRWQS

SEQ ID NO: 40862 - protein, 232 aa, Homo sapiens
QFFRVITCLPFKGPDYRLYKSEPELTTVAEVDESNGEEKSEPVSEIETSVVKGSHFPVGVVPPRAKSPTPESSTIASYVTLRKTKKMMDLRTERPRSAVEQLCLAESTRPRMTVEEQMERIRRHQQACLREKKKGLKCFSVLSDQSPLQSPSNLRDNPFRTTQTRRRDDKELDTAIRENDVKPDHETPATEIVQLKETEPQNVDFSIRGLLDCPSVSILPGRSIKRAKNQNS

SEQ ID NO: 40863 - protein, 132 aa, Homo sapiens
  misc_feature (1)...(132): Xaa = X or * as defined in Table 2
MGREPGHGSIDGQSCGVGVSESSCRDWVHWFPPHMVPPHHTLHTTGIPHPAIVTPTVKQESSQSDVGSLHSSKHQDSXXXXXXGARLKEPNLTTAGWGGKIFFKGPPKKISGAGFKKRGEGKNLGVTKLNRL

SEQ ID NO: 40864 - protein, 319 aa, Homo sapiens
  DOMAIN (269)..(308): TRANSCRIPTION PROTEIN DNA-BINDIN domain identified by eMATRIX, accession number PD02448A, p-value=3.122e-09, raw score of 9.37
  DOMAIN (264)..(318): HMG (high mobility group) box domain identified by PFam, accession name HMG_box, E-value=6.8e-15, PFam score of 62.9
PPRSESFRDKSRESLEEAAKRQDGGLFKGPPYPGYPFIMIPDLTSPYLPNGSLSPTARTYLQMKWPLLDVQAGSLQSRQALKDARSPSPAHIVSNKVPVVQHPHHVHPLTPLITYSNEHFTPGNPPPHLPADVDPKTGIPRPPHPPDISPYYPLSPGTVGQIPHPLGWLVPQQGQPVYPITTGGFRHPYPTALTVNASMSSFLSSRFPPHMVPPHHTLHTTGIPHPAIVTPTVKQESSQSDVGSLHSSKHQDSKKEEEKKKPHIKKPLNAFMLYMKEMRAKVVAECTLKESAAINQILGRRWHALSREEQAKYYELARV

SEQ ID NO: 40865 - protein, 337 aa, Homo sapiens
  DOMAIN (208)..(265): HMG (high mobility group) box domain identified by PFam, accession name HMG_box, E-value=1e-05, PFam score of 26.6
QGCAVAGPLHPARLPCCVHGCPVRMHALSLCHVRCHFAVTFRLMYLDWLPTVIEPCGVGSNKVPVVQHPHHVHPLTPLITYSNEHFTPGNPPPHLPADVDPKTGMCSCGTGRCAVARTCRIRSCVPCEALSPCDARGAHSAGIPRPPHPPDISPYYPLSPGTQGQPVYPITTGGFRHPYPTALTVNASMSRKHQDSKKEEEKKKPHIKKPLNAFMLYMKEMRAKVVAECTLKESAAINQILGRRLGYNARAFGLKRGWRLDKYRGFVWMEMAVWSLPPAFSFQGKKKKRKRDKQPGETNDKPESSLGASSLMVVGNWTYRNQEKHIPTLELDHTVSV

SEQ ID NO: 40866 - protein, 132 aa, Homo sapiens
  DOMAIN (42)..(96): Kinesin light chain repeat proteins domain identified by eMATRIX, accession number BL01160B, p-value=6.644e-09, raw score of 19.54
LPAAIEAMKNAHREEMERELEKSQRSQISSVNSDVEALRRQYLEELQSVQRELEVLSEQYSQKCLENAHLAQALEAERQALRQCQRENQELNAHNQVLLRVKESEIQYLKQEISSLKDELQTALRDKKYASD

SEQ ID NO: 40867 - protein, 62 aa, Homo sapiens
ATLTPHPLVWLLRGESALPSSPGGGQHFVFVPLMQLRTHTPESRGKPFTTWKMLKATIPILE

SEQ ID NO: 40868 - protein, 84 aa, Homo sapiens
  DOMAIN (2)..(34): REV protein (anti-repression transactivator protein) domain identified by eMATRIX, accession number PF00424A, p-value=3.647e- 11, raw score of 14.34
APSPPGAPGRSGLRRRRRRRRRRADHVGSQGEPVQEIPGQHLQQEQVSELLQAPRVASAQRRGPDAGKTHLWRLAAPGSRWDRL

SEQ ID NO: 40869 - protein, 120 aa, Homo sapiens
MSCRRHCGTRSTQVTSTKTIYTELSIAKAKADCDISRLKEQLKAATEALGEKSPDSATVSGYDIMKSKSNPDFLKKDRSCVTRQLRNIRSKSVIEQESLKEGLTVQERLKLFESRDLKKD

SEQ ID NO: 40870 - protein, 448 aa, Homo sapiens
  DOMAIN (219)..(273): Kinesin light chain repeat proteins domain identified by eMATRIX, accession number BL01160B, p-value=7.864e-09, raw score of 19.54
  misc_feature (1)...(448): Xaa = X or * as defined in Table 2
ERRKRFGMLDATDGPGTEDAALRMEVDRSPGLPMSDLKTHNVHVEIEQRWHQVETTPLREEKQVPIAPVHLSSEDGGDRLSTHELTSLLEKELEQSQKEASDLLEQNRLLQDQLRVALGREQSAREGYVLQATCERGFAAMEETHQKKIEDLQRQHQRELEKLREEKDRLLAEETAATISAIEAMKNAHREEMERELEKSQRSQISSVNSDVEALRGQYLEELQSVHRELEVLSEQYSAKCLENAHLAQALEAERQALRQCQRENQELNAHNQELNNRLAAEITRLRTLLTGDGGGEATGSPLAQGKDAHXLKGLMRVKESEIQYLKQEISSLKDELQTALRDKKYASDKYKDIYTELSIAKAKADCDISRLKEQLKAATEALGEKSPDSATVSGYDIMKSKSNPDFLKKDRSCVTRQLRNIRSKSLKEGLTVQERLKLFESRDLKKD

SEQ ID NO: 40871 - protein, 1201 aa, Homo sapiens
MEEPRSTPEETERDGTLLPGQPVQATRAPLGLPHTRLEDEDEDLGAPPGEEYGDGSPSREDSMVPPKSVEVLDREGHQQGTAKLDQGAPGVKRQRIRFSTIQCQRYIHPEGSEKTWTSSTSSDTSQDRSPSEESMSSEPAPSVLPATGDSDTYLSIIHSLETKLYVTEEKLKDVTVRLESQQGQSREALLALHHQWAGTEAQLREQLRASLLQVGALASQLEQERQERARRVEGHVGELGDFQVKNSQALMCLENCREQLRSLPRASQEDEQDARAASLASVESALVSAIQALQHWPAPAHGGARAQLETGGTEENGKPASLQQCSQSELTEQEQVRLLSDQIALEASLISQIADSLKNTTSDVSRMLHEISWSGQPPMESAGAPVDTWARKVLVDGEFWSQVESLRKHLGTLGGEAVGASGDGQQSIPQGLAPILANATWVRAELSFATQSVRESFHRRLQSIQETLRGTQTALRQHKCLLREILGAYQTPDFERVMQQVLEALRLPAGHEDGVQLSWDLSPLGEVLGRDSDSSQEPFDVSDQSPGAFVAIQEELAQQLKEKASLLEEIAAALPSLPPVESLRDCQKLLQVSQSLSYNTCLGGLGQYSSLLVQDAIIQAQVCYASCRIRLEYEKELQLCKESWQTREPSCSEQAQAARALREEYEELLRKQKSEYLDVIAIVERENAELKAKAAQLDHQQQCLEDAESKHSMSMFTLRGRYEKEIRCVVEQLTRTESTLQAERSRVLSQLDASVRDRQDMERHHGEQIQTLEDRFQLKVRELQTIHEEELRTLQEHYSQSLRCLQDTLCLHQGPHPKALPAPAPNWQATQGEADSMTGLRERIQELEAQMDVMREELGHKDLEGDAATLREKYQRDLESLKATCERGFAAMEETHQKKIEDLQRQHQRELEKLREEKDRLLAEETAATISAIEAMKNAHREEMERDWEKSQRSQISSVNWDVEALRRQYLEGAAVGAAWNLEVLFGSSYSQKCLENAHLAQALEAERQALRQCQRENQELNAHNQELNNRLAAEITRLRTLLTGDGGGEATGSPLAQGKDAYELEVLLRVKESEIQYLKQEISSLKDELQTALRDKKYASDKYKDIYTELSIAKAKADCDISRLKEQLKAATEALGEKSPDSATVSGYDIMKSKSNPDFLKKDRSCVTRQLRNIRSKSLKEGLTVQERLKLFESRDLKKD

SEQ ID NO: 40872 - protein, 51 aa, Homo sapiens
NSSHHCHHHHHHHNHHHQHHQHNHCHQHHHYNHHYDYHHDDNYYHHHHHHH

SEQ ID NO: 40873 - protein, 145 aa, Homo sapiens
HRSTITRQCPSGLETRIALLPPAVFPSGSRTLPPSTPGSSSPQPRPPLTRGPGPPRTHALASGTRGPARGEEKVADTPHHGEGGCPNSEKEPFLHPTAPPPRLPTPSPESGPVPHTLQQAPPLRRHLGGTPAGAPASPQSSEWGG

SEQ ID NO: 40874 - protein, 96 aa, Homo sapiens
SLAVFCHELPHKLGDFPALLHAGLSVRQALLLNLASALTAFAGLYVALAVGVSEESEAWILAVATGLFLFLLHNVGLLGGWTVLLLLSLYEDDITF

SEQ ID NO: 40875 - protein, 162 aa, Homo sapiens
TLSPERLSPELRLLPYMITLGDAVHNFADGLAVGAAFAISWKTGLATSLAVFCHELPHELGGLRPLAAPGAVPCAKELLLNLASALTAFAGLYVALAVGVSEESEAWILAVATALFLYVAICDMLPAMLKVRDPRPWLLFLLHNVGLLGGWTVPADAVPVRG

SEQ ID NO: 40876 - protein, 230 aa, Homo sapiens
MVGVFTPWKSAKLQMRDFFPQRFTRVAGRAADKTPDTELKKEVVYSARNIGKDSCLKSRAPQLHNAFEDACEMEVVFWGLIAERIVTEKVYESESCTDSEEELNMKTSSVHRPPAMTVKKEPREERKGPKKGTAALGKANRQADGSHPVATTTTCQQRLLPGYCQCSLKAQGLFNQLMVNAFRPGIHPFRQLAFPLAQSRSKNAVQEPRPGIMDPKSPLGVLPHCGQGGI

SEQ ID NO: 40877 - protein, 143 aa, Homo sapiens
MDDIPQEARQYRHNQAYAYSIQGDGAEDDDERIVRFHTRFSAIQCAAAVPRAPAESSSSSKKFEQSHLHMSSETQANNELTTNGHGPPASKQVSQQPKGIMGMFASKAAAKTQETNKETKTEAKEVTNIFYCTYTDAIRGKTC

SEQ ID NO: 40878 - protein, 208 aa, Homo sapiens
  DOMAIN (94)..(109): VWFC domain proteins domain identified by eMATRIX, accession number BL01208B, p-value=7.750e-10, raw score of 15.83
  DOMAIN (46)..(108): von Willebrand factor type C domain identified by PFam, accession name vwc, E-value=2.2e-14, PFam score of 61.2
MLGLLLEYFHLIFGTTNKSSSGENKRKRKRVLKSKTYLDGEGCIACVHGGKTYSHGEVWHPAFRAFGPLPCILCTCEDGRQDCQRVTCPTEYPCRHPEKVAGKCCKICPEDKADPGHSEISSTRCPKAPGRVLVHTSVSPSPDNLRRFALEHEASDLVEIYLWKLVKGGMDEESGAVQPGEEKTQGDRTAGFVALKGCPRQREQLCSE

SEQ ID NO: 40879 - protein, 310 aa, Homo sapiens
LGFPSSEVNTEIPDVSRDILKRLGDKFKVNLDSEQAVKEEKIVEQPTVSVTEPKLATPAGLKKSSKKAEPVKVLQKEKKRGKRVALSDDETKETENMRKKRRRIKLPESDSSEDEETTLRGIENGKRGFRKKDISSTIQVRCAGFLFTFRHDSVKSKLAVTASIHVYSIQKAMLKDSGPLFNTDYDILKSNLQNCSKFSAIQCAAAVPRAPAESSSSSKKFEQSHLHMSSETQANNELTTNGHGPPASKQVSQQPKGIMGMFASKAAAKTQETNKETKTEAKEVTNASAAGNKAPGKGNMMSNFFGKAAM

SEQ ID NO: 40880 - protein, 491 aa, Homo sapiens
RRFPPAGAVAVIERGVRGGSQRCRTMADQLYLENIDEFVTDQNKIVTYKWLSYTLGVHVNQAKQMLYDYVERKRKENSGAQLHVTYLVSGSLIQNGHSCHKVAVLREDKLEAVKSKLAVTASIHVYSIQKAMLKDSGPLFNTDYDILKSNLQNCSKFSAIQCAAAVPRAPAESSSSSKKFEQSHLHMSSETQANNELTTNGHGPPASKQVSQQPKGIMGMFASKAAAKTQETNKETKTEAKEVTNASAAGNKAPGKGNMMSNFFGKAAMNKFKVNLDSEQAVKEEKIVEQPTVSVTEPKLATPAGLKKSSKKAEPVKVLQKEKKRGKRVALSDDETKETENMRKKRRTIKLPESDNSEYEVFPDSSGAYEAESPSPPPPPSPPLEPVPKTEPEPPSVKSSSGENKRKRKRVLKSKTYLDGEGCIVTEKVYESESCTDSEEELNMKTSSVHRPPAMTVKKEPREERKGPKKGTAALGKANRQVSITGFFQRK

SEQ ID NO: 40881 - protein, 33 aa, Homo sapiens
IPFRNLNTYDIHWLEKILKARKHVHMVIISQLQ

SEQ ID NO: 40882 - protein, 755 aa, Homo sapiens
  misc_feature (1)...(755): Xaa = X or * as defined in Table 2
PELLTEGVKEPIMDSQERDSGDPLVDESLKRQGFQENYDARLSRIDIANTLREQVQDLFNKKYGEALGIKYPVQVPYKRIKSNPGSVIIEGLPPGIPFRKPCTFGSQNLERILAVADKIKFTATRPFQGLIPKPDEDDANRLGEKVILREQIKELFNEKLRXGPWGLNRPVLVPYKLIRDSPDAVEVPGLPDDIPIRNPNTYDIHRLEKILKAREHVRMAIISQLQLLQQQQHHISEGRPFAEICNDAKVPGESEARKPPFCPVGTRLFLLKKREPEVSMNKDRYPQEAPRNLQSLRTLLDILDDPRGGCVHLRQSQSRWRGADTRELPRGMLEGLRQLLSAIGCPRDPTCAPAQPGDQPLQRLAFTLANEPQTVLEKPPPRFRRRGAARSPEQLYTPRRGGVLPAEPERTQSASADAGSLACRALEVDSGCPTGPPCPKGSRRLTITSGVDCGLLKQMKELEQEKVVLLQGLEMMAGSRLQRLQPVQDRQCRLGQSRASADFGPAGSPHPLGRLLPKVQEVARCVGELLAAAGASRALPTSSSGPLCPALTFTSFPGWQQQTILMLKEQNRRLTQEVTEKSGRVMQLEQKSALIMKQLFEAQALSQQDGEASGLHLHLARLGWAEPQGSSVTQPFEGGRPVSPNVSGWRPPAAQAVPEWAPSCPTCHPGFPGPPPAGPRTEPLTRFWLLVLTWAGALLSLHGPQLLLPLSGTVGDSLFPAVLLWVPSPGKGNAHAGLHFRQWPVEGGRAALMRR

SEQ ID NO: 40883 - protein, 930 aa, Homo sapiens
ALRTKRLWPGGHCRAEAPQWPPASPLAPATALAAHSRHLSLCRSDKGSMSEDCGPGTSGELGGLRPIKIEPEVLDIIQVTVPDALPTSEEMTDSMPGHLPSEDSGYGMETLTDKKWTWDGAKAIGISEPIKVLYSKFLMHPEELFVVGLPEGISLRRPNCFGIAKLWKILEASNSIQFVIKSGEEIRWDRELFCRACSMPGGSLLQIAKSYTTGLESKSCDPAVESKASAGQDEMQPHARPKLLTEGVKEPIVDSQERDSRDPLVGESLKRQGFQENYDARLLRIDIANTLREQVQELFNKTYGEALGIKYPVQVPYKWIKSNPGSMIIEELPPGILFRKPFGSQNLERILAMANKITFTVTRPFQGLIRKPDEDDTNRLGEVILQEQVKELFNEKYSQCLWSGCEPPPDIPFRNLNTYDIHWLEKILKARKHVHMVIISQLQLLQQQQHHISEGRPFAEICNDAKVPGESEARKPPFCPVGTRLFLLKKREPEVSMNKDRYPQEAPRNLQSLRTLLDILDDPRGGCVHLRQSQSRWRGADTRELPRGMLEGLRQLLSAIGCPRDPTCAPAQPGDQPLQRLAFTLANEPQTVLEKPPPRFRRRGAARSPEQLYTPRRGGVLPAEPERTQSASADAGSLACRALEVDSGCPTGPPCPKGSRRLTITSGVDCGLLKQMKELEQEKVVLLQGLEMMAGSRLQRLQPVQERQCRLGQSRASADFGPAGSPHPLGRLLPKQQTILMLKEQNRRLTQEVTEKSGRVMQLEQKSALIMKQLFEAQALSQQDGEASGLHLHLARLGWAEPQGSSVTQPFEGGRPVSPNVSGWRPPAAQAVPEWAPSCPTCHPGFPGPPPAGPRTEPLTRFWLLVLTWAGALLSLHGPQLLLPLSGTVGDSLFPAVLLWVPSPGKGNAHAGLHFRQWPVEGGRAALMRR

SEQ ID NO: 40884 - protein, 97 aa, Homo sapiens
ESSRRQRCLRGQSLPADCCALLRTLLQQLQKLQTLVTNKISRPYKMAATQTGTCLMVGVAPSTTDPQEESTSQGWLFPGLGRALKIGNNGGQRPQGT

SEQ ID NO: 40885 - protein, 240 aa, Homo sapiens
MEKQVSYYGGAKPESWSHEERSQVEVGTGEVPSRSLLFYDDGAGLWEDGRSTLLPMEPPDGWEINPGGPAEQRPRDHLQHDHLDSTHETTKYLSEAWPKDGGNGTSPDFSHSKEWFHDSGERPTPAVPRKGALGGRQALERNQAGEAAGPGRGELSEVLKPPQGPDGAPPRGRPGRHAAARLELPALDPDGSLAAQPAPPTRSLPLGTLLQQLQKLQTLVTNKISRPYKMAATQTGTCLM

SEQ ID NO: 40886 - protein, 479 aa, Homo sapiens
  DOMAIN (265)..(286): CAMP RESPONSE ELEMENT BINDING (CREB) PROTEIN SIGNATURE domain identified by eMATRIX, accession number PR00041E, p-value=2.976e- 13, raw score of 7.20
  DOMAIN (248)..(305): bZIP transcription factor domain identified by PFam, accession name bZIP, E-value=9.5e-17, PFam score of 64.5
  misc_feature (1)...(479): Xaa = X or * as defined in Table 2
MAAAAAMATSPAAGPQPLVQAAHPPPDSTSIYTPGLISDFDFSGSILGAPSQLMPPSVLLLPAIEQLHCSRHYLLFYSHGNPHTKACVAFTVGVEGGPTLRGSPSLSLSCAQNSKPSHFPNCAGQATSFREEAPGEMTQLPVIKAEPLEVNQFLKVTPEDLVQMPPTPPSSHGSDSDGSQSPRSLPPSSPVRPMARSSTAISTSPLLTAPHKLQGTSGPLLLTEEEKRTLIAEGYPIPTKLPLTKAEEKALKRVRRKIKNKISAQESRRKKKEYVECLEKKVETFTSENNELWKKLQKLQTLVTNKISRPYKMAATQTGTCLMVAALCFVLVLGSLVPCLPEFSSGSQTVKEDPLAADGVYTASQMPSRSLLFYDDGAGLWEDGRSTLLPMEPPDGWEINPGGPAEQRPRDHLQHDHLDSTHETTKYLSEAWPKDECNGHQTIFLPLQGVVPRQGYGPQHHHQTLLGHAKTQDIGRTPX

SEQ ID NO: 40887 - protein, 628 aa, Homo sapiens
MDGLQASAGPLRRGRPKRRRKPQPHSGSVLALPLRSRKIRKQLRSVVSRMAALRTQTLPSENSEESRVESTADDLGDALPARREPYGHLGPAELLEASPAARSLQTPSARLVPASAPPARLVEVPAAPVRVVETSALLCTAQHLAAVQSSGAPATASGPQVDNTGGEPAWDSPLRRVLAELNRIPSSRRRAARLFEWLIAPMPPDHFYRRLWEREAVLVRRQDHTYYQGLFSTADLDSMLRNEEVQFGQHLDAARYINGRRETLNPPGRALPADRVVPVPGRLLACVSSAFSTTVWQFLAVLQEQFGSMAGSNVYLTPPNSQGFAPHYDDIEAFVLQLEGRKLWRVYRPRVPTEELALTSSPNFSQDDLGEPVLQTVLEPGDLLYFPRGFIHQAECQDGVHSLHLTLSTYQRNTWGDFLEAILPLAVQAAMEENVEFRRGLPRDFMDYMGAQHSDSKDPRRTAFMEKVRVLVARLGHFAPVDAVADQRAKDFIHDSLPPVLTDRERALSVYGLPIRWEAGEPVNVGAQLTTETEVHMLQDGIARLVGEGGHLFLYYTVENSRVYHLEEPKCLEIYPQQADAMELLLGSYPEFVRVGDLPCDSVEDQLSLATTLYDKGLLLTKMPLALN

SEQ ID NO: 40888 - protein, 137 aa, Homo sapiens
  DOMAIN (33)..(67): Clathrin adaptor complexes medium chain proteins domain identified by eMATRIX, accession number BL00990C, p-value=4.176e- 38, raw score of 18.78
  DOMAIN (1)..(137): Adaptor complexes medium subunit family domain identified by PFam, accession name Adap_comp_sub, E-value=4.3e-06, PFam score of -144.3
VLSGMPELRLGLNDKVLFDNTGRGKSKSVELEDVKFHQCVRLSRFENDRTISFIPPDGEFELMSYRLNTHVKPLIWIESVIEKHSHSRIEYMIKGGKEYLMRAHFGLPSVEAEDKEGKPPISVKFEIPYFTTSGIQV

SEQ ID NO: 40889 - protein, 323 aa, Homo sapiens
WGSWAPQSRGCPYQPGAAQGRALAPQHRGSCSPPWTGGGKEYLMRAHFGLPSVEAEDKEGKPPISVKFEIPYFTTSGIQVRLAPGSLYGRKRSSLGKSHPSLLQVDGQYSQQQGAGHPRGTKRGSQTPGARQRVEPGKCWPVVCVPHVPCPPTSTALRKHLRPQRAIYTSRLAPGALGGHCSVCLLPGLAGLACGAFPGPAWVTRCCHSARSVLTHQGAPPGPDITVPARLPEPEVEVSCRGRRPALLNAQQSPPSLPPPPPSAAAEASCSHHVRQRRLRAGPEGQGFYLFHDRNKHSILKLAKPREPFCVVTDSRIQFGPPH

SEQ ID NO: 40890 - protein, 339 aa, Homo sapiens
  DOMAIN (147)..(181): Clathrin adaptor complexes medium chain proteins domain identified by eMATRIX, accession number BL00990C, p-value=4.176e- 38, raw score of 18.78
  DOMAIN (5)..(339): Adaptor complexes medium subunit family domain identified by PFam, accession name Adap_comp_sub, E-value=9.5e-80, PFam score of 278.4
NPRAIFKSVRTCPVPPTQPCRNVKARSCGVGAGTTSFTLSVWPHRYITQEGHKLETGAPRAPGTVTNAVCWRSEGIKYRKNEVFLDVIESVNLLVSANGNVLRSEIVGSIKMRVFLSGMPELRLGLNDKVLFDNTGRGKSKSVELEDVKFHQCVRLSRFENDRTISFIPPDGEFELMSYRLNTHVKPLIWIESVIEKHSHSRIEYMIKAKSQFKRRSTANNVGDPHFPLPNDCRLNPSFKTTVGERLSWVPENSEIVWSIKSFPGGKEYLMRAHFGLPSVEAEDKEGKPPDSVFKFEIPYFLTSGIQVRYLKIIEKSGYQALPWVRYITQNGDYQLRTQ

SEQ ID NO: 40891 - protein, 93 aa, Homo sapiens
  misc_feature (1)...(93): Xaa = X or * as defined in Table 2
MGSLCFLPSLQYWCDELKVEXKTQGRGFPLPGSPASASHASWTALVKGVGSGQAQEAEGSEEQEIGESPGQSQGVAGAGLGLNEGQVPRMXTR

SEQ ID NO: 40892 - protein, 64 aa, Homo sapiens
  misc_feature (1)...(64): Xaa = X or * as defined in Table 2
LLPRPGSGLDFLLSPVLPSHSASWACPLPRPSPMPSSCCXRXRKEMASGFSKGPTLGCCPTCPP

SEQ ID NO: 40893 - protein, 61 aa, Homo sapiens
  misc_feature (1)...(61): Xaa = X or * as defined in Table 2
SPSQGESIPTXWRPTGPSPPTSSPGPAXSSLSPRPSPSSASASPSMCVRPSMWAASLLKSL

SEQ ID NO: 40894 - protein, 500 aa, Homo sapiens
  DOMAIN (109)..(161): RECEPTOR CELL NK GLYCOPROTEIN IMMUNOGLOB domain identified by eMATRIX, accession number PD01652B, p-value=2.723e-23, raw score of 8.50
  DOMAIN (42)..(398): Immunoglobulin domain identified by PFam, accession name ig, E-value=1.5e-17, PFam score of 61.6
MTPALTALLCLGLSLGPRTRVQAGPFPKPTLWAEPGSVISWGSPVTIWCQGSLEAQEYRLDKEGSPEPLDRNNPLEPKNKARFSIPSMTEHHAGRYRCHYYSSAGWSEPSDPLELVMTGFYNKPTLSALPSPVVASGGNMTLRCGSQKGYHHFVLMKEGEHQLPRTLDSQQLHSGGFQALFPVGPVNPSHRWRFTCYYYYMNTPRVWSHPSDPLEILPSGVSRKPSLLTLQGPVLAPGQSLTLQCGSDVGYDRFVLYKEGERDFLQRPGQQPQAGLSQANFTLGPVSPSNGGQYRCYGAHNLSSEWSAPSDPLNILMAGQIYDTVSLSAQPGPTVASGENVTLLCQSWWQFDTFLLTKEGAAHPPLRLRSMYGAHKYQAEFPMSPVTSAHAGTYRCYGSRSSNPYLLSHPSEPLELVVSGHSGGSSLPPTGPPSTPGLGRYLEVLIGVSVAFVLLLFLLLFLLLRRQRHSKHRTSDQRKTDFQRPAGAAETEPKDRGLLR

SEQ ID NO: 40895 - protein, 244 aa, Homo sapiens
  misc_feature (1)...(244): Xaa = X or * as defined in Table 2
RCAPMTTCAWASCCSPWPTPFGTGPPSTSVSTSWPWQPWGWGWLXVGAAPAGGRQHPSPPALPRRSSGRSKLSRPSLCQLVPGILXTRLLSPPQKESLPWRGSWREFPLPQLNTLPATEADPGVSSLPSAQRHLHSYKIKVLSRQESLAPAPASGYPESTALPQNGRGPWAVGFGQIPFLCIHNVGRSLGAGPGSGKPLPCVFRSTFSSSHQYCRLGRKHNFHFTKGKLRCGCGPGDGRPMASI

SEQ ID NO: 40896 - protein, 100 aa, Homo sapiens
  misc_feature (1)...(100): Xaa = X or * as defined in Table 2
RCCCCTTRPARKCRTTMGIRHSTWPAPTATRTTHSGSRSPGSTAASPRGLCPRPALTDCPCGHLSGLPVASVXAGSCPHVPGDQTTRKSGTVFPTQCTRP

SEQ ID NO: 40897 - protein, 741 aa, Homo sapiens
MWRKPVFMEKHKDDSGSIREAGEKGEVTRRLCYYYIHEPIHKLTLQVLQKEIVNTQNVQTTSVSGLKQTLLAESEALTSYSHRVFSAWDFGLCGDVHVRLRQRIILYELKVELEETVVRRQAAVRTLGQQARVWLVRVLLNLLVVALLGAAFYGVYWATGCTVELQEMPLVQELPLLKLGVNYLPSIFIAGVNFVLPPVFKLIAPLEGYTRSRQIVFILLRTVFLRLASLVVLLFSLWNQITCGGDSEAEDCKTCGYNYKQLPCWETVLGQEMYKLLLFDLLTVLAVALLIQFPRKLLCGLCPGALGRLAGTQEFQVPDEVLGLIYAQTVVWLCGPFRGQSSIWAQIPESISSLPETTQNFLFFLGTQAFAVPLLLISSILMAYTVALANSYGRLISELKRQRETICDKRRLLGDTTSRTPSIRCDKGRLSQSPVATGQGAVPTNSEPIRGRSRDKKKGGILSPIGSAKRRACQSLDSYDAMNILPKKSWHVRNKDNVARVRRDEAQAREEEKEREMGAAGSAREFLRKKARHQNSLPELEAAEAGAPGSGPVDLFRELLEEGKGVIRGNKEYEEEKRQEKERQEKALGILTYLGQSAAEAQTQPPWYQLPPGRGGPPPGPAPDEKIKSRLDPLREMQKHLGKKRQHGGDEGSRSRKEKEGSEKQRPKEPPSLDQLRAERLRREAAERSRAEALLARVQGRALQEGQPEEDETDDRRRRYNSQFNPQLARRPRQQDPHLTH

SEQ ID NO: 40898 - protein, 379 aa, Homo sapiens
MANLWLCPGALGRLAGTQEFQVPDEVLGLIYAQTVVWVGSFFCPLLPLLNTVKFLLLFYLKKESEGFGDRLFLKQRMSLLSQMTSSPTDCLFKLVSLASEVQDLHLAQRKEMASGFSKGPTLGLLPDVPSLMETLSYSYCYVGIMTAYREHREEIQERFSSWTSAAGLDLEEDMGVCPVFAVTLTSEEEEEEEEEQQDEGHRDPNQNLQVFTGPTPPWTGQLELGSCHALALAWTFSYLLFFRALSLLGLPTPTPFTNAVQLLLTLKGSPAEQGDKKAKSVLLLTEKDASHAVGVLRYLERADAKVPAELYEFTAGVLEAKEDKKAGRPLCPYLKAFGFCKAGILIDLLVSKGAMVNDHRTTMEPLRSTLACQTGLPDA

SEQ ID NO: 40899 - protein, 539 aa, Homo sapiens
  DOMAIN (29)..(74): HSF-type DNA-binding domain proteins domain identified by eMATRIX, accession number BL00434A, p-value=1.000e-40, raw score of 17.17
  DOMAIN (8)..(154): HSF-type DNA-binding domain identified by PFam, accession name HSF_DNA-bind, E-value=1.2e-93, PFam score of 321.3
MKQSSNVPAFLSKLWTLVEETHTNEFITWSQNGQSFLVLDEQRFAKEILPKYFKHNNMASFVRQLNMYGFRKVVHIDSGIVKQERDGPVEFQHPYFKQGQDDLLENIKRKVSSSKPEENKIRQEDLTKIISSAQKVQIKQETIESRLSELKSGNNSTVTRLIYALFLLVGVCVACVMLIPGMEEQLNKIPGFCENEKGVVPCNILVGYKAVYRLCFGLAMFYLLLSLLMIKVKSSSDPRAAVHNGFWFFKFAAAIAIIIGAFFIPEGTFTTVWFYVGMAGAFCFILIQLVLLIDFAHSWNESWVEKMEEGNSRCWYAALLSATALNYLLSLVAIVLFFVYYTHPASCSENKAFISVNMLLCVGASVMSILPKIQESQPRSGLLQSSVITVYTMYLTWSAMTNEPGGLASMLTAADRTGIRTSNNSQVNKLTLTSDESTLIEDGGARSDGSLEDGDDVHRAVDNERDGVTYSYSFFHFMLFLASLYIMMTLTNWYRYEPSREMKSQWTAVWVKISSSWIGIVLYVWTLVAPLVLTNRDFD

SEQ ID NO: 40900 - protein, 480 aa, Homo sapiens
RERSCLHLVCIRCSCDVVEMGSVLGLCSMASWIPCLCGSAPCLLCRCCPSGNNSTVTRLIYALFLLVGVCVACVMLIPGMEEQLNKIPGFCENEKGVVPCNILVGYKAVYRLCFGLAMFYLLLSLLMIKVKSSSDPRAAVHNGFWFFKFAAAIAIIIGAFFIPEGTFTTVWFYVGMAGAFCFILIQLVLLIDFAHSWNESWVEKMEEGNSRCWYAALLSATALNYLLSLVAIVLFFVYYTHPASCSENKAFISVNMLLCVGASVMSILPKIQESQPRSGLLQSSVITVYTMYLTRSCMTNEPETNCNPSLLSIIGYNTTSTVPKEGQSVQWWHAQGIIGLILFLLCVFYSSIRTSNNGQVNKLTLTSGESTLIGRWVGARSDGITGRDGGTDVSPEAVRINGKRDGCSLYSYSFFHFMLCLASLYIMMTLTSWYRYEPSAWMESQWTAVLWVKISSSWIGIVLYVWTLVAPLVLTNRDFD

SEQ ID NO: 40901 - protein, 113 aa, Homo sapiens
  DOMAIN (9)..(35): Synapsins proteins domain identified by eMATRIX, accession number BL00415J, p-value=6.968e-09, raw score of 10.57
  misc_feature (1)...(113): Xaa = X or * as defined in Table 2
GVLLCRLXQGQNYWNFLQTKVTGNMRDKRTTPMPEFLHASWPNTELRYWKENCPESQKGPXPMMALSXGCPLPWPAPNVTSSSKGWSPGQLWMYRFGRPLRISSETGWSLWLT

SEQ ID NO: 40902 - protein, 832 aa, Homo sapiens
  DOMAIN (659)..(672): PROTEIN ZINC-FINGER METAL-BINDI domain identified by eMATRIX, accession number PD00066, p-value=5.846e-15, raw score of 13.92
  DOMAIN (221)..(721): Zinc finger, C2H2 type domain identified by PFam, accession name zf-C2H2, E-value=4.9e-143, PFam score of 488.6
MEDAWGIRKETGRVKEEAEKVTGWGNNWRNVEKSSMSRKVKAARPGFKKLPMTSDIPPKCTIKDLLPKEKSSTEAVFHTVVLERHESPDIEDFSFKEPQKNVHDFECQWRDDTGNYKGVLMAQKEGKRDQRDRRDIENKLMNNQLGVSFHSHLPELQLFQGEGKMYECNQVEKSTNNGSSVSPLQQIPSSVQTHRSKKYHELNHFSLLTQRRKANSCGKPYKCNECGKAFTQNSNLTSHRRIHSGEKPYKCSECGKTFTVRSNLTIHQVIHTGEKPYKCHECGKVFRHNSYLATHRRIHTGEKPYKCNECGKAFRGHSNLTTHQLIHTGEKPFKCNECGKLFTQNSHLISHWRIHTGEKPYKCNECGKAFSVRSSLAIHQTIHTGEKPYKCNECGKVFRYNSYLGRHRRVHTGEKPYKCNECGKAFSMHSNLATHQVIHTGTKPFKCNECSQVFTQNSQLANHRRIHTGEKPYKCNECGKAFSVRSSLTTHQAIHSGEKPYKCIECGKSFTQKSHLRSHRGIHSGEKPYKCNECGKVFAQTSQLARHWRVHTGEKPYKCNDCGRAFSDRSSLTFHQAIHTGEKPYKCHECGKVFRHNSYLATHRRIHTGEKPYKCNECGKAFSMHSNLTTHKVIHTGEKPYKCNQCGKVFIQNSHLANHQRTHTGEKPYRCNECGKAFSVRSSLTTHQAIHTGKKPYKCNECGKVFTQNAHLANHRRIHTGEKPYRCTECGKAFRRQGVTPGPSLECNGTILAYSSLKFVGSSDTHISLLRSQDDRQVLPHLANPNFREGLLPAFLLLCSDSHFLQFCSQFAPRKTQGSGSVNNIQANIIAK

SEQ ID NO: 40903 - protein, 33 aa, Homo sapiens
LFPNLERWLHKHEPSSVRSHSVRASPAPRGGAQ

SEQ ID NO: 40904 - protein, 49 aa, Homo sapiens
MELVQVLKRGLQQITGHGGLRGYLRVFFRLVSVPYIPDTRPKLSVESEL

SEQ ID NO: 40905 - protein, 126 aa, Homo sapiens
RTRGRGQRGKMELVQVLKRGLQQITGHGGLRGYLRVFFRTNDAKVGTLVGEDKYGNKYYEDNKQFFWHRWLHSMTDDPPTTKPLTARKFIWTNHKFNVTGTPEQYVPYSTTRKKIQEWIPPSTPYK

SEQ ID NO: 40906 - protein, 176 aa, Homo sapiens
VLKRGLQQITGHGGLFRGYLRVFFRTNDAKVGTLVGEDKYGNKYYEDNKQFFGDERLQASGLALTLCEQTEEGSCLWSQRSKLGKSQSMNFKNSKTRSFQRTVSAGKTKYYHPVVAGRQQQARATCDHVDPRTQEHGPGAAWPYWPRLGLKHALLTFTVALQYRAQPLFRLPNLPL

SEQ ID NO: 40907 - protein, 8 aa, Homo sapiens
GQYGNYQQ

SEQ ID NO: 40908 - protein, 200 aa, Homo sapiens
  DOMAIN (94)..(102): MOLLUSCAN RHODOPSIN C-TERMINAL TAIL SIGNATURE domain identified by eMATRIX, accession number PR00239C, p-value=1.231e- 09, raw score of 3.51
MKICWNILSTTEFIENEIKGFWEKIDVWVFTQWPLTFLPVSCRIDVGHNDYGYQQPSYPEQGYDRPYEDSSQHYYEGGNSQYGQQQDAYQGPPPQQGYPPQQQQYPGQQGYPGQQQGYGPSQGGPGPQYPNYPQGQGQQYGGYRPTQPGPPQPPQQRPYGYDQTLSLISLSQNIWQTQPQFPFVHCRLETLKGQYGNYQQ

SEQ ID NO: 40909 - protein, 392 aa, Homo sapiens
  DOMAIN (315)..(323): MOLLUSCAN RHODOPSIN C-TERMINAL TAIL SIGNATURE domain identified by eMATRIX, accession number PR00239C, p-value=1.231e- 09, raw score of 3.51
WMGGNMSVAFAAPRQRGKGEITPAAIQKMLDDNNHLIQCIMDSQNKGKTSECSQYQQMLHTNLVYLATIADSNQNMQSLLPAPPTQNMPMGPGGMNQSGPPPPPRSHNMPSDGMVGGGPPAPHMQNQMNGQMPGPNHMPMQGPGPNQLNMTNSSMNMPSSSHGSMGGYNHSVPSSQSMPVQNQMTMSQGQPMGNYGPRPNMSMQPNQGPMMHQQPPSQQYNMPQGGGQHYQGQQPPMGMMGQVNQGNHMMGQRQIPPYRPPQQGPPQQYSGQEDYYGDQYSHGGQGPPEGMNQQYYPDGNSQYGQQQDAYQGPPPQQGYPPQQQQYPGQQGYPGQQQGYGPSQGGPGPQYPNYPQGQGQQYGGYRPTQPGPPQPPQQRPYGYDQGQYGNYQQ

SEQ ID NO: 40910 - protein, 345 aa, Homo sapiens
  DOMAIN (272)..(291): ALPHA/BETA GLIADIN FAMILY SIGNATURE domain identified by eMATRIX, accession number PR00209B, p-value=3.859e-12, raw score of 4.88
MHLEVNSSPEPLDENLDNTVTSALSGHEQRIQTSLPVLLTTKTEILARFSQLQFPEEQSSFAYPANCVKSKGMNTKLPLRPLKVCRELTIDSDRDILYRTLFMGDSGMGKVQFEFGEEVHIVIKSTGFGPFSSYATLEPFVAVQLWGGGQHYQGQQPPMGMMGQVNQGNHMMGQRQIPPYRPPQQGPPQQYSGQEDYYGDQYSHGGQGPPEGMNQQYYPDGHNDYGYQQPSDPEQGYDRPYEDSSQHYYEGGNSQYGQQHDAYQGPPPQQGYPPQQQQYPGQQGYPKQQQGYGPSQGGPGPQYPNYPQGQGQQYGGYIPTQPGPPQPPQQRPYGYDQGQYGNYQQ

SEQ ID NO: 40911 - protein, 28 aa, Homo sapiens
  misc_feature (1)...(28): Xaa = X or * as defined in Table 2
LKVSTXAMPLPRXTPSRRCQPXRTGTSP

SEQ ID NO: 40912 - protein, 28 aa, Homo sapiens
  misc_feature (1)...(28): Xaa = X or * as defined in Table 2
LKVSTXAMPLPRXTPSRRCQPXRTGTSP

SEQ ID NO: 40913 - protein, 151 aa, Homo sapiens
  DOMAIN (35)..(115): Glutathione S-transferases domain identified by PFam, accession name GST, E-value=2.8e-08, PFam score of 30.6
  misc_feature (1)...(151): Xaa = X or * as defined in Table 2
XTCRPVPVWMSTWHGSTRLCGEAASGLVDKVMFPVFLGEPVSPQTLAATLAELDVTLQLLEDKFLQNKAFLTGPHISLADLVAITELMHPVGAGCQVFEGRPKLATWRHALEAAVGEELFQEAHEFILKAKTSTCRPSIGQKLIPACGHDP

SEQ ID NO: 40914 - protein, 100 aa, Homo sapiens
CPCTQLRPFLSSCLASLHDPHPFIRPQGNPVVYSVRPSRVLGSPDSWISLLAHLSLFGLQTRPAMAPGRRWRWEKFPKLCMPTCPLPDFSVPQTRGWTYL

SEQ ID NO: 40915 - protein, 32 aa, Homo sapiens
HGGQSCHRPLAYPVSRILSPLTSNQSTGVEVK

SEQ ID NO: 40916 - protein, 62 aa, Homo sapiens
  DOMAIN (1)..(62): Ribosomal L18ae protein family domain identified by PFam, accession name Ribosomal_L18ae, E-value=4.7e-07, PFam score of -8.9
ARHRARAHSIQIMKVEEIAASKCRRPAVKQFHDSKIKFPLPHRVLRRQHKPRFTTKRPNTFF

SEQ ID NO: 40917 - protein, 203 aa, Homo sapiens
  DOMAIN (1)..(137): Ribosomal L18ae protein family domain identified by PFam, accession name Ribosomal_L18ae, E-value=2.1e-11, PFam score of 45.3
MFAPNHVVAKSSFWYFVSQLKKMKKFSGEIAYSGWVFEKSPLRVKNFRIWLRCDSLSGTHNLYREYQDLTTAGGHPVLPSHGLMGLELYLDLLSQPCRAVYIFAKKNDIPFELRIVDLIKGQHLSDAFAQGEPPQEGASLEGRGLHLDGECGPSCSYLTRKYKVPDYLVPLGTCRPVPVLDEYLGMAAHDFCGEAASGPCGIR

SEQ ID NO: 40918 - protein, 388 aa, Homo sapiens
  DOMAIN (28)..(119): Lectin C-type domain identified by PFam, accession name lectin_c, E-value=8.4e-26, PFam score of 99.2
AFSLGKMSEKKLFGPNGERMPFSKVKALCAGLQATVAAPKNAEENKAIQDVAKDTAFLGITDEATEGQFMYLTGGRLTYSNWKKDEPNDHGSGEDCVILLNNGLWNGISCTSSFIAIFQWAHYQYRQAENYPKGELHTLRVKLCGPSWPTNAIHFRSRLLMPLGPTVLLMTMAVFQLSQAVAMCSWCCGLVLPPAGCLQDKASKPRETQAQPGLCVRGNFRIPSRQDFAAALARALSGLDLWASLWVPFADFLGSSLSVPWFSYLENDEEDLTRLSLRLNGERTFLESPGKKRIGAGTPPMSQEAVMLAVMERDPGQCRGEEGPTECRAMWPGWGGRHSLPGHPAMLCSFLGSDLEIRGSNGGWEPPFIPGLQPELARGIQGSGRGAE

SEQ ID NO: 40919 - protein, 51 aa, Homo sapiens
LSICLQSAVCTPGMDPAAPCSLGILDWGTLPSTAEPGREGPADAWVDPGVR

SEQ ID NO: 40920 - protein, 70 aa, Homo sapiens
  misc_feature (1)...(70): Xaa = X or * as defined in Table 2
HLLPTQGALCPAEGWPAPWQGYTPTCDCAEDTTQLERAGQLPPVFXSCHRGGVSSQXGSPGVPQLLHQPE

SEQ ID NO: 40921 - protein, 209 aa, Homo sapiens
  misc_feature (1)...(209): Xaa = X or * as defined in Table 2
SSKLSGLTTNVVDIILAHHFGQEELQANLDLIQTYRMHIAQDINQDNLQLFLNSYNGRRDLEIERPILGQNDNKSKTLKGSTLLVVGDNSPAVEAVVECNSRLNPINTTLLKMADCGGLPPGXFSPGKLTEAFKYFLQGMGYIPLVLCYSTSGSMTSVARSRTHSTSSSLGSGESPFSRSVTSNQSDGTQESCESPDVLDRQQTMEVSC

SEQ ID NO: 40922 - protein, 382 aa, Homo sapiens
KSCFNAFFNFEDMQEITQHFAVCHVDAPGQQEGAPSPFPTGYQYPTMDELAEMLPPVLTHLSLKSIIGIGVGAGAYILSRFALNHPELVERPLCSLMVDPCALKGWIDWAASKLSGLTTNVVEIILAHHFGQEELQANLDLIQTYRMHIAQDINQDNLQLFLNSYNGRRDLEIERPILGQNDNKSKTLKCSTLLVVGDNSPAVEAVMADCGGLPQVVQPGKLTEAFKYFLQGMGYIPVCAAQSPEHRVSTSASMTRLARSRTHSTSSSLGSGESPFSRSVTSNQSDGTQESCESPDVLDRHQTMEISLDDVLLSALLRNNGKSAQQKKISAKPKLEFLCPRPGTCDHGSREKQGHSRGPGQFPGRWPGRAVAETRGAIDHRL

SEQ ID NO: 40923 - protein, 34 aa, Homo sapiens
  misc_feature (1)...(34): Xaa = X or * as defined in Table 2
GICPFLQLSFYHLLDXDTRYLQILRLQLKPHSFH

SEQ ID NO: 40924 - protein, 517 aa, Homo sapiens
  DOMAIN (349)..(360): RNase H domain identified by eMATRIX, accession number PF00075B, p-value=1.000e-13, raw score of 12.56
  DOMAIN (282)..(470): Reverse transcriptase domain identified by PFam, accession name rvt, E-value=4.7e-31, PFam score of 116.6
  misc_feature (1)...(517): Xaa = X or * as defined in Table 2
MRKDSCASSMHQQVSRSKKRAGQKTPPEDQEGGQRALRSSHIRLGQFLLIEDCKTPSPSSLGADAIAKQRKTSVSAAASVSATIPIRRVQGPTVVGSWARGVSAAASGPRGTGPKGKARSEKGCSLSHGPQTNKPLVVQKGQKMEQANHPVGLVISVVYKDILKKIVQRETSHPLIHVRYAEAITGRRTAPEDKGSLGRDMLAKAGAIIYMNMGNKLPIWCHLLEEGIYLEVWALEGQFGRAKNACPVQIRLKDPTTFPYQRQYPLRPEAHKGLQDIVKHVKAQGLVKKCSSPCNTPILGVQKPNGQWSLVQDLRLISEAVIPLYPVVPNPYTLLSQIPEEAEWFPVLDLKDAFFCIPLHYDSHDSQFLFAFEDPTDHTSQLIWTVLPQGFRDSPHLFGQALAQDLGHFSSPGTLVLQYVDDLLLATSSEASCQQATLDLLNFLANQGYKASRSKAQLCLQQVKYLGLILARGTRTLGKERIQPILAYPHPKTLKQLWGFLQITGFCQLWIPRXSKI

SEQ ID NO: 40925 - protein, 340 aa, Homo sapiens
  DOMAIN (150)..(167): Zinc finger, CCHC class domain identified by PFam, accession name zf-CCHC, E-value=0.0035, PFam score of 23.7
  misc_feature (1)...(340): Xaa = X or * as defined in Table 2
MKPSVWALIQLNLSPYEKGILGLTKRHQGRLCTDGRQGIQPLPPSQAHTGIPLLHPYSIQVDCAIDRGKLCFCCCIGECNYSDQQGPGTVAGSWARGISAAVSVSATILISRVQGPLHVLGQEVFLLLRRQTNLAGSERTENGAGQSPGGACYQCGLQGHFTKDCPMRNKLPPRPCPLYQGNHWKDGEPIEHDCQQIIVQTSAAREDLLEVPLANPDLNLYTDGSSFVENGEVAKAVIAQFPTTVGVSCLDGRLRVLEVLARAIRLGEGNKGYSIRKRGSQIVPVCRXHDCISRKPHHLSPKSPXADKQLQQSLRIQNQCAKITSILIHQXQTNREPNHE

SEQ ID NO: 40926 - protein, 697 aa, Homo sapiens
  DOMAIN (569)..(580): RNase H domain identified by eMATRIX, accession number PF00075B, p-value=1.000e-13, raw score of 12.56
  DOMAIN (502)..(687): Reverse transcriptase domain identified by PFam, accession name rvt, E-value=1.3e-27, PFam score of 105.1
MGRKQHKKAENSKNQNAYSPPKDHNSLPAREQNWTENEFDKLTEVGFRSKADQHSNSGTTENTAKILLEKNNAKTHNCQIHIEMKEKMLRAAREKGIGQQVFCNEGLNALLSDKFLKMMCPQFVPSDVQMCPEFLPPGGFVVSLTSGVKLQTFTVSVTALKGGISGVVHSFWWVRGLAGLMSEAADLRGVNLQTFMVSVTAHKGFADPKSEQQRDLLRRVKEQRFHSLESDLSQLPLLALVACFYSLILPHPHPPERADWSILQRADCLGTLAAQRELVPDNQEEKRGSEKEMETWYCGQSSREKGMAVHAWDSASDQAQQASARCPECGACQACAHLEPALACEHRTQPQLLPAPLSSHFPNSGAKYQTPIGQLKVTSTAAGLKTRVSGFLGKGSLTNPDSSELGALKEISKEISKGPQNPPGCQFCPLQAVGGGEFGPTQVHDPFSLSDLKQIKADLVKFSDGPDRRLSSRSVTIRGILGQSVTRPEAHKGLQDIVKHLKAQGLVRKCSSDCNTPILGVQKLNGQWRLVQDLGLINKAIIPLYPVVPNPYTLLSQISEEAEWFTVLDLKDAFFCIPLHSDSQFLFACEDPTDHTSQLTQTILPHGFRDSPYLFGQALAQDLGHFSSSGTLALQYVDDLPLATSLEASCQQATLDLLNFLANQGYKASRSKAQLCLQQVEYLGLILARGARALSKE

SEQ ID NO: 40927 - protein, 757 aa, Homo sapiens
  DOMAIN (486)..(503): RNase H domain identified by eMATRIX, accession number PF00075A, p-value=3.160e-12, raw score of 14.44
  DOMAIN (470)..(698): Reverse transcriptase domain identified by PFam, accession name rvt, E-value=1.2e-24, PFam score of 95.3
  misc_feature (1)...(757): Xaa = X or * as defined in Table 2
MSMGFLVEESEPVVWRGLMVMSAIEKLLRQVSGYLLAQGVSRNVVHEPGVGSSQVCSVPCPTVAKLNSGAKYRAPVGQLKATSAATRLKTRVSGFLGRGSLTSPDSLELGALVCLEPASTFPVLLGRAKGRQRGKPFSSGVRTTRGPISLPPYPSLPIAPRPINDNPPLISPAQKEICEEISKGQQKPLGYRLCPLQAVGGGEFGPTWVHVPFSLSDLKQIKADLGNFSDDPDRYINVLQGLGQIFYLIWRDVMLLLDQTLAFNEKNAALAAAQEFGDTWYLSQVNDRMTAEERGKIPNGQQAVPSMDPHWDLDSDHGDCSCKHLLTCVLEGLRRIRKKDQEEQAQKEKQDQRKTAALVMALRQTNFGGSERTENGAGQSPERDTLAKAGAIIYMNMGNKLPICCPLPEEGINPEVWALEGQFGKAKNAHPVQIRLKDPTTFPYQRQYPLRPEAHKGLKDIVKYLKAQALVKKCSSPCNSPILGVQKPNSQWRLVQDLRLINEAVIPLYPVVPNPYILLSQIPEEAEWFTVLDLKDAFFCIPPHSDSQFLFAFEDPTDHMSQLMWTVLPQGFKDSPHLFGQALAQDLGYFSSPGTLVLQYVDDLLLATSSEASCQQATLDLLNFLANQGYKRLLTMDPRTQRDSQAPLYSNQGENQRDKKSKKEVQREEETDKEGVRKRERERQRRSQRERKRDGTSVSTLAVLEEPFSLPMRYGGPYLGLAKTRADSLCLWGGVEGEARVGAGASCSTRRPVRVPX

SEQ ID NO: 40928 - protein, 592 aa, Homo sapiens; identical to SEQ ID NO: 35674
  DOMAIN (495)..(507): RNase H domain identified by eMATRIX, accession number PF00075C, p-value=3.077e-09, raw score of 11.58
  DOMAIN (319)..(438): Gag P30 core shell protein domain identified by PFam, accession name Gag_p30, E-value=1.1e-16, PFam score of 62.0

SEQ ID NO: 40929 - protein, 451 aa, Homo sapiens
  DOMAIN (282)..(445): Gag P30 core shell protein domain identified by PFam, accession name Gag_p30, E-value=6.1e-12, PFam score of 45.3
LLKGARCLIQRPSFALQQETHRAHTLLLEWEPQAETAFTTLKQALLQAAALTLPTRQNFSLYVTDRAEIALGVLIQTCGTTPQPVAYLTIEKGKERGEQQHKQLAEAAERKERKRQEVREREKEKETERQSKKEREEETKMESERKRETEKEVSTLAALEEPFSPPQPSLGLAEAGAGSLFSWGGVEGEVRGGGRAAHSAHRLVQVPGGQVRVQVFENPLLKAIKSDLPRSSLWSGRKTSVSAAALKEIRKEISKGTQIPLGYRLCPLQAVGGGEFGPTKIHVPFSLSDLKQIKADLGKFSDDPDRYIDVLQGLGKTFDLTWRDVMLLLDQTLAFNEKNAALAAASEFGGIWYLSQVNDRMTAEERDQFPTGQQAIPSMDPHWDLDSDHGDWSHKHLLTCVLEGLRGIRKKPMNYSMMSTIIQGKEENPSAFLQQLWKSLRKYTPPSSKSL

SEQ ID NO: 40930 - protein, 212 aa, Homo sapiens
  DOMAIN (143)..(208): Gag P30 core shell protein domain identified by PFam, accession name Gag_p30, E-value=3.2e-09, PFam score of 35.7
MATGLKTRKETSKEISKGLQKPLGYWLCPLQAVGGGEFGPTWVHVSFSLSDLKQIKADLGKFSDGPDRYIDVLQGPGQTFYLTWTDVMLLLDLTLAFKEKNVALAEALEFGDTWYLSQVNDRMTAKERNKFPTGQQADPSMDPHWDLDSDQGDWSHKHLLTCVLEGLRRIRKKPMNYSMMSTITQGKEENPFAFLKQLLEDLRKYTPITQLT

SEQ ID NO: 40931 - protein, 28 aa, Homo sapiens
MRAIPKPLRQDRPCKLGSVVCGIQRSQL

SEQ ID NO: 40932 - protein, 118 aa, Homo sapiens
  DOMAIN (34)..(46): RNase H domain identified by eMATRIX, accession number PF00075C, p-value=9.786e-11, raw score of 11.58
SWPSDKQTLVVQRGQKMEQANHPDPTDHMSQLMWTVLPQGFRDSPHLFGQALAQDLGHFSSPGTLVLQYVDDLLLATSSEASCQQATLALLNFLANQGYKLSRSKAQLCLQQVKYLCL

SEQ ID NO: 40933 - protein, 97 aa, Homo sapiens
  misc_feature (1)...(97): Xaa = X or * as defined in Table 2
DIYVPIRIIXKLPQAYADPAVPPCTSGRIWLXIHAGAWSSFWLVSYXLLPQFQILLLVYSEIQILPGLVLGECMCQGICPFLLDFLVYLRRGVCSIL

SEQ ID NO: 40934 - protein, 29 aa, Homo sapiens
  misc_feature (1)...(29): Xaa = X or * as defined in Table 2
WGRGEPLCLAQGLXTHQSAPCQNRPLGSL

SEQ ID NO: 40935 - protein, 133 aa, Homo sapiens
  misc_feature (1)...(133): Xaa = X or * as defined in Table 2
MPEPPTTSVGSCAARASPVSAIPCSTAPSPIDHPRAEECGRTAWDWQAAPPAVPVRDPLGEASWAPESGFVNAPINTVSSYSGGDLENLCVDTLYLANLVGTWRTFVSSSGIVNTPISALSKQTTGLYQSAGX

SEQ ID NO: 40936 - protein, 55 aa, Homo sapiens
  misc_feature (1)...(55): Xaa = X or * as defined in Table 2
LGNKHLLGSIDPRGSWVTGEYIFLRPPIAAXGRQXDFLPFPELWWTSLNNSWAFS

SEQ ID NO: 40937 - protein, 164 aa, Homo sapiens
  DOMAIN (83)..(100): Zinc finger, CCHC class domain identified by PFam, accession name zf-CCHC, E-value=0.0035, PFam score of 23.7
GKLCFCCCIGECNYSDQQGPGTVAGSWARGISAAVSVSATILISRVQGPLHVLGQEVFLLLRRQTNLAGSERTENGAGQSPGGACYQCGLQGHFTKDCPMRNKLPPRPCPLYQGNHWKDGEPIEHDCQQIIVQTSAAREDLLEVPLANPDLNLYTDGSSFVENG

SEQ ID NO: 40938 - protein, 229 aa, Homo sapiens
  DOMAIN (101)..(112): RNase H domain identified by eMATRIX, accession number PF00075B, p-value=1.000e-13, raw score of 12.56
  DOMAIN (34)..(219): Reverse transcriptase domain identified by PFam, accession name rvt, E-value=1.3e-27, PFam score of 105.1
RLSSRSVTIRGILGQSVTRPEAHKGLQDIVKHLKAQGLVRKCSSDCNTPILGVQKLNGQWRLVQDLGLINKAIIPLYPVVPNPYTLLSQISEEAEWFTVLDLKDAFFCIPLHSDSQFLFACEDPTDHTSQLTQTILPHGFRDSPYLFGQALAQDLGHFSSSGTLALQYVDDLPLATSLEASCQQATLDLLNFLANQGYKASRSKAQLCLQQVEYLGLILARGARALSKE

SEQ ID NO: 40939 - protein, 53 aa, Homo sapiens
  misc_feature (1)...(53): Xaa = X or * as defined in Table 2
DVXSNNSMTSLQVRCRTSMYLSGSSENFPRSTWICDAVAETPLAQEPATVPGP

SEQ ID NO: 40940 - protein, 105 aa, Homo sapiens
PSDRQTLVVQRGQKIEQANHLVGLVTSVVWKDTLKKIVHGMAFSMLISCPRQLSSRSITIQGILGRAVTRYFSHLLSCNWETLLQIDQGHQATDGLTNGTPNELN

SEQ ID NO: 40941 - protein, 222 aa, Homo sapiens
  DOMAIN (115)..(126): RNase H domain identified by eMATRIX, accession number PF00075D, p-value=7.188e-09, raw score of 10.71
  DOMAIN (18)..(41): Retroviral aspartyl protease domain identified by PFam, accession name rvp, E-value=0.0058, PFam score of 15.6
MIQQLDSGCPGQAPAHVITLTEPRVCLTIEGQEIHFLLDTGMAFSVLISCPGQLSSRSVTIRGILGQPVNRIPQTTHPNLRGPSCPKGLGIALMFGQALAQDLGLFSSPGTLVLQYVDDLLLATSLEASCQQATLDLLNFLANQVYKVSRLKAQLCLQQVKYLGLILARGTRALQDGEPIEHDCQQIIVQTYAARDDLLEVPLANPDLNLYNDGSSFVENGI

SEQ ID NO: 40942 - protein, 96 aa, Homo sapiens
  misc_feature (1)...(96): Xaa = X or * as defined in Table 2
GDICHHLGLTPVGSHSLLSCSRXQVAXVGAVTAATIGTGILLQQLAFLVCNWLLLSGSSENFPRSALICFKSEREKGTCIQVGPNSPPPTACKGHN

SEQ ID NO: 40943 - protein, 160 aa, Homo sapiens
  misc_feature (1)...(160): Xaa = X or * as defined in Table 2
LSSYSGGDLEKLYVXLRDCKYTNQHSVSSSRFVNIPISTLCLTQGLXMHPMDTLYLATLGGDLENLCVHTLYLANLVGMWRTFVSSSGIVNAPISTLSKQTTXLSVKWTNQQDVGGARQENKSRLPEPAVTTPLGSPPTPWKLCSFALCNKSCYCPKKKK

SEQ ID NO: 40944 - protein, 777 aa, Homo sapiens
  DOMAIN (462)..(479): RNase H domain identified by eMATRIX, accession number PF00075A, p-value=3.160e-12, raw score of 14.44
  DOMAIN (446)..(674): Reverse transcriptase domain identified by PFam, accession name rvt, E-value=1.2e-24, PFam score of 95.3
MGCFVIHTKALCELALLRRAAQQLIEVFPEFLPRGPISLPPYPSLPIAPRPINDNPPLISPAQKEICEEISKGQQKPLGYRLCPLQAVGGGEFGPTWVHVPFSLSDLKQIKADLGNFSDDPDRYINVLQGLGQIFYLIWRDVMLLLDQTLAFNEKNAALAAAQEFGDTWYLSQVNDRMTAEERGKIPNGQQAVPSMDPHWDLDSDHGDCSCKHLLTCVLEGLRRIRKKYMNYSMMSTITQGKEENPSASLERLWEALRKYTPLSTKSLEGQLILKDKFITQSATDIRRKFQKQALGPKQNLETLLNLATSVFYNRDQEEQAQKEKQDQRKTAALVMALRQTNLGGSERTENGAGQSPERDTLAKAGAIIYMNMGNKLPICCPLPEEGINPEVWALEGQFGKAKNAHPVQIRLKDPTTFPYQRQYPLRPEAHKGLKDIVKYLKAQALVKKCSSPCNSPILGVQKPNSQWRLVQDLRLINEAVIPLYPVVPNPYILLSQIPEEAEWFTVLDLKDAFFCIPPHSDSQFLFAFEDPTDHMSQLMWTVLPQGFKDSPHLFGQALAQDLGYFSSPGTLVLQYVDDLLLATSSEASCQQATLDLLNFLANQGYKRLLTMDPRTQRDSQAPLYSNQGENQRDKKSKKEVQREEETDKEGVRKRERERQRRSQRERKRDGTSVSTLAVLEEPFSLPMRYGGPYLGLAKTRADSLCLWGGVEGEARVGAGASCSTRRPVRVPGEHRLGRPCTGHGQPAPAGLDRGMCSFWAARVPGLGGAKSHGDCH

SEQ ID NO: 40945 - protein, 158 aa, Homo sapiens
  DOMAIN (17)..(114): Retroviral aspartyl protease domain identified by PFam, accession name rvp, E-value=1.3e-11, PFam score of 46.3
  misc_feature (1)...(158): Xaa = X or * as defined in Table 2
SNNRTEGARGKRQLMSSPSTEPRVRLTIEGQETDFLLDTGAAFSVLISCLGRLSSRSVTIRXILGQPVTRYFSQPLSCNWETLLFSHAFLIMPESSTPLLGRDILAKAGAIIYINMGNKLPICCPLLVEGINPEVWALEGQFGRAKNARPLQIRLKDP

SEQ ID NO: 40946 - protein, 550 aa, Homo sapiens
  DOMAIN (460)..(471): RNase H domain identified by eMATRIX, accession number PF00075B, p-value=1.000e-13, raw score of 12.56
  DOMAIN (50)..(268): Gag P30 core shell protein domain identified by PFam, accession name Gag_p30, E-value=2.8e-28, PFam score of 102.6
VLQFLKTACPEFVPSDVQMCSEFLPSGGFVVSLTSGVKLQTFTLDTKVLHVPFSLSDLKQIKADLGKFSDDPDRYKDVLQGLGQTFDLAWRDVMLLLDQILAFIEKNAALAAAREFGDTWYLSQVNDRMTAKERDKFLTGQQAIPTMDPHWDFDSDHGDWSHKHLLTCVLEGLKGIRKKPMNYSMMSTITQGQEEKPSAFLERLREALRKYTPLSPESLEGQLILKDKFITQSAADIRRQLQKQALGPEQNLQELLNLATLVFYNRDQEEQAQKEKRDQRKAAALVRALRQTNLGGSERTEYGAGQSPRRDILAKAGAIIYMNMGNKLPICCPLLEEGINPEVWALERQFGRAKNARPVQIRLKDPTTFPYQRQYPLRLEAHKALQDIVKHLKPQGLVRKCSSPCNTPVLGVQKPNGQWRLVQDLRLINEAVIPVYLVVANPYTLLSQIPEEAEWFMVLDLKDAFFCIPLHSGSQFLFAFEDPTDHMSQLMWMVLPQGFRDSPHLFGEALAQDLGHFSSPGTLVLQYMDDLLLATSWEASCQQATLELSS

SEQ ID NO: 40947 - protein, 337 aa, Homo sapiens
  DOMAIN (112)..(123): RNase H domain identified by eMATRIX, accession number PF00075B, p-value=1.000e-13, raw score of 12.56
  DOMAIN (45)..(230): Reverse transcriptase domain identified by PFam, accession name rvt, E-value=6.5e-36, PFam score of 132.7
MHAVHTSLLVERTILTTTKERGSTLQYPLRPGAHKGLQDIVKRFKAQALIRKCSSPCNTPILGVQKPNGQWRLVQDLRLINEAVIPLYPVVPNPYNLLSQIPEEAEWFTVLDLKDAFFCIPLHSDSQFLFAFEDPTDHTSQLTWTVLPPGFRDSPPLFGQALAQDLGHFSSPGTLVLQYVDDLLLATSSEASCQQATLDLLNFLANQGYKTSKLKAYLCLQQVKYLDLILARGTRALSKEQIQPILVYPPPKTLKQLDFADFGTTIKQDFRLLGQTSVDRLLQLSQGQAVKGNQLLPVSLVKRKTTLAPNTQTASPRALADSLMQLARQVSRLESGQ

SEQ ID NO: 40948 - protein, 1481 aa, Homo sapiens
  DOMAIN (73)..(118): kw TRANSCRIPTASE REVERSE II ORF2 domain identified by eMATRIX, accession number DM01354N, p-value=1.000e-40, raw score of 13.17
  DOMAIN (157)..(432): Reverse transcriptase domain identified by PFam, accession name rvt, E-value=2.4e-85, PFam score of 297.0
DQRRTEGDRDTQKTLQKINESRSWFFERINKIDRPLARLIKKKREKNQIDTIKNDKGDITTDPTEIQTTIREYYKHLYTNKLENLEEMDTFLDTYTLPRLNQEEVESLNRPITGSEIVAITNSLPTKKSPGPEGFTAEFYQRYKEELVPFLLKLFQSIEKEGILPNSFYEASIILIPKPGRDTTKKENFRPISLINIDAKILNKILANRIQQHIQKLIHHDQVGFIPGMQGWFNIRKSINVIQHINRAKDKNHMIISIDAEKAFDKIQQRFMLKTLNKLGIDGTYFKIIRAIYDKPTANIILNGQKLEAFPFKTGTRQGCPLSPLLFNIVLEVLARAIRQEKEIKGIQLGKEEVKLSLFADDMIVYLENPIVSAQNLLKLISNFSKVSGYKINVQKSQAFLYTNNRQTESQIMSELPFTIASKRIKYLGIQFTRDVKDLFKENYKPLLKEIKEDTNKWKNIPCSRVGRINIVKMAILPKVIYRFNAIPIKLPMTFFTELEKTTLKFIWNQNRARIAKSILSQKNKAGGITLPDFKLYYKATVTKTAWYWYQNRDIDQWNRTEPSEIMPHIYNCLIFDKPEKNKQWGKDSLFNKWCWENWLAICRKLKLDPFLTPYTKINSRWIKDLNVRPKTIKTLEENLGITIQDIGVGKDFMSKTPKAMATKAKIDKWDLIKLKSFCTAKETTIRVNRQPTTWEKIFATYSSDKGLISRIYNELKQIYKKKTNNPIKTWAKDMNRHFSKEDIYAAKKHMKKCSSSLAIREMQIKTTMRYHLTPVRMAIIKKSGNNRWNIGGLVPKLNYDLKRHLEKEEKPTKTEQAISKDKNAEKNNRLSLQGEIIIAIILITEPGLKGRGIPIFIIEDGGTSYVVALQILCKLVELTQKPVDQPFDYICGVSTALLLKSARPRTHWKEEAPDTSEHLKEQTPDTPSLRTVTLTARVCGFILEVSETKNSPEGTNSGHILTSQMGLSPIAKRRETSASAAALVSATIPICRVQGPLRVLGQEVFLLLLRLPTAPLPINDKPPLISPAQKETSKEISKGPQKPLGYRLCPLQAVGGGEFGLTRVHVPFSLYDLKQIKADLGKFSDDPDRYIDVLQGLGQTFYLTWRDVMLLLDQTLAFNEKNAALAAAREFGDIWDQGEQSKKEKQDQRKTVALVMALRQINLGGSERTENGAGQSAGFRDSPQLFGQALAQDLGHFSSPGTLVLQYVDDLLLATSLEASCQQATLDLLNFLANQGYKVSRSKAQLCLQQVKYLGLILARGTSAQLAELLALTLALELGNGKRINVYTDSKYAYLILHDHAAIWKERAFLTSGGTPIKYHKEIMELLHTVQKPKEVAVLHCQSHQQAQGSVALQSADGKGSQAFVIFFKSAGSLWPKICSEMPSRIHGLEMEAFRIHLVLYSTVAEVEPKKQDKILLTIPTHFYKHMSLSPRPPLAQAHRMELPESRTAVIVFALLDLATQWSYRALGWYWGLSAKSPVM

SEQ ID NO: 40949 - protein, 682 aa, Homo sapiens
  DOMAIN (615)..(679): Gag P30 core shell protein domain identified by PFam, accession name Gag_p30, E-value=6.6e-12, PFam score of 45.1
MQDWAAAKADRTVLRERVRIEIASTHIALQHAIVTGDAVGMDDIPQEARQYRHNQAYAYSIQGDGAEDDDERIVRFHTRSQEKKEEAITLLKDSIKYGPEFADAYSSLASLLAEQAPEGLCPLSSGLGRSRPMATEWSPGNRICAAPWPKEVAEPACVPRPPSRALHALMASAARRSSGRHTFRPTTPGAAQRRCVPATLRGFRRGPAGLGRETRRPAGSRRGDAAAAISHPAALPRGRARDQQPAMPEPPTPSVGSCAARASQISAAPCSTAPSPIDHPRAEECRRTVWDWQAAPPAAQVRDPLGEASWAPESGGDVENLYVLLRDCKYTSQHPVSSSGSVNAPIDTLYLATLLRDCKYTNRHSVSSSRFVNTPISTVSSSEFANAPIDTLHLATLKEETPNTSEHQKEQTPDMPPLRTVTVTARVRGFILDVSETKNPPIPDTFWRPRWDLRQSPSRGQARVQVFENASVRTAKSDFPWSSMWSGRKTSVSAAALVSATIPISRAHGRLIVGSWARGVSAAASQIKVDLGKFSDDPDRYIDVLQGVGQTFNLSWRDVMLLLDQTLAFNEKNAALAAAQEFGDTWHLSQVNDRMTAEERDKFPTSQQAIPSMEPHWDLDSDHGDWSHKHLLTCVLQGLRRTGKKPMNYSVMPTITQGKEENPSTFLERPWEALRKYTPQIT

SEQ ID NO: 40950 - protein, 674 aa, Homo sapiens
  DOMAIN (13)..(55): Chloramphenicol acetyltransferase proteins domain identified by eMATRIX, accession number BL00100C, p-value=1.000e-39, raw score of 23.60
  DOMAIN (1)..(143): Chloramphenicol acetyltransferase domain identified by PFam, accession name CAT, E-value=2.5e-110, PFam score of 379.9
  misc_feature (1)...(674): Xaa = X or * as defined in Table 2
MNAHPEFRMAMKDGELVIWDSVHPCYTVFHEQTETFSSLWSEYHDDFRQFLHIYSQDVACYGENLAYFPKGFIENMFFVSANPWVSFTSFDLNVANMDNFFAPVFTMGKYYTQGDKVLMPLAIQVHHAVCDGFHVGRMLNELQQYCDEWQGGAQYPLRPEAHKGIQDIVKYLKAQGLGRKCSSPCNTPILGVQKLNGQWRLVQDLRLINEGFFXSSKLQAMQAMFAENSMSSVYSPTQEAEYWLPHGILQPADCFFEAASTSRSMWPREDWLSTTSLTTWNMDFADFGTTIKQDFRLLGQTSVDRLLQLSQGQAVKGNQLLPVSLVKRKTTLAPNTQTASPRALADSLMQLARQVSRLESGHLDHGSHSYRRSDNSLDPRSHSCCRSDIGLGPRSHLYCRSDYQRETTIPSMPVKGNQAPCMKSNNALIVILGTVTLDAVGIGLVMPVLPGLLRDIVHSDSIASHYGVLLALYALMQFLCAPVLGALSDRFGRRPVLLASLLGATIDYEIMATTPSWEDEEPIEHDSQQIIVQTYATRDDLLEVPLANPDLNLYADGSSFVENGIRRAGYAIVSDVTVLENSLAAVTLQNRQGLDLLTAEKGGLCTFSGKECCFYTNQSGISSPLEDTTTAGPFLHPIQQEVARAIIGQFPTAFGVSCLEGRLRGEASWTSWVE

SEQ ID NO: 40951 - protein, 122 aa, Homo sapiens
HSSRSPSCPRTCSSPWNLLIRVVVLTSAAAEILVFLRLVIGDSPFVFAKMCPELVPSGGFLVSLTSRMKPRAFMVSVTALLFPDFLMIAFLTGMRWYLIVVLICISLMASNDEHFFMCFLAA

SEQ ID NO: 40952 - protein, 716 aa, Homo sapiens
  DOMAIN (281)..(292): RNase H domain identified by eMATRIX, accession number PF00075B, p-value=1.000e-13, raw score of 12.56
  DOMAIN (214)..(403): Reverse transcriptase domain identified by PFam, accession name rvt, E-value=2.5e-30, PFam score of 114.2
MSGTLKGMLPKRDLPIYPIYPDLCPLGPNACETNFLSPLFSEKEISKEISKGPQKPLGYRLCPLQAIGAGEFGPTRVHVPFSLSDLKQIKADLGKFSDDPDRHIDVLQGLGQTFDLAWRDVMLLLDQTLAFYEKNVALAAAREFGDTWYLSQVCLTIEGQEIDFLLDSGTAFSVLISCPGQLSSRSVTIRGILGQPVTRPEAHKGLQNTVKHLKAQGLVRKCSSPGNTPILGVQKPNRQCRLVQDLRLINEAVIPLYPVVPNPYTLLSQIPEEAEWFMVLDLKDAFFCIPLHSDSQFLFAFEDPTDHTSQLMWMVLPQGFRDSPHLFGQALARDLGHFSSLGTLVLQYVDDLLLATSSEALCQQATLDLLNFLANQGYKVSRSKAQLCLQQDGEPIEHDCQQIIVQTYATRDDLLDVPLTIPDLNLYTDGSSVVENGIQRTGYTIVSDVTILESPVAAILLLLAFGACIFNLLVKFVSSRIEAFELQMVLQMEPQMSSTNNFYRGPMDRPAGTSPGLESSPLKDTTTAGAVTLTTEVCSFTPEPARPRTHQKEETPNTSEHQKEQTPDTLPLRTVTLTASVHGFILEVNGSGKTGKATIVWQDATQNWQHKIQERFKTTQQAELEEVSALEGLLLNTGCESKMPTTTLGTTSPPYSGSARSRDDRHQPVPTLVRDGPFRRSTRKSSRWPRQTEAERVLRRLQDGDSKVKVAVGYDP

SEQ ID NO: 40953 - protein, 930 aa, Homo sapiens
  DOMAIN (35)..(47): PEPSIN (A1) ASPARTIC PROTEASE FAMILY SIGNATURE domain identified by eMATRIX, accession number PR00792C, p-value=1.931e- 09, raw score of 9.10
  DOMAIN (18)..(115): Retroviral aspartyl protease domain identified by PFam, accession name rvp, E-value=1.7e-15, PFam score of 60.2
SNDRTEDDCGKHPFMSSPPTEPWVCLIIEGQEIDFLLDTGTTFSVLIPCLGRLSSRSVTIQGILGQPVTRYFSHLLSCNWETLLFSHAFLVMPESPTPLLGRDILAKAGAIISMKTGNKLPICCPLLEGINPEVWALEGQFGRAKNAHPLQIRLKDPISFPYQRQYPLRPEAHKGLQDIVKHLKAQDSVRKCSSPCNTPILGVQKLNSQWRLVQDLRLINEAVIPLYPVVRNPYTLLSQVPEEAEWFTVLDLKDAFFCIPLHSDSQFLFAFEDPTDHTSQLMWMVLPQRFRDSPHLFGQAQAQDLGHFSSPGTLVLQYSEIAKTLYTLIKEMERANTHLVEWEPEAETAFETLKQALVQAPALSLPTGQNFALYVIERAGIALGVLTQTHRTTPQPVAYLSKEIDVVAKGWPHCLRTVVAVAVLVSEAIKIIQGKDFTVWTTHDVNGILGAKGGLWPSDNCLLRYQALLLEEPVLQIHMCIAINPATFLPEDGEPIKHDCQQIIVQTYATQDDLLEVPLANPDFNLYNSGSSFVENGIQRAGYAIVSDVTVLGSKPLSPGTSTQLAELVALTRALELGKGKRINVYTDSKYAYLILHAHAAIWKEREFLTSGGTPIKYHKEIMELLHTVQKPKEVAVLHCQSHQKGSARRIFCLTRIPGTRVCKNPHVSLSGISEWPLRDHTPLCFRPKALLAWVHEEICSMGCKDPGWNSLKVSEEDRKMQESLETSRDLLNGFDQNVDNDMDSKVQAEGASDGDEELIGKWRKGLSMLWKILSIENMMNVWKDGTIKDAIIVIEKAVKAIKPETINSCQRNLCPDVVHDFTRFTTEPIKDIKEIGDLAIKLGIFESSNSTQFLNQFVPDDRLSPHNKLLKFYKPEFYSSYPLVSCLDHYVDQVGARISMSFCVTTVTEASGSGSWTCGVSQLKLSYAD

SEQ ID NO: 40954 - protein, 179 aa, Homo sapiens
  DOMAIN (16)..(139): Gag P30 core shell protein domain identified by PFam, accession name Gag_p30, E-value=3.3e-21, PFam score of 77.8
QPKKGTNSLLTSKPSPVCNPHWDLDSDHGDWIHKHLLTCVLEGLRRIRKKPMNYSMMSTITQGKEENPSAFLKWLREALRKYTPLSPNSLRGQLILKDTFITQSAADIRRKLQKQALGPEQNLEALLNQATSVFYNRDQEEQAQKEKQSLEGTLPQSTMVLWARSSQPDDPTTELMVPR

SEQ ID NO: 40955 - protein, 424 aa, Homo sapiens
  DOMAIN (242)..(253): RNase H domain identified by eMATRIX, accession number PF00075B, p-value=1.000e-13, raw score of 12.56
  DOMAIN (175)..(363): Reverse transcriptase domain identified by PFam, accession name rvt, E-value=4.7e-31, PFam score of 116.6
  misc_feature (1)...(424): Xaa = X or * as defined in Table 2
GPRGTGPKGKARSEKGRSLSHGPQTNKPLVVQKGQKMEQANHPVGLVISVVYKDILKKIVQRETSHPLIHVRYAEAITGRRTAPEDKGSLGRDMLAKAGAIIYMNMGNKLPIWCHLLEEGIYLEVWALEGQFGRAKNACPVQIRLKDPTTFPYQRQYPLRPEAHKGLQDIVKHVKAQGLVKKCSSPCNTPILGVQKPNGQWSLVQDLRLISEAVIPLYPVVPNPYTLLSQIPEEAEWFPVLDLKDAFFCIPLHYDSHDSQFLFAFEDPTDHTSQLIWTVLPQGFRDSPHLFGQALAQDLGHFSSPGTLVLQYVDDLLLATSSEASCQQATLDLLNFLANQGYKASRSKAQLCLQQVKYLGLILARGTRTLGKERIQPILAYPHPKTLKQLWGFLEITGFCXLWIPGYSKIARPLYTLIKETQRA

SEQ ID NO: 40956 - protein, 134 aa, Homo sapiens
  DOMAIN (47)..(62): PHD-finger domain identified by eMATRIX, accession number PF00628, p-value=1.321e-10, raw score of 15.84
  DOMAIN (31)..(79): PHD-finger domain identified by PFam, accession name PHD, E- value=1.7e-14, PFam score of 61.6
EGSGSEKSSAASEEEEEKESEEAILADDDEPCKKCGLPNHPELILLCDSCDSGYHTACLRPPLMIIPDGEWFCPPCQHKLLCEKLEEQLQDLDVALKKKERAERRSQTFLKIKKKRKKIQKNPKQTCLKGGQQE

SEQ ID NO: 40957 - protein, 329 aa, Homo sapiens
  DOMAIN (29)..(76): kw TRANSCRIPTASE REVERSE II ORF2 domain identified by eMATRIX, accession number DM01354V, p-value=5.091e-31, raw score of 12.97
  misc_feature (1)...(329): Xaa = X or * as defined in Table 2
XWKYSSNDESEGSGSEKSSAASEEEEEKEIASKRIKYLGIQLTRDLKDLFKENYKPLLNEIKEDTNKWMDEHSMLMGRKNQYRENGHTTQELEKTTLKFIWNQKRARLAKSILSQKNKAGGITHIYNYLIFDKPDKNKKWGKDSLFNKQCWENWLAICRKLKLDPFLTPYTKINSRWIKDLNVRPKTIKTLEENLGNTIQDIGMVKDFMSKTAKAMATKAKIDKLHLIKLKSFCTAKETTIRVNRQPAEWEKIFAIYSSDKGLISRIYNELKQIYKKKQPHQKVGERYKQILLKRRHLCSQKTHEKMLIITGHQRNANENHNEIPSHTS

SEQ ID NO: 40958 - protein, 183 aa, Homo sapiens
  misc_feature (1)...(183): Xaa = X or * as defined in Table 2
SPCRAQRHSCMWGLWQQSPCSPGSWQDSSPAQSGPPPRXPFSVPSSPWCLPSTWPLSPSPLPASWRRKTSAPSLLSLATAGPPXAGVCEAKTPKKKYSDDDEEEESEENSRDSESDFSDDFSDDFVETRRRRSRRNQKRQINYKEDSESDGSQKSLRRGKEIRRVHKRRLSSSESEGYFFIKS

SEQ ID NO: 40959 - protein, 942 aa, Homo sapiens
MKSEEQPMDLENRSTANVLEETTVKKEKEDEKELVKLPVIVKLEKPLPENEEKKIIKEESDSFKENVKPIKVEVKECRADPKDTKSSMEKPVAQEPERIEFGGNIKSSHEITEKSTEETEKLKNDQQAKIPLKKREIKLSDDFDSPVKGPLCKSVTPTKEFLKDEIKQEEETCKRISTITALGHEGKQLVNGEVSDERVAPNFKTEPIETKFYETKEESYSPSKDRNIITEGNGTESLNSVITSMKTGELEKETAPLRKDADSSISVLEIHSQKAQIEEPDPPEMETSLDSSEMAKDLSSKTALSSTESCTMKGEEKSPKTKKDKRPPILECLEKLEKSKKTFLDKDAQRLSPIPEEVPKSTLESEKPGSPEAAETSPPSNIIDHCEKLASEKEVVECQSTSTVGGQSVKKVDLETLKEDSEFTKTSGIEEPSETKGSMQKSKFKYKLVPEEETTASENTEITSERQKEGIKLTIRISSRKKKPDSPPKVLEPENKQEKTEKEEEKTNVGRTLRRSPRISRPTAKVAEIRDQKADKKRGEGEDEVEEESTALQKTDKKEILKKSEKDTNSKVSKVKTQRQSSMDWFSDTWQMEIFPAMMKVKGLAVKNPSAASEEEEEKESEEAIPSRMTLKESDGGGVGRRKDISTITGHRGKDISTILDEERKENKRPQRAAAARRKKRRRLNDLDSDSNLDEEQSEDEFKISDGSQDEFAVSDENPDESEEDPPSNDDSDTDFWSRKLRRHPSRPMRQSRRLRRKTPKKKYSDDDEEEESEENSRDSESDFSDDFSDDFVETRRRRSRRNQKRQINYKEDSESDGSQKEFCDVNQSGQFESGAEAQTSIQKQMRRRRKRKANHPANGYTGFETDEGGEFLTLLIGDANQPARDSQPRVLPSEQESTKKPYRIESDVEEDFENVGKVGSPLDYSLVDLPSTNGQSPGKAI

SEQ ID NO: 40960 - protein, 149 aa, Homo sapiens
KEKKRNKKKKTIGSPKRIQSPLNNKLLNSPAKTLPGACGSPQKLIDGFLKHEGPPAEKPLEELSASTSGVPGLSSLQSDPAGCVRPPVVKYCTDLIEEKDLEKLDLVIKYMKRLMQQSVESVWNMAFDFILDNVQVVLQQTYGSTLKVT

SEQ ID NO: 40961 - protein, 16 aa, Homo sapiens
MCSLERSVYILPATIT

SEQ ID NO: 40962 - protein, 72 aa, Homo sapiens
SFSPFLDPMEEDILQVVKYCTDLIEEKDLEKLDLVIKYMKRLMQQSVESVWNMAFDFILDNVQVVLQQTYGS

SEQ ID NO: 40963 - protein, 297 aa, Homo sapiens
  misc_feature (1)...(297): Xaa = X or * as defined in Table 2
MMNEKNLEKGLGVDSVDKDAMNAAIQQAIKAQPSMSPKKAPPAPAKEARNVVAVGTGGRGTHDRDPSEKPPRLQWFEQQAKKLAKQQEEDSEEEEEDLDGDVLEIGKSKIKVLAESVSDWEDIDSDEELECEDTEAMDDVVEQDAEEEEAEEGPPLGAIPITDCLFCSHHSSSLMKNVAHMTKDHSFFIPDIEYLSDIKGLIKYLGTHSSSSNVCKGLWDLEKRPSIDLKCRTXYSTKRHCTRTLSASSHFILCQWFSVLSPVHASTDQEIQEMHDDQSNPQNAVVREHCVGWGWGV

SEQ ID NO: 40964 - protein, 515 aa, Homo sapiens
MATYTCITCRVAFRDADMQRAHYKTDWHRYNLRRKVASMAPVTAEGFQERVRAHGPSRRRRARARPLYCTVCSKKFASFNAYENHLKSRRHVELEKKAVQAVNRKVEMMNEKNLEKGLGVDSVDKDAMNAAIQQAIKAQPSMSPKKAPPAPAKEARNVVAVGTGGRGTHDRDPSEKPPRLQWFEQQAKKLAKQQEEDSEEEEEDLDGDVLEIGKSKIKVLAESVSDWEDIDSDEELECEDTEAMDDVVEQDAEEEEAEEGPPLGAIPITDCLFCSHHSSSLMKNVAHMTKDHSFFIPDIEYLSDIKGLIKYLGEKVGVGKICLWCNEKGKSFYSTEAVQAHMNDKSHCKLFTDGDAALEFADFYDFSWRLAVGGHDWVERLTASHYFYGYYPGARVGHRSLMRYYKQRFGLSRAVAVAKNRKAVGRVLQQYRALGWTGSTGAALMRERDMQYVQRMKSKWMLKTGMKNNATKQMHFRVQGSQKEIQIFHSSEIDGIATAVEDDFASPTPTKDAKN

SEQ ID NO: 40965 - protein, 313 aa, Homo sapiens
WEDIDSDEELECEDTEAYGRCWWTKDPEEEEPEEGPTPCSLMKNVAHMTKDHSFFIPDIEYLSDIKGLIKYLGEKVGVGKICLWCNEKGKSFYSTEAVQAHMNDKSHFEKLSLTEFNTSLVEKKNLRPRLKYDLSLFLFWVKHQEFSFASIPLNRAGDLQLVDMTGWRSSYPDHKEGEDPNKAEELPSEKNLEYDDETMELILPSGARVGHRSLMRYYKQRFGLSRAVAVAKNRKAVGRVLQQYRALGWTGSTGAALMRERDMQYVQRMKSKWMLKTGMKNNATKQMHFRVQLTQGEDNKDEALQDDPLLLNE

SEQ ID NO: 40966 - protein, 809 aa, Homo sapiens
MATYTCITCRVAFRDADMQRAHYKTDWHRYNLRRKVASMAPVTAEGFQERVRAHGPSRRRRARARPLYCTVCSKKFASFNAYENHLKSRRHVELEKKAVQAVNRKVEMMNEKNLEKGLGVDSVDKDAMNAAIQQAIKAQPSMSPKKAPPAPAKEARNVVAVGTGGRGTHDRDPSEKPPRLQWFEQQAKKLAKQQEEDSEEEEEDLDGDDWEDIDSDEELECEDTEAMDDVVEQDAEEEEAEEGPPLGAIPITDCLFCSHHSSSLMKNVAHMTKDHSFFIPDIEYLSDIKGLIKYLGEKVGVGKICLWCNEKGKSFYSTEAVQAHMNDKSHCKLFTDGDAALEFADFYDFSWRLAVGGHDWVEVEGRIRGCGSREDNECLLVCNFSVIGVAIQITRKGRTPIRAEELPSEKNLEYDDETMELILPSGARVGHRSLMRYYKQRFGLSRAVAVAKNRKAVGRVLQQYRALGWTGSTGAALMRERDMQYVQRMKSKWMLKTGMKNNATKQMHFRVQMDCRGIAVLVFKAPSFYLIMAPKHKSGDAGDSNMPKGSRKVLPLSEKVKVLKEKKLYAEVAKIHGVKLQTFGVSVTAHKGSVDPKSEQQQDLLQRVKEQSFHSVEADPAAEGAGSGLSQLRKGLPQCSSRLNGSSSATKVGAQAEEAPRASEGCEGCQHAVTSQYVKLAYASVGLASLTTAGQVRRLETQGRVDAAVSSLKAVQRQNSLFLGGSQAFSPKSFNQVDEATRIREVIKPCAEDRVIFSNSESPSAATVLNAERRTHKLAAVCEAIRCGTAPAATFQQPPLLELSRLSNS

SEQ ID NO: 40967 - protein, 217 aa, Homo sapiens
GTKGWAFPITDCLFCSHHSSSLMKNVAHMTKDHSFFIPDIEYLSDIKGLIKYLGEKVGVGKICLWCNEKGKSFYSTEAVQAHMNDKSHCKLLQDGDAALEFADFYDFRSSYPDHKEGEDPNKAEELPSEKNLEYDDETMELILPSGARVGHRSLMRYYKQAIWLVKNLWQLPKIRKAVGRVLQQYRSPGIGLGSTGAALMRERDMQYVQRMKSKMGC

SEQ ID NO: 40968 - protein, 165 aa, Homo sapiens
  misc_feature (1)...(165): Xaa = X or * as defined in Table 2
MNPLANSTLTDVHPHFIFKQMAELDRDMDEAGNHHSQQTNTRTENQTPHVLTHKWELNNENTRTQGREHHTSEEFIAIQPEYYQKEKSNSDINLEGTSYWTENHCSGIYKVINCLESEIHSEENXCQNXIFLSDNIQVELRXIPLMCDVPCPVSVCSHCSTPTYE

SEQ ID NO: 40969 - protein, 604 aa, Homo sapiens
  DOMAIN (408)..(418): 4 kw A55R REDUCTASE TERMINAL DIHYDROPTERIDINE domain identified by eMATRIX, accession number DM00099B, p-value=4.375e- 09, raw score of 14.73
  DOMAIN (290)..(586): Kelch motif domain identified by PFam, accession name Kelch, E-value=2.7e-54, PFam score of 193.8
MHEAGNHHCQQSNTRKENQTPDVLTHKWEGFDQLRLEGLLCDVTLMPGDTDDAFPVHRVMMASASDYFKAMFTGGMKEQDLMCIKLHGVSKVGLRKIIDFIYTAKLSLNMDNLQDTLEAASFLQILPVLDFCKVFLISGVTLDNCVEVGRIANTYNLTEVDKYVNSFVLKNFPALLSTGEFLKLPFERLAFVLSSNSLKHCTELELFKATCRWLRLEEPRMDFAAKLMKNIRFPLMTPQELINYVQTVDFMRTDNTCVNLLLEASNYQMMPYMQPVMQSDRTAIRSDTTHLVTLGGVLRQQLVVSKELRMYDEKAHEWKSLAPMDAPRYQHGIAVIGNFLYVVGGQSNYDTKGKTAVDTVFRFDPRYNKWMQVASLNEKRTFFHLSALKGYLYAVGGRNAAGELPTVECYNPRTNEWTYVAKMSEPHYGHAGTVYGGVMYISGGITHDTFQKELMCFDPDTDKWIQKAPMTTVRGLHCMCTVGERLYVIGGNHFRGTSDYDDVLSCEYYSPILDQWTPIAAMLRRQSDVGVAVFENKIYVVGGYSWNNRCMVEIVQKYDPDKDEWHKVFDLPESLGGIRACTLTVFPPEETTPSPSRESPLSAP

SEQ ID NO: 40970 - protein, 408 aa, Homo sapiens
  DOMAIN (219)..(252): RECEPTOR INTERLEUKIN-1 PRECURSOR domain identified by eMATRIX, accession number PD02870B, p-value=9.882e-14, raw score of 18.83
  DOMAIN (47)..(334): Immunoglobulin domain identified by PFam, accession name ig, E-value=6.2e-27, PFam score of 91.8
MNEIEFRLERTPVDESDDEIQHDEIPTGKCIAPIFDKRLKHFRVTEGSPVTFTCKIVGIPVPKVYWFKDGKQISKRNEHCKMRREGDGTCSLHIESTTSDDDGNYTIMAANPQGRISCSGHLMVQSLPIRSRLTSAGQSHRGRSRVQERDKEPLQERFFRPHFLQAPGDMVAHEGRLCRLDCKVSGLPPPDMTWLLNGQPVLPDASHKMLVRETGVHSLLIDPLTQRDAGTYKCIATNKTGQNSFSLELSVVAKEVKKAPVILEKLQNCGVPEGHPVRLECRVIGMPPPVFYWKKDNETIPCTRERISMHQDTTGYACLLIQPAKKSDAGWYTLSAKNEAGIVSCTARLDIYAQWHHQIPPPMSVRPSGSRYGSLTSKGLDIFSAFSSMESTMVYSCSSRSVVESDEL

SEQ ID NO: 40971 - protein, 21 aa, Homo sapiens
MSCQQQSADFLKNAGNGESEA

SEQ ID NO: 40972 - protein, 41 aa, Homo sapiens
  misc_feature (1)...(41): Xaa = X or * as defined in Table 2
METFKYSKEREEPQEHEWLQVEHGVDGILEAEFSLLQEHLX

SEQ ID NO: 40973 - protein, 437 aa, Homo sapiens
PWEGSAPATSPLGEDSAWGSADGSESWSCRELLQPGDVLGESCGLTPPALPAHCIQEGCLPPLTQELRCCQPPRMGRWALDVAFLWKAELTLGLELLYYCFFIGINFYNKWLTKSFHIFPLFMTMLHLAVIFLFSALSRALVQCSSHRARVVLSWADYLRRVAPTAALREVASLFRKPSAEEMLCPPARQRGEARELSQNPIIRAGEGRLQGHRQVATVICAPAPFSVMGLSPELQQCIVGNFASRYTMTKSSAVLFILIFSLIFKLEELRAALVLVVLLIAGGLFMFTYKSTQFNVEGFAWCWGPRSSVAFAGPSPRCSCRRLNSASRIPSTPCSTCSHSCSWGLFPLFAVFEGTGLLLRVLGSLFLGGILAFGLGFSEFLLVSSRTSSLTLSIAGIFKEVCTLLLAAHLLGDQISLLNWLGFASASREYPSTLPS

SEQ ID NO: 40974 - protein, 374 aa, Homo sapiens
MGRWALDVAFLWKAVLTLGLVLLYYCFSIGITFYNKWLTKSFHFPLFMTMLHLAVIFLFSALSRALVQCSSHRARVVLSWADYLRRVAPTALATALDVGLSNWSFLYVTVSLYTMTKSSAVLFILIFSLIFKLEELRAALVLVVLLIAGGLFMFTYKSTQFNVEGFAWCWGPRSSVAFAGPSPRCSCRRLNSASRIPSTPCSTCSHSCSWGLFPLFAVFEGLHLSTSEKIFRFQDTGLLRRVLGSLFLGGILAFGLGFSEFLLVSRTSSLTLSIAGIFKEVCTLLLAAHLLGDQISLLNWLGFASASREYPSTLPSKPCIPEVTQSPFQKPLVSVLLPVTLSDSDAGSVPGGSAAVTPLGRCGGHLQSGWVGPG

SEQ ID NO: 40975 - protein, 154 aa, Homo sapiens
PVMPKLIYVIRTGKQLKISLGHVDFQTVPSFLQQLNVWQTIKASEHPDRNDCVAVLRQKRSLGSVENTSGKRKCWGGQSGFTTSELEETEEDSDLSDYGDDVDGRKDALAEPCFMLIGEIFELRGKPQYQLEIWQVPTGTPDHLEEEANEKSKG

SEQ ID NO: 40976 - protein, 207 aa, Homo sapiens
GIDVQGKKNSFSLSSFLERLPRDFFSHQEEETEEDSDLSDYGDDVDGRKDALAEPCFMLIGEIFELRGMFKWVRRTLIALVQVTFGRTINKQIRDTVSWIFSEQMLVYYINIFRDAFWPNGKLAPPTTIRSKEQSQETKQRAQQKLLENIPDMLQSLVGQQNARHGIINKYSNALQETRANKHLLYALMELLLIELCPELRVHLDQL

SEQ ID NO: 40977 - protein, 73 aa, Homo sapiens
  misc_feature (1)...(73): Xaa = X or * as defined in Table 2
NRYIVPISQIMKRKRRKVSIVLNVTGYXRGMRKPGLLNLASGFLLSTSPTSENSNRCRGLWQIDPWEEGETYV

SEQ ID NO: 40978 - protein, 156 aa, Homo sapiens
  DOMAIN (65)..(80): WILM'S TUMOUR PROTEIN SIGNATURE domain identified by eMATRIX, accession number PR00049D, p-value=1.610e-09, raw score of 0.00
CWWQDPLQRTRQKSVTATSTKIDISNVKIPKHPADAYFKKQQLWKPRNRKLAGKLSTPAARDAPRARPPHEAPPPPPPPELRYRVPPRPAPSSWRHPSGKGRRGPPGIGGRIVGERQLRTEYGNDRPGREGDPAPGCCGGARTLSLYGEIKLRVKF

SEQ ID NO: 40979 - protein, 171 aa, Homo sapiens
  DOMAIN (117)..(171): Ribosomal protein L6e domain identified by PFam, accession name Ribosomal_L6e, E-value=0.00047, PFam score of -55.1
SAAKSEMAGEKVEKPDTKEKKPEAKKVDAGGKVKKGNLKAKKPKKGKPHCSRNPVLVRGIGRYSRSAMYSRKAMYKRKYSAAKSKVEKKKKEKVLATVTKPVGGDKVGGTRGVKLRKMPRIYPTEDVPRKLLSHGKKPFSQHVRKLRASITPGTILIILTGRHRGKRVVFL

SEQ ID NO: 40980 - protein, 94 aa, Homo sapiens
  DOMAIN (43)..(62): ALPHA-CATENIN SIGNATURE domain identified by eMATRIX, accession number PR00805J, p-value=4.857e-09, raw score of 7.44
CIALYCHLLNICSKVKAEMQNLGREFIVPGMDSATSLIWATKDLMNAVIEAPEKKPLLKREKQDESQSEIKWASQKKHLNPVQALSEFKAMDSI

SEQ ID NO: 40981 - protein, 932 aa, Homo sapiens
  DOMAIN (777)..(802): ALPHA-CATENIN SIGNATURE domain identified by eMATRIX, accession number PR00805I, p-value=1.188e-32, raw score of 12.05
  DOMAIN (16)..(893): Vinculin family domain identified by PFam, accession name Vinculin, E-value=0, PFam score of 1653.0
EMTAVHAGNINFKWDPKSLEIRTLAVERLLEPLVTQVTTLVNTNSKGPSNKKRGRSKKAHVLAASVEQATENFLEKGDKIAKESQFLKEELVVAVEDVRKQGDLMKAAAGEFADDPCSSVKRGNMVRAAPALLSAVTRLLILADMADVYKLLVQLKVVEDGILKLRNAGNEQDLGNQYKALKPEVDKLNIMAAKRQQELKDVGHRDQMAAARGILQSNVPILYTASQACLQHPDVAAYKANRDLIYKQLQQAVTGISNAAQATASDDASQHQGGGGGELAYALNNFDKQIIVDPLSFSEERFRPSLEERLESIISGAALMADSSCTRDDRRERIVAECNAVRQACRTCVSEYMGNAGRKERSDALNSAIDKMTKKTRDLRRQLRKAVMDHVSDSFLETNVPLLVLIEAAKNGNEKEVKEYAQVFREHANKLIEVANLACSISNNEEGVKLVRMSASQLEAGCPQVINAATWALAPKPQSKLAQENMDLFKEQWEKQVRVLTDAVDDITSIDDFLAVSENHILEDVNKCVIALQEKDVDGLDRTAGAIRGRAARVIHVVTSEMDNYEPGVYTEKVLEATKLLSNTVMPRFTEQVEAAVEALSSDPAQPMDENEFIDASRLVYDGIRDIRKAVLMIRTPEELDDSDFETEDFDVRSETSVQTEDDQLIAGQSARAIMAQLPQEQKAKIREQVASFQEEKSKLDAEVSKWDDSGNDIIVLAKQMCMIMMEMTDFTRGKGPLKNTSDVISAAKKIAEAGSRMDKLGRTIRDHCPDSACKQDLLAYLQRIALYCHQLNICSKVKAEVQNLGGELVVSGNCDTCGALQGLKGWPPPLCLATHWVDSAMSLIQAAKNLMNAVVQTVKASYVASTKYQKSQGMASLNLPAVSMKMKAPEKKPLVKREKQDETQTKIKRASQKKHVNPVQALSEFKAMDSI

SEQ ID NO: 40982 - protein, 944 aa, Homo sapiens
  DOMAIN (632)..(657): ALPHA-CATENIN SIGNATURE domain identified by eMATRIX, accession number PR00805G, p-value=1.000e-31, raw score of 11.78
  DOMAIN (41)..(914): Vinculin family domain identified by PFam, accession name Vinculin, E-value=0, PFam score of 1513.5
  misc_feature (1)...(944): Xaa = X or * as defined in Table 2
PDWRETKQRPSASGLWNLALAQLAAEMTAVHAGNINFKWDPKSLEIRTLAVERLLEPLVTQVTTLVNTNSKGPSNKKRGRSKKAHVLAASVEQATENFLEKGDKIAKESQFLXEXLLAAVEYVRKQGDLMKTAAGEFADDPCSSVEQGNMVQAAXTLLSAVTCLLILADMGNVYTLLIQLKVVEDDILKLRNAGNEQDLGIXYKALKPEVNKVNIMAVKRQQELKDVGHRDQMAAARGILQKNVLIFYTASRACLQHPDVAAYKANRDLIYKQLQQAITGISNVAQATASDDASHHQGGGGVELAYVLNNFDKQIIVDPLSFSEERFRPSLEERLESIISGAALMADSSCTRDDRRERIVAECNAVRQALQDLLSEYMGNAGRKERSDALNSAIDKMTKKTRDLRRQLRKAVMDHVSDSFLETNVPLLVLIEAAKNGNEKEVKEYAQVFREHANKLIEVANLACSISNNEEGVKLVRMSASQLEAGCPQVINAATWALAPKPQSKLAQENMDLFKEQWEKQVHVLTDAADDITSIDDFLAVSENHILEDVNKCVIALQEKDVDGLDRTAGAIRGRAARVIHVVTSEMDNYEPGVYTEKVLEATKLLSNTVMPRFTEQVEAAVEALSSDPAQPMDENEFIDASRLVYDGIRDIRKAVLMIRTPEELDDSDFETEDFDVRSETSVQTEDDQLIAGQSARAIMAQLPQEQKAKIREQVASFQEEKSKLDAEVSKWDDSGNDIIVLAKQMCMIMMEMTDFTRGKGPLKNTSDVISAAKKIAEAGSRMDKLGRTIRDHCPDSACKQARPARLSLPXLGLLAYLHCIALYCHQLNICSKVKAEVQNLGGELVVSGVDSAMSLIWATKNLMNAVVQTVKASYVASPNNKKSQGMASLNLPAVSWKMKAPEKKPLVKREKQDETQTKIKRASQKKHVNPVQALSEFKAMDSI

SEQ ID NO: 40983 - protein, 1515 aa, Homo sapiens
  DOMAIN (351)..(362): PROTEIN REPEAT MUSCLE CALCIUM-BI domain identified by eMATRIX, accession number PD00301B, p-value=7.600e-12, raw score of 5.49
  DOMAIN (1068)..(1180): Domain in Myosin and Kinesin Tails domain identified by PFam, accession name MyTH4, E-value=1.4e-55, PFam score of 198.1
MRPRTLAVSVTALKVARLESVPSDVQMCSEFLPSGGLVVSLGSGVKLQIFVVSVTAHKSSVDPKNSGAQLASASGSRTRAAGGAACQSCAVRSHSLALRWSMGLGAVEQGAVLVREAPAAQEPMEWVGGSGMAGCRSRALLHGKAAKAQRETEHSAEKEIAAEKKTTNGNPDLPPRDCDRRMPDQFDQAVVLNQLRYSGMLETVRIRKAGYKVLMRNLALPEDVRGKCTSLLQLYDASNSEWQLGKTKVFLRESLEQKLEKRREEEVSHAAMVIRAHVLGFLARKQYRKVLYCVVIIQKNYRAFLLRRRFLHLKKAAIVFQKQLRGQIARRVYRQLLAEKREQEEKKKQEEEEKKKREEEERERERERREAELRAQQEEETRKQQELEALQKSQKEAELTRELEKQKENKQVEEILRLEKEIEDLQRMKEQQELSLTEASLQKLQERRDQELRRLEEEACRAAQEFLESLNFDEIDECVRNIERSLSVGSEFSSELAESACEEKPNFNFSQPYPEEEVDEGFEADDDAFKDSPKPSEHGHSDQRTSGIRTSDDSSEEDPYMNDTVVPTSPNGDYDYDQDDYEDGAITSGSSVTFSNSYGSQWSPDYRCSVGTYNSSGAYRFSSEGAQSSFEDSEEDFDSRFDTDDELSYRRDSVYSCVTLPYFHSFLYMKGGLMNSWKRRWCVLKDETFLWFRSKQEALKQGWLHKKGGGSSTLSRRNWKKRWFVLRQSKLMYFENDSEEKLKGTVEVRTAKEIIDNTTKENGIDIIMADRTFHLIAESPEDASQWFSVLSQVHASTDQEIQEMHDEQANPQNAVGTLDVGLIDSVCASDSPDRPNSFVIITANRVLHCNADTPEEMHHWITLLQRSKGDTRVEGQEFIVRGWLHKEVKNSPKMSSLKLKKRWFVLTHNSLDYYKSSEKNALKLGTLVLNSLCSVVPPDEKIFKETGYWNVTVYGRKHCYRLYTKLLNEATRWSSAIQNVTDTKAPIDTPTQQLIQDIKENCLNSDVVEQIYKRNPILRYTHHPLHSPLLPLPYGDINLNLLKDKGYTTLQDEAIKIFNSLQQLESMSDPIPIIQGILQTGHDLRPLRDELYCQLIKQTNKVPHPGSVGNLYSWQILTCLSCTFLPSRGILKYLKFHLKRIREQFPGTEMEKYALFTYESLKKTKCREFVPSRDEIEALIHRQEMTSTVYCHGGGSCKITINSHTTAGEVVEKLIRGLAMEDSRNMFALFEYNGHVDKAIESRTVVADVLAKFENALTGKLLTVSFQAHEAVIHGHHPAPEENLQVLAALRLQYLQGDYTLHAAIPPLEEVYSLQRLKARISQSTKTFTPCERLEKRRTSFLEGTLRRSFRTGSVVRQKVEEEQMLDMWIKEEVSSARASIIDKWRKFQGMNQEQAMAKYMALIKEWPGYGSTLFDVECKEGGFPQELWLGVSADAVSVYKRGEGRPLEVFQYEHILSFGAPLANTYKIVVDERELLFETSEVVDVAKLMKAYISMIVKKRYSTTRSASSQGSSR

SEQ ID NO: 40984 - protein, 640 aa, Homo sapiens
  DOMAIN (330)..(362): Transketolase proteins domain identified by eMATRIX, accession number BL00801F, p-value=2.421e-25, raw score of 23.45
  DOMAIN (127)..(435): Transketolase domain identified by PFam, accession name transketolase, E-value=5.1e-180, PFam score of 611.5
  misc_feature (1)...(640): Xaa = X or * as defined in Table 2
MAGLGMGEEGIPGGERWEHKRRAHIVSNHRITRTGTHPYTHSPYPHKDNVHTARREHKTQDLGTIRSVGHSSEHTQHTTPDTVPPLVVIVCRVCYRPPHGETRAEYTRHRGQNRRTKFWVGIKEEKNLAQQERTEEQLANIARGGYVLKDCAGQPELIFIATGSEVELAVAAYEKLTAEGVKARVVSMPSTDAFDKQDAAYRESVLPKAVTARVAVEAGIADYWYKYVGLNGAIVGMTTFGESAPAELLFEEFGFTVDNPLASRAVRLRLPFNNDQVEAAVGWKLAVERHNGPTALILSRQNLAQVERTPDQVKEIARGGYVLKDSGGKPDIILIATGSEMEITLQAAEKLAGEGRNVRVVSLPSTDIFDAQDEEYRESVLPSNVAARVAVEAGIADYWYKYVGLKGAIVGMTGYGESAPADKLFPFFGFTAENIVAKAHKVLGVKAGSHIPRKKYDVPGKKSFSPVKYSTIGSPSPERPVSITTIPNSFVIITANRVLHCNADTPEEMHHWITLLQRSKGDTRVEGQEFIVVEKLIRGLAMEDSRNMFALSXIQRPRRQSHXKSNRRSXCLSQVXKRASWXAFTNIXWPDRHGLRKYSFWSPGNIHHLRHCRMLXVVRLLLRLLNAVYEWRLAPAIVAA

SEQ ID NO: 40985 - protein, 980 aa, Homo sapiens; identical to SEQ ID NO: 33540
  DOMAIN (327)..(439): Domain in Myosin and Kinesin Tails domain identified by PFam, accession name MyTH4, E-value=2.3e-55, PFam score of 197.3

SEQ ID NO: 40986 - protein, 134 aa, Homo sapiens
IREQFPGSEMEKYALFTYESLKKTKCREFVPSRDEIEALIHRQEMTSTVYCHGGGSCKITINSHTTAGEFAVGVPTLFGTGPPDASALCHCRLETATGNHSVSVGLQKQGRVHSEQWTVLMRTRASALAQQLAL

SEQ ID NO: 40987 - protein, 182 aa, Homo sapiens
  DOMAIN (32)..(42): Ephrins proteins domain identified by eMATRIX, accession number BL01299A, p-value=6.538e-09, raw score of 11.02
  misc_feature (1)...(182): Xaa = X or * as defined in Table 2
WCPHRWRPHTLTPTAAPAVTKSPEATHLYGQVSWNSQNLHLEGQLQSASLQGSFMLKXXGDPLDFVMSPPRPLFERLKARISQSTKTFTPCERLEKRRTSFLEGTLRRSFRTGSVVRQKVEEEQMLDMWIKEEVSSARASIIDKWRKFQGMNQEQAMAKYMALIKEWPGYGSTLFDVEGTDT

SEQ ID NO: 40988 - protein, 185 aa, Homo sapiens
MQNYRIIDKTRRETRNSKKTNKEGREKTEREGAENRQQRTNQGKKVQQEAQRRGIRWDREDTGTPPGPTSDKKDNEESEDRNNARNKREHNEKEGTTVGPWVGVDVRVLGTPAIAGYWNVTVYGRKHCYRLYTKLLNEATRWSSAIQNVTDTKAPIDTPTQQLIQDIKEETYLSFYGVPSNPKGA

SEQ ID NO: 40989 - protein, 209 aa, Homo sapiens
VVEKLIRGLAMEDSRNMFALFEYNGHVDKAIESRTVVADVLAKFENALTGKLLTVSFQAHEAVIHGHHPAPEENLQVLAALRLQYLQGDYTLHAAIPPLEEVYSLQRLKARISQSTKTFTPCERLEKRRTSFLEGTLRRSFRTGSVVRQKVEEEQMLDMWIKEEVSSARASIIDKWRKFQGMNQEQAMAKYMALIKEWPGYGSTLFDVE

SEQ ID NO: 40990 - protein, 2408 aa, Homo sapiens
  DOMAIN (516)..(527): PROTEIN REPEAT MUSCLE CALCIUM-BI domain identified by eMATRIX, accession number PD00301B, p-value=7.600e-12, raw score of 5.49
  DOMAIN (1283)..(1395): Domain in Myosin and Kinesin Tails domain identified by PFam, accession name MyTH4, E-value=7.9e-55, PFam score of 195.6
MPEPPTHSMGSCAAGASLTSTAPCSTAPSPIDHLRAKECERTAQDWQAAPPAALVRDPLAALVRTWRTFMSSSRIVNTPIGTLCLAQGFQWFSVLSQVHASTDQEIQEMHDEQANPQNAVGTLDVGLIDSVCASDSPDRPNSFVIITANRVLHCNADTPEEMHHWITLLQRSKGDTRVEGQEFIVRGWLHKEVKNSPKMSSLKLKKRWFVLTHIPGLLQEFREDALNWGPDEKIFKETELVNDMDKINGRIERAEASTCELGLLRIIQVVSPFHSSVHLFTNVGPQVRNRIAACERAGMMEYRSASLSLLNASVAEGYVREEKEIAAEKKTTNGNPDLPPRDCDRRMPDQFDQAVVLNQLRYSGMLETVRIRKAGYKVLMRNLALPEDVRGKCTSLLQLYDASNSEWQLGKTKVFLRESLEQKLEKRREEEVSHAAMVIRAHVLGFLARKQYRKVLYCVVIIQKNYRAFLLRRRFLHLKKAAIVFQKQLRGQIARRVYRQLLAEKREQEEKKKQEEEEKKKREEEERERERERREAELRAQQEEETRKQQELEALQKSQKEAELTRELEKQKENKQVEEILRLEKEIEDLQRMKEQQELSLTEASLQKLQERRDQELRRLEEEACRAAQEFLESLNFDEIDECVRNIERSLSVGSEFSSELAESACEEKPNFTLSKPRPPNRKRQEVDEGFEADDDAFKDSPNPSEHGHSDQRTSGIRTSDDSSEEDPYMNDTVVPTSPSADSTVLLAPSVQDSGSLHNSSSGESTYCMPQNAGDLPSPDGDYDYDQDDYEDGAITSGSSVTFSNSYGSQWSPDYRCSVGTYNSSGAYRFSSEGAQSSFEDSEEDFDSRFDTDDELSYRRDSVYSCVTLPYFHSFLYMKGGLMNSWKRRWCVLKDETFLWFRSKQEALKQGWLHKKGGGSSTLSRRNWKKRWFVLRQSKLMYFENDSEEKLKGTVEVRTAKEIIDNTTKENGIDIIMADRTFHLIAESPEDASQWFSVLSQVHASTDQEIQEMHDEQANPQNAVGTLDVGLIDSVCASDSPDRPNSFVIITANRVLHCNADTPEEMHHWITLLQRSKGDTRVEGQEFIVRGWLHKEVKNSPKMSSLKLKKRWFVLTHNSVHYYKSSEKNRRSNWGTLVLNSLCSVVPPDEKIFKETGYWNVTVYGRKHCYRLYTKLLNEATRWSSAIQNVTDTKAPIDTPTQQLIQDIKENCLNSDVVEQIYKRNPILRYTHHPLHSPLLPLPYGDINLNLLKDKGYTTLQDEAIKIFNSLQQLESMSDPIPIIQVILQTGHDLRPLRDELYCQLIKQTNKVPHPGSVGNLYSWQILTCLSCTFLPSRGILKYLKFHLKRIREQFPGTEMEKYALFTYESLKKTKCREFVPSRDEIEALIHRQEMTSTVYCHGGGSCKITINSHTTAGEVVEKLIRGLAMEDSRNMFALFEYNGHVDKAIESRTVVADVLAKFEKLAATSEVGDLPWKFYFKLYCFLDTDNVPKDSVEFAFMFEQAHEAVIHGHHPAPEENLQVLAALQLQYLQMDYTLQAAIPPLEEVYSLQRLKARISQSTKTFTPCERLEKRRTSFLEGTLRRSFRTGSVVRQKVEEEQMLDMWIKEEVSSARASIIDKWRKFQGMNQEQAMAKYMALIKEWPGYGSTLFDVECKEGGFPQELWLGVSADAVSVYKRGEGRPLEVFQYEHILSFGAPLANTYKIVVDERELLFETSEVVDVAKLMKAYISMIVKKRYSTTRSASSQGSSRSKHRSAAVSTALVDTECDFKKAKEGTEIQTTIREYYKHLYANKVENLEEMDKFLDTYTLPRLNQEEVESLNRPITDSEIEAIINSLPTKKSPGPDGFTAEFYQRYKEELVPFLLKLFQSIEKVGILPNSFYEASIIRYQSLAETQPKENFRPISLMNIDAKILSKILANQIQQHIEKLIHHDQVGFIPGMQGWFNICKSINIIQHINRTNDKNHMIISIDAEKAFDKIQQRFMLKTLNKLVLEVLARAIRQQKEIKGIQLGKEEIKLSLFADDMIVYLENPIVSAQNLLKLIGNFSKVSGYKINVQKSQAFLYTNNRQTESQIMSKLLFTIASKRIKYLGIQLTRDVKGLFKENYKPLLNEIKEDTNKWKNIPCSWVGRINIVKMAILPKVIYRFNAIPNDFLHRIGKNYFKVHMEPKRAHIAKSILSQKNKAGGITLPDFKLYYKATVTKTAWYWYQNRDIDQWNRTEPSEITLHIYNHLIFDKPDKNKKWGKDSLFNKWCWENWLATCRKLKLDPFLTPYTKINSRWIKDLNVRPKTIKTLEENLGITIQDIGMGKDFMSKTPKAMGTKAKIDKWDLIKLKSFCTAKETTITVKRQPTEWEKIFAIYSSDKGLISRIYNELKQIHKNNQPHQKVGEGYEQTLLKRRHLCSQKT

SEQ ID NO: 40991 - protein, 713 aa, Homo sapiens
  DOMAIN (247)..(359): Domain in Myosin and Kinesin Tails domain identified by PFam, accession name MyTH4, E-value=2.1e-54, PFam score of 194.2
IDSVCASDSPDRPNSFVIITANRVLHCNADTPEEMHHWITLLQRSKGDTRVEGQEFIVRGWLHKEVKNSPKMSSLKLKKRWFVLTHNSLDYYKSSEKNALKLGTLVLNSLCSVVPPDEKIFKETGYWNVTVYGRKHCYRLYTKLLNEATRWSSAIQNVTDTKAPIDTPTQQLIQDIKENCLNSDVVEQIYKRNPILRYTHHPLHSPLLPLPYGDINLNLLKDKGYTTLQDEAIKIFNSLQQLESMSDPIPIIQGILQTGHDLRPLRDELYCQLIKQTNKVPHPGSVGNLYSWQILTCLSCTFLPSRGILKYLKFHLKRIREQFPGTEMEKYALFTYESLKKTKCREFVLSRDEIEALIHRQDMTSTVYCHGGGSCKITINSHTTAGEVVEKLIRGLAMEDSRNMFALFEYNGHVDKAIESRTVVADVLAKFEKLAATSEVGDLPWKFYFKLYCFLDTDNVPKDSVEFAFMFEQAHEAVIHGHHPAPEENLQVLAAHATSSIMQGDYTLHAAIPPLEEVYSLQRLKARISQSTKTFTPCERLEKRRTSFLEGTLRRSFRTGSVVRQKVEEEQMLDMWIKEEVSSARASIIDKWRKFQGMNQEQAMAKYMALIKEWPGYGSTLFDVEVRTGCHVLGWAGCWHLRTWITAKFMWREDKMEHFALSTSFFRAPKIVPLTPPFSSQFLFSCVVNASVILGMNAKLRCHLFFYPSLGKL

SEQ ID NO: 40992 - protein, 178 aa, Homo sapiens
  DOMAIN (50)..(63): CHOLINESTERASE SIGNATURE domain identified by eMATRIX, accession number PR00878F, p-value=9.723e-10, raw score of 5.37
  DOMAIN (2)..(163): Carboxylesterases domain identified by PFam, accession name COesterase, E-value=1.1e-15, PFam score of 56.1
  misc_feature (1)...(178): Xaa = X or * as defined in Table 2
MDIVQDATFVYATLQTAHYHRDAGLPVYLYEFEHHARGIIVKPRTDGADHGDEMYFLFGGPFATGAKVPPDTPTGCPVSHLWMQTHPSIGWPQGAHQFLICYALPNESLLLRKQQKQQEXGGRNPNDGNLPCWPRYNKDEKYLQLDFTTRVGMKLKEKKMAFWMSLYQSQRPEKQRQF

SEQ ID NO: 40993 - protein, 99 aa, Homo sapiens
  DOMAIN (37)..(48): Carboxylesterases type-B serine proteins domain identified by eMATRIX, accession number BL00122G, p-value=2.500e-15, raw score of 11.67
  DOMAIN (26)..(84): Carboxylesterases domain identified by PFam, accession name COesterase, E-value=1.4e-15, PFam score of 55.8
GGRSVSPALSEIPHPILPPGLSMGKEKALSLQMMKYWANFARTGNPNDGNLPCWPRYNKDEKYLQLDFTTRVGMKLKEKKMAFWMSLYQSQRPEKQRQF

SEQ ID NO: 40994 - protein, 509 aa, Homo sapiens
  DOMAIN (107)..(148): Carboxylesterases type-B serine proteins domain identified by eMATRIX, accession number BL00122E, p-value=5.015e-17, raw score of 22.02
  DOMAIN (30)..(496): Carboxylesterases domain identified by PFam, accession name COesterase, E-value=2.8e-108, PFam score of 373.2
PLPGARRCLHEFWGQLASMYVSTRERYKWLRFNEDCLYLNVYAPARAPGDPQLPVMVWFPGGAFIVGAASSYEGSDLAAREKEGLVFLQHRLGIFSFLSTDDSHARGNWGLLDQMAALRWVQENIAAFRGRPREILTLFGQSAGAMSISGLMMSPLASGLFHRAISQSGTALFRLFITRNPLKVAKKVAHLAGCNHNSTQILVNCLRALIRAKVMRVSNKMRFLQLNFQRDPEEIIWSMSPVVDGVVIPDDPLVLLTQGKVSSVPYLLGVNNLEFNWLLPYIMKFPLNRQAMRKETITKMLWSTRTLLAKNSWGAEHGSKSLVGPPLAQLAPRPQNITKEQVPLVVEEYLDNVNEHDWKMLRNRMMDIVQDATFVYATLQTAHYHRDAGLPVYLYEFEHHARGIIVKPRTDGADHGDEMYFLFGGPFATGLSMGKEKALSLQMMKYWANFARTGNPNDGNLPCWPRYNKDEKYLQLDFTTRVGMKLKEKKMAFWMSLYQSQRPEKQRQF

SEQ ID NO: 40995 - protein, 586 aa, Homo sapiens
  DOMAIN (552)..(565): PROTEIN ZINC-FINGER METAL-BINDI domain identified by eMATRIX, accession number PD00066, p-value=1.000e-14, raw score of 13.92
  DOMAIN (229)..(586): Zinc finger, C2H2 type domain identified by PFam, accession name zf-C2H2, E-value=1.8e-103, PFam score of 357.2
ICKYIMNDQWARQNCLHSPTYGPSENVLSSAESKPEIQLSPSCPLIFSSQQALSQHVWLSHLSQLFSSLWAGNPLHLGKHYPEDQKQQQDPFCFSGKAEWIQEGEDSRLLFGRVSKNGTSKALSSPPEEQQPAQSKEDNTVVDIGSSPERRADLEETDKVLHGLEVSGFGEIKYEEFGPGFIKESNLLSLQKTQTGETPYMYTEWGDSFGSMSVLIKNPRTHSGGKPYVCRECGRGFTWKSNLITHQRTHSGEKPYVCKDCGRGFTWKSNLFTHQRTHSGLKPYVCKECGQSFSLKSNLITHQRAHTGEKPYVCRECGRGFRQHSHLVRHKRTHSGEKPYICRECEQGFSQKSHLIRHLRTHTGEKPYVCTECGRHFSWKSNLKTHQRTHSGVKPYVCLECGQCFSLKSNLNKHQRSHTGEKPFVCTECGRGFTRKSTLITHQRTHSGEKPFVCAECGRGFNDKSTLISHQRTHSGEKPFMCRECGRRFRQKPNLFRHKRAHSGAFVCRECGQGFCAKLTLIKHQRAHAGGKPHVCRECGQGFSRQSHLIRHQRTHSGEKPYICRKCGRGFSRKSNLIRHQRTHSG

SEQ ID NO: 40996 - protein, 44 aa, Homo sapiens
  misc_feature (1)...(44): Xaa = X or * as defined in Table 2
MAPYKEKNITLPARVKFGPPKGSLKRAPXXXXXEVIFTRHSYNL

SEQ ID NO: 40997 - protein, 26 aa, Homo sapiens
  misc_feature (1)...(26): Xaa = X or * as defined in Table 2
SWACAIHPTGYLIEQAGGXWVTARRD

SEQ ID NO: 40998 - protein, 464 aa, Homo sapiens
  DOMAIN (295)..(336): Nuclesosome assembly protein (NAP) domain identified by eMATRIX, accession number PF00956B, p-value=1.400e-25, raw score of 23.14
  DOMAIN (301)..(441): Nucleosome assembly protein (NAP) domain identified by PFam, accession name NAP_family, E-value=1.7e-26, PFam score of 98.2
MLRRYRPDITSCHGSTAESKGGVVLDVSGRARPLRRTRNSPSPTSLTSSKMSGLDGGNKLPLAQTGGLAAPDHASGDPDRDQCQGLREETEATQVMANTGGGSLETVAEGGASQDPVDCGPALRVPVAGSRGGAATKAGQEDAPPSTKGLEAASAAEAADSSQKNGCQLGEPRGPAGQKALEACGAGGLGSQMIPGKKAKEVTTKKRAISAAVEKEGEAGAAMEEKKVVQKEKKVAGGVKEETRPRAPKINNCMDSLEAIDQELSNVNAQADRAFLQLERKFGRMRRLHMQRISFIIQNIPGFWVTAFRNHPQLSPMISGQDEDMLRYMINLEVEELKHPRAGCKFKFIFQGNPYFRNEGLVKEYERRSSGRVVPFSTPIRWHRGQDPQAHIHRNREGNTIPSFFNWFSDHSLLEFDRIAEIIKGELWPNPLQYYLMGEGPRRGIRGPPRQPVESARSFRFQSG

SEQ ID NO: 40999 - protein, 145 aa, Homo sapiens
SRPLELTAYASALRAGFFLVLGLLGHSHGGFPNTISIGGLFMRNTVQEHSAFRFAVQLYNTNQNTTEKPFHLNYHVDHLDSSNSFSVTNACPAERDYLPWPGSIRENNWTALPCCKDHGLLHLKCSPGGARQNWAYCIWGVTGEL

SEQ ID NO: 41000 - protein, 842 aa, Homo sapiens
  DOMAIN (523)..(556): Bacterial extracellular solute-binding proteins family 3 sig. domain identified by eMATRIX, accession number BL01039B, p-value= 5.941e-12, raw score of 20.00
  DOMAIN (582)..(842): Ligand-gated ion channel domain identified by PFam, accession name lig_chan, E-value=1.3e-166, PFam score of 566.9
EPANSFSFSIIILTTPELRPCSCQLRFRRSMARQKKMGQSVLRAVFFLVLGLLGHSHGGFPNTISIGGLFMRNTVQEHSAFRFAVQLYNTNQNTTEKPFHLNYHVDHLDSSNSFSVTNAFCSQFSRGVYAIFGFYDQMSMNTLTSFCGALHTSFVTPSFPTDADVQFVIQMRPALKGAILSLLGHYKWEKFVYLYDTERGFSILQAIMEAAVQNNWQVTARSVGNIKDVQEFRRIIEEMDRRQEKRYLIDCEVERINTILEQVVILGKHSRGYHYMLANLGFTDILLERVMHGGANITGFQIVNNENPMVQQFIQRWVRLDEREFPEAKNAPLKYTSALTHDAILVIAEAFRYLRRQRVDVSRRGSAGDCLANPAVPWSQGIDIERALKMVQVQGMTGNIQFDTYGRRTNYTIDVYEMKVSGSRKAGYWNEYERFVPFSDQQISNDSASSENRTIVVTTILESPYVMYKKNHEQLEGNERYEGYCVDLAYEIAKHVRIKYKLSIVGDGKYGARDPETKIWNGMVGELVYGRADIAVAPLTITLVREEVIDFSKPFMSLGISIMIKKPQKSKPGVFSFLDPLAYEIWMCIVFAYIGVSVVLFLVSRFSPYEWHLEDNNEEPRDPQSPPDPPNEFGIFNSLWFSLGAFMQQGCDISPRSLSGRIVGGVWWFFTLIIISSYTANLAAFLTVERMVSPIESAEDLAKQTEIAYGTLDSGSTKEFFRRSKIAVYEKMWSYMKSAEPSVFTKTTADGVARVRKSKGKFAFLLESTMNEYIEQRKPCDTMKVGGNLDSKGYGVATPKGSALGNAVNLAVLKLNEQGLLDKLKNKWWYDKGECGSQGLRE

SEQ ID NO: 41001 - protein, 263 aa, Homo sapiens
MARQKKMGQSVLRAVFFLVLGLLGHSHGGFPNTISIGKRKRASRRSRLSLTRDHCPGKAFPAVFRAERSTGGEQEAGMLQGGEESRLFGSLLWTLPWRACSSWKLSQGDADCLAAPGRITRARGAQSVVSGCRETGWGLFMRNTVQEHSAFRFAVQLYNTNQNTTEKPFHLNYHETSPIPLKSPPVSFCCALVVHSTLHRPSLCSVSSLAHRSHIPSPHCHCKNCCCTPLQPTNVLVDYALFARSREKANVTLKLPLTEVIPF

SEQ ID NO: 41002 - protein, 914 aa, Homo sapiens
  DOMAIN (303)..(326): POTASSIUM CHANNEL SIGNATURE domain identified by eMATRIX, accession number PR00169G, p-value=5.922e-12, raw score of 9.39
  DOMAIN (135)..(354): Ion transport protein domain identified by PFam, accession name ion_trans, E-value=3.4e-09, PFam score of -5.3
SAEPPPRPCGSRPGGLGWGPRRPPRSAPAEPEPDPGRLPPGTMVQKSRNGGVYPGPSGEKKLKVGFVGLDPGAPDSTRDGALLIAGSEAPKRGSILSKPRAGGAGAGKPPKRNAFYRKLQNFLYNVLERPRGWAFIYHAYVFLLVFSCLVLSVFSTIKEYEKSSEGALYILEIVTIVVFGVEYFVRIWAAGCCCRYRGWRGRLKFARKPFCVIDIMVLIASIAVLAAGSQGNVFATSALRSLRFLQILRMIRMDRRGGTWKLLGSVVYAHSKELVTAWYIGFLCLILASFLVYLAEKGENDHFDTYADALWWGLITLTTIGYGDKYPQTWNGRLLAATFTLIGVSFFALPAGILGSGFALKVQEQHRQKHFEKRRNPAAGLIQSAWRFYATNLSRTDLHSTWQYYERTVTVPMYSSQTQTYGASRLIPPLNQLELLRNLKSKSGLAFRKDPPPEPSPSKGSPCRGPLCGCCPGRSSQKVSLKDRVFSSPRGVAAKGKGSPQAQTVRRSPSADQSLEDSPSKVPKSWSFGDRSRARQAFRIKGAASRQNSEEASLPGEDIVDDKSCPCEFVTEDLTPGLKVSIRAVCVMRFLVSKRKFKESLRPYDVMDVIEQYSAGHLDMLSRIKSLQSRVDQIVGRGPAITDKDRTKGPAEAELPEDPSMMGRLGKVEKQVLSMEKKLDFLVNIYMQRMGIPPTETEAYFGAKEPEPAPPYHSPEDSREHVDRHGCIVKIVRSSSSTGQKNFSAPPAAPPVQCPPSTSWQPQSHPRQGHGTSPVGDHGSLVRIPPPPAHERSLSAYGGGNRASMEFLRQEDTPGCRPPEGNLRDSDTSISIPSVDHEELERSFSGFSISQSKENLDALNSCYAAVAPCAKVRPYIAEGESDTDSDLCTPCGPPPRSATGEGPFGDVGWAGPRK

SEQ ID NO: 41003 - protein, 912 aa, Homo sapiens
  DOMAIN (319)..(342): POTASSIUM CHANNEL SIGNATURE domain identified by eMATRIX, accession number PR00169G, p-value=5.922e-12, raw score of 9.39
  DOMAIN (151)..(370): Ion transport protein domain identified by PFam, accession name ion_trans, E-value=3.4e-09, PFam score of -5.3
GARWPQRLRARPKPGRSAEPPPRPCGSRPGGLGWGPRRPPRSAPAEPEPDPGRLPPGTMVQKSRNGGVYPGPSGEKKLKVGFVGLDPGAPDSTRDGALLIAGSEAPKRGSILSKPRAGGAGAGKPPKRNAFYRKLQNFLYNVLERPRGWAFIYHAYVFLLVFSCLVLSVFSTIKEYEKSSEGALYILEIVTIVVFGVEYFVRIWAAGCCCRYRGWRGRLKFARKPFCVIDIMVLIASIAVLAAGSQGNVFATSALRSLRFLQILRMIRMDRRGGTWKLLGSVVYAHSKELVTAWYIGFLCLILASFLVYLAEKGENDHFDTYADALWWGLITLTTIGYGDKYPQTWNGRLLAATFTLIGVSFFALPAGILGSGFALKVQEQHRQKHFEKRRNPAAGLIQSAWRFYATNLSRTDLHSTWQYYERTVTVPMYSSQTQTYGASRLIPPLNQLELLRNLKSKSGLAFRKDPPPEPSPSQKVSLKDRVFSSPRGVAAKGKGSPQAQTVRRSPSADQSLEDSPSKVPKSWSFGDRSRARQAFRIKGAASRQNSEEASLPGEDIVDDKSCPCEFVTEDLTPGLKVSIRAVCVMRFLVSKRKFKESLRPYDVMDVIEQYSAGHLDMLSRIKSLQSRVDQIVGRGPAITDKDRTKGPAEAELPEDPSMMGRLGKVEKQVLSMEKKLDFLVNIYMQRMGIPPTETEAYFGAKEPEPAPPYHSPEDSREHVDRHGCIVKIVRSSSSTGQKNFSAPPAAPPVQCPPSTSWQPQSHPRQGHGTSPVGDHGSLVRIPPPPAHERSLSAYGGGNRASMEFLRQEDTPGCRPPEGTLRDSDTSISIPSVDHEELERSFSGFSISQSKENLDALNSCYAAVAPCAKVRPYIAEGESDTDSDLCTPCGPPPRSATGEGPFGDVGWAGPRK

SEQ ID NO: 41004 - protein, 942 aa, Homo sapiens
  DOMAIN (261)..(284): POTASSIUM CHANNEL SIGNATURE domain identified by eMATRIX, accession number PR00169G, p-value=5.922e-12, raw score of 9.39
  DOMAIN (93)..(312): Ion transport protein domain identified by PFam, accession name ion_trans, E-value=3.4e-09, PFam score of -5.3
MVQKSRNGGVYPGPSGEKKLKVGFVGLDPGAPDSTRDGALLIAGSEAPKRGSILSKPRAGGAGAGKPPKRNAFYRKLQNFLYNVLERPRGWAFIYHAYVFLLVFSCLVLSVFSTIKEYEKSSEGALYILEIVTIVVFGVEYFVRIWAAGCCCRYRGWRGRLKFARKPFCVIDIMVLIASIAVLAAGSQGNVFATSALRSLRFLQILRMIRMDRRGGTWKLLGSVVYAHSKELVTAWYIGFLCLILASFLVYLAEKGENDHFDTYADALWWGLITLTTIGYGDKYPQTWNGRLLAATFTLIGVSFFALPAGILGSGFALKVQEQHRQKHFEKRRNPAAGLIQSAWRFYATNLSRTDLHSTWQYYERTVTVPMYRLIPPLNQLELLRNLKSKSGLAFRKDPPPEPSPSQKPPRRGCQGEGVPAGPDCEAVTQRRPEPRGPPPARCPKSWSFGDRSRARQAFRIKGAASRQNSEEASLPGEDIVDDKSCPCEFVTEDLTPGLKVSIRAVCVMRFLVSKRKFKESLRPYDVMDVIEQYSAGHLDMLSRIKSLQSRVDQIVGRGPAITDKDRTKGPAEAELPEDPSMMGRLGKVEKQVLSMEKKLDFLVNIYMQRMGIPPTETEAYFGAKEPEPAPPYHSPEDSREHVDRHGCIVKIVRSSSSTGQKNFSAPPAAPPVQCPPSTSWQPQSHPRQGHGTSPVGDHGSLVRIPPPPAHERSLSAYGGGNRASMEFLRQEDTPGCRPPEGTLRDSDTSISIPSVDHEELERSFSGFSISQSKENLDALNSCYAAVAPCAKVRPYIAEGESDTDSDLCTPCGPPPRSATGEGPFGDVGWAGPRKQGSPEPSTAIAAAGPHTRSPPQTRTGAFLRLWHQPVRVRSAVSPHPYKTAKFSKLEPPIHSCSRVMESSWPLLCTAFIAQEGGDKGVSAKLSQLLLLLGFWEATRNS

SEQ ID NO: 41005 - protein, 564 aa, Homo sapiens
GFGHTVHAAEGGDFGGSWQGDSVLLCSTVDPGSWAASRGKGSPCRGPLCGCCPGRSSQPSKVEVAVSCSCGALLGMCMPPVVLALEGCPRGVAAKGKGSPQAQTVRRSPSADQSLEDSPSKVPKSWSFGDRSRARQAFRIKGAASRQNSEEASLPGEDIVDDKSCPCEFVTEDLTPGLKVSIRAVCVMRFLVSKRKFKESLRPYDVMDVIEQYSAGHLDMLSRIKSLQSRQEPRLPVQQGTRTGIDMIVGPPPPSTPRHKKYPTKGPTAPPRESPQYSPRVDQIVGRGPAITDKDRTKGPAEAELPEDPSMMGRLGKVEKQVLSMEKKLDFLVNIYMQRMGIPPTETEAYFGAKEPEPAPPYHSPEDSREHVDRHGCIVKIVRSSSSTGQKNFSAPPAAPPVQCPPSTSWQPQSHPRQGHGTSPVGDHGSLVRIPPPPAHERSLSAYGGGNRASMEFLRQEDTPGCRPPEGTLRDSDTSISIPSVDHEELERSFSGFSISQSKENLDALNSCYAAVAPCAKVRPYIAEGESDTDSDLCTPCGPPPRSATGEGPFGDVGWAGPRK

SEQ ID NO: 41006 - protein, 258 aa, Homo sapiens
MRPKLGHWLWDGKEGDTEKRMNRIWWQRRESRQELPQYREGKGAGEPWTGEADVGQGPWKTMLLAEYMKRKPSLMTTKALANLTHFTALTRAGPRVCSQCAAHLPKAPNGRRAPAKHCLVREIKSLLLVPGIHECVKSGQIRNLESARVSMVAKSNSRSYSSPLVWLEAETWCEGITSPEGSKSIVEGIIEEEEEDEEGSESISKRKKEDDMENVNQAIIINLSDCLDTQMMYFTFLLKVKKPFTSLKIIHKSSYRYH

SEQ ID NO: 41007 - protein, 229 aa, Homo sapiens
HPGTAMDALNSMQNFLRGRPKTFKSLENAIEWSVKSGQIRNLESARVSMVGQVKQCEGITSPEGSKSIVEGIIEEEEEDEEGSESISKRKKEDDMETKKDHPYTWRIELAKTEKYWDGWFRGLSNLFLSCPIPKLLLLAGVDRLDKDLTIGQMQGKFQMQVLPQCGHAVHEDAPDKVAEAVATFLIRHRFAEPIGGFQCVFPGLLVTCCPPLLQHRALLVNTFAPEAHC

SEQ ID NO: 41008 - protein, 100 aa, Homo sapiens
  DOMAIN (69)..(85): EUKARYOTIC PORIN SIGNATURE domain identified by eMATRIX, accession number PR00185B, p-value=2.125e-21, raw score of 8.65
  DOMAIN (3)..(100): Eukaryotic porin domain identified by PFam, accession name Euk_porin, E-value=6.3e-05, PFam score of -64.0
DMCNTPTYCDLGKAAKDVFNKGYGFGMVKIDLKTKSCSGVEFSTSGHAYTDTGKASGNLETKYKVCNYGLTFTQKWNTDNTLGTEISWENKLAEGLKLEA

SEQ ID NO: 41009 - protein, 147 aa, Homo sapiens
  DOMAIN (5)..(21): EUKARYOTIC PORIN SIGNATURE domain identified by eMATRIX, accession number PR00185A, p-value=3.455e-14, raw score of 10.68
  DOMAIN (2)..(146): Eukaryotic porin domain identified by PFam, accession name Euk_porin, E-value=3e-05, PFam score of -58.4
  misc_feature (1)...(147): Xaa = X or * as defined in Table 2
MCNTPAYCDLGKAAKDVFNKGYGFGMVKIDLKTKSCSGVEFSTSGHAYTDTGKASGNLETKYKVCNYGLTFTQKXNTPAYCDLGKAAKDVFNKGYGFGMVKIDLKTKSCSGVEFSTSGHAYTDTGKASGNLETKYKVCNYGLTFTQK

SEQ ID NO: 41010 - protein, 56 aa, Homo sapiens
  DOMAIN (19)..(31): EUKARYOTIC PORIN SIGNATURE domain identified by eMATRIX, accession number PR00185C, p-value=2.857e-09, raw score of 13.61
VDIDFSGPTIYGWSVLAFEGWLAACEMSFDTAKSKLSQNNFALGYKAADFQLHTHV

SEQ ID NO: 41011 - protein, 246 aa, Homo sapiens
  DOMAIN (68)..(84): EUKARYOTIC PORIN SIGNATURE domain identified by eMATRIX, accession number PR00185B, p-value=1.938e-15, raw score of 8.65
  DOMAIN (2)..(245): Eukaryotic porin domain identified by PFam, accession name Euk_porin, E-value=2.1e-103, PFam score of 356.9
MCNTPTYCDLGKAAEDVFNKGYGFGMGKIDLKTKSCSAVEFSTSGHAYTDTGKASGNLEPECKVCNYGLTFTQKRNTDNTLGTEISLENKLAKGLKLSLDTILVPNTGKKSGELKASYKWDCFSVGSNVDLDFSGPTIYGWAVLVFEGWLAGYQMSFDTAKSKLSQNNFALGYEAADFQLHTHVTDGTEFGGSIYQKVNGIEMSINLAWTAGSNNTHFGIATKYKLDCRTSLSAKAVVLGTRVGSC

SEQ ID NO: 41012 - protein, 106 aa, Homo sapiens
MSPLKGTGAVPSLLGPQSTSLSTPSPPAHARCGAGQLVVLAWPGCSSPRLAPKRATVARHAGAQALSGRGGAQARLGVRGCAGADGVGLKTFSVALAEQRQALGVE

SEQ ID NO: 41013 - protein, 32 aa, Homo sapiens
YTKVFALDVAARHRVQFAMPESDAVAMLKQLS

SEQ ID NO: 41014 - protein, 544 aa, Homo sapiens
  DOMAIN (95)..(124): kw REPLICATION REPB REPA INITIATION domain identified by eMATRIX, accession number DM00653A, p-value=7.207e-27, raw score of 20.40
  DOMAIN (252)..(446): ParA family ATPase domain identified by PFam, accession name ParA, E-value=2.7e-08, PFam score of 41.0
SSVTGRTEKARIWEVTDRTVRRPWIGEAVAAAAADGVTFSVPVTPHTFRHSYAMHMLYAGIPLKVLQSLMGHKSISSTEVYTKVFALDVAARHRNRFTQFRLSETKEITNPYAMRLYESLCQYRKPDGSCIVSLKIDWIIERYQLPQSYQLYYFELAIPVGYFYPGSFSTASRILLLHPRGLRAITIAVFGKQNTYIRLEPFKINVLEQITKHIEKLQCGGVVKQLSRRGNNQHISSTYDINRADTQVRRAVNNYDIIVMSNSFNGQSEHQVWIARLTWVIGTINVVCAADVLIVPTPAELFDYTSALQFFDMLRDLLKNVDLKGFEPDVRILLTKYSNSNGSQSPWMEEQIRDAWGSMVLKNVVRETDEVGKARLTWGIGTINVVCAADVLIVPTPAELFDYTSALQFFDMLRDLLKNVDLKGFEPDVRILLTKYSNSNGSQSPWMEEQIRDAWGSMVLKNVVRETDEVGKEPPSTNTFRHSYAMHMLYAGIPLKVLQSLMGHKSISSTEVYTKVFALDVAARHRVQFAMPESDAVAMLKQLS

SEQ ID NO: 41015 - protein, 229 aa, Homo sapiens
  DOMAIN (162)..(176): Phage integrase family domain identified by eMATRIX, accession number PF00589B, p-value=1.621e-11, raw score of 16.17
  DOMAIN (5)..(208): "Phage" integrase family domain identified by PFam, accession name Phage_integrase, E-value=6.8e-09, PFam score of 43.0
RVSRGRKWFFIALKRMPAMKKAMNLFLGLSNVRTVHPEGFTVYISTHISFPSLSGYRTGLRSFGLVKQKKSPIRMPCVYTNPCVSIHPLWLRLRSPSARWLRCGSPSLGWTRTEPAPSPPRGGRTEKARIWEVTDRTVRTWIGEAVAAHAADGVTFSVPVTPHTFRHSYAMHMLYAGIPLKVLQSLMGHKSISSTEVYTKVFALDVAARHRVQFAMPESDAVAMLKQLS

SEQ ID NO: 41016 - protein, 160 aa, Homo sapiens
  DOMAIN (100)..(114): Phage integrase family domain identified by eMATRIX, accession number PF00589B, p-value=1.621e-11, raw score of 16.17
  DOMAIN (7)..(149): "Phage" integrase family domain identified by PFam, accession name Phage_integrase, E-value=1.3e-07, PFam score of 38.4
  misc_feature (1)...(160): Xaa = X or * as defined in Table 2
AGCVRHRLSENRLDHRALPAASKLPAYAXLPPPLPAGRLXRIPHRQFLXHQIRLPTERRCLLTRRTEKARIWEVTDRTVRTWIGEAVARLAADGVTFSVPVTPHTFRHSYAMHMLYAGIPLKVLQSLMGHKSISSTEVYTKVFALDVAARHRVQFAMPES

SEQ ID NO: 41017 - protein, 320 aa, Homo sapiens
  DOMAIN (105)..(132): Mrp family proteins domain identified by eMATRIX, accession number BL01215A, p-value=4.964e-11, raw score of 9.75
  DOMAIN (94)..(309): "Phage" integrase family domain identified by PFam, accession name Phage_integrase, E-value=3e-06, PFam score of 22.4
MKLMETLNQCINAGHEMTKAIAIAQFNDDSPEARKITRRWRIGEAADLVGVSSQAIRDAEKAGRLPHPDMEIRGRVEQRVGYTIEQINHMRDVFGTRLRRAEDVFPPVIGVAAHKGGVYKTSVSVHLAQDLALKGLRVLLVEGNLVHMTVRIMLWISRTQQQSTAGIQPHTEVYFRFLTFDSRGSPNADHVHKHLLGDNRYPIWIMQPSAHHPARQPEHDNHFRKDRESADLGSDGQNGQDLDWGGGCAHAADGVTFSVPVTPHTFRHSYAMHMLYAGIPLKVLQSLMGHKSISSTEVYTKVFALDVAARHRVHVCDAGV

SEQ ID NO: 41018 - protein, 432 aa, Homo sapiens
  DOMAIN (365)..(379): Phage integrase family domain identified by eMATRIX, accession number PF00589B, p-value=1.621e-11, raw score of 16.17
  DOMAIN (221)..(411): "Phage" integrase family domain identified by PFam, accession name Phage_integrase, E-value=9.7e-10, PFam score of 45.8
MDLGIISIWTIVEAGNAACPKPNINTARGFPRPHTFLKCKTKNTKCLNSINQRLKIFESAKGLDVWDSWPLQNADGTVAEYNGYHVGFALAGSPKDADDTSIYMFYQKTANKFEANDPSPGKSDAGMVPVLQPLHLTGKSVNSTLTIPDLYPPTCLSVLNVGTTSPKRLESTDYKISVTVSPEPNIAPNAQWDILQMFLHKQTTFRAYLPWASLERCTANTLESLAFYRPQYEGTHRAENTHKIQYSMQCAEMEHSTKTFDLLILFHYGESWNLLRADQRLIFAKSWPRASRYQQGHQDLFILRSDLPSQVFIRDKLMERRNRRTGRTEKARIWEVTDRTVRTWIGEAVAAAAADGVTFSVPVTPHTFRHSYAMHMLYAGIPLKVLQSLMGHKSISSTEVYTKVFALDVAARHRVQFAMPESDAVAMLKQLS

SEQ ID NO: 41019 - protein, 389 aa, Homo sapiens
  DOMAIN (216)..(254): Chloramphenicol acetyltransferase proteins domain identified by eMATRIX, accession number BL00100D, p-value=1.462e-32, raw score of 17.22
  DOMAIN (214)..(268): Chloramphenicol acetyltransferase domain identified by PFam, accession name CAT, E-value=3.3e-31, PFam score of 117.1
MGRRKIIAMTFRKERLETCMPLLCDSKRSPTKHIEKLQCGGVVKRREEAIRKSDGTLQEHDGICEIHVAKYAEIFGLTGGEASKDIRQALKSFAGKEVVFYRPEEDAGDEKGYESFPWFIKRAHSPSRGLYSVHINPYLIPFFIGLQNRFTQFRLSETKEITNPYAMRLYESLCQYRKRDGSGIVSLKIDWVIERYQLPQVTSVCLTSAAVPAGFIENMFFVSANPWVSFTSFDLNVANMEGVFAPVFTMGKYYTQGDKVLMPLAIQVFIRDKLMERRNRRTGRTEKARIWEVTDRTVRTWIGEAVAAAAADGVTFSVPVTPHTFRHSYAMHMLYAGIPLKVLQSLMGHKSISSTEVYTKVFALDVAARHRVQFAMPESDAVAMLKQLS

SEQ ID NO: 41020 - protein, 949 aa, Homo sapiens
  DOMAIN (629)..(667): Chloramphenicol acetyltransferase proteins domain identified by eMATRIX, accession number BL00100D, p-value=7.677e-36, raw score of 17.22
  DOMAIN (626)..(699): Chloramphenicol acetyltransferase domain identified by PFam, accession name CAT, E-value=9.8e-57, PFam score of 201.9
SPVIGVAAHKGGVYKTSVSVHLAQDLALKGLRVLLVEGNDPQGTASMYHGWVPDLHIHAEDTLLPFYLGEKDDVTYAIKPTCWPGLDIIPSCLALHRIETELMGKFDEGKLPTDPHLMLRLAIETVAHDYDVIVIDSAPNLGIGTINVVCAADVLIVPTPAELFDYTSALQFFDMLRDLLKNVDLKGFEPDVRILLTKYSNSNGSQSPWMEEQIRDAWGSMVLKNVVRETDEVGKAVINHKKRKNSPRIVQSNDLTEAAYSLSRDQKRMLYLFVDQIRKSDGTLQEHDGICEIHVAKYAEIFGLTSAEAKDPRGVYKTSVSVHLAQDLALKGLRVLLVEGNDPQGTASMYHGWVPDLHIHAEDTLLPFYLGEKDDVTYAIKPTCWPGLDIIPSCLALHRIETELMGKFDEGKLPTDPHLMLRLAIETVAHDYDVIVIDSAPNLGIGTINVVCAADVLIVPTPAELFDYTSALQFFDMLRDLLKNVDLKGFEPDCINAGHEMTKAIAIAQFNDDSPEARKITRRWRIGEAADLVGVSSQAIRDAEKAGRLPHPDMEIRGRVEQRVGYTIEQINHMRDVFGTRLRRAEDVFPPVIGVAAHKGGVYKTSVSVHLAQDLALKGLRVLLVEGFIENMFFVSANPWVSFTSFDLNVANMDNFFAPVFTMGKYYTQGDKVLMPLAIQVHHAVCDGFHVGRMLNELQQYCDEWQGGADYRVLVGELDDEQMAALSRLGNDYRPTSAYERGQRYASRLQNEFAGNISALADAENISRKIITRCINTAKLPKSVVALFSHPGELSARSGDALQKAFTDKEELLKQQASNLHEQKKAGVFIRDKLMERRNRRTGRTEKARIWEVTDRTVRTWIGEAVAAAAADGVTFSVPVTPHTFRHSYAMHMLYAGIPLKVLQSLMGHKSISSTEVYTKVFALDVAARHRVQFAMPESDAVAMLKQLS

SEQ ID NO: 41021 - protein, 234 aa, Homo sapiens
  DOMAIN (192)..(204): Phage integrase family domain identified by eMATRIX, accession number PF00589C, p-value=9.609e-10, raw score of 14.62
  DOMAIN (1)..(63): Sigma-54 transcription factors domain identified by PFam, accession name sigma54, E-value=3e-09, PFam score of 37.1
RPEDIEPNVDHLLARAATEIGQAVRFNAEAKARYLQFARSKEAPWSGNFRDLSASVTRMATLADGGRISTGLVDAEIQRLQWLWQPAGEAQVRDIDLDGLLPTDTACKLDLFDRLQLEAVVRVCRESQTLSDAEPHDLPSQVFIRDKLMERRNRRTGRTEKARIWEVTDRTVRTWIGEAVAAAAADVLQSLMGHKSISSTEVYTKVFALDVAARHRVQFAMPESDAVAMLKQLS

SEQ ID NO: 41022 - protein, 59 aa, Homo sapiens
RIPLYAGIPLKVLQSLMGHKCISSTEVYTKVFALDVAARHRVQFAMPESDAVAMLKQLS

SEQ ID NO: 41023 - protein, 483 aa, Homo sapiens
  DOMAIN (42)..(71): kw REPLICATION REPB REPA INITIATION domain identified by eMATRIX, accession number DM00653A, p-value=7.207e-27, raw score of 20.40
  DOMAIN (265)..(371): ParA family ATPase domain identified by PFam, accession name ParA, E-value=1.5e-24, PFam score of 95.0
MEAITNGMMNLNRQRHQHLVALRIIFAHGENGGEEVVHIGHNRFTQFRLSETKEITNPYAMRLYESLCQYQRYQLPQSYQRMPDFRRRFLQVCVNEINSRTPMRLSYIEKKKGRQTTHIAIRDAEKAGRLPHPDMEIRGRVEQRVGYTIEQINHMRDVFGTRLRRAEDVFPPVIGVAAHKGGVYKTSVSVHLAQDLALKGLRVLLVEGNDPQGTASMYHGWVPDLHIHAEDTLLPFYLGEKDDVTYAIKPTCWPGLDIIPSCLALHRIETELMGKFDEGKLPTDPHLMLRLAIETVAHDYDVIVIDSAPNLGIGTINVVCAADVLIVPTPAELFDYTSALQFFDMLRDLLKNVDLKGFEPDVFIRDKLMERRNRRTGRTEKARIWEVTDRTVRTWIGEAVAAAAADGVTFSVPVTPHTFRHSYAMHMLYAGIPLKVLQSLMGHKSISSTEVYTKVFALDVAARHRVQFAMPESDAVAMLKQLS

SEQ ID NO: 41024 - protein, 59 aa, Homo sapiens
PPHHSLDTHHLATFPYTFPPRGLTLEDPHEVFALDVAARHRVQFAMPESDAVAMLKQLS

SEQ ID NO: 41025 - protein, 79 aa, Homo sapiens
  DOMAIN (12)..(26): Phage integrase family domain identified by eMATRIX, accession number PF00589B, p-value=1.621e-11, raw score of 16.17
ISCCSFFSPRPPHTFRHSYAMHMLYAGIPLKVLQSLMGHKSISSTEVYTKVFALDVAARHRVQFAMPESDAVAMLKQLS

SEQ ID NO: 41026 - protein, 532 aa, Homo sapiens; identical to SEQ ID NO: 34392
  DOMAIN (190)..(232): Chloramphenicol acetyltransferase proteins domain identified by eMATRIX, accession number BL00100C, p-value=1.000e-39, raw score of 23.60
  DOMAIN (145)..(320): Chloramphenicol acetyltransferase domain identified by PFam, accession name CAT, E-value=1.7e-125, PFam score of 430.3

SEQ ID NO: 41027 - protein, 524 aa, Homo sapiens
  DOMAIN (179)..(225): Bacterial type II secretion system protein E proteins domain identified by eMATRIX, accession number BL00662F, p-value=1.273e- 28, raw score of 11.96
  DOMAIN (192)..(266): Bacterial type II secretion system pr domain identified by PFam, accession name GSPII_E, E-value=4.3e-56, PFam score of 191.1
MEHLNPQSKDPRGDPHYVEDKGHKYLVFEANTGTENGYQGEESLFNKAYYGGGTNFFRKESQKLQQSAKKRDAELANGALGIIELNNDYTLKKVMKPLITSNTVTDEIERANVFKMNGKWYLFTDSRGSKMTIDGINSNDIYMLGYVSNSLTGPYKPLNKTGLVLQMGLDPNDVTFTYSHFAVPQAKGNNVDPDVVMVGEIRDTETAQIAVQASLTGHLVLSTLHTNSASGAVTRLRDMGVESFLLSSSLAGIIAQRLVRRLCPQCRQFTPVSPQQAGRSPFEPDVRILLTKYSNSNGSQSPWMEEQIRDAWGSMVLKNVVRETDEVGKGQIRMRTVFEQAIDQRSSTDTSLSTPAAPMVDSLIARVGVMARGNAITLPVCGRDVKFTLEVLRGDSVEKTSRVFIRDKLMERRNRRTGRTEKARIWEVTDRTVRTWIGEAVAAAAADGVTFSVPVTPHTFRHSYAMHMLYAGIPLKVLQSLMGHKSISSTEVYTKVFALDVAARHRVQFAMPESDAVAMLKHLS

SEQ ID NO: 41028 - protein, 32 aa, Homo sapiens; identical to SEQ ID NO: 41013

SEQ ID NO: 41029 - protein, 81 aa, Homo sapiens
  DOMAIN (14)..(28): Phage integrase family domain identified by eMATRIX, accession number PF00589B, p-value=1.621e-11, raw score of 16.17
TLRQTKPDNSADPPHTFRHSYAMHMLYAGIPLKVLQSLMGHKSISSTEVYTKVFALDVAARHRVQFAMPESDAVAMLKQLS

SEQ ID NO: 41030 - protein, 289 aa, Homo sapiens
  DOMAIN (105)..(132): Mrp family proteins domain identified by eMATRIX, accession number BL01215A, p-value=4.964e-11, raw score of 9.75
  DOMAIN (37)..(268): "Phage" integrase family domain identified by PFam, accession name Phage_integrase, E-value=4.2e-10, PFam score of 47.0
MKLMETLNQCINAGHEMTKAIAIAQFNDDSPEARKITRRWRIGEAADLVGVSSQAIRDAEKAGRLPHPDMEIRGRVEQRVGYTIEQINHMRDVFGTRLRRAEDVFPPVIGVAAHKGGVYKTSVSVHLAQDLAPEGLRVLARGSWPRASRYQQGHQDLFILRSDLPSQVFIRDKLMERRNRRTGRTEKARIWEVTDRTVRTWIGEAVAAAAADGVTFSVPVTPHTFRHSYAMHMLYAGIPLKVLQSLMGHKSISSTEVYTKVFALDVAARHRVQFAMPESDAVAMLKQLS

SEQ ID NO: 41031 - protein, 274 aa, Homo sapiens
  DOMAIN (207)..(221): Phage integrase family domain identified by eMATRIX, accession number PF00589B, p-value=1.621e-11, raw score of 16.17
  DOMAIN (50)..(253): "Phage" integrase family domain identified by PFam, accession name Phage_integrase, E-value=1.1e-13, PFam score of 58.8
MVDSLIARVGVMARGNAITLPVCGRDVKFTLEVLRGDSVEKTSRVWSGNERDQELLTEDALDDLIPSFLLTGQQTPAFGRRVSGVIEIADGSRRRKAAALTESDYRVLVGELDDEQMAALSRLGNDYRPTSAYERGQRYASRLQNEFAGELSVFIRDKLMERRNRRTGRTEKARIWEVTDRTVRTWIGEAVAAAAADGVTFSVPVTPHTFRHSYAMHMLYAGIPLKVLQSLMGHKSISSTEVYTKVFALDVAARHRVQFAMPESDAVAMLKQLS

SEQ ID NO: 41032 - protein, 314 aa, Homo sapiens; identical to SEQ ID NO: 34662
  DOMAIN (247)..(261): Phage integrase family domain identified by eMATRIX, accession number PF00589B, p-value=1.621e-11, raw score of 16.17
  DOMAIN (155)..(293): "Phage" integrase family domain identified by PFam, accession name Phage_integrase, E-value=1.3e-07, PFam score of 38.3

SEQ ID NO: 41033 - protein, 32 aa, Homo sapiens; identical to SEQ ID NO: 41013

SEQ ID NO: 41034 - protein, 106 aa, Homo sapiens
  misc_feature (1)...(106): Xaa = X or * as defined in Table 2
RILGKGAGQTRAESLVWGRGVPARCCXPGGPFLVPGPPPXVRHLSYARPMLXPGIPLKVLQSLMGHKSISSPEVYRKVFALNVAARHRVQFAMPEFDAVAMLKQLS

SEQ ID NO: 41035 - protein, 227 aa, Homo sapiens
  DOMAIN (160)..(174): Phage integrase family domain identified by eMATRIX, accession number PF00589B, p-value=1.621e-11, raw score of 16.17
  DOMAIN (47)..(206): "Phage" integrase family domain identified by PFam, accession name Phage_integrase, E-value=5.1e-14, PFam score of 60.0
MAALSRLGNDYRPTSAYERGQRYASRLQNEFAGNISALADAENISRKIITRCINTAKLPKSVVALFSHPGELSARSGDALQKAFTDKEELLKQQASNLHEQKKAGVFIRDKLMERRNRRTGRTEKARIWEVTDRTVRTWIGEAVAAAAADGVTFSVPVTPHTFRHSYAMHMLYAGIPLKVLQSLMGHKSISSTEVYTKVFALDVAARHRVQFAMPESDAVAMLKQLS

SEQ ID NO: 41036 - protein, 341 aa, Homo sapiens
  DOMAIN (274)..(288): Phage integrase family domain identified by eMATRIX, accession number PF00589B, p-value=7.840e-12, raw score of 16.17
  DOMAIN (139)..(320): "Phage" integrase family domain identified by PFam, accession name Phage_integrase, E-value=5.9e-12, PFam score of 53.1
MVNITHVAVILAVLIGKEDVKRDTMKRWSGKPVRPTGIKEFAHPAGKRRFAVMGPQVRQSKNLSHFTVCLSWRKQRLSITRNVKIARESSSQTTLLRRFIVSPGIKNVRGGCSLTRSENLMAPYRNMTVLCEIHVAKYAEIFGLTSAEASKDIRQALKSFAGKEVVFYRPEEDAGDEKGYESFPWFIKRAHSPSRRLYSGHINPYLIPFFIGLQNRFTQVFIRDKLMERRNRRTGRTEKARIWEVTDRTVRTWIGEAVAAAAADGVTFSVPVTPHTLRHSYAMHMLYAGIPLKVLQSLMGHKSISSTEVYTKVFALDVAARHRVQFAMPESDAVAMLKQLS

SEQ ID NO: 41037 - protein, 438 aa, Homo sapiens
  DOMAIN (13)..(55): Chloramphenicol acetyltransferase proteins domain identified by eMATRIX, accession number BL00100C, p-value=1.000e-39, raw score of 23.60
  DOMAIN (1)..(124): Chloramphenicol acetyltransferase domain identified by PFam, accession name CAT, E-value=1.9e-88, PFam score of 307.2
MNAHPEFRMAMKDGELVIWDSVHPCYTVFHEQTETFSSLWSEYHDDFRQFLHIYSQDVACYGENLAYFPKGFIENMFFVSANPWVSFTSFDLNVANMDNFFAPVFTMGKYYTQGDKVLMPLAIQTPAFGRRVYAVIEIADGSRRRKAAALTESDYRVLVGELDDEQMAALSRLGNDYRPSFAYERGQRYASRLQNEFAGNISALADAENISRKIITRCINTAKLPKSVVALFSHPGELSARSGDALQKAFTDKEELLKQQASNLHEQKKAGVIFEAEEVITLLTSVLKTSSASRTSLSSRHQFAPGATVLYKGDKMVFIRDKLMERRNRRTGRTYKARIWEVTDRTVRTWIGEAVAAAAADGVTFSVPVTPHTFRHSYAMHMLYAGIPLKVLQSLMGHKSISSTEVYTKVFALDVAARHRVQFAMPESDAVAMLKQLS

SEQ ID NO: 41038 - protein, 376 aa, Homo sapiens
  DOMAIN (309)..(323): Phage integrase family domain identified by eMATRIX, accession number PF00589B, p-value=1.621e-11, raw score of 16.17
  DOMAIN (183)..(355): "Phage" integrase family domain identified by PFam, accession name Phage_integrase, E-value=3.4e-14, PFam score of 60.6
DLDAGVSEHSGDWLDQDSVSDQFSVEFEVESLDSEDYSPSEGGQELSDEDDEVYQVTVYQAGESDTDSFEEDPEISLADYWKCTSCNEMNPPLPSHCNRCWALRENWLPEDTGKDKGEISEKAKLENSTQAEEGFDVPDCKKTIVNDSRESCVEENDDKITQASQSQESEDYSQPSTSSSIIYSSQEDVKEFEREETQDKEESVESSLPLNAIEPCVICQGRPKNGCIVHGKTGHLMACFTCAKKLKKRNKPCPVFIRDKLMERRNRRTGRTEKARIWEVTDRTVRTWIGEAVAAAAADGVTFSVPVTPHTFRHSYAMHMLYAGIPLKVLQSLMGHKSISSTEVYTKVFALDVAARLRVQFAMPESDAVAMLKQLS

SEQ ID NO: 41039 - protein, 240 aa, Homo sapiens
  DOMAIN (173)..(187): Phage integrase family domain identified by eMATRIX, accession number PF00589B, p-value=1.621e-11, raw score of 16.17
  DOMAIN (67)..(219): "Phage" integrase family domain identified by PFam, accession name Phage_integrase, E-value=4e-13, PFam score of 57.0
GKAKARRRTRKRKPQTTPRGRPNAHSTTERRTKSGGGANDNTKLTRKDTTRPARTTPTSRNRGRGRTRRKRNSAKEQRNRATNATPSIREYEQSARRTRRKRRSDQAATATSKRHITGVFIRDKLMERFNLRTGRTEKARIWEVTVRTVRTWIGEAVAAAAADGVTFSVPVTPHTFRHSYAMHMLYAGIPLKVLQSLMGHKSISSTEVYTKVFALDVAARHRVQFAMPESDAVAMLKQLS

SEQ ID NO: 41040 - protein, 340 aa, Homo sapiens
  DOMAIN (273)..(287): Phage integrase family domain identified by eMATRIX, accession number PF00589B, p-value=1.621e-11, raw score of 16.17
  DOMAIN (138)..(319): "Phage" integrase family domain identified by PFam, accession name Phage_integrase, E-value=3.5e-14, PFam score of 60.6
  misc_feature (1)...(340): Xaa = X or * as defined in Table 2
XQTQEWSGSATFTSDGKIRLFYTDYSGKHYGKQSLTTAQVNVSKSDDTLKINGVEDHKTIFDGDGKTYQNVQQFIDEGNYTSGDNHTLRDPHYVEDKGHKYLVFEANTGTENGYQGEESLFNKAYYGGGTNFFRKESQKLQQSAKKRDAELANGALGIIELNNDYTLKKVMKPLITSNTVTDEIERANVFKMNGKWYLFTDSRGSKMTIDGINSNDIYMLGIPQLMERRNRRTGRTEKARIWEVTDRTVRTWIGEAVAAAAADGVTFSVPVTPHTFRHSYAMHMLYAGIPLKVLQSLMGHKSISSTEVYTKVFALDVAARHRVQFAMPESDAVAMLKQLS

SEQ ID NO: 41041 - protein, 312 aa, Homo sapiens
  DOMAIN (245)..(259): Phage integrase family domain identified by eMATRIX, accession number PF00589B, p-value=1.621e-11, raw score of 16.17
  DOMAIN (120)..(291): "Phage" integrase family domain identified by PFam, accession name Phage_integrase, E-value=1.3e-11, PFam score of 52.0
MLPFYPRRASVCHVACDNHIVAFGLRHCEVRVSECHIRLDQDPFAAQALFCSTACFDSLLDKKITSVAPAAGKAACRCPHRSCTEETTWQVAARPAESLVAQCLLPCVFYSKQAAFRNNHVEWPLNDTWSENFMESNVHPPFFSHCFFLFDVALRKLTLSHNTRQCWPRASRYQQGHQDLFILRSDLPSQVFIRDKLMERRNRRTGRTEKARIWEVTDRTVRTWIGEAVAAAAADGVTFSVPVTPHTFRHSYAMHMLYAGIPLKVLQSLMGHKSISSTEVYTKVFALDVAARHRVQFAMPESDAVAMLKQLS

SEQ ID NO: 41042 - protein, 97 aa, Homo sapiens
  DOMAIN (30)..(44): Phage integrase family domain identified by eMATRIX, accession number PF00589B, p-value=1.621e-11, raw score of 16.17
NDTKAKNLYLTKRTTAAARTSSNPPVPVTPHTFRHSYAMHMLYAGIPLKVLQSLMGHKSISSTEVYTKVFALDVAARHRVQFAMPESDAVAMLKQLS

SEQ ID NO: 41043 - protein, 474 aa, Homo sapiens; identical to SEQ ID NO: 35385
  DOMAIN (407)..(421): Phage integrase family domain identified by eMATRIX, accession number PF00589B, p-value=1.621e-11, raw score of 16.17
  DOMAIN (269)..(453): "Phage" integrase family domain identified by PFam, accession name Phage_integrase, E-value=2.1e-10, PFam score of 48.0

SEQ ID NO: 41044 - protein, 169 aa, Homo sapiens
  DOMAIN (102)..(116): Phage integrase family domain identified by eMATRIX, accession number PF00589B, p-value=1.621e-11, raw score of 16.17
  DOMAIN (25)..(148): "Phage" integrase family domain identified by PFam, accession name Phage_integrase, E-value=3.9e-07, PFam score of 32.7
SYFIMVKVGTSYVPINVSFSPKVGRRASRYQQGHQDLFILRSDLPSQVFIRDKLMERRNRRTGRTEKARIWEVTDRTVRTWIGEAVAAAAADGVTFSVPVTPHTFRHSYAMHMLYAGIPLKVLQSLMGHKSISSTEVYTKVFALDVAARHRVQFAMPESDAVAMLKQLS

SEQ ID NO: 41045 - protein, 213 aa, Homo sapiens
  DOMAIN (146)..(160): Phage integrase family domain identified by eMATRIX, accession number PF00589B, p-value=1.621e-11, raw score of 16.17
  DOMAIN (26)..(193): "Phage" integrase family domain identified by PFam, accession name Phage_integrase, E-value=2.7e-07, PFam score of 34.6
RWGRWRTGGSSRSEPTMELRAPAWPRGRPGQGGARPAGSELRGNATAPSPACLCRNILCRMEESPNTDGKRPETGSNKRGKAGDKWWKIKTGIIRDKLMERRNRRTGRTEKARIWEVTDRTVRTWIGEAVAAAAADGVTFSVPVTPHTFRHSYAMHMLYAGIPLKVLQSLMGHKVISSTDFYTKVFALDVAARHRVQFAMPESDAVAMLKQLS

SEQ ID NO: 41046 - protein, 269 aa, Homo sapiens
  DOMAIN (202)..(216): Phage integrase family domain identified by eMATRIX, accession number PF00589B, p-value=1.621e-11, raw score of 16.17
  DOMAIN (68)..(248): "Phage" integrase family domain identified by PFam, accession name Phage_integrase, E-value=1.8e-08, PFam score of 41.5
PGCIRCKCVAVDGDPCMKSNNALIVILGTVTLDAVGIGLVMPVLPGLLRDIVHSDSIASHYGVLLALYALMQFLCAPVLGALSDRFGRRPVLLASLLGATIDYAIMATTPVLWIYPLVNSPFCWPRASRYQQGHQDLFILRSDLPSQVFIRDKLMERRNRRTGRTEKARIWEVTDRTVRTWIGEAVAAAAADGVTFSVPVTPHTFRHSYAMHMLYAGIPLKVLQSLMGHKSISSTEVYTKVFALDVAARHRVQFAMPESDAVAMLKQLS

SEQ ID NO: 41047 - protein, 245 aa, Homo sapiens
  misc_feature (1)...(245): Xaa = X or * as defined in Table 2
RNTRYWVINSISVIPPSSALISKRSPRLMAKKTAHFLGISRTSVAEFTFTRSGISRDHCVKGAGAADRRPNAPPRAEFQSGWFLIMECFARXVGDPQLTAHFDAVRREIMPLPREGKTLQTEVREMPRKCAVFLAINLGDRFDIKADEGGITDIEFITQYLVLRYAHEKPKLTRWSDNVRILELLAQNDIMEEQEAMALTRAYTTLRDELHHLALQELPGHVSEDCFTAERELVRASWQKWLVEE

SEQ ID NO: 41048 - protein, 213 aa, Homo sapiens
NTLYQPTATDAYRDELRQYLLRVPEDDEEQQLEALRQFKQAQLLRIAAADIAGTLPVMKVSDHLTWLAEAMIDAVVQQAWVQMVARYGKPNHLNEREGRGFAVVGYGKLGGWELGYSSDLDLIFLHDCPMDAMTDGEREIDGRQFYLRLAQRIMHLFSTRTSSGILYEVDARLRPSGAAGMLVTSAEAFADYQKNEAWTWEHQALVRARVVYG

SEQ ID NO: 41049 - protein, 785 aa, Homo sapiens
  DOMAIN (666)..(693): NI-FE HYDROGENASE SMALL SUBUNIT SIGNATURE domain identified by eMATRIX, accession number PR00614I, p-value=7.286e-20, raw score of 12.23
  DOMAIN (472)..(586): 4'-phosphopantetheinyl transferase superfami domain identified by PFam, accession name ACPS, E-value=1.8e-20, PFam score of 81.4
MSDTKRNTIGKFGLLSLTFAAVYSFNNVINNNIELGLASAPMFFLATIFYFIPFCLIIAEFVSLNKNSEAGVYAWVKSSLGGRWAFITAYTYWFVNLFFFTSLLPRVIAYASYAFLGYEYIMTPVATTIISMVLFAFSTWVSTNGAKMLGPITSVTSTLMLLLTLSYILLAGTALVGGVQTDDAITVDAMIPNFNWAFLGVTTWIFMAAGGAESVAVYVNDVKGGSKSFVKVIILDGDIIGLLYHVSRALAISLGLLCQPTFDLVIQGDYCFWNTISFGSVQDPPGDGESHDVEHGLENKEQEEGARRCSCATATKPPSAAPATTYHVCYCRPPTNTQCPRPINYLFIGILALLLAVALWPSIPWFGKADNRIAAIQARGELRVSTIHTPLTYNEINGKPFGLDYELAKQFADYLGVKLKVTVRQNISQLFDDLDNGNADLLAAGLVYNSERVKNYQPGPTYYSVSQQLVYKVGQYRPRTLGNLTAEQLTVAPGSVVGYDLQTLTQTHHQPVRFLAKRFAVKEAAAKAFGTGIRNGLAFNQFEVFNDELGKPRLRLWGEALKLAEKLGVANMHVTLADERHYACATYIKIGFVIEDFAVLYTMPQNSPIETSGVVKALVWSAACTLNNSHVQSTFAYGRLIHEHCERRPHFDAGRFAKEFGDEGHREGWCLYHLGCKGPETYGNCSTLQFCDVGGVWPVAIGHPCYGCNEEGIGFHKGIHQLANVENQTPRSQKPDVNAKEGGNVSAGAIGLLGGVVGLVAGVSVMAVRELGRQQKKDNADSRGE

SEQ ID NO: 41050 - protein, 210 aa, Homo sapiens
RGDKPQHIVTVHRADVVKAQLFKQRARHYHAFNMFFGAFEQLFNWRHARENFFPAGKQLCQMVVERADIFGNRHFIVVENHQHIRTDIARVIHRFKRHACGNRAIANDTDGAAIFAFTAILYGIQFSCASFYLFVVYEHGSLKTVGCPLQEVWRTALESCKPAHIQLSGVLAISSIVMQSVNAMPSWSGYSSSQAASAARWLLARSGLIC

SEQ ID NO: 41051 - protein, 747 aa, Homo sapiens
  DOMAIN (274)..(325): Aromatic amino acids permeases proteins domain identified by eMATRIX, accession number BL00594F, p-value=1.000e-40, raw score of 18.48
VLKPNHLTERKGCGFACGRYGKLGAWELDYSPDLDIIFLNDCPMNAMTAGERKIDGRQFYLRLAQRIMHLFSTRTSSGILYEVDARLRPSGAAGMLVTSAEAFADYQKNEAWTWEHQALVRARVVYGDPQLTAHFDAVRREIMTLPREGKTLQTEVREMREKMRAHLGNKHRDRFDIKADEGGITNIEFITQYLVLRYAHEKPKLTGWSDNVRILELLAQNDIMEEQEAMALTRAYTTLREPRFSRFSLFWGCSPLGLFDYLADLFKIDNSHGGRFKTVLLTFLPPALLYLIFPNGFIYGIGGAGLCATIWAVIIPAVLAIKARKKFPNQMFTVWGGNLIPAIVILFVLPWFYFIPPGLICTSLVYRASPPISMPAKAVAYCVLRISGGDGSCDVICRGKVADRSKFWNPNWSKTHTEPTQQSQTATSNRTSATTAEQRSDEKEGNNRTRHEEQRSQNATQHKRRERATTTQKTCSETVTPTTMNMCNEPELRRHARVLPPVLYIVQRRYDESHLRISISACNVCRTERHAVHTDETIHSTVVADCKERVAVMRLRLPLCAACRHIGDVIVYSAYVCEHRCMRLLATRRHYVVTLTTHLRRRLFLTEVNARYVCIYDDEHSRSSTVTHAHPIDHQSAHYDTYVYDIGTVSYMRLNTSVRLIRRRAHTCTSRALMDSHSKDGRPMDYASAVVVTHPLKQHVNYLSASSTERHFHIGDTSGPVVTPYWSDRRYVLERRSCQVGATAITV

SEQ ID NO: 41052 - protein, 30 aa, Homo sapiens
  misc_feature (1)...(30): Xaa = X or * as defined in Table 2
TINPPELAFVKTVHXSPRICLGFIHIFLLN

SEQ ID NO: 41053 - protein, 62 aa, Homo sapiens
  misc_feature (1)...(62): Xaa = X or * as defined in Table 2
HWWKNWRRCWIPVIWHXRRSRTIWRCCKKWITASTLLSRSSPSKLPPCMSGFQPVVAGRKRR

SEQ ID NO: 41054 - protein, 47 aa, Homo sapiens
  misc_feature (1)...(47): Xaa = X or * as defined in Table 2
ADDQIPHSKTHLKLSLEVEENQQXEIXRPLLQXGGMSVPRCVHGRSG

SEQ ID NO: 41055 - protein, 225 aa, Homo sapiens
ISAELNRPFAIRGDLGVVWERQKQETGWRSWVPWPHVHAEDIILGNPPDIPEVTMVHLPRVEATLAPLALLTKTVWLPWIKLESPRIRFQFSHHVRRAVLCEDAYYKLTLAQVEKLKNGGKVIASDELMTKFRIPNTLEFCAPVMADAPAIALLRLSLACLDLAQAMMPAFHKPISSSFVNDYAGTSFACAASDMDERRMLNAPLSLRLTLVEKLRRCWIPVIRH

SEQ ID NO: 41056 - protein, 585 aa, Homo sapiens
  DOMAIN (124)..(135): TYPE II EGF-LIKE SIGNATURE domain identified by eMATRIX, accession number PR00010C, p-value=8.000e-11, raw score of 11.16
  DOMAIN (1)..(421): EGF-like domain identified by PFam, accession name EGF, E- value=4.2e-14, PFam score of 60.3
MCKNLIGTFMCICPPGMARRPDGEGCVACNAGFEPETTSSSDCHLRASYSALGSRALHIDPSDPLHYISASQPSPKVCQGYMCPSQILEMDTDECSIGNPCGNDINECAQNPLLCAFRCMNTFGSYECTCPIGYALREDQKMCKEDRERRKKADRKRQKGPEAPKKKKAEEDGRDKEDKRAREQKQNMNSEKSEGTPHVMCAYLYDLAGLFSGFYEHCPILSAENEEVRNSRLKLAQPRTLRDENECRTKPGICENGRCVNIIGSYRCECNEGFQSSSSGTECLGVFWNAEFGHQLIAGDHFFHHFQAHLVQFGGDFFQLFNLGEGQLVVSIFTPVRLAVHGSKRTGKIHDPNKTSSSLETTFSHFPVEERETQQCCSLADIDECKEIPGICANGVCINQIGSFRCECATGFSYNDLLWVCEGNLNKEALLASTTEHRLVRSTALHSLEANRLVHSFYGLSLNYDKYVLHAFILASRLSKLRTLLGWRYTTPWTVYFNSVTSSDITLTDSYSSHSVPAIANSWLRNWLHANLIVTLLLTWATLNPCVLLNIDYALTETVETAIFFFRIAIQYYAILTLCCLENKR

SEQ ID NO: 41057 - protein, 554 aa, Homo sapiens
  DOMAIN (176)..(214): ELEMENT TRANSPOSABLE INSERTION PROTEIN TRANSPOSITION DNA domain identified by eMATRIX, accession number PD02455A, p-value= 2.091e-29, raw score of 25.65
MSKPKYPFEKRLEVVNHYFTTDDGYRIISARFGVPRTQVRTWVALYEKHGEKGLIPKPKGVSADPELRIKVVKAVIEQHMSLNQAAAHFMLAGSGSVARWLKVYEERGEAGLRALKIGTKRNIAISVDPEKAASALELSKDRRIEDLERQALSKPDKYADVKKRISEIYHENRGRYGYRRVTLSLHREGKQINHKAVQRLMGTLSLKAAIKVKRYRSYRGEISSTTKLFLTAFRMIVVAIILIATFDWNRLKPTINQKVSAELNRPFAIRGDLGVVWERQKQETGWRSWVPWPHVHAEDIILGNPPDIPEVTMVHLPRVEATLAPLALLTKTVWLPWIKLEKPDARLIRLSEKNNNWTFNLANDDNKDANANRRHGRFGWIIFFSIKGGSPLMTNDIHGSLVYTTGKPRPKLEGDVESRQLRLADLGPLIGVDSGKGAEKSKRSEQKKGEKSVQPAGKVLPYDRFETDKWDVMDADVRFKGRRIEHGSSLPISDLSTHIILKNADLRLQPLKFGMAGGSIAANIHLEGDKKPMQGRADIQARRLKLKELMPDVN

SEQ ID NO: 41058 - protein, 158 aa, Homo sapiens
  DOMAIN (53)..(92): tRNA synthetases class II domain identified by eMATRIX, accession number PF00152D, p-value=4.429e-09, raw score of 21.30
SELGHAGLNGDILVWNPVLEDAFELSSMGIRVDADTLKHQLAGDEDRLELEWHQALLRGEMPQTIGGGIGQSRLTMLLLQLAHIGQVQCGVWAAAVRESVPSLPLQLFHFTRHVVRQPLSDKIRNHQRIGIKPFPALQAFHNGAKTTGKIGADTKLLA

SEQ ID NO: 41059 - protein, 125 aa, Homo sapiens
  DOMAIN (14)..(59): Respiratory-chain NADH dehydrogenase subunit 1 proteins domain identified by eMATRIX, accession number BL00667C, p-value= 7.375e-22, raw score of 15.17
  DOMAIN (20)..(78): NADH dehydrogenases domain identified by PFam, accession name NADHdh, E-value=0.00023, PFam score of 19.1
RPSPLPTGLGDTGLGFLPRFIEMEKLPFDVAEAEQELQEGPLPEYSGPGLALAKWGLGLKQVVMASLFVALFLPFGRAQELSLACLLTSLVVTLLKNINSMTAGILVCLVTVVSPGLIKVLIYDQ

SEQ ID NO: 41060 - protein, 46 aa, Homo sapiens
QAPRQAAMVAVVQVDFSTIGVYTGSIWFCISSAVSPHDASGDPLES

SEQ ID NO: 41061 - protein, 78 aa, Homo sapiens
QAPRQAAMVAVVQVDFSTIGVYTGSIWFCISSAVSPHDASGDPLESTCNEEGEYSGQIFCRSIRSWSLNFSNRMMVSF

SEQ ID NO: 41062 - protein, 65 aa, Homo sapiens
CGFSSFSRLPHSSYSAHHSVVPSLLIRASGRPRWSQWYRWIFRAGVFTPWFPFLLTTPVVKPPKA

SEQ ID NO: 41063 - protein, 102 aa, Homo sapiens
  misc_feature (1)...(102): Xaa = X or * as defined in Table 2
RVGRPGHRASAQSGGNPQNHRRLGEPVSARHPAYLSTGSGDAAAARYRRSAXSLRRXSRASSHPPERAGTPVAPGTIDIFRWRTAARQHRPRLYRRLPHSAA

SEQ ID NO: 41064 - protein, 50 aa, Homo sapiens
  misc_feature (1)...(50): Xaa = X or * as defined in Table 2
RLIGLHGQNSRSVPQLPMESASVAXRCTAALDGGVSSTSTRWLFASCTRL

SEQ ID NO: 41065 - protein, 746 aa, Homo sapiens
  DOMAIN (506)..(527): RHS PROTEIN SIGNATURE domain identified by eMATRIX, accession number PR00394D, p-value=1.090e-28, raw score of 6.56
  DOMAIN (495)..(738): Domain of unknown function 2 domain identified by PFam, accession name DUF2, E-value=5e-08, PFam score of 23.7
MRSDPDTSVNEIETKLSALLGSETTGEILFDLLCANGPEWNRFVTLEMKYGRIMLDTAKIIDEQDVPTHILSKLTFTLRNHPEGVVMKNFEVLQPLQNSLSGLPLWVSERILQQINQLTHYEPVIGIMGKTGAGKSSLCNALFAGEVSPVSDVAACTRDPLRFRLQIGEHFMTIVDLPGVGESGVRDTEYAALYREQLPRLDLILWLIKADDRALATDEHFYRQVIGEAYRHKMLFVISQSDKAEPTSGGNILSTEQKQNISRKICLLHELFQPVHPVCAVSVRLHPVVALLQQFRTDDERTHRYHYDSQHRLVDYTRTQYEEPLVESRYLYDPLGRRVAKRVWRRERDLTGWMSLSRKPQVTWYGWDGDRLTTIQNDRSRIQTIYQPGSFTPLIRVETATGELAKTQRRSLADALQQSGGEDGGSVVFPPVLVQMLDRLESEILADRVSEESRRWLASCGLTVEQMQNQMDPHGRDNSVVPEYDEWGNLLNEENPHQLQQLIRLPGQQYDEESGLYYNRHRYYDPLQGRYITQDPIGLKGGWNFYQYPLNPISDIDPLGLSMWEVARQMNAIASKLPEGFHIGINFSASHIISPTFVDECLNFRDSFTRRDLNLVLEVTERDLLNVDESLVQRLNILHENGFVIALDDFGTGYSGLSYLHDLHIDYIKIDHSFVGRVNADPESTRILDCVLDLARKLSISIVAEGVETKEQLDYLNQNYITFQQGYYFYKPVTYIDLVKIILSKP

SEQ ID NO: 41066 - protein, 269 aa, Homo sapiens
  DOMAIN (75)..(107): Bacterial-type phytoene dehydrogenase proteins domain identified by eMATRIX, accession number BL00982A, p-value=7.923e- 15, raw score of 18.41
  DOMAIN (74)..(193): FAD binding domain identified by PFam, accession name FAD_binding_3, E-value=0.00045, PFam score of 0.1
  misc_feature (1)...(269): Xaa = X or * as defined in Table 2
MEHERYVGISNLMLKPELYLAVGISGQIQHMVGANASQTIFAINKDKNAPIFQYADYGIVGDAGALMSEDIFDAIIVGAGLAGSVAALVLAREGAQVLVIERGNSAGAKNVTGGRLYAHSLEHIIPGFADSAPVERLITHEKLAFMTEKSAMTMDYCNGDETSPSQRSYSVLRSKFDAWLMEQAEEAGAQLITGIRVDNLVQRDGKVVGVEADGNRVMKKILTTPIKAEDLQDIRVGDVIYLXRHRSLSVGXRAESGGXRSGRIVKRTG

SEQ ID NO: 41067 - protein, 68 aa, Homo sapiens
SDNASRQTSGNGENDRQTTSAGIGVDSRRDRVAAIPPSCSSTDHAVDGTVTSGSRKTGSGAGRFKPLL

SEQ ID NO: 41068 - protein, 502 aa, Homo sapiens
  DOMAIN (303)..(324): RHS PROTEIN SIGNATURE domain identified by eMATRIX, accession number PR00394D, p-value=1.090e-28, raw score of 6.56
MFARIWSSHPQWLTLYLAQHRAVIIPDDAKLHRNLLRWYSAGRLDIPELLDYAQSWRETEPDNEDAPYYEYAQRVYCGEGESLLAELCDYWREYPSTQADALMLQWCRQHRVDYYPLSGGKRVWRRERDLTGWMSLSRKPQVTWYGWDGDRLTTIQNDRSRIQTIYHDGDALHDPNDTDTTPALDCHFRQIPAGEDGGSVVFPPVLVQMLDRLESEILADRVSEESRRWLASCGLTVAQMQSQMDPVYTPARKIHLYHCDHRGLPLALISTEGTTAWYAEYDEWGNLLNEENPHQLQQLIRLPGQQYDEESGLYYNRHRYYDPLQGRYITQDPIGLKGGWNFYQYPLNPISNIDPLGLETLKCIKPLHSMGGTGERSGPDIWGNPFYHQYLCVPDWYKGTYILLRLRPKGNQTGGKKFKKGDTTDHRPEDPSAVVLCVRERILLLGRRLHIPLAQQLVGVKSGFLQIIQVTATAIRHVALNADFHRHSQADIQHCVFNDSGD

SEQ ID NO: 41069 - protein, 107 aa, Homo sapiens
  misc_feature (1)...(107): Xaa = X or * as defined in Table 2
GPDRCQIGPLAEXNTGNSHKAALRQQRAEGRWWQKPHGEWRAATADGRTYAAISAQATAPQSPAGQSTMPRPPRWLSTPALPVMPAVTVDRQITPASVSTTKQAISA

SEQ ID NO: 41070 - protein, 661 aa, Homo sapiens
  DOMAIN (374)..(395): RHS PROTEIN SIGNATURE domain identified by eMATRIX, accession number PR00394D, p-value=1.090e-28, raw score of 6.56
SHQQQQAAWLRHWRITMCRKDRAALFKKVVPTKTAGRNAGPRKSTPERDSPKSYRSPVTGVQYSTRQADGVHTTQRIWISASVCHRPGRYRLPDPELHPDSTLSMWPDNRIARDAHYLYRYDRHGRLTEKTDLIPEGVIRTDDERTHRYHYDSQHRLVHYTRTQYAEPLVESRYLYDPLGRRVAKRVWRRERDLTGWMSLSRKPQVTWYGWDGDRLTTIQNDRTRIQTIYQPGSFTPLIRVETATGELAKTQRRSLADTLQQSGGEDGGSVVFPPVLVQMLDRLESEILADRVSEESRRWLASCGLTVEQMQNQMDPVYTPARKIHLYHCDHRGLSLALVSTGRATEWCAEYDEWGNLLNEENPHQLQQLIRLPGQQYDEESGLYYNRHRYYDPLQGRYITQDPIGLKGGWNFYQYPLNPVQYIDSMGLASKYGHLNNGGYGARPNKPPTPDPSKLPDIAKQLRLPYPIDQASSAHNVFKTFFRALSPYDYTLYCRKWVKPNLTCTPQDDSQYPGMDTKTASDYLPQTNCRYRARLYHVLLGLFHELFASGYLRGHLTLAIAELESGDDHSAQAVHTTVSQSLEKAIGAGELSPRDQALVTDMWENLFQQASQQSDKAFTPHPANTARADYPALTALPFNNFRTHNRFGFNAASVLASIGI

SEQ ID NO: 41071 - protein, 192 aa, Homo sapiens
MIAEFESRILALIDGMVDHASDDELFASGYLRGHLTVAIAELESGDDHSAQAVHTTVSQSLEKAIGAGAGDRYVGKPVSAGVTAVSCGVWSSMPDATLIASYQAYTSHAYIGAGSVDRIRRFSAASGKWLNPLKHRRNSLTQTDTHRRQTNTERLCVPSDSAAWCMDRNAVPVLSVGVYRKIYGQCTEVNGV

SEQ ID NO: 41072 - protein, 86 aa, Homo sapiens
  misc_feature (1)...(86): Xaa = X or * as defined in Table 2
HLTRQGIPTDLQLRVLSVRRKTNKQKGHPHRKRICTSPSSKTKSRXNHKDGEKTEQKNWKLXNAEHLSSSKGTQFLTSNGPKLDGE

SEQ ID NO: 41073 - protein, 556 aa, Homo sapiens
  DOMAIN (116)..(163): kw TRANSCRIPTASE REVERSE II ORF2 domain identified by eMATRIX, accession number DM01354V, p-value=1.000e-40, raw score of 12.97
  DOMAIN (1)..(130): Reverse transcriptase domain identified by PFam, accession name rvt, E-value=0.088, PFam score of -44.3
  misc_feature (1)...(556): Xaa = X or * as defined in Table 2
LSEGKLTNRKDIHTKTPSVRHHHQRPKCWKFWPGHSGRRRKXRCIQVGKEEVKLSLFADDMIVYLENPIVSAQNLLKLISNFSKVSGYKINVQKSQAFLYTNNRQTESQIMTELPFTTASKRIKYLGIQLTRDVKDLFKENYKPLLNEIKEDTNKWKNIPCSWVGRINIVKMAILPKVIYRFNAIPIKLPMTFFIELEKTTLKFIWNQKRARIAKSILSQKNKAGGITLPDFKLYYKATVTKTAWYWYQNRDIDQWNRTEPSEIMLHIYNYLIFDKPEKNKQWGKDSLFNIWCWENWLAICRKLKLDPFLTPYTKINSRWIKDLNVRSKTIKTLEENLGNTIQDIGMGKDFMSKTPKAMATKAKIDKWDLIKLKSFCTAKETTISVNRQPTEWEKIFAIYSSDKGLISRIYNELKQIYKKKTNNPIKKWVKDTNRHFSKEDIYAAKRHMTKCSSSLAVREMQIKTTMRYHLTPVEEVRAGEMAKTRRCQNVKGASEEGIRALALFLINLTVHMEGNHIDGDIEIQTNRSPLQAPGEICESFTALMAMQLLSKLFWS

SEQ ID NO: 41074 - protein, 75 aa, Homo sapiens
YSLKSGSVMPPALFFWLRIVLAIQALLWFQMNHKSSFFQFLGSMAIFTILILPIHEHGMFFHLFASSFISLSSDL

SEQ ID NO: 41075 - protein, 52 aa, Homo sapiens
LPLFLMNTLISFSCLMPLARTSNTMLIGAGREGILVLCQFSKGMLPVFAHSV

SEQ ID NO: 41076 - protein, 56 aa, Homo sapiens
  misc_feature (1)...(56): Xaa = X or * as defined in Table 2
SSGLHSWDARLVQYTQINKYNPAYKQSQRQKPHDYLNRCRKSLXQNSTTLHAKNSQ

SEQ ID NO: 41077 - protein, 595 aa, Homo sapiens
  DOMAIN (374)..(417): kw TRANSCRIPTASE REVERSE II ORF2 domain identified by eMATRIX, accession number DM01354T, p-value=1.000e-40, raw score of 9.48
  DOMAIN (253)..(496): Reverse transcriptase domain identified by PFam, accession name rvt, E-value=6.6e-31, PFam score of 116.1
MGTQNQTISVSEEMMFQAEEIASAQKMWNQHHITPSKVDHIVGSKALFSKCKRTEIITNYLSDHSAIKLKLRIKKLTQNRSTTWKLNNLLLNDYWVHNEMKAEIKIFFETNENKDTTCQNLWDTFKAMCRGKFITLNAHKRKQQRCKIDTLTSQLKELEKQEQTHSKASRRQEITKIRAELKEIEAQKTLQKINESRSWIFEKINKTDRLLARIIKKKREMNQIDAIKNDKGDITTNPTEIQTTIREYCKHLYANKLENLEEMDKFLNTYTLPRLNQEEIESLNRPITGSEIEAIINSLPTKKSPGPDGFTAEFYQRYKEEMIEKKAFDKSQQPFMLKTLNKLGIDGTFLKIRRAIYDKPTANIILNGQKLEAFPLKTGTRQGCPLSPLLFNIVLEVLAREIRQGKEIKHIQLGKEEVKFSLFADDVIAYLENPIVSAQNLLKLISNFSKVSGYKINVQKLQAFLYTNNRQTESQIMSEFPFTIASKRIKYLGIQLTRDVKDLFKENYKPLLNKIKEDTNKWKNIPCSWIGRINIMKMAILHKVIDRFSAIPFKLQRTLHRIGKNYFKVHMEPKKAPHFQDNPKQKEQSWRHHAT

SEQ ID NO: 41078 - protein, 56 aa, Homo sapiens
  misc_feature (1)...(56): Xaa = X or * as defined in Table 2
SSGLHPWDARLVQYTQINKCNPAYKQSQRQKPHDYLNRCRKSLXQNSTTLHAKNSQ

SEQ ID NO: 41079 - protein, 24 aa, Homo sapiens
VPISSGCLKCVAPPCSLFLLPAPA

SEQ ID NO: 41080 - protein, 92 aa, Homo sapiens
LNTLYFLLLPNCPGQNFQQFIDLRILNQPLHPRDEAHLIMVDKLFDVLLDSVCQYFIEDFCINVHQGYWSKILFFGCVSARLWYQDDAGLIK

SEQ ID NO: 41081 - protein, 75 aa, Homo sapiens
CKNSGKPNPAADQKVYPPRSSWLHPWDARLVQHTQINKCNPAYKQNQRQKPHDYLNRCRKGLRQNSTALHAKNSE

SEQ ID NO: 41082 - protein, 366 aa, Homo sapiens
  DOMAIN (89)..(136): kw TRANSCRIPTASE REVERSE II ORF2 domain identified by eMATRIX, accession number DM01354V, p-value=1.000e-40, raw score of 12.97
  misc_feature (1)...(366): Xaa = X or * as defined in Table 2
GWKFWPGQSGRRRKXRCIQLGKEKVKLSLFADDMIVYLENPIVSAQNLLKLISNFSKVSGYKINVQKSQAFLYTNNRQTESQIMSELPFTIASKRIKYLGIQLTRDVKDLFKENYKPLLKEIKEDTNKWKNIPCSWVGRISIVKMAILPKVIYRFNAIPIKLPMTFFTELEKTTLKFIWNQKRARIAKSILSQKNKAGGITLPDFKLYYKATVTKTAWCWYQNRDIDQWNGTEPSEIMPHIYNYLIFDKPEKNKQWGKDSLFNKWCWENWLAICRKLKLDPFLTPYTKINSRWIKDLNVRPKTIKTLEENLGITIQDIGVGKDFMSKTPKAMATKAKIDKWDLIKLKSFCTAKETTVRVNRQPTTW

SEQ ID NO: 41083 - protein, 306 aa, Homo sapiens
  DOMAIN (146)..(193): kw TRANSCRIPTASE REVERSE II ORF2 domain identified by eMATRIX, accession number DM01354V, p-value=1.000e-40, raw score of 12.97
  DOMAIN (11)..(162): Reverse transcriptase domain identified by PFam, accession name rvt, E-value=0.0051, PFam score of -26.8
  misc_feature (1)...(306): Xaa = X or * as defined in Table 2
SSGLHPWDARLVQYMQINQCNPAYKQNQRQKPHDYLNRCRKGLXQNSTTLHAKNSAINXCWKFWPGQLGRRRKXRCIQLGKEEVKLSLFADDMIVYLENPIISAQNLLKLISNFSKVSGYKINVQKSQAFLYTNNRQTESQIMSELPFTIASKRIKYLGIQLTRDVKDLFKENYKPLLNEIKEDTNKWKNIPCSWIGRINIVKMAILPKVIYRFNAIPIKLPMTFFTELEKTTLKFIWNQKRARITKSILSQKNKAGGITLPDLKLYYKAIVTQNSMVLLPKQRYRPMEQNRALRNNAAYLQLSDL

SEQ ID NO: 41084 - protein, 56 aa, Homo sapiens; identical to SEQ ID NO: 41078
  misc_feature (1)...(56): Xaa = X or * as defined in Table 2

SEQ ID NO: 41085 - protein, 679 aa, Homo sapiens; identical to SEQ ID NO: 35834
  DOMAIN (90)..(133): kw TRANSCRIPTASE REVERSE II ORF2 domain identified by eMATRIX, accession number DM01354T, p-value=1.000e-40, raw score of 9.48
  DOMAIN (7)..(212): Reverse transcriptase domain identified by PFam, accession name rvt, E-value=6.1e-27, PFam score of 102.9

SEQ ID NO: 41086 - protein, 60 aa, Homo sapiens
NTGKPNPAAHQKAYPPPSSWLHPWDARLVQHTQINKRNPSYKQNQRQKPHDYLNRSRKGL

SEQ ID NO: 41087 - protein, 111 aa, Homo sapiens
KFLCRPPIIRPPKTFNTLIVLARRCIQCFRFFDIACFNRVGKGFGVGHQLRGFRHDIRGFAQWTHLPDGCAFRDRCYAAGAQCENVPALTACGDNNQRGACWYPQQEVISV

SEQ ID NO: 41088 - protein, 137 aa, Homo sapiens
WASVKSPVPCWNCWISHRRRVTCRHVRFAPGFNLAKAVQGAALVITGKGRIDSQTAGGKAPLGVASVANQFNVPVIGIAGVLGDGVEVVPQYGIDAVFSILPRLAPLAEVLASGETNLFNSARNIACAIKIGQGIKN

SEQ ID NO: 41089 - protein, 302 aa, Homo sapiens
  DOMAIN (14)..(300): Zinc-binding dehydrogenases domain identified by PFam, accession name adh_zinc, E-value=0.016, PFam score of -74.6
MSNTPIELKGSSFTLSVVHLHEAEPKVIHQALEDKIAQAPAFLKHAPVVLNVSALEDPVNWSAMHKAVSATGLRVIGSCTSIDSQTAGGKAPLGVASVAKQFNVPVIGIAGVLGDGVEVVHQYGIDAVFSILPRLAPLAEVLASGETNLFNSARNIACAIKIAYIISQSYVNIINNSQTPLGEIFTEKGIKPTLIIDAACHPSILKEAVTLASPAARIVLMGFSSEPSEVIQQGITGKELSIFSSRLNANKFPIVIDWLSKGLIKPEKLITHTFDFQHVADAISLFEQDQKHCCKVLLTFSE

SEQ ID NO: 41090 - protein, 197 aa, Homo sapiens
SILKVACDVDNPLVGARGAAAVFGPQKGATPEMVEELEQGLQNYARVLHQQPEINVCQMAGAGAAGGMGIAAPVFFNGDIKPGIEIVLNAVNLAQAVQGAALVITGEGRIDSQTAGGKAPLGVASVAKQFNVPCDLGLLAYVGDGVEVVHQYGIDAGFNILPFLAPLAEVLASGETNLFNSARNIACAIKIGQGIKN

SEQ ID NO: 41091 - protein, 380 aa, Homo sapiens
  DOMAIN (47)..(73): Dihydrodipicolinate synthetase proteins domain identified by eMATRIX, accession number BL00665E, p-value=2.286e-19, raw score of 20.33
  DOMAIN (2)..(135): Dihydrodipicolinate synthetase family domain identified by PFam, accession name DHDPS, E-value=5.5e-05, PFam score of -82.0
MSTGRSPSPTRRSNIIGIKDTIDSVAHVRSMIHTVKGAHPHFTVLCGYDDHLFNTWLLGGDGAISASGNFAPQVSVNLLKAWRDGDVAKAAGYHQTLLQIPQMYQLDTPFVNVIKEAIVLCGRPVSTHDDAFYAVITHAAGPQGALPLTPQMLMESPSGNLFGMTQNAGMGWHANKLTGKEVLQWLLFLSAVPPVQLLTGWCVTAKALPDISAISALTAVKHGNCSSLTPLLNPPGSDVIVCAEMDEQWGYVGAKSRQRWLFYAYDRLRKTVVAHVFGERTMATLGRLMSLLSPFDVVIWMTDGWPLYESRLKGKLHVISKRYTQRIERHNLNLRQHLARLGRKSLSFSKSVEQHDKVIGHYLFRAQGENHYTLEYQELT

SEQ ID NO: 41092 - protein, 204 aa, Homo sapiens
  DOMAIN (36)..(59): Dihydrodipicolinate synthetase proteins domain identified by eMATRIX, accession number BL00665D, p-value=2.946e-18, raw score of 14.76
  DOMAIN (9)..(187): Dihydrodipicolinate synthetase family domain identified by PFam, accession name DHDPS, E-value=1.8e-17, PFam score of 71.5
LLIPARPPGINPYYWKVSEANLIRYFQQVGDSVTLPVMLYNFPALTGQDLTPALVKTLADSRSNIIGIKDTIDSVAHLRSMIHTVKGAHPHFTVLCGYHDHLFNTLLLGGDGAISASGNFAPQVSVNLLKAWRDGDVAKAAGYHQTLLQIPQMYQLDTPFVNVIKEAIVLCGRPVSTHVLPPASPLDEPRKAQLKTLLQQLKLW

SEQ ID NO: 41093 - protein, 394 aa, Homo sapiens
  DOMAIN (130)..(173): Integrase core domain identified by PFam, accession name rve, E-value=0.076, PFam score of 10.4
EQSGRGARDGGARDGVREGGSWTQQHGLPLTKVELATVAEYPVCLWQRLTLSPQYGSIPRGDQSDGWKVDYNGPFSLWKGQHFVINGIDTCSGCKFAIPVCSASAKLLPMSSQNVYHRDILHRIDSEQGTHFRVKEVQQWALGRGFYWSYYISHHPEAAGLVEQCNGILKTPSQFQMGRNTLQGWGKVLPSLEGCAFSSSKSNLCSVVLKVFVPKEGMVPPGDTTMIILNCKLRLPPMPLNLLASKEVTVLDYQGEIGQLLHNRGKEECVWNTGDCLTYLLILPSSVIKVKEKPQPHPGRTINGPDPSGMKTWVTPPAGAVFLIGSWLRYDYGQYTWRAASSQMLDRKGMNLASNLFHIGILGIFVGHFFGMLTPHWMYEAMTYGSCDTDNANV

SEQ ID NO: 41094 - protein, 35 aa, Homo sapiens
  misc_feature (1)...(35): Xaa = X or * as defined in Table 2
WKRLERRAIQGDSPVHKNARAGELDEXAATRAIPG

SEQ ID NO: 41095 - protein, 196 aa, Homo sapiens
EILPVPGPVVIAWAIFRRIAGESWSAIVISGLSIARHAQQKRIITFTASLAARLEIALKIVRNADGTESASEQLYQVVGAGCKMPWQSEAMKDVLICDKRRLMRRTGGTETSKYPEEKKSTEIPPVAASERGGAQSLNQCATEAVVLTRVDSHLKVGDSLSHTTSFLKKFAARFGGQLEKALGLGSMQAFSDIRGL

SEQ ID NO: 41096 - protein, 122 aa, Homo sapiens
RCQTRQNAEYRVNAVLVHHFHAITQYASNPNHRYIKLLRHRRHTQRRFTACRLRVDAPFPGNHQCCALHCLRKIDRIQHNFNARFNIPIEKYPAPQYPYRPQRPRPAIWQTLISGCWCKTRA

SEQ ID NO: 41097 - protein, 569 aa, Homo sapiens
  DOMAIN (163)..(227): PAS domain identified by PFam, accession name PAS, E-value= 5.8e-12, PFam score of 48.9
MTRDGLANKALAVARTLADSPEIRQGLQKKPQESGIQAIAEAVRKRNDLLFIVVTDMQSLRYSHPEAQRIGQPFKGDDILKALNGEENVAINRGFLAQALRVFTPIYDENHKQIGVINDSRWSIIWSVLFGMLVGLIGTCILVKVLKKILFGLEPYEISTLFEQRQAMLQSIKEGVVAVDDRGEVTLINDAAQELLNYRKSQDDEKLSTLSHSWSQVVDVSEVLRDGTPRRDEEITIKDRLLLINTVPVRSNGVIIGAISTFRDKTEVRKLMQRLDGLVNYADALRERSRLEHILHNQRVPFIMKLHHRMLRHFIAASVIVLTSSFLIFELVASDRAMSAYLRYIVQKADSSFLYDKYQNQSIAAHVMRALAAEQSEVSPEQRRAICEAFESANNTHGLNLTAHKYPGLRGTLQTASTDCDTIVEAAALLPAFDQAVEGNRHQDDYGSGLGMAEEKFHYYLDLFRAVGDGHNSKEDATFGLGWRVNGNATMTPTFGTLASPQTYGHTGWTGTVTVIDPVNHMTIVMLSNKPHSPVADPQKNPNMFESGQLPIATYGWVVDQVYAALKQK

SEQ ID NO: 41098 - protein, 104 aa, Homo sapiens
NAETVKMFTTSSKEDATFGLGWRVNGNATMTPTFGTLASPQTYGHTGSPPLPPICPVRPPGYLRRLSPRFPRLFGISLPQRPPGILERSLQRRRNPSGWRRRNQ

SEQ ID NO: 41099 - protein, 663 aa, Homo sapiens
  DOMAIN (352)..(373): BACTERIAL CHEMOTAXIS SENSORY TRANSDUCER SIGNATURE domain identified by eMATRIX, accession number PR00260C, p-value=7.882e- 09, raw score of 10.26
MDVQSAADDTGLPMLVVRGPFNVVWQRLPAALEKVGMKVTDSTRSQGNMAVTYKPLSDSDWQELGASDPGLASGDYKLQVGDLDNRSSLQFIDPKGHTLTQSQNDALENAILAVIRHEICLSDVVRIRASRRFDKTSGTPDRQKILKLGYLLPAGWLADVDPRLVGVMNVWTLLVPAALFFFGAGMLFPLATSGAMEPFPFLAGTAGALVGGLQNIGSGVLASLSAMLPQTGQPGVVDDLNGIVDRAVLAAAGDADVASGAARLSARHRSIVISSMGERCCFIRSRITRICGFLAAGVGLDQLAPDFATPVIRELLALLLCLFSGGLAMYGYLRWLRNEKAMRLKEDLPYTNSLLIISLILMVVAVIVMGLWIPPTCIVDDRMAKYIPGLADSPNDTIKGKNTLRISDLLHHSGGFPADPQYPNKAVAGALYSQDKGQTLEMIKRTPLEYQPGSKHIYSDVDYMLLGFIVESVTGQPLDRYVEESIYRPLGLTHTVFNPLLKGFKPQQIAATELNGNTRDGVIHFPNIRTSTLWGQVHDEKAFYSMGGVSGHAGLFSNTGDIALFNAETVKMFTTSSKEDATFGLGWRVNGNATMTPTFGTLASPQTYGHTGWTGTVTVIDPVNHMTIVMLSNKPHSPVADPQKNPTMFESGQLPIATYGWVV

SEQ ID NO: 41100 - protein, 45 aa, Homo sapiens
  misc_feature (1)...(45): Xaa = X or * as defined in Table 2
NCLSPVSANXWPAKTGRPILPSATVTASTRNVLSKHWRIWVSTVC

SEQ ID NO: 41101 - protein, 94 aa, Homo sapiens
ATQRQDLHFVRSPGDAVYTQITPEAADAVVARNPDTAQHLHCVYPHTSNAALAQKYLHIAASPEVMVPLSAFHAASYSMFFMEFNLIAMWANFS

SEQ ID NO: 41102 - protein, 1066 aa, Homo sapiens
  DOMAIN (655)..(681): SYNTHETASE BETA CHAIN LIGASE PHENYLALANYL-TRNA domain identified by eMATRIX, accession number PD02410A, p-value=6.786e- 25, raw score of 12.66
  DOMAIN (39)..(341): Cytosol aminopeptidase family domain identified by PFam, accession name Peptidase_M17, E-value=1.5e-23, PFam score of 76.0
  misc_feature (1)...(1066): Xaa = X or * as defined in Table 2
MLLGLHSLAAFLQRESFSGKQSWGCQLAALLQRRITKMTEAMKITLSTQPADARWGEKATYSINNDGITLHLNGADDLGLIQRAARKIDGLGIKHVQLSGEGWDADRCWAFWQGYKAPKGTRKVVWPDLDDAQRQELDNRLMIIDWVRDTINAPAEELGPSQLAQRAVDLISNVAGDRVTYRITKGEDLREQGYMGLHTVGRGSERSPVLLALDYNPTGDKEAPVYACLLGDIITYRNGKKVEVMNTDAEGRLVLADGLSDYRAERGSTRGTRLTLACHALLDCKTLTLTELGRNLPTKARTKHNIKRIDRLLGNRHLHKERLAVYRWHASFICSGNTMPIVLVDWSDIREQKRLMVLRASVALHGRSVTLYEKAFPLSEQCSKKAHDQFLADLASILPSNTTPLIVSDAGFKVPWYKSVEKLGWYWLSRPVHNTVCRLTTFGNSGHHQIGTTDDIAASKDFRVAGLEGVVAASGAMMRLVNPARRCVLPAHSNVLWTETNAMITASAGTICSEPATMLRAATAFGVRFAHFGTHHFYAADFAVTVHFNTQRLDVEFELYAFFPRVFHFAAGTRHVLFITTIGTGNVLRSWRTDVRTQSIAVSPPPRTTTRLPSMLTNAPVAFSELGISDDHSGIIELPADAPIGTDIREYLKLDDNTIEISVTPNRADCLGIIGVARDVAVLNQLPLVQPEIVPVGATIDDTLPITVEAPEACPRYLGRAYAYWSMELEDMISTDDAYVTGNADPISAQVSVSVTVVNHKRYELRSTQCRSRFSTYSVSPSLEDYNRRVPLAKHGGYFKETLEHTKDTLISSQAALNAAIQAYKANKALVMNTPLNRQPQVVEAADATKEAWLALKRTDIKSPVTGYIAQRSVQVGETKHYSRMYGLSIVLYSRGDPLVLHAGTDEVIMSPQQAKARGLTSTITFPVGNIAPEGSVIKSTAIDPSMIDEQGIYYHKGVAKVYLSEKSAIYDIKHDKIKAGDILVIIGVGPSGTGMEETYQVTSALKHLSYGKHVSLITDARFSGVSTGACIGHVGPEALXAWIAAFNAAWLLINVSLVCSSVSLK

SEQ ID NO: 41103 - protein, 34 aa, Homo sapiens
YSRRCRYNGTLSSGIPDGIALRRKFFQILPERLA

SEQ ID NO: 41104 - protein, 233 aa, Homo sapiens
  DOMAIN (99)..(222): Peptidase family M20/M25/M40 domain identified by PFam, accession name Peptidase_M20, E-value=1.1e-09, PFam score of 37.0
TTGRFPPSVQDSFVNESSRMGLPDEFTLQREFERARQQGALAQWIAAFEGGFTGIVATLDTGRPGPVMAFRVDMDALDLSEEQDVSHRPYRDGFASCNAGMMHACGHDGHTAIGLGLAHTLKQFESGLHGVIKLIFQPAEEGTRGARAMVDAGVVDDVDYFTAVHIGTGVPAGTVVCGSDNFMATTKFDAHFTGTAAHAGAKPEDGHNALLAAAQATLALHAIAPHSEGASRV

SEQ ID NO: 41105 - protein, 262 aa, Homo sapiens
  misc_feature (1)...(262): Xaa = X or * as defined in Table 2
FDRHVGEFFLNQLETTNSLAKLHALIGVARRIFKGAHRRTVVGEGYQETFMVELFFDAVKAVTFPTEHVFLVQFHVVKGDFTAAIHTQTELFKFGHFDARFAHINKPFGVDRFVRRSPVARHHHDVRGVGAAGNKTLTTIKINLTISTGISRFQATHVGARARFGDRXVRTDSTTTVGHRDCIITGGHRHKSFQPGHEAPQAVPLPGRFHHHXPSHDHCRXLVSLAGAAYRSPQDPVPYMPISPGLDWVRQIVCCVMASDAD

SEQ ID NO: 41106 - protein, 1205 aa, Homo sapiens
  DOMAIN (746)..(781): Bacterial microcompartiments proteins domain identified by eMATRIX, accession number BL01139, p-value=5.655e-32, raw score of 16.27
  DOMAIN (483)..(734): Acyl-CoA dehydrogenase domain identified by PFam, accession name Acyl-CoA_dh, E-value=3.7e-131, PFam score of 449.1
MVDLHEKGLIRKLLDVQSFDSHAAQSLARNPNHIEISANQYANWGSKGASVDRLDVVVLSALEIDTQFNVNVLTGSDGVLRGASGGHCDTAIASALSIIVAPLVRGRIPTLVDNVLTCITPGSSVDILVTDHGIAVNPARPELAERLQEAGIKVVSIEWLRERARLLTGEPQPIEFTDRVVAVVRYRDGSVIDVVHQAIMVAAFAGFIGYAVMNLAVNFWLTNKGILPTTDAAVLKANNIQSILGIQSIDTGILGAVIAGIIVWMLHERFHNIRLPDALAFFGGTRFVPIISSLVMGLVGLVIPLVWPIFAMGISGLGHMINSAGDFGPMLFGTGERLLLPFGLHHILVALIRFTDAGGTQEVCGQTVSGALTIFQAQLSCPTTHGFSESATRFLSQAPPPCGLLHLCFIATVTLVNACSYTLAMSTCREVRDGEEPPLLVRIGWSILVGIIGIVLLALGGLKPIQTAIIAGGCPLFFVNIMELFVAGIRELMASENWEAYFAECDRDSVYPERFVKALADMGIDSLLIPEEHGGLDAGFVTLAAVWMELGRLGAPTYVLYQLPGGFNTFLREGTQEQIDKIMAFRGTGKQMWNSAITEPGAGSDVGSLKTTYTRRNGKIYLNGSKCFITSSAYTPYIVVMARDGASPDKPVYTEWFVDMSKPGIKVTKLEKLGLRMDSCCEITFDDVELDEKDMFGREGNGFNRVKEEFDHERFLVALTNYGTAMCAFEDAARLRQSAQESTMEALGMIETRGLVALIEASDAMVKAARVKLVGVKQIGGGLCTAMVRGDVAACKAATDAGAAAAQRIGELVSVHVIPRPHGDLEEVFPIGLKGDSSNLGSFYLKYATEAGMKLAVVTGQIVCTVRHHGLAHDKLLMVEMIDPQGNPDGQCAVAIDNIGAGTGEWVLLVSGSSARQAHKSETSPVDLCVIGIVDEVVSGGQRYSAVDAKHSDVTVQEAAAIAWHMPFDDDQYHRLLSAAGLSKSWTRTMQKRRLSGKIEDFSRRFGNQITSRKGPQPANLWAKPELLPGMQTTRDLIIDDTDVLLVYSTQNVLALRLFHHPRHADILLFTGAVTRAMRMPALRAYESAPDHKICVSYGACGVGGGIFHDLYSVWGGSDTIVPIDVWIPGCPPTPAATIHGFAVALGLLQQKIHAVDYRDPTGVTMQPLWPQIPPSQRIAIEREARRLAGYRQGRAICRSGSCAL

SEQ ID NO: 41107 - protein, 164 aa, Homo sapiens
TGIVATLDTGRPGPVMAFRVDMDALDLSEEQDVSHRPYRDGFASCNAGMMHACGHDGHTAIGLGLAHTLKQFESGLHGVIKLIFQLHRYAAHAGAKPEDGHNALLAAAQATLALHAIAPHSEGASRVNVGVMQAGSGRNVVPASALLRQPTRSALNTTQQLNAR

SEQ ID NO: 41108 - protein, 170 aa, Homo sapiens
MGIESLQAFLRSAGALGVWVYTFLERILIPTGLHHFIYGQFISGPAAVEGGIQMYWAQHLQEFSLSAEPLKSLFPEGGFALHGNSKIFGAVGIYLAMYFAAAPENRVKVARLLIPTPLAAMLVVIPEPLEFTFLFISPILYAVHAVLTASMSPVMYLPGVVGNMGEGKID

SEQ ID NO: 41109 - protein, 1647 aa, Homo sapiens
  DOMAIN (739)..(764): ACRIFLAVIN RESISTANCE PROTEIN FAMILY SIGNATURE domain identified by eMATRIX, accession number PR00702E, p-value=6.538e- 30, raw score of 7.83
  DOMAIN (708)..(894): AcrB/AcrD/AcrF family domain identified by PFam, accession name ACR_tran, E-value=3.1e-98, PFam score of 339.8
MYKEVNTGTNLPAQIDLYAVDGDEYKFLCIAKGGGSANKTYLYQETKALLTPGKLKNYLVEKMRTLGTAACPPYHIAFVIGGTSAETNLKTVKLASAKYYDELPTEGNEHGQAFRDVELEKELLIEAQNLGLGAQFGGKYFAHDIRVIRLPRHGASCPVGMGVSCSADRNIKAKINRQGIWIEKLEHNPGKYIPEELRKAGEGEAVRVDLNRPMKEILAQLSQYPVSTRLSLNGTIIVGRDIAHAKLKERMDNGEGLPQYIKDHPIYYAGPAKTPEGYALRFSWPNDRRTDGFLCRSTASAGRKYDHAGERQPQPAGPRGKPPAQESRETETEAWCLETPGPDPGPGLEALTGNPERGTFSPAMGFTGARSVTEHPHALREPSTRVNTLQLELKAGKTITLEDGRQINGADYLAAPVPGKALAIFGDTGPCDAALDLAKGVDVMVHEATLDITMEAKANSRGHSSTRQAATLAREAGVGKLIITHVSSRYDDKGCQHLLRECRSIFPATELANDFTVLFTYTASQPGTHQKIIDMAMNGVGCRATARIMGVGLNTILRHLKNSGRSRVPPAFRRGGEFFAGAEMDDQGGYVGAKSRQRWLFYAYDSLRKTVVAHVFGERTMATLGRLMSLLSPFDVVIWMTDGWPLYESRLKGKLHVISKRYTQRIERHNLNLRQHLARLGRKSLSFSKSVELHDKVIGHYLNIKHYRNFRATIIPTIAVPVVILGTFAILSAVGFTINTLTMFGMVLAIGLLVDDAIVVVENVERVIAEDKLPPKEATHKSMGQIQRALVGIAVVLSAVFMPMAFMSGATGEIYRQFSITLISSMLLSVFVAMSLTPALCATILKAAPEGGHKPNALFARFNTLFEKSTQHYTDSTRSLLRCTGRYMVVYLLIAPGWRTVLRTAMYFTAAPENRVKVAGLLIPATLTAMLVGITEPLEFTFLFISPLLFAVHAVLAASMSTVMYLFGVVSVIVDIDFNRVLGAWSDLTRIPLASLKKSFHMGEAFHQHERGEISDEAFAEALCHEMALPLSYEQFSHGWQAVFVALRPEVIAIMHKLREQGHRVVVLSNTNRLHTTFWPEEYPEIRDAADHIYLSQDLGMRKPEARIYQHVLQAEGFSPSDTVFFDDNADNIEGANQLGITSILVKDKPPSRTISRSRKARRIADPGLQPERTSLAWFRTMLGYGALMALAIKHNWHQAGMLFWISIGILAIVALILWHYTRDIVNVGGDMATIMAGLACGEPNPLGWEILRNCATQFISCQDSVAALGMRVLGNPYGNEPAHNLRWHTVEELPQVTQPGKLTEAFKYFLQGMGYSFLGIASRQTNVKKAGPDNIATCWYCNTFILVPLTKRQVFRVARVYTVSKYSSVAIMRDHPQYTTLARSSSRTVTRNSIYNSSYSTSLTYCYPHQRLEQAAYEMTALRAATIELGPLVPGLPHLRTIHRQLYQDIFDWSGQLREVDIYQGDTPFCHFAYIEKEGNALMQDLEEEGYLVGLEKAKFVERLAHYYCEINVLHPFRVGSGLAQRIFFEQLAIHAGYQLSWQGIEKEAWNQANQSGAMGDLTALQMIFSKVYFCELGADVLVKRNDALTLADIDALKPQKIVISPGLTERWGSIRAKTTALRNAYRARVYSKEVHIEGYTPEDKK

SEQ ID NO: 41110 - protein, 361 aa, Homo sapiens
  DOMAIN (155)..(205): Sugar transport proteins domain identified by eMATRIX, accession number BL00216B, p-value=1.415e-09, raw score of 27.64
MKGKVKEAKQVLCYAASVNKKTIPSNLLDELQLPRKKVTRASVLDFCKNRQLCKVTLVMSCVWFTVSYTYFTLSLRMRELGVSVHFRHVVPSIMEVPARLCCIFLLQQIGRKWSLAVTLLQAIIWCLLLLFLPEGEDGLRLKWPRCPATELKSMTILVLMLREFSLAATVTVFFLYTAELLPTVLRATGLGLVSLASVAGAILSLTIISQTPSLLPIFLCCVLAIVAFSLSSLLPETRDQPLSESLNHSSQIRSSAVIHSNKDEPHHCAVAWVKNHTFNLSAAEQLVLSVPLDTAGHPEPCLMFRPPPANASLQDILSHRFNETQPCDMGWEYPENRLPSLKNELLDEADLHNLKEGVIIP

SEQ ID NO: 41111 - protein, 453 aa, Homo sapiens
  misc_feature (1)...(453): Xaa = X or * as defined in Table 2
MPVRKNMIMNEGNITTPTNGCRIRASCGVPMICINQLKDGNKKPSPLTAARMKQKAIILFLIRTVRTDTHVVEDTGRKGSRKANSRERFPDAFPEFHGFADFRVLRQAMIQIWLVSMVQHVHNVCTTDACRIVQTRIVVTAGFQLSNASLVAMRRWVYRVRRIQYRRTTQTAVFHSTHGNYREGQPVGTLIDDRYKANENVELVHYAQPLLNEADSLAKVMPSDIPLKQRRWLGLQMLEGDIYSRAYAGEASQHLDAALARLRNEMDDPALHIADARYQCIAAICDVVSNTLTAEPSRFTTAVDKIVLNRFLGLPIFLFVMYLMFLLAINIGGALQPLFDVGSVALFVHGIQWIGYTLHFPDWLTIFLAQGLGGGINTVLPLVPQIGMMYCFSSFLKTPALACREIFVPLMRLRVNLRWYPPVLXRISWWTNSRIPTTFSTRGSACWRATPAK

SEQ ID NO: 41112 - protein, 295 aa, Homo sapiens
  misc_feature (1)...(295): Xaa = X or * as defined in Table 2
RLFEHPRLGVAAVENGALGKRSAVVLPGFDAVNHKTRFIEFVKSAIEGNRLTVRAIGPQFFTQTPVIVFNQGVSGAQNIAGRAVVLLQTNSFGTGEIIKETLNILHLRPAPAVDXLVVITDDHHFAGVARQQADPRVLNVVGILEFVHQDIGKTFAVVLQDMRLVKPQLVSAQQQLGEVHQARAVTRFLIRLIHLLPGLLHRITVALNMMRTQAFIFLAVDVPHCLPRRPLLLVEVHGFDQTQKVAAWRGHRFALFVIKAVEQVRNVHWHRRVKIGWAEKRNALRQKAGNFQMRQ

SEQ ID NO: 41113 - protein, 75 aa, Homo sapiens
  misc_feature (1)...(75): Xaa = X or * as defined in Table 2
DFLGRGAFNVINIGAWASRPVQGSTVDLSHGLHLVLHLKNNLXFYGFDSHFLKSFFYKGTSISIQVEVGISQGNL

SEQ ID NO: 41114 - protein, 594 aa, Homo sapiens
  DOMAIN (209)..(246): 3 kw RESISTANCE BENOMYL YLL028W CYCLOHEXIMIDE domain identified by eMATRIX, accession number DM00973A, p-value=7.783e- 11, raw score of 21.17
  DOMAIN (141)..(571): Sugar (and other) transporter domain identified by PFam, accession name sugar_tr, E-value=7.2e-07, PFam score of 1.4
MAGEENFKEELRSQDASRNLNQHEVAGHPHSWSLEMLLRRLRAVHTKQDDKFANLLDAVGEFGTFQQRLVALTFIPSIMSAFFMFADHFVFTAQKPYCNTSWILAVGPHLSKAEQLNLTIPQAPNGSFLTCFMYLPVPWNLDSTIQFGLNDTDTCQDGWIYPDAKKRSLINEFDLVCGMETKKDTAQIMFMAGLPIGSLIFRLITDKMGRYPAILLSLLGLIIFGFGTAFMNSFHLYLFFRFGISQSVVGYAISSISLATEWLVGEHRAHAIILGHCFFAVWAMLLTGIAYGLPHWQLLFLVGGILVIPFISYIWILPESPRWLMMKGKVKEAKQVLCYAASVNKKTIPSNLLDELQLPRKKVTRASVLDFCKNRQLCKVTLVMSCVWFTVSYTYFTLSLRMRELGVSVHFRHVVPSIMEVPARLCCIFLLQQIGRKWSLAVTLLQAIIWCLLLLFLPEGEDGLRLKWPRCPATELKSMTILVLMLREFSLAATVTVFFLYTAELLPTVLRATGLGLVSLASVAGAILSLTIISQTPSLLPIFLCCVLAIVAFSLSSLLPETRDQPLSESLNHSSQIRNKVKDMKTKETSSDDV

SEQ ID NO: 41115 - protein, 71 aa, Homo sapiens
FSLWPLKKFSNRFLKKKPMEFGSWTTREILIASFAGVRGAITLAGVLSIPLLLPDGNVFPARYELVFLAAV

SEQ ID NO: 41116 - protein, 141 aa, Homo sapiens
WWSPVLVPLPSSVRSWCGLAGLRHSFYPSRRYIYRKPDWLGFSRRTAAAVQIPRRRPSDAPSCNRPSAASRNSRWIAGPAPGFLVPCQPGLVPAGTDLHQIQQHSLHGWRISAQYVRLLSAHCCTRWYIRRFCLAEQSSAF

SEQ ID NO: 41117 - protein, 53 aa, Homo sapiens
  misc_feature (1)...(53): Xaa = X or * as defined in Table 2
ENTTWLYADXNAGRDADFGHAKRKWTLWLAILAAVATAMANRQPGAGLFALFT

SEQ ID NO: 41118 - protein, 237 aa, Homo sapiens
MGWRMGIWLRVFTVAKHLQRAESDQIGFRLKEHCWKRYAVRHPVKDVSGFSPVLTVNMRAPQSNPARRTVGWLRMFRRLRKRRKPRPLPLSPLHMDVHAGNLVHSASGLKLIDWEYAGDGDIALELAAVWVENTEQHRQLVNDYATRAKIQPAQLWRQVRRWLPWLLMLKAGWFEYRWRQTGDRQFIRLADDSWRQLHRSNKESSRELVARLRVFAQSSGGAVDQEGGRVQCFREGL

SEQ ID NO: 41119 - protein, 75 aa, Homo sapiens
  DOMAIN (23)..(53): PEPTIDE REDUCTASE PROTEIN METHI domain identified by eMATRIX, accession number PD01888C, p-value=1.123e-14, raw score of 21.56
SFINVERYRAEPQTADAAPLKRGAFGSWLPEPDHYAEDDHQQYLHKNPYGYCGIGGIGVCQAYKIVQIQYIARTA

SEQ ID NO: 41120 - protein, 94 aa, Homo sapiens
  DOMAIN (52)..(82): PEPTIDE REDUCTASE PROTEIN METHI domain identified by eMATRIX, accession number PD01888C, p-value=4.600e-30, raw score of 21.56
  DOMAIN (1)..(86): Peptide methionine sulfoxide reductase domain identified by PFam, accession name PMSR, E-value=1.2e-11, PFam score of 37.8
KNSAQGMRQANAHGTQYRSAIYPLTPEQDAAARASLERFQAAMLAADDDRHITTEIANATPFYYAEDDHQQYLHKNPYGYCGIGGIGVCLPPEA

SEQ ID NO: 41121 - protein, 84 aa, Homo sapiens
QSRSCSRHQSKPDRRTDARLHTLHGSFLHTRRGSVNTAREGHQMADEIDAMALYRAWQQLDNGSCAQIRRVSEYGEHNNSHADD

SEQ ID NO: 41122 - protein, 171 aa, Homo sapiens
  DOMAIN (1)..(171): 3' exoribonuclease family domain identified by PFam, accession name RNase_PH, E-value=1.9e-07, PFam score of 38.2
  misc_feature (1)...(171): Xaa = X or * as defined in Table 2
SDRSXIPVRPTHRDSGNRHDGSSGYCRCYGXHGXHRGIRYRCWPEKSQTRSGLLPLTVNYQERTYAAGRIPGSFFRREGRPSEGETLIARLIDRPIRPLFPEGFVNEVQVIATVVSVNPQVNPDIVAMIGASAALSLSGIPFNGPIGAARVGYINDQYVLNPTQDELKESK

SEQ ID NO: 41123 - protein, 334 aa, Homo sapiens
  DOMAIN (155)..(183): Radical activating enzymes proteins domain identified by eMATRIX, accession number BL01087A, p-value=8.200e-14, raw score of 19.50
  misc_feature (1)...(334): Xaa = X or * as defined in Table 2
TDHDGRNDTQRIGSGERNRPFSNANTAHHQCRFAGFALFCGEIFTTNQRRQPHPQRRDTNTHGSDGHHGINTLSNANQHEGIGHFVNRTAHIERQHQTHDHRQHNNAANSGTEVSQXARXHAAVXRYVAEREIHSGDRCGKRNSAHKIMPGWWCALPDTAPSLSKVVFFKGCPHLCPWCANPESISGKIQTVRREAKCLHCAKCLRDADECPSGAFERIGRDISLDALEREVMKDDIFFRTSGGGVTLYRGEDPAEDARYAHTNQPRQNKAVVDDEATDVGGAGTVKLNRCQIARISRQDVITVASRCEHGFCHPCDTVHRHDGDHTGTEDFVF

SEQ ID NO: 41124 - protein, 133 aa, Homo sapiens
SQSLPVWSIQCSSVMHLKASVQGEDGRNQILTMGCYGHRGNACGQLRRIEQNENDHSHIERDFLFIAALLAFAIYDQFIMPRRNGPTLLAIPLLRRGRIDSVIFVGLIVILIAKRSSFRNITQRLLQMATGMA

SEQ ID NO: 41125 - protein, 111 aa, Homo sapiens
SVLHLYYEQNTEHDTRGYRPIKTLDIVPAFEASHLLWQSYENSWEQIFSASVGASWQKHYGTDVLTQLGYGQRIIWNDIIDAGATLRWEKRPYDGDREHNLYVEFDMTFRF

SEQ ID NO: 41126 - protein, 158 aa, Homo sapiens
TCGEAASIVDRIRGFFEPSSILVSTLVLTLRPTGLLPLVTDSLPMRLLPTEIMAGSPIRSRDISLGDDPGINGQRAQGTWERWTVRADEPQAFHIEGVMFQIRNVNGAMPFPEDRGWKDTVWVDGQVELLVYFGQPSWAHFQFYFNSQTHKVGPRAVA

SEQ ID NO: 41127 - protein, 171 aa, Homo sapiens
  misc_feature (1)...(171): Xaa = X or * as defined in Table 2
MHKPNILSPGKPTSGVDPLTRREFWLHINSMVEKGVTVMVTTHFMDEPEYCDRIGLVYRGKLIASGTPDDLKAQSANDEQPDPTMEQAFIQLIHDWDKEHSNDVAKRRWISTHTMTGSPYIDATISDNRQELIAKMQAGKIRGLVVIPVDFAEQMERANATAPIQVITDGX

SEQ ID NO: 41128 - protein, 185 aa, Homo sapiens
  misc_feature (1)...(185): Xaa = X or * as defined in Table 2
GPATPRQPFKVLASLGRLVQHGGRWDAQHLHNAVHLVDLIGATEEGLSGVHLHKDAAQGPHVNGQVVGCAQEHLRXAVEAALDILVDPLAKLAGAAEVHNLDGAALGVAQQDVFGLEVAVNDAEAQAWPERAVPCRAAAPASGSGSARRRGSGCCAGGRTGCRTAAQIPSTSGFRNMKCRFRCTI

SEQ ID NO: 41129 - protein, 907 aa, Homo sapiens
  DOMAIN (445)..(473): ubiH/COQ6 monooxygenase family proteins domain identified by eMATRIX, accession number BL01304C, p-value=9.400e-30, raw score of 14.02
  DOMAIN (150)..(388): Cytochrome C and Quinol oxidase polypep domain identified by PFam, accession name COX1, E-value=7.4e-134, PFam score of 458.1
MHPRFQTAFAQLADNLQSALEPILADKYFPALLTGEQVSSLKSATGLDEDALAFALLPLAAACARTPLSNFNVGAIARGVSGTWYFGANMEFIGATMQQTVHAEQSAINHTWLSGEKTLATINGRESTCCLQSMFTLDRHSGMFLVSKSFPSQFFTNDMGGNMMMYINLIWAWGHPEVYILILPVFGVFSEIAATFSRKRLFGYTSLVWATVCITVLSFIVWLHHFFTMGAGANVNAFFGITTMIIAIPTGVKIFNWLFTMYQGRIVFHSAMLWTIGFIVTFSVGGMTGVLLAVPGADFVLHNSLFLIAHFHNVIIGGVVFGCFAGMTYWWPKAFGFKLNETWGKRAFWFWIIGFFVAFMPLYALGFMGMTRRLSQQIDPQFHTMLMICASEEAQRMQQASEDEFNRALNIAFDNRLGLCKVESARQVFPLTGRYARQFASHRLALVGDAAHTIHPLAGQGVNLGFMDAAELIAELKRLHRQGKDIGQYIYLRRYERSRKHSAALMLAGRHHPLRNFQLTAFQHSTHQPSNTSFFNIQTNLAFTTNGTWTWEQDLAYAQDSRAERVKHPLFISLLIITLSFIPIFTLEGQEGRLFGPLAFTKTYAMAGAALLAIVVIPILMGYWIRGKIPPESSNPLNRFLIRVYHPLLLKVLHWPKTTLLVAALSVLTVLWPLNKVGGEFLPQINEGDLLYMPSTLPGISAAEAASMLQKTDKLIMSVPEVARVFGKTGKAETATDSAPLEMVETTIQLKPQEQWRPGMTMDKIIEELDNTVRLPGLANLWVPPIRNRIDMLSTGIKSPIGIKVSGTVLADIDAMAEQIEEVARTVPGVISELDERLESTELEVVSNSARFWQSRVECGVFSVAATENTTVFTFQRDTAWRLTVRHVRTVCRRNQYRYRRSDQRLP

SEQ ID NO: 41130 - protein, 780 aa, Homo sapiens
  DOMAIN (476)..(498): SpoU rRNA Methylase family domain identified by eMATRIX, accession number PF00588B, p-value=3.077e-18, raw score of 17.18
  DOMAIN (355)..(496): SpoU rRNA Methylase family domain identified by PFam, accession name SpoU_methylase, E-value=1.3e-60, PFam score of 214.8
MYLSQPGESTSQNIAGFCNEWGIDSSLQQAGGLSPQGMQIPRSPRQIVMLQRKASKPGQGLGKTTGWIHRTTLLSRGVKMIPGVSYQKIDDDGLHVVINGETQVLAVDNVVICAGQEPNRALAQPLIDSGKTVHLIGGCDVAMELDARRAIAQGTRLADLQAASQGTCIDDQDITIDTYEFTTDYLENPTCGEKVVEETLVSHLLKSNCLITHQPDWGSLQIQYRGRQIDREKLLRYLVSFRHHNEFHEQCVERIFNDLLRFCQPEKLSVYARYTRRGGLDINPWRSNSDFVPSTTRLLEVDMLKRTASSDLYQLFRNCSLAVLNSGSLTDNSKELLSRFENFDINVLRRGGGSMLNIVLYDPEIPPNTGNIIRLCANTGFRLHIIEPMGFAWDDKRLRRAGLDYHEFTAVTRHHDYRAFLEAENPQRLFALTTKGTPAHSAVSYQDGDYLMFGPETRGLPASILDALPAEQKIRIPMVPDSRSMNLSNAVSVVVYEAWRQLGYPGADTGAYHIIPWSSITTFANFVRGIVSVVANYDVDRHEDADKANQALKDAVAELMENEEIRGLIIGEPNFAGIVGLSNTAFTLRVSFTTLPLKQWTSDLQAHCLGRKSKRISHSKTTRAVTSVWWFVILKAGWSGGHGTLSRMPVKVLTAISAPQASVQTRPPADREAFTRIHLPEHTLYPHTPAIAAGVFIDGDIPMTTQTQHDLAPANQPEFELTVTPVPDEQRIDFWPQYFGAIPQWLLLEPHIFAWMDRFCEGYSGVSGRSTGSSRGDLQA

SEQ ID NO: 41131 - protein, 439 aa, Homo sapiens
  DOMAIN (354)..(377): FAD-DEPENDENT PYRIDINE NUCLEOTIDE REDUCTASE SIGNATURE domain identified by eMATRIX, accession number PR00368A, p-value=1.857e- 12, raw score of 17.76
  DOMAIN (62)..(309): NADH:flavin oxidoreductase / NADH oxidas domain identified by PFam, accession name oxidored_FMN, E-value=7e-07, PFam score of - 61.5
MLADCKNFDSSDLISDLAGDCQRQRQISCGSLLNRTRQRYCSRQSALAVKQRRCTKGPVPEYLFEMLIGHRLRIAITAENAGGFIEDKQRTLSRCHIFPGIFQRSLPERQHRFLTPINRSKCQLIRTLLSTLCTPKCGPGFKHRIVLCKSSDLSKTFPAAQCPEESKPPVRIRCSLGRCPPPRWVTGDWGQSTLEIPDLVEDGGTFAETVELAQAIEAAGATIINTGIGWHEARIPTIATPVPRGAFSWVTRKLKGHVSLPLVTTNRINDPQVADDILSRGDADMVSMARPFLADAELLSKAQSGRADEINTCIGCNQACLDQIFVGKVTSCLVNPRACHETKMPILPAVQKKNLAVVGAGPAGLAFAINAAARGHQIPGKEELYETLRYYRRMIEVTGVTLKLNHTVTADQLQAFDETILASGIVPRTPPIDGIDHPK

SEQ ID NO: 41132 - protein, 657 aa, Homo sapiens
  DOMAIN (116)..(138): Fumarate reductase / succinate dehydrogenase FAD-binding site proteins domain identified by eMATRIX, accession number BL00504A, p-value=9.384e-10, raw score of 10.76
  DOMAIN (117)..(235): Pyridine nucleotide-disulphide oxidoreducta domain identified by PFam, accession name pyr_redox, E-value=1.9e-05, PFam score of 21.2
NPADGRTGFTLCATGEALSSATIAAAERRQALQEGCDDILSHGDADMVSMARPFLADAELLSKAQSGRADEINTCIGCNQACLDQIFVGKVTSCLVNPRACHETKMPILPAVQKKNLAVVGAGPAGLAFAFNIAKQIPGKEEFYDTLRYYRRMIEVTGVTLKLNHTVTADQLQAFDETILAVGIVPRTPPIDGIDHPKVLSYPDVLRDKAPVSNKVAIIGCGGIGFDTAMYLSQPGESTSQNIAGFCNEWGIDSSLQQADCDAPAKASKPGQGLGKTTGWIHRTTLLSRGVKMIPGVSYQKIDDDGLHVVINGANQGSDMLRLQGELDSASRIGRRSAAPKLGSLNDGRCFINCHILDRLPYKGLVPACSWNGGSLDPLEGRPDEPHVEVLGIPPAAMLDQAPRLASTLNGCLGVAGPYEDERTQEGLPGPRDTAAEEVLGVQTGGAGSRGRVRGPQPADLPSASGPGAACWSMSPPPDQPPCVLAHGFFRRTPTSTQQRPAEQCFHSPAPLELPLSSTSSILSFAEYGNAMAWLYRGKILPSGTPDDLKAQSANDGNPDPTMEKAFIQLIHDGIRSIAMSNPILSCRRYGRYQEWCLTIPAVFISAPYVRRYVRFHEHQEGGGVRQEATVREIPLAIAVIPNSRTPCGCSYPQHLR

SEQ ID NO: 41133 - protein, 174 aa, Homo sapiens
  DOMAIN (69)..(93): Aminotransferases class-IV proteins domain identified by eMATRIX, accession number BL00770D, p-value=3.443e-10, raw score of 16.24
  DOMAIN (1)..(158): Aminotransferase class IV domain identified by PFam, accession name aminotran_4, E-value=1.6e-08, PFam score of -19.9
DAMVSSWNRAAPNTIPTAAKAGGNYLSSLLVGSEARRHGYQEGIALDVNGYISEGAGENLFEVKDGVLFTPPGFTSSALPGITRDAIIKLAKELGIEVREQVLSREKSLYLADEVFMSGTAGEITPRRSGNGYSGLAKGRCGPVTKRIQHALQGVYSWVTPGYFESVRCTAYGH

SEQ ID NO: 41134 - protein, 189 aa, Homo sapiens
REPAGENGPPVCDGAMLDLKAWGSECHQQLTGRDNQQIKRSIYLLPERAKLAELRLLVIPGQVDYLQHIEELAAFIKGLGDVPVRLNAFHAHGVYGEAQSWASATPEDVEPLADALKVRGTCRPDKTRQASHQALCANCRMRRERLIRPTVRHKPVGMIRRDKRRIRHYAPTAGCGVNALSGLRFGTDL

SEQ ID NO: 41135 - protein, 159 aa, Homo sapiens
  DOMAIN (92)..(111): Ribonucleotide reductase large subunit proteins domain identified by eMATRIX, accession number BL00089I, p-value=7.702e- 12, raw score of 15.71
  DOMAIN (1)..(103): Ribonucleotide reductase domain identified by PFam, accession name ribonucleo_red, E-value=1.4e-47, PFam score of 126.9
  misc_feature (1)...(159): Xaa = X or * as defined in Table 2
SNATNGIEPPRGYVSIKASKDGILRQVVPDYEHLHDAYELLGEMPGNDGYLQLVGIMQKFIDQSISANTNYDPSRFPSGKVPMQQLLKDLLTAYKFGVKTLYYQNTRGRRXRRTRRSGAVNPGTMGCESGACKNPGYLRMPGCRRKTPLIPALPGFGFW

SEQ ID NO: 41136 - protein, 147 aa, Homo sapiens
  DOMAIN (1)..(24): LGN motif, putative GEF specific for G-alpha domain identified by PFam, accession name GoLoco, E-value=4.5e-05, PFam score of 30.3
MDSLMDMLASTQGRRMDDQRVTVSSLPGFQPVGSKAYKPSRRPDKAFTPHPASQYQILHAPLVAAIVSGLTAARVVFVRLQQPSLGVLSNTSGCDATNVVGRLQDNASVSPGIVHTDSVIWRSCQVRRSAVHTLWRQKTRLFDAVDA

SEQ ID NO: 41137 - protein, 107 aa, Homo sapiens
MDLVTGSRKVIIAMEHCAKDGSAKILRRCTMPLTAQHAGHMLVTELAVVRSFDGKMWLTEIADGPTSQAQPAATYRIPLSNSRVRRRYRHRYYRYNLSIRKKRHRPL

SEQ ID NO: 41138 - protein, 150 aa, Homo sapiens
  misc_feature (1)...(150): Xaa = X or * as defined in Table 2
TPYPAYVQHVTPGRIRRGKRRIRQCLPVLESRFHNTQKSRGETEGASGFSLQHHLGDSSRAAPGPYRVSTAAADSGGRAGSSAPSALVPRGCXGPSLAPAGRSQRXHRGGGQLSPAAPRTANKAAGLGPPARLNFFIRAQCDSRINDITR

SEQ ID NO: 41139 - protein, 48 aa, Homo sapiens
  misc_feature (1)...(48): Xaa = X or * as defined in Table 2
PLSIIEADFRIWANAGXRMVAGIKPSIARVPLVLQVSALEVPEQCYRH

SEQ ID NO: 41140 - protein, 268 aa, Homo sapiens
  DOMAIN (174)..(193): Nitrite and sulfite reductases iron-sulfur/siroheme-binding s domain identified by eMATRIX, accession number BL00365B, p-value= 2.440e-18, raw score of 13.74
  DOMAIN (127)..(196): Nitrite and sulphite reductase 4Fe-4S domain identified by PFam, accession name NIR_SIR, E-value=2.6e-29, PFam score of 110.8
MPKPNTRWSAWGLRRLKRKWSVARGSNLNRSVQYEFTGRGDRIGWVKGIDDNWHLTLFIENGRILDYPARPLKTGLLEIAKIHKGDFRITANQNLIIAGVPESEKAKIEKIAKESGLMNAVSPQRENSMACVSFPTCPLAMAEAERFLPSFIDNIDNLMAKHGVSDEHIVMRVTGCPNGCGRAMLAEVGLVGKAPGRYNLHLGGNRIGTRIPQITRRIEHRANDARTHRKVAEAFTRFALFRPAPYQFIKRRQDFRLVMFSIYMPVPS

SEQ ID NO: 41141 - protein, 194 aa, Homo sapiens
  DOMAIN (150)..(178): Flagella basal body rod proteins domain identified by eMATRIX, accession number BL00588B, p-value=9.229e-16, raw score of 20.68
HHYRKMNIQQSKWLIVTVCDGKLNWLLSGSKVCCTWMLCVQSEPELAKAWIFANLLAAFLIDDIIQPSLDFPPRRAEITIAADGTISALNPGDPANTVAPVGRLKLVKATGSEVQRGDDGIFRLSAETQATRGPVLQADPTLRVMSGVLEGSNVNAVAAMSDMIASARRFEMQMKVISSVDDNAGRANQLLSMS

SEQ ID NO: 41142 - protein, 193 aa, Homo sapiens
  misc_feature (1)...(193): Xaa = X or * as defined in Table 2
LNALRAVPGKGFLSRPLDVALQQDGWLAVQTADGSEGYTRNGSIQVDPTGQLTIQGHPVIGEAGPIAVPEGAEITIAADGTISAPIRAIRQIRLRQANPNQPGHPRHPRQAHARPNRDVTPTSKSNPPATPQHARDLQGPPRVLNVPLGLRKWAACQFGRVTPRKSRGSQVSRVVMSVIAVYRRNLRRFIVAX

SEQ ID NO: 41143 - protein, 222 aa, Homo sapiens
  DOMAIN (129)..(142): Thioredoxin family proteins domain identified by eMATRIX, accession number BL00194, p-value=8.800e-11, raw score of 12.16
FRKLQVCWLPRPHLRPWWTCKPRWFGSCLRVFLLERVIGDVWGLRLWSALGVAFFGWAFITSLQAKRGWMRIVPIILLAAALVSVRPLQDWAFGATHTAQTQTHLNFTQIQTVDELNQALVEAQGKPVMLDLYADWCVACKEFEKYTFSDPQVQKALADTVLLQANVTANDAQDVALLKHLNVLGLPTILFFDGQGQEHPQARVTGFMDAETFSAHLRDRQP

SEQ ID NO: 41144 - protein, 471 aa, Homo sapiens
GMALTYTALGLVVAAAGLQFQAALQHPYVLIGLAIVFTLLAMSMFGLFTLQLPSSLQTRLTLMSNRQQGGSPGGAILLYIAQSGNMWLGGGTLYLYALGMGLPLMLITVFGNRLLPKSGPWMEQVKTAFGFVILALPVNIAPGSLDKALNQYAAHSGFTLSVDASLTRGKQSNGLHGDYDVESGLQQLLDGSGLQVKPLGNNSWTLEPAPAPKEDALTVVGDWLGDARENDVFEHAGARDVIRREDFAKTGATTMREVLNRIPGVSAPENNGTGSHDLAMNFGIRGLNPRLASRSTVLMDGIPRPLRPLRSAAAFTGSRFARQHGCHCTWYAVVVRCVTDTQSVGGVVNFVTRAIPQDFGIEAGILMSDLKHGSLVGACLGRLGPGAVLYLAVAVLGVRVRRGVVLVCPLGGTGLGYSCQGGAFQFAASCFLGRYGVVQGVIHVCFGPRSVFLDDCLRFDLPCLVWLSCPR

SEQ ID NO: 41145 - protein, 303 aa, Homo sapiens
  DOMAIN (197)..(210): Thioredoxin family proteins domain identified by eMATRIX, accession number BL00194, p-value=8.800e-11, raw score of 12.16
  DOMAIN (173)..(205): Thioredoxin domain identified by PFam, accession name thiored, E-value=0.026, PFam score of 12.1
LLKPFHVIAIATGRSLAVFCMGRLRTICSHATPPASAILLYIAQSGTWGGGGTLYLYALGMGLPLMLITVFGTRLLPKSGPWMEQVKTAFGYVILALPVFLLERVIGDVWGLRLWSALGVAFFGWAFITSLQAKRGWMRIVQIILLAAALVSVRPLQDWAFGATHTGQTQTHLNFTQIKTVDELNQALVEAKGKPVMLDLYADWCVACKEFEKYTFSDPQVQKALADTVLLQANVTANDAQDVPTSAPFISPPNALVAIIVQLRFGDFYNRVSKGSRPTVFGRTLKARRITLSEKSILKAKIH

SEQ ID NO: 41146 - protein, 269 aa, Homo sapiens
  misc_feature (1)...(269): Xaa = X or * as defined in Table 2
SSGGHGRRAAGRLQHPLLRVHVPVVDTSCVPSCSRLQWHHLPLCPGQLQHGHFHGPWCFPPSGXGXGQGGRLPGSAVQERGCARYPGPHEVVCHVPLLPPAALLPLQRLXQLCRGLXPPLPLGQPTASGVETIATSSCSCCHSVHTWWASWPSAWSTCXTTLRGWEPRTPPSRILGSCGPHCRGDVDRGHVHPGEXAFQSLVPCQGTPKGPMAPPXVGRGVSPPGTRVEAALSCESPPHARQSMCFNLHTHSIDPKQSRRPYSDNVGKE

SEQ ID NO: 41147 - protein, 215 aa, Homo sapiens
CSWQPAVPTQPQPAGPSAPRQGLPGHSRGAQPALVSPHKGLTPVPGTPAPASTPPAPAGGEGLPSPAAGAPPAHCPGHPPAPATAAPVPGLCGPCPSLPACPQTRPPTHVNTKKRVPGVRPAARRPWPPGCTWRGARTVTFLHQLNPGVNCQMLTVGRSGIRPTCTIASCSVNKLHPQMHPATQPHHRMALSPSHSEGPSHCWGLSLGDISPIPR

SEQ ID NO: 41148 - protein, 182 aa, Homo sapiens
LLNTQSFPCSLMQLLQEATMSSLWCSGTGDVIEDWCRCDSTAFGSCVPVSCSFLSAHRLRLSTVHEPSSTLVVLEWEHSEPPIGVQIVDYLLRQEKVTDRMDHSKVETGEHLLLHGLVLIQGDKTKTKKNALPHGFAPGPQYPRAMQEEQGEEEAVLLLQEAAVLLPLRVRDIRSCCFRHRE

SEQ ID NO: 41149 - protein, 376 aa, Homo sapiens
  misc_feature (1)...(376): Xaa = X or * as defined in Table 2
LCLVMILYTRRRWCKRRRVPQPQKSASAEAANEIHYIPSVLIGGHGRESLRNARVQGHNSSGTLSIRETPILDGYEYDITDLRHHLQRECMNGGEDFASQVTRTLDSLQGCNEKSGMDLTPGGDGRKARLMNKYKDNIIATSPVDSNHQQATLLSHTSSSQRKRINNKARGMHVXHXGEGDSGTEAENDPQLTFYTDPSRSRRRSRGRNDRGGRNKTTLTLISITSCVIGLVCSSHVNCPLVVKITLHVPEHLIADGEPVLLRMGSQLDASDWLNPAQVVLFSQQNSSGPWAMDLCARRLLDPCEHQCDPETGRREHRAAGNCQRDHARAHSVWLGSPPYHDTSLRWSPMYTTMESAPHAFPPSVTADAETVTLLA

SEQ ID NO: 41150 - protein, 1310 aa, Homo sapiens
HASGPGLKMALAGLCALLACCWGPAAVLATAAGDVDPSKELECKLKSITVSALPFLRENDLSIMHSPSASEPKLLFSVRNDFPGEMVVVDDLENTELPYFVLEISGNTEDIPLVRWRQQWLENGTLLFHIHHQDGAPSLPGQDPTEEPQHESAEEELRILHISVMGGMIALLLSILCLVMILYTRRRWCKRRRVPQPQKSASAEAANEIHYIPSVLIGGHGRESLRNARVQGHNSSGTLSIRETPILDGYEYDITDLRHHLQRECMNGGEDFASQVTRTLDSLQGCNEKSGMDLTPGSDNAKLSLMNKYKDNIIATSPVDSNHQQATLLSHTSSSQRKRINNKARAGSAFLNPEGDSGTEAENDPQLTFYTDPSRSRRRSRVGSPRSPVNKTTLTLISITSCVIGLVCSSHVNCPLVVKITLHVPEHLIADGSRFILLEGSQLDASDWLNPAQVVLFSQQNSSGPWAMDLCARRLLDPCEHQCDPETGRREHRAAGECLCYEGYMKDPVHKHLCIRNEWGTNQGPWPYTIFQRGFDLVLGEQPSDKIFRFTYTLGEGMWLPLSKSFVIPPAELAINPSAKCKTDMTVMEDAVEVREELMTSSSFDSLEVLLDSFGPVRDCSKDNGGCSKNFRCISDRKLDSTGCVCPSALQAMKDSSGCYDRHIGVDCSDGFNGGCEQLCLQQMAPFPDDPTLYNILMFCGCIEDYKLGVDGRSCQLITETCPEGSDCGESRELPMNQTLFGEMFFGYNNHSKEVAAGQVLKGTFRQNNFARGLDQQLPDGLVVATVPLENQCLEEISEPTPDPDFLTGMVNFSEVSGYPVLQHWKVRSVMYHIKLNQVAISQALSNALHSLDGATSRADFVALLDQFGNHYIQEAIYGFEESCSIWYPNKQVQRRLWLEYEDISKGNSPSDESEERERDPKVLTFPEYITSLSDSGTKRMAAGVRMECQSKGRCPSSCPLCHVTSSPDTPAEPVLLEVTKAAPIYELVTNNQTQRLLQEATMSSLWCSGTGDVIEDWCRCDSTAFGADGLPTCAPLPQPVLRLSTVHEPSSTLVVLEWEHSEPPIGVQIVDYLLRQEKVTDRMDHSKVETETVLSFVDDIISGAKSPCAMPSQVPDKQLTTISLIIRCLEPDTIYMFTLWGVDNTGRRSRPSDVIVKTPCPVVDDVKAQEIADKIYNLFNGYTSGKEQQTAYNTLLDLGSPTLHRVLYHYNQHYESFGEFTWRCEDELGPRKAGLILSQLGDLSSWCNGLLQEPKISLRRSSLKYLGCRYSEIKPYGLDWAELSRDLRKTCEEQTLSIPYNDYGDSKEI

SEQ ID NO: 41151 - protein, 57 aa, Homo sapiens
  misc_feature (1)...(57): Xaa = X or * as defined in Table 2
ALQGWSKNLHPEDIQLGKTPPPXQVAQEGGWSRRVGSDTWILEEQPGSTTRRVSVGM

SEQ ID NO: 41152 - protein, 127 aa, Homo sapiens
  misc_feature (1)...(127): Xaa = X or * as defined in Table 2
VILSSFDLIKHGILLEISDSIQFRGCKRSRIPELGGLEELWXPGDCRQPRPWRAGRHLQPGSLGSLVSKHQLRGSRKTLYSAFRKCHLLSVWEGKPLKIXRGDQVADSSQKKQLAADAHTPYRGGDI

SEQ ID NO: 41153 - protein, 433 aa, Homo sapiens
SSHQKQMLAPCFLGSLQNWQHHTAGKGKWVLGTCAFGEQLAASGHMKETRADRSKKLFRHYTVGSYDSFDTSRGGRVRKPYAGFFPDLQDICDEQPRPLHSTLRPACGGIQPGKQQPMPFAKTDTCASDKHVEKKLERLIHQAVSDAPEPSRVVKGIFIGGLPCARLWVVPYLMGHVQEVTMAEGYERASQATFREQMQEVPCCLQRSTGSSMKTGNKIRRVTDNVLTRSGPLINDILSVAVDSSVSVLIWMHLFSSHPLGIVRYWGCMGISCKLLLLTRVCYLITPLDLERFPFPNTEQVTFPERRVSVFLLPLSWCLDTRLPREPGCRSRRDSFTHRVFYSVTPTSGDVPGSHPFCDKPVRRGDDPYIRNDRGTLYSTLQFISTCVQVVGVYGHLPGFKSDAAQAVPRLLSQKRDQNHKEEEITDGDERPK

SEQ ID NO: 41154 - protein, 1284 aa, Homo sapiens; identical to SEQ ID NO: 36412
  DOMAIN (422)..(467): kw TRANSCRIPTASE REVERSE II ORF2 domain identified by eMATRIX, accession number DM01354N, p-value=1.000e-40, raw score of 13.17
  DOMAIN (17)..(247): AP endonuclease family 1 domain identified by PFam, accession name AP_endonucleas1, E-value=2.8e-89, PFam score of 310.0
  misc_feature (1)...(1284): Xaa = X or * as defined in Table 2

SEQ ID NO: 41155 - protein, 1218 aa, Homo sapiens; identical to SEQ ID NO: 36413
  DOMAIN (56)..(111): kw TRANSCRIPTASE REVERSE II ORF2 domain identified by eMATRIX, accession number DM01354Q, p-value=1.000e-40, raw score of 9.23
  DOMAIN (1)..(284): Reverse transcriptase domain identified by PFam, accession name rvt, E-value=8.2e-52, PFam score of 185.6

SEQ ID NO: 41156 - protein, 1709 aa, Homo sapiens; identical to SEQ ID NO: 32700
  DOMAIN (797)..(842): kw TRANSCRIPTASE REVERSE II ORF2 domain identified by eMATRIX, accession number DM01354N, p-value=1.000e-40, raw score of 13.17
  DOMAIN (391)..(621): AP endonuclease family 1 domain identified by PFam, accession name AP_endonucleas1, E-value=7e-83, PFam score of 288.8

SEQ ID NO: 41157 - protein, 1203 aa, Homo sapiens; identical to SEQ ID NO: 34339
  DOMAIN (121)..(166): kw TRANSCRIPTASE REVERSE II ORF2 domain identified by eMATRIX, accession number DM01354N, p-value=1.000e-40, raw score of 13.17
  DOMAIN (211)..(387): Reverse transcriptase domain identified by PFam, accession name rvt, E-value=3.5e-23, PFam score of 90.5
  misc_feature (1)...(1203): Xaa = X or * as defined in Table 2

SEQ ID NO: 41158 - protein, 1221 aa, Homo sapiens; identical to SEQ ID NO: 35785
  DOMAIN (387)..(432): kw TRANSCRIPTASE REVERSE II ORF2 domain identified by eMATRIX, accession number DM01354N, p-value=1.000e-40, raw score of 13.17
  DOMAIN (473)..(746): Reverse transcriptase domain identified by PFam, accession name rvt, E-value=1.8e-87, PFam score of 304.0

SEQ ID NO: 41159 - protein, 1070 aa, Homo sapiens; identical to SEQ ID NO: 36416
  DOMAIN (154)..(195): kw TRANSCRIPTASE REVERSE II ORF2 domain identified by eMATRIX, accession number DM01354I, p-value=1.000e-40, raw score of 15.55
  DOMAIN (400)..(594): Reverse transcriptase domain identified by PFam, accession name rvt, E-value=8.6e-35, PFam score of 129.0

SEQ ID NO: 41160 - protein, 1118 aa, Homo sapiens; identical to SEQ ID NO: 40011
  DOMAIN (191)..(232): kw TRANSCRIPTASE REVERSE II ORF2 domain identified by eMATRIX, accession number DM01354I, p-value=1.000e-40, raw score of 15.55
  DOMAIN (437)..(662): Reverse transcriptase domain identified by PFam, accession name rvt, E-value=7e-52, PFam score of 185.8

SEQ ID NO: 41161 - protein, 1691 aa, Homo sapiens; identical to SEQ ID NO: 34342
  DOMAIN (795)..(836): kw TRANSCRIPTASE REVERSE II ORF2 domain identified by eMATRIX, accession number DM01354I, p-value=1.000e-40, raw score of 15.55
  DOMAIN (1031)..(1306): Reverse transcriptase domain identified by PFam, accession name rvt, E-value=1.3e-79, PFam score of 277.9

SEQ ID NO: 41162 - protein, 1078 aa, Homo sapiens; identical to SEQ ID NO: 36419
  DOMAIN (479)..(524): kw TRANSCRIPTASE REVERSE II ORF2 domain identified by eMATRIX, accession number DM01354N, p-value=1.000e-40, raw score of 13.17
  DOMAIN (563)..(838): Reverse transcriptase domain identified by PFam, accession name rvt, E-value=4.7e-88, PFam score of 306.0

SEQ ID NO: 41163 - protein, 1099 aa, Homo sapiens; identical to SEQ ID NO: 34343
  DOMAIN (22)..(67): kw TRANSCRIPTASE REVERSE II ORF2 domain identified by eMATRIX, accession number DM01354N, p-value=1.000e-40, raw score of 13.17
  DOMAIN (71)..(341): Reverse transcriptase domain identified by PFam, accession name rvt, E-value=7.5e-70, PFam score of 245.5

SEQ ID NO: 41164 - protein, 854 aa, Homo sapiens; identical to SEQ ID NO: 36422
  DOMAIN (50)..(96): kw TRANSCRIPTASE REVERSE II ORF2 domain identified by eMATRIX, accession number DM01354O, p-value=1.000e-40, raw score of 8.73
  DOMAIN (83)..(358): Reverse transcriptase domain identified by PFam, accession name rvt, E-value=1.5e-87, PFam score of 304.3

SEQ ID NO: 41165 - protein, 1139 aa, Homo sapiens; identical to SEQ ID NO: 40004
  DOMAIN (336)..(377): kw TRANSCRIPTASE REVERSE II ORF2 domain identified by eMATRIX, accession number DM01354I, p-value=1.000e-40, raw score of 15.55
  DOMAIN (582)..(857): Reverse transcriptase domain identified by PFam, accession name rvt, E-value=5.3e-88, PFam score of 305.8
  misc_feature (1)...(1139): Xaa = X or * as defined in Table 2

SEQ ID NO: 41166 - protein, 1340 aa, Homo sapiens; identical to SEQ ID NO: 32693
  DOMAIN (154)..(195): kw TRANSCRIPTASE REVERSE II ORF2 domain identified by eMATRIX, accession number DM01354I, p-value=1.000e-40, raw score of 15.55
  DOMAIN (400)..(675): Reverse transcriptase domain identified by PFam, accession name rvt, E-value=1.2e-87, PFam score of 304.6

SEQ ID NO: 41167 - protein, 607 aa, Homo sapiens; identical to SEQ ID NO: 36426
  DOMAIN (154)..(195): kw TRANSCRIPTASE REVERSE II ORF2 domain identified by eMATRIX, accession number DM01354I, p-value=1.000e-40, raw score of 15.55
  DOMAIN (400)..(585): Reverse transcriptase domain identified by PFam, accession name rvt, E-value=3.3e-11, PFam score of 50.7

SEQ ID NO: 41168 - protein, 1483 aa, Homo sapiens; identical to SEQ ID NO: 36427
  DOMAIN (970)..(1011): kw TRANSCRIPTASE REVERSE II ORF2 domain identified by eMATRIX, accession number DM01354I, p-value=1.000e-40, raw score of 15.55
  DOMAIN (1218)..(1483): Reverse transcriptase domain identified by PFam, accession name rvt, E-value=1.8e-74, PFam score of 260.8

SEQ ID NO: 41169 - protein, 957 aa, Homo sapiens; identical to SEQ ID NO: 36428
  DOMAIN (267)..(312): kw TRANSCRIPTASE REVERSE II ORF2 domain identified by eMATRIX, accession number DM01354N, p-value=1.000e-40, raw score of 13.17
  DOMAIN (351)..(626): Reverse transcriptase domain identified by PFam, accession name rvt, E-value=1.7e-88, PFam score of 307.4

SEQ ID NO: 41170 - protein, 1099 aa, Homo sapiens; identical to SEQ ID NO: 34349
  DOMAIN (110)..(151): kw TRANSCRIPTASE REVERSE II ORF2 domain identified by eMATRIX, accession number DM01354I, p-value=1.000e-40, raw score of 15.55
  DOMAIN (356)..(597): Reverse transcriptase domain identified by PFam, accession name rvt, E-value=6.8e-65, PFam score of 229.0

SEQ ID NO: 41171 - protein, 1597 aa, Homo sapiens; identical to SEQ ID NO: 34348
  DOMAIN (272)..(317): kw TRANSCRIPTASE REVERSE II ORF2 domain identified by eMATRIX, accession number DM01354N, p-value=1.000e-40, raw score of 13.17
  DOMAIN (1057)..(1423): Voltage gated chloride channels domain identified by PFam, accession name voltage_CLC, E-value=1.1e-169, PFam score of 576.2

SEQ ID NO: 41172 - protein, 1104 aa, Homo sapiens; identical to SEQ ID NO: 36431
  DOMAIN (411)..(456): kw TRANSCRIPTASE REVERSE II ORF2 domain identified by eMATRIX, accession number DM01354N, p-value=1.000e-40, raw score of 13.17
  DOMAIN (5)..(235): AP endonuclease family 1 domain identified by PFam, accession name AP_endonucleas1, E-value=7e-83, PFam score of 288.8

SEQ ID NO: 41173 - protein, 1139 aa, Homo sapiens
  DOMAIN (154)..(195): kw TRANSCRIPTASE REVERSE II ORF2 domain identified by eMATRIX, accession number DM01354I, p-value=1.000e-40, raw score of 15.55
  DOMAIN (400)..(675): Reverse transcriptase domain identified by PFam, accession name rvt, E-value=1.2e-87, PFam score of 304.6
  misc_feature (1)...(1139): Xaa = X or * as defined in Table 2
MVKGSIQQEELTILNIYAPNTGAPRFIKQVLSDLQRDLDSHTLIMGDFNTPLSTLDRSTRQKVNKDTQELNSALHQADLIDIYRTLHPKSTEYTFFSAPHHTYSKIDHILGSKALLSKCKRTEIITNYLSDHSAIKLELRIKNLTQSRSTTWKLNNLLLNDYWVHNEMKAEIKMFFETNENKDTTYQNLWDAFKAVCRGKFIALNAYKRKQERSKIDTLTSQLKELEKQEQTHSKASRRQEITKIRAELKEIETQKTLQKINESRSWFFERINKIDRPLARLIKKKREKNQIDTIKNDKGDITTDPTEIQTTIREYYKHLYANKLENLEEMDTFLDTYTLPRLNQEEVESLNRPITGSEIVAIINSLPTKKSPGPDGFTAEFYQRYMEELVPFLLKLFQSIEKEGILPNSFYEASIILMPKPGRDTTKKENFRPISLMNIDAKILNKILANRIQQHIKKLIHHDQVGFIPGMQGWFNIRKSINVIQHINRAKDKNHMIISIDAEKAFDKIQQPFMLKTLNKLGIDGTYFKIIRAIYDKPTANIILNGQKLEAFPLKTGTRQGCPLSPLLFNIVLEVLDRAIRQEKEIKGIQLGKEEVKLSLFADDMIVYLENPIVSAQNLLKLISNFSKVSGYKINVQKSQAFLYTNNRQTESQIMGELPFTIASKRIKYLGIQLTRDVKDLFKENYKPLLKEIKEETNKWKNIPCSWVGRINIVKMAILPKVIYRFNAIPIKLPMTFFTELEKTTLKFIWNQKRTRIAKSILSQKNKAGGITLPDFKLYYKATVTKTAWYWYQNRDIDQWNRTEPSEIMPHIYNYLIFDKPEKNKQWGKDSLFNKWCWENWLAICRKLKLDPFLTPYTKINSRWIKDLNVKPKTIKTLEENLGITIQDIGMGKDFMSKTPKAMATKAKIDKWDLIKLKSFCTAKETTIRVNRQPTTWEKIFATYSSDKGLISRIYNELKQIYKKKTNNPIKKWAKDMNRHFSKEDIYAAKKHMKKCSSSLAIREMQIKTTMRYHLTPVRMAIIKKSGNNRCWRGCGEIGTLLHCWWDCKLVQPLWKSVWRFLRDLELEIPFDPAIPLLDIYPNEYKSCCYKDTCTQNKIPRNPTYKGCEGPLQGELQTTAQQNKRGHKQMEEHSMLMX

SEQ ID NO: 41174 - protein, 1585 aa, Homo sapiens; identical to SEQ ID NO: 36434
  DOMAIN (154)..(195): kw TRANSCRIPTASE REVERSE II ORF2 domain identified by eMATRIX, accession number DM01354I, p-value=1.000e-40, raw score of 15.55
  DOMAIN (400)..(675): Reverse transcriptase domain identified by PFam, accession name rvt, E-value=3.6e-89, PFam score of 309.6
  misc_feature (1)...(1585): Xaa = X or * as defined in Table 2

SEQ ID NO: 41175 - protein, 1127 aa, Homo sapiens; identical to SEQ ID NO: 36435
  DOMAIN (154)..(195): kw TRANSCRIPTASE REVERSE II ORF2 domain identified by eMATRIX, accession number DM01354I, p-value=1.000e-40, raw score of 15.55
  DOMAIN (400)..(675): Reverse transcriptase domain identified by PFam, accession name rvt, E-value=5.1e-89, PFam score of 309.1

SEQ ID NO: 41176 - protein, 1115 aa, Homo sapiens; identical to SEQ ID NO: 36436
  DOMAIN (154)..(195): kw TRANSCRIPTASE REVERSE II ORF2 domain identified by eMATRIX, accession number DM01354I, p-value=1.000e-40, raw score of 15.55
  DOMAIN (400)..(675): Reverse transcriptase domain identified by PFam, accession name rvt, E-value=2.8e-87, PFam score of 303.4

SEQ ID NO: 41177 - protein, 1258 aa, Homo sapiens
  DOMAIN (272)..(317): kw TRANSCRIPTASE REVERSE II ORF2 domain identified by eMATRIX, accession number DM01354N, p-value=1.000e-40, raw score of 13.17
  DOMAIN (356)..(631): Reverse transcriptase domain identified by PFam, accession name rvt, E-value=2.6e-81, PFam score of 283.5
  misc_feature (1)...(1258): Xaa = X or * as defined in Table 2
MGDFNTPLSTLDRSTRQKVNKDTQELNLALHQADLIDIYRTLHPKSTEYTFFSAPHHTYSKIDRIVGSKALLSKCKRTEIITNYLSHHSAIKLELRIKNLTQNRSTTWKLNNLLLNDYWVHSEMKAEIKMFFETNENKDTTYQNLWDTFEAVCRGKFIALNGHKRKQERSKIDTLTSQLKELEKQEQTHSKASRRQEITKIRAELKEIEIQKTLQKINESRSWFFERINKIDRPLARLIKKKREKNLIDAIKTDKGDITTNPTEIQTTIREYYKHLYANKLENREEMDKFLDTYTLPRLNQEEVESLNRTITGSEIVARINSLPTKKSPGPDGFTAEFYQRYKEELVPFLLKLFQSIEKEGILPNSFYEASIILIPKPGRDTTKKENFRPISLMNIDAKILNKILAKGIQQHIKKLIHHDQVGFIPGMQGWFNIHKSINVIQHINRAKDKNHMIISIDAEKAFDKIQQPFMLKTLNKLGIDGTYFKIIRAIYDKPTASIILNGQKLEAFRLKTGTRQGCPLSPLLFNIVFEILARAIRQEKEIKGIQLGKEEVKLSLFAGDMIVYLENPIVSAQNLLKLISNFSKVSGYKINVQKSQAFLYTNNRQTESQIMSELPFTIASKRIKYLGIQLTRDVKDLFKENYKPLLKEIKEDTNKWKNIPCSWVGRINIVKMAILPKVIYRINAIPIKLPMPFFTELEKSTLKFIWNQKRARIAKSILSQKNKAGSITLPDFKLYYKATVTKTAWYWYQNRDIDQWNRTEPSEITPHIYNYLIFDKPEKNKQWGKDSLFNKWCWENWLAICRKLKLDPFLTPYTKINSRWIKDLNVRPKTIKTLEENLGITIQDIGIGDDFMSKTPKTMAAKDKIDKWDLIKLKSFCTAKETTIRVNRQPTKWEKIFATYSSDKGLISRIYNELKQIFKKKTNNPIKKWVKDMNRHFSKGDIYAAKKHMKKCSSSLAIREMQIKTTMRYHLTPVRMAIIKKSGNNRCWRGCGEIGTLLHCWWDCKLVQPLWKSVWRFLRDLELEIPFDPAIPLLGIYPKDYKSCCYKDTCTLTWMELEAIILSEVLRNGKTKNRMFSLISGNQDTGMQRHTEFYDGLWRLRRGRVEGACYDIIWPSFGTDVSFEKQIHLWLFLTPQPATIKIALLGYGLLGKILMAIRDAGFEISAMQMFNMDRVNVEEFYEVYKGVVTEYHDMVTEMYSGPCVAMEIQQNNATKTFREFCGPADPCIENSLKTRVEVIIQVQDDGELDQDGGNRHX

SEQ ID NO: 41178 - protein, 1240 aa, Homo sapiens; identical to SEQ ID NO: 36438
  DOMAIN (110)..(151): kw TRANSCRIPTASE REVERSE II ORF2 domain identified by eMATRIX, accession number DM01354I, p-value=1.000e-40, raw score of 15.55
  DOMAIN (356)..(631): Reverse transcriptase domain identified by PFam, accession name rvt, E-value=8.3e-88, PFam score of 305.1

SEQ ID NO: 41179 - protein, 1298 aa, Homo sapiens; identical to SEQ ID NO: 36439
  DOMAIN (154)..(195): kw TRANSCRIPTASE REVERSE II ORF2 domain identified by eMATRIX, accession number DM01354I, p-value=1.000e-40, raw score of 15.55
  DOMAIN (400)..(675): Reverse transcriptase domain identified by PFam, accession name rvt, E-value=5.1e-89, PFam score of 309.1

SEQ ID NO: 41180 - protein, 1111 aa, Homo sapiens; identical to SEQ ID NO: 36440
  DOMAIN (154)..(195): kw TRANSCRIPTASE REVERSE II ORF2 domain identified by eMATRIX, accession number DM01354I, p-value=1.000e-40, raw score of 15.55
  DOMAIN (400)..(675): Reverse transcriptase domain identified by PFam, accession name rvt, E-value=2.8e-88, PFam score of 306.7

SEQ ID NO: 41181 - protein, 1260 aa, Homo sapiens; identical to SEQ ID NO: 36441
  DOMAIN (154)..(195): kw TRANSCRIPTASE REVERSE II ORF2 domain identified by eMATRIX, accession number DM01354I, p-value=1.000e-40, raw score of 15.55
  DOMAIN (400)..(675): Reverse transcriptase domain identified by PFam, accession name rvt, E-value=1.8e-88, PFam score of 307.4

SEQ ID NO: 41182 - protein, 1284 aa, Homo sapiens; identical to SEQ ID NO: 36442
  DOMAIN (627)..(652): 7 kw REVERSE TRANSCRIPTASE RNA POLYMERASE domain identified by eMATRIX, accession number DM00895E, p-value=3.333e-11, raw score of 15.72
  DOMAIN (598)..(873): Reverse transcriptase domain identified by PFam, accession name rvt, E-value=1.6e-88, PFam score of 307.5

SEQ ID NO: 41183 - protein, 1115 aa, Homo sapiens; identical to SEQ ID NO: 36443
  DOMAIN (323)..(369): kw TRANSCRIPTASE REVERSE II ORF2 domain identified by eMATRIX, accession number DM01354O, p-value=1.000e-40, raw score of 8.73
  DOMAIN (356)..(631): Reverse transcriptase domain identified by PFam, accession name rvt, E-value=3.2e-86, PFam score of 299.8

SEQ ID NO: 41184 - protein, 1132 aa, Homo sapiens; identical to SEQ ID NO: 40024
  DOMAIN (277)..(322): kw TRANSCRIPTASE REVERSE II ORF2 domain identified by eMATRIX, accession number DM01354N, p-value=1.000e-40, raw score of 13.17
  DOMAIN (361)..(636): Reverse transcriptase domain identified by PFam, accession name rvt, E-value=2.6e-88, PFam score of 306.8

SEQ ID NO: 41185 - protein, 1307 aa, Homo sapiens; identical to SEQ ID NO: 36445
  DOMAIN (294)..(335): kw TRANSCRIPTASE REVERSE II ORF2 domain identified by eMATRIX, accession number DM01354I, p-value=1.000e-40, raw score of 15.55
  DOMAIN (540)..(815): Reverse transcriptase domain identified by PFam, accession name rvt, E-value=7.7e-89, PFam score of 308.6

SEQ ID NO: 41186 - protein, 1328 aa, Homo sapiens
  DOMAIN (252)..(293): kw TRANSCRIPTASE REVERSE II ORF2 domain identified by eMATRIX, accession number DM01354I, p-value=1.000e-40, raw score of 15.55
  DOMAIN (8)..(238): AP endonuclease family 1 domain identified by PFam, accession name AP_endonucleas1, E-value=1.6e-91, PFam score of 317.5
MTGSNSHITILTLNINGLNSAIKRHRLASWIKSQDPSVCCIQETHLMCRDTHRLKIKGWRKIYQANGKQKKAGVAILVSDKTDFKPTKIKRDKEGHYIMVKGSIQQEELTILNIYAPNTGAPRFIKQVLSDLQRDLDSHTLIMGDFNTPLSILDRSTRQKVNKDTQELNSALHQADLIDIYRTLHPKSTEYTFFSAPHHTYSKIDHIVGSKALLSKCKRTEIITNYLSDHSAIKLELRIKNLTQSRSTTWKLNNLLLNDYWVHNEMKAEIKMFFETNENKDTTYQNLWDAFKAVCRGKFIALNAYKRKQERSKIDTLTSQLKELEKQEQTHSKASRRQEITKIRAELKEIETQKTLQKINESRSWFFERINKIDRPLARLIKKKREKNQIDTIKNDKGDITTDPTEIQTTIREYYKHLYANKLENLEEMDTFLDTYTLPRLKQEEVESLNGPITGSEIVAIINSLPTKKSPGPDGFTAEFYQRYKEELVPFLLKLFQSIEKEGILPNSFYEASIILIPKPGRDTTKKENFRPISLMNIDAKILNKILANRIQQHIKKLIHHDQVGFIPGMQGWFNIRKSINVIQHINRAKDKNHMIISIDAEKAFDKIQQPFMLKTLNKLGIDGTYFKIIRAIYDKPTANIILNGQKLEAFPLKTGTRQGCPLSPLLFNIVLEVLARAIRQEKEIKGIQLGKEEVKLSLFADDMIVYLENPIVSAQNLLKLISNFSKVSGYKINVQKSQAFLYTNNRQTESQIMGELPFTIASKRIKYLGIQLTRDVKDLFKENYKPLLKEIKEDTNKWKNIPCSWVGRINIVKMAILPKVIYRFNAIPIKLPMTFFTELEKTTLKFIWNQKRARIAKSILSQKNKARIKLEASLFKLYYKATVTETAWYWYQNRDIDQWNRTEPSEIMPHIYNYLIFDKPEKNKQWGKDSLFNKWCWENWLAICRKLKLDPFLTPYTKINSRWIKDLNVRPKAIKVLEENLGNTIQDIGMGKDFMTKTPKAMATKAKIDKWDIINLKSFCTAEETTIRVNRQPTEWEKNFAIYPSDKGLISRFYKELKQIYKKKTNNPIKKWAKDMNRHFSKEDIYAAKKHMKKCSSSLAIREMQIKTTMRYHLTPVRMAIIKKSGNNRCWRGCGEIGTLLHCWWDCKLVQPLWKSVWRFLRDLELEIPFDPAIPLLGIYLKDYKSCCYKDTCTQLRGGGGAQASCRYGHHGGRSGVLEPSSGSSSTSRHKHFSDEGRDGERLCSLKTPCRNCLSSECPLVSGIGGFLISLTSRMKPQTLAVSVTVLKDGVSGVCSFRCSDVSGASSFQWVRGLADFRSKAVLTPQM

SEQ ID NO: 41187 - protein, 154 aa, Homo sapiens
YFTDRLRARLAGTPLIMFGTIARSGVRIVSREPLNRRAILIIALSLAVGLGVSQQPLILQFAPEWLKNLLSSGIAAGGITAIVFSLAGHPALATNAQPMEAFLLHQTTFFQNLIRVKEAICSDQFNTTMFRGLQGNSACTKCNPRCLNELTPTE

SEQ ID NO: 41188 - protein, 50 aa, Homo sapiens
  misc_feature (1)...(50): Xaa = X or * as defined in Table 2
MQFCHTLREFALEYRTCRERVLQQQQKQATYRERNKTRGRMITETEKFSX

SEQ ID NO: 41189 - protein, 501 aa, Homo sapiens
  DOMAIN (78)..(120): 3 THREONINE--TRNA LIGASE domain identified by eMATRIX, accession number DM01242E, p-value=5.500e-39, raw score of 23.00
RDEVNGCIRLVYDMYSTFGFEKIVVKLSTRPEKRIGSDEMWDRAEADLAVALEENNIPFEYQLGEGAFYGPKIEFTLYDCLDRAWQCGTVQLDFSLPSRLSASYVGEDNERKVPVMIHRAILGSMERFIGILSEEFAGFFPTWLAPVQVVIMNITDSQSEYVNELTQKLSNAGIRVKADLRNEKIGFKNRSGELSHLPPINQSKPRNFPSAALPQVPQPTHLSQRPRASPKPPPPDPERVELSLEEHREMLEGFYEEISKGRKPTLILRTQLSVRVNAILASLESVKPLYTMALGLLVKYPDSALGQLRIESTVDGSRLYITGNGVLFQHVKFHAFLLYLGYTPQAAREVRIMQFCHTLREFALEYRTCRERVLQQQQKQATYRERNKTRGRMITETEKFSGVAGEAPSNPSVPVAVSSGPGRGDADSHASMKSLLTSRPEDTTHNRRSRDRHGPRGCQVCSAQPSLLRAVPVADMRALMTGKDCPPCPGKRLRGAELGPL

SEQ ID NO: 41190 - protein, 153 aa, Homo sapiens
  misc_feature (1)...(153): Xaa = X or * as defined in Table 2
ISRFRRRALSPKAESSLSSILPREKRSPSRTWILTPRRLFSLAISSKSAGNTLSSRIFKXKAXACKXRGRVSTRCRIFLALFIVTIKHRLMMRSTASNRQYSISIWTILPCWSARCFSIKIAGIPAEPPRYLLISPGILTGLKINFFTTVSFW

SEQ ID NO: 41191 - protein, 172 aa, Homo sapiens
MGLPWQVGMGAIFWGAIGLLLLTIFRVRYWMIANIPVSLRVGITSGIGLFIGMMGLKNAGVIVANPETLVSIGNLTSHSVLLGILGFFIIAILASRNIHAAVLVSIVVTTLLGWMLGDVHYNGIVSAPPSVMTVVGHVDLAGPIGNSLVGCPYFAILRRFSDGSGGLGRNQI

SEQ ID NO: 41192 - protein, 1162 aa, Homo sapiens
  DOMAIN (873)..(912): DNA mismatch repair proteins mutL / hexB / PMS1 proteins domain identified by eMATRIX, accession number BL00058B, p-value= 1.257e-33, raw score of 16.83
  DOMAIN (802)..(1139): DNA mismatch repair protein domain identified by PFam, accession name DNA_mis_repair, E-value=5.8e-43, PFam score of 156.2
MVWGMSPNKTPYQALSLHSAVPTTYSQADDDYSPPSKRPKANELPQPPVPEPANAGKRKVREFNFEKWNARITDLRKQVEELFERKYAEALGSTEAKAVPYQKFEAHPNDLYVEGLPENIPFRSPSWYGIPRLEKIIQVGNRIKFVIKRPELLTHSTTEVTQPRTNTPVKEDWNVRITKLRKQVEEIFNLKFAQALGLTEAVKVPYPVFESNPEFLYVEGLPEGIPFRSPTWFGIPRLERIVHGSNKIKFVVKKPELVISYLPPGMASKINTKALQSPKRPRSPGSNSKVPEIEVTVEGPNNNNPQTSAVRTPTQTNGSNVPFKPRGREFSFEAWNAKITDLKQKVENLFNEKCGEALGLKQAVKVPFALFESFPEDFYVEGLPEGVPFRRPSTFGIPRLEKILRNKAKIKFIIKKPEMFETAIKESTSSKSPPRKINSSPNVNTTASGVEDLNIIQVTIPDDDNERLSKVEKARQLREQVNDLFSRKFGEAIGMGFPVKVPYRKITINPGCVVVDGMPPGVSFKAPSYLEISSMRRILDSAEFIKFTVIRVFLKHSYTRIIHGCFPVTAQRLRQELQMLMTECLTWARNGSSKHPLSLAQKPEFLFHQLQSRDNAICPIAEQKAGKALGTTVMVSVPYEKMLRDQSAVVVQGLPEGVAFQHPENYDLATLKWILENKAGISFIINRPFLGPESQLGGPGMVTDAERSIVSPSESCGPINVKTEPMEDSGSHPSSTSNEVIEMELPMEDSTPLVPSEEPNEDPEAEVKIEGNTNSSSVTNSAAGVEDLNIVQVTVPEPAKAIKPIDRKSVHQICSGPVVLSLSTAVKKIVGNSLDAGATNIDLKLKDYGMDLIEVSGNGCGVEEENFEGLTLKHHTSKIQEFADLTRVETFGFRGKALSSLCALSDVTISTCHVSAKVGTRLVFDHDGKIIQKTPYPHPRGTTVSVKQLFSTLPVRHKEFQRNIKKVIARRIIDYRYDMPYVRETYQDSGLTFTIEQHEDLNCATLPLYFSKASVFTALQNMAKSTVALITTAARDRSSAGAGAAARAGRQKGGARQLQGERGRGSSAAEQQPRGERRSSRRATGAGGAAGVRCNKQLATQTPVPAAHAAARGCRTCSPPGGAPPVLLLLLLLLLLLPRGLGGRSYRQPGAREMQERGHPQD

SEQ ID NO: 41193 - protein, 236 aa, Homo sapiens
  misc_feature (1)...(236): Xaa = X or * as defined in Table 2
WGSRDNRDEIRNTLVLDTLRLQRVCAQRAFLVLFVLGKVTFEELNFTFILVIQNVRGDTVEEPTVVRDNHRTARELQQGVFQRAQGFDIQVVGWFVEQQHVAANLSRCRLVNTPTQQVRFSTATFRVIWRVTPTAGKLSGGFLFKMYGLPAAAIAIGTLLNQKTARKWAVLXSPPALTSFLTGITEPIEFSFMFVAPILYIIHAILAALFMWKFVPETKRKTLEELEALSNRIAAE

SEQ ID NO: 41194 - protein, 191 aa, Homo sapiens
MLSMEDVLEILRIKLVGVIPEDQSVLRASNQGEPVILDINADAGKAYADTVERLLGEERPFRFIEEEKKGFLKRLNQHRCVNVARGQNSNDEEAEDTQKYAVRSQITDAHQRFRVSDNHTCVFQPHHANEQTDTAGNTHTQTHRNVGYHPVANAENQDCAHPDLPRQAHRLYNDKSEERIQAHSGCQCNWQ

SEQ ID NO: 41195 - protein, 77 aa, Homo sapiens
  misc_feature (1)...(77): Xaa = X or * as defined in Table 2
WRKRCVKVRNLSPLCLPDRKLTLPCCSIAIRNCIAKLPVSXLWVALWGWVTGRLRLNLIFTLTRKRQKLSSSQGSRW

SEQ ID NO: 41196 - protein, 1450 aa, Homo sapiens
  DOMAIN (1084)..(1132): Sodium:galactoside symporter family proteins domain identified by eMATRIX, accession number BL00872B, p-value=2.364e- 36, raw score of 26.61
  DOMAIN (758)..(993): tRNA synthetases class I (C) domain identified by PFam, accession name tRNA-synt_1e, E-value=6.7e-169, PFam score of 574.5
MDSHGFGMASVRFICGTQDSHKELEQKLAAFLGMEDAILYSSCFDANGGLFETLLGAEDAIISDALNHASIIDGVRLCKAKRYRYANNDMQELEARLKEAREAGARHVLIATDGVFSMDGVIANLKGVCDLADKYDALVMVDDSHAVGFVGENGRGSHEYCDVMGRVDIITGLAVGFWQNLDELQEKAVIEREFRPGIETTEQFAMRRELAIEFSRVTESAALAGYKWLGRGDENTADGAAVNAMRIMLNQVNIDGTIVIGEGEIDEAPMLYIGEKVGTGRGDAVDIAVDPIEGTRMTAMGQANALSVLAVGDKGCFLNAPDMYMEKLIVGPGAKGTIDLNLPLADNLRNVAAALGKPLSELTVTILAKPRHDAVIAEMQQLGVRVFAIPDGDVAASILTCMPDSEVDVLYGIGGAPEGVVSAAVIQRIRWRHERSSAGAVMTSKCDNEENRRIGVAGSWHAAKRWASKPVSIAPEAYGASDTSRYQYSLILFDCGSTKIPLDHRHVFQGFKTHKWTSSLTLNYFLWRDRKGAISNFVSFLAMLVMIQLLLLLAYESLWPDAWHFLSIFSGSAWLMTLLWLNFGLMVNRIVQRVIFVTGYYGLTQGLLSVLRLFWGNLINFMANWRALKQVLQHGDPRRVAWDKTTHDFPSVTGDTRSLRPLGQILLENQVITEEQLDTALRNRVEGLRLGGSMLMQGLISAEQLAQALAEQNGHDWVTPNHHIQKTADDQSSDGCHDGHPPWVLLSYTYRIELGTQRANENGESFVAMVDRMIAEMHKDFDALNILRPDMEPRATHHIAEIIELTEQLIAKGHAYVADNGDVMFDVPTDPTYGVLSRQDLDQLQAGARVDVVDDKRNPMDFVLWKMSKEGEPSWPSPWGAGRPGWHIECSAMNCKQLGNHFDIHGGGSDLMFPHHENEIAQSTCAHDGQYVNYWMHSGMVMVDREKMSKSLGNFFTVRDVLKYYDAETVRYFLMSGHYRSQLNYSEENLKQAPGTHQHYCQILQHRKRHCAGQGFRFTRNRQIRFTSDHLFHRICRITSSKFNLHRRVFRAEAIQNRRQMAHIAPIFSLNILFLFVFNTTTPLQWLMASDVVDYEESRSGRRLDGLVFSTYLFSLKIGLAIGGAVVGWILAYVNYSASSSVQPVEVLTTIKILFCVVPVVLYAAHVHHAVALQASPHARAGRRITDRRHLTSPLRPTHRTRIRTLALSHRCRPPTYKEDKKVLFRSRLTTASGGYYQNFANNLNRFFLNLLAMFFTEEAFAVDLYASSVPDGRAANQPLSVITFRPPIEAPLPGAAVRRAVIGSPAQLNIPGNSEVFHLCRVMYLDKEPLFIDSSWIPLSRYPDFDEIYVEGSSTYQLFQERFDTRVVSDKKTIDIFAATRPQAKWLKCELGEPLFRISKIAFDQNDNRCTSPNSSAAPIAPSFYSTRLGLPKCCDHRREPPRLPCTAD

SEQ ID NO: 41197 - protein, 182 aa, Homo sapiens
KLLELRSKREAGMLERSSSRMVTCSQWAATRNPVVALPIYGFIERCLVPFGLLHIWNVPFQMQIGEYTNAAGQVFHGDIPRYMAGDPTAGKLSGGFLFKMYGLPASAIAIWHFVKPETRAKVGGIMIFAALTSFLTGITEPIEFSFMFVAPILYIIHAILAGWHSQSVFFWGCVTVRRSRTV

SEQ ID NO: 41198 - protein, 1276 aa, Homo sapiens
  DOMAIN (1011)..(1054): Transcriptional regulatory protein C terminal. domain identified by eMATRIX, accession number PF00486C, p-value=5.131e- 15, raw score of 20.21
  DOMAIN (305)..(358): tRNA synthetases class I (C) domain identified by PFam, accession name tRNA-synt_1e, E-value=2.5e-26, PFam score of 95.0
SIGMMGLKNAGVIVANPETLVSIGNLTSHSVLLGILGFFIIAILASRNIHAAVLVSIVVTTLLGWMLGDVHYNGIVFAPPSVMTVVGHVDLAGSFNLGLAGVIFSFMLVNLFDSSGTLIGVTDKAGLADEKGKFPRMKQALYVDSISSVTGSFIGTFSVTAYIESSSGVSVGGRTGLTAVVVGLLFLLVIFLSPLAGMVPGYAAAGALIYVGVLMTSSLARVNWQDLTESVPAFITAVMMPFSFSITEGIALGFISYCVMSILIRFRGSLESWYPGRRLLALGLITIFGLVNGMTLLPEEKVLDVPTDPTYGVLSRQDLDQLQAGARVDVVDDKRNPMDFVLWKMSKEGEPSWPSPRTLDNDTRYGRFSQFLSQVLTCTSARQILQRVDTLPLYLHAYAFHLNMRLERVLPADLLDIASENNLRGVKIHVLDGERFSLGNMDDKELSAFGDKARRLNLDIHIETSASDKASIDEAVAIALKTGASSVRFYPRYEGNLRDVLSIIANDIAYVRETYQDSGLTFTIEQHEDLKSHELVSLVSPSPDLGKRGQAPSCHACSSPVRPNSCAVAAQVYIGSEYEHQSIKNIIQLVDAGMKVGMPTMAVTGIWCAISVTFSLATRIAAEMGAQIIKTYYVEKGFERIVAGCPVPIVIAGGKKLPEREALEMCWQAIDQGASGVDMGRNIFQSDHPVAMMKAVLAVVNMTPFVGLSINSRQNSKIPLPDRVNSGSCARTRGILYESAADLPAVCLTNGFHHRFTNNMVRLAERVLEILLTILKAVVILLVVVTCGAFMSSAKSHLLPAPPPKRREKHQPAFKVDVKLSGITKRFMSAKRPCVRNTPILTSCPSCSATDALLEGQEVFANLQEGMSQRWLFFPSGNRHKIDQQHLFTFEHAFGEGSGFIDFALFVGGMLFIKIVYQRERQPISSLEVRDDIERRAYEIALVSLEVEPDEREAYELFMEKRFGDLVDRRRAKNGDNEYMAWDMTLGWIIWQQRAGIHFSTMSQQEVLPVIIMTAHSDLDAAVSAYQQGAFDYLPKPFDIDEAVALVERAISHYQEQQQPRNVQLNGPTTDIIGEAPAMQDVFRIIGRLSRSSISVLINGESGTGKELVAHALHRPVRARQPVKNGAPDGEYLPDVPQRRQMNADNVQAVEQILTELTFLHSLFEIQVFHGDIPRYMAGDPTAGKLSGGFLFKMYGLPAAAIAIWHSAKPENRAKVGGIMISAALTSFLDRYHRADRVLLHVRSADQLQAFDETILASGIVPRTGSQGLRKWRFSA

SEQ ID NO: 41199 - protein, 46 aa, Homo sapiens
VMRATAANLFLDSGLFQECQQEPQQVTDTHPYHCPIPKNVTPSPLK

SEQ ID NO: 41200 - protein, 398 aa, Homo sapiens
MQRNGRNNMAEHRGGSGNFAEDREKASDAGRKGVISLEKNMNMKTIEDVFIHLLSDTYSAEKQLTRALAKLRRQHQMKIKSAFHRTRETHDRLTFDPQILSAFGVSAKNPTDGTPVVVKNLLSVEGLHWFLPNVIKNFSGFAPLGAILALVLGAGLAERVGLLPALMVKMASHVNARVGCGFTANLLIVTTDVLLSGISTEAAAAFNPQMHVSVIDNWYFMASSVVVLTIVGGLITDKIIEPRAGSVVLDSVPDNALVVGEKARVKGLASHFVYGYGKGGKESVSHQNYPQVIKHTPRMTAMANIALFRLFNRDLFGNFNELYRTITRTAGPVVLHFHVLHSYWLNLKSVVRFCEKVKNHKPDVTLVWTLHDHWSVTGRAPLPTVAKAGKQAARNARP

SEQ ID NO: 41201 - protein, 254 aa, Homo sapiens
MCSEKVAMCCDDDDDDDDDDDDDDDDDDDYSCSHGFWDFSYTWNTSIPQGHLGMGSPIKGLVEIRDKLGDRTQRVYIQRITGNGLEFENPCKQFRGLTRMYIRRLTRLSVQWYMVALERPVLQKYRYRGSKAHETSHSMSTVTSSNEKQDNTRIDTQGATNRVATLRHRETVLANEVAPYAATDNVLAASTDVGDVSWKLPVAQCFSPCFAVGTPLHTWQSGLLQECQQEHQQVTDTQPYHCPIPKNVTPSPLK

SEQ ID NO: 41202 - protein, 136 aa, Homo sapiens
LFEFTLDVKVRESPILFRDESMRTACSPDGLCSNGFGLELKCPFTSRDFMKFRLGGFEAIKSAYMAQVQYSMWVTGKDAWFFANYDPRMKREGIHHVVVERDPQYMSDFNEMVPEFIEKMDEALAEIGLTVRELGI

SEQ ID NO: 41203 - protein, 219 aa, Homo sapiens
  DOMAIN (31)..(78): DNA polymerase III beta subunit domain identified by eMATRIX, accession number PF00712A, p-value=8.085e-20, raw score of 26.49
  DOMAIN (28)..(219): DNA polymerase III beta subunit domain identified by PFam, accession name DNA_pol3_beta, E-value=5.1e-89, PFam score of 309.2
  misc_feature (1)...(219): Xaa = X or * as defined in Table 2
ARGKKPPRRGKEDFWDLSIATRVSVNPIKFPVEAXPFLKPLQQVSGPLGGRLPLPIPGNLLLQVADGTLSLTGTDLEMEMVARVALVQPHEPGATTVPARKFFDICRGLPEGAEIAVQLEGERMLVRSGRSRFSLSTLPAADFPNLDDWQSEVEFTLPQATMKRLIEATQFSMAHQDVRYYLNGMLFETEGEELRTVATDGHRLAVCSMPIGQSLPSHS

SEQ ID NO: 41204 - protein, 234 aa, Homo sapiens
  DOMAIN (171)..(215): DNA polymerase III beta subunit domain identified by eMATRIX, accession number PF00712E, p-value=4.462e-33, raw score of 24.83
  DOMAIN (51)..(231): DNA polymerase III beta subunit domain identified by PFam, accession name DNA_pol3_beta, E-value=1.8e-97, PFam score of 337.2
  misc_feature (1)...(234): Xaa = X or * as defined in Table 2
WRGQRCLASVFPRHPGAEGRGRPVFRAETIFLXXSRRGLARTGRRKLPVKLKAADFPNLDDWQSEVEFTLPQATMKRLIEATQFSMAHQDVRYYLNGMLFETEGEELRTVATDGHRLAVCSMPIGQSLPSHSVIVPRKGVIELMRMLDGGDNPLRVQIGSNNIRAHVGDFIFTSKLVDGRFPDYRRVLPKNPDKHLEAGCDLLKQAFARAAILSNEKFRGVRLYVSESQLKSRQ

SEQ ID NO: 41205 - protein, 93 aa, Homo sapiens
  misc_feature (1)...(93): Xaa = X or * as defined in Table 2
VRGFPSGAEQLYGXSVSLLILLPNLSNSGRTGFPVAPLPYSKSPSDFMSLLISTVPGSQLXQPIQRAELVCTTCSPIVSAPTGQAPTQGAFSH

SEQ ID NO: 41206 - protein, 589 aa, Homo sapiens
  DOMAIN (501)..(544): RecF protein domain identified by eMATRIX, accession number BL00617A, p-value=2.456e-14, raw score of 25.53
  DOMAIN (387)..(505): DNA polymerase III beta subunit domain identified by PFam, accession name DNA_pol3_beta, E-value=3.3e-46, PFam score of 166.9
  misc_feature (1)...(589): Xaa = X or * as defined in Table 2
MSESNKQQAVNKLTEIVANFTAMISTRMPDDVVDKLKQLKDAETSSMGKIIYHTMFDNMQKAIDLNRPACQDTGEIMFFVKVGSRFPLLGELQSILKQAVEEATVKAPLRHNAVEIFDEVNTGKNTGSGVPWVTWDIIPDNDDAEIEVYMAGGGCTLPGRSKVLMPSEGYEGVVKFVFENISTLAVNACPPVLVGVGIATSVETAAVLSRKAILRPIGSRHPNPKAAELELRLEEGLNRLGIGPQGLTGNSSVMGVHIESAARHPSTIGVAVSTGCWAHRRGTLLRVMKKILTTPIKAEDLQDIRVGDVIYLTGTLVTCRDVCHRRLIELKRPIPYDLNGKAMFLYLYGMLFETKVKNCARGNRRPPSGGLFNANWSIFAKPFGDRVIELMRMLDGGDNPLRVQIGSNNIRAHVGDFIFTSKLNPDKHLEAGCDLLKQAFARAAILSNEKFRGVRLYVSENQLKITANNPEQEEAEEILDVTYSGAEMEIGFNVSYVLDVLNALKWRKRPHDADRFGFQRANGSGKTSVLEAIYTLGHGRAFRSLQIGRVIRHEQEAFVLHGRLQGEERETAIGLTKDKQGDSKVRIDX

SEQ ID NO: 41207 - protein, 391 aa, Homo sapiens
  DOMAIN (217)..(261): DNA polymerase III beta subunit domain identified by eMATRIX, accession number PF00712E, p-value=4.462e-33, raw score of 24.83
  DOMAIN (141)..(348): DNA polymerase III beta subunit domain identified by PFam, accession name DNA_pol3_beta, E-value=1.2e-104, PFam score of 361.0
MKSLIIVNPADCIGCRTCEVACVVAHPSEQELNADVFLPRLKVQRLDSIKRFWEQMMRIVTAAVMASTLAVSSLSHAAEVGSGDNWHPGEELTQRSTQSHMFDGISLTEHQRQQMRDLMQQARHEQPPVNVSELETMHFPGMLFETEGEELRTVATDGHRLAVCSMPIGQSLPSHSVIVPRKGVIELMRMLDGGDNPLRVQIGSNNIRAHVGDFIFTSKLVDGRFPDYRRVLPKNPDKHLEAGCDLLKQAFARAAILSNEKFRGVRLYVSENQLKITANNPDQEEAEEILDVPYSGAEMEIGFNVSYVMDVLNALKCENVRMMLTDSVSSVQIEDAASQSAAYVGMPMRLEGSPPLGNPEFQKISSPCALYIALCSKARHHTGRYLGLCGL

SEQ ID NO: 41208 - protein, 132 aa, Homo sapiens
LCAWLRMRGHANGTAALAESRRKMQARRRLKNRIALTLSMATMAFGLFWLIWILMSTITRGIDGMSLAPFTEMTPPPHTERGGLANALSWKRRNVDISNNIETWILRARATTSLSSSDSSSIPRMAMMSFSS

SEQ ID NO: 41209 - protein, 504 aa, Homo sapiens
  DOMAIN (138)..(215): Binding-protein-dependent transport system domain identified by PFam, accession name BPD_transp, E-value=3.4e-07, PFam score of 37.4
MAFGLFWLIWILMSTITRGIDGMSLALFTEMTPPPNTEGGGLANALAGSGLLILWATVFGTPLGIMAGIYLAEYGRKSWLAEVIRFINDILLSAPSIVVGLFVYTIVVAQMEHFSGWAGVIALALLQVPIVIRTTENMLKLVPYSLREAAYALGTPKWKMISAITLKSAVVGNMTRILLRMAPIVVKTAPLLFTALSNQFWSTDMMQPIANLPVTIFKFAMSPFAEWQQLAWAGVRNLNFYYGKFHALKNINLDIAKNQVCVCYNQCTESLVNGLYANAAHLVSVGQRSTGNSSVIKARQGSSIRPMIVKYSALCLCRMRSERFIRRTKHRKFDRLQCTCRPDKRSASGNLAFVISLRPVPLVAVVFALFAAFPMFSDVSIQLRHFIFANFLPATGDVIQRYIEQFVANSNKMTAVGACGLIVTALLLMYSIDSALNTIWRSKRARPKIYSFAVYWMILTLGPLLAGASLAISSYLLSKQWAIDIDSVNRLGAIILTALITGDT

SEQ ID NO: 41210 - protein, 116 aa, Homo sapiens
  misc_feature (1)...(116): Xaa = X or * as defined in Table 2
WYACDQCQTCLPDHAPECAVAXAKTCCTAIETGTYRQSGRERKQSAMVLXRVRVLLXXRRETACHVRAGLLXSXGTALGGHYRRLQQXNSTGRHAGSGGTPLRQRSSVVSSGVADG

SEQ ID NO: 41211 - protein, 74 aa, Homo sapiens
  misc_feature (1)...(74): Xaa = X or * as defined in Table 2
LRFCLVFNILSRYSLISTVQKFSPAMLNGTLPLENILHXLRNITAIMNLVIFHGLSAXSVCYIPGRGSVMSDRV

SEQ ID NO: 41212 - protein, 184 aa, Homo sapiens
TIIRQPLHWRRRKIVAEAAFHRSQHDVLYWFTVEAAVSDRPVQCLTITAVQRERDTQSLSVITAELEPVRAPSLIAFFHGHSGGENHPSEQPDHPRQVAHLRRQYRPHQRTCSGNGRKMVTEQHFLVRRHIVQPVVMAHRWRHTRRVNRQHIFGDIQPIKTVSDQIDTDRRHHNPQRVDLFPTI

SEQ ID NO: 41213 - protein, 139 aa, Homo sapiens
  misc_feature (1)...(139): Xaa = X or * as defined in Table 2
RIMVHATGLMKHASSPGCWDLNRRTRRCGVRRVTEXQRASXKRXSVTTSCIMPKPDGLTAAKNLAEAFEHYNEWHPHSGTRGRRARFSVRATYAAGRLATIPGYRGGPLGLMCGQPNRKPTDGANERLTMIRAATAMSE

SEQ ID NO: 41214 - protein, 241 aa, Homo sapiens
  DOMAIN (79)..(99): w LOW TRANSPOSASE SAPA 12K domain identified by eMATRIX, accession number DM00475B, p-value=1.300e-15, raw score of 12.12
  DOMAIN (12)..(105): Transposase domain identified by PFam, accession name Transposase_8, E-value=3.2e-38, PFam score of 140.4
  misc_feature (1)...(241): Xaa = X or * as defined in Table 2
MIDVLGPEKRRRRTTQEKIAIVQQSFEPGMTVSLVARQHGVAASQLFLWRKQYQEGSLTAVAAGEQVVPASELAAAMKQIKELQRLLGKKTMENELLKEAVEYGRAKKWIAHAPLLPGDGESQTPNTASRVLPFSSTGAPSQAIMQPGAAQATMSIIVPHTSSLAAILTHIHQSVQVGFQVMSSVTITPAQQAHSRHADLTVQLAPATQSFMHPHWWHSPQGHSPSTRQSSNDHHPHHPAX

SEQ ID NO: 41215 - protein, 871 aa, Homo sapiens
  DOMAIN (619)..(662): GLYCINE DEHYDROGENASE DECARBOXYL domain identified by eMATRIX, accession number PD00545E, p-value=1.000e-40, raw score of 16.16
  DOMAIN (340)..(420): Binding-protein-dependent transport system domain identified by PFam, accession name BPD_transp, E-value=1.7e-22, PFam score of 88.2
MAKEISSELLNTILTRVGGPGNIASCGNCMTRLRLGVHDSSLVDPNIKTLEGVKGVILTSDQVQVVFGPGKAHRAAKAMSELLGEAPVQDAAEIAAQNKRQLKAKQTSGVQQFLAKFATIFTPLIPGFIAAGLLLGIATLIATVMHVPADAQGTLPDALNFMKVLSKGYRAHSRIQGTELTTVDGCKRFFTTQPGVVDRALFGMNGLLHCRTNKFHIGTEIPGSAHTARNCANIKIRQWLTLLSAFVASIFNGVFGLLMAWILTRYRFPGRTLLDALMDLPFALPTAVAGLTLASLFSVNGFYGEWLAKFDIKVTYTWLGIAVAMAFTSIPFVVRTVQPVLEELGPEYEEAAETLGATRWQSFCKVVLPELSPALVAGVALSFTRSLGEFGAVIFIAGNIAWKTEVTSLMIFVRLQEFDYPAASAIASLHVILRRTDDWMDGRRSRHTDDTDVLLRIHHVIGELPTYGYRRVWALLRRQAELDGMPAINAKRVYRIMRQNALLLERKPAVPPSKRAHTGRVAVKESNQRWCSDGFEFCCDNGERLRVTFALDCCDREALHWAVTTGGFNSETVQDVMLGAFFNVLLADTPGLDIDTLDKDVAHDSRSIQPAMLRDDEILTHPVFNRYHSETEMMRYMHSLERKDLALNQAMIPLGSCTMKLNAAAEMIPITWPEFAELHPFCPPEQAEGYQQMIAQLADWLVKLTGYDAVCMQPNSGAQGEYAGLLAIRHYHESRNEGHRDICLIPASAHGTNPASAHMAGMQVVVVAGSSQTYVEGRSHVAYPSLRRYFAAMASGHAHSAAKSLWLQTLFPARQNNCRGVYVIRFRRQVSTYRWRSPAAAPAPSLRYRHCFATKTRFYQYRGAPNIRART

SEQ ID NO: 41216 - protein, 387 aa, Homo sapiens
  DOMAIN (170)..(222): ELEMENT TRANSPOSABLE INSERTION PROTEIN TRANSPOSITION DNA domain identified by eMATRIX, accession number PD02455C, p-value= 5.253e-11, raw score of 29.23
  DOMAIN (97)..(252): Integrase core domain identified by PFam, accession name rve, E-value=4.1e-27, PFam score of 97.8
MDQCPYKRGARELLCPFHHVETQREGAISEKVGPHQIPNLLDLGHDFDDWMDGRRSRHTDDTDVLLRIHHVIGELPTYGYRRVWALLRRQAELDEWTVKESNQRWCSDGFEFCCDNGERLRVTFALDCCDREALHWAVTTGGFNSETVQDVMLGAVERRFGNDLPSSPVEWLTDNGSCYRANETRQFARMLGLEPKNTAVRSPESNGIAESFVKTIKRDYISIMPKPDGLTAAKNLAEAFEHYNEWHPHRANPDANVVSEDVLRESVGKSVVNLIHGVRDMAAIRQLKATHTDSVSSEQVDNVRRMLLAMVDDFRCVVIKLAERMAHLREVKDAPEDERVLAAKECTNIYAPLANRLGIGQLKWELEDYCFRYLHPYRIQTNCQTAA

SEQ ID NO: 41217 - protein, 637 aa, Homo sapiens
  DOMAIN (272)..(320): Sodium:galactoside symporter family proteins domain identified by eMATRIX, accession number BL00872B, p-value=3.294e- 23, raw score of 26.61
  DOMAIN (119)..(382): Sodium:galactoside symporter family domain identified by PFam, accession name Na_Galacto_symp, E-value=3.3e-10, PFam score of 46.5
MAELFDIIDPIAIAEVREALTRTLATELADELLAIYNANYQSEYRVEHEDIAKRTLRNACLRFLAFGETHLADVLVSKQFHEANNMTDALAALSAAVAAQLPCRDALMQEYDDKWHQNGLVMDKWFILQATSPAANVLETVRGLLQHRSFTMSNPNRIRSLIGAFAGSNPAAFHAEDGSGYLFLVEMLTDLNSRNPQVASRLIEPLIRLKRYDAKRQEKMRAALEQLKGLENLSGDLTRSAIANASLTSLRPHLEDAYISSQRNHLENVANALDKHLQYNVDYGEWCNGKRLTGISFAGTLFVLKLGLAFGGALIGWMLAYGGYDAAEKAQNSATISIIIALFTIVPAICYLLSAIIAKRYYSLTTHNLKTIMEQLAQGKRRCQQQFTSQELHVILRRTDDWMDGRRSRHTDDTDVLLRIHHVIGELPTYGYRRVWALLRRQAELDGMPAINAKRVYRIMRQNALLLERKPAVPPSKRAHTGRVAVKESNQRCYCCDNGERLRVTFALDCCDREALHWAVTTGGFNSETVQDVMLGAVERRFGNDLPSSPVEWLTDNGSCYRANETRQFARMLDLNLHELGRPAKRVVVISYSGDRPGNNRGMDAKVESGMSVGNTLYIRLATTGCWRRIGGMTPVP

SEQ ID NO: 41218 - protein, 114 aa, Homo sapiens
  misc_feature (1)...(114): Xaa = X or * as defined in Table 2
RIMVHATGLMKHASSPGCWDLNRRTRRCGVRRVTEXQRASXKRXSVTTSCIMPKPDGLTAAKNLAEAFEHYNEWHPHDGPEHSVFMPSRXAPMTRXKIYSSPPYRSSQRAHRHA

SEQ ID NO: 41219 - protein, 97 aa, Homo sapiens
  misc_feature (1)...(97): Xaa = X or * as defined in Table 2
NPSQLWEAAPPQWKWIQGAGKVSCQLSRAADQLGRQHHISDPCFSIVPLILXFAAYFPINPAVLKLAPVALYADAIRYNARTPLQGSLLPLTRLVWA

SEQ ID NO: 41220 - protein, 353 aa, Homo sapiens
  DOMAIN (250)..(293): PPGPP GTP PYROPHOSPHOKINASE ATP: domain identified by eMATRIX, accession number PD02309A, p-value=5.091e-32, raw score of 27.18
  misc_feature (1)...(353): Xaa = X or * as defined in Table 2
RIMVHATGLMKHASSPGCWDLNRRTRRCGVRRVTEXQRASXKRXSVTTSCIMPKPDGLTAAKNLAEAFEHYNEWHPHRANPDANVVSEDVLRESVGKSVVNLIHGVRDMAAIRQLKATHTDSVSSEQVDNVRRMLLAMVDDFRCVVIKLAERIAHLREVKDAPEDERVLAAKECTNIYAPLANRLGIGQLKWELEDYCFRYLHPTEYKRIAKLLHERRLDREHYIEEFVGHLRAEMKAEGVKAEVYGRPKHIYSIWRKMQKKNLAFDELFDVRAVRIVAERLQDCYAALGIVHTHYRHLPDEFDDYVANPKPNGYQSIHTVVLGPGGKTVEIQIRTKQMHEDAELGVAAHWEI

SEQ ID NO: 41221 - protein, 484 aa, Homo sapiens; identical to SEQ ID NO: 40780
  DOMAIN (88)..(108): w LOW TRANSPOSASE SAPA 12K domain identified by eMATRIX, accession number DM00475B, p-value=1.300e-15, raw score of 12.12
  DOMAIN (28)..(114): Transposase domain identified by PFam, accession name Transposase_8, E-value=5.2e-24, PFam score of 93.2
  misc_feature (1)...(484): Xaa = X or * as defined in Table 2

SEQ ID NO: 41222 - protein, 128 aa, Homo sapiens
  misc_feature (1)...(128): Xaa = X or * as defined in Table 2
RIMVHATGLMKHASSPGCWDLNRRTRRCGVRRVTEXQRASXKRXSVTTSCIMPKPDGLTAAKNLAEAFEHYNEWHPHECAGLSLATGISAAAGLXWARRSFIQRDSRDPRYRAPIRIHPLPGANHLRQ

SEQ ID NO: 41223 - protein, 524 aa, Homo sapiens
  DOMAIN (496)..(508): GALACTOKINASE FAMILY SIGNATURE domain identified by eMATRIX, accession number PR00473B, p-value=1.931e-12, raw score of 14.66
  DOMAIN (87)..(180): Transposase domain identified by PFam, accession name Transposase_8, E-value=3.2e-38, PFam score of 140.4
MINMLKDLVENVDHMHEHIQNFSRDGNDSKKNKLDTLDMKNMLLWMRNSFNCLISRLEIEERISKLDYRLVIGEQMIDVLGPEKRRRRTTQEKIAIVQQSFEPGMTVSLVARQHGVAASQLFLWRKQYQEGSLTAVAAGEQVVPASELAAAMKQIKELQRLLGKKTMENELLKEAVEYGRAKKWIAHAPLLPGDGERTDDWMDGRRSRHTDDTDVLLRIHHVIGELPTYGYRRVWALLRRQAELDGMPAINAKRVYRIMRQNALLLERKPAVPPSKRAHTGRVAVKESNQRWCSDRFEFCCDNGERLRVTFALDCCDREALHWAVTTGGFNSETVQDVMLGAVERRFGNDLPSSPVEWLTDNGSCYRANETRQFARMLGLEPKNTAVRSPESNGIAESFVKTIKRDYISIMPKPDGLTAAKNLAEAFEHYNEWHPHSALGYRSPREYLRQRACNGGKSSCAPRDDRKVRVMAADYENQLDEFSLDAPIVAHENYQWANYVRGVVKHLQLRNNSFGGVDMRSAAI

SEQ ID NO: 41224 - protein, 189 aa, Homo sapiens
QDMQNLLVLRETSVKPEYPGLKVPEAFRRIQGRKGEPGEGAYVYRSAFSVFQKPRFSCALGGAIAASWAGGGAPSPCGRRAELPWGPGPVGVAQTVCPERPRRERRLRGEREEEAADKVMARRWRKSRRRKRKEMEERMSPEETEGTNFDFAGEAVGQAERKGPAFSAAEESFHEEEKRRRKEQSDLTF

SEQ ID NO: 41225 - protein, 715 aa, Homo sapiens
  DOMAIN (625)..(650): XYLOSE ISOMERASE SIGNATURE domain identified by eMATRIX, accession number PR00688F, p-value=2.742e-25, raw score of 17.38
  DOMAIN (564)..(676): Xylose isomerase domain identified by PFam, accession name Xylose_isom, E-value=4.1e-67, PFam score of 236.4
MTALAMALGLACASSWAAELAKPLTLDQLQQQNGKAIDTRPSAFYNGWPQTLNGPSGHELAALNLSASWLDKMSTEQLNAWIKQHNLKTDAPVALYGNDKDVDAVKTRLQKAGLTHISILSDALSEPSRLQKLAHFEQLVYPQWLHDLQQGLSSNGTWALSDSDLCISHMSSAPFYQKIGSLFDHPRRVSQMVGRNGGHVCITSAPFGVQSLKVTESPVCNDPCTKCLWMVGKLVNIWVHAAFSVFFPRIIRKQQPGCWQKQQGRRVRAYYRRRSRQGCRRCKGRVAVKESNQRWCSDGFEFCCDNGERLRVTFALDCCDREALHWAVTTGGFNSETVQDVMLGAVERRFGNDLPSSPVEWLTDNGSCYRANETRQFARMLGLEPKNTAVRSPESNGIAESFVKTIKRDYISIMPKPDGLTAAKNLAARFGAYDYRNCKESQYSPPESSTAAGRVNTQAIRMLVTVLRCKPPPSTTIVPATEEEIVATRRQPIIVPIPNASATAMMIHTGAYSMVLCQTRQAYRHSAIKITLMQAVNRQHQGNNREYRKWHNGAKQRCETGRQRKLLQPMEATHKLGGENYVLWGGREGYETLLNHHLRQEREQLGRFMQMVVEHKHKIGFQGTLLIEPKPQEPTKHQYDYDAATVYGFLKQFGLEKEIKLNIEANHATLAVCTYQMHSLQKAQDIARSILERDVRINSNEELALPKEKLQELHI

SEQ ID NO: 41226 - protein, 149 aa, Homo sapiens
AHRRATMTIHKKGQAHWEGDIKRGKGTVSTESGVLNQQPYGFNTRFEGEKGTNPEELIGAAHAACFSMALSLMLGEAGFTPTSIDTTADVSLDKVDAGFAITKIALKSEVAVPGIDASTFDGIIQKAKAGCPVSQVLKAEITLDYQLKS

SEQ ID NO: 41227 - protein, 300 aa, Homo sapiens
  misc_feature (1)...(300): Xaa = X or * as defined in Table 2
ANGARLALPPLGTFQGRQLRRRRPRWRRRRPGEASGPVMRLRGPRPGASAQPWDGGSQVARXWCPFPSPQGWDGGSQGGQGDGARFRTHRAKVQQDGDGRXDEADGVHRHAPLQGRLVLVQVGVADEREDDAGNEGLQHLQQPGYGGHIASDLAGPGPGPGHFGGVSHTRDAGEEGGGDGVVPRTAVGQELDIGGGVDDGGREAEEGRIAGEGDGEVAPRQGEAGLEPAQLHDEDDQGHGEAEAPGEHGPVAHGPRPGAHASHQREGHAGRHQLQQAKETQGLCQGPRGPHDHGGPQARR

SEQ ID NO: 41228 - protein, 151 aa, Homo sapiens
  misc_feature (1)...(151): Xaa = X or * as defined in Table 2
NPLPRLQLRRQLHLPSVRNCCQTRRCGRXHRQRLRQXARRKLVRSVYFGSCLRQLLREEWKXYXRVXVLGWYSAVSTSSLPFDYCFLPNSDGYRRVVDPGSLSGHPFLYQRYGWQHDDVHQPDLGLGPPGSLHPDPACFRCVLRNCGNLLA

SEQ ID NO: 41229 - protein, 943 aa, Homo sapiens
  DOMAIN (565)..(600): PROTEIN REGION YCF24 CHLOROPLAST LPP-AROD INTERG domain identified by eMATRIX, accession number PD02360C, p-value=1.851e- 14, raw score of 19.22
  DOMAIN (186)..(279): Transposase domain identified by PFam, accession name Transposase_8, E-value=3.2e-38, PFam score of 140.4
  misc_feature (1)...(943): Xaa = X or * as defined in Table 2
RDGRKPLQPDAARNCGGSQSQRSGSRKRRGDRRITLMSLKTRKANRWAXSFRRKMAAISTPRTDIACAKYRYETLHADRVLYYIDSRQHQHLMQAWAIVRKAGYVPESVPLEHHMFGMMLGKDGKPFKTRAGGTVKLADLLDEALERARRLVAERTRYSAKSWKTVFRLVIGEQMIDVLGPEKRRRRTTQEKIAIVQQSFEPGMTVSLVARQHGVAASQLFLWRKQYQEGSLTAVAAGEQVVPASELAAAMKQIKELQRLLGKKTMENELLKEAVEYGRAKKWIAHAPLLPGDGERTDDWMDGRRSRHTDDTDVLLRIHHVIGELPTYGYRRVWALLRRQAELDGMPAINAKRVYRIMRQNALLLERKPAVPPSKRAHTGRVAVKESNQRWCSDGFEFCCDNGERLRVTFALDCCDREALHWAVTTGGFNSETVQDVMLGARRWRIRYFRRWTAPYIEVITSEQMMDAYSSVGMPINYPHWSFGKKFIETERLYKHGQQGLAYEIVINSNPCIAYLMEENTITMQALVMAHACYGHNSFFKNNYLFRSWTDASSIVDYLIFARKYITECEELTSRDWIFYLRSRGINQQDAQQMIIYAFAAELTEALRDEGLKQQVLARIGQRLPGGLGPSDPVRYRNQDDHELQITHGNKILCGIVWKPVILSDDMVFKKNDVGYPQRNLTSAETHFALGKQQGPRTAEQPVRQWQRWPTYDQTHGETQPRDQSDKSQEARTPRNTERRKTEQPPDREAQNRGHKKKQKQQKRPNKKKKTRQEHTNRREQETQNATTQTNGKNKRPENEEPARRYAQPQEQQTKDRTKKHEKRKRTQQRKKKTKTKQTKGTTKTTRERFKASRTRPMKKDATSAQNKETTTSIHRNRDRTRNDKEEESKIGGKREIAEKTQRTEDTTHKTPRRQRREQKPTRNNNDNRIWCQKCCIEWCLKL

SEQ ID NO: 41230 - protein, 155 aa, Homo sapiens
  DOMAIN (93)..(117): Cyclic nucleotide-binding domain proteins domain identified by eMATRIX, accession number BL00888B, p-value=2.969e-12, raw score of 14.79
  DOMAIN (87)..(154): Cyclic nucleotide-binding domain identified by PFam, accession name cNMP_binding, E-value=0.0022, PFam score of 24.7
  misc_feature (1)...(155): Xaa = X or * as defined in Table 2
RIMVHATGLMKHASSPGCWDLNRRTRRCGVRRVTEXQRASXKRXSVTTSCIMPKPDGLTAAKNLAEAFEHYNEWHPHNPTLEWFLSHCHIHKYPSKSTLIHQGEKAETLYYIGKGSVAVLIKDEEGKEMILSYLNQGDTIGDLGLFEEGQERSAW

SEQ ID NO: 41231 - protein, 61 aa, Homo sapiens
WLPFGLSHHNSPHPTSWGANGGFCQLLSMSVLIMHSGTLGAHWDFSPVIGLEANRGVGDGS

SEQ ID NO: 41232 - protein, 287 aa, Homo sapiens
  DOMAIN (60)..(261): Transposase domain identified by PFam, accession name Transposase_15, E-value=7.3e-101, PFam score of 348.5
  misc_feature (1)...(287): Xaa = X or * as defined in Table 2
MSHQLTFADSEFSSKRRQTRKEIFLSRMEQILPWQNMVEVIEPFYPKAGNGRRPYPLETMLRIHCMQHWYNLSDGAMEDALYEIASMRLFARLSLDSALPDRTTIMNFRHLLEQHQLARQLFKTINRWLALGVMMTQGTLFDATIIEAPSSTKNKEQQRDPEMHQTKKGNQWHFGMKAHIGVDAKSGLTHSLVTTAANEHDLNQLGNLLHGEKQFVSAMPATKEPQREELAEVDVDLLIAERPGKVKTLKTESAQGTKRPSTSNTXKPASVPGWSTRFASSSGSSAS

SEQ ID NO: 41233 - protein, 590 aa, Homo sapiens
  DOMAIN (240)..(260): w LOW TRANSPOSASE SAPA 12K domain identified by eMATRIX, accession number DM00475B, p-value=1.300e-15, raw score of 12.12
  DOMAIN (173)..(266): Transposase domain identified by PFam, accession name Transposase_8, E-value=3.2e-38, PFam score of 140.4
  misc_feature (1)...(590): Xaa = X or * as defined in Table 2
XIQQNKGLPKPEFRFKGQSTKSDSAEDYLLWKRLQGVSAACPAPSYAAHQIEHLSAKLQKIDEQLLAIQNIAENIEQDFPKPEMLDLHCDKLLSMQIENLFAVSPGERFSFSYFMDKAVLQCSKIHEDIIDDLIIKDGVSSEELGLTEQAMGTSRLVIGEQMIDVLGPEKRRRRTTQEKIAIVQQSFEPGMTVSLVARQHGVAASQLFLWRKQYQEGSLTAVAAGEQVVPASELAAAMKQIKELQRLLGKKTMENELLKEAVEYGRAKKWIAHAPLLPGDGERTDDWMDGRRSRHTDDTDVLLRIHHVIGELPTYGYRRVWALLRRQAELDGMPAINANTSLRVTFALDCCDREALHWAVTTGGFNSETVQDVMLGSVERRFGNDLPSSPVEWLTDNGSCYRANETRQFARMLGLEPKNTAVRSPESNGIAESFVKTIKRDYISIMPKPDGLTAAKNLAEAFEHYNEWHPPSALGYRSPREYLGQRVVLGMPSVADHLQRFSAHRYAGFHAHRSQQKHVHAACCNRARRDTPPTGSPAVDLPPGRQHALTVPRWLSRRDIDRDAAGQRFHSSLPQLQVLREQPFVQREQK

SEQ ID NO: 41234 - protein, 353 aa, Homo sapiens
  DOMAIN (72)..(124): ELEMENT TRANSPOSABLE INSERTION PROTEIN TRANSPOSITION DNA domain identified by eMATRIX, accession number PD02455C, p-value= 5.253e-11, raw score of 29.23
  DOMAIN (34)..(164): Integrase core domain identified by PFam, accession name rve, E-value=3.2e-26, PFam score of 94.7
KKAISDGALTGSSSAVITERDCVSRSRWTAVIVRHCTGRATTGGFNSETVQDVMLGAVERRFGNDLPSSPVEWLTDNGSCYRANETRQFARMLGLEPKNTAVRSPESNGIAESFVKTIKRDYISIMPKPDGLTAAKNLAEAFEHYNEWHPHSALGYRSPREYLRQRACNGARRPPVSQPRAAPAGPQLGADGTRTFSLSPFPSLASGERLMMPPAAFKGEAGGLLVFPPAFYGAKPPTAPATPAPGPEPLGGPEPADGGGGGAAGPGAEEEQLDTAEIAFQVKEQLLKHNIGQRVFGHYVLGLSQGSVSEILARPKPWRKLTVKGKEPFIKMKQFLSDEQNVLALRTIQVRQR

SEQ ID NO: 41235 - protein, 459 aa, Homo sapiens
  DOMAIN (68)..(113): Respiratory-chain NADH dehydrogenase 75 Kd subunit proteins domain identified by eMATRIX, accession number BL00641C, p-value= 1.000e-40, raw score of 21.10
MSCMTPASDGTFISIDDEEAKQFRESVVEWLMTNHPHDCPVCEEGGNCHLQDMTVMTGHSFRRYRFTKRTHRNQDLGPFISHEMNRCIACYRCVRYYKDYADGTDLGVYGAHDNVYFGRPEDGTLESEFSGNLVEICPTGVFTDKTHSERYNRKWDMQFAPSICQQCSIGCNISPGERYGELRRIENRYNGTVNHYFLCDRGRFGYGYVNLKDRPRQPVQRRGDDFITLNAEQAMQGAADILRQSKKVIGIGSPRASVESNFALRELVGEENFYTGIAHGEQERLQLALKVLREGGIYTPALREIESYDAVLVLGEDVTQTGARVALAVRQAVKGKAREMAAAQKVADWQIAAILNIGQHPLFVTNVDDTRLDDIAAWTYRAPVEDQARLGFAIAHALDNSAPAVDGIEPELQSKIDVIVQALAVFRLVIGEQMIDVLGPEKRRRRTTQEKIANCSAEL

SEQ ID NO: 41236 - protein, 188 aa, Homo sapiens
  DOMAIN (118)..(137): Electron transfer flavoprotein alpha-subunit proteins domain identified by eMATRIX, accession number BL00696A, p-value=7.469e- 13, raw score of 12.15
  DOMAIN (1)..(172): Electron transfer flavoprotein alpha subuni domain identified by PFam, accession name ETF_alpha, E-value=4.8e-15, PFam score of 63.4
IAALLKDKHPAMLLLAATKRGKALAARLSVQLNAALVNDATAVDIVDGHICAEHRMYGGFAQEKINSPLAIITLAPGVQEPCTSDTSHQCPTETVPYVAPRHEILCRERRAKAASSVDLSKAKRVVGVGRGLAAQDDLKMVHELAAVLNAEVGCSRPIAEGENWMERHAQHKSWNPLSWAPLGSQAHP

SEQ ID NO: 41237 - protein, 455 aa, Homo sapiens
  DOMAIN (2)..(446): LBP / BPI / CETP family domain identified by PFam, accession name LBP_BPI_CETP, E-value=0.00043, PFam score of -57.0
MLRILCLALCSLLTGTRADPGALLRLGMDIMNREVQSAMDESHILEKMAAEAGKKQPGMKPIKGITNLKVKDVQLPVITLNFVPGVGIFQCVSTGMTVTGKSFMGGNMEIIVALNITATNRLLRDEETGLPVFKSEGCEVILVNVKTNLPSNMLPKMVNKFLDSTLHKVLPGLMCPAIDAVLVYVNRKWTNLSDPMPVGQMGTVKYVLMSAPATTASYIQLDFSPVVQQQKGKTIKLADAGEALTFPRGVMPKAPPQLLVPATFLSAELALLQKSFHVNIQDTMIGELPPQTTKTLARFIPEVAVAYPKSKPLTTQIKIKKPPKVAMKTGKSLLHLHSTLEMFAARWRRKAPMSLFLLEEHFNLKGQHSLHENQLQMATSLDRLLSLSRKSSSIGNFNERELTGFITSYLEEAYIPVVNDVLQVGLPLPDFLAMNYNLAELDIVELGGIMEPADI

SEQ ID NO: 41238 - protein, 101 aa, Homo sapiens
  misc_feature (1)...(101): Xaa = X or * as defined in Table 2
VSALSLLLHRAPRCRRPSLPPLQDAGLHGWEHGVQRGRGPAAHRDPVXEGWHHSGHLAQGHSEGXPCGDSETPAGREGKTAGHRTGRCGCRQEQTEGAQQD

SEQ ID NO: 41239 - protein, 72 aa, Homo sapiens
  misc_feature (1)...(72): Xaa = X or * as defined in Table 2
FLGGEGVIFPRGWWGAAMRFVSTGSRHTTPXGSEKSAGPHTQWHQNSKXATSETRLHSCASEGIVPAGCRPY

SEQ ID NO: 41240 - protein, 784 aa, Homo sapiens
VPMVVVPPVGAKGNTPATGTTQGKKAEGTQNQSKKAEGAPNQGRKAEGTPNQGKKTEGTPNQGKKAEGTPNQGKKAEGTPNQGKKAEGAHNQGKKVDTTPNQGKKVEGAPTQGRKAEGAQNQAKKVEGAQNQGKKAEGAQNQGKKAEGAQNQGKKAEGAQNQGKKAEGGQNQGKKTEEAQKQGKKAEGAQIQGKKNEGAQTQGKKAEGAQNQGKKNEGAQTQGKKAEGAQTQGKKADGAQNQGKKAEGAQNQGKKAEGAQNQGKKAEGAQNQGKKADGAQNQGKKAEGAQNQGKKAEGAQNQGTKAEGAQNQGKKAEGAQNQGKKAEGAQNQGKKAEGAQNQGKKAEGAQNQGKKAEGAQNQGKKAEGAQNQGKKAEGAQNQGKKAEGAQNQGKKAEGAQNQGKKAEGAQNQGKKAEGAQNQGKKVEGAQNQGKKAEGAQNQGKKAEGAQNQGKKAEGAQNQGQKGEGAQNQGKKTEGAQGKKAERSPNQGKKGEGAPIQGKKADSVANQGTKVEGITNQGKKAEGSPSEGKKAEGSPNQGKKADAAANQGKKTESAFVQGKNTDVAQSPEAPKQEAPAKKKSGSKKKGEPGPPDADGPLYLPYKTLVSTVGSMVFNEGEAQRLIEILSEKAGIIQDTWHKATQKGDPVAILKRQLEEKEKLLATEQEDAAVAKSKLRELNEEMAAEKAKAAAGEAKVKKQLVAREQEITAVQARMQASYREHVKEVQQLQGKIRTLQEQLENGPNTQLARLQQGELHPAGCLEPGHEPGGEQPPQPGPGPAGQ

SEQ ID NO: 41241 - protein, 202 aa, Homo sapiens
SLKCLIISLSPVHSYPGKRPEVSFSPINSGQPPNYEMLKEEHEVAVLGVAYNPAPPTSTVIHIRNETSVPDHVVLVPVQHSLHEPCCLGFIAFAYSVKSRHRKMVGDLTGAQALCLHRQVPEHLGPDFGHPHDHSAHHHPSVDLPSLPSSFLLLFLFLFLPALQLLFLSFSLVFFFFFSFFPLFQRLELWGWGEWDHHSTES

SEQ ID NO: 41242 - protein, 122 aa, Homo sapiens
RVATIVDIWEKSISGKKNSQNLFVNPCCLGFIAFAYSVKSRDRKMVGDLTGAQALCLHRQVPEHLSPDCGHPHDHSAHHHPGVDLPSLSIDQEASSRPGARALQDGAWASVFPSVQWEQQGW

SEQ ID NO: 41243 - protein, 179 aa, Homo sapiens
PDRRWSSLDTMNHTGQTFFSPVNSGQPPNYEMLKEEHEVAVLGAPHNPAPPTSTVIHIRSETSVPDHVVLVPVQHPLHEPCCLGFIAFAYSVKSRDRKMVGDVTGAQALCLHRQVPEHLGPDSGHPHDHSAHRHPSADLPGLWIDQEASLRPGALPMTCIPRTPTSIPRPAPRGQELCP

SEQ ID NO: 41244 - protein, 74 aa, Homo sapiens
  misc_feature (1)...(74): Xaa = X or * as defined in Table 2
XPRDPPGQAKPRGAPVKRPRKTEILRQNRGRKACDRPVAKTKKKKAEGTVVHRGRLPEVPAGILRPARLPGGHX

SEQ ID NO: 41245 - protein, 1696 aa, Homo sapiens
  DOMAIN (1573)..(1587): C2H2-TYPE ZINC FINGER SIGNATURE domain identified by eMATRIX, accession number PR00048A, p-value=4.913e-10, raw score of 10.52
  DOMAIN (172)..(1654): Zinc finger, C2H2 type domain identified by PFam, accession name zf-C2H2, E-value=2.2e-102, PFam score of 353.5
EAKTHKSVVMTDPLLDSQPASSTGEMDGLCPELLLIPPPLSNRGILGPVQSPCPSRDPAPIPTEPGCLLVEATATEEGPGNMEIIVETVAGTLTPGAPGETPAPKLPPGEREPSQEAGTPLPGQETAEEENVEKEEKSDTQKDSQKAVDKGQGAQRLEGDVVSGTESLFKTHMCPECKRCFKKRTHLVEHLHLHFPDPSLQCPNCQKFFTSKSKLKTHLLRELGEKAHHCPLCHYSAVERNALNRHMASMHEDISNFYSDTYACPVCREEFRLSQALKEHLKSHTAAAAAEPLPLRCFQEGCSYAAPDRKAFIKHLKETHGVRAVECRHHSCPMLFATAEAMEAHHKSHYAFHCPHCDFACSNKHLFRKHKKQGHPGSEELRCTFCPFATFNPVAYQDHVGKMHAHEKIHQCPECNFATAHKRVLIRHMLLHTGEKPHKCELCDFTCRDVSYLSKHMLTHSNTKDYMCTECGYVTKWKHYLRVHMRKHAGDLRYQCNQCSYRCHRADQLSSHKLRHQGKSLMCEVCAFACKRKYELQKHMASQHHPGTPSPLYPCHYCSYQSRHKQAVLSHENCKHTRLREFHCALCDYRTFSNTTLLFHKRKAHGYVPGDQAWQLRYASQEPEGAMQGPTPPPDSEPSNQLSARPEGPGHEPGTVVDPSLDQALPEMSEEVNTGRQEGSEAPHGGDLGGSPSPAEVEEGSCTLHLEALGVELESVTEPPLEEVTETAPMEFRPLGLEGPDGLEGPELSSFEGIGTSDLGAEENPLLEKPVSEPSTNPPSLEEAPNNWVGTFKTTPPAETAPLPPLPESESLLKALRRQDKEQAEALVLEGRVQMVVIQGEGRAFRCPHCPFITRREKALNLHSRTGCQGRREPLLCPECGASFKQQRGLSTHLLKKCPVLLRKNKGLPRPDSPIPLQPVLPGTQASEDTESGKPPPASQEAELLLPKDAPLELPREPEETEEPLATVSGSPVPPAGNSLPTEAPKKHCFDPVPPAGNSSPTEAPKKHHLDPVPPAGNSSPTEALKKHRFEQGKFHCNSCPFLCSRLSSITSHVAEGCRGGRGGGGKRGTPQTQPDVSPLSNGDSAPPKNGSTESSSGDGDTVLVQKQKGARFSCPTCPFSCQQERALRTHQIRGCPLEESGELHCSLCPFTAPAATALRLHQKRRHPTAAPARGPRPHLQCGDCGFTCKQSRCMQQHRRLKHEGVKPHQCPFCDFSTTRRYRLEAHQSRHTGIGRIPCSSCPQTFGTNSKLRLHRLRVHDKTPTHFCPLCDYSGYLRHDITRHVNSCHQGTPAFACSQCEAQFSSETALKQHALRRHPEPAQPAPGSPAETTEGPLHCSRCGLLCPSPASLRGHTRKQHPRLECGACQEAFPSRLALDEHRRQQHFSHRCQLCDFAARERVGLVKHYLEQHEETSAAVAASDGDGDAGQPPLHCPFCDFTCRHQLVLDHHVKGHGGTRLYKCTDCAYSTKNRQKITWHSRIHTGEKPYHCHLCPYACADPSRLKYHMRIHKEERKYLCPECGYKCKWVNQLKYHMTKHTGLKPYQCPECEYCTNRADALRVHQETRHREARAFMCEQCGKAFKTRFLLRTHLRKHSEAKPYVCNVCHRAFRWAAGLRHHALTPTDRHPFFCRLCNYKAKQKFQVVKHVRRHHPDQADPNQGVGKPPPTPTVHLHDVQLEDPSPPAPAAPHTGPEG

SEQ ID NO: 41246 - protein, 420 aa, Homo sapiens
  DOMAIN (300)..(317): Zinc finger C2H2 type, domain proteins. domain identified by eMATRIX, accession number BL00028, p-value=8.435e-12, raw score of 16.07
  DOMAIN (61)..(377): Zinc finger, C2H2 type domain identified by PFam, accession name zf-C2H2, E-value=1.9e-34, PFam score of 127.8
GGPDMDARAPAVGGSCHQHGPSGAPGPCIGRMESEVGVRDHAIPEGARCNRFRKETTEGPLHCSRCGLLCPSPASLRGHTRKQHPRLECGACQEAFPSRLALDEHRRQQHFSHRCQLCDFAARERVGLVKHYLEQHEETSAAVAASDGDGDAGQPPLHCPFCDFTCRHQLVLDHHVKGHGGTRLYKCTDCAYSTKNRQKITWHSRIHTGEKPYHCHLCPYACADPSRLKYHMRIHKEERKYLCPECGYKCKWVNQLKYHMTKHTGLKPYQCPECEYCTNPADALRVHQETRHREARAFMCEQCGKAFKTRFLLRTHLRKHSEAKPYVCNVCHRAFRWAAGLRHHALTHTDRHPFFCRLCNYKAKQKFQVVKHVRRHHPDQADPNQGVGKDPTTPTVHLHDVQLEDPSPPAPAAPHTGPEG

SEQ ID NO: 41247 - protein, 314 aa, Homo sapiens
  DOMAIN (179)..(243): Phosphopantetheine attachment site domain identified by PFam, accession name pp-binding, E-value=7.3e-11, PFam score of 45.2
  misc_feature (1)...(314): Xaa = X or * as defined in Table 2
MSILLTSIARQSRDKRTRLGHKQRILAGLGSNHPIRRNLQGLRRFALVDRQLVVQNVVTRWCRMVYQSAANVFIQHRPISHDERVQQRGTAITMMVQQAQWAERGKSGLSGVAIGPAVDTSALQAQLRETLPPHMVPVVLLQLPQLPLSANGKLDRKALPLPELKAQAPGRAPKAGSETIIAAAFSSLLGCDVQDADADFFALGGHSLLAMKLAAQLSRQVARQVTPGQVMVASTVAKLATIIDAEEDSTRRMWIRNHSAVAXRXWPDAVLFPSCVRFCLAVQRALALSRSTMVDYRHSVTAPQWPHADGGKPG

SEQ ID NO: 41248 - protein, 312 aa, Homo sapiens
MRTILTIDIQLRYPRRPGAFGTHTFLKCAFSNKQRRFTVKRFAFLAARYPASQEMPPVRHGHAVAAAIPCGNVPANGNTPARYKGQCGLCSSTLQDALRDFIQVAHTCEIPLMPACFGLADDKLWRWLNEKLPCSLMLLPTLPPSVLGIRLQNQLQRKIVLFGGVWMPGDEVKKVTCKNGVVNEIWTRNHADIPLRPRFAVLASGSFFSGGLVAERNGIREPILGLDVLQTATRGEWYKGDFFAPQPWQQFGVTTDETLRPSQAGQTIENLFAICSMLGGFDPIAQGCGGGVCAVSALHAAQQIAQRAGGQQ

SEQ ID NO: 41249 - protein, 151 aa, Homo sapiens
SRAVEFVRDLRAPDQGGRQGGDCASGEGLYMHSIHQILEHLLCAWYCSCSKCWKENSEQNIGKYVPSGSLHSQPHCLYREINKMEWWSRLVSSDPEINTKKINPENSKLSDLDSETRSMVEKMMYDQRQKSMGLPTSDEQKKQEILKKFMD

SEQ ID NO: 41250 - protein, 150 aa, Homo sapiens
  misc_feature (1)...(150): Xaa = X or * as defined in Table 2
APSRTSGSSVGLQGSYVLDVDGREFGCERVKGXFLVHRAGHLLTLWLFSSQINKMEWWSRLVSSDPEINTKKINPENSKVSPGWLGELQQEGEGPRCFQSFTDSCHCLPSLSDLDSETRSMVEKMMYDQRQKSMGLPTSDEQKKQEILKK

SEQ ID NO: 41251 - protein, 366 aa, Homo sapiens
  misc_feature (1)...(366): Xaa = X or * as defined in Table 2
RDPQERRERGTRVQSSGTWIGAGAMGGEQEEERFDGMLLAMAHQHEGGVQELVNTFFSFLRRKTDFFIGGEEGMAEKLITQTFSHHNQLAQKTRREKIARQEAERREKAERAARLAKEAKSETSGPQIKELTDEKAEKLQLEIDQKKDAENPEAQLKNGSLDSPGKQDTEEDEEEDEKDKGKLKPNLGNGADLAQXRLNPDPCRELDLAVPFCVNFRLKGKDMVVDIQRRQHLGVGLKGQPAIIDGELYNEVKVEESSWLIEDGKVVTVHLEKINKMEWWSRLVSSDPEINTKKINPENSKLSDLDSETRSMVEKMMYDQRQKSMGLPTSDEQKKQEILKKFMDQHPEMGFFPKAKFPTNPCFFPP

SEQ ID NO: 41252 - protein, 125 aa, Homo sapiens
LGFGVRYWSQSARAANRGSEARSVPHSLLGSPEWTGISLGGTMEQYTANSNSSTEQIVVQAGQIQQQVQGQPLMVQVSGGQLITSTGQPIMVQAVPGGQGQTIMQVPVSGTQGLQQIQVGPPRQK

SEQ ID NO: 41253 - protein, 314 aa, Homo sapiens
  DOMAIN (223)..(272): CBF-B/NF-YA subunit proteins domain identified by eMATRIX, accession number BL00686, p-value=4.471e-31, raw score of 13.91
  DOMAIN (232)..(283): CCAAT-binding transcription factor domain identified by PFam, accession name CBFB_NFYA, E-value=1e-11, PFam score of 52.4
  misc_feature (1)...(314): Xaa = X or * as defined in Table 2
QVWKQNCFKHYSNETDNSTTQLVGLQTLQVVVPSLILCEHCMNFSSPHVWCCLVQAVPGGQGQTIMQVPVSGTQGLQQVSNIXKYXAVYQRRGFKEXIITTYQTQQIIIQQPQTAVTAGQTQVIPLALSHRSKTDLEESDNXVRYFPVNADGTILQQGKCTHKLPXDFLGQLFCPLDNXHLSSSGQGTVTVTLPVAGNVVNSGGMVMVRKCIFQLCLXNFLEHATXCLLKFEPLYVNAKQYHRILKRRQARAKLEAEGKIPKERRVCITLGRIXERRIAGFYFXNYLLYPKEKDSPHMQVGRHIHFILLFITLY

SEQ ID NO: 41254 - protein, 117 aa, Homo sapiens
AEPDTINLKGKLIWKSENHLRNLGIRLLLPSLLLTVKASSLYSVLHISADSHFVYFHLPHYCLLRSLSFTVGVCSNSSDPSTSHLNFPPLFSLVGSTSLLSVFSSLSCPTSTSTARQ

SEQ ID NO: 41255 - protein, 214 aa, Homo sapiens
  misc_feature (1)...(214): Xaa = X or * as defined in Table 2
QRPNAAQTQPSRGCQLSAPARAGRFHPQSCRPSRVGCKGHVCIPGDRSLALWPPRLGCGEXTSSALDSQGILVSNFPHEGSPTPQQSGLKTGRILLNHGRRRLKVSQSEGRFLEVGWKQRGPTAHRTHSNRTRRRHALSTGGDTGRARNARSGGGRSPRSSLPAASSTPGVCWSPRMSQARQPPSCRRGVPRRPEMLRSLSPSCQICVCVRFRH

SEQ ID NO: 41256 - protein, 156 aa, Homo sapiens
  misc_feature (1)...(156): Xaa = X or * as defined in Table 2
PMALWADGRARHKVGTECECGMHPGLKCSGRTLGSQTMLATTPCDSPTXISNKNGLRSVSYRXCLINALWLFSISPHILVRCGTESSXLLPSLVPSWLPXLVRVRPLPTGWCXIPSCLKPPPTWSSHHSPQRLPXNPATLVCLQNGTARSHSSTPV

SEQ ID NO: 41257 - protein, 118 aa, Homo sapiens
  misc_feature (1)...(118): Xaa = X or * as defined in Table 2
HERLLNPGRETDWATCYSETASCSVAXATVQXHDHGSLXPQTPGLKWFSHFSLPSSWDYRHVPPCPETGPCPVTQDGVQWSYHGSLXPQTPRLKQSYHVSLPSSWDYRWEHPVAGKQA

SEQ ID NO: 41258 - protein, 187 aa, Homo sapiens
  misc_feature (1)...(187): Xaa = X or * as defined in Table 2
IQTTPKGRRTKPCHRQKRTIVTPRQSTPRSNRGKDTRSKQRDETTEXTTRAQDTNKEGATQDRTETARRTQSNMEKEKPNQHNRKRKDRDSRKDKGHERETKNTERNRTKRREKRKDNKHNEAKSQRQTRKKKETKETATRKREEPSNSCSMHPFQISWLHSVGDNGRRDQLLCQGFHLYYLMCFPQ

SEQ ID NO: 41259 - protein, 123 aa, Homo sapiens
  DOMAIN (86)..(109): Immunoglobulins and major histocompatibility complex proteins domain identified by eMATRIX, accession number BL00290A, p-value= 7.750e-12, raw score of 20.89
  DOMAIN (82)..(108): Immunoglobulin domain identified by PFam, accession name ig, E-value=0.039, PFam score of 11.9
DIDPTGLQSQGSPKGQDPPLMFSEDYQKSLLEQYHLGLDQKLRKYVVGELIWNFADFMTNQCQPKTTPSVILFLPSCEEPQANKATLVCLMNNFYPGILMVTWKADGTLITQSVEKTTPSKQS

SEQ ID NO: 41260 - protein, 139 aa, Homo sapiens
  DOMAIN (57)..(80): Immunoglobulins and major histocompatibility complex proteins domain identified by eMATRIX, accession number BL00290A, p-value= 1.333e-09, raw score of 20.89
  DOMAIN (54)..(123): Immunoglobulin domain identified by PFam, accession name ig, E-value=1.2e-05, PFam score of 23.3
  misc_feature (1)...(139): Xaa = X or * as defined in Table 2
FGTGPSASPRTSFRHQCGHXPHWTAVTVDSQGAGQPKTTPSVILFLPSCEEPQANKATLVCLMNNFIPGILMVTWKADGTLITQSVEKTTPSKQSNNKYVASSYLSLTPESWRSRRSYSCQVMQEGSTVEKSVAPAECS

SEQ ID NO: 41261 - protein, 217 aa, Homo sapiens
  DOMAIN (135)..(158): Immunoglobulins and major histocompatibility complex proteins domain identified by eMATRIX, accession number BL00290A, p-value= 1.000e-13, raw score of 20.89
  DOMAIN (133)..(203): Immunoglobulin domain identified by PFam, accession name ig, E-value=1e-06, PFam score of 26.7
GPMRPGTGQGGLEAPGEPGPNLRQRWPLLLLGLAVVTHGLLRPTAASQSRALGPGAPGGSSRSSLRSRWGRFLLQRGSWTGPRCWPRGFQSKHNSVTHVFGSGTQLTVLSQPQALTPSVILFLPSCEEPQANKATLVCLMNDFYPGILTVTWKADGTPITHGVEKTTPSKQSNNKYVASSYTLSLTPEQWRSRRSYSCQVMQEGSTVEKSVAPAECS

SEQ ID NO: 41262 - protein, 114 aa, Homo sapiens
  misc_feature (1)...(114): Xaa = X or * as defined in Table 2
GSAAGQVQQQQQRRHQQGKVTVKYDRKELRKRLVLEEWIVEQLGQLYGCEEEEMPEVEIDIDDLLDADSDEERASKLQEALVDCYKPTEEFIKELLSRIRGMRENXAPPPKKSV

SEQ ID NO: 41263 - protein, 115 aa, Homo sapiens
  misc_feature (1)...(115): Xaa = X or * as defined in Table 2
TMNNMRGQILLLFLLIWLWNRYGQLVGSSEKHKIASQLELIQSQFHYCVTLDKLLNFSEPVHVKQEQLLSVCSEKEVTEVKVLALVNHVGSKCCFLIFCSGPSXPKFSVSQVFSD

SEQ ID NO: 41264 - protein, 128 aa, Homo sapiens
RSQRGAEPALRARDSESLPQRLAARGRCWVSKTSPVPSAQKQNGADISVLLSTRCDPTPRAAPSLRDCGAQSICNTAMMILFSPLQGRCRVRRQSLGYSSGRVSVQVCSPSFSILASGWVWPVGVLAR

SEQ ID NO: 41265 - protein, 121 aa, Homo sapiens
  DOMAIN (8)..(30): TRANSFORMING PROTEIN P21 RAS SIGNATURE domain identified by eMATRIX, accession number PR00449A, p-value=4.706e-19, raw score of 13.20
  DOMAIN (9)..(119): Ras family domain identified by PFam, accession name ras, E- value=9.1e-18, PFam score of 65.4
  misc_feature (1)...(121): Xaa = X or * as defined in Table 2
TDHIMREYKLVVLGSGGVGKSALTVQFVQGIFVEKYDPTIEDSYRKQVEVDCQQCMLEILDTAGTEQFTAMRDLYMKNGQGFALVYSITGQSTFNDLQDLREQILRGXRTREDVPMILVGN

SEQ ID NO: 41266 - protein, 238 aa, Homo sapiens
  misc_feature (1)...(238): Xaa = X or * as defined in Table 2
YKKNFDISLLSVKCETCTHMLTSSSLXCXNLICRSLFLIDFNLXAGFVIXVGFTAQSTFNDLQDLREQILRVKDTEDVSIFSLCKMLCHLSVAKXKSACFQNLARQWCNCAFLESSAKSKINVNEVTYNCWAAQTSAFLVCFKLTARLLALSITNVSSCTGWGVQRSHQDQGNSKHAASSVWKVGFGIVRLGTGTCLSSLERGYMCMEKEMFDPYTPSRVLKPRSEALELFGPLKSLT

SEQ ID NO: 41267 - protein, 159 aa, Homo sapiens
YFRFLCVIFCSFLLRCLVSRVLLYPMLIAEIPRVQGRGGPSWPGLGGRLLKELSRLLTFLKVRKLSILSGWREVPLGQPSLTEPPPPAPPHPGPGSWLASASAPHLSQPPAAGPAGQPPSPGSPVPGGCSLALPVTSVLCLEPPALKPAAASAPVVAVH

SEQ ID NO: 41268 - protein, 49 aa, Homo sapiens
  misc_feature (1)...(49): Xaa = X or * as defined in Table 2
TALQEFGTRSGIPALGCPPPDPXPPPGSCPPPEPQLLSVGEPSRCSCSP

SEQ ID NO: 41269 - protein, 74 aa, Homo sapiens
  misc_feature (1)...(74): Xaa = X or * as defined in Table 2
LGAARRAQLLESWPRAPPPARLHACHLQPLPRTPKVHTSXPTQQQGGFSLCLKKKNVPVSVEMICSSARLKLTE

SEQ ID NO: 41270 - protein, 110 aa, Homo sapiens
  misc_feature (1)...(110): Xaa = X or * as defined in Table 2
RPLLLSTLCWELRAALSYWRAGRAPPPPARLHAGPASGFWVLTPSGGEEGEPRTHLWGGGGRRGGGRKKKDXGGQGRGAGGFATFSPPANAPRLHTSLTNSSARWIFLCV

SEQ ID NO: 41271 - protein, 340 aa, Homo sapiens
  DOMAIN (177)..(194): Zinc finger C2H2 type, domain proteins. domain identified by eMATRIX, accession number BL00028, p-value=6.063e-15, raw score of 16.07
  DOMAIN (9)..(199): Zinc finger, C2H2 type domain identified by PFam, accession name zf-C2H2, E-value=5.8e-51, PFam score of 182.7
  misc_feature (1)...(340): Xaa = X or * as defined in Table 2
FPRAGEKPYTCEESGRAFNQSXTLTTHMTIHAGXKPYKCEECGKAFYRFSYLTKHMIIHTGETFYKCEECGRGFNWSSTLTKHNRIHTGEKPYKCEQCGKALNESSNLTAHKIIHTGEKPYKCEECGKAFNRSPKLTAHKVIHSGEKPYKCEECGKAFSQSSILTTHKRIHTGEKPYKCEECGKAFNRSSNLTKHKIIHTGEKSYKCEECGICRTPKMAVFSQCHQVLKITNIHYPSSIATIVHGDRAQSHVDICTLGDKASGAIIGTAFYTTQCEQRAYNETAVSRYTISRPPSHHGGDSETTEFSPAIGRCNGVHKSWGSNRCSDRWRSKPLLARSVS

SEQ ID NO: 41272 - protein, 96 aa, Homo sapiens
  DOMAIN (11)..(31): RETINOIC ACID RECEPTOR SIGNATURE domain identified by eMATRIX, accession number PR00545B, p-value=8.364e-21, raw score of 6.13
GTREGAGGAPEEMPVDRILEAELAVEQNSDQGVEGPGGTGGSGSNESVGVNPLSFVMGVGGGSLGLFYIPSPSFPLITFLTLLGTGGAAKQGLSNI

SEQ ID NO: 41273 - protein, 502 aa, Homo sapiens
  DOMAIN (206)..(238): Nuclear hormones receptors DNA-binding region proteins domain identified by eMATRIX, accession number BL00031B, p-value=8.313e- 32, raw score of 22.25
  DOMAIN (172)..(243): Zinc finger, C4 type (two domains) domain identified by PFam, accession name zf-C4, E-value=1.3e-22, PFam score of 79.5
  misc_feature (1)...(502): Xaa = X or * as defined in Table 2
MSWAARPPFLPQRHAAGQCGPVGVRKEMHCGVASRWRRRRPWLDPAAAAAAAVAGGEQQTPEPEPGEAGRDGMGDSGRGECPSRRAGEPVTALSATPPPPPFPVISSSMGSPGLPPPAPPGFSGPVSSPQVRGCDQLTAWPLSFSCFPCNPVLGVRGLHCPPPPGGPGAGKRLCAICGDRSSGMWLRGXTERESLGHVSSPVGXDLTYSCRDNKDCTVDKRQRNRCQYCRYQKCLATGMKREGKDPPCPGVLDHMPFSLIPLRPPEEMPVDRILEAELAVEQKSDQGVEGPGGTGGSGSSVSVGVNPLSFVMGVGGGSLGLWAKRIPHFSSLPLDDQVILLRAGQXPWIPLTSXHLTPLXLPDLFLATGLHVHRNSAHSAGVGAIFDRSVALGXAGMXIEGVGLXAGPCLRAIILFNPGKRRITFVSQGQGNLGASSSPMETYCKQKYPEQQGRXDGAGGHXGSLGGGECYEDVFLFFFKLIGDTPIDTFLMEMLEAPHQLA

SEQ ID NO: 41274 - protein, 61 aa, Homo sapiens
  misc_feature (1)...(61): Xaa = X or * as defined in Table 2
MICTVAISYVLFVDVYISLLSATCSPKPQGSAVFQHDXVSPGIXNGSERCCSRDRHRQFLW

SEQ ID NO: 41275 - protein, 98 aa, Homo sapiens
  misc_feature (1)...(98): Xaa = X or * as defined in Table 2
AEGIRTIQGTENIFCKVVWGRQVSLSQTNTLEGQSNDHGCQLRKRTFISTFTAHYSRFFLQRFVFPYTGFEKCQSTAWXKPRYLLSHSVKGKRNLHPA

SEQ ID NO: 41276 - protein, 48 aa, Homo sapiens
RSAASLLKPGRPGTHQKEPATPDMLPLRAVTLTAKVCSFTPEASEREG

SEQ ID NO: 41277 - protein, 208 aa, Homo sapiens; identical to SEQ ID NO: 30977

SEQ ID NO: 41278 - protein, 204 aa, Homo sapiens
  DOMAIN (41)..(87): Argininosuccinate synthase proteins domain identified by eMATRIX, accession number BL00564F, p-value=1.918e-30, raw score of 19.09
  DOMAIN (1)..(199): Arginosuccinate synthase domain identified by PFam, accession name Arginosuc_synth, E-value=1.5e-97, PFam score of 311.7
KTQDPAKAPNTPDILEIEFKKGVPVKVTNVKDGTTHQTSLELFMYLNEVAAQHGVGRIDLGDNRFIGMKGRGIYYTPTGTILYHAHLHIEAFTMDREVRTIIQGLGLKFAELVYTGFWHSPECELCRHCIAKSQERVEGKVQVSVLKGQVYILGRESPLSLYNEELVSMNVQGDYEPTDATGFININSLRLKEYHRLQSKVTAK

SEQ ID NO: 41279 - protein, 368 aa, Homo sapiens
  misc_feature (1)...(368): Xaa = X or * as defined in Table 2
MFLCPPNPVALTMMLKDYFLEQFSFYRYIDQRVRSFPHCLPHPIAGRGTSQAPSFTSCFSKMSLEEAMRTVKKFMDSGGRRGLGRRVFSAPRHTEGGTPDGNSHLSPNQKMEKLTEKGCKQLRQGGLCVRVSDRTVRSVQETTAITATLKGSLGTYCRGTRNLLTAEGFMPHASVCIQSKSGKVARNTVQGFTAHGKAVLEGPGGSGREVEATTCGRRLKDKDSEHAGAGSRHHQSQVTGSLGEERAVRAESPGEGPAEFLRRIQGAVQTRAVTAGSSVEKINTKLETCDCDASEEEVLGGDNVETEGRCWNSLEGSEEERKMRESVELSRDLVNGFDQNADNDMDNKVQAEVVSDRDEELVGNWSKX

SEQ ID NO: 41280 - protein, 216 aa, Homo sapiens
  misc_feature (1)...(216): Xaa = X or * as defined in Table 2
LYLQRPFFQIRSSLQVLGHRQIFPQSPRCLHLAPPPLMRHSHRSPTWYXFSPRRTQQSRPVSAQPLGSCGGIQPAPPPVTQPSQLSPPRGSRXLGSDGAGTQPRHVQNPCPLTCVHMXSPPPPCLNLQARCPQSLRAKVVPAVEQRARVGHVESPGSHCWLEREPEVGSGPQQGQRPLPAGAADXCLGAFWQTHLDLGDSLISCSHDLQGWQLSQA

SEQ ID NO: 41281 - protein, 282 aa, Homo sapiens
MRTQCLLGLRTFVAFAAKLWSFFIYLLRRQIRTVIQYQTVRYDILPLSPVSRNRLAQVKRKILVLDLDETLIHSHHDGVLRPTVRPGTPPDFILKVVIDKHPVRFFVHKRPHVDFFLEVRHLMLMEGLKDYAIAFLKDNCMSKGIITLYGIALSPNLFQVSQWYELVVFTASMEIYGSAVADKLDNSRSILKRRYYRQHCTLELGSYIKDLSVVHSDLSSIVILDNSPGAYRSHPDNAIPIKSWFSDPSDTALLNLLPMLDALRFTADVRSVLSRNLHQHRL

SEQ ID NO: 41282 - protein, 280 aa, Homo sapiens
WNSAELGRGGPGAGGAGVIGMMRTQCLLGLRTFVAFAAKLWSFFIYLLRRQIRTVIQYQTVRYDILPLSPVSRNRLAQVKRKILVLDLDETLIHSHHDGVLRPTVRPGTPPDFILKVVIDKHPVRFFVHKRPHVDFFLEVVSQWYELVVFTASMEIYGSAVADKLDNSRSILKRRYYRQHCTLELGSYIKDLSLVVHSDLSGIVILDNSPGAYRSHPGYGGRDNAIPIKSWVSVTPSDTALLNLLPMLDALRFTADVRSVLSRNLHQHRLWVTACFPLPP

SEQ ID NO: 41283 - protein, 43 aa, Homo sapiens
RAFLLCLIDQWFLPLQWVQGPVRQWAPVTGVSTFLFQRISSSL

SEQ ID NO: 41284 - protein, 248 aa, Homo sapiens
MMSFDSMSHIQVMLLQEVPSSYPASKKNEAPQTSGGGPGTPRKGLGEPAVVPMSPAVGTPALTQCHGPHAEDDLEEPILTTDPVARDCPLDLLMDGKTGAIISSLLHSNCLPAPFCQCSHAVKWQLKTVHSCCPLGEVQPQRRCVIATAKEKGIGVKHHCNIHSDNVNSIITATVAAHQQQQLPQNGNNSGIKNNQNSSENTVTNNSKNISNHIICRNSSKNSKSSSSSSSNNNKNSSNTINSNNKAR

SEQ ID NO: 41285 - protein, 224 aa, Homo sapiens
MMSFDSMSHIQVMLLQEVPSSYPASKKNEAPQTSGGGPGTPRKGLGEPAVVPMSPAVGTPALTQCHGPHDEDDLEEPILTTDPVARDLTMPTAASQHLQKQCLEHHHYFHSYNINSDITVSRNNISSIITTPVHHCNIHSDNVNSIITATVAAHQQQQLPQNGNNSGIKNNQNSSENTVTNNSKNISNHIICRNSSKNSKSSSSSSSNNNKNSSNTINSNNKAR

SEQ ID NO: 41286 - protein, 325 aa, Homo sapiens
  DOMAIN (212)..(232): ALPHA-2A ADRENERGIC RECEPTOR SIGNATURE domain identified by eMATRIX, accession number PR00558C, p-value=4.977e-10, raw score of 6.54
  misc_feature (1)...(325): Xaa = X or * as defined in Table 2
IESPGPFPPGLQRPVPHRGEFCLRCTSSEALPCFYSWTVTFSPWTVAAAQGQPRPGPASRTLLLATQSEIAAAELGPGSWGGPSSCPSEQSSHGPPASSXAAPLQTGRRLRSRASXRSGAPSVAALPAPLSRPQERHPSVSASRSGHPPGPCPSPPPPAARPVQPSPCRAPPGSAAGRARAPHAXAAPGSWLSSAGAAARRWPFQTAKGSGSXDRPGRPGPDAPAAPPGWHRAPPSGSSSGAGTGRHPQPFGRPRRRTPAPYAAPCAFVATLVFSXLLIFGGAFSFPALSHCPTSAXLKRLLSEPAPIAFPFGLHPGTLLSRASE

SEQ ID NO: 41287 - protein, 1743 aa, Homo sapiens
  DOMAIN (1390)..(1425): Matrix protein (MA) p15. domain identified by eMATRIX, accession number PF01140D, p-value=1.628e-09, raw score of 15.54
  DOMAIN (39)..(347): Ras association (RalGDS/AF-6) domain identified by PFam, accession name RA, E-value=7.6e-73, PFam score of 255.4
MSAGGRDEERRKLADIIHHWNANRLDLFEISQPTEDLEFHGVMRFYFQDKAAGNFATKCIRVSSTATTQDVIETLAEKFRPDMRMLSSPKYSLYEVHVSGERRLDIDEKPLVVQLNWNKDDREGRFVLKNENDAIPPKAQSNGPEKQEKEGVIQNFKRTLSKKEKKEKKKREKEALRQASDKDDRPFQGEDVENSRLAAEVYKDMPETSFTRTISNPEVVMKRRRQQKLEKRMQEFRSSDGRPDSGGTLRIYADSLKPNIPYKTILLSTTDPADFAVAEALEKYGLEKENPKDYCIARVMLPPGAQHSDEKGAKEIILDDDECPLQIFREWPSDKGILVFQLKRRPPDHIPKKTKKHLEGKTPKGKERADGSGYGSTLPPEKLPYLVELSPDGSDSRDKPKLYRLQLSVTEVGTEKLDDNSIQLFGPGIQPHHCDLTNMDGVVTVTPRSMDAETYVEGQRISETTMLQSGMKVQFGASHVFKFVDPSQDHALAKRSVDGGLMVKGPRHKPGIVQETTFDLGGDIHSGTALPTSKSTTRLDSDRVSSASSTAERGMVKPMIRVEQQPDYRRQESRTQDASGPELILPASIEFRESSEDSFLSAIINYTNSSTVHFKLSPTYVLYMACRYVLSNQYRPDISPTERTHKVIAVVNKMVSMMEGVIQKQKNIAGALAFWMANASELLNFIKQDRDLSRITLDAQDVLAHLVQMAFKYLVHCLQSELNNYMPAFLDDPEENSLQRPKIDDVLHTLTGAMSLLRRCRVNAALTIQLFSQLFHFINMWLFNRLVTDPDSGLCSHYWGAIIRQQLGHIEAWAEKQGLELAADCHLSRIVQATTLLTMDKYAPDDIPNINSTCFKLNSLQLQALLQNYHCAPDEPFIPTDLIENVVTVAENTADELARSDGREVQLEEDPDLQLPFLLPEDGYSCDVVRNIPNGLQEFLDPLCQRGFCRLIPHTRSPGTWTIYFEGADYESHLLRENTELAQPLRKEPEIITVTLKKQNGMGLSIVAAKGAGQDKLGIYVKSVVKGGAADDGRLAAGDQLLSVDGRSLVGLSQERAAELMTRTSSVVTLEVAKQGAIYHGLATLLNQPSPMMQRISDRRGSGKPRPKSEGFELYNNSTQNGSPESPQLPWAEYSEPKKLPGDDRLMKNRADHRSSPNVANQPPSPGGKSAYASGTTAKITSVSTGNLCTEEQTPPPRPEAYPIPTQTYTREYFTFPASKSQDRMAPPQNQWPNYEEKPHMHTDSNHSSIAIQRVTRSQEELREDKAYQLERHRIEAAMDRKSDSDMWINQSSSLDSSTSSQEHLNHSSKSVTPASTLTKSGPGRWKTPAAIPATPVAVSQPIRTDLPPPPPPPPVHYAGDFDGMSMDLPLPPPPSANQIGLPSAQVAAAERRKREEHQRWYEKEKARLEEERERKRREQERKLGQMRTQSLNPAPFSPLTAQQMKPEKPSTLQRPQETVIRELQPQQQPRTIERRDLQYITVSKEELSSGDSLSPDPWKRDAKEKLEKQQQMHIVDMLSKEIQELQSKPDRSAEESDRLRKLMLEWQFQKRLQESKQKDEDDEEEEDDDVDTMLIMQRLEAERRARLQDEERRRQQQLEEMRKREAEDRARQEEERRRQEEERTKRDAEEKRRQEEGYYSRLEAERRRQHDEAARRLLEPEAPGPNSYPGSTGAAVGAHDACRDAKEKRSKSQDADSPGSSGAPENLTFKERQRLFSQGQDVSNKVKASRKLTELENELNTK

SEQ ID NO: 41288 - protein, 2348 aa, Homo sapiens
  DOMAIN (1826)..(1837): Trp-Asp (WD) repeat proteins proteins domain identified by eMATRIX, accession number BL00678, p-value=1.000e-09, raw score of 9.67
  DOMAIN (163)..(473): Ras association (RalGDS/AF-6) domain identified by PFam, accession name RA, E-value=1.3e-72, PFam score of 254.7
MSAGGRDEERRKLADIIHHWNANRLDLFEISQPTEAHRGPRRPPQPPSPCRGVSRGRAGRAGAGGARQSLVPLSGRSPGGSPGPPPPPPRARRGPGLIPGGAGGAAARGAGALHLQPGCGSRRPFAVAGMEPVTRAVLRVHKLAGCQLGGESQYHKVREDLEFHGVMRFYFQDKAAGNFATKCIRVSSTATTQDVIETLAEKFRPDMRMLSSPKYSLYEVHVSGEERRLDIDEKPLVVQLNWNKDDREGRFVLKNENDAIPPKKAQSNGPEKQEKEGVIQNFKRTLSKKEKKEKKKREKEALRQASDKDDRPFQGEDVENSRLAAEVYKDMPETSFTRTISNPEVVMKRRRQQKLEKRMQEFRSSDGRPDSGGTLRIYADSLKPNIPYKTILLSTTDPADFAVAEALEKYGLEKENPKDYCIARVMLPPGAQHSDEKGAKEIILDDDECPLQIFREWPSDKGILVFQLKRRPPDHIPKKTKKHLEGKTPKGKERADGSGYGSTLPPEKLPYLVELSPGRRNHFAYYNYHTYEDGSDSRDKPKLYRLQLSVTEVGTEKLDDNSIQLFGPGIQPHHCDLTNMDGVVTVTPRSMDAETYVEGQRISETTMLQSGMKVQFGASHVFKFVDPSQDHALAKRSVDGGLMVKGPRHKPGIVQETTFDLGGDIHSGTALPTSKSTTRLDSDRVSSASSTAERGMVKPMIRVEQQPDYRRQESRPDISPTERTHKVIAVVNKMVSMMEGVIQEVDQVDQKQKNIAGALAFWMANASELLNFIKQDRDLSRITLDAQDVLAHLVQMAFKYLVHCLQSELNNYMPAFLDDPEENSLQRPKIDDVLHTLTGAMSLLRRCRVNAALTIQLFSQLFHFINMWLFNRLVTDPDSGLCSHYWGAIIRQQLGHIEAWAEKQGLELAADCHLSRIVQATTLLTMDKYAPDDIPNINSTCFKLNSLQLQALLQNYHCAPDEPFIPTDLIENVVTVAENTADELARSDGREVQLEEDPDLQLPFLLPEDGYSCDVVRNIPNGLQEFLDPLCQRGFCRLIPHTRSPGTWTIYFEGADYESHLLRENTELASILRAQPLRKEPEIITVTLKKQNGMGLSIVAAKVTHTASLPWAAELMTRTSSVVTLEVAKQGAIYHGLATLLNQPSPMMQRNRRGSGKPRPKSEGFELYNNSTQNGSPESPQLPWAEYSEPKKLPGDDRLMKNRADHRSSPNEQTPPPRPEAYPIPTQTYTREYFTFPASKSQDRMAPPQNQWPNYEEKPHMHTDSNHSSIAIQRVTRSQEELREDKAYQLERHRIEAAMDRKSDSDMWINQSSSLDSSTSSQEHLNHSSKSVTPASTLTKSGPGRWKTPAAIPATPVAVSQPIRTDLPPPPPPPPVHYAGDFDGMSMDLPLPPPPSANQIGLPSAQVAAAERRKREEHQRWYEKEKARLEEERERKRREQERKLGQMRTQSLNPAPFSPLTAQQMKPEKPSTLQRPQETVIRELQPQQQPRTIERRDLQYITVSKEELSSGDSLSPDPWKRDAKEKLEKQQQMHIVDMLSKEIQELQSKPDRSAEESDRLRKLMLEWQFQKRLQESKQKDEDDEEEEDDDVDTMLIMQRLEAERRARDEERRRQQQLEEMRKREAEDRARQEEERRRQEEERTKRDAEEKRRQEEGYYSRLEAERRRQHDEAARRLLEPEAPGLCRPPLPRDYEPPSPSPAPGAPPPPPQRNASYLKTQVLSPDSLFTAKFVAYNEEEEEEDCSLAGPNSYPGSTGAAVGAHDACRDAKEKRSKSQDADSPGSSGAPENLTFKERQRLFSQGQDVSNKVKASRKLTELENELNTKSCSWDSAVRLWEGPVQDVRKLRENLAGGTDASISHPSTQLKRLNSWLRAPYENLMPDDLRWKSFIPKPPYPQPVDKLSSTKPAPDGKKHSRAAQDGSSLPRARVFVSGVRCVPRMKVMADEQNSRVVGQRRQDSRTGNGKRCPSSEIGTGQRGAQKACAGSLQSVHEAQVRPQRPRFSTPPHRGLSFRVNFGGGSFKPQQPPSPQARCPVSPSPRRPHKPGTEDTGGNTEAQRAPPAQSGLPVPTQARSPVFLLPTAKSPKAQGSPTLSADHPGAMDFLRTAVPRRVSPRGSGTVDFLGFAVPRRVSPRGSGTADFLGFAVPRRVSPRGSGTVDFLGIAVPRPDSGLGLAPRRHRRQRATPSSHAGIAESHVGIPGLTRSPSSRTFCLPAPGRDPQAQPWGCLPRRLLWLRAPRAPGSPGVVPTVFPAAYKGKMEKSRSEATRISTLYNKQQCLQRNTRSALSQLGHVIQKLNQDIQAFHSSSRVLLRDYQDEYQDRVSEIVTAVQRTQQSAETLLADTKFHR

SEQ ID NO: 41289 - protein, 1076 aa, Homo sapiens
  DOMAIN (945)..(960): WILM'S TUMOUR PROTEIN SIGNATURE domain identified by eMATRIX, accession number PR00049D, p-value=2.068e-09, raw score of 0.00
  DOMAIN (81)..(171): PDZ domain (Also known as DHR or GLGF) domain identified by PFam, accession name PDZ, E-value=6e-09, PFam score of 43.2
MGGQTQRDVGVRVETIHRRDVWTDTEGCRGEGGSHPQETCGQTQRDVGVRVETIHRRDVWTDTEGCRGEGGSHPQETCGQTQRDVGGAGQDKLGIYVKSVVKGGAADVVSIILKEVHFQCVIYSANDDGRLAAGDQLLSVDGRSLVGLSQERAAELMTRTSSVVTLEVAKQGAIYHGLATLLNQPSPMMQRKQFLWNFNDNQGVENKILRDTEYALIPVSDRRGSGKPRPKSEGFELYNNSTQNGSPESPQLPWAEYSEPKKLPGDDRLMKNRADHRSSPNVANQPPSPGGKSAYASGTTAKITSVSTGNLCTEEQTPPPRPEAYPIPTQTYTREYFTFPASKSQDRMAPPQNQWPNYEEKPHMHTDSNHSSIAIQGNETDTTDTAWSVLWEKRPQQGMELLSLGREPGHSCMHGRAFQEEGKAQRCVVVQQEPWRVTRSQEELREDKAYQLERHRIEAAMDRKSDSDMWINQSSSLDSSTSSQEHLNHSSKSVTPASTLTKSGPGRWKTPAAIPATPVAVSQPIRTDLPPPPPPPPVHYAGDFDGMSMDLPLPPPPSANQIGLPSAQVAAAERRKREEHQRWYEKEKARLEEERERKRREQERKLGQMRTQSLNPAPFSPLTAQQMKPEKPSTLQRPQETVIRELQPQQQPRTIERRDLQYITVSKEELSSGDSLSPDPWKRDAKEKLEKQQQMHIVDMLSKEIQELQSKPDRSAEESDRLRKLMLEWQFQKRLQESKQKDEDDEEEEDDDVDTMLIMQRLEAERRARACLSLLGSATSMGTVTFVQVSRRVLECGRQSSEWDRIPGQGPKLSKFFLTPEILAERFHPLLWPLVQEACGELWLVLSTQGQGVTDGFLDEERRRQQQLEEMRKREAEDRARQEEERRRQEEERTKRDAEEKRRQEEGYYSRLEAERRRQHDEAARRLLEPEAPGLCRPPLPRDYEPPSPSPAPGAPPPPPQRNASYLKTQVLSPDSLFTAKFVAYNEEEEEEDCSLAGPNSYPGSTGAAVGAHDACRDAKEKRSKSQDADSPGSSGAPENLTFKERQRLFSQGQDVSNKVKASRKLTELENELNTK

SEQ ID NO: 41290 - protein, 66 aa, Homo sapiens
  DOMAIN (19)..(53): Tropomyosins proteins domain identified by eMATRIX, accession number BL00326A, p-value=2.627e-10, raw score of 14.01
  misc_feature (1)...(66): Xaa = X or * as defined in Table 2
TLSGGEPQRLEAERRARLQDEERRRQQQLEXMRKREAEDRARQEEERRRQEEERTKRDAEEKVMVL

SEQ ID NO: 41291 - protein, 23 aa, Homo sapiens
TPIVPLIEAPSPHHWQPHVINGI

SEQ ID NO: 41292 - protein, 144 aa, Homo sapiens
  DOMAIN (80)..(127): + TRANSPORT EXCHANGER NA H TRANS domain identified by eMATRIX, accession number PD01672I, p-value=8.000e-11, raw score of 17.98
VLFCGITQAHYTYNNLSVESRSRTKQLFEVLHFLAENFIFSYMGLALFTFQKHVFSPIFIIGAFVAIFLGRAAHIYPLSFFLNLGRRHKIGWNFQHMMMFSGLRGAMAFALAIRDTASYARQMMFTTTLLIVFFTVWIIGGGTN

SEQ ID NO: 41293 - protein, 511 aa, Homo sapiens
  DOMAIN (332)..(379): + TRANSPORT EXCHANGER NA H TRANS domain identified by eMATRIX, accession number PD01672I, p-value=1.917e-09, raw score of 17.98
  DOMAIN (92)..(406): Sodium/hydrogen exchanger family domain identified by PFam, accession name Na_H_Exchanger, E-value=1.1e-26, PFam score of 102.1
RRCCWSPGRGGVGGSGTTEPGDAALPCPGRVAQAPPRRLLLLLPLLLGRGLRVTAEASASSSGAAVENSSAMEELVTEKEAEESHRPDSVSLLTFILLLTLAILTIWLFKYCRVHFLHETGLAMICGLIVGVILRYGTPGTRGRDKLLNCTQEDQAFSTLVVDVSGKFFEYTLKREISPGKINSVKQNDMLGKSVGIFLGIFSGCFTMGAVTGVVTALVTKFTKLDCFPLLETALFFLMSWSTFLLAEACGFTGVVAVLFCGITQAHYTFNNLSVESRSRSKQLFEAENFIFSCMILALFTFQKHVFSPVFIIGAFVAVFLGRAAHIYPLSFFLSLGRRHKIGWNFQHTMMFSGLRGAMAFALAICDTASYARQMTFPTTPFIVFFTIWIIGGGTTPMLSWLNIRVSIKEPSKEDHNEHHRQYFRVGVDPDQDPPPNNDSFQVLQGDSPDSARGNWTKQESTWIFRRWYSFDHNYLKPILTHSGSPLTTTLPPVRKLRHWKMKATEVESDG

SEQ ID NO: 41294 - protein, 225 aa, Homo sapiens
  misc_feature (1)...(225): Xaa = X or * as defined in Table 2
VPVAPIFHFSHFSPAPTVFTQSRQDSMQCILRQHCHLILISRSSSLVPAGLRGAMAFALAIRDTASYARQMMFTTTLLICPELLALLLSLSHSRSLLLHGYHGPSXYALFFSLSFSLVTWVGAKPGRYQSLIFVVVVGCTFQNQEPLREEDSDFILTEGDLTLTYGDSTVTANGSSSSHTASTSLEGSRRTKSSSEEVLERDLGMGDQKVSSRGTRLVFPLEDNA

SEQ ID NO: 41295 - protein, 105 aa, Homo sapiens
GPLRPTAPGGIRGRETPTGRTPSQNPLPVFSPAGEHSGLSGHSSPVQPHSESTIPPDVKIPRERPPAWLQECGSFIFPRTVPVEAFGPQVLQSSRGQDGDTKHSK

SEQ ID NO: 41296 - protein, 287 aa, Homo sapiens
  misc_feature (1)...(287): Xaa = X or * as defined in Table 2
GPPTPRRPRPLPSSLPSRRSRDPPRIPLCAXFPQTRKQIARSEPDXTWASQSSTSIPRIWRFVHAXKFSTAPLTATPPPGKMCSAGCRETVKTTXPPLRGGPAPFLLPSRAVARGTRPGFRSALSFRRPGNRSRGVNLIKLGLRSPPPPYPGFGGSYTPENSQPLPSLLLHPLEKCALRDAERQLKPPDHHLMVAWLIPDVWNGEGEPSPSHTRHSLRASSSNYVLRAPEGNLLARRLPRETAINLQPKACYKTLSHPESFSHFYNQFCPRRHQWLPAQPPGHFFLG

SEQ ID NO: 41297 - protein, 111 aa, Homo sapiens
  misc_feature (1)...(111): Xaa = X or * as defined in Table 2
NSPSRPRSSQRGVAGRRSEAGPVAVPXGGPKKGRGCXGNGRWGQRPRWMLRASGSGESTTPACSAENRHASXRKKRKRPGQVSWEETEETRSGHSQPRGHAEPLLHRPQRR

SEQ ID NO: 41298 - protein, 74 aa, Homo sapiens
  DOMAIN (13)..(26): LUTEOVIRUS ORF6 PROTEIN SIGNATURE domain identified by eMATRIX, accession number PR00910A, p-value=3.789e-12, raw score of 2.51
  misc_feature (1)...(74): Xaa = X or * as defined in Table 2
TILSSXSSSSSSSPSPSPSPSPSPSPSPSPSPSPSPSPSPSPSSSFFLRWSPALFPRSLSFSLFPGTGTPFSCP

SEQ ID NO: 41299 - protein, 155 aa, Homo sapiens
  misc_feature (1)...(155): Xaa = X or * as defined in Table 2
KEYLVRTKXQKGKGENPLVKITFRPPPGLRTYPSAPWSARSTYGRAAAVWRPHSPSAPRRGTHPWPAGHRGQRASGEGVGTHTHAHMSSVCACSTHTCWSRNCKDPREDRGRGLTVLLEAAVCNSCLLLVLKTPRNPQLPILYTDSDTKSSTGNP

SEQ ID NO: 41300 - protein, 497 aa, Homo sapiens
MAAASFYITGHMQKGKGKGRMHKPSSHSPTRSLHEAQTLLCTYSHLLQDTGDGYQMESVKRAQVCPVWRCGGLEGCFMEGHVGAACSHSQQGQFGDCFALKYTLWVHKSNLPMFLVWKKLWGFPKVYLRIQLVRKAFIVSPTDSKKPSPSQALCKSENPRPSKDKTGHTSDSGASVIKHGLNPEKIFMQVHYLKGYFLLRFLAKRLGDETYFSFLRKFVHTFHGQLILSQAPSHPAKQICIQAHVSHPFALSIAFIVIAIVCNYVFIMGLFVSFRCPPLYVYAQQGQTILFHQYLAHDWHTVDTVSPQPLQTWPIATSLSTATVLDTAQCLVRQTRVVDESAKQSCPSNRHSTFCLCEFDSSRYLMPPPPGVVDRPLGLSAVASQVFTGLTCASGAQMGTVGQSLHKGQISLPPLLQESWFAASWLQDGHHCSIHQACGEEPLQRERRAGAECGLARQVRAEVTKWIGVNRRPRKRKRREKEEVFEKRVIYVTSVEE

SEQ ID NO: 41301 - protein, 282 aa, Homo sapiens
  misc_feature (1)...(282): Xaa = X or * as defined in Table 2
RNVIKLKGWSRPSKQQDNPTLRPGPPSPAGGFQQLLMRMRRPLAGGGKSWGIAHFYKPLQRERRAGAECGLARQVRAEVTKWIGVNRRPRKRKRMEKEEVFEKLLPDQLGLLLEHLLEQKTLSPRTLQSLQRTYHLQDQDAEVRHRWCELIVKHKFTKAYKSVERFLQEDQAMGVYLYGELMVSEDARQQQLARRCFERTKEQMDRSSAQVVAEMLFXRGQDRFSLKKCDKVKGMVKTQQATGQPDSPPRPALTGRRVPATADADEKAFGGWRKILGYRTFL

SEQ ID NO: 41302 - protein, 156 aa, Homo sapiens
  DOMAIN (19)..(42): LACY PROTON/SUGAR SYMPORTER SIGNATURE domain identified by eMATRIX, accession number PR00174A, p-value=3.132e-09, raw score of 8.67
  misc_feature (1)...(156): Xaa = X or * as defined in Table 2
RRMHAYVSLDPLERPPFFFFFLFFFFFFFFLRRSFALVAQAGVHWRDLGSPQPPPPRFKXFSCLSLPSSWNYRHAPPRPANFVFLVETGLQLPTSGDLPASASQSVGITGVSHCAWPGNWLLKETRCGSSVGRQITGPITPDAWVDPGIPDRYLQA

SEQ ID NO: 41303 - protein, 98 aa, Homo sapiens
  misc_feature (1)...(98): Xaa = X or * as defined in Table 2
FFFFFLRQSFALVAQAGVQWRDLCSPQPPPPRFKXFSCLSLPSSWNYRHGPPHPANFXFLVEMEFHHVGQACLKLLPSGDPPALASQSAGITGVSHRA

SEQ ID NO: 41304 - protein, 144 aa, Homo sapiens
APSVRSGNERDLARDEEAQETQVRGCHASGGCTPAATAGASPPAWAGRRGTGQRLRSQPRQTGRQPPRVQPLAPPPGAPAPLPNPQNCRRKTRSHPRFWAGTLAPGPCPGLWCLPGLVQVDVLAAGRCDHLSCLPPLCPQAFLL

SEQ ID NO: 41305 - protein, 62 aa, Homo sapiens
  misc_feature (1)...(62): Xaa = X or * as defined in Table 2
GAATGEGGCCRLPGHPALASTAXAIPCRGPRVQETSPPPVLGWDPGSRAMSRALVFAWVGAG

SEQ ID NO: 41306 - protein, 302 aa, Homo sapiens
  DOMAIN (84)..(119): Prion protein domain identified by eMATRIX, accession number BL00291A, p-value=7.181e-10, raw score of 4.49
  misc_feature (1)...(302): Xaa = X or * as defined in Table 2
GLGDPGVPVLRSGGLGPPADLKGDQAVAEXLHEASGVTEHHPSAQPGPGGEAAEPAHLIVXEPEGGSPGHPGGGPGHPGXSEGPAGGKPGPAGGGSAQGCRRSSEPSGTXSGRSPRXGPHGHPDCRTHPAREGAQVHSRSPLPGGAPVRRGCSQGPEQRLQQEDFLRVQQLSAAGPLRPQLYPQVWLCPDEHQLLEQYPRSYFSERIDVFKPCGVQQGCPVLDRASSKISPEDAAGSVVRLRSLWAASGLQQGASGLATFLQLLTCGVLWPDEELVHLLLDEVVASAALRCPDPVPMEPTCG

SEQ ID NO: 41307 - protein, 514 aa, Homo sapiens
  DOMAIN (162)..(182): INHIBIN BETA B CHAIN SIGNATURE domain identified by eMATRIX, accession number PR00671C, p-value=9.379e-09, raw score of 4.18
  misc_feature (1)...(514): Xaa = X or * as defined in Table 2
VLQLLKAMRLELFLPPGGFMVLLASGVKLQTFATQVPSWLHPVDPSPGLEVELPASPVQCAHTPQPLGGRWDWVPWSRGQRSSGRLGPHGSPWRRWEAQAWQPAGPKPCPVGSXGPVRNRGQRRWAGTAGDPVHPPQPLAQVLSPSLPGADRAGQLLRVQGPPSPCPPGTPAGPQGRCAAPVPTGVSPSTPPCKLREQAPALASPERGSHSAAVGXRAPQVLPKWXPELMFRWVRSFFLLVGSWLTSGVKLHPFVVSVTALKGDASGVIPSSRWVHGLAGLRCEAADLRDSGAQLASPSGSLTRTGGGAACQSRAVCPHSSAFGWSMGLGAMEQGAALIGEARASREPMEEVGGSGMAACRSQALPRGQLRPSEKSRAAPVGWHCWGPSTPSAATGPGAKPLIARGRQGRPAAQSAGPAKPMPTRNSSWPARAVRSPGSHWRLSLHTSLQAERAGSGLGQPRKGLPQCSSGLKGSSSAAKVVAQAEEAQRASEGCEDYLARCHLSIRKMRRRNQ

SEQ ID NO: 41308 - protein, 213 aa, Homo sapiens
  misc_feature (1)...(213): Xaa = X or * as defined in Table 2
EPPGPTGPPSPQSPWHPGLPGRWSSTHVVFTHLHLAGPGWSCDHRWMGKQLPVSLSASGVQGVPRFRSQDMYQSSRNKFPSGAAHVPQEWAVPWKNQGNTHQSSRPSESGCCAQAEGSNQCHQRQEAAGPSRLSLPDGGRRLETPRHPNGPWYWNNSPQRLNXWRRGDPSWPEPQGKPHTGGARVPACQRREICLSPFRGPRRRQKENIYEYL

SEQ ID NO: 41309 - protein, 78 aa, Homo sapiens
FHGHPAPGEMRGWPRVTKRSPAQSGKTHFPPGSPGPPDTSTESIFRRAWKAPGFPGRGRTADPETARCGAWDEIVEPV

SEQ ID NO: 41310 - protein, 191 aa, Homo sapiens
  misc_feature (1)...(191): Xaa = X or * as defined in Table 2
GPLSQCPPLPRLLPPLGVYSKGRAPHADTHSPGHRRTHAHAQPAAAAATATRXQRRRRLPPRRTPFRRPAARPDRRVPAHSSAVLPRPGKPGAFQALRKMDSVDVSGGPGEPGGKLGFARLRRAPPDRLPGCPSSHSFQTQSLSFMAHNVDEPLESATSLLGLLRRSWFCFTWQKQTVYWSTGRIRHSGEK

SEQ ID NO: 41311 - protein, 46 aa, Homo sapiens
  misc_feature (1)...(46): Xaa = X or * as defined in Table 2
SISLMNIDVKILNKILANQIQQHIRKLIHHDXVGFIPCLRILVIYI

SEQ ID NO: 41312 - protein, 77 aa, Homo sapiens
  misc_feature (1)...(77): Xaa = X or * as defined in Table 2
NQRLPQPFLPTTPPPPATRATXDEEKSPYPGPGSDKKCPTLQLPSPPTPSAGGFPPLGESGSPGGLVKAQIMEGISM

SEQ ID NO: 41313 - protein, 1859 aa, Homo sapiens
  DOMAIN (1248)..(1277): SODIUM CHANNEL SIGNATURE domain identified by eMATRIX, accession number PR00170F, p-value=2.831e-16, raw score of 11.07
  DOMAIN (396)..(1194): Ion transport protein domain identified by PFam, accession name ion_trans, E-value=2.1e-38, PFam score of 141.0
MQLRPEEDDEMPFICSLSGDNGIMGCHEIPPLKEQGRECCLSKDDVYDFGAGRQDLNASGLCVNWNRYYNVCRTGSANPHKGAINFDNIGYAWIVIFQVRPFRPGASLVYYVMDAHSFYNFIYFILLIIVSVREPGLLGVSFSTAQSPKCQGDSFPGVAAESLLLRGWVLWLPGGGREVRGPWPSSPGPVVIATQFSETKQREHRLMLEQRQRYLSSSTVASYAEPGDCYEEIFQYVCHILRKAKRRALGLYQALQSRRQALGPEAPAPAKPGPHAKEPRHYRKWPCIRRGTQAPHTLVQPIPATLASDPASCPCCQHEDGRRPSGLGSTDSGQEGSGSGSSAGGEDEADGDGARSSEDGASSELGKEEEEEEQADGAVWLCGDVWRETRAKLRGIVDSKYFNRGIMMAILVNTVSMGIEHHEQASAAQPGRACGRGVRAPGPCPGLDDTFVLNWGLIRKGGQVKAPGPWRWGCNVVFTSMFALEMILKLAAFGLFDYLRNPYNIFDSIIVIIRYPSPNPPGSRVLSVLRTFRLLRVLKLVRFMPALRRQLVVLMKTMDNVATFCMLLMLFIFIFSLRTDTGDTVPDRKNFDSLLWAIVTVFQVSGRCVFMFAGYNGMASTSPWASLYFVALMTFGNYVLFNLLVAILVEGFQAEVTVVLAEEAPPQGLRKTGRGRGGLDGGGLQFKLLAGNLSLKEGVADEVPDPMLVALGSRKSSVMSLGRMSYDQRSLVSPCGELWTGAAAFGHLVPQPWVCLWGADPNGNSFQSSSRSSYYGPWGRSAAWASRRSSWNSLKHKPPSAEHESLLSAERGGGARVCEVAADEGPPRAAPLHTPHAHHIHHGPHLAHRHRHHRRTLSLDNRDSVDLAELVPAVGAHPRAAWRAAGPAPGHEDCNGRMPSIAKDVFTKMGDRGDRGEDEEEIDYVSGGGAEGDLVRWDRTEVGAAVYKPDWCEVREDWSVYLFSPENRFRVLCQTIIAHKLFDYVVLAFIFLNCITIALERPQIEAGSTVSGCSLWAGQAFTAIFVGEMTLKAYLRSSWNVLDGFLVFVSIIDIVVSLASAGGAKILGPIGNIVLICCAFFIIFGILGVQVRGAQSGQGLGVDTRNITNRSDCMAANYRWVHHKYNFDNLGQVSTTVLALIRPDGWVNIMYNGLDAVAVDQQVGVAGTRPSLDYFISFLLIVSFFVLNMFVGVVVENFHKCRQHQEAEEARRREEKRLRRLEKKRRSEWVPVEGVGHRHTRLLIHSMCTSHYLDIFITFIICLNVVTMSLEHYNQPTVSPGLPPSPRLMFTTVFVLEAVLKLVAFGLRRFFKDRNRSVMGITLEEIEINAALPINPTIIRIMRVLRIARGEGQGVGQGTGRALLDTVVQALPQVSTGDNWNGIMKVLLGGLGWRNQSCLSSLQFVSPLYFVSFVLTAQFVLINVVVAVLMKHLDDSNKEAQEDAEMDAELELEMAHGLGPGPRLPTGSPGAPGRGPGGAGGGGDTEGGLCRRCYSPAQVGRGWRGVRVAIKDSLEGELTIIDNLSGSIFHHYSSPAGCKKCHHDKQEVQLAETEAFSLNSDRSSSILLGDDLSLEDPTACPPGRKDSKNFLCEMEEIPFNPVRSWLKHDSSQVSASQKGPEKGTGTGTLPKIALQGSWASLRSPRVNCTLLRQSTGPSSSAGSLQTTLEDSLTLSDSPRRALGPPAPAPGPRAGLSPAARRRLSLRGRGLFSLRGLRAHQRSHSSGGSTSPGCTHHDSMDPSDEEGRGGAGGGGAGSEHSETLSSLSLTSLFCPPPPPPAPGLTPARKFSSTSSLAAPGRPHAAALAHGLARSPSWAADRSKDPPGRAPLPMGLGPLAPPPQPLPGELEPGDAASKRKR

SEQ ID NO: 41314 - protein, 70 aa, Homo sapiens
LFWFRNNLFLFRKDHLNVAGRAHVWVNPTMSSVGPAAHLRCFVNSALFLGHRPCVQPHCLACAHLPTPPL

SEQ ID NO: 41315 - protein, 78 aa, Homo sapiens
LLPCHKFLFHQFLLGYLFLLGNFFFWFRSNLFLFSKAHLNVAGRAHVWVNPTMSSVGLAAHLRCFIHLDMLNGQRVYI

SEQ ID NO: 41316 - protein, 50 aa, Homo sapiens
TRRGGCPEEKVEELKLWEKCVHSLYRHSSSALDLQKIPGAIYIPSGFPLR

SEQ ID NO: 41317 - protein, 45 aa, Homo sapiens
  DOMAIN (1)..(28): Ribosomal protein L22p/L17e domain identified by PFam, accession name Ribosomal_L22, E-value=9.9e-13, PFam score of 49.5
MRRRTYRAHGRINPYMSSPCHIEMILTEKEQIVPKPKKEGAHTKK

SEQ ID NO: 41318 - protein, 54 aa, Homo sapiens
  misc_feature (1)...(54): Xaa = X or * as defined in Table 2
RRKCIPGRRNSKHKGPDGAGRPXVCREQQEGQCAWTGYPGAQGPDPYCGKGPYS

SEQ ID NO: 41319 - protein, 151 aa, Homo sapiens
  misc_feature (1)...(151): Xaa = X or * as defined in Table 2
LKRTKCDQLLKTSFLDLGRGPILKWLCTSKWGHQQIIIRAXGTEYKTTSFFFFFETASRLCHPGWECSGAISAHSXFLLPGSCHSPASASXVAVTTDTREHAQLIFFXHFSRDGFHVVARWLDLLTCDLPLSLQVLGYRNYIIIVRQLPSR

SEQ ID NO: 41320 - protein, 91 aa, Homo sapiens
  misc_feature (1)...(91): Xaa = X or * as defined in Table 2
SFKTAPPGFFFSFXLHLILMLKFTPGAIKLVFLQFLLGISFFFLGKPPSSWFRNESCSVFRKESSQSWQGRAHVWGXSDPWSSGRSRRAHL

SEQ ID NO: 41321 - protein, 186 aa, Homo sapiens
  misc_feature (1)...(186): Xaa = X or * as defined in Table 2
VHTTEATCTTTGAKPCPWPSKLATRQDHSVLSTSNPRGPTPHKSGSPETAGALSSGDAGSRGEGPRTVSSERSSPGKGGSTLLGTTAXGPGPAHFASAVLGPSSKSLQAASXEVDSFPSSLLKTAVSVLASTVRLSVSFMPPFITVSVTSSVISASSSPSELASMATLPGASGXAARAVNFELDEE

SEQ ID NO: 41322 - protein, 109 aa, Homo sapiens
  misc_feature (1)...(109): Xaa = X or * as defined in Table 2
SQTVSIVGELPIPRKRCEIGIWDAQKRCPRLTGPWATISVPTISKKATGNPQHPNHPRARYQINAEXWKVHFXTNTDRPSHECPCTLVVHRTLDQLRHKSSTSGGKTHG

SEQ ID NO: 41323 - protein, 105 aa, Homo sapiens
  misc_feature (1)...(105): Xaa = X or * as defined in Table 2
SVQRSVDHLXDHPXTSVDWELYLDGSSFANPCKVTLKTTTSPASVTPEADWSMHSQSMRNSLRDSFSLKFGLIIIHDFLTPTFNPLENPCGFLTRFCCVPNQISS

SEQ ID NO: 41324 - protein, 95 aa, Homo sapiens
  misc_feature (1)...(95): Xaa = X or * as defined in Table 2
PSQFHLKLLHLMLALLYPVGTCQVKDSSLLQKSTSVPPDSPQTGHSKLGPFNPGRFRXRPQCQPGVLPPDVELSCHSWSNVLWTTAAKTPIFCSY

SEQ ID NO: 41325 - protein, 426 aa, Homo sapiens
  DOMAIN (215)..(253): IMP dehydrogenase / GMP reductase proteins domain identified by eMATRIX, accession number BL00487B, p-value=8.200e-09, raw score of 16.59
NLALGMAMWNRPCQRLPQQPLVAEPTAEGEPHLPTGRELTEANRFAYAALCGISLSQLFPEPEHSSFCTEFMAGLVKWLELSEAVLPTMTAFASGLGGEGTDVSVQTLLKDPILKDDPTVITQDLLSFSLKDGHYDARARVLVCHMTSLLQVPLEELDVLEEMFLESLKEIKEEESEMAEASRKKKENRRKWKRYLLIGLATVGGGTVIGVTGGLAAPLVAAGAATIIGSAGAAALGSAAGIAIMTSLFGAAGAGLTGYKMKKRVGAIEEFTFLPLTEGRQLHITIAVTGWLASGKYRTFSAPWAALAHSREQYCLAWEAKYLMELGNALETILSGLANMVAQEALKYTVLSGIVAALTWPASLLSVANVIDNPWGVCLHRSAEVGKHLAHILLSRQQGRRPVTLIGFSLGARVIYFCLQEMAQEK

SEQ ID NO: 41326 - protein, 563 aa, Homo sapiens
  misc_feature (1)...(563): Xaa = X or * as defined in Table 2
CQRLPQQPLVAEPTAEGEPHLPTGRELTEANRFAYAALCGISLSQLFPEPEHRXVLLSCPLGTPVGLHSDAHYGQRLAVAVHVEGTLPFTSSTFAAASVFQKARPWQHPGEQMAFSGKPFLVAAVTSAGGSGAPSVGCTELISTSVLGYHTALEMAGLVQWLELSEAVLPTMTAFASGLGGEGADVFVQILLKDPILKDDPTVITQVHPTPGVKDGKLIFXARVLVCHMTSLLQVPLEELDVLEEMFLESLKEIKEEESEXESPATKTEGGGEDKDRKHPLMGDKMTESKTDLWIYEMGNAGVLLFRRYLWLQPKKKENRRKWKRYLLIGLATVGGGTVIGESSXRCAPLVAAGAATIIGSAGAAALGSAAGIAIMTSLFGAAGAGLTGKVQKEXVGAIEEFTFLPLTEGRQLHITIAVTGWLASGKYREDQEDQAALAHSREQYCLAWEAKYLMELGNALETILSGLANMVAQEALKYTVLSGKCPHLPWPASLLSVANVIDNPWGVCLHRSAEVGKHLAHILLSRQQVPGNGCVIGFSLGARVIYFCLQEMAQEKGEHGLL

SEQ ID NO: 41327 - protein, 39 aa, Homo sapiens
  misc_feature (1)...(39): Xaa = X or * as defined in Table 2
VSLLKAADNWLVNSYPFCNSVSSEFFFRXIRDFFLFWIH

SEQ ID NO: 41328 - protein, 64 aa, Homo sapiens
VSLDLAPPATPVSQSVWRGLCVSEAARTRTHTPIIHVTCLKWLGWLCFVKYRGRISPDIWLNFP

SEQ ID NO: 41329 - protein, 180 aa, Homo sapiens
  DOMAIN (8)..(53): kw TRANSCRIPTASE REVERSE II ORF2 domain identified by eMATRIX, accession number DM01354N, p-value=4.450e-34, raw score of 13.17
MQMDTKSYYEHLYAHKLENLEEMDKFLEKYKPPSLNQEELDTLNRPITRSKIEMISDEEKTLREQEIVASSPSLSGLKLGFESIYKIPFADALDLFRGRKVYLEDGFAYVPLKDIVAIILNEFRAKLSKALAGRAWLREGPENTFSYVGEWWESLPGSMSRQLWKGAGEKRRSSFRAVAK

SEQ ID NO: 41330 - protein, 55 aa, Homo sapiens
  DOMAIN (8)..(49): kw TRANSCRIPTASE REVERSE II ORF2 domain identified by eMATRIX, accession number DM01354I, p-value=1.507e-19, raw score of 15.55
  misc_feature (1)...(55): Xaa = X or * as defined in Table 2
QHLLRRWGRSGLLLNDRXVSNEIKMEINKFIELNNNSDTIYQTLWDTANTVLKFM

SEQ ID NO: 41331 - protein, 216 aa, Homo sapiens
MVDVGKWPIFTLLSPQEIASIRKACVFGTSASEALYVTDNDEVFVFGLNYSNCLGTGDNQSTLVPKKLEGLCGKKIKSLSYGSGPHVLLSTEGKEYGKADARWVYFDPTIVSVEILTVALDGSLALFLIYAIVKEKYYRQVRSWKCESLALLYQVSNSLGIKRQSWREQQVCGLSSPSGGLTGSAALGGGPFCGHPVVTPKSLAKHLYPVTRQFDS

SEQ ID NO: 41332 - protein, 195 aa, Homo sapiens
  misc_feature (1)...(195): Xaa = X or * as defined in Table 2
VGAGGRGWRFAAAVRRAAGGGLRPGPAPGPRAGGGGPRGAHLALLRRAGALRAGKEYGKADARWVYFDPTIVSVEILAVALDVSLALFLIYAIVKEKYYRHFLQITLCVCELYGCWMTFLPEWAHPEAPNLQQPATGWLYWLGFTLFFFXRCVGFLIPRNWLLWAVHGPRTSRKWHQKGNQFQWKEVFSGTFQNP

SEQ ID NO: 41333 - protein, 83 aa, Homo sapiens
  misc_feature (1)...(83): Xaa = X or * as defined in Table 2
ARGRAGVAGGPRXAAELPGLPRDPFPASRPLRRSDCLGGLIRHKPPDPGAGARVEGEALPSWSPGGALEEGVTXPGTRGPPWE

SEQ ID NO: 41334 - protein, 211 aa, Homo sapiens
  misc_feature (1)...(211): Xaa = X or * as defined in Table 2
RDQVRRGQGGEPARIQCPRRRLGEGPGAPNRLGPPARDPRCSPWPRADSPRDPNRLSSPQLPRPAYLGPACFPXPSWGVSRSLPSLAPWRPHRLPDSQRFPNGGSRSRATSGSWTWKSKECREWRPSGSRGTRGSSGSGAGSSGSSAGVGRRAGHGRWHLRXGPLFPAAPASATCPLWHGWKGASLDLGLQPWATFYPRVTGARGGRTLGP

SEQ ID NO: 41335 - protein, 101 aa, Homo sapiens
ESRMTRCASTPAAAGHGGHRSPSGPPRGAASCPPMTAAAGFAPAAAAHSPASACPRHPSAESGHSGAGCGVCGRSQSPWPPPHTSSRSWCAGSAGSAGPTR

SEQ ID NO: 41336 - protein, 175 aa, Homo sapiens
  misc_feature (1)...(175): Xaa = X or * as defined in Table 2
QICHSPPGNKAHSHLLPYQTPVPSSQYPPSPSRTLQLPFPTPWNPCQWPSRGSCGPSAVGTGPPFPTGIPSVPXAPSARGXHHSSACGCHPGCAGPQPARSPHGPAPASGCHTVSGCCHALLQSCLAPGRPSPAGTWPHPPPGGLPSAPGTEPCTAFEGFQPPCWLSQHPLSPCL

SEQ ID NO: 41337 - protein, 107 aa, Homo sapiens
  misc_feature (1)...(107): Xaa = X or * as defined in Table 2
TPQGGTAPSGGRHPWASASPHRLPPLXCSARPGCHSSRMRSPGTRPSGPLQDCHPPPRPQTPHAGSHHTSAPQAPAGTFXXRQRVAPGSSCWHLPQSWSCSAWLGGC

SEQ ID NO: 41338 - protein, 84 aa, Homo sapiens
  misc_feature (1)...(84): Xaa = X or * as defined in Table 2
AGRASKGGXNPSKAVQGSVPGAEGSPPEGGCGQGPAGLGLPGARQDCSRAXQHPPGPGGGQEVYLDISLAPGSTGIQGLEAKHL

SEQ ID NO: 41339 - protein, 44 aa, Homo sapiens
  misc_feature (1)...(44): Xaa = X or * as defined in Table 2
SSYVFKSILTAFGMTWMRLETIILSEVTQGXKTKHQMFSLICGS

SEQ ID NO: 41340 - protein, 163 aa, Homo sapiens
  misc_feature (1)...(163): Xaa = X or * as defined in Table 2
FVYFFRGELCKISSTLGFKGTGQGLQPSKVSXXVPSRPAGNGRPAYPETSQPPPGPSGGXHWLAGWQXGGPEPGWTCIWPXGSXGTEIGSPSQPGPEPAGVPSPRDAGSAATGCHTGLAGVVWPPRLCHRRVTDGRKSMKRCLSRSYCTSSVRASGGGAGRIT

SEQ ID NO: 41341 - protein, 136 aa, Homo sapiens
CMTATVISKTIITTNPVSTIVDVYTVEQLKGKALKNEGKADPSYGILYAYISTLNIDDETTKVVRNRCSSCGYIVNEASNMCTTCNKNSLDFKSVFLSFHVLIDLTDHTGTLHSCSLTGSVAEETLGCTVHEFLAM

SEQ ID NO: 41342 - protein, 45 aa, Homo sapiens
  misc_feature (1)...(45): Xaa = X or * as defined in Table 2
SFLWHPLGLHFHTHHXXXNYKSSSKXMVRIRVTFSKFIFVRNNYC

SEQ ID NO: 41343 - protein, 96 aa, Homo sapiens
  misc_feature (1)...(96): Xaa = X or * as defined in Table 2
PQCRLHLRQGLALSPKLECSSAITAHCSLELPGSSNPPSASRFXGSRSVAQAGVQQCYHSSLQPRTPGVKQSSLSFPFLRLQPKVSSATLPVRLQE

SEQ ID NO: 41344 - protein, 87 aa, Homo sapiens
LRKDDTQIREAFHIFVQSWRPALPSLPSLPLARALAETLNQPFGSGLITPSGILLNSQMLDFSWPNRTANHSAPSLVGFASLLSWGP

SEQ ID NO: 41345 - protein, 93 aa, Homo sapiens
AELLTSCLARGSVQPGKRPLSFLLPTVVRPAEGLCGTYLALGANGAARGLSGLTQVRFTPWLAFFSREPSCGLDCRCLSYLWLVSIPHAANMG

SEQ ID NO: 41346 - protein, 655 aa, Homo sapiens
  DOMAIN (152)..(649): Gamma-glutamyltranspeptidase domain identified by PFam, accession name G_glu_transpept, E-value=0.023, PFam score of -222.8
  misc_feature (1)...(655): Xaa = X or * as defined in Table 2
MAAENEASQESALGAYSPVDYMSITSFPRLPEDEPAPAAPLRGRKDEDAFLGDPDTGEARXPRPCPALGSPRSSFFCVKHPGSPLRETRKDPFSAAAAECSCRQDGLTVIVTACLTFATGVTVALVMQIYFGDPQVRGTNGEGEETGEWGVGXCLRNCGKGSSVDAAVAAALCLGIVAPHSSGLGGXGAVEVGVPQAYFLPPGLXASCAARALREETLQRSWETKVGTLVRRESSGESLFIALLLTQALICXVLAQDGFNVTHDLGQWGLGIWERHEVDGEGXNLXDLEPPPLPGSLLHRPDLAEVLDVLGTSGPAAFYAGGNLTLEMVAEVSARVVRVGACPKVPIAGHPRPHFFGVYRGDLSPGSQGPPSGEASQSMATSFWPFNLTSLVSREQALHWVAEVRLTRLPFPGFKDIRSGEIGYCHRADDMLRWVLGRTWGLQRQRWVWGKGQEKSSYELDGAPTAAQVLIMGPDDFIVAMVRYASSDSEPGTRDPLNQEGVGAGXRFSWPNRTANHSAPSLVGFASLLSWGPXGLXVGGAMAWLPLCGTYLALGANGAARGLSGLTQVRFTPWLAFFSREPSCGLDCRCLSXQSNLLQVDSECRAETSWGGHRDRXRKDSSQGCPWVHGSRRTNNFIIAVKDPRSPDAAGATIL

SEQ ID NO: 41347 - protein, 121 aa, Homo sapiens
  DOMAIN (3)..(58): Glyceraldehyde 3-phosphate dehydrogenase proteins domain identified by eMATRIX, accession number BL00071D, p-value=8.750e- 15, raw score of 19.39
  DOMAIN (3)..(120): glyceraldehyde 3-phosphate dehydrogenases domain identified by PFam, accession name gpdh, E-value=2.1e-24, PFam score of 84.1
  misc_feature (1)...(121): Xaa = X or * as defined in Table 2
SSMTTVHATTATQKTVGETLAXLLQNIIPVSTSVAEAMGKVIPEPDKRLTGMAFCVPTHNMLVVALICHLQKAAKYDGMRRCFNATTGITFNGHFVRLLSWDEFGSSNRVVDLMVHTASKE

SEQ ID NO: 41348 - protein, 46 aa, Homo sapiens
  misc_feature (1)...(46): Xaa = X or * as defined in Table 2
CLLLKSCSQEAAAALALPALGLVFDVFLXIYFVRTKYLRVGFRNFF

SEQ ID NO: 41349 - protein, 20 aa, Homo sapiens
MKALPSSQSCGPTSVNSPFH

SEQ ID NO: 41350 - protein, 22 aa, Homo sapiens
MKACHLGTPQFTGVSCGVQKAF

SEQ ID NO: 41351 - protein, 144 aa, Homo sapiens
  misc_feature (1)...(144): Xaa = X or * as defined in Table 2
MQVETGRGLGVGRREGRQGLAKPRQLPESLLHSARHPSKLGRPKVASLHEGTAQLTILWANFSQLSFPLDLFLIKRPLXXXXXXXXXXXXXXXXXXXXXXXXXXXXXXXXXXXXXXXXXXXXXXXXXXXXXXXRSSKLXRDDHA

SEQ ID NO: 41352 - protein, 26 aa, Homo sapiens
FLHFYFQTYSKQNNHLNCQKNSNFTQ

SEQ ID NO: 41353 - protein, 525 aa, Homo sapiens
  DOMAIN (177)..(195): Ubiquitin carboxyl-terminal hydrolases family 2 proteins domain identified by eMATRIX, accession number BL00972A, p-value= 6.318e-19, raw score of 11.93
  DOMAIN (459)..(519): Ubiquitin carboxyl-terminal hydrolase family domain identified by PFam, accession name UCH-2, E-value=7.5e-24, PFam score of 92.7
MVSRPEPEGEAMDAELAVAPPGCSHLGSFKVDNWKQNLRAIYQCFVWSGTAEARKRKAKSCICHVCGVHLNRLHSCLYCVFFGCFTKKHIHEHAKAKRHNLAIDLMYGGIYCFLCQDYIYDKDMEIIAKEEQRKAWKMQGVGEKFSTWEPTKRELELLKHNPKRRKITSNCTIGLRGLINLGNTCFMNCIVQALTHTPLLRDFFLSDRHRCEMQSPSSCLVCEMSSLFQEFYSGHRSPHIPYKLLHLVWTHARHLAGYEQQDAHEFLIAALDVLHRHCKGDDNGKKANNPNHCNCIIDQIFTGGLQSDVTCQVCHGVSTTIDPFWDISLDLPGSSTPFWPLSPGSEGNVVNGESHVSGTTTLTDCLRRFTRPEHLGSSAKIKCSGCHSYQESTKQLTMKKLPIVACFHLKRFEHSAKLRRKITTYVSFPLELDMTPFMASSKESRMNGQYQQPTDSLNNDNKYSLFAVVNHQGTLESGHYTSFIRQHKDQWFKCDDAIITKASIKDVLDSEGYLLFYHKQFLEYE

SEQ ID NO: 41354 - protein, 271 aa, Homo sapiens
  DOMAIN (211)..(258): kw TRANSCRIPTASE REVERSE II ORF2 domain identified by eMATRIX, accession number DM01354V, p-value=1.000e-40, raw score of 12.97
  DOMAIN (1)..(224): Reverse transcriptase domain identified by PFam, accession name rvt, E-value=2.6e-30, PFam score of 114.1
MELKTMVQELRDTSTSFSSQFDQVEERVSEIEDQMNEMKTNDKNHMTISIDAEKAFNKIQQPFMLKTLNKLGIDVTYLKIIRDIYGKPTANIILNGQKLGAFPLKTGTRQGCPLPPLLFNVVLEVLARAIRQEKEMKNIQLEKEEVKLSLFADDMIVYLENPIILAPNLLKLISNFSKVSGYKTHVQKSQAFLYTNNRQTESQITSELPFAIASKRIKYLGIQLTRDVKDLFKENYKPQLNEIKEDTNKWKNIPCSWIGRINIVKMAILPK

SEQ ID NO: 41355 - protein, 484 aa, Homo sapiens
  DOMAIN (116)..(163): kw TRANSCRIPTASE REVERSE II ORF2 domain identified by eMATRIX, accession number DM01354V, p-value=1.000e-40, raw score of 12.97
MAQELRDECTSLSSRFDQLEERVSEMEDHMNEMKREEKFRKKGIKRNEQSLQEIWDYVKRPNLRLIGVPETQNLLKLISNFSKVSGYKINVQKSQAFLYTNNRQTESQIISELPFTIASKRIRYLGIQLTRDVKDLFKENYKPLLNEIKEDTHKWKNIPCSWIGRINIVKMAILPKVIYRFNAMPIKLPLTFFTELEKTTLKFIWNQKRARIAKSILSQKNKTGGITLPDFKLYYKATVTKAAWYWYQNRDIDQWNRIEPSEIIPHIYNYLIFDKPEKNKKWGKDSLFNKWCWENWLAICRKLKLDPFLTPYTKINSRWIKDLHARSKTIKTLEENLGNTIQDIGIGKDFMSKTPKAMATKAKIDKWDLIKLKSFCTAKETTIRVNRQPKEWEKIFAIYSSDKRLISRIYEEIKQIYKKKTNNPINKWAKDMNRHFSKEDIYAANRHMKKCSSSLVIREMQIKTTMRYHLTPVRMVIIKKSGNN

SEQ ID NO: 41356 - protein, 540 aa, Homo sapiens; identical to SEQ ID NO: 40421
  DOMAIN (35)..(78): kw TRANSCRIPTASE REVERSE II ORF2 domain identified by eMATRIX, accession number DM01354T, p-value=1.000e-40, raw score of 9.48
  DOMAIN (2)..(157): Reverse transcriptase domain identified by PFam, accession name rvt, E-value=1.4e-06, PFam score of 23.8

SEQ ID NO: 41357 - protein, 395 aa, Homo sapiens; identical to SEQ ID NO: 39321
  DOMAIN (7)..(54): kw TRANSCRIPTASE REVERSE II ORF2 domain identified by eMATRIX, accession number DM01354V, p-value=1.000e-40, raw score of 12.97

SEQ ID NO: 41358 - protein, 715 aa, Homo sapiens
  DOMAIN (149)..(204): kw TRANSCRIPTASE REVERSE II ORF2 domain identified by eMATRIX, accession number DM01354Q, p-value=1.000e-40, raw score of 9.23
  DOMAIN (107)..(624): Reverse transcriptase domain identified by PFam, accession name rvt, E-value=2.7e-08, PFam score of 41.0
MKEKMLRAAREKGRVTHKGKPIRLTADLSAETPQARREWGPIFNILKEKNFQPRISYPDKLSFISEGEIKYFTDKQMLRDFVTTRPVLKELLKEALNMERNNWYQPLQKHAKNMPNSIILIPKPGRDTTKKENFRPISLMNIDAKILNKILANRIQQHIKKLIHHDQVGFIPGMQGWFNIHKSINVIQHINRTIDKNHMIISIDAEKAFDKIQQLFMLKTLNKLGIDGTYLKIRIKYLGIQLTREVKDLFKENYKPLLNEIKEDTNKWKNIPCSWVGRINIMKMAILPKVIYRFNAISNKLPMTFFTELEKTTLNFIWNQKRARIAKSILSQKNKAGGITLPDFKQYYKATVTKTAWYWYQNRDIDQWNRTEPSEITPHIYTYLIFDKPEKNKQWGKDSLFNKWCWENWLAVCRKLKLDPFLTPYTKINSRWIKDLNVRPKTIKTLEEILGITIQDTGMGKDFMSKTPKAMATKAKIDKWDQIKLKSFCTAKETTIRVNRQPTKWEKIFATYSSDKGLIFRIYNELKQIYKKKTNNPIKKWAKDMNRPFSKEDIYAAKKYMKKCSPSLAIREMQIKTTMRYHLTPVRMAIIKKSGNNRQTESQIMSELPITIASKRIKYLGIQLTKDVKDLFKENYKPLLNEIKEDTNKWKNIPCSWIGRINIVKMAILPKPTNVHVTNLAAQDTTALEAAQISLEGHPQEKEISVTAMPLLSPS

SEQ ID NO: 41359 - protein, 677 aa, Homo sapiens
  DOMAIN (110)..(151): kw TRANSCRIPTASE REVERSE II ORF2 domain identified by eMATRIX, accession number DM01354I, p-value=1.000e-40, raw score of 15.55
  DOMAIN (315)..(590): Reverse transcriptase domain identified by PFam, accession name rvt, E-value=8.6e-78, PFam score of 271.9
MGDFNTPLSTLDRSTRQTVKKDIQELNSALHQVDLIDIYRTLHPKSTEYTFFSAPHHTYSKIDHTVGSKALLSKCKRTEIITNCLSDHSAIKLELRINKLTQNHSTTWELNNLLLNDYWVHNEMKAEIKMFFETNENKDTTYQDLWDTFKAVGRGKFIALNAHKRKQERSKIDTLTSQIKELEKQEQTHSKARRRQEITKIRAELKETETQKPFKKSMNPGAEIQTTIREYYKHLYANKLENLEEMDKFLNTYTLPRLNQEEVESLNRTITGSEIEARINSLPTKKSPGPDGFTAEFYQRYKEEMVPFLLKLFQSIEKEGILPNSFYEASIILIPKPGRDTTKKENFRPISLMNIDAKILNKILANQIQQHIKNLIHHDQVGFIPGMQGWFNICKSVNVIQHINRTKDKNHMIFSIDAEKAFDKFQQLFMLKTLNKLGIDGMYLKIIRAIYDKLTANIILNGQKLEAFPLKTATRQGCPLSPLLFNIVLEILTRAIRQEKEIKGIQLGEEEVKLSLFADDMIVYLENPIISAQNLLKLISNFSKVSGYKINVQKSQAFLHTNNRQTESQMMSELPFTIASKRTKYLGIQLTRDVKDLFKENYKPLLNEIKEDTNKWKNIPCSWIGRINIVKMAILPKVIYRFNAIPIKLPMTFFTELEKTTLKFIWNQKIACIANQS

SEQ ID NO: 41360 - protein, 396 aa, Homo sapiens
  DOMAIN (28)..(83): kw TRANSCRIPTASE REVERSE II ORF2 domain identified by eMATRIX, accession number DM01354Q, p-value=1.000e-40, raw score of 9.23
  DOMAIN (1)..(230): Reverse transcriptase domain identified by PFam, accession name rvt, E-value=9.8e-11, PFam score of 49.1
MGVNKNIEEETYPRPISLMNIDAKILNKILANQIQQYIKKLIHHDQVGFIPGMQGWFNICKSINVIQHINRTKDKNHMIISIDAEKAFDKIQQRFMLKTLKKLELEKTALKFIWNQKRARITKSILSQKNKAGGITLPDFKLYYKATVTKTAWLPFILQSSTRVIVDQKGPVQNLLKLISNFSKVSGYKINVQKSQAFLYTNNRQTESQIMSKLPFTIASKRIKYLGIQLTRDVKDLFKENYKPLLSEIKEDTNKWKNIPCSWVGRINIVKMAILPKVIYRFNAIPIKLPMTFFTELEKTTLKFIWNQKRARIAKSILSQKNKAGGIMLRDFKLYYKATVTKTAWYWYQNRDIDQWNRTEPSEITPHIYNYLIFDKPEKNKQWGKDSLFNKWCWEN

SEQ ID NO: 41361 - protein, 117 aa, Homo sapiens
  DOMAIN (3)..(50): kw TRANSCRIPTASE REVERSE II ORF2 domain identified by eMATRIX, accession number DM01354V, p-value=1.000e-40, raw score of 12.97
MITIASKRIKYLGIQLTRDVKDLFKENYKPLLNEIKEDTNKWKNIPCSWVGRINIVKMAILPKITDSAMEMLSAKCHYLHILDISGCVLLTDQILEDLQIGCKQLRILKMQYCTNIS

SEQ ID NO: 41362 - protein, 485 aa, Homo sapiens
  DOMAIN (328)..(375): kw TRANSCRIPTASE REVERSE II ORF2 domain identified by eMATRIX, accession number DM01354V, p-value=1.000e-40, raw score of 12.97
  DOMAIN (426)..(483): Ribosomal protein L23 domain identified by PFam, accession name Ribosomal_L23, E-value=2.6e-06, PFam score of 25.7
MAILPKVIYRFNAISNKLPMTFFTELEKTTLNFIWNQKRARIAKSILSQKNKAGGITLPDFKQYYKATVTKTAWYWYQNRDIDQWNRTEPSEITPHIYTYLIFDKPEKNKQWGKDSLFNKWCWENWLAVCRKLKLDPFLTPYTKINSRWIKDLNVRPKTIKTLEEILGITIQDTGMGKDFMSKTPKAMATKAKIDKWDQIKLKSFCTAKETTIRVNRQPTKWEKIFATYSSDKGLIFRIYNELKQIYKKKTNNPIKKWAKDMNRPFSKEDIYAAKKYMKKCSPSLAIREMQIKTTMRYHLTPVRMAIIKKSGNNRQTESQIMSELPITIASKRIKYLGIQLTKDVKDLFKENYKPLLNEIKEDTNKWKNIPCSWIGRINIVKNGHTAQAHKCTCHQPGSPRHYSSGGSPNILGRAPTGERNKRDRYAIIKSLLTTGSAMKKIEDNNTLVDVKINKYQIKQVVKKLYDTDVVNTLIRPEGEKKADV

SEQ ID NO: 41363 - protein, 124 aa, Homo sapiens
  DOMAIN (7)..(54): kw TRANSCRIPTASE REVERSE II ORF2 domain identified by eMATRIX, accession number DM01354V, p-value=1.000e-40, raw score of 12.97
MSELPFTIVSKRIKYLGIQLTRDVKDLFKENYKPLLNEIKEDTNKWKNIPCSWIGRINIVKMAILPKIGYCVQDTTSANTTLVHQTTPSHVMPPNHHQLAFNYQELEHLQTVKNISPLQILPPS

SEQ ID NO: 41364 - protein, 163 aa, Homo sapiens
  DOMAIN (7)..(54): kw TRANSCRIPTASE REVERSE II ORF2 domain identified by eMATRIX, accession number DM01354V, p-value=1.000e-40, raw score of 12.97
MSELPFTIASKRIKYLGIQLTRDVKDLFKENYKPLLNETKEDTNKWKNILCSWIGRINIVKMAILPKVIYRFNAIPIKLPMTFFTELEKTTLTFIWNQKTARIAKTILSQKNKAGGITLPDFKLYYKATVTKTAWDMDEAGNHHSEQTTARTENQTLHVLTHS

SEQ ID NO: 41365 - protein, 419 aa, Homo sapiens; identical to SEQ ID NO: 39316
  DOMAIN (193)..(240): kw TRANSCRIPTASE REVERSE II ORF2 domain identified by eMATRIX, accession number DM01354V, p-value=1.000e-40, raw score of 12.97
  DOMAIN (6)..(206): Reverse transcriptase domain identified by PFam, accession name rvt, E-value=0.00053, PFam score of -12.8

SEQ ID NO: 41366 - protein, 1175 aa, Homo sapiens
  DOMAIN (205)..(250): kw TRANSCRIPTASE REVERSE II ORF2 domain identified by eMATRIX, accession number DM01354N, p-value=1.000e-40, raw score of 13.17
  DOMAIN (289)..(567): Reverse transcriptase domain identified by PFam, accession name rvt, E-value=1.5e-78, PFam score of 274.3
SSDGSWWTGFQWREWRQAGRSVNSWDNPKQEVRASSKDKSRGSIQEAMRMQSSAKLLCSAWTLAYSIAVRTLSSDSEGQPPLVIHRQTGSGEDLQQTPTDLQLRVLTIRRKTNKQKGHPHQNPISSRRQEITKIRAELKKIETQKPFKKINESRSWFFEKINKIDRLLARLIKKKIEKNQIDAIKNDKGNITTNPTEIQTTIREYYKHLYANKLEHLEEMDKFLDIYTLPRLNQEEVESVNRPITGSEIEAIINSLPTKKSPGPDRFTAELYQRYKEELVPFLLKLFQSIEKEGILPNSFYEASIILISKPGRDTTKKENFRPISLMNIDAKILNKILANQIQQHIKKLIHHHQVGFIPGMQGWFNILKSINVIHHINRTKDKNHMIISIEAEKAFDKIQQPFMLKTLNKLGIDGTYLTYLKIIRAIYDKPTANIILNGQKLEAFPFKTGTRQGCPLSPLLFNIVLEALARAIRQEKEIKGIQLGKEDVKLSLFADDMIVYLENPIVSAQNLLKLISNFSEVSGYKINVQKSQAFLYTNNRQTESQIMSELPFTIASKRIKYLGIQLTRDVKDLFKENYKPLLNEIKEDTNKWKNIPCSWIGRINIVKMAILPKTLNQKFSYWFRVNKHYIHQRTFPLKETEFNTIATLYNGASPAQHQKALEPMAIKHQDCHGSEELPFAVLLSSLNENSIRVICLVRQIGGKREFLGVQVVLKTKPELAFPVEGGLQGQRWISNYLYEGNGQGDEKEKSNTEDRKSLSMEMMFQPRQEGVERASEAKGRMGVGKDTEKQLLEEESARAQAWRRKCAGCMVTESRMLFWLSGDKGPQFVTMGPAEGPARSKNQHKKIESFKHLSLDNSSQEETPGPGQCHYHLQQLPSAPHKEAKATQHKRVCPSISSQSLTPSSLLSKDITTAPCKLNLTKDLCLMNEQPYRNVIGHKGSGLTVKDGVGKPSKTTEFFTEYFSYKKSYPKKPYKCIQRQLLLIQSQEELAGNHVQRPLALEFGALFSPGGASWGFGDLKSYLGLQNTVSTHLDKLPLLGERHMSHQTPMSHPWPLSGTLPLTSHKSPRTVHPPAEHHQSPLPIPLPVTAKGAFASVPPLLFPAPQGLSNEGRRCHGYILINISGITNNTEIYASLVTITLQHFLLPSEDCGKAPLQGRVEGREGVSQKEKRKT

SEQ ID NO: 41367 - protein, 791 aa, Homo sapiens; identical to SEQ ID NO: 35811
  DOMAIN (598)..(645): kw TRANSCRIPTASE REVERSE II ORF2 domain identified by eMATRIX, accession number DM01354V, p-value=1.000e-40, raw score of 12.97
  DOMAIN (419)..(611): Reverse transcriptase domain identified by PFam, accession name rvt, E-value=6.3e-06, PFam score of 14.5

SEQ ID NO: 41368 - protein, 585 aa, Homo sapiens
  DOMAIN (146)..(193): kw TRANSCRIPTASE REVERSE II ORF2 domain identified by eMATRIX, accession number DM01354V, p-value=1.000e-40, raw score of 12.97
  DOMAIN (13)..(159): Reverse transcriptase domain identified by PFam, accession name rvt, E-value=0.0024, PFam score of -22.0
MIPPLLIPRQTGSGEDLQQTPTDLHLRVLTVRRKTNKQKGHPHQNPICTSPSSKTKVLEVLARAFRQEKEIKGIQVGKEEVKLSLFADDMIVYLENPIVSAQNLLKLISNFSKVSGYKINVQKSQAFLYTNNRQTESQIMTELPFTTASKRIKYLGIQLTRDVKDLFKENYKPLLNEIKEDTNKWKNIPCSWVGRINIVKMAILPKVIYRFNAIPIKLPMTFFIELEKTTLKFIWNQKRARIAKSILSQKNKAGGITLPDFKLYYKATVTKTAWYWYQNRDIDQWNRTEPSEIMLHIYNYLIFDKPEKNKQWGKDSLFNIWCWENWLAICRKLKLDPFLTPYTKINSRWIKDLNVRSKTIKTLEENLGNTIQDIGMGKDFMSKTPKAMATKAKIDKWDLIKLKSFCTAKETTISVNRQPTEWEKIFAIYSSDKGLISRIYNELKQIYKKKTNNPIKKWVKDTNRHFSKEDIYAAKRHMTKCSSSLAVREMQIKTTMRYHLTPVEEVRAGEMAKTRRCQNVKGASEEGIRALALFLINLTVHMEGNHIDGDIEIQTNRSPLQAPGEICESFTALMAMQLLSKLFWS

SEQ ID NO: 41369 - protein, 533 aa, Homo sapiens
  DOMAIN (167)..(214): kw TRANSCRIPTASE REVERSE II ORF2 domain identified by eMATRIX, accession number DM01354V, p-value=1.000e-40, raw score of 12.97
  DOMAIN (1)..(180): Reverse transcriptase domain identified by PFam, accession name rvt, E-value=2.7e-11, PFam score of 51.0
MIFVSIDAEKALDKIQQRFMLKTLSKLGIDGTYLKIIRAIYDKPTASIILNGQKLEAFPLKTGTRQGCPLSPLLFNTVLEVLARAIRQEKEIKHIQLEQEEVKLSLFADDMIVYLENPIVSAQNLLKLISNFSKVSGYKINVQKSQTFLYTNNRQTESQIMSGLPFTIASKRIKYLGIQLTRDVKDLCKDNYKPLLNEIKEDTNKWKNIPCSWIGRINIVKMAILPKLLDHFTGFFGFLGLHFNFFLDLSELLTIQVLNSIPITSVISVWLRTIAGGYCAHLEVFWAVGLPQIEVMAGRQATSFPDQPCGERHPTFMLVHEPGHLNPLSVLRVRTFPPLRHHQANDMIVYLENPIVSAQNLLKLISNFSKDSGYKINVQKSQAFLCTNNRQTESQIMSELPLTIASKRIKYLGIQLTRDVKHLFKENYKPLLNEIKEDTNKWKNIPCSWVGRINIVKMAILPKMLHSAENKQWLSPKQRGGSMENRIDVWNIVLKGLSTSSNTVLDSSPIVLVTDSPGHIYIDLCGTYNNREN

SEQ ID NO: 41370 - protein, 278 aa, Homo sapiens
  misc_feature (1)...(278): Xaa = X or * as defined in Table 2
XVKPQTLANCFKENKIPRNPTYKGCEGPLQAELQTTAQRNQRGHKQMEEHSMLMDRKNQYCENGHTAQVLPDEGVQVPGVLNKELDKTQKQSNEAMKPQKQRCIENEKYTPQGVGPEVHEPELRAGAEGPQRRIRGGARLHPPRSQMGSQPRSGHEDTGNPGLGFLFHELQEGDNAKAVGTLVTEAGGDEEKKIRSKPEQGAGAEEESHFCAGAADPTIKDNQKRGGGDQEPSQQQPEASSPGLLRGGATTPILAASLQPQCVQQVAPEGARQHFPTL

SEQ ID NO: 41371 - protein, 608 aa, Homo sapiens
  DOMAIN (198)..(245): kw TRANSCRIPTASE REVERSE II ORF2 domain identified by eMATRIX, accession number DM01354V, p-value=1.000e-40, raw score of 12.97
  DOMAIN (1)..(211): Reverse transcriptase domain identified by PFam, accession name rvt, E-value=3.7e-06, PFam score of 17.8
MHTAPFIFPVKRTVPDPGEYWDGSPVATGPESLGVFMKLHLPATLATWGSSPTADSGGTWVAQAHLGPATQLEGAQAVPLSKRPAGRRAVGPGPPGICWGAEATEESEVLEVLARAIRQEKEIKGIQLGKEEVKLSLFADDMIVYLENPIVSAENLLKLISNFSKVSGYKINVQKSQAFLYTNNRQTESQIMGELPFTIASKRIKYLGIQLTRDVKDLFKENYKPLLKEIKEDTNKWKNIPCSWVGRINIVKMAILPKVIYRFNAIPIKLPMTFFTELEKTTLKFIWNQKRARIAKSILSQKNKAGGITLPDFKLYYKATVTKTAWYWYQNRDIDQWNRTEPSEIMPHIYNYLIFGKPEKNKQWGKDSLFNKWCWENWLAICRKLKLDPFLTPYTKINSRWIKDLNVKPKTIKTLEENLGITIQDIGVGKDFMSKTPKAMATKAKIDKWDLIKLKSFCTAKETTIRVNRQPTTWEKIFATYSSDKGLISRIYNELKQIYKKKTNNPIKKWAKDMNRHFSKEDIYAAKKHMKKCSSSLAIREMQIKTTMRYHLTPVRMAIIKKSGNNSLIVGASMDTSLLSGPIPYDIQHFDRFGSVTVRRGCAIEFYN

SEQ ID NO: 41372 - protein, 547 aa, Homo sapiens
  DOMAIN (95)..(142): kw TRANSCRIPTASE REVERSE II ORF2 domain identified by eMATRIX, accession number DM01354V, p-value=1.000e-40, raw score of 12.97
MDKFLDTYTLPRLNQEEVESLNRPITGAEIVAIINSLPTKKSPGPDGFTAEFYQRLISNFSKVSGYRINVQESQAFLYTINRQTESQIMSALPLTIASKRIKYLGIQLTRDVKDLFKENYKPLLNEIKEDTNKWKNIPCSWVGRINILKMAILPKNWKKTTLKFIWNHKRACIAKSILSQRNKAGGITLPDFELYYKATVTKTAWYWYQNRDIDQWNRTEPSEITPHIYNHMIFDKPDKNKKWGNDSLFDKWCWENWLAICRKLKLDPFLTPYTKINSRWIKDLNVRPKTIKTLEESLGNTIQDIGIGKDFMSKTSKAMTTKAKIDKWDLIKLKSFCTAKETTIRVNRQPTEWENIFAIYSSDKGLISRIYKELKQIYKKKTNNPIKKWAKDMNRHFSKEDIYAAKKHMKKCSSSLAIREMQIKTTMRYHLTPVRMAIIKKSGNNRTRENYFKIHMESKKSQNSQGNRKEKEQSWRHHATRLQTIVQGYTVAKTACYWYKNRPTDQSNRTENQEIRLHTYNHLIFDKPDKSNGETTPYSINGARITG

SEQ ID NO: 41373 - protein, 208 aa, Homo sapiens
  DOMAIN (107)..(154): kw TRANSCRIPTASE REVERSE II ORF2 domain identified by eMATRIX, accession number DM01354V, p-value=1.000e-40, raw score of 12.97
KLAQDRDALSPPLLFNIVLEVLARAIRQEKEIKGIQLGKEEVKLSLFADDMIVYLENPIVSAQNLLKLISNFSKVSGYKINVQKSQAFLYTNNRQTESQTMSELPFTIASKRIKYLGIQLTRDVKDLFKENYKPLLNEIKEDTNKWKNIPCSWVGRINIVKMAILPKVNYRFNAIPIKLPMTVFTELEKNYFKVHMGTKKEPASPSQS

SEQ ID NO: 41374 - protein, 92 aa, Homo sapiens
LPRASDAEPRKCVPSVVVGVVGMGHVPGIEKNWSTDLNIQEIMTVSRLAVKAAFFGLLGYSLYWMGRRTASLVLSLPAAQYCLQRVTEARHK

SEQ ID NO: 41375 - protein, 90 aa, Homo sapiens
CVPSVVVGVVGMGHVPGIEKNWSTDLNIQEIMTVPPPSVSGRVSRLAVKAAFFGLLGYSLYWMGRRTASLVLSLPAAQYCLQRVTEARHK

SEQ ID NO: 41376 - protein, 373 aa, Homo sapiens
  DOMAIN (54)..(314): TraB family domain identified by PFam, accession name TraB, E -value=9.3e-05, PFam score of -59.7
  misc_feature (1)...(373): Xaa = X or * as defined in Table 2
LELSFPPAGQRGVLSGDPQNLCTCPSGSWHVPRCWAVERQRPNLPRTVTQLVAEDGSRVYVVGTAHFSDDSKRDVVKVSAATRHIPDTGWCKLLPGSRDGLVRFPTYRVSMLKMDESTLLREAQELSLEKLQQAVRQVRSRGQGSGSGSGSKPPHITEQLGMAPGGEFREAFKEVGTGXGRGWPQGCGSQAVTFKRAIAALSFWQKVRLAWGLCFLSDPIRXGCPRDPGRPAGWSVGMAEMIGEFPDLHRTIVSERDVYLTYMLRQAARRLELPRASDGDGRPQAWDPLXGXGPRGHVPGIEKNWSTDLNIQEIMTXVPAPPCKPHPTSPQVAAFFGLLGYSLYWMGRRTASLVLSLPAAQYCLQRVTEARHK

SEQ ID NO: 41377 - protein, 107 aa, Homo sapiens
  misc_feature (1)...(107): Xaa = X or * as defined in Table 2
KDCQFXVGPEQKKALYKVHAPIQAALQLGPYEXADQKRTCVRFGRHTCETAAFTFWKSLGLDKVTKPRSSSSQLLALAIRSSPGSTTDACLLDSFSGKSRISSWFGS

SEQ ID NO: 41378 - protein, 124 aa, Homo sapiens
  misc_feature (1)...(124): Xaa = X or * as defined in Table 2
IRRESTHLQQALGTTPQDRLTCTGHSAQPPACSASPLPPGPPXSSAWPLPPSTRLARQKQAAATAQPXPLTTQTLGPWSSASTWTSAHKQPGAAAQEWTSTAGSRQLLAGASGSSPSSCSVWTN

SEQ ID NO: 41379 - protein, 183 aa, Homo sapiens
  DOMAIN (15)..(32): Zinc finger C2H2 type, domain proteins. domain identified by eMATRIX, accession number BL00028, p-value=1.600e-10, raw score of 16.07
  DOMAIN (13)..(64): Zinc finger, C2H2 type domain identified by PFam, accession name zf-C2H2, E-value=2.3e-10, PFam score of 47.9
KASVIVHSDVKPFKCKLCGKEFNRMHNLMGHMHLHSYSKPFKCLYCPSKFTLKGNLTRHMKVKHGVMERGLHSQGLGRGRIALAQTDGVLRSLEQEEPFDLSQKRRAKVPVFQSDGESAQGSHCHEEEEEDNCYEVEPYSPGLAPQSQQLCTPEDLSTKSEHAPEVLEEACKEEKEDASKGEW

SEQ ID NO: 41380 - protein, 102 aa, Homo sapiens
  DOMAIN (49)..(62): PROTEIN ZINC-FINGER METAL-BINDI domain identified by eMATRIX, accession number PD00066, p-value=1.000e-10, raw score of 13.92
  DOMAIN (28)..(84): Zinc finger, C2H2 type domain identified by PFam, accession name zf-C2H2, E-value=6.3e-05, PFam score of 29.8
  misc_feature (1)...(102): Xaa = X or * as defined in Table 2
GHHFQMNVVCRCSVWMLSLEPHPVGQIHSCXXERAKLCGKEFNRMHNLMGHMHLHSDSKPFKCLYCPSKFTLKGNLTRHMKVKHGVMERGLHSQVSRPSLEA

SEQ ID NO: 41381 - protein, 204 aa, Homo sapiens
  misc_feature (1)...(204): Xaa = X or * as defined in Table 2
MAISMVTTRSTTIRTTAAGCHYENDMAHNHSDRGGLPLKVVLTTPFLTPPGKGGGAAGALERRTEEGDRDAGGAAQEGGLTPTSVPPSSXHTLWLRTVDPEASTSPSTPRHPYPNRGGGGRALEPHPRRXVXAGCHYENDMAHNHSDRGGLPLKVVLTTPFLTPPGKGGGAAGALERRTEEGDRDAGGAAQEGGLTPTSVPPSS

SEQ ID NO: 41382 - protein, 918 aa, Homo sapiens
MHRLGRGEENLVRGRRSHESPKKYRDSKSGQNVPRLYKEAKEETKMTATKTVIRSLDYRVTVDSDTLASDAARLTCRHGLGNQSIREDRNGRSQKTVHTEGDMNMNIKKIVKQATVLTFTTALLAGGATQAFAKENNQKAYKETYGVSHITRHDMLQIPKQQQNEKYQVPQFDQSTIKNIESAKGLDVWDSWPLPNADGTVAEYNGYHVVFALAGSPKDADDTSIYMFYQKVLYRWNRQSSTSVIETNKTSVELSLPFDEDYIIEIKPFSDGGDGSSSEQNSNSKISRHNLRNWLFCQGFDWKDVLLFKESSLTCRANKSPLGELASYLVYTVSCTRVLNLWKLIGVSTSLTGEIDIFHMKDECEQLYGQLSLQKVQVGRQGTRAPVVGQFVPAGGAYVAFWYRPGVGGLGLWAGVTHASGGGKGAELEPWPSIREDRNGRSQKTVHTEGDMNMNIKKIVKQATVLTFTTALLAGGATQAFAKENNQKAYKETYGVSHITRHDMLQIPKQQQNEKYQVPQFDQSTIKNIESAKGLDVWDSWPLPNADGTVAEYNGYHVVFALAGSPKDADDTSIYMFYQKVLYRWNRQSSTSVIETNKTSVELSLPFDEDYIIEIKPFSDGGDGSSSEQNSNSKISRHNLRNWLFCQGFDWKDVLLFKESSLTCRANKSPLGELASYLVYTVSCTRVLNLWKLIGVSTSLTGEIDIFHMKDECEQLYGQLSLQKVQVGRQGTRAPVVGQFVPAGGAYVAFWYRPGVGGLGLWAGVTHASGGGKGAELEPWPSIREDRNGRSQKTVHTEGDMNMNIKKIVKQATVLTFTTALLAGGATQAFAKENNQKAYKETYGVSHITRHDMLQIPKQQQNEKYQVPQFDQSTIKNIESAKGLDVWDSWPLQNADGTVAEYNGISRCVCSCGKPERR

SEQ ID NO: 41383 - protein, 469 aa, Homo sapiens
  DOMAIN (111)..(152): kw TRANSCRIPTASE REVERSE II ORF2 domain identified by eMATRIX, accession number DM01354I, p-value=1.000e-40, raw score of 15.55
MTGDFNTPLSTSDRSTRQKVNKDIQELNSALHQADLIDIYRTLHPKSTEYTFFSAPHRTYSIIDLIGGSKALLSKCKRIEITTNCLSDHSAIKLELRIKKLTQNRSTTWQLNNPLLNDYWVHNEMKAEIKMFFETNENKDTTYQNLWDTFKAVCRGKFIALNAHKRKQERSKIDTLTSQLKELEKQEQTHSKASRRQEITKIRAELKEIETQKTIQKISESRSWFFEKINKIDRLLARLIKKKREKNQIDAIKNDQGDITTLERVVLEEPDTLHLLNYTPRKVLYRWNRQSSTSVIETNKTSVELSLPFDEDYIIEIKPFSDGGDGSSSEQIRIPKISTLPHAARSEFQMPRKEIGLKIPIGTDILEKHVCSDPVAVEALGEKLHGGSDDGYGFPKNDYELHRARREEGVPNPPRRPMGYFVLLLKHIYQGPDNGTSSGKCGKELHRAQTLLEQQFSECVLETSSMSIT

SEQ ID NO: 41384 - protein, 425 aa, Homo sapiens
  DOMAIN (154)..(195): kw TRANSCRIPTASE REVERSE II ORF2 domain identified by eMATRIX, accession number DM01354I, p-value=1.000e-40, raw score of 15.55
  DOMAIN (1)..(140): AP endonuclease family 1 domain identified by PFam, accession name AP_endonucleas1, E-value=1.1e-06, PFam score of -14.9
  misc_feature (1)...(425): Xaa = X or * as defined in Table 2
MVKGSIQQEELTILKIYAPNTGAPRFIKQVLSDLQRDLDSHTIMTGDFNTPLSTSDRSTRQKVNKDIQELNSALHQADLIDIYRTLHPKSTEYTFFSAPHRTYSIIDLIGGSKALLSKCKRIEITTNCLSDHSAIKLELRIKKLTQNRSTTWQLNNLLLNDYWVHNEMKAEIKMFFETNENKDTTYQNLWDTFKAVCRGKFIALNAHKRKQERSKIDTLTSQLKELEKQEQTHSKASRRQEITKIRAELKEIETQKTIQKISESRSWFFEKINKIDRLLARLIKKKREKNQIDAIKNDQGDITTLERVVLEEPDTLHLLNYTPRKVLYRWNRQSSTSVIETNKTSVELSLPFDEDYIIEIKPFSDGGDGSSSEQIRIPKISNKKTKXPNPWRQKXGXXLAVADAYARGSGASTSNACTLSAISTI

SEQ ID NO: 41385 - protein, 142 aa, Homo sapiens
  misc_feature (1)...(142): Xaa = X or * as defined in Table 2
MLHTKQHLSMGTEDMDDKLHFSDCSAASLVSLSTTTGGHVLTNMSADIARYLPVLYRWNRQSSTSVIETNKTSVELSLPFDEDYIIEIKPFSDGGDGSSSEQIRIPKISNAXARGSGASTPNACALSAISRIMISLTARSSL

SEQ ID NO: 41386 - protein, 205 aa, Homo sapiens
  misc_feature (1)...(205): Xaa = X or * as defined in Table 2
DRTLAEAPHTAPARSGHRGWCPRPHRRRRNRGRQLLAPGRGADPGAGEAATVQWRLLRGQPAAALHVQQGAGDAANAGLQRGAHADSHDRAVPAGHAPGPVAAAGRGHDGQVPAALGXAGGPVGLRRPEPPLQTRGKGRLAPATQQVGQARRLPTGRGQLLLRRPQPAAHHGPRPRLGGRGRGGSHKSPPHGIWPRLAGWRATLE

SEQ ID NO: 41387 - protein, 101 aa, Homo sapiens
  misc_feature (1)...(101): Xaa = X or * as defined in Table 2
PLGVLWSLWKSLVHSDAGAGELXEVITGSTWPNPXQCCLVPNVDDEEEGEEQDDDDDEEEEGLXDIDEEGDEDEGEEEEDDDDVEEGEEDEGEDDWKFAKE

SEQ ID NO: 41388 - protein, 67 aa, Homo sapiens
DIWPNPLQYYLVPDMDDEEGEGEEDDDDDEEEEGLEDIDEEGDEDEGEEDEDDDEGEEGEEDEGEDD

SEQ ID NO: 41389 - protein, 489 aa, Homo sapiens
  misc_feature (1)...(489): Xaa = X or * as defined in Table 2
SKDTKRDVDSKSPGMPLFEAEEGVLSRTQIFPTTIKVIDPEFLEEPPALAFLYKDLYEEAVGEKKKEEETASEGDSVNSEASFPSRNSDTDDGTGIYFEKYILKDDILHDTSLTQKDQGQGLEEKRVGKDDSYQPIAAEGEIWGKFGTICREKSLEEPKGVYGEGRISRPCGDRWXRSDAEESSHHRGRQSGYPENKLCGFLLKTPHHVLERADEAGSHGNEVGNASPEVNLNVPVQVSFPEEEFASGATHVQETSLEEPKILVPPEPSEERLRNSPVQDEYEFTESLHNEVVPQDILSEELSSESTPEDVLSQGKESFEHISENEFASEAEQSTPAEQKELGSERKEEDQLSSEVVTEKAQKELKKSQIDTYCYTCKCPISATDKVFGTHKDHEVSTLDTAISAVKTVIRDSDKTKSGEGAYGREMKSPHKFPEGKIHNDKEHDRIVQEFLAETGPKVTRFNEQCRFRPRIYVYENNQTQIMVEEPQA

SEQ ID NO: 41390 - protein, 30 aa, Homo sapiens
  misc_feature (1)...(30): Xaa = X or * as defined in Table 2
XHSGLQIDGDPGCTARPRALTDGSRPGGKK

SEQ ID NO: 41391 - protein, 129 aa, Homo sapiens
  misc_feature (1)...(129): Xaa = X or * as defined in Table 2
VSGTRGPSPCLGTSWASGAWRPPLGGLPPSAGANGPGRVRSAAGCSLVAGCKVLGSWVSGFAGRSHVACAGSSGESVRARCPGTAXAAGGPGPQAFQAAYXQGSRMHRAPPRPNRQVQTWWEEGAGTGP

SEQ ID NO: 41392 - protein, 23 aa, Homo sapiens
  misc_feature (1)...(23): Xaa = X or * as defined in Table 2
ERLRMPGVAKGRPRXGNPRRGRG

SEQ ID NO: 41393 - protein, 413 aa, Homo sapiens
MAPPRCPRPPAPPPSPPRLSLSSQCRTEPSPHANAIWRDPVQLLGAASPALNLPVCGSRGKKSGEKRMKRIVSVLGEVLIITVDCAGNTLWKFCRVNKSQLYTLCTTVQVGLETYGIILCCSKALPASPDVVSLSYLTRRGPKSDLNGSLENTAGILKLHLPPWKSAQGGPEDRTPRGLALGTDKTPAAPSPTPPQTGPRIQPPPWRQEEPRCRRAAVAVFKGDAAILPGAERESAQPMRMREAGAVSPVTVVPMVVLETSPRGLAKQEPSVAVLGCRGSEDPASPLHGVDGNVSGCQESQRADHDEETRRRVRRRQHGIPPSGLSGRCWWGIKMNTLQTRTRAPQELFVPPETSGPTSEKMLVSFHGSSLRNEATPQYGLEEEAGNGRWQQSPVTGMLAFLDKPPFWNPHPL

SEQ ID NO: 41394 - protein, 129 aa, Homo sapiens
  misc_feature (1)...(129): Xaa = X or * as defined in Table 2
PPYWGHFHSSAAASAALKGKDGGSSRSLVPPAQXHSHSPSKTHCVHTPSRSCAQGLTHTLTQSPPSLKIAQSPSFDARAHARLRIWQIPSAPRVPPLSASLSPTRTAGSVRFESQSTKTSRSHRFLPRT

SEQ ID NO: 41395 - protein, 270 aa, Homo sapiens
MDDFEGSKTSVEEAIADVVEIARTRNLANIPKPELEYLEWVGVRREAKVVPEAGSEHCFSQHSILEYVEPRAFSPPASLPAPVPAGVRRDRTWERGAPGSPRHRWWQALRFAESGRLDWKRRREGESGEEEEEEEQEQEHGQGQSAKSSTQRAWVEEGEERREQLTGLHAFSTRFQRQTDPLEVHFLALLQGRLQSTSTGCLKERDYKEGNGDDKSCTRVSHMRQCIKVHGTVAGTQAVRTSSIILSLQNITEIVVHIVEYIDKGLDRIT

SEQ ID NO: 41396 - protein, 120 aa, Homo sapiens
  misc_feature (1)...(120): Xaa = X or * as defined in Table 2
RTPSSKGCGRPPRGMGAQGSAGCGRRRSPRRSRQARRWSHPCXPPSSPPWPRPARSPPGCSHRAALSSPSPPSSFLARHSARPRLALALGPPPWCSSGCASSAPFDLQHPEQSQNQDARG

SEQ ID NO: 41397 - protein, 39 aa, Homo sapiens
MLEDAQDQPLLLDHVPPHGTDLAQREGRPFTRALRKLSP

SEQ ID NO: 41398 - protein, 47 aa, Homo sapiens
  misc_feature (1)...(47): Xaa = X or * as defined in Table 2
GAVTENDFYDLVRTIGGDLVEKVDLIDKFVHPKXVKSFLILPLTISV

SEQ ID NO: 41399 - protein, 456 aa, Homo sapiens
  DOMAIN (129)..(335): tRNA synthetases class II (F) domain identified by PFam, accession name tRNA-synt_2d, E-value=8.3e-32, PFam score of 118.8
  misc_feature (1)...(456): Xaa = X or * as defined in Table 2
GISTMVGSALRRGAHAYVYLVSKASHISRGHQHQAWGSRPPAAECATQRAPGSVVELLGKSYPQDDHSNLTRKVLTRVGRNLHNQQHHPLWLIKERVKEHFYKQYVGRFGTPLFSVYDNLSPVVTTWQNFDSLLIPADHPSRKKGDNYYLNRTHMLRAHTSAHQWDLLHAGLDAFLVVGDVYRRDQIDSQHYPIFHQLEAVRLFSKHELFAGIKDGESLQLFEQSSRSAHKQETHTMEAVKLVEFDLKQTLTRLMAHLFGDELEIRWVDCYFPFTHPSFEMEINFHGEWLEVLGCGVMEQQLVNSAGAQDRIGWAFGLGLERLAMILYDIPDIRLFWCEDERFLKQFCVSNINQKVKFQPLSKYPAVINDISFWLPSENYAENDFXYLVRTIGSDLVERVDLIDKFVLPKTHKTSHSYRIMYRHMEPTLSQREVRHIHIQALQEAAVQLLGVEGRF

SEQ ID NO: 41400 - protein, 37 aa, Homo sapiens
TSAEEFISTCSTPLPCPASLNSLNPRSVSPPSFSTGC

SEQ ID NO: 41401 - protein, 157 aa, Homo sapiens
  misc_feature (1)...(157): Xaa = X or * as defined in Table 2
QAGPSGGIPEGIAITGDDSSMHAIAPEDLPVGQDVEAEDSDTGDLDPVLTVFRRGVEREFFSNWYKTAWSFSKLAQKGLLSSXPSSLSSSSSSSDKAVTAGTELFASSLSSSSDPRRSISSSSLLFVAPLPVVSSTLAGPYLPTAFFTPGRLAFSFS

SEQ ID NO: 41402 - protein, 158 aa, Homo sapiens
MQPQAGPSGGIPEGIAITGDDSSMHAIAPEDLPVGQDVEAEDSDTGDLDPAQRRATKGLKVEIRFLKNTSVCSGEDGAICQCYSPSDIPYNLLIKSVFSSKNNAVNLLSNVPVSCLDVLICPLTHEETAQEATTIDELPSNKTAEKGFTTVKGCDKST

SEQ ID NO: 41403 - protein, 119 aa, Homo sapiens
  misc_feature (1)...(119): Xaa = X or * as defined in Table 2
STMIEAHVDVRTTDGYFFLLFCVGFTKKHNNLIPKTSYAXHQQYICLPHQDDRVTHQNPSLPDGSIARVLSIYYLYISRREMNSIISQGLQKVHIHIVIPGSLMNQELLDDLITVFFKA

SEQ ID NO: 41404 - protein, 161 aa, Homo sapiens
  DOMAIN (83)..(134): Ribosomal protein S3Ae proteins domain identified by eMATRIX, accession number BL01191B, p-value=5.059e-34, raw score of 13.33
  DOMAIN (18)..(161): Ribosomal S3Ae family domain identified by PFam, accession name Ribosomal_S3Ae, E-value=2.5e-20, PFam score of 80.9
MVEPLALLKIAKIKPDVGGRLSYSKLIMSPTDYGHQITEAARPVMTQGTQIASDGLKGLVFEMSLADLQNDEVAFRKFKLITEDVQGKNCLTNFYGMGLTCDKICSKVEKCSTMIEAHVDVRTTDGYFFLLFCVGFTKKHNNLIPKTSYAQHQQSPKSRRR

SEQ ID NO: 41405 - protein, 216 aa, Homo sapiens
  DOMAIN (16)..(67): Ribosomal protein S3Ae proteins domain identified by eMATRIX, accession number BL01191A, p-value=1.000e-40, raw score of 15.57
  DOMAIN (15)..(216): Ribosomal S3Ae family domain identified by PFam, accession name Ribosomal_S3Ae, E-value=1e-73, PFam score of 258.3
PAPWRLGKNKRLTKGGKKGAKKKGVNPFSKKEWYDVKAPAMFNIRNIGKTLVTRTQGTKIASDGLKGVRVFEVSLADLQNDEVAFRKFKLITEDVQGKNCLTNFHGMDLYTRDKMCSMVKKWQTMIEAHVDVKTTDGYLLRLFCVGFTKKRNNQIRKTSYAQHQQVRQIREGRWMEIMDPRRWQDQMDLEEVGHELIAGSIWKRHRKGLPIYLSSP

SEQ ID NO: 41406 - protein, 72 aa, Homo sapiens
  misc_feature (1)...(72): Xaa = X or * as defined in Table 2
RQGLTLSFRLECPGVISAHCSLNLPGSSKPPASAPQVAGTTGVYHHASXFFIFFVEMGFHHVAQPGLCNFVF

SEQ ID NO: 41407 - protein, 146 aa, Homo sapiens
  misc_feature (1)...(146): Xaa = X or * as defined in Table 2
LDVQIQEAQRTPGKFIAKRYSPRHFVIRLSKLKTKERILRAVRQKHQVTYKGKPIRLAADFSTETLQARRDRGPIFSLLKQNNYQPRILYPEKLSIIYEGKIQSFSDKQMLREFAIRKPPLQELLKGSLNLETNPGNTXKQNFFKA

SEQ ID NO: 41408 - protein, 180 aa, Homo sapiens
  DOMAIN (83)..(104): Crystallins beta and gamma 'Greek key' motif proteins domain identified by eMATRIX, accession number BL00225A, p-value=5.125e- 18, raw score of 13.82
  DOMAIN (8)..(167): Beta/Gamma crystallin domain identified by PFam, accession name crystall, E-value=7.7e-41, PFam score of 149.1
  misc_feature (1)...(180): Xaa = X or * as defined in Table 2
EPRPGEKTAHVYGPDCLCGSCVQLSFSGAFFSTRWVSYEQANCKGEQFVFEKGEYAHWDWWTSSQRTDLSSLRPIKVDSQEHKIILYENPNFTGKKMEIIDDDVPSFHAHGYQEKVSSVWLRSGTWVGYXYPGYRGLQYLLEKGDYKDSSDFGARHPQVQSVRCIHDMQGHQCGAFHPSK

SEQ ID NO: 41409 - protein, 129 aa, Homo sapiens
  misc_feature (1)...(129): Xaa = X or * as defined in Table 2
EIIDDDVPSFHAHGYQEKVSSVWVRSGMXVHCQPWLTLPQELRLWGPRSGETLALTSAPVSKTCDFGARHPQVQSVRCIHDMQGHQCGAFHPLGTQEEEEAGQKEQMEQVPFWLARGDICELSGKKSVM

SEQ ID NO: 41410 - protein, 148 aa, Homo sapiens
  DOMAIN (66)..(100): Regulator of chromosome condensation (RCC1) proteins domain identified by eMATRIX, accession number BL00625B, p-value=1.724e- 09, raw score of 17.69
  misc_feature (1)...(148): Xaa = X or * as defined in Table 2
MEEEELEFVEELEAVLQLTPEVQLAIEQVFPSQDPLDRADFNAVEYINTLFPTEQLPMPSAHGGVSSCGNAGGPVSFATRENARCGIWGSGGVCDGVFGAGAAGWGGVXGGGALGWMLSGRRIVLRSAIFTSPVSRAGSPERGWSCDC

SEQ ID NO: 41411 - protein, 70 aa, Homo sapiens
  misc_feature (1)...(70): Xaa = X or * as defined in Table 2
SSDGRHLAFDQGSPGXVLGHVGKQRAVDVQPSVAVRVRQPLLLLSTIMGSGLLGWEQGIDILNSIEICSI

SEQ ID NO: 41412 - protein, 95 aa, Homo sapiens
  misc_feature (1)...(95): Xaa = X or * as defined in Table 2
AAESPGRSTRTDGAGLTRSLPRGSRCAGAWVAAGGLSWARGGGRQEAGWRNDGXGGTGARGGAGSRAAAHARGAAGHRASVSKPGPSRSSRFQCC

SEQ ID NO: 41413 - protein, 79 aa, Homo sapiens
  misc_feature (1)...(79): Xaa = X or * as defined in Table 2
GEEIAWLGAARPGKPTPSRIPLXPSLFPWRPHKFPERSVFAGSQPASQSPPLRPPPPSHPEGSCLGSRLPPPGYLLPLR

SEQ ID NO: 41414 - protein, 56 aa, Homo sapiens
MCFICCLFPAESQWCHGSLGSRSPDAGSWPQISLIRALPECLVSTIAFDQWCPFAW

SEQ ID NO: 41415 - protein, 80 aa, Homo sapiens
  misc_feature (1)...(80): Xaa = X or * as defined in Table 2
SSFPAPAREGALAPCRCLAGISVTLQGNPXGRCHHHHHHHHHHHHRCYDSQESGKLPRPGPKAELEGPPAWLLVGPGAHP

SEQ ID NO: 41416 - protein, 242 aa, Homo sapiens
MGKDFMTKTPKAMVTNAKIDKRDLIKLKSFCAAKETVIRVNRQPREWEKIFAISPSDKGLIPRIYKEVKQIYKKKTNNPIKSTSSASASALAMFEESFSPPLRCGSPSLGWSRLEPAPSACGEGRAWDLAARHARAPLRWVPARPKPPPQKGYTCQKFCHDSTLNKGDDRVIYNLTRPPYCCVRFPLAGRRPHILCLSQLASNLELFKRGKRRGEQRKEEVTCGMLRRVKTLLSKEEEQAMT

SEQ ID NO: 41417 - protein, 83 aa, Homo sapiens
  misc_feature (1)...(83): Xaa = X or * as defined in Table 2
LSCGRSLHQGSVTSCKTINALTLTVDTWRGCAWXGCACTFHCRSATNMIRAYVYFSTISVLSLQEIRLSLRAILADLRLSICF

SEQ ID NO: 41418 - protein, 347 aa, Homo sapiens
  DOMAIN (182)..(227): kw TRANSCRIPTASE REVERSE II ORF2 domain identified by eMATRIX, accession number DM01354N, p-value=1.000e-40, raw score of 13.17
MAVPGEALLFHDPLRQTGAILEEAENAESETEGDDNEARWNLAVNPSGPGLFLVGKDTFKAVCRGKFIALNAHKRKQERSKIDTLTSQLKEQEKQEQTHSKASRRQEITKIGAELKEIETQKTLQKINESRSWCFGKINKIDRPLARLIKKKREKNQIDAIKNDKGDITTDPTEIQTTIREYYKHLYANKLENLEEMDKFLDTHTLPRLNQEEVESLNRPITGSEIVAIVWFFKKYIVVGRKKYTRRQFCHESTLNKGDKVIYNLTHPPYCCVRFSLAGMGPHILYLSQLARNLELLKRGKGRGEKRKEEVTCGMLRKPWDPLVAASPDCCASRSRNRPPKCHISRK

SEQ ID NO: 41419 - protein, 132 aa, Homo sapiens
  misc_feature (1)...(132): Xaa = X or * as defined in Table 2
MGPNSTLENLLKGATSVFYNRDQEEAQKKERKLRGRTKALAAALQSWQSPGAPRCIHXLLSVWQARVFXRGMPRQQDEATSTLSIQWQKPVETELSPDMEVTGFRASLTDERVHLPEVLPQEYTEQRRQGHL

SEQ ID NO: 41420 - protein, 44 aa, Homo sapiens
MDMRWLWWSHLQDPLVGWMWRTVTRRELPRLKGTLASSFAMRVH

SEQ ID NO: 41421 - protein, 89 aa, Homo sapiens
IDQIAIIATRFGPHPNSGLLLSLLLLLFLRPEIPEHPSFSASNLWKQVTSSFLCSPLPLSLLKSSKLLANRDKYRMCGPVPANGNRTQQ

SEQ ID NO: 41422 - protein, 69 aa, Homo sapiens
  misc_feature (1)...(69): Xaa = X or * as defined in Table 2
WNQPRCPSTVNWIMKIWYIYTMEHYAAIKRNMIMSFAATWMELEAIFLSKMPQXQKNKYCVFLHACLES

SEQ ID NO: 41423 - protein, 519 aa, Homo sapiens
  DOMAIN (373)..(385): GLUCOSE/RIBITOL DEHYDROGENASE FAMILY SIGNATURE domain identified by eMATRIX, accession number PR00081B, p-value=1.205e- 09, raw score of 10.38
  DOMAIN (56)..(80): Trehalase domain identified by PFam, accession name Trehalase, E-value=1.5e-05, PFam score of 22.3
MIDVALAISLHAPNDEIRDEIVPINKKYNIETFLAAVRRYLEKSNANQGRVTIEYHTYDREKKLVEKYDVSTTGTGGGGGLISITGWLWLDQWRDAENAGFDLPERSTFEIHVQVFRRNWIFEPLIKPFFRFTGVRPLYVFPQYEHRVRVFGKLRAQRQHVSVGINRCGRRAGTVNANPDHSCALFDAKLCKHVTRMMTELVIRGITKLPFLPTGIPLYAGGDLFTGSAVHRQSSHRITAKIEANCNRHRFTPSKKTAVNIQHILEEQLSASLGHRLKNKKENAAVLTVVDQNVSLRRGLLLSRNECVQVKGLVQIQRLLKLHASDIMPHTECVAGEEQKQFTVRDISELVRQGQDLMVQVVKDPLGTKAETERLDALVNAAGILRMGATDQLSKEDWQQTFAVNVGGAFNLFQQTMNQFRRQRGEAIVTYYHWQVKHAPLHQSKRGKNCGVGEGQNGPVILQQKPGALPTQRHLFLRAQMADVISGLPTLADMALAQLVLLLGHGAVSTSSTGQDYTL

SEQ ID NO: 41424 - protein, 196 aa, Homo sapiens
  DOMAIN (109)..(150): Site-specific recombinases proteins domain identified by eMATRIX, accession number BL00397C, p-value=3.829e-26, raw score of 19.42
  DOMAIN (5)..(186): Site-specific recombinases domain identified by PFam, accession name recombinase, E-value=1e-76, PFam score of 268.3
MSRIFAYCRISTLDQTTENQRREIESAGFKIKPQQIIEEHISGSAATSERPGFNRLLARLKCGDQLIVTKLDRLGCNAMDIRKTVEQLTETGIRVHCLALGGIDLTSPTGKMMMQVISAVAEFERDLLLERTHSGIVRARGAGKRFGRPPVLNEEQKQAVFERIKSGVSISAIAREFKTSRQTILRAKAKLQTPDI

SEQ ID NO: 41425 - protein, 164 aa, Homo sapiens
  DOMAIN (109)..(137): Enterobacterial virulence outer membrane protein domain identified by eMATRIX, accession number BL00694B, p-value=7.891e- 16, raw score of 16.19
  misc_feature (1)...(164): Xaa = X or * as defined in Table 2
EPAAQGNVLVDLLCXMKNRNRWLPNELSQVLHVTQSQFSKTGMSAKHTAFAMRMSPAQMTDIVVGLSTGQSPFMVLMQQGGHSAMQETRIASLPVTAIPAGMKIPCVTAGSACMVGPSVRVNEWFSAYGMAGMAYSRVSTFVRGLSPRYLTTREAPGCGSSAGH

SEQ ID NO: 41426 - protein, 27 aa, Homo sapiens
PARLSHYAKSTRPGRYLPDESPVNARG

SEQ ID NO: 41427 - protein, 398 aa, Homo sapiens
  DOMAIN (357)..(378): HTRA/DEGQ PROTEASE FAMILY SIGNATURE domain identified by eMATRIX, accession number PR00834B, p-value=7.500e-19, raw score of 10.09
  DOMAIN (1)..(264): Xylose isomerase domain identified by PFam, accession name Xylose_isom, E-value=1.4e-165, PFam score of 563.5
MEATHKLGGENYVLWGGREGYETLLNTDLRQEREQLGRFMQMVVEHKHKIGFQGTLLIEPKPQEPTKHQYDYDAATVYGFLKQFGLEKEIKLNIEANHATLAGHSFHHEIATAIALGLFGSVDANRGDAQLGWDTDQFPNSVEENALVMYEILKAGGFTTGGLNFDAKVRRQSTDKYDLFYGHIGAMDTMALALKIAARMIEDGELDKRIAQRYSGWNSELGQQILKGQMSLADLAKYAQEHHLSPVHQSGRQEQLENLVMPSVVSINVEGSTTVNTPRMPRNFQQFFGDDSPFCQEGSPFQSSPFCQGGQGGNGGGQQQKFMALGSGVIIDADKGYVVTNNHVVDNATVIKVQLSDGRKFDAKMVGKDPRSDIALIQIQNPKNLTAIKMADSDALRV

SEQ ID NO: 41428 - protein, 342 aa, Homo sapiens
  DOMAIN (60)..(69): 5-HYDROXYTRYPTAMINE 5B RECEPTOR SIGNATURE domain identified by eMATRIX, accession number PR00519D, p-value=9.156e-09, raw score of 8.65
  DOMAIN (138)..(339): Xylose isomerase domain identified by PFam, accession name Xylose_isom, E-value=4.6e-29, PFam score of 105.9
SAWSLCEWDSAPPKIARWQRKRIQHQDFERRLREMVAERRARLARVTDLVEQQTLHREVEAYEARLARCRHALEKIENSNGENMSLENAPDDVKLAVDLIVLLEENQIPASTVLRALDIVKRDYDKKLTRDDEAENLIGAMDTMALALKIAARMIEDGELDKRIAQRYSGWNSELGQQILKGQMSLADLAKYAQEHHLSPVHQSGRQEQLENLDVKALGIAGQMHGATLLDAHQRVLRPYNERKWNPRRERDRSNERERHGKRYGDRKGQGNARMIEDGELDKRIEQPEGRRDSEEGQQSQKGQKTKAEIAKNAQEQDRTPVHQKGRQEQPENPENQDRGDK

SEQ ID NO: 41429 - protein, 336 aa, Homo sapiens
  DOMAIN (37)..(66): Band 7 protein family proteins domain identified by eMATRIX, accession number BL01270C, p-value=2.324e-22, raw score of 16.91
  DOMAIN (91)..(146): Xylose isomerase domain identified by PFam, accession name Xylose_isom, E-value=1.5e-17, PFam score of 65.2
  misc_feature (1)...(336): Xaa = X or * as defined in Table 2
NMMEQVLDIPSLXVISKDNANVTIDAVCFIQVIDAPRAAYEVSNLELAIINLTMTNIRTVLGSMELDEMLSQRDSINSRLLRIVDEATNPLALKIAARMIEDGELDKRIAQRYSGWNSELGQQILKGQMSLADLAKYAQEHHLSPVHHQVAEWMRARNGQLFRLRSNHLTLLVEQNNFYARGAKIYPDIHIDRSLKKCPSDLFAANARCGICQQSDERCLRYQPRRERGLYRIDITYPGKSYTTTALPSRFVWFVTGKAQSTQASALSYIDSLLYHHLDLYGQRLGHLDDGTDSWNHVPTLNGQCTLVLIHEYVDTRGPEIKTILVISWWNILVFH

SEQ ID NO: 41430 - protein, 109 aa, Homo sapiens
  DOMAIN (51)..(77): AP endonucleases family 1 proteins domain identified by eMATRIX, accession number BL00726E, p-value=4.231e-22, raw score of 15.26
  DOMAIN (1)..(108): AP endonuclease family 1 domain identified by PFam, accession name AP_endonucleas1, E-value=0.00041, PFam score of -54.3
  misc_feature (1)...(109): Xaa = X or * as defined in Table 2
DIGIGEENRKRWLRTGKCSFLPKEREWMDRLMSWGLVDTFRHANPQTADRFSWFDYRSKGFDDNRGLRIDLLLASQPLAECCVXTGIDYEIRSMEKPSDHAPVWATFRR

SEQ ID NO: 41431 - protein, 44 aa, Homo sapiens
  misc_feature (1)...(44): Xaa = X or * as defined in Table 2
YCKLACLQVDSRGSQVFALDVAARHRXQFAMPESDAVAMLKHLS

SEQ ID NO: 41432 - protein, 142 aa, Homo sapiens
  DOMAIN (90)..(134): Synapsins proteins domain identified by eMATRIX, accession number BL00415N, p-value=8.969e-10, raw score of 4.29
  misc_feature (1)...(142): Xaa = X or * as defined in Table 2
GVFGRVSEKQRPAAPAAGERPLPRPRPLPCGAAARTGPFAAQAAXRAAAAPRSERRRHHGAEEGHQRCIYRHAADRALGEAARRTGYALRPAGEPELAAAARRRXRAPDPGPRVPRHLGLLATRACPPGGAHCSPERGAISW

SEQ ID NO: 41433 - protein, 791 aa, Homo sapiens
  DOMAIN (348)..(369): CHLORIDE CHANNEL SIGNATURE domain identified by eMATRIX, accession number PR00762D, p-value=9.379e-19, raw score of 11.29
  DOMAIN (43)..(439): Voltage gated chloride channels domain identified by PFam, accession name voltage_CLC, E-value=6.3e-27, PFam score of 93.7
  misc_feature (1)...(791): Xaa = X or * as defined in Table 2
RRQGLEGWWAIGLEGLTGKALAWLFTVPGVRGLQWSPRFFLTRLRTLLCKVLGVLFSVAGGKKGPTCILQILKGQRRQEAXCISGWAERVWASGQAXWEVWLHWAKSRNWFLFWKQHVHALRVRLDTTLFSLEEGSSFWNQGLTWKVVRRTFSESINHTPRITLGVPYSVHSFQLPGLLNFGEFKVCFVLSPRIFNLTHENFLSSEGPEIGGLLGATFNCLNKRLAKYRMRNVHPKPKLVRYLHSRLPPEPAAAPXAWCGPRHLSCRQMSSSSQIGNDSFQLQVTPVHLLPLSHTTRKNPEMYDLPLLFFNPQESAILQLFHQDGECLHCSPIVGDWCHLGHSQACPSFSVPSGLFVPSLLCGAAFGRLVANVLKRYSVCVRVCAHVHVCARVRVYACVWVRMTISLTVILIESTNEITYGLPIMVTLMVSTLPPGPCQAQGHVRPTGPIFRSLLEWETEVEMDKXGHDFAHVLVSECISSEAXGMLLFCGGPDRSLFSTFRAVWSLSRLLDSVIAAGKQXAXRTXSVGYSLLCPDLKGDPSAVSILRTTVHHAFPVVTENRGNEKEFMKGNQLISNNIKFKVKKTAXEERQVRDKRSRLTRLSALELRNMCDEHIASEEPAEKEDLLQQMLERRXEPGGAPTARRATQRWGEPLAQMFPLTFHGLILRSQLVTLLVRGVCYSESQSVSLSEAEISQARPDEARGVGRCRRLDLTLLNPRMIVVRRAAPACPMRSCLFMPLASQAVSLFRTMGLRHLPVVNAVGEVSEAPALPPPLREDPLARCCLCTQTI

SEQ ID NO: 41434 - protein, 25 aa, Homo sapiens
RIPGKTHVPLLDFEMSRRPTICRSF

SEQ ID NO: 41435 - protein, 318 aa, Homo sapiens
  misc_feature (1)...(318): Xaa = X or * as defined in Table 2
LKCELSDQGLAPAIQTVRLTHESLTALEIPNALLQTIQDLILDLRVRCVMATLQHTAEEIKRLAEKEDWIVDNEGLTSLPCQFEQCIVCSLQSLKGVLECKPGEASVFQQPKTQEEVCQLSINITQVFIYCLEQLSTKPDADIDTTHLSGDVSSPDLFGSIHEDFSLTSEQRLLIVLSNCCYLERHTFLNIAEHFEKHNFQGIEXITQVSMASLKELDQRLFENYIELKADPIVGSLEPXIYAGYFDCKDCLPPTGVRNYLKEALVNIIAVHAEVFTISKELVPRVLSKGIEAVSERAQSTDAVCFILQQKWSFTGET

SEQ ID NO: 41436 - protein, 334 aa, Homo sapiens
  misc_feature (1)...(334): Xaa = X or * as defined in Table 2
MDEEERVYRACYILCISLLSSPGNPGLHSPMLDLDNDTRPSVLGHLSLFLIQKYNHSILFFSPLAWRYKTPHRVAFVEKLTKLVLSQLPYFXIISNMFYFVFLIFKTAEKSNPINHIXTRLCLFLVFXKMIQEVMHSLVKLTRGALLPLSIRDGEAKQYGGWEVALRSHSAHFCLDVFVRRLTHESLTALEIPNDLLQTIQDLIFRPGSQLXPVSRIFIFSAGTFRFKNHLHDFTGFHTCLTGAPRGPVGGCASDDGQAAADTSQWLSXIXVLYLXLFLLASMFSLSVDVFSLAPXRXFSKHLFCFXEQRLLIVLSNCCYLERHTFLNISHGSP

SEQ ID NO: 41437 - protein, 125 aa, Homo sapiens; identical to SEQ ID NO: 41252

SEQ ID NO: 41438 - protein, 315 aa, Homo sapiens
  DOMAIN (224)..(273): CBF-B/NF-YA subunit proteins domain identified by eMATRIX, accession number BL00686, p-value=8.388e-33, raw score of 13.91
  DOMAIN (232)..(284): CCAAT-binding transcription factor domain identified by PFam, accession name CBFB_NFYA, E-value=5.2e-13, PFam score of 56.7
  misc_feature (1)...(315): Xaa = X or * as defined in Table 2
QQVWKQNCFKHYSNETDNSTTQLVGVQTLQVVVPSLILCEHCMNFSSPHVWCCMVQAVPGGQGQTIMQVPVSGTQGLQQVSNIXKYXAVYQRRGFKEXIITTGQTQQIIIQQPQTAVTAGQTQVIPLALSHRSKTDLEESDNXVRYQPVNADGTILQQGKCTHKLPXDFLGQLFCPLDNXHTTSSGQGTVTVTLPVAGNVVNSGGMVMVRKCIFQLCLXNFLEHATXCLLKEEPLYVNAKQYHRILKRRQARAKLEAEGKIPKERRVCITLGRIXERRIAGFYFXNYLFSPKEKDSPHMQVGRHIHFILLFITLY

SEQ ID NO: 41439 - protein, 49 aa, Homo sapiens
IKKVRKQDFQKEAQHFRLLAGPHEGHWNVFLAQTLELKVTASPDKVTKT

SEQ ID NO: 41440 - protein, 198 aa, Homo sapiens
  misc_feature (1)...(198): Xaa = X or * as defined in Table 2
HRHIARHLFPRTTPTPXLSWQGSXTPRWKGVRAVVTQPRKERRAESEQFQATKPRSQLXLQPPTPSLVSSCQLKTTAASRPLTXPSKSVYPSAPFHPWLPCSKPERSVSPESNDSISEELNHFKPIVCSPCTPPKRLPDGRVLSPLIIKSTPPQPKQKPAEADFLXGQSTDPQKVGTDLSGAADQKDPFKSHSYLSGS

SEQ ID NO: 41441 - protein, 115 aa, Homo sapiens
  misc_feature (1)...(115): Xaa = X or * as defined in Table 2
EATSNFKQPPSLPFWCLKSRTSLKPRQSKVCSSSFPVIXGKTGNELALQIPXFKSSCGPRFPDXXXPAGRSAPSLGPPPSQSCAHQXEHWVQVCIKHGITNAEPPAEHLKVLVRE

SEQ ID NO: 41442 - protein, 125 aa, Homo sapiens
SESSGRFWLCGLGPGTSPLLSLKFPHLLPASRGRSPPSPRPRVPRGKATQVVWAWGYRCVDEDPARCLGTPGRTDPHCGQGLLCPLGKSCSTSQPLSQGDGRGTSWDRSHACSPGGHPHRCIGCM

SEQ ID NO: 41443 - protein, 436 aa, Homo sapiens
  DOMAIN (83)..(92): Zinc finger C3HC4 type (RING finger), proteins. domain identified by eMATRIX, accession number BL00518, p-value=1.667e-09, raw score of 12.23
  DOMAIN (68)..(106): Zinc finger, C3HC4 type (RING finger) domain identified by PFam, accession name zf-C3HC4, E-value=1.4e-06, PFam score of 25.6
MAAAGPSTRASSAAAAAALSRRGRRGRCDETAAAKTGAPGPASGPSLLVLSPPLLQPPLPPRPEESGCAGCLEPPGEAAALPCGHSLCRGCAQRAADAAGPGCPRCRARGPGWARRRARDDGQADSEVLGECARRSQPERCRPRRDGGAAAAGPRPEQEPRAAPAEPGLLSVLLEAPALVNTMFDANLEPNALIGGQLGSAWIMAISVWHTYIFECEQDLCFASDRWNTAKCPARLSDSENEEPSRGQMTQTHRSAFVSKNNSYSLAFLAGGPAGPADSERLLPPRKRPEYSDLQPPSCFPFEGRVGCEGEEWRAGQYARMIAVSLGMNAYWALTVFQGLDRGFSHLVLCHPPGSINIPILQMRPREVEHLAQGLTGLKERARPKVQQRESRVRGSWVTGAQAPTFVGASEQSEVLCLFLEVLLPDFLDLSQVEDS

SEQ ID NO: 41444 - protein, 278 aa, Homo sapiens
RHNRVWRAVFHAHQPGDTMHQYARLTTARARQHQKVAAWRGHRFALFVIKAVEQVRNVHWHRRVKIGWAEKRNALRQKAGYIYRFADYISEVRDANREISRCGSKRLSQVCIRSPFSGLIQQACIPLRIAPPTSVGLAGPPRFARRDVISRTDVTYRNDRLFQPFGVGQCGFINLRCIVLRERLQHDGVGSDTAKYFHTLPDGFGDERNDRMREAQQTFQYSHQRMASTAQFCFGATVHYRLGQLEIPVTELVPGELIQNACGDIEAEAVQRFAVRFD

SEQ ID NO: 41445 - protein, 99 aa, Homo sapiens
  DOMAIN (43)..(63): RIBOSOMAL PROTEIN L5 SIGNATURE domain identified by eMATRIX, accession number PR00058D, p-value=5.408e-21, raw score of 9.34
  DOMAIN (2)..(72): Ribosomal L18p/L5e family domain identified by PFam, accession name Ribosomal_L18p, E-value=0.032, PFam score of -29.1
  misc_feature (1)...(99): Xaa = X or * as defined in Table 2
GLPLAHGLLGRFGMDRIYEGQVEMTGDXCDVESIDGQPGAFTCYLDVGLARTITGNKVFGALKGAVDKGCSVPHSTRXFPACDSAEFALGIPYFVQPNI

SEQ ID NO: 41446 - protein, 246 aa, Homo sapiens
MKVLGVQRPLLQSTIIVEKTVQDLLNLMHDLSAYSDQFLNMVCVKLQEYKDTCTAAYRGIVQSEEKLVISASWAKDDDISRLLKSLPNWMNMAQPKQLRPKREEEEDFIRAAFGKESEVLIVNLGDKLIPPQDILRDVSDLKALANMHESLEWLASRTKSAFSNLSTSQMLSPAQDSHTNTDLPPVSEQIMQTLSELAKSFQGYGLTAACLSYIWEEGNYGHCGLMWESMDYDPLVVKLNKDISAI

SEQ ID NO: 41447 - protein, 358 aa, Homo sapiens
MPVIKPGAAFGKESEVLIGNLGDKLIPPQDILRDVSDLKALANMHESLEWLASRTKSAFSNLSTSQKPRQGHETENMVSESTLLDAVDPSLRKETGYATPKLSMLVDPGLKHSPERNLEYYETGVQEFSRPASVPEMGTVLQPGGRASARPAARRATGLGTTEKANEARGRRSLEWNPFLHLLSAGSPGFQLCVLLGKLPCPETAEGPHDLHSLNCYSLSLCGPLPGEAPTTRSGETLSRGVSPHQAKQGKSSAGRGWIHSRLSPATPAAPGFLASLSISALTGLGHFTAAGRKNGMDPRTSRQAQALPAGDSGKSLSLSESRCPIHHKGTGITAIGLLRIRCTLYSIVMNGGRKQVF

SEQ ID NO: 41448 - protein, 120 aa, Homo sapiens
MHNYVNTENVTVPASAHKIEYSRRRACTPTVFNFDIRRPSLEHRQLNYIQVDLEGGSDSDNPQTKKTPTTPLPQTPTRRTELYAVIDIERTAAMSNLQKALPRDDGTSRKTRHNSTDLPM

SEQ ID NO: 41449 - protein, 385 aa, Homo sapiens
MTFDGITSHDIYMLGDVSNSSTGPAKPMNNTGLVLQMGRDANDVTFTYSRFAVPQAKGNNVVITSYMTNRGFFEDKKATFAPSFLMNIKGNKPSVVRHSILEQGQLTWLPIAQRAGLAAGQSGRTVLRERVRIETASTHIALAARHSDRRCCRNGRDPARGSGSTGITEGDPLQKTGYVSTSRLGVSTEGRATEQSAGLALPKWAAGRGRSEPALESSSIRQFPTAPRSGYPGTLCPSFLYHSKPVLCAPNSRASPSSATTLSTRTLWGPGAGSHPFGLLNTRLSPDLCPGKIVLRALKESRAGMPEQDKDPRVQENPDDHRTVPEVTGDARSAFWPLRDNGGLSPFVPRPGPLQTDLHAQRGSSRVDWDAARRLTQQEPFIVLS

SEQ ID NO: 41450 - protein, 63 aa, Homo sapiens
PGLCVCSFWVLTVSWLVCQKFPELKFKYVEEEQPEEFFIPYVWSLVYNSAVGLYWNPQDIQLF

SEQ ID NO: 41451 - protein, 73 aa, Homo sapiens
LPSSCKIVQPRSNNIPAWQLTPWSHTGLRGLWLTRNEAFCLKFTDSPVGSSVEMTLTRAAMYQALPASLMTTL

SEQ ID NO: 41452 - protein, 183 aa, Homo sapiens
MTPSSLALALSGPIVPQACLGNTVHARLWPCLSQPLSSVHERPGLKEQQSAEVKSFLSAVSLSDWVVISEAGSAWYMAALVRVISTELPTGLSVNFKQKASFLVNHSPRSPVWLRELAAMLDVVERAARSYRKMKFPELKFKYVEEEQPEEFFIPYVWSLVYNSAVGLYWNPQDIQLFTMDSD

SEQ ID NO: 41453 - protein, 70 aa, Homo sapiens
MGFPTEGQGCFFPTRDPLQPRQALSKFFYFWGNRSRTDRLLGVSSVKRGLHECVFLTHFDLENWVLVGNR

SEQ ID NO: 41454 - protein, 654 aa, Homo sapiens; identical to SEQ ID NO: 40189
  DOMAIN (57)..(100): kw TRANSCRIPTASE REVERSE II ORF2 domain identified by eMATRIX, accession number DM01354T, p-value=1.000e-40, raw score of 9.48
  DOMAIN (1)..(179): Reverse transcriptase domain identified by PFam, accession name rvt, E-value=1.2e-10, PFam score of 48.8

SEQ ID NO: 41455 - protein, 97 aa, Homo sapiens
  misc_feature (1)...(97): Xaa = X or * as defined in Table 2
ASTAGVSYYVAQAGLKLLGLSLSKCRDYRCEPPCPEXMSLYKVMAMARKAMSLYIYFFLDEFMYFAGTWMKLETIILSKLSQGQKTKHRMFSLVGGN

SEQ ID NO: 41456 - protein, 121 aa, Homo sapiens
MEYYAAIKNDEFMSFVGTWMKLETIILSKLSQGQKTKHRMFSLIGKLRFVLQVGGLLECQCLSEATSIGKGGEYYIKGTSRGTKESEQQPSTPDLPSDRAYPNEKEPENQPCTQHDALFHK

SEQ ID NO: 41457 - protein, 124 aa, Homo sapiens
MEYYAAIKKDEFMSLAGTWMKLETIIVSKLSQGQKTKHHMFSLIGVHLSRVGSLNSCSWIPPMHLGAGVGPELSQSATPPGVFLLDAEATEKEAAQRMNPGEDKINQIRVLQLLLGKTYGTDRS

SEQ ID NO: 41458 - protein, 65 aa, Homo sapiens; identical to SEQ ID NO: 37354

SEQ ID NO: 41459 - protein, 90 aa, Homo sapiens
MEHYAAIKIDEFMSFVGTWMKLETIILSKLSQGRKTKHRMFSLIGKDPPHLCRSLTIPLEGLGGSGFCIQSLLTLVPPAGPRREFRRGFR

SEQ ID NO: 41460 - protein, 48 aa, Homo sapiens
MEYYAAIKKDKFMSFVGTWMKLETIILSKLSPACCAIYPVATRGQQRL

SEQ ID NO: 41461 - protein, 89 aa, Homo sapiens
MEYYAAIKKDEFVSFAETWMKLETIILSKLSQGQKTKPNVLTHRETIWKITCEPSPVISICLQSELFMVKVDAKSLEHSGSKEQSKSIL

SEQ ID NO: 41462 - protein, 100 aa, Homo sapiens
MIDWIKKMCHIYITEYYAATKNDEFMSFVGTWMKLETIILSKLSQGQKTKHHMFSLIALIQILAAAAAERDVVYFTFGDSELMRDIYSMHIFLTERKLTV

SEQ ID NO: 41463 - protein, 96 aa, Homo sapiens
MEYYAAIKKDEFMSFVETWMKLETIMLSKLSQGQKTKHRMFSHNSPQNKPPAAPVINEYADAQLHNLVKRMRQRTALYKKKLVEGDLSSPEASPQT

SEQ ID NO: 41464 - protein, 74 aa, Homo sapiens
MKNDEFMSFVGTWMKLETIILSKLSQGQKPNTACSHSWMDPQRRGKRQSLSISEAGANQFPKSVFRFFGLGDSK

SEQ ID NO: 41465 - protein, 84 aa, Homo sapiens
WMMLETIILSKLSQGQKTKHCMFSLKGLSMVAYSVQVLAVFISCAILTLAMKIAWIFGLNSVQNITANLSVDGSTSGNPIQKWK

SEQ ID NO: 41466 - protein, 325 aa, Homo sapiens
MDEAGNHHSEQTITRTENQTLHVVTHRWELNNKTWTQGFLGKQNSETDICVQEMYWGCFWDEHILGNEGTRRTGQRRKWKAFTLSQDLSSHTDPPQQALSNWKGTRALPNENKRDGLYPRCCLASYVCCPKKEAWSWGKVAVFSKGKLQRGSQLRAACDQPSGQLGYEHFVLQGALWSCQLWEEVGYSPGAHLMLCRVEASAATTSSLKAVPAFTREEWAASASPEGCRKEETGHQQGAHHQQLVTIGKQLKAEGKSSQRDSYFWHTVKKQNWNLYVKSQRHPQLLEGETLLKEISFLDHEKLSFGPSSAGLGTLAASYSPRSVS

SEQ ID NO: 41467 - protein, 106 aa, Homo sapiens
  misc_feature (1)...(106): Xaa = X or * as defined in Table 2
MIGSKINEIEHKKQQRKIKEAKTRFFVKINNKSLARQRKNREDNIRTEIRDMDEAGNHHSQQTNTGTENQTLHVLTHKWELNNENPWTQGREHHTLGPVRGGRDAX

SEQ ID NO: 41468 - protein, 42 aa, Homo sapiens
TIARKLKTLKKGTWMKLETIILSKLSQGQKTKHRMFSLISGN

SEQ ID NO: 41469 - protein, 51 aa, Homo sapiens
PESTKNSNKFTRKNQTTPSKRTWMKLETIILSKLSQGQKSKHRMFSLISGN

SEQ ID NO: 41470 - protein, 54 aa, Homo sapiens
QACYIYTTEYYAAIKNDEFMSFVGTWMKLETIILSKLSQGQKTKHRMFSLIGGS

SEQ ID NO: 41471 - protein, 139 aa, Homo sapiens
MEQLSPMASSYHSDHAAVSLAIFFDYKGIKLGIKLAAVPSALPTPAGPSDSAGPLWHPCPVPVTTQFFPLDPGIQSKQGGPLLQLAANNYNLKPKQHFGSWFGTMKRLGTWMKLETIILSKLSQGQKTKHRMFSLIDGN

SEQ ID NO: 41472 - protein, 263 aa, Homo sapiens
MAEGKGGARHVLHGGRQESMCRGTALYKTIRSCLKFCPPLRRDTLFTDWLQDLIRLQSTLESEKGIEASVSSGKAYILGQLQTAVLAGELWMASGQCPSETKFPEEGAGSNLCCSVSSTGDNQANKVGGVELQQTAAELQKRGLTVRRKSNKQKATTSTSTKRTPTQTSVQSSSASKIKEGNLAQWTWKERHFFVFNVKYPGLGKMLAIWDMDEAGNHHSQQTNTGTENQTLHVLTHKWELNNENTWTQGGGTSHTGASRRIF

SEQ ID NO: 41473 - protein, 149 aa, Homo sapiens
  DOMAIN (37)..(57): kw TRANSCRIPTASE REVERSE II ORF2 domain identified by eMATRIX, accession number DM01354W, p-value=3.400e-20, raw score of 12.64
  misc_feature (1)...(149): Xaa = X or * as defined in Table 2
IYLTKELKDLYKEKCKTLLKEITDDTNKWKHIPSSWMGRINIVKMTTLPKAIYKFNAIPFRIPPSFFTALEDTILKFIWNQKRCPHSQCKIKQKEQIWRHHTTXFQAILXGHSHQNSIGTWMKLENIILSKLLQGQKTKHCMFSLIGGN

SEQ ID NO: 41474 - protein, 147 aa, Homo sapiens
MEYYAAIKKDEFMSFGGTWMKLETIILSKLSQGQKTKHRMFSLTGDPTGDDRLCLLSLPGDPTGDDRLCLLSLPGDPTGDDRLCLLSLPGDPTGDPTGDDRLCLLSLPGDPTGDDRLCLLSLPGDPTGDDRLCLLSLPGDPTDLRVG

SEQ ID NO: 41475 - protein, 198 aa, Homo sapiens
MEYYAAVKNDEFMSFAETWMKLETIILSKLSQGQKTKHCMFSLKDGRRCQQDQKTLDSCGRCRAGPSLNTTLKPKRVKTVSGNRIKSNQTNKLQKKGMAAVGQACEQVPKPLCSGCGVGDASSSNGHPSGTQVVHIGVGSACDSPQPQQLWAVEFALGACKNAQLPLCMGPGQKSKLQLKESKILPKATESVSTMTRT

SEQ ID NO: 41476 - protein, 86 aa, Homo sapiens
PLQAPGESPLSDSLPVHWWRPYSGSVRSPRRFPTQILDLWGSESVGRRTRSASGTGTWMKLETIILSKLTQEQKTKHCMFSLICGS

SEQ ID NO: 41477 - protein, 92 aa, Homo sapiens
  DOMAIN (4)..(53): kw TRANSCRIPTASE REVERSE II ORF2 domain identified by eMATRIX, accession number DM01354Z, p-value=1.000e-40, raw score of 9.06
SIYPNTCTRMFIVALLTIAKTWNQAICPTMIDWIKKMWHIYSMEYYAAIKNDEFMSFVGTWMKLETIIFSKLSQGQKTKHRMFSLIGGELEQ

SEQ ID NO: 41478 - protein, 51 aa, Homo sapiens
KAYQPEKAQDQVDSQPNSTRGTWMKLETIILSKLTQEQKTKHCIFSLISGS

SEQ ID NO: 41479 - protein, 90 aa, Homo sapiens
  DOMAIN (4)..(53): kw TRANSCRIPTASE REVERSE II ORF2 domain identified by eMATRIX, accession number DM01354Z, p-value=8.909e-28, raw score of 9.06
FYYKDTCTHMFIVALFTIAKTWNQPKCPSVIDWIMKNMWHIYTMEYYAAIKNDEFMSFSGTWMKLETIILSKLTQEQKTKHCMFSLISGS

SEQ ID NO: 41480 - protein, 40 aa, Homo sapiens
RPLKSQETTETWMKLETIILSKLSQRQKTKHRMFSLIGGN

SEQ ID NO: 41481 - protein, 22 aa, Homo sapiens
  misc_feature (1)...(22): Xaa = X or * as defined in Table 2
KATRSVNCWWDHLXRPFWGSPH

SEQ ID NO: 41482 - protein, 415 aa, Homo sapiens
MEYYAAIKKDEFMSFAGTWMKLETIILSKLSQGQKTKHRMFSLIAPGSHHSAFCLYEFDSSRDFLDFADFGTTIKQDFRLLGQTSVDRLLQLSQGQAVKGNQLLPVSLVKRKTTLAPNTQTASPRALADSLMQLARQVSRLESGQDFADFGTTIKQDFRLLGQTSVDRLLQLSQGQAVKGNQLLPVSLQQNEKYQVPQFDQSTIKNIESAKGLDVWDSWPLQNADGTVAEYNGYHVVFALAGSPKDADDTSIYMFYQKVGDNSIDSWKNAGRVFKDSDKFDANDPILKDQTQEWSGSATFTSDGKIRLFYTDYSGKHYGKQSLTTAQVNVSKSDDTLKINGVEDHKTIFDGDGKTYQNVQQFIDEGNYTSGDNHTLRDPHYVEDKGHKYLVFEANTGTENGYQGEESLFNKAGVL

SEQ ID NO: 41483 - protein, 2678 aa, Homo sapiens
  DOMAIN (449)..(490): kw TRANSCRIPTASE REVERSE II ORF2 domain identified by eMATRIX, accession number DM01354I, p-value=1.000e-40, raw score of 15.55
  DOMAIN (696)..(971): Reverse transcriptase domain identified by PFam, accession name rvt, E-value=3.3e-82, PFam score of 286.5
  misc_feature (1)...(2678): Xaa = X or * as defined in Table 2
XTWMKLETIILSKLSSSLKHGHSWEVLSVPQAQLFSYLQLLLLHSHLLEGARAREIQGSSVAKGKMPAKNAELLVKNQMISWIGQINSRPKEQKNPKTETEAVRSERRCGCCCPSVWKPEHSHDLLQSHREPAAELWVQVSGHLAHISVCERMCMMWSQSSGPVLLLYSCREQQAREARKQVGQRNLQAHEKMMCRDYSHQMASELFTECNRPVEKGVHICQKGTLSSSKIRGETCCTQLCRTFHTPQWRKELAPSRRGLRIWKVLSSHSYWHVYLHADLTPTEDLSSQRHEVESNKASAIQQEELTILNIYAPNTGGPRFIKQVLSDLQGDVDSHTIIMGDFNTPLSTLDRSTRQKVNKDTQELNSALHQADLIDIYRTLHPKSKEFTFFSAPHHTYSKIDHILGSKALLSKCKRTEIITNCLSDHSAIKLELRIKKLTQNCSTTWKLNNLLLNDYWVHNEMKAEIKMFFETNENKDTTYQNLWDTFKAVCRGKFIALNAHKRKQERSKIDTLTSQLKELEKQEQTHSKASRRQEITKIRAELKEIKTKKKTLQKINESRSWFFERINKIDRPLARLINKKREKHQIDAIKNDKGDITTDPTEIQTTIREYYKHLYANKLENLGEMDKFLDTYTLPRLNQEEVESLNRPITGSEIVAIINSLPTKKSPGPDGFTAEFYQRYKEELVPFLLKLFQSIEKEGILPNSFYEASIILIPKPGRGTTKKENFRPISLMNIDAKILNKILANRIQQHIKKLIHQDQVGFISAMQGWFNIHKSINIVQHINRTNDKNHMIISIDAEKAFDKIQQRFMLKTLNKLGIDGTYLKIIRAIYDKSTANIVLNGQKLEAFPLKTGTRQGCPLSPLLFNIVLEVLARAIRQEKEIKGIQLRKEEIKLSLFADDMIVHLENPIVSAQNLLKLIDNFSKVSGYKINVQKSQAFLYTNNRQTESQIMSELPFTIASERIKYLGIQLTRDVKDLFKENYKPLLNDIKEDTNKWKNTPRSWVGRINIMKMAILPKVIYRFNAIPIKLPMTFFTELEKTTLKFIWNQKGARIAKSILIYRFNAQELEKTTLKFIWNQKGARIAKSILSQKNKAGGITLPDFKLYYKATVIKTAWYWYQNRDIDQWNRTEPSEIMPHIYNHLIFDKPDKNKKWGNDSLFNKWCWENWLAICRKLKLDPFLIPYTKINSRWIKDLNVRPKTIKTLEENLGNTIQDIAMGKDFMSKTPKAMATKAKIDKWDLINLKSFCTAKETTIRVNRQPIEWEKIFAIYSSDKGRISRIYNELKQIYKKKTNNPIKKWAKDMNRHFSKEDIYAAKRHMKKCSSSLAIREMHIKTTMRHHLTSVRMAIIKKLGNDWDMDEAGKPSFSANYHKDKKPNTACFSLIGGELNNGEHLDTGKGNITQSHTGACWEVGGKGRDMDETGSHHPQQTNTAKENQTPHVLTHKWELNNENTWTQGGEHHKLGPVVGWEDVGGIALGETPKGTGRVLLGAGHTEFQCKVPEWLSSPSPKHTDSLSAPCGHCLEMREGWCWHFKTVFAILFSASVSDMKLKPVVESDTLTIESGPLASEDKPLSCGTNSGKEQEINETLPITTVAQSSVLLHPQEAAARIRMSARQKQIMEIEEQKQKQLELLEQIEQQKLRLETDCFRAQLEEEKRKKTQPTGVGCRKSHHYINHLHSFSSLPVKVESGKIQEPFSAMSKSTVSTSHSIISQMHDRPLLPSENITAQQGNMKALQEQLDLQKKVLQATQEAQEQLLLCKQKEVEQQTGLSVFLPLVTPDSSALLPSAKADLGRIQESSPTKNNIAVSSDHHVISQLQDKRLSLSQPILSQQNNFKFLQEQLNIQKDSLQARREAQEVLYVHKQSELDRRVCSEQAEPSFPFQVAQHTFTSLPSADTKSGKIQEQHSSKSEKGLVSCQSDIPISQDGSLSFLQQFLPLHDSLKLLQEQLTKQRDTLQARHEAQVELLLHRQRDLGDSKSGLVSSSSSPVVVQHSVASQASAKAEPRRIQELYLSEKENVDESERFQECISIKSDSTIPLSHPKIPRCQERLLRVSQHMLPLQDNLEEHQAWLDTEKEAFHFSQKTQENTSSEQTGSSSFIPQLVQLSFTSLASAESGTILEPLFTESESKIFSSHLQIPQLQDRLLRISQLIQPQQDNLKALQEQLATQREAIILARQEAREELLLHQSEWEGRISPEQVDTSSLPLVPQHSFASLPLNESERNQEPCSINSDNIVSSGHSEIPTLPDGLLGLSHLVLPQQDNLIALEEHLHAQTDFLPSIEKTQKELVLSKPCKFEEKVSSEHFIQSHHGDLQALQQQLDTQKKAIRSIQEVQEELLLQRLSELEKRVSSEQVCSSSFVSQQDNLGLQKQLDLQREVLHYSQKAQEKLLVQRQTALQQQIQKHEETLKDFFKDSQISKPTVENDLKTQKMGQLRDWFPNTQDLAGNDQENIRHADRNNSDDNHLASEDTSAKQSGRHETSINTCTISIGLVRKSFLFVAKLNSGLSRLPYGQCAFRVCRRSCTLHYVKTAHILYKLIAEVTRGFGHLLNFFPQHMASTTPQLDSGHKGKDWEGSRGRCDTDKKEGKVATEAETRVTQLQVKECQQPPGLKRQGTGSPLEPLEGGWPCQHLDLQLLSSFQNCERRSSVVLSHQLVVIWYSSHRKPYANSELNNERYL

SEQ ID NO: 41484 - protein, 28 aa, Homo sapiens
KTSLQNCCLTNGLTLVVWWLKILSMAFI

SEQ ID NO: 41485 - protein, 631 aa, Homo sapiens
MAGAPPPASLPPCSLISDCCASNQRDSVGVGPSEPGAGYNLVVCRFLSRSEKRNIWVGVTRFSRAFEDVKVFWRVTLNKTVVVLQKDGVNLMEELQSVSGTTTCTMGQTKCFISIELKPEKVPQVEVYFFVELYEATAGAAINNSARFAQIKILESDESQSLVYFSVGSRLAVAHKKATLISLQVARDSGTGLMMSVNFSTQVFLSLGSNFTLQLVTVMLVGGRFYGMPTILQEAKSAVLPVSEKAANSQVGFESTAFQLMNITAGTSHVMISRRGTYGALSVAWTTGYAPGLEIPEFIVVGNMTPTLGSLSFSHGEQRKGVFLWTFPSPGWPEAFVLHLSGVQSSAPGGAQLRGFFTIADGESEASFDVHLLPDEVPEIEEDYVIQLVSVEGGAELDLEKSITWFSVYANDDPHGVFALYSDRQSILIGQNLIRSIQINITRLAGTFGDVAVGLRISSDHKEQPIVTENAERQLVVKDGATYKVDVVPIKNQADRQLIQESSGWHLAGAPLGRSFQRKEQAAIFAVLQPLLVISRQTGSGVDLQQTPADLQQRDLTVRRKTNRKEQHIHSETSSKGHQHQRPKVGKSTKRGRNQSKNAENSKNQNAASPPMDHNFLLAREQNWTENEFDD

SEQ ID NO: 41486 - protein, 208 aa, Homo sapiens; identical to SEQ ID NO: 37956

SEQ ID NO: 41487 - protein, 119 aa, Homo sapiens
MAGAPPPASLPPCSLISDCCASNQRDSVGVGPSEPGVGYSLVVRRFLSRSEKRNIRVGVTRFSRKPNSLTIKGCREPQGIITDVGQPTRLETAIGRCVLQSPEDKAMGPSEPQEVVASV

SEQ ID NO: 41488 - protein, 101 aa, Homo sapiens
MAGAPPPASLPPCSLISDCCASNQRDSVGVGPSEPGAGYSLLVCRFLSPSEKRSIGVVVTRFSRCRLSPLSLTRKGNSLTPCTSPVRQCPRPASACTRRYP

SEQ ID NO: 41489 - protein, 50 aa, Homo sapiens
MNAMGQDLQPPNNQCQTILSGSNSAMKFSTDTAVCFSWITPVRRKLSIRS

SEQ ID NO: 41490 - protein, 708 aa, Homo sapiens
ALGRAQITDGIGQCVEMVQQDEDRYLVRWLLPPSLLSESELQAVPSALSSGIPVPVFAVKDSKVLCRVHQLFLNFPGSTSSATNVSMVVSADPLSSERAEMNILEINQELRSQLAESNQQFRDLKEKFLITQATAYSLANQLKKYKCEEYKDIIDSVLRDELQSMEKLAEKLRQAEELRQYKALVHSQAKELTQLREKLREGRDASRWLNKHLKTLLTPDDPDKSQGQDLREQLAEGHRLAEHLVHKLSPVGEMGNISMDTSVFAENDEDEDEDEDDKDEEVEKVQESPAPREVQKTEEKEVPQDSLEECAVTCSNSHNPSNSNQPHRSTKITFKEHEVDSALVVESEHPHDEEEEALNIPPENQNDHEEEEGKAPVPPRHHDKSNSYRHREVSFLALDEQKVCSAQDVARDYSNPKWDETSLGFLEKQSDLEEVKGQETVAPRLSQELPEVKEQEVPEDSVNEVYLTPSVHHDVSDCHQPYSSTLSSLEDQLACSALDVASPTEAACPQGTWSGDLSHHQSEVQVSQAQLEPSTLVPSCLRLQLDQGFHCGNGLAQRGLSSTTCSFSANADSGNQWPFQELVLEPSLGMKNPPQLEDDALEGSASNTQGRQVTGRIRASLVLILKTIRRRLPFSKWRLAFRFAGPHAESAEGDQCPDGQIALTGVSPVSQFPSCREQESAAAGRRQHVSRDSARAEYEQCHVLAENA

SEQ ID NO: 41491 - protein, 76 aa, Homo sapiens
ASRAATSTFGMYLQIQFFLNCSVLEVMRAYLQQLRQETGLRLCEKVFDPQNDKPSKWWTCFVKRQFMNKSLSGPGQ

SEQ ID NO: 41492 - protein, 245 aa, Homo sapiens
  misc_feature (1)...(245): Xaa = X or * as defined in Table 2
NPGAVKMPAYHSSIMDPDTKLIGNMAHLLPIRSQFKGPAPRETKDTDIVDEAIFLPSGPNVFFKNYEIKNEADRTLIYITLYISECLKKLQKCQFPKAQGGGKEMFYAGESTNFSHFLGEPGFPTLTAILCPNPANKQEDEVMRALFTNQPKGKRLGLRLCEKSFSDPQNGXTPAKWVDLAFVKRQFMNKSLSGPWTVEGSPGQPTVSRGPGAAFFQQDVTQSFCLYLVKFYRDERRACLYLKNS

SEQ ID NO: 41493 - protein, 276 aa, Homo sapiens
  DOMAIN (63)..(105): Ribosomal protein L30e proteins domain identified by eMATRIX, accession number BL00709B, p-value=5.313e-28, raw score of 21.58
  DOMAIN (171)..(201): Zinc finger, C3HC4 type (RING finger) domain identified by PFam, accession name zf-C3HC4, E-value=0.014, PFam score of 12.6
MVLAKKIKKSVEWINSRLLLVIKSGKYILAYKQTPKMITQGKAKLAIHTENCPALRKSKIEYYTMLTKTGVHHYSDNNFELGIACGKYCRVCMLSIIDPDDSDIVRSVPEQTGHHLDHSGFSASPACGPWRAQTDQGLKGSPTQHSCSTKKQPDCFFKWVCDPVPPNWTFDETIRKPISLGCGHTVCKMCLNKLHRKACPFDQTTINTDIELLPVNSALLQLVGAQALKITKILTDLHKHNMPKFGSSILHHKLSVTEKQKDTFSKHNMGNEPLLT

SEQ ID NO: 41494 - protein, 175 aa, Homo sapiens
  DOMAIN (57)..(91): Cytosol aminopeptidase proteins domain identified by eMATRIX, accession number BL00631E, p-value=6.860e-16, raw score of 27.20
SPFRTLRNWTDSKVGEEEQGVIYVTLGSGATGVFTNSCWLWNKLFEASIETGDRVWRMPLFKHWTRQVVDCQLADVNNIGKYRSAGACTSAAFLKEFVTHPKWAHLDISSVMTNKDESHEDIFLKSSPWEQGVVTGGRPHKNVHPLVRQVHIHFVVVANLSECGETEHTHMQQVT

SEQ ID NO: 41495 - protein, 592 aa, Homo sapiens
  DOMAIN (406)..(427): CYTOSOL AMINOPEPTIDASE SIGNATURE domain identified by eMATRIX, accession number PR00481D, p-value=1.450e-23, raw score of 9.86
  DOMAIN (124)..(531): Cytosol aminopeptidase family domain identified by PFam, accession name Peptidase_M17, E-value=2.3e-216, PFam score of 732.2
  misc_feature (1)...(592): Xaa = X or * as defined in Table 2
THVRLAGARASPRAPRLRPRKPRPQGLPCLPGLRRARLEGGARGRADEMFLLPLPAAGRVVVRRLAVVRSGSRSLSTADMTKGLVLGIYSKEKEDDVPQFTSAGENFDKSLAGKLRETLNISGPPLKAGKTRTFYGLHQDFPSVVLVGLGKKAAGIDEQENWHEGKENIRAAVAAGCRQIQDLELSSVEVDPCGDAQAAAEGAVLGLYEYDDLKQKKKMAVSAKLYGSGDQEAWQKGVLFASGQNLARQLMETPANEMTPTRFAEIIEKNLKSASSKTEVHIRPKSWIEEQAMGSFLSVAKGSDEPPVFLEIHYKGSPNANEPPLVFVGKGITFDSGGISIKASANMDLMRADMGGAATICSAIVSAAKLNLPINIIGLAPLCENMPSGKANKPGDVVRAKNGKTIQVDNTDAEGRLILADALCYAHTFNPKVILNAATLTGAMDVALGSGATGVFTNSSWLWNKLFEASIETGDRVWRMPLFEHYTRQVVDCQLADVNNIGKYRSAGACTAAAFLKEFVTHPKWAHLDIAGVMTNKDEVPQSTGKAXLGRPTRTLIEFLLRFSQDNCLVQILKNVFHSVLNWTVELKKVFE

SEQ ID NO: 41496 - protein, 91 aa, Homo sapiens
MEAVCDSPYMKNTDTSCSPHPPYGVTWARLADKSKTVQETLSDRGVQFPTQTPACSVTPFPMSCDLQGDCACRDPQAQEHSRKDLRGYSHG

SEQ ID NO: 41497 - protein, 1752 aa, Homo sapiens
  DOMAIN (632)..(643): Neutral zinc metallopeptidases zinc-binding region proteins. domain identified by eMATRIX, accession number BL00142, p-value= 6.625e-10, raw score of 8.38
  DOMAIN (1288)..(1544): Sushi domain (SCR repeat) domain identified by PFam, accession name sushi, E-value=2.6e-18, PFam score of 74.3
LPTRRSWAVFFKGGESGAHTLRRKARKKRKKQVKGGSPKKGEEAKKVEAPRLPKLAAPGGGAGAKGGAGGTSDMRLWSWVLHLGLLSAALGCGLAERPRRARRDPRAGRPPRPAAGPATCATRGPRPPRLAAAAAAAGRAWEAVRVPRRRQQREARGATEEPSPPSRALYFSGRGEQLRVLRADLELPRDAFTLQVWLRAEGGQRSPAVITGLYDKCSYISRDRGWVVGIHTISDQDNKDPRYFFSLKTDRARQVTTINAHRSYLPGQWVYLAATYDGQFMKLYVNGAQVATSGEQVGGIFSPLTQKCKVLMLGGSALNHNYRGYIEHFSLWKVARTQREILSDMETHGAHTALPQLLLQENWDNVKHAWSPMKDGSSPKVEFSNAHGFLLDTSLEPPLCGQTLCDNTEVIASYNQLSSFRQPKVVRYRVVNLYEDDHKNPTVTREQVDFQHHQLAEAFKQYNISWELDVLEVSNSSLRRRLILANCDISKIGDENCDPECNHTLTGHDGGDCRHLRHPAFVKKQHNGVCDMDCNYERFNFDGGECCDPEITNVTQTCFDPDSPHRAYLDVNELKNILKLDGSTHLNIFFAKSSEEELAGVATWPWDKEALMHLGGIVLNPSFYGMPGHTHTMIHEIGHSLGLYHVFRGISEIQSCSDPCMETEPSFETGDLCNDTNPAPKHKSCGDPGPGNDTCGFHSFFNTPYNNFMSYADDDCTDSFTPNQVARMHCYLDLVYQGWQPSRKPAPVALAPQVLGHTTDSVTLEWFPPIDGHFFERELGSACHLCLEGRILVQYASNASSPMPCSPSGHWSPREAEGHPDVEQPCKSSVRTWSPNSAVNPHTVPPACPEPQGCYLELEFLYPLVPESLTIWVTFVSTDWDSSGAVNDIKLLAVSGKNISLGPQNVFCDVPLTIRLWDVGEEVYGIQIYTLDEHLEIDAAMLTSTADTPLCLQCKPLKYKVVRDPPLQMDVASILHLNRKFVDMDLNLGSVYQYWVITISGTEESEPSPAVTYIHGRGYCGDGIIQKDQGEQCDDMNKINGDGCSLFCRQEVSFNCIDEPSRCYFHDGDGVCEEFEQKTSIKDCGVYTPQGFLDQWASNASVSHQDQQCPGWVIIGQPAASQVCRTKVIDLSEGISQHAWYPCTISYPYSQLAQTTFWLRAYFSQPMVAAAVIVHLVTDGTYYGDQKQETISVQLLDTKDQSHDLGLHVLSCRNNPLIIPVVHDLSQPFYHSQAVRVSFSSPLVAISGVALRSFDNFDPVTLSSCQRGETYSPAEQSCVHFACEKTDCPELAVENASLNCSSSDRYHGAQCTVSCRTGYVLQIRRDDELIKSQTGPSVTVTCTEGKWNKQVACEPVDCSIPDHHQVYAASFSCPEGTTFGSQCSFQCRHPAQLKGNNSLLTCMEDGLWSFPEALCELMCLAPPPVPNADLQTARCRENKHKVGSFCKYKCKPGYHVPGSSRKSKKRAFKTQCTQDGSWQEGACVPVTCDPPPPKFHGLYQCTNGFQFNSECRIKCEDSDASQGLGSNVIHCRKDGTWNGSFHVCQEMQGQCSVPNELNSNLKLQCPDGYAIGSECATSCLDHNSESIILPMNVTVRDIPHWLNPTRVERVVCTAGLKWYPHPALIHCVKGCEPFMGDNYCDAINNRAFCNYDGGDCCTSTVKTKKVTPFPMSCDLQGDCACRDPQGPRNTAGKDLRGYSHGLREGTRKLFKGISPTPGAPHSLLVFDFTVSCSTEWPLHTRGSFRHPTGLAF

SEQ ID NO: 41498 - protein, 63 aa, Homo sapiens; identical to SEQ ID NO: 41450

SEQ ID NO: 41499 - protein, 120 aa, Homo sapiens
MRCPGKAAGPRLQDRPAVTVIFLGLKTASLGRENPGVGLCERFRSEQSSSTEATEPRKRLNSDGQGRLHSKKFPELKFKYVEEEQPEEFFIPYVWSLVYNSAVGLYWNPQDIQLFTMDSD

SEQ ID NO: 41500 - protein, 215 aa, Homo sapiens
  misc_feature (1)...(215): Xaa = X or * as defined in Table 2
PRIRHEVIEEVIRMMLEIINSCLTNSLHHNPNLVYALLYKRDLFEQFRTHPSFQDIMQNIDLVISFFSSRLLQAGAELSVERVLEIISQGALRCPKDRLKEISQKLKFKYVEEEQPRGVFXSPYVWSLVLQLQQSALYWEFHRTFQLFHPWDSRLRGRDASSPPGTPSSQGRPFQSSFISGVTEVGQTGYLVYLLLKEDCTSVFSSHTLIWRIGC

SEQ ID NO: 41501 - protein, 34 aa, Homo sapiens
LLVYHYHHHHHHHHHHHHHLLHHERKKLPMLLYS

SEQ ID NO: 41502 - protein, 68 aa, Homo sapiens
ARRPRSAGDVRHCRRPPRPLPPRCRRPRPPPPPSPLRPPRRRSISEWSHPPSATSPPASPQSLEPQRK

SEQ ID NO: 41503 - protein, 893 aa, Homo sapiens
  DOMAIN (97)..(110): BTB (also known as BR-C/Ttk) domain proteins domain identified by eMATRIX, accession number PF00651, p-value=8.286e-10, raw score of 15.00
  DOMAIN (13)..(129): dUTPase domain identified by PFam, accession name dUTPase, E- value=0.012, PFam score of -6.3
DCNVQCRPVHLDVSKIAVVSAALCSAGLEVLVPEGGMLPPRDTTMIPLNWKLRLPPGHFGLFLLLSQLAKKGVTVFDPDYQDEISLLLHNGGEAVPAHCCILSACSPFFTERLERERPAQGGKVVLELGGLKISTLRKLVDFLYTSEMEVSQEEAQDVLSAARQLRVSELESLQLEGGKLVKAPQGRRLNRECLQPTSAAPISARVVTPSHHPHTPLPTNQTPCPLGAIRLKSLGKEEGPQENNRQNADNLSGTLLLKRKARACPTPQEKNSSPSSHSQEPRENKNDTALDPTVLSPPSLYPSVDKHLLPRKIRLSRSKPSPGICTSKPSSILSGSSSVPATPGRRLWRQRSVNKETPEDKPKPGRASPLQSTPNPSGLGKTGGSRKRSPEVRAPNSDSAEEGQVGRVKLRKIVNGTCWEVVQETPLKNTQDSPQIPDPGGDFQEPSGTQPFSSNEQEMSPTRTELCQDSPMCTKLQDILVSASHSPDHPVVKSEFESSPELVEKEPMLAIDCREPYAFDTALLEQPCEAEEYRITSAAATSELEEILDFMLCGSDIEPPIGSLESPGAEGCRTPTYHLTETGKNWIEGEEWCLPDMELWPRELTELEKEPAGENRGPTELLSPLVMPSEVSEVLSVGGRWTPDLEITSSQPLDGQEDKLLHVSSLDTPQRSYGDLSPPCSNWVETGLEVSLTTDELLYPSPKAGKEVSGHSELLGSLPASSEEEEIDVVDWTAEGRLVPTTVPSVWPDPSSESETEGRNHGFRIMTEVWPCSIINVPTSPGTQSCKNEKGNKAPHQCSITTVASSIPSPPFASFSRFSATATTAASALRFLPRGAMAPRARPRMQRDWCPGLSLYVSPAVPIYNAIMFLFVLANFSMATFMDPGIFPRGIAS

SEQ ID NO: 41504 - protein, 225 aa, Homo sapiens
MGRAIQVLRAVTVLFRRYLVFRGSVTGPGSIGSSRQPVRAVGRSIGGPSGRPPMRPSSAAALDSNRSTNPIVSCACEGSTLCASYENLMPDELSLSPMTPRWDHLVAEKQAQCSTDSTLCFFTRFYLIAFFSRVFGSKVAFPKGRERELVVSKQTQFYAPLLRAGASGPAFSASAGSLGVRKVSELPAVNPYRPAATSILASSEERIRLRGIRQKKRLRQVLQQQ

SEQ ID NO: 41505 - protein, 81 aa, Homo sapiens
  misc_feature (1)...(81): Xaa = X or * as defined in Table 2
KGLWTVPPSFGDTVSGPPVPTGGSAGHTVPPPPRXCRRQPPPSPPWRRLFLPQLRSRSSQPPAGPARHLPPPAARPECFCA

SEQ ID NO: 41506 - protein, 227 aa, Homo sapiens
MESAPGEDAVNIVKTTTRDLEYSVNLIDIALAGLERMDSNFERSFTEGTQYVYIFMGYMSYFGTDMQYVITSWKIGHPSPQAFILCVTNNPIIHLWQSCRDPTKSKKQKSQKRWKAQELMLAGENISKSYSTEVATNLYGPAATSILPSSEERIQLRGIRQKCTCRSTLAQLLRSYGETACHACLCEETTKQALCEQQGCLFHLDAGHLDVYVQAWAQRPDIRVFLY

SEQ ID NO: 41507 - protein, 73 aa, Homo sapiens
  misc_feature (1)...(73): Xaa = X or * as defined in Table 2
VPILPQPLLLHPIILLSXVPILPQPPAPPPYNPFITSPPHTWSGLQFHSVTSPPPPAQQFTLKRVAEAKGIVK

SEQ ID NO: 41508 - protein, 181 aa, Homo sapiens
LKSQEVIIYDDVDLSEKESKDEDKLKMWKPKFLTPKEKKEKNGAEESERNFFKTKKQNLEKNRMKREEKLFRERFKVRSLLKYDKEIIVINTAVACSNNSRNGIFDLPISPGEELEVIDTTEQNLVICRNSKGKLKINLYSLSTNCLGNKKKQTQNYKTVLKNPFAENGELFMLHIANTLT

SEQ ID NO: 41509 - protein, 192 aa, Homo sapiens
MHFSEQIPIVKRCMTVIKIGIMSLNKIHRTIGKVKSAKHEDKKMKEKQPCELKPKNTEKEPYSNHVFKVDACEGTPEKIQMTNVHTGRRNMLAGKQEAMIDIIQTNPCPEGPKLARHSQGHCGHLEVLESTKETPDLGVSKTSSISEEIYDDVEYSRKEVLDGKEALKRLQQFFKKEKDRFKIKKTKSKENL

SEQ ID NO: 41510 - protein, 61 aa, Homo sapiens
  DOMAIN (27)..(40): REPEAT PRECURSOR GLYCOPROTEIN EG domain identified by eMATRIX, accession number PD00120A, p-value=2.636e-10, raw score of 12.94
RDSRSFLNIWELLNKVPGILKPLADLGSCCCSCCCCCCCIVKTTLMSRELGDNLLGFMKKE

SEQ ID NO: 41511 - protein, 309 aa, Homo sapiens
MACLASCPLLKIENVLPSFPDFVTIDHFKKAICSSLKAYNHHIQELQREMKEATASAQRIRRDLQELRGRYGTVEPQDKCATCDFPLLNRPFYLFLCGHMFHADCLLQAVRPGLPAYKQARLEELQRKLGAAPPPAKGSARAKEAEGGAATAGPSREQLKADLDELVAAECVYCGELMIRSIDRPFIDPQQAKRGETGGQFFNTRKSITNLRQPPPKEGAADVKPTRVQFMSSDGPRHHLQPARVAHDVHKEAEAAELRPEAPGPDDKEVGFLSPEDCPDCEQEEATAHEGHPQPDTFSSKQDKITSSR

SEQ ID NO: 41512 - protein, 74 aa, Homo sapiens; identical to SEQ ID NO: 30979
  misc_feature (1)...(74): Xaa = X or * as defined in Table 2

SEQ ID NO: 41513 - protein, 146 aa, Homo sapiens
  DOMAIN (73)..(90): Zinc finger, CCHC class domain identified by PFam, accession name zf-CCHC, E-value=0.00083, PFam score of 26.1
RRKLQKQALGPEQNLETLLNLATSVFYNRDQEEQVQKEKRDQRKAAALVMALRQTNLGGSERTEHEAGQSPGKACYQCGLLGHFKKDCPMRNKLPPRRVSTMLRQSLEGALPQRMKVPWVRSPQPDDPTTGLRVPGASASSCHHPH

SEQ ID NO: 41514 - protein, 65 aa, Homo sapiens
CLIELVSLMSLLMSKASPLSFQGLCCKTIPSPPQLYKAREGLSPSPPSDMGGTGGPQAKVYTVFL

SEQ ID NO: 41515 - protein, 10 aa, Homo sapiens
MFLGLVGLRT

SEQ ID NO: 41516 - protein, 128 aa, Homo sapiens
  misc_feature (1)...(128): Xaa = X or * as defined in Table 2
VEAFPTGSEKATAVISSLLSDIIPQSRLPTSIPSDNRRAFISQISQAVFQALSIPXNLYIPYGPPSSRKHTLTKLSHQLKKDWTILLPLSLLRIQACPRNATGYSPFKVLYRHSFLLRPSLIPDTRPT

SEQ ID NO: 41517 - protein, 61 aa, Homo sapiens
  misc_feature (1)...(61): Xaa = X or * as defined in Table 2
WYGEIMGDVSQGCFERXWAMFLRAASSGIRGGVGTXSGRHXAEGRFYGDFRGNRAASVFSR

SEQ ID NO: 41518 - protein, 381 aa, Homo sapiens
  DOMAIN (46)..(92): kw TRANSCRIPTASE REVERSE II ORF2 domain identified by eMATRIX, accession number DM01354O, p-value=3.901e-13, raw score of 8.73
  DOMAIN (270)..(381): RNase H domain identified by PFam, accession name rnaseH, E- value=6.9e-05, PFam score of 3.2
MHINQKIYKKLIYFWTYTLPRLDQEEIRSLNRPITSSEIESAINSLPTKKFPRPDGFTVEFYQMYKEELTHNKKRKLQANILDEHQCKKSSRNPGKLNPAAHEKLIHHDQAGFIPGMQALVCWITVFLLQCSKGTTDAPVGSGLWLCQPTPRCGNKIYNPSEQCCYDDAILSLKETRRCGSTCTFWPCFELCCPESFGPQQKFLVKLRVLGMKSQCHLSPISRSCTRCCCRASTQLCSCQCPKHTYPGSCIPLPASCTPTPPHPLHFYRKPQVDIASNALSTVLLPERQRELFSQAKLIALTRALTLAKGLRINIYTDSKYAFHILHHHAVIWAERGFLITQGSSIINASLIKTLLKAALLPKEAGVIHCKGHQKASDPIA

SEQ ID NO: 41519 - protein, 142 aa, Homo sapiens
  DOMAIN (112)..(130): RNase H domain identified by eMATRIX, accession number PF00075J, p-value=7.188e-14, raw score of 15.78
  DOMAIN (60)..(138): Integrase core domain identified by PFam, accession name rve, E-value=6e-17, PFam score of 62.6
LGSGDLPWEINPLSSCSLLHEKDPPTTSGPQTDRPKEHLTNFNQTITDAELRVTLTVEGPSQMLWVTLTVEDIIPRFSLPTSIQSDNGPAFTSQITQAVSQALGIQWNLHIPYSPQSSGKVERTNGPLKTHLTKLSHQFKKD

SEQ ID NO: 41520 - protein, 285 aa, Homo sapiens
  DOMAIN (244)..(262): RNase H domain identified by eMATRIX, accession number PF00075J, p-value=2.125e-14, raw score of 15.78
  DOMAIN (48)..(260): Reverse transcriptase domain identified by PFam, accession name rvt, E-value=1.3e-22, PFam score of 88.6
DISTPSLATDHMPITIPLNLITTYPTQRQYPIPPHALKGLKPVITDLLQHRLLKPINSPYNSPILPVQKPDKSYRLVQDLRLTNQIVLPIHPVVPNLYTLLSSIPSSTTHYSVLHLKDAFFTIPLHPSSQPLFAVTWTDPDTQQSQQLTWAVLPQGFRDSPHYFSQALSHDLLSFHPSASHLIQYIDDLLLCSPSFESSQQDTLLLLQHLFSKGYQSDDRPAFTSQITQAVSQALGIQWNLHIPYHPQSSGKVEWTNGLLKLLLLLLTANIDDTSYLQIPHKGLQ

SEQ ID NO: 41521 - protein, 202 aa, Homo sapiens
  DOMAIN (66)..(114): Integrase core domain identified by PFam, accession name rve, E-value=4.1e-09, PFam score of 35.5
MTSGPQTDQPKEHLTNFKLDEQERVFSLAQSHTDNRRLHEPDLQEVIRAVPLGDPKWNYQADSPDVIPRFGLPTSIQSDNGLAFISQITQAVSQALGIQWKLRTPYHPQSSGKCWDYRHKSLHPAKCLLNSYSPSNVQGSGDTVVDRTPSLSLRKSSLWYKAPQSRDGDTIGDGKTSGAHQLGQPNKKRHGYHIISFPDFLS

SEQ ID NO: 41522 - protein, 41 aa, Homo sapiens
  DOMAIN (4)..(41): Integrase core domain identified by PFam, accession name rve, E-value=0.00084, PFam score of 17.2
  misc_feature (1)...(41): Xaa = X or * as defined in Table 2
LSQWRSDNGPAFISQITQAVSQAPGIQXNLYIPYHPQSSGK

SEQ ID NO: 41523 - protein, 377 aa, Homo sapiens
  DOMAIN (190)..(201): RNase H domain identified by eMATRIX, accession number PF00075F, p-value=5.500e-12, raw score of 12.87
  DOMAIN (127)..(274): RNase H domain identified by PFam, accession name rnaseH, E- value=5.4e-23, PFam score of 89.8
  misc_feature (1)...(377): Xaa = X or * as defined in Table 2
AEALPVQFYFHLSDIRGMLLHEPDLQKGIKAVSQEDPQWSYQADSPGIARRDYMVSRLVEGLKKAAYKAVNYDKLKKTTQVTIVPGPDFNLASHIIPDTTPDPHDCYLSDTPGIHSISHISFFAIPHPDHTWFIDGSSTTPNRHTPAKAGYAIVPSTSIIEAAALPPSATSRQAKLIALTRTLTLAKELCVNIYTDSKYAFHILHHHAVIWAERGFLTKQGWSNINASLIKTLLKATLLPKEAGVIHCKGHQKASDPIAQGNTYADKIAKEAASGPTSVPHGQFFSFSLVTPTYSPTKTSTYPSLLTQGKWFLDQGKYLLPASKAHSILPSFHNLFHVGYKPLAHLLEYLISFLSWKSILKEITSQXSICYSTTPQG

SEQ ID NO: 41524 - protein, 313 aa, Homo sapiens
  DOMAIN (237)..(255): RNase H domain identified by eMATRIX, accession number PF00075J, p-value=7.923e-13, raw score of 15.78
  DOMAIN (142)..(296): Integrase core domain identified by PFam, accession name rve, E-value=2.8e-40, PFam score of 143.3
MQQEDPEESTKSPNPTTNKKQEKKLSLFGGLFTWTRVKFGAVTQIGGPPLGDQSPVLLLLQRLFSKGYRVSPSKAQISSPSVTYLNSVSLIKTLLKTTLLPKEAGVIHCKGHQKASDPIALGNTSADKGLFRPPPFPSHQARGFAPAQDWQIDFTHMPRVRKLKYLLVWVDTFTGWVEAFPTGSEKATAVTSSLLSDIIPRFGLPTSIESDNGPAFTSQITQAVSQALGIQWNLHISYRPQSSGKVEQTNGLLKTHLTKLSLQLKKDWTVLLPLALLRIRACPRNATGYSPFELLYGRSFLLSPSLIPDTRPT

SEQ ID NO: 41525 - protein, 1663 aa, Homo sapiens
MNPQRAVEKINLSKETNADLMDMNCESHGPEMGFQADAQLADQSQVAEIERQKVDVDLENKSVQSSRSSLSSDSPASLYHSAHDEPQEALDEVNLKELNIDMEVRSYDCSSSELTFDSDPPLLSVTEQSHLDAEGKERHIDLEDESCESDSSEITFDSDIPLYSVIDQPEVAVYEEETVDLESKSNESCVSEITFDSDIPLHSGNDHPEVAVKEVIQKEEYIHLERKNDEPSGSEISSDSHAPLHSVTNSPEVAVKKLNPQKEEQVHLENKENEPIDSEVSLDYNIIFHSVTGRSEDPIKEISLHTKEHMYLENKSVFETSLDSDVPLQAATHKPEVIVKETWLQREKHAEFQGRSTEFSGSKTSLDSGVPHYSVTEPQVAVNKINRKKQYVLENKNDKCSGSEIILDSNVPPQSMTDQPQLAFLKEKHVNLKDKNSKSGDSKITFDSEQLQEAVKKIDQWKEEVIGLKNKINEPSTYKLIHHPDVSVQSVADQPKSVADRLRETVKEISLWKDEEVDTEDRRNEAKGFEIMYDSDVLQPVAGQPEEVVKEVSLWKEHVDLENKIVKPTDSRINFDSHEPLQSVTNKIPGANKEINLLREEHVCLDDKGYVPSDSEIIYVSNIPLQSVIKQPHILEEEHASLEDKSSNSYSPEESSDSNDSFQAAADELQKPVKEINLWKEDHIYLEDKSYKLGDFDVSYASHIPVQFVTDQSSVPVKEINLQKKDHNDLENKNCQKLTNPQVSYKEADLQKEEHVVMEEKTDQPSDSEMMYDSDVPFQIVVNQFPGSVKETHLPKVVLVDLVPGDSDYEVISDDIPLQLVTDPPQLTVKDISCINTECIDIEDKSCDFFGSEVRCNCKASTPSMTNQCKETFKIINRKKDYIILGEPSCQSCGSEMNFNVDASDQSMTYESQGPDEKMVKYIDSEDKSCGYNGSKGKFNLEDTSHRTTHRLQKAHKEASLRKDPRNAGLKGKSCQSSASAVDFGASSKSALHRRADKKKRSKLKHRDLEVSCEPDGFEMNFQCAPPLPSDTDQPQETVKKRHPCKKVSSDLKEKNHDSQSSSVLKVDSVRNLKKAKDVIEDNPDEPVLEALPHVPPSFVGKTWSQIMREDDIKINALVKEFREGRFHCYFDDDCETKKVSSKGKKKVTWADLQGKEDTAPTQAVSESDDIVCGISDIDDLSVALDKPCHRHPPAERPPKQKGRVASQCQTAKISHSTQTSCKNYPVMKRKIIRQEEDPPKSKCSRLQDDRKTKKKVKIGTVEFPASCTKVLKPMQPKALVCVLSSLNIKLKEGEGLPFPKMRHHSWDNDIRFICKYKRNIFDYYEPLIKQIVISPPLSVIVPEFERRNWVKIHFNRSNQNSSAGDNDADGQGSASAPLMAVPARYGFNSHQGTSDSSLFLEESKVLHARELPKKRNFQLTFLNHDVVKISPKSVRNKLLESQSKKKIHGKRVTTSSNKLGFPKKVYKPIILQQKPRKASEKQSIWIRTKPSDIIRKYISKYSVFLRHRYQSRSAFLGRYLKKKKSVVSRLKKAKRTAKVLLNSSVPPAGAEELSSAMANPPPKRPVRASCRVARRRKKTDESYHGRQKGPSTPVRAYDLRSSSCLQQRERMMTRLANKLRGNEHSIACNTAGGTLHDLEPPALPYAALSTVAPWGLKLFQFP

SEQ ID NO: 41526 - protein, 195 aa, Homo sapiens
FFHCPSEGTLSSVSGAVFQVTGPPWRGNADAPPPPGRPGPSISSASLEDPRPRTGASSAFVPRESERPSPGWCDGRGWWQSRERAASSSARRPCGATPPSLDYCPEPRCQTLSGGLRPGHPSAFTGLLRLSSFYLLRLPSCSPLLPHSQRRERKVEQNNFKITGNLSLQGRPSSGGLFHLRSCSGRFLYGMVHVY

SEQ ID NO: 41527 - protein, 523 aa, Homo sapiens
HLFLEFSVTQQEVQFKPESLCKKLFSDHKELEGLMKTLIHPCSQGIVIFSRSWAGDVGFRKEQNVLWDALLIAVNSPVVLYTILIDPNWPGGLEYARNTAHQLKQKLQTVGGYTGKVCIIPRLIHLSSTQSRPGEIPLRYPRSYRLADEEEMEDLLQALVVVSLSSRSLLSDQMGCEFFNLLIMEQSQLLSESLQKTRELFIYCFPGVRKTALAIKIMEKIKDLFHCKPKEILYVCESDSLKDFVTQQTTCQAVTRKTFMQGEFLKIKHIVMDETENFCSKYGNWYMKAKNITHPKAKGTGSENLHHGILWLFLDPFQIHHADVNGLPPPSAQFPRKTITSGIHCALEIAKVMKEEMKRIKENPPSNMSPDTLALFSETAYEEATCAQALPGVCETKTNLTTEQIANYVARKCHSLFQCGYLPKDIAILCRRGEDRGRYRLALLKAMELIETHRPSEVVFSPATGVWGSHIVLDSIQQFSGLERTVVFGLSPECDQSEEFHKLCFASRAIKHLYLLYEKRAAY

SEQ ID NO: 41528 - protein, 556 aa, Homo sapiens
MLGEMMFGSVAMSYKGSTLKIHQIRSPPQLMLSKVFTARTGSSICGSLNTLQDSLEFINQDNNTLKADNNTVINGLLGNIASLSSLLITPFPSPNSSLTRSCASSYQRRWRRSQTTSLENGVFPRWSIEESFNLSDESCGPNPGIVRKKKIAIGVIFSLSKDEDENNKFNEFFFSHFPLFESHMNKLKSAIEQAMKMSRRSADASQRSLAYNRIVDALNEFRTTICNLYTMPRIGEPVWLTMMSGTPEKNHLCYRFMKEFTFLMENASKNQFLPALITAVLTNHLAWVPTVMPNGQPPIKIFLEKHSSQSVDMLAKTHPYNPLWAQLGDLYGAIGSPVRLARTVVVGKRQDMVQRLLYFLTYFIRCSELQETHLLENGEDEAIVMPGTVITTTLEKGEIEESEYVLVTMHRNKSSLLFKESEEIRTPNCNCKYCSHPLLGQNVENISQQEREDIQNSSKELLGISDECRMISPSDCQEENAVDVKQYRDKLRTCFDAKLETVVCTGSVPVDKCALSESGLESTEETWQSEKLLDSDSHTGKAMRSTGMVVEKKTSR

SEQ ID NO: 41529 - protein, 43 aa, Homo sapiens
VTCGFHGKLRRRALRILSCLCREQYSLTGSLRSTEYLQASEQE

SEQ ID NO: 41530 - protein, 26 aa, Homo sapiens
GRPGGDKISQHLLVCKGFYFSFTYEA

SEQ ID NO: 41531 - protein, 441 aa, Homo sapiens
  DOMAIN (396)..(421): 7 kw REVERSE TRANSCRIPTASE RNA POLYMERASE domain identified by eMATRIX, accession number DM00895E, p-value=5.966e-10, raw score of 15.72
  DOMAIN (17)..(210): AP endonuclease family 1 domain identified by PFam, accession name AP_endonucleas1, E-value=5.7e-34, PFam score of 126.3
PPLLIPRQTGSGVDLQQTPTDLQLRVLTVRRKTNKQKGHPHQNSICTSPSSKTKDFKPTKIKRDKEGHYIMVKGSIQQEELTILNIYTPNTGAPRFIKQVLRDLQRDLDSHTIIVGDFNTPLSTLDSSKRQKVDKDIQELNSALYQADLTDIYRTLHPKSTEYTFFSAPHHTYSKIDHIVGSKALLSKCNRTEIITNCLSDHSAIRLELRIKKLTENRSTTWKLNNLLLKDYWVHNEMKAEIKMFFETNENKDTTYQNLWDTGKAACRGIFIAINAHKRNQKRSKMDTLTSQLKELEKQEQRHSKASRRLNQEEVESLNKPRTGSEIEAIINSLPTKKSPGADGFTAEFYQRYKEELGPFLLKLFQSIEKEGILPNSFYEASIILIPKPDRDTTKKENFRPICLMNIHAKIINKILANQIQQHIKKLIHHDQVGFIPRMQG

SEQ ID NO: 41532 - protein, 84 aa, Homo sapiens
  misc_feature (1)...(84): Xaa = X or * as defined in Table 2
LLKGKLTNRKDIHTKTPSVRHHHRRPKPGRDTTKKIILNQYPWXTSMQKSSIKYWQTESSSTSKSLSTMIKLASSLGCKNWKKL

SEQ ID NO: 41533 - protein, 558 aa, Homo sapiens
  DOMAIN (200)..(247): kw TRANSCRIPTASE REVERSE II ORF2 domain identified by eMATRIX, accession number DM01354V, p-value=1.000e-40, raw score of 12.97
  DOMAIN (159)..(391): AP endonuclease family 1 domain identified by PFam, accession name AP_endonucleas1, E-value=6.6e-06, PFam score of -26.8
MDVYSSCIQNCQHLEATKIFFSRQTGSEADLQKTPADLQQRGLMVRRKTNKQKGIASISTKRTSTQKHNPKVTNIKDQSQYHTEWAKAGSIPFENWHKTKMPSLTTPIQHGIGSSGQVNQARERNKSIQIGREEAKLSLFADDMIVYLENPIVSAQNLLKLISNFCKVSGYKINVQKSQVFLYTNNRQTESQIMSELLFTIATKRIKYLGIQLTRDVKDLFKENYKLLLKEIREDTNIWKNIPGSWIGRINIPPLLIPRQTGSGVDLQQTPTDLQLRVLTATRKTNQQKGHPHQNPICTSPSSKTKGRSTRQKVNKDIQEFNSALPQVDLIDIYRTLHPKSTENTFFSAPHHTYSKIDHIVGSKALLSRCKRTEIITNCLSDHSAIKLELRIKKLTQNCSTTWKLNNLLLNDNWVHNEMKAEIKMFFETNANKNTTYQNLWDTFKALCRGKFIALNAHKRQQERSKTDTLTSQLKELEKQEQSHSKASRRQEITKIRAELKEIGTQKILQKINESRSWFFEKINKIDRLLARLIKKKREKNQTDAIKNDKGDITTDST

SEQ ID NO: 41534 - protein, 71 aa, Homo sapiens
  misc_feature (1)...(71): Xaa = X or * as defined in Table 2
FVFLWSLMMVTYRWGFGVDVLSVCXFSFQQSEPQLQVCWSLLEVHSXPCLPGYQQRRNSCWPRGSCDVVIT

SEQ ID NO: 41535 - protein, 68 aa, Homo sapiens
  misc_feature (1)...(68): Xaa = X or * as defined in Table 2
LSDSPKLKXRKKCXGQPERKVGLPTKGSPSDXQQISWQKLCKPEESGGQYSTFLKKRIFNPEFHIQQN

SEQ ID NO: 41536 - protein, 307 aa, Homo sapiens
  DOMAIN (237)..(257): kw TRANSCRIPTASE REVERSE II ORF2 domain identified by eMATRIX, accession number DM01354U, p-value=5.696e-19, raw score of 12.24
  DOMAIN (82)..(270): Reverse transcriptase domain identified by PFam, accession name rvt, E-value=0.0031, PFam score of -23.6
  misc_feature (1)...(307): Xaa = X or * as defined in Table 2
MEGSPSVXXMGLXTEVPGVHSENDKNQKKKIRKLDPKKKQVDTVQIIQGSKKGSSFLIFFFSPLIILTVELQVGNVVAQELSIQLELFWRTRASQSVTEPTAGLCLLNPGEQEMRALRGRRKPLLLIPRQTGSGVDLQQTPTDLQLRVLTVRRKTNKQKGHPHQNPILLEVLARAIRQEKEIKGIQLGKEEVKLSLFAGDMIVYLENPIVSTQNLLKLISNCSKVSGYKINVQKSQAFLYTNNKQTDSQIMSELPFTIASKRIKYLSNPTYKGCEGPLQGKLQTIAQRNKTEPNKWKNIPVMGEEPM

SEQ ID NO: 41537 - protein, 45 aa, Homo sapiens
MTSLSQLTSSGSTWTWPPSSCSTSCPSSSSLWPTLVWPRNCGCVI

SEQ ID NO: 41538 - protein, 92 aa, Homo sapiens
  misc_feature (1)...(92): Xaa = X or * as defined in Table 2
FQKEWYQLLLVPLVEIWLXIHLVLDFFXLVNYXLLPQFQSMLLVSSEIQLLPGLVLGECMCQGIYPFLLDFLWSLMMVTYRWGFGVDVLCVC

SEQ ID NO: 41539 - protein, 502 aa, Homo sapiens; identical to SEQ ID NO: 32850
  DOMAIN (436)..(477): kw TRANSCRIPTASE REVERSE II ORF2 domain identified by eMATRIX, accession number DM01354I, p-value=1.000e-40, raw score of 15.55
  DOMAIN (212)..(422): AP endonuclease family 1 domain identified by PFam, accession name AP_endonucleas1, E-value=8.7e-07, PFam score of -13.2

SEQ ID NO: 41540 - protein, 52 aa, Homo sapiens
KPVPEAWQSRSPPWQCLAVGAPRLRPDLSTGSTGTSPDATSRTEVGLHHFFF

SEQ ID NO: 41541 - protein, 667 aa, Homo sapiens
  DOMAIN (155)..(200): kw TRANSCRIPTASE REVERSE II ORF2 domain identified by eMATRIX, accession number DM01354N, p-value=1.000e-40, raw score of 13.17
  DOMAIN (71)..(282): Reverse transcriptase domain identified by PFam, accession name rvt, E-value=0.004, PFam score of -25.2
MASSANQAFTGHRKESEAALLLVQFAPPAQKTMKAYIKNEETNGPRVDIYEAPAFKGGRLTPHMDGYPSEMKLLEERSGSNICCSPIFAVLQPPLLIPRQTGSGVDLQQTPTDLELRVLTFRRKTNKQKGHPYQNPICTSPSSKTKEIQTTIREYYKHLYANKLENLEGMDKFLDTYTFPRLNQEEVESLNRPITASEIETIINSLPTKKSPGPDRFTAEFYQRYKEELLISNFSKVSGYKINVQKSQVFLYTNNRQTECQIMSELPFLTASKRIKYLGIQLIRDVKDLFKENYKPLLNKIKEDTNKWKNVPCSWIGRINIVKMAVLPKVIYRFNTIPIKLPMTSFTELEKTTLKFIWDQKRVCIAKSILNQKNKAGGITLPDFKLYYKATVTKTAWYWYQNRDIDQWNGREPSEIIPHIYNYLIFDKPDKNKKWGKDSLINKWCWENWLAICRKLKLDPFLTSYTKINSRWIKDLNVRLKTIKTLEENLGNTIQDTGVGKDFMSRTPKAMATKAKIEKWDLIKLESFCTAKETTIRVNRKPTEWEKIFATYSSDKGLVSRIYNELQQIYKKKTNNPIKKWAKDMNRHFSKENIYAANRHMKRCSSSLATREMQIKTTMKYHLTPVRMAIIKKSGNNRCWRGCVQIGTLLHRWWDCKVVQPLWKRVW

SEQ ID NO: 41542 - protein, 246 aa, Homo sapiens
MNINKKGIHTETLSEGHQHQRPKVDKATKMRKNQHKKAENSKNQSTSSPPKDHNSSTARKQNWMENDFDELIEVGFRSLSKWHTRRLYPASSSEGPTPTEPRSLLAQQSEIELKAGCPSEMKLPEEGSGSNICRSAIFAVLQPLLVIPRQTGSGVDLQQTPTDLQLMVLTVRRKTNKQKGHPHQNPMCTSPSSKTKELKEDVRTHHKEAKNLEKRLDKWLTRINSIEKNLNDLMELKSMVRELHDA

SEQ ID NO: 41543 - protein, 455 aa, Homo sapiens
  DOMAIN (138)..(183): kw TRANSCRIPTASE REVERSE II ORF2 domain identified by eMATRIX, accession number DM01354N, p-value=1.000e-40, raw score of 13.17
  DOMAIN (62)..(315): Reverse transcriptase domain identified by PFam, accession name rvt, E-value=8e-07, PFam score of 27.2
MGLKALTGGAALTRPLTVPQRREEDKVWPPLLIPRQTGSGVDHQQTPTDPQLRILTVRRKTNTQKGHPHQNPNCTSPSSKTKELKEEVGTQRKEVKNLEKRLDEWLTRIANAEKSLKDLMQLKTMAQELQIQTTIREYYKHLYANKLENLEEMDKFLDTYTLPRLNQEEVESLNRPITGSEIEAIINSLPTKRSPGPDGFTAEFYQRYKEELCWKFWPGRSGRKKEVKGIQLGKEEVKLSLFADDMIVYLENPIISAQNLLKLIGNFSKVSGYKINVQKSQAFLYTNNRETESQIMSELPFTTASKRIKYLGIQLTRDVKELFKETYNPLLNEIKEDTTKWKNIPCSWVGRINIVKIAILPKVICIFNAIPIKLPMTFFTELEKTTLKFIRNQKRARIAKSILSQKNKAGDVTLPDFKLYYKATVTKTVWYWYQNRDIDQWNRTEPSEIILHIYN

SEQ ID NO: 41544 - protein, 1307 aa, Homo sapiens
  DOMAIN (896)..(941): kw TRANSCRIPTASE REVERSE II ORF2 domain identified by eMATRIX, accession number DM01354N, p-value=1.000e-40, raw score of 13.17
MGSLLQSSKDKLRSYLLWGWRDKGDGLLPLLSAAFYVMVGEVLSKDSCTGTAQIQGTVPTDVPTSSWCTGTCYGSCPLKAMCPPHSSPAQGSQTLTSSQSEWSLCLSVFPDLDPSKACGCPLGCLIFAGAGLGPPLGLSDISLGFVGSSTAVGHMVLAKYLIKRDAVPLCPMLVMLALSLGRKGVGQDAGSEAPGVILLTLVVSRVCAYSPVVPWAVRMATVLQATVFLQARRHHTGELYVRFLPKPQVWHRGRLWRATPPCPALSHPALRVLMSSRCVLISPDVDPSGGTASTGSMVLPGQDVRQDASGCARLKGCFGRPRCCRACRLEGPGWEPAKPQVPAASGFVWFWPDPRGLLPLEAHHYLEKCMSTSGKARGQPQVTEEFSSRQNETPVVGETKLSEERSGSNICCAPISAVLQLLLLIPRQTGSGVDLQQTPTDLQLRVLNVRRKTNKQKGHPHQNPICMSPSSKTKEKSLKDLMELKTKARELCDECTSLSSRIDQLEERISVMEDQMNEMKQEEKFREKIIERNEQSLQEIWDYVKRANLCRIGVPENDGENGTKLENTLQDIIQENFPNLARQANIQIQEIQRTPQRYSSRRAIPIHIIVRFTKVEMKEKMLRAAREKGQECSSSPATEQSWTENDELREEGFRQSNYSELQEEIQTEGKEVKNFEKNLHECITRITNTEKCLKELMELKAKARELREECRSLRSRCNQLEERISVMEDQMNEMNDRENGTKLENTLQDIIQENFPNLARQANVQIQEIQRTPQRYSSRRATARHIIVRFTKVEMKEKMLRAAREKEKQEQTHSKASRRQEITKIRAELKEIETQKTLQKINESRSWFFERINKIDRLLARLIKKKREKNQIDAIKNDKGDITTDPTQIQTTIREYYKHLYADKPENLEEMDKFLDTYTLPRLNQEEIESLNRPITGSEIVVIINSLPIKKSPGPEGFTAEFYQRSTLRQEEEKRKNASALYEKIRGHLRRKEEQYRKEVEANKQLQLTLRTRDTELRTVRNHLNQVVQELNDTQRQLSREQNARILQDEILTNHLCKQKEIALARRKRNSQIPHSHDKVQDLLHENRMLQDEIATLRLEIDTIEKQNEENKKNYFEDIGDLQKTIKRNGEILTTMISEYTAQLGVLTAENTMLHSQLEREKQKKESLETEVESHRCRLAAVRRDCEQSETSKRDVELAFQGAKDEWFHLPEKMNFDDLKANSVLRSQQLSRTQSNLESLSLKFQHTRDALTEKQKRGLFQNAWEETYAKPSVKSRKFNKCIKINNVTEGIHWKAGICRGEAVSTAE

SEQ ID NO: 41545 - protein, 49 aa, Homo sapiens
  misc_feature (1)...(49): Xaa = X or * as defined in Table 2
KVTRGWGSPHQDAGXSPCQSHQDQTPXGILKEHQEKARRKXRQLCVLQL

SEQ ID NO: 41546 - protein, 1181 aa, Homo sapiens
  DOMAIN (943)..(988): kw TRANSCRIPTASE REVERSE II ORF2 domain identified by eMATRIX, accession number DM01354N, p-value=1.000e-40, raw score of 13.17
  DOMAIN (419)..(1180): Reverse transcriptase domain identified by PFam, accession name rvt, E-value=1.4e-15, PFam score of 65.2
MLDKGMGKDSMSKTPKATATEAKIDKWDLIKLKSCCTAKETIIRLENGYTLFDYDVGLNDIIQLLVRPDPDHLPGTSTQIEAKPCSNSPPKVKKAPRVGPSNQPSTSARARLIDPGFGIYKSMPHARTETSVGTYESHSTSELEDLTEPEQRELKTKLTKLEAEIVTLRHVLAAKERRCGELKRKLGLTALVGLRQNLSKSWLDVQVSNTYVKQKTSAALSTMGTLICRKLGGVKKSATFRSFEVQCPSETKLPEEGSDSNICCSAIFAVLQPPLVIPRQTGSGVDQQQIPTDLQLRVLTVRRKTNKQKAHPHQNPICTSPSSKTKEIQTTIREYYKHLYANKLENVEEMDKFLDTYNLLRLNQDEVESLIRPITGCEIEAIINSLPTKKSPGPDGFTAEFYQRYKEELAPFLLKLFQSIEKEGILPNSFCEANIILIPKPGRDITKKENFRPISLMNIDAKILNKILANRIQQHIRKLIHHDPVGFIPGLQGWFNICKSINLIHHINRTKDKNHTIISTDAEKAFDKIQQPFMLKTFNKLDKQESQIMSELPFTIASKKIKYLGIQLTRDVKDLFKENYKPLLNEIKEDTNKWKNIPCSWIGRINIMKMAILPKERRRGRGTRSSGNPSNLQFARILPQSGSRVRVLILESSMPEFPLFESRRRGRAAEARRTLSRAPPSAGSEGPGHPVPTAAVLPNTNGEIFALRTPSLLTPRGAPPVGAGRDPLPTIRRDWAPHPAPRGGCPPAAEPEEALAFGPHVEQRPHPLAQLLNRGFARHVLNGARLGAINGDLLHVTRSSMFCYLNENKDKTYQNLWDTFKAVCRGKFIALNAHKRKQERSKIDTLTSQLKELQKQEQTHSKASRRQEITKIRAELKEIETQETLQKINESRSWFFERINKIDRPLARLIKKKREKNQIDAIKNDKGDITTNPTEIQTTIREYYKHLYADKLENLEEMDKFLDTYTLPRLNQEEVESLNRPITGSEIEAIINTLPTKKSPGPDGFTAEFYQRYKEELVPFLLKLSQSIEKEGILPNSFYEASIILIPKPGRDTTIKENFRPISLMNIDAKILNKILANRIQQHIKKLIHHDQVGFIPGMQGWFNIRKSINVIQHINRTTDKNHMIISIDAEKAFNKIQQLFMLKTLNKLGIDGTYLKIIRAIYDKPTANIILNGQKLEAFP

SEQ ID NO: 41547 - protein, 37 aa, Homo sapiens
QLFVLELPFSRSIFVAFSVFPEFECWPALLDWGSSPG

SEQ ID NO: 41548 - protein, 253 aa, Homo sapiens; identical to SEQ ID NO: 31356

SEQ ID NO: 41549 - protein, 203 aa, Homo sapiens
MNEMKREEKFREKRIKRNEQSLQEMWDYVKRPNLRLIDVPESDRENGTKLENTLQDIILENFPNLARQANIQIQEIQRMPQRYSSRRATTRNLIVRFTKVEMKEKMLRAAREKGRVTHKGKPIRLTADLLAETLQARREWGPIFNILKEKNFQPRISYPAKLSFISEGEIKYFTEKQMLRDFVTTSPALEELLKEALNMERNN

SEQ ID NO: 41550 - protein, 88 aa, Homo sapiens
MSIRSTWRRAEFNSWVSFLTFRLVDLSLVFDDGDVQVGFWCGCPSCLLVFLLISQDPQLQVCWSLQEVHSRPCSPGYQQQRLQYSEYS

SEQ ID NO: 41551 - protein, 73 aa, Homo sapiens
IYGFAYVEPALQPRDEANWIMVDKLSDVLLDSICQYFIEDFCIDVHQRYWSKILFFCYVSARLWYQDDVGLTK

SEQ ID NO: 41552 - protein, 313 aa, Homo sapiens
MDQLCLEVEGKIVDKTEGNIDDSLVEMLPLKASRVKPPLVIPRQTGSGVDLQQNPTDLQLRVLTVRRKTNKQKGHPHQNPICTSPSSKAKERVSVIEDQMNETKREEMFREKRVKRNEQSLQEIWEYVKRPNLRLIGVPESDGDNGTKLENTLQDIIQQYFPNLARQANIQIQEIQRMPQRCSSRRAAPRHIIVRFTKAEMKEKMLRAARGKGRVTHKGKPIRLKVDVLAETLQARREWGPIFNILKEKNFQPRISFPAKLSFISKGEIKSFTDKEMLRDFVTTRPALQELLKEALNMERNNRYQPQQKHAKL

SEQ ID NO: 41553 - protein, 99 aa, Homo sapiens
  misc_feature (1)...(99): Xaa = X or * as defined in Table 2
LHIWPFLLPCKAQNQVHCSKFCPLGRFPFMAVLQGCPRKGLXCCSCPLLGGIWISCRIICAFRTYLRPIMYIPLPFADGMLLCTAHSMARCFGYCSLVV

SEQ ID NO: 41554 - protein, 625 aa, Homo sapiens
  DOMAIN (342)..(383): kw TRANSCRIPTASE REVERSE II ORF2 domain identified by eMATRIX, accession number DM01354I, p-value=1.000e-40, raw score of 15.55
  DOMAIN (133)..(328): AP endonuclease family 1 domain identified by PFam, accession name AP_endonucleas1, E-value=4.9e-30, PFam score of 113.2
MVLALTGNKADLASKRPLEFQEAQAYADDDSWLFMETSAKGAMNVNEIFMAIAEKLPKNKPQNAAGAPDRNQGYLSACEFSGRKLPKQTTKHIKQSLRTKLCGASYASSNLIPRKLYEPPLVIPRKTGSGVDLQQTPTDLQLWVLTVRRKSNKQKGYPHQNPICMLPSSKTKDFKPTKIKRDKDGHYIMVKGSIQQEELTVLNINAPNTGAPRFIKQALRDLQRDLDSHTIIMGDFNTPLSTLDRSTRQKVNKDIQELNSALHQADLIDIYRTLHPRSKDYTFFSAPHHTYSKIDHIVGSKALLAKCKRTEITRNCLSDHSAIKLELRIKKLTQKCSTTWKLNNLLLNDYWVHNEMKAEIKMFFETNENQDTTYQNLWDTFKAVCRGKFIALNAHKRKQERSKIDILTSQLKELEKQEQTHSKASRRQEITKIRVELKEIKTQKTLQKINESRSWLFEKINKIDRQLARLIKKKREKNQIDAIKNDKGDITTDPTEIQTTIREYYKHLYAKKLENLEEMDKFLDTYTLPRLNQEEVESLNRPITGSEIEAIIKSLPAKKSPGPDGFTAEFYQRCEKELAQFLLRLFKSTEKEGILPNSFYEDSIILFYQSLAETPQKKRILDQYP

SEQ ID NO: 41555 - protein, 66 aa, Homo sapiens
  misc_feature (1)...(66): Xaa = X or * as defined in Table 2
ILPEVQGGAGTIXLSLFLIEXPLFLSPAXLPWPELPTLCXIGVVRDGTPVLCQFSKGMLPVFAHSV

SEQ ID NO: 41556 - protein, 353 aa, Homo sapiens
  DOMAIN (184)..(220): kw TRANSCRIPTASE REVERSE II ORF2 domain identified by eMATRIX, accession number DM01354F, p-value=8.457e-37, raw score of 14.56
  DOMAIN (44)..(277): AP endonuclease family 1 domain identified by PFam, accession name AP_endonucleas1, E-value=2.9e-09, PFam score of 24.8
WLLAASPLWLCRIRPLILAAFMGWQSRSALGTQSQESGKGSPDQVLVPQDCGPWLGSVELVSVPGSQAGEEPILSENKGRVTQMKIPEERSGSNICCSAIFAVLQPPLLIPRQTRSGVDLQQNPTDLQLRVLTVRRKTNKEKGHPHQNPTCTSPASKTKGALRFIKQVLRDLERALDSHTIMGDFNTPLSTLDRSTRQKVNKDIQELNSALHQVDLIDIYRTLHPKSTEYTVFSAPHHTYSKIDHTVGSKALLSKCKRIEILTNCLSDHSAIKLELRIKKLTQNHSTTLKLNNLLLNDYWVHKETKAEIKMVFEIDENKDTIYQNLWDTFKAVCRGKFIALKAHKRKQERVTP

SEQ ID NO: 41557 - protein, 26 aa, Homo sapiens
GRSGGDKISQHLLVCKGFYFSFTYEA

SEQ ID NO: 41558 - protein, 179 aa, Homo sapiens
  misc_feature (1)...(179): Xaa = X or * as defined in Table 2
HTDGFLVWMPFLFVSFPSNSQDRQLQVCWRLLEVHSRPCFPGYQQRWLQNNRYSVNRKCCCLIVPLEVLSQRSTHQHVGEWLCLLGRKFPAGMEACTAMLCSSSVLEAATLSFSVQHRACTGGSXKPQQGRVYPSEGREHNGAAAFGPFCSSECPASCPDPGTQPCAPGTYIPFFSCQT

SEQ ID NO: 41559 - protein, 275 aa, Homo sapiens
  misc_feature (1)...(275): Xaa = X or * as defined in Table 2
QVRGYRCRFVTWVNCMSLRFGVQRIPSPSLTGTQPPVGADXHLTRPGTPLRXNFQRNDQAVTFAVHHIHFVQPLLLIPMQTGSGVDLRQTPTDLQLRVLTVRRKTNKQKGHPHRNPICMSPSSKTKARQANIQIQEIQRTPQRYSSRRATPRHIIVRFTKVEMKEKKLRAAREKGRVTHKGKPIRLTVDLLAETLQARREWGPIFNILKEKNFQPRISYPAKLNFISEEEIKSFTDKQMLRDFVTTRPALQELLKEALNMERNNQYQPLQNHAKL

SEQ ID NO: 41560 - protein, 369 aa, Homo sapiens
  misc_feature (1)...(369): Xaa = X or * as defined in Table 2
VSSTTKEKALSVPPRWCILQKKNPPNHQPVSLPEVFLPQILKFSGPPHWRRIEDEYKVMRLNIGDMKTKKKMLEKYEQLEIRHQQKSRTXKAVCCITXLSRHIILLGQAPLVQQSMXQPESHHQVNPPETSYGIHQTPKLSXIGIKXRPWIMMSEVKGYKVGNFFFAKAPNRAPPLLKPRQTGSGVDLQQTPADLQLRVLTVRRNTNKQKGHPHQNPICTSPSSKTKEVENLEKRLDKWLTRLTNVEKSLNDLMELKTMARELHDEGTSFSSQFDQLEERVPVMEDQMNEMKQEEKFREKRMKRNEQSLQEIRDYVKRPNLRLIGVPESDGENGTKLENTLQDIIQENFPSLARQANIQIQEIQRMPQR

SEQ ID NO: 41561 - protein, 114 aa, Homo sapiens
  misc_feature (1)...(114): Xaa = X or * as defined in Table 2
QSGPSAAGLLEFAGGPLQTLFAWVSAAEVGKCKGSGSSLSXPKKGVMDGTWKIGSLPPEYCAFPTGXKNGAPLRLYPTPGSEGPTPTESPXFASTAVGDQTARQQRGWGRGARH

SEQ ID NO: 41562 - protein, 116 aa, Homo sapiens
  misc_feature (1)...(116): Xaa = X or * as defined in Table 2
DRCPAAWDRHPAGIQSSRREPSKATWTLRSKLSVQDGRRDSSLRLNCKVAARLGAGHPPMLRLGLRCXYPGKQGLEWTSSKLQQTCHXGSXLLKGKLTNRKDIHSKTPSVRHYHQR

SEQ ID NO: 41563 - protein, 655 aa, Homo sapiens
  DOMAIN (196)..(241): kw TRANSCRIPTASE REVERSE II ORF2 domain identified by eMATRIX, accession number DM01354N, p-value=8.560e-40, raw score of 13.17
MPFYSEQTYIKEPAIQRFEEVHFRQNKGADGAQMWRIQVCWLTGLKRSREPLLLMPRQRGSGVDLQQTPTDLQLRILMVRRKTNKQKGHPHQNPICTSSSTKTKELEKQEQTNSKAIRRQEITKIGAELKEIETQKTLQKFNESRSWFFEKIKKIDRPLARLIKKKTEKNQIDAIKNDKGDITTDHPEMQTTIREYCKHFYANKLENLEEMDKFLDTYTLPRLKQEEVESLNRPITGSEIEAIINSLPTKKIPGPDGFTAKFYQRYKEELVTFLLKLFQTIEKEGNPKQKEQTGGIALPDFKLYYKATGTKTACHCCLIPRQTGSGVDLQQTPTGLQLRERSSSPAMEQSWTENDFDELREDSFRRSNYSELQEEVRTHGKEVKNLEKQLDEWLTRITNAEKSSKDRMELKTKARELHDECTSLSSRCDQLEERVSVTEDEMNEMKRGEKFREKRIKRNEQSLQEIWDYVKRPNLCLIGVPESDGENGTKLENTLQDIIQENFPNLARQANIQIQEIQRMPQRYSSRRATPRHIIVRFTKVEMKEKMLRAAREKGQVTHKGKPIRLTADLSAETPQARREWGPIFNILKGKNFQPRISYPAKLSFISEGEIKYFTDKQMLRDFVTTRSALKELLKEALNTERHNRYQSLQKHAKL

SEQ ID NO: 41564 - protein, 127 aa, Homo sapiens
  misc_feature (1)...(127): Xaa = X or * as defined in Table 2
GVSVPLLWGASQLGYLGVMDPLAEAVCPFSDLQLHSGRTSTVFKAALGQSGAHCPERCVSAQSXADXRALREHKQXFGSTLCGPVMVVAMELGSSTMVELVSSPANSVKVFLFLHIFSSTCCFLTFS

SEQ ID NO: 41565 - protein, 74 aa, Homo sapiens
  misc_feature (1)...(74): Xaa = X or * as defined in Table 2
SGLLPIKVAFTKPQFLFILLRIWLXRGYVFCSWKVTTPREQPQCITDGYQIFIFMQKTLSCLSILGKRTMSLMQ

SEQ ID NO: 41566 - protein, 357 aa, Homo sapiens
  DOMAIN (156)..(183): TRANSMEMBRANE FOUR FAMILY SIGNATURE domain identified by eMATRIX, accession number PR00259B, p-value=2.250e-17, raw score of 14.81
  DOMAIN (126)..(190): Transmembrane 4 family domain identified by PFam, accession name transmembrane4, E-value=4.6e-16, PFam score of 54.3
MACTLSVLCPTLGAGWQRGSLVQCCQVAVSGSPALHPLPTVLSQQPCDRGCYTVILNTFETYVYLAGALAIGVLAIEPQCSHPKWSWALLEVFSMQLLNPQISNSNKEAQIFLEVVRETNERDTGWLGGACLLAIGIWVMVDPTGFREIVAANPLLLTGAYILLAMGGLLFLLGFLGCCGAVRENKCLLLFSPFVEQKFFCFLFLIPYLSDLCPGDWEKITLAHSPDEQSSEAMESLGPEGTRISWLSTPAVQRASAGARSCVLAWVLCFQLIRADEQEGETEAPSYLCFPAARRSFPESTCHHSPLLLEPNLYRRPSCLLQTTGPPRLTIATSCYSCPDFPITTIKGESPRGLPEA

SEQ ID NO: 41567 - protein, 166 aa, Homo sapiens
  DOMAIN (139)..(166): TRANSMEMBRANE FOUR FAMILY SIGNATURE domain identified by eMATRIX, accession number PR00259D, p-value=2.756e-15, raw score of 13.50
  DOMAIN (37)..(165): Transmembrane 4 family domain identified by PFam, accession name transmembrane4, E-value=2.6e-13, PFam score of 45.5
GSPYPPSPSTAHISPASKMQMSLALCKLLTREFFTKELTKHYQGNNDTDVFSATWNSVMITFGCCGVNGPEDFKFASVFRLLTLDSEEVREFARRILLPKSGRGPAEPGRKCLLGRSLFLNKQGCYTVILNTFETYVYLAGALAIGVLAIELFAMIFAMCLFRGIQ

SEQ ID NO: 41568 - protein, 150 aa, Homo sapiens
LEDTLHVVDMEARLRQRSEETTEAALLLPSSSEESFQLIPSCQEEISLSRCHPGLPTTPRSQHSTSQHSPPHLQPGTSFAGLAAAAYYLNWAPWIPPAHPQASLHQETANHWDWGRFNLDKLTWQLGPKRTNTASSATPRRSYLINEHRP

SEQ ID NO: 41569 - protein, 237 aa, Homo sapiens
MLCELQSAADVTGGDDGDDVHLTNVAVQKTSPDYHPKKLHPTVGPLCIHSPENGSLSVTPWPWDAHMGCKWTLQRFRQYLASKHGPEAVETLFRDIDNIFVKSLQSVQKVIISDKHCFELYGYDILIDQDLKPWLLEVNASPSLTASSQEDYELKTCLLEDTLHVVDMEARLTGREKRVGGFDLMWNDGPVSREEGAPDLSGMGNFVTNTHLGCVNDRKKQLRQLFCSLQVQKKASS

SEQ ID NO: 41570 - protein, 100 aa, Homo sapiens
  DOMAIN (44)..(57): NONHISTONE CHROMOSOMAL PROTEIN HMG17 FAMILY SIGNATURE domain identified by eMATRIX, accession number PR00925B, p-value=3.400e- 16, raw score of 3.73
  DOMAIN (14)..(100): HMG14 and HMG17 domain identified by PFam, accession name HMG14_17, E-value=2.8e-11, PFam score of 50.9
GGGENFSYPWYLLVGCGWFSSSPIVPDVPPFSLLLPAQKKKPAPPKPEPKPKKAPAKKGEKVPKGKKGKADAGKEGNNPAENGDAKTAQAQKAEGAGDAK

SEQ ID NO: 41571 - protein, 113 aa, Homo sapiens
  DOMAIN (41)..(72): HMG14 and HMG17 proteins domain identified by eMATRIX, accession number BL00355, p-value=2.459e-31, raw score of 5.97
  DOMAIN (25)..(113): HMG14 and HMG17 domain identified by PFam, accession name HMG14_17, E-value=9e-21, PFam score of 82.4
TAKPKTNWCCRAPTSRLASTFATMPFKKAECVGDAHPATVKDEPQRISARLSAKPAPPKPEPKPKKAPAKKGEKVPKGKKGKADAGKEGNNPAENGDAKTDQAQKAEGAGDAK

SEQ ID NO: 41572 - protein, 118 aa, Homo sapiens
  DOMAIN (46)..(77): HMG14 and HMG17 proteins domain identified by eMATRIX, accession number BL00355, p-value=2.703e-31, raw score of 5.97
  DOMAIN (30)..(118): HMG14 and HMG17 domain identified by PFam, accession name HMG14_17, E-value=2.3e-35, PFam score of 130.9
NDPRTDQIFLFAASRVQHLRAAAVSAGTMPKRKAEGDANGDKAKAQDEPHRRSARLSAKPAPPKPEPKPKKAPAKKGEKVPKGKKGKADAGKEGNNPAENGDAKTDQAQKAECAGDAK

SEQ ID NO: 41573 - protein, 68 aa, Homo sapiens
  DOMAIN (22)..(33): NONHISTONE CHROMOSOMAL PROTEIN HMG17 FAMILY SIGNATURE domain identified by eMATRIX, accession number PR00925C, p-value=1.486e- 11, raw score of 5.57
  DOMAIN (2)..(61): HMG14 and HMG17 domain identified by PFam, accession name HMG14_17, E-value=0.014, PFam score of 22.0
WKAEREEIEPRPKKAPAKKGEKVPKGKKGKAEAGQDGDNPTENGDAKTDQGQKAEGAGDAKRTVSHQN

SEQ ID NO: 41574 - protein, 75 aa, Homo sapiens
  DOMAIN (36)..(47): NONHISTONE CHROMOSOMAL PROTEIN HMG17 FAMILY SIGNATURE domain identified by eMATRIX, accession number PR00925C, p-value=4.789e- 12, raw score of 5.57
  DOMAIN (11)..(75): HMG14 and HMG17 domain identified by PFam, accession name HMG14_17, E-value=0.0024, PFam score of 24.6
CSTFFPLLPCPKKETLLPPKAQSPKPKKAPAKKGEKVPKGKKGKADAGKEGNNPAENGDAKTAQAQKAEGAGDAK

SEQ ID NO: 41575 - protein, 103 aa, Homo sapiens
  DOMAIN (30)..(61): HMG14 and HMG17 proteins domain identified by eMATRIX, accession number BL00355, p-value=8.412e-32, raw score of 5.97
  DOMAIN (14)..(103): HMG14 and HMG17 domain identified by PFam, accession name HMG14_17, E-value=1.6e-25, PFam score of 98.2
  misc_feature (1)...(103): Xaa = X or * as defined in Table 2
STYVPLPSPPSSMPKRKAEGHAMGDKAKVKDEPQRRFARLSAKPAPPKPEPKPKKAPAKKGEKVPKGKKGKADAGKEGEXPLQKNGDAKTDQAQKAEGAGDAK

SEQ ID NO: 41576 - protein, 73 aa, Homo sapiens
ALVTSELEKFQDRLARCTMHCNDKAKDSIDAGSKELQVKQQLDSCVTKCVDDHMHLIPTMTKKMKEALLSIGK

SEQ ID NO: 41577 - protein, 192 aa, Homo sapiens
AAAAPGAGGGGVHGEESGEREHPEDAGERPEAQQRRCQRERPERRGLPASPLARSCLLLLRPTSLHTARVSTLFFSEPRNASGLMFRCSASCCEDSQAFHAVGAPVHQSTAMAPLAQARALLTSELEKFRHHLARCAMHCNDKAKDSIDAGSKELQVKQQLDSCVTKCVDDHMHLIPTMTKKMKEALLSIGK

SEQ ID NO: 41578 - protein, 58 aa, Homo sapiens
ELCKDSCIASKHVVFTRIAVQITGFLHLTRTSSKSSKIPSCRPLVLLLASVPSDSHPV

SEQ ID NO: 41579 - protein, 230 aa, Homo sapiens
  DOMAIN (108)..(148): Ribosomal protein L7Ae proteins domain identified by eMATRIX, accession number BL01082, p-value=6.760e-35, raw score of 20.37
  DOMAIN (75)..(178): Ribosomal protein L7Ae domain identified by PFam, accession name Ribosomal_L7Ae, E-value=2.4e-33, PFam score of 124.2
  misc_feature (1)...(230): Xaa = X or * as defined in Table 2
HQPKKDLTGFVKWPRYIRLQRQRAILYKRLKVHLAINQFTQALARQTATQLLKLAHKYRPETKQEKKQRLLARAEKKAAGKGDVPTKRPPVLRAGVNTVTTLVENKKAQLVVIAHDVGPIELVVFLPALCRKMGVPYCQIKGKARLGRLVHRKTCTTCRFTQVNSEDKGALAKLVEAIRTNYNDRYDEIRRHWGGNVLGPKSVARIAKLEKAKAKELAHXTGGSYQDQLQ

SEQ ID NO: 41580 - protein, 38 aa, Homo sapiens
  misc_feature (1)...(38): Xaa = X or * as defined in Table 2
RPCVKESGKPHLKSSTMWTTLKLLRIXPRRTTCSPRLS

SEQ ID NO: 41581 - protein, 52 aa, Homo sapiens
LLLTIQLYYFYVSYSMVFGNSLLFYFFIFYLFLFFEMESCSVAQAGAQWRFS

SEQ ID NO: 41582 - protein, 84 aa, Homo sapiens
CLEVLHKILFFEMESHSVTQAGVQWRDLGSLQPLPPGSSNSPTSASQVAGIRSMRQKGRANFFVFLVEMGFHHVGQADLELLTL

SEQ ID NO: 41583 - protein, 103 aa, Homo sapiens
NSGSKGRRICHCEAIAGCHPWGFANNPAPAQCEDNVPHRLIGVASSEGRDLIHTGVLKPINGLQFLSVSRSSRLPLLPVGQPIGWDSTDSPAPLQTSSSKEPC

SEQ ID NO: 41584 - protein, 34 aa, Homo sapiens
FFFFEMESYSVTQAGVQWRDLCHALSAGRWARRV

SEQ ID NO: 41585 - protein, 91 aa, Homo sapiens
  misc_feature (1)...(91): Xaa = X or * as defined in Table 2
PPLSRLLCPRHPHSGWPEGYSPEHLRCGLRSGTLRSRQALHCQVSSNPXPPSLWFXGCGNVLXELCLFVLPVSVNLYQVLLSEIWEFHRTD

SEQ ID NO: 41586 - protein, 720 aa, Homo sapiens
  DOMAIN (656)..(702): Biotin-requiring enzymes attachment site proteins domain identified by eMATRIX, accession number BL00188, p-value=9.036e-32, raw score of 30.29
  DOMAIN (56)..(425): Carbamoyl-phosphate synthase (CPSase) domain identified by PFam, accession name CPSase_L_chain, E-value=2.1e-218, PFam score of 739.0
  misc_feature (1)...(720): Xaa = X or * as defined in Table 2
PAGRCRTAWAVAAQQLMLSAALRTLKHVLYYSRQCLMVSRNLGSVGYDPNEKTFDKILVANRGEIACRVIRTCKKMGIKTVAIHSDVDASSVHVKMADEAVCVGPAPTSKSYLNMDAIMEAIKKTRAQAVHPGYGFLSENKEFARCLAAEDVVFIGPDTHAIQAMGDKIESKLLAKKAEVNTIPGFDGVVKDAEEAVRIAREIGYPVMIKASAGGGGKGMRIAWDDEETRDGFRLSSQEAASSFGDDRLLIEKFIDNPRHIEIQVLGDKHGNALWLNERECSIQRRNQKVVEEAPSIFLDAETRRAMGEQAVALARAVKYSSAGTVEFLVDSKKNFYFLEMNTRLQVEHPVTECITGLDLVQEMIRVAKGYPLRHKQADIRINGWAVECRVYAEDPYKSFGLPSIGRLSQYQEPLHLPGVRVDSGIQPGSDISIYYDPMISKLITYGSDRTEALKRMADALDNYVIRGVTHNIALLREVIINSRFGKRNLNTXFLSKGFPEAFKGHLLTKSEKTQFLAIASSLFVAFQLRAQHFQENSRMPVIKPDIANWELSVKLHDKVHTVVASNNGSVFSVEVDGSKLNVTSTWNLASPLLSVSVDEHSEGLFQCLSREAGGNMSIQFLGTVYKVNILTRLAAELNKFMLEKVTEDTSSVLRSPMPGVVVAVSVKPGDAVAEGQEICVIEAMKMQNSMTAGKTGTVKSVHCQAGDTVGEGDLLVELE

SEQ ID NO: 41587 - protein, 846 aa, Homo sapiens
  DOMAIN (652)..(695): Integrins beta chain cysteine-rich domain proteins domain identified by eMATRIX, accession number BL00243I, p-value=7.211e- 09, raw score of 31.77
LRMGFFRPMAMKIQAHRQFEWALTRSLELSREHKCVSRGVVWTPYHKWNTKVEVDGSKLNVTSTWNLASPLLSVSVDGTQRTVQWLAEGYSPEHLRCGLRSGTLRSRQALHCQVEELPGDCMPASQTPTQPFLCRHLRAQDWPEPRPPAKYIGFTWVAQPLPSLPVGSSSECVSNSTANMKKCGLGISQGHARGKGQPDLATALLWAPPGPGSKWVVDRSLRGSAVAATDHLSGWLCASNVGDLQRGNAQDVSNVGLTKWSQASQVFLMNLVGLMYLPAPCLIGVKFEGLNPVSFIQLIASSPLTRGQGSRSHPIIRAALIKQESALPQTRLERNLGPFTQQIFACRGGPSVTQHCSVLKSCRHLQLMMNFLFTPSTKIKRQRTFSRTCPLSENMLRQGHIWQCRSFKLQTAMTTKNAQRKCRKKKKRTGEKRPPNIKGSPHKHRLESGAQDQIFIRRQKARRAYQPAAVSTSATPDHRKNTDQYQPWCLRHKSENPTISLLKADSFNGPCTSGLTLEGAGTQGPPVQPRCRLGTSGTRAVCLVLPLSLKWGSPELGSTQGAKEANANYLIFSSMLSRYFICTIEKSGGTKIKTSQNVIKKTENFTCIPFTTYKLIPIKENPMSWADPGDGGGDMWTGASRWQQMAVAASHSPPRAAALRITCRSSSNVILQTPCAKCCNDPEVCGCSRECGEPGDSIHFNTDRLNLKTVSGENGLSHNCLAFFLGGKCADKPFLSAQHLNGTMIIFRDTKLSPSFTSYVSADADKGEVLFFKRLLGTAKAMNILELINGKRKVVTSEWRKGQTPPEPNDQSDAINSGTKRNVNMRLPRGDNEDNAAAPPLRSCQK

SEQ ID NO: 41588 - protein, 77 aa, Homo sapiens; identical to SEQ ID NO: 33478

SEQ ID NO: 41589 - protein, 448 aa, Homo sapiens; identical to SEQ ID NO: 33479

SEQ ID NO: 41590 - protein, 59 aa, Homo sapiens
  misc_feature (1)...(59): Xaa = X or * as defined in Table 2
FLHAENKAHRPGISLCGLRAQPRQPASRHAWXSMRSEQRPWLTASGRSSGQTRSSRSLG

SEQ ID NO: 41591 - protein, 653 aa, Homo sapiens
EFDYSEDKSSWDNQQENPPPTKKIGKKPVAKMPLRRPKMKKTPEKLDNTPASPPRSPAEPNDIPIAKGTYTFDIDKWDDPNFNPFSSTSKMQESPKLPQQSYNFDPDTCDESVDPFKTSSKTPSSPSKSPASFEIPASAMEANGVDGDGLNKPAKKKKTPLKTDTFRVKKSPKRSPLSDPPSQDPTPAATPETPPVISAVVHATDEEKLAVTNQKWTCMTVDLEADKQDYPQPSDLSTFVNETKFSSPTEELDYRNSYEIEYMEKIGSSLPQDDDAPKKQALYLMFDTSQESPVKSSPVRMSESPTPCSGSSFEETEALVNTAAKNQHPVPRGLAPNQESHLQVPEKSSQKELEAMGLGTPSEAIEITAPEGSFASADALLSRLAHPVSLCGALDYLEPDLAEKNPPLFAQKLQREAVHPTDVSISKTALYSRIRTTEVEKPAGLLFQQPDLDSALQIARAEIITKEREVSEWKDKYEESRREVMEMRKIVAEYEKTIAQMIEDEQREKSVSHQTVQQLVLEKEQALADLNSVEKSLADLFRRYEKMKEVLEGFRKNEEVLKRCAQEYLSRVKKEEQRYQALKVHAEEKLDRANAEIAQVRGKAQQEQAAHQASLRKEQLRVDALERTLEQKNKEIEELTKICDELIAKMGKS

SEQ ID NO: 41592 - protein, 713 aa, Homo sapiens
LARQGTARMGGSQSLQPAPASDLNLEASEAILGKLYLGLLWEEHLVAPSYCCGQKRFPGIQFWSLSSGCMAGGLLLPSASFLCTPGTVVFPAREQPGISDCLLLGRTHERGSSVPGATAQFPGSCACGWADGVENTTYSKTIALYGFFFKIKGLKHDTTSYSFYMQRIKHTDLESPSAVYEHNHVSLRAARLVKYEIRAEALVDGKWQEFRTNQIKQKFGLTTFLENCCFLDRDIGRSLRPLFLCLRLHGITKGENSTTAIKYEHQLIWFQIHESCCDHTFTDEDIAAAGQLSNSQEVPQPVWKIVAEYEKTIAQMIGRCPDLRGLRPAPMFLNYEEALEDRRLRTAPEGSFASADALLSRLAHPVSLCGALDYLEPDLAEKNPPLFAQKLQEELEFAIMRIEALKLARQIALASRSHQDGQAGNCRQGGYDATPSCQQEGPQAQPAGLKWVTVARGSHRSQDFSGVKREAAHPTDVSISKTALYSRIGTAEVEKPAGLLFQQPDLDSALQIARAEHKARLERRVTGSTNRWRLPKQPFSGDLLSLSQMCKALSIDFEEALRNPDSSFLQDNTFLQHNRGRGAGLLGRSFYTSGPLLCDIGKLHVQRQQILSGVLGSGPAPPPLGSHPDCSSPHTALVLISMPSFFYLVPYLPPPPMKQQTAGKQRSPYKSILSASSVLTCAAGSGNATRDRWRPFRPGAHGLTGQQRVKPKL

SEQ ID NO: 41593 - protein, 186 aa, Homo sapiens
GRERPLLRTNMETVYRVPILVLECPNLKLKKPPWLHMPSAMTVYALVVVSYLLITGGIYGELTSCNNCGAIAVKQGKLWEREDECKVDRTTNWDPKHNMSHEDRLNPREPYILSQVNACLVGGREQENSLLLKASLIKTTYVISAAPECMIGMDTQTLPNIPLFAWNSPGSLLDLTYATEYQISDE

SEQ ID NO: 41594 - protein, 66 aa, Homo sapiens
FLKSLAKGAEEMLDDLLVTVREKIGPIATPDYIQNAPGLPKTRSGMFRGLHGLGWAEAWWWWGVRG

SEQ ID NO: 41595 - protein, 172 aa, Homo sapiens
  misc_feature (1)...(172): Xaa = X or * as defined in Table 2
HERFETTYFKKFPGYYVTGDGCQRDQDGYYWITGRIDDMLNVSGHLLSTAEVESALVEHXRLLQEAAVVGHPHPCEGVNASYCFVTLCDGHTFSPKLTEELKKAVMRKRLAPFATPDYIQNAPGLPKTRSGKIMRRVLRKIAQNDHDLGDMSTVADPSVISHLFSHRCLTIQ

SEQ ID NO: 41596 - protein, 189 aa, Homo sapiens
  DOMAIN (118)..(156): Short-chain dehydrogenases/reductases family proteins domain identified by eMATRIX, accession number BL00061B, p-value=3.647e- 21, raw score of 25.79
  DOMAIN (3)..(174): short chain dehydrogenase domain identified by PFam, accession name adh_short, E-value=1e-42, PFam score of 155.3
AREHLHSKGFLVFAGCLMKDKGHDGVKELDSLNSDRLRTVQLNVCSSEEVEKVVEIVRSSLKDPEKGMWGLVNNAGISTFGEVEFTSLETYKQVAEVNLWGTVRMTKSFLPLIRRAKGRVVNISSMLGRMANPARSPYCITKFGVEAFSDCLRYEMYPLGVKVSVVEPGNFIAATSLYSPESIQAIAKK

SEQ ID NO: 41597 - protein, 329 aa, Homo sapiens
MIDLDLQFLAQCRNTIGAQEMFAERVTPFSCLAVPEFVWCFRLFNRLLTNPFPYSINLSRSGQDKGHDGVKELDSLNSDRLRTVQLNVCSSEEVEKVVEIVRSSLKDPEKVWPLAQATADTLFTACITLLRQNLLQVFAFGQVPRYHLELLERCPLEQEGEALTSLLSVMSSIVHRAVTLMAWPQEKQASSLNYGRNHEALSPKDVNKNGFSTGNRSNDLIQPQTIRSKLVRRPKFSKAQQLASSTSTPESVILLTASHSLTEKPASKAHYWLQGVDLAGKNCVRTRQRAGLSAECPHPETLGDLAAVYLSHNELLFLQAQHHMEAAKS

SEQ ID NO: 41598 - protein, 84 aa, Homo sapiens
  DOMAIN (2)..(37): Matrix protein (MA) p15. domain identified by eMATRIX, accession number PF01140D, p-value=2.465e-09, raw score of 15.54
MEHKKEEEEEEEEEEEEEEEEEEEEEEEETKFQKILIKWVFDSLGCDTHFIYLCNCTFICTKASSDFSSSKVLLQGLLRALSKG

SEQ ID NO: 41599 - protein, 57 aa, Homo sapiens
  DOMAIN (6)..(57): Neuromodulin (GAP-43) proteins domain identified by eMATRIX, accession number BL00412D, p-value=8.568e-11, raw score of 16.54
  misc_feature (1)...(57): Xaa = X or * as defined in Table 2
RHIYSSNEVHXKEEEEEEEEEEEEEEEEEEEEEEEEEEEEEEEEEEEEEEEIPLSSL

SEQ ID NO: 41600 - protein, 121 aa, Homo sapiens
  DOMAIN (26)..(78): MARCKS family proteins domain identified by eMATRIX, accession number BL00826B, p-value=2.814e-09, raw score of 12.51
  misc_feature (1)...(121): Xaa = X or * as defined in Table 2
ILDTSPMRWTQKNFSMILAQPEQQCKTLSQNKNKDRRIKKKEEKKKKKKKKKKKKKKKKKKKKKKKKKXEKEKEKEKEKKKEKEEEKKKQEEEEEEEEEEEEEEEEEEEEEEEEEEERRRR

SEQ ID NO: 41601 - protein, 100 aa, Homo sapiens
  DOMAIN (50)..(93): p53 tumor antigen proteins domain identified by eMATRIX, accession number BL00348F, p-value=3.571e-09, raw score of 23.19
MTVCIHIASEDLPVGRDVEVEDSDIHDRDPGLGDKSETPSEKKKKKKKKKKKKKKKKKKKKKKKKKKKKKKKKKKKKKKKKKKKKKKKKKNPIFFNIIFI

SEQ ID NO: 41602 - protein, 147 aa, Homo sapiens; identical to SEQ ID NO: 34326
  DOMAIN (73)..(101): Granins proteins domain identified by eMATRIX, accession number BL00422C, p-value=4.886e-11, raw score of 16.18

SEQ ID NO: 41603 - protein, 295 aa, Homo sapiens
  DOMAIN (52)..(91): kw TRANSCRIPTASE REVERSE II ORF2 domain identified by eMATRIX, accession number DM01354X, p-value=1.000e-40, raw score of 13.86
EVKDLYDKTFKSLKKEIKEDLRRWKDLPCSWIGRINIVKMAILPKAIYRFNAIPIKIPTQFFNELEGAICKFIWNNKKPRIAKTLLKDKRTSGGITMPDLKLYYRAIVIKTAWYWYRDRQVDQWNRIEDPEMNPHTYGHLIFDKGAKTIQWKKDSIFNNWCWHNWLLSCRRMRIDPYLSPCTKVKSKWIKELHIKPETLKLIEEKVGKSLEDMGTGERFLNRTAMACSKKKEKKEEEEDEEEKEKEKEKEEKEKEEEEEEEEEEEEEEEEEEEEEEEEEEEEEEEEEEEEEEEEE

SEQ ID NO: 41604 - protein, 85 aa, Homo sapiens
  DOMAIN (39)..(77): Nuclear transition protein 2 proteins domain identified by eMATRIX, accession number BL00970C, p-value=1.378e-09, raw score of 14.80
QEKKRRKEKKKKEEEEEEEEEEEEEEEEEEEEKKKKKKKKKKKKKKKKKKKKKKKKKKKKKKKKKKKKKKKGRKTDLAVDPVVGS

SEQ ID NO: 41605 - protein, 139 aa, Homo sapiens
  DOMAIN (83)..(111): Granins proteins domain identified by eMATRIX, accession number BL00422C, p-value=4.886e-11, raw score of 16.18
IWQGCNCQESDSLRLPKLVHKGLYNFFLVLLEHWLLERSPYAIRKLKEAMERPMWKEREPPPICNPRPQLSFQETIALAFNHEEEEEEEEEEEEEEEEEEEEEEEEEEEEEEEEEEEEEEEEDLLYNFIYIIFSKMPTK

SEQ ID NO: 41606 - protein, 453 aa, Homo sapiens
  DOMAIN (396)..(447): Neuromodulin (GAP-43) proteins domain identified by eMATRIX, accession number BL00412D, p-value=8.597e-14, raw score of 16.54
MVSRIWSWISEAQCPLCRPSGTYGPGEAALLLWLCIEAAAAAAAARSTTTPIITNHQSNTIAEQNPPRHENGDPKTYIIHVLAEQVLERLPHGVALRHDPLAPVVSRAGGVGHQRCAADDALQPLLQGRPEPGLAERHGVQDNLILKVSHTHTQKSAEKRAVSDPSSTVHRPQPLPPSTVHQSTIPSNPDSSSAYCLPSTRHGFSSYTDSFVPPSGPSNPMNPTIGNGLSPQRVHYQHLPTHAGGKRNAALEYGVPRKYYHMLKITASDYEKTKPFQVGDKVMGSGWRKVGMQTVKQHRVTLIKILGNLRHQVLFYHALHLVPPSLSAHDLVLALSSNCCREVDLAQFTFHLLSLKVYGISRLTGEKSGQDSQFSGFNGYITKRSSFSLKKKKRKKEKKKKEEEEEEEEEEEEEEEEEEEEEEEEEEEEEEEEEEEEEEEEEEEEENSLSLTE

SEQ ID NO: 41607 - protein, 45 aa, Homo sapiens; identical to SEQ ID NO: 33329
  DOMAIN (13)..(41): Granins proteins domain identified by eMATRIX, accession number BL00422C, p-value=6.170e-10, raw score of 16.18
  misc_feature (1)...(45): Xaa = X or * as defined in Table 2

SEQ ID NO: 41608 - protein, 79 aa, Homo sapiens
  DOMAIN (44)..(79): Troponin domain identified by eMATRIX, accession number PF00992A, p-value=2.014e-10, raw score of 16.67
VKTTERTNDRRTDERRRRAYDGTDERTTERTTERRIRTTEDRKKKRKRKRKKEEEEEEEEEEEEEEEEEEEEEEEEEEE

SEQ ID NO: 41609 - protein, 92 aa, Homo sapiens
  DOMAIN (33)..(78): RIBOSOMAL PROTEIN 40S ZINC-FINGER METAL domain identified by eMATRIX, accession number PD01457A, p-value=4.273e-10, raw score of 16.51
  misc_feature (1)...(92): Xaa = X or * as defined in Table 2
FLQMEDTYIVTKLLLLLRFAWLYLDLVFVLIXYRKKRRKKKRKKKEKEKEKEKKKKKKKKKKKKKKKKKKKKKKKRKKEMALQSCSLWYLYA

SEQ ID NO: 41610 - protein, 50 aa, Homo sapiens
MDLQQCKTILYSIFQIYEIHSSDAFGHRGFIFITSGKIVYFQKQLLIGPY

SEQ ID NO: 41611 - protein, 193 aa, Homo sapiens
  DOMAIN (133)..(160): Enoyl-CoA hydratase/isomerase proteins domain identified by eMATRIX, accession number BL00166C, p-value=4.176e-11, raw score of 18.93
MAQKKEEEEEKKEEEEEEEEEEEEEEEEEEEEEKKKKKEEKRERSKKYKQQQQQNTKRNKNLTSPQDETQTANHKPEEHPEENTKNSVDEQEETVISYESTPEVSRGNQTMAEVTQLSQEAQRIVEKLEKSTKPIVAAINGSCLGGGLEALGVQQDIQGEQKRQRSLSWWSLHSRSAGDMISGKNQFLLSEDK

SEQ ID NO: 41612 - protein, 90 aa, Homo sapiens
  DOMAIN (52)..(74): Enoyl-CoA hydratase/isomerase proteins domain identified by eMATRIX, accession number BL00166B, p-value=2.742e-14, raw score of 16.92
  DOMAIN (16)..(85): Enoyl-CoA hydratase/isomerase family domain identified by PFam, accession name ECH, E-value=0.02, PFam score of -54.9
PEPILTMESKGMWQLFELTLHNSKVNTLSKELHSEFSEVMNEIWASDQIRSAVLISSKPGCFIAGADINMLAACKDPSRSNTAITRKHRE

SEQ ID NO: 41613 - protein, 119 aa, Homo sapiens
  DOMAIN (84)..(99): PHD-finger domain identified by eMATRIX, accession number PF00628, p-value=8.125e-11, raw score of 15.84
  DOMAIN (1)..(41): SAND domain identified by PFam, accession name SAND, E-value= 1.9e-05, PFam score of 22.4
  misc_feature (1)...(119): Xaa = X or * as defined in Table 2
KWFTPMEFEIKGGYAXSKNWRLSVRCGGWPLRRLMEEGSLPNPSRIYYRNKLRILKSQNNSSVDPCMRNLDECEVCRDGWELFCCDTCSRVFHDDCHIPPVESEKMKESAGSQQCCQES

SEQ ID NO: 41614 - protein, 307 aa, Homo sapiens
  DOMAIN (35)..(50): PHD-finger domain identified by eMATRIX, accession number PF00628, p-value=6.250e-11, raw score of 15.84
  DOMAIN (94)..(173): Bromo domain identified by PFam, accession name bromodomain, E-value=1.7e-12, PFam score of 47.9
MGAALRNRGNSQWLWRMRNLDECEVCRDGGELFCCDTCSRVFHEDCHIPPVESEKDLPPAMRTLQQNVCLCLDGEGAGSSGTGTQQCDPESSGRRWQQEKCEFLLLKVYCCSESSFFAKIPYYYYIREACQGLKEPMWLDKIKKRLNEHGYPQVEGFVQDMRLIFQNHRASYKVFSSPAAEWWLLMPAVPRVLPFVKWNQLHLEVTPRGLRPAPLPQSRTKGVDYKYKNKSREKEDEVHNMGRAWLCYVSNVIIGAVSSELENHPMNEEGESEELASSLLYDNVPDTVDIANNSTLGKPKRKRSKNK

SEQ ID NO: 41615 - protein, 885 aa, Homo sapiens
  DOMAIN (708)..(723): PHD-finger domain identified by eMATRIX, accession number PF00628, p-value=6.250e-11, raw score of 15.84
  DOMAIN (583)..(664): SAND domain identified by PFam, accession name SAND, E-value= 3e-55, PFam score of 197.0
AKLMAQQGQQGQMASGDSNLNFRMVAEIQNVEGQNLQEQVCPEPIFRFFRENKVEIASAITRPFPFLMGLRDRSFISEQMYEHFQEAFRNLVPVTRVMYCVLSELEKTFGWSHLEALFSRINLMAYPDLNEIYRSFQNVCYEHSPLQMNNVNDLEDRPRLLPYGKQENSNACHEMDDIAVPQEALSSSARCEPGFSSESCEQLALPKAGGGDAEDAPSLLPGGGVSCKLAIQIDEGESEEMPKLLPYDTEVLESNGMIDAARTYSTAPGEKQGEEEGRNSPRKRNQDKEKYQESPEGRDKETFDLKTPQVTNEGEPEKGLCLLPGEGEEGSDDCSEMCDGEEPQEASSSLARCGSVSCFSTETFDLKTPQVTNEGEPEKELSLLPGEGEEGSDDCSEMCDGEERQEASSSLARRGSVSSELENHPMNEEGESEELASSLLYDNVPGAEQSAYENEKCSCVMCFSEEVPGSPEARTESDQACGTMDTVDIANNSTLGKPKRKRRKKRGHGWSRMRMRRQKNSQQNDNSKADGQVVSSEKKANVNLKDLSKIRGRKRGKPGTRFTQSDRAAQKRVRSRASRKHKDETVDFKAPLLPVTCGGVKGILHKKKLQQGILVKCIQTEDGKWFTPTEFEIKGGHARSKNWRLSVRCGGWPLRWLMENGFLPDPPRIRYRKKKRILKSQNNSSVDPCMRNLDECEVCRDGGELFCCDTCSRVFHEDCHIPPVEAERTPWNCIFCRMKESPGSQQCCQESEVLERQMCPEEQLKCEFLLLKVYCCSESSFFAKIPYYYYIREACQGLKEPMWLDKIKKRLNEHGYPQVEGFVQDMRLIFQNHRASYKYKGFGQMGFRLEAEFEKNFKEVFAIQGNKWEQLTGLVDAESIQQMAP

SEQ ID NO: 41616 - protein, 771 aa, Homo sapiens
  DOMAIN (594)..(609): PHD-finger domain identified by eMATRIX, accession number PF00628, p-value=6.250e-11, raw score of 15.84
  DOMAIN (469)..(550): SAND domain identified by PFam, accession name SAND, E-value= 3e-55, PFam score of 197.0
AKLMAQQGQQGQMASGDSNLNFRMVAEIQNVEGQNLQEQVCPEPIFRFFRENKVEIASAITRPFPFLMGLRDRSFISEQMYEHFQEAFRNLVPVTRVMYCVLSELEKTFGWSHLEALFSRINLMAYPDLNEIYRSFQNVCYEHSPLQMNNVNDLEDRPRLLPYGKQENSNACHEMDDIAVPQEALSSSARCEPGFSSESCEQLALPKAGGGDAEDAPSLLPVSCKLAIQIDEGESEEMPKLLPYDTEETFDLKTPQVTNEGEPEKGLCLLPGEGEEGSDDCSEMCDGEERQEASSSLARRGSVSSELENHPMNEEGESEELASSLLYDNVPGAEQSAYENEKCSCVMCFSEEVPGSPEARTESDQACGTMDTVDIANNSTLGKPKRKRRKKRGHGWSRMRMRRQKNSQQNDNSKADGQVVSSEKKANVNLKDLSKIRGRKRGKPGTRFTQSDRAAQKRVRSRASRKHKDETVDFKAPLLPVTCGGVKGILHKKKLQQGILVKCIQTEDGKWFTPTEFEIKGGHARSKNWRLSVRCGGWPLRWLMENGFLPDPPRIRYRKKKRILKSQNNSSVDPCMRNLDECEVCRDGGELFCCDTCSRVFHEDCHIPPVEAERTPWNCIFCRMKESPGSQQCCQESEVLERQMCPEEQLKCEFLLLKVYCCSESSFFAKIPYYYYIREACQGLKEPMWLDKIKKRLNDHGYPQVEGFVQDMRLIFQNHRASYKYKDFGQMGFRLEAEFEKNFKEVFAIQGNKWEQLTGLVDAESIQQMAP

SEQ ID NO: 41617 - protein, 403 aa, Homo sapiens
  DOMAIN (214)..(229): PHD-finger domain identified by eMATRIX, accession number PF00628, p-value=6.250e-11, raw score of 15.84
  DOMAIN (273)..(352): Bromo domain identified by PFam, accession name bromodomain, E-value=1.7e-12, PFam score of 47.9
MKAFLGWWLAARARPRPASGAGVMLAQVPPVAPRLRDGLGHPLSWLVTLPGGNLQDRIASPVSAAESTRHSSHSNSGQILGTRPLAALCSASCEGREPGAVGRTHGQRLHLTAASFMAAATSDCLPLPSVVGLLDEMGWASREPNCCDCYCSSGSSHPEELLGSGLVLGSICKGSCDVICLQFSQSWVPARAPVEMRNLDECEVCRDGGELFCCDTCSRVFHEDCHIPPVEAERDLPPAMRTLQQSAGLCLDGERAGSSGTGTQQCDPESSGRRWQQEKCEFLLLKVYCCSESSFFAKIPYYYYIREACQGLKEPMWLDKIKKRLNEHGYPQVEGFVQDMRLIFQNHRASYKVFSSPTAEWWLLINASSPQNITRGQVEPASPGSDTPWPEAGPFASKQDQGC

SEQ ID NO: 41618 - protein, 247 aa, Homo sapiens
MRYKKEQPLFLPKYDLGADAAILQPQEEDCGSTQVRGGHHRTKTEETGLLVTSLNQGIKPHDSVTKLLSPQRSSVLFLLLITSGVHTDSSKAVLESRRSLGYEASFLEYFQSFYKLFPVDRLYAWHCSDHRNTTVTAINTDRPGLLTLSLTVTIGQGSKKAPSGFSHISPAPTVKQQPILCDDRDFSPSSFPSTNTPSQFATNEVLTTGPPPGAGCCQYSTITRKTGPNCQAGGCPGGARPAKWLRS

SEQ ID NO: 41619 - protein, 57 aa, Homo sapiens
ASCSTSVSVGSGVVWWSLCVMVTLLCLQVNEVTVEQLVQQYPHITFSTVLQDCKRTL

SEQ ID NO: 41620 - protein, 60 aa, Homo sapiens; identical to SEQ ID NO: 34324
  DOMAIN (1)..(52): Neuromodulin (GAP-43) proteins domain identified by eMATRIX, accession number BL00412D, p-value=4.273e-14, raw score of 16.54

SEQ ID NO: 41621 - protein, 116 aa, Homo sapiens
  DOMAIN (5)..(44): PROTEIN ZINC FINGER ZINC-FINGER METAL-BINDING NU domain identified by eMATRIX, accession number PD01066, p-value=6.824e-27, raw score of 19.43
  DOMAIN (3)..(58): KRAB box domain identified by PFam, accession name KRAB, E- value=1.3e-16, PFam score of 68.6
KPVTFEDVAVNFTQEEWDCLDASQRVLYQDVMSETFKNLTSVAWVRKKEEEEEEEEEEEEEEEEEEEEEEEEEEEEEEEEEEEEEEEEEEEEEEEEEEEEEEEGEEEEEEEEEGEN

SEQ ID NO: 41622 - protein, 172 aa, Homo sapiens
  DOMAIN (59)..(110): Neuromodulin (GAP-43) proteins domain identified by eMATRIX, accession number BL00412D, p-value=9.753e-15, raw score of 16.54
MGQSKGMGWASYLQEDHVLKAQIVHAIVCGLRMPLSGFPPWVGQVFLALIQPRRQSKTPSKKKEEEEEEEEEEEEEEEEEEEEEEEEEEEEEEEEEEEEEEEEEEEEEEEEEEEEEEEEEEEEEEEEEEEEEEEEEEEEEEEEEEEEEEEEEEEEEGSKINNLSFYHWKLVK

SEQ ID NO: 41623 - protein, 85 aa, Homo sapiens; identical to SEQ ID NO: 34746
  DOMAIN (2)..(53): Neuromodulin (GAP-43) proteins domain identified by eMATRIX, accession number BL00412D, p-value=7.075e-13, raw score of 16.54

SEQ ID NO: 41624 - protein, 194 aa, Homo sapiens
  DOMAIN (25)..(53): Dehydrins proteins domain identified by eMATRIX, accession number BL00315A, p-value=5.164e-09, raw score of 9.35
MPATWEAEARESHKREFETHLVQHSETPSEKEEEEEEEEEEEEEEEEEEEEEEEEEEEEEEEEEEEEEEGEEEEEEEEEEEEEEEEEEEGEEEEEEEEEEEEEEDEEEEEEEEEEEEEEEEEEEEEEEEEEEEEEEEEEEGEEEEEEEEEEEEEEEEEEEGEEEEEEEEEEEEEEDEEEEEEEEEEEEEEEELL

SEQ ID NO: 41625 - protein, 146 aa, Homo sapiens
  DOMAIN (81)..(124): p53 tumor antigen proteins domain identified by eMATRIX, accession number BL00348F, p-value=5.000e-09, raw score of 23.19
MGFSFILNDDEMTYDNKSDFKVSETLSKKKKEKREKKKKKKKKKKKKKKKKKKKKKKKKEEEEEEEEEEEEEEEEEEEKKKKKKKRKRKRKKKKRKRKRKRKKKKKKKKKKKEKKKKGKGKGRKRKKKKKEILPFSTTWMELETLY

SEQ ID NO: 41626 - protein, 100 aa, Homo sapiens
  DOMAIN (7)..(60): Clathrin light chain proteins domain identified by eMATRIX, accession number BL00224B, p-value=9.654e-10, raw score of 16.94
LEEEEEEEEEEEEEEEEEEEEEEEEEEEEEEEEEEEEEKEEEEEEEDEEEEGQLLQHCAPKSMINQRISISPATSFQKAEVLSFHLTNEEAVNGGGDRCG

SEQ ID NO: 41627 - protein, 77 aa, Homo sapiens [sequence omitted]

SEQ ID NO: 41628 - protein, 147 aa, Homo sapiens
  DOMAIN (31)..(82): Neuromodulin (GAP-43) proteins domain identified by eMATRIX, accession number BL00412D, p-value=5.562e-15, raw score of 16.54
  misc_feature (1)...(147): Xaa = X or * as defined in Table 2
MVRPFLYKKIKEEEEEEEEEEEEEEEEGEEEEEEEEEEEEEEEEEEEGEEEEEEEEEEEEEEEEEEDKDDEEEREKKEEEEEEEEEEEEEEEEEEEEEEEEEEEEKKHSLXDPDLGEKENKGQRKRKLARGTSQPSLSPGGSDPLGA

SEQ ID NO: 41629 - protein, 167 aa, Homo sapiens
  DOMAIN (117)..(167): Neuromodulin (GAP-43) proteins domain identified by eMATRIX, accession number BL00412D, p-value=8.644e-15, raw score of 16.54
VAPGDRHAFPLAPSGLSPELTLPQTQCCAQATVQGLEGTRSWSQSGTSSLSPWSHTSLRRRRKEEGEEEEEEEEEEEEEEEEEEEEEEEEEEEEEEEEEEEEIEEGEEEEEEEEEEEEEEEEEEEEEEEEEEEEEEEEEEEEEEEEEEEEEEEEEEEEEEEEEAKTQ

SEQ ID NO: 41630 - protein, 75 aa, Homo sapiens
  DOMAIN (48)..(75): Granins proteins domain identified by eMATRIX, accession number BL00422C, p-value=2.841e-11, raw score of 16.18
AFDKQPRGRGRVVKEEVLKKKKKEEEKEEEGEEEEEEEEEEEEEEEEDEEEEEEEEEEEEEEEEEEEEEEEEEEE

SEQ ID NO: 41631 - protein, 116 aa, Homo sapiens
  DOMAIN (40)..(88): Ribosomal protein L15e proteins domain identified by eMATRIX, accession number BL01194B, p-value=2.832e-10, raw score of 13.66
MWADCRDLHLVPALHGEDHGHRASHNQSTTRQFHPGHREPRSHHCTLAWATRAKLRLKKKGRRRRRRRRRRRGRRRGRRRGRRRGRRRGRRRGRRRRRRRRRRRRRRRREEEEEEE

SEQ ID NO: 41632 - protein, 111 aa, Homo sapiens
  DOMAIN (71)..(99): Granins proteins domain identified by eMATRIX, accession number BL00422C, p-value=1.818e-11, raw score of 16.18
  misc_feature (1)...(111): Xaa = X or * as defined in Table 2
MAAALQLGDRAKPCFKKEKERRQRRKKRKEREKGRKEKEKEKKKEEEEEEEEEEEEEEEEEEEEEEEEEEEEEEEEEEEEEEEEEEEEEEEEEEEXEEEEEEEEEEGKDTD

SEQ ID NO: 41633 - protein, 235 aa, Homo sapiens
  DOMAIN (32)..(60): Dehydrins proteins domain identified by eMATRIX, accession number BL00315A, p-value=6.642e-09, raw score of 9.35
EEGEVEEEGEEEEEEEEGEGEEEEEEEGEGEGEGEGEGEEEEEEEEEEEEEEEEEEEEEEEEEEEEEEEEEEEEEEQEEEEEEEEEEEEEEERRSGSSGSSQQGQPHLPGAYLLASMSCSERHSGLQLLTLLSLYLWRQFPLVRDHHPSNVFLLPSAQPPPVRNYPQADFNENGFIDEEDLQRIILRLLNSDDMSEDLLMDLTNHVLSESDLDNDNMLSFSEFEHAMAKSPDFMK

SEQ ID NO: 41634 - protein, 139 aa, Homo sapiens
MPLEGGVIPEEGDDQVGRRPSQESLTIPSVSEDAMESSKSTLQNSLTITSEIKNTPNLRPRQSMPMNLLAEKLSPLCSWLSIICSALAEPRAFIDLRVEEVHADSSMGSHGQSWKRHHKFQIQSMGLVAQLPAFRSSLA

SEQ ID NO: 41635 - protein, 237 aa, Homo sapiens; identical to SEQ ID NO: 37324
  DOMAIN (193)..(237): Involucrin proteins domain identified by eMATRIX, accession number BL00795C, p-value=7.100e-09, raw score of 17.06

SEQ ID NO: 41636 - protein, 1080 aa, Homo sapiens
  DOMAIN (154)..(198): Beta-lactamase class-A proteins domain identified by eMATRIX, accession number BL00146B, p-value=9.250e-37, raw score of 24.10
  DOMAIN (83)..(233): Beta-lactamase domain identified by PFam, accession name beta -lactamase, E-value=9.5e-71, PFam score of 248.5
  misc_feature (1)...(1080): Xaa = X or * as defined in Table 2
LMLVVIFNGTERIEDLRKPPSFDAILGGGLRVLFFQNEAHPPFASWRNNEEARTDRPSQQLRSLNGKWRLMRYFLLTHLCETLVKVKDAEDQLGARVGYIELDLNSGKILESFRPEERFPMMSTFKGLLCGAVLSRIDAGQEQLGRRIHYSQNDLGEYSPVTEKHLTDGMTVRELCSAAITMSDNTAANLLLTTIGGPNELTAFLHNMGDHVTRLDRSEPELNEAIPNDERDTRCLGQWQQRSQTINWPTTTLAPGTINNWMEADKVSHPGHADIRGGFTVLGSSALVALQEIQKTVRDYYEHFYACELDNIVEMEKFLETYNHTRLNREEIESLNRPITSSKIESLIKTLQTRNNPGPDEFTAKFYQMYKEELGNEQHLSILSSKEKEELNHGKSPNTTSSGVGGAEGEGEEEEEEEEEEEEEEEEEEEEEEEEEEEEEEEEEEEEEERRKKKEERRKKKKEEERRRKKKKRRRKLAGSVGQTSAGGASCEERCSGLVIVTYPLTSKVKRAVQSSSQPADQETPSGAYATRALGFKHKTGQPFGEATELAAEGSQLLAAREQNWMNNEFDELEEVGFRRITSLEKNINDLMELKNTARKLHEAYTSCNSQIDQAEERISEIEDQLNEIKQEDKIREKRVKRNEQSLQEMWDYVKIPNLGLIVVPENDGENGTKLENTLQDIIQENFPNLTRRINIQIQEXEEQKEKEKKKKKKKKKKKKKKKKRKKRKKKKKKKKKKKKKKKKKKEERRKKKEERRRKKKKEEERRRKEEENXPGLWVRPQQVVPRVRNAAAAWXLXRIPXHRRXKGLCSHLHNRHDQETPSGAYATRALGFKHKTGQPFGEATELAAEGSQLLAAREQNWMNNEFDELEEVELQKNNQFREEHKXPDGARKTQQENFMKHTQVATAKSIKQKKGYQKIEDQLNEIKQEDKIREKRVKRNEQSLQEMWDYVKIPNLGLIVVPENDGENGTKLEEHSAGYYPGELPQPNKADQHSNSGKTENTTKILLEKSKPKTHNCQIHQGXKEGKNVKGSQRERSGYPQKEAHQTNDGSLGRRGWGPIFNILKEKNFQSRISYPANL

SEQ ID NO: 41637 - protein, 62 aa, Homo sapiens
  DOMAIN (10)..(61): Neuromodulin (GAP-43) proteins domain identified by eMATRIX, accession number BL00412D, p-value=1.468e-14, raw score of 16.54
  misc_feature (1)...(62): Xaa = X or * as defined in Table 2
YSCLMFPQDGEXLEKEEEEEEEEEEEEEEEEEEEEEEEEEEEEEEEEEEEEEEEEEEEEEEN

SEQ ID NO: 41638 - protein, 167 aa, Homo sapiens
  DOMAIN (138)..(166): Granins proteins domain identified by eMATRIX, accession number BL00422C, p-value=1.000e-12, raw score of 16.18
MKHQHFALLVPEKFLIAQSTASRVDRRQIWRDVSSERGEISQCLKVGTSLNSTDVSAVEAVRATVLGSGTLTPTVLRSNAGPYTRISTVPACLLGQEEEEEEEEEEEEEEEEEEEEEEEEEEEEEKEEEEEEEEEEEEEEEEEEEEEEEEEEEEEEEEGEEEERRKS

SEQ ID NO: 41639 - protein, 254 aa, Homo sapiens; identical to SEQ ID NO: 37325
  DOMAIN (107)..(160): Clathrin light chain proteins domain identified by eMATRIX, accession number BL00224B, p-value=5.582e-09, raw score of 16.94

SEQ ID NO: 41640 - protein, 728 aa, Homo sapiens
  DOMAIN (10)..(65): kw TRANSCRIPTASE REVERSE II ORF2 domain identified by eMATRIX, accession number DM01354Q, p-value=1.000e-40, raw score of 9.23
  DOMAIN (2)..(238): Reverse transcriptase domain identified by PFam, accession name rvt, E-value=3.5e-46, PFam score of 166.9
  misc_feature (1)...(728): Xaa = X or * as defined in Table 2
MNIDANIPNKILENRIQQHIKKLIHHDQVGFIPGMQGWFNIRKSINVIQHINRTKDKNCMIISIDAEKAFDKIQQCFMLETLNKLGIGGTYLKIIRAIYDKPTANIILNGQKLEAFPLKTGTRQGCPLSPLLFNIVLEVLARAIRQEKEIKGVQLGKEEVKLSLFADDMIVYLENPIVSAQHLLKLISNFSKVSGYKINVQKSQAFLYTNNRQTENQIMSELPFTIASKRIKYRGIQLTRDLKDLFKENDKPLLKEIKEDDKEMEEHSMLMGRKNQYRENSHAAQELEKNYFKVHMEPKKSPHYQVNPKPKEQSGRHHVTXLQTILQGYSNQNSMVLVPKQTYRSMEQNRSLRNNATYLQLSDLXQTQEKQAMGKGFPIXXMVLGKLASHMXKPETGSLPYTLYKNQFKVDXRLKRXTXNHKNQRRKPRHYHSGHRHGQGLHVXNTKINGNKNQNXQMGSNXTKELLHSKRNYRQSDQATYKMGENFHNLLIRQRANIQNVQXTQTNLQEKNKQPHQKVGEGHEQTLLKRRHLCSQKTHEKNSPSLAIREMQIKTTMRYHLTPVRMAIIKKSGNSRKHIQKKEEEEEEEEAEEEEEEEEEEEEEEEEEEEEEEEEEEEEEEEEEEEEEEEEEEEEEEEEEKCSLKHTEAPCVKGIETIFWNKFSLCDITKSYLSGVQKLEERAHKVKLALKFKKEIKMALHGGNPIWLSSVTLVFGVLMYWEMEECDD

SEQ ID NO: 41641 - protein, 290 aa, Homo sapiens; identical to SEQ ID NO: 35416
  DOMAIN (13)..(48): Troponin domain identified by eMATRIX, accession number PF00992A, p-value=3.418e-11, raw score of 16.67

SEQ ID NO: 41642 - protein, 85 aa, Homo sapiens
GSTISCARCAELRGSASRFRPLPAAAMKWMFKEDHSLEHRCVESAKIRAKYPDRVPLTMGQLYEKEKDEDGFLCVAYSGENTFGF

SEQ ID NO: 41643 - protein, 151 aa, Homo sapiens
  DOMAIN (1)..(16): PUROTHIONIN SIGNATURE domain identified by eMATRIX, accession number PR00288C, p-value=5.368e-09, raw score of 10.15
GCRCRCRRRCCCARCAELRGSASRFRPLPAAAMKWMFKEDRWLEHRCVESAKIRAKYPDRVPVIVEKVSQGSQIVDIDKRKYLVPSDITVAQFMWIIRKRIQLPSEKAIFLFVDKTVPQSSLTMGQLYEKEKDEDGFLYVAYSGRGTLFGF

SEQ ID NO: 41644 - protein, 322 aa, Homo sapiens
MVVLSVPAEVTVILLDIEGTTTPIAFVKVGEGGPKKQKYPTGRKRAGETGNERQTAGEKNQTKDARGNTQEHGEGKRTPGGRASRRNRERESLDKNRSKSGHRAPHKELGNGKKPSRSRQRRAQTATIRSRLATELVGSSGRRSGSALANRGQKKAGLTAFWDFAEFGTTIKQDFRLLGQTSVDRLLQLSQGQAVKGNQLLPVSLVKRKTTLAPNTQTASPRALADSLMQLARQVSRLESGQDFADGGTTIKQDFRQLGQTSVDRMLQLSQGQAVKGNQLLPVSLVKRKTTLAPNTQTASPRALADSLMQLARQVSRLESGQ

SEQ ID NO: 41645 - protein, 337 aa, Homo sapiens
  DOMAIN (253)..(269): PRO-OPIOMELANOCORTIN SIGNATURE domain identified by eMATRIX, accession number PR00383B, p-value=8.650e-09, raw score of 9.75
  misc_feature (1)...(337): Xaa = X or * as defined in Table 2
RPPFPVPGVQKCPLPTRGGLHIGRWLRDRAGPPEAQDGTGGRSRSRRRPPALPNSRPSPVASGREMVVLSVPAEVTVILLDIEGTTTPIAFVKGDILFPYIERKMLKEYLQTHWEEEEFQQDVSLFEGNKAEEDAHLDGAVPIPGKHLGIGVDDLQQMIQAVVDNVCWQMSLDRKTTALKQLQGHMWRAAFTAGRMKAEFFADVVPAVRKWREAGMKVYIYSSGSVEAQKLLFGHSTEGDILELVDGHFDTKIGHKRRRVKVTRKIADSIGCSTNKHFVFWTDVTSRRASAGLREAGCCTLAVVVRPGNAGINRXLRKTYYSLITSFQWNYYLPSST

SEQ ID NO: 41646 - protein, 171 aa, Homo sapiens
KLLEFLNRETKASANLSETVTKPPLPQKNTAQVGASSQTRKPNKLAPHPAVPAFVKNTCPSRPRERQTHFLRPRPEDRMVALKPIKIVLPPVFMPFSSPQGIRSRMPTQHLYCRWVAPKALVPTCLPTHSLSRKEEKPKRMDTPFLPYSRPPSGEWLLIVLWFFNRSQRSR

SEQ ID NO: 41647 - protein, 78 aa, Homo sapiens
METSSLRITPDLLNARATERESPKVGPIIGVLPRPPGTLASICGGLVMLLPEITGIALPETVDDVEKLGRHCPKFNAP

SEQ ID NO: 41648 - protein, 565 aa, Homo sapiens
  DOMAIN (189)..(226): 3 kw RESISTANCE BENOMYL YLL028W CYCLOHEXIMIDE domain identified by eMATRIX, accession number DM00973A, p-value=1.391e- 11, raw score of 21.17
  DOMAIN (130)..(541): Sugar (and other) transporter domain identified by PFam, accession name sugar_tr, E-value=1.6e-07, PFam score of 19.6
LRAAGGGRTMPSFDEALQRVGEFGRFQRRVFLLLCLTGVTFAFLFVGVVFLGTQPDHYWCRGPSAAALAERCGWSPEEEWNRTAPASRGPEPPERRGRCQRYLLEAANDSASATSALSCADPLAAFPNRSAPLVPCRGGWRYAQAHSTIVSEFDLVCVNAWMLDLTQAILNLGFLTGAFTLGYAADRYGRIVIYLLSCLGVGVTGVVVAFAPNFPVFVIFRFLQGVFGKGTWMTCYVIVTEIVGSKQRRIVGIVIQMFFTLGIIILPGIAYFIPNWQGIQLAITLPSFLFLLYYWVVPESPRWLITRKKGDKALQILRRIAKCNGKYLSSNYSEITVTDEEVSNPSFLDLVRTPQMRKCTLILMFAWFTSAVVYQGLVMRLGIIGGNLYIDFFISGVVELPGALLILLTIERLGRRLPFAASNIVAGVACLVTAFLPEGIAWLRTTVATLGRLGITMAFEIVYLVNSELYPTTLRNFGVSLCSGLCDFGGIIAPFLLFRLAAVWLELPLIIFGILASICGGLVMLLPETKGIALPETVDDVEKLGSPHSCKCGRNKKTPVSRSHL

SEQ ID NO: 41649 - protein, 78 aa, Homo sapiens; identical to SEQ ID NO: 41647

SEQ ID NO: 41650 - protein, 565 aa, Homo sapiens; identical to SEQ ID NO: 41648
  DOMAIN (189)..(226): 3 kw RESISTANCE BENOMYL YLL028W CYCLOHEXIMIDE domain identified by eMATRIX, accession number DM00973A, p-value=1.391e- 11, raw score of 21.17
  DOMAIN (130)..(541): Sugar (and other) transporter domain identified by PFam, accession name sugar_tr, E-value=1.6e-07, PFam score of 19.6

SEQ ID NO: 41651 - protein, 70 aa, Homo sapiens
RRLFFFFLRQSLALSPRLECSGAISAHCKLHLPGSCHCPASASQVAGTTGTRHHAWLIFLYTFSRDGVSA

SEQ ID NO: 41652 - protein, 139 aa, Homo sapiens
MSHAQWRVPVVPATGEAEAGEWHEPGRFLIGQGAHVGAVNSEGDTPLDIAEEEAMEELLQNEVNRQGTQCKVSVDLSFWGLEDGGPLLMAALGSTPVGILCGVSDLTFPFHTALAEVLHEGSTSAADFCLDIQAFPYTL

SEQ ID NO: 41653 - protein, 486 aa, Homo sapiens
  DOMAIN (280)..(335): Domain present in ZO-1 and Unc5-like netrin receptors domain identified by eMATRIX, accession number PF00791B, p-value=2.364e- 11, raw score of 28.49
  DOMAIN (249)..(466): Ank repeat domain identified by PFam, accession name ank, E- value=1.1e-33, PFam score of 125.3
MGVQKSRTEVWEALPRFQRVYGKAWMSRQKSAAEVEPSWRTSARAVWKGNVRSETPHRIPTGVLPSAAMRRGPPSSRPQNDRSTDTLHCVPRKDRDTQHWPMKEARSGAVPCKATEAELSKAVGAHLLHQHDLDVFIRDKLMERRNRRTGRTEKARIWEVTDRTVRTWIGEAVAAAAADGVTFSVPVTPHTFRHSYAMHMLYAGIPLKVLQSLMGHKSISSTEVYTKVFALDAAARHRAGYDVNIKDYDGWTPLHAAAHWGKEEACRILVDNLCDMEMVNKVACIDDNVDMVKFLVENGANINQPDNEGWIPLHAAASCGYLDIAEFLIGQGAHVGAVNSEGDTPLYIAEEEAMEELLQNEVNRQGVDIEAARKEEERIMLRDARQWLNSGHINDVRHAKSGGTALHVAAAKGYTEVLKLLIQAGYDVNIKDYDGWTPLHAAAHWGKEEACRILVDNLCDMEMVNKVGQTAFDVADEDILGYLEEL

SEQ ID NO: 41654 - protein, 36 aa, Homo sapiens
DRVSLCCPGWSTVARSWLTASSASQVHAILLPQPPE

SEQ ID NO: 41655 - protein, 106 aa, Homo sapiens
SVRKMANMNSDSRHLGTSEVDHERDPGPMNIQFEPSDLRSKRPFCIEPTNIVNVNHVIQRVSDHASAMNKRIHYYSRLTTPADKALIAPDHVVPAPKECYGYSPFG

SEQ ID NO: 41656 - protein, 332 aa, Homo sapiens
MNTGKLQLSVHLEALGQPHHLGTSDVSFPGLTTHTANEGVSRLPLVSSNDPLYRPIVTATTPIHGYMWCTNMEMNTLKVMAFVAQNFLDNFPSSDTLSFIARIFLLFQMMTVYPLLGYLARVQLLGHIFGDIYPRRLQIGRLLKVFRVFFWTLSSGILGNWHTGRGECFAHGFALLVNALQVARNLANIRAARTRVRTIRTSASTVFLAPYTQGDIQKTKICIDAVSSKVASTSKVLTVSFTLLRSPAPLERHLANSQEPLFYVVHGQVFSLLFLEIVYNEYNIKLIWPFCIEPTNIVNVNHVIQRVSDHASAMNKRIHYYSRLTTPADKAL

SEQ ID NO: 41657 - protein, 289 aa, Homo sapiens
  DOMAIN (197)..(229): Polypeptide deformylase domain identified by eMATRIX, accession number PF01327D, p-value=2.440e-20, raw score of 18.82
  DOMAIN (66)..(224): Polypeptide deformylase domain identified by PFam, accession name Pep_deformylase, E-value=2.1e-21, PFam score of 84.5
  misc_feature (1)...(289): Xaa = X or * as defined in Table 2
MARLWGALSLWPLWAAVPWGGAAAVGVRACSSTAAPDGVEGPALRRSYWRHLRRLVLGPPEPPFSHVCQVGDPVLRGVAAPVERAQLGGPELQRLTQRLVQVMRRRRCVGLSAPQLGVPRQVLALELPEALCRECPPRQRALRQMEPFPLRVFVNPSLRVLDSRLVTFPEGCESVAGFLACVPRFQAVQISGLDPNGEQVVWQASGWAARIIQHEMDHLQGCLFIDKMDSRTFTNVYWMKVNDXSFATGAEDSGYQDANTFTLSWANLTWHQLGWLAYDRKLDCQGMAD

SEQ ID NO: 41658 - protein, 74 aa, Homo sapiens
  DOMAIN (5)..(37): Polypeptide deformylase domain identified by eMATRIX, accession number PF01327D, p-value=2.440e-20, raw score of 18.82
LDPNGEQVVWQASGWAARIIQHEMDHLQGCLFIDKMDSRTFTNVYWMKDGTQKVQNNILSHVAILQLCPDEENG

SEQ ID NO: 41659 - protein, 252 aa, Homo sapiens
  DOMAIN (214)..(251): TFIIS zinc ribbon domain proteins domain identified by eMATRIX, accession number BL00466, p-value=8.200e-19, raw score of 25.88
  DOMAIN (212)..(250): Transcription factor S-II (TFIIS) domain identified by PFam, accession name TFIIS, E-value=2.2e-10, PFam score of 47.9
MVQEKNTAGALGLLTELQNVLELLRSTGTGMLLNVSLKQSADEEVTSLAKSLVKSWKKLPDKPSSEKDPKEKQIEPAMTSQNSKRNTSDSVRMKYREMLPAALRTGDDCIEMGTDEEELGSRTEEAIDPERGNTGMKYKNRVQSKISNLTDAKNPDLRKNAPCGNIPPDLLARMTAEEMASDELKEMHKNLRKEAIREHQMAKTGGTQPDSLTCAKCKKKNCTSTQVQACSAGEPMTTFVDCNECGNQQKFC

SEQ ID NO: 41660 - protein, 35 aa, Homo sapiens
QHYRWRGLKLKVGTVPVQLHYQQKHSASHYSSIIG

SEQ ID NO: 41661 - protein, 111 aa, Homo sapiens
MFCVWGWGAPSSHCLNSLKSPHVSPTGSPQTTSEGLTCCHSLLLPQSRVMRMDGVQGFRWGLRRCPCWPCPSWLSRPGLTDQIHLYAGRGADSSGTPWFWIPFLGSLWRQP

SEQ ID NO: 41662 - protein, 415 aa, Homo sapiens
MVKNHSPLDTRQSSRLTTLPMERTKTQVMRKLTVIVGTLSIAKLIMYVNTLPHLLPPVSLAESLPYERVGQGLLFLRKYKNGNAEKASDLPKVLTELKSDNQRLKDENGALIRVISKLSNSEHGISRISHLGQPLLILHLIIGGGLAHQPPTTPVHIEAPSPGTATGPQERYPEPWSPTAVCSSPSVEMELNCEPRPRKPARAGPAWASPETPPEALDTVHSHDTGLREQEGVTTATSALRYGKHTSRSMFPPSPWTKTDAIHYVAYQDQLGPEEGTAPHTHTGSTLVSTFKITQQPVPTPQGSSLAVGSEECKSWALEGLNEVHEWKRIQVVEDELGKGKGVKEAEVAQMGQDRDAAICAGKERYSGFWRSHEFSVVKKWQGPEGFMDGKERSKEGRQGGLASGHKGTSLCCPG

SEQ ID NO: 41663 - protein, 488 aa, Homo sapiens
  DOMAIN (106)..(151): kw TRANSCRIPTASE REVERSE II ORF2 domain identified by eMATRIX, accession number DM01354N, p-value=1.000e-40, raw score of 13.17
  DOMAIN (190)..(465): Reverse transcriptase domain identified by PFam, accession name rvt, E-value=6.5e-84, PFam score of 292.2
CQAKFIMNRLKKNERQKVQDIKEVKQNIHLIRASFAGKGKQLEEKMQPLEPEAIMLSELMQEQKTKCRMFSLISGKHGVHMDSKTGATDSGAYLRVEEIQTTIREYYKHLYANKLENLEEMDKFLDKYTLPRLNQEEVESLNRPITGAEILAIISSLPTKKSPGPDGFTAEFYLRYKEELVPFLLKLSQSIEREGILPNSFYEASIILIPKPGRDTTKKENFRPISLMNIDAKILNKILANRIQQHIKKLIHHDQVGFIPGMQGWFNLRKSINVIQHINRAKDKNHMIISIHEEKAFDKIQQPFMLKTLNKLGIDGTYLKIIRAIYDKPTANIILNGQKLEAFPLKTGTRQGCPLSPLLFNIVLEVLARAIRQEKEIKGIHLGKEEVTLSLFADDMIVYLENPIVSAQNLLKLISNFSKVSGYKINVQKSQAFLYTNNRQTESQIMSELPFTIASRRIKYLGIQLTRDMKDLFKENYKPLLSEIVTVF

SEQ ID NO: 41664 - protein, 172 aa, Homo sapiens
  DOMAIN (21)..(71): Ribosomal protein L24e proteins domain identified by eMATRIX, accession number BL01073, p-value=3.195e-37, raw score of 24.30
  DOMAIN (10)..(84): Ribosomal protein L24e domain identified by PFam, accession name Ribosomal_L24e, E-value=1.1e-30, PFam score of 115.4
LGGVTRGFNMRIEKCYFCGGPMYPGHGMMFVRNDCKGFRFCKSKCHKNFKKKRNPRKVRWTKAFRKAAGKELTGDNSFEFEKRRNEPIKYQRELWNKTIDAMKRVEEIKQKRQAKFIMNRLKKNKELQKVQDIKEVKQNIHLIRAPLAGKGKQLEEKMVQQLQEDVDMEDAP

SEQ ID NO: 41665 - protein, 102 aa, Homo sapiens
  misc_feature (1)...(102): Xaa = X or * as defined in Table 2
MWASQWSLACKKSKSSSVQSSSVCDREDTRSSQSSSRSRAFTHFSNCSHCSLTVVRGSTNSSXXXXXXXXXXXXXXXXXXXXXXXXXXXXXXXXXXXXXXXP

SEQ ID NO: 41666 - protein, 69 aa, Homo sapiens
EEELVDPLTTVREQCEQLEKCVKARERLELCDERVSSRSHTEEDCTEELFDFLHARDHCVAHKLFNNLK

SEQ ID NO: 41667 - protein, 172 aa, Homo sapiens
  misc_feature (1)...(172): Xaa = X or * as defined in Table 2
PDMGLEDEQKMLTESGDPEEEEEEEEELVIGLRLSVHTGNLGRPGMXNFPLLLSIQNXMGDPHSAISGGQCGSASWPSARIPLQQVREQCRASWKKCVKARERLELCDERXSSRSHTEEDCTEELFDFLHARDHCVAHKLLXQLAFCTDPPTTSERAMPSQLEEMCKRPGSG

SEQ ID NO: 41668 - protein, 694 aa, Homo sapiens
  DOMAIN (587)..(604): JUN TRANSCRIPTION FACTOR SIGNATURE domain identified by eMATRIX, accession number PR00043B, p-value=6.422e-11, raw score of 8.73
  DOMAIN (576)..(640): bZIP transcription factor domain identified by PFam, accession name bZIP, E-value=1.5e-07, PFam score of 32.0
MKHLKRWWSAGGGLLHLTLLLSLAGLRVDLDLYLLLPPPTLLQDELLFLGGPASSAYALSPFSASGGWGRAGHLHPKGRELDPAAPPEGQLLREVRALGVPFVPRTSVDAWLVHSVAAGSADEAHGLLGAAAASSTGGAGASVDGGSQAVQGGGGDPRAARSGPLDAGEEEKAPAEPTAQVPDAGGCASEENGVLREKHEAVDHSSQHEENEERVSAQKENSLQQNDDDENKIAEKPDWEAEKTTESRNERHLNGTDTSFSLEDLFQLLSSQPENSLEGISLGDIPLPGSISDGMNSSAHYHVNFSQAISQDVNLHEAILLCPNNTFRRDPTARTSQSQEPFLQLNSHTTNPEQTLPGTNLTGFLSPVDNHMRNLTSQDLLYDLDINIFDEINLMSLATEDNFDPIDVSQLFDEPDSDSGLSLDSSHNNTSVIKSNSSHSVCDEGAIGYCTDHESSSHHDLEGAVGGYYPEPSKLCHLDQSDSDFHGDLTFQHVFHNHTYHLQPTAPESTSEPFPWPGKSQKIRSRYLEDTDRNLSRDEQRAKALHIPFSVDEIVGMPVDSFNSMLSRYYLTDLQVSLIRDIRRRGKNKVAAQNCRKRKLDIILNLEDDVCNLQAKKETLKREQAQCNKAINIMKQKLHDLYHDIFSRLRDDQGRPVNPNHYALQCTHDGSILIVPKELVASGHKKETQKGKRK

SEQ ID NO: 41669 - protein, 669 aa, Homo sapiens
  DOMAIN (561)..(578): JUN TRANSCRIPTION FACTOR SIGNATURE domain identified by eMATRIX, accession number PR00043B, p-value=6.422e-11, raw score of 8.73
  DOMAIN (557)..(621): bZIP transcription factor domain identified by PFam, accession name bZIP, E-value=1.5e-07, PFam score of 32.0
  misc_feature (1)...(669): Xaa = X or * as defined in Table 2
MKHLKRWWSAGGGLLHLTLLLSLAGLRVDLDLYLLLPPPTLLQDELLFLGGPASSAYALSPFSASGGWGRAGHLHPKGRELDPAAPPEGQLLREVRALGVPFVPRTSVDAWLVHSVAAGSADEAHGLLGAAAASSTGGAGASVDGGSQAVQGGGGDPRAARSGPLDAGEEEKAPAEPTAQVPDAGGCASEENGVLREKHEAVDHSSQHEENEERVSAQKENSLQQNDDDENKIAEKPDWEAEKTTESRNEGISLGDIPLPGSISDGMNSSAHYHVNFSQAISQDVNLHEAILLCPNNTFRRDPTARTSQSQEPFLQLNSHTTNPEQTLPGTNLTGFLSPVDNHMRNLTSQDLLYDLDINIFDEINLMSLATEDNFDPIDVSHLFDEPDSDSGLTLDSSHNNTSDIKSNSSHSVCDEGAIGYCTDHESSSHHDLEGAVGGYYPEPSKLCHLDQSDSDFHGDLTFQHVFHNHTYHLQPTAPESTSEPFPWPGGRSQEGLREXDTLKDTDRNLSRDEQRAKALHIPFSVDEIVGMPVDSFNSMLSRYYLTDLQVSLIRDIRRRGKNKVAAQNCRKRKLDIILNLEDDVCNLQAKKETLKREQAQCNKAINIMKQKLHDLYHDIFSRLRDDQGRPVNPNHYALQCTHDGSILIVPKELVASGHKKETQKGKRK

SEQ ID NO: 41670 - protein, 84 aa, Homo sapiens
AYAPTINGFLKVCSHRATPFHVGSEDVNSCPQAWERASPSLRWWTAYLPHSRSSNSHFENFLCLIAFHLTVNSLLAKPLGQSNL

SEQ ID NO: 41671 - protein, 537 aa, Homo sapiens
MKAAHRLTLEGGHLDWRVGHVITGAFSVEGGPEAELHRRGTWLRKLQTEAGHLHCVAPHVYVQPGSRSAAADTGLAHGSPPAVSSCLQHGDGVAGRSKQGPPPGENSDVAQDSSAAPPGEDEGNFLPGGRDELLQVDTDLAQVHTQGLAGPVHTTDSAQVHTQGMAGAPYTLGCKRDLGAGTWDLRLTNSIHQGNGTASLTALHKIITGCAAVCELALGEGLWPGKINPTLPKRKLRHNKSLANSQQGIEYCQHPVPAFQCESCQNQNGDTCLKQNKTKPQPIELGTALTVFPIKPSQKTANTTIVCLVGKSRTYPSSREASVDEKRTQYIKSRRGCPVSPPGWELSPSPRWVAAGSAGHCDGQQALDARVGEKAERVRNCAALPRDFIDQVVLQVANLLLGGKQLNTRSSRNGSLKTWNGGESLSLAEVANELDTETLRRLKRECGGLQTLLRNSHQVFQVVNGRVHIRDWREETLWKTKQPEAKQRLLSEACKTRLCWFFMHHPDGCALSTDCCPFAHGPAELRPPRTTPRKKIS

SEQ ID NO: 41672 - protein, 33 aa, Homo sapiens
  misc_feature (1)...(33): Xaa = X or * as defined in Table 2
MLCLQRFYMIFVDFQSRPQFXLKSCQHIISCHQ

SEQ ID NO: 41673 - protein, 222 aa, Homo sapiens
  DOMAIN (40)..(76): Uricase proteins domain identified by eMATRIX, accession number BL00366E, p-value=2.746e-14, raw score of 21.95
MTEVLEKGMVCAGAALGVGSMENGRPPDPADWAVMDVVNYFRTVGFEEQASAFQEQIEDMEISLPNIHYFNIDMSKMGLINKEEVRGFPCMTLIRTLVTRFGAHLDNLKTRSSRSLMTSAKIFFPRKVTFAGSDSEGMVSVLRPIQPNTPSKRVSVSTTIQGLTEFHITSLRPRDKETLFKVKASCRTCGSGNQDVEIRMVPLAITPSDLPRKSVLPLPPEL

SEQ ID NO: 41674 - protein, 418 aa, Homo sapiens
  DOMAIN (90)..(122): GTP-binding elongation factors proteins domain identified by eMATRIX, accession number BL00301B, p-value=5.500e-31, raw score of 20.09
  DOMAIN (5)..(373): Elongation factor Tu family domain identified by PFam, accession name GTP_EFTU, E-value=5.6e-138, PFam score of 467.7
MGKEKTHINIVVIGHVDSGKSTTTGHLIYKCGGIDKRTIEKFEKEAAEMGKGSFKYAWVLDKLKAERERGITIDISLWKFETSKYYVTIIDAPGHRDFIKNMITGTSQADCAVLIVAAGVGEFEAGISKNGQTREHALLAYTLVAFVPISGWNGDNMLEPSANMPWFKGWKVTRKDGNASGTTLLEALDCILPPTHPTDKPLRLPLQDVYKIGGIGTVPVGRVETGVLKPGMVVTFAPVNVTTEVKSVEMHHEALSEALPGDNVGFNVKNVSVKDVRRGNVAGDSKNDPPMEAAGFTAQVIILNHPGQISTGYAPVLDCHTAHIACKFAELKEKIDRRSGKKLEDGPKFLKSGDAAIVDMVPGKPMCVESFSDYPPLGRFAVRDMRQTVAVGVIKAVDKKAAGAGKVTKSAQKAQKAK

SEQ ID NO: 41675 - protein, 470 aa, Homo sapiens
  DOMAIN (97)..(129): GTP-binding elongation factors proteins domain identified by eMATRIX, accession number BL00301B, p-value=5.500e-31, raw score of 20.09
  DOMAIN (12)..(436): Elongation factor Tu family domain identified by PFam, accession name GTP_EFTU, E-value=1.7e-134, PFam score of 455.9
  misc_feature (1)...(470): Xaa = X or * as defined in Table 2
KLPLKAKMGKEKTHINIVVIGHVDSGKSTTTGHLIYKCGGIDKRTIEKFEKEAAEMGKGSFKYAWVLDKLKAERERGITIDISLWKFETSKYYVTIIDAPGHRDFIKNMITGTSQADCAVLIVAAGVGEFEAGISKNGQTREHALLAYTLGVKQLIVGVNKMDSTEPPYSQKRYEEIVKEVSTYIKKIGYNPDTVAFVPISGWNGDNMLEPSANMPWFKGWKVTRKDGNASGTTLLEALDCILPPTRPTDKPLRLPLQDVYKIGGIGTVPVGRVETGVLKPGMVVTFAPDNVTTEVXSVEMHHEALSEALPGDNVGAFNVKNVSVKDVRRGNVAGDSKNDPPMEAAGFTAQVIILNHPGQISAGYAPVLDCHTAHIACKFAELKKKIDRRFGKKLEDGPKFWKSGDAAIVDMVPGKPMCVESFSDYPPLGPFAVHDMRQTVAGGAHQKQVDKKAAGAGKVTKSAQKAQKG

SEQ ID NO: 41676 - protein, 293 aa, Homo sapiens
  DOMAIN (18)..(82): RNA recognition motif. domain identified by PFam, accession name rrm, E-value=8.2e-14, PFam score of 59.3
MASNVTNKMDPHSMNSRVFIGNLNTLVVKKSDVEAIFSKYGKIAGCSVHKGFAFVQYDKEKNARAAVAGEDGRMIASQVVDINLAAEPKVNRGNAGVKRSAAEMYGSSFDLDYGFQRDYYDGMYSFPARVPPPPPIALAVVPSKRQRLSGNTSRRGKSGFNSKSGKRGSSKSGKLKGDDLQAIKQELTQIKQKVDSLLENLEKIEKEQSKQEVEVKNAKSEEEQSSSSMKKDETHVKMESEGGAEDSAEEGDPLDDDVNEDQGDDQLELIKDDEKEAEEGEDDRDSTNGQDDS

SEQ ID NO: 41677 - protein, 341 aa, Homo sapiens
  misc_feature (1)...(341): Xaa = X or * as defined in Table 2
KETEAQRKRLRRNEPEEQEIRTRKTRSPQTPDQQTYKKGRNERLCGISQPTKEPTRGGFCRFRNPPSNRIFACWGKPAWTACCNSLRARRMLMERNARAAGSRKRMGRMDCWARVLDINLAAEAKSEPEKKAGVKRICKRRCTGSSFDLDYXLFNGDYYDRMYSYPARVPPPPPIARAVVPSKRQRVSGNTSRRGKSGFNSKSGQRGSSKSGKLKGDDLQAIKEELTQIKRKSGFLFLGKTWEKIEKEQSKQAVEMKKXXSQKEEQSSQLRXKKDETXCXRLEVLKGGAEDSAEEGDLLDDDDNEDRGDDQLELIKDDEKEAEEEEDDRDSANGRDDSLST

SEQ ID NO: 41678 - protein, 349 aa, Homo sapiens
  DOMAIN (53)..(120): RNA recognition motif. domain identified by PFam, accession name rrm, E-value=0.088, PFam score of 13.7
  misc_feature (1)...(349): Xaa = X or * as defined in Table 2
ETQNRISSPSPSCEIFLIFSYIFRLCEKPYHQTRSASNVTNKTDPRSMNSRVFIGNLNTLVVKKSDVEAIFSKYGKIVGCSVHKGFALSFSMLMKRNARAAVAGEDGRMIAGQVLDINLAAEPKVNRGKAGVKRSAAEMYGSQXQNTLLRPLYFSSSFDLDYDFQRDYYDRMYSYPARVPPPPPIARAVVPSKRQRVSGNTSRRGKSGFNSKEWNSGVSSKFWKRXKGDDLQAIKEELTQIKQKVDSLLENLEKIEKEQSKQAVEMKNDKSEEEQSSSSLKKDETNLKMESEGGCRLTLPEEGDPLDXXYDEXXRSGGNDPAGSXSKDDEKEAEEGEDDRDSANGEDDS

SEQ ID NO: 41679 - protein, 378 aa, Homo sapiens
  DOMAIN (217)..(263): Negative factor (F-Protein) or Nef. domain identified by eMATRIX, accession number PF00469A, p-value=6.010e-10, raw score of 14.59
  DOMAIN (246)..(378): Reverse transcriptase domain identified by PFam, accession name rvt, E-value=3e-05, PFam score of 4.9
MDRAGPGKSTYRSLVTSTGLATLEQVGCIGKRTTINPTILVPHLVAYGRMAGDKDSFHSVGQLILKDKFITQSAADIRRKVQKPALGTEQNLETLLNLVTSVFYNRDQEEQTKREKQSLEGPLPQRMKDLWTRSAQPDDSATGLRVPGASTSSCHHPHRAPGRVILVKAGAIIYMNVGNKLPICCPLLEEGINSEVWNLEGQFGRAKTPHPVQIRLKDPIAFPYQRQYPLRPEAHKGLQDIVRHLKAQGLVRRCSSPCNTSILGIQKPNGQWRLVQDLRIINEAIIPLYPAVPNPYTLLSQIPEEAEWFTVLDLKDAFFCIPLHSDSQFLFAFEDPTDHTSQLMWMVLPQGFRDSPHLFGQALAQDLGQFSSPGTLVL

SEQ ID NO: 41680 - protein, 214 aa, Homo sapiens
  DOMAIN (13)..(64): Ribosomal protein S3Ae proteins domain identified by eMATRIX, accession number BL01191A, p-value=1.000e-40, raw score of 15.57
  DOMAIN (12)..(172): Ribosomal S3Ae family domain identified by PFam, accession name Ribosomal_S3Ae, E-value=6.1e-89, PFam score of 308.9
MAVGKNKRLTKGGKKGAKKKVVDPFSKKDWYDVKAPAMFSIRNIGKTLVTRTQGTKIASDGLKGRVFETMIEAHVDVKTTDGYLLRLFCVGFTKKRNNQIRKTSYAQHQQVRQIRKKMIEIMTREVQTNDLKEVVNKLIPDSIGKDIEKACQSIYPLHDVFVRKVKMLKKPKFELGKLMELHGEGSSSGKATGDETGAKVERADGYEPPVQESV

SEQ ID NO: 41681 - protein, 167 aa, Homo sapiens
  DOMAIN (68)..(120): Ribosomal protein S3Ae proteins domain identified by eMATRIX, accession number BL01191C, p-value=9.554e-13, raw score of 16.50
SLTLNVQDLPIGYLLSSVLCWVLPKKPQHIRSRKTLLCFSHPTRSRPNPGRKMMEIHDPQRLQTNGLEGSGQLIGFRTTIWKGHRKGLPNLLFLSQRFFVRKVKMLKKPKFELGKLMELHGEGSSSGKATGDETGAKVERADGYGPPVQESVGKFRLQIVANKKCYL

SEQ ID NO: 41682 - protein, 221 aa, Homo sapiens
MAFTLYSLLQAALLCVNAIAVLHEERFLKNSEWDRGARAGAAAESPGARNLMGPREGTPRAGTEEQRKARLGVEAEPFLSSGLGSTAGRIFNRHPLCRAQGVGVEGYRSQSGTPLLAITSGEAELVLQWFEILQFFSICSLQYKLQHSHVIYKPTIRVLCEVQEVITLHTCSEITSKIQRVLTQPFINAVKDKARYYLNCLQTAYCGTLCELISYKRQRIG

SEQ ID NO: 41683 - protein, 118 aa, Homo sapiens
ATMLGLNIISRKWFYKSSEKSLGLRGGLGRPLAFTLYSLLQAALLCVNAIAVLHEERRISSKNICAGGTRTIGIGWIWEKEPGIKSQLMNLIRSVRTEMRVPLIIVNSIAIVLLLLFG

SEQ ID NO: 41684 - protein, 250 aa, Homo sapiens
  DOMAIN (127)..(171): Cytochrome b5 family heme-binding domain proteins. domain identified by eMATRIX, accession number BL00191K, p-value=9.027e- 12, raw score of 17.38
  DOMAIN (119)..(235): Oxidoreductase FAD/NAD-binding domain identified by PFam, accession name oxidored_fad, E-value=4.9e-13, PFam score of 56.7
GLYYRKCQLISKEDVTHDTRLFCLMLPPSTHLQVPIGEHVYLKLPITGTEIVKPYTPVSGSLLSEFKEPVLPNNKYIYFLIKIYPTGLFTPELDRLQIGDFVSVSSPEGNFKISKFQELEDLFLLAAGTGFTPMVKILNYALTDIPSLRKVKLMFFNKTEDDIIWRSQLEKLAFKDKRLDVEFVLSAPISEWNGKQGHISPALLSEFWKRNLDKSKVLVCICGPVPFTEQGVRLLHDLNFSKNEIHSFTA

SEQ ID NO: 41685 - protein, 595 aa, Homo sapiens
  DOMAIN (278)..(321): kw TRANSCRIPTASE REVERSE II ORF2 domain identified by eMATRIX, accession number DM01354T, p-value=7.811e-24, raw score of 9.48
  DOMAIN (151)..(361): Reverse transcriptase domain identified by PFam, accession name rvt, E-value=4e-05, PFam score of 3.1
GTIIGGGCDEVLLVTRTPGRWCGMGGDGGSRRMTSGSQVVHAYVGGGCYGLRRPVSNPADGMCKEVLAVVIAARLVHRWVNYESMLKECLVGRMAIKPAVLKGTEIVKPYTPVSGSLLSEFKEPVLPNNKYIYFLIKIYPTGLFTPELDRLQIGHQQQRPKVDKSTKLRKNLCKKAENANNQNASSPPKDHNSSLAREHNWMDNEFDKLTEVGFRRTDDKNHVMISIDAEKAFNKIQHPFMLKTLKLGIDGTYLKVIRAVYDKPTSDIMLNGQKLEAFPLKTGTRQGYPLSPLLFNIVLQVLARAVRLDVEFVLSAPISEWNGKQGHISPALLSEFLKRNLDKSKVLVCICGPVPFTEQGVSWKNEEHSALNGSSPGWLLSPQLVVQQEALLGSCMWATYFLFLLLCATVKYFHRFRSAKGIKDSHSNSTIIIIHKDRNLAVLDWYCSLVATPAMAERGQHEAQAMASEGESLKPWQLPCDVEHVGAQKSRNGVWEPLSRFQKMYGNAWMPRQKFAAGAGLSWRTSARAVQKGNVGLEPPHRVPTGTPPSGAVRRGPLSSRPQNGRSTYSLYQVPGKAADTQHQPMKAARMEAVP

SEQ ID NO: 41686 - protein, 91 aa, Homo sapiens
MSISFSCFSFSKDKPKARSSSGRDTARRGLAVWPPPGGRWRATAPGFSRETPRCSPTGPGSPPPPAGPRICWSHSGHDLVAIFTFLARVAD

SEQ ID NO: 41687 - protein, 72 aa, Homo sapiens
ICNHKDMIYMQQEPVGRTRGMIWWPSSLSWLELQTCSSPLAAAAATARAPPLTLRQPGKAGPVTGRIVSRNH

SEQ ID NO: 41688 - protein, 33 aa, Homo sapiens
FFFIFCDTVSSSVTQAGVEWSDLGSLQPLLVTI

SEQ ID NO: 41689 - protein, 259 aa, Homo sapiens
MTSGPQTNQPKKHLTNFKSASVFPSVKGAFLIKLAMKVDGVGSHEAPSWCRILASQRSTKIHGVGFVKIHAPWNVLCREAEFLKLKMPTKKMYHINETRGLLKKINSVLQKITDPIQPKVAEHRPQTMKRLSYPFSREKQHLQQSHDTCPLPFGERAEEIIDKEMMANKKMKKLIRYLKLKQQSPPDHEECVKRKQRYEVDYNLEPFAGLTPEYMEMRTSTPNGFGLGRLLAVFPSPPKYSEPAVVMLQMTLPSSSPTA

SEQ ID NO: 41690 - protein, 236 aa, Homo sapiens
  DOMAIN (90)..(186): Gag P30 core shell protein domain identified by PFam, accession name Gag_p30, E-value=9.3e-07, PFam score of 27.1
  misc_feature (1)...(236): Xaa = X or * as defined in Table 2
PNPKCRXVFPVFLFYRPIXPFPSSPASLIARPSXVPILPQPPLLTPYNPPTTSPPHTRSGLQFSSATSSSPPAQQFPLREVAGAEGIVNAHVPFSLSDLSQISQHLGSFSSDPTKYIQEFRYLTLSYNLTWSDLNVILTSTLSPDERERVFPVSQSHVXXPSGFMSQTSRKALEQFPERIPQWNYQANSPGKNFKNXNLALKPHNRNXSTLPSTCTIIERKQPDGNAFLSYNYLPP

SEQ ID NO: 41691 - protein, 113 aa, Homo sapiens
LLLFRSLPAKLNQAPILPWPLPPPPYNPSITSPVHTWFSLQFHSETSPPPPAQQFPLRAVAGTEGIVRMNGKEFFLQPNLTLITAGFKSQTSRKALEQFPERIPNGTIRQIPQ

SEQ ID NO: 41692 - protein, 331 aa, Homo sapiens
  DOMAIN (109)..(208): Gag P30 core shell protein domain identified by PFam, accession name Gag_p30, E-value=6.9e-21, PFam score of 76.7
MGMTVEVRVREMCEDVTELPLKTEEDHQPRNPRSAQRWAQRLAMRARGIRGHDERERVFSLAQSHADNRRLHELDLQEGSRAVPREDPQWNYQADSPGTARRDYMISCLVEGLKKAAYKAGNSDKLRETTRGKDENPAQVMARLAATLTRFTALDPEGPEGRLILNMHFITQSTPDIRKKLQKLESGPQTPQQEFINLAFKVYSNREEAARRQRMSELQLLASAVRQNPATPPAHKNFKMPKPHTPKPQQSSIPTRLPPSGSCFKCQKSGHWAKECPQPRISPKPCPICGRTHWKADCPARPAATPRAPKALAQGCLTDSFSDLLGLATED

SEQ ID NO: 41693 - protein, 374 aa, Homo sapiens
  DOMAIN (133)..(343): Gag P30 core shell protein domain identified by PFam, accession name Gag_p30, E-value=6.6e-29, PFam score of 104.8
TKETRFIHGPKTPAPVTDWEGSLPLVFNHCRDASLIIHSRFKGVRPHRDTCLGPSPLAASPAFLGKGQAAHCQAELSPNSSSASTPPPYNPSITSPPHTRSGLQFSSATSSSPPAQQFPLREVAGAEGIVRVHVPFSLSDLSQISQCLGSFSSDPTKYTQEFQCLTLSYNLTWSDLNVILTSTLSPDEWERVSSLAQSHADNPGFTSQTSRKALEQFPETDPQWNHQANSPGIARRDYMVSCLVEGLKKAAYKAVNYDKLKETTQGEDENPAQVVARLAATLRRFTALDPEGPEGRLILNMHFITQSAPDITKKLQKLESGPQTPQQELINLTFKVHNNGEETDAARSPWKPPGPSRTPSFRACFPCPHNFCGY

SEQ ID NO: 41694 - protein, 104 aa, Homo sapiens
  DOMAIN (2)..(30): Cytochrome C and Quinol oxidase polypeptide domain identified by PFam, accession name COX1, E-value=0.044, PFam score of 10.3
LGNDHIHDVIVTAHAFVIIFFIVIPIIIGGAATAEGVEGRCIHLLQLRRNLREFSGLRTQTCTYIWNERLGPDAHGPGVEGIWPGDAGDAAPVRLLGFDREERA

SEQ ID NO: 41695 - protein, 261 aa, Homo sapiens
  DOMAIN (125)..(176): Heme-copper oxidase catalytic subunit copper B binding regio. domain identified by eMATRIX, accession number BL00077C, p-value= 5.829e-26, raw score of 18.98
  DOMAIN (5)..(261): Cytochrome C and Quinol oxidase polypeptide domain identified by PFam, accession name COX1, E-value=1.1e-68, PFam score of 241.6
  misc_feature (1)...(261): Xaa = X or * as defined in Table 2
MFADRXLFSTTHQSIVPLYLLFGAXAGVLATALSLLIRAELGQPGNLLGNDHIYNVIVTAHAFVIIFFIVIPIIIGGFGNXLVPLIIGAPDMAFPRINNISFXLLPPSLLLLLASAIVEAGAGTRLNKSYPPLAGNYSHPWKPPVDLTIFSLHLAGVSSILGAINFITTIINIKPPAITQYQTPLFVXSTTHQSHRTTIPIYSAHELASSPQPLSLLIRAELGQPGNLLGNDHIYNVIVTAHAFVIIFFIVIPIIIGGFGN

SEQ ID NO: 41696 - protein, 429 aa, Homo sapiens
  DOMAIN (236)..(261): GLYCOSYL HYDROLASE FAMILY 47 SIGNATURE domain identified by eMATRIX, accession number PR00747G, p-value=9.667e-26, raw score of 14.50
  DOMAIN (3)..(312): Glycosyl hydrolase family 47 domain identified by PFam, accession name Glyco_hydro_47, E-value=1.2e-31, PFam score of 118.6
MHLNQLPPILSRLGAVGFFGSMKAHLVSVSRQVRNIRKVLRKIEKPFGLYPNFLSPVSGNWVQLPIPGSVAAGEMPASYPYRHRAPEVRRVCEALPHHVSVGGLGDSFYEYLIKSWLMSGKTDMEAKNMYYEALEAIETYLLNVSPGGLTYIAEWRGGILDHKMGHLACFSGGMIALGAEDAKEEKRAHYRELAAQITKTCHESYARSDTKLGPEAFWFNSGREAVATQLSESYYILRPEVVESYMYLWRQTHNPIYREWGWEVVLALEKYCRTEAGFSGIQDVYSSTPNHDNKQQSFFLAETLNRCLVSACNGPDTGLEARDTAESETVISPAVKGSRGEKAMVRETDKPAKCIGKKSKNGKSDLKAASKMDAQFRSLCFEEVTPLWFEKVLEMNGPASPSVSPGGLSLEVWSLVMWHKDARPSVTNA

SEQ ID NO: 41697 - protein, 193 aa, Homo sapiens; identical to SEQ ID NO: 40634
  DOMAIN (38)..(56): GLYCOSYL HYDROLASE FAMILY 47 SIGNATURE domain identified by eMATRIX, accession number PR00747E, p-value=9.571e-19, raw score of 15.13
  DOMAIN (10)..(172): "Phage" integrase family domain identified by PFam, accession name Phage_integrase, E-value=1.4e-10, PFam score of 48.6

SEQ ID NO: 41698 - protein, 138 aa, Homo sapiens
  DOMAIN (103)..(118): MEALWORM BEETLE B PROTEIN SIGNATURE domain identified by eMATRIX, accession number PR00485B, p-value=9.486e-09, raw score of 11.13
  misc_feature (1)...(138): Xaa = X or * as defined in Table 2
ILSISKLRTSLAGEGSVDTPKASGVTRHIKGPGVAAEMSAFILPLPGXVSPGWEWAASAVLNGLRTTLALRRGVCLIRSRPGTLGLEDGASPRTESLHTGTACKGAVDGSSEVDEKLKRIALDFLGLHGGDDPRSSWH

SEQ ID NO: 41699 - protein, 413 aa, Homo sapiens
  DOMAIN (28)..(46): GLYCOSYL HYDROLASE FAMILY 47 SIGNATURE domain identified by eMATRIX, accession number PR00747E, p-value=9.571e-19, raw score of 15.13
MPASYPYRHRAPEVRRVCEALPHHVSVGGLGDSFYEYLIKSWLMSGKTDMEAKNMYYEALEFPSALRLPRLVHAHVPPAAEGQELGEPWWIIPSELSMFTGYLSNNRFYPPPPKGKEVFRIKAIRLGEKLLPAFNTPTGIPKGVVSFKSRSTGHREHGAAGAQGNGSTMQQEHKVMGARCSRSTEQSSQTTKPSVVTPFTKALKHPGEYKYVVESLTLRREGTGSLGAPLRPTCLTRPFSQVHHINANYFLDITSVKPEEIESNLFSFSSTFEDPSTATYMQFLKEGLRPAGSRSHGAGPGRSNAGRPAPGPAVQPAAPAGRRARSLALIDTLLAGGAGSRVQFCAFHTQGQADHQVVHHIRANYFLDITSVKPEEIESNLFSFSSTFEDPSTATYMQFLKEGLRRGLPLLQP

SEQ ID NO: 41700 - protein, 83 aa, Homo sapiens
MFDHGGTLGRMGAGGVPPAQATSCSPLWIFRALGKEVLSEGLRSCGFLRGAKWPLSVFRMLGTVLSETSFPLSFQFLRSVYFS

SEQ ID NO: 41701 - protein, 183 aa, Homo sapiens
  misc_feature (1)...(183): Xaa = X or * as defined in Table 2
ETETTGEREGSLSNHPSNPTAAGLSLDTMKSHCPNHSSLLSTAASPPKLWRCFKEEHELAVLGAPPKPLLPPTSHRDPTSASVYLRAPTHVVWSLFKHPLSXTPCCMGFIAFAYSVKSRDRKIGCERDPGPIAYASTAKCLNIWALILGLLHDHSGSSSSPVLIVPGLWDRSGGITGGQELCP

SEQ ID NO: 41702 - protein, 386 aa, Homo sapiens
  DOMAIN (41)..(85): Ribosomal protein S2 proteins domain identified by eMATRIX, accession number BL00962D, p-value=7.075e-23, raw score of 22.51
  DOMAIN (2)..(107): Ribosomal protein S2 domain identified by PFam, accession name Ribosomal_S2, E-value=1e-32, PFam score of 119.4
MKNTGQRTVLKFAAATGVRAIAGHFTPGNFTNQIQGAFREPRLLVVTVPRVDQQPLTEASYVNFPTIALCHTASPLRCVNIAIPCNNTEARSVGLMQLLPREVLHMCGTISHEHPWEVMPDLYFYRDPEETEKEEQAAAEKPVTKQEFQGEQTAPAPELTATQPEVADWSDGVRVPSVPIQLFPTEDWSAQPAVEDWEKGFGLKKTCTRTFHPVVKTDPRKIDSENQERVLNTPERTENCYSAKGNVKLQQRILDPEPHSSLPAKTAASESMFFSSSRVFSLIIPEEPQECFSSMQLLRWRGSPDRGTSAAIDTRRRSFQPHDEDPESTASFPYCYISPSIDRIIPQANGFKFELLVNSHHIVHFARAGNRRALDFMCHNLDWKKI

SEQ ID NO: 41703 - protein, 302 aa, Homo sapiens
  DOMAIN (126)..(144): RIBOSOMAL PROTEIN S2 SIGNATURE domain identified by eMATRIX, accession number PR00395D, p-value=7.000e-17, raw score of 13.04
  DOMAIN (26)..(200): Ribosomal protein S2 domain identified by PFam, accession name Ribosomal_S2, E-value=5.3e-80, PFam score of 279.2
LKGKFLSMSGALDVLQMKEEDVLKFLAAGTHLGGTNLDFHMEQYIYKRKSDGIYIIYLMRTWEKLLLAARAIVAIENPADVSAISSRNTGQRAVLKFAAATGATPIAGRFTPGTFTNHIQAAFREPRLLVVTDPRADHQPLTEASYVNLPTIALCNTDSPLRYVDIAIPCNNKGAHSVGLMWWMLAREVLRMRGTISREHPWEVMPDLYFYRDPEEIEKEEQAAAEKAVTKEEFQGEWTAPAPEFTATQPEVADWSEGVQVPSVPIQQFPTEDWSAQPATEDWSAAPTAQATEWVGATTDWS

SEQ ID NO: 41704 - protein, 273 aa, Homo sapiens
  DOMAIN (83)..(135): Ribosomal protein S5 proteins domain identified by eMATRIX, accession number BL00585A, p-value=1.391e-40, raw score of 28.43
  DOMAIN (86)..(223): Ribosomal protein S5 domain identified by PFam, accession name Ribosomal_S5, E-value=1.2e-84, PFam score of 294.6
MADDAGAAGGPGGPGGPEMGNRGGFRGGFGSGIRGQGRGRGRGRGQGRGARGGKAEDKEWMPVTKLGRLESEIIDFFLGASLKDEVLKIMPVQKQTRAGQRTRFKAFVAIGDYNGHVGLGVKCSKEVATAIRGAIILAKLSIVPVRRGYWGNKIGKPHTVPCKVTGCCGSVLVRLIPAPRGTGIVSAPVPKKLLMMAGIDDCYTSARGCTATLGNFTKATFDAISKTYSYLTPDLWKETVFTKSPYQEFTDHLVKTHTRVSVQRTQAPAVATT

SEQ ID NO: 41705 - protein, 344 aa, Homo sapiens; identical to SEQ ID NO: 39820
  DOMAIN (155)..(207): Ribosomal protein S5 proteins domain identified by eMATRIX, accession number BL00585A, p-value=7.300e-35, raw score of 28.43
  DOMAIN (158)..(295): Ribosomal protein S5 domain identified by PFam, accession name Ribosomal_S5, E-value=3e-79, PFam score of 276.7

SEQ ID NO: 41706 - protein, 52 aa, Homo sapiens
  misc_feature (1)...(52): Xaa = X or * as defined in Table 2
XRVFGEQSIGKAPTLSLCKVNRALRLCAGTAFIPGTQGLWHRLRTCGLKSCS

SEQ ID NO: 41707 - protein, 45 aa, Homo sapiens
  misc_feature (1)...(45): Xaa = X or * as defined in Table 2
FFKSTVCSFQKQFQTLPVPIGGSIMYXDISDHRGQRXXNVGPCGH

SEQ ID NO: 41708 - protein, 76 aa, Homo sapiens
  misc_feature (1)...(76): Xaa = X or * as defined in Table 2
TQCVTINYXGMKWGSFGYIVFHKDGCALIDKRFHTFCVSFKGSQIQSSAAFLIPDVQVHQRLQKDFQGLMVPIVGS

SEQ ID NO: 41709 - protein, 258 aa, Homo sapiens
  DOMAIN (209)..(239): Ribosomal protein L1e proteins domain identified by eMATRIX, accession number BL00939C, p-value=6.333e-19, raw score of 15.46
MQSAGLQRGRGGGSGNFMGGRGNFGDGGSNFGCGRNFGGRRGYGGEGGGSRGSYGGGDGGCNGFGGDGGTYDGGPGSSGRGGYGGGGPGYRNQGGRYGGGGYGGYNEGGNFGGGTCGGGGNNNDSGNYSGRQQSNFGSMKGGSFGGRSSDSPYGGGWVGKPCTAKWSGLLVAPESDSSNPLFVLSKSCGDKKQTIVRHCIEEVPELPSVVEGKVEGYKKTQEAVLLHKKLKTWSDIKKIYASQQIRTGKDKMRNHHRI

SEQ ID NO: 41710 - protein, 81 aa, Homo sapiens
  DOMAIN (59)..(75): PRION PROTEIN SIGNATURE domain identified by eMATRIX, accession number PR00341D, p-value=2.427e-09, raw score of 0.26
NQGGGYGGGGGYDGYNEGGNFGGGNYGGGGNYNDFGNYSGQQQSNYGPMKGGSFGGRSSGSPYGGGYGSGGGSGGYGSRRF

SEQ ID NO: 41711 - protein, 205 aa, Homo sapiens
  DOMAIN (62)..(117): Ribosomal protein L1e proteins domain identified by eMATRIX, accession number BL00939A, p-value=1.000e-40, raw score of 11.86
  DOMAIN (30)..(205): Ribosomal protein L4/L1 family domain identified by PFam, accession name Ribosomal_L4, E-value=1.9e-72, PFam score of 254.1
TRELSSSSSAMACARPLISVYSEKGESSGKNVTLPAVFKAPIRPDIVNFVHTNLRKNNRQPYAVSELAGHQTSAESWGTGRAVARIPRVRGGGTHRSGQGAFGNMCRGGRMFAPTKTWRRWHRRVNTTQKRYAICSALAASALPALVMSKGHRIEEVPELPLVVEDKVEGYKKTKEAVLLLKKLKAWNDIKKVYAFASSHSRRRG

SEQ ID NO: 41712 - protein, 163 aa, Homo sapiens
  DOMAIN (141)..(157): PRION PROTEIN SIGNATURE domain identified by eMATRIX, accession number PR00341D, p-value=2.427e-09, raw score of 0.26
RGGGSGNFMGRGGNFGGGGGNFGRGGNFGGRGGYGGGGGGSRGSYGGGDGGYNGFGGDGGNYGGGPGYSSKGGYGGGGPGYGNQGGGYGGGGGYDGYNEGGNFGGGNYGGGGNYNDFGNYSGQQQSNYGPMKGGSFGGRSSGSPYGGGYGSGGGSGGYGTRRF

SEQ ID NO: 41713 - protein, 96 aa, Homo sapiens
  misc_feature (1)...(96): Xaa = X or * as defined in Table 2
DALPRWPSGSGDGGAVREAGQQGTRLERPAAVLIRAADPGRRTQALAGLPRGXPHPRMDPPESFQATGGTQQMTSTAPSWLTMXLRSVSGWXELKD

SEQ ID NO: 41714 - protein, 43 aa, Homo sapiens
  misc_feature (1)...(43): Xaa = X or * as defined in Table 2
XNKERGWNDPPQFSYGLQTQAGGPRRSLLTKRVAAPQDGSPRX

SEQ ID NO: 41715 - protein, 106 aa, Homo sapiens
PLMCQSLPLCGHGSLPMPVPKVSAHPPSVEPQTRLGNLWAPRQRQDHSPTGGDLGALLEGGGGPIGGGPGEVSDAGTEKVQQDQATWLKWVRSLTLNSPLLRRATL

SEQ ID NO: 41716 - protein, 632 aa, Homo sapiens
  DOMAIN (227)..(242): WW DOMAIN SIGNATURE domain identified by eMATRIX, accession number PR00403B, p-value=8.800e-12, raw score of 12.19
  DOMAIN (255)..(563): Phosphotyrosine interaction domain (PTB/PID) domain identified by PFam, accession name PID, E-value=5.1e-83, PFam score of 289.2
MVPRRGHLGDPRLLPPRRMLSPHHSTLLRQLTGAAEETRDILTPEPLQSRFSPELKSGFAGVRGPPPDPHTETRNHSGIQTPVYTHHPWAGCAAQALPRDRPVSRPVSRPVFVRRQLAPQPAAQRGWACRRSSSRGRAGLRVRAGRGWRGAAGVMLGKDYMLAIILVNCDGVHGGARWEDQELREDEGIRKATLGLKDDDLWGDHSLEVEAGLPPGWRKIHDAAGTYYWHVPSGSTQWQRPTWELGDAEDPGTCFAVRSLGWVEVPEEDLAPGKSSIAVNNCIQQLAQTRSRSQPPDGAWGEGQNMLMILKKDAMSLVNPLDHSLIHCQPLVHIRVWGVGSSKGRDFAFVASDKDSCMLKCHVFCCDVPAKAIASALHGLCAQILSERVEVSGDASCCSPDPISPEDLPRQVELLDAVSQAAQKYEALYMGTLPVTKAMGMDVLNEAIGTLTARGDRNAWVPTMLSVSDSLMTAHPIQVPEEGEVGGFGGAEASTEEEPLWQCPVRLVTFIGVGRDPHTFGLIADLGRQSFQCAAFWCQPHAGGLSEAVQAACMVQYQKCLVASAARGKAWGAQARARLRLKRTSSMDSPGGPLPLPLLKGGVGGAGATPRKRGVFSFLDAFRLKPSLLHMP

SEQ ID NO: 41717 - protein, 479 aa, Homo sapiens
  DOMAIN (45)..(60): WW DOMAIN SIGNATURE domain identified by eMATRIX, accession number PR00403B, p-value=8.800e-12, raw score of 12.19
  DOMAIN (119)..(409): Phosphotyrosine interaction domain (PTB/PID) domain identified by PFam, accession name PID, E-value=3.9e-55, PFam score of 196.6
MLGKDYMLAIILVNCDDDLWGDHSLEVEAGLPPGWRKIHDAAGTYYWHVPSGSTQWQRPTWELGDAEDPGTGTEGIWGLRPPKGRSFSSLESSLDRSNSLSWYGGESYIQSMEPGAKCFAVRSLGWVEVPEEDLAPGKSSIAVNNCIQQLAQTRSRSQPPDGAWGEGQNMLMILKKDAMSLVNPLDHSLIHCQPLVHIRVWGVGSSKGRDRDFAFVASDKDSCMLKCHVFRCDVPAKAIASALHGLCAQILSERVETPSLLKDLPRQVELLDAVKQSCSEVRGTVYGDTASHQGHGHGCAERGHWYPHRQGGPECLGSPPCSVCLTLSLTAHPIQAEASTEEEPLWQCPVRLVTFIGVGPRPTHLWASSLTWAVRASSAQPSGASPHAGELSEAVQAACMVQYQKCLVASAARGKAWGAQARARLRLKRTSSMDSPGGSPAPPPAQKEGLAVQGQPPRKRGVFSFLDAFRLKPSLLHMP

SEQ ID NO: 41718 - protein, 152 aa, Homo sapiens
  DOMAIN (3)..(56): Phosphotyrosine interaction domain (PTB/PID) domain identified by PFam, accession name PID, E-value=1e-08, PFam score of 35.4
QKYEALYMGTLPVTKAMGMDVLNEAIGTLTARGDRNAWVPTMLRVSDSLMTAHPIQVQYQKCLVASAARGKAWGAQARARLRLKRTSSMDSPGGPLPLPLLKGGVGGAGATPRKRGSCRRSPQRLPTVVNQHPFSTDSGNPPGPGTCLNWPA

SEQ ID NO: 41719 - protein, 43 aa, Homo sapiens
  misc_feature (1)...(43): Xaa = X or * as defined in Table 2
MMFGGEEIECVQSTKSGLTRPEPTXTLLFLFVFRAARAEGCKS

SEQ ID NO: 41720 - protein, 38 aa, Homo sapiens
  misc_feature (1)...(38): Xaa = X or * as defined in Table 2
TRALSKFGSSRVEQSXAGYSGPGTPXEGGSGILGETVC

SEQ ID NO: 41721 - protein, 283 aa, Homo sapiens
  DOMAIN (210)..(231): PROSTAGLANDIN D RECEPTOR SIGNATURE domain identified by eMATRIX, accession number PR00854H, p-value=4.387e-09, raw score of 14.71
KPTQPPKPKKPRLRKPAGTEPFPPNVCFKPTEAQLSGCRSGQRVGIPGAPWTLSRRAKPAPAGPANRRPAGRGRRGREGETLIPRALPSKCSPFQRLLPIGKRTHNNIFRKVFPHNSRAEVLTAMEGGAFGRVSAAPTGYGSIPQDCPHFRFQCQIWASCMSEQSAINLYIRALHHPLLMLRLKATLIQDSPNPISEIELFWVSPISQSQPGFRCIFSRPFIPVLRYRKRPFNSENAKKAPDCLIKLLNQMQLFRLNKLERFQNLVLQELSSLKQDIQALDTP

SEQ ID NO: 41722 - protein, 144 aa, Homo sapiens
  DOMAIN (60)..(112): Ribosomal protein S3Ae proteins domain identified by eMATRIX, accession number BL01191C, p-value=1.000e-33, raw score of 16.50
  DOMAIN (12)..(102): Ribosomal S3Ae family domain identified by PFam, accession name Ribosomal_S3Ae, E-value=0.00048, PFam score of -31.3
  misc_feature (1)...(144): Xaa = X or * as defined in Table 2
MTVSKNKCHTKGGKKGTEKKVVASFSKIYWYNVKAPAMFSIRNIGKALVIGTHGTDFVSDGFKGGLIEIPDSIGKDKEKACRSIYPLHDVFVRKVKMLKKPKFELGKLMELHGEGRSSGKATGNESGAKVEXADGYGSPAQKSF

SEQ ID NO: 41723 - protein, 214 aa, Homo sapiens; identical to SEQ ID NO: 41680
  DOMAIN (13)..(64): Ribosomal protein S3Ae proteins domain identified by eMATRIX, accession number BL01191A, p-value=1.000e-40, raw score of 15.57
  DOMAIN (12)..(172): Ribosomal S3Ae family domain identified by PFam, accession name Ribosomal_S3Ae, E-value=6.1e-89, PFam score of 308.9

SEQ ID NO: 41724 - protein, 91 aa, Homo sapiens
  DOMAIN (7)..(59): Ribosomal protein S3Ae proteins domain identified by eMATRIX, accession number BL01191C, p-value=8.096e-38, raw score of 16.50
ELGLLEKNLLLLVCRIPDSIGKDIEKACQSIYPLHDVFVRKVKMLKKPKFELGKLMELHGEGSSSGKATGDETGAKVERADGYEPPVQESV

SEQ ID NO: 41725 - protein, 146 aa, Homo sapiens
MLKKPKFELGKLMELHGEGSSTGKATGDETVPATGGDASSSSSGAAATKNAGCSREGVAGSVRSKESATGGSPDHFPKLPLFALLTLQLSVYLILSGRGTRTRDPPNGGTRRAVTQTVLKHPFLPPTHHAAGDKDGRALTLWGVQT

SEQ ID NO: 41726 - protein, 119 aa, Homo sapiens
MVKKMARPMDWKASPLMSKDLPDGLPCPPPVPVLGFTLKNRPTIQDTGRPLLMPQPPNQVPPKFREEDGWEIHDPREGAGQIDLKRSGSINLIPRQPLEKDNRKGLAQSYLSLSHDVLR

SEQ ID NO: 41727 - protein, 46 aa, Homo sapiens
  misc_feature (1)...(46): Xaa = X or * as defined in Table 2
AQGQRQETIQGGRSLSRTLYLXGRSGTSLSQKLAQLSSLTGDSTPL

SEQ ID NO: 41728 - protein, 53 aa, Homo sapiens
  misc_feature (1)...(53): Xaa = X or * as defined in Table 2
VLQLLKVAHPELFIPPGGFVFSLTSGVKLHTXALQLLKVAHPELLIPPGSWSH

SEQ ID NO: 41729 - protein, 676 aa, Homo sapiens
MRARQNGCSFCFPPPSLVALAPSQHKLERPSGARVGFTSLQEGIVHAEWTSGLGLRRSGRDFCYINCERLMEWELLSEACPDFSEFQSKEHQHHILREQGPKCLIMGTSSQAASHTAQTRPAHTYKYPNLYEAVGTGIKLVPHLCEPAATEHAEGEHTVGEQPSGEQPSGEHLSGEQPLSELESGEQPSDEQPSGEHGSGEQPSGEQASGEQPSGEHASGEQASGAPISSTSTGTILNCYTCAYMNDQGKCLRGEGTCITQNSQQCMLKKIFEEMSFSYFYMQTFIHHHSENINDTYHELQKDDSNINCVQRDYVIMDMDEAGNHHSQQTIARTKNQTLRVVTHRAPSPIDHPRAEECERTAWDWQAAPPAAPVRDPLGEASWAPESGGDVENLYVLLRDCKYTNQHPVFSSSFVSAPIDTLYLAALACCYVHPIASTMVTISTTDRRNNKLIFKVNLLEMDDKILVDFRLSKPGRSGVWHYSVLLDPLHISPTINEAEMWGDGVQGLWSVGDGEEVRLLSVGHYSGYGSDDNPCGKAPKGLALWKSFLSLDSGETPTGECVKGSFCPQPGSSSVQTLQPALICTLKQTVLAFPEHLAAWFQPPCCVFLTSQTEMDKFPLMLLLLGVFPLVFFQGVSEGLGWLGQEVRTGAKIAGEQAEDDLASTGGGQHQDSGMI

SEQ ID NO: 41730 - protein, 131 aa, Homo sapiens
  misc_feature (1)...(131): Xaa = X or * as defined in Table 2
SLMGTSTSSALGMHVPRAITRDVLSAPVIVSGNTAKFCTMLGHFLKKTRTERRDIQAPXSFISLPPKSTWEKLSSAAMVSTLRXGASDQKCXLLGGNDRVSLIVIQVEGPLQDPGTLGRLLQSLTVKRISV

SEQ ID NO: 41731 - protein, 178 aa, Homo sapiens
MGKKQNRKTGNSKTQSASPPPKERSSSPATEQSWMENDFDELREEGFRGSNYSELREDIQTKGKEVENFEKNLEECITRITNTEKCLKELMELKTKARELREECRSLRSRCDQLEERVSAMEDEMNEMKDMDEAGNHHSQQTNTGTENQTLHALTHKWDLNDENIWTQREEHHTPGPV

SEQ ID NO: 41732 - protein, 394 aa, Homo sapiens
  DOMAIN (197)..(252): Sialyltransferase family domain identified by eMATRIX, accession number PF00777C, p-value=7.968e-37, raw score of 18.60
  DOMAIN (141)..(393): Sialyltransferase family domain identified by PFam, accession name Sialyltransf, E-value=4.3e-30, PFam score of 113.4
EYFRLALSKLQSCDLFDEFDKDMDEAGNYHSQQTNTGTENQTLHVLTHKWEHCPWGHPNQYSNPAGLSSENISNFNNTLRYHIAGISKTAASREEANGVSIDHVQPPSGLIINKESEVYKMLQEKQELNEPLKQSTSFLILQEILESEIKGDLNNPQDSEVLLSSVYYSVAASIGNAQKVPMCDKCGPGIVGIIPCKKCVVVGNGGVLKNKTLGEKIDSYDVIIRMNNGPVLGHEEEVGRRTTFRLFYPESVFSDPIHNDPNTTVILTAFKPHDLRWLLELLMGDKINTNGFWKKPALNLIYKPYQIRILDPFIIRTAAYELLHFPKVFPKNQKPKHPTTGIIAITLAFYICHEVHLAGFKYNFSDLKSPLHYYGNATMSLMNKVTMQSQGKGV

SEQ ID NO: 41733 - protein, 85 aa, Homo sapiens
  DOMAIN (14)..(41): Protamine P1 proteins domain identified by eMATRIX, accession number BL00048, p-value=1.000e-10, raw score of 6.39
  misc_feature (1)...(85): Xaa = X or * as defined in Table 2
QVDGCIPELKVXFXKKRGRRGRRGRRRRRRGRRREEGGGGGGGSFWRTHHTKPKDQHKKDTMGHFRSCAFQEGFVVHVPLLSSEK

SEQ ID NO: 41734 - protein, 46 aa, Homo sapiens; identical to SEQ ID NO: 41727
  misc_feature (1)...(46): Xaa = X or * as defined in Table 2

SEQ ID NO: 41735 - protein, 522 aa, Homo sapiens
  DOMAIN (24)..(70): kw TRANSCRIPTASE REVERSE II ORF2 domain identified by eMATRIX, accession number DM01354O, p-value=1.000e-40, raw score of 8.73
  DOMAIN (59)..(332): Reverse transcriptase domain identified by PFam, accession name rvt, E-value=4.9e-83, PFam score of 289.3
IREEVESLKRPITGSEIEAIINSLPTRKSPEPDGFTAEFYQRYNEELVPFLLKLFQSTEKEGILPNSFYEASIILTPKPGRDITKKGNFRPISLMNIDAKILNKILTNRIQQHIKKLIHHDQVGFIPGMQGWFNVQKSINIIQHINRTKDKNHMIISIDAEKAFDKIQQPFMLKTLNQLGIDGTYLKIIRAICDKPTANIILNGQKLEAFLFKTGIRQGCPLSPLLFNIVLEVLARAIRQKKGIKGIQLGKEEVKLSLFADDMIVCLENPKVSAQNLLKLISNFSKVSGYKINVQKSQAFFYTNNRQTESQIMSELPFTIASKRIKYLGIQLTRDVKDLFKENYKPLLNEIKEDTNKWKNIPCSWVGRINIVKMAILPKVIYRFNAIPIKLPMTFFTELEKTTLKFIWNQKRAHIAKSILSQKNKAGGITLPDFKLYYQATVTKTARDMDEAGNHHSQQTITRTENQTPHVLTHRDLVPCIPAAPAMAKRWQGTAQAMASEDASPKPWQLQCDIEPAGAQKS

SEQ ID NO: 41736 - protein, 71 aa, Homo sapiens
  misc_feature (1)...(71): Xaa = X or * as defined in Table 2
VIGIWALALGILARPQRGFHVVHLQDVGGAAAXAAKGLLRNVVRXXVDQVQVSGAQGIAGVVVTVGGEEDF

SEQ ID NO: 41737 - protein, 225 aa, Homo sapiens
  DOMAIN (51)..(90): DEAD-box subfamily ATP-dependent helicases proteins domain identified by eMATRIX, accession number BL00039A, p-value=7.333e- 25, raw score of 18.44
  DOMAIN (45)..(169): DEAD/DEAH box helicase domain identified by PFam, accession name DEAD, E-value=4.3e-28, PFam score of 91.7
MSASQDSRSRDNGPDGMEPECVIESNWNEIVDSFDDMNLSESLLRDIYAYGFEKPSAIQQQAILPCIRGYNVIAQARSGTGKMATFAISILQQIELDLKATQALVLAPTRELAQQIQKVVMALVDYMGASCHACVRGTNMRAEVQKLQMEAPHIIVGTPSRVFDMLYRKIPGPPNPSGCWNRSRVDRFGRKGVAINMVTEEDKRTLRDIETFYNTSIEEMPLNVA

SEQ ID NO: 41738 - protein, 103 aa, Homo sapiens
  DOMAIN (2)..(102): Fumarylacetoacetate (FAA) hydrolase fam domain identified by PFam, accession name FAA_hydrolase, E-value=8.4e-07, PFam score of -5.6
VHGRASSLGVGTPIPKGHGQIKPDRLKPPVYGACKLLDMELEMAFFVGPGNRLGEPIPISKAHEPIFGMVLMNAWSARHIQKWEYVPLGPFLGKSFGTPVKSS

SEQ ID NO: 41739 - protein, 440 aa, Homo sapiens
  DOMAIN (145)..(371): Fumarylacetoacetate (FAA) hydrolase fam domain identified by PFam, accession name FAA_hydrolase, E-value=5.4e-65, PFam score of 229.3
MSFIPVAEDSDFPIHNLPYGVFSTRGDPRPRIGVAIGDQILDLSIIKHLFTGPVLSKHQDVFNQPTLNSFMGLGQAAWKEARVFLQNLLSVSQARLRDDTELRKCAFISQASATMHLPATIGDYTDFYSSRQHATNVGIMFRDKENALMPNWLHLPVGYHGRASSVVVSGTPIRRPMGQMKPDDSKPPVYGACKLLDMELEMAFFVGPGNRLGEPIPISKAHEHIFGMVLMNDWSARDIQKWEYVPLGPFLGEEFWGHCLLPWVVPMDALMPFAVPNPKQGPRGPCRYLCHDEPYTFDINLSVNLKGEGMSQAATICKVQILKYMYWTMLQQAHSPTLSNGCNLRPGDLLGFLGPISGPGAQKNFGSMLELSWKGTKPIDLGNGQTRKFLLDGDEVIITAMATRDFKWYSQGDGYRIGFGQCAGKVLPALLPIMRFFLLF

SEQ ID NO: 41740 - protein, 54 aa, Homo sapiens
  DOMAIN (4)..(12): Helicases conserved C-terminal domain proteins domain identified by eMATRIX, accession number PF00271, p-value=1.000e-08, raw score of 7.99
  misc_feature (1)...(54): Xaa = X or * as defined in Table 2
XENYIHRIGRGGRFGRKGVAINMVTEEDKRTLRDIETFYNTSIEEMPLNVADLI

SEQ ID NO: 41741 - protein, 87 aa, Homo sapiens
  misc_feature (1)...(87): Xaa = X or * as defined in Table 2
MEYYAAIKKDEFMSFVRIWMKLETIILSKLSQGQKTKHRRFSLIDGIHHRSFTRTENSSQRTGRKCWNXXPTCGLARSWFGKTWSGN

SEQ ID NO: 41742 - protein, 52 aa, Homo sapiens
WMKLETIILSKLSQGQKIKHCMFSLGTKMLSTRHPHYLSFQMLTALVPLSAI

SEQ ID NO: 41743 - protein, 52 aa, Homo sapiens
  misc_feature (1)...(52): Xaa = X or * as defined in Table 2
CLHRXGRGSPRPGPGGGSTGGAGPGAGPSLAPPLPAQNAEGLGGRRRGNKYL

SEQ ID NO: 41744 - protein, 124 aa, Homo sapiens; identical to SEQ ID NO: 41457

SEQ ID NO: 41745 - protein, 43 aa, Homo sapiens
  misc_feature (1)...(43): Xaa = X or * as defined in Table 2
SQQGLYAKPTSSQALXGDGQASAEMGRILSYEXEHAVFGFSSL

SEQ ID NO: 41746 - protein, 139 aa, Homo sapiens; identical to SEQ ID NO: 41471

SEQ ID NO: 41747 - protein, 111 aa, Homo sapiens; identical to SEQ ID NO: 34996

SEQ ID NO: 41748 - protein, 89 aa, Homo sapiens; identical to SEQ ID NO: 41461

SEQ ID NO: 41749 - protein, 187 aa, Homo sapiens
  DOMAIN (27)..(47): w T-CELL IG HEAVY ALPHA domain identified by eMATRIX, accession number DM00202D, p-value=8.971e-09, raw score of 15.89
MFAPLELDGGCSSTDSLRGSSLACPPLEGTKQPLFSRLIGLAILENPWNHYQRRRGPGGYQMAVGLANSSGYATEMAKALYRPRSHLPELSLAFFYEHNAEEPLLSFEPFQHLRHRMGKWKSWEEEAIMEALKLKRDMDEAGNHHSQQTNTRTGNQTLHVLTPKWELNNKNTWTQGEEHHTPGPVGG

SEQ ID NO: 41750 - protein, 88 aa, Homo sapiens
MEYYAAIKNDEFMSFVGTWMKLETIILSKLLQGQKTKHCMFSLIARDIQKWEYVPLGPFLGKSFGTTVSPWVVPMDALMPFAVPNPKQ

SEQ ID NO: 41751 - protein, 53 aa, Homo sapiens
FRVLCRDMDEAGNHHSQQTIARTENRTPHVLTHRAGHQASSSTSSIWELVRNA

SEQ ID NO: 41752 - protein, 103 aa, Homo sapiens
  DOMAIN (86)..(97): Extracellular link domain identified by PFam, accession name Xlink, E-value=0.01, PFam score of 7.6
MEYYAATKNDEVMSFVGHDEAGNHHSQQTNTRTENQTPHVLTHKWELSNDRSYPYDYRRNHTVLDLRKSQPIPALKSSARCQTNDDDRESRHDVYCITYQQRL

SEQ ID NO: 41753 - protein, 246 aa, Homo sapiens
MDEAGNHHSEQTITGTENQTPDVLTHSLVAAAVTERGALAGAGGGKGSANREPRAGWRETRGEEPARALGAGLFPGRGRRTSHGEEVEGCGGNGAGLLRPRGQRGEPQTQPERQPGQVCRVVEKVKFQAGVHQTLGTPVAADADSTLASTNAIITLISRYQPQIITPCADKWATERVYGNSSEYVESTVLPSHSCDALEHVAAYVAAPLNIDQTRAGFYPMENSDSLLKSPSIYVMSFDDRMTYSL

SEQ ID NO: 41754 - protein, 676 aa, Homo sapiens; identical to SEQ ID NO: 41729

SEQ ID NO: 41755 - protein, 335 aa, Homo sapiens
  DOMAIN (71)..(82): RNase H domain identified by eMATRIX, accession number PF00075D, p-value=6.357e-10, raw score of 10.71
  misc_feature (1)...(335): Xaa = X or * as defined in Table 2
LKDAVFSIRISPESQKLFAFQWEDPESGVTTQYTWTQLTQGFENSPTIFGEALARDLQKFPAKDLGCILLLYMDDLLLGHSTAVRCAKGMDALLQHLEDCGYKVSKKKAQICRQQVTKWGDWERFEWEPLQQQAFCKLKEKFMSAPALGLPDLTKPFTLYVSEREKTAVGVLIQTVGPWPTPVAYLSKQLDGVSKGWPPCLRALAATALLAQEADKLTLVQNLNIKAPHAVGTSAQKPELIALTRALELSEGTWMKLETIILSKLSQGQKDQTLHVLTGISRSTXACSCLASLQVGLETGSQLSLENPLRVGIQRRRCFTCAVDGEGFLLGVPMA

SEQ ID NO: 41756 - protein, 67 aa, Homo sapiens
  misc_feature (1)...(67): Xaa = X or * as defined in Table 2
KRRNHQILEIRSHLQSVEDNLKSGLGSTASLXMSWTQPRNGAEVGFLLILGYIKETPRNAETPSMVL

SEQ ID NO: 41757 - protein, 208 aa, Homo sapiens
  DOMAIN (37)..(76): kw TRANSCRIPTASE REVERSE II ORF2 domain identified by eMATRIX, accession number DM01354X, p-value=7.043e-17, raw score of 13.86
MRLLHLICITIILFSESLFSQAVRINSYRRKEGCQIGKKRGTMVPSQQELEKTTLNFIWNQKRARIAKTVLSKKNKAGGIMLPDFKLHYKDTVTKTAGDMDEAGNHHSQQTNAGTENQTLHVLTLRQCFEKKQKILANVQLQGICGPSSCALRSIAMFVPRLGFPLAALHGAGMRRQALYWGTEDCADHDSGLRTHGLSEPSLDCTVA

SEQ ID NO: 41758 - protein, 42 aa, Homo sapiens
  misc_feature (1)...(42): Xaa = X or * as defined in Table 2
VEEEQGHSFRNARXIISWXRNENGLDRMDCSCRNGERDKGHG

SEQ ID NO: 41759 - protein, 487 aa, Homo sapiens
  misc_feature (1)...(487): Xaa = X or * as defined in Table 2
MADPPWSSVQVNKYDSGLLSSVSAEPLASSASSHPGMSDNAPASLESGSSSTPTNCSTSSAIPQPGAATKPWRSKSLSVKHSATVSMLSVKPPGPEAPRPTPEAMKPAPNNQKSMLEKLKLFNSKGGSKAGEGPGSRDTSCERLETLPSFEESEELEAASRMLTTVGPASSSPKIALKGIAQRTFSRALTNKKSSLKGNEKEKEKQQREKDKEKSKDLAKRASVTERLDLKEEPKEDPSGAAVPEMPKKSSKIASFIPKGGKLNSAKKEPMAPSHSGIPKPGMKSMPGKSPSAPAPSKEGERSRSGKLSSGLPQQKPQLDGRHSSSSSSLASSEGKGPGGTTLNHSISSQTVSGSVGTTQTTGSNTVSVQLPQPQQQYNHPNTATVAPFXEGFHLPXHAXVITFXTANYASSDNDLNVGYTHXLTASEFFQSRLSSLGEVAGLHAHTCXAXLGSNIPFSVRLRPVPAASAEDLRGHQGLIKDRAQVS

SEQ ID NO: 41760 - protein, 109 aa, Homo sapiens
  misc_feature (1)...(109): Xaa = X or * as defined in Table 2
LLLMGLKHNVLKLPRGPMVTLRESVWETLNFLKXSFVXLNMLIFKKSSXRLQXVRFHFLCPRVLIVQLPFMSENMRCLVFCSCVSLLRMMVSSFIHVPFFKVLSFFALG

SEQ ID NO: 41761 - protein, 271 aa, Homo sapiens
  DOMAIN (52)..(97): kw TRANSCRIPTASE REVERSE II ORF2 domain identified by eMATRIX, accession number DM01354N, p-value=1.000e-40, raw score of 13.17
MEYYAAMKDEFMSFAGTWMKLETIILSKLSQGQKAKHRMFSLIEIQTTIREYYKHLYANELENLEEMDKFLDTYTLPRLNQEEVESLNRSITGSEIEAMINSLPTKKSPGPDGFTAKFYQSPSLTGKNDKEPEILPYFHADFLVVPGTHQASPVLMVLGHKSFPHRNSPPSVCMANFFTQKPPSQSIHNAVNTHTDPPLFLVLLKDRGLLVIWCHESQGDELWHLVLLDSKCCFGSMTHRMEWSGPSAAGLLEFAGGPLQTLFAWVSPAEA

SEQ ID NO: 41762 - protein, 149 aa, Homo sapiens
  DOMAIN (35)..(51): Calcium-binding EGF-like domain proteins pattern proteins domain identified by eMATRIX, accession number BL01187B, p-value= 2.000e-12, raw score of 12.04
  DOMAIN (22)..(57): EGF-like domain identified by PFam, accession name EGF, E- value=0.054, PFam score of 20.1
MAREAPLKWRPLPEPEGKHDECGSGQHNCDENAICTNTVQGHSCTCKPGYVGNGTICRAILPGLLALVDRTFLVTLGGTQPGFLLLVYQLAREIPQVMTACASCPSQEIPQEIPQEIPQVMTACASCPSQEIPQVMTACASCPSQEIPQ

SEQ ID NO: 41763 - protein, 24 aa, Homo sapiens
NIPNQGVERPLQRKVQNTTERNHR

SEQ ID NO: 41764 - protein, 414 aa, Homo sapiens
  DOMAIN (51)..(90): DEAD-box subfamily ATP-dependent helicases proteins domain identified by eMATRIX, accession number BL00039A, p-value=7.333e- 25, raw score of 18.44
  DOMAIN (45)..(243): DEAD/DEAH box helicase domain identified by PFam, accession name DEAD, E-value=8.3e-45, PFam score of 144.6
  misc_feature (1)...(414): Xaa = X or * as defined in Table 2
MSASQDSRSRDNGPDGMEPECVIESNWNEIVDSFDDMNLSESLLRDIYAYGFEKPSAIQQQAILPCIRGYNVIAQARSGTGKMATFAISILQQIELDLKATQALVLAPTRELAQQIQKVVMALVDYMGASCHACVRGTNMRAEVQKLQMEAPHIIVGTPSRVFDMLYRRYLAPKSIRMLVLNEADEMLSRGFKGQIYDISKRLNSTTKVVLLSATMPFDVLEVTKKFMRGPHIRILVKKEELPLEGIRHFYINVEPEEFNLDTLCDWYEPXPITQAVIFHQPPGGKVDWLSPEKMHARDSTVPPMHGDMTKKERDVIMREFRSGSXPEFXITPLTLPGQRPLMCQPGFLXSFKLMTLPPPTRGKLLIHRNRSRVDRFGRKGVAINMVTEEDKRTLRDIETFYNTSIEEMPLNVA

SEQ ID NO: 41765 - protein, 133 aa, Homo sapiens
  misc_feature (1)...(133): Xaa = X or * as defined in Table 2
KSRGRGLPYTMDAFMLGMGMLKYPNFVATXARGYPGFAPSYGYQFPGFPAAAYGPVAAAAVAAARGSGSNPARPGGFPGANSPGPVADLYGPASQDSGVGNYISAASPQPGSGFRHTGIAGPLIATAFTNGYH

SEQ ID NO: 41766 - protein, 87 aa, Homo sapiens
ICSFSVADLYGPASQDSGVGNYISAASPQPGSGFGHGIAVSTCLPLPSCLLLPDQLLVACGCARKAQHRGQRRGQRVPINITPAPEG

SEQ ID NO: 41767 - protein, 143 aa, Homo sapiens
  DOMAIN (63)..(117): Tubulin subunits alpha beta, and gamma proteins. domain identified by eMATRIX, accession number BL00227F, p-value=1.000e- 40, raw score of 21.16
  DOMAIN (1)..(114): Tubulin/FtsZ family domain identified by PFam, accession name tubulin, E-value=7.8e-67, PFam score of 235.5
RGDVVPKDVNAAIATIKTKRTIQFVDWCPTGFKVGINYQPPTVVPGGDLAKVQRAVCMLSNTTAVAEAWARLDHKFDLMYAKRAFVHWYVGEGMEEGEFSEAREDMAALEKDYEEVGADSAAGVNLYTPLSWNCLIFCKCLLP

SEQ ID NO: 41768 - protein, 278 aa, Homo sapiens
  DOMAIN (6)..(60): Tubulin subunits alpha beta, and gamma proteins. domain identified by eMATRIX, accession number BL00227F, p-value=6.657e- 32, raw score of 21.16
  DOMAIN (1)..(57): Tubulin/FtsZ family domain identified by PFam, accession name tubulin, E-value=1.9e-25, PFam score of 98.0
MLNNTTAVAEAWAHLDQNFDLMYAKHAFVHWYVGEGMEEEEFSGAPEDMAALEKDYEEVGADSAEGKDESEEQPELIRRETLGIRKFHVKEKGARALAYPSHQSLAEGCSWRVLSSHPFLPAIYTDRADVNSLWKLLGWKMADTICQLEVCQSAPKRIIGISCGRQRSPTVRQNLSEGIHEDTALTLQETGRGRKKPQKTKTHGKNTGNTHRTKGARTVQGAPPTDGDAEQQHGKKKGRDHTQTHRRGHPSNLQAPNKFNFYSNLHQEVAQSTFQYSH

SEQ ID NO: 41769 - protein, 122 aa, Homo sapiens
  DOMAIN (34)..(88): Tubulin subunits alpha beta, and gamma proteins. domain identified by eMATRIX, accession number BL00227F, p-value=2.358e- 22, raw score of 21.16
  DOMAIN (42)..(85): Tubulin/FtsZ family domain identified by PFam, accession name tubulin, E-value=6e-18, PFam score of 73.0
VNQLTTLKSLHLSKIFLFSASFSVGSMGSISYKCIHNQPDDNLDQNFDLMYAKHAFVHWYVGEGMEEEEFSEAPEDMAALEKDYEEVGADSVSWSSSICFKYLLCSSQHLLGTWWVTYALKF

SEQ ID NO: 41770 - protein, 340 aa, Homo sapiens
  DOMAIN (61)..(116): Tubulin subunits alpha beta, and gamma proteins. domain identified by eMATRIX, accession number BL00227B, p-value=1.000e- 40, raw score of 19.29
  DOMAIN (10)..(329): Tubulin/FtsZ family domain identified by PFam, accession name tubulin, E-value=6.5e-161, PFam score of 548.0
MARTRKAELARECISIHVGQAGVQIGNACWELYCLEHGIQPDGQMPSDKTIGGGDDSFNTFFSETGAGKHVPRAVFVDLEPTVIDEVRTGTYRQLFHPEQLITGKEDAANNYARGHYTIGKEIIDLVLDRIRKLADQCTGLQGFLVFHSFGGGTGSGFTSLLMERLSVDYGKKSKLEFSIYPAPQVSTAVVEPYNSILTTHTTLEHSDCAFMMFNAAHFQHSKPKRTHSKFVELVPQLGFKGWPFNYPAFPLWLPGRRPGPTVTREAVCNAEPNTNKLVARGLGSPWTHKFDLMYAKRAFVHWYVGEGMEEGEFSEAREDMAALEKDYEEVGADSADRRG

SEQ ID NO: 41771 - protein, 57 aa, Homo sapiens; identical to SEQ ID NO: 39783
  DOMAIN (18)..(42): Ribosomal protein S26e proteins domain identified by eMATRIX, accession number BL00733C, p-value=6.940e-24, raw score of 10.40
  DOMAIN (2)..(55): Ribosomal protein S26e domain identified by PFam, accession name Ribosomal_S26e, E-value=0.072, PFam score of 5.0

SEQ ID NO: 41772 - protein, 154 aa, Homo sapiens
  DOMAIN (17)..(60): Ribosomal protein S26e proteins domain identified by eMATRIX, accession number BL00733A, p-value=1.000e-40, raw score of 11.62
  DOMAIN (17)..(137): Ribosomal protein S26e domain identified by PFam, accession name Ribosomal_S26e, E-value=1.4e-52, PFam score of 188.1
VAVLEARLLSPVRASKMTKKRRNNGRAKKGRGHVQPIRCTNCARCVPKDKAIKKFVIRNIVEAAAVRDISEASVFDAYVLPKLYVKLHYCVSCAIHSNVVMESISVKARKDRTPPPRFRPGGCWPHVPPPKPNVRELEFFKDLKDRLISSWEEK

SEQ ID NO: 41773 - protein, 76 aa, Homo sapiens
MNSVGEACTDMKREYDQCFNRWFAEKFLKGDSSGDPCTDLFKRYQQCVQKAIKEKEIPIEGLEFMGHGKEKPENSS

SEQ ID NO: 41774 - protein, 78 aa, Homo sapiens
  misc_feature (1)...(78): Xaa = X or * as defined in Table 2
MIQLILQFWYLFSMLLKPVQQCQHCSQITPSGTMPTSETGYGRGPTKWEFHVQWCGRNKAGGWLYLHMRXAGQRFGNL

SEQ ID NO: 41775 - protein, 182 aa, Homo sapiens
KISNNITLREDHLDTVLAVLEDSSRDIREALHELLCCTNVSTKEGIHLALVELLKNLTKYPTDRDSIWKCLKFLGSRHPTLVLPLVPELLSTHPFFDTAEPDMDDPAYIAVLVLIFNAAKTCPTMPALFSDHTFRHYAYLRDSLSHLVPALRLPGRKLVSSAVSPSIIPQEDPSPAVPAAEP

SEQ ID NO: 41776 - protein, 418 aa, Homo sapiens; identical to SEQ ID NO: 41674
  DOMAIN (90)..(122): GTP-binding elongation factors proteins domain identified by eMATRIX, accession number BL00301B, p-value=5.500e-31, raw score of 20.09
  DOMAIN (5)..(373): Elongation factor Tu family domain identified by PFam, accession name GTP_EFTU, E-value=5.6e-138, PFam score of 467.7

SEQ ID NO: 41777 - protein, 462 aa, Homo sapiens
  DOMAIN (113)..(145): GTP-binding elongation factors proteins domain identified by eMATRIX, accession number BL00301B, p-value=7.158e-27, raw score of 20.09
  DOMAIN (28)..(417): Elongation factor Tu family domain identified by PFam, accession name GTP_EFTU, E-value=7.9e-128, PFam score of 433.5
MDIKKGITDISASLRVESGWEARTRKEKTHINTVIIGHVDSGKSTTTGHLIYKCGGVDKRTIEKFEKEAAEMGKCSFKYAWVLDKLKAEREHGITIDISLWKFETSKYYVTIIDAPGHRDLIKNMITGTSQADCAVLIVAAGFGEFEAGISKNGQTREHALLAYTLGVKQLIVGVNKMDSTEPPYSHKRYEEIVKEVSTYIKKIGHNTDTVAFVPVSGWNGDNTLEPSANMPWFKGWKVTRKDGNASGTTLLEALDCILPPTRPTDKPLCLPLQDVYKIGGIVNVATEVKSVEMHHEALSEVLPGDNVGFNVKNVSVKDVRRGNVAGDSKKDPPMEAAGFTAQVIILNHPGQISAGYAPVLDCHTAHIACKFAELKEKTDRHSGKKLEDGPKFLKSGDAAIVDMVPGKPVYVESFSDYPPLGRFAVHDIRQTVAVGVIKAVDKKAAGAGKVTKSAQKAQKAK

SEQ ID NO: 41778 - protein, 477 aa, Homo sapiens
  DOMAIN (95)..(127): GTP-binding elongation factors proteins domain identified by eMATRIX, accession number BL00301B, p-value=5.500e-31, raw score of 20.09
  DOMAIN (10)..(269): Elongation factor Tu family domain identified by PFam, accession name GTP_EFTU, E-value=1.8e-99, PFam score of 337.9
  misc_feature (1)...(477): Xaa = X or * as defined in Table 2
HLKAKMGKEKTHINIVVIGHVDSGKSTTTGHLIYKCGGIDKRTIEKFEKEAAEMGKGSFKYAWVLDKLKAERERGITIDISLWKFETSKYYVTIIDAPGHRDFIKNMITGTSQADCAVLIVAAGVGEFEAGISKNGQTREHALLAYTLGVKQLIVGVNKMDSTEPPYSQKRYEEIVKEVSTYIKKIGYNPDTVAFVPISGWNGDNMLEPSANMPWFKGWKVTRKDGNASGTTLLEALDCILPPTRPTDKPLALPLQGVHKLGGIGTVSSAPMETGFSNPGMVVTFAPSPRXQRKVKSVEMHHEALNEALSGEQCGLSMSKKVSVKECFVRGNVAGXPAKNDPTQWEASWLSLLQVIILEPSQAQISAGLCPLYWDCHTGSHLHAKFAELKEKIDRRSGKKVEDGPKILRSLGDAAIVDMVPGRPMCVESFSDYPPLGRFAVRDMRQTVAVGVIKAVDKKAAGAGKVTKSAQKAQKAK

SEQ ID NO: 41779 - protein, 332 aa, Homo sapiens
MSPPILDIETINALADAINGFQGSMMLVSHDFRLIQQVAQEIWVCEKQTITKWPGDILAYKLHLKSKLVDEEPQLTKRTHSVKLTIMVEGKAEAGTFFTRWQERRPALLERLTYDDVYSYTTISRMLVLRVMRGAGGVRARTRVPDVDDGQRLTVTDDSVMETIQRKIVRSGYERACELSSAVMRLSYDDAESRSSYPLRRRLLPRHAGDAALLLDLLLLCDCYDDDYRSDCTCAQRTDRLYVDTACAATAATLSTAACVATASSSAFAATGARWRLHLTDITRRRLTDATTTADYCCLLLLLQTATAYGLRLRTIQLLQLTHASSVDCIYY

SEQ ID NO: 41780 - protein, 624 aa, Homo sapiens
  DOMAIN (229)..(261): ABC transporters family proteins domain identified by eMATRIX, accession number BL00211B, p-value=7.000e-21, raw score of 13.37
  DOMAIN (111)..(589): ABC transporter domain identified by PFam, accession name ABC_tran, E-value=4.5e-75, PFam score of 262.8
MPSDLAKKKAAKKKEAAKARQRPRKGHEENGDVVTEPQVAEKNEANGRETTEVDLLTKELEDFEMKKAAARAVTGVLASHPNSTDVHIINLSLTFHGQELLSDTKLELNSGRRYGLIGLNGIGKSMLLSAIGKREVPIPEHIDIYHLTREMPPSDKTPLHCVMEVDTERAMLEKEAERLAHEDAECEKLMELYERLEELDADKAEMRASRILHGLGFTPAMQRKKLKDFSGGWRMRVALARALFIRPFMLLLDEPTNHLDLDACVWLEEELKTFKRILVLVSHSQDFLNGVCTNIIHMHNKKLKYYTGNYDQYVKTRLELEENQMKRFHWEQDQIAHMKNYIARFGHGSAKLARQAQSKEKTLQKMMASGLTERVVSDKTLSFYFPPCGKIPPPVIMVQNVSFKYTKDGPCIYNNLEFGIDLDTRVALVGPNGAGKSTLLKLLTGELLPTDGMIRKHSHVKIGRYHQHLQEQLDLDLSPLEYMMKCYPEIKEKEEMRKIIGRYGLTGKQQVSPIRNLSDGQKCRVCLAWLAWQNPHMLFLDEPTNHLDIETIDALADAINEFEGGMMLVSHDFRLIQQVAQEIWVCEKQTITKWPGDILAYKEHLKSKLVDEEPQLTKELPTTC

SEQ ID NO: 41781 - protein, 74 aa, Homo sapiens
  misc_feature (1)...(74): Xaa = X or * as defined in Table 2
YGLASVSPTQISSSSCNPWMFEGGTLVGGDWIGSHDSEGVLTRSGCLISVWHFSCAVSPATLXRRCLLLLRLPP

SEQ ID NO: 41782 - protein, 225 aa, Homo sapiens
  DOMAIN (63)..(111): TRANSCRIPTION PROTEIN DNA-BINDIN domain identified by eMATRIX, accession number PD02448B, p-value=8.683e-11, raw score of 10.17
MPALRINSGAGPFKACVAAAFGSPSARVSTIIYLNVHDAVTKAIQEARQMKEQLQREKQVLYGKKTAIYEEQARLGKQHLEKYPDYEYKPRPKCTCLMDDKKLHVGEYEAIMHNRQQEMRQYFNVGQQAQIPIATAGVVYHGAITMAGMPSPHLPSEHSSLSSSPEPGMPVIQSTFVKGEEPHIKEEIEAEDINGEIYDEYDKEDDDPDVDYGSDKENRIAGKAN

SEQ ID NO: 41783 - protein, 375 aa, Homo sapiens
  DOMAIN (173)..(212): TRANSCRIPTION PROTEIN DNA-BINDIN domain identified by eMATRIX, accession number PD02448A, p-value=3.386e-23, raw score of 9.37
  DOMAIN (168)..(236): HMG (high mobility group) box domain identified by PFam, accession name HMG_box, E-value=3.6e-27, PFam score of 103.7
DEVAQPLNLSAKPKTSDGKSPTSPTSPHMPALRINSGAGPLKASVPAALASPSARVSTIGYLNDHDAVTKAIQEARQMKEQLRREQQVLDGKVAVVNSLGLNNCRTEKEKTTLESLTQQLAVKQNQEGKFSHAMMDFNLSGDSDGSAGVSESRIYRESRGRGSNEPHIKRPMNAFMVWAKDERRKILQAFPDMHNSNISKILGSRWKAMTNLEKQPYYEEQARLSKQHLEKYPDYKYKPRPKRTCLVDGKKLRIGEYKAIMRNRRQEMRQYFNVGQQAQIPIATAGVVYPGAIAMAGMPSPHLPSEHSSVSSSPEPGMPVIQSTYGVKGEEPHIKEEIQAEDINGEIYDEYDEEEDDPDVDYGSDSENHIAGQAN

SEQ ID NO: 41784 - protein, 237 aa, Homo sapiens
  DOMAIN (2)..(40): Ribosomal protein L21e proteins domain identified by eMATRIX, accession number BL01171, p-value=6.667e-39, raw score of 19.94
  DOMAIN (2)..(72): Ribosomal protein L21e domain identified by PFam, accession name Ribosomal_L21e, E-value=1.1e-31, PFam score of 118.7
MYMQIYKKGDIVDIKGMGTAQKGMPHKCYHGKTGRVYNVTWHAVGLIVNKQVKGKILAKRINALIEHIKHSKSQDSFLKRVKENNQKKKPKTKALNFLSSLQLNFPDQTYDFAQASLAARTHLLFPGRKPARRNVAPVPPLTPDRWLNEGDTISIGNVAVFVKETLKDSSGKLLDLINEFSEVSGYKINVHKSVALLYINNDKAENQIKNSISFTTATEKILRNILNKGGEGSLQGK

SEQ ID NO: 41785 - protein, 41 aa, Homo sapiens
RGKFKTLVKKNQGDPKKGKNPPGPKMGKNNFGKTPFWAKKI

SEQ ID NO: 41786 - protein, 185 aa, Homo sapiens
  DOMAIN (48)..(86): Ribosomal protein L21e proteins domain identified by eMATRIX, accession number BL01171, p-value=1.000e-40, raw score of 19.94
  DOMAIN (20)..(125): Ribosomal protein L21e domain identified by PFam, accession name Ribosomal_L21e, E-value=8.7e-45, PFam score of 162.2
  misc_feature (1)...(185): Xaa = X or * as defined in Table 2
RLQEFGTRNRHLPVNSPKLTNTKGKRRGTRYMFSRPFRKHGVVPLATYMRIYKKGDIVDIKGMGTVQKGMPHKCYHGKTGRVYNVTQHAVMGIVVYKQAXGQRFLPKRIXCCVIEHIKHSKSRDSFLKRVKENDQKKKEAKEKGTWVQLNRQLAPPREAHFVRTNGKEPGACWNPIPYEFHGHNR

SEQ ID NO: 41787 - protein, 697 aa, Homo sapiens
  DOMAIN (630)..(644): Phage integrase family domain identified by eMATRIX, accession number PF00589B, p-value=1.621e-11, raw score of 16.17
  DOMAIN (508)..(676): "Phage" integrase family domain identified by PFam, accession name Phage_integrase, E-value=4.3e-10, PFam score of 47.0
MQETHLKQNDPGRLNVTVREWFFPNGYAFATGSDDATCRLFDLRADQELLLYSHDNIICGITSVAFSKSGRLLLAGYDDFNCNVWDTLKGDRAVSFRKCKQIAIYFNPISILYSACEAERSWEPHAAPAAASPVRGLLCPCVIHGALNQIYVWSFAMRGSAFLYLFYIFLQLLCLLMPYWYRPVTGAGSFSPRLLLFTAVMCYGLGPSQECISQSAVKTKFEQHTIRAKQILATVKNIMDSVNLAAEDKRHYSVEEREDQIDRLDFIRNQMNLLTLDVKKKIKEVTEEVANKVSCAMTDEICRLSVLVDEFCSEFHPNPDVLKIYKSELNKHIEDGMGRNLADRCTDEVNALVLQTQQEIIGNIYVYKVMSESIRKLEEGYIKEVFDIDNEVSVVHSLTDGKIAKMLLNQGDYDNGDNEDDFIDLAEQLPIGSMLPRSLASTPTAPTTPATPDNASQEELMITLVTGLASVTSRTSMGIIIVGGVIWKTIGWKLLSVSLTMYGALYLYERLSWTTHAKERAFKQQFVNYATEKLRMIVSSTSANCSHQVKHWPRASRYQQGHQDLFILRSDLPSQVFIRDKLMERRNRRTGRTEKARIWEVTDRTVRTWIGEAVAAAAADGVTFSVPVTPHTFRHSYAMHMLYAGIPLKVLQSLMGHKSISSTEVYTKVFALDVAARHRVQFAMPESDAVAMLKQLS

SEQ ID NO: 41788 - protein, 736 aa, Homo sapiens
MCYGLGPSQECISQSAVKTKFEQHTIRAKQILATVKNIMDSVNLAAEDKRHYSVEEREDQIDRLDFIRNQMNLLTLDVKKKIKEVTEEVANKVSCAMTDEICRLSVLVDEFCSEFHPNPDVLKIYKSELNKHIEDGMGRNLADRCTDEVNALVLQTQQEIIGNIYVYKVMSESIRKLEEGYIKEVFDIDNEVSVVHSLTDGKIAKMLLNQGDYDNGDNEDDFIDLAEQLPIGSMLPRSLASTPTAPTTPATPDNASQEELMITLVTGLASVTSRTSMGIIIVGGVIWKTIGWKLLSVSLTMYGALYLYERLSWTTHAKERAFKQQFVNYATEKLRMIVSSTSANCSHQVKHCSKKVKVEKGLKSSSPVPLNSSFIPLFLEPRNRVKLNNDSQSSGGWHTSGSEMPSALPNLGKTTRVLSLEEQRGKGFFNYLQPWRRGEGWDVRLNPKPDKSESGIQSDEIECIQGATYKNPELDRIATEDDLVEMQGYKDKLSIIGEVLSRRHMKVAFFGRTSSGKSSVINAMLWDKVLPSGIGHITNCFLSVEGTDGDKAYLMTEGSDEKKSVKTVNQLAHALHMDKDLKAGCLVRVFWPKAKCALLRDDLVLVDSPGTDVTTELDSWIDKFCLDADVFVLVANSESTLMNTEKHFFHKVNERLSKPNIFILNNRWDASASEPEYMEDVRRQHMERCLHFLVEELKVVNALEAQNRIFFVSAKEVLSARKQKAQGMPESGMHYL

SEQ ID NO: 41789 - protein, 201 aa, Homo sapiens
IANPVHGLSEPIFQLPRSLASTPTAPTSPAMPDNASQAELMITLVTGLASLTSRTSMGIDNVGGMIWKTIGWKLISVSLTMYGALYLYERLSWTTHAKERAFKQQFVNYATGKLKMIASSTSANCSHQVKQQMATTFARLCQQADITQRQLEEEIARLPKEIDQWEKIQNNLKLLRNKAVQLEYELENFTKQFLPSRDEES

SEQ ID NO: 41790 - protein, 385 aa, Homo sapiens
EDQIDRLDFIRNQMNLLTLDVKKKIKEVTEEVANKVSCAMTDEICRLSVLVDEFCSEFHPNPDVLKIYKSELNKHIEDGMGRNLADRCTDEVNALVLQTQQEIIENLKPLLPAGIQDKLHTLIPCKKFDLSYNLNYHKLCSDFQEDIVFRFSLGWSSLVHRFLGPRNAQRVLLGLSEPIFQLPRSLASTPTAPTTPATPDNASQEELMITLVTGLASVTSRTSMGIIIVGGVIWKTIGWKLLSVSLTMYGALYLYERLSWTTHAKERAFKQQFVNYATEKLRMIVSSTSANCSHQVKQQIATTFARLCQQVDITQKQLEEEIARLPKEIDQLEKIQNNSKLLRNKAVQLENELENFTKQFLPSSNEGSVTIEIALVTLIGGNRNL

SEQ ID NO: 41791 - protein, 82 aa, Homo sapiens
  misc_feature (1)...(82): Xaa = X or * as defined in Table 2
SKAESVFPPTLPRQRPAAAAGPHWGAGXGQDEAGLHPGPEDRGFLRETPADPGLQAGLGQVHPPRSRADPPAPYQVPPRMGT

SEQ ID NO: 41792 - protein, 114 aa, Homo sapiens
GQHWTSTQRKADFQHPAGAVGPEPTDRSLQWRTSPSADAQEENLYAAVKDTQPEYGVEKDTPAAASEAPQEVTYAQLHSLTLRRKATEPPPSQEREPPAEPSIYATLAIHYARR

SEQ ID NO: 41793 - protein, 650 aa, Homo sapiens
  DOMAIN (231)..(283): RECEPTOR CELL NK GLYCOPROTEIN IMMUNOGLOB domain identified by eMATRIX, accession number PD01652B, p-value=3.486e-18, raw score of 8.50
  DOMAIN (64)..(419): Immunoglobulin domain identified by PFam, accession name ig, E-value=1.9e-16, PFam score of 58.1
FVSCQAPWSHPPAQLSPVGADAMTLTLSVLICLGLSVGPRTCVQAGTLPKPTLWAEPASVIARGKPVTLWCQGPLETEEYRLDKEGLPWARKRQNPLEPGAKAKFHIPSTVYDSAGRYRCYYETPAGWSEPSDPLELVATGFYAEPTLLALPSPVVASGGNVTLQCDTLDGLLTFVLVEEEQKLPRTLYSQKLPKGPSQALFPVGPVTPSCRWRFRCYYYYRKNPQVWSNPSDLLEILVPGVSRKPSLLIPQGSVVARGGSLTLQCRSDVGYDIFVLYKEGEHDLVQGSGQQPQAGLSQANFTLGPVSRSHGGQYRCYGAHNLSPRWSAPSDPLDILIAGLIPDIPALSVQPGPKVASGENVTLLCQSWHQIDTFFLTKEGAAHPPLCLKSKYQSYRHQAEFSMSPVTSAQGGTYRCYSAIRSYPYLLSSPSYPQELVVSGPSGDPSLSPTGSTPTPGPEDQPLTPTGLDPQSGLGRHLGVVTGVSVAFVLLLFLLLFLLLRHRHQSKHRTSAHFYRPAGAAGPEPKDQGLQKRASPVADIQEEILNAAVKDTQPKDGVEMDARAAASEAPQDVTYAQLHSLTLRREATEPPPSQEREPPAEPSIYAPLAIHLAHGGPRSHTQQKETQRLQKARELPPVDTNEPQPAWDP

SEQ ID NO: 41794 - protein, 656 aa, Homo sapiens
  DOMAIN (124)..(176): RECEPTOR CELL NK GLYCOPROTEIN IMMUNOGLOB domain identified by eMATRIX, accession number PD01652B, p-value=5.117e-23, raw score of 8.50
  DOMAIN (57)..(413): Immunoglobulin domain identified by PFam, accession name ig, E-value=1.8e-17, PFam score of 61.3
GLIPLQSAGSPEGDAMTPALTALLCLGLSLGPRTRVQAGPFPKPTLWAEPGSVISWGSPVTIWCQGSLEAQEYQLDKEGSPEPLDRNNPLEPKNKARFSIPSMTQHHAGRYRCHYYSSAGWSEPSDPLELVMTGAYSKPTLSALPSPVVASGGNMTLRCGSQKRYHHFVLMKEGEHQLPRTLDSQQLHSGGFQALFPVGPVNPSHRWRFTCYYYYMNTPRVWSHPSDPLEILPSGVSRKPSLLTLQGPVLAPGQSLTLQCGSDVGYDRFVLYKEGERDFLQRPGQQPQAGLSQANFTLGPVSPSNGGQYRCYGAHNLSSEWSAPSDPLNILMAGQIYDTVSLSAQPGPTVASGENVTLLCQSWWQFDTFLLTKEGAAHPPLRLRSMYGAHKYQAEFPMSPVTSAHAGTYRCYGSRSSNPYLLSHPSEPLELVVSGHSGGSSLPPTGPPSTPGLGRYLEVLIGVSVAFVLLLFLLLFLLLRRQRHSKHRTSGLRLCPSSPRPEKADFQRPAGAAETEPKDRGLLRRSSPAADVQEENLYAAVKDTQSEDGVEIYTRQSPHDEDPQAVTYAEVKHSRPRREMASPPSPLSGEFLDTKDRQAEEDRQMDTEAAASEAPQDVTYAQLHSLTLRREATEPPPSQEGPSPAVPSIYATLAIH

SEQ ID NO: 41795 - protein, 606 aa, Homo sapiens
  DOMAIN (418)..(457): DNA mismatch repair proteins mutL / hexB / PMS1 proteins domain identified by eMATRIX, accession number BL00058B, p-value= 4.073e-13, raw score of 16.83
MEFLFYFLIRQALIEHISGSGARNQAHRALPDGLQESQERPVVTCLKHEDFELAFLLLTKGADHRAISLTEGDTHLHAALHIFLEIKGQQWEHADAHPLPEGHAKAREEAVRPAGELVPDDNRGKEGNDDQDDWSTQEIEACLQDFDNMTWEIECTSEMLKKLSSKKLKGINKGQVSANMKIQKRIPRCYVEDTEAEKGREHVNPEYFPPASAVETEYNIMKFHSFSTNMAFNILNDTTATVEYPFRVGELEYAVIDLNPRPLEPIILIGRSGTGKTTCCLYRLWKKFHVYWEKAEQAGSPLLAKQLLLLLDASLPKPFFLRNEDGSLKRTIIGWSAQEESTIPSWQEDEEEAEVDGDYSEEDKAVEMRTGDSDPRSGFLRNLVQIPFVEVIMKGKKEGGAGVDPAAEKEDLDIVCERFTTSKLQSFEDLASISTYGFRGEKHNKKGLKKMQANNAKAMSARAEAIKALVKPKEVKPKIPKGVSRKLDRLAYIAHPKLGKRARARIAKGLRLCRPKAKAKDQTKAQAAAPPSVPAQAPKDKDTSNIFISNRKRGCDFTKKETNIPKVLTISMAPSLMSLYSVTRNQTTKPPSRHKNLTKGQLEPLY

SEQ ID NO: 41796 - protein, 189 aa, Homo sapiens
  DOMAIN (31)..(69): Ribosomal L29e protein family domain identified by PFam, accession name Ribosomal_L29e, E-value=1e-15, PFam score of 65.7
IRCSSVDPRVRPRVRGASGAAAYCCRHVSIPRDHTTHNQSRKWHRNGIKKPRSQRYESLKGVDPKFLRNMRFAKKHNTKGLKKMQANNAKAMSARAEAIKALVKPKEVKPKIPKGGQPINLIRLAYIAHPKLGKRARARIAKGLKLCRPKAKAKAKAKAKDQTKAQAAAPASVPAQAPKRTQAPTKASE

SEQ ID NO: 41797 - protein, 96 aa, Homo sapiens
  misc_feature (1)...(96): Xaa = X or * as defined in Table 2
XGWNAVEVFFSRTARDNRLGCMFVRCAPSSRYTLLFSHGNAVDLGQMCSFYIGLGSRINCNIFSYDYSGYGVSSGKPSEKNLYADIDAAWQALRTP

SEQ ID NO: 41798 - protein, 593 aa, Homo sapiens
MKSGFYMTASNDQLIDWIEKKLQALPKAKIAPKKGHAHCLVVCCRYGVSPENIILYGQSIGTVPTVDLASRYECAAVILHSPLMSGLRVAFPDTRKTYCFDAFPRNLQFSTRSFIQRHFLLNLSCNNMCDGATSGVDTQKLQASTVWKFLLLFSWTEQDSFMEQSFLYPLICPASKSLFDPVTSVEDDRNEIKLAQWEFSQTFDLTIWANFTDSILADQAWGGPKSGEVLCGAEHLRFPGAFSLAPGNPVDDTASCFIHSERQTLSGTNITTSIPQGSCFSRLEQLKLSPDHEIPWEWSKGQGTGAVVAQLEHECPGLQRSARTSAVAWRSVAENAPTPCVWEESARLSRRPRATYPEWRKWLGAVHGEIQEANPSVPGGKWFSESALLTTQLIPSSCILHQAQKDPHKRDSHPPTIALEKEGERQRAFTYVPRSFRVKPGLTVKTAEPDGVGAQGTESSGWRSYRRWIRGDYGGKEYYKEPRETNLRLLVNSGKKRGIPEKVGGSGCQLFESRNHVFNCLLSDSFRACLIEDDQKLVLNLFSASDCGGLVSLQEEEETQGVGTEKRPCESTAKSTSCKPGRPDSPETHLPAP

SEQ ID NO: 41799 - protein, 279 aa, Homo sapiens
  DOMAIN (173)..(228): Actins proteins domain identified by eMATRIX, accession number BL00406D, p-value=1.000e-40, raw score of 12.58
  DOMAIN (1)..(279): Actin domain identified by PFam, accession name actin, E- value=7.5e-159, PFam score of 522.5
MDDDIAALVVDNSSGMCKAGFAGDDVPWAIFPSIVGCTRHQVMMLHVAPEEHPVLLTEAPLNPKANCEKMTQIMFETFNTPAMYVAIQAMLSLYASVRTAHVQGLHTTAEREIVRDIKKLCYVALDFEREMAMVASSSSLEKSYKLLDGQVITIGNERFHCPEALFQPSFLGMESCGIHKTTFNYIMKCDVDICKDLYTNTVLSGGTTMYPGITNRMQKKITALAPSMMKIKIIAPPERKYSVWISGSILASLSTFQQMWISKQKYDQSGPSIVHRKCF

SEQ ID NO: 41800 - protein, 181 aa, Homo sapiens
  DOMAIN (75)..(130): Actins proteins domain identified by eMATRIX, accession number BL00406D, p-value=1.000e-40, raw score of 12.58
  DOMAIN (1)..(181): Actin domain identified by PFam, accession name actin, E- value=1.2e-105, PFam score of 348.0
ERGYSFTTTAERDIVRDIKEKLCYVALDFEQEMATAASSSSLEESYELPDGQVITIGNERFRCPEALFQPSFLGMESCGIHETTFNSIMKCDVDIRKDLYANTVLSGGTTMYPGFADRMQKEITALAPSTMKIKIIAPPERKYSVWIGGSILASLSTFQQMWISKQEYDESGPSIVHRKCF

SEQ ID NO: 41801 - protein, 396 aa, Homo sapiens
MEAERLRLLEEEAKLKKVARMGFNASSMLRKSQLGFLNVTSYSRLANELRVSCMERKKVQIRSLDPSSLASDRFNFILASTNSDQLFVVNQVEVEGSKYGIISLRTLKIPSFHVYVLRNLYVPNRKVKSLCWASLNQLDSHVLLCFEGITDAPSCAVLLPASRFLSVHTRVNQPGMLCSFQIPEAWSCAWSLNTRAYHCFSAGLSQQVLLTSVATGHQQSFDTSSDVLAQQFASTAPLLFNGCRSGEIFAIDLRCRNRGKGWRATRLFHDSAVTSVQILQEEQCLMASDMTGKIKLWDLRATKCVRQYEGHVNESAYLPLHVHEEEGIVVAVGQDCYTRIWSLHDAHLLRTIPSPYSASEDDIPSVAFASRLGGIRGAAPGLLMAVRQDLYCFPFS

SEQ ID NO: 41802 - protein, 228 aa, Homo sapiens
  DOMAIN (120)..(156): Enoyl-CoA hydratase/isomerase proteins domain identified by eMATRIX, accession number BL00166D, p-value=5.400e-16, raw score of 22.87
  DOMAIN (1)..(155): Enoyl-CoA hydratase/isomerase family domain identified by PFam, accession name ECH, E-value=2.8e-09, PFam score of 27.8
IMKEVRRALCNAATDDSKLLLLSAVGSVFCSGLDYSYLIGRLSSDRRKESTRIAEAIRDFVKAFIQFKKPIVVAINGPALGLGASILPLCDIVWASEKAWFQTPYATIRLTPAGCSSYTFPQILGVALANEMLFCGRKLTAQEACSRGLVSQVFWPTTFSQEVMLRVKEMASCSAVVLEESKCLVRSFLKSVLEDVNEKECLMLKQLWSSSKGLDSLFSYLQDKIYEV

SEQ ID NO: 41803 - protein, 466 aa, Homo sapiens
  DOMAIN (353)..(376): POTASSIUM CHANNEL SIGNATURE domain identified by eMATRIX, accession number PR00169G, p-value=5.050e-21, raw score of 9.39
  DOMAIN (17)..(123): K+ channel tetramerisation domain identified by PFam, accession name K_tetra, E-value=7.5e-28, PFam score of 105.9
MEPWPCSPGGGGGTRARHVIINVGGCRVRLAWAALARCPLARLERLRACRGHDDLLRVCDDYDVSRDEFFFDRSPCAFRAIVALLRAGKLRLLRGPCALAFRDELAYWGIDEARLERCCLRRLRRREEEAAEARAGPTERGAQGSPARALGPRGRLQRGRRRLRDVVDNPHSGLAGKLFACVSVSFVAVTAVGLCLSTMPDIRAEEERGECSPKCRSLFVLETVCVAWFSFEFLLRSLQAESKCAFLRAPLNIIDILALLPFYVSLLLGLAAGPGGTKLLERAGLVLRLLRALRVLYVMRLARHSLGLRSLGLTMRRCAREFGLLLLFLCVAMALFAPLVHLAERELGARRDFSSVPASYWWAVISMTTVGYGDMVPRSLPGQVVALSSILSGILLMAFPVTSIFHTFSRSYSELKEQQQRAASPEPALQEDSTHSATATEDSSQGPDSAGLADDSADALWVRAGR

SEQ ID NO: 41804 - protein, 406 aa, Homo sapiens
  DOMAIN (293)..(316): POTASSIUM CHANNEL SIGNATURE domain identified by eMATRIX, accession number PR00169G, p-value=5.050e-21, raw score of 9.39
  DOMAIN (136)..(344): Ion transport protein domain identified by PFam, accession name ion_trans, E-value=1.2e-17, PFam score of 72.0
RWVPLPPYLWVGRGLHLSSQKPEAGTECSLSEPGWKGRDMFLRIPSNLGGIRTSLQQELWVTLLVEEEKNLAHLGSHQITTHSRSQSFKEGPQLCSPQPWLDSRPPSPSLEPETTDPTLTVEGRSCQESLLRAQNIVEQPRAVEQSLKGECSPKCRSLFVLETVCVAWFSFEFLLRSLQAESKCAFLRAPLNIIDILALLPFYVSLLLGLAAGPGGTKLLERAGLVLRLLRALRVLYVMRLARHSLGLRSLGLTMRRCAREFGLLLLFLCVAMALFAPLVHLAERELGARRDFSSVPASYWWAVISMTTVGYGDMVPRSLPGQVVALSSILSGILLMAFPVTSIFHTFSRSYSELKEQQQRAASPEPALQEDSTHSATATEDSSQGPDSAGLADDSADALWVRAGR

SEQ ID NO: 41805 - protein, 44 aa, Homo sapiens
KQAAEPAVATRWGPLPQCGSFVLSFFAINLAAAHSLGPRCFYEL

SEQ ID NO: 41806 - protein, 1005 aa, Homo sapiens
  DOMAIN (749)..(795): Ribosomal RNA adenine dimethylases proteins domain identified by eMATRIX, accession number BL01131A, p-value=1.000e-08, raw score of 26.62
  DOMAIN (742)..(1005): Domain of unknown function DUF36 domain identified by PFam, accession name UPF0117, E-value=2.1e-69, PFam score of 233.5
MAPTAMVQQAASPKLLRDKEPGKLACRQKAYEIALNMMKNTQELQDHFFLKGRTAHMAMIITQCFKEIITTPELTAKATGVSRQAINSRSAFKPLRKEPFPWRESPTTSRSGAGEGGSSHPKTFLKRQALPHRNQPQGQTKLLEWLSNLSLSNPVPPGPAVAGRGGGGGCGGEEAEPRVPRGWEEGGPRLGPAGWQTPGRGRRGAWWRSPDPGPRALAGAPRLSFLALSPGASTPPLRNCIWRTGSSQAEESHRPSPRLRLGRLPSRGAALGTCKPAMPEPPTPSVGSCAAGGSPTSVAPCSMAPSPIDHPRAEECGLTAWDWQAAPVQPQCETHWVKPAGLLSLVGTWRTFMSSSGIVNTPIGTLYLAQDSFGSSAFLSEGLKSLSRISQEKGMRMRVMTPPSRFASPGKLNCPWSVIPRGQATLGWNFLHCPPVSQQKKPRALPSDVGQHAESPSSCPSVSGIGGFLVSLTLTMKPRTLAVSVTALKVVRLELVPSDVQMCSEFLPSGVKLQTFAGSVTALKAVRLEFFIPPGGLVVALASEVKLQTFVVSVTAHKSSVDPKPLGWSMGLGAMEQGVALVGEARAAQEPTEGMGGSGMAAAGPEPCPTGRQLRTGEELSAAPKVLSEYIESAITSYHKLGNYKQQKFISHSLKSGKSKIEVLADLPTQREDDEPHNFVRMYKECLSCWLESGIPNLGVWPKRIHTTAEKYREYEAREQTDQTQVQELHRSQDRDFETMAKLHIPVMVDEVVHCLSPQKGQIFLDMTFGSGGHTKAILQKESDIVLYALDRDPTAYALAEHLSELYPKQIRAMLGQFSQAEALLMKAGVQPGTFDGVLMDLGCSSMQLDTPERGSSLRKDGPLDIRMDDLLQQSTYIATKTFQALRIFVNNELNELYTGLKTAQKFLRLGGRLVALSFHSLEDRIVKRFLLGISMTERFNLSVRQQVMKTSQLGSDHENTEEVSMRRAPLMWELIHKKVLSPQDQDVQDNPRGRSAKLRAAIKL

SEQ ID NO: 41807 - protein, 115 aa, Homo sapiens
EVTACWQSSQPSLALCASSAWAPTLAALEEPFSPPLHCGSPFLSWPRPEPTPSAPPWAPVRPEPPRRAPPPAPRRPVPSTTQGLRSAGTRHRDWQAAPLAALVLDPLGEASWAPE

SEQ ID NO: 41808 - protein, 272 aa, Homo sapiens; identical to SEQ ID NO: 33118

SEQ ID NO: 41809 - protein, 147 aa, Homo sapiens; identical to SEQ ID NO: 33120

SEQ ID NO: 41810 - protein, 32 aa, Homo sapiens
  misc_feature (1)...(32): Xaa = X or * as defined in Table 2
IKVSPSGRDPVRDNXITWXFLPYCSSTTGSLH

SEQ ID NO: 41811 - protein, 105 aa, Homo sapiens
  misc_feature (1)...(105): Xaa = X or * as defined in Table 2
MELPASPALFARTPQPLGGRWDWAPWSRGWRSSRRLGPHRSPRRGSEAQAWRAAGPEPCPAGRQLRPVNIEWLFALILTHTFGTFQVLAXTSQALIXNPRVLYPD

SEQ ID NO: 41812 - protein, 74 aa, Homo sapiens; identical to SEQ ID NO: 33133
  misc_feature (1)...(74): Xaa = X or * as defined in Table 2

SEQ ID NO: 41813 - protein, 107 aa, Homo sapiens
  misc_feature (1)...(107): Xaa = X or * as defined in Table 2
GSKKKFHXHSRILERSRSWRTSYQGRPQEPSWLHPVDPHRGCRWSCLPVPCRAPSTPQPLGGRWDWAPWSRGRRLSGRLGPHRSPRNRGRLRHGGLQVPSRASQEGS

SEQ ID NO: 41814 - protein, 205 aa, Homo sapiens
  misc_feature (1)...(205): Xaa = X or * as defined in Table 2
VRDIHGSPTHHRPGGLRGKNGFVGEARDPRYRSGHCFRECRTQALVAFTXCXSCGFTEVKNXGLSCLPAGQGSGPAARHVXASHPLHGLPCGPSLPNRAPPPTPRRPVPSTTQGLRNASARRGTGRQLHLQPWCGIHXVKPAGLLSLLHGQACGDPATPSRERLSQPAVPTALGSRRRLLLGPAGSPGSSLPPSRQPPGGRRRPP

SEQ ID NO: 41815 - protein, 507 aa, Homo sapiens
MQESVKKPIDFTCKHIGGEQTIEGLQVQDVTQRVGSEGNFMTVFQEEGRGQNRRYLHHAHNEINTQRRQIILHEARKLINEQLLLQSRIFDILGLYCVRNWWVLGLTDLKNEAADPRGVKLRTFTVSVAALKEARLELFVPPGGFVVSLASGVKLQTFPVSVTAHKGSVDPKNSGAQLASPSGSRTRAAGGAACQSRAVTHALLSPWVVDGIGRRGAGGGARRGGSGRTGAHGVGGGSSMADCRSQPLPCGKAAKARREIERSAAITYTGSPSPSTMIINFLRPSPDPDANIMLPEQPSGLLRYSFIATKMDRQKTDTEEWGIAIKIPEGVKVALELGNEQSLEEFGGSEEDRKMRESLVLLRELLSCCHQNVDRNMDSKGHTDKVSDRYKEFIGNWSKGVAQDAAPKGASHNPWRLPCGIKSAGEDTASLPTVGRSNATESSAIQTTKSADALILDLSAPELWLQTPVSNGSTTPQRASEASGSSATDQPWMSVTQYHVSGQRHKC

SEQ ID NO: 41816 - protein, 455 aa, Homo sapiens
  DOMAIN (186)..(233): kw TRANSCRIPTASE REVERSE II ORF2 domain identified by eMATRIX, accession number DM01354V, p-value=1.000e-40, raw score of 12.97
MWESLELPRDLLNGFDQNADSDVDNEVQAEVVSDGDEELTGNWNEDHFCYALAKRLVAFCLFPRDMWNFKLERDDLKLEVMFKREAEHKSLENLQPDDAIEKEKPISGEKFKPAAEICISNKEPNINSQDNGENISRASCNVHLEKPQATQYQPMKEFPKAVGARPLNQCALDNFRDELMKGGQFMETKMGIKYLGIQLTRDVKDLFKENYKPLLNEIKEDTNKWKNIPCSWVGRINIVKMAILPKITCWSPKQSLDKANQSLLLAVIREYNVLTISVASYKDVMDFRHEFEDLEVYFKALAAFPWGRARDLQPAMPEPPIPSVGSCAARASSTSATPCSTAPSPIDHPRAEECGPTVLDWETAPSAAPVQDPLGEASWAPESANLVGRRTFVSSSGIVKAPISTLSKQTTQLYQSAGCGWGQLGLIQMWNNNETKPPKRKKRIYLKFRFVEQGD

SEQ ID NO: 41817 - protein, 217 aa, Homo sapiens; identical to SEQ ID NO: 32291

SEQ ID NO: 41818 - protein, 264 aa, Homo sapiens
MRAAGRAFPGGSGLCSARDGWAPSGTALVRRLLPDSRYRAWRQLAPDFCLFSCSEGSGLQSQLLLSTDFKLLEEGTAAYASPYCELQSAQGLVWWTQSGQPMHRAWRFLGLIIHFLVLVILGTGPYCEPQQTEAPQPLESWLGKPGVGNSGARFLSPVTSLKPDKHIEFDQKEAWGLLGRAWDLQPAMPEPLQPSVGSCVARASPTSTAPCSTAPSPINHPRAEEYGHTVQDWQAAPPAALVQDPLGEASWAPESGGEVENLYV

SEQ ID NO: 41819 - protein, 147 aa, Homo sapiens
  misc_feature (1)...(147): Xaa = X or * as defined in Table 2
QKQEESWPEDTYPRALAAFPRGRARDLQPAMPEPPTLSMGSCAPEPPRGAPPPAPRRRIPSTTQGLRSSGAGRRTCRQLHLQPRCRIHWVKPAGLLSLWLFQMHSASCWWNYHSGAWRMVALFSWLHXECPSGESGAPILHFPFALP

SEQ ID NO: 41820 - protein, 146 aa, Homo sapiens
  misc_feature (1)...(146): Xaa = X or * as defined in Table 2
VLQLLRRHVWSCSFPPGVVVSLALAVKLQTFVTQEPSWLHPVDPAPGLQVELPASPLQCTRTSQPLGGRWDWAPWSRGRRSSGRLGPHRSPWRGXEAQAWRAAGPEPWPRGKACXGPARNRAKRRFPHCTFXEEVTVCSPQKRGGD

SEQ ID NO: 41821 - protein, 68 aa, Homo sapiens
  misc_feature (1)...(68): Xaa = X or * as defined in Table 2
RSWNPQTLFVGMYNATAAWKPIXQFLKKLNMKLPXDPGREPLNQTGXKGKRGGQEAFLEKGISSRMSQ

SEQ ID NO: 41822 - protein, 249 aa, Homo sapiens
  DOMAIN (101)..(122): GLUTELIN SIGNATURE domain identified by eMATRIX, accession number PR00211B, p-value=9.000e-09, raw score of 0.86
MPEPPTHSMGSCAARASPRSTTPCSTAPSPIDHPRAEECERTARDWQAAPPAALVRDPLGEASWAPESGGEPTPSGPGVAGSGSTHTHALTHACTHAHTRAEPLRLPPPPRPLPPPLSPPPLRLCCLRSLFPCPLTESAAKAGSKKFHSVQEIPSPAVCELGVGTVLHIDPEKWRAGRENVETGGKRTGSGKDSTGRGWGQTDYGLGKKERTEEASRSCICLVCVSMRRDALCGQSVGSHFCQWSLRTS

SEQ ID NO: 41823 - protein, 1021 aa, Homo sapiens
MRPRTLAMSVTALKVARLEFVPSDVRMCSEFLPSGVKLQTFEVSVTALKAARLELFVPPGGLLVPLTSGVEPQIFMVSVIAHKGSVDPKNSGAQLASPSGSPNGAADGAACQSRAVCLHSSALGWSMGLGAMEQRVGGSVTSISQRLMFPAKGTLMLDKLCSAGGSLPCTSLKGEGEDFTPSLAGLHLNAAGLHCTNDITTRPRGIPDAAQSTLATPSAARSNPADAPLICFPRSGSYLRIGIIRLLPFEIKPQCTVIHWKVTGILVMWKQLLGACMQEKTAFAGPWKEVKVKSGVMRGEASKRRNPRERCEACFLEGCWVGSLTPRKGSEELEFFRELQRSIWRVRPVTFPSLEPFGSVVAGTVAIKVHHVEDIALSLIFWDGVLIVRAENIQVVIDTDINMVVTPLESVRKRKKNVIIHRERAFCLESVVKPFNNFGAKASSIVSRYHLAFLPYDFHGADLTSSWTPHSCVVDIDSWGGHIERTLRQCPGLQAAEEQHHNPPSLSSSLATLPCSLPPFIPSSFAKAKMHFILVAGKGRECFENNYQVISISFFKGPFLVLLILVPPLLVPLRPCVNFAISQTITRQGCAVWLHSTLGFGDQPCRLRVPGVALSNTTSSTSSGQVDFYILTISSFTCLLSALLLGLPHSGRVLKFKARFDVFIVFPTVGGWKFSLINHIPCATSLMPHWPLAHQAVARRVVLGVSTVRLKYLYILPPLSHMSTGTCPLSGQVHLNRHVLATPSAVPKSVSAVSVSYVPSSICPSAVAFFTRQSWIFIAAAASNIRCHFPQTKVKMGRILHPFFGIAIFVALMFMFVRFVHHNIPDKKDIPWLLNIVEVLKGNEHKVADVGKYNAGQKMMFWSIMSMIFVLLVTGVIIWRPYFAQYFPMQVVRYSLLIHAAAGIILIHAILIHMYMAFWVKGSIKGMIEGKISDRTVDRFDLNLHVFRQTGNFTQNVPGRSFTNTVVLTMSPTQASGFDDRFYVIQRLTWGCSDVCRYFARFRIYRDLTGGDDHIAQINAL

SEQ ID NO: 41824 - protein, 94 aa, Homo sapiens
VLQLIKAVWTQRTQEPSWLHPVDPALGLQVELPASPAPCACTPQPLGPLLPGLPLWRHLRSPSVHHCTVGAPFWAGQGRSPLPQRRCALFLAGP

SEQ ID NO: 41825 - protein, 165 aa, Homo sapiens
  misc_feature (1)...(165): Xaa = X or * as defined in Table 2
QRAGSPHSPRSLSVPPLPGLPLWRHLRSPSAHRCTMGAPFWAGQGHSRLPQLAGRRGGRGASGNRCCVQRLQASWSSRWAWAWRAPHSEQPAGPAGPGQXGTWHPGQRLQRMYWVLQQCRLTGAVLDFSPGLSCLPAGQGSGPAARHAXAFHPLHGLLCGRSLPD

SEQ ID NO: 41826 - protein, 87 aa, Homo sapiens
  DOMAIN (5)..(14): Zinc finger C3HC4 type (RING finger), proteins. domain identified by eMATRIX, accession number BL00518, p-value=4.667e-09, raw score of 12.23
CIQHCHHCCCYRCRASAAGAASLQGSTHVRIQHCTPCPVLLTPSVRLRDVCTRSIWPLVVTGLPSAMNVSSWCSTSSPAFGVLVLWI

SEQ ID NO: 41827 - protein, 285 aa, Homo sapiens
  DOMAIN (147)..(165): RNase H domain identified by eMATRIX, accession number PF00075J, p-value=1.563e-14, raw score of 15.78
  DOMAIN (99)..(209): Integrase core domain identified by PFam, accession name rve, E-value=3.1e-16, PFam score of 60.1
  misc_feature (1)...(285): Xaa = X or * as defined in Table 2
MTELALASDAHMWGSNPGQRVTGVMVGECGTMLGDTQVLLSNPCVVSIFEINWILPKITKFKPIEGAENAFTDGSSNGKATYSASKGKVFPTPYTSAQKAELVAVIECFPVMRIPASTKTDNAPGYTSQAVATFFSIWNIKHITGIPCNSQGQAIVERMNLSLKQQLQKQKGGNRDYGTTHMQLNLALSTLNFLSLPTGQMLSAAEQHLQKPAAKTEAEQLVRWRDPITESWEVEWPKFRKLTTKNAGKDVEQQELSFIAGGTVSGIGGFLGLPDFKNEAADPRX

SEQ ID NO: 41828 - protein, 114 aa, Homo sapiens
LMVNSLTEVDIKSRGVPVLDLFLAQEAERLRKQTGAVEKVEEQCHPLNGLNFSQVIFALNQTLLQQESLRAGSLQIPYTTEDLIKHYNCGDLSSVILSHDSSQERITAQEIDSY

SEQ ID NO: 41829 - protein, 1027 aa, Homo sapiens
MARDRVKNGLTKLLETNILVDKMKLDLSALEPVLLAKSEDVEALMEKLAVDQESADQVRNTVQEDEATAKVKAEETQAIADDAQRDLDEALPALDAANKALDSLDKADISEIRVFTKPPDLVMTVMEAISILLNAKPDWPSAKQLLGDSNFLKRLLEYDKENIKPQILAKLQKYINNPDFVPEKVEKVSKACKSMCMWAELDITMATLREKQALLRQVEDQIQALQDEYDKGVNEKESLAKTMALTKARLVRAGKLTAALEDEQVRWEESIQKFEEEISNITGNVFIAAACVAYYGAFTAQYRQSLIECWIQDCQSLEIPIDPSFSLINILGDPYEIRQWNTDGLPRDLISTENGILVTQGRRWPLMIDPQDQVCIKVTIINFTVTKSGLEDQLLSDVVRLEKPRLEEQRIKLIVRINTDKNQLKTIEEKILRMLFTSEGNILDNEELIDTLQDSKASSCTEVRSRLSINAGSTHEGTRLYIICRQYLTTLFGADKADRIYDDMPDIEKTANVLQDYLDDYNLTNPKEVKLVFFQDAIEHVSRIARMIRQERGNALLVGVGGTGKQSLTRLAAHICGYKCLQIELSRGYNYDSFHEDLRKLYKMAGVEDKNMVFLFTDTQIVVEEFLEDINNILNSGEVPNLFEKDELEQVLAATRPRAKEVGISEGNRDEICYLLWLVTNRGMGRMGTQYGLEGTKTEEAIVQNLGETPSRETGGASAREKEETLLQQESLRAGSLQIPYTTEDLIKHYNCGDLSSVILSHDSSQGPYRRSGNVLSLEAGREGGSAEEKRFWEMGRGSYINDMIKKKDDRVEDEGCRFENERISFRGRRKRRSVIHKMEVNAVTESEDFGKLFERLLEAAAAGRERITAQEIDSYLRRELIYKRNERIGKRVKALLEEFPDKGFFFAFGAEQVFDLRGMKVLERGETRWGAFVFDKKDICRTRTPSPTPSTPGLTQQCPNWDLGLPTAEQVSGKRKRSAANVDRSLIDSFHSPERKGERRRAVGRQGESGKGDVGARGQGRVEFEP

SEQ ID NO: 41830 - protein, 123 aa, Homo sapiens
MGLLLPSRGLFAVLPHAQGSLVVTPETTVGHFMGNNTVLDVLRREGYEVEHAPAGRPIHKSASLAGIKMTKEGKKRVADLVKAETQTPFISTTEKYQPSVPTNQVSPFLSHPHPSKHALTSAV

SEQ ID NO: 41831 - protein, 167 aa, Homo sapiens
WVMLMVNSLTEVDIKSRGVPVLDLFLAQEAERLRKQTGAVEKVEEQCHPLNGLNFSQVIFALNQTLLQQESLEAGSLQIPYTTEDLIKHYNCGDLSSVILSHDSSQVPNFINATLPPQERITAQEIDSYLRRELIYKRNERIGKRVKALLEEFPDKGFFFAFGAASQ

SEQ ID NO: 41832 - protein, 278 aa, Homo sapiens
MTKQICYLLWLVTNRGMGRMGTQYGLEGTKTEEAIVQNLGETPSRETGGASAREKEETLLQQESLRAGSLQIPYTTEDLIKHYNCGDLSSVILSHDSSQGPYRRSGNVLSLEAGREGGSAEEKRFWEMGRGSYINDMIKKKDDRVEDEGCRFENERISFRGRRKRRSVIHKMEVNAVTESEDFGKLFERLLEAAAAGRERITAQEIDSYLRRELIYKRNERIGKRVKALLEEFPDKGFFFAFGAGHFMGNNTVLDVLRREGYEVEHAPAGQTHPQREE

SEQ ID NO: 41833 - protein, 162 aa, Homo sapiens
TIFQRTFLLEFKTLQSPEPSANSVSAHNPLWLHSFTSHKDWMDKCVCLVTAFSQHMHHVPVALPEMVRALSAQQQTLRQITICGDRQAKDTKVLVQCVHPVYIPNMVLILADGDPSSFLSHWLPFLSTLRRQEDQATAYVCENQACSMLIMDPCELRKLLHP

SEQ ID NO: 41834 - protein, 225 aa, Homo sapiens
RNCARRRPCWGFLEDYAFVVRGLLDLYEASQESAWLEWALRLQDTQDRLFWDSQGGGYFCSEAELGAGLPLRLKDDQDGAEPSANSVSAHNLLRLHGFTGHKDWMDKCVCLLTAFSERMRRVPVALPEMVRALSAQQQTLKQIVICGDRQAKDTKALVQCVHSVYIPNKVLILADGDPSSFLSRQLPFLSTLRRLEDQATAYVCENQACSVPITDPCELRKLLHP

SEQ ID NO: 41835 - protein, 105 aa, Homo sapiens
  DOMAIN (25)..(48): LACY PROTON/SUGAR SYMPORTER SIGNATURE domain identified by eMATRIX, accession number PR00174A, p-value=7.987e-09, raw score of 8.67
FLSLPTFLFVIFSGEEELLVLALVFLSLFFFFFFLRWSFAVVAQAVVQWHNLSSLPFGFKQFSCLSLPSSWDYRCPPPRPANFCIFTRDGVSPCCPGWSRTSDLR

SEQ ID NO: 41836 - protein, 123 aa, Homo sapiens; identical to SEQ ID NO: 38146
  DOMAIN (52)..(69): 70 KD HEAT SHOCK PROTEIN SIGNATURE domain identified by eMATRIX, accession number PR00301F, p-value=5.765e-20, raw score of 13.98

SEQ ID NO: 41837 - protein, 98 aa, Homo sapiens
NRMGNHFIAEFKRKHKKDISENKRAVRRLRTACERAKRTLSSSTQASIEIDSLYEGIDFYTSITRAPFEELNAWGISWWWSLPPPVGASSGPTIEEVD

SEQ ID NO: 41838 - protein, 553 aa, Homo sapiens; identical to SEQ ID NO: 38982
  DOMAIN (307)..(362): Heat shock hsp70 proteins family proteins domain identified by eMATRIX, accession number BL00297G, p-value=1.000e-40, raw score of 21.87
  DOMAIN (3)..(519): Hsp70 protein domain identified by PFam, accession name HSP70, E-value=1e-247, PFam score of 836.4

SEQ ID NO: 41839 - protein, 270 aa, Homo sapiens
  DOMAIN (163)..(218): Heat shock hsp70 proteins family proteins domain identified by eMATRIX, accession number BL00297G, p-value=1.000e-40, raw score of 21.87
  DOMAIN (1)..(270): Hsp70 protein domain identified by PFam, accession name HSP70, E-value=4.5e-11, PFam score of -107.0
  misc_feature (1)...(270): Xaa = X or * as defined in Table 2
AGKPHCGGEFCTPNVHHFFRXFXANPKRTIIENKEALTPPPTVCXRAKPTLSSAPRAVIEIDSSXEGIGLYTSITPPRFEELNADLFLAPLTPVEKALRNAKLDKSQIHDIVLVGGSTRIPKIQSFLQDFFNGKELNKSINPDEAVAYGAAVQAAILSGDKSENVQDLLLLDVTPLSLGIETAGGVMTVLIKRNTTIPTKQTQTFTTYSDNQPGVLIQVYEGERAMTKDNNLLGKFELTGMPGGMPGGFPGGGAPPSGGASSGPTIEEVD

SEQ ID NO: 41840 - protein, 130 aa, Homo sapiens
MVNHFIAEFKRKHKKDISENKRAVGRLRTACERAKRTLSSSTQASIEIDSLYEGIDFYTSITRARFEELECWTCSVAPWDPVEKALPRCQTRTSHRFHDICPGLVVLLRIPQDCRSLAAKTSFNGKKNLN

SEQ ID NO: 41841 - protein, 292 aa, Homo sapiens
  DOMAIN (242)..(261): INTERLEUKIN-1B CONVERTING ENZYME SIGNATURE domain identified by eMATRIX, accession number PR00376E, p-value=8.333e-17, raw score of 12.26
  DOMAIN (1)..(257): ICE-like protease (caspase) p20 domain identified by PFam, accession name ICE_p20, E-value=7.1e-79, PFam score of 264.9
MTMLLQNLGYKVDVKRNLTAWEMTTELEAFAHRPEHKTSDSTFPVFLSHGVREGICGKKYSEQVPDILQFNEIFKMLNSKNCPSLKDKPKVIIFEACCGDKVLKEKRKQFIRSVGEGTINGLLGELLETRVLSQEEIEIVKCENATVMDKARALLDSVIRKGAPACQICITYICEEDSHLAGTLGLSAGNDYRVGGIFSAPRAQGLWSHGIREGICGKKYSEQVPDVLQLNGIFKTLNSKNCPSLKDKPKVIIIQACHVETHEWTLISLCPSWTLDPTTDLKRPEESDSMLR

SEQ ID NO: 41842 - protein, 395 aa, Homo sapiens
  DOMAIN (359)..(394): Caspase family histidine proteins domain identified by eMATRIX, accession number BL01121E, p-value=5.179e-31, raw score of 23.71
  DOMAIN (203)..(334): ICE-like protease (caspase) p20 domain identified by PFam, accession name ICE_p20, E-value=7.3e-86, PFam score of 288.0
SIPHEPWPVSLLLFQEQVPGKKELRKGLALLEAIISICGSLDKVLKEKRKLFIHSMGEGTINGLLDELLQTRVLNQEEMEKVKRENATVMDKTRALIDSVIPKGAQACQICITYICEEDSYLAETLGLSADQTSGNYLNMQDSQGVLSSFPAPQAVQDNPAMPTSSGSEGNVKLCSLEEAQRIWEQKSAEIYPIMDKSSRTRVALIICNEEFDSIPRRTGAEVDITGMTMLLQNLGYSVDVKKNLTASDMTTELEAFAHRPEHKTSDSTFLVFMSHGIREGICGKKHSEQVPDILQLNAIFNMLNTKNCPSLKDKPKVIIIQACRGDSPGVVWFKDSVGVSGNLSLPTTEEFEDDAIKKAHIEKDFIAFCSSTPDNVSWRHPTMGSVFIGRLIEH

SEQ ID NO: 41843 - protein, 217 aa, Homo sapiens
AGPELRGLFPGVRQLPISPIEMTAAMMYGITSCRMRTESEPSCGSPVVSGDPKEDHNCTNAKSSNARSTLPTSDSIPSSSLADDHYKFASKESQEGNEGSEGSFRSHESHSDREEDDRKHSQKEPRDALGDSGYASQHKKRQDFAKARKVPSDTLPLKKRRTVKHRPRTAPHQGEEEEIKEAAGSLLHLAEIRSCLNNITNRTAKGQEEQNEITKKL

SEQ ID NO: 41844 - protein, 96 aa, Homo sapiens
  DOMAIN (75)..(96): Ribosomal protein L27e proteins domain identified by eMATRIX, accession number BL01107C, p-value=6.344e-26, raw score of 9.88
  DOMAIN (18)..(96): Ribosomal L27e protein family domain identified by PFam, accession name Ribosomal_L27e, E-value=8.3e-28, PFam score of 105.8
LIPPLLRPLVQSGGIPEMGKFMKPGKVVLVLAGRYSGRKAVIVRYSVDIPLDKTVVNKDVFRDPALKRKARREAKVKFEERYKTGKNKWFFQKLRF

SEQ ID NO: 41845 - protein, 76 aa, Homo sapiens
TQSEVPAQDLGLLAGVSSGHLWLYGFLSGPFSLLSAEMGKFMKPGKVVLVLAGRYSGRKAVIVKVSASRDSASLHA

SEQ ID NO: 41846 - protein, 175 aa, Homo sapiens
  DOMAIN (29)..(72): Ribosomal protein L27e proteins domain identified by eMATRIX, accession number BL01107A, p-value=1.000e-40, raw score of 12.03
  DOMAIN (27)..(167): Ribosomal L27e protein family domain identified by PFam, accession name Ribosomal_L27e, E-value=3.3e-89, PFam score of 309.8
FWQESASGHLWLSGFLSGPFSLLSAEMGKFMKPGKVVLVLAGRYSGRKAVIVKNIDDGTSDRPYSHALVAGIDRYPRKVTAAMGKKKIAKRSKIKSFVKVYNYNHLMPTRYSVDIPLDKTVVNKDGFTDPALKRNARMEAKVKFEERYKTGKNKWFFQKLRVLDAFVLIIKNYKE

SEQ ID NO: 41847 - protein, 138 aa, Homo sapiens
  misc_feature (1)...(138): Xaa = X or * as defined in Table 2
LGGLKGTWGETKPAMAAAEEEDGGPEGPNRERGGAGATKTLLYTGNHLFSPQWLETRPERQECPVCKAGISREKVVGEKSLLTFSLHFLRLKTPQICRLPVXLFLPPXGFQPFGDTGGFHFSFGVGAFPFGFFNSPSY

SEQ ID NO: 41848 - protein, 218 aa, Homo sapiens
MAAAEEEDGGPEGPNRERGGAGATFECNICLETAREAVGQRPAPESRGGFQPFGDTGGFHFSFGVGAFPFGFFTIVFNAHEPFRRGTAATQKSICSVAPFPDPGFFYYRVRKVISAPVGEPASLWSVTPLHSKGFIFVSAFLGEWAWLGDVTVDPGFCHWIWNEDLVSQSSMIPATAIGSAFQEAVVVTRAPPPLPLNPSCRDCHSNIHVSKMAAALA

SEQ ID NO: 41849 - protein, 217 aa, Homo sapiens
  DOMAIN (75)..(84): Zinc finger C3HC4 type (RING finger), proteins. domain identified by eMATRIX, accession number BL00518, p-value=2.714e-10, raw score of 12.23
  DOMAIN (61)..(103): Zinc finger, C3HC4 type (RING finger) domain identified by PFam, accession name zf-C3HC4, E-value=1.7e-05, PFam score of 22.1
RGQEVVSGLLGRVYVYLGGLKGTWGETKPAMASAEEESGAPNVPNRERGGAGRPKTPFECNICLETAREAVVSVCGHLYCWPCLHQWLETRPERQECPVCKAGISREKVVPLYGRGSQRSPQDPRIKNSPRPPGGRGPAPESRGGSQPFGDTGGFHFSFGVGAFPFGFFTTVFNAHEPFRRGTGVDLGQGHPSLQLGKEFPLPGFSAIFFLFWLLSN

SEQ ID NO: 41850 - protein, 122 aa, Homo sapiens
AFPRGRARDLQPAMPEPPTHSMGSCAARASPTSTTPCSMAPSPIDHPRAEECEHRVQDWQAAPPAAPLKVCKYTNQHPVFSTRFVNAPIDTLYLAALVRTWRTFMSSSRIVNTPIGTLYLAQ

SEQ ID NO: 41851 - protein, 158 aa, Homo sapiens
CQKILSESWPKQFFHSVKMSANKGLCLGLRGSLTPGSPPLPPPGSGWNQGLQNRGQRARDSPAALQEPTWSPRGAHGLPCPEQLQLQPLPPRESSPEGSSCLACGYRRRQTKTGFLYHLQSLVCGVQLAYTVCPVRTAVGQSRNTTSPFPSGGLGCQH

SEQ ID NO: 41852 - protein, 309 aa, Homo sapiens; identical to SEQ ID NO: 33125

SEQ ID NO: 41853 - protein, 247 aa, Homo sapiens
HVGIMGATTEDEISVGTQPNHITESRWLGEVTACWQSSQPSLALGTSSAWAPTLVTLEEPFSPPLHRASGCGGCTGSPSSAGPLALRSISRRALAAFPRGRARDLQPAMPEPPTPSMGSCAAQASPTSAAPCSTAPSPIDHPRAEECERTVQDWRAAPPAAPVRDPLETGKIDQEIHKYNTPGFTGCLSRVQFNQIAPLKAALRQTNASAHVHIQGELVESNCGASPLTLSPMSSATDPWHLDHLDS

SEQ ID NO: 41854 - protein, 431 aa, Homo sapiens
  DOMAIN (187)..(206): TYROSINE KINASE CATALYTIC DOMAIN SIGNATURE domain identified by eMATRIX, accession number PR00109B, p-value=1.882e-12, raw score of 12.27
  DOMAIN (72)..(367): Eukaryotic protein kinase domain identified by PFam, accession name pkinase, E-value=1.1e-71, PFam score of 251.5
  misc_feature (1)...(431): Xaa = X or * as defined in Table 2
ETIQAVVFMSLHFLYYCSEPTLDVKIAFCQGFDKQVDVSYIAKHYNMSKSKVDNQFYSVEVGDSTFTVLKRYQNLKPIGSGAQGIVCAAYDAVLDRNVAIKKLSRPFQNQTHAKRAYRELVLMKCVNHKNIISLLNVFTPQKTLEEFQDVYLVMELMDANLCQVIQMELDHERMSYLLYQMLCGIKHLHSAGIIHRDLKPSNIVVKSDCTLKILDFGLARTAGTSFMMTPYVVTRYYRAPEVILGMGYKENVDIWSVGCIMGEMVRHKILFPGRDYIDQWNKVIEQLGTPCPEFMKKLQPTVRNYVENRPKYAGLTFPKLFPDSLFPADSEHNKLKASQARDLLSKMLVIDPAKRISVDDALQHPYINVWYDPAEVEAPPPQIYDKQLDEREHTIEEWKELIYKEVMDSEEKTXKWCXLKGQPSPSAQVQQ

SEQ ID NO: 41855 - protein, 428 aa, Homo sapiens
RASLRIDTQTRQMQLLEASSPSTSPDQCVVRFQLPARTPRGSGSLGPNGTFCCLLLLLILSVDKEKGFEGSRGAGEVEKEVEEEDEEEEEAEGARRVCVHVCMRVAAGGAACQSRAVRSHSSALGWSMGLGAVEQGVVLLGEARAAQEPMEWVGGSGMAGCRSRALPRRKAAKARQEIEHSPGGPALLGDPVHPPQPLARVLSPPLPGASRAGRLLRVRGPPSPSPPGTPAGPQAPHAAPVPARASPSTPPCKLREWAPALASPERGSHSAGGRLKGSSNATKVGAQAGEKNCGIHDRSGGVEGRSVLNGDPTLNILGVEQYEAIRYPGGDGILLSQQEKATGRGAGFATGMSAGHTSGVQLHGAKTVVITFLDNSASVRGAFSFPFLCSLNQESSISISISISISICSAVGHDCLYCLPAAHVICLM

SEQ ID NO: 41856 - protein, 323 aa, Homo sapiens
MDRPETWVHKGRPDAYVCKYLPTSVEAGLILGSTGGYLALGLALSLSLQEIVSYWDGSDVQDYRGQPSAGEVPEAGLLRGPGQGRLDSGLTTALYMLRKRQSRKFTTWQSVFTKPEFGFVVASLELIYKEVMNSEEKTKNGVVKGQPSPSACREVWRERHEREPGLRAALAGQLELQVGVGLAGPRTRDSQPALLAPGSEGLSTRASGCGRCTGSPSSAGPPALCSISRRAVAAFLRGKAQDLQPAMPEPPTHSMGSCAARASPTSTTPCSMAPSPSDHPRAEECERTAPGLAGSSTCSPGAGSTSPSLPDECCPLLYCGQSH

SEQ ID NO: 41857 - protein, 301 aa, Homo sapiens
MGSPGVHRKTGTNKMDGWIGGMDGRNGWMNRGEVPKSAVCKAVYPGKSVVLFKGLRAREATDGVDSTQDLKAGELGALKTTEDRRLMSQLKEHELNLADSEVDNQKRGKRHYEEKQKEHLDTLNKKKRELDMKEKELEKIQKFGGTVVRIQAKLVNDEGASSRAKEEGLSGCFDSILARFPKLATLSVIGYQNRLISELVGRSRWGHLLLEMQKSEKTSQKADLRFTIVMLPSRVIEEVANFMTAKKIIRNMANTRQNNLECTNHRVHDKSSGPNFEGPPMPSGGVNTVSTRYRGAGNREE

SEQ ID NO: 41858 - protein, 80 aa, Homo sapiens
  misc_feature (1)...(80): Xaa = X or * as defined in Table 2
PVGTNTECEIPFQPMETGHSSRVDASGYKXPCLLCSVYSRGKTAGECTLFXVHHFLSSLCPVNLGANNQLHYIPWFSTDG

SEQ ID NO: 41859 - protein, 159 aa, Homo sapiens
  DOMAIN (57)..(67): C2HC-TYPE ZINC-FINGER SIGNATURE domain identified by eMATRIX, accession number PR00939A, p-value=6.318e-09, raw score of 8.95
  DOMAIN (57)..(74): Zinc finger, CCHC class domain identified by PFam, accession name zf-CCHC, E-value=0.043, PFam score of 17.0
MGPNSTLENLLKGATSVFYNRDQEEAQKKERKLRGRTKALAAALQAGKVQEPQDASISCYQCGRPGYFKEECPGSKTKPPQPCPSSGKNQWRQNCPQIWRSLGSEPVSQMKGYTCQKFCHKSTPNKGGRVIYNLTHPPYCCVQFQFPLAGMGPHILYLS

SEQ ID NO: 41860 - protein, 336 aa, Homo sapiens
  DOMAIN (35)..(106): RNA recognition motif. domain identified by PFam, accession name rrm, E-value=0.0039, PFam score of 23.9
VLAGGPRTHPDQKPIPWRQPLAPHQGRGAPLAADVYVGNLPGDARVSDLKRALRELGSVPLRLTWQGPRRRAFLHYPDSAAAQQAVSCLQGLRLGTDTLRGRPVGTVPKERGWRIGKGEGYADLEYAMMVSMGAVSKETPVVTIVHDCQVVDIPEELVEEHDITVDYILTPTRVIATGCKRPKPMGITWFKTSLIHALFECSYCKQRISLIDHQHPVGSSQLVSHDFKERKPGGHYTKDLCQAGDGTRDLGLKLERGPEPLGSSSSSIDLLILGDSRAMSLPVTAVCQWQMGVNATETIRHTEMKIFTIQTFTKGLPTLALEKREAIVSIKQRQQE

SEQ ID NO: 41861 - protein, 279 aa, Homo sapiens
  DOMAIN (221)..(255): PROTEIN TRANSCRIPTION REGULATION NUCLEAR domain identified by eMATRIX, accession number PD02411, p-value=1.600e-27, raw score of 21.89
  DOMAIN (132)..(260): SET domain identified by PFam, accession name SET, E-value= 2.5e-44, PFam score of 160.7
MEAGEASSSEEEPPSPEDKENQVPKRVGPHLRFEISSDDGFSVEAESLEGMSGARLLGIHHDAVIFLAEQLPGAQRCQHYKFRYHQQGEGQEEPPLNPHGAARAEVYLRKCTFDMFNFLASQHRVLPEGATCDEEEDEVQLRSTRSAIHGRGLFCKRNIDAGEMVIEYSGIVIRSVLTDKREKFYDGKGIGCYMFRMDDFDVVDATMHGNAARFINHSCEPNCFSRVIHVEGQKHIVIFALRRILRGEELTYDYKFPIEDASNKLPCNCGAKRCRRFLN

SEQ ID NO: 41862 - protein, 233 aa, Homo sapiens
  DOMAIN (155)..(177): SET domain proteins domain identified by eMATRIX, accession number PF00856B, p-value=4.462e-23, raw score of 16.42
  DOMAIN (84)..(215): SET domain identified by PFam, accession name SET, E-value= 6.3e-34, PFam score of 126.1
CQHYKFRYHQQGEGQEEPPLNPHGAARAEVYLRKCTFDMFNFLASQHRVLPEGATCDEEEDEVQLRSTRRATSLELPMAMRFRHLKKTSKEAVGVYRSAIHGRGLFCKRNIDAGEMVIEYSGIVIRSVLTDMRKKFYDGKGIGCYMFSMDDFDVVDATMHGNAARFINHSCEPNCFSGVIPGGGPENKIVIFGLRRILGGEEVNLRTKKFPIEDAKNKLPCNCGAKRCRRFLN

SEQ ID NO: 41863 - protein, 44 aa, Homo sapiens
  DOMAIN (13)..(31): Small cytokines (intercrine/chemokine) C-C subfamily signatur domain identified by eMATRIX, accession number BL00472B, p-value= 7.652e-14, raw score of 14.67
  DOMAIN (3)..(34): Small cytokines (intecrine/chemokine), inter domain identified by PFam, accession name IL8, E-value=4.2e-09, PFam score of 34.8
VYFPDAINAPVTCCYNFTNRKISVQRLASYRRITISKGPKEAAM

SEQ ID NO: 41864 - protein, 184 aa, Homo sapiens
  DOMAIN (54)..(89): Troponin domain identified by eMATRIX, accession number PF00992A, p-value=8.461e-09, raw score of 16.67
  DOMAIN (1)..(34): TPR Domain domain identified by PFam, accession name TPR, E- value=1.3e-05, PFam score of 32.0
AILYAKRASVFVKLQKPNAAIRDCDRAIEINPDSAQPYKWRGKAHRAQKIAEHRRKYERKREEREIKERIERVKKAREEHERAQREEEARRQSGAQYGSFPGGFPGGMPGNFPGGIPGMGGGMPGMAGMPGLNEILSDPEVLAAMQDPEVMVAFQDVAQNPANMSKYQSNPKVMNLISKLSAKK

SEQ ID NO: 41865 - protein, 268 aa, Homo sapiens
MENSKSKDLGTRYSEDPRPSICDTALSNTLEGDESCRSSDSPEADFEMELSAYLILPECGTRTQDLLNGGTGRPVTQTGLKHIPLLATLQGSVVSGIFELSGAIMFPLPRHWCLQQKPLVVCLVQLQPCMEAVPVPVPGAACATAAAGVCRSEVTHAVWQLRVRQPEDEGSKEDLPHTKLVPVKWNSFFKRLHRPFHGMGGGMPGMAGMPGLNEILSDPEVLAAMQDPEVLVAFQDVAQNPANMSKYQSNPKVMNLISKLSVKFGGQV

SEQ ID NO: 41866 - protein, 379 aa, Homo sapiens
  DOMAIN (245)..(280): Troponin domain identified by eMATRIX, accession number PF00992A, p-value=8.461e-09, raw score of 16.67
  DOMAIN (124)..(191): TPR Domain domain identified by PFam, accession name TPR, E- value=3.9e-08, PFam score of 40.5
PPSFAHHLPTMDPRKVNELRAFVKMCKQDPSVLYTEEMRFLREWVESIGGKVPPATQKAISEENTKEEKPDSKKVEEDLKADEPSSEESDLEIDKEGVIEPDTDAPQEMGDENAEITEEMMDQANDKKVAAIEALNDGELQKAIDLFTDAIKLNPRLAILYAKRASVFVKLQKPNAAIRDCDRAIEINPDSAQPYKWRGKAHRLLGHWEEAAHDLALACKLDYDEDASAMLKEVQPRAQKIAEHRRKYERKREEREIKERIERVKKAREEHERAQREEEARRQSGAQYGSFPGGFLGGMPGNFPGGMPGMGGGMPGMGGMPGLNEILSDPEVLAAMQDPEVMVAFQDVAQNPANMSKYQSNPKVMNLISKLSAKFGGQA

SEQ ID NO: 41867 - protein, 88 aa, Homo sapiens
  DOMAIN (28)..(50): UBIQUITIN SIGNATURE domain identified by eMATRIX, accession number PR00348C, p-value=1.643e-27, raw score of 20.03
  DOMAIN (1)..(51): Ubiquitin family domain identified by PFam, accession name ubiquitin, E-value=3.1e-38, PFam score of 122.8
VKAKIQDKEGIPPDQQRLIFAGKQLEDGRTLSDYNIQKESTLHLVLRLRGGIIEPSLRQLAQKYNCDKMICRKKCGHTNNLRPKKKVK

SEQ ID NO: 41868 - protein, 104 aa, Homo sapiens
  DOMAIN (56)..(104): Ribosomal L40e family domain identified by eMATRIX, accession number PF01020, p-value=1.000e-40, raw score of 15.00
  DOMAIN (1)..(52): Ubiquitin family domain identified by PFam, accession name ubiquitin, E-value=8.2e-39, PFam score of 124.5
NVKAKIQDKEGIPPDQQRLIFAGKQLEDGRTLSDYNIQKESTLHLVLRLRGGIIEPSLRQLAQKYNCDKMICRKCYARLHPRAVNCRKKKCGHTNNLRPKKKVK

SEQ ID NO: 41869 - protein, 147 aa, Homo sapiens
  misc_feature (1)...(147): Xaa = X or * as defined in Table 2
RFFNFLGGIPPXSGPKGMTLDQTQGSKSKQIQWPALTFKPLVERNIPSSVTAVEFLVDKQLDFLTEDSAFQPYQVRNFRLLFKIKGXLNFIDIQTFFKQYSLNIISSNFXLCEKPNECSQLILLIGXTVYXFFNFLGGIPLNLGQKE

SEQ ID NO: 41870 - protein, 703 aa, Homo sapiens
  DOMAIN (362)..(382): ENDOPEPTIDASE LA (LON) SERINE PROTEASE (S16) SIGNATURE domain identified by eMATRIX, accession number PR00830A, p-value=3.712e- 09, raw score of 8.41
MIRLPWPPKVLGLQVTAVAQQNQGEVPEPQDMKVAEVLFDAADANAIEEVNLAYENVKEVDGLDVSKEGTEAWEAAMKRYDERIDRVETRITARLRDQLGTAKNANEMFRIFSRFNALFVRPHIRGAIREYQTQLIQRVKDDIESLHDKFKVQYPQSQACKMSHVRDLPPVSGSIIWAKQIDRQLTAYMKRVEDVLGKGWENHVEGQKLKQDGDSFRMKLNTQEIFDDWARKHAIVTGDAVGMDDIPQEARQYRHNQAYAYSIQGDGAEDDDERIVRFHTRVTVDSDTLASDAARLTCRHGLGNQYTVYSQASTMSIPVAMETDGPLFEDVQMLRKTVKDEAHQVLQLYQITQINHGLMMVGPSGSGKSMAWRVLLKALERLEGVEGVAHIIDPKAISKDHLYGTLDPNTREWTDGLFTHVLRKYVFFDLSILKSFPTRIIDSVRGELQKRQWIVFDGDVDPEWVENLNSVLDDNKLLTLPNGERLSLPPNKLPTPPPPPNHLWKNRLPRNWSLLPKMLRATDIESKAKHGLKQALETVNDYNPLMKDFPLNDLLSATELDKIRQALVAIFTHLRKIRNTKYPIQRALRLVEAISRDLSSQLLKVLGTRKLMHVAYEEFEKVMVACFEVFQTWDDEYEKLQVLLRDIVKRKREENLKMVWRINPAHRKLQARLDQMRKFRRQHEQLRAVIVRVLRPQSAGLHA

SEQ ID NO: 41871 - protein, 67 aa, Homo sapiens
HTSNNNSCYSTSHLIFLDKPILLLHIISLDFIQLFGSIQMEHMHTQDLVCLLLSGFTQKMQLMLKLH

SEQ ID NO: 41872 - protein, 640 aa, Homo sapiens
  DOMAIN (84)..(98): MU OPIOID RECEPTOR SIGNATURE domain identified by eMATRIX, accession number PR00537A, p-value=8.821e-09, raw score of 8.17
MGNVRPSREDRDKRTHNVLFCIKACDRARRKGSPGGESRAKVAAQLPVAWVPLHMSQKPSRPCQEQSMKAARAACHASDEGVQCQDPLRPSAAGPAPQLALVCVPHARLRPSWLLLLRGPDQHRRGCVGPAHALISQRHAIIPSPPSPGCVTTSQHPGVRCLRGKLTREARRGTSTRVYYERRRAQRARTQTKQKPQRKQNHTEKAKKSSKIQTKSSSEFQYDKKRRARREAHACIPAAQEARQENRLNTRDGRGKLSADPGMSLHPGEVRADESKPTPTTADSESEARQTRVRSGTTGSDGRAPRSRREQSRRGPHARTTTRGTDDAGRARTAHDGAPGRRHDTIRELTQAGSPRHDPQHRSASAATDAQSARRTRSAKENDSEHTPTHPPPTGRKWSGMTHSKLQAAVTLRCGDGRPISGDKYTVYSQASTMSIPVAMETDGPLFEDVQMLRKTVKDEAHQTFKPLVERNIPSSVTAVEFLVDKQLDFLTEDSAFQPYQNSPSPWLHQPTPVTSADGIGLLSHIPVRPSSAEPHRPLKITAHSSPPLTKTLVDHHKEELERKAFMEPLRSVASTSAKNDLDLNRSQTGKDCHLHRHFVDPVLNQLQRPPQETGERLNKYKEEHRRILQESIDVAPFTT

SEQ ID NO: 41873 - protein, 159 aa, Homo sapiens
WWANVSTHLSKPQNAQRVSPPSCLVSARRPSGCAMIQAFSASSTRDASTRRGPLRPGPTTPARDSGADAGGGHQLAPLTQYQNRHWRADLGPPSPALPEQEFHGKPLWRIGCGCPCDGHSHPSYLPCTSEDSGHPCTAADPDSCFTPVSPQHFIDLFKF

SEQ ID NO: 41874 - protein, 301 aa, Homo sapiens
LILTSVLLFQRHGYCTLGEAFNRLDFSSAIQDIRTFNYVVKLLQLIAKSQLTSLSGVAQKNYFNILDKIVQKVLDDHHNPRLIKDLLQDLSSTLCILIRGVGKSVLVGNINIWICRLETILAWQQQLQDLQMTKQVNNGLTLSDLPLHMLTNILYRFSDGWDIITLGQVTPTLYMLSEDRQLWKKLCQYHFAEKQFCRHLILSEKGHIEWEVGCNFATFRKHYPAKEQYGRQHCIFCRHCSILFWKDSGHPCTAADPDSCFTPVSSQQFIALFQVLRAAPCHPYWRFVNPAVCAGLIVSVL

SEQ ID NO: 41875 - protein, 345 aa, Homo sapiens; identical to SEQ ID NO: 36807
  DOMAIN (30)..(68): Ribosomal protein L21e proteins domain identified by eMATRIX, accession number BL01171, p-value=9.719e-36, raw score of 19.94
  DOMAIN (2)..(100): Ribosomal protein L21e domain identified by PFam, accession name Ribosomal_L21e, E-value=1.8e-62, PFam score of 220.9

SEQ ID NO: 41876 - protein, 178 aa, Homo sapiens
  DOMAIN (6)..(115): Ribosomal protein L21e domain identified by PFam, accession name Ribosomal_L21e, E-value=4e-06, PFam score of 25.6
  misc_feature (1)...(178): Xaa = X or * as defined in Table 2
FAKNERTQRGKRRGTRYMFSRPFRKHGVVPLGPHICRIYRKGDIVDTQGNGVLFKKGMPHKCYPWPKLEGVLQLLPQHAVAIVVNQPVLGQSFFPREXIVRIEHIKHSKSPRXASLKRVLKENDSEKERSPNEKGTWGSNLKRHLAPPQKKHTLXRTNGKEPELLEPIPYEFHGHNRC

SEQ ID NO: 41877 - protein, 163 aa, Homo sapiens
  DOMAIN (30)..(68): Ribosomal protein L21e proteins domain identified by eMATRIX, accession number BL01171, p-value=8.953e-30, raw score of 19.94
  DOMAIN (2)..(100): Ribosomal protein L21e domain identified by PFam, accession name Ribosomal_L21e, E-value=2e-50, PFam score of 180.9
MMNTKAKRKGTGYMFSRPLQKHGVVPLATYMLIYKKGDIADIKGRGTVQKGMPHRCYHGKTGRVYNFTQHAFGIVLNKQVKGKILAKRINVHIEHIKHSKSRGSFLKCVKENDQKKKEAKEKSTWVQLKHQPAPPREAHCVRTNGKELELLESIPYEFMHNRC

SEQ ID NO: 41878 - protein, 129 aa, Homo sapiens
  misc_feature (1)...(129): Xaa = X or * as defined in Table 2
NCKISFLHFCYIFVKALKRISALSRGKILAKRINVRIEHIKHSKSRDSFLKRVKENDQKKKEAKEKGTWVQLKRQGKNLVYISLVLRALXGXDLTHHIIILFPFFFLXXPAPPREAHFVRTNGKEPELL

SEQ ID NO: 41879 - protein, 44 aa, Homo sapiens
  DOMAIN (1)..(44): Ribosomal protein L21e domain identified by PFam, accession name Ribosomal_L21e, E-value=0.00057, PFam score of 1.6
  misc_feature (1)...(44): Xaa = X or * as defined in Table 2
GMGTVQKGMPHKCYHGKTGRVYNVTQHAVGIVVNKQVKXVVLCG

SEQ ID NO: 41880 - protein, 207 aa, Homo sapiens
  DOMAIN (18)..(132): Ribosomal protein L21e domain identified by PFam, accession name Ribosomal_L21e, E-value=0.014, PFam score of -13.9
  misc_feature (1)...(207): Xaa = X or * as defined in Table 2
WAFRPEPPSSSKFAQNDGPQRGKRRGTRYMFSRPFXENHGVVPLAHIFMRIYKKGDIVRHPRGMGYCSKKGMPPTSCYPWQKLGRVYNVTPAMLFGIVCKQTKLKGNDSLPRGILMWRIXAHLRHFXGARDRASLKTCGRENGSRKKERKPKGGKVTWGFQLKRRHLGFPPQEEATFLLKEPIGGREPXACLEPYFPYWISWGINRC

SEQ ID NO: 41881 - protein, 75 aa, Homo sapiens; identical to SEQ ID NO: 41574
  DOMAIN (36)..(47): NONHISTONE CHROMOSOMAL PROTEIN HMG17 FAMILY SIGNATURE domain identified by eMATRIX, accession number PR00925C, p-value=4.789e- 12, raw score of 5.57
  DOMAIN (11)..(75): HMG14 and HMG17 domain identified by PFam, accession name HMG14_17, E-value=0.0024, PFam score of 24.6

SEQ ID NO: 41882 - protein, 104 aa, Homo sapiens
  DOMAIN (31)..(62): HMG14 and HMG17 proteins domain identified by eMATRIX, accession number BL00355, p-value=1.692e-37, raw score of 5.97
  DOMAIN (15)..(104): HMG14 and HMG17 domain identified by PFam, accession name HMG14_17, E-value=2.6e-25, PFam score of 97.5
  misc_feature (1)...(104): Xaa = X or * as defined in Table 2
PAPTSRCRRRRAPLPKKKAEGDAKGNKAKVKDEPQRRSARLSAKPAPPKPEPKPKKAPAKKGEKVPKGKKGKADAGKEGEXPLQKNGDAKTDQAQKAEGAGDAK

SEQ ID NO: 41883 - protein, 163 aa, Homo sapiens
RPLLLLLLPPPQRLLGLSTPRNRPPRAARRTRCPCRPGRVGRPEGPTDLTTCDSTGAAPSYFCPATVLPSQLSTCLPEVNFQKQESPEPGRGMNREDAPEKSLGADVHSAEGPSAAHAAEDGIKPDSQRGGVPAHLCRGGQQPAQPAASALHRPGCRRRGEWR

SEQ ID NO: 41884 - protein, 57 aa, Homo sapiens
GEGCGWAEVGRCRPGPPDPAGPAGAAGPGAARGGLFRGVLSPSSRCGGGSSSSRSGR

SEQ ID NO: 41885 - protein, 137 aa, Homo sapiens
KQPAVQVISVFLDAAASCTEAAGSPALAAPAGEQSCSVQPAGTSMGVPRARQGDEPRGSSREESGGDVHSAEGPSAAHAAEDGIKPDSQRGGVPAHLCRGGQQPAQPAASALHRPGEGRFDPSCLLSTWLRLQGGSL

SEQ ID NO: 41886 - protein, 215 aa, Homo sapiens
  DOMAIN (88)..(204): gag gene protein p24 domain identified by PFam, accession name gag_p24, E-value=4.3e-14, PFam score of 57.3
MGQVWGLVHFTLEVFHTGDEEEQEYSEVTEDVTEHVYLPAKAKVAKEEEAGIQQARQEGDLEAWQFPVRIHPPDQQENITATFEPFPFKLLKELKQAINQYGPGSPFVMGLLKNVTVSSQMIPTDGDPLTRACLTPAQFLQFKTWWADEASIQAARNAWAQPQINITADQLLGVGGWAGLDAQFVMQDDAIEQLRGVCIRAREKNHLMWGTIPFL

SEQ ID NO: 41887 - protein, 246 aa, Homo sapiens
  DOMAIN (118)..(246): gag gene protein p24 domain identified by PFam, accession name gag_p24, E-value=8.3e-35, PFam score of 129.1
EEQEYSEVTEEVTEQVYLPAKAKVAKEGEVHPYPSAPPHYYFEENDPPNLSFPEDTGRKVVAPVTVRAAPRGTALSSIQAGIQQARQEGDLEAWQFPVRIHPPDQQGNIIATFEPFPFKLLKEFKQAISQYGPGSPFVMGLLKNVTVSSQKIPTDWDTLTRACLTPAQFLQFKTCAMKQGPREPYVDFIARLQESLKKMIADSAAQEIVLQLLAFDNAHPDCQAALRPIRGKAHLVDYVKACDGIG

SEQ ID NO: 41888 - protein, 116 aa, Homo sapiens
  misc_feature (1)...(116): Xaa = X or * as defined in Table 2
NPNPSWNLAHVWDMDRKXEQRGIQVXXSNINKSXKEKMSMQCLEMPRNPDHXGRIDVSFQNLMRLTRXSQMGYLPWDLKQELETFSKLSXKQVMLSVVVTFVRNMLQLRFLTSFSG

SEQ ID NO: 41889 - protein, 105 aa, Homo sapiens
ISPLSFSESECSWKVFREAASPFRLDSSIFWSFLPGSSAKTSVRTLEPCVTTSVPCVILSRAFFWFSGEIVTQQEQRPGGGCTSASALGPPSWPPASPSMEGKGL

SEQ ID NO: 41890 - protein, 126 aa, Homo sapiens
  misc_feature (1)...(126): Xaa = X or * as defined in Table 2
LFIVTVCPAFLRFSSAICDSFLICPQVGGCVRRVLLVTVGVLLSISLDMAATGVSLGSSWSLFLGIWLMIRFQVSXWYPNWLLILSWRNISITSTPSYYFTYFPTFCYQISPPNQLFCFCLCSWFL

SEQ ID NO: 41891 - protein, 260 aa, Homo sapiens
MPKHQQTSTSIKIMQENMASPKELNKHEGEIKTFPDKQKLRDFINTRPVLQELLKGVLPSERREDVNGKKKSSEDTKLTELFHTDNEEEQENSEVTEEVTEQVYLPAKAKVAKEGEVHPYPSAPPPYYFEENDPLDLSFPEDIGRKVVAPVTLRAAPRVTALSSIQAGIQQAIREGQNQQPIWIPSRHLKPYQEPDAEEETPGGSRGPPGCSHVETDAEEDPNSYEQHPSTTATHLGTDQEAVRDGGRKPEESGTTSHNE

SEQ ID NO: 41892 - protein, 488 aa, Homo sapiens
  DOMAIN (425)..(479): ATP synthase c subunit proteins domain identified by eMATRIX, accession number BL00605, p-value=9.182e-39, raw score of 27.67
  DOMAIN (419)..(487): ATP synthase subunit C domain identified by PFam, accession name ATP-synt_C, E-value=4.6e-27, PFam score of 103.4
  misc_feature (1)...(488): Xaa = X or * as defined in Table 2
MVTLMGHAALCLHYVMQLGTTGGAWYFPRASSQAREMPQCPTLESQEGENSEEKGDSSKEDPKETVALAFVRENPGAQNGLQNAQQQGKKKRKKKRIIIISGKVLEDFLALAMHFADEETGQKRCSLNQTIQLLITPDTGSIWHQAFLSSIVRRAAQQYGFREGGEDDDWTLYWTDYSVSLERVMEMKSYQKINHFPGMSEICRKDLLARNMSRMLKMFPKDFRFFPRTWCLPADPAQLDLWSQTFWPRPRTAPDGTGADGLGLRLGSLGKVSFWFPACHGLGXPEASYTASMACGSLPWKLSTFSAYLEDHSYNVEQIWRDIEDVIIKTLISAHPIIRHNYHTCFPNHTLNSACFEILGFDILLDHKLKPWLLETEKMQTAGALFISPALPSYSNFPLQVARREFQTSVVSRDIDTAAKFIGAGAATVGVAGSRAGIGTVFGSLIIGYARNPSLKQQLFSYAILGFALSEAMGLFCLMVAFLILFAM

SEQ ID NO: 41893 - protein, 767 aa, Homo sapiens
MGWDCGLARWARVGLRERAAVQPLAPGCAAMSFAFPPFIPQGYKTAFGVGTNKIVTQDNRWELPGAWYFPRASSQAREMPQCPTLESQEGENSEEKGDSSKEDPKETVALAFVRENPGAQNGLQNAQQQGKKKRKKKRLGLKAGEWGAMLMIGDQSIQLPAFLSSIVRRAAQQYGFREGGEDDDWTLYWTDYSVSLERVMEMKSYQKINHFPGMSEICRKDLLARNMSRMLKMFPKDFRFFPRTWCLPADWGDLQTYSRSRKNKTYICKPDSGCQGKGIFITRTVKEIKPGEDMICQLYISKPFIIDGFKFDLRIYVLVTSCDPLRIFVYNEGLARFATTSYSRPCTDNLDDICMHLTNYSINKHSSNFSRDAHSGSKRKLSTFSAYLEDHSYNVEQIWRDIEDVIIKTLISAHPIIRHNYHTCFPNHTLNSACFEILGFDILLDHKLKPWLLEVNHSPSFSTDSRLDKEVKDGLLYDTLVLINLESCDKKKVLEEERQRGQFLQQCCSREMRIEEAKGFRAVQLKKTETYEKENCGGFRLIYPSLNSEKYEKFFQDNNSLFQNTVASRAREEYARQLIQELRLKREKKPFQMKKKVEMQGESAGEQVRKKGMRGWQQKQQQKDKAATQASKQYIQPLTLVSYTPDLLLSVRGERKNETDSSLNQEAPTEEASSVFPKLTSAKPFSSLPDLRNINLSSSKLEPSKPNFSIKEAKSASAVNVFTGTVVSILEAEKSKIKVLASLMSGEGLFLIDGSFLLCPHTVEGAS

SEQ ID NO: 41894 - protein, 126 aa, Homo sapiens; identical to SEQ ID NO: 34930
  DOMAIN (24)..(36): Glyceraldehyde 3-phosphate dehydrogenase proteins domain identified by eMATRIX, accession number BL00071A, p-value=2.607e- 14, raw score of 5.81
  DOMAIN (22)..(102): glyceraldehyde 3-phosphate dehydrogenases domain identified by PFam, accession name gpdh, E-value=1.6e-45, PFam score of 154.6

SEQ ID NO: 41895 - protein, 243 aa, Homo sapiens
  DOMAIN (215)..(236): Glyceraldehyde 3-phosphate dehydrogenase proteins domain identified by eMATRIX, accession number BL00071E, p-value=4.600e- 24, raw score of 11.48
  DOMAIN (3)..(242): glyceraldehyde 3-phosphate dehydrogenases domain identified by PFam, accession name gpdh, E-value=8e-110, PFam score of 369.5
MVKVKARVNEFGYTGCLVTRAAFNSGKVDIVAINDPFIDLNYLAYMLQYDSTHGKFHGTIKAENGKLVINGNPITIFQDIFTAMEKVGAHLQRGAKRVMIFAPSTEAIMFMMKVNYEKYDNSLKIISNASCTTNCLAPLAKVIHDNSGVGRGPDLPSGKPAKYYDIKKMMKQASEDPIKGILGYTEHQIVSSDFNSDTQSSTFDAGAGITLNDHFVKLISWYDNEFGYSNRVVDLMAHMASKE

SEQ ID NO: 41896 - protein, 335 aa, Homo sapiens
  DOMAIN (145)..(180): Glyceraldehyde 3-phosphate dehydrogenase proteins domain identified by eMATRIX, accession number BL00071C, p-value=1.900e- 29, raw score of 11.81
  DOMAIN (3)..(334): glyceraldehyde 3-phosphate dehydrogenases domain identified by PFam, accession name gpdh, E-value=2.8e-166, PFam score of 558.2
  misc_feature (1)...(335): Xaa = X or * as defined in Table 2
MVKVKARVNEFGYTGCLVTRAAFNSGKVDIVAINDPFIDLNYLAYMLQYDSTHGKFHGTIKAENGKLVINGNPITIFQEXDPTKIKWGDAGTEYVVESTSIFTAMEKVGAHLQRGAKRVMIFAPSTEAIMFMMKVNYEKYDNSLKIISNASCTTNCLAPLAKVIHDNSGIVERLMITVHVITTTQKTVDGPCRKLRPDGHRALQNIIPASTSTAKAMVKVIPELNKKLTGMASHVPTAKVLVVDPTCHLEKPAKYYDIKKMMKQASEDPIKGILGYTEHQIVSSDFNSDTQSSTFDAGAGITLNDHFVKLISWYDNEFGYSNRVVDLMAHMASKE

SEQ ID NO: 41897 - protein, 168 aa, Homo sapiens
  DOMAIN (15)..(32): GLYCERALDEHYDE-3-PHOSPHATE DEHYDROGENASE SIGNATURE domain identified by eMATRIX, accession number PR00078C, p-value=6.250e- 16, raw score of 15.99
  DOMAIN (1)..(124): glyceraldehyde 3-phosphate dehydrogenases domain identified by PFam, accession name gpdh, E-value=5.7e-62, PFam score of 209.6
PQAKIIHDNFGTVEGLVTTVHTITATQKTVDGPSRKLWHNSRRALQNIILASTGTAKPVGKGILAYTEHQAVSSDFNSDTHSSTFDTGAGIALNDHFVKLISWYDNEFGYSNRVVDFMAHMASKENLSSTGLNEKATVTEEIDVYLDSGAPGKNPPVFTMAVPGACRT

SEQ ID NO: 41898 - protein, 1678 aa, Homo sapiens
  DOMAIN (1434)..(1480): Glyceraldehyde 3-phosphate dehydrogenase proteins domain identified by eMATRIX, accession number BL00071B, p-value=1.000e- 40, raw score of 21.70
  DOMAIN (1357)..(1677): glyceraldehyde 3-phosphate dehydrogenases domain identified by PFam, accession name gpdh, E-value=1.9e-234, PFam score of 786.0
MTTPVQSKICISFQAAFRAQGPLAMLQHFDTIYSILHHFRSIDPGLKEDTLQFLIKGVYGSGVVSRHSQELPAILDDTTLSGSDRNAHLNALKMNCYALIRLLESFETMASQTNLVDLDLGGKGKKARTKAAHGFDWEEERQPILQLLTQLLQLDIRHLWNHSIIEEEFVSLVTGCCYRLLENPTINHQKNRPTREAITHLLGVALTRYNHMLSATVKIIQMLQHFEHLAPVLVAAVSLWATDYGMKSIVGEIVREIGQKCPQELSRDPSGTKGFAAFLTELAERVPAILMSSMCILLDHLDGENYMMRNAVLAAMAEMVLQVLSGDQLEAAARDTRDQFLDTLQAHGHDVNSFVRSRVLQLFTRIVQQKALPLTRFQAVVALAVGRLADKSVLVCKNAIQLLASFLANNPFSCKLSDADLAGPLQKETQKLQEMRAQRRTAAALLDPEEEWEAMLPELKSTLQQLLQLPQGEEEIPEQIANTETTEDVKGRIYQLLAKASYKKAIILTREATGHFQESEPFSHIDPEESEETRLLNILGLIFKGPAASTQEKNPRESTGNMVTGQTVCKNKPNMSDPEESRGNDELVKQEMLVQYLQDAYSFSRKITEAIGIISKMMYENTTTVVQEVIEFFVMVFQFGVPQALFGVRRMLPLIWSKEPGVREAVLNAYRQLYLNPKGDSARAKAQALIQNLSLLLVDASVGTIQCLEEILCEFVQKDELKPAVTQLLWERATEKVACCPLERCSSVMLLGMMARGKPEIVGSNLDTLVSIGLDEKFPQDYRLAQQVCHAIANISDRRKPSLGKRHPPFRLPQEHRLFERLRETVTKGFVHPDPLWIPFKEVAVTLIYQLAEGPEVICAQILQGCAKQALEKLEEKRTSQEDPKESPAMLPTFLLMNLLSLAGDVALQQLVHLEQAVSGELCRRRVLREEQEHKTKDPKEKNTSSETTMEEELGLVGATADDTEAELIRGICEMELLDGKQTLAAFVPLLLKVCNNPGLYSNPDLSAAASLALGKFCMISATFCDSQLRLLFTMLEKSPLPIVRSNLMVATGDLAIRFPNLVDPWTPHLYARLRDPAQQVRKTAGLVMTHLILKDMVKVKGQVSEMAVLLIDPEPQIAALAKNFFNELSHKGNAIYNLLPDIISRLSDPELGVEEEPFHTIMKQLLSYITKDKQTESLVEKLCQRFRTSRTERQQRDLAYCVSQLPLTERGLRKMLDNFDCFGDKLSDESIFSAFLSVVGKLRRGAKPEGKAIIDEFEQKLRACHTRGLDGIKELEIGQAGSQRAPSAKKPSTGSRYQPLASTASDNDFVTPEPRRTTRRHPNTQQRASKKKPKVVFSSDESSEEAEPHRSDTMGKVKVGVNGFGRIGRLVTRAAFNSGKVDIVAINDPFIDLNYMVYMFQYDSTHGKFHGTVKAENGKLVINGNPITIFQERDPSKIKWGDAGAEYVVESTGVFTTMEKAGAHLQGGAKRVIISAPSADAPMFVMGVNHEKYDNSLKIISNASCTTNCLAPLAKVIHDNFGIVEGLMTTVHAITATQKTVDGPSGKLWRDGRGALQNIIPASTGAAKAVGKVIPELNGKLTGMAFRVPTANVSVVDLTCRLEKPAKYDDIKKGILGYTEHQVVSSDFNSDTHSSTFDAGAGIALNDHFVKLISWYDNEFGYSNRVVDLIGHIGLQG

SEQ ID NO: 41899 - protein, 200 aa, Homo sapiens
  DOMAIN (51)..(106): Tubulin subunits alpha beta, and gamma proteins. domain identified by eMATRIX, accession number BL00227B, p-value=4.886e- 29, raw score of 19.29
  DOMAIN (5)..(195): Tubulin/FtsZ family domain identified by PFam, accession name tubulin, E-value=1e-38, PFam score of 142.0
  misc_feature (1)...(200): Xaa = X or * as defined in Table 2
PVATTCECIFIHLGEADVWIGNAAWELYYLEQSIQHDSPMPSDKTTGXGDNXFYASSGAGKFVSRAVFINLEPIVTDEVCTGTYHQLFHPEQLITDKEDAAHNYAWGHHDIGKIIGCYSTNKTKCTIQFVDWCFTSLKVGINCQLPTVVPAGNLANIKRAACMLSNTIAIAEAWVCLGHKSDLSYANCSFVHQFFNKSIH

SEQ ID NO: 41900 - protein, 221 aa, Homo sapiens
  DOMAIN (148)..(202): Tubulin subunits alpha beta, and gamma proteins. domain identified by eMATRIX, accession number BL00227F, p-value=6.956e- 16, raw score of 21.16
  DOMAIN (51)..(199): Tubulin/FtsZ family domain identified by PFam, accession name tubulin, E-value=3.8e-36, PFam score of 133.5
IFTCAGGFQCARMCIEPGLLSTVATTCECIFIHLGEADVWIGNACRELYYLEPIVTDEVCTGTYHQLFHPEQLITDKEDAAHNYAWGHHDIGKIIGCYSTNKTKCTIQFVDWCFTSLKVGINCQLPTVVPAGNLANIKRAACMLSNTIAIAEAWVCLGHKSDLSYANCSFVHWEMGEEMGEEAFSEACEDMAALEKDYEEVGVDSFSFRIIRVFFPFFVVH

SEQ ID NO: 41901 - protein, 165 aa, Homo sapiens
WCDGPQNRYALICQQCYSHNGMALKEEFEYIAFRCAYCFFLNPARKTRPQAPRLPEFSFEKRQVVEGSSSVGPLPSGSVLSSDNQFNEESLEHDVLDDNTEQTDDKIPATEQTNQVIEKASDSEEPEEKQETENEEASVIETNSTVPGADSIPDPELSGESLTAE

SEQ ID NO: 41902 - protein, 254 aa, Homo sapiens
AALSSNVLPRHLGSPATSVPGMGLHPPGPPLARPILPRERGALDRIVEYLVGDGPQNRYALICQQCFSHNGMALKEEFEYIAFRCAYCFFLNPARKTRPQAPRLPEFSFEKRQVVEGSSSVGPLPSGSVLSSDNQFNEGGAIPQTSHFLSEIPGKKSYWLKPNPNKAKEHCIECGIQDPEMTARFVWREEKVLLGLMMSYKRTCKVLGMKVPVEHRMTTEGCVKKEGKSRKPRGTRKSKDFFIRVPQMSDEVRI

SEQ ID NO: 41903 - protein, 148 aa, Homo sapiens
  DOMAIN (96)..(124): Granins proteins domain identified by eMATRIX, accession number BL00422C, p-value=1.766e-10, raw score of 16.18
MSGSRGFHLVLATTIFTSQGKEPMWGTCKLVPSQDDSKPTQRQFTILNFNDLMSSAVPMTPEDPSFWDCFCFTEEIPIRNGGAGEGEGGGGGEAEAEEEEEGEGEEEKEGEEEEEGEEEEGEEEDNKRKRKRKEEEKKEEEEEEKEKK

SEQ ID NO: 41904 - protein, 85 aa, Homo sapiens
MDLGHQDVPSQDDSKPTQRQFTILNFNGFNVHLPFPWTPGRSFILGTVFASTGGNSHYGNGYKVHDGFPGVNQGELKLFVIFRIH

SEQ ID NO: 41905 - protein, 377 aa, Homo sapiens
  DOMAIN (208)..(243): Ribosomal protein L3 proteins domain identified by eMATRIX, accession number BL00474C, p-value=3.854e-23, raw score of 21.74
  DOMAIN (50)..(322): Ribosomal protein L3 domain identified by PFam, accession name Ribosomal_L3, E-value=1.5e-140, PFam score of 480.4
MSHRKFSTPRHGSLGFLPWKHSSRHRGKVKSFPKDDPSKPVHLTAFLGYKAGMTHIVREVDRPGSKVNKKEVVEAVTIVERPPVGIVGCVETPQGFRTCKTVFAEHISDECKRRFYKNWHKSKKKAFTKYCKKWQDEDGKKQLEKDFSSMKKYCQVICVIAHTQMHLLPLCQKKAHLMEIQVNGGTVAEKLDWAGERLKHQVPVNQVFGQDEMIDVIRVTKGKGYKRVTSHWHTKKLPRKTHQGLCKVACIGAWHPARVGFSVGYLIKDGKLIKNNASTDYDLSDKSINPLGGFVHYGEVTNDFVMLKGCVVGTKKWVLTLHKSLLVQTKQRALEKIDLKFIDTSSKFGHGRFQTTEEKKAFMGPLKKDRIAKEEGA

SEQ ID NO: 41906 - protein, 183 aa, Homo sapiens [sequence omitted]

SEQ ID NO: 41907 - protein, 112 aa, Homo sapiens
KNKHCEHQFPSQHALDENMDLLEGITGFEDSVRKFICHVVGITYQHIDRWLLAEMLGDLSDSQLKVWMSTYRWSADESGQIFICSQEESIKPKNIVEKIDFDSVSSIMASSQ

SEQ ID NO: 41908 - protein, 298 aa, Homo sapiens
  misc_feature (1)...(298): Xaa = X or * as defined in Table 2
ESVAAAARAFPFTAPKELERQQRRRFRFHHLFLFPSLRTPCRVSVSLQPWLWKATEVMAMFEQMRANVGKLLKGIDRYNPENLATLERYVETQAKENAYDLEPNLAVLKLYQFNPAFFQTTVTAQILLKALTNLPHTDFTLCKCMIDQATIQERNGPIPDQIFVPSGTLLEDPAHFPGPFWQTPGNGRACQKAWDENHWTLFGKVLTGFXRLLVRKFICHVVGYHLPSHIDRWLLAEMLGDLSDKPAKRCWMSKIRLREDDRRGQIFICSQEXEHLNPRNIVEKIDFDSVSSIMASSQ

SEQ ID NO: 41909 - protein, 140 aa, Homo sapiens
  misc_feature (1)...(140): Xaa = X or * as defined in Table 2
QLWPNXLLSRNKEATLRYSQLPTCHSICYXMPAFXHTISDLSFNKNINCKSYHLRVFYKYVXIVCHFXVPKVYWTKYYQTSCRTXWRXSGVEXPPIISSSSSACCLLRRLPTEGTCPEIFWNPRLGISAECRDSCGPTSF

SEQ ID NO: 41910 - protein, 982 aa, Homo sapiens
  DOMAIN (314)..(342): PRECURSOR GLYCOPROTEIN SIGNAL RE domain identified by eMATRIX, accession number PD01719A, p-value=2.603e-11, raw score of 12.89
  DOMAIN (579)..(682): ZU5 domain identified by PFam, accession name ZU5, E-value= 3.1e-56, PFam score of 200.3
CLWRKWSVALGCRYFFGLLRGARIQLLPSGAFSCLRVSLSPSPPPGTPLSTMRKGLRATAARCGLGLGYLLQMLVLPALALLSASGTGSAAQDDDFFHELPETFPSDPPEPLPHFLIEPEEAYIVKNKPVNLYCKASPATQIYFKCNSEWVHQKDHIVDERVDETSGLIVREVSIEISRQQVEELFGPEDYWCQCVAWSSAGTTKSRKAYVRIAYLRKTFEQEPLGKEVSLEQEVLLQCRPPEGIPVAEVEWLKNEDIIDPVEDRNFYITIDHNLIIKQARLSDTANYTCVAKNIVAKRKSTTATVIVYVNGGWSTWTEWSVCNSRCGRGYQKRTRTCTNPAPLNGGAFCEGQSVQKIACTTLCPVDGRWTPWSKWSTCGTECTHWRRRECTAPAPKNGGKDCDGLVLQSKNCTDGLCMQTAPDSDDVALYVGIVIAVIVCLAISVVVALFVYRKNHRDFESDIIDSSALNGGFQPVNIKAARQDLLAVPPDLTSAAAMYRGPVYALHDVSDKIPMTNSPILDPLPNLKIKVYNTSGAVSPQDDLSEFTSKLSPQMTQSLLENEALSLKNQSLARQTDPSCTAFGSFNSLGGHLIVPNSGVSLLIPAGAIPQGRVYEMYVTVHRKETMRPPMDDSQTLLTPVVSCGPPGALLTRPVVLTMHHCADPNTEDWKILLKNQAAQGQWEDVVVVGEENFTTPCYIKLDAEACHILTENLSTYALVGHSTTKAAAKRLKLAIFGPLCCSSLEYSIRVYCLDDTQDALKEILHLERQTGGQLLEEPKALHFKGSTHNLRLSIHDIAHSLWKSKLLAKYQEIPFYHVWSGSQRNLHCTFTLERFSLNTVELVCKLCVRQVEGEGQIFQLNCTVSEEPTGIDLPLLDPANTITTVTGPSAFSIPLPIRQKLCSSLDAPQTRGHDWRMLAHKLNLDRYLNYFATKSSPTGVILDLWEAQNFPDGNLSMLAAVLEEMGRHETVVSLAAEGQY

SEQ ID NO: 41911 - protein, 205 aa, Homo sapiens
MREVEEDSPHESPLVLVSDWDVGIVTLWPCLLGSFLHHVTTRGYRRLSFVLEKAAAFQDVVVVGEENFTTPCYIQLDAEACHILTENLSTYALVGHSTTKAAAKRLKLAIFGPLCCSSLEYSIRVYCLDDTQDALKKLVGPQLSRHSAEIPNLGFQKISGQVPSVGKRLSRQQADEELLIIGGLAVPSTLAEYLLVCPADAPQPC

SEQ ID NO: 41912 - protein, 219 aa, Homo sapiens
MMKYTETELKKRKGIVEHEEQKVKPRNAEDCLYELPENIHISSAKKTKKMFSNQMLSGIPELDLGINARIKNIISSEDAKQNRFYHEELNVPIQRNTEEPKTRLLRVGDTEKLGDTEKAEAERSPPNHKHPDKQKATDDYRYKKKPSSYGSTPFHSYLCVLVEHFLSLLQIGPNINICIILYFMVINSWFRVKVRTRPCLEEEEEEDEGGGGGGEGEEE

SEQ ID NO: 41913 - protein, 235 aa, Homo sapiens
NSAVVTMPVVRKIFRRRRGDSESEEDEQDSEEVRLKLEETREVQNLRKRPNGVSAVALLVGEKVQEETTLVDDPFQMKTGGMVDMKKLKERGKDKISEEEDLHLGTSFSAETNRRDEDADMMKYIETELKKRKGIVEHEEQKVKPKNAEDCLYELPENIRVSSAKKTEEMLSNQMLSGIPEVDLGIDAKIKNIISTEDAKAPSAGRAAEQEERQRDLLRAYQHGCELCAAQQILS

SEQ ID NO: 41914 - protein, 99 aa, Homo sapiens [sequence omitted]

SEQ ID NO: 41915 - protein, 429 aa, Homo sapiens
  DOMAIN (104)..(149): kw TRANSCRIPTASE REVERSE II ORF2 domain identified by eMATRIX, accession number DM01354N, p-value=4.577e-24, raw score of 13.17
MKLIPQLSPYTKINSRWIKDLNIRPETINILEDNIGKPLLDIGLGKDFMTNNPKANAIKTKINSWDLIKLKRFFTAKGAVRVNRQPTEWEKIFTIHMSDKGLISRIYNELKQIENLQEMDKFLDTYTLPRLNQEEFQSLNRPITGSEIEAIINSLPTKKSPGPDGFTAEFYQRYKEELVFSCLTELEAGSHFFQKVCEFFRVSWYVPMVVHGVKVHDKAGNTAFPYGGFESFLKTEDTLLYKSVPNPGGRGPVLLSGLLGTGLHNRSRCSIGWLPVGEQVFRYRSANNVRARRSPEFYVYRDKVLDSPRHQDQRQDWVVTIFATELVAIFNQAGKLSQYIESGSRRLSWYQSSIRACVEYSPPPLIVVGAPLLLKKIPENRALVFAPTSEKQTKVCRHLDKPYTRTLGPQPGNNRAQITTPPAQRELGS

SEQ ID NO: 41916 - protein, 99 aa, Homo sapiens
  DOMAIN (2)..(48): kw TRANSCRIPTASE REVERSE II ORF2 domain identified by eMATRIX, accession number DM01354O, p-value=1.553e-15, raw score of 8.73
  misc_feature (1)...(99): Xaa = X or * as defined in Table 2
LTNEKKVQDQMDSQPNSTRGTRRSLYPFLLKLFQLIEKEGILPNSFYEASIILIPKPGRDTTTTKKEFXTNIPDEHRCKNPQXNTSKPNPAAHPKAYPP

SEQ ID NO: 41917 - protein, 241 aa, Homo sapiens
PFPSNYFAASIGALCWCKAIPGRHTSWTLFSHCQICCVALSPGPLWASVSPVLSPKAPPEKMATQTILLLVSCFVIVYVLDCVVASCSGLVWNSDPVRHRVQMLVDNGYATISPSVLLPFRPTAGCVGYRSAPSGLLPSPSSVTYEVSSCTCLPLTYPTALGQLGSKRPRRGLAKSSIIVGTAQAEERTELRGILTWRRVSGPPHHTWMPWGSPRTSESPHLQNAAVANSALPGPAGGLGA

SEQ ID NO: 41918 - protein, 723 aa, Homo sapiens
MEGLNWLSLLAFIFLLCWMLSALKHQTPNSSAFGLLDLHQWFATGSRMNKNNKPSSFIAIRNAAFSEVGIGISANAMLLLFHILTCLLKHRTKPADLIVCHVALIHIILLLPTEFIATDIFGSQDSEDDIKHKSVIYRRNRQSQHFHSTNLSPKAPPEKMATQTILLLVSCFVIVYVLDCVVASCSGLVWNSDPVRHRVQMLVDNGYATISPSVLPRLTAPNEWRASVYLNDSLNKCSNGRLLCVDRGLDEGPRSVPKCSESETDEDYIVLRAPLREDEPKDGGSVGNAALVSPEASAEEEEEREEGGEACGLERTGAGGEQVDLGELPDHEEKSNQKVAAATLEDRTQDEPAEESCQIVLFQNNCMDNFVTSLTGSPYEFFPTKSTSFCRESCSPFSESVKSLESEQAPKLGLCAEEDPVVGALCGQHGPLQDGVAEGPTAPDVVVLPKEEEKEEVIVDDMLANPYVMGDEGEEEEEEFVDDTLANPYVMGVGLPGRGGEEEEEEEVVDDTLASLYKMGEEHRHKGLAPLWEGGQKPSQKLPPKKPDLRQVPQPLASEVPQRRQERAVVTEGRPLEASRALPAKPRAFTLYPRSFSVEGQEIPVSISVYWEPEGSGLDDHRIKRKEEHLSVVSGSFSQRNHLPSSGTSTPSSMVDIPPPFDLACITKKPITKSSPSLLIDSDSPDKYKKKKSSFKRFLALMFNKMERPGTMAHACHPSTLGS

SEQ ID NO: 41919 - protein, 205 aa, Homo sapiens
  DOMAIN (107)..(155): Ribosomal protein S13 proteins domain identified by eMATRIX, accession number BL00646A, p-value=7.158e-21, raw score of 25.82
  DOMAIN (107)..(205): Ribosomal protein S13/S18 domain identified by PFam, accession name Ribosomal_S13, E-value=4.3e-40, PFam score of 146.6
MLISGFTQTGLSKKLHLTKSSDDFPLHTEEGCFWLQVIKGQTQSGFRNEGNLLAHKAKKCKRQSGFSSGGWEVLDQGAGCFHRRPTCCHCAAAMSLVIPEKFQRILRVFKTNIDEWCKITFAITAIKGVGQRYAHVVLRKADIDLTSRVGELTEDEVECVITMMQNPHQYKIPGWFLNRQKDVKDGKYSQALANGLDNKLHEDLE

SEQ ID NO: 41920 - protein, 173 aa, Homo sapiens
  DOMAIN (128)..(161): Ribosomal protein S13 proteins domain identified by eMATRIX, accession number BL00646B, p-value=4.444e-10, raw score of 21.42
  DOMAIN (56)..(164): Ribosomal protein S13/S18 domain identified by PFam, accession name Ribosomal_S13, E-value=4.1e-20, PFam score of 80.3
NSAWARRPLVLPLMSLVSPWKSSQHIFRVLNPPNLDGRRKNSPLPITCHLRVWARRYAHVVLRKADIDLTKRAGELTEDEVERVITILQNPRQYKIPDWFLNRQKDVKDGKYSQVLANGLDNKLREDLERLKEDSAPIEGLRHFWGLRVRGQHTQDQLGRRGRHRGASAGARR

SEQ ID NO: 41921 - protein, 126 aa, Homo sapiens
MPDLYFYRDPEEIEKEQAAAENTVTKEEFQGEWTAPAPEFTATQPEVADWPDGVQVPSVPIQQLPTEDWSTQPATEDWSAAPTAQATEGGSTHGFEGLAHGRGHGSLLFTLNYTSCESFAHLGGRI

SEQ ID NO: 41922 - protein, 74 aa, Homo sapiens [sequence omitted]

SEQ ID NO: 41923 - protein, 121 aa, Homo sapiens; identical to SEQ ID NO: 38336

SEQ ID NO: 41924 - protein, 125 aa, Homo sapiens
QTYSLRRATPRHIIVGFTKVEMKEKVLRAANKPIRLTVDLSAETLQARKEGGPIFNILKEKNFQPRISYPAKLSFISEGEIKSFTDKQMLKDFVTTRPALQELLKEALNMERNNQYQPLQKHAKW

SEQ ID NO: 41925 - protein, 211 aa, Homo sapiens
MGKKQCKKAKNSKNQNASSPPKDHNSSPAGEQNWMENELTEVGFRRWVVTDSSKLKEHVLTQCKEAKNLEKRLQELLTRITSLEKNIYDLMELKNTARELRDAYISISSRIDQAEKRISEIEDQLNEIKREDKIREKNEKDEQGLQEIWDYVKRPNLHLIGVPGLLYSDMCRLLPSPRNQPALQALERGVILEVKCVVCSTQAGAARRGVK

SEQ ID NO: 41926 - protein, 184 aa, Homo sapiens; identical to SEQ ID NO: 37344

SEQ ID NO: 41927 - protein, 144 aa, Homo sapiens
TESSSININKKDDHAKTPPKDHNSSPAREQNKTENEFDELTEIGCRRWVITNSSELKEHVVTQCKEAKNLEKMLQELLTRITSLEKNINDLMELKNTAQELREAYTIINSQTDQAEERISEIEDQLNEIKGEDNIREKTVKRIE

SEQ ID NO: 41928 - protein, 424 aa, Homo sapiens
  misc_feature (1)...(424): Xaa = X or * as defined in Table 2
PGKQDLEWTSSKLQQTCRRGTLLVEGKLTNRKEXHQHQQKLRPHGNLIQRDHNCSPAREQNWMENEFDKLTEVGFRRWTITNSSKLKERVLTQCKEATNLAKRLEKLLTRITSLEKNKNDLMELKNTAQELREAYTSISGRINQAEQRTSEIEDQLNEIKRRGVSVCPQPSEDTPRSTARVPKGMVPFRPRVPLVTPPREKKEAPWLACLRTRALRILIDPPSQVWDIVSCDAENETKLENTLQDIIQENFPNLARQANVQIQEIQRTPQRYSSRRATPRHIIVRFTKVEMKEKMLRAAREKGQVTHKAKPIRLTADLSAENLQARRTEWGPIFNILKEKNFQPRISYPAKLSFISEGEIKYFTDKQMLRDFVTTRPALKELLKEALNMERDNRYQPLQNHAKFVKTIEAREETCINLMCQITS

SEQ ID NO: 41929 - protein, 140 aa, Homo sapiens
  DOMAIN (11)..(37): TROPOMYOSIN SIGNATURE domain identified by eMATRIX, accession number PR00194E, p-value=1.000e-30, raw score of 8.74
  DOMAIN (1)..(59): Tropomyosins domain identified by PFam, accession name Tropomyosin, E-value=2.4e-36, PFam score of 115.8
YEEEIKILTDKLKEAETRAEFAERSVAKLEKTIDDLEDKLKCTKEEHLCTQRMLDQTLLSPFTTPSFPVSFKFPSLPSPHFLVRFLGGLLGVHPAAYWLKMYSPFMWSLWGRLGEREINSATVLILNIDKCLFEIKNQSL

SEQ ID NO: 41930 - protein, 137 aa, Homo sapiens
  DOMAIN (73)..(114): Tropomyosins proteins domain identified by eMATRIX, accession number BL00326D, p-value=1.000e-40, raw score of 8.76
  DOMAIN (3)..(137): Tropomyosins domain identified by PFam, accession name Tropomyosin, E-value=1.5e-97, PFam score of 306.3
RPEAKHIAEEADRKYEEVARKLVIIEGDLERTEERAELADSRCREMDEQIRLMDQNLKCLSAAEEKYSQKEDKYEEEIKILTDKLKEAETRAEFAERSVAKLEKTIDDLEDKLKCTKEEHLCTQRMLDQTLLDLNEM

SEQ ID NO: 41931 - protein, 145 aa, Homo sapiens
  DOMAIN (128)..(140): RIBOSOMAL PROTEIN P2 SIGNATURE domain identified by eMATRIX, accession number PR00456F, p-value=6.400e-12, raw score of 5.86
  DOMAIN (28)..(141): 60s Acidic ribosomal protein domain identified by PFam, accession name 60s_ribosomal, E-value=4.6e-37, PFam score of 121.0
GHIGVRPSLHPVTSTTSGNVSPTLARAMASISELACVYLALILHDDEVIIMEVNINTLIKAASVNVEPFWPGLFGKALANVNIGSLICNVGAGGPALAAGAAPAGGPAPSIAAASAEEKKMEAKKEESEESDDDMGFGLFTKPVL

SEQ ID NO: 41932 - protein, 140 aa, Homo sapiens
  misc_feature (1)...(140): Xaa = X or * as defined in Table 2
PPRTGQRQPLHSARRHGPSVSELACIYSALISARTDEVTVTEDKINALIKSSPLXMLSPFWPWLCLQRPLANVNIGSLICNVRGPVEPAASQPGAGPARKVLAPSTAAAPSXRRRKLEAKKRKNPKEVLNDEHGLLVFLN

SEQ ID NO: 41933 - protein, 225 aa, Homo sapiens
  DOMAIN (43)..(95): Ribosomal protein S5 proteins domain identified by eMATRIX, accession number BL00585A, p-value=5.800e-35, raw score of 28.43
  DOMAIN (46)..(164): Ribosomal protein S5 domain identified by PFam, accession name Ribosomal_S5, E-value=4.4e-60, PFam score of 213.0
MPVTKLGRLVKDMKIKSLEEIYLFSLPIKESEIIDFFLGASLKDEVLKIMPVQKQTRAGQRTRFKAFVAIGDYSGHVGLGVKCSKEVATATRGAIILAKLSIVPVTGRRGSVLVRLIPAPRGTGIVSAPVPKKLLMMAGIDDCYTSAQGCTATLGNFAKATFDAISKTYSYLTPDLWKETVFTKSPYQEFTDHLVKTHTRVSVQQTQAPAVAYNIGFLYKKNKVN

SEQ ID NO: 41934 - protein, 344 aa, Homo sapiens; identical to SEQ ID NO: 39820
  DOMAIN (155)..(207): Ribosomal protein S5 proteins domain identified by eMATRIX, accession number BL00585A, p-value=7.300e-35, raw score of 28.43
  DOMAIN (158)..(295): Ribosomal protein S5 domain identified by PFam, accession name Ribosomal_S5, E-value=3e-79, PFam score of 276.7

SEQ ID NO: 41935 - protein, 320 aa, Homo sapiens
  DOMAIN (214)..(251): Ribosomal protein S5 proteins domain identified by eMATRIX, accession number BL00585B, p-value=1.281e-26, raw score of 18.78
  DOMAIN (177)..(271): Ribosomal protein S5 domain identified by PFam, accession name Ribosomal_S5, E-value=8.4e-12, PFam score of 45.9
  misc_feature (1)...(320): Xaa = X or * as defined in Table 2
HEAKHQMADDAGGSAGGPEGPGGPWDGKTPLLSGEVFGIVIRGRGSRPRGRGRGRGRGARGGKGPRIKWIGMPVHQVGAALVKDHXRSKFPWKEIYLFSLPIKGIKDSXFSFLAGPLSKDEGFEGLCPVQKQTRAGQAQQVSRPFVAIGGLQMAHVGSGVLSAPKEVATGHPVGAIILAKLSIRPRAQKGIWGTKYWQSPNTVPCKVTGRCGFVVVRLIPAPRGSGIVSAPVAKKLLMMAGIDDCYTSAPGCTATLGNFAKGHPLIAIFKTYKLPXPPDLWKETVFTKVPYQEFTDHLVKDPHPESSVQRDLRLQLVATT

SEQ ID NO: 41936 - protein, 14 aa, Homo sapiens
MASKVALAKLPRVA

SEQ ID NO: 41937 - protein, 35 aa, Homo sapiens
TVFTKSPYQEFTDHLVKTHTRVSVQRTQAPAVATT

SEQ ID NO: 41938 - protein, 21 aa, Homo sapiens
MTRFLFVVVFFPGLIHFIFLV

SEQ ID NO: 41939 - protein, 204 aa, Homo sapiens
  DOMAIN (39)..(91): Ribosomal protein S5 proteins domain identified by eMATRIX, accession number BL00585A, p-value=2.233e-13, raw score of 28.43
  DOMAIN (46)..(177): Ribosomal protein S5 domain identified by PFam, accession name Ribosomal_S5, E-value=2.7e-51, PFam score of 183.8
MPVTKLGRLVKDMKIKSLEEIYLFSLPIKESEIIDFFLGASLKDEVLKIMPVQKQTRAGSRHLVAIGDYNGHVGLGVKSSKEVATAIRGAIILAKLSIVPVRRGYWGNKIGKPHTVPCKAAAALCWYASSLHPGALASSPHLCLRSLLMMAGIDDCYTSARGCTATLGNFAKATFDAISKTYSYLTPDLWKETVFTKSPSTGTH

SEQ ID NO: 41940 - protein, 227 aa, Homo sapiens
  DOMAIN (79)..(94): RanBP1 domain proteins domain identified by eMATRIX, accession number PF00638, p-value=8.615e-09, raw score of 11.91
  DOMAIN (75)..(112): Cyclophilin type peptidyl-prolyl cis-tr domain identified by PFam, accession name pro_isomerase, E-value=1.6e-18, PFam score of 67.4
MAFKVGTTLECGEEARKEQYLDESLYIETMEKAGIECLWLFHAHSESFKLSVDLPFWNLEDDGPLLTAPLGSAPGGDFKHHDGTGGKSIYGEKFDDEKFILKNTGPGILSMAMLDPTQMVLSFSSALPRLSGWMASMWSWQGALAGLPPIFQVPLPRLVSLVTRTPTAGSKCFYGCRSGQAVSLQATSHATLVAVEGPVLTGPRPLQGTPLVKSGCYDDGTDAPSLE

SEQ ID NO: 41941 - protein, 184 aa, Homo sapiens
  DOMAIN (31)..(58): Cyclophilin-type peptidyl-prolyl cis-trans isomerase signatur domain identified by eMATRIX, accession number BL00170A, p-value= 4.706e-23, raw score of 17.08
  DOMAIN (17)..(184): Cyclophilin type peptidyl-prolyl cis-tr domain identified by PFam, accession name pro_isomerase, E-value=4e-47, PFam score of 165.4
  misc_feature (1)...(184): Xaa = X or * as defined in Table 2
EFGTRDNRVLLPLVNPTVFFDIAVDGVYPLGRVSFELFADKVPKTAENFRALSTGEKGFGYKGSCFHRLFPGFMCQGWXLXSHHNGTGGKSHLWGRNLKDENFILKHTGPGILSMANAGPNTNGSPVFLTSCTAKTEWLDGKHAGLGKVKEGMNIVEAMERFGSRNGKTSKKIISIADCGTTSN

SEQ ID NO: 41942 - protein, 292 aa, Homo sapiens
  DOMAIN (28)..(82): Ribosomal protein S2 proteins domain identified by eMATRIX, accession number BL00962B, p-value=6.029e-32, raw score of 36.15
  DOMAIN (18)..(183): Ribosomal protein S2 domain identified by PFam, accession name Ribosomal_S2, E-value=2.3e-84, PFam score of 293.7
MSGALDVLQMKEEDVLKFHAAGTHLGGTNLDFQMEQYIYKRKSDGIYIINLKRTWEKFLLAARAVVAIENPADVSVISSGNTGQRAVLKFAAATGATPIAGHFTPGTFTNQIQAAFREPRLLVVTDPRADHQPLTESSYVNLPTIALCNTDSPLRYVDICNNKGAHSVGLMWWMLAREVLRMRGTISRGHPWEVMPDLYFYRDPEEIEKEEQAAAEKAVTKEEFQGEWTAPAPEFTATQPEVADLSEGVQVPSVPIQQFPTDDWSTQPATENWSAAPTAQATEWVGATTDWS

SEQ ID NO: 41943 - protein, 558 aa, Homo sapiens
  DOMAIN (116)..(160): Ribosomal protein S2 proteins domain identified by eMATRIX, accession number BL00962D, p-value=9.591e-35, raw score of 22.51
  DOMAIN (15)..(183): Ribosomal protein S2 domain identified by PFam, accession name Ribosomal_S2, E-value=8.6e-78, PFam score of 271.9
MSGALDALQMKEEDVLAAGTNLGGTNLDFQMEWYICKRKSDGIHIINLKRTWEKLLLSARAIVAIENPADVSVISSRNTGQRAMLKFVAATGDTPIAGCFTPGTFTNQIQATFWEPRVLVVTDPRADHQPLMEASYVNLPTIALCNTDSPLRYVDIAIPCNNKGAHSVGLMWWMLACKVLHMCGTISCEHLWEVMPDLYFYRDPEETEKEKQAAVEKAVTKEEFQGEWTALAPEFTATQPKVAGWSEGVQAPSVPIQRFPTEDWSAQPATEDWGQILEREPDLMSQKQLAMKSANALRLAHQGRNGREEALKSISSTKAMRTMAKMVKVNFFRTLEIIQRLATIEGMFKKNSLNLSPQIDQPKKHLTNFKSVHDFSTTVMLSAIVEIPLPNRKLAKYYCDQCYCGRNRKRVITLCTKLLSGTKGSSHIPCANSPGFLGKAGFLRIRGTELDLVVITGLHFGDPESFGPDGQEATVQSPTWAPDKTAEFERVPREPVKKVNPNPRPLGTTNPAFCPRLDSRDQLCPCPIPPTFQSFCEQRPRGLFRRGRRKRGGKPEAA

SEQ ID NO: 41944 - protein, 367 aa, Homo sapiens
  DOMAIN (97)..(151): Ribosomal protein S2 proteins domain identified by eMATRIX, accession number BL00962B, p-value=4.600e-36, raw score of 36.15
  DOMAIN (87)..(275): Ribosomal protein S2 domain identified by PFam, accession name Ribosomal_S2, E-value=7.8e-40, PFam score of 144.6
MLEAVLEESPREEAAFSWVMKGNLAAGKTIQAQDRDAVGILSSRTGESMENLQKNLLPKQRRRTRETFTMSGALDVLQMKEEDVLKFLAAGTHLGGTNLDFQMEQYIYKRKSDGIYIINLKRTWEKLLLAARAIVAIENPADVSVISSRNTGPEGLCLKFAAATGATPIAGRFTPGTFTNQIQAAFREATGFLVVTWTPGLDHQPLTEASYVYLPTIALCNTDSPLRYVDIAIPCNNKGAHSVGLMWWMLAREVLRMRGTISREHPWEVMPDLYFYRDPEEIEKEEQAAAEKAVTKEEFQGEWTAPAPEFTATQPEVADWSEGVQVPSVPIQQFPTEDWSAQPATEDWSAAPTAQATEWVGATTDWS

SEQ ID NO: 41945 - protein, 132 aa, Homo sapiens
  DOMAIN (16)..(36): kw TRANSCRIPTASE REVERSE II ORF2 domain identified by eMATRIX, accession number DM01354W, p-value=8.573e-13, raw score of 12.64
MREDTNKWKNIPCSWIGRINIVKMAILPKLPPTNQEAKKELRREVTGGGGGCYGRFVGAVGLLQEYSWSDRKAQAYAFSSFRFPPSSSSPLQRRPVAARELSFQYRDSELIQSAAEGAHPSYRAAECLWLEQ

SEQ ID NO: 41946 - protein, 189 aa, Homo sapiens
MMMTMMIIIVIIPILHLRKWRHKDVNLSSVPGKARRANSSSTPTQLRKADRTAAQKAACTVSNPETNAPLQCNANRTPSPGVNLASSRNEDSRGETWKTQKAELGKEGSREICLLLGALLVSVSFWTLFSEHLRGKTRMTVGNKAGLTAHRGLKKNMRLHFRGTFYVNDLSEYGAPEKKKEEPDPKGRD

SEQ ID NO: 41947 - protein, 75 aa, Homo sapiens
CLGFIAFAYSVKSRDRKMVGDVTGAQAYASTAKCLNIWALILGILMTIGFILLLVFGSVTVYHIMLQIIQEKRGY

SEQ ID NO: 41948 - protein, 124 aa, Homo sapiens
HENSGQPPNYEMLKEEQEVAMLGAPHNPAPPMSTVIHIRSETSVPDHVVWSLFNTLFMNTCCLGFIAFAYSVKSRDRKMVGDVTGAQAYASTAKCLNIWALILGIFMTILLTVIIPVLVVQAQR

SEQ ID NO: 41949 - protein, 143 aa, Homo sapiens
PDRRWSSLDTMNHTGQTFFSPVNSGQPPNYEMLKEEHEVAVLGAPHNPAPPTSTVIHIRSETSVPDHVVWSLFNTLFMNPCCLGFIAFAYSVKSRDRKMVGDVTGAQAYASTAKALNIWALILGILMTILLIVIPGLIFQAYG

SEQ ID NO: 41950 - protein, 665 aa, Homo sapiens
  DOMAIN (314)..(331): Zinc finger C2H2 type, domain proteins. domain identified by eMATRIX, accession number BL00028, p-value=3.314e-09, raw score of 16.07
  DOMAIN (282)..(335): Zinc finger, C2H2 type domain identified by PFam, accession name zf-C2H2, E-value=0.0038, PFam score of 23.9
RGSRCHGTSPRPHAGAAAGMGPAPHSGLPEGLSVKKEDGTQQTEATTSQRPWTHMTNAPAVNKRACKGHPRGHPSQQVVMDGPQLCTVGQSCLGSAAGSQQTETLWWPWRPWWAENKSRRPLPSMPNPSICRESPTVFNLREEAPTQSDLQRGSPAKLPAPPLRLPALPPCTLDSEAPGATDLEAYDGRGVFFARGPDRFLGSLQPPSWSPLGPFRGLVKAEDKARVHRSKKQEGPGPEDARKKVPAAPITVSKEAPAPVAHPAPGGPEEQWQRAIHERGEAVCPTCNVVTRKTLVGLKKHMEVCQKLQDALKCQHCRKQFKSKAGLNYHTMAEHSAKPSDAEASEGGEQEERERLRKVLKQMGRLRCPQEILSAIGALEDGREGERGRWVEDSTGAWPHEAAMRPHSQWVMSECESSCVLRVGVVGGPVSKGSGRPIIGTWCRQWEQEEPVPSLAPVIPDATQGLAGFASSPGWHCYKKTQETLSQAGQKTSAALSTVGSAISRKLGDMRTGLLAFGSQGVPPCSSDPILAKMGAGFLKDRREAEQLLVMILREPPVESGLEETGDSAAVPGGVRTGGAVLEGLPLLGLTEHEQGASPGAPRGGLNSATFKSFEDRVGTIKVIVPGLFDGLGKSKVVGDRENGSDNLPSSAGSGDKPLSDPAPF

SEQ ID NO: 41951 - protein, 169 aa, Homo sapiens
  misc_feature (1)...(169): Xaa = X or * as defined in Table 2
SLRLWVTERTAVTNLPSSSRGVGDKPPVGSPHLFLSLVVAFNPLQSTRNPASASQPQPCSAEQPARRGXAEPALRTVLPIHAEMWLPRLHEFEEHRLVHRCFTLTFVDETDHCAVLPRGAGSGQGGGFERILSQSPGSLWESCXPGLWLNILSNPPPCPLPAPLGRTAQ

SEQ ID NO: 41952 - protein, 30 aa, Homo sapiens
  misc_feature (1)...(30): Xaa = X or * as defined in Table 2
RGTWSIIAXKSQGISWDRFEEVTLCREPFT

SEQ ID NO: 41953 - protein, 846 aa, Homo sapiens
MEALGPGGDRASPASSTSSLDLWHLSMRADSAYSSFSAASGGPEPRTQSPGTDLLPYLDWDYVRVVWGGPGPAPPDAALCTSPRPRPAVAARSGPQPTEVPGTPGPLNRQATPLLYALAAEAEAAAQAAEPPSPPASRAAYRQRLQGAQRRVLRETSFQRKELRMSLPARLRPTVPARPPATHPRSASLSHPGGEGEPARSRAPAPGTAGRGPLANQQRKWCFSEPGKLDRVGRGGGPARECLGEACSSSGLPGPEPLEFQHPALAKFEDHEVGWLPETQPQGSMNLDSGSLKLGDAFRPASRSRSASGEVLGSWGGSGGTIPIVQVWKSGDAGCVHASDQPYGTGLGQRTGQVTVPTEYPLHECPGTAGADDCWQGVNGSVGISRPTSHTPTGTANDNIPTIDPTGLTTNPPTAAESDLLKPVPADALGLSGNDTPGPSHNTALARGTGQPGSRPTWPSQCLEELVQELARLDPSLCDPLASQPSPEPPLGLLDGLIPLAEVRAAMRPACGEAGEEAASTFEPGSYQFSFTQLLPAPREETRLENPATHPVLDQPCGQGLPAPNNSIQGKKVELAARLQKMLQDLHTEQERLQGEAQAWARRQAALEAAVRQACAPQELERFSRFMADLERVLGLLLLLGSRLARVRRALARAASDSDPDEQASLLQRLRLLQRQEEDAKELKEHVARRERAVREVLVRALPVEELRVYCALLAGKAAVLAQQRNLDERIRLLQDQLDAIRDDLGHHAPDTTGSARPEAGSRGWELKFSPFHIVISPEGKNELTTFVPLSAPQTSRLCGDQKPGELTLQDTASRGRCPNGESWYLRFAIRSFSSLPGPLGQPQGL

SEQ ID NO: 41954 - protein, 512 aa, Homo sapiens
  DOMAIN (308)..(353): kw TRANSCRIPTASE REVERSE II ORF2 domain identified by eMATRIX, accession number DM01354N, p-value=1.000e-40, raw score of 13.17
  DOMAIN (392)..(512): Reverse transcriptase domain identified by PFam, accession name rvt, E-value=0.015, PFam score of -33.2
  misc_feature (1)...(512): Xaa = X or * as defined in Table 2
XSPLKNTALCRDTKGSSRHVFLASHESHKLLRTELPLQNYREGLGGQKAPSSGSDGSGFCLHRRLCLPAWKKESHPEQGCTQSRADRAARTSYLTAQRRKQALPVLRKDSSKISTTSLLLPERGPNPDPKKGFLDSHPRNNSGQPPLLIPRQTGSGVDLQQTPTDLQLRILTVRRKTNQQKGHPHQNPICTSPSPRPKERSSSSATEQSRMENDFDEFREEGFRRSNYSELKEEVRTHGKEDIIQENFPNLATQANIQIQEIQRTPQRYSSRRATPRHIIVRFTKVEMKEKMLRAAREKEIQTTIREYYKHLYTNKLENLEEADKFLNTYTLPRLNQEEVESLNRPITGSEIEAIINSIPTKKSPGPDGFKAEFYQRYKEELAPFLLKLFQSIEKEGILPNSFYEASIILIPKPGTDTTEKENFRAISLMNIDAKILNKILANRIQQHIKKLIHHDQVGFIPGMQGWFNICKSINIIKHINRTNDKNHMIISIDAEKAFDKIQQHFVLKTLK

SEQ ID NO: 41955 - protein, 487 aa, Homo sapiens
  DOMAIN (199)..(224): 7 kw REVERSE TRANSCRIPTASE RNA POLYMERASE domain identified by eMATRIX, accession number DM00895E, p-value=3.333e-11, raw score of 15.72
  DOMAIN (170)..(445): Reverse transcriptase domain identified by PFam, accession name rvt, E-value=8.4e-78, PFam score of 271.9
MRGATEDRRQNAERMGNGEVEHSSSPATEQSWTENDFDELREEGFRRSNYSKLQEEIQTEGEEVKNFEKNLDESITRIINTEKCLKELMELKTKARELREECRSLRSRCDQLEEREEVESLNRPITGSEIVAIINSLPTKKSPGPDGFTAEFYQRYKGELVPFLLKLFQSIEKEGILPNSFYEGSIILIPKLGRDTTKKENFRPISLMNIDAKILNKILANRIQQHIKKLIHHDQVGFIPGIQGWFNIHKSINVIQHIKRTKDKNRMIISIDAEKAFDKIQQRFMLKTLNKLGIDGTYLKIIRAVYDKPTANIILNGQKLEAFPLKTGTRQGCPLSPLLFNIVLEVLARAIRQEKEIKCIQLGKEEVKLSLFADDMIVYLENPTVSAQNLLKLESNFRKVSGYKINVQKSQAFLNTNNRQTESQIMSELPFTIASKRIKYLGIQLTRDVKDLFKENYKPLLKEIKEDINKWKNIPCSWVGIINIVKL

SEQ ID NO: 41956 - protein, 164 aa, Homo sapiens
  misc_feature (1)...(164): Xaa = X or * as defined in Table 2
ILSWLTLWSILRLYIVTLTGKICSLTSEASEATSPPRGTNNSRSVALAVVTLVWRVCSFIFDSKAFILAFAFFFSHWFSILPFPPQHGATLWYFWGDFECSRGPRNIHTDDRARLVPMTERGGPPQGGEPARTRSPRQGGRGGMEGGEXYPCPPHLGGQERKPG

SEQ ID NO: 41957 - protein, 134 aa, Homo sapiens
  DOMAIN (72)..(119): kw TRANSCRIPTASE REVERSE II ORF2 domain identified by eMATRIX, accession number DM01354V, p-value=6.162e-22, raw score of 12.97
  misc_feature (1)...(134): Xaa = X or * as defined in Table 2
YTEVLKGPDGAENHGTRTTXXMHKPHXPIRSTGRKADKQLQQSLRNKINVQKSQAFLYTNNRQTESQIMSELPFTIASKRIKYLGIQLTMDVKDLFKENYKPLLKEIRGYKQMGEHSMLMGRKNQYSENGHTAQ

SEQ ID NO: 41958 - protein, 26 aa, Homo sapiens
GRPGGDKISQHLLVCEVLYFSFTYEA

SEQ ID NO: 41959 - protein, 336 aa, Homo sapiens
  DOMAIN (215)..(256): kw TRANSCRIPTASE REVERSE II ORF2 domain identified by eMATRIX, accession number DM01354I, p-value=1.000e-40, raw score of 15.55
  DOMAIN (1)..(201): AP endonuclease family 1 domain identified by PFam, accession name AP_endonucleas1, E-value=8.4e-07, PFam score of -13.1
NAAPLQQRNKAGCRYDLDELREEGFRRSNFFKLKAEVRTQCKETKNLEKTLDKWLTRKTSVEKSLNDLMELKTMVQGLRDKCTNFSNGFDQLEERVSVIEEQMNEMKQEKKYREKKDRSMTQKVNKDIQELDSALHQEELIDIYRTVHPKSTEYTFFSAPHRTYFKIDHIVGSKALLSKCKRTEIITNCLSDHSAIKLELRIKKLTQNRSTTWKLNNLLLNDYWVHNEMKAEIKMFFETNENKDTTYENLWDTFKAVCRGKFRALNVHKRKQERSKIDTLISQLKELERQELTHSKASRMQEITKIRAEQKEKETEKNIQKNQRIQELFLLKDQQN

SEQ ID NO: 41960 - protein, 510 aa, Homo sapiens
  DOMAIN (436)..(481): kw TRANSCRIPTASE REVERSE II ORF2 domain identified by eMATRIX, accession number DM01354N, p-value=1.000e-40, raw score of 13.17
  DOMAIN (78)..(260): AP endonuclease family 1 domain identified by PFam, accession name AP_endonucleas1, E-value=0.083, PFam score of -89.8
MGKKQSRKAENSKNQSTSHPPKERSSSSATEKSWMENDFNKLREEGFRQSNFSELKEEVRTHCKKAKNLEKRLDEWLTRITNVDKSLSDLMELKTVARELCDTCTSFSSRFYQLEERVSVIEDQMNEMKREEKFREKRVKRNEQSLPEIWDYVKRPNLRLIGVPVSDRENGTKLENTLQDIIQEKFPNLARQANIQIQEIQTATKILLEKSNSKTHNSPHHTYSKIDHIVGSKALLSKCRRTEIITNCLSDHSAIKLELRIKKLTQNRSTTQKLNNLLLNDYWVNNEMKGEIKMFFETNESKDKTYQNLWDTFKAVCRGKFIALNAHKRKQERSKIDTLTSQLKELEKQEQTHSKASRRQEITKMRAELKEMEKQKTLQKINESRSWFFEKINKIDRLLARLIKKKRENNQIDTIKNDERDITTDPTEIQTTIREYYKHLYANKLENLEEMDKFLDTYSLPRLNQEEVESLNRPITGSEIEAIINSLRTKKSPGPDGFTAEFYQRYKESS

SEQ ID NO: 41961 - protein, 413 aa, Homo sapiens
  DOMAIN (17)..(70): Chaperonins cpn60 proteins domain identified by eMATRIX, accession number BL00296D, p-value=3.106e-31, raw score of 11.15
  DOMAIN (17)..(118): TCP-1/cpn60 chaperonin family domain identified by PFam, accession name cpn60_TCP1, E-value=5.5e-12, PFam score of 47.8
  misc_feature (1)...(413): Xaa = X or * as defined in Table 2
XELKLVFSVCQRKEVLSLVIIAEDIDREARSTFIFNRLKVGLQIIAVKAPDFGDNRKNQREDTAIATGGLAQIEKYIQEIVEQLDVTTSEYEKEKLNVCLAKLSDGVAVLKAGGTSDVKECSSSPAMQQSWMESDFDELREEGFRRSNFSKLKEEVRMHRKEAKSLEKKLDEWLTRITSVEKSLNDLMELKTMARELHNQCTSFSSQFHQLEERVSVIEDQMNEMKREEKFREKTVKRNEQSLQEIWDYVKRPNPCLIGIPQSDGENGTKLENTLQDIMQENFPNLARQANIQIQEIQRMPQRYSSRRATPRHIIVRFTKVEMKEKMLRAAREKGWVTYKGKPIRLTADLLAETLQARREWGPIFTILKEKNFQPRISCPAKLSFISEGEIKSFTDKQMLRDLSPPGLLYKSS

SEQ ID NO: 41962 - protein, 708 aa, Homo sapiens
  DOMAIN (380)..(415): Wnt-1 family proteins domain identified by eMATRIX, accession number BL00246B, p-value=5.500e-33, raw score of 13.69
  DOMAIN (378)..(477): wnt family of developmental signaling protei domain identified by PFam, accession name wnt, E-value=4.5e-69, PFam score of 191.0
MAEGKGEAGTFFTGQQHGPPLLISRQTGSGVDLQQTPTDLQLRVLTVRRKTNKQKGHPHQNHICMSPSTKTKEEHSSSPATEQSWMENDFDELREEGFRRSNYSELKEEVRTHGKEVKNLEKKLDEWLTRITNAEKSLKDLMELKTTAREICDECTSLSSRCDQLPRPDGFTAEFYERYKEEMVPFLLKLFQSIEKEGILPNSLYEASIILIPKPGRDTTKKENFRPISLMNIDAKILNKILANRIQQHIKKLIHHNQVGFIPGMQGWFNICKSINIIQHINRNNGKNHMITSIDAEKAFDKIQQRFMLKTLNKLVEIGNKYIRIVLIIEIMYKRPWSSSAYGDSLMNGSYCDYFCTVNVCSWVPWWNLEKNEEPEESRGSRETAFTYAVSAAGVVNAMSRACREGELSTCGCSRAARPKDLPRDWLWGGCGDNIDYGYRFAKEFVDARERERIHAKGSYESARILMNLHNNEAGRRDHASRLDALGRSQMSNHASHYPSPYYSGDFAGEPGSVRQLPSEPFRRRRCARDRPPPAGPLSRPSDPGAKRGGGQLRRPWTAGAESPPRSSELSPFPSLAPAVHSLLFALRPGKTGKREINPKRERTGYVMKNNYSECLMSLMFFQDKVAKNSHLFSCEKDFQLGSRSQGRIQCPTIAANCFWHPTLRFQRSSQQQRHFNGDIQSIVHSRLQFTTPVYNPVYNPVALRMQD

SEQ ID NO: 41963 - protein, 449 aa, Homo sapiens
MPKSPKDITAAGARKWTSKSIREPWENLSQTIQNPSPTTAPCGSTSFISDVSNYTCNNETNKGFVVLDPRAVLGVPEEGWAVPPLLISRQTGSGVDLQQTPTDLQLRVLTVRRKTNKQKGHPHQNHICMSPSTKTKEEHSSSPATEQSWMENDFDELREEGFRRSNYSELKEEVRTHGKEVKNLEKKLDEWLTRITNAEKSLKDLMELKTTAREICDECTSLSSRCDQLVSVMEDQMNEMKREEKFREKRIQRNKQSHQEIWDYVKRPNLRLIGVPESDKENGTKLENTLQDIIQENFPNLARQANIHIQEIQRTPQRYSSRRATPRHIIVTFTKVEMKEKILRAARDKGRVTHKGKPIRLTADLLAETLQERREWGPIFNILKEKNFQPEFHIPKLSFRSEGEIKYFTDKQMLRDSVITRPALKGLVKEALNMERNNRYQPLQKHAKV

SEQ ID NO: 41964 - protein, 502 aa, Homo sapiens; identical to SEQ ID NO: 35112
  DOMAIN (250)..(297): kw TRANSCRIPTASE REVERSE II ORF2 domain identified by eMATRIX, accession number DM01354V, p-value=1.000e-40, raw score of 12.97

SEQ ID NO: 41965 - protein, 603 aa, Homo sapiens
  DOMAIN (450)..(482): kw TRANSCRIPTASE REVERSE II ORF2 domain identified by eMATRIX, accession number DM01354K, p-value=1.367e-29, raw score of 9.35
  misc_feature (1)...(603): Xaa = X or * as defined in Table 2
MIIIVPLYSSLGDRVKSCEKKRERERERRKKERKKERKKERKKERKKASSKEREEGRKKERRKKLRKKEEKERKKRKKKRREGRKERKKEKERKEGKKEERKNIPGKRRESTDPLKEMDHRCLLPEMLKGTWWTTPARASGPAVPLLCEFRQWTVDTTSVVPESTHMPGQMTQPIPAPDSHNMDEAGGHYPKQTNTRPENQILHVFTDKWELNTEYKDPKKRTTDTRAYLRVEATLAADWMVPTQIEGRSSFVLATLAADWMVPTQIEGRSSFVLATLAADWMVPTQTEGRSSFVLATLAADWMVPTQIEGRGRMTPHMAGYSSETKLPEERSGSSICGSPISAVLQPPLLIPRQTGSGVDLQQTPTDLQLRVLMERSSSPATEQSWMENDFDEMRDEGFRRSNYSELKEEVQTYCKEVCRGKFKALNAHKRKQETSKIDTLTSQLKELEKQEETHSKASRRQEITKIRAELKEIETQKTLQKINESRSWFFEKINKIHRPLARLIKKKTEKNQINAIKNDKWDITNNLTEIQATIREYYKHLYANKLENLEEMDKFLDTYTLPRLXNCRQSLIAYQQIKVQDQMDSQSNSTRGTRRSWYHSF

SEQ ID NO: 41966 - protein, 72 aa, Homo sapiens
  misc_feature (1)...(72): Xaa = X or * as defined in Table 2
PDGAKKHGKRTRDERTSFSSEFNQLEERVSVIENQMNEMKREEKFREKRVKRNEQSLQEIWDMXKDQMRSTS

SEQ ID NO: 41967 - protein, 387 aa, Homo sapiens
NNQCREVLKGVDGAESQGSRTREERRSLRSRCDQLEERVSVIEDQMNEMKREGKFREKRIKRNEQSLQEIWDYVKRPNLRLIGVPESDGENGTKLENTLQDIIQENFPNLTRQANIQIQEIQRTPQRYSSRRATPRHIVVRFTKVEMKEKMLRAAREKGRVTHKGKPIRLTADLSAGTLQARREWGPIFNILKEKNFPPRISYPAKLSFISEGEIKYFTDKQMLTIVHLKTLDIIYMYNIRRPKGGEKKADQEVNSEPRNNIVLETKGDRGPQAPASPGGPPPRRVRRSASGSRAGITFHPVHYLTRRPFAHRFHYQSHGYGVGSVQSAELRHKTNSAARAALRDGGVDCRGRERGSACQKRSDDEAGGLVLSDLPRVMSGSWEVRR

SEQ ID NO: 41968 - protein, 1045 aa, Homo sapiens
  DOMAIN (727)..(768): kw TRANSCRIPTASE REVERSE II ORF2 domain identified by eMATRIX, accession number DM01354I, p-value=1.000e-40, raw score of 15.55
  DOMAIN (499)..(713): AP endonuclease family 1 domain identified by PFam, accession name AP_endonucleas1, E-value=2.8e-49, PFam score of 177.1
MVPASASDEGLRKLPVMVEGEGGASVSHGKQALMITDFIANQSKDRSLIVRLLCATFYKEKLITIHNSKGMESPQMHISDRLDKENVVHIYHGILCSHKKEQDRVLCRDIDGAGSHYRQQTNTGTENQTLHVLTYKWELNDENTWTQGGEQHTLEPVEPTEEKLFIQFERSHIVSAWTALQTFSTIKLLCLLKAFIPEACFLAQIMDSITQEGIIEITERSSSPATEQSWTENDFDELREEGFRKSNYSELKEEVRTNGKKVKNFEKKLDEWITRITNAEKSLKDLMERKTKARELRDECTSLSNRCDQLEERGSAMEDEMNEMKQEEKFRDKRIKRNEQSLQEIWDCVKRPNLRLIGVHESDGENGTKLENTLKDIIQENFPNLARQVNTQIQEIQRMPQRYSSRRATPRHIIVRFTKVEMKEKVLRATREKGRVTHKGKPIRLTADLSVETLQARREWGPIFNILKEKNSQPRISYPAKLSFKTEGEIKSFTDKQMLRDFVTTRPALKELLKEALNMERNNRDTYRLKIKGWRKIYQANGKQKKAGVAILVLDKTDFKPTKIKRDKEGHYIMVKGSIQQEELTILNIYAPNTGALRFIKQVLSDLQRDSDSHTIITGDFNTSLSTLGRSTRQKVNKDIQELNSALRQVDLIDIYRTPHPKSTEYTFFSAPHRTYSKIDHIVGSKRVLSKCKRTEMITNCLSDHSAIKPELRIKKLTQNHSITWKLNNLLLNDYWVHNEMKAEIKMLFETNENKDTTYQNLWDTFKAVCRGKFIALKAHKRKQERSKIDTLTSQLKELEKQEQTHSKASRRQEITKNRAELKEIETQNTLQKINASRSWFFERTNKIDRPLARLIKKKREKNQIDAIKNDKGDITTDPTEIQTTIREYYKHLYANKLENLEEMDKFLDTYTLPRLNQEEVESLNRPITGAEIEAIINSLPTKKSPGPDGFTAEFYQRYKEELECSSSPAMEQSWTENDFDDLREEGFRRSVITNFSKLKEDVQTHHKEAKNLEKRLDEWLTSNNQCREVLKLPERAENHGTRTM

SEQ ID NO: 41969 - protein, 26 aa, Homo sapiens
GRPGGDTISQHLLVCKGFYFSFIYEA

SEQ ID NO: 41970 - protein, 181 aa, Homo sapiens
  misc_feature (1)...(181): Xaa = X or * as defined in Table 2
AAAMADSGTAGGAALAAPAPGPGSGGPGPRVYFQSPPGAAGEGPGGADDEGPVRRQGKVTVSYDRKELRKRLNLEDWILXQLNGAFYDCQEEEIPELEIDVDELLDMESDDARAARVKELLVDCYKPTEAFISGLLDKIRGMQKLSTPPEEVRVPDPGRTVAPTGQSLPPDLVATAITGGT

SEQ ID NO: 41971 - protein, 96 aa, Homo sapiens
SDVTFSGKPSLVTLFPLYPPGKFSFSSVDVSMLQSTIKHGSCSLWASPSEEFDILEVVPLFCVLFRPTASFISSRLPSKGVKSSSCPFGRAGSSMV

SEQ ID NO: 41972 - protein, 217 aa, Homo sapiens
MQSLTNSELENYIQDNMKKEMVEIQQNAVQNQTAVMIEIGTNLLNQTAEQTRKLTDVEAQVNSIYNHGVPRKKRSQSNMHVFPANDPTVAKEEQISFRDCAEVFKSGHTTNGIYTLTFPNSTEEIKPTAVTPEAHPSPRVGTNVENLGNGEQASFGTYPCFRFTPEGRACGALSLPPLTFQQVLEFDSHQTEIAKICKNSIGQLFCINDCTGSKGQK

SEQ ID NO: 41973 - protein, 1033 aa, Homo sapiens
  DOMAIN (848)..(885): Fibrinogen beta and gamma chains C-terminal domain proteins domain identified by eMATRIX, accession number BL00514C, p-value= 4.000e-29, raw score of 17.41
  DOMAIN (817)..(1031): Fibrinogen beta and gamma chains, C-term domain identified by PFam, accession name fibrinogen_C, E-value=6.2e-74, PFam score of 257.5
MVDSLIARVGVMARGNAITLPVCGRDVKFTLEVLRGDSVEKTSRVWSGNERDQELLTEDALDDLIPSFLLTGQQTPAFGRRVSGVIEIADGSRRRKAAALTESDYRVLVGELDDEQMAALSRLGNDYRPTSAYERGQRYASRLQNEFAGNISALADAENISRKIITRCINTAKLPKSVVALFSHPGELSARSGDALQKAFTDKEELLKQQASNLHEQKKAGVSYRPVHMAAKGTWPPELVEMTQHNGLGSKEARLWSQRGGAGARRGGNEEHRLGSQIRSEIQIRCPNKRFMEKIWSYKGNSSMSTLEDPRNKLKDMHSQGHDHVKIWWTYNWHDWIVLKIQFARVDFFLEKKVLAMEDKHIIQLQSIKEEKDQLQVLVSKQNSIIEELEKKIVTATVNNSVLQKQQHDLMETVNNLLTMMSTSNYLQIVMEMSQAFFQKHCRTPNKEWKFSGGGGVNRGQRGCRVKVWGTGRRRGPGGYGECSRQGMATEFGEEIYRTVLKINPCGYISSCLYSRRPPYMCARPVCVYFALFLMVDTLGKVWGLGSSFLSQTSTYNNFRKSMDSIGKKQYQVQHGSCSYTFLLPEMDNCRSSSSPYVSNAVQRDAPLEYDDSVQRLQVLENIMENNTQWLMKLENYIQDNMKKEMVEIQQNAVQNQTAVMIEIGTNLLNQTAEQTRKLTDVEAQVLNQTTRLELQLLEHSLSTNKLEKQILDQTSEINKLQDKNSFLEKKVLAMEDKHIIQLQSIKEEKDQLQVLVSKQNSIIEELEKKIVTATVNNSVLQKQQHDLMETVNNLLTMMSTSNSAKDPTVAKEEQISFRDCAEVFKSGHTTNGIYTLTFPNSTEEIKAYCDMEAGGGGWTIIQRREDGSVDFQRTWKEYKVGFGNPSGEYWLGNEFVSQLTNQQRYVLKIHLKDWEGNEAYSLYEHFYLSSEELNYRIHLKGLTGTAGKISSISQPGNDFSTKDGDNDKCICKCSQMLTGGWWFDACGPSNLNGMYYPQRQNTNKFNGIKWYYWKGSGYSLKATTMMIRPADF

SEQ ID NO: 41974 - protein, 656 aa, Homo sapiens
  DOMAIN (191)..(228): Fibrinogen beta and gamma chains C-terminal domain proteins domain identified by eMATRIX, accession number BL00514C, p-value= 5.869e-22, raw score of 17.41
  DOMAIN (160)..(223): Fibrinogen beta and gamma chains, C-term domain identified by PFam, accession name fibrinogen_C, E-value=2.7e-22, PFam score of 79.8
MPNRRGRQGRRRVVRTRGLMRPPPRWLPTAVTPEAHPSPRVGTNVENLGNGEQASFGTYPCFRFTPEGSFLEKKVLAMEDKHIIQLQSIKEEKDQLQVLVSKQNSIIEELEKKIVTATVNNSVLQKQQHDLMETVNNLLTMMSTSNSAKDPTVAKEEQISFRDCAEVFKSGHTTNGIYTLTFPNSTEEIKAYCDMEAGGGGWTIIQRREDGSVDFQRTWKEYKVMTDVSRIFAIQLTMVQLKIFRLYDVICGTMLPHDARQRQRATGPSQSCDPQGEQQTLRAPCCQMALSDCGLMIHLKGLTGTAGKISSISQPGNDFSTKDGDNDKCICKCSQMLTGDEYFAGGLHSSFDDLCGNSGCGNQERKLEGSINDIKRHDDDLTPLEGSLEEMKEAVGLKSTQNKGTTSKISNSSEGEAQSEHEPCFIVDCNMETSTEEKENLPGGYSGNKVTNEGFPEKVTSDHRPGEGEGACDSVKIHVSAGGNSRNKCPDGGKCLQEQRGGQYSKDFLSCRKEVGEGSRNDALKTLLDSALFTQTCSRWNDALKTLLDSALFTQTCSSWNDALKTVLDHALFTQTCRAPASLLEQKPTCQFIPTVLLPPLPHWLSRPSGLVHAAGQLPLQGTLFPCIYLANFLISFNSFTFSMGQFSAVDSSPHS

SEQ ID NO: 41975 - protein, 218 aa, Homo sapiens
  DOMAIN (147)..(161): Ribosomal protein L1 proteins domain identified by eMATRIX, accession number BL01199, p-value=7.923e-12, raw score of 8.49
  DOMAIN (47)..(218): L1P family of ribosomal proteins domain identified by PFam, accession name Ribosomal_L1, E-value=1e-08, PFam score of -1.9
  misc_feature (1)...(218): Xaa = X or * as defined in Table 2
TSEASRQSERVDSAALSALSLLSRSSKCRPWGTARVARAGGCLTPLLSRRFLETRPFTGPWDPGLGVTCWCCPPKRRLKSTPRPKFSVCVLGDQQHCDEAKAVDATFEVCLGDQVLSNANGFLSLSAKKYDAFLASESLIKQIPRILGPGLNKAGKFPSLLREEGQAICYSSTNLTXSSLPSSQVLCLAVAVGHVKMTDDELVYNIHLAVNFLVSLLK

SEQ ID NO: 41976 - protein, 231 aa, Homo sapiens
  DOMAIN (7)..(228): L1P family of ribosomal proteins domain identified by PFam, accession name Ribosomal_L1, E-value=7.5e-09, PFam score of 0.0
  misc_feature (1)...(231): Xaa = X or * as defined in Table 2
EAMSSKVSRDTLYEAVREVLHGTQRKRRKFLETVELQISLKNYDPQKDKRFSGTVRLKSHSPALSFSVCVLGDRQHCDEAKAVDIPPHGPSEAAEKTSTKNKKLVQKSWPKKVXMPFLASESSDQARFPRIPRAPGLNKAGKFPSLLTHNGKHGGPKVDEVKVPQSRFQMKKVLCLAVAVGHVKMTDDELVFNIHLAVNFLVSLLKKNWQKCSGALYYQEAPMGQSPKRLY

SEQ ID NO: 41977 - protein, 158 aa, Homo sapiens
  DOMAIN (20)..(35): RIBOSOMAL PROTEIN S2 SIGNATURE domain identified by eMATRIX, accession number PR00395F, p-value=6.063e-13, raw score of 10.56
  DOMAIN (14)..(49): Ribosomal protein S2 domain identified by PFam, accession name Ribosomal_S2, E-value=9.6e-15, PFam score of 56.0
IPALWEAKAGGSRDSPLRYVHIAIPCNNKGAHSVGLMWWMLAWEVLCMRGTISREHPWEVMPDFCFYRDPEEIEKEEQPAAEKAVTKEEFQGERTAPAPEFTATQPEVADWSEGVQVPSVPIQQFPTEDCSAQPATEDWSAAPTAQATEWVGATTEWS

SEQ ID NO: 41978 - protein, 133 aa, Homo sapiens
LRVGMLQRSKANGPDDDHLLGASCTCGPSTGSPSPRLPSLPQRPQKGLLHQRATRMKPGNIAKGLWKRLSKGTVMKLWLLTAVPRLSGLLVCPLVHQLLLAFKFLKRFPIFCLWFRAANRHARFSILFKLSRP

SEQ ID NO: 41979 - protein, 517 aa, Homo sapiens
MHTHPHAYVHTQVHTPTHVHTPTHVHRCMLTLTHIRTPAVLCLHLADSPHSCARECESRVRGLGVTLQHLSGPSSQSRGSTLNENKTPWFEMEGNLAPEVQPGGAVDWRPSCVGSTAARVCKVTGDTRPSWTWPKRCSEIPGAPCSVTHQPPSTKLQGPTSSLRHVAFEGRPLYGPDDAPGWEQPQTPRRRGDDSGAPGWSLQSTTFRAEHGACRKGGQRTCWVFPGVWCQQVSSASSPLSESNGDSRDGVLGKRLIECLYKLAIKIWHRNSGATSPQCGTSHPKAPREVFSNHSPEKPRHYDHWHPCLFPPDPPRPSHPIKPSFRSHLHPPCTLPNPENGQAAVSSHNFITVPLLKRFHRPFAILPGFILVAPDEVGPSGAFEAGRAGEDSGSLLRVACAGGSKQVSMGGRGRDKRRVRLTARPSPALAVTQSWAAWLAGACVGTRKMAEAPSAERTFPAQSQIHTACSPQHSGQAAAAFPDRELQLTAPRIQPTRTPTGALHLRTGSHSFLLGTT

SEQ ID NO: 41980 - protein, 249 aa, Homo sapiens
  DOMAIN (53)..(94): kw TRANSCRIPTASE REVERSE II ORF2 domain identified by eMATRIX, accession number DM01354I, p-value=1.214e-38, raw score of 15.55
  misc_feature (1)...(249): Xaa = X or * as defined in Table 2
MAGYSSETKLPEERSDSSIRGSRKSTVLQTLLLIPRQTGIKKLTQNRSTTWKLNNLLLNDYWVHNEMKAEIKMFFETNENKDTTYQNLWDYIQSSVXREIYSTKCPQEKAGKIQNDTLTSQLKELEKQEQTHSKASRRQEITKIRAEPKEIQTQKTLQKINESRSLFFKRINKIDRPLARLIKKKREKNQIDAIKNEKGISPPIPQNYKLPSENTTNTSMQINXKIXKKWINSWTHTPSQEXTRKKLNL

SEQ ID NO: 41981 - protein, 167 aa, Homo sapiens
  misc_feature (1)...(167): Xaa = X or * as defined in Table 2
VRATYFHHAPANCTEFVPRQLVSRAENLPQATSLPTEKASRAFRVLLIPRQTRSGVDLQQTPTDLQLRVLIVRRKTNKQKGHPHQNPICTSPLRRSNFFELKEEVRTHGKDAKNLEKRLDKWLTRISSVEKSLNDLMELRTMAXELCDECTSFSSXFNQLEERVSVI

SEQ ID NO: 41982 - protein, 522 aa, Homo sapiens
  DOMAIN (290)..(333): kw TRANSCRIPTASE REVERSE II ORF2 domain identified by eMATRIX, accession number DM01354T, p-value=1.000e-40, raw score of 9.48
  DOMAIN (112)..(414): Reverse transcriptase domain identified by PFam, accession name rvt, E-value=2.5e-27, PFam score of 104.2
  misc_feature (1)...(522): Xaa = X or * as defined in Table 2
MNSLLTGQIPESQQIHRDSSAATWWKKIYRQKMGNDIEKSEVRGGLTPHTAGYSSETKLPEKRSGSSICGSPISAVLQPPLLIPRQTGSGVDLQQTPTDLKLRVLTVRRKSNKQKGHPHQKPICTSPLSKTKDRSTRQKVNKDIQDLNSALHQADLIDIYRTLHPKSTEYTFFSAPHHTCSKIDHIVGSKALLEQMXKNRNYQKLSLRPQCNQLELRIKKLTQNHSTTWKLNNLLLNDYWMQKRPLKIQQCFMLKTLNKLGIDGTYLKIIRAIYDKPTANIILNGQKLEAFLLKTGTRQGCPLSPLLLNVVLEVLARAIRQEKEIKGIQLGKEEVKLSLFADDMIVYLENPIVSAQNLPKLISNFSKVSGYKINVQKSQTFLYTNNRQTESQIMSELPFTIASKRIKYLGIQLTRDVKDLFKENYKPLLKEIKEDTNKWKNIPCSWVGRINIVKMAILPKVIYRFNAIPIKLPMTFFTELEKTTLKFIWNQKRACIAKSILSQKNKAGGITLPEFRLYTRLQ

SEQ ID NO: 41983 - protein, 1654 aa, Homo sapiens; identical to SEQ ID NO: 35108
  DOMAIN (79)..(103): Bacterial extracellular solute-binding proteins family 5 sig. domain identified by eMATRIX, accession number BL01040A, p-value= 4.600e-22, raw score of 17.12
  DOMAIN (6)..(254): Bacterial extracellular solute-binding prot domain identified by PFam, accession name SBP_bac_5, E-value=3.2e-112, PFam score of 386.2

SEQ ID NO: 41984 - protein, 1225 aa, Homo sapiens
  DOMAIN (863)..(908): kw TRANSCRIPTASE REVERSE II ORF2 domain identified by eMATRIX, accession number DM01354N, p-value=1.000e-40, raw score of 13.17
  misc_feature (1)...(1225): Xaa = X or * as defined in Table 2
XFYVMVGEVLSKDSCTGTAQIQGTVPTDVPTSSWCTGTCYGSCPLKAMCPPHSSPAQGSQTLTSSQSEWSLCLSVFPDLDPSKACGCPLGCLIFAGAGLGPPLGLSDISLGFVGSSTAVGHMVLAKYLIKRDAVPLCPMLVMLALSLGRKGVGQDAGSEAPGVILLTLVVSRVCAYSPVVPWAVRMATVLQATVFLQARRHHTGELYVRFLPKPQVWHRGRLWRATPPCPALSHPALRVLMSSRCVLISPDVDPSGGTASTGSMVLPGQDVRQDASGCARLKGCFGRPRCCRACRLEGPGWEPAKPQVPAASGFVWFWPDPRGLLPLEAHHYLEKCMSTSGKARGQPQVTEEFSSRQNETPVVGETKLSEERSGSNICCAPISAVLQLLLLIPRQTGSGVDLQQTPTDLQLRVLNVRRKTNKQKGHPHQNPICMSPSSKTKEKSLKDLMELKTKARELCDECTSLSSRIDQLEERISVMEDQMNEMKQEEKFREKIIERNEQSLQEIWDYVKRANLCRIGVPENDGENGTKLENTLQDIIQENFPNLARQANIQIQEIQRTPQRYSSRRAIPIHIIVRFTKVEMKEKMLRAAREKGQECSSSPATEQSWTENDELREEGFRQSNYSELQEEIQTEGKEVKNFEKNLHECITRITNTEKCLKELMELKAKARELREECRSLRSRCNQLEERISVMEDQMNEMNDRENGTKLENTLQDIIQENFPNLARQANVQIQEIQRTPQRYSSRRATARHIIVRFTKVEMKEKMLRAAREKEKQEQTHSKASRRQEITKIRAELKEIETQKTLQKINESRSWFFERINKIDRLLARLIKKKREKNQIDAIKNDKGDITTDPTQIQTTIREYYKHLYADKPENLEEMDKFLDTYTLPRLNQEEIESLNRPITGSEIVVIINSLPIKKSPGPEGFTAEFYQRSTLRQEEEKRKNASALYEKIRGHLRRKEEQYRKEVEANKQLQLTLRTRDTELRTVRNHLNQVVQELNDTQRQLSREQNARILQDEILTNHLCKQKEIALARRKRNSQIPHSHDKVQDLLHENRMLQDEIATLRLEIDTIEKQNEENKKNYFEDIGDLQKTIKRNGEILTTMISEYTAQLGVLTAENTMLHSQLEREKQKKESLETEVESHRCRLAAVRRDCEQSETSKRDVELAFQGAKDEWFHLPEKMNFDDLKANSVLRSQQLSRTQSNLESLSLKFQHTRDALTEKQKRX

SEQ ID NO: 41985 - protein, 348 aa, Homo sapiens
  DOMAIN (195)..(235): kw TRANSCRIPTASE REVERSE II ORF2 domain identified by eMATRIX, accession number DM01354Y, p-value=1.000e-40, raw score of 10.69
MAGYSSETKPPEERSGSNICCSPISAVLQPPLLIPRQTGSGVDLQQTLTDLQLRVLTVRRKTNKQKGHPHQNPICTSPSSKTKGIKYLRIQLTRDVKDLFKENYKPLLNKIKEDTNKCKNIPCLWVGRINIMKMAILPKVIYRFNAIPIKLPMTFFTELEKTTLKFIWNQKRARIAKSIISQKNKAGGIMLPDFKLYYKATVTKTAWYWYQNRDIDQWNRTEPSEIMPCIYNCLIFDKPEKNKKWGKDSLFNKWCWENWLAICRKLKLDPFLTPYTKINSRWIKDLNVRSKTIKTLEENLGNTIQDIGMGKDFMSKTPKAMATKAKIDKWDLIKLKSFCTAKEKLPSE

SEQ ID NO: 41986 - protein, 89 aa, Homo sapiens
DKTSRGMIRQQHLRFTNICCSEATAADTQANRVWSGPPANSNRPAAEGPAMEQSWMENDFDKLRQEGFRRSKYSKLKAEVRMNGKEVKN

SEQ ID NO: 41987 - protein, 198 aa, Homo sapiens
LLEGKLTNRKDIHTKNPSVRHRSSKTKERVSAMEDEINEMKREEKFREKRVKRNEQSLQEIWDYLKRPNLRLIGVPESDGENGTKLENTLQDIIQENFPNLARQANIQIQEIQRMPQRYSLRRATPRHIIVRFTKVEMKEKMLRAAREKGRVTHKGKPIRLTADLSAETLQARREWGPIFNILKEKNFQPRISYPAKL

SEQ ID NO: 41988 - protein, 419 aa, Homo sapiens; identical to SEQ ID NO: 32852

SEQ ID NO: 41989 - protein, 253 aa, Homo sapiens; identical to SEQ ID NO: 31356

SEQ ID NO: 41990 - protein, 134 aa, Homo sapiens
PLLLIPRQTVSGVDLQQTPTDLQLRAQEHDECTSLSSRFDQLEERVSVMEDEMNEKKREEKFREKRIKRNEQSLQEIWDYVKRPNLRVIGVPESDGENGTKLENTLQDIIQENFPNLARQANILIQEIQRTTQK

SEQ ID NO: 41991 - protein, 186 aa, Homo sapiens
LLEGKLTNRKDIHTETPSVCHHHQRPKDIIQENFPNLARQANIQIQEIQRTPQRYSSRRATPRHIIVRFTKVEMKEKMLRAAREKGRVTHKVKPIRLTADLLAETLQARREWGLIFNILKEKNFQPRISYPAKLSFISEGEIKYFTDKQMLRDFVTTRPALKELLKETLNVERNNRYQPLQKHAKL

SEQ ID NO: 41992 - protein, 399 aa, Homo sapiens
  DOMAIN (157)..(202): kw TRANSCRIPTASE REVERSE II ORF2 domain identified by eMATRIX, accession number DM01354N, p-value=1.000e-40, raw score of 13.17
  misc_feature (1)...(399): Xaa = X or * as defined in Table 2
MAGYSSETKLPEERSGSNICCSPISAVLQPPLLIPRQTGSGVDLWQTPTDLQLRVLTVRRKINKQKGHPHQNPICTSPSSKTKGQIRAELKEIETQKALQKINESRNWVFEKINKIDRPPARLIKKKREKNQIDAIKNDRGDITIDPTEIQTTIREYYKHLYANKLENLEERDKFLNTYTLPRLNQEEVESLNRPITGSEIEAIINSLPTKKSPGPDGFTDAFYQRYKEDLVPFLLKLFQSIEKDRILSNSFYEASIFLIPKLGRDTTKKENXQTERTSTPKPHLYITIIEDQRPDQSRTEGNRDTKSPSKNQXIQELWFLKRSTKLIATSKTNKEEKREESNRCNKKXXRGYHHRSHRNTNYHQRILXTPLCKXTRKSGRKGXIPQHIHSPKTKPGRS

SEQ ID NO: 41993 - protein, 345 aa, Homo sapiens
YSSETKLPEERSGSSICGSPISVVLQPPLLIPRKTGSGVDLQQSPTDLQLTVLTVRRKTNKQKGHPHQKPICMSPSSKTKDEWLTRITNAQKYLKDLMELKTMARELHDEGTSLSSRCDQLEESVSAMEDQMNEMKQEEKFREKRIKRNEQSLQQIWDYVKRPNLRLIGIPESDGENGTKLENTLQDIIQENFPNLARQANIQIQEIQRTPQRCSSRTATPRYTIVRFTKVEMKEKMLRAAREKGRVTHKGKPIRLTADLSAETVQARREWGPIFNILKEKNFQPRISYPAKLSFISEGEIKSFTDKQMLRDFVTTRPALPELLKEALNMERKNQYKPLQKHAKL

SEQ ID NO: 41994 - protein, 416 aa, Homo sapiens; identical to SEQ ID NO: 31361

SEQ ID NO: 41995 - protein, 269 aa, Homo sapiens
MAGYSSEKKLPKERSGSNICCSPISAVLQPLLLIPRQTGSGVDLQQTPTDLQLRVLTVRRKTNKQKGHPHQNPICTSPSSKTKGPNCSDLKQPMYLGFEKDVFKTIADYYGHLKEPLLTFHLFDAFVSVLGRSWIFWAKFRVAAGPDFAEGALWPDGWRLQDLGLSGTRLQSRQVAWLAAQFAAAAFPQRACGGGINDPSTWDDAWQPIWGEEWLPGHGHGVLQPSIAIAVALCALSGLGCPDRWPFSAPGAPGSGRGHSAQACSLIVN

SEQ ID NO: 41996 - protein, 237 aa, Homo sapiens
  DOMAIN (160)..(191): kw TRANSCRIPTASE REVERSE II ORF2 domain identified by eMATRIX, accession number DM01354G, p-value=2.432e-34, raw score of 11.57
  DOMAIN (22)..(208): AP endonuclease family 1 domain identified by PFam, accession name AP_endonucleas1, E-value=0.012, PFam score of -77.0
  misc_feature (1)...(237): Xaa = X or * as defined in Table 2
MNSLLTGQIPESQQIHRDSSAATWWKKIYRQKMGNDIEKSEVRGGLTPHTAGYSSETKLPEKRSGSSICGSPISAVLQPPLLIPRQTGSGVDLQQTPTDLKLRVLTVRRKSNKQKGHPHQKPICTSPLSKTKDRSTRQKVNKDIQDLNSALHQADLIDIYRTLHPKSTEYTFFSAPHHTCSKIDHIVGSKALLKQMXKNRNYQKLSLRPQCNQTRTQDXETHSKPLNYMETEQPAPE

SEQ ID NO: 41997 - protein, 588 aa, Homo sapiens
  DOMAIN (321)..(352): kw TRANSCRIPTASE REVERSE II ORF2 domain identified by eMATRIX, accession number DM01354G, p-value=9.500e-37, raw score of 11.57
  DOMAIN (185)..(378): AP endonuclease family 1 domain identified by PFam, accession name AP_endonucleas1, E-value=1.1e-32, PFam score of 122.0
  misc_feature (1)...(588): Xaa = X or * as defined in Table 2
MNLSRHLNEVKGELLWSLEWRDPDGGSIRMEVGLGGWTQRLEEEKKGNVCSHGNLEKDFPYIPHLFGLQQKKMDLKGVFKSCFKIYCSSKHLLKTGFISEAVLCYGEGGEGDTVLTMKERWPHECIVLIQCNKGRLTPHTARYSSETKLPEERSGSSICGSPISAVLQPPLLIPRQTGSGVDLQQTPTNLQLRVLTVRRKTNKQKGHPHQKPICMSPSSKTKDFKPTKIKRDKEGHYIMVKGSIQQEELTILNIYAPNTEAPRFIKQVLSDLQRDLDSHIIIMGDFNTPISTLDRSMRQKVNKDIQELKSALQQADLIDIYRTLHPKSTEYTFFSAPHHTYSKIDHIVGSKALLSKCKRMEIITNCLSDHSAIKLELRIKKLTQNRSTTWKLNNVLLNDYWVHNKMKAEIKMFFETNGNKDTTYQNLWDYIQRSVXREIYSTKCPQEKAGRIXNXHPNIQLKELEKQEQTHSKVSRRQEITKIRAELKEIETQKTLQKINESRSWFFEKFNKIDRRLARLIKKKREKNQIDAIKNDKGISPLIPQKYKLPSENTINTSTQINXKIXKKWINSSTHTPSQDXTRKKLNL

SEQ ID NO: 41998 - protein, 44 aa, Homo sapiens
  misc_feature (1)...(44): Xaa = X or * as defined in Table 2
KGRNIQLNGLVIGTLSNXLKCLKMFFTMPLGYINGGISSDFFLH

SEQ ID NO: 41999 - protein, 80 aa, Homo sapiens
GPQQQQMLELCFLHSLQNSLASGTQPWHAPALLLLLEACLSLLQWIQDPQLQVCWSLLEVHSRPCLPGYQQQWLQNSGFS

SEQ ID NO: 42000 - protein, 417 aa, Homo sapiens
  DOMAIN (350)..(364): Phage integrase family domain identified by eMATRIX, accession number PF00589B, p-value=1.621e-11, raw score of 16.17
  DOMAIN (223)..(396): "Phage" integrase family domain identified by PFam, accession name Phage_integrase, E-value=3.7e-13, PFam score of 57.1
MAGLRLTLPVMRELDSEKAFHKIQHPFVIKTLCKISIQGTYLTVIKAICDKPTANIILNGEKLKAFPLRTGTRQGCPLSPLLFNVVLEVLARAIKQEKEPNWEAPPSTGGLTPHTARYSSETKLSEEQSGSSIGGSPISVVLQPLLLIPRQTGSGVDLQQNPTDLQLRVVTVRRKTNKQKGHPHQTPICTSPSSKTKAPHHTYLKIGHIVGSKALLSKCKRTEIRTNCLSDHSAIKLELRIKKLTQNSSTTWKLNNLLLNDYWVHNEMKSEIKMVFETNKKKDSTYQNLWDTFKAVFIRDKLMERRNRRTGRTEKARIWEVTDRTVRTWIGEAVAAAAADGVTFSVPVTPHTFRHSYAMHMLYAGIPLKVLQSLMGHKSISSTEVYTKVFALDVAARHRVQFAMPESDAVAMLKQLS

SEQ ID NO: 42001 - protein, 344 aa, Homo sapiens
  DOMAIN (233)..(280): kw TRANSCRIPTASE REVERSE II ORF2 domain identified by eMATRIX, accession number DM01354V, p-value=1.000e-40, raw score of 12.97
  DOMAIN (48)..(246): Reverse transcriptase domain identified by PFam, accession name rvt, E-value=0.00011, PFam score of -2.9
MWCQSSETIFQAHGEKLAATSKPPEASKTIHFHFHSILSINFKFISNYGKNILCPRLTPHTAGYSSETKLPEERSGSSICCSPISVVLQPLLLIPRQTGSGVDLQQTPTDLQLRVLTVRRKTNKQKGHPHQNPIYMSPSSKTKVLEVLARAIRQEKEIKGIQLGKEEVKLSLFADDMIVYLENPIIPAQNLLKLISNFSKVSGYKINVQKSQAFLYTNNRQTDSQIMSELPFTIASKRRKYLGIQLTRDVKDLFKENYKPLLNEIKEDTNKWKNIPCSWVGRISIMKMAILPKVIYRFNAIPIKLPMTFFTELEKTKVHMEPKKSLHCQVNPKPIEQSWRHQAT

SEQ ID NO: 42002 - protein, 337 aa, Homo sapiens
  DOMAIN (180)..(192): Fungal Zn(2)-Cys(6) binuclear cluster domain proteins domain identified by eMATRIX, accession number BL00463, p-value=7.469e-10, raw score of 8.22
HLTRPGTPLRQNFPRNNQAAAFAGSPIPAVLQHLLLTPRQTGSGVVFQQTPTDLQLRVLTVGRKTNKQKGHPHQNPNCTSPSSKTKDKTSRGMIRQQHLQVTNIRCSTATAADTQANRVWSGPLANSNRPAAEGPEEIQINGKEVKKFEKKLDEWITRITNAEKSLKELMELKAKARELCEECRSLRSRCDQLEERVSVMEDEMNEMKREGKFREKRIKRNEQSLQEIWDYVKRPNLRLIGVPESDRENGTKLENTLQDIIQENFPNLARQANIQIQEIQRTPQRYSSRRATPRHIIVRFTKVEMKEKMLRAARKKGQVTHKGKPIRLTADLSVETL

SEQ ID NO: 42003 - protein, 238 aa, Homo sapiens
LKNLPFSFTKLQQLTAMWLSDNQKSGIILRIIGVTEEEDNSKSLENIFGGIIEENFPGLVRDLDIQIQEAQRIPGKFIAKRSSPKHIVIRLSKVKTKEKSLKSCETEAPVTTLSCRSVGVDWRSTPDPVCLGISSTGCRTADIGEPQMLLPDHSSGSFVSEEYPAMASVGAMRFSAGLRWGPGLGEGELCREAAALGSLPPAPPSCTGSPGAPQAPAESASLEGSEPSCPEPYPDSPV

SEQ ID NO: 42004 - protein, 577 aa, Homo sapiens
  DOMAIN (265)..(301): kw TRANSCRIPTASE REVERSE II ORF2 domain identified by eMATRIX, accession number DM01354F, p-value=6.400e-37, raw score of 14.56
  DOMAIN (128)..(358): AP endonuclease family 1 domain identified by PFam, accession name AP_endonucleas1, E-value=7e-83, PFam score of 288.8
  misc_feature (1)...(577): Xaa = X or * as defined in Table 2
SRVRPVVHLRRAPMVCQGHTTPPVCGSLAGPGDCVHYSVPAGYSSETKLPEERSGSNICCSPISAVLQPQLLIPRRTGSGVDLQQTPTDLQLRVLTVRRKTNKQKGHPHQKPICMSPSSKTKGSNSHITILTLNVNGLNAPIKRHRLANWIKSQDPSVCCIQETHLTCRDTHRIKIKGWREIYQANGKQKKAGVAILVSDKTDFKPTKIKRDKEGHYMMVKGSIQQEELTTLNIYAPNTGAPRFIKQVLRDLQRDLDSHTLIMGDFNTPLSTLDRSTRQKVNKDIQDLNSALHQVDLIDIYRTLHPKSTEYTFFSALHHIYSKIDHIVGSKALLSKYKTTEIITNCLSDHSAIKLELRIKKLTQNRSTTWKLNNLLLNDYWVHNKMKAEINTLFETNENKDTTYQNLWDYIQSSVXREIHSTKCPQEKAGKIXNXHPNIQLKELEKQEQTHSKASRRQEITKIRAKLKEIETQKILQKINESRSWFFEKINKIDRPLARPIKKKREKNQIDAIKNEKGISPLIPQKYKLPSENTINTSMQINXKIXKKWINSSTHTPSQDXTRKKLNLXINTSMQIN

SEQ ID NO: 42005 - protein, 197 aa, Homo sapiens
LLEGKLTNRKDIHTKNPSVRHHHQRPKVDKTTKMGRKQSRKTGNSKNQSASPPPKERSSSPATEQNWTENDFDELREEGFRRSNYSELKEEVRTNAKEVKNFEKKLDEWITRITNAEKSLKDLMELKTTARELRDECTSPSSQCNQLEERISAMEDKMNEMKREEKFREKRIKRKEQSLQEIWDYVKRPNLCLIGVP

SEQ ID NO: 42006 - protein, 1183 aa, Homo sapiens
  DOMAIN (330)..(375): kw TRANSCRIPTASE REVERSE II ORF2 domain identified by eMATRIX, accession number DM01354N, p-value=1.000e-40, raw score of 13.17
  DOMAIN (414)..(689): Reverse transcriptase domain identified by PFam, accession name rvt, E-value=3.2e-81, PFam score of 283.2
MWPKGNYVVTRSVTLGSHFIPLETLKNNRREAILRGKSIGSLEGEKLEDGLVFPEELEEETGIIVIRTLSCRSVGVCWRSTPDPVCLGISSRGCRTADIGEQQMLLPDRSSGSFVSEEYPAVGFAKSKLPKTFRSVVTKADPQVGCSPWCDPIFPVHRGKNSGIKRALCPCDKRPQSSHHGTHRLQRIAQRPFSESEICRSLCDSNSSPAESCAGETEHNGWPEAVGQSVLRIRGCCSPGNSQQPRGEYLVHSKVNHCLTLSPHGKTTPNITTAVTTTNIYVSFLQPLMTYTSSRTNKKKREKNQIDTIKNDKGDITTDPTETQTTIREYYKHLYANKIENPEEMDKFLNTYTLPRLNQEEVESLNRPITGSEIEAIINSLPTKKSPGPDGFTAEFYQRYKEELVPFLLKLFQSIEKEGILLNSFCEASIILIPKPGRHTTKKENFRPISLMNIDVKILNKILANRIQQHIKKLIHHDQVGFIPGMQGWFNIRKSINVIQHINRTKDKNHMIISIDAEKAFDKIQQPFMLKTLNKLAIDGTYIKIIRAIYDKPTANIMLNEQKLEAFPLKTGTRQGCPLSPLLFNIVLEVLARAIRQDKEIKGIQLGKEEVKLSLFADDMIVYLENPIVSAQNLLKLISNFSKVSGYKINVQKSQAFLYTNNRQTESQTMSELPFTIASKRIKYLGIQLTRDVKDRFKENYKSLLSEIKEDTNKWKNIPCSWVGRINIVKMAILPKVIYRFNAIPIKLPMTFFTELEKTTLKFIRNQKRARIAKSILSQKNKAGGITLLDFKLYYKATVTKTAWYWYQNRHVDQWNRTEPSEIMLHIYNYLIFEKPDINKQWGKDSLFNKWCWENWLAICRKLKLDPFLTSYTKINSRWIKDLNVRPKTIKTLEENLGNTIQDIGMGKDFMSKTPKAMATKAKLDKWDLIKLKSFCTAKETTIRVKRYSSETKLPEERSGSSICGSPISAVLEPLLLIPRQTGSGVDLQQTPTDLQLRVLTVRRKTNKQKGHPHQKRICTSPSSKTKEKSLKDLMELKTMARELRDECTSLSSQCDQLEESISAMEEEMNEMKQEEKFREKRIKRNEQSLQEIWDYVKRPNLHLIGVPESDGENGIKLENTLQDIIQEHFPNRAKQANTQVQEIQKMPQRYSSRRAIPIHIIVRFTKVEMKEKMLRAAREKGQ

SEQ ID NO: 42007 - protein, 65 aa, Homo sapiens
MRRLLIPLALWLGAVGVGVAELTEAQRRGLQVALEEFHKHPPVQWAFQETSVESAVDTPFPAGIF

SEQ ID NO: 42008 - protein, 81 aa, Homo sapiens
  DOMAIN (3)..(15): INTERLEUKIN-1B CONVERTING ENZYME SIGNATURE domain identified by eMATRIX, accession number PR00376F, p-value=4.833e-11, raw score of 13.77
  DOMAIN (1)..(41): ICE-like protease (caspase) p10 domain identified by PFam, accession name ICE_p10, E-value=6e-17, PFam score of 69.3
NVSWRDSTMGSIFITQLITCFQKYSWCCHLEEVFRKVSVSFLVTHLFLQEEFVMIHFLLHNDNFCQGSESREVPSFCHSVV

SEQ ID NO: 42009 - protein, 177 aa, Homo sapiens
  DOMAIN (24)..(48): Glycosyl hydrolases family 39 proteins domain identified by eMATRIX, accession number BL01027A, p-value=9.477e-09, raw score of 13.79
  DOMAIN (9)..(98): Caspase recruitment domain identified by PFam, accession name CARD, E-value=0.034, PFam score of 9.3
IQPLVSVLDEKPSNGVLVHMVKLLIKTFLDGIFDDLMENNVLNTDEIHLIGKCLKFVVSNAENLVDDITETAQTAGKIFREHLWNSKKQLSSVHGSEHEDKALTCHWVGHPGFPEKLKERKKFCGIMVVGLFGFTTDSGKAGADIHGRFLQGNFCNDAVTKAHVEKDFIAFKSSTPH

SEQ ID NO: 42010 - protein, 143 aa, Homo sapiens
  DOMAIN (24)..(38): INTERLEUKIN-1B CONVERTING ENZYME SIGNATURE domain identified by eMATRIX, accession number PR00376A, p-value=6.510e-11, raw score of 14.23
  DOMAIN (24)..(72): ICE-like protease (caspase) p20 domain identified by PFam, accession name ICE_p20, E-value=1.6e-21, PFam score of 74.8
FSAVREDGGCYLWQIYPIKERMDRIRLVLIICNKEFDHLPPRNGADFAIMEMKKLLEDLGYSVDVEENLTARHNVSQGETGTKGLPIFITQLIACFQRYSWRCHLEEVFWKVQQAFESPEATVQMPTIERVSMTRYFYLFPGN

SEQ ID NO: 42011 - protein, 397 aa, Homo sapiens
  DOMAIN (92)..(110): Caspase family histidine proteins domain identified by eMATRIX, accession number BL01121D, p-value=4.086e-19, raw score of 12.34
  DOMAIN (31)..(194): ICE-like protease (caspase) p20 domain identified by PFam, accession name ICE_p20, E-value=5.5e-57, PFam score of 192.3
LLEIQGAQPSGKLKLCPHAHFHELKTKRADEEMETALRQFAAHPEHQSSDSTFLVFMSHSILNGICGTKHWDQEPDVLHDDTIFEIFNNRNCQSLKDKPKVIIMQACRGNNVSWRHETNGSVFISQIIYYFREYSWSHHLEEIFQKIYPIKERKDRIRLVLIICNKEFDHLPPRNGADFAIMEMKKLLEDLGYNNVSRRDSTRGSIFITQLIACFQRYSWRCHLEEVFWKLFPVRGAGEAMADGIFDDLMENNVLNTDEIHLIGKCLKFVVSNAENLVDDITETAQIAGKIFREHLWNSKKQLSSDTFKIWELQVPCSLGFAVDNFLSNPTKVWNWNIQGLPLDAFSTENGIIIKRGHRWARVIQTKRAGEWSRSKHSYFQTVDNWDEKQEFRDGIV

SEQ ID NO: 42012 - protein, 417 aa, Homo sapiens
  DOMAIN (166)..(212): Thiolases acyl-enzyme intermediate proteins domain identified by eMATRIX, accession number BL00098C, p-value=3.829e-32, raw score of 21.65
  DOMAIN (6)..(415): Thiolase domain identified by PFam, accession name thiolase, E-value=7.3e-156, PFam score of 531.2
KSSHCIKMGPQIFHKTSELFLPATSCPSCPDQNEEDVSQTQYKECCGGGWCSHSIFAVWHFAALGAGFSDKTPAHTVTMACISANQAMTTGVGLIASGQCDVIVAGGVELMSDVPIRHSRKMRKLMLDLNKAKSMGQRLSLISKFRFNFLAPELPAVSEFSTSETMGHSADRLAAAFAVSRLEQDEYALRSHSLAKKAQDEGLLSDVVPFKVPGKDTVTKDNGIRPSSLEQMAKLKPAFIKPYGTVTAANSSFLTDGASAMLIMAEEKALAMGYKPKAYLRDFMYVSQDPKDQLLLGPTYATPKVLEKAGLTMNDIDAFEFHEAFSGQILANFKAMDSDWFAENYMGRKTKVGLPPLEKFNNWGGSLSLGHPFGATGCRLVMAAANRLRKEGGQYGLVAACAAGGQGHAMIVEAYPK

SEQ ID NO: 42013 - protein, 547 aa, Homo sapiens
  DOMAIN (143)..(198): Thiolases acyl-enzyme intermediate proteins domain identified by eMATRIX, accession number BL00098B, p-value=5.219e-35, raw score of 32.59
  DOMAIN (110)..(547): Thiolase domain identified by PFam, accession name thiolase, E-value=5.5e-124, PFam score of 425.3
MLPRSPTPNPQDPQDLRRNARQPARSHAAQGDTDRAARPLSRLGEAGSRERGIRRPAVPCTYQSQPAAPGSPSHDDPKTERPLGSDSRLQGCDTQAPHRLGKDGKDWAAREALFVASFASVKIGELRGLLHRTSVPKEVVDYIIFGTVIQEVKTSNVAREAALGAGFSDKTPAHTVTMACISANQAMTTGVGLIASGQCDVIVAGGVELMSDVPIRHSRKMRKLMLDLNKAKSMGQRLSLISKFRFNFLAPELPAVSEFSTSETMGHSADRLAAAFAVSRLEQDEYALRSHSLAKKAQDEGLLSDVVPFKVPGKDTVTKDNGIRPSSLEQMAKLKPAFIKPYGTVTAANSSFLARGVESGVVPTGWNTTLLSPGGEELVRLVICKTELDDRAMWHGLHLPDLNPFDYFQGMLKVQVYLTDGASAMLIMAEEKALAMGYKPKAYLRPTYATPKVLEKAGLTMNDIDAFEFHEAFSGQILANFKAMDSDWFAENYMGRKTKKFNNWGGSLSLGHPFGATGCRLVMAAANRLRKEGGQYGLVAACAAGGQ

SEQ ID NO: 42014 - protein, 1131 aa, Homo sapiens
  DOMAIN (125)..(141): Calcium-binding EGF-like domain proteins pattern proteins domain identified by eMATRIX, accession number BL01187B, p-value= 9.775e-09, raw score of 12.04
  DOMAIN (657)..(710): Latrophilin/CL-1-like GPS domain identified by PFam, accession name GPS, E-value=2.7e-13, PFam score of 57.6
  misc_feature (1)...(1131): Xaa = X or * as defined in Table 2
MVCSAAPLLLLATTLPLLGSPVAQASQPLWPMAKGQTMWAQTSTLTLTEEELGQSQAGGESGSGQLLDQENGAGESALVSVYVHLDFPDKTWPPELSRTLTLPAASASSSPRPLLTGLRLTTECNVNHKGNFYCACLSGYQWNTSICLHYPPCQSLHNHQPCGCLVFSHPEPGYCQLLPPVPGILNLNSQLQMPGDTLSLTLHLSQEATNLSWFLRHPGSPSPILLQPGTQVSVTSSHGQAALSVSNMSHHWAGEYMSCFEAQGFKWNLYEVVRVPLKATDVARLPYQLSISCATSPGFQLSCCIPSTNLAYTAAWSPGEGSKASSFNESGSQCFVLAVQRCPMADTTYACDLQSLGLAPLRVPISITIIQDGDITCPEDASVLTWNVTKAGHVAQAPCPESKRGIVRRLCGADGVWGPVHSSCTDARLLALFTRTKLLQAGQGSPAEEVPQILAQLPGQAAEASSPSDLLTLLSTMKYVAKVVAEARIQLDRRALKNLLIATDKVLDMDTRSLWTLAQARKPWAGSTLLLAVETLACSLCPQDHPFAFSLPNVLLQSQLFGPTFPADYSISFPTRPPLQAQIPRHSLAPLVRNGTEISITSLVLRKLDHLLPSNYGQGLGDSLYATPGLVLVISIMAGDRAFSQGEVIMDFGNTDGSPHCVFWDHSLFQGRGGWSKEGCQAQVASASPTAQCLCQHLTAFSVLMSPHTVPEEPALALLTQVGLGASILALLVCLGVYWLVWRVVVRNKISYFRHAALLNMVFCLLAADTCFLGAPFLSPGPRSPLCLVPPSSVISSTWPPFSGCGAGPGVGPPAALCLSPAGKAPSSPPHGAPGLPVPTGVGRCHPGALPTSRAIPEGGGMLVGWEGRGVIHLRGPVLAIIGVNGLVLAMAMLKLLRPSLSEGPPAEKRQALLGVIKALLILTPIFGLTWGWPGHSVRGSLHGPSLHLHHSQHPPGRLHPIVWLPHGQEGRGRGWHKQSIYLSRRYKKLCANASAAPKPPAPPSPWPQMKAASWNTAKEEATLPGRQMLQSEPHTDPCSCKGVEAVCXSCXDLRCQRDPQQRSAKLCWGXSKPSHSYTHLWPHLGLAWPLCXRKSPRSLITSSPFSTPSRASSSYCLVASWTGRPGPWLA

SEQ ID NO: 42015 - protein, 119 aa, Homo sapiens
GQILANFKAMDSDWFAENYMGRKTKVGHGCCNRLRKEGGQYALVAACALAGQGVFILLFGCLMDRKIQEALRKRFCRAQAPSSTISLVSCCLQILSCASKSMSEGIPWPSSEDMGTARS

SEQ ID NO: 42016 - protein, 470 aa, Homo sapiens
  DOMAIN (114)..(152): Beta-ketoacyl synthases proteins domain identified by eMATRIX, accession number BL00606B, p-value=2.575e-15, raw score of 28.75
  DOMAIN (52)..(470): Thiolase domain identified by PFam, accession name thiolase, E-value=1.9e-118, PFam score of 406.9
  misc_feature (1)...(470): Xaa = X or * as defined in Table 2
KSSHCIKMGPQIFHKTSELFLPATSCPSCPDQNEEDVSQTQYKECCGGGWCSHSIFAVWHFIXRPDATXFGXSSAYGFVASDQCPXGSSXLYHLWYSYSGSENKQCGXRAALGAGFSDKTPAHTVTMACISANQAMTTGVGLIASGQCDVIVAGGVELMSDVPIRHSRKMRKLMLDLNKAKSMGQRLSLISKFRFNFLAPELPAVSEFSTSETMGHSADRLAAAFAVSRLEQDEYALRSHSLAKKAQDEGLLSDVVPFKVPGKDTVTKDNGIRPSSLEQMAKLKPAFIKPYGTVTAANSSFLLTDGASAMLIMAEEKALAMGYKPKAYLRRDFMYVSQDPKDHLLLGPTYATPKVLEKAGLTMNDIDAFEFHEAFSGQILANFKAMDSDWFAENYMGXKKPRFGLPPLWRRFNNWGGSLSLGHPFGATGCRLVMTAANRLREEGRASMAXVAACAAGGQGHAMIVEAYPK

SEQ ID NO: 42017 - protein, 214 aa, Homo sapiens
  DOMAIN (17)..(67): Ribosomal protein S4e proteins domain identified by eMATRIX, accession number BL00528C, p-value=1.000e-33, raw score of 22.01
  DOMAIN (1)..(97): Ribosomal family S4e domain identified by PFam, accession name Ribosomal_S4e, E-value=2.2e-08, PFam score of 41.3
MDVISIDKTGENVRLIYDTKGHSAVHHITSEEAKYKLCKVRKIFVGTKGIPHLVIHDVHTIHYPDPLIKAVLPGEISKEEEQEQGKGGSQAMVHLAKDGSSLMKSGKLLFLGKEPGAFISYSQTSQSWDGGGECNSQPLPALYAASKAGCSSTGTVLQKEPQMLAVRSKGKSKGMGAWVLKGIWAETPTLFTTSTVGVQRTIPQSMMLCHAEHF

SEQ ID NO: 42018 - protein, 309 aa, Homo sapiens
  DOMAIN (74)..(128): Ribosomal protein S4e proteins domain identified by eMATRIX, accession number BL00528B, p-value=1.148e-21, raw score of 24.75
  misc_feature (1)...(309): Xaa = X or * as defined in Table 2
KSGARSLQPQFLRAPEDGGPLSLPNAAMARGPKKHLIRVAAPKHWMLDKLTGGCAPRHSPVPHKLRECLPLIIFLRNRLKYALTGDEVKKICMQRFIKIDGKVRTXYNPTPAGFHGMSSAFDKTGEENFPSXSIDTKGSAFAVHPYLTTLEEGQSTSLVPKVKKRSFVGHKKGIPSSWVTSXWPATIRXPRSPSSKVNXYHFRLDLETWQRLLDFIKFDTGNLCMGDWGGANLGRNWVLITNRERHPGSFDPWFHVKDANGNSFATRLSNIFVIGKGNKPWISLPRGKGIRLTIAEERDKRLAAKQSSG

SEQ ID NO: 42019 - protein, 153 aa, Homo sapiens
EYNVLLQATNFVVIGHNSKKHCSTGGEEWKGSQALVCKSLLPLLQITVSSGGMLVQKLNTNDLQSERTPFDGTMVYAQNKRQQVVLTERWAQGHPAIHFSSMHPGWADTPGVRQAMPGFHARFGDRLRSEAQGTDTMLWLALSSAAAAQPSGR

SEQ ID NO: 42020 - protein, 81 aa, Homo sapiens
IPQARVVLIKNRGKRSQAKSLASTRGQVLSSDGVHSHACPLRSPLGRDVNRSLLPKIEKQSPLHPLHCREAESVTPFAVQL

SEQ ID NO: 42021 - protein, 72 aa, Homo sapiens
GAATPAGVGSRPEQHRDMDPATLQQLTPLCGSLSLLDRKPVSTHLPLATASSSPAEEEKLIEILEQLAQTFK

SEQ ID NO: 42022 - protein, 131 aa, Homo sapiens
PLPRFLEIMMHEGKCQPQGHSSNDLEACWSSGGGEQNSLPDWPHQLHDLRQLTWALCSSFLLVETLCSLRSFLLPGVRQAMPGFHARFGDRLRSEAQGADTMLWLALSSAAAAQPSGRFFQGDFLPGCEGS

SEQ ID NO: 42023 - protein, 54 aa, Homo sapiens
  DOMAIN (7)..(25): GLUCOSE/RIBITOL DEHYDROGENASE FAMILY SIGNATURE domain identified by eMATRIX, accession number PR00081A, p-value=1.439e- 11, raw score of 10.53
VQIPGRVFLVTGGNSGIGKATALEIAKRGGTVHLVCRDQAPAEDARGEIIREMR

SEQ ID NO: 42024 - protein, 569 aa, Homo sapiens
  DOMAIN (46)..(59): BTB (also known as BR-C/Ttk) domain proteins domain identified by eMATRIX, accession number PF00651, p-value=1.947e-11, raw score of 15.00
  DOMAIN (281)..(568): Kelch motif domain identified by PFam, accession name Kelch, E-value=1.2e-91, PFam score of 317.8
MNATRSEEQFHVINHAEQTLRKMENYLKEKQLCDVLLIAGHLRIPAHRLVLSAVSDYFAAMFTNDVLEAKQEEVRMEGVDPNALNSLVQYAYTGVLQLKEDTIESLLAAACLLQLTQVIDVCSNFLIKQLHPSNCLGIRSFGDAQGCTELLNVAHKYTMEHFIEVIKNQEFLLLPANEISKLLCSDDINVPDEETIFHALMQWVGHDVQNRQGELGMLLSYIRLPLLPPQLLADLETSSMFTGDLECQKLLMEAMKYHLLPERRSMMQSPRTKPRKSTVGALYAVGGMDAMKGTTTIEKYDLRTNSWLHIGTMNGRRLQFGVAVIDNKLYVVGGRDGLKTLNTVECFNPVGKIWTVMPPMSTHRHGLGVATLEGPMYAVGGHDGWSYLNTVERWDPEGRQWNYVASMSTPRSTVGVVALNNKLYAIGGRDGSSCLKSMEYFDPHTNKWSLCAPMSKRRGGVGVATYNGFLYVVGGHDAPASNHCSRLSDCVERYDPKGDSWSTVAPLSVPRDAVAVCPLGDKLYVVGGYDGHTYLNTVESYDAQRNEWKEEVPVNIGRAGACVVVVKLP

SEQ ID NO: 42025 - protein, 160 aa, Homo sapiens
  DOMAIN (63)..(77): KELCH REPEAT SIGNATURE domain identified by eMATRIX, accession number PR00501A, p-value=1.237e-10, raw score of 8.25
  DOMAIN (29)..(115): Kelch motif domain identified by PFam, accession name Kelch, E-value=0.00025, PFam score of 27.8
SGSGLACGTPSGLGFIIFSCNSIGLFLPIIFLNPLRYDPKGDSWSTVAPLSVPRDAVAVCPLGDKLYVVGGYDGHTYLNTVESYDAQRNEWKENGRSTDSLHCVPGKATDTQHKPMKAARMGAVPCKARGVELPKAVGAHVLHQCDLNVRHEVNGDHVRV

SEQ ID NO: 42026 - protein, 43 aa, Homo sapiens
KGGQESQFNLRRMIGGAEQGEVDMESHRNANAEPAVQRTLLEK

SEQ ID NO: 42027 - protein, 265 aa, Homo sapiens
RGGRGGAGAAGAELAGPLPSPAPFESPGFTPPGPWGSICPAAFAHALHSGTVPARSGRTMARGAALALLLFGLLGVLVAAPDGGFDLSDALPDNENKKPTAIPKKPSAGDDFDLGDAVVDGENDDPRPPNPPKPMPNPNPNHPSSSGSFSDADLADGVSGGEGKGGSDGGGSHRKEGEEADAPGVIPGIVGAVVVAVAGAISSFIAYQKKKLCFKENAEQGEVDMESHRNAQRQKPAVQRTLLEKIEDCPEKQPQAFGSRVRTAA

SEQ ID NO: 42028 - protein, 47 aa, Homo sapiens
KGGQHKGSGAHEAWQAQQWAPWWWPGHWQSPRLLAVGGEVPGKSPGT

SEQ ID NO: 42029 - protein, 55 aa, Homo sapiens
LCLAVAVGHVKMPDDELVYNIHLAVNFLVSLLKKNWQNVRALYIKSTMGKPQRLY

SEQ ID NO: 42030 - protein, 80 aa, Homo sapiens
VPVVQVPAAPGPLPGPATGSCSASAAPRPPDPPPGHPEGHHGHSPGVLGFEVGIFSYCQEQPQKCVTIKIFESPPIRRRL

SEQ ID NO: 42031 - protein, 130 aa, Homo sapiens
ARVGFLLGQEGKAGARASGPADDVCGKGASAIRSHMRASRSPPSPRRCHHHHEATGTASGSAAGGPGAGCVWLCRLALTPSAQDGRNSTFQTYKKEVCLPRHSHPCWMHAAGTTAGGSAVMSACCPSSSR

SEQ ID NO: 42032 - protein, 107 aa, Homo sapiens
  misc_feature (1)...(107): Xaa = X or * as defined in Table 2
KGPRVTQGATVPKRQAPSAGLDGSPISQFPWSYDVXAIAILCGQGVTXPLPVSPPGGPAPPESVALAEWVCSGSRRPLSNSGIARRPIGVIQPLDFLQNWPKPVLRC

SEQ ID NO: 42033 - protein, 530 aa, Homo sapiens
MPNGTNESHRYNASERSQTQKDEQTGKTVGPPEWTPLVRRNGGDSGLDFHFFAEKLKIIVDSAGRAGTGHMRPPAVHFGHRGQAMITLSPLRAKQKAVLQKPPPLTSTYSLMLPLFLPDKRPPTTEWFLPVMEDAHELTLAWLMLALYRKPNASVQGSAQEETLCVFRVKEPLEWQALFADVHSGVNDKGPNINCSLYEHIKNVSEIVLNLAQTQKNPAHSDPSSTPAGCMLWHNCWRICGDECLLSKSSSSRPPTRTSYRLLQPSAAPRPPDPPPGHPEGIMAIRAAPSCLGACITLQDEETCEQTHTHSRIYMIYLFARCLLHAIARGRSRKCAASAGGTCPHVRVPGGGSYFRVSLQGQQTHWMRPENGFSTCVRTKSRRCPIIREQHPTKIPKALTANANQAFFLLVNGHSMVASPHQSQRRADLGGFWRDASSSLLANSQVQVCGSLRKRPHGWVVPFSLRCVAPLTADDSRLRTASLEMSTPPMHVQDDWQLRRGLPAGNTAVTVSELIYLNANGRLQVEKFLF

SEQ ID NO: 42034 - protein, 391 aa, Homo sapiens; identical to SEQ ID NO: 34243

SEQ ID NO: 42035 - protein, 50 aa, Homo sapiens
  misc_feature (1)...(50): Xaa = X or * as defined in Table 2
MGHLVRMVASLGIAVAAAEQPAQCGQGQPFVLPVGVSSRNEDYPRTCRMX

SEQ ID NO: 42036 - protein, 203 aa, Homo sapiens
GGLVPMSVSLGEGSYFRVSLQGQQTHWMRARKWFQHLCQGFLHHLPQKTLALNPCLRLCFWGELKIRQGEQIPSHQSGRKRHRSRDLKTIPGNLAMKVAREDRSRQRPQQPVTTGCILEKPLQLKSVGWNRVARVDTGNQLGGCSRKPGGGRWCLDLGGGGSGCVPVRAVAIESNDGGRKSPTRTARLLLVSDDPVTGYNRSS

SEQ ID NO: 42037 - protein, 221 aa, Homo sapiens; identical to SEQ ID NO: 33883
  DOMAIN (107)..(126): PROTEIN TYROSINE PHOSPHATASE SIGNATURE domain identified by eMATRIX, accession number PR00700D, p-value=4.462e-11, raw score of 12.47
  DOMAIN (26)..(165): Dual specificity phosphatase, catalytic doma domain identified by PFam, accession name DSPc, E-value=2.5e-42, PFam score of 154.1

SEQ ID NO: 42038 - protein, 158 aa, Homo sapiens
  DOMAIN (93)..(133): Synapsins proteins domain identified by eMATRIX, accession number BL00415R, p-value=7.655e-11, raw score of 7.93
AHGRQPDSPTQVGASTQHDAPSPHTTDVKARNAHTTEPVPKASQHGGTIVLLGIYLKELKIFPHKNLHVDVYSIQTHNCQNLEASMMSFSSFMGQLLQFESQVLAPHCSAEAGSPAMAVLDRGTSTTTVFNFPVSIPVHSTNSALSYLQSPITTSPSC

SEQ ID NO: 42039 - protein, 449 aa, Homo sapiens
  DOMAIN (330)..(349): PROTEIN TYROSINE PHOSPHATASE SIGNATURE domain identified by eMATRIX, accession number PR00700D, p-value=4.462e-11, raw score of 12.47
  DOMAIN (250)..(389): Dual specificity phosphatase, catalytic dom domain identified by PFam, accession name DSPc, E-value=6.7e-69, PFam score of 242.3
  misc_feature (1)...(449): Xaa = X or * as defined in Table 2
WAVCATRVGGAVGGTAKKPRSPEPRVTLLSQSKSGFWFGAERPGGLAFPRKAPPCPWPREQTKSTAGPITLGALRPAMVMEVGTLDAGGLRALLGERAAQCLLLDCRSFFAFNAGHIAGSVNVRFSTIVRRRAKGAMGLEHIVPNAELRGRLLAGAYHAVVLLDERSAALDGAKRDGTLALAAGALCREARAAQVFFLKGGYEAFSASCPELCSKQSTPMGLSLPLSTSVPDSAESGCSSCSTPLYDQGGPVEILPFLYLGSAYHASRKDMLDALGITALINVSANCPNHFEGHYQYKSIPVEDNHKADISSWFNEAIDFIDSIKNAGGRVFVHCQAGISRSATICLAYLMRTNRVKLDEAFEFVKQRRSIISPNFSFMGQLLQFXVPQDVLVPHCSAEGWEAPDMAVLDRGTSTTTVFNFPVFIPVHSTNSALSLPFRGPINGPFPAG

SEQ ID NO: 42040 - protein, 355 aa, Homo sapiens
LQMSIFQLQKKVSPALPNQSHMHWEEESTVDGNVQRESRPPLQKLKVSAEPTANGVKPLQEQPLAKDVAPGKGMPQTNSGSTEKTQPGEGLEESGPPQPGGKEDAPAAEGKKKDAGAGTEAESLKGNAEAQPLGPEAKGQPLQAAVEKDSLRAVEVTENPQTAAEMKPLGTTENVLTLQIAGELQPQGTVGKDEQAPLLETISKENESPEILEGSQFVETAEEQQLQATLGKEEQPQLLERIPKENVTPEVLDRSQLVEKPVMNDPFHKTPEGPGNMEQIQPEGIVGSMEHPARNVEAGAYVEMIRNIHTNEEDQRIEGETGEKVETDMENEKVSEGAETKEEETGEVVDLSAAT

SEQ ID NO: 42041 - protein, 147 aa, Homo sapiens
SSAFRSVLLEMRVSSRTCIIDTLQGAVPTYPGSGTPALGEKSGSLGLVAWSFPRPGESSSTAPRRSPCCCPWSPSHSSPASFPPLRPSAPATRAPREGLPTPASRAHFPGATAIPKTSGLLIATASLCWGQTHQPCPLPLARFLGKR

SEQ ID NO: 42042 - protein, 109 aa, Homo sapiens
  DOMAIN (40)..(65): ALDO-KETO REDUCTASE SIGNATURE domain identified by eMATRIX, accession number PR00069A, p-value=8.364e-29, raw score of 16.01
  DOMAIN (12)..(91): Aldo/keto reductase family domain identified by PFam, accession name aldo_ket_red, E-value=3.7e-46, PFam score of 165.9
GSAAAMASRLLLNNGAKMPILGLGTWKSPPGQVTEAVKVAIDVGYRHIDCAHVYQNENEVGVAIQEKLREQVVKREELFIVSKLWCTYQARGPFSPGGSQDQGDRSQAQ

SEQ ID NO: 42043 - protein, 120 aa, Homo sapiens
  DOMAIN (34)..(72): Aldo/keto reductase family proteins domain identified by eMATRIX, accession number BL00798E, p-value=1.000e-40, raw score of 20.32
  DOMAIN (8)..(105): Aldo/keto reductase family domain identified by PFam, accession name aldo_ket_red, E-value=3.6e-57, PFam score of 203.3
VQRGGIHEGLVKAIGISNFNHFQVEMILNKPGLKYKPAVNQIECHPYLTQEKLIQYCQSKGIVVTAYSPLGSPDRPWAKPEDPSLLEDPRIKAIAAKHNKTTAQVQPLQVLLTVHNCLHS

SEQ ID NO: 42044 - protein, 272 aa, Homo sapiens
  DOMAIN (133)..(171): Aldo/keto reductase family proteins domain identified by eMATRIX, accession number BL00798E, p-value=8.105e-38, raw score of 20.32
  DOMAIN (7)..(253): Aldo/keto reductase family domain identified by PFam, accession name aldo_ket_red, E-value=2e-119, PFam score of 410.2
MASHLVLNNGTKMPILGLGTWKSPPGRVTEAVNVAINVGYCHIDCAHHENEVGVAIQEKLREQVVKREELFIVTWEGIFPLNELGNVVPSDTNILDTWAAMEELVDEWLMKAIGISNFNHLQVERLLNKPGLKYKPVVNQIECHPYLTQEKLIQYCQSKGIVVTAYSPVGTPSRPWVNPEDPSLLRDPRIKAIAAKHNKTTAQVLIRFPMQRNLGVIPKSVTPELIADNFKVFDFELNSQDMTALLSYNRNWRVCALVSCASHKDYPFHEEF

SEQ ID NO: 42045 - protein, 459 aa, Homo sapiens
  DOMAIN (246)..(276): ALDO-KETO REDUCTASE SIGNATURE domain identified by eMATRIX, accession number PR00069D, p-value=1.529e-32, raw score of 19.36
  DOMAIN (7)..(362): Aldo/keto reductase family domain identified by PFam, accession name aldo_ket_red, E-value=5.4e-181, PFam score of 614.7
MASRLLLNNGAKMPILGLGTWKGSILRVGFGSSSREPPPYRGQPLMGGPPVRILGPSGRPKRHNARGRRGKWASQTGGPRAQTGTWSRRQGQVTEAVKVAIDVGYRHIDCAHVYQNENEVGVAIQEKLREQVVKREELFIVSKLWCTYHEKGLVKGACQKTLSDLKLDYLDLYLIHWPTGFKPGKEFFPLDESGNVVPSDTNILDTWAAMEELVDEGLVKAIGISNFNHLQVEMILNKPGLKYKPAVNQIECHPYLTQEKLIQYCQSKGIVVTAYSPLGSPDRPWAKPEDPSLLEDPRIKAIAAKHNKTTAQVLIRFPMQRNLVVIPKSVTPERIAENFKVFDFELSSQDMTTLLSYNRNWRVCALLRVKLWTCHSSTMPGPLHPLCLGSGCVPHLGNPSLALHKYFLNGALNSFDYVLETLAPENSHASKELTTQICFILTIFLFQNKKAVEVCEFAY

SEQ ID NO: 42046 - protein, 328 aa, Homo sapiens
  DOMAIN (196)..(226): ALDO-KETO REDUCTASE SIGNATURE domain identified by eMATRIX, accession number PR00069D, p-value=1.529e-32, raw score of 19.36
  DOMAIN (22)..(315): Aldo/keto reductase family domain identified by PFam, accession name aldo_ket_red, E-value=5e-179, PFam score of 608.1
EGRTVLGGGLGSAAAMASRLLLNNGAKMPILGLGTWKSPPGQVTEAVKVAIDVGYRHIDCAHVYQNENEVGVAIQEKLREQVVKREELFIVSKLWCTYHEKGLVKGACQKTLSDLKLDYLDLYLIHWPTGFKPGKEFFPLDESGNVVPSDTNILDTWAAMEELVDEGLVKAIGISNFNHLQVEMILNKPGLKYKPAVNQIECHPYLTQEKLIQYCQSKGIVVTAYSPLGSPDRPWAKPEDPSLLEDPRIKAIAAKHNKTTAQVLIRFPMQRNLVVIPKSVTPERIAENFKVFDFELSSQDMTTLLSYNRNWRVCALLSCTSHKDYPFP

SEQ ID NO: 42047 - protein, 285 aa, Homo sapiens
MTEPVWVPARSRSPGHTLRLDAAATAASLSPRGCRLRTPSSDMSPSGRLCLLTIVGLILPTRGQTLKDTTSSSSAELNYHGHSGPDTSPRVPSLHQHQIDTTTDKKTQHYPQTRGPIKNHKQQLHAEVDLRIPKFLRCNRCTIGLDSAQNRANILSFLHALVDSRGSHVFLCLTRYIGDSMVMRWDGSMFRLLQQLPSRGAHVFQPLLIARDQLAILGSDFAFSQVLRLEPDKGLLEPLQELGPPALVAPRAFAHITMAGRRFLFAACFKGPTQIYQHHEIDLSA

SEQ ID NO: 42048 - protein, 121 aa, Homo sapiens; identical to SEQ ID NO: 38336

SEQ ID NO: 42049 - protein, 125 aa, Homo sapiens; identical to SEQ ID NO: 41924

SEQ ID NO: 42050 - protein, 512 aa, Homo sapiens
  DOMAIN (421)..(462): kw TRANSCRIPTASE REVERSE II ORF2 domain identified by eMATRIX, accession number DM01354I, p-value=1.000e-40, raw score of 15.55
  DOMAIN (183)..(407): AP endonuclease family 1 domain identified by PFam, accession name AP_endonucleas1, E-value=1.5e-50, PFam score of 181.4
MEEEMNEMKREGKFREKRIKRNEQSLQEIWDYVKRPNLRLIGVPESDGENGTKLENTLQDIIQENFPNLARQANIQIQEIQRTPQRYSLRRATPRHIIVRFTKVEMKEKMLRAAREKGRVTLKGKPIRLTADLSAETLQARREWGPIFNILKGKNFQPRISYPANLSFISEGEIKYFTDKQMLRDFVTTRPALQELLKEALNMERNNWYQLLQNHAKIVTHRLKIKGWRKIYQANGKQKKAGVANLVSDKTDFKPTKIKRDKEGHYIMVKGSIQQEELTTLNIYAPNTGAPRFIKQVLSDLQRDLDSHTLIMGDFNTPLLTLDRSTRQKVNKDTQELNSALHQADLIDIYRTLHPKSTEYTFFSAPHHIYSKTDHILGSKALLSKCKRTEIITNYLSDHSAIKLELRIKNLTKNRSTTWKLNNLLLNDYWVHNEMKAEMKMFFETNENKDTTYQNLWDTFKAMCRGKFIAVNAHKRKQERSKIDTLTSQLKELEKQEQTHSKASRRQEITKI

SEQ ID NO: 42051 - protein, 847 aa, Homo sapiens; identical to SEQ ID NO: 38953

SEQ ID NO: 42052 - protein, 596 aa, Homo sapiens
MTGVSRGSGLPISMAENRRPLPVSAGSKPVIPILQSPLQILNTTHYFLKSLLTPTSSFAHVISSAEDLVQRRNVIGDVYSQGPASPFEINNGLGSPLKYTAWRKQEMGPWQWLWQQDFHLFLGAPLQRYAEPLPVGTISPGWGSCVVDSSQESLPNDKHLRAAKEVPLQLQWQRSFQLPLGASPQRNTRILLTGMFSWVWLNIHPGTLLGEKLGSWGSKGRTTAGAIAERLLVSSESSIPGNPEQLPRNAELPLTEVFRCGQCSYAAGTPQKAPCPVRSSRARDPCRKPSDCLLGTDEQKDSSNLCRLKCPCLTALKRAVFLPARSWRSENGQTASSSGSLSPEQPKWEAPPSRGRLTPHTAGSLRSQCDQREEWVSAMEDEMNEMKREGKFREKRIKRKEQTLQEIWDYVKRPNLCLIGVPESDGENGTKLENTLQDIIQENFPNLARQANIQIQEIQRTPQRYSSRRATPRHIIIRFTKVEMKEKMLRAAREKGWVTHKGKHIRLTADLSAETLQARREWGSIFNILKEKNFQPRISYPAKLSFISEGEIKYFTDKQMLRDFATTRPALKELLKEALNMERNKRYQPLQKHAKM

SEQ ID NO: 42053 - protein, 337 aa, Homo sapiens
  DOMAIN (126)..(147): Glyceraldehyde 3-phosphate dehydrogenase proteins domain identified by eMATRIX, accession number BL00071E, p-value=7.545e- 17, raw score of 11.48
  DOMAIN (29)..(153): glyceraldehyde 3-phosphate dehydrogenases domain identified by PFam, accession name gpdh, E-value=3.5e-38, PFam score of 130.1
MQPPINPPVDHVIGPQLTAVTAASHAAPAFNSGKVNIVAINDSFIDLNYIVYMFQYNSTHGKFHGTVKAVNRKCVTNGNTITIFQEQDPTKIKWVDAGIDYAVESSMTPALPLFNAGEMPSITTYFVNLISWYDNEFGYINRVLDLIVHMAFKEPNLRLIGVPESDGENGTKLENTLQDIIQENFPNLERRANVQIQEIQRTPRRYSSRRATPRHIIVRFTKVEMKEKMLRAAREKGRVTHKGKPIRLTADLSAETLQARREWRPIFNIFKEKNFQPRISYPAKLSFISEGEIKYFTDKQMLRDFVTTRPALKELLKDALNMERNNRYQPLQNHAKM

SEQ ID NO: 42054 - protein, 259 aa, Homo sapiens
MAEQEQLQSAVPSPLLVIPRQKGSGVDFQQSPTDLQLRDLTDRRKTNKQKGIASTLTKRTSTPKPHLYVTNIKDQRPNPRLIGVPESDGEKGTKLENTLQDIIQENFPNLARQANIQIREIQRTPQRYSSRRATPRHIIVRFTKVEMKEKMLRAAREKGRVTHKGKPIRLTADLWAETLQARREWGPIFNILKEKNFQPRISYPAKLSFISEGEIKSFTDKQMLRDFVTTRPALKELLKEALNMERNNWYQLLQNHAKL

SEQ ID NO: 42055 - protein, 343 aa, Homo sapiens
MKTHLQEMITFQEQRGPNWEATPSRGRLTPHTARYPSETKLPEEQSGSNICCSAIFAVLQSPLLIPSKIGSGMDLQQTPTDLQLKVLTVRRKTNKQKGHPHKNPICMSPSSNTKEKSLNDRMEPKTMAQELHDECTSFSSQFDQLEERVSVIEDEMNEMKQNLHLIDVPESDGENGTKVENTLQDIIQENFPNLARQANIQIQEIQRMPQKYSSRRATPRHKIVRFTKVVMQEKMLRAAREKGRVTHKGKPIRLTADLSAETLQARREWEPIFNILKEKNFQPRISYPAKLSFLSEGEVKSFKDKQMLRDFVTTRPALKELLKEALNMERNNWYQPLQKHAKL

SEQ ID NO: 42056 - protein, 684 aa, Homo sapiens
MKPFRSCFDHIPVGKEMKLHSSVLRKAPQPCHGHAIGMEIPAFQTPDLAFRVELHPVSPFPTDHAFSAQSQIHTHLCGAPETRNRRSCKFFYLRASRKLRTILFEEHLSKPKVTMGLQSNKNGTCVTNLTCCMEHGEEDVIYTWKALGQAANESHNGSILPISWRWGESDMTFICVARNPVSRNFSSPILARKLCEGDCLSPLHRRLCPGPTPSSAPSPHGNRHCMETGGRWVVTRLGGRWQVLQDLGRFPELTFLPSLCLHPFSEGAADDPDSSMVLLCLLLVPLLLSLFVLGLFLWFLKRERQEEYIEEKKRVDICRETPNICPHSGENTEYDTIPHTNNPPFPLTSPPISAFPSLDSECLSGLVYVIQERTILKEDPANTVYSTVEIPKKDSSSSPAMEQSWMENDFDELREEVIRRSNYELQEEIQTKGKEVKNFEKNLDECITRIVNTEKCLKELMELKAKARELQRVSAMEDEMNEMKQEGNKQSLQEIWDYVKRPNLRLIGAPESDGENGTKLENTLQDIIQENLPNLARQANIQIQEIQRTPQRYSSRRATPRHIIVRFTKVEMKEKMLRAAREKGRVTHKGKPIRLTADLSAETLQARREWGPIFNILKEKNLQPRISYLAKLSFISEGEIKSFTDKRMLRDFVTTRPTIKELLKEALNIERNNQYQPLQNHAKM

SEQ ID NO: 42057 - protein, 464 aa, Homo sapiens
MALKRAADLPAQRSSSAKGQTASSNGSLTPMSPDWETPSSRGQQTPHTGELQLASGRSPTSNTKGKEIHEDGEKPVQKAENSKNQNAYSPPKDHNSLPAREENWMENEFDKLTEVGFRRKLKLDPLLTPYTKINSRWIKDLNVRPKTIKTLEENRDNTIEDIGVGKDFMTKTPKAMATRAKIDKWDLIKLKSFCTAKETIIRVNRITNTEKCLKELMELETKPGELREECRSLRSRCDQLEESVSAMEDEMNEMKREGKFREKRIKRNEQSLQEIWDYVKRPNLRLTGVPESDGENGTKLENTLQDIIQENFPNLARQANIQIQEIQRTPQRYSSRRATPRHIIVRFTKVEMKEKMLRAAREKGQVTLKGKPIRLTADLSAETLQARREWGPIFNILKENNFQPRISYPAKLNFISEGEIKYFTDKQMLRDFVTTRPALKELLKEVLNMERNNRYQPLQNHAKM

SEQ ID NO: 42058 - protein, 331 aa, Homo sapiens; identical to SEQ ID NO: 38338

SEQ ID NO: 42059 - protein, 409 aa, Homo sapiens
  misc_feature (1)...(409): Xaa = X or * as defined in Table 2
PTDPAAEGPCLLDAKTNKRKGPSTPILPFCPSPFIRGPKVDSTHGAWGQKQHRXTGIFXRSRAPSPPPKEHGSSPATEQSWMENDFDELREEGFRRINYSELKEEARTHGKEVINLEKKLDEWITRITNAEKCLKELMELETKARELREECRSLRSRRNQLEERVSAMEDEMNEMKQEEKFREKKNKKKXTKALKELWDYVKRPNLRLIGIPESDEENGTKLENTLQDIIQENFPNIARQANVQIRGNYRERPQRLPPRGRATPRTHIIVRFTKVGNGREKMFKGQPGGKGRVTLKGKPITLTTADLSAETSTSQKTEWGPIFNILEGKEFSNPEISYLSQTXAFISGREELNSFYRTSQMLRDFCHHQASRLPXKSTRPALKELLKEEALKHGKGNNPVPSHLQKFIA

SEQ ID NO: 42060 - protein, 639 aa, Homo sapiens
MVIGRADGENKRKKTFIEHLLCPNPCDFQHKITVQASPNLDKRRSLNSSSSSPPSSPTMMPRLRAIQLTSDESNKTWGRNTVFRQEEFEDVKRNFKKKGCTWGPNSIQMKDRTDCKERIRPLSDGNSPWSTILIKNQKTMPLASLFVDQPGSCEEPKLSPDGLEHRKPKQIKLPSQAYIDLPLGKDAQRENPAEAESWEEAASANAATVSIEMTPTNSLSRSPQRKKTESALYGCTVLLASVALGLDLRELHKAQAAEEPLPKEEKKKREGIFQRASKSRRSASPPTSLPSTCGEASSPPSLPLSSALGILSTPSFSTKCLLQMDSEDPLVDSAPVTCDSEMLTPDFCPTAPGSGREPALMPRLDTDCSVSRNLPSSFLQQTCGNVPYCASSKHRPSHHRRTMSDGNPTPTGATIISATGASALPLCPSPAPHSHLPREVSPKKHSTVHIVPQRRPASLRSRSDLPQAYPQTAVSQLAQTACVVGRPGPHPTQFLAAKERTKSHVPSLLDADVEGMKPQTFAVSVAALKGAASGVVSSSQRVRDLADLRSEAVDLHTPRDRTLPTHQVQGQGQQQEEQPQVEVAAVGELALLRVVVPAPGLLQYIPLSITTPSKHRSPYDRTSRGLRYGYAKEQTLMSM

SEQ ID NO: 42061 - protein, 37 aa, Homo sapiens
  misc_feature (1)...(37): Xaa = X or * as defined in Table 2
AHHTHLCLLTESPPEGRXVCWGCGLGWGVVLSLVCPP

SEQ ID NO: 42062 - protein, 115 aa, Homo sapiens
RPRCCSARTRVSSPSAAPTRRAGASWPRCARTTRAARWPGTSARTCVWRESCCSNAACTTTEARRCCRPTGAAGPWSSSPRRRPSPASRPSCLLEEEAGEGGQGHARGRTPPDGG

SEQ ID NO: 42063 - protein, 311 aa, Homo sapiens
MTDWGKKKWDIYTRVNTMPAIKKKENMSFARRWMEPGAIILSQLMQEQKTRHCMFSFLVTGTKKLIKDVRICMGLCQDYQGGTLAGDLCEDLCVAGELLFQRCLHYNRGKKVLQADWRGRPVVLKSKEEAFSSFPPLSLLEEEAGEGGQDMPEAELLLMVAGEQEEYVYFSLLQDLSPHVLPVLGSCGHFYAVVAIDVDMAFFEPKMREILEQNCTGDEDCNFFDCFSRCDLRVNKCGAQRVNNNLQVICDKIFRHWFSAPLKSSAVSFQLQLQLQEAVQECADPGVPSGNTRRAASSVFWKLRRLLQSPH

SEQ ID NO: 42064 - protein, 201 aa, Homo sapiens
  DOMAIN (30)..(85): Ferritin iron-binding regions proteins domain identified by eMATRIX, accession number BL00540B, p-value=1.000e-40, raw score of 18.82
  DOMAIN (1)..(80): Ferritins domain identified by PFam, accession name ferritin, E-value=6.4e-48, PFam score of 164.2
MKLQNQRGGRIFLQDIKKPDCDDWESGLNAMECALHLEKSVNQSLLELHKLATDKNDPHLCDFIETHYLNKQVKAIKELAQAHELVLLSLAMASCKVLCVLIPKVMYKTPRSPRIGTAFQYLSKMVLFSASLVKQNEQVTSAGGDIDTEDMSPYVTKVTCLDPRIQRLGKQKHKLTVKSSKYQKHNRSRSFMTLKLEAEIA

SEQ ID NO: 42065 - protein, 140 aa, Homo sapiens
  DOMAIN (33)..(43): Ribosomal protein L6 proteins 2 domain identified by eMATRIX, accession number BL00700C, p-value=4.000e-13, raw score of 11.76
  DOMAIN (1)..(51): Ribosomal protein L6 domain identified by PFam, accession name Ribosomal_L6, E-value=1.5e-20, PFam score of 74.5
MIKGVTLGFCYKMRSVYVHFPINIIIQENGSLVEIRNFLGEKYIRRVQMRPAVSSSQVLEDLFSRFLLEKECKTELSRHFKSWNDRRETTRYQGVRLPLEFKSSQITTLRGRLDDIPESSVTLASRFSLWVFSPINLLHI

SEQ ID NO: 42066 - protein, 223 aa, Homo sapiens
  DOMAIN (90)..(129): Ribosomal protein L6 proteins 2 domain identified by eMATRIX, accession number BL00700B, p-value=1.000e-40, raw score of 18.26
  DOMAIN (39)..(223): Ribosomal protein L6 domain identified by PFam, accession name Ribosomal_L6, E-value=1.9e-42, PFam score of 149.6
  misc_feature (1)...(223): Xaa = X or * as defined in Table 2
EWSSVRRSLVEKRALRRPHPQCLCFRMKTILSNQTVDIPENVDITLKGRTVIVKGPREGTLRRDFQSPSMENFTFLERKKKRLRVDKWWGNRKELATVRTICSHVQNMIKGVTLGFRYKMRSVYAHFPHQPLLSRGNGSLVEIRNFFGXKNISARVRMRPGVACSVSQAQKGEFISLEGNDIELVSNSAALIQQATTVKNKDIRKFLDGIYVFEKGTVQQADE

SEQ ID NO: 42067 - protein, 97 aa, Homo sapiens; identical to SEQ ID NO: 41455
  misc_feature (1)...(97): Xaa = X or * as defined in Table 2

SEQ ID NO: 42068 - protein, 113 aa, Homo sapiens; identical to SEQ ID NO: 37356

SEQ ID NO: 42069 - protein, 60 aa, Homo sapiens
MEYYEAIKKDEFMSFAGTWMKLETIILSKLSQEQKTKHCRFSLTCERPGDVFTDEGVGAH

SEQ ID NO: 42070 - protein, 146 aa, Homo sapiens; identical to SEQ ID NO: 37357

SEQ ID NO: 42071 - protein, 108 aa, Homo sapiens
MEYYAAIIKDEFMSFAGTWMKLETINLSKLSQGQKTKHLMSSLISGSGTIKTHGHREENITHQGLLGLNVTSSGKLSLTTKHVAPFSLNLITYPNGGIGDYRVPLPTT

SEQ ID NO: 42072 - protein, 29 aa, Homo sapiens
WMKLETIILSKPSQGQKTKHCMLSLIGGN

SEQ ID NO: 42073 - protein, 232 aa, Homo sapiens
  DOMAIN (55)..(104): kw TRANSCRIPTASE REVERSE II ORF2 domain identified by eMATRIX, accession number DM01354Z, p-value=5.554e-17, raw score of 9.06
IWAILADPRMAQGKLRMEIGTKLRCLIWTVHKGVHWVTFWWVERSQTGNLEVRRLWLGLLTHLHSGVNSLFTRARIWNPSMIDWIKKMWHIYTMEYYAAIKKNQFMSFAGTWMKLSAPAAPTVLFLASFTNHYNLRASLLVESCLAPSYTSVEPRFSIPQSLTPARGSSDGHTCFSHQSHDSLLICADSTHFWLSAHIWIQANAPPVPRAPSELSLKTRLKCSPQLNLRRPP

SEQ ID NO: 42074 - protein, 220 aa, Homo sapiens
MRDIYTMEYYAAIKKDEFMSFAGTRMKLKTIILSKPSEGQKTKHYMFSLIDTELCTQQVLNTCCSLLCGLWTSSTSVTRELARNSPQICCIRICIEQGPRFFVCTLTPASRFLSAICVSRAYRMSSGFTPELDDEGILPCRAGKFLVSRAICPNLFNASKQLTYKARLCHQKGSETWILSGEAKADSPPTEKVCISYSIYRGYSSLCPANELVLNTPMTK

SEQ ID NO: 42075 - protein, 724 aa, Homo sapiens
  DOMAIN (10)..(65): kw TRANSCRIPTASE REVERSE II ORF2 domain identified by eMATRIX, accession number DM01354Q, p-value=1.000e-40, raw score of 9.23
  DOMAIN (1)..(238): Reverse transcriptase domain identified by PFam, accession name rvt, E-value=2.7e-49, PFam score of 177.2
MNIDAKILNKILANRIQQHIKKLIHHDQVGFIPGMQGWFNIRKSINIVQHINRTNDKNHMIISIDAEKAFDKIQQRFMLKTLNKLGIDGTYLKIIRAIYDKSTANIVLNGQKLEAFPLKTGTRQGCPLSPLLFNIVLEVLARAIRQEKEIKGIQLRKEEIKLSLFADDMIVHLENPIVSAQNLLKLIDNFSKVSGYKINVQKSQAFLYTNNRQTESQIMSELPFTIASERIKYLGIQLTRDVKDLFKENYKPLLNDIKEDTNKWKNTPRSWVGRINIMKMAILPKVIYRFNAIPIKLPMTFFTELEKTTLKFIWNQKGARIAKSILIYRFNAQELEKTTLKFIWNQKGARIAKSILSQKNKAGGITLPDFKLYYKATVIKTAWYWYQNRDIDQWNRTEPSEIMPHIYNHLIFDKPDKNKKWGNDSLFNKWCWENWLAICRKLKLDPFLIPYTKINSRWIKDLNVRPKTIKTLEENLGNTIQDIAMGKDFMSKTPKAMATKAKIDKWDLINLKSFCTAKETTIRVNRQPIEWEKIFAIYSSDKGRISRIYNELKQIYKKKTNNPIKKWAKDMNRHFSKEDIYAAKRHMKKCSSSLAIREMHIKTTMRHHLTSVRMAIIKKLGNDWCWRGCGEIGRLLHCWWDCKLVQPLWKSVWRFLRDLELETPFDPASPLLGIYWVYTQRIINHAAIKIHAHICLLQHYSPIAKTWNQPKCPIQWIDWIKKKM

SEQ ID NO: 42076 - protein, 995 aa, Homo sapiens
  DOMAIN (923)..(977): Dynein light chain type 1 proteins domain identified by eMATRIX, accession number BL01239, p-value=1.000e-40, raw score of 16.10
  DOMAIN (907)..(995): Dynein light chain type 1 domain identified by PFam, accession name Dynein_light, E-value=1.5e-53, PFam score of 191.3
MDEMSTQTQVCSVRAARGLAGSGGQSAAPRSWSCLLFIQCRHNAKNLEPTQPAEDEKGCFEDKIPNRRESFGGKCKQLWQKAALQRKRTSACFKLQDNSSSLQEDEEVEMEAISWQASSPAMNGHPAPPVTSARFPSWVTFDDNEVSCPLPPVTSPLKPNTPPSASVIPDVPYNSMGSFKKRDRPKSTLMNFSKVQKLDISSLNRTPSVTEASPWRATNPFLNETLQDVQPSPINPFSAFFEEQERRSQNSSISSTTGKSQRDSLIVIYQDAISFDDSSKTQSHSDAVEKLKQLQIDDPDHFGSATLPDDDPVAWIELDAHPPGSARSQPRDGWPMMLRIPEKKNIMSSRHWGPIFVKLTDTGYLQLYYEQGLEKPFREFKLEICHEISEPRLQNYDENGRIHSLRIDRVTYKEKKKYQPKPAVAHTAEREQVIKLGTTNYDDFLSFIHAVQDRLMDLPVLSMDLSTVGLNYLEEEITVDVRDEFSGIVSKGDNQILQHHVLTRIHILSFLSGLAECRLGLNDILVKGNEIVLRQDIMPTTTTKWIKLHECRFHGCVDEDVFHNSRVILFNPLDACRFELMRFRTVFAEKTLPFTLRTATSVNGAEVEVQSWLRMSTGFSANRDPLTQVPCENVMIRYPVPSEWVKNFRRESVLGEKSLKAKVNRGASFGSTSVSGSEPVMRVTLGTAKYEHAFNSIVWRINRLPDKNSASGHPHCFFCHLELGSDREVPSRFANHVNVEFSMPTTSASKASVRSISVEDKTDVRNVPVVFGESWKKHLNGEFGKLYSIKRTGFVAEERKHYTVYPPQHQVFTWTQMCDIGGVEVVILGQDPYHRPYQAHEAALVSKGLCDLCLVWKTCMKSCLQTDGFDHPGHGDLSGPTEWNGRQNNLMGGDRWSWPAPFSMVTMCDRKAVIKNADMSEEMQQNSVECAPQALEKYNIEKNTAAHIKKECDKKYNATWHCILGRNFSSYVTHETKHFIYFYLGQVAILLFKSG

SEQ ID NO: 42077 - protein, 69 aa, Homo sapiens
  DOMAIN (3)..(66): Dynein light chain type 1 domain identified by PFam, accession name Dynein_light, E-value=7.6e-06, PFam score of 29.0
VTMCDRKAVIKNADMSEEMQQDSVECATQALEKYNIEKDIAAHIKKVRMGAGADTQPGAGGSFPPILLS

SEQ ID NO: 42078 - protein, 126 aa, Homo sapiens
  DOMAIN (19)..(73): Dynein light chain type 1 proteins domain identified by eMATRIX, accession number BL01239, p-value=4.060e-35, raw score of 16.10
  DOMAIN (3)..(96): Dynein light chain type 1 domain identified by PFam, accession name Dynein_light, E-value=1.5e-29, PFam score of 111.6
  misc_feature (1)...(126): Xaa = X or * as defined in Table 2
VTMCDRKAVIKNADMSEEMHQDSVECATQALEKYNIEKDIAAHIKKEFDKKYNPTWHCIVGEGTFGSLCXHIETKHFHLTSYLGAKWAISFCFKFWFKRHGTVATHPVIPFQKQGIAALNFQLPED

SEQ ID NO: 42079 - protein, 270 aa, Homo sapiens
  DOMAIN (17)..(110): Skp1 family domain identified by PFam, accession name Skp1, E -value=8.7e-17, PFam score of 69.2
MDGEEKTCGGCEGPDAMYVKLISSDGHEFIVKREHALTSGTIKTTLGGPGQSAVNETNEVNFREIPSRVLSKVCTYFMYKVRYPNSSTEVPELPIAPEIALELLMDSEDCLKRKAIGDIQCRGSTNKPANLVQVGIRTVSGRSDFEVINYSMSLSPWGDWGCGISPEVLQDTDRLPRVCLTSAKVQVSGYGEKSPLEGISYVLPFAGDSQESCPGFRDMSKWIHRKYVRFKVDVRDKFGGSFRSWSLKPNLSLVSSYMINQQFPLLPINH

SEQ ID NO: 42080 - protein, 115 aa, Homo sapiens
  DOMAIN (20)..(115): Skp1 family domain identified by PFam, accession name Skp1, E -value=1.3e-37, PFam score of 138.3
EQNGWREEKTYGSCEGPDAMYVKLISSDGHEFIVKREHALTSGTIKAMLSGPGQFAENETNEVNFREIPSHVLSKVCMYFTYKVRYTNSSTEIPEFPIAPEIALELLMAANFLDC

SEQ ID NO: 42081 - protein, 396 aa, Homo sapiens
MSFVSHIASGKEANIIPTGREAVPMDDPRRDPNDEVEAWKRRHFQECIMEGLCRTRTKPLNYTKLSMIDQRFDGNPTAFLEKIREALPQDPSGQGHKLLDIERNTSAEEDASSWTSRGRRGEQTSGRAHDAGTPAGHQSSAGKYQSTINPSNEKNNNSLKDKVDVEEKKKTSQHLGKIERTYVEILGNGSPDNFVYSHGVNQGLWYCTKQDEKFVRTLRSFFTAIHNLLERQLAPVEMINVTRWILSGYSLHKWVTGRGCNSLEGSEEDRKICEALNHLRDLLNGFGQNADSDIDNEIQAEVVSDGDVQLLGNWSKGRSCHALAKRLAAFCPCPRDLWNFELQRHKLGCRDERESGEGCILRLLHLEHSNHEQSSSHDRCPRLVSTDPSSCSARVT

SEQ ID NO: 42082 - protein, 379 aa, Homo sapiens
  DOMAIN (79)..(107): 303 kw ACTIVATING RAN GTPASE ISOZYME domain identified by eMATRIX, accession number DM01269A, p-value=8.650e-10, raw score of 23.35
MTSLCILIISRMSIRDFSNSLQNGIESGNETTSYLSTCMFSDGVRDPMLKGQKKKEGRRKKKKNEEEEEKEKKKRKKEKEKEKKQKEKEKEKKKEKEKKKEKKKKTREIRETHTHLPNPQHALARENLLWRGKCYRQQAAEPDSRIQMASRGQRTRRLLSPEVGVEYDVSRSIAGAGQLVLAIDASSLLLESARFFFYAFVLLAGSLGCDLQYDVGHSFNKYFLSVELPDFLSLTEIIQQRTHLCLTCLRKSDDKDAFIHLLDFSEWTLDSAVWEPTSHITVEGVSCPENCREKITLRLAKCRWPPDILNAHYDILNAHNDILNAHNDILNAHNDILNAHNDILSAHNDILNAHNDILNAHNDILYNRMCHSLFAMSIE

SEQ ID NO: 42083 - protein, 136 aa, Homo sapiens
  DOMAIN (52)..(87): 2-oxo acid dehydrogenases acyltransferase component lipoyl bi domain identified by eMATRIX, accession number BL00189A, p-value= 5.426e-12, raw score of 19.58
  DOMAIN (27)..(135): Glycine cleavage H-protein domain identified by PFam, accession name GCV_H, E-value=2.3e-32, PFam score of 120.9
  misc_feature (1)...(136): Xaa = X or * as defined in Table 2
ERRNSGNMALRVERSVRAVLCSLHVVLAPAAPCLSRPWQLGMGAVWYCNLPEVGTKLNKQDEFGALERVKAASELYSPLSGEVTEINEALAENPGLVNKSRYEDGWLIKMTLSNPSXLDELMSEEAYEKYIKSIEE

SEQ ID NO: 42084 - protein, 185 aa, Homo sapiens
  DOMAIN (50)..(185): Glycine cleavage H-protein domain identified by PFam, accession name GCV_H, E-value=5.3e-37, PFam score of 136.3
  misc_feature (1)...(185): Xaa = X or * as defined in Table 2
RRDPRTPANMALRVVRSVRALLCTLRAVPLPAAPCPPRPWQLGVGAVRTLRTGPALLSVRKFTEKHEWVTTENGIGTVGISNFAQEALGDVVYCSLPEVGTKIXTKPSWSLVLLESVKAASELYSPLSGEVTEINEALAENPGTCKTNFCYEDGWLIKMTLSNPSELDELMSEEAYEKYIKSIEE

SEQ ID NO: 42085 - protein, 113 aa, Homo sapiens
KWIIDLAMSSWMHLYHHVCQTALLLRIYSLSKDLLSAGQVPALSQVLGTQQETDRVFPMSFPSPGETEGVTLSPFGLHSTQRLEFQLLKRLMLAGLVVVSVEDAVRAAGLFPG

SEQ ID NO: 42086 - protein, 58 aa, Homo sapiens
  misc_feature (1)...(58): Xaa = X or * as defined in Table 2
MKPPVRSLSTPPRSIIMGSSATEIEELENTTFKYLTGEQTEKMWQRLKGMEIKKLNXG

SEQ ID NO: 42087 - protein, 59 aa, Homo sapiens
VLSRSIIMGSSATEIEELENTTFKYLTGEQTEKMWQRLKGILRCLVKQLERGDVNLVDL

SEQ ID NO: 42088 - protein, 208 aa, Homo sapiens
MGSSATEIEELENTTFKYLTGEQTEKMWQRLKGIYVVQICRKVTKKAICRDTATNKISLSQWALTKCDTIKGLERAYALEFKLSGTLKLACEEACQWALTKCDTIKGLERAYALEFKLSGTLKLACEEAWKRLKPRDCDWSCLCQQGERRSNGLVLMSGARVPLPATCTLERSQPGPIQEILPKMTAWKCRAPPTEWTTEARDEKGSP

SEQ ID NO: 42089 - protein, 72 aa, Homo sapiens; identical to SEQ ID NO: 31631

SEQ ID NO: 42090 - protein, 53 aa, Homo sapiens
  DOMAIN (23)..(53): Flocculin repeat proteins domain identified by eMATRIX, accession number PF00624I, p-value=9.452e-11, raw score of 9.10
  misc_feature (1)...(53): Xaa = X or * as defined in Table 2
SPVMMSFFLFVCLLTTXRSPSSSSSSSSSSSSSSSSSSSSSPSPSSSFSGSVV

SEQ ID NO: 42091 - protein, 56 aa, Homo sapiens
  DOMAIN (6)..(41): Matrix protein (MA) p15. domain identified by eMATRIX, accession number PF01140D, p-value=7.625e-12, raw score of 15.54
TQKRRRGRRRRRRRRRRRRRRRRRRRRRRRRRPKQKNKKLCIFFSMFFCGYFDRDS

SEQ ID NO: 42092 - protein, 40 aa, Homo sapiens
  misc_feature (1)...(40): Xaa = X or * as defined in Table 2
SCNSSILSFLSLSLVADPQIATYRSXCSRLGHKGTLLPGS

SEQ ID NO: 42093 - protein, 142 aa, Homo sapiens
MGSRLNWMEVIPEQCTYLHVLIKCMFFWNRQHRGGIQEKAALKQRTPRIFHEKNTPCYLLVQEEGADTRIGMNPTQSLEPSTAALQPDTELPQPPQTPKSDTDQMLSVKKKKKRKKKKKKKKKKKKKKKKKKKKKKKLYFQT

SEQ ID NO: 42094 - protein, 98 aa, Homo sapiens
  DOMAIN (56)..(84): Granins proteins domain identified by eMATRIX, accession number BL00422C, p-value=8.054e-13, raw score of 16.18
MEMQDYLRLFEGLPGEVWDPVQNQICMRSQGLRVEYNTPLSSREEEEEEEEEEEEEEEEEEEEEEEEEEEEEEEEEEEERKKECSKAQCKHFPLSEVL

SEQ ID NO: 42095 - protein, 124 aa, Homo sapiens
  DOMAIN (1)..(36): Troponin domain identified by eMATRIX, accession number PF00992A, p-value=3.418e-11, raw score of 16.67
EEEEEEEEEEEEEEEEEEEEEEEEEEEEEEEEEEERSVAHVEPRTGYLFNSQQTLNTYHVRGTDPGTWDKSVHRIAKARIVNINHDFQISHRISSRSTLSLPPPQPTQHEDNEDEELYDNPLPQ

SEQ ID NO: 42096 - protein, 164 aa, Homo sapiens
MVDVKHYWNSANVPVEQAQSSTESAQDAYMDGQGQRGDIISQSGLSNSTESLDSMKALTAAIEAANAQIHGPASQHMGNNTATVTTTTTIATVTTGDRIEGPLMARQFSRDASTSTVSIQGSGNHYHACAADDDFDTDFDPSILPPPDPWIDSITEDPLEAVQS

SEQ ID NO: 42097 - protein, 567 aa, Homo sapiens
  DOMAIN (511)..(539): Dehydrins proteins domain identified by eMATRIX, accession number BL00315A, p-value=6.754e-10, raw score of 9.35
MSSITGTLPMSLLSKVSRVIPIDSEDELTTATRWRPIAVGLGSVGAALEAQSPSFRRFTRSNSVTTAVQADLDFHDNLENSLESIEDNSCPGPMARQFSRDASTSTVSIQGSGNHYHACAADDDFDTDFDPSILPPPDPWIDSITEDPLEAVQRSVCHRDGHWFLKLLQAERDRMEGWCQQMEREERENNLPEDNTVPFHKHLKAFSIFSYFERHEIGASNYWDSKILVSAVANPAPRTESPISNAANPDQGELDHKAVATLSRKKGKYQCMKEYSSCPHNTPDDGLETLTGRLCFWEHLRETAIFGSYERQEERSVSTTWFRENDAAEMSCQQGQAVGFEIPEACPALLVSWNAFIQSSCGEEKPCNISVELEEYLICRQGTAAQGDRHTSLPVLSGTVNGPRGRGTQARPAAVSDLCAQTDGSRPGHRRPLSPGQRLTHRPTVGQAHALCHEKGGAEKGPKCALLPLLERWNVAAAVWMMWKPSTRRREEKYQIPLNRNRIEEEEERKDCEEERKKDCEEEEERRKKKKKKKKKKKKKKKKKKKKKKKKRKERRTAKPKSWCPVA

SEQ ID NO: 42098 - protein, 104 aa, Homo sapiens
  DOMAIN (91)..(103): RIBOSOMAL PROTEIN P2 SIGNATURE domain identified by eMATRIX, accession number PR00456F, p-value=3.531e-10, raw score of 5.86
  DOMAIN (1)..(104): 60s Acidic ribosomal protein domain identified by PFam, accession name 60s_ribosomal, E-value=1e-36, PFam score of 119.9
MASISELACIYSALILHDNEVTVTEYKIKALIKAAGVNVEPFRPGLFAKAPANVNIRSLICNVGAGGPAPAAGAAPAGAEEKKMEAKKEEFEDSDDDMGFGLSD

SEQ ID NO: 42099 - protein, 116 aa, Homo sapiens
  DOMAIN (103)..(115): RIBOSOMAL PROTEIN P2 SIGNATURE domain identified by eMATRIX, accession number PR00456F, p-value=6.400e-12, raw score of 5.86
  DOMAIN (28)..(116): 60s Acidic ribosomal protein domain identified by PFam, accession name 60s_ribosomal, E-value=1.1e-28, PFam score of 94.4
GCVGVRPSLHPATSTASGSASPTLARAMASVSELACIYSALILHDDEVTVTALANVNIGSLICNVGAGGPAPAAGAAPAGGPAPSTAAAPAEEKKVEAKKEESEESDDDMGFGLFD

SEQ ID NO: 42100 - protein, 78 aa, Homo sapiens
  DOMAIN (28)..(76): 60s Acidic ribosomal protein domain identified by PFam, accession name 60s_ribosomal, E-value=1e-15, PFam score of 53.2
CCVVVRPSLHPATSTASGSASPTLARAMASVSELACIYSALILHDDEVTVTEDKINALIKAAGVNVEPFWPGLFAKVR

SEQ ID NO: 42101 - protein, 140 aa, Homo sapiens
  DOMAIN (123)..(135): RIBOSOMAL PROTEIN P2 SIGNATURE domain identified by eMATRIX, accession number PR00456F, p-value=6.400e-12, raw score of 5.86
  DOMAIN (72)..(136): 60s Acidic ribosomal protein domain identified by PFam, accession name 60s_ribosomal, E-value=1e-17, PFam score of 59.5
MVDSGPETGKMQDEPEIPEATVAAHLPRACTSTRRKEAQTLFLCHIPTSNPCLPGSPELAQVQMPLQPSRQALANVNIGSLICNVGAGGPALAAGAAPAGGPAPSIAAASAEEKKMEAKKEESEESDDDMGFGLFTKPVL

SEQ ID NO: 42102 - protein, 172 aa, Homo sapiens
  misc_feature (1)...(172): Xaa = X or * as defined in Table 2
PDRPTRPCRQCARSFRRKLKAAVGVEGPSLSSGELGTRVPAAPSPTTRPRAMAFCLPSFACIYSALILHDDEVTVTEDKINALIKSSRVXMLSPFWPGLFAKALANVNMGSLICNVGAGGPCCPASWVLQPAGRSLPPPLLAASSLREKKVEAKKEGFRGSFDXLTWGFGSF

SEQ ID NO: 42103 - protein, 94 aa, Homo sapiens
RVACWQSHGGSLLLSGSGWPSPAPLAAAVAPQPWVLGFTLPSVSQGKKYKPLDLRPKKTRAMRRRLNKHEENLKTKKQQRKERLYPLRKYAVKA

SEQ ID NO: 42104 - protein, 196 aa, Homo sapiens
AIRRLRISAREEERENQPRLLPLSLGAGGGVGGFVQQWPRFKARDLRGKKKEELLKQLDDLKVELVPSARRQKRQGGAASKLSKIRVVRKSIAPCSPRLFTQTQKENLRKFYKGKKYKPLDLRPKKTRAMRRRLNKHEENLRTKKQQRKERLYPLRKYAVKALGGALSIKHKENLKTKKQQRKERLYPLRKYAVKA

SEQ ID NO: 42105 - protein, 48 aa, Homo sapiens
  misc_feature (1)...(48): Xaa = X or * as defined in Table 2
AGSPXFPQFSEAXRRGALGSGADQDLSHPRITIETLTSCRSLQTSSPR

SEQ ID NO: 42106 - protein, 2652 aa, Homo sapiens
  DOMAIN (134)..(170): Actinin-type actin-binding domain proteins domain identified by eMATRIX, accession number BL00019C, p-value=4.800e-30, raw score of 14.66
  DOMAIN (294)..(2652): Filamin/ABP280 repeat domain identified by PFam, accession name Filamin, E-value=0, PFam score of 2553.4
  misc_feature (1)...(2652): Xaa = X or * as defined in Table 2
RGSGSSKFEPRSRSASVLAPSALGPPNTSPRQLVAHCALPATRMPVTEKDLAEDAPWKKIQQNTFTRWCNEHLKCVNKRIGNLQTDLSDGLRLIALLEVLSQKRMYRKYHQRPTFRQMQLENVSVALEFLDRESIKLVSIDSKAIVDGNLKLILGLVWTLILHYSISMPVWEDEGDDDAKKQTPKQRLLGWIQNKIPYLPITNFNQNWQDGKALGALVDSCAPGLCPDWESWDPQKPVDNAREAMQQADDWLGVPQVITPEEIIHPDVDEHSVMTYLSQFPKAKLKPGAPLKPKLNPKKARAYGRGIEPTGNMVKQPAKFTVDTISAGQGDVMVFVEDPEGNKEEAQVTPDSDKNKTYSVEYLPKVTGLHKVTVLFAGQHISKSPFEVSVDKAQGDASKVTAKGPGLEAVGNIANKPTYFDIYTAGAGVGDIGVEVEDPQGKNTVELLVEDKGNQVYRCVYKPMQPGPHVVKIFFAGDTIPKSPFVVQVGEACNPNACRASGRGLQPKGVRIRETTDFKVDTKAAGSGELGVTMKGPKGLEELVKQKDFLDGVYAFEYYPSTPGRYSIAITWGGHHIPKSPFEVQVGPEAGMQKVRAWGPGLHGGIVGRSADFVVESIGSEVGSLGFAIEGPSQAKIEYNDQNDGSCDVKYWPKEPGEYAVHIMCDDEDIKDSPYMAFIHPATGGYNPDLVRAYGPGLEKSGCIVNNLAEFTVDPKDAGKAPLKIFAQDGEGQRIDIQMKNRMDGTYACSYTPVKAIKHTIAVVWGGVNIPHSPYRVNIGQGSHPQKVKVFGPGVERSGLKANEPTHFTVDCTEAGEGDVSVGIKCDARVLSEDEEDVDFDIIHNANDTFTVKYVPPAAGRYTIKVLFASQEIPASPFRVKVDPSHDASKVKAEGPGLSKAGVENGKPTHFTVYTKGAGKAPLNVQFNSPLPGDAVKDLDIIDNYDYSHTVKYTPTQQGNMQVLVTYGGDPIPKSPFTVGVAAPLDLSKIKLNGLENRVEVGKDQEFTVDTRGAGGQGKLDVTILSPSRKVVPCLVTPVTGRENSTAKFIPREEGLYAVDVTYDGHPVPGSPYTVEASLPPDPSKVKAHGPGLEGGLVGKPAEFTIDTKGAGTGGLGLTVEGPCEAKIECSDNGDGTCSVSYLPTKPGEYFVNILFEEVHIPGSPFKADIEMPFDPSKVVASGPGLEHGKVGEAGLLSVDCSEAGPGALGLEAVSDSGTKAEVSIQNNKDGTYAVTYVPLTAGMYTLTMKYGGELVPHFPARVKVEPAVDTSRIKVFGPGIEGKDVFREATTDFTVDSRPLTQVGGDHIKAHIANPSGASTECFVTDNADGTYQVEYTPFEKGLHVVEVTYDDVPIPNSPFKVAVTEGCQPSRVQAQGPGLKEAFTNKPNVFTVVTRGAGIGGLGITVEGPSESKINCRDNKDGSCSAEYIPFAPGDYDVNITYGGAHIPGSPFRVPVKDVVDPSKVKIAGPGLGSGVRARVLQSFTVDSSKAGLAPLEVRVLGPRGLVEPVNVVDNGDGTHTVTYTPSQEGPYMVSVKYADEEIPRSPFKVKVLPTYDASKVTASGPGLSSYGVPASLPVDFAIDARDAGEGLLAVQITDQEGKPKRAIVHDNKDGTYAVTYIPDKTGRYMIGVTYGGDDIPLSPYRIRATQTGDASKCLATGPGIASTVKTGEEVGFVVDAKTAGKGKVTCTVLTPDGTEAEADVIENEDGTYDIFYTAAKPGTYVIYVRFGGVDIPNSPFTVMATDGEVTAVEEAPVNACPPGFRPWVTEEAYVPVSDMNGLGFKPFDLVIPFAVRKGEITGEVHMPSGKTATPEIVDNKDGTVTVRYAPTEVGLHEMHIKYMGSHIPESPLQFYVNYPNSGSVSAYGPGLVYGVANKTATFTIVTEDAGEGGLDLAIEGPSKAEISCIDNKDGTCTVTYLPTLPGDYSILVKYNDKHIPGSPFTAKITDDSRRCSQVKLGSAADFLLDISETDLSSLTASIKAPSGRDEPCLLKRLPNNHIGISFIPREVGEHLVSIKKNGNHVANSPVSIMVVQSEIGDARRARVYGRGLSEGRTFEMSDFIVDTRDAGYGGISLAVEGPSKVDIQTEDLEDGTCKVSYFPTVPGVYIVSTKFADEHVPGSPFTVKISGEGRVKESITRTSRAPSVATVGSICDLNLKIPEINSSDMSAHVTSPSGRVTEAEIVPMGKNSHCVRFVPQEMGVHTVSVKYRGQHVTGSPFQFTVGPLGEGGAHKVRAGGPGLERGEAGVPAEFSIWTREAGAGGLSIAVEGPSKAEITFDDHKNGSCGVSYIAQEPGNYEVSIKFNDEHIPESPYLVPVIAPSDDARRLTVMSLQESGLKVNQPASFAIRLNGAKGKIDAKVHSPSGAVEECHVSELEPDKYAVRFIPHENGVHTIDVKFNGSHVVGSPFKVRVGEPGQAGNPALVSAYGTGLEGGTTGIQSEFFINTTRAGPGTLSVTIEGPSKVKMDCQETPEGYKVIYTPMARGNYLISVKYGGPNHIVGKSPFKAKVTGQRLVSPGSAPNETSSILVESVTKVVYKKTWVXRQFPKGIFGTPNKVTSXGGQGSQKAFVGQKSSFLVDCSKAGSNMLLIGVHGPTTLPCEEVSMKHVGNQQYNVTYVVKERGDYVLAVKWGEEHIPGSPFHVTVP

SEQ ID NO: 42107 - protein, 212 aa, Homo sapiens
MDEEDKAFKQKQKEEQKELEELKVKARKKGPLDTGGIKKSGKNVWDGVRYAGYLHKTSSQVHSLIYLFVEYLANARCSVKHYGRHKDETDKDFVFKGSLGLLSAQRTPAARGRRGPELPPGRRRARERRLVAATRELAPRPPAQALPGRSRPLAPGSEERSAVQVLQTPLVSRHSPRPPSRNSEHEPVRAPKITGIRDCPAGLLGGECLEDS

SEQ ID NO: 42108 - protein, 84 aa, Homo sapiens
  misc_feature (1)...(84): Xaa = X or * as defined in Table 2
QKKPLKQPKKQAXEMDEVRAGAEALAGAGALGDRPELNTLCLSPEDKAFKQKQKEEQKKLEELKAKAAGKGPLATGGIKKSGKK

SEQ ID NO: 42109 - protein, 207 aa, Homo sapiens
  DOMAIN (147)..(204): GYF domain identified by PFam, accession name GYF, E-value= 5.8e-25, PFam score of 96.4
MLSSKLGNTGAQAQGERVHAFHLKKLTVKQPQVDPSGGIQKKTRKTGCILQLLLLKLPYIKKVYFPEKDLLGSEIKAKLQKCPDRLSELADQMVAQGNLGMYQETREQLAMRLKDMFAEEVAEGELETPTPTQRGEAELPGDGLVDVMWEYKWENPGDAELHGPFTSDQMQTWVSEGYFPDGVYCRKLDPLRGQFYNSKRIDFDLYT

SEQ ID NO: 42110 - protein, 341 aa, Homo sapiens
  DOMAIN (281)..(338): GYF domain identified by PFam, accession name GYF, E-value= 1.5e-26, PFam score of 101.6
MPKRKVTFQGVGDEEDEDEIIVPKKKLVDPVAGSGGPGSRFKGKHSLDSDEEEDDDDGGSSKYDILASEDVEGQEAATLPSEGGVRITPFNLQEEMEEGHFDADGNYFLNRDAQIRDSWLDNIDWVKIRERPPGQRQASDSEEEDSLGQTSMSAQALLEGLLELLLPRETVAGALRRLGARGGGKGRKGPGQPSSPQRLDRLSGLADQMVARGNLGVYQETRERLAMRLKGLGCQTLGPHNPTPPPSLDMFAEELAEEELETPTPTQRGEAESRGDGLVDVMWEYKWENTGDAELYGPFTSAQMQTWVSEGYFPDGVYCRKLDPPGGQFYNSKRIDFDLYT

SEQ ID NO: 42111 - protein, 52 aa, Homo sapiens
  misc_feature (1)...(52): Xaa = X or * as defined in Table 2
SHCLANAPGDVKVRNDPESPRELXHLXRXRINYTRWKRSIXEEWCQGHSWRG

SEQ ID NO: 42112 - protein, 441 aa, Homo sapiens
  DOMAIN (1)..(13): MOLLUSCAN RHODOPSIN C-TERMINAL TAIL SIGNATURE domain identified by eMATRIX, accession number PR00239E, p-value=9.182e- 09, raw score of 1.58
MPQQSPPQSPPPDWWLDEDEDEAVLFITFTKTGWFMVFLEEMDFLMLKVFGEVPSATVEMFCLEAIVKHSEISTHCDKIEANGGLQLLQRLYRLHKDCPKVQRNIMRVIGNMALNEHLHSSIVRSGWVSIMAEAMKSPHIMESSHAARILANLDRETVQEKYQDGVYVLHPQYRTSQPIKADVLFIHGLMGAAFKTWRQQDSEQAVIEKPMEDEDRYTTCWPKTWLAKDCPALRIISVEYDTSLSDWRARCPMERKSIAFRSNELLRKLRAAGVGDRPVVWISHSMGGLLVKKMLLEASTKPEMSTVINNTRGIIFYSVPHHGSRLAEYSVNIRYLLFPSLEVKELSKDSPALKTLQDDFLEFAKDKNFQVLNFVETLPTYIGSMIKLHVVPVESADLGIGDLIPVDVNHLNICKPKKKDAFLYQRTLQFIREALAKDLEN

SEQ ID NO: 42113 - protein, 774 aa, Homo sapiens; identical to SEQ ID NO: 35949
  DOMAIN (546)..(573): Protamine P1 proteins domain identified by eMATRIX, accession number BL00048, p-value=2.688e-09, raw score of 6.39

SEQ ID NO: 42114 - protein, 112 aa, Homo sapiens
MEKSDKYYLIQGAEAANVTGPDGVPVEGSRYAADRRRYRRGYYGRRRGPPRNKIALSKSSIASLLWVKSDGCFPGPQMIGLLVTVGQMAQHRNYKTRSSFPACIQFCCNQRP

SEQ ID NO: 42115 - protein, 121 aa, Homo sapiens
  DOMAIN (46)..(85): 'Cold-shock' DNA-binding domain proteins domain identified by eMATRIX, accession number BL00352B, p-value=5.886e-25, raw score of 23.66
  DOMAIN (17)..(90): 'Cold-shock' DNA-binding domain identified by PFam, accession name CSD, E-value=2e-28, PFam score of 106.0
PPPPAAKTRRKKVLATKVLGTVKWFNVRNGYGFINRNDTKEDVFVHQTAIKKNNPRKYLRSVGDGETVEFDVVEGEKGAEAANVTGPDGVPVEKGSRYAADRRRYRRCYYDRRRGPPPEYW

SEQ ID NO: 42116 - protein, 143 aa, Homo sapiens
  DOMAIN (46)..(85): 'Cold-shock' DNA-binding domain proteins domain identified by eMATRIX, accession number BL00352B, p-value=5.886e-25, raw score of 23.66
  DOMAIN (17)..(89): 'Cold-shock' DNA-binding domain identified by PFam, accession name CSD, E-value=3.7e-30, PFam score of 112.1
PPPPAAIDAEKKVLATKVLGTVKWFNVRNGYGFINRNDTKEDVFVHQTAIKKNNPRKYLRSVGDGETVEFDVVEGEKGAEAANVTGPDGVPVEGSRYAADRRRYRRGYYGKARWPFPANYAGGGRRRKGAAQVEGFLPPLPLD

SEQ ID NO: 42117 - protein, 140 aa, Homo sapiens
  DOMAIN (18)..(59): CAMP-DEPENDENT PROTEIN KINASE REGULATORY CHAIN domain identified by eMATRIX, accession number DM01513A, p-value=9.100e- 35, raw score of 13.61
  DOMAIN (20)..(57): Regulatory subunit of type II PKA R-subunit domain identified by PFam, accession name RIIa, E-value=3.7e-16, PFam score of 67.1
AVLTKKMSIPFSNTHYRIPQGFGNLLEGLTREILREQPDNIPAFAAAYFESLLEKREKTNFDPPEWGSKVEDRFYNNHAFEEQEPPEKSDPKQEESQISGKEEETSVTILDSSEEDKEKEEVAAVKIQAAFRGHIAREEA

SEQ ID NO: 42118 - protein, 273 aa, Homo sapiens
MGPSGFQPSVLTSRASQELQPQLNLQPENPEHHAFEEQEPPEKCDPKQENSPISGKEKETPVTILDSSEEDKEKEEVAAVKIQAAFWGHTAREEDENNGPNFPGLCNWGERDLEGGKRSKPLRYSGNEDSHFRPVLNLPPQSSKGHFPPRGAEQAMLWVTVAEDGEYVHDPEEGRSLCALRRGRHCISLEGSSQGYRDVQEKVFAFSGSLPEANQADWSRDECLMGTYLIQAGPITNGFRNKVLRPEKEVSLALGVKSRMYESLRAAMVGRID

SEQ ID NO: 42119 - protein, 104 aa, Homo sapiens
NCKISFLHFCYIFVKALKRISALSRGKILAKRINVRIEHIKHSKSRDSFLKRVKENDQKKKEAKEKGTWVQLKRQPAPPREAHFVRTNGKEPELLEPIPYEFMA

SEQ ID NO: 42120 - protein, 174 aa, Homo sapiens
  DOMAIN (71)..(122): Ribosomal protein S3Ae proteins domain identified by eMATRIX, accession number BL01191B, p-value=5.290e-09, raw score of 13.33
  DOMAIN (5)..(117): Ribosomal protein L21e domain identified by PFam, accession name Ribosomal_L21e, E-value=0.00015, PFam score of 8.2
  misc_feature (1)...(174): Xaa = X or * as defined in Table 2
FAKLPNPKGKGGEATRYMFSRPFXENHGVVPLGHNNXRFYKKGDIVDIQGEWGTLFQKGNCPHKVVTHGQNLEGVLPMVTPAMLVGHLLXTNQFXGKVFSKRINVRIEPIKHSKSRDSFLKRVKENDQKKKEAKEKGTWVQLKRQPAPPREAHFVRTNGKEPELLEPIPYEFMA

SEQ ID NO: 42121 - protein, 458 aa, Homo sapiens
YAPPPLLPVGSPESRVFQTGFCKPPTGGMAQGGPRLTVTAAWHSKINFMLGAKADGKTILKGLQSIFQEQGMAESAHLAVGMLIRQSDLAYTWAITGSSKADFTGKEDGKYFTQANCVNLTEALPLYEEQLGCLYCLVEFSKEIVYVPSNFELSNDFGDGTRLCDRFPLHLGSVSARSRRSQGREDALLPAASGWQGLRRKAREGDALHCCRGHQGEEAGGGEEEDRSVQAGSHFPAPPLAADTLRGVTTPRAAGESGRRRQPGEASRSGARTEAAAVLTPLRARVSDGWSERAREGWRAGEPAGLRLFVSACTSYVTTPSFSKNLLGACCAPGQAKQTRGCEAQRGEGPIAVNKLPSNTSNHSDSHDTHVDTSRNTPRGQLWTVPSSRGRLKLILDFRTGEESVEQKSEKGLEEKDSRSPDPDSILFLQGNHRAQALDVRGDVSLPQGLLPPGGSLP

SEQ ID NO: 42122 - protein, 69 aa, Homo sapiens
MTFSLPLAAVVRAWMKPTGSGMFLYQYLPVVKSSQAVFPVVIEISSISGSILPKFPMLSLMSLHTGSII

SEQ ID NO: 42123 - protein, 30 aa, Homo sapiens
EGLPRAALEKDYEEVGVDSVEAEAEEGEEY

SEQ ID NO: 42124 - protein, 96 aa, Homo sapiens
  DOMAIN (28)..(72): Synapsins proteins domain identified by eMATRIX, accession number BL00415N, p-value=8.620e-09, raw score of 4.29
GPRVGPAAGAARVEPPGRPGERPRARPRRRPPPRSRPRPWPGARPRRPGCPRPAGPGQSRPRPAPPLKLREGAWGHPGSGAAFSLRVGALGSARLR

SEQ ID NO: 42125 - protein, 88 aa, Homo sapiens
  misc_feature (1)...(88): Xaa = X or * as defined in Table 2
LRAPHVACSRCNQGPCMENCLNTDQTHTQTQRQGXEEKSSSSKPISSLMEYYKRSQCSVKSKARSVFXLKLRAQAQLLQETKKPVFRL

SEQ ID NO: 42126 - protein, 256 aa, Homo sapiens
MQSQRQEDVKLFRISGKRSPPGGGSKVPQKKVKFAVAEDDDDDDKETEDKSPVKKSIRDTLPNHAQQSNQNGKDSKSPMSRKAGFGGGNLQKHGRSSALLSTAFVSATGRFRFKKNTNTTVTVGNPLSSPHLLRSEHFNTAKKEKYDSDTTTKVRLSSTFEDTQFEGTADFTSFDISTALKGGWESEQKAEKPALNYACKASFKPQILQGRLEPGQFRKHLRSRGSRALDQTEDGNVQEVVSVCGNEPRLQLAAGN

SEQ ID NO: 42127 - protein, 73 aa, Homo sapiens
  misc_feature (1)...(73): Xaa = X or * as defined in Table 2
REISYKERIGMXMPPSVILNSYVKSMLETYPHPLLRGVVAPGPLKKGFLTESLLALPDPSFSGRMTSFKITPV

SEQ ID NO: 42128 - protein, 280 aa, Homo sapiens
  DOMAIN (33)..(88): Histone H2A proteins domain identified by eMATRIX, accession number BL00046, p-value=1.000e-40, raw score of 12.95
  DOMAIN (2)..(120): Core histone H2A/H2B/H3/H4 domain identified by PFam, accession name histone, E-value=6.8e-54, PFam score of 192.5
MSGRGKQGGKARAKAKSRSSRAGLQFPVGRVHRLLRKGNYAERVGAGAPVYLAAVLEYLTAEILELAGNAARDNKKTRIIPRHLQLAVRNDEELNKLLGGVTIAQGGVLPNIQAVLLPKKTERKNWDVNAALSDFEQLRQVHAGNLPPSFSEGSGGSRTPEKGFSDREPTRPPRPILQRQDDIVQEKRLSRGISHASSSIVSLARSHVSSNGGGGGSNEHPLEMPICAFQLPDLTVYNEDFRSFIERDLIEQSMLVALEQAGSLVEGLDLIASFQFKCVI

SEQ ID NO: 42129 - protein, 71 aa, Homo sapiens
  DOMAIN (32)..(64): HECT-domain (ubiquitin-transferase) domain identified by eMATRIX, accession number PF00632C, p-value=8.250e-26, raw score of 20.66
TSRVPMNGFPELYGSNGPQLFTIEQWGSPEKLPRAHTCFNRLDLPPYETFEDLREKLLMAVENAQGFEGVD

SEQ ID NO: 42130 - protein, 242 aa, Homo sapiens
  DOMAIN (203)..(235): HECT-domain (ubiquitin-transferase) domain identified by eMATRIX, accession number PF00632C, p-value=8.250e-26, raw score of 20.66
  DOMAIN (18)..(241): HECT-domain (ubiquitin-transferase) domain identified by PFam, accession name HECT, E-value=6.2e-17, PFam score of 69.7
MALCTRRGKLPQQVETRFAVALWTAETCLHYQTGQVSSAASPSTPTVAAKWGSWPQGGRKHLLGPVERRLIELEVVYVEKFKIDDVYRNHIPQAFPLIGGKLRQRAAGFTQQGFGTLLMCGLGDVDVNDWRQHSIYKNGYCPNHPVIQWFWKAVLLMDAEKRIRLLQFVTGTSRVPMNGFAELYGSNGPQLFTIEQWGSPEKLPRAHTCFNRLDLPPYETFEDLREKLLMAVENAQGFEGVD

SEQ ID NO: 42131 - protein, 1071 aa, Homo sapiens
  DOMAIN (959)..(991): HECT-domain (ubiquitin-transferase) domain identified by eMATRIX, accession number PF00632C, p-value=8.250e-26, raw score of 20.66
  DOMAIN (689)..(1012): HECT-domain (ubiquitin-transferase) domain identified by PFam, accession name HECT, E-value=5.5e-122, PFam score of 418.7
PGGWLRRALPGRERLQSPVHAVPPQHGTSHSRLLVTWPGAGRDQDFSSPPLLLLGETDHLHLDLPLSPLPTSDELFLPGICDPYVKLSLYVADENRELALVQTKTIKKTLNPKWNEEFYFRVNPSNHRLLFEVFDENRLTRDDFLGQVDVPLSHLPTEDPTMERPYTFKDFLLRPRSHKSRVKGFLRLKMAYMPKNGGQDEENSDQRDDMEHGWEVVDSNDSASQHQEELPPPPLPPGWEEKVDNLGRTYYVNHNNRTTQWHRPSLMDVSSESDNNIRQINQEAAHRRFRSRRHISEDLEPEPSEGGDVPEPWETISEEVNIAGDSLGLALPPPPASPGSRTSPQELSEELSRRLQITPDSNGEQFSSLIQREPSSRLRSCSVTDAVAEQGHLPPPSVAYVHTTPGLPSGWEERKDAKGRTYYVNHNNRTTTWTRPIMQLAEDGASGSATNSNNHLIEPQIRRPRSLSSPTVTLSAPLEGAKDSPVRRAVKDTLSNPQSPQPSPYNSPKPQHKVTQSFLPPGWEMRIAPNGRPFFIDHNTKTTTWEDPRLKFPVHMRSKTSLNPNDLGPLPPGWEERIHLDGRTFYIDHNSKITQWEDPRLQNPAITGPAVPYSREFKQKYDYFRKKLKKPADIPNRFEMKLHRNNIFEESYRRIMSVKRPDVLKARLWIEFESEKGLDYGGVAREWFFLLSKEMFNPYYGLFEYSATDNYTLQINPNSGLCNEDHLSYFTFIGRVAGLAVFHGKLLDGFFIRPFYKMMLGKQITLNDMESVDSEYYNSLKWILENDPTELDLMFCIDEENFGQTYQVDLKPNGSEIMVTIENKSDYIDLVIQWRFVNRVQKQMNAFLEGFTELLPIDLIKIFDENELELLMCGLGDVDVNDWRQHSIYKNGYCPNHPVIQWVLGRAVLLHGTPEKRIRLLQFCHRGTSRVPMNGFAELYGSNGPQLFTIEQWGSPEKLPRAHTCFNRLDLPPYETFEDLREKLLMAVENAQGFEGGGLNDPCASGGGCSSSKFCLHFCICLTDFCRGDGREQLQAWSLEPSLHHALVQVRMREPGPSLSSCLSHHKLSTG

SEQ ID NO: 42132 - protein, 208 aa, Homo sapiens
MSSLHWLVGGHLLSIYYIPGVGDTDTVTVKAWILAPRSSQSRDACKQGITAQCTQGSKPGAQRVQECRGGCWSPSPEAGMQGGLPGGGDDIDTGCVGVVRQRGCGGQCFRQGEQPKRRCGSICLLHCCLSVPSTVPGTHRCSVNGWGISENVWFTGVSVTRQGRFVRVQGLLSRRKWEVAARRYLQARKLNAALVWRVVLLGTILLNR

SEQ ID NO: 42133 - protein, 119 aa, Homo sapiens
  DOMAIN (55)..(72): TEKTIN SIGNATURE domain identified by eMATRIX, accession number PR00511C, p-value=1.000e-08, raw score of 7.86
CPAPQVRKLRQEWRMKLKVTEEIIMMKHLTCIARMLSVLSAMKRALGSLLTEVHEVDDTIQTLQQRLRDAEDTLQSLVHIKATLEYDLAVKANSLYIDQEKCMSMRKSYPNTLRLVGFC

SEQ ID NO: 42134 - protein, 143 aa, Homo sapiens; identical to SEQ ID NO: 34613
  DOMAIN (90)..(130): Ribosomal protein L7Ae proteins domain identified by eMATRIX, accession number BL01082, p-value=7.750e-40, raw score of 20.37
  DOMAIN (58)..(143): Ribosomal protein L7Ae domain identified by PFam, accession name Ribosomal_L7Ae, E-value=2.1e-38, PFam score of 141.0

SEQ ID NO: 42135 - protein, 228 aa, Homo sapiens
  DOMAIN (187)..(208): RIBOSOMAL PROTEIN L7A FAMILY SIGNATURE domain identified by eMATRIX, accession number PR00882G, p-value=2.125e-25, raw score of 10.27
  DOMAIN (109)..(196): Ribosomal protein L7Ae domain identified by PFam, accession name Ribosomal_L7Ae, E-value=8.5e-18, PFam score of 72.6
MPKGKKAKGKKVALAPAVMKKQEAKKVVNPLFEKRPKNFGIGQDIQPKRDLTHFVKWPRYIRLQRQRAILYKRLKALDCQTATQLLKLAHKYRPETKQEKKQRLLAWAEKKAAGKRDVPTKRPPVLRAGVNIVTTLVENKKAQLVVIADDVDPIELVVFLPALCRKMGVNSEDKGTLAKLMEAIRTNYNDRYDEIRRHWGGNILGPKSVARIAKLEKAKAKELATKLG

SEQ ID NO: 42136 - protein, 291 aa, Homo sapiens
  DOMAIN (103)..(117): RIBOSOMAL PROTEIN L7A FAMILY SIGNATURE domain identified by eMATRIX, accession number PR00882D, p-value=6.500e-17, raw score of 14.85
  misc_feature (1)...(291): Xaa = X or * as defined in Table 2
AVTSDEPKGKKAKAKKVAPAPAVVKNQEAKKVVDPLFEKRHKNFGIGQDIQPKRASPRLCELPRYIRLQRQRAILYKRLKGPFCDYPGFTRALDRQTVXSSLLKLAHKYRPETKQEKKQRLFARAREEGVLAKGDVPNERDPPVLRARSLTPFHHPWVEKQEKLQLVVNWHTDVDPIELVVLLALPLCREKWGVPYCNYRREKARLWDRLVPQERPCTTCPPFTQGELRKTKGGFWLKLGWKLIRTQFTIDQILMRSRRHWGGNVLGPKSVGSXSPKLEKAKAKELAHXTG

SEQ ID NO: 42137 - protein, 91 aa, Homo sapiens
MSLQAGASKPDENPTINLQFKIQQLAISAFSAMELIKGGKGHQGELDRTETQQHQFSRTRHETVSQYSGVFIPGEASYKIRHCESIVTPHL

SEQ ID NO: 42138 - protein, 72 aa, Homo sapiens
GVQADAKLLFTPQHKMLRLRLPNLKMVRLRVSFSAVVFKAVSDICKILNIRRSEELSLLKPSGDYFKKKKKK

SEQ ID NO: 42139 - protein, 507 aa, Homo sapiens
  DOMAIN (118)..(221): PH domain identified by PFam, accession name PH, E-value=1.2e -10, PFam score of 43.0
SSRSLMEQGIQEDEQLLYDLQYYSFFDLNPKYDAVRINQLYEQARWAILLEEIDCTEEEMLIFAALQYHISKLSLSAETQDFAGESEVDEIEAALSNLEVTLEGGKADSLLEDITDIPKLADNLKLFRPKKLLPKAFKQYWFIFKDTSIAYFKNKELEQGEPLEKLNLRGCEVVPDVNVAGRKFGIKLLIPVADGMNEMYLRCDHENQYAQWMAACMLASKGKTMADSSYQPEVLNILSFLRMKNRNSASQLAARILEAHQNVAQMPLVEAKLRFIQAWQSLPEFGLTYYLVRFKGSKKDDILGVSYNRLIKIDAATGIPVTTWRFTNIKQWNVNWETRQVVIEFDQNVFTAFTCLSADCKIVHEYIGGYIFLSTRSKDQNETLDEDLFHKLTGDIRRSEELSLLKPSGDYFKKKKKKDKNNKEPIIEDILNLESSPTASGSSVSPGLYSKTMTPIYDPINGTPASSTMTWFSDKPFDGTKLQHPRIQPTPPVPRSTCGYVPASVSG

SEQ ID NO: 42140 - protein, 102 aa, Homo sapiens
QSIPWTEAASQDLEQSCRELPSLMVDVAHHNIPAGLNSGHGLLQLEESRANMWTRKKKPSGVRYRRFILYSPSRSTSRVNSRMPAPSTSTSCTIPLNSTALA

SEQ ID NO: 42141 - protein, 83 aa, Homo sapiens
SRQAWHEAASASARRRGTRSPALSPARAPAGPIWTNARRSARANSVSPAAAPPPRRPVSLSDPGESCTRDPRAPDPCGPFRCC

SEQ ID NO: 42142 - protein, 57 aa, Homo sapiens
  DOMAIN (19)..(34): PHD-finger domain identified by eMATRIX, accession number PF00628, p-value=5.065e-09, raw score of 15.84
LIAGSYHFHFGSCRFFIGHDRCQNWYHGCCIGILQSEAELIDEYVCYRSSCNASITQ

SEQ ID NO: 42143 - protein, 260 aa, Homo sapiens
  DOMAIN (46)..(228): Acyltransferase domain identified by PFam, accession name Acyltransferase, E-value=0.039, PFam score of -9.3
  misc_feature (1)...(260): Xaa = X or * as defined in Table 2
LLVVGTTVVVYFPNGRFKEFMSRHVHLMCYRICVRALTAIITYHDRENRPRNGGICVANHTSPIDVIILASDGYYAMVGQVHGGLMGVIQRAMVKACPHVWFERSEVKDRHLVVKRLTEHVQDKSKLPILIFPEGTCINNTSVMMFKKGSFEIGATVYPVAIKYDPQFGDAFWNSSKYGMVTYLLRMMTSWAIVCSVWYLPPIDXERQIEDAVQFANRVKSAIARQGGLVDLLWDGGLKREKVKDTFKEEQQKLYSKMIV

SEQ ID NO: 42144 - protein, 304 aa, Homo sapiens
METIMDDEVTKRFSAEELETWNLLSRTNYNLRIALALTGISLLVVGTTVAGYLLHTSPIDVIILASDGYYATVGQMHGGLIGLIQRAMVKTCPHIWFERLEVKDRHLLAKRLTEQVQDISKLPILIFPEGICINNTSVMMFKKGSFEIGATVYPDAINMWYLPSMTRGADEDAVQFMNTIKSAIARQGELVDLLWDGGLKREKNPGLPGLLWIPGLWISPSTVGSLCTGATCPWRYERMLLGVATQDKMPCFFYNKLLENLKHTNIIAKAIAAKAKINKWDLNKLKRFGTAKETIIRVKRQPTE

SEQ ID NO: 42145 - protein, 198 aa, Homo sapiens
  DOMAIN (99)..(119): NEUROHYPOPHYSIAL HORMONE SIGNATURE domain identified by eMATRIX, accession number PR00831D, p-value=6.595e-09, raw score of 13.84
  misc_feature (1)...(198): Xaa = X or * as defined in Table 2
DPPTDSLSPDGGSIELEFYLAPEPFSMPSLLGAPPYSGLGGVGDPYAPLMVLMCRVCLEDKPIKPLPCCKKAVCEECLKVYLSAQIQCPTCQFVWCXCAGCAWKTSPSSPCLAARRPCARSASKSTSSAQIQCPTCQFVWCFKCHSPWHEGVNCKEYKKGDKLLRHWASEIEHGQRNAQKCPKCKIHIQRTEGCDHMT

SEQ ID NO: 42146 - protein, 337 aa, Homo sapiens
RMKTPSSISTSWNLAVLIPAPSHVLSASPLQPSRKKDIFPPLPDQKANTKTLGYANQGRIFQYPLCSPVKKWVLGQEIDPDKCFSGLCSLDLQEESVNAEGVSRHCFYFVGCFLTRLDELSGENAIFLGQIQCPTCQFVWCFKCHSPWHEGVNCKEYKKGDKLLRHWASEIEHGQRNAQKCPKCKIHIQRTEGCDHMTCSQCNTNFCYRCGERYRQLRFFGDHTSNLSIFGCKYRYLPERPHLRRLVRGSVCAGKLFIAPLIMVLGLALGAIAVVIGLFVFPIYCLCKKQRKRSRTVPGGRMSPGKMREESDWEAASSTCVWATRPEAVSIACVLKA

SEQ ID NO: 42147 - protein, 172 aa, Homo sapiens
SKKKKKEKEFKLKNTPTNEPTCFQNFLGPSWGRPFLPFSCRTTRPVPGPTCRPPPPPNGTEKSPKGLGGRVRFPGLSRCPAVFGKAIVFPLGAPRTPDPSSSPSPPSVIRHADHFPSAPPGRRRDGFFPNSLRSPGAPYLTLSPRILVGLGAREKELVPALVTATLSPQIGG

SEQ ID NO: 42148 - protein, 214 aa, Homo sapiens
MKINPGQISDYKEKKTHNADMKTQVSRCLVETMAVKLSTARLFGFKLQRTGAESLHVTSSIPEQVRLLGVQAYAQCFREAQLQEQSTCGTLHHGEVAANAIGRFAKSVREFLEKNYTDEAIETDDLTIKLVIKALLEVAQTGGKNIELAVMRRDQSLKSGCDTITREADKKVPSDSASYVLFVGSKPQFGLGDVATRAWFTDIFNASRSYVVPA

SEQ ID NO: 42149 - protein, 95 aa, Homo sapiens
  DOMAIN (28)..(59): Proteasome A-type subunits proteins domain identified by eMATRIX, accession number BL00388D, p-value=1.409e-27, raw score of 20.71
  DOMAIN (2)..(61): Proteasome A-type and B-type domain identified by PFam, accession name proteasome, E-value=8.2e-19, PFam score of 73.2
RYTQSNGRRPFGISALIVGFDFDGTPRLYQTDPSGTYHAWKANAIGRGAKSVREFLEKNYTDEAIETDDLTIKLVIKGTPWKWFSQVAKTLNLLS

SEQ ID NO: 42150 - protein, 612 aa, Homo sapiens
  DOMAIN (358)..(404): Proteasome A-type subunits proteins domain identified by eMATRIX, accession number BL00388A, p-value=1.000e-40, raw score of 23.14
  DOMAIN (387)..(524): Proteasome A-type and B-type domain identified by PFam, accession name proteasome, E-value=5.1e-06, PFam score of 26.7
  misc_feature (1)...(612): Xaa = X or * as defined in Table 2
MEETGMCEGHGASPGMEASSGEREKRGTGEASPGDREKRGTGEASSGEREKRRTGEASSGDREKRGTGKASSGEREKRGTGEASYGEREKRGTGAAGGQESCAHCGGWLMPRAKPSTHRETNPRGTEATAMAMDHVGQQADTTDSTDGSQWDPSEHSPNCGIREVGAGDPDTQQTGRHHCYYPAKETNEKTNTNRNSNTFIEQLLHAKQQRGNSGVPFKPGHMVRALTTNALSWAKLYPDPWCLRMGGTGNEVFENEIKTGSCWIKEQEGQPRPQSPRSQVRPEADPGPSPLTKMSAENEYRPPSPPKLAAERDKPSPRLRPRGVPWRRESRVRAGRECALLRVAAEGARPPPAGMSYDRAITVFSPDGHLFQVEYAQEAVKRGSTAVGVRGRDIVVLGVEKKSVAKLQDHRPVRKICTLHDNVCMAFAGLTPADARIVIQTGPGVEFQSHRAXTVEGPRVTVEYITPLTFASLKASVYTQSKWGARPFGISGPHRGFSTFDGTPXLYQTDPSGTYHAWKANSIGRGAKSSARSSWEKNYTDKAIETDDLTIKLVIKALLEVVQSGGKNIELAVMRRDQSLKILNPEEIEKYVAEIEKEKEENEKKKQKKAS

SEQ ID NO: 42151 - protein, 139 aa, Homo sapiens; identical to SEQ ID NO: 34774

SEQ ID NO: 42152 - protein, 585 aa, Homo sapiens
  misc_feature (1)...(585): Xaa = X or * as defined in Table 2
MSYPADDYESEAAYDPYAYPSDYDMHTGDPKQDLAYERQYEQQTYQVIPEVIKNFIQYFHKTVSDLIDQKVYELQASRVSSDVIDQKVYEIQDIYENSWTKLTERFFKNTPWPEAEAIAPQVGNDAVFLILYKELYYRHIYAKVSGGPSLEQRFESYYNYCNLFNYILNADGPAPLELPNQWLWDIIDEFIYQFQSFSQYRCKTAKKSEEEIDFLRSNPKIWNVHSVLNVLHSLVDKSNINRQLEVYTSGGDPESVAGEYGRHSLYKMLGYFSLVGLLRLHSLLGDYYQAIKVLENIELNKKSMYSRVPRVPRSPTYYYVGFAYLMMRRYQDAIRVFANILLYIQRTKSMFQRTTYKYEMINKQNEQMHALLAIALTMYPMRIDESIHLQLREKYGDKMLRMQKGDPQVYEELFSYSCPKFLSPVVPNYDNIHPNYHKEPFLQQLKVFSDEVQQQAQLSTIRSFLKLLHPPCLVAKPGLASLDLTEQEFRIQLLVFKHKMKNLRVDSAVSQALDGEFQSASEVDFYIDKDMIHIADTKVARRYGDFFIRQIHKFEELNPNPXRRMGQRPWMIFTTHSGNLVLNVL

SEQ ID NO: 42153 - protein, 178 aa, Homo sapiens
  misc_feature (1)...(178): Xaa = X or * as defined in Table 2
MMEHGGWALAXAFTTAALALADAGVEMYDLVVGCGLSLAPGPAPTWLLDPTRLEEERAAAGLTVALMPVLNQVAGLLGSGEGGLTESWAEAVRLGLEGCQRLYPVLQQSLVRAARRRGAAAQPSTRSLSNYGRKPRTVLPPSTKRPAPSASGDPLEWTPRHKPLPAEVIQASPGYTLS

SEQ ID NO: 42154 - protein, 78 aa, Homo sapiens
  misc_feature (1)...(78): Xaa = X or * as defined in Table 2
WATERWKGRKNHEISWKCFPGKAISXMRSSKQMKPNFPRCSSITVLSVRGMVLFLTLACPRFKMSSRTDFRFGNPQVT

SEQ ID NO: 42155 - protein, 139 aa, Homo sapiens
IFTSSSPFENQLLILFFPHFHLNDCSNSFLFFFSEMESRSVAQLECTGAISAHCNLCLLGSSDFPALASRVAGTTGTRHHTQLIFVFLVETGFHHVGQDGLNLLDLMVCPPGPPQSAGITAVSHRAPASNTVFQLLEHL

SEQ ID NO: 42156 - protein, 796 aa, Homo sapiens; identical to SEQ ID NO: 31807
  DOMAIN (725)..(776): Ribosomal protein L30 proteins domain identified by eMATRIX, accession number BL00634, p-value=7.667e-18, raw score of 34.38
  DOMAIN (720)..(772): Ribosomal protein L30p/L7e domain identified by PFam, accession name Ribosomal_L30, E-value=7.2e-08, PFam score of 30.9

SEQ ID NO: 42157 - protein, 120 aa, Homo sapiens
WPYCSRDFADFGTTIKQDFRLLGQTSVDRLLQLSQGQAVKGNQLLPVSLVKRKTTLAPNTQTASPRALADSLMQLARQVSRLESGQQDPQLQVCWSLLEAHSRPCLPGYQQRWRQNSGFL

SEQ ID NO: 42158 - protein, 167 aa, Homo sapiens
  DOMAIN (12)..(63): Ribosomal protein L30 proteins domain identified by eMATRIX, accession number BL00634, p-value=5.224e-20, raw score of 34.38
  DOMAIN (24)..(59): Ribosomal protein L30p/L7e domain identified by PFam, accession name Ribosomal_L30, E-value=6.7e-14, PFam score of 50.7
MFQTAGCQAHAGHCEGHGQRSIRVRKVLRLLHLRQIFSGTFVKLNKASINMLRIVEPYIVWGYPNLKSVNELIYKCGYGKINKKIIALTDNALIAPSLGKYGIICMEDMINEIYTVGKHFKEANNFLWPFELSSPRGGMKKKTTHFVEGGDAGNRQDQINRFFRRMN

SEQ ID NO: 42159 - protein, 134 aa, Homo sapiens
MSCICKQVFDFLEDESVASFFFLDHAEKPSSRVWPMKKNTWVTVMMAAFMRTWADMRSCHVVLAQCRVLMASVGAACHSDHGDQPSPVLLSYGVPFDVARNALRLSVGRSTTRAEVDLVVQDLKQAVAQLEDQA

SEQ ID NO: 42160 - protein, 214 aa, Homo sapiens
MSGSEYDIPGVITRPIYAEIEKLTTEQLTTHQAYWNAVTAQVAAITARANLGIIKANFVTAKIQALATKAEYALTKLKLSNESVTYCTAQYNLSSMLPQQLLMLKNQTTQVAEQTKLTTEQINMTKEQKEAQRAQTSDTRTDGTRVAGSVGKQKELYDQQITSYKRDAEVKAAKLFTDAWVTQKTIDEGLSPPNGFTNTSLDSILTALKNNNAL

SEQ ID NO: 42161 - protein, 356 aa, Homo sapiens
MLPQQLLMLKNQTTQVAEQTKLTTEQINMTKEQKEAQRAQTSDTRTDGTRVAGSVGKQKELYDQQITSYKRDAEVKAAKLFTDAWVTQKTIDEGLSPPNGFTNTSLDSILTALKNNNALGFPGWAATNYDPSIGIAYGNLSILSQIDPEVVKWQVPQKAGYEVQVQSSRIGFGDFEEWADKFLYENYPDRITEEFEIDIMDDDRIVLTATDGSELSFYPENYSQDAMYLYVNYYYIQPTSVADPVVHPAVSVPSADDLPSTSEWTQVSQNHTPKSATLKTVTHIKSVFSDGRPDEESTNTEEEQVSWTNFSDVYEKEFREPSEVGLIIIRKTTMTQVQTGTVSTGSTTNTEVIDLG

SEQ ID NO: 42162 - protein, 215 aa, Homo sapiens
SVTNAKQVDVSTATAQKKAEQGVTTPLVSPDAAYQMQAARTGNQVFNDSVTTRTPGEELGDIATGVGLGFVNTLGGIGALGAGLLNDDAGAVVAQQLSKFNDAVHATQSQALQDKRKLFAARNLMSEVESERQYQTDKKEGTNDIVASLSKFGRDFVGSIENAAQTDSIISDGLAEGVGSLLGAGPVLRGASLLGKAVVPANTLRSAALAGAIDA

SEQ ID NO: 42163 - protein, 74 aa, Homo sapiens
ILPSALRPPNPNWNVGYVQTQLVSKPLSLPTGIPCSTTSNILKPVITKDARLHRVIVHGWGIKGTIPIAKIAIS

SEQ ID NO: 42164 - protein, 414 aa, Homo sapiens
  misc_feature (1)...(414): Xaa = X or * as defined in Table 2
MQLPGRGHSFVCKANAGSTQARQGASAGVAGCRGWLNYAASEQIVLRVPHMRCEIPHKCVRRKSRIRPHSPFRLRNCWKGRSVRAFSLLRQLAKGGCAARRLSWVTPGFSQSRRCKTTASAKLACLQVRAQSEDISTVPIHYAYNMTRVGRMQMLGKYNPQSAKLVREAILPTKATLDLSNQNNEDFSAFQLGLAQALHIKVHTMTREVMSDELTKLLEGNLKPAIDMMVEFNTTGSLPENAVDVLNTALGDRKSFVALMALMEYSRYLVAEDKSAFVTPLYVEADGVTNGPINAMMLMTGGLFTPDWIRNIAKGGLXFQYTFTFNRNSRSQCFHIFQETSKKFFSMCFXSSLLTKHCHSSRDVWVFSTSFQHIRHTLIDGISNRTNQLTCNTTSTRTIDGNSQRVLSNTTFKF

SEQ ID NO: 42165 - protein, 1276 aa, Homo sapiens
MYSKEKEIEGLEHQLKGIKAARAYAEDVRKLMGNSLFRKVILEQFCTVDCARYVQESCDPLLEDRQRADALAMAQAAGCLKRYLEITLQKAETLVGVQSDIENALDVARDTPMTTEAAKTASDIFKMSDEEILNMPGPSSIQNNPEPVENNTPAQPDPIVEVEQTDEPEVTTEPTEVENTSESESNSDAFTTGNDSATVDPNKVDSNSKPATDNAPSTTEQGQAKVVEDKQVSDQKTDFDYKAGYERIMAPFKANGKMITPQSPEEQEESLLVVTTGVSANRLMGGAMQLTFRKMAFDYYPFHWAGDSCKHWVRHCEAMETRGQWAQKLVMEFQSKMEKWHEETGLKPPWHLGVDSLFRRKADSLSSPRKNPLERSPSQGRQPAFQPPAWNRLRSSCMVVRVDDLDIHQVSTAGQPSKKPSTLLSCSRKLHNLPTQVSAIHIEFTEYYFPDNQELPVPCPNLYIQLNGLTFTMDPVSLLWGNLFCLDLYRSLEQFKAIYKLEDSSQKDEHLDIRLDAFWLKRPKASWDLWSVHFTQISLDFEGTENFKGHTLNFVAPFPLSIWACLPLRWQQAQARKLLLASEGRLKPSASFGSPVQSEALAPDSMSHPRSKTEHDLKSLSGLTEVMEILKEGSSGMDNKGPLTELEDVADVHMLVHSPAHVRVRLDHYQYLALLRLKEVLQRLQEQLTKDTESMTGSPLQNQTACIGVLFPSAEVALLMHPAPGAVDADSAGSDSTSLVDSELSPSEDRELKSDASSDQGPASPEKVLEESSIENQDVSQERPHSNGELQDSGPLAQQLAGKGHEAVESLQAKKLSRTQASSSPAALKPPAGRETAVNGQGELIPLKNIEGELSSAIHMTKDATKEALHATMDLTKEAVSLTKDAFSLGRDRMTSTMHKMLSLPPAKEPMAKTDEGVAAPVSGGAARLRFFSMKRTVSQQSFDGVSLDSSGPEDRISVDSDGSDSFVMLLESESGPESVPPGSLSNVSDNAGVQGSPLVNNYGQGSPAANSSVSPSGEDLIFHPVSVLVLKVNEVSFGIEVRGEDLTVALQAEELTLQQLGTVGLWQFLHGQCPGTCFQESSTLKTGHIRPAVGLRFEVGPGAAVHSPLASQNGFLHLLLHGCDLELLTSVLSGLGPFLEDEEIPVVVPMQIELLNSSITLKDDIPPIYPTSPGPIPITLAMEHVVLKRSDDGVFHIGAAAQDKPSAEVLKSEKRQPPKEQVFLVPTGEVFEQQVKELPILQKELIETKQALANANQDKEKLLQEIRKYNPFFEL

SEQ ID NO: 42166 - protein, 1790 aa, Homo sapiens
  DOMAIN (900)..(931): Bacteriophage-type RNA polymerase family proteins signatur domain identified by eMATRIX, accession number BL00900B, p-value= 9.074e-12, raw score of 22.91
  DOMAIN (829)..(1176): DNA-dependent RNA polymerase domain identified by PFam, accession name RNA_pol, E-value=7e-07, PFam score of -127.9
MAITTFAKTFGQASTKTESNNGSRPKAQFWINVGYVANEGTEDERFISLPTGIPLDTQEHLPTNSSNEDFRAMRCAQNDLLDQLMEFAKTLEPGQEGVISLQVQLRRVKEEAPAISASKYLRRQPISEETVDALCKSFTHLLPDNDTNLPFNVDVLDYMMECSDGRCHLNQSRINWIKSQLEKALLDKNFYDYICDDGETLHIAVHGGVTYQGVPQWTDGIKVIGYDCAHAGDKLKCPKQFIGSIREKLYEDSYGVWRDEEYCINECESMDKAMRKSLIMGTKEDVAKMKAKRQMNKAVTFAERYSTSEPVRRIVTFNHPAIKATILEEGIMEQLNYGYKIKRNQVRGSWLFLVYGKPIYELHRGEKFKTYYHKARIADRNIRIHYPMPLSNPFQKNERTTDEDIAAAYEAYLRNRLVSGDKLITAEMERIAKFVMDATDKPVGLIGNELEVNVIHGTREEVIAKYKVWLQEQIDKGNPVVLDELNRLGNKAIDEKGLALQCFCYPKPCHGEVIKENYAIPTKDTNIKTMAIEDIRTFVNAFIVYAANHPELNFKVTRVGCGLAGIDDSVMASMFKNATEYAMSTIEHQMHLEKLYNKNQLLPRMRQEFEENSGIDFKAFFAHIGIDYKFGIDAMVQMALHKRADLPTLVGTLRHHCKSAQEVADNLFKMASEDCFNFDPTIDKFIVIYTISDDVQHELDSFQYPLPMVVRPKLLTKNYGTGYFTCNKSVILKKNHTDDDICLDHLNRMNKIPLSINWDVAHMVKNEWANLDKPKEGETRQEFEKRVRAFQKYDRTAHEVMGLLTQEGNKFYLTHRPDKRGPNRLRREEYTMQTFTAREYLKIDIANNYGLDKEDWDDRIAWFDKNENNLLNLVREAEEPALFYAGVKAWMDVKEGKPIGYPVALDATSSGLQILACLTGDRRAAELCNVVNYRDESGKVKRRDAYTVIYNKMLNTLGKGARIKRNDCKQAIMTALYGSEAKPKEVFGEGIMLNVFESTMNVEAPAVWELNKFWLQCGNPEAFVYHWVMPDGFNVYIKVMVNEVETVHFLDKPYDCVRKVQGTEEKTRMLSANTTHSIDGLVVRELVRRCDYDKNQIEYIKALCNGEAEYKTSEKNYGKAMELWGYYEKTGFLTARIFDYLDSETIKLVNTQDILDLIESMPKKPFHVLTVHDCFRCLPNYGNDIRRQYNNLLATIAKVMFHKDTNVATVLDASGSLSDGSVEVGTFHHPDETYPDSVTIYHGVRDLLYKRSAKDPSQTASYPNNIINMQVISIDMKATPRLILGTALPRVISTIEGKDVTWHVDVAGGKAPLTYKWQFKANTVGAAFADIDSGENPTAKTATLINHAVTAESAGTYKVIVTDANGTTIESSSLLVVGVQEPPEVASIVAYPSPLALSVADDITDGKTVKFSSLPAGSLIGTLSIKTQPDSGKATAEISGNVLTVKPVAAVPGKAFYVEVDSVEEGVRIIDILANYDLFQYENNIKGDYCNVSGLQMYDEHITDDEMEEMGLTDRWVDWYYEDDQSFFDNPKEYLNNLKNLTSCYDRVEPGNVGIIVNRLGEDKGVENEVKGVGRYWLTWNEELYTFPTFKQMKTYDGLFYFQLSDGTQIGHQMAISYKVNPTKVTNIFQTYRKGVNEITEQDLRQRIADVLNRQGNLINTDTFIDGGKSKLLDSVTDTIRKEMEPVGIDIIAISWIGAPEYPDNVKRAINAKVEATQKTLQREQEIQQRVAEANMEREQAKGVADAIRLRGEALTENPNVMQLEAINKWNGTLPTTMIPGATTPFVNVK

SEQ ID NO: 42167 - protein, 1333 aa, Homo sapiens
  DOMAIN (1178)..(1229): Ribosomal protein L30 proteins domain identified by eMATRIX, accession number BL00634, p-value=4.913e-12, raw score of 34.38
  DOMAIN (1199)..(1225): Ribosomal protein L30p/L7e domain identified by PFam, accession name Ribosomal_L30, E-value=4.9e-07, PFam score of 28.1
MLNYNAPIDGQKSSIDGANSAQMQTFFWLKKAIITARKEQYFMPLASVTNMPKHYGKTIKVYEYVPLLDDRNINDQGIDASGATIVNGNLYGSSKDIGNITSKLPLLTENGGRVNRVGFTRIAREGSIHKFGFFYEFTQESIDFDSDDGLMEHLSRELMNGATQITEAVLQKDLLAAAGTVLYAGAATSDATITGEGSTPSIVSYKNLMRLDQILTENRTPTQTTIITGSRMIDTKVIGATRVMYVPSDLVPEVKAMKDLFGNKAFIETQHYADADIVSKQIKTDESRTQEGQYSALQHANRIRSAYNSGNFELASAYLNDFMQFAQHMQNKVGALNEHLVTGNADKNKSVHYQALTADREWVRSRTGLGVNPYDTKSVKFAQQVALEAKTVADIANALASAYPELKVSHIKVTPLDSRLNAPAAEVVKAFRQGNRDVAFSQQKADSVNQVKETPVTKQEPVTSTVQTKTPVSEPVKTEPTTKESRPQAIKEPVSQSEKRDVNLTNEDTIKQPTESVKETETSAKESTVTEELREGIDAVYPSLVGTADSKAEGIKNYFKLSFTLPEEQKSRTVGSEAPLKEVAQALSSRARYELFTEKEVANPAFNGEVIKRYKELMEHGEGIADILRSRLAKFLNTKDVGKRFAQGTEANRWVGGKLLNIVEQDGDTFKYNEQLLQTAVLVGLQWRLTATSNTAIKDAKDVAAITGIDQALLPEGLVEQFDTGMTLTEAVSSLAQKIESYWGLSRNPNAPLGYTKGIPTAMAAEILAAFVESTDVVENIVDMSEIDPDNKKTIGLYTITELDSFDPINSFPTAIEEAVLVNPTEKMFFGDDIPPVANTQLRNPAVRNTPEQKAALKAEQATEFYVHTPMVQFYETLGKDRILELMGAGTLNKELLNDNHAKSLEGKNRSVEDSYNQLFSVIEQVRAQSEDISTVPIHYAYNMTRVGRMQMLGKYNPQSAKLVREAILPTKATLDLSNQNNEDFSAFQLGLAQALDIKVHTMTREVMSDELTKLLEDSLLSLMDLFLPDINLGENGALELKRGIAKNPLTITIYGSGARGIAGKLVSSVTDAIYERMSDVLKARAKDPNISAAMAMFGKQAASEAHAEELLARFLKDMETLTSTVPVKRKGVLELQSTGAGAKGKINPKTYTIKGEQLKALQENMLHFFVEPLRNAITQTRYQWCEPKGLKGVAASSLRQIFNRTFVKLNKASVNMLRIVEPYTAWGYPILKSVNELIHKCGYGKISKKRIALTDEALMAQSLGKYGIICREDLIHEIYTIGKHFKEANNFLWPFKLSSPRGRMKKKTTHFVEGGDAGNREDQINRLIRRMN

SEQ ID NO: 42168 - protein, 4011 aa, Homo sapiens
  DOMAIN (23)..(47): Eukaryotic and viral aspartyl proteases proteins domain identified by eMATRIX, accession number BL00141E, p-value=7.088e- 09, raw score of 14.32
MLGNATAGLSNALGDFRNSARQQAGDAIMAEAMRYQDPNEYRNALASGALFAGYDPSLISSRTMENLDNRAGNLLDQASKQQNLDFTRYSNDRTMKVNAATDAAAPALQELALAYQSGDPRKVQAAQAQYGDVLKTLPAGVVMDYMNNLQGQGTAGIGQRRSLFNLGVDIRNDADTQAAMQLLNNIRRGAYSADDARMLAEGTFDQMSPGAVSRALSQLDRAYPGAYTPGTGSASLSPPGTQGTRNGSAYDTTYKFTPTDVPITQMNLGEVVQHQDTMKKTLGASPVGAYQINQDTLKDFAPKVFGEDWQNIPMSPENQDKLGEAIFNARKNGNLKSTWAALPDDTPGAYKNLSWDEMKDYIAQAETGNSINPLQEQAFTSVAGNTVGTRNMQNIGNTLLPEYQAATVDPSTTGQVAKRIIDSNELKGINQGALVRQINEVAKQNAISPAMAGAIIQRSITAVEANAKLATTGTAIEQNARNQLTAQIQSNIYAAQNTLDTALADLREVQRRIQTGQENLRSVLPRYQERVNTAKRLLDGARSAVAADPQNLDIKSLQNIKQEESEANRRSLGRDAGRRLDSVTNAKQVDVSTATAQKKAEQGVTTPLVSPDAAYQMQAARTGNVGANAFEPGTVQSDFMNLTPMQIMNKYGVEQGLQLINARADAGNQVFNDSVTTRTPGEELGDIATGVGLGFVNTLGGIGALGAGLLNDDAGAVVAQQLSKFNDAVHATQSQALQDKRKLFAARNLMSEVESERQYQTDKKEGTNDIVASLSKFGRDFVGSIENAAQTDSIISDGLAEGVGSLLGAGPVLRGASLLGKAVVPANTLRSAALAGAIDAGTGTQSLARIASTVGRAAPGIVGVGAMEAGGAYQQTADEIMKMSLKDLEKSPVYQQHIKDGMSPEQARRQTASETGLTAAAIQLPIAAATGPLVSRFEMAPFRAGSLGAVGMNLARETVEEGVQGATGQLAQNIAQQQNIDKNQDLLKGVGTQAGLGALYGFGSAGVVQAPAGAARLAGAATAPVLRTTMAGVKAAGSVAGKVVSPIKNTLVARGERVMKQNEEASPVADDYVAQAAQEAMAQAPEAEVTIRDAVEATDATPEQKVAAHQYVSDLMNATRFNPENYQEAPEHIRNAVAGSTDQVQVIQKLADLVNTLDESNPQALMEAASYMYDAVSEFEQFINRDPAALDSIPKDSPAIELLNRYTNLTANIQNTPKVIGALNVINRMINESAQNGSLDVTEESSPQEMQNVALAAEVAPEKLNPESVNVVLKHAADGRIKLNNRQIAALQNAAAILKGAREYDAEAARLGLRPQDIVSKQIKTDESRTQEGQYSALQHANRIRSAYNSGNFELASAYLNDFMQFAQHMQNKVGALNEHLVTGNADKNKSVHYQALTADREWVRSRTGLGVNPYDTKSVKFAQQVALEAKTVADIANALASAYPELKVSHIKVTPLDSRLNAPAAEVVKAFRQGNRDVAFSQQKADSVNQVKETPVTKQEPVTSTVQTKTPVSEPVKTEPTTKESRPQAIKEPVSQSEKRDVNLTNEDTIKQPTESVKETETSAKESTVTEELREGIDAVYPSLVGTADSKAEGIKNYFKLSFTLPEEQKSRTVGSEAPLKEVAQALSSRARYELFTEKEVANPAFNGEVIKRYKELMEHGEGIADILRSRLAKFLNTKDVGKRFAQGTEANRWVGGKLLNIVEQDGDTFKYNEQLLQTAVLAGLQWRLTATSNTAIKDAKDVAAITGIDQALLPEAMAAEILAAFVESTDVVENIVDMSEIDPDNKKTIGLYTITELDSFDPINSFPTAIEEAVLVNPTEKMFFGDDIPPVANTQLRNPAVRNTPEQKAALKAEQATEFYVHTPMVQFYETLGKDRILELMGAGTLNKELLNDNHAKSLEGKNRSVEDSYNQLFSVIEQVRAQSEDISTVPIHYAYNMTRVGRMQMLGKYNPQSAKLVREAILPTKATLDLSNQNNEDFSAFQLGLAQALDIKVHTMTREVMSDELTKLLEGNLKPAIDMMVEFNTTGSLPENAVDVLNTALGDRKSFVALMALMEYSRYLVAEDKSAFVTPLYVEADGVTNGPINAMMLMTGGLFTPDWIRNIAKGGLFIGSPNKTMNEHRSTADNNDLYQASTNALMESLGKLRSNYASNMPIQSQIDSLLSLMDLFLPDINLGENGALELKRGIAKNPLTITIYGSGARGIAGKLVSSVTDAIYERMSDVLKARAKDPNISAAMAMFGKQAASEAHAEELLARFLKDMETLTSTVPVKRKGVLELQSTGAGAKGKINPKTYTIKGEQLKALQENMLHFFVEPLRNGITQTVGESLVYSTEQLQKATQIQSVVLEDMFKQRVQEKLTEKAKDPTWKKGDFLTQKELNDIQASLNNLAPMIETGSQTFYIAGSENAEVANQVLATNLDDRMRVPMSIYAPAQAGVAGIPFMTIGTGDGMMMQTLSTMKGAPKNTLKIFDGMNIGLNDITDASRKANEAVYTSWQGNPIKNVYESYAKFMKNVDFSKLSPEALEAIGKSALEYDQRENATVDDIANAASLIERNLRNIALGVDIRHKVLDKVNLSIDQMAAVGAPYQNNGKIDLSNMTPEQQADELNILFREELEARKQKVAKAKAEVKEEIVSEKEPVNPDFGMVGREHKASGVRILSATAIRNLAKISNLPSTQAATLAEIQKSLAAKDYKIIYGTPTQVAEYARQKNVTELTSQEMEEAQAGNIYGWTNFDDKTIYLVSPSMETLIHELVHASTFEEVYSFYQGNEVSPTSKQAIENLEGLMEQFRSLDISKDSPEMREAYADAIATIEGHLSNGFVDPAISKAAALNEFMAWGLANRALAAKQKRTSSLVQMVKDVYQAIKKLIWGRKQAPALGEDMFSNLLFNSAILMRSQPTTQAVAKDGTLFHSKAYGNNERLSQLNQTFDKLVTDYLRTDPVTEVERRGNVANALMSATRLVRDVQSRGFNMTAQEQSVFQMVTAALATEAAIDPHAMARAQELYTHVMKHLTVEHFMADPDSTNPADRYYAQQKYDTISGANLVEVDAKGRTSLLPTFLGLAMVNEELRSIIKEMPVPKADKKLGNDVDTLLTNAGTQKATNVQDSIDALSETIMAAALKRESFYDAVATPTGNFIDRANQYVTDSIERLSETVIEKADKVIANPSNVAAKGVAHLARLTAAIASDKQGEIVAQGVMTAMNQGKVWHPFHDLVNDIVGRTKTNANVYDLIKLVKSQISQDRQQFREHLPTVIAGKFSRKLTDTEWSAMHTGLGKTDLAVLRETMSMAEIRDLLSSPKKVKDEISTLEKEIQNQAGRNWNLVQKKSKQLAQYMITGEVGNNLLRNAHAISRLLGERITNGPVADVAAIDKLITLYSLELMNKSDRGLLSELAQSEVEGMEFSIAYMVGQRTEEMRKAKGDNRTLLNHFKGYIPVENQQGVNLIIADDKEFAKLNSQSFTRIGTYQGSTGLRTGSKGYYFSPVAARAPYSQGILQNVRNTAGGVDIGTGFTLGTMVAGRITDKPTVERITKALAKGERGREPLMPIYNSKGQVVAYEQSVDPNMLKHLNQDNHFAKMVGVWRGRQVEEAKAQRFNDILIEQLHAMYEKDIKDSSANKSQYVNLLGKIDDPVLADAINLMNIETRHKAEELFGKDELWVRRDMLNDALGYRAASIGDVWTGNSRWSPSTLDTVKKMFLGAFGNKAYHVVMNAENTIQNLVKDAKTVIVVKSVVVPAVNFLANIYQMIGRGVPVKDIAVNIPRKTSEINQYIKSRLRQIDAEAELRAAEGNPNLVRKLKTEIQSITDSHRRMSIWPLIEAGEFSSIADAGISRDDLLVAEGKIHEYMEKLANKLPEKVRNAGRYALIAKDTALFQGIQKTVEYSDFIAKAIIYDDLVKRKKKSSSEALGQVTEEFVNYDRLPGRFRGYMESMGLMWFYNFKIRSIKVAMSMIRNNPVHSLIATVVPAPAMFGNVGLPIQDNMLTMLAEGRLDYSLGFGQGLRAPTLNPWFNLTH

SEQ ID NO: 42169 - protein, 5464 aa, Homo sapiens
  DOMAIN (2539)..(2588): TRANSPORT TRANSMEMBRANE PROTEIN domain identified by eMATRIX, accession number PD01825A, p-value=6.418e-09, raw score of 23.38
MDKNFDDLFRLVQEYQPQQVGVETTGQQGGFISLLQKEMLNRNVFFNFASSRGGQPGIHPVTSKLSRFNLVVPWFKAGKMYFPAEMKDSPIMTLFMGQIRLATINGLKGKDDCIDTISMLGYLNPWKPQAGIVTDDKGDIEDDSKPFIIVAANEALTRLHGRFNMRNNNVVVEMQEGRTNYPLLAKYAVQSYDPNEVKCPFIMDLAGEKFAEDVIRILEVYDDKGRRRPLNDRNNPHSLFTPRPNVLQNNAPKAWEVLNVMYQAKHPKLSTAEDGYNEIDIPDTLDPALDAYIAYRYYTSLNTPESSAKAAEYLSFYDSICYCCETLNDPIVDKMIGNAYYVVKFVALRMTFIKNVSDNMTQLLAIHNKLTELSAIYTKLDELQLIHNNLDKLQELYNQLSKLTGLYDNLQALLRVYDNLTPINTVASNIDAVNTVATDIAKVIIVSAQIDKVITVANSITNVNTVAGSIDAVNTVSTNINAIKNVNTNMAALLDLDNHMTELLAVHARLGDLVTIAEQLDTIIADHEKYATAEGAGLIGFNQAQTYAANTVGAMLRQVITMDNDKGGYAVAGKLTSTGGVWSLATGSINMNAPTAGAVANLVLNYKAGKVSGLLVAPSQQMALDGLIMGASTTDNTATVSVTAPLRFKADLTAKAISGVNTRIMPSSAVTLNVDAYGGITLGYPPSLQTVEPVMTFITPTGKAPLTPRFSSVTAGAAVLVMVGEAEAQLKYSGGGWAAVSDWDSGTYCAFDTVSGELTVYHSTLIKDSTVTFSLLLPTDGTQLTAQLKSHTDSSFVLKIAKPDGSLLDAPLEGMGIMYSRGMHGIYKVPYGSLIVDVGRVQVKFSEFNTTEGRETGLITGAVMSIEDYLKGKNCLASPNYDPDDQHSSWREDLPQFKKDREHLTLVNTRRNRTYNTKLNRFDPEYWVVDYNALMVATIIPYGSKSFKVPCQWRTNKDFLGVRWMTEDTFDHHLYRYETDPNYLGLILAFRHNPDEPDKFTVTIQTPEKAYTYRLAPYGFNNKTRRWECLDTKYGTKRTYQADIFVATDEDIPESEMTEVYGTKDYIFILDFADLRTGVAFNGVTINPRNITMISFDCTEAHHGLGKDAYIAAMYNNDDGATFQMEIGGIHTNAALAAGDKLQCIWRYLDVNGNAPAAENEFEVTDGPIKQVDSVKWFTNLTVSGSGRKQLGQRKYPQVVMGMGMTSGFDDGYNLTPERQDKETGELITEQTVLDYPILFAGESQVAIHFMSGAYPDRGYDVFQKYMTETWGINYAGVRPINGTTGSTAVDRACAVNPDSEVFDPTQSSDAGGLWWWDLEADKPGPALLYCVEQVGKLKPKAIIWGQGDQDATALAYPGDRDPAPSLTRTKQATKKVFEYLRSLYGQIPIFIQELSYAWGITNTDEPNVPIRTGLPSFLAARRNTWGDIEFRWKSYGLDPALAQYRIEIYNPSNLNQILHSFVVSGTQEANGYVYADFTVEDWIPVMMEAVGSPNPWEFMKWRVVCLYQEREIPSAPWSDNIPLDNAGLVKKTILVGINQFGGGHFTDMSDPTATTANGAIGRKDKVSASTLRLTFAEKAGLRPIQVMPINVAADSAGMTVGTHKWWNTSSNSPGDALLAINDMVKGLGVKPDYFIEANPWETMYMKDVNSSTWPALMTAFESSNKAMLAWMRTNWGNPNLEIWFQGATTVWFGVAPPNDLNSEATVTVRDKQIQMATANIGFKLGSFVPGSNLYTAYRNVESSWIYYTVEAFHATAIELGEALALNVNRATNPPDWSYLRPPANLQGRKLATRDIKMTWDNRAGITHWKYANRHVTTGAEISSGILTSPEYVFTLNDQQNAYNGDTLNMSFSVSEYAADSGAVGASSSFVGVVQNGSYMQTPTQLKAAKQLNGDIIFTWVGRPSWQHFWVVNTSVNDSKTVIFSKEWSSESLTWTVAEQNEFYGLEEGGATHVIFMVSEYDPSNGLVSIGAQVTGQTEQPSNPMNPVAGLYAVFTGDPGNSNIKIMWDKPSVGGRDVRIRNMHVTSSATISDQFVSDNNLVFTREEQVAAYGFTASSVSVRAQEHDIESGALGLTTEYVAVPETAGTVGQGFAKKDSVGNCTMSWEVGDAVQWQVEIINAENSTVVKTEIVVAPTITWTAEEITAEYGYLTDHMVWRVRPYRADGASNIREIQLQLINEMTDVHMGALTAQYMPDDFTFEPGIGQIHFNVETSRKVCLDLAKSVLRLVPVYPLPTNKDALDFVSKAQCQILKECQNLGMELYFQIGEPWWWDGSYNTGEGKNAPCIYDPKTMALYKEETGNDVPTPWIKDIFAPVEEHQWPYVDWLCTKLGQSTNYIRDYVKGKFPDAQATLLFFTPQIMSPASELTGRLNFPESEWVFPNYDFVQIEDYDWIIDGRLDLVPLTFDAAVNRLGYPLNVVHYFIGFVLLPEDAKKIWADVDKAWGLALEAGFSMSHESVEVLLARMEERMKTLFENNARDAKSRQDLDDAVRNLQLSINKMDTRLENVEKSLAESVPTIEEFITIKHKVVGAGLFGKWVWAGSGIIIGILAAARREIFAWRIGVAISKKKVGGVGGVIAAIIAAVFAVEGGYVNDPKDPGGETNHGVTIQVAQKHKQELESMYNWDGSMKNLTQEMASSIYYNDYILKPGFVKFADVSPAVTEKLVDAGVNTGPARPSRWLQESLNAFSRNGKDYPKIQVDGKVGSGTLSAYKSLQNKRGKVEACKLILKSLDGKQLNYYLSLNMPEYTTGWIANRIGNVPLERGSSGSYLFLLGSQHGEKKVQALWDEDKKEYSKELDRVKLAYDQKNREHSYEVGQLTLRLDKAKESYEVVIDSITNQYNSRLLQSEKRAESYKRQASTGTTQCLNLASHAARLDSSLEEGRRLVEELRATVRLRDNQLIELGNQIRSDRITMEQNTDSMVPLPDPSQATKLTSWKNEPSLQALKADLDAAKPSHTAMMIKVKEWNDLMRIEGKAKPPKVKGRSQVQPKLVRRQAEWRYSALTEPFLGSNKLFKVTPVTWEDVQGARQNELVLNYQFRTKLNRVSFIDNYVRSVVDDGTGIVRVGWNREIRKEKQEVPVFSLFPIQTQEQADALQQALQLRTDNPRGYEENVDEAIKESVRFFDETGQATYAVQTGTTTTEVEVPLANHPTVEMLNPENIIIDPSCQGDINKAMFAIVSFETCKADLLKEKDRYHNLNKIDWQSSAPVNEPDHATTTPQEFQISDPMRKRVVAYEYWGFWDIEGNGVLEPIVATWIGSTLIRLEKNPYPDGKLPFVLIPYMPVKRDMYGEPDAELLGDNQAVLGAVMRGMIDLLGRSANGQRGMPKGMLDALNSRRYREGEDYEYNPTQNPAQMIIEHKFPELPQSALTMATLQNQEAESLTGVKAFAGGVTGESYGDVAAGIRGVLDAASKREMAILRRLAKGMSEIGNKIIAMNAVFLAEHEVVRITNEEFVTIKREDLKGNFDLEVDISTAEVDNQKSQDLGFMLQTIGPNVDQQITLNILAEIADLKRMPKLAHDLRTWQPQPDPVQEQLKQLAVEKAQLENEELRSKIRLNDAQAQKAMAERDNKNLDYLEQESGTKHARDLEKMKAQSQGNQQLEITKALTKPRKEGELPPNLSAAIGYNALTNGEDTGIQSVSERDIAAEANPAYSLGSSQFDPTRDPALNPGIRLDCARYVQESCDPLLEDRQRADALAMAQAAGCLKRYLEITLQKAETLVGVQSDIENALDVARDTPMTTEAAKTASDIFKMSDEEILNMPGPSSIQNNPEPVENNTPAQPDPIVEVEQTDEPEVTTEPTEVENTSESESNSDAFTTGNDSATVDPNKVDSNSKPATDNAPSTTEQGQAKVVEDKQVSDQKTDFDYKAGYERIMAPFKANGKMITPQSPEEVISLMQMGANYTRKMQEIQPYRKYLLMLENNGLLDEGQLSYAIDLVKGNPDAIKKLVKESGIDVLDINPEEEVKYQAGNHRVSDAEAAFATELEDAKSTPEGQATLQLISTTWDDHSKQALLENRGLVNTIVEQKANGIYDRIVSEIERLKILGQIPIGTAFLDAYNQVGNYLAANGGFNDLIKQKPVEQPEPVVQPVATRVATPKSEITNTQQAAAASPSRVTPRKTEKSSIDGANSDQMQTFFWLKKAIITARKEQYFMPLASVTNMPKHYGKTIKVYEYVPLLDDRNINDQGIDASGATIVNGNLYGSSKDIGNITSKLPLLTENGGRVNRVGFTRIAREGSIHKFGFFYEFTQESIDFDSDDGLMEHLSRELMNGATQITEAVLQKDLLAAAGTVLYAGAATSDATITGEGSTPSIVSYKNLMRLDQILTENRTPTQTTIITGSRMIDTKVIGATRVMYVGSELVPELKAMKDLFGNKAFIETQHYADAGTIMNGEVGSIDKFRIIQKCCTGAGAGAQATVANPGYRTSMVSGQEHYDVYPMLVVGDDSFTSIGFQTDGYIHMSINDKPTADLTQGNDDTVDEVKVDELSLLKQRANMMGISYSNNISAETLRKKIEAAQEPVEPQPNPLALSTGTVTTATSLRHQQRLEQLKLVRVRIQNLDPKKKDLPGEIITVANEYIGTVRKFVPFGEATDEGYHIPYCIYNFLKERKFLNIRVTKGKNGQPNITSAWVREFAIEVLSPLTKEELQTLAAAQIAAGEDFTLPDIDMSGSEYDIPGGINSPIYAEIEKITTEQLTTREVGGSGVFDALMQSASNHLLAEFKNNRITGGDYVKAYIATMEACMANAVQFLTTKDQAYWNAVTAQVAAITARANLGIIKANFVTAKIQALATKAEYALTKLKLSNESVTYCTAQYNLSSMLPQQLLMLKNQTTQVAEQTKLTTEQINMTKEQKEAQRAQTSDTRTDGTRVAGSVGKQKELYDQQITSYKRDAEVKAAKLFTDAWVTQKTIDEGLSPPNGFTNTSLDSILTALKNNNALGKTKIYVASSVYNLAGDIHKRPNYLKTTVIGNIVSKSDFSMGDTITNSYLNGPGIRLRRFPGWAATNYDPSIGIAYGNLSILSQIDPEVVKWQVPQKAGYEVQVQSSRIGFGDFEEWADKFLYENYPDRITEEFEIDIMDDDRIVLTATDGSELSFYPENYSQDAMYLYVNYYYIQPTSVADPVVHPAVSVPSADDLPSTSEWTQVSQNHTPKSATLKTVTHIKSVFSDGRPDEESTNTEEEQVSWTNFSDVYEKEFREPSEVGLIIIRKTTMTQVQTGTVSTGSTTNTEVIDLGGGVTETRTTTVTTDTLGYTWSYQNTDVVTTMSAGGMPQLFIYKQNSGNAILDALFINKTTNNRFYSFIPIRSDKNWISGSTYTLCKKAFKKATGGKISDIMDDLKKNKDIGDIQYIYAVFGCSLNSPENTAKEYIYRFFQLVNQSMPADPNYPTMDALVEGFAQANRDFDAYQEWWESRSEEVVEVETTTETVDETVEVAEEAAAQEEEKEVQEEEAKEPVQAKPSLFAGLKR

SEQ ID NO: 42170 - protein, 7718 aa, Homo sapiens
  DOMAIN (3642)..(3666): Eukaryotic and viral aspartyl proteases proteins domain identified by eMATRIX, accession number BL00141E, p-value=7.088e- 09, raw score of 14.32
MAITTFAKTFGQASTKTESNNGSRPKAQFWINVGYVANEGTEDERFISLPTGIPLDTQEHLPTNSSNEDFRAMRCAQNDLLDQLMEFAKTLEPGQEGVISLQVQLRRVKEEAPAISASKYLRRQPISEETVDALCKSFTHLLPDNDTNLPFNVDVLDYMMECSDGRCHLNQSRINWIKSQLEKALLDKNFYDYICDDGETLHIAVHGGVTYQGVPQWTDGIKVIGYDCAHAGDKLKCPKQFIGSIREKLYEDSYGVWRDEEYCINECESMEFDCIVSDLNSIAREYSDGAIYVNREKFASWTGTADKDDVDFLNEYAVCPVSLLGLVFEGAEAVIARSGRAVFVGNCVSEGVYFVPLGVDVPTVTRYLACRYRFLVEATVCGVPFPASKSYHFATPKYEWNNAKDTHMTRRRQKVNRELLLLFECQQGSPSEKSHLFWLSALIRGGGGTLFLLGSQHGEKKGQALWDEDKKEYSKELGRGKLAYDQKNREHSYEGGQLTLRLDKAKESYEVVIDSITNQYNSRLLQSEKRAESYKRQASTGTTQCLNLASHAARLDSSLEEGRRLVEELRATVRLRDNQLIELGNQIRSDRITMEQNTDSMVPLPDPSQATKLTSWKNEPSLQALKADLDAAKPSHTAMMIKVKEWNDLMRIEGKAKPPKVKGRSQVQPKLVRRQAEWRYSALTEPFLGSNKLFKVTPVTWEDVQGARQNELVLNYQFRTKLNRVSFIDNYVRSVVDDGTGIVRVGWNREIRKEKQEVPVFSLFPIQTQEQADALQQALQLRTDNPRGYEENVDEAIKESVRFFDETGQATYAVQTGTTTTEVEVPLANHPTVEMLNPENIIIDPSCQGDINKAMFAIVSFETCKADLLKEKDRYHNLNKIDWQSSAPVNEPDHATTTPQEFQISDPMRKRVVAYEYWGFWDIEGNGVLEPIVATWIGSTLIRLEKNPYPDGKLPFVLIPYMPVKRDMYGEPDAELLGDNQAVLGAVMRGMIDLLGRSANGQRGMPKGMLDALNSRRYREGEDYEYNPTQNPAQMIIEHKFPELPQSALTMATLQNQEAESLTGVKAFAGGVTGESYGDVAAGIRGVLDAASKREMAILRRLAKGMSEIGNKIIAMNAVFLAEHEVVRITNEEFVTIKREDLKGNFDLEVDISTAEVDNQKSQDLGFMLQTIGPNVDQQITLNILAEIADLKRMPKLAHDLRTWQPQPDPVQEQLKQLAVEKAQLENEELRSKIRLNDAQAQKAMAERDNKNLDYLEQESGTKHARDLEKMKAQSQGNQQLEITKALTKPRKEGELPPNLSAAIGYNALTNGEDTGIQSVSERDIAAEANPAYSLGSSQFDPTRDPALNPGIRLDCARYVQESCDPLLEDRQRADALAMAQAAGCLKRYLEITLQKAETLVGVQSDIENALDVARDTPMTTEAAKTASDIFKMSDEEILNMPGPSSIQNNPEPVENNTPAQPDPIVEVEQTDEPEVTTEPTEVENTSESESNSDAFTTGNDSATVDPNKVDSNSKPATDNAPSTTEQGQAKVVEDKQVSDQKTDFDYKAGYERIMAPFKANGKMITPQSPEEVISLMQMGANYTRKMQEIQPYRKYLLMLENNGLLDEGQLSYAIDLVKGNPDAIKKLVKESGIDVLDINPEEEVKYQAGNHRVSDAEAAFATELEDAKSTPEGQATLQLISTTWDDHSKQALLENRGLVNTIVEQKANGIYDRIVSEIERLKILGQIPIGTAFLDAYNQVGNYLAANGGFNDLIKQKPVEQPEPVVQPVATRVATPKSEITNTQQAAAASPSRVTPRKTEKSSIDGANSDQMQTFFWLKKAIITARKEQYFMPLASVTNMPKHYGKTIKVYEYVPLLDDRNINDQGIDASGATIVNGNLYGSSKDIGNITSKLPLLTENGGRVNRVGFTRIAREGSIHKFGFFYEFTQESIDFDSDDGLMEHLSRELMNGATQITEAVLQKDLLAAAGTVLYAGAATSDATITGEGSTPSIVSYKNLMRLDQILTENRTPTQTTIITGSRMIDTKVIGATRVMYVGSELVPELKAMKDLFGNKAFIETQHYADAGTIMNGEVGSIDKFRIIQVPEMLHWAGAGAQATVANPGYRTSMVSGQEHYDVYPMLVVGDDSFTSIGFQTDGYIHMSINDKPTADLTQGNDDTVDEVKVDELSLLKQRANMMGISYSNNISAETLRKKIEAAQEPVEPQPNPLALSTGTVTTATSLRHQQRLEQLKLVRVRIQNLDPKKKDLPGEIITVANEYIGTVRKFVPFGEATDEGYHIPYCIYNFLKERKFLNIRVTKGKNGQPNITSAWVREFAIEVLPPLTKEELQTLAAAQIAAGEDFTLPDIDMSGSEYDIPGGINSPIYAEIEKITTEQLTTREVGGSGVFDALMQSASNHLLAEFKNNRITGGDYVKAYIATMEACMANAVQFLTTKDQAYWNAVTAQVAAITARANLGIIKANFVTAKIQALATKAEYALTKLKLSNESVTYCTAQYNLSSMLPQQLLMLKNQTTQVAEQTKLTTEQINMTKEQKEAQRAQTSDTRTDGTRVAGSVGKQKELYDQQITSYKRDAEVKAAKLFTDAWVTQKTIDEGLSPPNGFTNTSLDSILTALKNNNALGKTKIYVASSVYNLAGDIHKRPNYLKTTVIGNIVSKSDFSMGDTITNSYLNGPGIRLRRFPGWAATNYDPSIGIAYGNLSILSQIDPEVVKWQVPQKAGYEVQVQSSRIGFGDFEEWADKFLYENYPDRITEEFEIDIMDDDRIVLTATDGSELSFYPENYSQDAMYLYVNYYYIQPTSVADPVVHPAVSVPSADDLPSTSEWTQVSQNHTPKSATLKTVTHIKSVFSDGRPDEESTNTEEEQVSWTNFSDVYEKEFREPSEVGLIIIRKTTMTQVQTGTVSTGSTTNTEVIDLGGGVTETRTTTVTTDTLGYTWSYQNTDVVTTMSAGGMPQLFIYKQNSGNAILDALFINKTTNNRFYSFIPIRSDKNWISGSTYTLCKKAFKKATGGKISDIMDDLKKNKDIGDIQYIYAVFGCSLNSPENTAKEYIYRFFQLVNQSMPADPNYPTMDALVEGFAQANRDFDAYQEWWESRSGNRDIPIGKPPKRPVYPTIPSKSINIRSNGGYRYNMTISWNFIEESVSSGKAFSGAKKGQLKFAYEGTVVLMQKAVMYSEKGNDKVGFTIYRLDKITMYWQNGDNSWRKISVYGLNHNNNVYKNKSVSISGVDALNDDEESGFIIPLHNNIYRSMSLVNGTQLSTACCYLVLNSYKKVKKKWYQSGIFKVVVVVVAVVVSVFFTPAAGAGVMGTAASIGAALGFAGLAAIIVGAVANAIAAMILMSIIQTVSVSLLGDKIGIIVATIASMVAMNVGTALSTGSSMSTMLGEMMKADNIIKLTSSVGNGISDYINASAMETVKKTEKLMAEYRDQIKTIQEKYEEMFGTEGMGYIDPMNLTNVGQQFEPLDSFLSRTLMTGHDIADMSNNMITNFADITLQLDLDTNFGYGYGSFNTPTMNYNPMQSGILSNDWLQNITGGATGNTGGQTQGLTDQLGLNIPTFQLGLGGLNALGNIYGALQANKLAKNQFSFAKDVTNTNLNNQIKSYNTALEDRARSRAVAENRDQSTADAYIAANRLTRDFRNSARQQAGDAIMAEAMRYQDPNEYRNALASGALFAGYDPSLISSRTMENLDNRAGNLLDQASKQQNLDFTRYSNDRTMKVNAATDAAAPALQELALAYQSGDPRKVQAAQAQYGDVLKTLPAGVVMDYMNNLQGQGTAGIGQRRSLFNLGVDIRNDADTQAAMQLLNNIRRGAYSADDARMLAEGTFDQMSPGAVSRALSQLDRAYPGAYTPGTGSASLSPPGTQGTRNGSAYDTTYKFTPTDVPITQMNLGEVVQHQDTMKKTLGASPVGAYQINQDTLKDFAPKVFGEDWQNIPMSPENQDKLGEAIFNARKNGNLKSTWAALPDDTPGAYKNLSWDEMKDYIAQAETGNSINPLQEQAFTSVAGNTVGTRNMQNIGNTLLPEYQAATVDPSTTGQVAKRIIDSNELKGINQGALVRQINEVAKQNAISPAMAGAIIQRSITGKPEGWFSGIRNAFDTDVIDLGGDYQLDKAAVEANAKLATTGTAIEQNARNQLTAQIQSNIYAAQNTLDTALADLREVQRRIQTGQENLRSVLPRYQERVNTAKRLLDGARSAVAADPQNLDIKSLQNIKQEESEANRRSLGRDAGRRLDSVTNAKQVDVSTATAQKKAEQGVTTPLVSPDAAYQMQAARTGNVGANAFEPGTVQSDFMNLTPMQIMNKYGVEQGLQLINARADAGNQVFNDSVTTRTPGEELGDIATGVGLGFVNTLGGIGALGAGLLNDDAGAVVAQQLSKFNDAVHATQSQALQDKRKLFAARNLMSEVESERQYQTDKKEGTNDIVASLSKFGRDFVGSIENAAQTDSIISDGLAEGVGSLLGAGPVLRGASLLGKAVVPANTLRSAALAGAIDAGTGTQSLARIASTVGRAAPGIVGVGAMEAGGAYQQTADEIMKMSLKDLEKSPVYQQHIKDGMSPEQARRQTASETGLTAAAIQLPIAAATGPLVSRFEMAPFRAGSLGAVGMNLARETVEEGVQGATGQLAQNIAQQQNIDKNQDLLKGVGTQAGLGALYGFGSAGVVQAPAGAARLAGAATAPVLRTTMAGVKAAGSVAGKVVSPIKNTLVARGERVMKQNEEASPVADDYVAQAAQEAMAQAPEAEVTIRDAVEATDATPEQKVAAHQYVSDLMNATRFNPENYQEAPEHIRNAVAGSTDQVQVIQKLADLVNTLDESNPQALMEAASYMYDAVSEFEQFINRDPAALDSIPKDSPAIELLNRYTNLTANIQNTPKVIGALNVINRMINESAQNGSLDVTEESSPQEMQNVALAAEVAPEKLNPESVNVVLKHAADGRIKLNNRQIAALQNAAAILKGAREYDAEAARLGLRPQDIVSKQIKTDESRTQEGQYSALQHANRIRSAYNSGNFELASAYLNDFMQFAQHMQNKVGALNEHLVTGNADKNKSVHYQALTADREWVRSRTGLGVNPYDTKSVKFAQQVALEAKTVADIANALASAYPELKVSHIKVTPLDSRLNAPAAEVVKAFRQGNRDVAFSQQKADSVNQVKETPVTKQEPVTSTVQTKTPVSEPVKTEPTTKESRPQAIKEPVSQSEKRDVNLTNEDTIKQPTESVKETETSAKESTVTEELREGIDAVYPSLVGTADSKAEGIKNYFKLSFTLPEEQKSRTVGSEAPLKEVAQALSSRARYELFTEKEVANPAFNGEVIKRYKELMEHGEGIADILRSRLAKFLNTKDVGKRFAQGTEANRWVGGKLLNIVEQDGDTFKYNEQLLQTAVLAGLQWRLTATSNTAIKDAKDVAAITGIDQALLPEGLVEQFDTGMTLTEAVSSLAQKIESYWGLSRNPNAPLGYTKGIPTAMAAEILAAFVESTDVVENIVDMSEIDPDNKKTIGLYTITELDSFDPINSFPTAIEEAVLVNPTEKMFFGDDIPPVANTQLRNPAVRNTPEQKAALKAEQATEFYVHTPMVQFYETLGKDRILELMGAGTLNKELLNDNHAKSLEGKNRSVEDSYNQLFSVIEQVRAQSEDISTVPIHYAYNMTRVGRMQMLGKYNPQSAKLVREAILPTKATLDLSNQNNEDFSAFQLGLAQALDIKVHTMTREVMSDELTKLLEGNLKPAIDMMVEFNTTGSLPENAVDVLNTALGDRKSFVALMALMEYSRYLVAEDKSAFVTPLYVEADGVTNGPINAMMLMTGGLFTPDWIRNIAKGGLFIGSPNKTMNEHRSTADNNDLYQASTNALMESLGKLRSNYASNMPIQSQIDSLLSLMDLFLPDINLGENGALELKRGIAKNPLTITIYGSGARGIAGKLVSSVTDAIYERMSDVLKARAKDPNISAAMAMFGKQAASEAHAEELLARFLKDMETLTSTVPVKRKGVLELQSTGAGAKGKINPKTYTIKGEQLKALQENMLHFFVEPLRNGITQTVGESLVYSTEQLQKATQIQSVVLEDMFKQRVQEKLTEKAKDPTWKKGDFLTQKELNDIQASLNNLAPMIETGSQTFYIAGSENAEVANQVLATNLDDRMRVPMSIYAPAQAGVAGIPFMTIGTGDGMMMQTLSTMKGAPKNTLKIFDGMNIGLNDITDASRKANEAVYTSWQGNPIKNVYESYAKFMKNVDFSKLSPEALEAIGKSALEYDQRENATVDDIANAASLIERNLRNIALGVDIRHKVLDKVNLSIDQMAAVGAPYQNNGKIDLSNMTPEQQADELNKLFREELEARKQKVAKAKAEVKEEIVSEKEPVNPDFGMVGREHKASGVRILSATAIRNLAKISNLPSTQAATLAEIQKSLAAKDYKIIYGTPTQVAEYARQKNVTELTSQEMEEAQAGNIYGWTNFDDKTIYLVSPSMETLIHELVHASTFEEVYSFYQGNEVSPTSKQAIENLEGLMEQFRSLDISKDSPEMREAYADAIATIEGHLSNGFVDPAISKAAALNEFMAWGLANRALAAKQKRTSSLVQMVKDVYQAIKKLIWGRKQAPALGEDMFSNLLFNSAILMRSQPTTQAVAKDGTLFHSKAYGNNERLSQLNQTFDKLVTDYLRTDPVTEVERRGNVANALMSATRLVRDVQSRGFNMTAQEQSVFQMVTAALATEAAIDPHAMARAQELYTHVMKHLTVEHFMADPDSTNPADRYYAQQKYDTISGANLVEVDAKGRTSLLPTFLGLAMVNEELRSIIKEMPVPKADKKLGNDVDTLLTNAGTQVMESLNRRMAGDQKATNVQDSIDALSETIMAAALKRESFYDAVATPTGNFIDRANQYVTDSIERLSETVIEKADKVIANPSNVAAKGVAHLAKLTAAIASEKQGEIVAQGVMTAMNQGKVWQPFHDLVNDIVGRTKTNANVYDLIKLVKSQISQDRQQFREHLPTVIAGKFSRKLTDTEWSAMHTGLGKTDLAVLRETMSMAEIRDLLSSPKKVKDEISTLEKEIQNQAGRNWNLVQKKSKQLAQYMITGEVGNNLLRNAHAISRLLGERITNGPVADVAAIDKLITLYSLELMNKSDRGLLSELAQSEVEGMEFSIAYMVGQRTEEMRKAKGDNRTLLNHFKGYIPVENQQGVNLIIADDKEFAKLNSQSFTRIGTYQGSTGLRTGSKGYYFSPVAARAPYSQGILQNVRNTAGGVDIGTGFTLGTMVAGRITDKPTVERITKALAKGERGREPLMPIYNSKGQVVAYEQSVDPNMLKHLNQDNHFAKMVGVWRGRQVEEAKAQRFNDILIEQLHAMYEKDIKDSSANKSQYVNLLGKIDDPVLADAINLMNIETRHKAEELFGKDELWVRRDMLNDALGYRAASIGDVWTGNSRWSPSTLDTVKKMFLGAFGNKAYHVVMNAENTIQNLVKDAKTVIVVKSVVVPAVNFLANIYQMIGRGVPVKDIAVNIPRKTSEINQYIKSRLRQIDAEAELRAAEGNPNLVRKLKTEIQSITDSHRRMSIWPLIEAGEFSSIADAGISRDDLLVAEGKIHEYMEKLANKLPEKVRNAGRYALIAKDTALFQGIQKTVEYSDFIAKAIIYDDLVKRKKKSSSEALGQVTEEFVNYDRLPGRFRGYMESMGLMWFYNFKIRSIKVAMSMIRNNPVHSLIATVVPAPAMFGNVGLPIQDNMLTMLAEGRLDYSLGFGQGLRAPTLNPWFNLTH

SEQ ID NO: 42171 - protein, 23 aa, Homo sapiens
AKRKREELSNVLAAMRKAAAKKD

SEQ ID NO: 42172 - protein, 188 aa, Homo sapiens
  DOMAIN (51)..(106): Ribosomal protein L36e proteins domain identified by eMATRIX, accession number BL01190B, p-value=1.000e-40, raw score of 16.17
  DOMAIN (17)..(118): Ribosomal protein L36e domain identified by PFam, accession name Ribosomal_L36e, E-value=4.2e-63, PFam score of 223.1
AGTHLRPFSPSLSAAMALRYPMAVGLNKGHKVTKNVSKPRHSRRRGRLTKHTKFVRDMIREVCGFAPYERRAMELLKVSKDKRALKFIKKRVGTHIRAKRKREELSNVLAAMRKAAAKKDLGPSPCPLPEIKDKLDRSPGSPAVRGWVWVCRGPAVPCLVPALSHTLSGCCLVVNQKPWPAHPSRGSR

SEQ ID NO: 42173 - protein, 49 aa, Homo sapiens
FRGRCCVQRYRGCTLASACLLVGEAEAPSPVDPLERSRPYAVLRGQNLE

SEQ ID NO: 42174 - protein, 93 aa, Homo sapiens
SQLLRGLRQENRLNPRRGGCSEPRSHHCTPAWATGTPGSALAAPRTAGSAPADPRGSGPVPPPPGGCRGQGSATVTLDAASSPALQKQRGHFR

SEQ ID NO: 42175 - protein, 68 aa, Homo sapiens
  misc_feature (1)...(68): Xaa = X or * as defined in Table 2
RPVAYLLLQGWGRCCVQRYRGCTLASACLLVGEAEAPSPVDPLERSRPYAVLRGQNLDQTLHXSTHQA

SEQ ID NO: 42176 - protein, 137 aa, Homo sapiens
  DOMAIN (15)..(68): ATP P2X receptors proteins domain identified by eMATRIX, accession number BL01212A, p-value=8.615e-23, raw score of 34.89
MWIGTLKNNFMVDTFVSICFALVSGKLYQWKEPVISSVHSKVKRTAEVKEEIVEKEMKKLVHSVFNMADYTFPLQVNTCLLVGEAEAPSPRGSGWSEAGPYAVLRGQNLVLMGTIFSILLVTVILMAFCVYKPIRRR

SEQ ID NO: 42177 - protein, 48 aa, Homo sapiens
QPFCRCTQQLRRDSDHGEWAMMTMAVLLKRKGGNVGKRKRDQIVTVSV

SEQ ID NO: 42178 - protein, 185 aa, Homo sapiens
MSDAAVDTSSEITTKDLKKKEAVEEAENGRDTPANGKANEENGEQEADNEVDEEEEEGGEEDEEEEEGDGEEEDGDEDEEAESARGKLCVIDWKTSEKPKPFIQSTFDNPLQVVAYMGAMNHDTNYSFQVQCGLIVVAYKDGSPAHPHFMDAELCSQYWTKWLLRLEEYTEKKKNQNIQKPEYSE

SEQ ID NO: 42179 - protein, 130 aa, Homo sapiens
  misc_feature (1)...(130): Xaa = X or * as defined in Table 2
LQTILQGYSNQNSMVLVPKQRYRPMEQNRALRNNAAYLQKSPXADKQLQQECQDTKSMCKNHKHSYTPITDKQRAKSRVNSHSQLLQREXNTXESNLQGAXRTSSRRTTNHCSMKXKRIQTNGRTFHAHG

SEQ ID NO: 42180 - protein, 1049 aa, Homo sapiens
  DOMAIN (700)..(745): kw TRANSCRIPTASE REVERSE II ORF2 domain identified by eMATRIX, accession number DM01354N, p-value=1.000e-40, raw score of 13.17
  DOMAIN (70)..(310): Reverse transcriptase domain identified by PFam, accession name rvt, E-value=1.4e-09, PFam score of 45.3
  misc_feature (1)...(1049): Xaa = X or * as defined in Table 2
MDEFLNTYTLPRLNQEEVESLNRPITGSEIVAIINSLPRKKSPGPDGFTAEFYQRYKEELVPFLLKLFQSIEKEGILPNSFYEASIILIPKPGRDTTIKENFRPISLMNIDAKILNKIILANRIQQHIKKLIHHDQVGFIPGMQGWFNIRKSINVIQHINRTKDKNHMIISTDAEKAFDKIQQPFMLKTLKKFGIDGTYLKIRIKYLGIQLTRDVKDLFKENYKPLLNEIKEDTKKWKNIPCSWVGRINIMKMAILPKVIYRFNAIPIKLPMTFLTELEKTTLKFIWNQKRARIAKSILSQKNKAGGITLPDFKLYYKATVTKTAWYWYQKRDIHQWNTTEPSEITPHIYNHLIFDKPEKNKQWGKDSLFNKWCWENWLAIWRKLKLDPFLTPYTKINSRWIKDLNVRPKTIKTLEENLGITIQDIGMGKDFMSKTPKAMATKAKIDKWDLIKLKSFCTAKETTIRVNRQPTKWEKIFTTYSSDKGLISRIYNELKQIYKKKSDNPIKKWVKDMNRHFSKEDIYAAKKHMKKCSPSLAIREMQIKTTMRYHLTPPSLLIPRQTGSGVDLQQTPTDLQLKVLTVRRKTNKQKVHPHQNPICTSPSSKTKELEKQEQTHSKASRRQEITKIRAELKEIETQKNLQKINESRSWFLEKVNKIDRLLARLIKKKREKDQIDAIKNDKGDITTDPTEIQATIREHYKHLYANKLENLEEMDKFLDTYTLPRLNQEEVESLNRPITGSEIEAIINSLPTKKSPGPDGFTAKFYQRYKEELVPFLLKLFQSIEKEGILPNSFYESSIILIPKPGRDTTKKENXQTESTSTPKPHLYITIIKDQRTEKQEQTHSKASRRQEITKIRAELKEIETQKNLQKINESRSWFLEKVNKIDRLLARLIKKKREKDLNRCNKKXXRGYHHRSHRNTSYHQRTLXTPLRKXTRKSRRNGXIPGHIHSPKTKPGRSXISEXTNKQALKLRQXSIAYQPKRVQDQMDSQPNSTRGTRRNWYHSFXNYSNQXKKRESSLTHFMSPASSXYQSREETQPKKRILDQYP

SEQ ID NO: 42181 - protein, 178 aa, Homo sapiens
  DOMAIN (159)..(172): PROTEIN PMBA HOMOLOG TLDD TLDE AF0655 MT domain identified by eMATRIX, accession number PD02678A, p-value=4.214e-09, raw score of 6.25
  misc_feature (1)...(178): Xaa = X or * as defined in Table 2
MFQRGHISQWWVVVGALTVFTSVLDTDPMRDNKRSGSEILPFCREHGTSFTYNHAHSPLSCSPSCLFSGLALFSPENNSGFLCMTLPASFTAGNRLFSSAGQPWWIQQGFKAHAKARRLILLAFHHYCCRPFLAVELKPSPVSTPTFLFAXLLPPCSVPGAILHESFGEAITWLDAEK

SEQ ID NO: 42182 - protein, 115 aa, Homo sapiens
  misc_feature (1)...(115): Xaa = X or * as defined in Table 2
QTHSQHYTEWGKVESIPPENWNNTRMPIFTISIQHIIRSSSESNQTRERNQGHPNGXRGSQTVAFCXRYDRIPRKPXRLIQKTPRTASAADTQANRVWSGPPASSNRPAAEGPDC

SEQ ID NO: 42183 - protein, 87 aa, Homo sapiens
  misc_feature (1)...(87): Xaa = X or * as defined in Table 2
ENKIPRNPTYKGCEGPLQGELQTAAQGNKRGHKHMEKHSRLMDRKNQYPSAADTQANRVWSGPPANSNRPAAEGPDXPGQNFQYHVE

SEQ ID NO: 42184 - protein, 95 aa, Homo sapiens
LTVSCPCSRMLFLTTDVLLPLMFIKKLGANVASPSSKKPLFVIRLVITTLLPLACGTLPTSSVSRTTFFRTMLPQAPEFAPPSTGTESHYYCCIW

SEQ ID NO: 42185 - protein, 92 aa, Homo sapiens
  misc_feature (1)...(92): Xaa = X or * as defined in Table 2
YPGKQGLEWTSSKLQQTCRKYRERHKDTPTRRATPRRHNCQVHQSXNEGKNVKGSQRERSGYSQREAHQTNSRSLGRNSTSQKRVGASIQRS

SEQ ID NO: 42186 - protein, 78 aa, Homo sapiens
  misc_feature (1)...(78): Xaa = X or * as defined in Table 2
EASRGRIRQQHLPFCNICCSAASTGDTQANRVWSGPPANSNRPAAEGLDCXKENXQTERTSTPKPDLYITIIKDQSLL

SEQ ID NO: 42187 - protein, 91 aa, Homo sapiens
  misc_feature (1)...(91): Xaa = X or * as defined in Table 2
EASRGRIRQQHLPFCNICCSAASTGDTQANRVWSGPPANSNRPAAEGLDCXKENXQTERTSTPKPDLYITIIKDQRLIPGLFTSPWISARI

SEQ ID NO: 42188 - protein, 273 aa, Homo sapiens
  DOMAIN (182)..(229): kw TRANSCRIPTASE REVERSE II ORF2 domain identified by eMATRIX, accession number DM01354V, p-value=1.000e-40, raw score of 12.97
  misc_feature (1)...(273): Xaa = X or * as defined in Table 2
XYWKKKGKREKSKKSRVEHNRSQRAEFDPAGVKRVLALVHSRSCLVCLHSFLQGVETATLLANLSVPVVVKRFLMPICLRPVARAGCFLLVQLTGFPGAISNWEAPPSKGQLTPHTAGCPSEMKLPEEGSLSDICCSAIFAVLQPLLVIPRETGSGVDLQQTPTDLQLRQTESQIMSELPFTVASKRIKYLGIQLTKDVKDLFKEIYKPLLSEIKEDTNKWKSIPCSWLGRINIVKMAILPKVTYIFNAIHIKLPMTELEKTKVHMEPEKSLH

SEQ ID NO: 42189 - protein, 120 aa, Homo sapiens
  misc_feature (1)...(120): Xaa = X or * as defined in Table 2
VDRSRLQKVSNNKLVQAKGGCSNPLQGSXKLDNPKDANSRQQPERTWKWIFPQPHRXGAFGPRHCXESHLYQFGLDLLNSAGSGIGKNEVQEQKRAEVGARAAPEKELPEALSWFLKVLW

SEQ ID NO: 42190 - protein, 297 aa, Homo sapiens
MKLPEEGSGSNICRSSIFAVLQPPLVIPRKTGSGVDLQQTPTDLQLRVLTITRKTNKQKGHPHQNPICTSPSSKTKEMQNALDSLSNRIEQVEERISEFKDKVFKLILFNKDKDKRMRKYEQSFQEVWDYVKQPNLRIIGVAKEEEKSKSLENIFGGIIEENFPGLSRDLDIQIQEAQRTPGKFIAKRSSPRHIVIRFSKVKTTERILRAVRQKHQVTYKGKLNRLTVDFSEETLQARRGACRPLTGVPALSHTYTERHLTNTRAIHLKWYQDRAKIKPSSACKVEHSKSQHLPEFR

SEQ ID NO: 42191 - protein, 283 aa, Homo sapiens
  DOMAIN (118)..(159): kw TRANSCRIPTASE REVERSE II ORF2 domain identified by eMATRIX, accession number DM01354I, p-value=1.000e-40, raw score of 15.55
  misc_feature (1)...(283): Xaa = X or * as defined in Table 2
XQTGSGVDLQQTPTDLQLRVLTIRRKTNKQKGHPPKPHLYVTIIKDQRTLHPKSTEYTFFSAPHPTYSKIDHIVGSKALLSKCKRTEIITNCLSDHSAIKLELRIKKLTQNRSTTWKLNNLLLNDYWVYKEMKAEIKMFFETNENKDTTYQNLWDTFKAMYSGKFMALNAHKRKQQRSKIDTLISQLTELEKQEQTHSKASRRQETTKIRAELKEIETQKTLQKINESRSWFFEKINKIDRTLARLIKKKREKNQIDTIKNDKGDITTDPTEIQTTVYIIWYX

SEQ ID NO: 42192 - protein, 119 aa, Homo sapiens
  misc_feature (1)...(119): Xaa = X or * as defined in Table 2
LLEGKLTNKKDIHIKTPSVRHHHQRPKPKISLSXXATSAKSQDTKSMCKNHKHSYTTITDKQRANHEXTPIHNCFKESKIPRNPTYKRCXGRSSRRTANHCSRKXKRTQTNGRTFHTHG

SEQ ID NO: 42193 - protein, 418 aa, Homo sapiens
  DOMAIN (168)..(206): Synapsins proteins domain identified by eMATRIX, accession number BL00415O, p-value=8.883e-10, raw score of 3.44
MPYSQYKFTVLICFHDADKDISETGKKKKFNWTYNFTWLMRHQNHGARQNALLTWQQQEKNEEEAKAETPDKPIRSFISMTNMKIQGTLFYTRIYFVYYTAVIQCNSWYMVPGRGVQKSRRDVDGLREARSCLSGVRDSRLSALGGLGGPSAWAFGGSGRMPSAGIRAKRMQNQGWQPRDVPDPQPFPLPKRTPCSPDPRGWAGACDDGSAGPRARGWARKWLPPQQHAVQVSAVLGNTQQRSDGSERGMYLGHFWRGEGSRGSNGSLRREGISFCLRLTSKSVIGPCQRRDEKDFGCLLGRVAAAHLGGRSAALGATEAKLKQALAGMGFPNSPSEPKTKRNPEPWFRFSSFSHRPRPLPLALCPRTRHVPLSSLTLQVCFSISKPVGKARKLRKTTRERGFWGETPRPRVESTLRF

SEQ ID NO: 42194 - protein, 514 aa, Homo sapiens
  DOMAIN (162)..(195): Chloramphenicol acetyltransferase proteins domain identified by eMATRIX, accession number BL00100E, p-value=5.755e-22, raw score of 15.41
  DOMAIN (175)..(198): Chloramphenicol acetyltransferase domain identified by PFam, accession name CAT, E-value=9.2e-16, PFam score of 64.4
  misc_feature (1)...(514): Xaa = X or * as defined in Table 2
YWRCNGFLSXYAEAAEEIVDCITESLSILKTPLPKKMNEEMLCQEFGRFGPLASVKIMWPRTDEERARERNCGFVAFMNRRDAERALKNLNATAFRPALSHFPSLPMDTTSQIPKHPVTVSSTNKLILIIKTHFQAQSSLNQNIHPMDPSHGIQYSAFSPSTPNPSHPALPXPLAIQVHHAVCDGFHVGRMLNELQQYCDEWQRDKLEEILRGLTPRKNDIGDAMVFCLNNAEAAEEIVDCITESLSILKTPLPKKMNEEMLCQEFGRFGPLASVKIMWPRTDEERARERNCGFVAFMNRRDAERALKNLNATAFRPALSHFPSLPMDTTSQIPKHSSHRQFNKQAHSDHQDSLSGPVQSESKYPSHGSIPWDSILSLLTLNTQPIPPSLALTHMEMESGLHFHCPFTASPPSAVPPPELEKTTLKFIWNQKRARIANSILSQKNKAGGITLPDFKLYYKATVTKTAWTGSPTAIRQARTTRQEKEMKGIQIGKEEVKLSLFTDDVNLQVRENK

SEQ ID NO: 42195 - protein, 168 aa, Homo sapiens
MEDVHLNEPKQESSADLLQNIINIKNECSPVSLNTVQVSWLNPVVVPQSSPAEQCQDFHGGQVFSPPQKCQPFQVRGSQQMIDQASLYQYSPQNQHVEQQPHYTHKPTLEYSPFPIPPQSPAYEPNLFDGPESQFCPNQSLVSLLGDQRESENIANPMQTSSSGQAAK

SEQ ID NO: 42196 - protein, 1028 aa, Homo sapiens
  DOMAIN (884)..(928): XPA protein domain identified by eMATRIX, accession number BL00752B, p-value=9.703e-10, raw score of 19.17
  DOMAIN (427)..(481): Surp module domain identified by PFam, accession name Surp, E -value=1.7e-23, PFam score of 91.5
ADKTPGGSQKASSKTRSSDVHSSGSSDAHMDASGPSDSDMPSRTRPKSPRKHNYRNESARESLCDSPHQNLSRPLLENKLKAFSIGKMSTAKRTLSKKEQEELKKKEDEKAAAEIYEEFLAAFEGSDGNKVKTFVRGGVVNAAKEEHETDEKRGKIYKPSSRFADQKNPPNQSSNERPPSLLVIETKKPPLKKGEKEKKKSNLELFKEELKQIQEERDERHKTKGRLSRFEPPQSDSDGQRRSMDAPSRRNRSSGVLDDYAPGSHDVGDPSTTNLYLGNINPQMNEEMLCQEFGRFGPLASVKIMWPRTDEERARERNCGFVAFMNRRDAERALKNLNGKMIMSFEMKLGWGKAVPIPPHPIYIPPSMMEHTLPPPPSGLPFNAQPRERLKNPNAPMLPPPKNKEDFEKTLSQAIVKVVIPTERNLLALIHRMIEFVVREGPMFEAMIMNREINNPMFRFLFENQTPAHVYYRWKLYSILQGDSPTKWRTEDFRMFKNGSFWRPPPLNPYLHGMSEEQETEAFVEEPSKKGALKEEQRDKLEEILRGLTPRKNDIGDAMVFCLNNAEAAEEIVDCITESLSILKTPLPKKIARLYLVSDVLYNSSTKVVNASYYRKFFETKLCQIFSDLNATYRTIQGHLQSENFKQRVMTCFRAWEDWAIYPEPFLIKLQNIFLGLVNIIEEKETEDVPDDLDGAPIEEELDGAPLEDVDGIPIDATPIDDLDGVPIKSLDDDLDGVPLDATEDSKKNEPIFKVAPSKWEAVDESELEAQAVTTSKWELFDQHEESEEEENQNQEEESEDEEDTQSSKSEEHHLYSNPIKEEMTESKFSKYSEMSEEKRAKLREIELKVMKFQDELESGKRPKKPGQSFQEQVEHYRDKLLQREKEKELERERERDKKDKEKLESRSKDKKEKDECTPTRKERKRRHSTSPSPSRSSSGRRVKSPSPKSERSERSERSHKESSRSRSSHKDSPRDVSKKAKRSPSGSRTPKRSRRSRSRSPKKSGKKSRSQSRSPHRSHKKSKKNKH

SEQ ID NO: 42197 - protein, 136 aa, Homo sapiens
MPQRYSSRRATPRCIIVRFTKVEMKEKMLRAAREKGQVTHKGNPIRLTADLLVKTLQARREWGPIFNILKEKNFQPRISYPAKLSFISEGEIKSFTDKQMLRDFGTTRPALKELLKEALNMERNNQYQPLQKHVRL

SEQ ID NO: 42198 - protein, 327 aa, Homo sapiens
  misc_feature (1)...(327): Xaa = X or * as defined in Table 2
NPGKQGLEWTSSQTPADLQLRVLTVRRNTNKQKGHPHQNPICTSPSSKTKEVENLEKRLDKWLTRLTNVEKSLNDLMELKTMARELHDEGTSFSSQFDQLEERVPVMEDQMNEMKQEEKFREKRMKRNEQSLQEIRDYVKRPNLRLIGVPESDGEKEPSWKTLCRILSRRTSPAXQGRPTFKFRKYRECHKDTPQGEQLQDTXLSDSPKLKXRKKYXGQPERKKYRLPSANTKTSLRKXTRKSRRNGXITGHIHPPKTKPGRSXIPEXTNSRLXNXGNNXXPANQKKSRTRRIHSQILPEAQRGAGTIPSETIPINGKRGNPPKLIL

SEQ ID NO: 42199 - protein, 740 aa, Homo sapiens
  DOMAIN (116)..(148): Bacterial-type phytoene dehydrogenase proteins domain identified by eMATRIX, accession number BL00982A, p-value=5.700e- 09, raw score of 18.41
PPLVIPRQTVSGVDLQQTPTDLQLRVLTLRRKTSKQKGHTHQNPICMSPSSRTKGRQRDKLEEILRGLTPRKNDIGDAMVFCLNNAEAAEEIVDCITESLSILKTPLPKKACAPRVVSGAGPAGTWLALGAGAAFRPGLHGAAGGHPPGRGEVGGVRTRRTRPPRAPDRATGVSSPPGPASAGNPPKSYRVHVHKVQVCYIGIHVPCWFAAAVKLSCTLDICPNAMVSAARQVPTGAGTPVRRQEGSIEVYEDAGSHYLCLLKARTQGQALLRWDLRGDTQSPEKLYMPKTIKETSLSTYHVPGITLNDRSIINKIDPGVEESPLDLHVCHGNNYVDEKPALLLLSGKLGCPSLTSCYSNCLSYGNRCRLLQELVVNQHVEQQPHYTHKPTLEYSPFPIPPQSPAYEPNLFDGPESQFCPNQSLVSLLGDQRESENIANPMQTSSSVQQQNDAHSHSSSMMPSSACEAMVGHEMASDSSNTSLPFSNMGNPMNTTQLGKSLFQWQVEQEENKLANISQTQFLSKDADGDTKTAAQAGVWRNQVAELGWRRKIFDLDLNAAGDQVAAERVAETNSLELSQGSGTFPSGYYYKDQWRPRKFKMRQFNDPDNITECLQRKVVHLFGDSTISQWFEYLTTFVPEREEERPQKETILQNCIFNCNQTVVAKSPYNKGMKSQRSDPLVIVEDSGNLMLPGDKKLDIPYPLGSSQQSCRVLPGKTTTKRIPFKFQVRKTQALIRSSG

SEQ ID NO: 42200 - protein, 1492 aa, Homo sapiens
  DOMAIN (237)..(278): kw TRANSCRIPTASE REVERSE II ORF2 domain identified by eMATRIX, accession number DM01354I, p-value=1.000e-40, raw score of 15.55
  DOMAIN (402)..(654): Reverse transcriptase domain identified by PFam, accession name rvt, E-value=3e-55, PFam score of 197.0
  misc_feature (1)...(1492): Xaa = X or * as defined in Table 2
MSDAEDERFLQFQLRYRVYLTGDCRTVGAGQWVQRTEREPKQGEALPHPGSARGWGVPFPRDDGWHLENRVTPTLILRFSHSLSKQHTRRPYSAPGSEGPTPTEPCSLLAQQSEIKLQDGSEAGGGPLLLIPRQTGSGVDLRQTPTDMQLRVLTVRRKTNKQKGQPHQNPICTSPSSKTKAPHHTYSKTDHIVGSKALLSKCKRSEIITNCLSDHSAIKLELRIKKRIQNRSTTWKLNNLLLNDYCVHNEIKAEIKMFFETNENKDTTYQNLWDTFKAVCRGKFRALRAHKRKQERSKIDTLTSQLKELEKQEQTHSKASRRQEVTKIRAELKETETQKKTFKKSMNPGAEIQTTIREYYKHLYANKLENLEEMDKFLDIYTLPRLNQEEVESLNSPITGSEIEAIINSLTTKKIPGPDGFTAEFYQRYKEEQQHINKLIHHDQVGFIPGMQDWFNIRKSINAIQHINRTNDKNHMIISIDAEKAFDKIQQPFMLKPLNKLGIDGTYLKIIRAIYDKRTANIILNGQKLEAFPLKTGTRQGCPLSPLLFNIVLEVLARAIRQEKEIKGIQLGKEEVKLSLFADDMIVYLENPTVSAQNLLKLISNFSKVSGYKINVQKSQAFLYTNNRQRESQIMSELPFTTASKRIKYLGIQLTRDVKDLFKANYKPLLKEIKEDTNKWKNIPCSWVGRINIVKMAILPKVIYRFSAIPIKLPMTFFTELEKTTLKFIWNQKRARIAKSILSQKNKAGGVTLPDFKLYYKATVTKTAWYWYQNRDTDQWNRTEPSEIMPHIYNYLIFDKSDKNKQWGKDSLFNKWCWENWLAICRKLKLDPFLTPYTKINSRWIKDLNVRPKTIKILEENLGNTIQDIVVGKDFMSKTPKAMAAKAKIDKWDLMKLKSFCTAKEITIRVNRQPTKWEKIFAIYSSDKGLISRIYNELKQIYKKKANNPIKKWAKDMNRYFSKADIHEADEHMKKSSTSLIIREMQIKITLRYHLTPPSLLIPRQTGSGVDLQQTPTDLQLKVLTVRRKTNKQKVHPHQNPICTSPSSKTKELEKQEQTHSKASRRQEITKIRAELKEIETQKNLQKINESRSWFLEKVNKIDRLLARLIKKKREKDQIDAIKNDKGDITTDPTEIQATIREHYKHLYANKLENLEEMDKFLDTYTLPRLNQEEVESLNRPITGSEIEAIINSLPTKKSPGPDGFTAKFYQRYKEELVPFLLKLFQSIEKEGILPNSFYESSIILIPKPGRDTTKKENXQTESTSTPKPHLYITIIKDQRTEKQEQTHSKASRRQEITKIRAELKEIETQKNLQKINESRSWFLEKVNKIDRLLARLIKKKREKDLNRCNKKXXRGYHHRSHRNTSYHQRTLXTPLRKXTRKSRRNGXIPGHIHSPKTKPGRSXISEXTNKQALKLRQXSIAYQPKRVQDQMDSQPNSTRGTRRNWYHSFXNYSNQXKKRESSLTHFMSPASSXYQSREETQPKKRILDQYP

SEQ ID NO: 42201 - protein, 147 aa, Homo sapiens
  DOMAIN (113)..(135): Ubiquitin carboxyl-terminal hydrolases family 2 proteins domain identified by eMATRIX, accession number BL00972E, p-value= 1.000e-11, raw score of 20.72
  DOMAIN (80)..(144): Ubiquitin carboxyl-terminal hydrolase family domain identified by PFam, accession name UCH-2, E-value=2.9e-15, PFam score of 64.1
MKAPWTGQYRYISPKDLKVTIGKINYQFAGYSQDSQEFFLFLMDGLREDLNKTDNRKTYKEENNDHLNDFKAAEHAWQKHKRLYESIIVALFQDHCGGLDGGHYTAYCKNAAKQRWFKFDDHEVSDISVSSVKSSAAYILFYTSLGP

SEQ ID NO: 42202 - protein, 1128 aa, Homo sapiens
  DOMAIN (487)..(540): Clathrin light chain proteins domain identified by eMATRIX, accession number BL00224B, p-value=8.962e-10, raw score of 16.94
  DOMAIN (186)..(309): Rhodanese-like domain identified by PFam, accession name Rhodanese, E-value=1.5e-19, PFam score of 78.4
  misc_feature (1)...(1128): Xaa = X or * as defined in Table 2
FIMPAVASVPKELYLSSSLKDLNKKTEVKPEKISTKSYVHSALKIFKTAEECRLDRDEERAYVLYMKYVTVYNLIKKRPDFKQQQDYFHSILGPGNIKKAVEEAERLSESLKLRYEEAEVRKKLEEKDRQEEAQRLQQKRQETGREDGGTLAKGSLENVLDSKDKTQKSNGEKNEKCETKEKGAITAKELYTMMTDKNISLIIMDARRMQDYQDSCILHSLSVPEEAISPGVTASWIEAHLPDDSKDTWKKRGNVEYVVLLDWFSSAKDLQIGTTLRSLKDALFKWESKTVLRNEPLVLEGGYENWLLCYPQYTTNAKVTPPPRRQNEEVSISLDFTYPSLEESIPSKPAAQTPPASIEVDENIELISGQNERMGPLNISTPVEPVAASKSDVSPIIQPVPSIKNVPQIDRTKKPAVKLPEEHRIKSESTNHEQQSPQSGKVIPDRSTKPVVFSPTLMLTDEEKARIHAETALLMEKNKQEKELRERQQEEQKEKLRKEEQEQKAKKKQEAEENEITEKQQKAKEEMEKKESEQAKKEDKETSAKRGKEITGVKRQSKSEHETSDAKKSVEDRGKRCPTPEIQKKSTGDVPHTSVTGDSGSGKPFKIKGQPESGILRTGTFREDTDDTERNKAQREPLTRARSEEMGRIVPGLPSGWAKFLDPITGTFRYYHSPTNTVHMYPPEMAPSSAPPSTPPTHKAKPQIPAERDREPSKLKRSYSSPDITQAIQEEEKRKPTVTPTVNRENKPTCYPKAEISRLSAFLRFGTLNPCFWEVPGPSSLPGPSRPXGNTLVIXTLNIASPPCNRPPHLADYFQPETVIQDDINRSNLLGHKGEVAEEFGIIMKALWTGQYRYISPKDFKITIGKINDQFAGYSQQDSQELLLFLMDGLHEDLNKADNRKRYKEENNDHLDDFKAAEHAWQKHKQLNESIIVALFQGQFKSTVQCLTCHKKSRTFEAFMYLSLPLASTSKCTLQDCLRLFSKEEKLTDNNRFYCSHCRARRDSLKKIEIWKLPPVLLVHLKRFSYDGRWKQKLQTSVDFPLENLDLSQYVIGPKNNLKKYNLFSVSNHYGGLDGGFYTAYCKNAAGQRWFKFDDHEVSDISVSSVKSSAAYILFYTSLGPRVTDVAT

SEQ ID NO: 42203 - protein, 203 aa, Homo sapiens
  DOMAIN (13)..(52): Ribosomal protein L13e proteins domain identified by eMATRIX, accession number BL01104A, p-value=8.981e-31, raw score of 14.65
  DOMAIN (7)..(177): Ribosomal protein L13e domain identified by PFam, accession name Ribosomal_L13e, E-value=1.1e-72, PFam score of 254.8
MAPSRNGMILKPHFHKDWQRRVATWFNQPTRKIRRLRALQAKAHRIGPRHASGPIRPIVRCTPPSLPAPVVPYHTEAPVGRGFSLEELRVAGIHKKVAQIVGIAVDPRRRNKSIAVPAGQRSPRTPKKGDSSAEELKLATQLTGPVMPTRNVYKKEKARIVTEEEKNVKAFASLCMARANARLFGIRAKRAKEAAEQNVEKKK

SEQ ID NO: 42204 - protein, 247 aa, Homo sapiens
  DOMAIN (39)..(78): Ribosomal protein L13e proteins domain identified by eMATRIX, accession number BL01104A, p-value=5.404e-35, raw score of 14.65
  DOMAIN (33)..(230): Ribosomal protein L13e domain identified by PFam, accession name Ribosomal_L13e, E-value=9.4e-42, PFam score of 147.9
  misc_feature (1)...(247): Xaa = X or * as defined in Table 2
LRVDNAPAHASGLFFCAGAAGTVLFAMAPSRNGMVLKPHFHKDWQRRVATWFNQPARKIRRRRPRQAKARRIGPAPRGGGPIRPIVRCPTGRVHNGSWRPGRGFQPGRSSRVAGHSPRKVAPDPSGISVDPKRRETSSHGSPLQAQRASGLKEYRSQTQSSSPRKPSASPLXGDSSAEELKLATQLTGPVMPVRNVYKKEKARVITEEVKNFKAFASLRMARANARLFGIRAKRAKEAAEQDVEKKK

SEQ ID NO: 42205 - protein, 109 aa, Homo sapiens
MDVFAGGLLRHGSGSQNGINKAVTDFKTLRTKAHGTQQELHTAGIIIGMQAICSPAVCNSISNPVTKEMLFEFIDRCTAASQGQKRKHHLDPDTELMPPPPPKRPRPLT

SEQ ID NO: 42206 - protein, 252 aa, Homo sapiens
MARSQLTATSASWVQVILLPQPPKNTGAQKHWPTEGEAKEHCVSDDSESTLKAGGQHRIKQGGNSSSGAREPAPNILNSRRSWWTLVAKAAAVTVIIRVILMAAILRGTLAKEVNWWVLDLTDFKNEAADPRARHKDSPSPHQTQEPSWLHSVDPTPGPQVELPASPTMCAGTSQPLVSRWDWSPWSRKRHIIFAPSSHNKYAGESFPGIYDAIFDIENKANSRLAWKEVKKHISIAAFTIQAAAGTLKEVL

SEQ ID NO: 42207 - protein, 73 aa, Homo sapiens
MPDRLRSPIDHHGCRALGNSHSGGLSSPTCDGWQTLMPMGPAVLSLTLFITTINHQQHNLTFADLSTGKKIKY

SEQ ID NO: 42208 - protein, 75 aa, Homo sapiens
FASGCVALPVLMNIKAVIEQRQCTGVWNHKDELPDLGAAAGSKRPTCVIMVKPHEEYQEAYDECLEEVQSLPLPL

SEQ ID NO: 42209 - protein, 189 aa, Homo sapiens
  DOMAIN (2)..(37): Ribosomal protein L15e proteins domain identified by eMATRIX, accession number BL01194A, p-value=7.968e-32, raw score of 18.70
  DOMAIN (2)..(143): Ribosomal L15 domain identified by PFam, accession name Ribosomal_L15e, E-value=1.8e-40, PFam score of 147.9
MGAYKYIHELWRKKQSDVMSFLLRVRCWQYRQLSALHRAPRPTRPDKVHQLGYKIKQGYVIYGIRILRDGRKCSVPKGATYGKPVHHAIGRNPDTQWITKPVHKHKEMRGLACAGQKSHGLGKGRPPQLGNDKAIGVVRSLLGQDVNPQQLLNHGSWSLSMSRKQNKRRLQRNQLPALPDCNQALSSAF

SEQ ID NO: 42210 - protein, 77 aa, Homo sapiens
  DOMAIN (2)..(37): Ribosomal protein L15e proteins domain identified by eMATRIX, accession number BL01194A, p-value=9.100e-17, raw score of 18.70
MGAYKYIQELWRKKQSDVMRFLLRGSPPHPGLIKRADWATRPSKVTLYIGFVFAVVAENAQFPKGATLRQACPFMGV

SEQ ID NO: 42211 - protein, 94 aa, Homo sapiens
QSARLCGCRTLRASEMNPVPQMEMQKSPVFCVAHAGSCGPELFLFGHLGSSPGCWCPSVAQAGVQWQDWLTATSTSWDQAILPSHPPGAGTKDS

SEQ ID NO: 42212 - protein, 314 aa, Homo sapiens
  DOMAIN (160)..(207): kw TRANSCRIPTASE REVERSE II ORF2 domain identified by eMATRIX, accession number DM01354V, p-value=4.692e-17, raw score of 12.97
MAGAPPPASLPPCSLISDCCASSQRDSVGSSEKRGIRVGVTRFSRCPPSPLSLTRKGNSLTPCASPICLSWSHDGCSNSRSYIYITPSYLTTARTSFPALEILARAIRQEKEIKGIQLGKEEVKLSLFADDMIVHLENPIISAQNLGQTESQIMSGLPFKIATKRIKYLGIQLTRDVRDLFKNYKPLLNELKEGTNKWKKNILSSWIGRINIVKMAILPKKWNFKPKGGNLEFEGTSRYHLAEAFALVPKCHSHILCASPNYNLAKAVATNFSLLRISSIVQFPLMSENTWTQGEQGENMDTGRGTSPMGPVGG

SEQ ID NO: 42213 - protein, 96 aa, Homo sapiens
  misc_feature (1)...(96): Xaa = X or * as defined in Table 2
DPPSQKLKTLRKDXTNGXLQXPMKRSPXMTXWSXKPXHENYVTHAQASVPDSINWKKGYQXLKIKXMKXSKKRSLEKKEXKETNKASKKYGTMXKD

SEQ ID NO: 42214 - protein, 123 aa, Homo sapiens
MAGALPPASLPPCSLISDCCASNERSSMGIGPSEPCAGYNLLVCRLTKKKRIRSTNKVWDYVKRPNLRIIGVPEEEENSKSCENILGEIIEENFPSLATDLDIQIQEAQRTPQKFITERSLPS

SEQ ID NO: 42215 - protein, 36 aa, Homo sapiens
  misc_feature (1)...(36): Xaa = X or * as defined in Table 2
MVGAPTPASLLPCSLISDCCASNERGSVGVGPSKPX

SEQ ID NO: 42216 - protein, 235 aa, Homo sapiens
MAGAPPPASLPPCSLISDCCASSQRDSVGVGPSEPGARYNLVVCRFLSRLEKRGIRVGVTRFSRCRSSPLSLTRKGNSLTPCASQAGSCGPELFLFGHLGSSQFILCGVNWKQLQQEYSQENRTHPQPSYRKPVGKVQYSGGSDPIFQVPSVTPFFDSERELPDPLHFPNKGGQADGNMGQGEDIATTGDGEAVSFGKKTSSEFTNSVSSASSGSSNTSPFQVSGSHAFPINAFI

SEQ ID NO: 42217 - protein, 277 aa, Homo sapiens; identical to SEQ ID NO: 37953

SEQ ID NO: 42218 - protein, 434 aa, Homo sapiens
  DOMAIN (9)..(171): Protein of unknown function DUF84 domain identified by PFam, accession name DUF84, E-value=3e-99, PFam score of 343.1
MLIMHQVVCATTNPAKIQAILQAFHEIFGEGSCHIASVAVESGVPEQPFGSEETRAGARNRVANARRLLPEADFWVAIEAGIDGDSTFSWVVIENASQRGEARSATLPLPAVILEKVREGEALGPVMSRYTGIDEIGRKEGAIGVFTAGKLTRASVYHQATGLSAVGLLEFARGPLQTLFAWVSAAVAAEQRIFVNCECCCPVVPLEVLSQRSTWPSSLLPCSLISDCCASNQQDSVGIGPSEPGAGYNLPVRRFLSPSEKRSIRVGVTRFSSSGCMTLSKNLCALRRESAVIVGLCIGTQCCSAIAESNPGQNSANTHGGAFKLALARVSFHAADKDIPETGKKKRFNWTYSFTWLRRPQNHGGRRKPLLIWQRQEKMRKTQKRKPLINPSDLVRLIHYHENNMGETAPMIQIISHLVPPTTTRGNYGSYNSN

SEQ ID NO: 42219 - protein, 395 aa, Homo sapiens
MSEGNAAGRPARQGPDLLLTGARGSSGGGGLPSPPAVPSIRSRDLTLGGVKKKTFTPNIISRKIKEEPKEEVTVKKEKRERDRDRQREGHGRGRRRPEVIQSHSIFEQGPAEMMKKKGNWDKTVDVSDMGPSHIINIKKEKRETDEETKQILRMLEKDDFLDDPGLRNDTRNMPVQLPLAHSGWLFKEENDEPDVKPWLAGPKEEDMEVDIPAVKVKEEPRDEEEEAKMKAPPKAARKTPGLPKDVSVAELLRELSLTKEEELLFLQLPDTLPGQPPTQDIKPIKTEVQGEDGQVVLIKQEKDREAKLAENACTLADLTEGQVGKLLIRKSGRVQLLLGKVTLDVTMGTACSFLQELVSVGLGDSRTGEMTVLGHVKHKLVCSPDFESLLDHKHR

SEQ ID NO: 42220 - protein, 130 aa, Homo sapiens
SPGSPVIPSQTPLQSYAIQAVPLEVQAASSSDVQPWSYNIQLLLLFFLCWLSLTEGQVGKLPICKSERVQLLLGKVTLDVTMGTACSFLQELVSVGLGESRTGEMIDLGHVKHKLLCSPDFESLLDHKHW

SEQ ID NO: 42221 - protein, 247 aa, Homo sapiens
  misc_feature (1)...(247): Xaa = X or * as defined in Table 2
KGKKKVINQISLGQRMRLSQSSHGKVQACQVPFHPNAPPAVQFQSRELQSGSRPRSCGEKATRCLRQGPREVPLPKNAWAXQRKQEKKRSRKGSGREPGLRRPPNAQARDRSSRAPATHRKELKPEREHISCSRSHIRYQEWSVLRDTVHRNLVLDTKRHPALILVEYKERTSSPATEQSCMENDFDELREEGFRRSVITNFSELKEDVQTHHKEAKNLEKRLDKWLTRINSVEKSLNDWMELKTMA

SEQ ID NO: 42222 - protein, 32 aa, Homo sapiens
WWFRNRQNPACGFSVRDPQLVFSNSVKKVLVA

SEQ ID NO: 42223 - protein, 64 aa, Homo sapiens
  misc_feature (1)...(64): Xaa = X or * as defined in Table 2
ERELPDPLRFPSEGNASALLSASRTVRASTDLRPLSGTPXRDEPGTSDGNAEITRLLRRSGWEL

SEQ ID NO: 42224 - protein, 470 aa, Homo sapiens
  DOMAIN (147)..(199): Tubulin subunits alpha beta, and gamma proteins. domain identified by eMATRIX, accession number BL00227C, p-value=1.000e- 40, raw score of 25.48
  DOMAIN (37)..(458): Tubulin/FtsZ family domain identified by PFam, accession name tubulin, E-value=1.2e-262, PFam score of 886.0
GRWARGCLSVGGGRAGSLRVCSSFSRFCCRPNPALAMREIVLTQTGQCGNQIGAKFWEVISDEHAIDSAGTYHGDSHLQLERINVHHHEASGGRYVPRAVLVDLEPGTMDSVRSGPFAEVFRPDNFISRQCGAGNNWAKGRYTEGAELMESVMDVVRKEAESCDCLQGFQLTHSLGGGTGSGMGTLLLSKIREEYPDRIINTFSILPSPKVSDTVVEPYNATLSVHQLIENADETFCIDNEALYDICSRTLKLPTPTYGDLNHLVSATVSGVTTCLRFPGQLNADLRKLAVNMVPFPRLHFFMPGFAPLTSQGSQQYRALTVAELTQQMFDAKNMMAARDPRHGCYLTAAAIFRGRMPMREVDEQMFNIQDKNSSYFADWLPNNIKTAVCDIPPWGLKMSVTFTGNNTAVQELKRVSEQFTATFRRKAFLHWYTGEGMDEMEFTEAESNMNDLVSEYQQYQDATAEGEGV

SEQ ID NO: 42225 - protein, 400 aa, Homo sapiens
  DOMAIN (140)..(194): Tubulin subunits alpha beta, and gamma proteins. domain identified by eMATRIX, accession number BL00227D, p-value=1.000e- 40, raw score of 18.46
  DOMAIN (75)..(268): Tubulin/FtsZ family domain identified by PFam, accession name tubulin, E-value=1.1e-106, PFam score of 367.9
MLHGRARLLLAVTLHGRALFLLPMSVVGAEVVHKHDADEAQALLEKKSAAATRILNPWLKTLTFSGTNVVKNKWIREEYPEWIINTLSILLLPKVSDTVVEPYNATLSVHQLIENADETFCIDNEALYDICSRTLKLPTPTYGDLNHLVSATMSGVTTCLRFPGQLNADLRKLAVNMVPFPRLHFFMPGFAPLTSRGSQQYRALTVAELTQQMFDAKNMMAACEPRHGRYLTVAAIFTGRMPMKEVDEQMFNIQDKNSSYFAEWLPNNGLVSGNQAAITVFTSFWRSQSRINRFGAIGKAIATAPVQFPAGTSVAPHLEKTPGLSSRSPFKRGRLSDSTRQIGGCSGALAPQFPQDDLGAFLDFELPWIRSRTPDFARSLWEMKLSGLKTCPKGPERMQK

SEQ ID NO: 42226 - protein, 200 aa, Homo sapiens
  DOMAIN (24)..(166): Lipocalin / cytosolic fatty-acid binding pr domain identified by PFam, accession name lipocalin, E-value=9.7e-22, PFam score of 79.0
MKTLFLGVTLGLAAALSFTLEEEDITGTWYVKAMVVDKDFPEDRRPRKVSPVKVTALGGGKLEATFTFMREDRCIQKKILMRKTEEPGKYSAYGGRKLMYLQELPRRDHYIFYCKDQHHGGLLHMGKLVGRNSDTNREALEEFKKLVQRKGLSEEDIFTPLQTAQQPPGLHLQSPPYHQTQSPDHLDLPSSHDPSLLPPT

SEQ ID NO: 42227 - protein, 221 aa, Homo sapiens
  DOMAIN (24)..(187): Lipocalin / cytosolic fatty-acid binding pr domain identified by PFam, accession name lipocalin, E-value=6e-17, PFam score of 62.5
MKTLFLGVTLGLAAALSFTLEEEDITGTWYVKAMVVDKDFPEDRRPRKVSPVKVTALGGGNLEATFTFMREDRCIQKKILMRKTEEPGKYSACEPLPDPPLPMPNPGCTSPTADGGRKLIYLQELPGTDDYVFYCKDQRRGGLRYMGKLVGRNPNTNLEALEEFKKLVQHKGLSEEDIFMPLQTAQQPPGLHLQSPPYHQTQSPDHLDLPSSHDPSLLPPT

SEQ ID NO: 42228 - protein, 141 aa, Homo sapiens
  misc_feature (1)...(141): Xaa = X or * as defined in Table 2
GDMRGRREGGFGLGRRTAMRCGCSPGIVREADNLVKLSRPSTVRVTRSSASVMVLTMPLAPATFLRVNCWAGRGRCXSQNETVSRTRCEEGRXXKDYRVEEQRLRKNWDLARPGEEQLAPSPEKRDLPLRVKDQGRHPCVV

SEQ ID NO: 42229 - protein, 569 aa, Homo sapiens
  DOMAIN (283)..(330): kw TRANSCRIPTASE REVERSE II ORF2 domain identified by eMATRIX, accession number DM01354V, p-value=1.000e-40, raw score of 12.97
MGKKQNRKTGNSKKQSTSPPPKERSSSPATEKSWMENDFDELREEGFRRSNYSELREDIQTKGKEVENFERNLEECITRITNTEKCLKELMELKTKARELCEECRSLRSRCDQLEDCLLKKLHSHQANPEFDLITEHLTLCIRISIQIKAYLSLSKAQSSLSHRPPTYLAYLFNGFRLFKNLKAYLHPGEINSFIAHTKPVWWSLHTDAHEIWCRDSDLKLVPTLPLIPLEAALRNITHSLSIPPPKNFRRPNTSTLFCVIFLINIRRQEYQASEPKPSHRIPCDLQRIKYLGIQLTRDVKDLFKENYKPLRNEIKEDTNKWKNIPCSWVGRINIVKMAILPKPLLVIPRQTGSGMDPQQTSGDLQKCLTVLRKTNKQKAIASTSRKRMTMQKLHLKEKLINSKDQRTNDKNHMIISIDAEKAFNKTEHRFMLKTLNKLEINSRWIKDLNVKPKTIKTLEENLGNTIQDIVMDKDFMTKTPKAMATKAKIDKWDLIKLKSFCTAKETIIRVYRQPTERESIFVIYPSDKGLISRIYKELAIPGKGNSSNVSKDSKMSKHQKMQGENKHD

SEQ ID NO: 42230 - protein, 337 aa, Homo sapiens
  DOMAIN (110)..(151): kw TRANSCRIPTASE REVERSE II ORF2 domain identified by eMATRIX, accession number DM01354I, p-value=8.200e-39, raw score of 15.55
  misc_feature (1)...(337): Xaa = X or * as defined in Table 2
MGDFNTPLSTLDRSTRQKVNKDTQELNSALHQPDLIDIYGTLHPKSTEYTFFSAPHHTYSKIDHILGSKALLSKCKRTEIITSYLSDHSAIKLELRIQNLTQNHSTTWKLNNLLLNDYWLHNEMKAEIKMFFETNENKDTTYQNLWDAFKRSVXREIYSTKCPQEKAGKIQNXHPNIDQQNXXTTSKANKEKKREDSNRCNKKXXRGYHHRSHRNANYHQRILQYTSMQINXKIXKKWINSSTHTLSQDXTRKKLNLXIDQXQELKLWQXSIAYQPKRVQDQMDSQPNSTRVASKRIKYLGIQLTRMXRTSSRRTTNHCSMKXKRIQTNGRTFHAHG

SEQ ID NO: 42231 - protein, 595 aa, Homo sapiens
  DOMAIN (391)..(420): kw REPLICATION REPB REPA INITIATION domain identified by eMATRIX, accession number DM00653A, p-value=1.161e-15, raw score of 20.40
  DOMAIN (375)..(413): Initiator RepB protein domain identified by PFam, accession name RepB_protein, E-value=0.045, PFam score of 9.8
MDDTGSHNSQQTNTGTENHTPRFFTHKWELSNENTWTQGGEYHTLGPVRGPRGLEKEYFRDPPRTLLPAQLGRLLPATRVLQLQMWLKGPRDFADLGTTHQTGFSPAGANQRGPLAATFSGPGGEGQSAVARLTGEKKNHPGAQYANRLSPRVGRFINAAGTTGFPTGKRAVSATQLIPVRGNRPQNQYFPTGSFPHGNKGSPIQDEIGVRPKNPNPYQSVKDIRRSSFMVIECDNLKTCHTSHGSVMAETAVINHKKRKNSPRIVQSNDLTEAAYSLSRDQKRMLYLFVDQIRKSDGTLQEHDGICEIHVAKYAEIFGLTSAEASKDIRQALKSFAGKEVVFYRPEEDAGDEKGYESFPWFIKRAHSPSRGLYSVHINPYLIPFFIGLQNRFTQFRLSETKEITNPYAMRLYGGSSRVEKRLLVVFHRNVHEIGAVTGSGDFPGRSIPRPLALGSVRKIHLRPQVLRPTSPRNISPISNPGCLSDYTPTFQGCQTMQGRLPWSFTLSGKSRFSGEGAKTKETRFICGPQTPAPVTDWEGSLPLVFNHCRDASLIIHPRSRGQTMQGRLLGRGSLESKSGYASQVVSVSRKNQGF

SEQ ID NO: 42232 - protein, 92 aa, Homo sapiens
DVSWAGRSEDHRWIFLKEQRTGGPPKERSRSESRHQISCMCAASTWMERTAYGGSHRELLLQQLPQEHTRKTLPLQQTSAWTYRLFHTSCEI

SEQ ID NO: 42233 - protein, 170 aa, Homo sapiens
  misc_feature (1)...(170): Xaa = X or * as defined in Table 2
NWIPSLHLTQKLIQDGLKTXMLDLKPXKPXKKTXAIPFRTXAWARTSCLKHQKQWQQKPKLTNGIXLNXRVSAPAKETTISMNEATYRMGENFCNLLIXQRANIQNLQXTQTNLQEKNKQPHQKVGKGHEQTLLKKRHLCSQKTHEKMLIITGHQRNANQNHNEMPFHTS

SEQ ID NO: 42234 - protein, 82 aa, Homo sapiens
  misc_feature (1)...(82): Xaa = X or * as defined in Table 2
EESISXKWPYCPRXFVDSMPSPSSYRXVSSQNWKKLLXSSYGTKQEPTLPSQSXAKRTKLEASHYLTSNYTTRLQXPKQHGT

SEQ ID NO: 42235 - protein, 66 aa, Homo sapiens
  misc_feature (1)...(66): Xaa = X or * as defined in Table 2
LTNQKKSRTRWIHSQILSEVQRGADKQPNREXTPIHNCFKENKIPRNPTYKGCEGPLQGELQTTAQ

SEQ ID NO: 42236 - protein, 595 aa, Homo sapiens
  DOMAIN (37)..(83): kw TRANSCRIPTASE REVERSE II ORF2 domain identified by eMATRIX, accession number DM01354O, p-value=1.000e-40, raw score of 8.73
  DOMAIN (70)..(329): Reverse transcriptase domain identified by PFam, accession name rvt, E-value=2.2e-10, PFam score of 48.0
MDKFLNTYTLPRLNQEEVETLKRPITGAEIEAIINNLPTKNSPGPDGFTAEFYQRYKEEMVPFLLKLFQSIEKEGILPISFYEASIILIPKPGRDTTKKENFRPISLMNTDAKILNKILANQIQQHIKKLIHCDQVGFIPGMQGWFNIHKSINVIQHINRAKDKNHMIFSIDAEKAFDKIPQPFMLKTLNKLENKIPRNPTYKGCEGPLQGELQTTAQGNKRGYKEMEEHSMLMGRKNQYRENGHTAEELEKTTLKFIWNQKRARIAKSILSQKNKAGGITLPDFKLYYKATVTKTAWYWYQNRDIDQWNRTEPSEITPHTYNYLIFDKPEKNKQWGKDSLFNKWCWENWLAICRKLKLDPFLTPYTKINSRWIKDLNVKPKTIKTLEENLGITIQDIGVGKDFMSKTPKAMATKAKIDKWDLIKLKSFCTAKETTIRVNRQPTTWEKIFATYSSDKGLISRIYNELKQIYKKKTNNPIKKWAKDMNRHFSKEDIYAAKKHMKKCSSSLAIRKILFKKISSTFILDSGVTLQRLDFNILLNLVDLLCHPDSEFYVCHFRHFNLVRIHQGANAIFADFSCQMAVLFQVFRAMGLSG

SEQ ID NO: 42237 - protein, 54 aa, Homo sapiens
  misc_feature (1)...(54): Xaa = X or * as defined in Table 2
DPLPGQRQLLLQKQRRPXTQAGLLSFQPGPQPHGSVPPTLSQPWLPGGWPELSG

SEQ ID NO: 42238 - protein, 492 aa, Homo sapiens
MTDELREEGFRRSNYSELREDIQTKGKEVENFEKNLEECITRITNTEKCLKELMELKTKARELPRKLLVCPASFPGVFSMRAQQCPSRAPTVVITASLVFSFHKAILTNPFRSFLNHSCCDSLNNARFVDISRDVQLRAVHRIQDSFGVFLEATTKDKATSYIWSSLQTGKVESKGKRARTALEFFGVRRGSDIKDCGTLPRYASALSSLVLKGSCAYQDCETKRRNLASVIIRMRVSIAHPPMTSGPQTDQPKKHLTNFKSETKETCFIHEPKTLAPVTDWEGSLPLVFNHCRDGLSDHSATFQGCQTMQGCLPWSFTLSGKSRFPGAGAAASPAFLGQGQVPLDPFSFTLSGKSRFPGAGAAASPAFLGQGQVPLDPFSFTLSGKSRFPGAGAAASPAFLGQGQVPLNPFSFTLSGKSRFPGAGAAASPAFLGQGQVPLNPFSFTLSGKSRFPGAAASPAFLGQVPLDPFSFTLSGKSHFPGAGLAAFLG

SEQ ID NO: 42239 - protein, 634 aa, Homo sapiens
  DOMAIN (198)..(245): kw TRANSCRIPTASE REVERSE II ORF2 domain identified by eMATRIX, accession number DM01354V, p-value=1.000e-40, raw score of 12.97
  DOMAIN (1)..(211): Reverse transcriptase domain identified by PFam, accession name rvt, E-value=3.7e-06, PFam score of 17.8
MHTAPFIFPVKRTVPDPGEYWDGSPVATGPESLGVFMKLHLPATLATWGSSPTADSGGTWVAQAHLGPATQLEGAQAVPLSKRPAGRRAVGPGPPGICWGAEATEESEVLEVLARAIRQEKEIKGIQLGKEEVKLSLFADDMIVYLENPIVSAENLLKLISNFSKVSGYKINVQKSQAFLYTNNRQTESQIMGELPFTIASKRIKYLGIQLTRDVKDLFKENYKPLLKEIKEDTNKWKNIPCSWVGRINIVKMAILPKVIYRFNAIPIKLPMTFFTELEKTTLKFIWNQKRARIAKSILSQKNKAGGITLPDFKLYYKATVTKTAWYWYQNRDIDQWNRTEPSEIMPHIYNYLIFGKPEKNKQWGKDSLFNKWCWENWLAICRKLKLDPFLTPYTKINSRWIKDLNVKPKTIKTLEENLGITIQDIGVGKDFMSKTPKAMATKAKIDKWDLIKLKSFCTAKETTIRVNRQPTTWEKIFATYSSDKGLISRIYNELKQIYKKKTNNPIKKWAKDMNRHFSKEDIYAAKKHMKKCSSSLAIREMQIKTTMRYHLTPVRMAIIKKSGNNSLIVGASMDTSLLSGPIPYDIQHFDRFGSVTVRRGCAIEFYNTMSQLDPKIPLEMQGTQNNQNNLGKE

SEQ ID NO: 42240 - protein, 229 aa, Homo sapiens
  DOMAIN (103)..(135): kw TRANSCRIPTASE REVERSE II ORF2 domain identified by eMATRIX, accession number DM01354K, p-value=1.000e-08, raw score of 9.35
  misc_feature (1)...(229): Xaa = X or * as defined in Table 2
KNRNYNKLSLRPQCNQTRTQDXESHSKPLNYMETEQPAPEXLLGTXRNEGRNKDVLXNQREQRHHIPESLGRIQSSVXREIYSTKCLQEIMQERSKIDTLTSQLKELEKQEQTHSKASRRQEDNXNQSRTEGNRDTKNPSKNQXIQELVFXKDQQNXXTASKTNKEKKREESNRHNKKXXRGYHHRSHRNTNYHQRILQTPLRKXTRKSRRNGYIPRHIHSPKTKTGRS

SEQ ID NO: 42241 - protein, 46 aa, Homo sapiens
GPQTGSPTEQEVLQPDPPCILFRPGSSPSWASSGPFLHLFLTTWHK

SEQ ID NO: 42242 - protein, 195 aa, Homo sapiens
QWQMSLGTSEDHQHFTCTIWRPQGKSYLYFTQFKAEVRGAEIEYAMAYSKAAFERESDVPLKTEEFEVTKTAAPVSSSHIQLHGANAKQKEESEAPSWGKGGSQGSGHSRSFCGFLLPAIYVSPTDLTLHITVFLSVTQDEHDRVARASCAEKAVGNSAYHQYPGQGTQNNLPDLQQHFAIFENPCPLLTNKNGK

SEQ ID NO: 42243 - protein, 340 aa, Homo sapiens
GRQHGGSQRMGGTASARASSGRLAPRGRGAFAFRRRCPSPRRWRLTCGPAAVEHSFCHNVGPGVRATADKYTCMFTYASQGGTNEQWQMSLGTSEDHQHFTCTIWRPPRGKSYLYFTQFKAEVAGRLRFEYRHGLTFKAASLKRESDVPLENLRNFEVNQNSSGLTRPGGISKAELSKLVIVGQGIRALSCDQQPLLRGGTFSSPVKLKGACVPERAQHITGFLGGTLKFSTWADVALSRRGFSGWLKPWGREQRVQGPPGSQQLFRFPLPVKLFWTQDRRSRGTKRVGNMGAMLGKAAMLPPTSSRASFMSLQNCFPMFTQGTSFQMNWEEMKCFFIFK

SEQ ID NO: 42244 - protein, 402 aa, Homo sapiens [sequence omitted]

SEQ ID NO: 42245 - protein, 218 aa, Homo sapiens
  DOMAIN (187)..(206): BINDIN PRECURSOR SIGNATURE domain identified by eMATRIX, accession number PR00761E, p-value=5.926e-09, raw score of 14.32
MGFKKEEVACQGCIDTSFMELPLKPWPVEWVVKESVEQDIRGHGSLLNGMKKPTVHSVLICDSLQRKDSFLRWHDPLNIAPGQQKKEIAVPPQKFHSRVMAYKNWQASLKMTFSKDSETGDCGINGMFPGLHSMKNSMGTEGHKGMLFKEAENPEGEKKEAATLEGEKTLLVEVEKNSTLSEPGSGRGPPQEEEEEEEEEEAANEDAETPGIRDHESL

SEQ ID NO: 42246 - protein, 80 aa, Homo sapiens
  misc_feature (1)...(80): Xaa = X or * as defined in Table 2
SPEGKHYRCYLVHMPSDTERSSLXMRPRAGRSSAEGPGCRQRSLALDHMVQQAQRCWRYQWWRRFSKEFNQWWRRFSEEL

SEQ ID NO: 42247 - protein, 457 aa, Homo sapiens
RGGSGERMKRRFRGKDEEEVQGKGSRGGSGERIKRRFRGKDQEEVQGKGSRGGSGERIKRRFRGKDQEEVQGKGSRGGSGERIKRRFRGKDQEFSFELQQPVKPLQFGLGLQSLNQYLTRAFCSHDTVFTAKGQYISFQKSRRSALLLASFHLLMNDEVDDQLPINIDQGGWACLVCKEKLIIWKIALSPITKLSVCKELQLPPSDFHWSADLVALSYSSPSGEAHSTQAVAVMVATREGSIRYWPSLAGEDTYTEAFVDSGGDKTYSFLTAVQGGSFILSSSGSQLIRLIPESSGKIHQHILPQGQGMLSGIGRKVSSLFGILSPSSDLTLSSVLWDRERSSFYSLTSSNISKWELDDSSEKHAYSWDINRALKENITDAIWGSESNYEAIKEGVNIRYLDLKQNCDGLVILAAAWHSADNPCLIYYSLITIEDNGCQMSDAVTVEVTQYNPPFQV

SEQ ID NO: 42248 - protein, 91 aa, Homo sapiens
VPQPDTRKGSVLKWISKRGKPLAVEIEESHCLCLPLRTECLGIKPIVHLFSCTRPVIVPSLELNYDVDSIAHMFVADLLLMITLPSYDIPF

SEQ ID NO: 42249 - protein, 88 aa, Homo sapiens
PPWAPVRPEPPQQGPPSAPGRPIPSTTQGLRSADAGRRTGTQLHRQPAKVCSFTPEASETTSPPGGTNNSRRAALRAVTLTVKICSFT

SEQ ID NO: 42250 - protein, 62 aa, Homo sapiens
  DOMAIN (20)..(53): Chloramphenicol acetyltransferase proteins domain identified by eMATRIX, accession number BL00100E, p-value=9.182e-21, raw score of 15.41
  DOMAIN (30)..(53): Chloramphenicol acetyltransferase domain identified by PFam, accession name CAT, E-value=9.2e-16, PFam score of 64.4
FKRGQYGRLLRPRFHHGQILYARRQGAEPLAIQVHHAVCDGFHVGRMLNELQQYCDEWQGGA

SEQ ID NO: 42251 - protein, 74 aa, Homo sapiens
  misc_feature (1)...(74): Xaa = X or * as defined in Table 2
ASDPLRGLLCGPSLLDERHPLLHGAQSHRPPKGXGVRANNAGLAGSSIYLQPRCGIHEVKPSGLLSREGLQLQS

SEQ ID NO: 42252 - protein, 82 aa, Homo sapiens; identical to SEQ ID NO: 36802

SEQ ID NO: 42253 - protein, 70 aa, Homo sapiens
LQKEQHQFSKIGARPVIVPSLELHYDIDSIAHMFVADLLLIITLLSYYIPFYLGFQNAGITGINHRAWFY

SEQ ID NO: 42254 - protein, 50 aa, Homo sapiens
EDLVWWMGLGPSSKRQISSWRLVRHKKPLRGVGGSRHGCRVTERLFGDQM

SEQ ID NO: 42255 - protein, 76 aa, Homo sapiens
  misc_feature (1)...(76): Xaa = X or * as defined in Table 2
MFFLLTFYLLSPCSPTTFLFAEVMKIIIKKTEGTQRPVPVQVLGVLSAGPLDPMLFPXXXXXXXXXXXXNRAGGGG

SEQ ID NO: 42256 - protein, 300 aa, Homo sapiens
SNNSPTSASRVAGITGVRHCVRNWWVLGLTDFKNEAVDPRAWTTKSKTPPQNKTKQENKNEDVGRDQRVEWLVTEEVSELSLKGEKLHWKEKEVQSTGKETDARSSMRNYLMLLGPEVQEKEPVKRRLARGKAFVELAEPTRAPGNSGFPVSGGVFTPSLGALTWICKFRVKSWAILNSQLLLDTMKKGIVYKNGDRIQGNRSADNRNNGVPLTGARDMQPAMPEPPTHSMGSCAARAFPMSAASCFRAPSPIDHPKAEEWGARRGTGGQPTCSPGAGIHWVKPAGLLSREGLQLHSWSQ

SEQ ID NO: 42257 - protein, 75 aa, Homo sapiens
MQESFLFGLIPPSGTDLFWGVHVGGTVRSFSSHEAIFQTITWGETLDNTLLSRAEVPAAFRSALCPWFIETREWR

SEQ ID NO: 42258 - protein, 243 aa, Homo sapiens
  DOMAIN (10)..(29): UvrD/REP helicase domain identified by eMATRIX, accession number PF00580E, p-value=1.600e-09, raw score of 13.89
MRLESDKHLVQFVPIHKSKGLEYPIGPWLPFITNSRVQEQAFYHDRHSFEAVLDLNAAPESVDLAEAERLAEDLRLLYVALTLSAFAPLVRRRGDKKGDTDVHQSALGRLLQKGEPQDAAGLRTCIEALCDDDIAWQTAQTGDNQPWQVNDVSTAELNAKTLQRLPGDNWRVTSYSGLQQRGHGIAQDLMPRLDVDAAGVASVVEEPTLTTHQFPAGASRGTFWHSLFEDLDFTQPVDPNWRL

SEQ ID NO: 42259 - protein, 292 aa, Homo sapiens
KHPVQRVRLEAECGARASSSAECLLPPPPMRPGPPMRGGESAGTQTLGVAPLVRRRGDKKGDTDVHQSALGRLLQKGEPQDAAGLRTCIEALCDDDIAWQTAQTGDNQPWQVNDVSTAELNAKTLQRLPGDNWRVTSYSGLQQRGHGIAQDLMPRLDVDAAGVASVVEEPTLTPHQFPRGASPGTFLHSLFEDLDFTQPVDPNWVREKLELGGFESQWEPVLTEWITAVLQAPLNETGVSLSQLSGRNKQVEMESYLPISEPLIASQLDTLIRQFDPLSAGCRRGIMPVRAC

SEQ ID NO: 42260 - protein, 654 aa, Homo sapiens; identical to SEQ ID NO: 40189
  DOMAIN (57)..(100): kw TRANSCRIPTASE REVERSE II ORF2 domain identified by eMATRIX, accession number DM01354T, p-value=1.000e-40, raw score of 9.48
  DOMAIN (1)..(179): Reverse transcriptase domain identified by PFam, accession name rvt, E-value=1.2e-10, PFam score of 48.8

SEQ ID NO: 42261 - protein, 222 aa, Homo sapiens
  misc_feature (1)...(222): Xaa = X or * as defined in Table 2
MRFYGQLAEDPGQQKAGETTRHTEDYISQLPLQRQGIPELALQKDLFINKIYGKEFNVCRSTLEDPRVHVLCRDMDEAGNHHSEQTIARTENQTPHVLTHRRELNNENTWTQGGEHHTPEPVMGWGXRPRAAKSWGNNKAYXRLYFSAAFAETRDPRTCPSERSFYXQDLWKMSSMSAGRLXRIPEFMSFVGTWMKLETIILSKLLQGQKTKHRMFSLIGGN

SEQ ID NO: 42262 - protein, 43 aa, Homo sapiens
  misc_feature (1)...(43): Xaa = X or * as defined in Table 2
QQLVHTAFVIRLIRGTTEGAWRNCKQMARXQSISLECKFMPRT

SEQ ID NO: 42263 - protein, 73 aa, Homo sapiens
WWILVPLLPRARAYIPLEKGTWMKLETIILSKLLQGQKSKHLMFSLGTKMLSTRHPHYLSFQMLTALVPLSAI

SEQ ID NO: 42264 - protein, 43 aa, Homo sapiens
WMKLETIILSKLSQGQEIKHHMFSLIGVQYQHLSPVVYTIIQL

SEQ ID NO: 42265 - protein, 1825 aa, Homo sapiens
  DOMAIN (57)..(100): kw TRANSCRIPTASE REVERSE II ORF2 domain identified by eMATRIX, accession number DM01354T, p-value=1.000e-40, raw score of 9.48
  DOMAIN (1)..(179): Reverse transcriptase domain identified by PFam, accession name rvt, E-value=1.4e-11, PFam score of 51.9
MISSIDAEKAFDKIQQRFMLKTLNKLGIDGTYLKIIRAIYDKPTANIILNGQKLEAFPLKTGTRQGCPLSPLLFNTVLEVLARAIRQEKEIKGIQLGKEEVKLSLFADDMIVYLENPIVSAQNLLKLISNSSKVSGYKINVQKSQAFLYTNNRQTESQIMSELPFTIASKRIKYLAIQLKRDVKDLFKENYKPLLNEIKEDTNKWKNIPCSWVGRINIVKMAILPKVIYRFNAIPIKLPMPFFTELEKTTLKFIWNQKRARIAKSILIYRFNAQELEKTTLKFIWNQKGARIAKSILSQKNKAGGITLPDFKLYYKATVIKTAWYWYQNRDIDQWNRTEPSEIMPHIYNHLIFDKPDKNKKWGNDSLFNKWCWENWLAICRKLKLDPFLIPYTKINSRWIKDLNVRPKTIKTLEENLGNTIQDIAMGKDFMSKTPKAMATKAKIDKWDLINLKSFCTAKETTIRVNRQPIEWEKIFAIYSSDKGRISRIYNELKQIYKKKTNNPIKKWAKDMNRHFSKEDIYAAKRHMKKCSSSLAIREMHIKTTMRHHLTSVRMAIIKKLGNDWDMDKAGNHHSQQTIARTKNQTPHVLTHRWELNNDNTWTQEGEHHTLGTVVGWGEGGGIALGEIPKGTGRVLLGAGHTEFQCKVPEWLSSPSPKHTDSLSAPCGHCLEMREGWCWHFKTVFAILFSASVSDMKLKPVVESDTLTIESGPLASEDKPLSCGTNSGKEQEINETLPITTVAQSSVLLHPQEAAARIRMSARQKQIMEIEEQKQKQLELLEQIEQQKLRLETDCFRAQLEEEKRKKTQPTGVGCRKSHHYINHLHSFSSLPVKVESGKIQEPFSAMSKSTVSTSHSIISQMHDRPLLPSENITAQQGNMKALQEQLDLQKKVLQATQEAQEQLLLCKQKEVEQQTGLSVFLPLVTPDSSALLPSAKADLGRIQESSPTKNNIAVSSDHHVISQLQDKRLSLSQPILSQQNNFKFLQEQLNIQKDSLQARREAQEVLYVHKQSELDRRVCSEQAEPSFPFQVAQHTFTSLPSADTKSGKIQEQHSSKSEKGLVSCQSDIPISQDGSLSFLQQFLPLHDSLKLLQEQLTKQRDTLQARHEAQVELLLHRQRDLGDSKSGLVSSSSSPVVVQHSVASQASAKAEPRRIQELYLSEKENVDESERFQECISIKSDSTIPLSHPKIPRCQERLLRVSQHMLPLQDNLEEHQAWLDTEKEAFHFSQKTQENTSSEQTGSSSFIPQLVQLSFTSLASAESGTILEPLFTESESKIFSSHLQIPQLQDRLLRISQLIQPQQDNLKALQEQLATQREAIILARQEAREELLLHQSEWEGRISPEQVDTSSLPLVPQHSFASLPLNESERNQEPCSINSDNIVSSGHSEIPTLPDGLLGLSHLVLPQQDNLIALEEHLHAQTDFLPSIEKTQKELVLSKPCKFEEKVSSEHFIQSHHGDLQALQQQLDTQKKAIRSIQEVQEELLLQRLSELEKRVSSEQVCSSSFVSQQDNLGLQKQLDLQREVLHYSQKAQEKLLVQRQTALQQQIQKHEETLKDFFKDSQISKPTVENDLKTQKMGQLRDWFPNTQDLAGNDQENIRHADRNNSDDNHLASEDTSAKQSGRHETSINTCTISIGLVRKSFLFVAKLNSGLSRLPYGQCAFRVCRRSCTLHYVKTAHILYKLIAEVTRGFGHLLNFFPQHMASTTPQLDSGHKGKDWEGSRGRCDTDKKEGKVATEAETRVTQLQVKECQQPPGLKRQGTGSPLEPLEGGWPCQHLDLQLLSSFQNCERRSSVVLSHQLVVIWYSSHRKPYANSELNNERYL

SEQ ID NO: 42266 - protein, 375 aa, Homo sapiens
  DOMAIN (51)..(100): kw TRANSCRIPTASE REVERSE II ORF2 domain identified by eMATRIX, accession number DM01354Z, p-value=3.761e-15, raw score of 9.06
MAHPLWKTVWQCLIKLNVLLPYDLAIVQQVYEGCFKRHCLLKRHVENYVHVKTCTQMFIAVLFIIAKTWKQPRCPSALSLTIDPRSSFLDLTQTHFFSSLSGNWESKLLPSCKREQNQAQRPSIRMPAFFRRTWRAELHAHGSDLGNAPASSLLVPGITSRSMSCPKSMPQASLSRKSEPRPSIPVTEGTFYNPPSDGHQYLLESPGMTGVCIPQLSLTIAGQKRGTGKGSLELALHQVLFLCCNSPVLINWLCLGSRQGKPLGQLQKGQSDVEVSHLLLPPGLPAGWRMGSEALGKGREKDGMRVVERRKRGERDETNRSKTFITLEGNPCASPSTVGNRESPNIRGKASDMNDKRKRQQTGGMQRKQRARRAE

SEQ ID NO: 42267 - protein, 120 aa, Homo sapiens
  DOMAIN (38)..(112): Immunoglobulin domain identified by PFam, accession name ig, E-value=3.2e-12, PFam score of 44.4
MDMRVPAQLLGLLLLWLSGARCDIQMTQSPSSLSASVGDRVTITCQASQDISNYLNWYQQKPGKAPKLLIYDASNLETGVPSRFSGSGSGTDFTFTISSLQPEDIATYYCQQYDNLPPTV

SEQ ID NO: 42268 - protein, 187 aa, Homo sapiens
PYNLYKASFCACPRSLLFTLQKKRRTTKPKTFKNKDHDSEPFRNYLPSLIQTWSFIREAANEAMPLPVNTSLSSQHNCLAGTDVFICQPEPHKNLQLKWTGPYTVIRSMPTAVRQGLLNWIHRTRAREIMNKWPRTLSWWGEQVAAADSVSGEQEYAGRLVDTFEGFLQEMLNQKCCGEVPEGGALS

SEQ ID NO: 42269 - protein, 92 aa, Homo sapiens
  misc_feature (1)...(92): Xaa = X or * as defined in Table 2
MPLFLHIRLLVLSLILLLLSRKXXXXXXXXXXXXXXXXXXXXXXXXXXXXXXXXXXXXXXXXXXXXXXXXXXXXXXXXXXXXXXXXXXXXXP

SEQ ID NO: 42270 - protein, 87 aa, Homo sapiens
LWASLTDVRPSTRGGGAESSLNSPREKETPFPGLLSSGYCSLTLFDTARPRSTWQRASSQMLASPQSASSNLDTLPHLFLKKELKHC

SEQ ID NO: 42271 - protein, 217 aa, Homo sapiens
  DOMAIN (116)..(144): Phospholipase A2 histidine proteins domain identified by eMATRIX, accession number BL00118B, p-value=5.875e-33, raw score of 16.33
  DOMAIN (92)..(215): Phospholipase A2 domain identified by PFam, accession name phoslip, E-value=1.8e-69, PFam score of 244.2
MVPCIPATPAPAVAKRSQETRECRNKDTRQRDKRKDSWARGTTTTKSRRPVVALNVWLHCYLLDTKQKGQGKECESSPMILAAADSGISPRAVWQFRKMIKCVIPGSDPFLEYNNYGCYCGLGGSGTPVDELDKCCQTHDNCYDQAKKLDSCKFLLDNPYTHTYSYSCSGSAITCSSKNKECEAFICNCDRNAAICFSKAPYNKAHKNLDTKKYCQS

SEQ ID NO: 42272 - protein, 25 aa, Homo sapiens
  misc_feature (1)...(25): Xaa = X or * as defined in Table 2
XPRGGILLPQNLEGGSSTFPESHAX

SEQ ID NO: 42273 - protein, 420 aa, Homo sapiens
  DOMAIN (196)..(234): Ribosomal protein L34 proteins domain identified by eMATRIX, accession number BL00784, p-value=8.179e-10, raw score of 14.98
GLATEPESVFALDVLRQRLHEKIQEARGQGSAKELSPAALEKRRRRKQERDRKKRKRKELRAKEKARKAEEATEAQEVVEATPEGACTEPREPPGLIFNKVEVSEDEPASKAQRRKEKRQRVKGNLTPLTGRNYRQLLERLQARQSRLDELRGQDEGKAQELEAKMKWTNLLYKAEGVKIRDDERLLQEALKRKEKRRAQRQRRWEKRTAGVVEKMQQRQDRRRQNLRRKKAARAERRLLRARKKGRILPQDLERAGLEPRDRRRWPLLPGHVSPQLTRTEDNPEVWHMGTWHWESGEHVQAWCILGQNAMAPPRSLGFCLLGSHSFLFPSAPGRHFTAQNLEGGSSTFPESTHGHQRAPWSSGDASVWEDARCQVDHGLAVAKSIKEQHPLLKQTGKGSVPFPWGSLEKTLLFHLLWRA

SEQ ID NO: 42274 - protein, 276 aa, Homo sapiens
TLTKVLKKIQDLKNFSVLKMNCHQMRYVLSCVAQELLCSQLNTFHKSAIRRSWSSEDKVGQSEALSRVLQVAKKMKLISNGGDSAVEMDRRNVSEFKDVVIHEDQWVGETVLQSTFSSQLLNLGSYSSIQPEEYSSVVSDVVLQDLLAQVSSKHSYLRDLPPRQPQRKIYYRPALMTVVDGRHDVYIRVDSKLIEKILLNIFADCLNRVIVTSSEITYGMVMADLLHSLSAVSAEPCVSKIQSLFVLDESSYPLQQDFSLLDFYPDTVKHGADALF

SEQ ID NO: 42275 - protein, 376 aa, Homo sapiens
PRAINLGSYSSIQPEEYSSVVSEVVLQDLLAYVSSKHSYLRDLPPRQPQRVNSIDFVELEHLQPDVLVHAVLRVVDFTILTEAVYSYRGQKQKKVMLTVEQAQDQHYALVLWGPGAAWYPQLQRKKGYIWEFKYLFVQCNYTLENLELHTTPWSSCECLFDDDIRAITFKAKFQKSAPSFVKISDLATHLEDKCSGVVLIKAQISELAFPITASQKIALNAHSSLKSIFSSLPNIVYTGCAKCGLELETDENRIYKQCFSCLPFTMKKIYYRPALMTAIDGRHDVCIRVESKLIEKILLNISADCLNRVIVPSSEITYGMVVADLFHSLLAVSAEPCVLKIQSLFVLDENSYPLQQDFSLLDFYPDIVKHGANARL

SEQ ID NO: 42276 - protein, 123 aa, Homo sapiens
  DOMAIN (7)..(22): Ribosomal protein L15 proteins domain identified by eMATRIX, accession number BL00475A, p-value=6.500e-13, raw score of 10.62
  DOMAIN (86)..(117): Ribosomal protein L15 domain identified by PFam, accession name L15, E-value=3.8e-09, PFam score of 29.0
MPSRLRKTQKLRGHVSHGHGRIGKLQKHPRGHSNAGGMHHHRINFNKYYPGYFGKVGMSEQTQVNAAKNKPGAAPLIDVVQSGYYKVLGKEKLPKQPVIVKAKFFSRRAEKIKGVKGTCVLVA

SEQ ID NO: 42277 - protein, 100 aa, Homo sapiens
MTNVYSLDGILVFGLLFVCTCAYFKKVPRLKTWLLSEKKGVWGVFYKAPPGRPEMKSSPPAKPPRGAVQRGPLGGGHAVVPEVPELALRGPALRSDELIR

SEQ ID NO: 42278 - protein, 81 aa, Homo sapiens
MPSPPRGIDSVMTPPQEPDVALFIHSCSVPGVADVPTFHFGCVLWVTRRGLPPPPPTNGSHHIFSETRSDHAADAARASQR

SEQ ID NO: 42279 - protein, 116 aa, Homo sapiens
MSFLSLHQKQMLALCFTYSLQNSPRLAVAATTSTDANTTTAAVTLNAPAHPVVKVFIVLTPQFLSRDKDQLTKELQKHVKSVTVSCKSPRKMEFVPELRKTVTGKIKQARIDHEEP

SEQ ID NO: 42280 - protein, 156 aa, Homo sapiens
  misc_feature (1)...(156): Xaa = X or * as defined in Table 2
RGIREGEEFDVDLAGMEVAVGGWGRGLWLHRHQAGIRGQSLGWRCRPWVGAGGVQAASERPDLAGSIMGPEVGALRRASPVIVIQSQAGAFLSSNTTCQQFRDPGFRGRYPASPHTLSLPPETAHLXLLLCLPAAGVLPHTWPLLDRQGWHRGHAR

SEQ ID NO: 42281 - protein, 313 aa, Homo sapiens
  misc_feature (1)...(313): Xaa = X or * as defined in Table 2
MAAPLVLVLVVAVTVRAALFRSSLAEFISERVEVVSPLSSWKRVVEGLSLLDLGVSPYSGAVFHERQYIPVKMKSKAFWIFSWEYAMMYVGSHSGNHLPLLLPSQLLGFHPRSLVALYFLFQISLQTLVIFWYFFAEMFEHFSLFFVCVFQINVFFYTIPLAIKLKEHPIFFMFIQIAVIAIFKSYPTVGDVALYMAFFPVWNHLYRFLRNIFVLTCIIIVCSLLFPVLWHLWIYAGSANSNFFXGITLTFNVGQRPHRLKAPRASSAARSDRGPAASPASPGDAARPVSGRRPWDAPPHNYLNAVPPPSRPQ

SEQ ID NO: 42282 - protein, 173 aa, Homo sapiens
VIAIFKSYPTVGHVALYMAFFPVWNHLYRFLRNIFVLTCIIIVCSLLFPVLWHLWIYAGSANSNFFYAITLTFNVGQILLISDYFYAFLRREYYLTHGLYLTPQGIAPEAMLVLQSRPGWHRAAWTLRGLVGPEAGAKASKPRSLPSKRVLGQKRFESKGHKFSGTKKGPMAD

SEQ ID NO: 42283 - protein, 69 aa, Homo sapiens
MGTLTGKTFLGDSLMKGRPGCSMPEIWDVEDPANAGKTPLCNLLVKDSKPHFTTVFQNSVYKVLEVVKE

SEQ ID NO: 42284 - protein, 289 aa, Homo sapiens
MGGGGSSGTFRVRHPGRNVSAFWTPPEAEAHSPTEKSCRLRTRGMTRSKLTASSDTSESLDAYQGPLPYTWEPCALINPILNAVLAALLSVLRFLPVLPLEHTAREHPKKAENQTHERALSTRLIRQLWRNLAGVAEEPEGEKERPQQTVVMWASCMPLVAPQLGPPLLYPWKHKNREKGASAQTRSTPCTGSRSSLEARPTDLHDYLGSDPQKVPRHQLGSSRGEGGFAEHLETSMGHAIKNTCDSQEEVEISTLTGVWKKLIPTLMDERFKTSAEEVTADVVEIAEN

SEQ ID NO: 42285 - protein, 74 aa, Homo sapiens
MGQLYEVMVLVAQYWMPSSAVWHPLALVLDALITHLRSGAEGVIYPDPLTYGSDNHEEDYFLYVAYSDESVYGK

SEQ ID NO: 42286 - protein, 117 aa, Homo sapiens
  DOMAIN (63)..(86): Actinin-type actin-binding domain proteins domain identified by eMATRIX, accession number BL00019B, p-value=1.000e-16, raw score of 13.34
  DOMAIN (35)..(115): Calponin homology (CH) domain identified by PFam, accession name CH, E-value=0.07, PFam score of 4.1
NSGKMAKYGEHEASPDNGQNEFSDIIKSRSDEHNDVQKKTFTKWINARFSKSGKPPINDMFTDLKDGRKLLDLLEGLTGTSLPKEQWFHTGTCLIERRQSAAGFTSQQCGISEYRGN

SEQ ID NO: 42287 - protein, 118 aa, Homo sapiens
MAKYGEHEASPDNGQNEFSDIIKSRSALSGTFSGTVCSLIAFPLEQGSPTPRAWTGTSPLPVRDQVAQQEVSPTTGERDNGPLLLIPHSDQIPQLAISCHRIASPTQPNWSPGPEGQF

SEQ ID NO: 42288 - protein, 97 aa, Homo sapiens
GAHWTILPTDTGSLKWFSPMITFFTFHIHFKFFPTDYHFFKHLDNFLQGKRFHNQQDAESAFQKFLESQSTDFYATGVNKLISCWQNCVDCNGSYFD

SEQ ID NO: 42289 - protein, 103 aa, Homo sapiens
PQKKYIHIFLDSLALLPRLECSGAISAHCKLHLLVSSDSPASASQVAGITGARHHAWLIFVFLVEMGFHHVGQAGLELLTSGDPPALASQRAGVSIFIYLFIF

SEQ ID NO: 42290 - protein, 104 aa, Homo sapiens
FFFFLRLSLTLSLRLECSGSRQQGLGSRDCHASASRVAGITGTSHQTRLIFVFLVATGFRYVGQGGLKLLTSSDLPASASQNAGSTGVTPRADQLLFKVALGPF

SEQ ID NO: 42291 - protein, 188 aa, Homo sapiens
FNFFLRQSLALLPRLECSGMISAHCNLHLPGSSNSPALAPRVAGIISTCHHAQVIFACLVEMGFHHVGQAGLKLLTSGDLPALASEKCWDYRREQPRPALFFWYFSRDQRFTTLGQAGLELLASSNPPASASKSAGITDVSHGTHAKRLYSWLCVSETAFNPNFSTFRLKNILFMVNLEHNYCILSFH

SEQ ID NO: 42292 - protein, 49 aa, Homo sapiens
PHPANFVFLVEMGFCHVGQAGLELLTSSDLPALASQSAGIPGVSHRAQP

SEQ ID NO: 42293 - protein, 38 aa, Homo sapiens
RQGFHHVGQAGLKLLTSGDLPALASQSAGIAGMTHSAR

SEQ ID NO: 42294 - protein, 255 aa, Homo sapiens
MGFRHVGQAGLELLASCDLPTLASQSAGITGVSHHGRHKKYFLNDDDDVIEIYTITQTDQEQAGVPQQCRPGLQLTTSVREEDQAAVAAAAARRETDSAAIAQRSPRQSHLCTNRVFFLLRWPLTNYTTLNGRRPSHERHDDRDDSDDNDVQTEEEFICNRQGLGPTASRLPSRCGGGRGAVNARSRQQEVNHKGSLLATAGMPSCNRSGRALTGQAELFFTGSQAQPGRCLRCPGGSAEKGERGPLGSEAPKPS

SEQ ID NO: 42295 - protein, 23 aa, Homo sapiens
EESGFLCVGCSGRKNGRRGSRPL

SEQ ID NO: 42296 - protein, 263 aa, Homo sapiens
MGFRHVGQAGLKLLTSSDLPALASQVQCKLVVPASAERHISPLQRGLIAFSLRPDPGLAGDRASLGVPLCGYRIGNPRRSPKRTRHCARTAAVSCSAYSKCLYQFRPNVGHSASTPKAMCQTTAAGEGAHAADEGYTQRVVGARRGTPQRYTGGAETKNRAFRSYPKMETSWPRGGGSTPPVALDAQVERECALGSGAQGKHSCLAVRVVLIFCINEHYPQTLTYRLPFVLPLRSGGTPTSWRALFFPSSSDSNCKLCGGTSS

SEQ ID NO: 42297 - protein, 42 aa, Homo sapiens
FFFFFLVEMGFHHVGQAGLKLLTSSDRPPWPPKVLGLQARAT

SEQ ID NO: 42298 - protein, 83 aa, Homo sapiens
LELQATMPSKSLFCCCCCCFAFCVLVEMGFRHVGQAGLKLLTSSDPPTLASQKCWGLQGMRAPCPALFAFLTDNSVLIETALT

SEQ ID NO: 42299 - protein, 440 aa, Homo sapiens
  DOMAIN (62)..(102): kw TRANSCRIPTASE REVERSE II ORF2 domain identified by eMATRIX, accession number DM01354Y, p-value=1.000e-40, raw score of 10.69
  misc_feature (1)...(440): Xaa = X or * as defined in Table 2
MAILPKVIYRFNAIPIKLPVTFFTELGKTTLRFIWNQKRACIGKSVLSQKNKAGGITLPDFKLYYKATVTKTAWYWYQNRDIDQWNRTESSEIMLHIYNHLIFDKPDKNKKWGKDSLFNKWCWENWLAICRKLKLDPFLTSHTKINSRWIKDLNVRPKTIKTLEENLGNTIQAIGMGKDFMTKTPKAMATKAKIDKWDLIKLKSFCTAKETTIRLLGRPPALFTASSSVLKQLALEGILILDSRALLGFLYEARHSHSNSPNHDAQNATSKKNIRDGYDKIYRQEQVLARMEEKTLITAGGNVKWCSHFRKQIGGQWLTLETKTKTPQPFSSTSQISTDKDKGLNPQLLKMDPGHMGWCPPGMGIPWQLSSDDRVWVLAAAGSGRHPGSGFKSLPGLLHEGSYGHXXXXSXIXGGNSXGSSGGPQCISGEERVFRVVQSI

SEQ ID NO: 42300 - protein, 43 aa, Homo sapiens
TELPWSLWDSWQSIRGQGGDPRASGSCHPGTKGASAPGPGCSF

SEQ ID NO: 42301 - protein, 178 aa, Homo sapiens
MAISTSGSSVPWPSAPVARMGGVLTWGFCLATCWQSIRGQGGDPWSAGSGHPGTKGASAPGPGEGQSGGDSGSAADRGVTTCRGRPPSELARDKPGMERGSRKSSGHRDWGRSWGLSCGWLTLETKTKTPQPFVQYLSNQHRQGQRPQSTTAEDGPWPHGMVRHACPAICRRRGSEEV

SEQ ID NO: 42302 - protein, 197 aa, Homo sapiens
MAISTSGSSVPWPSAPVARMGGVLTWGFCLATCWQSIRGQGGDPWSAGSGHPGTKGASAPGPGEGQSGGDSGSAADRGVTTCRGRPPSELARDKPGMERGSRKSSGHRDWGRSWGLSCGWLTLETKTKTPPPFSSTTQISTGKDKGLNPQLLKMDPGHMGWSDTPAQLSAGEEAQKRFRGLKDILLPCPYEQAISAP

SEQ ID NO: 42303 - protein, 117 aa, Homo sapiens
LPLKRTCSPFTEEFEPLPSKQAKEGDLQRVLLYVRRETEEVFDALMLKTPDLKGLRNAISEKYGFPEENIYKVYKKCKRGILVNMDNNIIQHYSNHVAFLLDMGELDGKIQIILKEL

SEQ ID NO: 42304 - protein, 641 aa, Homo sapiens
  DOMAIN (385)..(432): AAA-protein family proteins domain identified by eMATRIX, accession number BL00674D, p-value=3.342e-10, raw score of 23.41
MKGPLAPCKSEIQRGSQIVKLQNDLLLLHVSHPGDADARAREKKETDEIKATTRTGQHNARRTTTRQQQQAKRDESAGPLHDYEHTLYILALSIAVYCNASYVHYMRRRVSHNVIPSSDIDSGLICSCSIAFTYHAGISVVRIWPPSWDHSRQHQIIVSVTYSWYRVLAMYSLAEQIAYSTYPHTSLVAFEVVSAHSAVHRGPVKVEEDPWIRTGTRYEQELLGRGYAKADGTFCCELPFKAQGYTYRLLASEGKTAYGPHLIRTMCAIRSPIDILSESIVLMSCLDAKNYLQWDKCSSHLPQNDGSTNSLHHAPGKATGSKHQSVKAAVGAVPCRSIGPELLKAMGAYSLHQCHLDVRHGVKRNYCGALSSLGAGNVADRVLAQLLTEMDGIEQLKDVTILAATNRPDRIDKVKDLKHNPVKQTGSPSGGNVFDTGRSNNRGGQVTSLRTYSWAATRIHHISKVTGQITAPKIGETDSPGTENHNFLERKPTKRNLHESQCQDSASIANRTEADRGDRSSLERQTFQREDISPENLHVEHTTFHGTVPAKTERANKDEQKDRRNKKRITKRKRSKRRAEKQRKDTEKKKTRKERRRTTRSRTRQREEKAILRPPLTRGCSPPRCRTFGPIAALIWRSRAQ

SEQ ID NO: 42305 - protein, 155 aa, Homo sapiens
MNGCSALPAFAHADSRSYIRKLSYCIFQKAIATPSKPGSGPGTVARICNPGTLGGRGYIQKIKSGEEDFESLASQFSDCSSAKARGDLGAFSRVLGVYRKTSGRGQDGLQGVVCRCLSGVGRQHGASSCPPPPRRLLGRRSALAINMVTDECGRV

SEQ ID NO: 42306 - protein, 259 aa, Homo sapiens
  DOMAIN (33)..(48): WW/rsp5/WWP domain proteins domain identified by eMATRIX, accession number BL01159, p-value=3.077e-15, raw score of 13.85
  DOMAIN (64)..(183): PPIC-type PPIASE domain identified by PFam, accession name Rotamase, E-value=2.4e-09, PFam score of 44.5
  misc_feature (1)...(259): Xaa = X or * as defined in Table 2
PGWEKRMSRSSVVNTQEALPTAAIPRDAKGRVYYFNHITNASQWERPSGNSSSGGKNGQGEPARVRCSHLLVKHSQSRRPSSWRQEKITRTKEEALELINGYIQKIQSGEEDFESLASQFSDCKHQPKARGDLGAFQQKVRLQKPFXRTPRFALADGGRXAGPCFTDSGIHIILPHLSEGWGAQAWPRGRAGRLGRPAPPCPPASGRTPHSLPPSHSIYCSHNGWEGALPDWGPFQTGGPGVPHSLSVPSWGCDLQTLH

SEQ ID NO: 42307 - protein, 106 aa, Homo sapiens
  misc_feature (1)...(106): Xaa = X or * as defined in Table 2
PRERAPRGSVGAGGEICHTSVCCCQPSWTRLLLLITWMLLYYSECKPFHCSREEPDNHILLLKIXEFGPPSTQGQHAAPLSRSRYSCCPDRYLLRKLGICQEHQLL

SEQ ID NO: 42308 - protein, 352 aa, Homo sapiens [sequence omitted]

SEQ ID NO: 42309 - protein, 287 aa, Homo sapiens
  DOMAIN (49)..(287): AIR synthase related protein domain identified by PFam, accession name AIRS, E-value=1.8e-07, PFam score of 12.4
MSKRESFNLESYELDKSFWLTRFTELKGTGCKVPQDVLQKLLESLQENHFQEDEQFLGAVMPRLRIGMDTCAISLRHGGLSLVQTTDYIYPIVDDPYMMGRIACANVLSDLYAMGVTECDNMLMLLGVSNKMTDRERDKVMPLIIQSFKDAAEEAGMSVMVSQTVLNPWIVLGGVTTTVFQPNEFIMPDNAVPGDVLVLTKPLGTQKWNKIKLVVTEDVELANQEAMMNMVRLNRTAAGLMHTFNAHMATDITGFGILGHVQNLAKQQRNEVSFVIHNLLVLAKMAA

SEQ ID NO: 42310 - protein, 143 aa, Homo sapiens
IVLGGVATTVCQLNEFIMTDNAVPADVLVLTKPLGTQVAVAVHQWLDIPEKWNKIKLVVTQEDVELAYQEAMMNMARLNRTGGLLICLPREQAARFCAEIKSPKYGEGHQAWIIGIVEKGNRTARIIDKPRIMEVAHKWPLKM

SEQ ID NO: 42311 - protein, 340 aa, Homo sapiens
MAVHQWLDIPKKWNKIKLVVTQEDVELAYQEAMMNMARLNGTAAGLMHTFNAHAATDIKGFGIWGHVQNLAKQQRNEVSFVIHNLPVLAKMAAASKAKSRCTIRYENPKREQVSEQEVTGQPLKESCILRLEEGRMSLSRQNNGHQGIGKVKRKRRIKTVQCHDSSSEKTFHKERGDNPMNEPCRSRRMKAEISAAEITGSTRQSGAQQSGAGIMTPSSFCLGPFECGSIILSAQRARSGPTLIVGAIHNIEPVAYVCLTNTIRYIHGSYHPTQEAGHHPRCLPVFDLPPLAEKDEMIDVEFRIWIAMKIIEIQEKVETQSKKPKESSKIIPELKAKIAI

SEQ ID NO: 42312 - protein, 393 aa, Homo sapiens
  DOMAIN (56)..(377): AIR synthase related protein domain identified by PFam, accession name AIRS, E-value=2.6e-26, PFam score of 100.8
GERGPRTMSTRESFNPESYELDKSFRLTRFTELKGTGCKVPQDVLQKLLESLQENHFQEDEQFLGAVMPRLGIGMDTCVIPLRHGGLSLVQTTDYIYPIVDDPYMMGRIACANVLSDLYAMGVTECDNMLMLLGVSNKMTDRERDKVMPLIIQGFKDAAEEAGTSVTGGQTVLNPWIVLGGVATTVCQPNEFIMPDNAVPGDVLVLTKPLGTQVAVAVHQWLDIPEKWNKIKLVVTQEDVELGLPGRRLMNMARLNRTAAGLMHTFNAHAATDITGFGILGHAQNLGQASRRNDVSFVIHNLPGAWPRWLAVSKACGNMFGLMHVTCPETSGGLLICLPREQAARFCAEIKSPKYGEGHQAWIIGIVEKGNRTARIIDKPRIIEVAHKWPLKM

SEQ ID NO: 42313 - protein, 53 aa, Homo sapiens
  misc_feature (1)...(53): Xaa = X or * as defined in Table 2
RPLQIRSHSELLGVWTPTSEFXEDTTQSVTAGLLEVSWGRVVLCSKSFPALQS

SEQ ID NO: 42314 - protein, 172 aa, Homo sapiens
MTVKTSDTCSSRRRSQLVYSSHVFAQTPAAAGTGGTPSHSAHRVDQVDWSCPEMTYCKEPLFPTRLREDPLSRTELCPLKIQMLESKPPVTQSVNVFEEVFKEVMKGTSTHSMGSLCDPLPCFRMGLREEEAWHAGRLARGEVRAWGLVMISLVKHKFTDKTKDVKTVMVEH

SEQ ID NO: 42315 - protein, 76 aa, Homo sapiens
GISSSVLRMGPPLHTVVGWLQQLQAAHSEEEEKMFHLCGFKHKEVVSQSSLPAVIPQNSLATIASHAREALCGVGG

SEQ ID NO: 42316 - protein, 115 aa, Homo sapiens
  DOMAIN (40)..(76): Ribosomal protein S9 proteins domain identified by eMATRIX, accession number BL00360B, p-value=3.769e-16, raw score of 20.22
  DOMAIN (2)..(88): Ribosomal protein S9/S16 domain identified by PFam, accession name Ribosomal_S9, E-value=5e-21, PFam score of 70.5
MAIAVVLCRCGSGFIRMNEGPLEMIKLLTLQYKLLELGLLLDKEQLAGMDIHVRVKGSGHVVQIYAVLQYISKALVPCYPKYVDEASEEIKDTLTRPCWWFTPVAMSHCLLFPSA

SEQ ID NO: 42317 - protein, 162 aa, Homo sapiens
QWRNSSHRCLLLHPPLRRLPPALPPPPPPCCCSKLLPPLGLKGFQMEHFDASLSTYFKALLGPRDTRVKGWFLLDNYIPTFICSVIYLLIVWLGPKYMRNKQPFSCRGILVVYNLGLTLLSLYMFCELVTGVWEGKYNFFCQGTRTAGESHMKIIRVLWRDY

SEQ ID NO: 42318 - protein, 138 aa, Homo sapiens
PSHRCLLLHPPLRRLPPALPPPPPPCCCSKLLPPLGVKGFQMEHFDASLSTYFKALLGPRGISSSVLRMGPPLPQWVFVRENNFGGSLTQQLQAAHSEEEEKMFHLCGFKHKEVVSQSSLPAVIPQNSLATIASHAPA

SEQ ID NO: 42319 - protein, 116 aa, Homo sapiens
  DOMAIN (14)..(29): LIM domain proteins domain identified by eMATRIX, accession number BL00478B, p-value=5.750e-12, raw score of 14.79
  DOMAIN (11)..(108): LIM domain containing proteins domain identified by PFam, accession name LIM, E-value=2.6e-12, PFam score of 48.6
VITSGGITFCDQLWHKECFLCSGCRKDLCEEQFMSRDDYPFCVDCYNHLYANKCVACSKPISGLTGAKFICFQDSQWHSECFNCGKCSVSLVGKGFLTQNKEIFCQKCGSGMDTDI

SEQ ID NO: 42320 - protein, 236 aa, Homo sapiens
  DOMAIN (53)..(98): kw TRANSCRIPTASE REVERSE II ORF2 domain identified by eMATRIX, accession number DM01354N, p-value=1.000e-40, raw score of 13.17
MEYYAAIKNDEFMSFVGTWMKLETIILSKLLQGQKTKHRMFSLIEIQTTIREYYKHLYANKLENLEEMDKFLNTYTLPRLNQEEVESLNRPITGSEIVAIINSLPTKRSPGPDGFTAKFYQRKINSRWIKDLNVRPKTIKNLEENLGNTIQDIGMGKGFITKTLKEMATKAKIDKWDLIKLKRFFTAKDTIIVVNRQPTEWDKCFSMYPSDKGLISRSYKELKQISENKTTPSKSV

SEQ ID NO: 42321 - protein, 63 aa, Homo sapiens
SRAPTSRTWRAGGRRCRARPGATRGPPTCCSTLLEQRSSYALRACRSSLVSAGDVLQQRLQGR

SEQ ID NO: 42322 - protein, 388 aa, Homo sapiens
MEHYAAIKIDEFMSFVGTWMKLETIILSKLSQGRKTKHRMFSLIGKDPPHLCRSLTIPLEGLGGSGFCIQSLLTLVPPAGPRREFRRGFRQLRGVVNSLRKNGSIQSRYISMSVWTSPRRLVELAGQSLLKDEALAIAALELLPRELFPPLFMAAFDGRHSQTLKAMVQAWPFTCLPLGVLMKGQHLHLETFKAVLDGLDVLLAQEVRPRRWKLQVLDLRKNSHQDFWTVWSGNRASLYSFPEPEAAQPMTKKRKVDGLSTEAEQPFIPVEVLVDLFLKEGACDELFSYLIEKVKRKKNVLRLCCKKLKIFAMPMQDIKMILKMVQLDSIEDLEVTCTWKLPTLAKFSPYLGQMINLRRLLLSHIHASSYISPEKEEQYIAQFTSQFL

SEQ ID NO: 42323 - protein, 137 aa, Homo sapiens
MEYYEAIKKDEFMSFAGTWMKLETIILSKLSQEQKTKHCRFSLTCERPGDVFTDEGVGAHGPGRAEAAREERGRALVHPSHRPSPPKMQRDSEGGDGEINTFDFVAKVNGNCHPEGDLGTGLPALAIPGAGGAGTGA

SEQ ID NO: 42324 - protein, 332 aa, Homo sapiens
  DOMAIN (195)..(250): Beta-lactamase class-A proteins domain identified by eMATRIX, accession number BL00146C, p-value=1.000e-40, raw score of 25.08
  DOMAIN (80)..(290): Beta-lactamase domain identified by PFam, accession name beta -lactamase, E-value=6.8e-106, PFam score of 365.2
MIDWIKKIWHIYTVEYYAAIKKDEFMSFVGTWVKLETIILSKLLQGQKTKHRMFSLLGESDEITWTQEGEHHTLGPVETLVKVKDAEDQLGARVGYIELDLNSGKILESFRPEERFPMMSTFKVLLCGAVLSRIDAGQEQLGRRIHYSQNDLVEYSPVTEKHLTDGMTVRELCSAAITMSDNTAANLLLTTIGGPKELTAFLHNMGDHVTRLDRWEPELNEAIPNDERDTTMPVAMATTLRKLLTGELLTLASRQQLIDWMEADKVAGPLLRSALPAGWFIADKSGAGGRSLWKNASNAAFLRFLAFCWPFAHMFFPALSPDSVDNRITAFE

SEQ ID NO: 42325 - protein, 247 aa, Homo sapiens
MEYYAAMKKDEFMSFVGTWKKLETIILSKLSQGQKTKHHVFSLIDGNSIMRTLGHRDWTSSRLVESMSSSIQEGEAAAVSPGDSVWEQLQAGKSLMARELPTDQRERDFTEISQGINSSGDVGYRRGKHLYALLPAAPTEEAQLEGQGRNHKHGQGGRRTLGVAAVTDYGRVCKIPKHTRFASVAECRFENHSKSEDQKGQLLGGAEGAIEGVDVCHDKDQKVRHQEPKSQDIHQRLLVKLFRFPAR

SEQ ID NO: 42326 - protein, 148 aa, Homo sapiens
MEYYAAIKKDEFMSFAGTWMKLETIILSKLSQGQKTKHRMFSLTGILVQNQKSLHQRLQSYYTYSLLKVNGPFGDSWAIYMNPIPKTSLEEEQNLRATDSASSLIALGTLNSNENGRRTATHNWQRSLHLIQKLIQDGLKTYMLDLKP

SEQ ID NO: 42327 - protein, 185 aa, Homo sapiens
MEYYAAIKKDDFVSFVGTWMKLETIILSKLLQGQKTEHRMFSLIGLVTRPAAVPAAFGSLLEMHSPELHTTPCESETLEVVLGICGVRARIRNHGHSCVLCEIVIAHISHTYELEHKCKAVDLPIVFMGHIKAPNTLLTLLMLKIFPHVSRDPSITTDSTNTHKLEESETLKSQDLDGLRDCSRL

SEQ ID NO: 42328 - protein, 747 aa, Homo sapiens
MEYYAAIKKDEFMSFVETWMKLETIMLSKLSQGQKTKHRMFSHNSPQNKPPAAPVINEYADAQLHNLVKRMRQRTALYKKKLVEGDLSSPEASPQTAKPTAVPPVKESDDKPTEHYYRLLWFKVKKMPLTEYLKRIKLPNSIDSYTDRLYLLWLLLVTLAYNWNCCFIPLRLVFPYQTADNIHYWLIADIICDIIYLYDMLFIQPRLQFVRGGDIIRFQESYPSFSPIWFVDCDDPNLTSVLERPEDTENNNYLRQQLKCTWMFEMLDQPLPMGQNGKIEVTSEEEEEEMAGDIKYLNHCKMKKEELISGKKLEDEGIEKENLATLEKIRKTQSQGHLNVMWCLGSGETTKPRNSGSTGRRKESKQLKAGSQREWLQVQIQTIGILMSEKAELWTALYYTQHAARQFEGESKDLASCLQYSWRVQDNEGLSLLNREQEERLLELEQKAELWEEQVEVHRQTLETMQNDLTTISHAVFQNGELKEQLAKLQTGFMKLNNENMEITSTPQSEQHIKKEPSEKLGDGLDSEEEALPLMPSIPEELESREAMVAFLNSAVASAEEEQAWPRGQLKEQRGAMEKLQSHFMELMQEKVDLKEQMEKLERRCIQLSGETDVIIHHTVPELEVSAEDVAPEGIHQQPGPGQGGDEGEAAGAAGAAGAAGAGGIPEEGIVIIGNDSSTHVMEPEDLPVGQDVDVEDSDIDDPDPVVIRTTGYLLFILHINACVYYWASNYEGIGTTRWVYDGEGNE

SEQ ID NO: 42329 - protein, 136 aa, Homo sapiens
MEYYAAIKKDELMSFAGTWVKLETIILSKLSHGQKTKHRMFSLIDTVVVGSDDFPLLRVPGCCASSLNAAHTSVNIKLELTPVRKTLRMREAHPTRRIMGKRQAHEVLATSRILSSEQAKAEFAPDTYGFAVGKSG

SEQ ID NO: 42330 - protein, 140 aa, Homo sapiens
MEYYAAMKNDEFMSFVGTWMKLETIILSKLSQGQKPNTACSHSWMDPQRRGKRQSLSISEAGANQFPKSVFRFFGLGDSKVGSKWSATCACEPIHTSEYCGDRVICKTTSSLRGASFAWCSSGNGERSRMAYIIMIVASV

SEQ ID NO: 42331 - protein, 168 aa, Homo sapiens
  DOMAIN (45)..(92): Synapsin domain identified by PFam, accession name Synapsin, E-value=1.5e-18, PFam score of 72.8
MEYYAAIKKDEFVSFVGTSMKLETIILSKLSQGQKTKHRMFSLIGSSLFSSLSSAMKQAPQATSGLMEPPGPSTPIVQRPRILLVIDDAHTDCPSQEDRRFSVFPFLVQGLPVESGFVVDRHTHPDPAALIFAALAKTRYQTLDGWVDGDLRKVTPDLQTELAAFSVG

SEQ ID NO: 42332 - protein, 175 aa, Homo sapiens
  DOMAIN (14)..(63): kw TRANSCRIPTASE REVERSE II ORF2 domain identified by eMATRIX, accession number DM01354Z, p-value=2.207e-18, raw score of 9.06
RFLNLKTVQLNTKTKTNHLSRKPNLSKCQQLLNMDNGPTTTDWIKKMWHIYTMEYYAAIKNDEFMSFVGTWMKLVTIILSKLSQGQKTKHRMFSLTEIQKTLRDYYEHLYAHKLENLEKLEMDKFLETCNLPRLTQEEIESLNRSITSSETESVIKSLPTRKGPGPGGFTAKFYQ

SEQ ID NO: 42333 - protein, 42 aa, Homo sapiens; identical to SEQ ID NO: 41468

SEQ ID NO: 42334 - protein, 220 aa, Homo sapiens
MEYYAAIKKDEFMSFVGTRMKLETIILSKLSQGQKTKHRMFSLIGSGSPSAAVYTAVLTACTAGWVPATHRRAVGTQKGVVARVPEQVKGDLRAGSFLKTAQAFLGSVVSFHQDAGLCYTPPVMASVPLGAVDSSPSSQHEKGLEPLGRGQAITGERTSWESNMNYKAAAACVTLKRASIAQLPTWPLPEDLITTAAHSAVSLSSFESLLKCHFLNKATD

SEQ ID NO: 42335 - protein, 193 aa, Homo sapiens
MEYYAAIKMDEFMSFVGTWMKLETIILSKLSPGQKIKHRMFSLIGAPVDNGPRVCRFPHCRTSHRAPSADQTNPARPRRRRASYGTLVERTATLLEQRRAARWWATGGAGPCATTPATSPPCPRCGRPRSGARVVEGFLHRLRASPASSSYCVAAAGTCTCLLPELMSGWAPRAHPARAVQSGGHGLSWGLNV

SEQ ID NO: 42336 - protein, 980 aa, Homo sapiens
  DOMAIN (10)..(65): kw TRANSCRIPTASE REVERSE II ORF2 domain identified by eMATRIX, accession number DM01354Q, p-value=1.000e-40, raw score of 9.23
  DOMAIN (1)..(238): Reverse transcriptase domain identified by PFam, accession name rvt, E-value=2.7e-49, PFam score of 177.2
MNIDAKILNKILANRIQQHIKKLIHHDQVGFIPGMQGWFNIRKSINIVQHINRTNDKNHMIISIDAEKAFDKIQQRFMLKTLNKLGIDGTYLKIIRAIYDKSTANIVLNGQKLEAFPLKTGTRQGCPLSPLLFNIVLEVLARAIRQEKEIKGIQLRKEEIKLSLFADDMIVHLENPIVSAQNLLKLIDNFSKVSGYKINVQKSQAFLYTNNRQTESQIMSELPFTIASERIKYLGIQLTRDVKDLFKENYKPLLNDIKEDTNKWKNTPRSWVGRINIMKMAILPKVIYRFNAIPIKLPMTFFTELEKTTLKFIWNQKGARIAKSILIYRFNAQELEKTTLKFIWNQKGARIAKSILSQKNKAGGITLPDFKLYYKATVIKTAWYWYQNRDIDQWNRTEPSEIMPHIYNHLIFDKPDKNKKWGNDSLFNKWCWENWLAICRKLKLDPFLIPYTKINSRWIKDLNVRPKTIKTLEENLGNTIQDIAMGKDFMSKTPKAMATKAKIDKWDLINLKSFCTAKETTIRVNRQPIEWEKIFAIYSSDKGRISRIYNELKQIYKKKTNNPIKKWAKDMNRHFSKEDIYAAKRHMKKCSSSLAIREMHIKTTMRHHLTSVRMAIIKKLGNDWCWRGCGEIGRLLHCWWDCKLVQPLWKSVWRFLRDLELETPFDPASPLLGIHPKDYRSCCYKDTCTRMFTAALFTIAKTWNQPKCPSMIDWIKKMWHIYTMEYYAAIKKDEFMSFAGTWIKLETIILSKLSQGQKTKHHMFSLIGLAVLKHVLTPRIKATHVAFDCMKNYLDAIYDVTVVYEGKDDGGQRRESPTMTVDWIVADILAIRQNALGHVRYVLKEGLKWLPLYGCYFAQHGGIYVKRSAKFNEKEMRNKLQSYVDAGTPCYRQPRNKKLEPASKSILTSLKGPANAYHHQPHPNGSPVTMVTAASPPDCELHRGPKGNLVWLNEGTSPDLAQKLGNSPRRLKIPKLCLVA

SEQ ID NO: 42337 - protein, 1426 aa, Homo sapiens
  DOMAIN (417)..(442): 7 kw REVERSE TRANSCRIPTASE RNA POLYMERASE domain identified by eMATRIX, accession number DM00895E, p-value=3.333e-11, raw score of 15.72
  DOMAIN (388)..(1268): Reverse transcriptase domain identified by PFam, accession name rvt, E-value=6.9e-84, PFam score of 292.1
MEYYAAIKKDEFMSFVGTWMMLETIILSKLSQGRKPKRRMLSLIGSQLLTNKGTSWMENEFDELTEVGFRRTLHPKSTTEYTFFSAPHCTYLKIDHIIASKTLLSKCKRTEIITNGLSDHSVIKLELKIKKFTQNCTTTWKLKNLLLNDYWVNNEIKAEIKMFFETSENEDTMYQNLWDTFKPLCRGKFIALNAHKRKQRRSKIDIQTAQLKELEKEQQTNSKASRRQEITKIRAELKVTETRKTLQKINESRSWFFERINKIDRLLARLIKKKREKNQIDTIKNDKGDITTDPTEIQTTIREYYKHLYANKLENLEEMDKFLNTYTLPRLNQEEVESLNRPITGAEIVAIINSLPTKKSPGPDGFTAEFYQRYKEELVPFLLKLFQSIEKEGILPNSFYEASIILIPKPGRDTTKKENFRPISLMNIDAKILNKILANRIQQHIKKLIHHDQVGFIPGMQGWFNIRKSINVIQHINRAKDKNHMIISIDAEKAFDKIQQLFMLKTLNKLGIDGTYFKIIRAIYDKPTANIILNGQKLEAFPLKTGTRQGCPLSPLLFNIVLEVLARAIRQEKEIKGIQLGKEEVKLSLFADDMIVYLENPIVSAQNLLKLISNFSKVSGYKINVQKSQAFLYTNNTDKQESQIMSELPFTTASKRIKYLGIQLTRDVKDLFKENYKPLLNEIKEDTNKWKNVPCSWVGGRINLVKMAILPKVIYRFNAIPIKLPMTFFTELEKTTLKFIWNQKRALIAKSSLSQKNKTGGITLPDFKLYYKATVTKTSWYWYQNRDIDQWNRTEPSEIMPHIYNYLIFDKPDKNKQWGKDSLFNKWCWENWLAICRKLKLDPFLTPYTKIDSRWIKDLHVRPKTIKTLEENLGNTIQDIGMGKDFMSKTQKAMATKAKIDKWDLIKLKSFRTAKETTIRVNRQPTTWEKIFAIYSSDKGLISRVYNELKQIYKKKTNNPIKKWAKDMNRHFSKEDIYAAKKHMKKCSSSLAIREMQIKTTMRYYLTPVRMAIIKKSRNNRCRRGCGEIGTLLHCWWDCKLVQPLWKTVWRFLKDLELEKPFDPAIPILGIYPKDYKSCCYKDTCTCMFTEALFTTAKTWNQPKCPKMIDWIKKMWHIYTMEYSAAIKKDEFTSFVGTWMKLETIILSKLSQGQKTKHRMFSLIVLEVLARAIRQEKEIKGIQLGKEEVKLSLFADDMIVYLENPIMSAPNLLKLISNFSKVSGYKINVQKSQAFLYTNIRQIESQIMSELPFTIATKRIKYLGIQLSRNVKELFKENYKPLLKEIKEDTNDWKNIPCSWIGRVNIVKMAMLPKVIYRFSAIPIKLPMTFFTELEKTTLKFIWNQKRACIAKTILSKKNKAGGITLPDFKLYCKATVTKTAWYWVPKQIYRPMEQNRDLRNNTTHLQPSDLSQTRQKQATRKGFPI

SEQ ID NO: 42338 - protein, 215 aa, Homo sapiens
  DOMAIN (181)..(201): F-ACTIN CAPPING PROTEIN ALPHA SUBUNIT SIGNATURE domain identified by eMATRIX, accession number PR00191C, p-value=2.620e- 21, raw score of 11.49
  DOMAIN (1)..(211): F-actin capping protein alpha subunit domain identified by PFam, accession name F-actin_cap_A, E-value=3.7e-13, PFam score of 40.3
MKTEIKVFFETNENKDTTYQNLWDTFKAVRRGKFIALNTLKGKEERSKINTLTSGLKDLEKQEQTNSKASRRLYKHGIHICLASGESLRKLTFMRVCVKRPPNRLCVSNKAVYFTWVQVAGVLKIHYYEYGNVQSVSHKDVQDSLTVSNEVQTAKEFIKIIGNAENDHQTATSENYQTMSDTTFQALRRQLPVTRRKIDWNKILIYQIGKEMQNA

SEQ ID NO: 42339 - protein, 120 aa, Homo sapiens
  DOMAIN (57)..(77): RIBOSOMAL PROTEIN S19 FAMILY SIGNATURE domain identified by eMATRIX, accession number PR00975A, p-value=8.500e-19, raw score of 15.68
  DOMAIN (26)..(104): Ribosomal protein S19 domain identified by PFam, accession name Ribosomal_S19, E-value=3.8e-37, PFam score of 131.0
LDQLLDMSYEQLMQLYSCAQRRRLNPGLRRKQHSLLKRLRKAKKEAPPMEKPEVVKTHLRDMIILPEMVGSMVGVYNGKTFNQPEMIGHYLGEFSITYKPVKHGRPGIGATHSSRFIPLK

SEQ ID NO: 42340 - protein, 173 aa, Homo sapiens
  DOMAIN (77)..(97): RIBOSOMAL PROTEIN S19 FAMILY SIGNATURE domain identified by eMATRIX, accession number PR00975A, p-value=6.657e-16, raw score of 15.68
  DOMAIN (46)..(103): Ribosomal protein S19 domain identified by PFam, accession name Ribosomal_S19, E-value=4.9e-23, PFam score of 83.0
MAEVEQKKQTFRRFTYRGVDLDQLLDMSYKRLMPLYSARQQRRLNRGLRRKQHSLLKCLRKAKKEALPMEKPEVVKTHLRDVIILPEMVGSMVGVYNGKTFNQHFREHLDKLFAKGIGMLDIALNEAFNILSDKCGGGYPRRTVTMEGRTCPVEVGTMEETQSRPENAYPLRA

SEQ ID NO: 42341 - protein, 197 aa, Homo sapiens
  DOMAIN (160)..(176): RIBOSOMAL PROTEIN S19 FAMILY SIGNATURE domain identified by eMATRIX, accession number PR00975C, p-value=4.429e-18, raw score of 16.18
  DOMAIN (68)..(187): Ribosomal protein S19 domain identified by PFam, accession name Ribosomal_S19, E-value=6e-11, PFam score of 42.0
  misc_feature (1)...(197): Xaa = X or * as defined in Table 2
PPPRSSEDPAKMAEVEHEEGSGPFRKFTLPAAVDLDQLLDIVPTKQFDAAVQVAAQRRRLEPGGLRRKQHSPAXKRLRKAKKGGPAPWRKPEVVKTHTLRDYDHSYPEMVGSMVGVYNGKTFNQVGDQGVCGRPCRLGWAGVAXCRRDQLTPSFALGLPQPEMIGHYLGEFSITYKPVKHGRPGIGATHSSRFIPLK

SEQ ID NO: 42342 - protein, 72 aa, Homo sapiens
  misc_feature (1)...(72): Xaa = X or * as defined in Table 2
RTASYPRRFPWDHLLICPCQQLLICFLSLWIRLVFTKVSCTXNHNNMFSCVWLLLLSMIFLRFTHIACIRNI

SEQ ID NO: 42343 - protein, 32 aa, Homo sapiens
  misc_feature (1)...(32): Xaa = X or * as defined in Table 2
MFSCVWLLLLSMIFXRFTHIACIRNIILXIIE

SEQ ID NO: 42344 - protein, 61 aa, Homo sapiens
LLLLLYGCEKTTEGRNKLWYIHTIEHYSIIKRIIFLIHAIWVNRKNIMLSKRSQTQENMLL

SEQ ID NO: 42345 - protein, 228 aa, Homo sapiens
HASDQKEIIIEPFQAVDEVERVPEDYYTGPVYLTEVTTLQQRLLQPDFQPVCASQLYPRHKHLLIKRSLRCRKCEHNLSKPEFNPTSIKFKIQLVAVNYIPEVRIMSIPNLRYMKESQVLLTLTNPVENLTHVTLLECEEGDPDDINSTAKVVVPPKELVLAGKDAAAEYDELAEPQDFQDDPDIIAFRKANKVGIFIKVTPQREEGEVTVCFKMKHDFKNLAAPISP

SEQ ID NO: 42346 - protein, 294 aa, Homo sapiens
MESRVLLTLTNPVENLTHVTLFECEEGVPDDINSTAKEVHPALHIWMEFTPQGNSITSDLIRTVHVSEGALVKVALPEMKVPGPVIYPSHSPGYLLEVPGSQNGSACSRQSASEEQAGRRRAAGQPWTEARAQPVAVPEGVVSGYSEGRPTPCAFQIPDGSYRCLALEAEESSGEEGLQGEVGPTDLEEDEGVSRSGDDSACRVTQGTPQLPKALGIQPPSCSREEQGASQHDDRASQDWDVVKAGQMMTASPSPGPGPRVAQKPEQGGTGKPTLNHLHSQPMETLKWVQMGRT

SEQ ID NO: 42347 - protein, 84 aa, Homo sapiens; identical to SEQ ID NO: 36673
  misc_feature (1)...(84): Xaa = X or * as defined in Table 2

SEQ ID NO: 42348 - protein, 132 aa, Homo sapiens; identical to SEQ ID NO: 36468
  misc_feature (1)...(132): Xaa = X or * as defined in Table 2

SEQ ID NO: 42349 - protein, 95 aa, Homo sapiens
ALELMTKYFNNWNWVYDNVINHDESELNLKHIKIDLDKFSDNPDGYIDVLQGLGQSFDLTWRDIMLLLDQTLTPSERSAAITAAREFGNLWYLSQ

SEQ ID NO: 42350 - protein, 74 aa, Homo sapiens
MKQTSKILLQLPVWPSAIPALYSMPGISHFELRIYHVNVLLTFIGNFTCKTLYISMCCQTINIWPCLFYSFTTK

SEQ ID NO: 42351 - protein, 378 aa, Homo sapiens
MEHYAAIKIDEFMSFVGTWMKLETIILSKLSQGRKTKHRMFSLIGKDPPHLCRSLTIPLEGLGGSGFCIQSLLTLVPPAGPRREFRRGFRQLRGVVNSLRKNGSIQSRYISMSVWTSPRRLVELAGQSLLKDEALAIAALELLPRELFPPLFMAAFDGRHSQTLKAMVQAWPFTCLPLGVLMKGQHLHLETFKAVLDGLDVLLAQEVRPRRWKLQVLDLRKNSHQDFWTVWSGNRASLYSFPEPEAAQPMTKKRKVDGLSTEAEQPFIPVEVLVDLFLKEGACDELFSYLIEKVKRKKNVLRLCCKKLKIFAMPMQDIKMILKMVQLDSIEDLEVTCTWKLPTLAKFSPYLGQMINLRRLLLSHIHASSYISPEKEEH

SEQ ID NO: 42352 - protein, 45 aa, Homo sapiens
  misc_feature (1)...(45): Xaa = X or * as defined in Table 2
NKTRMPSLTTPLQHSTESPSQSSQTREGNKGYPNWXRGSHTVTVC

SEQ ID NO: 42353 - protein, 86 aa, Homo sapiens
  misc_feature (1)...(86): Xaa = X or * as defined in Table 2
XTRMKLETIILSKLSQGRKTKHRMFSLIERASPSAPQIQYLQGAAVTHSGLAIDVAGIYTIGILGSQAFGLGLNYSTSFPGSPACR

SEQ ID NO: 42354 - protein, 290 aa, Homo sapiens
  DOMAIN (64)..(112): Ribonucleotide reductase large subunit proteins domain identified by eMATRIX, accession number BL00089H, p-value=4.500e- 34, raw score of 28.49
  DOMAIN (75)..(139): Ribonucleotide reductase domain identified by PFam, accession name ribonucleo_red, E-value=5.6e-42, PFam score of 112.0
MEYYAAIKKDEFMSFVGTWMKLETIILSKISQEQKTKHRMFSLIDQGSPTPGPRTCVSPWPVRDWAAQQEMSGGYGIRNSLLIAPMPTASTAQILGNNESIEPYTSNIYTRRVLSGEFQRLNSAIIYDRDFSYNYFGFKNGQQSQQLGGHQVRKAEWVADGKVTSPGPGPEEVVVQEEGEVDKEHLGQAAMQRYGVSIIYKALQHFRHHGCGSTNIDSQEHSDEHTRRLMQILPGNHCVDDQGIGRDDGHKEEDKRQDQKGPPLSKSRETHQEELGAGDVEGACISILTH

SEQ ID NO: 42355 - protein, 73 aa, Homo sapiens
  misc_feature (1)...(73): Xaa = X or * as defined in Table 2
ELSSCSLMSHRAIHHPSEERATTTNQQSEPGSWXGWVGANRWCHKMSSGGSLGTEPCGSCLACSAWTVTVQAQ

SEQ ID NO: 42356 - protein, 100 aa, Homo sapiens
  misc_feature (1)...(100): Xaa = X or * as defined in Table 2
RLSLQTAGCSDVPVFPSAPSGPPSPAXAPXSGSAASPWPPFAPSAAHVAMPAPPRHWPQLSLKMPPWPPDSPVPPGCLAXAEAPPPHCPVHLPASRSALS

SEQ ID NO: 42357 - protein, 126 aa, Homo sapiens
  misc_feature (1)...(126): Xaa = X or * as defined in Table 2
KSVHSLPPSFSSLLPWTCNRTLSKPPALPSPSRQPECRRRLLHCSGSRHSSCPSSSSSPSFSSSPSPSSSSSASASPPPPPSPSPAPPXLWLQPLFCSQXQLCHCQELVHLESRLTYPYHSSNQPF

SEQ ID NO: 42358 - protein, 157 aa, Homo sapiens
MGYYAAIKKDEFMSFVGTWMKLKTIILSKLSQGQKTKHCMFSLIAWAVLIEHSKCGPCSDIPASALLFQPQPQQTLPYKITSGLQPPTYQGRGLGTMSSPVTMNNKNTQIVVSKHHILSVETGLLGEMADSKPGPGNILDEHGISCIPDSFKAIKGY

SEQ ID NO: 42359 - protein, 139 aa, Homo sapiens
  misc_feature (1)...(139): Xaa = X or * as defined in Table 2
MEYYAAMKNDEFMSFVGTWMKLETIILSKLSQGQKPNTACSHSWMDPQRRGKRQSLSISEAGANQFPKSVFRFFGLGDSKVGSKWSATCACEPIHTSEYCGDRVICKTTSSLRGASFAWCSSGNGEXWFPASSMSLQRT

SEQ ID NO: 42360 - protein, 127 aa, Homo sapiens
MIITGLEDYEMGLRMEGTLEIPGHYQKDKFLAQSTPDLLLPKTSLTNPFSINQILAERQIVTFTVYPDTERDRETRNLADLKQIKIDLGKFSDNPDGYIDILRGLRQSFDLTWRDIMLLLNQTLAPN

SEQ ID NO: 42361 - protein, 28 aa, Homo sapiens
GTGLLSSLMVTWRSGLLEVTKDAMPGSR

SEQ ID NO: 42362 - protein, 151 aa, Homo sapiens
LFSLDFPFKWEGSLCSVFVSTACPLEGFSAATASITPDALSSKLQYTAPPPSPPPSSSILRPLPQPASRGPAAEGPRAGDAAGGSAQATGRLLSARPGSRPGLLPPGGASLVGVPSRDPCPASARGGRGVRPRSPALGNRPGRRRLRWGRL

SEQ ID NO: 42363 - protein, 45 aa, Homo sapiens
  misc_feature (1)...(45): Xaa = X or * as defined in Table 2
SWKPSFSANYHKDRKPNTACSHSXDPAFLAPSPVPXSRPLRPPQD

SEQ ID NO: 42364 - protein, 217 aa, Homo sapiens
  misc_feature (1)...(217): Xaa = X or * as defined in Table 2
SVSGLVEKVTFEQRLKGGEGDSTVGSSGNEIFRQWPCWELSNGCSLQGDAGCSCLVVHVTFPAGSLSGDGLPTAQWLQSLLVLAGGRRVNSTQGHRCHHWGSVAEPCVLVKRHHAAQEGLCSFQKTPRSQVPFHLFWDPGHHTLLCSYCPSGVAGTQPAVQAVSTAVXTAAEGEPLPMSENMRCLVFCPCDSLLRMMVSSFIRVPTKDMNSSFFMAA

SEQ ID NO: 42365 - protein, 328 aa, Homo sapiens
  DOMAIN (124)..(159): Matrix protein (MA) p15. domain identified by eMATRIX, accession number PF01140D, p-value=9.325e-10, raw score of 15.54
  DOMAIN (261)..(325): Gag P30 core shell protein domain identified by PFam, accession name Gag_p30, E-value=3e-09, PFam score of 35.8
  misc_feature (1)...(328): Xaa = X or * as defined in Table 2
MLVLGYNRKNTEGTQKQKGTNASDFHFLSQVLEQVVSPKGSKEAQCCVLRHLGCESSESAPGIPPNLGIQLLTWAVMWDPFPTTLARAPSLALELMTQYFNNWNWVYNNITDQGESKMSKLKGKERRQREGERRERKREREKRERESQRKERKREKKGKKREREKDRSDLKQIKIDLGKFSDTPDGYIDVLQGLGQPYYLTWRDIMLLLDQTLTPNERSAAITAVREFGDLWYLSQVNDRKITEEREQFPTGQQAVPSVDPHWDTESEHGDWCHRYLLTDVLEGLRKTRKKPINXSMISTITQGKEENPTAFLERLREALRKHTSLSP

SEQ ID NO: 42366 - protein, 75 aa, Homo sapiens
  misc_feature (1)...(75): Xaa = X or * as defined in Table 2
CLASWKEKSLLHCPQRKQRLRGEELEKLKKWKETATQIKRSYCWIXPSKSPHYLTSXKRXWNYXXLGNYNSIPAS

SEQ ID NO: 42367 - protein, 288 aa, Homo sapiens
  DOMAIN (94)..(282): Gag P30 core shell protein domain identified by PFam, accession name Gag_p30, E-value=1.9e-13, PFam score of 50.6
MRQIQMRKRKTSVKIELQILNEPSPALGLTPEHKGNVGHTGKGPLESSSPDPFLCGQERGKQVQDCYIDGKCSPQGKNALKMYSGEFDPVRVCVPFSLSDLKQLKIDLGRFSDNPDGYIDVLQGLGQSFDLTWRDIMLLLDQTLTPNERNATITAAREFGDLWCLSQVNDRMTTEQRERFPTGQQAVPSVDPRWDTESEHGDGCHRHLLTCMLEGLRKTKKKPMNYSMMSTITQGKEKNPNAFLERLRQALRKHTSLSPDSIEGQLILKDKCITLSAADIRKNFRSPP

SEQ ID NO: 42368 - protein, 224 aa, Homo sapiens
MEYYAAIKNDEFTVFVGTWMKLETIILSKLSQGQKSKHRMFSLIDLKRIKIDLGKFSDNPDGYIDILQGLGKSFDLTWRDIMLLLDQTLTPNERSAAITAAREFDDLWYLGQVNDRMTTEEREQFPTGQQAVPSVDPHWDTESEHGDWCHRHLLTCMLEGLRKTRKKPFASSTIETAKLQIILQMESQMQSMTKIYCVPLNWPASPCSNVNDIEVTPPKEISTA

SEQ ID NO: 42369 - protein, 90 aa, Homo sapiens
  misc_feature (1)...(90): Xaa = X or * as defined in Table 2
TDSPHCTDPPSRPTVPASCLKRKCCGSTMPTARPIMPTLMETRXMPISPRVSWAGPRPTSWPALISSTLFPRMANHWRDXSRITWFQGQA

SEQ ID NO: 42370 - protein, 125 aa, Homo sapiens
  DOMAIN (30)..(56): Nuclear transition protein 2 proteins domain identified by eMATRIX, accession number BL00970B, p-value=6.341e-09, raw score of 10.09
  misc_feature (1)...(125): Xaa = X or * as defined in Table 2
TRAAGIRHEGKPEKTGLKRNFTNDCRKSXTSGXRSTTSSRSRSPSPAPRSRSCSRRDLPAPPPLSRSGDRPQTAPSCPMWRARLPSCPGSAIPIPRPAWTRSACCGAASTRLRPFSGSSTSPQWM

SEQ ID NO: 42371 - protein, 105 aa, Homo sapiens
SIFPVHKLGGQTSKFTVSMRKRPSLKENSLDGRSYEFIRHPSQRRIRAKRWKIRQKSVLTPMPSLGKYCHCPMIIYGHGVPSCKHSCFIFPETHWGLSLKKPSPF

SEQ ID NO: 42372 - protein, 72 aa, Homo sapiens
  misc_feature (1)...(72): Xaa = X or * as defined in Table 2
PNWFKHDVSKSESFSNKMWIAKILKAARPAPLTQCVRNSCFLQCRHLSSVSASDLTXDNVKRQFCVSPHTES

SEQ ID NO: 42373 - protein, 537 aa, Homo sapiens
  DOMAIN (141)..(168): Protamine P1 proteins domain identified by eMATRIX, accession number BL00048, p-value=8.538e-09, raw score of 6.39
ESNPAANDPPLYSQQPSAVAQAPGDNRQRAAIIREWTNTAAETGEGIVDDQHRVANVTAAVATATLKSLQAQEDARHRNTDQRSSENRRSEPWSLEERKREQWNSLKQNADQQDTEAMSDYKKQLRNLKEEIAVLSAEKSALQGRSSRSRSPSPAPRSRSCSRSRSASPSTAVKVRRPSPNRSKLSNVARKAALLSRFSDSYSQARLDAQCLLRRCIDKAETVQRIIYIATVEAFHVAKMAFRHFKIHVRKSLTPSYVGSNDFENAVLDYVICHLDLYDSQSSVNDVIRAMNVNPKISFPPVVDFCLLSDFIQEICCIAFAMQALEPPLDIAYGADGEVFNDCKYRRSYDSDFTAPLVLYHVWPALMENDCVIMKGEAVTRRGAFVRWPCIVTIHPKCLIHKFENIYKPRDSIKEVYKELIRFHTKESVRGNLGCLHIGDGRNKKQRWQADTGATADPFLVRGAFSLGLRLFLSKSLLAAERGCYLEHLVILRGGMPSPYDLNSSQKATPPNAVALEIKFPNMNFWGHIHIIEGNDG

SEQ ID NO: 42374 - protein, 34 aa, Homo sapiens
WWQASCSLTWGSWPHGFQGMESWAMHRVGTVASL

SEQ ID NO: 42375 - protein, 87 aa, Homo sapiens
  misc_feature (1)...(87): Xaa = X or * as defined in Table 2
YNTVLPKACLCGSLICWMNXSHSDQNMQVSVERSNLRVRLYACCGLLLCTAYPQHFAHRYVDKIPGYPSRAGTLTGLHPMQVCRCRR

SEQ ID NO: 42376 - protein, 1944 aa, Homo sapiens
  DOMAIN (171)..(226): kw TRANSCRIPTASE REVERSE II ORF2 domain identified by eMATRIX, accession number DM01354Q, p-value=1.000e-40, raw score of 9.23
  DOMAIN (125)..(1646): Reverse transcriptase domain identified by PFam, accession name rvt, E-value=1.7e-31, PFam score of 118.0
KFYVSTTVTRGSLLPELPRWWQATSKMVASLMFSDLGFLASQIPRNGILGHAVSVIALLEAMDHRREPWNPATSVQLNWDEPKDLAAQEQWTLSCRSVGVCWRSTPDPVCLGISSGGCKTADIGEQQMLLPDRSSGIFVSEEYPAIWKCRNHPSSVSLMLGALDWRCSYSAILVNRIQQHIKKLIRDDQVGFIPGMQGWFTICKSINVIRHINRTKDKNHMIISIDAEKAFDKIQQRFMLKTLNKLVLEVLARAIWQEKEIRGIQLGKEEVKLSLFADDMIVYLENPIVSAQNRLKLIGKFSKVSGYKINVQKSQAFLYTNNRQTESEIMSELPFTIALKRMKYLGIQLTRDVKDLFKENYEPLLNEIKEDTNKWKNIPCSWVERINIMKKAILPKVIYRFNAIPIKLPMTFFTELEKTTLKFIWNQKRAHITKSILSQKNKAGGITLPDFKLHYKAAVTKTAWAGNRIVEILPEHLKEFQSLETLDLSSNNISELQTAFPALQLKYLELNRNKIKNVDGLTFQGLGALKSLKMQRNGVTKLMDGAFWGLSNMEILQLDHNNLTEITKGWLYGLLMLQELHLSQNAINRISPDAWEFCQKLSELDLTFNHLSRLDDSSFLGLSLLNTLHIGNNRVSYIADCAFRGLSSLKTLILQGNRIRSITKKAFTGLDALEHLHLNTSSLLCDCQLKWLPQWVAENNFQSFVNASCAHPQLLKGRSIFAVSPDGFVCDDFPKPQITVQPETQSAIKGSNLSFICSAASSSDSPMTFAWKKDNELLHDAEMENYAHLRAQGGEVMEYTTILRLREVEFASEGKYQCVISNHFGSSYSVKAKLTVNMLPSFTKTPMDLTIRAGAMARLECAAVGHPAPQIAWQKDGGTDFPAARERRMHVMPEDDVFFIVDVKIEDIGVYSCTAQNSAGSISANATLTVLETPSFLRPLLDRTVTKGETAVLQCIAGGSPPPKLNWTKDDSPLVVTERHFFAAGNQLLIIVDSDVSDAGKYTCEMSNTLGTERGNVRLSVIPTPTCDSPQMTAPSLDDDGWATVGVVIIAVVCCVVGTSLVWVVIIYHTRRRNEDCSITNTDETNLPADIPSYLSSQGTLADRQDGYVSSESGSHHQFVTSSGAGFFLPQHDSSGTCHIDNSSEADVEAATDLFLCPFLGSTGPMYLKGNVYGSDPFETYHTGTFGKALRRPHLDAYSSFGQPSDCQPRAFYLKAHSSPDLDSGGFMIALWYHGTLSPEPAFVLKARDDVGTCHSHRAGQHWLKYYLLQALAEGNVVPEPPHRVPPGAPPTGAARRELLSSNPQNGRSTDSLRSVPAKAADTQCQSVKAARREAVPCKVTGPELPKATGAYLLHQCDLDMRHGVKTDHSGALRIGGKYRAPVGQLKTISVATGLKTQLSYQKPFINPVTRRCIQSVAATALLTEESRKETFRGNLIVRKPHCKRTLEPLEKGKAGKIECLIGLASSVVYKDTLKKIVQVEISHPLVHAPYAKGITGRPTDPGDEAVPNPYTLLSQIPEKAEWFILLDLKDALFFIPVHPDSQFLFAFEDPSNSTSQLTWTVLPLAFRNGPHLFGQASTQDLSQLSYLDTLVLWHVDDLLLAACSETLCHQATQALLNFLTTCGYKVSKPKAQLCSQQVKYLGLKLPKGTRAPSEECIQPILAYPHPKTLKQLRAFLGITGFCRIWIPSILTAKGDLWLSDNHLLKYQVLLLEGPVLQLRTCATLNPATFLPDNEEKIEHNCQQVIAQTYATRGDLLEVPLTDPDLNLYTDGSSFVQKGLQKAGYAVVSDNGILESNPFTPGTSTQLAELVALTWALEFGEGKRVNINTGSKYAYLVLHAHASIWREREFLTSEGTPIKHQEAIRRLLLVVQKPEEVAVLHCWGHPKGKEREIEGNCQADIEAKRASRQDPPLEMLIERHLVWGNPLWETNPQYSAEEIEWGTS

SEQ ID NO: 42377 - protein, 1438 aa, Homo sapiens
  DOMAIN (1064)..(1107): CTF/NF-I proteins domain identified by eMATRIX, accession number BL00349C, p-value=1.000e-09, raw score of 9.33
  DOMAIN (1241)..(1394): Integrase core domain identified by PFam, accession name rve, E-value=1.4e-33, PFam score of 120.1
  misc_feature (1)...(1438): Xaa = X or * as defined in Table 2
MQWEEAEKDPSGSCVFQRPPVALVFPLHSKWTLVNSPPSSGDPYVPGRPAQSGQLSLSPAPPYVLPGPGKIKQAGNNPSLTSIYRSEVFCAHRHLHPPQLVCARGHIGSAHLSVDRGSLIWEVLESTVWARTNEWSPVTRTVLISALASTHIPQPCESRPPVPPEYEVTVLRSQGTAQLPPWSSSTSWRLTDPSCPKHAAWLTDLASSKGPAAGGTGSFSQPGTLTSTRTNPLKKEKSPEDLKQIKIDLGKFSDNPDGYIDVLQGLGQSFDLTWRDIMLLLNQTLTPNEKVPPLLQPESLAISGISVRDQEEQAEQDKQDKKKAITLVMALRQVDFGGSVKGKSWANRMPNRAYFQCGLQGHFKKDCPSRKPQVCLTIESQEVNCLLDAGAAFSVLLSCPGQLSSRSVTIRGVLGQPVTRYFFQPLSCDWGALPFSHAFLIMPESLTPLLEREILVKAGAIIHLNIGEGTPICRLLFEEGISPEVWATEGQYGQAKNAHFVQVKLKDSTSFPYQRQYPLRPEAQQRLQKIVKDLKAQGLVKPYSSPCNTPILGVQKPKRQWRLVQDLRIINEAVFPLYPAIPSPYTLLSQIPEEAEWFTVLDLKDAFFCIPVHPDSQFLFAFEDPSNPTSQLTWTVLPQGFRDSPHLFGQALAQDLSQFSYLDTPVLQCMDDLLLAARSETLCHQATQALLNFLTTCGYKVSKPKAQLCSQQVKCLGLKLSKVTRALSEERIQPILAYPYPKTLKQLRGFLGITGFCRIWIPRYGKIARPLYTLIKETQKANTHLVRWTPEAEAAFHALKKALMQAPVLSLLTGQDFSSYVTKNKQTKKKKTXIALRVLALVXGTSLQPVAYLSKEIDVVAKGQPHCLRVVVAVAVLVSEAVKIIQGRNLTVWTSHDVNGILTAKGDLWLSDNHLLKYQALLLEGPMLRLCTCAALNLDTFLPHNEEKIEHNCQQVIAQTYATRGDHLEVPLTDPNPNLYTDGRSFVEKGLQKVGYAVVSDNGILESNPLTPGTSAQLAKLTRALELGEGKRVNIYTDSKYAYLVLHAHAVIWREREFLTSEGTPIKHQEAIRELLLAVQKPKEVAVLHCRGHQKGKEREIERNRQADIEAKRAARQDPPLEMLIEGPLVWGNPLWETKPQYSEEEIEWGISRGHSFLPSGWQATEQGKIPLPAANQWKLLKTTHQNFHLCIDSTHQMAKLLFTGPGLFKTLKQIVGACEVCQINNPLPYHQAPPGEQRTGHYSGEDWQLDFTHMPKSQGFQYLLVWVDIFTGWAEAFPCRTEKDQDVIKALIHEIIPRFGLPRGLQSDNGPVFKATVTQGVSQALGIQYHLHCAWRPQSSGKVKKMNEALKRHLKKLTQETHLAWPALLPTALLRIQNSPQKAGLSPYKMLYGWPFLTKDLVLDREMASLVADITSLAKYQQVLKTLQGTCSREEGK

SEQ ID NO: 42378 - protein, 199 aa, Homo sapiens
GQEPQVREQKACHHLGSGPSPSWKRLATILGALCTRTPWHLGYQPTYPSAIAISKPWLLGQGLRTDDPVLWVYNNIIEQDKSKLTIWREREFLTSEGTPIKHQEAFRRLLLAVQKPQEVAVLCCQGHQKGNEREIEVNCQADIEAKRAARQDPPLEMLTEGPLEIIEEHIDKMSKRSKQLKYGANTWKKTVRRFIHTHS

SEQ ID NO: 42379 - protein, 37 aa, Homo sapiens
EPPRLDAEHALQREAPQKDTGGKSGDLDAGSPTSCSC

SEQ ID NO: 42380 - protein, 24 aa, Homo sapiens
TPCVPSKVYTVPVKRHPYCKMIES

SEQ ID NO: 42381 - protein, 174 aa, Homo sapiens
MCLSTIVDFGFPLVKPMWKYTGWELRDKHPGPSHAAISGPSWGQMTSAPWILLAQGGEGASGEESGSLLYSPYSPWKNGNSWGSWFGELAEPCSASSLRWAPSGGLVGSPSSAPSAAPSWSCEKLRETQGKCSCPHLCLPTPLLLLNVPSISMQTPVCPQKSTRYQSRDIHTAR

SEQ ID NO: 42382 - protein, 43 aa, Homo sapiens
KARHSISKDPRMVEHYCGLSPRGQGPVQQLLLSLGRQIFPFPP

SEQ ID NO: 42383 - protein, 600 aa, Homo sapiens
  DOMAIN (255)..(287): ABC transporters family proteins domain identified by eMATRIX, accession number BL00211B, p-value=8.200e-13, raw score of 13.37
  DOMAIN (120)..(329): ABC transporter domain identified by PFam, accession name ABC_tran, E-value=0.00049, PFam score of -16.6
MENSMEVPQKSKNRTTMWSSNFFTGYISKIKEINVSKTYLHADVYCSAIHNRQNMESTQTVIQINKCKGKLGEKLEWRAQNVAPEKGRGKGDPVQNLDTRIREHTLMVTFFSGAYFGDPGENLSPSLTMAAQHGPQPYMSVGSLRDQVIYPDSVEDMRRKGYSEQDLEAILDIVHPHHILQWEGAPTAGCEMALGKDLALLELPFMVQGHRHQALPRWQHEKKWLLQEMTRVLSPACGGSGNTGWEAMCDWKDILPGGEKQRIGMARMFYHRPKYALLDEGTSAAMRINVEGKIFQAAKDAGIALLSITHQPSCGREYHTHLLQFDGEGGWKFEKLGSAARLSLTEEKQRLEQQLAGIPKMQRHLQELCQILGEAVAPAHVPAPSPQGPGGLQARHLCPADQTQNSLPSLFNLASFLTSLQVPQAEPWGSSDPLSASSFPIPPVHVLLTQSLKSLSLPTGSSVSGSTAPDMGALTLLSRKGRSRWPYRQTGAEPQVTMQQPAVHVKGQEPLTSMMASFPPQKQKETSEWLFPFSSSHALVGLVKSLACWWRWVIKNSFISLESPDPLYTKVDKGIAVLQEPQAKEAAQKAVNGATGVPIV

SEQ ID NO: 42384 - protein, 171 aa, Homo sapiens
MKSTSGEDAVNIIEMTTKDLEYYINSVDTAAPGFERTECNFERSSTGGTLQTLPRPLPLRHFRFRRRSHISGVLSSGAGASNPCPYCVCEEASKRGSHVQRGISEGLSGVEKRGGLLFFHLTLKRHAGSTESDTSEPVSTVWFGLDFHWYSGVLDKSLDLAFVICEVDRFQ

SEQ ID NO: 42385 - protein, 24 aa, Homo sapiens
GCGEQGTLLHCWWECKQVQPPWKT

SEQ ID NO: 42386 - protein, 82 aa, Homo sapiens
  misc_feature (1)...(82): Xaa = X or * as defined in Table 2
GAFCPFTLLHGYQVLQWPGSSLPHKEGPAPALEGGHVYPRWIXASADSQSTEAGRIGPASTGXRQYPGGEEHACCLPALLHS

SEQ ID NO: 42387 - protein, 120 aa, Homo sapiens
MALIDVGFVGEKRADGSPLSGQLFTIPGRRAKLAVGNMIYAYYPELSIHGLYCSLCLPSAELPDDFPNGQSPGLHKTEFLIPEELKKCQQLLNYVKEGHTQVASHVQRLFMECAGFSPEV

SEQ ID NO: 42388 - protein, 455 aa, Homo sapiens
  DOMAIN (356)..(388): S-adenosyl-L-homocysteine hydrolase proteins domain identified by eMATRIX, accession number BL00738F, p-value=7.261e- 29, raw score of 12.23
  DOMAIN (186)..(447): S-adenosyl-L-homocysteine hydrolase domain identified by PFam, accession name AdoHcyase, E-value=6.2e-171, PFam score of 581.3
MSVQVVSAAAAAKVPEVELKDLSPSEAESQLGLSTAAVGAMAPPAGGGDPEAPAPAAERPPVPGPGSGPAAALSPAAGKVPQASAMKRSDPHHQHQRHRDGGEALVSPDGTVTEAPRTVKKIQFADQKQEFNKRPTKIGRRSLSRSISQSSTDSYSSAASYTDSSDDETSPRDKQQKNSKGSSDFCVKNIKQAEFGRREIEIAEQEMPALMALRKRAQGEKPLAGAKIVGCTHITAQTAVLMETLGALGAQCRWAACNIYSTLNEVAAALAESGFPVFAWKGESEDDFWWCIDRCVNVEGWQPNMILDDGGDLTHWIYKKYPNMFKKIKGIVEESVTGVHRLYQLSKAGKLCVPAMNVNDSVTKQKFDNLYCCRESILDGLKRTTDMMFGGKQVVVCGYGEVGKGCCAALKAMGSIVYVTEIDPICALQACMDGFRLVKLNEVIRQVGHCYYLYR

SEQ ID NO: 42389 - protein, 312 aa, Homo sapiens
  DOMAIN (228)..(278): S-adenosyl-L-homocysteine hydrolase proteins domain identified by eMATRIX, accession number BL00738J, p-value=1.000e- 40, raw score of 18.61
  DOMAIN (156)..(219): S-adenosyl-L-homocysteine hydrolase domain identified by PFam, accession name AdoHcyase, E-value=1e-25, PFam score of 96.5
MRPRDIWSCSPEAAVYAELKSHGALEITLQPSEQCAAKVGPWKLAHRPNPDPGSCLYGCRQIFAFYPEPSIHGLYCSLCLPSAGGVLRVTCLPLTLGLFIVWNGSESNSMMTQDNDNTDQIDRACDMGWFFHRRVAAQWGLLWLMLYLLYVFQASLRTPELTWERVRSQVDHVIWPDGKRIVLLAEGRLLNLSCSTVPTFVLSITATTQALALIELYNAPEGRYKQDVYLLPKKMDEYVASLHLPTFDAHLTELTDEQAKYLGLNKNGPFKPNYYRCLGLPRNQGHLGSDELPALELVFASPTTYAYMNSEK

SEQ ID NO: 42390 - protein, 199 aa, Homo sapiens
MEPIYRVLSRKKISITNLLTTDFHCCYENTMGTKKSSAMKKNEPKNNKDVALGSLPNHKELSTSGEQGNPEPALKDKPGHTEAGYRLTLLCHLHIHPVLQTFFPRNVYVEVIIDPRTVFVPANEETQSALGKKCLHSEGIQQLPKEPLPFVSRGFLVSPQLTQDDPIPSIDAACVNKWMLSLSLAPDEQCAGPQFDEDD

SEQ ID NO: 42391 - protein, 83 aa, Homo sapiens
  DOMAIN (32)..(55): TRANSFORMING PROTEIN P21 RAS SIGNATURE domain identified by eMATRIX, accession number PR00449C, p-value=1.000e-12, raw score of 17.27
  DOMAIN (1)..(83): Ras family domain identified by PFam, accession name ras, E- value=0.00015, PFam score of -85.2
VGKSSIVCRFVQDHFDHNISPTIGASFMTKTVLCGNELHKFLIWDTAGQERSRQIPPLDPHENGNNGTIKVEKPTMQASRRCC

SEQ ID NO: 42392 - protein, 49 aa, Homo sapiens
AHELGFMQQNLGLLFVAGRQIPPLDPHENGNNGTIKVEKPTMQASRRCC

SEQ ID NO: 42393 - protein, 49 aa, Homo sapiens; identical to SEQ ID NO: 42392

SEQ ID NO: 42394 - protein, 207 aa, Homo sapiens
  DOMAIN (16)..(60): GTP-binding nuclear protein ran proteins domain identified by eMATRIX, accession number BL01115A, p-value=7.268e-10, raw score of 10.22
  DOMAIN (17)..(207): Ras family domain identified by PFam, accession name ras, E- value=2.4e-30, PFam score of 114.3
  misc_feature (1)...(207): Xaa = X or * as defined in Table 2
APALPGCEHMMAIRELKVCLLGDTGVGKSSIVCRFVQDHFDHNISPTIGASFMTKTVPCENDFTKFLIWDTAGQERFYSLAPMYYRGSGAAVIVYDFTEAGFHFHPLKKWVKRLKELGPENIVMAIAGNKCDLSDIREVPLKGCXRNTAESIGAIVVETSAKNAINIEELFQGISRPDPHPWTPHENGNNGTIKVEKPTMQASRRCC

SEQ ID NO: 42395 - protein, 161 aa, Homo sapiens
  DOMAIN (95)..(142): kw TRANSCRIPTASE REVERSE II ORF2 domain identified by eMATRIX, accession number DM01354V, p-value=1.000e-40, raw score of 12.97
MDKFLDTYTLPRLNQEEVESLNRPITGAEIVAIINSLPTKKSPGPDGFTAEFYQRLISNFSKVSGYRINVQESQAFLYTINRQTESQIMSALPLTIASKRIKYLGIQLTRDVKDLFKENYKPLLNEIKEDTNKWKNIPCSWVGRINIVKMAILPKNWKKLL

SEQ ID NO: 42396 - protein, 521 aa, Homo sapiens; identical to SEQ ID NO: 35770
  DOMAIN (7)..(54): kw TRANSCRIPTASE REVERSE II ORF2 domain identified by eMATRIX, accession number DM01354V, p-value=1.000e-40, raw score of 12.97

SEQ ID NO: 42397 - protein, 483 aa, Homo sapiens
  DOMAIN (84)..(129): kw TRANSCRIPTASE REVERSE II ORF2 domain identified by eMATRIX, accession number DM01354N, p-value=1.000e-40, raw score of 13.17
  DOMAIN (89)..(271): Reverse transcriptase domain identified by PFam, accession name rvt, E-value=2.8e-05, PFam score of 5.4
MKLPEEGLAAIFAVLQYYYSASSAGDNQATRSGVELHKSRRLLLRDLMLKKPQQKEYSFTKGFRIPGGPIKQVVTQMKTTIREYYKHLYENKLENLEEMDKFLDTYTLPRLNQEEVQSLNRPITGSEIEATINSLPTKRSPGPDGFTTEFYPRTNDKNHMIISIDAEKAFDKIQQPVILKTLNKLGFDGMYLKIIRAICDKPTANIILNGQKLEAFPLKTSTRQGCPLLPLLFNVVLEVLARAIRQTESQMMSELPFTIASKRIKYLGIQLTRDVKDLFKENYKPLLNEIKEDTNKWKNIPCSWVGRINIVKMAIPPKMFFRLQLPPVNSEETSHYEIPLPGRRVELRYPLRQGTEATDGQVCGNEDMLIRDRVRKTRGSAPPPAHNLAPTEVALEDVLRIFTSAWRGVDGALEKGGTSCPARAQLPAEPEDPLFRCLRVSRLKDREVRGLGLPRQLQGVWSTTYPRRHDWVNHRMWGRKQQY

SEQ ID NO: 42398 - protein, 534 aa, Homo sapiens
  DOMAIN (8)..(53): kw TRANSCRIPTASE REVERSE II ORF2 domain identified by eMATRIX, accession number DM01354N, p-value=1.000e-40, raw score of 13.17
  DOMAIN (77)..(350): Reverse transcriptase domain identified by PFam, accession name rvt, E-value=8.9e-80, PFam score of 278.5
IQTTIREYYKHLYANKLENLEEMDKFLDTYTLPRLNQEEVESLNRPITGSEIVAIINSLPTKKSPDQLDSQPNSAREKEGILSISFCEASIILIPKLGRDTTKKENFRPISLMTIDTKIFNKILANQIQQHIKKLIHHDQVGFIPGMQGWFNICKSINVIQHINRTKDKNHMIISIDAEKAFDKIQQLFMLKTLNKLGIDGTYFKIIRAIYDKPTANIILNGQKLEAFPLKTGTRQGCPLSPLLFNIVLEVLAGAIRQEKEIKGVQLGKEEVKLSLFADDMIVYLENHIVSAQNLLKLISNFSKVSGYKINVQKSLAFLYTNNRQTESQIMSELPFTIASKRIKYLGIQLTRDVKDLFKENYKPLLNEIKEDTNKWKNIPCSWVGRINIVKMAILSKVIYRFNAIPINLPITVFTELEKTTLKFTWNQKRAHIAKSILSQKNKAGGITLPDFKLYYKATVTKTGWYWYQNRDIDQWNRTEPSEITTHIYNYLIFDKPEKNKQRGKDSLFNKWCWENWLAICRKQCVFIVPPTEG

SEQ ID NO: 42399 - protein, 133 aa, Homo sapiens
  DOMAIN (13)..(60): kw TRANSCRIPTASE REVERSE II ORF2 domain identified by eMATRIX, accession number DM01354V, p-value=1.000e-40, raw score of 12.97
QTESQMMSELPFTIASKRIKYLGIQLTRDVKDLFKENYKPLLNEIKEDTNKWKNIPCSWVGRINIVKMAIPPKMFFRLQLPPVNSEETSHYEIPLPGRRVELRYPLRQGTEATDGQVCGNEDMLIRDRVRKTR

SEQ ID NO: 42400 - protein, 52 aa, Homo sapiens
HSLSCLLGNICAVLHLKDPELFAAYLKVLKDLVSKQDTTRDIQNVQVMAFCR

SEQ ID NO: 42401 - protein, 240 aa, Homo sapiens
  DOMAIN (102)..(149): kw TRANSCRIPTASE REVERSE II ORF2 domain identified by eMATRIX, accession number DM01354V, p-value=1.000e-40, raw score of 12.97
MDKATIGNETKIMLEVLARAIRQEKEIKGIQLGKEEVKLSLFADDMIVYLENPIVSAPNLLKLRSNFSKVSGYKINVQKSQAFLYTNNRQTESQIMSELPFTIASKRIKYLGIQLTRDVKDLFKENYKPLLKEIKEDTNKWKNIPCSWVGRINIVKMATLPKVSESLRREGSSSLQLVIPQSVCPLLWLSPRLIMDLTGEEVHANQSLGSHRQAWKRNHMSPLRSSGLAAQPPAFRPYLA

SEQ ID NO: 42402 - protein, 36 aa, Homo sapiens
CPHSLFPVPLTLALLSSPPTDSFSETKHQWVPDYWK

SEQ ID NO: 42403 - protein, 415 aa, Homo sapiens; identical to SEQ ID NO: 35821
  DOMAIN (100)..(147): kw TRANSCRIPTASE REVERSE II ORF2 domain identified by eMATRIX, accession number DM01354V, p-value=1.000e-40, raw score of 12.97

SEQ ID NO: 42404 - protein, 473 aa, Homo sapiens
  DOMAIN (57)..(100): kw TRANSCRIPTASE REVERSE II ORF2 domain identified by eMATRIX, accession number DM01354T, p-value=1.000e-40, raw score of 9.48
  DOMAIN (1)..(179): Reverse transcriptase domain identified by PFam, accession name rvt, E-value=1.6e-16, PFam score of 68.4
MIISVDAEKAFDKIQQPFMLKTLNKLGIDGMYFKIIRAIYDKPTANIILNGQKLEAFPLKTGTRQGCPLSPLLFNIVLEVLARAIRQEKEIKGIHLGKEEIKLSLFADDMIVYLENPIVSAQNLLKLISNFSKVSGYKINAQKSQAFLYTNNRQTESQIMSELPFTIASKRIKYLGIQLTRDVKDLFKENYNPLLNEIKEDTNKWKNIPCSWVGRINIVKMAILPKNWKKTTLKFIWNQKRACIAKSILSQKNKAGGITLPDFKLYYKATVTKTAWYWYQNRDIDQWNRTEPSEIMPPIYNYLIFDKPEKNKQWGKDSLFNKWCWENWLAICRKLKLDPFLTPYTKINSRWIKDLNVRPKTIKTLEENLGITIQDIGLGKDFMSKTPKAMATKAKIDKWDLIKLKSFCAEKETTIRVNRQPTKWEKIFATYSSDKGLISRIYNELKQIYKKKTNNPIKKWVKDMNRHFSKEDI

SEQ ID NO: 42405 - protein, 461 aa, Homo sapiens
  DOMAIN (37)..(83): kw TRANSCRIPTASE REVERSE II ORF2 domain identified by eMATRIX, accession number DM01354O, p-value=1.000e-40, raw score of 8.73
  DOMAIN (70)..(347): Reverse transcriptase domain identified by PFam, accession name rvt, E-value=1.6e-67, PFam score of 237.7
  misc_feature (1)...(461): Xaa = X or * as defined in Table 2
MDKFLDTYTLPRLNQEEVESLNRSITGSEIVAIINSLPTKKSPGPDGFTAEFYQRYKEELVLLLLKLFQSIEKEATLPNSFYEASIILIPKPGRDTTKKENFRPISLMNIDAKILSKILANQIQQHIKKFVHHDEVGFIPRMQGWFNIHKSKNVIQYINRTKDKNYMIISIDAEKAFDKIQQLFMLKTLSKLGIDGTYLKIIRAIYDKPTVKIILNGQKLEEFPLKTGTRQGCPLSPLLFNIVLEVLARAIRQEKEIKGILLGKEEVKLSLFADDMIVYLENPIVSAQNLLKLISNVSKVXGYKINVQKSQAFLYTTNRQTESQIMSELPFTIASKRIKYLGIQFTRDVKDLFKENYKPLLNEIKEDTNKWKNIPCSWVGRINIVKMAILPKPPLLIPRQTGSGVDLQQTPTDLQLSVLTVRRKINKQKGHPHQYLIWTSPSSKTKGRQLLASNRTKLDGE

SEQ ID NO: 42406 - protein, 226 aa, Homo sapiens
  DOMAIN (3)..(50): kw TRANSCRIPTASE REVERSE II ORF2 domain identified by eMATRIX, accession number DM01354V, p-value=1.000e-40, raw score of 12.97
MITIASKRIKYLGIQLTRDVKDLFKENYKPLLNEIKEDTNKWKNIPCSWVGRINIVKMAILPKITDSAMEMLSAKCHYLHILDISGCVLLTDQILEDLQIGCKQLRILKMQYCTNISKTTLAVKALQTKTGPKDIPGGGSLNLPELESGRRVGLRSDPLLPSSQKAAQRMSSKVQQQEYNTNDPPRWFGYDREGNPVTELDNITSSKGALELTVKKSTYSSEDQAA

SEQ ID NO: 42407 - protein, 930 aa, Homo sapiens
  DOMAIN (55)..(95): kw TRANSCRIPTASE REVERSE II ORF2 domain identified by eMATRIX, accession number DM01354Y, p-value=1.000e-40, raw score of 10.69
  DOMAIN (205)..(442): Reverse transcriptase domain identified by PFam, accession name rvt, E-value=0.017, PFam score of -34.0
  misc_feature (1)...(930): Xaa = X or * as defined in Table 2
IYRFNAIPIKLPMTFFTELEKTTLKFIWNQKRARIAKAIRSQKNKSGGITLPDFKLYYKATVTKTAWYWYQNRDIDQWNRTEPSEITPHIYNYLIFDKPEKNEQWGKDSLFNKWCWENWLAICRKLKLDPFLTPYTKINSRWIKDLIVRPKTIKTLEENLGITIQDIGMGKDFMSKTPKAMATKAKIDKWDLIKLKSFCTAKETTIRVNRQPTKWEKTFATYSSDKGLISRIYNELKQIYKKKTNNPIKKWAKDMNRHFSKEDIYAAKKHMKKCSPSLAIREMQIKTTMRYHLTPVRMAIIKKSGNNSTFDFGQHEFELHRSTYTRIVFSKITPILEVLARAIRQEKEIKGIQLGKEEVKLSLFADDMIVYVENPLPSSPHISLKLISNFSKLSGYKINVQKSQAFLYTNNRQTESQIMSELPFVIASKRIKYLGIQLTRDVKDLLKENYKPLLNEIKEDTNKRKNIPCSXVGRINIVKMAILPKAIWNSLLLLGYKPEQHVTVLDTAGNCITLVSVYQNICKHRKDKQETFMGKVQEGPVDFNGNKYEEFIDIFSDPMLQQTSKILPLTITAMCSDDWLLVRMKIRPFDKNTDIRIGDIHLRDNCPVTRLLSFNYAFSYPVTSCGIKKIFICNLAMPFSAVQDDFKQILTISLYFLKGGKGINILAVFPGFHSRIPVNWRGDLKKSRYWNKKQPRQKMSRLCGGLQWQLYGRRSFTGQKLSHELFFSNLETYTFMTKYFGKAKLKQIGVFKAETTVFVECTESWLLVEIRGAPLVENLQPKHNELSLGNGCPVTRMTNDIFEFTYALEFSGIMKYECPWGILVESFVKYQPAFLNFRTYIPVRCALERKPSSFEQNVIQNNTDKSKKIVQTQYYQAGNWGIEECYLGIPEEDIVITGDDNSLCVIAHEDLPVGQYVEREDGEIEDPDPA

SEQ ID NO: 42408 - protein, 38 aa, Homo sapiens
SRAPCCTPPASSLAAPRCCTHRSWRPATATEAETTRTR

SEQ ID NO: 42409 - protein, 119 aa, Homo sapiens
PGAAAGRCQLSPGPEPRAAGSAEAGARPGPVPTAGRPRRLQQQPKGLRPRFSTRRPSRAPCCTPPASSLAAPRCCTHRSWRPATATEAEAWLRAGSHIQIWLTFLSEPGHQSHATTRTR

SEQ ID NO: 42410 - protein, 128 aa, Homo sapiens
VMTTGTNSRVEPRVRGRVYKKKMDKKRQEKITEAKSKDKSQMDEEKTDDEKPKLQVELEQEYQDKFKRLPLEILEFVQEAMKGKISEDSNHGSAPLSLSSDPGKVNHKTPSSEELGGDIPGKEFDTPL

SEQ ID NO: 42411 - protein, 666 aa, Homo sapiens
  DOMAIN (55)..(97): Phosphatidylinositol-specific phospholipase X-box domain proteins prof domain identified by eMATRIX, accession number BL50007D, p-value=1.000e-40, raw score of 19.54
  DOMAIN (5)..(122): Phosphatidylinositol-specific phospholipase domain identified by PFam, accession name PI-PLC-Y, E-value=5e-85, PFam score of 295.9
MATEEMSNLVNYIQPVKFESFEISKKRNKSFEMSSFVETKGLEQLTKSPVEFVEYNKMQLSRIYPKGTRVDSSNYMPQLFWNAGCQMVALNFQTMDLAMQINMGMYEYNGKSGYRLKPEFMRRPDKHFDPFTEGIVDGIVANTLSVKIISGQFLSDKKVGTYVEVDMFGLPVDTRRKAFKTKTSQGNAVNPVWEEEPIVFKKVVLPTLACLRIAVYEEGGKFIGHRILPVQAIRPGYHYICLRNERNQPLTLPAVFVYIEVKDYVPDTYADVIEALSNPIRYVNLMEQRAKQLAALTLEDEEEVKKEADPGETPSEAPSEARTTPAENGVNHTTTLTPKPPSQALHSQPAPGSVKAPAKTEDLIQSVLTEVEAQTIEELKQQKSFVKLQKKHYKEMKDLVKRHHKKTTDLIKEHTTKYNEIQNDYLRRRAALEKSAKKDSKKKSEPSSPDHGSSTIEQDLAALDAEMTQKLIDLKDKQQQQLLNLRQEQYYSEKYQKREHIKLLIQKLTDVAEECQNNQLKKLKEICEKEKKELKKKMDKKRQEKITEAKSKDKSQMEEEKTEMIRSYIQEVVQYIKRLEEAQSKRQEKLVEKHKEIRQQILDEKPKLQVELEQEYQDKFKRLPLEILEFVQEAMKGKISEDSNHGSAPLSLSSRPWKSEPQDSLQ

SEQ ID NO: 42412 - protein, 398 aa, Homo sapiens
MLQVELEQEYQDKFKRLPLEILEFVQEAMKGKISEDSNHGSAPLSLSSDPGKQIQSKQLAGSMELLMKDSVFFEENQARVFIRSSGVKYFKEPFLDPPKLLPGPFIYSPNATCISHPLLHNKPQQNLMFEITTTYYWLWAYGWVDGSADLSWAGLISAGLIYAATASLAPHGAAGLWDVTPSGFWPAVSETRGCTRSMALASASSERLTVMVEGEGGANVSRVMTRNNWLVRINIEAGKMMASEQVDTALVKAINYTKDRGERLKVVLTCSAHETETTMCGACILGLRGVERRQRVKHGGKEEKEVKKSKCAYSSVAFWRRHGFRNDFPEILKVLKTKEESPVISAKAHLQKLAQPKCTETKKCYSQSKPFGSLVLISNQQNKQTSVQVGTGSAVLFF

SEQ ID NO: 42413 - protein, 853 aa, Homo sapiens
  DOMAIN (571)..(614): 'Homeobox' domain proteins domain identified by eMATRIX, accession number BL00027, p-value=2.565e-20, raw score of 26.43
  DOMAIN (482)..(611): Homeobox domain identified by PFam, accession name homeobox, E-value=1.4e-33, PFam score of 125.0
MERGTGETRGAEGTLGGRQGGREAGRNGGRDRATQGLGAGPREPGTDGGRKAGRKSGPRPPGVAGPPASGKTVSVRRGLRAGPTAAAPAGGAPPIRPGSGAQGVGGFLRDKRPGLGLPSGLHPRGSQTAHPQAEPCNAARGPQTRPRRSHTQDDGGVILVSEWLCPPEGGLLLTSLRPPKGWPCRLFAPGALRHPETCREGCKPGMVPSLSLPGSKPATLQTPPRCRTRESIVRPSRRGGISSLGSRSGLLRGNEREPHACVCETVPATATPTGIASFTERGPGTLKTPTEVQFHTPLHPPRLVSPCCRRVGAQRAASRSRGIPGEVRRAGPRNAPPSPLPPLPLPLRLSGPTTTTATTPPPPPPPPTTTTTTTPPAGPRPRRPGSLPGWGGLSQGGSPPFMKGWSLPACGPLQGRLAGWLAVRAGLLAAPAAVHSPAEVHGSPPASLCPRPSVKFRPGLTAMALPTPSDSTLPAEARGRGRPRRLVWTPSQSEALRACFERNPYPGIATRERLAQAIGIPEPRVQIWFQNERSRQLRQHRRESRPWPGRRGPPEGRRKRTAVTGSQTALLLRAFEKDRFPGIAAREELARETGLPESRIQIWFQNRRARHPGQGGRAPAQAGGLCSAAPGGGHPAPSWVAFAHTGAWGTGLPAPHVPCAPGALPQGAFVSQAARAAPALQPSQAAPAEGVSQPAPARGDFAYAAPAPPEPGRSPTLRLLGGLRTRAKAGRTGTRSATACRAPARWHSLGPLKRGRRPRGACATHVPGESVVGLGPGSPGRRGGVGTPSRGSSTSPARAPGTPPPPRGRGRCKASRRPPRRSRSRRPGLHSPAACCWMSSWRARSFCSRRNLS

SEQ ID NO: 42414 - protein, 134 aa, Homo sapiens
HHHQRLKVDKTTKMGRNQSRKAENSKNQSTSSPPKDRSSLPAMKQSWMEKDFDKLTEVDFRRMFEPITRKLKTLKKRFNEWLTRLNSVEKTLNDLMELETMARELRDPCTSFSSQFNQVEERVSVIEDQTNEMK

SEQ ID NO: 42415 - protein, 102 aa, Homo sapiens
TSSCSSEKFVITHLLKPTSVNSSKSFSFQLCSIGVQGAAILWRRRGSLVFRIFSFSALVSPHLCGFIYLWSLTMVTYFSLSNGGRPSPCQAAAPQVNLGLLC

SEQ ID NO: 42416 - protein, 197 aa, Homo sapiens
  misc_feature (1)...(197): Xaa = X or * as defined in Table 2
ISASASDNVFMSVSSPSCSSCFFTLYRYLWKSEKPLYYSFVDKPVAYKKREMVVNLQKQFKHTGRVQSSNLLEKKAPSSFQFNWTEEDTDRTCFHGHSLQGVLKEKGQSLLTKNSLYWLSTQKFXRCYGHHVPPYEESIYFLSNRFNLNLFSFLLRIKTSFLHEEVSLVEKKLFEEKIQCKKERNQDPRKVRTTLRK

SEQ ID NO: 42417 - protein, 294 aa, Homo sapiens
MAPKSLLNSEPQPPVYKYKQALRPAQKEDVKTKRSTVGRAQPSARLQRARHTEVLPWPSSVALATHPGVWSHGTAARHVEGKEASAMVDAPPPARLLPRRSISDCCTSSEQGSVGEGPAEPGSGYNLLVCRLLRPLEKRSIWVGVSRFSSYCTHVTTYEESNYSLSYQFILNLFSFLLRIKTSLLHEEVSLVEKKLFEKKYSVKRKKSRSKKAPGWDSHWCFCWLGQQGPTVELAARDPLLTAPLSSRGPKSPLSRAGLPHSGLPHPPDSRGPRHPQGHLLQLCRQLLCPGHLH

SEQ ID NO: 42418 - protein, 113 aa, Homo sapiens
  DOMAIN (41)..(60): HISTONE H2B SIGNATURE domain identified by eMATRIX, accession number PR00621A, p-value=1.000e-20, raw score of 12.25
  DOMAIN (14)..(113): Core histone H2A/H2B/H3/H4 domain identified by PFam, accession name histone, E-value=1e-22, PFam score of 88.9
  misc_feature (1)...(113): Xaa = X or * as defined in Table 2
FAFNMPEPGKIVPAPXKGSKKAVTKAQNKDGEKRMLSRKESYSVYVYKVLKQVHPDTGVSSKGMGIMNSFVDDILERIAGEAFRLAHYNKRSTITSREIQTDVRLLLTREMVK

SEQ ID NO: 42419 - protein, 134 aa, Homo sapiens
  DOMAIN (92)..(134): Histone H2B proteins domain identified by eMATRIX, accession number BL00357, p-value=1.000e-40, raw score of 7.74
  DOMAIN (18)..(134): Core histone H2A/H2B/H3/H4 domain identified by PFam, accession name histone, E-value=8.6e-55, PFam score of 195.4
FLLLYLVAMPDPAKSAPAPKKGSKKAVTKAQKKDGKKRKRSRKESYSVYVYKVLKQVHPDTGISSKAMGIMNSFVNDIFERIAGEASRLAHYNKRSTITSREIQTAVRLLLPGELAKHAVSEGTKAVTKYTSSK

SEQ ID NO: 42420 - protein, 131 aa, Homo sapiens
  DOMAIN (89)..(131): Histone H2B proteins domain identified by eMATRIX, accession number BL00357, p-value=6.236e-32, raw score of 7.74
  DOMAIN (14)..(131): Core histone H2A/H2B/H3/H4 domain identified by PFam, accession name histone, E-value=1.1e-45, PFam score of 165.2
LHSAMPEPAKSAPAPKKGSKKAVTKAQKKDGKKRKRSRKESYSIYVYKVLKQVHPDTGISSKAMGIMNSFVNDIFERIAGEASRLAHYNKRSTITLPREIQTAVRLLLPGELAKHAVSEGTKAVTKYTSAK

SEQ ID NO: 42421 - protein, 133 aa, Homo sapiens
  DOMAIN (91)..(133): Histone H2B proteins domain identified by eMATRIX, accession number BL00357, p-value=1.000e-40, raw score of 7.74
  DOMAIN (17)..(133): Core histone H2A/H2B/H3/H4 domain identified by PFam, accession name histone, E-value=8e-55, PFam score of 195.6
GGIECFKMPEPAKSAPAPKKGSKKAVTKAQNKDGKKRKRSRKESYSVYVYKVLKQVHPDTGISSKAMGIMNSFVNDIFERIAGEASRLAHYNKRSTITSREIQTAVRLLLPGELAKHAVSEGTKAVTKYTSSK

SEQ ID NO: 42422 - protein, 126 aa, Homo sapiens
  DOMAIN (84)..(126): Histone H2B proteins domain identified by eMATRIX, accession number BL00357, p-value=1.000e-40, raw score of 7.74
  DOMAIN (10)..(126): Core histone H2A/H2B/H3/H4 domain identified by PFam, accession name histone, E-value=4e-54, PFam score of 193.2
MPEPAKSAPAPKKGSKKAVTKAQKKDGKKRKRSRKESYSIYVYKVLKQVHPDTGISSKAMGIMNSFVNDIFERIAGEASRLAHYNKRSTITSREIQTAVRLLLPGELAKHAVSEGTKAVTKYTSSN

SEQ ID NO: 42423 - protein, 153 aa, Homo sapiens
  DOMAIN (111)..(153): Histone H2B proteins domain identified by eMATRIX, accession number BL00357, p-value=1.000e-40, raw score of 7.74
  DOMAIN (37)..(153): Core histone H2A/H2B/H3/H4 domain identified by PFam, accession name histone, E-value=4.8e-52, PFam score of 186.3
DAWVSGRLTELPSSCFFPPIFRQLLPVMPEPSKSAPAPKKGSKKAVTKAQKKDGKKRKRSRKESYSVYVYKVLKQVHPDTGISSKAMGIMNSFVNDIFERIAGEASRLAHYNKRSTITSREIQTAVRLLLPGELAKHAVSEGTKAVTKYTSSK

SEQ ID NO: 42424 - protein, 142 aa, Homo sapiens
  DOMAIN (43)..(62): HISTONE H2B SIGNATURE domain identified by eMATRIX, accession number PR00621A, p-value=2.440e-13, raw score of 12.25
  misc_feature (1)...(142): Xaa = X or * as defined in Table 2
FAFNMPEPAKSAPAPKKGSKKAVTKAQKKDGKKRKRSRQGRAYSVYVYKVLKQVHPDTWHLLLRPWGIMELLSFNDIFRNGIAGLRVSRLGRIXQQGVSTIHLPGEIHDGPLRLACLPGGVWPSKAVFRGAPRPFNQVNTSV

SEQ ID NO: 42425 - protein, 139 aa, Homo sapiens
QPPANSVYTHAFLSHCQVCWGGSAAWASSWGWAGETAAPWAPSSHSVEGGGSQGTSRTRAALRPEAELAAVASAHIPWVLSSCRSKPHIRGVSGVQSSHAGPHSGDRPGECPRRKPSPSGIFTSHREWVLAANGNEEKS

SEQ ID NO: 42426 - protein, 80 aa, Homo sapiens
  DOMAIN (2)..(51): kw TRANSCRIPTASE REVERSE II ORF2 domain identified by eMATRIX, accession number DM01354Z, p-value=1.231e-20, raw score of 9.06
  misc_feature (1)...(80): Xaa = X or * as defined in Table 2
FKDTCTRMFIAALFTIAKTWNQPKCPTMWHIYTMEYYAAIKSDEFMSFVGTWMKLETITLSKLXQGQKTKHRMFSLIGGT

SEQ ID NO: 42427 - protein, 81 aa, Homo sapiens
MDKFFDTYTLPKLNQEEVESLNRPITGSEVEAIINSLPTEKSPGPDGFTAEFHRTWMKLETIILSKLSQGEKTKHRMFSLI

SEQ ID NO: 42428 - protein, 713 aa, Homo sapiens; identical to SEQ ID NO: 38208
  DOMAIN (110)..(151): kw TRANSCRIPTASE REVERSE II ORF2 domain identified by eMATRIX, accession number DM01354I, p-value=1.000e-40, raw score of 15.55
  DOMAIN (547)..(703): Ferritins domain identified by PFam, accession name ferritin, E-value=3.8e-86, PFam score of 292.3

SEQ ID NO: 42429 - protein, 654 aa, Homo sapiens; identical to SEQ ID NO: 40189
  DOMAIN (57)..(100): kw TRANSCRIPTASE REVERSE II ORF2 domain identified by eMATRIX, accession number DM01354T, p-value=1.000e-40, raw score of 9.48

SEQ ID NO: 42430 - protein, 129 aa, Homo sapiens
  DOMAIN (84)..(94): Sushi domain proteins (SCR repeat proteins domain identified by eMATRIX, accession number PF00084C, p-value=1.000e-08, raw score of 11.25
  misc_feature (1)...(129): Xaa = X or * as defined in Table 2
IWMKLETIILSKLSQGXKTKHRMFSLTGGNLTMRTLGHRLLPSLPHRLRPCARLHLRCPPWPPPSRRRCARSTTPTATPPSTATSRWSSTPPTCTCLWPSTSTGTTWPWRTSSATSCACRTTKWSMPRS

SEQ ID NO: 42431 - protein, 28 aa, Homo sapiens
WMKLETIILSKLSQRQKTKHCMFSLIGT

SEQ ID NO: 42432 - protein, 90 aa, Homo sapiens; identical to SEQ ID NO: 41459

SEQ ID NO: 42433 - protein, 71 aa, Homo sapiens
MDEAGNHHSEQTITRTENQTLHVLTRHKNALHTAPALPVIPDAYRFSASFSNMKLNPGTVSADLTFGSYEG

SEQ ID NO: 42434 - protein, 228 aa, Homo sapiens
  DOMAIN (141)..(184): kw TRANSCRIPTASE REVERSE II ORF2 domain identified by eMATRIX, accession number DM01354T, p-value=1.176e-39, raw score of 9.48
MEYYAAIKNDEFMSFVGTWMKLETIILSKLLQGQKTKHRMFSLIGSIIVKVPSSLQAHLQLSGKEVDVNSEVHVQEMAEARKDDVVTVTDAEKALDKIQHLFMVKTLSKIGIQGTYLNVIKAIYDKPTANIILNGEKLKAFPLRNETRQGCPLSPLLFNTVLKVLARAVRQEKEIKGIQIGKEEVILSLFADDVIVYLKNPKDSYRKLLELIKGLAKFPDTKLMYTNQ

SEQ ID NO: 42435 - protein, 111 aa, Homo sapiens
MDEAGNHHSKQTITRTENQTPYVLTHRLFVRQLQGFLELLEYSLKIMDLSNLTFIPLVSQRIPSVLGTRVHGVTEKVLDGIGSSDEDATSWLLYETSGERSALDLLGPASG

SEQ ID NO: 42436 - protein, 63 aa, Homo sapiens
MEYYAAIKNDEFMSFVRTWMKLETIILSKLWQGQKTKHRMFSLIVILEFGNSYSRNSKLSVVY

SEQ ID NO: 42437 - protein, 31 aa, Homo sapiens
GTWMKLETIILSKLSQGQKTEHRVFSLIGGN

SEQ ID NO: 42438 - protein, 29 aa, Homo sapiens
WMKLETIILSKPSQGQKTKHCMLSLIGGN

SEQ ID NO: 42439 - protein, 76 aa, Homo sapiens
MDEAGNHHSQQTITRTENQTPHVLTRRCRNRHKEMKYLPGSHSWSIMEQDTGRTALFKAEERAGVCSPATDPSHST

SEQ ID NO: 42440 - protein, 89 aa, Homo sapiens; identical to SEQ ID NO: 41461

SEQ ID NO: 42441 - protein, 92 aa, Homo sapiens; identical to SEQ ID NO: 35001

SEQ ID NO: 42442 - protein, 91 aa, Homo sapiens
  DOMAIN (17)..(66): kw TRANSCRIPTASE REVERSE II ORF2 domain identified by eMATRIX, accession number DM01354Z, p-value=2.385e-14, raw score of 9.06
WMKLETIILSKLSQRQKTIHHLFSLIALFTIAKKWKPPRYLSVDKWIKKLWYHTYTMEYYSAFKKEAILPIAIAWMGLKDIMLSEISQTWP

SEQ ID NO: 42443 - protein, 44 aa, Homo sapiens
YVAIKTDEFTSFVGTRMKLETTILSKLSQGQKTKHRMFSLIGGN

SEQ ID NO: 42444 - protein, 31 aa, Homo sapiens
WMKLETVILSKLLQGQKTGHRMFSLIDLVVA

SEQ ID NO: 42445 - protein, 77 aa, Homo sapiens
MEYYAAMKKDAFMSFVGTWMKLETIILSRLSQGQKAKHCMFSLIAYYLKILKLMISDYNIEGSSGVVGLIPNIVYKA

SEQ ID NO: 42446 - protein, 35 aa, Homo sapiens
CQLEGTWMKLETIILSKLSQGQKAKHRMFSLKGGN

SEQ ID NO: 42447 - protein, 29 aa, Homo sapiens
WMKLETMILSKLSQGQKTKHRMFSVIVGN

SEQ ID NO: 42448 - protein, 297 aa, Homo sapiens
  DOMAIN (156)..(205): kw TRANSCRIPTASE REVERSE II ORF2 domain identified by eMATRIX, accession number DM01354Z, p-value=8.742e-13, raw score of 9.06
MDAMKYNDLRDFLTLLEQQGELKRITLPVDPHLEITEIADRTLRAGGPALLFENPKGYSMPVLCNLFGTPKRVAMGMGQEDVSALREVGKLLAFLKEPEPPKGFRDLFDKLPQFKQVLNMPTKRLRGAPCQQKIVSGDDVDLNRIPIMTCWPEDAAPLITWGLTVTRGPHRERQNVGQLEKVGLRIKKMWHIYTMEYYAAIKKDEFMSYAGTWMKLETIILSKLSQGQKTKHRMLSLIGWSRAGLSTPPDLFANKRKRICFRMKKDDLSSVIARLFGSLRWQKIALDWEFQISVGNI

SEQ ID NO: 42449 - protein, 398 aa, Homo sapiens; identical to SEQ ID NO: 33585

SEQ ID NO: 42450 - protein, 35 aa, Homo sapiens
PKQHGTWMKLETIILSKLSQGQKTKHRMFSLIGGN

SEQ ID NO: 42451 - protein, 42 aa, Homo sapiens; identical to SEQ ID NO: 41468

SEQ ID NO: 42452 - protein, 36 aa, Homo sapiens
ETTGTWMKLETIILSKLSQGQKTKHRMFSLIVRHRV

SEQ ID NO: 42453 - protein, 37 aa, Homo sapiens
QKQASEGTWMKLEAIILSKLSQGQKTKHHILSLIGGN

SEQ ID NO: 42454 - protein, 32 aa, Homo sapiens
TGTWMKLETIILSKLSQEPKTKHRMFSIIGWN

SEQ ID NO: 42455 - protein, 173 aa, Homo sapiens
  DOMAIN (19)..(68): kw TRANSCRIPTASE REVERSE II ORF2 domain identified by eMATRIX, accession number DM01354Z, p-value=8.350e-33, raw score of 9.06
  misc_feature (1)...(173): Xaa = X or * as defined in Table 2
PTDPXLGIYQKEYKSCYYKDICTRVCVPAALFTIANTWNQPKCTSMIDWVKKMWHIYTMEYYAAIKTDEFMSFAGTWMKLETIILRKLSQGQKTKHRMYSLIGGNLTMRTFGHSAGSHHTPGPIMRCGAGGGIALGEIPNVNDELMGTANQHGTCIPMQQNCTLCTCTLKLKV

SEQ ID NO: 42456 - protein, 126 aa, Homo sapiens
  misc_feature (1)...(126): Xaa = X or * as defined in Table 2
ASTAGVSYYVAQAGLKLLGLSLSKCRDYRCEPPCPEXMSLYKVMAMARKAMSLYIYFFLDEFMYFAGTWMKLETIILSKLSQGQKTKHRMFSLXGVSYYVAQAGLKLLGLSLSKCRDYRCEPPCPE

SEQ ID NO: 42457 - protein, 233 aa, Homo sapiens
MEYYAAIKKDEFMSFVGTWMKLETIILSKLSQGQKTKHRMFSLIEFHLGYHITWFSLHHRKLLLDVTALGEVIKLQMVLQTELRMDTPFFRGPLDRPQEESQLLFPIQRPFQQQGCCGLLGDHFKPYSSGSLLHLELSPEEAGEHQRWVPPPSFGISDLEGQQADASRNTSVYGVWRPLLGCLTQLGHTGTRTHLTKHFVPWWRGGLRPREIWDLSLSLWLEFLEFLQGSPTQ

SEQ ID NO: 42458 - protein, 54 aa, Homo sapiens; identical to SEQ ID NO: 41470

SEQ ID NO: 42459 - protein, 1219 aa, Homo sapiens
  DOMAIN (847)..(866): MAM DOMAIN SIGNATURE domain identified by eMATRIX, accession number PR00020A, p-value=5.776e-12, raw score of 18.17
MSRSCRAACGRAGCQHQGRAAGSPSPLLLRLRFFYSGLDTLIRMPASPGPGAFDPGIPFRTFPEPVLPVPAPAQAQIVHAGQACVVKEDNISERVYTIREGDTLMLQCLVTGHPRPQVRWTKTAGSASDKFQETSVFNETLRIERIARTQGGRYYCKAENGVGVPAIKSIRVDVQYLDEPMLTVHQTVSDVRGNFYQEKTVFLRCTVNSNPPARFIWKRGSDTLSHSQDNGVDIYEPLYTQGETKVLKLKNLRPQDYASYTCQVSVRNVCGIPDKAITFRLTNTTAPPALKLSVNETLVVNPGENVTVQCLLTGGDPLPQLQWSHGPGPLPLGALAQGGTLSIPSVQARDSGYYNCTATNNVGNPAKKTVNLLVRSMKNATFQITPDVIKESENIQLGQDLKLSCHVDAVPQEKVTYQWFKNGKPARMSKRLLVTRNDPELPAVTSSLELIDLHFSDYGTYLCMASFPGAPVPDLSVEVNISSETVPPTISVPKGRAVVTVREGSPAELQCEVRGKPRPPVLWSRVDKEAALLPSGLPLEETPDGKLRLERVSRDMSGTYRCQTARYNGFNVRPREAQVQLNVQFPPEVEPSSQDVRQALGRPVLLRCSLLRGSPQRIASAVWRFKGQLLPPPPVVPAAAEAPDHAELRLDAVTRDSSGSYECSVSNDVGSAACLFQVSAKAYSPEFYFDTPNPTRSHKLSKNYSYVLQWTQREPDAVDPVLNYRLSIRQLNQHNAVVKAIPVRRVEKGQLLEYILTDLRVPHSYEVRLTPYTTFGAGDMASRIIHYTERQIRWPPVLALRTLSSGPKQGILCRAPHLSSDLVSPLAFSAINSPNLSDNTCHFEDEKICGYTQDLTDNFDWTRQNALTQNPKRSPNTGPPTDISGTPEGYYMFIETSRPRELGDRARLVSPLYNASAKFYCVSFFYHMYGKHIGSLNLLVRSRNKGALDTHAWSLSGNKGNVWQQAHVPISPSGPFQIIFEGVRGPGYLGDIAIDDVTLKKGECPRKQTDPNKGARREGAACDGLKFHLSSPMDDGELTDDPIECKHLWIHRVDSKGAQYMLAELNCIHVAPRFLVFMDEGHKVGEKDSGGQPFQVYTDFSFYPHAIPEKMSIMPTLQVGKLRLREEEESAYGHTAAKARAGTRSWSLNRPPELKSFSLWTNMTQSVREPITGPLQCQTYTHSNTQHLGTWMKLETIILSKLTQEQKTKHHMFSLITGS

SEQ ID NO: 42460 - protein, 35 aa, Homo sapiens
PKQHGTWMKLETIILSKLTQEQKAKQRMFSLIGGN

SEQ ID NO: 42461 - protein, 199 aa, Homo sapiens
MAFLETSAPLYEHIWTLQVAFSTVGLGETLKVAMISMSTSSGYFLQLLQYCCSSTITITGYKGFLRDLKVETRADGVMRTMAPEKLLKSMPILQGQIDALLEFDVHPNELTNGVINAAFMLLFKDLIKLFACYNDGVINLLGTWMKLETIILSKLLQRQKTKHCMFSLIGGNRTMRTLGHRKGNITHWALLAGGGAAEG

SEQ ID NO: 42462 - protein, 42 aa, Homo sapiens
MARKMSRQLEMRTWMKLEIIILSKLTQEQKTEHRMFSLISGN

SEQ ID NO: 42463 - protein, 290 aa, Homo sapiens
MRFYGQLAEDPGQQKAGETTRHTEDYISQLPLQRQGIPELALQKDLFINKIYGKEFNVCRSTLEDPRVHVLCRDMDEAGNHHSEQTIARTENQTPHVLTHRRELNNENTWTQGGEHHTPEPVIGPMGTLLDSTGLNTDTWKPYNCICPASDRVPDQILPEDTCRQEYNFGNTENGVMMQPREATEAEDTDAHSTQVTVPGQIAENKIPRNPTYKGCEGPLQEKLQTTTQRNKRGQKLMEEHSMLMDRKNQHHENGRTAQGTWMKLETVILSKLSQGQKTKHRMFSLIGGN

SEQ ID NO: 42464 - protein, 50 aa, Homo sapiens
  misc_feature (1)...(50): Xaa = X or * as defined in Table 2
MRILRALPGKQIPWWNASPEQRVAGPRGGSTQWLNTGKELALGVWTFETX

SEQ ID NO: 42465 - protein, 414 aa, Homo sapiens
  DOMAIN (284)..(325): CORE POLYPROTEIN PROTEIN GAG CONTAINS: P domain identified by eMATRIX, accession number PD02059A, p-value=8.013e-11, raw score of 28.10
MPNIYTMEYYAAVKKDEFMSFVGTWMKLETIILSKLSQGQKTKHRMFSLIGTRMKLETIILSKLLQGQKNQTPYILTHRISFEDVRNYMPLAVIHSDESPILPLHEQQDASENGWIKDTERDADLEIYIVSGIGSFRWVLGLADFKSEAADPCGMKLQTFAVSVTALKGGASRVVHSSWWVCVLTDFRSEAAYLSVTALEGGASRVAHSSRFVVSLTSGVKLQTFTVNATAHKGSADPKSEQHQDLLQRAKKHTFHSMKGEPRRVVAAGWGGAIKADSNNLILLFQTIEKYCPWFPDKGSVDLLDWDRVGTTLCQLMRDGVLLPISVWTDWALIRVALLPFQSGDTLQLPQVNADVEPLPLPRCIGGITGPEGGDPPGPSFHYLVGVYYFLTCRSTWEQRKSPVALRAAGQIPQ

SEQ ID NO: 42466 - protein, 1104 aa, Homo sapiens
  DOMAIN (969)..(1018): kw TRANSCRIPTASE REVERSE II ORF2 domain identified by eMATRIX, accession number DM01354Z, p-value=1.000e-40, raw score of 9.06
MNKVILKSIWKCHGPRRAKINLKKNKNKSFLKCGLWRLALESLEELKDIETGIGPEILTLFLTLEMRSVNPWWFHDLHNHTTCFSVTDCLLSAQQFYGPGPGCSVPVPANQSFWTREEYSNLKLPRASHKAVVNGNIMWVVGGYMFNHSDYNMVLATMYVFGGFNSLLLSDILVFTSEQCDAHRSEAACLAAGPGIRCLLTMTDVTSTQIVTAAQPTPMTATGAMTIVSPGTTAAQKARYENCPKDNPMYYCNKKTSCRSCALDQNCQWEPRNQECIALPENICGIGWHLVGNSCLKITTAKENYDNAKLFCRNHNALLASLTTQKKVEFVLKQLRIMQSSQSMARVTVCSQSSHESLVDTGSLCFGDRIWLCAMWRAELVSSWNTSTLGLKAAACINPLNGSVCGRPANHSAKQCRTPCALRTACGDCTSGSSECMWCSNMKQCVDSNAYVASFPFGQCMEWYTMSTCPPENCSGYCTCSHCLEQPGCGWCTDPSNTGKGKCIEGSYKGPVKMPSQAPTGNFYPQPLLNSSMCLEDSRYNWSFIHCPENKIPRNPTYKGREGPLQGELQTTAQRNKRGHKQMEEHSMLMDRRINMVKKVIYRFNTIPIKLPMTFFTELEKTTLKFIWNQKRAHIAKSILSQKNKAGGITLPDFRLYYKATVTKTAWYWYQNRDLDQRNRTEPSEIIPHIYNYLIFDKPDKNKKWGKDFLFNKWCWENWLAICRKLKLDPFLTLYTKINSRWIKDLNVRPKTIKTLEENLGNTIQDTGMGKDFMTKTPKAMVTKAKIDKWDLIKLKSFCTAKETTIRVNRKPTEWEKIFATYSSDKGLISRIYKELKQIYKKKTNNPIKKWAKDMNRHFSKEDIYAANRHVKKCSSSLAIREMQIKTTMRYHLTPVRMAIIKKSGNNGCWRGCGEIGTLLYCWWDCKLAQPLWKSVWRFLRDLELEIPFDPAIPLLGIYPKEYKSCCYKDTCTRMFIEALLTIAKTWNQPKCPTMIDWIKKMWHIYTVEYYAAIKNDEFMSFVGTWMKLETIILSKLSQGQKTKHSMFSLIGLAVLKHVLTPRIKATHVAFDCMKNYLDAIYDVTVVYEGKDDGGQRRESPTMT

SEQ ID NO: 42467 - protein, 40 aa, Homo sapiens; identical to SEQ ID NO: 41480

SEQ ID NO: 42468 - protein, 404 aa, Homo sapiens
MEYYAAIKNDEFKSFVGIWMKLETIILSKLSQGQKTKHRVFSLRDYKLSHFLISLGFILLKRKDVIGLSSHHPGEQCSHDSPLRSLMVFGPELISGHSPLEPVVVPRRSHGCLIGAVNLKSSNRTPVVQEFERDLAGRAEILGKTSLKIWNVTRRDSALYRCEVVARNDRKEIDEIVIELTVQVKPVTPVCRVPKAVPVGKMATLHCQESEGHPRPHYSWYRNDVPLPTDSRANPRFRNSSFHLNSETGTLVFTAVHKDDSGQYYCIASNDAGSARCEEQEMEVCHTDKRGGFPWSWAAPHLWFLQDTALLPAALTGWCSVSVAFPGAQCKLSVDLSFWGLEDGGPLLTAPLGSTPVGTLCRGSDPTFPFHAPQSCVQPEATYGLHFYLVQLLPFPETCLTLFQ

SEQ ID NO: 42469 - protein, 524 aa, Homo sapiens
  DOMAIN (57)..(104): kw TRANSCRIPTASE REVERSE II ORF2 domain identified by eMATRIX, accession number DM01354V, p-value=1.000e-40, raw score of 12.97
MIVYLENPTVSAQNLLKLMSNFSKVSGYKINVQKSQAFLYTNNRQTESQIMSGLPFTITSKRITYLGIQLTRDVKDLFKENYKPLLKEIKEDTNKWKNIPCSWVGGRINLVKMAILPKVIYRFNAIPIKLPMTFFTELEKTTLKFIWNQKRALIAKSSLSQKNKTGGITLPDFKLYYKATVTKTSWYWYQNRDIDQWNRTEPSEIMPHIYNYLIFDKPDKNKQWGKDSLFNKWCWENWLAICRKLKLDPFLTPYTKINSRWIKDLHVRPKTIKTLEENLGNTIQDIGMGKDFMSKTPKAMATKAKIDKWDLIKLKSFCTAKETTIRVNRQPTEWEKIFATYSSDKGLISRIYNELKQIYKKKTNNPIKKWAKDMNRHFSEEDIYAAKKHMKKCSSSLAIREMQIKTTMRYHLTPVRMVIIKKSGNNRCWRGCGEIGTLLHCWWDCKLVQPLWKSVWQFLRDLELEIPFDPATPITGYILGVYPKDYKSCCYKDTCTHMFIVALFTIAKTWNPTPKCPIQWIDLD

SEQ ID NO: 42470 - protein, 107 aa, Homo sapiens
  misc_feature (1)...(107): Xaa = X or * as defined in Table 2
PAPRGGAYRGRQTSLSCGGLHPVXASWLLCLPKQAWAMVGRPPQASLLPCSLISDCCASNQRDSVGVGPSEPCAGYNLLLCRFLSQSEKHSIRVGAVDCSCSYLAIL

SEQ ID NO: 42471 - protein, 173 aa, Homo sapiens
MVGAPPPALLPPCSLISDCCASNQRDSLGVGPSEPGAGYNLVVRRFLSRSEKRSIRVGVTRFSSLKVGTAMLHKQQRWQPTPPSGSSIPAPSCAYKNPETLAGIHTSCWTSRGEDWRKKTQVAGCPEVHISGGTHRWLDVERGTLVGPDRLAGHRQAEQRGIWLGQSEESPGY

SEQ ID NO: 42472 - protein, 159 aa, Homo sapiens
  DOMAIN (44)..(89): kw TRANSCRIPTASE REVERSE II ORF2 domain identified by eMATRIX, accession number DM01354N, p-value=2.385e-39, raw score of 13.17
MAGAPPPASLPPCSLISDCCASNQRDSVGAGPSEPERQTTIREYYKHLYENKLENLEEMDKFLDTYTLSRLNQEEVESLNRRITGSEIEAVINSLPTKISPGLHGFTAEFYQRYKEELLGPVVGEWGYPHRLNAGPHENGGSPSIFRRPMPLIPREIDS

SEQ ID NO: 42473 - protein, 128 aa, Homo sapiens
  misc_feature (1)...(128): Xaa = X or * as defined in Table 2
KRTQTXAIAGAPPPASLPPCSLISDCCASNEXGSVGIGPSKPGAGYNLLLCHLISPSISPTSSPKSDTCPIADFSNKSPDRSSAGDILLAMQSLGSMAIFLILILPTREHGKFFHLFVSSFISLSSGL

SEQ ID NO: 42474 - protein, 120 aa, Homo sapiens
MVGAPTPASLLPCSLISDCCASNERGSVGVGPSKPGAGYNLLPYFLLPKVYQDSGLGSEGRKLEYVAFATLPGPYDILLSLGSLNREYTALFFRKAAYLRDCITLHPGAWILDIISSLDP

SEQ ID NO: 42475 - protein, 566 aa, Homo sapiens
  misc_feature (1)...(566): Xaa = X or * as defined in Table 2
MAEGEEGTSYMAAGERVVAIALIDGFRPLTLESTFFNSGSCSKLEQHSTYLGDFADFGTTIKQDFRLLGQTSVDRLLQLSQGQAVPEPKQHGIGPKQKYRSTGPNRALRNNAAYLQFLIFGNLEKTKPWGKDSLLIKVFEAAVLWIECFAFIFYDARGVLIVVQVDSCSKLEQHSTLSRAILLIYKGFCRFRNHHQTGFSPAGANQRGPLAATLSGPGGEGQSAVARLTGEKKNHPGAQYANRLSPRVGRFINAAGTTGFPTGKRAVSATQLMDFADFGTTIKQDFRLLGQTSVDRLLQLSQGQAVKGNQLLPVSLVKRKTTLAPNTQTASPRALADSLMQLARQVSRLESGHLISDCCASNQPDSVGVGPSEPGAGYNLVVRHFLSPSEKHSIRVGVTRFSRCRPSPLPLTQKGNSLTPCASQLRQCLALLRLRXRAISCCPSHWXKEKPPWRPIRKPPLPARWPIHXCSWHDRFPDCESGHLISDCCASNQPDSVGVGPSEPGAGYNLVVRHFLSPSEKHSIRVGVTRFSRCRPSPLPLTQKGNSLTPCASQLRQCLALLRLRH

SEQ ID NO: 42476 - protein, 444 aa, Homo sapiens
MAGAPPPASLPPCSLISDCCASNQRDSVGVGPSEPGAGYSLLVCRFLSPSEKRSIGVVVTRFSRCRLSPLSLTRKGNSLTPCTSPVRQCLALLRLAHGVTRDKTTKGGASGKAGQPPKPGATNTGAGASAAKSLFEIMQIPVLGVDPSFRNWGLARGMLDLETGILSGLDLKLVETKPDGTKQVRQNSKDMQAAEDITTGVIDWFKEAKVIFVEVPVGSQSANGMKSYGVCVGILGALRALGHEIIEVTPIENKVALSGIKTASKDVMIRAATGFYPEANWLKDTKEFNENFIKGITMQVILTQPEIEAALTGYVNDLMSVREGMEIKVTFKATRGDDGATAIVDIVPAGSQSVEVVEEPKKESKERKHRPVTQTNTAAVSALASATGKKKEEVVEVETTTETVDETVEVAEEAAAQEEEKEVQEEEAKEPVQAKPSLFAGLKR

SEQ ID NO: 42477 - protein, 558 aa, Homo sapiens
MAGAPPPASLPPCSLISDCCASNQRDSVGVGPSEPGAGYNLVVCRFLSRSEKRNIWVGVTRFSRAFEDVKVFWRVTLNKTVVVLQKDGVNLMEELQSVSGTTTCTMGQTKCFISIELKPEKVPQVEVYFFVELYEATAGAAINNSARFAQIKILESDESQSLVYFSVGSRLAVAHKKATLISLQVARDSGTGLMMSVNFSTQVFLSLGSNFTLQLVTVMLVGGRFYGMPTILQEAKSAVLPVSEKAANSQVGFESTAFQLMNITAGTSHVMISRRGTYGALSVAWTTGYAPGLEIPEFIVVGNMTPTLGSLSFSHGEQRKGVFLWTFPSPGWPEAFVLHLSGVQSSAPGGAQLRGFFTIADGESEASFDVHLLPDEVPEIEEDYVIQLVSVEGGAELDLEKSITWFSVYANDDPHGVFALYSDRQSILIGQNLIRSIQINITRLAGTFGDVAVGLRISSDHKEQPIVTENAERQLVVKDGATYKVDVVPIKNQADRQLIQESSGWHLAGAPLGRSFQRKEAGSNLCCSAASAGDIQANRVWSGPPANSSRPAAEGPDC

SEQ ID NO: 42478 - protein, 270 aa, Homo sapiens
  DOMAIN (203)..(217): Phage integrase family domain identified by eMATRIX, accession number PF00589B, p-value=1.621e-11, raw score of 16.17
MAGARPPASLPPCTLISDCCASNQRDSVGVGPSEPGQASGRGCGTLACTLSRTRSVPGLLHTALQASSTPSGTEAGMSSRLEMLALQTGATGKARLCFQLVILFHYGESWNLLRADQRLIFAKSWPRASRYQQGHQDLFILRSDLPSQVFIRDKLMERRNRRTGRTEKARIWEVTDRTVRTWIGEAVAAAAADGVTFSVPVTPHTFRHSYAMHMLYAGIPLKVLQSLMGHKSISSTEVYTKVFALDVAARHRVQFAMPESDAVAMLKQLS

SEQ ID NO: 42479 - protein, 473 aa, Homo sapiens
MMSPQEEPEQDRGMKWMKEWQEIIALYEKDNTYLVELSSLLVWNVNYEIPSLKKQIAKCQQLQQEYSCKEEECQAGAAEMGEQFYHSCKQYGIMGENTRGELLALVKDLPSQLAETGAAAQQSLGEAIEVYQASVGFVCDSPTEQVLPMLWFVQKRGNSTVYEWRTGTEPSVVERPHLEELPEQVAEDAIDWGDFGITVVEAGIQAPEGVARGPDALTLLEYTETQNQFLDELMELEIFLAQRAVELSEKADVLSVSQFQLAPVILQGQTKEKMVIMVSVLEDLIGKLTSLQLQHLFMNLASPRYVDRVTEFLQQNLKQSQLLALKKELMVQKQQEALEEQEALEPKLDLLLEKTKELQKLIEADISKRQKTRPTGRRKATGRKRHLMVILALSMFSTRSCGDWPCGLSVYGMLVSCKRCSDCYRCHNEAHYRICGWVMVLPISSVFARRNVMVAIGKESNGTKWNRMDSDAA

SEQ ID NO: 42480 - protein, 191 aa, Homo sapiens
RVDDFVRQTRPSAQAALAEKMAANQPPPLMMKHSQTDLVSRLKTRKILGVGGEDDDGEVHRSPISQALGTEIKFTIREPLGLTVWQFVSAVLFSGIAIMALAFPDQLYDAVFDGAQVTSKTPIRLYGGALLSISLIMWNALYTAEKVIIRWTLLTEACYFGVQFLVVTATLAETGLMSLGIRLTRSSRRGR

SEQ ID NO: 42481 - protein, 95 aa, Homo sapiens
  DOMAIN (68)..(95): TRANSMEMBRANE FOUR FAMILY SIGNATURE domain identified by eMATRIX, accession number PR00259D, p-value=2.756e-15, raw score of 13.50
  DOMAIN (50)..(94): Transmembrane 4 family domain identified by PFam, accession name transmembrane4, E-value=5.1e-08, PFam score of 28.6
  misc_feature (1)...(95): Xaa = X or * as defined in Table 2
XCRVNGPEDFKFASVFRLLTLDSEEVPEACCRREPQSRDGVLLSRSLFLNKQGCYTGILNTFETYVYLAGALAIGVLAIELFAMIFAMCLFRGIQ

SEQ ID NO: 42482 - protein, 302 aa, Homo sapiens
HRQPKQSLPFQAPAWARETPQGYLRWCGLPIYVDRPKKGAPSAELARKVILGGAGHARVSPRGFLPRRLLSGARAPPAGGPRESLAGEPGAWFPRQPPSRPPRRPPWGRGSPARGRGRRAIGLCAEPRGGTSAGRQTRPSAEAGLEEKMAAKQPPPLMKKHSQTDLVSRLKTRKILGVGGEDDDGEVHRSKISQVLGNEIKFTIREPLGLRVWQFVSAVLFSGIAIMALAFPDQLYDAVFDGAQVTSKTPIRLYGGALLNAAPTPRPLMKLSAGDVLPSCGHWWNTPSGLELAVATICKERS

SEQ ID NO: 42483 - protein, 22 aa, Homo sapiens
WKNIPCSWIGRINIVKMAVLPK

SEQ ID NO: 42484 - protein, 386 aa, Homo sapiens
  DOMAIN (94)..(139): Amino acid permeases proteins domain identified by eMATRIX, accession number BL00218D, p-value=3.797e-11, raw score of 21.49
  DOMAIN (6)..(325): Amino acid permease domain identified by PFam, accession name aa_permeases, E-value=7.5e-05, PFam score of -210.7
MREQFCLCALGIMQPDTAPEVLLTWVNCSSVRWATRVQDIFTAGKLLALALIIIMGIVQICKGEYFWLEPKNAFENFQEPDIGLVALAFLQGSFAYGGWNFLNYVTEELVDPYKNLPRAIFISIPLVTFVYVFANVAYVTAMSPQELLASNAVAVTFGEKLLGVMAWIMPISVALSTFGGVNGSLFTSSRLFFAGAREGHLPSVLAMIHVKRCTPIPALLFTCISTLLMLVTSDMYTLINYVGFINYLFYGVTVAGQIVLRWKKPDIPRPIKINLLFPIIYLLFWAFLLVFSLWSEPVVCGIGLAIMLTGVPVYFLGVYWQHKPKCFSDFIELLTLVSQKMCVVVYPEVERGSGTEEANEDMEEQQQPMYQPTPTKDKDVAGQPQP

SEQ ID NO: 42485 - protein, 203 aa, Homo sapiens
FVSVPSVLLGLQFWRSERDTARLQSARWRVERGRLKELLSRQRPRRREEVVVGREVCRTEMEVRASLQKIVSNGDEQLEKAMEEILRDFEKRPSSLLVDCQSSSEISDHSFGDIPASQTNKPSLQLILDPSNTEISTPRPSSPGGLPEEDSVLFNKLTYLGCMKVSSPRNEVEALRAMATMKSSSQYPFPVTLYVPNVPEGSV

SEQ ID NO: 42486 - protein, 165 aa, Homo sapiens
SFGLQRWRSERDSARLQSARRRVERGRLKELLSRQRPRRREEVVVGREVCRTEMEVRASLQKVSGSSDSVATMNSEEFVLVPQYADDNSTKHEEKPQLKIVSNGDEQLEKAMEEILRDSEKRPSSLLVDCQSSSEISDHSFGDIPASQTNKPSLQLIMDPSNTET

SEQ ID NO: 42487 - protein, 268 aa, Homo sapiens
MFRRNPLPNIDHELQEPLIDRGEDVPREEEEEEENGFEDRKDDSDDDGGGWITPSNIKQIQQELEQCDVPEDVRVGCVTTDFPRQNVLLQMGLHVLAVNCMLIQLRLGCHGCFKTTSDMSRVFCSHCGNKTLKKVSVTISDDGTLHMHFSRNPKVHKLTLKSDYTGSYSQYLRVPKVDDDLNERNLIYWNDWIRRTDVQSIAPLKIRSIEHTIGGPTTALTDSTGYLGLERSPRPESSLPVGATLPEFIKNRTPFRLKPLWWTLKAPL

SEQ ID NO: 42488 - protein, 413 aa, Homo sapiens
  DOMAIN (1)..(137): Protein of unknown function  DUF133 domain identified by PFam, accession name DUF133, E-value=5e-05, PFam score of -17.4
  misc_feature (1)...(413): Xaa = X or * as defined in Table 2
MAPVEHVVADAGAFLRHAALQDIGKNIYTIREVVTEIRDKATRRRLAVLPYELRFKEPLPEYVRLVTEFSKKTGDYPSLSATDIQVLALTYQLEAEFVGVSHLKQEPQKVKVSSSIQHPETPLHISGFHLPYKPKPPQETEKGHSACEPENLEFSSFMFWRNPLPNIDHELQELLIDRGEDVPSEEEEEEENGFEDRKDDSDDDGGGWITPSNIKQIQQELEQFDVPEDVRVWLAXPPDFAMQNVLLQMGLHVLAVNCMLIREARSYILRCHGCFKTTSDMSRVFCSHCGNKTLKKVSVTVSDDGTLHMHFSRNPKVLNPRGLRYSLPTPKGGKYAINPHLTEDQRFPQLRLSQKARQKTNVFAPDYIAGVSPFVENDISSRSATLQVRDSTLGAGRRRLNPNACRKKFVKKR

SEQ ID NO: 42489 - protein, 62 aa, Homo sapiens
  misc_feature (1)...(62): Xaa = X or * as defined in Table 2
MTMFXTXSKDNTAKLFDSTTLEHQKTFRTERPVNSAALSPNYDHVVLGGGQEAMDVTTXXHQ

SEQ ID NO: 42490 - protein, 126 aa, Homo sapiens
  DOMAIN (35)..(50): G-PROTEIN BETA WD-40 REPEAT SIGNATURE domain identified by eMATRIX, accession number PR00320C, p-value=4.960e-10, raw score of 13.01
  DOMAIN (10)..(48): WD domain, G-beta repeat domain identified by PFam, accession name WD40, E-value=0.00019, PFam score of 28.2
MESSETLGSGEVLVNVKEHSRQINDIQLSRDMTMFVTASKDNTAKLFDSTTLEHQKTFRTERPVNSAALSPNYDHVVLGGGQEAMDVTTTSTRIGKFEASYSSGGEDGYVRIHYFDPQYFEFEFEA

SEQ ID NO: 42491 - protein, 424 aa, Homo sapiens
  DOMAIN (383)..(423): kw TRANSCRIPTASE REVERSE II ORF2 domain identified by eMATRIX, accession number DM01354Y, p-value=9.232e-14, raw score of 10.69
MQKEQIRTGDTSTYGEKVSWRLLVVPITVADASSYCYRVVLQSSQTLSPIWTIARNTHRNCERYVDRSVDISILTGYFDYWWMPFLHSVDGLYILVWFSSGSFPFNSQAPILKLCLSILEVHSRRCLPGYHQRSLQNSKDCCLLLPLEPSSPRATPAKCQPELYCMSVCMPYSSWSRDKNPEPTKEQELKRAVTHSRPAHRAADGPPDGHRAAWCLSRDTTQFHTEPVRPWIPEQTSISCCSPNKGGQALLHIPRIEATAAVLRSGQTIPHETPMPLLLLVMQGLLAWAPSAAALFPPGQRRQSQFCVPLESSHTSRCATPYICCSSQHKAWAPSTAAPHLPEHCELENTTLHVIRNQKRARIAKTILSKKNKAGGIMLPDFKLYYKATVTKQHGTGTKNRYIDQWNRREALRNNATHLQPSDL

SEQ ID NO: 42492 - protein, 837 aa, Homo sapiens; identical to SEQ ID NO: 31196

SEQ ID NO: 42493 - protein, 359 aa, Homo sapiens
MYVRLLKKQFYKQAMTNKLATRLEIMLQGLCSFWLQESEPSQIAPGGNITTVEPKLFDSTTLEHQKTFRTERPVNSAALSPNYDHGWIKHAATGFHLGCQHLDEVDMAAPENSEIPATAEPQGVVTASVTPWGVPRVDRVSVLESTRVNCKTPVEHGSQDTSKECGANHPASATLFPLPGADQNWGYFYLWGKDASSYCYRVVLQSSQTLSPIWTIARNTHRCIPRKRNFLDTLAHETYISMAWHHLETGPTSGVCPALRPVATKPFYRLRATVISLNSHRCLQHQYSSCLEPRPKGMTGTLMSEQMRHPVTQGNRQACTVERLLAAAGPVCTHSWLENWTRSSTTPLERVTHSCLICS

SEQ ID NO: 42494 - protein, 165 aa, Homo sapiens
  DOMAIN (69)..(80): Trp-Asp (WD) repeat proteins proteins domain identified by eMATRIX, accession number BL00678, p-value=7.158e-09, raw score of 9.67
  DOMAIN (1)..(80): WD domain, G-beta repeat domain identified by PFam, accession name WD40, E-value=3.2e-11, PFam score of 50.7
MKPILLQGHERSITQIKYNREGDLLFTVAKDPIVNVWYSVNGERLGTYMGHTGAVWCVDADWDTKHVLTGSADNSCRLWDCETGKQLALLKTNSAVRTCGFDFGGNIIMFSTDKQMGYQCFVSFFDLRDPSQIDNNEPYMKIPCNDSKITSAVWGPLGEVHHRWP

SEQ ID NO: 42495 - protein, 69 aa, Homo sapiens
  DOMAIN (33)..(54): RIBOSOMAL PROTEIN L7A FAMILY SIGNATURE domain identified by eMATRIX, accession number PR00882G, p-value=3.939e-19, raw score of 10.27
LVHKKRGTTAAFAQVNLEDKGALAKLVETIRTNYSDRYDEICCHWGGNVLGPKSVARITKRAHHAGLFF

SEQ ID NO: 42496 - protein, 65 aa, Homo sapiens
  DOMAIN (24)..(45): RIBOSOMAL PROTEIN L7A FAMILY SIGNATURE domain identified by eMATRIX, accession number PR00882G, p-value=8.500e-25, raw score of 10.27
VAFTQVNSEDKGALAKLVEAIRTNYNDRYDEIRRHWGGNVLGPKSVARIAKLEKAKAKELATKLG

SEQ ID NO: 42497 - protein, 72 aa, Homo sapiens
  DOMAIN (16)..(51): PROTEIN BOLA TRANSCRIPTION REGULATION AC domain identified by eMATRIX, accession number PD02462A, p-value=6.484e-14, raw score of 22.48
  DOMAIN (1)..(66): BolA-like protein domain identified by PFam, accession name BolA, E-value=1.5e-06, PFam score of 34.4
MELRAEYLREKLQRDLAAEHVALLAVSAKFEGKPLLQRHRLVNACLAEALLRIHAFEQKTLIPEQWARERQK

SEQ ID NO: 42498 - protein, 111 aa, Homo sapiens
  DOMAIN (55)..(90): PROTEIN BOLA TRANSCRIPTION REGULATION AC domain identified by eMATRIX, accession number PD02462A, p-value=1.170e-18, raw score of 22.48
  DOMAIN (27)..(105): BolA-like protein domain identified by PFam, accession name BolA, E-value=6.3e-16, PFam score of 66.4
FAAASTGARAGVVSLLGCRSSWTAAMELSAEYLREKLQRDLEAEHVEVEDTTLNRCSCSFRVLVVSAKFEGKPLLQRHRLVNACLAEELPHIHAFEQKTLTPDQWARERQK

SEQ ID NO: 42499 - protein, 58 aa, Homo sapiens
VERLEAKVVEPLKTYGTIVKMKRAETELQRAAMDASRTSRHLEETINNFERQKMKDIK

SEQ ID NO: 42500 - protein, 436 aa, Homo sapiens
MVIVMDGERDRGQILDIYFERRTNRQVYTAIASCLDHYKSLFLVSSSLAPSSMFSARSQSDHAIALTQLQWLCVTFKTQPGVSLWPPRPSQPGPWLPPHHRYFISPLPAVSGLEIPFFGPPQGPRPCARQHDEAHPGKPLTARAQLPRAAHNGGLGNAQTKQLQTAVSNVEKHFGELCQIFAAYVRKTARLRDKADLLVNEINAYAGTETPHLKLGLMNFADEFAKLQDYRQAEVERLEAKVVEPLKTYGTIVKMKRDDLKATLTARNREAKQLTQLERTRQRNPSDRHVISQAETELQRAAMDASRTSRHLEETINNFERQKMKDIKTIFSEFITIEMLFHGKALEVYTAAYQNIQNIDEDEDLEVFQNSLYAPDYSSRLDIVRANSKSPLQRSLSAKCVSGTGQVSTCRLRKDQQAEDDEDDELDVTEEENFLK

SEQ ID NO: 42501 - protein, 422 aa, Homo sapiens
MQDPNADTEWNDILTQKGYLTPQGKSERIGRGGRRGAAHPPAESAPIFVYLEGDIKAQFIGPLVFGGMNLTRDELEWKLSESGAIMMDLEENPKKPIEDVLLSSISFVQISFLASLTELEQLSIMNNPCVMATPSIPGFDYRPYIVSWCLNLRVLDGYVISQKESEGSYPLPKCPPAFLTSLDRLHQARKRECAPIRAQSPPLPCVTSGGAAAILSVASGSRALEKCSSPWLPTRPLFLRTKGAVEERSPKAQPFLPTVPPLLLQPPVGALREPRSAMSSEESYRAILRYLTNEREPYAPGTEGNVKRKIRKAAACYVVRGGTLYYQRRQRHRKTFAELEVVLQPERRRDLIEAAHLGPGGTHHTRHQTWHYLSKTYWWRERIHNKISEGRRCMEQSLKETSTGFQELSHSGIILSSSSTEL

SEQ ID NO: 42502 - protein, 195 aa, Homo sapiens
  DOMAIN (21)..(105): Phosducin domain identified by PFam, accession name Phosducin, E-value=0.074, PFam score of 10.1
IDRFDAPCGLEELEDHEDEFNEEDERAIEMYRRRRLAEWKATKLKNKFGEVLEISGKDYVQEVTKAGEGLWVILHLYKQGIPLCALINQNLSGLARKFPDVKFIKAISTTCIPNYPDRNLPTILVYPGGDINGQFIGPLSVGGMNLTRDELEWKLSESGAIMTDLEENPKKPIEDVLLSSVRRSGPHEEGQRFRG

SEQ ID NO: 42503 - protein, 102 aa, Homo sapiens
  misc_feature (1)...(102): Xaa = X or * as defined in Table 2
SHYLKIHAEKLSEYDQISPPNSQPDKENPVLSTXXSIQRRHMTLFKMNLKIILKYRKPEAXSQRLVSKRXKHSIRGSGINLSFVPTGFQIVPFHLFETSLWL

SEQ ID NO: 42504 - protein, 112 aa, Homo sapiens
  misc_feature (1)...(112): Xaa = X or * as defined in Table 2
DYTITGELKTAIQRSKINFCPILHSHSSHNAKSFVIXTVTLLHRHLLXKVSVNKVQSLFIQCGIFSEAGAGVYNYCPPPRQRRQPGDKPRWRWRRGRNNRCSANSHGLQLYA

SEQ ID NO: 42505 - protein, 394 aa, Homo sapiens
  DOMAIN (3)..(29): Cytosolic fatty-acid binding proteins domain identified by eMATRIX, accession number BL00214A, p-value=9.045e-09, raw score of 21.17
MSFSGKYQLQNPEKLETFMKAIDSSVINIMENSKTSDSFQHELEDYIRKQKARGLQPTLCFTKVTEDSACQERGPTEPRGPEQQGLPFWRPHVFPASLERLRTVESRVPPWPKIPYAPRRLESVNHSQNNQDHFFKHRWLPSPSGQGENTGVRGAHGKEGSCCLFWEPRGSAQQAGRGDRSLEKKHREVGRQKAPGRSSKPQEKPRPKGTHTKGPGHDESPRGLQALQKRPKRIKRNTPGGKSRFVNLMKHSKKTYDSFQDELEDYIKASVPTVRLLGAAAALPEEATGTFPAVRPADACVLSLPRWAWKPPVFGRNGPDYFDWGLQIPLFLGAIWNFKPREAMRVQTEMELRMFRQNEFMYYKMREAALNNQPMQVMAEPNNEPSPALFHKKQ

SEQ ID NO: 42506 - protein, 153 aa, Homo sapiens
  DOMAIN (45)..(93): Ubiquitin-conjugating enzymes proteins domain identified by eMATRIX, accession number BL00183, p-value=5.737e-26, raw score of 28.97
  DOMAIN (1)..(147): Ubiquitin-conjugating enzyme domain identified by PFam, accession name UQ_con, E-value=2.3e-59, PFam score of 210.7
MAELPHRIIKETQRLLAEPVPGIKAEPDESNARYFHVVIAGESKDSPFEGGTFKRELLLAEEYPMAAPKVRFMTKIYHPNVDKLERISLDILKDKWSPALQIRTVLLSIQALLNAPNPDDPLANDVVEQWKTNEAQAIETARAWTRLYAMNSI

SEQ ID NO: 42507 - protein, 171 aa, Homo sapiens
MCDFGISGYLVDSVAKTMDAGCKPTWPRADDCGRSVEMEGSDADAEMMWGGAHNNAHDHALPPRLQRHIYYLATHPLPTRNDTRLTTRTTTTTHRRRELTITASTSIRYDDRADTPHNDPRQPDRLIKTHTTPQRDDQPRSTSRTQQHAAPRDTQRDVVQQQTTTRTSTNN

SEQ ID NO: 42508 - protein, 359 aa, Homo sapiens
  DOMAIN (192)..(223): Protein kinases ATP-binding region proteins domain identified by eMATRIX, accession number BL00107A, p-value=3.118e-20, raw score of 18.39
  DOMAIN (76)..(337): Eukaryotic protein kinase domain identified by PFam, accession name pkinase, E-value=2.9e-62, PFam score of 220.3
ISLHRRPGPTCSMESPASSQPASMPQSKGKSKRKKDLRISCMSKPPAPNPTPPRNLDSRTFITIGDRNFEVEADDLVTISELGRGAYGVVEKVRHAQSGTIMAVKRIRATVNSQEQKRLLMDLDINMRTVDCFYTVTFYGALFREGDVWICMELMDTSLDKFYRKVLDKNMTIPEDILGEIAVSIVRALEHLHSKLSVIHRDVKPSNVLINKEGHVKMCDFGISGYLVDSVAKTMDAGCKPYMAPERINPELNQKGYNVKSDVWSLGITMIEMAILRFPYESWGTPFQQLKQVVEEPSPQLPADRFSPEFVDFTAQCLRKNPAERMSYLELMEHPFFTLHKTKKTDIAAFVKKILGEDS

SEQ ID NO: 42509 - protein, 35 aa, Homo sapiens
SFHWVLTSWPPSLPAAPAPPPLSVRVLGSSSLQLL

SEQ ID NO: 42510 - protein, 145 aa, Homo sapiens
SPGLPHCWQPCRARSRGTDVWNVLVSGSGSGAYKEPAILVGPENLTLTVHQTAVLECVATGNPRPIVSWSRLGWPPNPTAKEQEQRAKTESQRKQPRDKARENQPKAARPKRAAPKSHEAARKTNPPTASTKRQAAPTNTPKESS

SEQ ID NO: 42511 - protein, 898 aa, Homo sapiens
  DOMAIN (188)..(212): Receptor tyrosine kinase class III proteins domain identified by eMATRIX, accession number BL00240B, p-value=9.809e-09, raw score of 24.70
  DOMAIN (84)..(832): Immunoglobulin domain identified by PFam, accession name ig, E-value=1.9e-39, PFam score of 132.2
MQRACGRSYQMEKGNAKGLSLVAPLVGAGRCWEIPSQIAVDKGPQGTVYKGCTYVGMCVIDYLHRTRAMSDFHVHPQATVGEEGGVARFQCQIHGLPKPLITWEKNRVPIDTDNERYTLLPKGVLQITGLRAEDGGIFHCVASNIASIRISHGARLTVSGSGSGAYKEPAILVGPENLTLTVHQTAVLECVATGNPRPIVSWSRLDGRPIGVEGIQVLGTGNLIISDVTVQHSGVYVCAANRPGTRVRRTAQGRLVVQAPAEFVQHPQSISRPAGTTAMFTCQAQGEPPPHVTWLKNGQVLGPGGHVRLKNNNSTLTISGIGPEDEAIYQCVAENSAGSSQASARLTVLWAEGLPGPPRNVRAVSVSSTEVRVSWSEPLANTKEIIGYVLHIRKAADPPELEYQEAVSKSTFQHLVSDLEPSTAYSFYIKAYTPRGASSASVPTLASTLGEAPAPPPLSVRVLGSSSLQLLWEPWPRLAQHEGGFKLFYRPASKTSFTGPILLPGTVSSYNLSQLDPTAVYEVKLLAYNQHGDGNATVRFVSLRGASERTALSPPCDCRKEEAANQTSTTGIVIGIHIGVTCIIFCVLFLLFGQRGRVLLCKDVENQLSPPQGPRSQRDPGILALNGARRGQRGQLGRDEKRVDMKELEQLFPPASAAGQPDPRPTQDPAAPAPCEETQLSLLPLQGCGLMEGKTTEAKTTEATAPCAGLAAAPPPPDGGPGLLSEGQASRPAAARARPLECTMCGMGLGHSAELAFAVEPSDDVAVPGQPIVLDCRVEGTPPVRITWRKNGVELPESTHSTLLANGSLMIRHFRLEPGGSPSDEGDYECVAQNRFGLVVSRKARIQAAMQGKAGAASEQMAGCEEGKRGQRVGTPTWKPKPQVSDLPKDMAGPPVWA

SEQ ID NO: 42512 - protein, 86 aa, Homo sapiens
IVAAILAIAGIVMMTYADGFHSHSVIGIALVVASASMSALYKPHRCSTWDKMSGAHPHSQIPDIIDGSEQVQCLLRSFATLWGGKT

SEQ ID NO: 42513 - protein, 208 aa, Homo sapiens
  DOMAIN (142)..(163): Isocitrate and isopropylmalate dehydrogenases proteins domain identified by eMATRIX, accession number BL00470A, p-value=4.938e- 09, raw score of 16.25
  DOMAIN (143)..(190): Isocitrate and isopropylmalate dehydrogenase domain identified by PFam, accession name isodh, E-value=6e-11, PFam score of 39.2
LFNQLAGKLELTRSSAESVSHGLWFLSPSLSGSPCMAAWIFSCLIIVDGMEKGGRAQIWLGIDGPSCWKWGESGDPILEMKKVLFKLLLGSAKFGEAALFLSILGVFNILFITCIPIILYFTKVEYWSSFDDIPWGNLCGFSVLLLSDHVGQEITAEAIKVLKAISDVRSNVKFDFENHLIGGAAIDLQGGGGKPRCVSKSLMLHCTR

SEQ ID NO: 42514 - protein, 59 aa, Homo sapiens
SITAFTGMLRTIPRDIRVGYVTAIPKFNTILNVNKRTENPQRFPHGMSSKELQYSTLVK

SEQ ID NO: 42515 - protein, 276 aa, Homo sapiens
  DOMAIN (178)..(195): ALLERGEN V5/TPX-1 FAMILY SIGNATURE domain identified by eMATRIX, accession number PR00837C, p-value=6.516e-15, raw score of 17.21
  DOMAIN (84)..(223): SCP-like extracellular protein domain identified by PFam, accession name SCP, E-value=3.4e-12, PFam score of 47.8
  misc_feature (1)...(276): Xaa = X or * as defined in Table 2
LLEIVNSSIQPEKQAGWLSQAVHGAPDGPNRPMLHPETSPGRGHLLAVLLALLGTTWAEVWPPQLQEQAPMAGALNRKESFLLLSLHNRLRSWVQPPAADMRRLDWSDSLAQLAQARAALCGIPTPSLASGLWRTLQVGWNMQLLPAGLASFVEVVSLWFAEGQRYRHAAGEXARNATCTHYMQLVWATSSQLGCGRHLCSAGQAAIEAFVCAYSPRGNWEVNGKTIVPYKKGAWGSLCTASVSSLLKAWDHARGLLGGPRETLGKEPTEPWTALK

SEQ ID NO: 42516 - protein, 506 aa, Homo sapiens
  DOMAIN (169)..(186): ALLERGEN V5/TPX-1 FAMILY SIGNATURE domain identified by eMATRIX, accession number PR00837C, p-value=5.179e-16, raw score of 17.21
  DOMAIN (141)..(213): SCP-like extracellular protein domain identified by PFam, accession name SCP, E-value=8.8e-11, PFam score of 42.7
MPVLQGALSTLAALTSPAPAASGAEKRRSCQAAPPAAEPDGSDPGQPVVLPAVTSVVGYSCLGPQEGLRWSLAGSWHPFQGPFVKVLENFISVKDWSDSLAQLAQARAALCGTPTPSLASGLWRTLQVGWNMQLLPAGLVSFVEVVSLWFAEGQRYSHAAGECARNATCTHYTQLVWATSSQLGCGRHLCSAGQAAIEAFVCAYSPRGNWEVNGKTIVPYKKGAWCSLCTASVSGCFKAWDHAGGLCEVPRNPCRMSCQNHGRLNISTCHCHCPPGYTGRYCQVRCSLQCVHGRFREEECSCVCDIGYGGAQCATKVHFPFHTCDLRIDGDCFMVSSEADTYYRARMKCQRKGGVLAQIKSQKVQDILAFYLGRLETTNEVIDSDFETRNFWIGTLGHGGCQQMARGPGREHMGAASAGKRGQKGSWQQTPGSEWANLDYPGPGLTYKTAKDSFRWATGEHQAFTSFAFGQPDNHGFGNCVELQASAAFNWNDQRCKTRNRYICQF

SEQ ID NO: 42517 - protein, 263 aa, Homo sapiens
  DOMAIN (99)..(134): SCP-like extracellular protein domain identified by PFam, accession name SCP, E-value=0.013, PFam score of 13.3
CWDYRCELSSVPSVSPPKSPARRCSSPLLGRTTATGDGASIMRADFPLAVLLIDWSDSLAQLAQASAALCGIPTPSLASGLWRTLQVGWNMQLLPAGLASFVEVVSLWFAEGQWYSHAAGECARNATCTHYTQVSVLQYPNPEQEYFYCDYRIEIKPGKPSLGGQWPHLRGKGGVTPVLVENRTVPKRYPGGVHFTSEKEEQKLLGPLEGNGPKIVLERLDMTLANHVWLKAQTRTNDISRQKAAVADWARPEGLGPLALLGK

SEQ ID NO: 42518 - protein, 168 aa, Homo sapiens
  DOMAIN (10)..(53): Ribosomal protein L10e proteins domain identified by eMATRIX, accession number BL01257A, p-value=1.000e-40, raw score of 11.15
  DOMAIN (9)..(130): Ribosomal L10 domain identified by PFam, accession name Ribosomal_L10e, E-value=4.3e-71, PFam score of 249.6
ATEDPGVAMGRRPARCYRYCKNKPYPKSRFCRGVPDAKIRIFDLGRKKAKVDEFPLCGHMVSDEYEQLSSEALEAARICANKYMVKSCGKDGFHIRVRLHPFHVIRINKMLSCAGADRIHISKKWGFTKFNADEFEDMVAEKRLIPDGCGVKYIPSRGPLDKWRALHS

SEQ ID NO: 42519 - protein, 226 aa, Homo sapiens
  DOMAIN (199)..(225): Dihydropyridine sensitive L-type calcium channel (Beta subuni domain identified by eMATRIX, accession number PF00774D, p-value= 9.250e-10, raw score of 10.59
  DOMAIN (12)..(202): Ribosomal L10 domain identified by PFam, accession name Ribosomal_L10e, E-value=4.2e-55, PFam score of 196.5
  misc_feature (1)...(226): Xaa = X or * as defined in Table 2
RFWVSPHGPAAPARCYRYCKNKPLPKVLRFCRGVPDAKIRIFDPGAEKRQKVEXVFRFCGHMVSDEYNQLSSXALEAARNLCPISTMVKSCGKDGFHIRVRLHPFHVIPHQTRCCSCAGADRLQTGMRGAFGKPQGTVARVHIGQVIMSIRTKLQNKEHVIDALRRAKFKFPGRQKIHISKKWGFTKFNADEFEDMVAEKRLIPDGCGVKYIPSRGPLDKWRALHS

SEQ ID NO: 42520 - protein, 121 aa, Homo sapiens; identical to SEQ ID NO: 38336

SEQ ID NO: 42521 - protein, 125 aa, Homo sapiens; identical to SEQ ID NO: 41924

SEQ ID NO: 42522 - protein, 238 aa, Homo sapiens
MGKKQSRKTGKSKKQSTSPPPKEHSSSPATEQSRTENDFDELREEGFRRSNYSELQEEIQTKGKEVTGENGTKLENTLQDIIQENFPNLARQANVQIQEIQRTPQRYSSRRATPRHIIVRFTKVEMKEKMLRAAREKGRVTHKGKPIRLTADLSPETPQARREWGLIFNILKEKNFQPRISYPAKLSFRSEGEIKSFTDKQMLRDFVTTRPALKELLKEALNMERKNWYQPLQNHAKL

SEQ ID NO: 42523 - protein, 273 aa, Homo sapiens
  misc_feature (1)...(273): Xaa = X or * as defined in Table 2
YPGKQGLEWTSNKIQQTCSXGSSLLEGKLTNRKDIHTKTPSVRHRSSKAKERVSVIEDQMNETKREEMFREKRVKRNEQSLQEIWEYVKRPNLRLIGVPESDGDNGTKLENTLQDIIQQYFPNLARQANIQIQEIQRMPQRCSSRRAAPRHIIVRFTKAEMKEKMLRAARGKGRVTHKGKPIRLKVDVLAETLQARREWGPIFNILKEKNFQPRISFPAKLSFISKGEIKSFTDKEMLRDFVTTRPALQELLKEALNMERNNRYQPQQKHAKL

SEQ ID NO: 42524 - protein, 347 aa, Homo sapiens
MGDFLHSTDRNYLIKFWAKLSAKKTPANSSSPLGDHQHPCITKNLQIPEKWLIGLLLPLKADLLKEDAGTHCKEAKNLDERLDEWLTRINSVEKFLNDLMELKTMAQELHYACTSFSSQFDQLEERVSVIENQMSEMKREEKFREKRVKRNEQSLQKIWDYVKRPNLRLTGVPESDWENGTKLENSLQDIIQENFPNLARQANIHIQEIQRMPQRYSSRRATPRHLIVRFTKFEMTEKMVRAAREKGQVTHKGKPIRITADISAETLQARREWGPIFNILKEKNFQPRISYPAKLSFISEGEIKSFTDKQMLRDFVTTRPTLQELLKEALNMERNNQYQPLQKHAKL

SEQ ID NO: 42525 - protein, 424 aa, Homo sapiens
MKLEESSGQLKIQLQEVEGTGLRNPPPSKGGIVMYGGPPPDLEGKKGEGQKEGGGGKREKRESDPGSAALVAPRNAELAPELAPNRPKHPLFQIPYNLSYGQTTPGESGKLTYLNLKVALFPLHSGPGNGKELKAYQLDKGEGEGVIDDGIDKCEGRQALTQARSPMLTDPLVLKQGPTPFGSSHANGVFSCSILCLNPNARGCYIFIVKKFAQGLVNRRFCRELGPLSIYYFTLVGNIVDTVEAALIALLCDGQKGTKLENTLQDIIQENFPNLARQANIQIQEIQRMPQRYSSRRATPRHIIVRFTKAEMKEKVLRAARDKGQVTHKRKPIRLPADLLAETLQARREWGPIFNILKEKNFQPRISYPAKLSFISEGEIKYFTDKQMMRDFVTTRPALKELLKEALNMERNNWYQPLQNHAKM

SEQ ID NO: 42526 - protein, 528 aa, Homo sapiens
  DOMAIN (291)..(303): Fungal Zn(2)-Cys(6) binuclear cluster domain proteins domain identified by eMATRIX, accession number BL00463, p-value=2.406e-10, raw score of 8.22
MVNSGASATRELEAGRPGICRPQPCTVGAIPLKVSLGGHVAASTIPPPKLGSTVQRATPSAGEGESAQCRTLSWNSALAPTSHCEIRHWLVSSVWQNQITPGWSLRTESLGGPAARCGGLVLWAASAPAASVAGRPQPQTYRGNQPPIFQHLQLRVLLLEGKLTNRNDICTKTPSVRHHHQRPKVDKTTKTGKKQSRKTGNSKKQSTSPPPKERSSSPATEQSWTENDFDELREEGFRRSNYSKLQEEIHTNGKEVKNFEKKLDEWITRITNAEKSLKELMELKAKARELCDECRSLRSRCDQLEERVLVMEDEMNELKQEENFREKRIKRNEQSLQEIWDYVKRPNLRRIGVPANDRENGTKLENTLQDIIQENFPNLARQANIQFQEIQRTPQRYSSRRATPRHIIVRCTKVEMKEKMLRAAREKGRLTHKGKPIRLTVDLLAETLQARREWGPIFNILKEKNFQPRISYPAKLSFTSEGEIKYFTDKQMLRDFVTTRPALKELLKEALNMERNNRYQPLKKHAKM

SEQ ID NO: 42527 - protein, 340 aa, Homo sapiens
MGDFCVSNRGTGFISLLLLLIPRQTGSGVDLQQTPTDLQLRVLTVRRKTNKQKEHPHQNPICTSPSSKAKDEWLTRITSAEKSLKDLMEVKTKARELRDECTSLSSRFDQLEERVLVMENQMNQMKQEEKFREKRIKRNEQSLQEIWDYVKRPNLRVIGVPESDGENGTKLENTLQDIIQENFPNLARKANIQIQETQRMPQRYSSRRATPRHIIVRFTKVEMKETMLRAAREKGRVTHKGKPIRLTADLSAETLQAKREWGPIFNILKEKNFQPRISYPAKLSFISEGEIKSFTDKQMLRDFVTTRPALKELLKEALNMERNNQYQHCKNMPNCKDHPG

SEQ ID NO: 42528 - protein, 684 aa, Homo sapiens; identical to SEQ ID NO: 42056

SEQ ID NO: 42529 - protein, 341 aa, Homo sapiens
  misc_feature (1)...(341): Xaa = X or * as defined in Table 2
VSKHPQASAGDTQTNRVWSGPPANSDRPAAEGPDCXKENXQTERTSNQNPICMSPSSKTKEAKNLDKRLDEWLTRINSIEKTLNDLMELNTMARKLRDACTSFSSQFDQVEERVSVIEDQMNEMKREEKFREKRIKRNKQSLQEIWDCVKRPNLRLIGVPESDGENGTKLENTLQDIIQENFPNLARQVNIQIQEIQRTPQRYSSRRGTPRHIIVRFTKVEIKEKILRAAREKGRVTHKGKPIRLTAVLLAETLQARREWGPIFNILKEKNFQPRVSYPAKLSFISEGEVKSFTDKQMLRDFVTTRPALQELLKEALNMERNNRYQLLQKHATLSRPSMLG

SEQ ID NO: 42530 - protein, 325 aa, Homo sapiens
MGKKQNRKTGNSKKQSVSPPPKERSSSPATEQSWMGNDFDELREEGFRRSNYSELREDIQTKGKEVENFEKNLEECITRITNTEKCLKELMELKTKARELLEERVSAMEDEMNETKREGKFREKRIKRNEQSLQEIWDYVKRPNLRLIGVTESDGENGTKLENTLQDIIQENFPNLARQANVQIQEIQRMPQRYSSRRAIPRHIIVRLTKVEMKEKMLRAAREKGRVTLKGKPIRLTVDLSAETLQARREWGPIFNILKEKDFQPRISYPAKLSFLSEGEIKYFTDKQMLRDFVTTRPALKELLKEALNMERNNRYQPLQNHAKM

SEQ ID NO: 42531 - protein, 394 aa, Homo sapiens
HFWCHKQDSKTKVCHFLATRAGREARGLPISPDGNSPSSLPWQLNGQGEPDFARSWSDEDGFPLLARPLSLAAAGVSGLVFTGLCPILLEAQPLWPCDLQFFRQSVKTNFSKLKEDVRIHHKEAGNLEKRLDEWLTIIDSVEKTLNDLIELKTMAQKLRDECRSLSIQCDQQEEKVSVIVKMNEMKQEEKFRDKIIKRNEQSLQEIWDYVKRPNLRLIGVPESDGENRTKLENTLQDIIQENFPNLARQADIQIQEIQRTPQRYSSRRATPRHIIVRFTKVEMKEKMLRAAREKGRVTHKGKPIRLTVDLSAETLQARREWGPIFNILKEKNFQPRISYPANLSFISEGEIKSFTDKQILRDFVTTRPALQELLKEALNMERNNWYQSLQKHAK

SEQ ID NO: 42532 - protein, 302 aa, Homo sapiens
MVDTGLLPPLGCCEECCYQIEVLLFFYSLVLDPPLDGDSDSTSDDEADSDEEDEDECKELNSDSECEEQETQEIKERENEKIATLKPGAIGSTKTQWNLRLVYSESTSINQGISGTASALTNGSNCLPPCDRANGTKLENTVQDIIQENFPNLARQANIQIQEIQRMPQRYSSRRATPKHIIVRFTKVEMKEKMLRAAREKGRHTHKGKSIKLIADLLAETLQARRERGPIFNILKEKNFQPRISYPAKLSFIHEGEIKSFTDKQMLRDFVTTRPALQELLKEALNMERNNWYQPLQKHAKL

SEQ ID NO: 42533 - protein, 627 aa, Homo sapiens; identical to SEQ ID NO: 34171

SEQ ID NO: 42534 - protein, 464 aa, Homo sapiens; identical to SEQ ID NO: 42057

SEQ ID NO: 42535 - protein, 1644 aa, Homo sapiens
  DOMAIN (1047)..(1072): 7 kw REVERSE TRANSCRIPTASE RNA POLYMERASE domain identified by eMATRIX, accession number DM00895E, p-value=7.545e-12, raw score of 15.72
  DOMAIN (1019)..(1289): Reverse transcriptase domain identified by PFam, accession name rvt, E-value=2.7e-71, PFam score of 250.3
MGPGARLAALLAVLALGTGDPERAAARGDTFSALTSVARALAPERRLLGLLRRYLRGEEARLRDLTRCNDETITYLLDKRLTVLTAANIPYSSPENGAKRRRQDAFPPIHYNTQDALLQYLSGVGWGAPPAAQAHRDAPFVDSIAQVLLRTSGGSAEASGWSLRSRWAVGGATGSWVLSKGDRASLGERVVTGWATLNVGRSFAYCLTTCVQPPLDVGPRKEHAPRPPSLSPTSTRQRGQSERSQDANGRRKQKTKSEPERFEDAVLLAGFKVEEEPVQRPRRKEWFQGPSPGHCCPAQPQDSAPCILATHAPARAQNAPGTAWAAALEGTSTVSLDHFHVVGVVVVSGGEIILLLSFRFYDKVLSLHEDSTTPVANPLLAFTLIKRLQSDWRNVVHSLEASENIRALKDGYEKVEQDLPAFEDLEGAARALMRLQDVYMLNVKGLARGVFQRVTGSAITDLYSPKRLFSLTGDDCFQVGKVAYDMGDYYHAIPWLEEAVSLFRGSYGEWKTEDEASLEDALDHLAFAYFREQSSSPATEQSWMENDFDELREEGFRRSNYSELQEEIRTNGKEVKSFEKKLDEWITRITNAEKSLKDLMELKTKARELRDECRSLSSRCNQLEERVSVMEDEMNETKRGEKFREKRIKRNEQSLQEIWDYVKRANLRLIGGPESDGENGTKLENTLQDIIQENFPNLARQANIQIQEIHRTPQRYSSRRATPRHIIVRFTKVEMKEKMLRAAREKGRVTHKGKPIRLTADLSAETLQARREWGPIFNILKEKNFQPRISYPAKLSFISEGEIKSFTDKQMLGGFVTTRPALQELLKEALNMERNNWYQPLQKHAKLTREARANTFKPSRRREITKIRAELKEIETPKTAQKINESRSWFSERINKIDRPLARLRKKKREKNQIDTIKNDEGDITTHPTEIHTIIREYYKHLYANKLENLEEMDKFLDTYTLPRPNQEEVESLNGPIAGSEIQAIINSLPTKKSPGPDGFYQRYKEELVPFRLKLFQSIEKEGILPNSFYEASIILIPKPGRDTTKKENFRPISLLNINAKILNKILANRIQQHIKKLMHHDQVGFIPGMQGWFNIRKSINVIQHINRTKDKNHMIISIDAEKAFDKIQQPFMLKTLNKLGIDGTYHKIIRANYDKPTANIILNGQKLEAFPLKTGTRQGCPLSPLLFNIVLEVLARAIRQEKETEGIQLGKEEVKLSLFADDMIVYLENPIVSAQNLLKLISNFSKVSGYKINVQKSQVFLYTDNRQTESQIISELPIHNCFKENKIPRNPTYKVREGPLQGEVNEIKEDTNKWKNIPCSWVGRINIVKMAILPKVIYRFNAISIQLPMTFFTELEKTTLKFIWNQKRAHIAKSILSKKNKAGGIMLPDFKLYYKATVTKTAWHWYQNRDIDQRNRTEPSEIMPHVYNHLIFGKPDKNKQWGNDSLFNKWCWENWLAICKKLKLDPFLTPYTKINSRWIKDLNVRPKTIKTLEENLGNNIQDIGMGKDFTSKTPKAMATKDKIDKWDLMKLKSFCTAKETTIIVNRQPTEWEKIFAIYSYDKGLISRIYKEFKQIYKKKTNNPIKMWAKDMNRHFSKEDIYAAKRHMKKCSSSLAIREMQIKTTMRYHLTPVRMAIIKKSGNN

SEQ ID NO: 42536 - protein, 304 aa, Homo sapiens
GQQEEFAGNELGFCRFRNHHQTGFSPAGANQRGPLAATLSGPGGEGQSAVARLTGEKKNHPGAQYANRLSPRVGRFINAAGTTGFPTGKRAVSATQLMDFADFGTTIKQDFRLLGQTSVDRLLQLSQGQAVKGNQLLPVSLVKRKTTLAPNTQTASPRALADSLMQLARQVSRLESGHDVENGTKLENTLQDIIQENFPNLARQANVQIQEIQRTPQRYSSRRATPRHIIVRFTKVEMKEKNVKGSQRERSGYPQREAHQTNKQISRQKLYKSEERGRPIFNILKEKNFQPRISYPAQTKLLHK

SEQ ID NO: 42537 - protein, 407 aa, Homo sapiens
  DOMAIN (346)..(382): kw TRANSCRIPTASE REVERSE II ORF2 domain identified by eMATRIX, accession number DM01354F, p-value=6.357e-16, raw score of 14.56
IKPQRWGKKQNRKTGNSKKQSASPPPKERSSSPATEQSWTENDFDELREEGFRRSVITNFSELKEHVVTHRKEAKNLEKKLDEWITRITNAEKSLKDLMELKTTAQELRNECTNLSNRCDQLEETVSAMEDQINEMNEMKQEGKFREKRIKRNEQSFQEIGDYVKRPNLHLIGVPESDGQNGTKLENTLQDIIQENFPNLARQANIQIQEIQRTPQRYSLRRATPRHIIVRFTKVEMKEKMLSAAREKGRVTHKGKPIRLTTADLSAETLQAQKTEWGPIFNILKEKNFQPRISYPAKLSFISEGEIKYFTDKQMLRDFCHHQGLPLKELLKEEALKHWKGTTRYQPLAKTLPKYRSTRQKVNKDTQELNSALHQADLIDIYRTLHTKSTEYTFFQHHTTPIPKLTT

SEQ ID NO: 42538 - protein, 211 aa, Homo sapiens
MPVPGTRRAPLHLLATSLQEQQYARWMAGCRLASKGRTMADSSYTSEVQAILAFLSLQRTGSGGPGNHPHGPDASAEGLNPYGLVAPRFQRKFKAKQLTPRILEAHQNVAQLSLAEAQLRFIQAWQSLPDFGISYVMVSNMRQWNVNWDIRQVAIEFDEHINVAFSCVSASCRIVHEYIGGYIFLSTRERARGEELDEDLFLQLTGGHEAF

SEQ ID NO: 42539 - protein, 35 aa, Homo sapiens
  DOMAIN (10)..(35): Dihydropyridine sensitive L-type calcium channel (Beta subuni domain identified by eMATRIX, accession number PF00774D, p-value= 9.250e-10, raw score of 10.59
EFEDMVAEKRLIPDGCGVKYIPSRGPLDKWRALHS

SEQ ID NO: 42540 - protein, 191 aa, Homo sapiens
  DOMAIN (39)..(79): Ribosomal protein L10e proteins domain identified by eMATRIX, accession number BL01257B, p-value=1.000e-40, raw score of 12.56
  DOMAIN (1)..(153): Ribosomal L10 domain identified by PFam, accession name Ribosomal_L10e, E-value=8.5e-104, PFam score of 358.2
RGVPDAKIRIFDLGRKKAKVDEFPLCGHMVSDEYEQLSSEALEAARICANKYMVKSCGKDGFHIRVRLHPFHVIRINKMLSCAGADRLQTGMRGAFGKPQGTVARVHIGQVIMSIRTKLQNKEHVIEAVRRAKFKFPGRQKIHISKKWGFTKFNADEFEDMVAEKRLIPDGCGVKYIPSRGPLDKWWALHS

SEQ ID NO: 42541 - protein, 79 aa, Homo sapiens
  DOMAIN (2)..(42): Ribosomal protein L10e proteins domain identified by eMATRIX, accession number BL01257D, p-value=7.840e-40, raw score of 18.80
MSIRTKLQNKEHAIEALRRAKFKFPGRQKIYISKKWGFTKFNADEFEDMVAEKRLIPDGCGVKYIPNRGPLDKWLALHS

SEQ ID NO: 42542 - protein, 355 aa, Homo sapiens
  DOMAIN (97)..(116): ALDO-KETO REDUCTASE SIGNATURE domain identified by eMATRIX, accession number PR00069B, p-value=2.475e-10, raw score of 11.33
MSRQLSRARPATVLGAMEMGRRMDAPTSAAVTRAFLERGHTEIDTAFVYSEGQSETILGGLGLRLGGSDCRVKIDTKAIPLFGNSLKPDSLRFQLETSLKRLQCPRVDLFYLHMPDHSTPVEETLRACHQLHQEGKFVELGLSNYAAWEVAEICTLCKSNGWILPTVYQGMYNAITRQVETELFPCLRHFGLRFYAFNPLADQSPEGCGSFWGTLGPGADCCFPSGGLLTGKYKYEDKNGKQPVGRFFGNTWAEMYRNRYWKEHHFEGIALVEKALQAAYGASAPSMTSATLRWMYHHSQLQGAHGDAVILGMSSLEQLEQNLAAAEEGPLEPAVVDAFNQAWHLVTHECPNYFR

SEQ ID NO: 42543 - protein, 112 aa, Homo sapiens
RVDPRVRHRALCCHPDGPSRPTALHQPQRLSGPKPSLLRTLAHAVPRTLSLQVPGEMAMRRPPGSSMFHCWASTHCATLEVTDHRWHSTNSVPCIPLPQGGLPLPRVGVKWQ

SEQ ID NO: 42544 - protein, 439 aa, Homo sapiens
  DOMAIN (120)..(140): ANION EXCHANGER SIGNATURE domain identified by eMATRIX, accession number PR00165G, p-value=2.714e-10, raw score of 11.41
  DOMAIN (37)..(383): HCO3- transporter family domain identified by PFam, accession name HCO3_cotransp, E-value=1.6e-99, PFam score of 344.0
MKKAQVISACSPPLLPVEAPDIVEQIKGVHCDRQNLSTEEIIALFISITFVLDAVKGTVKIFWKYYYGHYLDDYHTKRTSSLVSLSGLGASLNASLHTALNASFLASPTELPSATHSGQATAVLSLLIMLGTLWLGYTLYQFKKSPYLHPCVREILSDCALPIAVLAFSLISSHGFREIEMSKFRYNPSESPFAMAQIQSLSLRAVSGAMGLGFLLSMLFFIEQNLVAALVNAPENRLVKGTAYHWDLLLLAIINTGLSLFGLPWIHAAYPHSPLHVRALALVEERVENGHIYDTIVNVKETRLTSLGASVLVGLSLLLLPVPLQWIPKPVLYGLFLYIALTSLDGNQLVQRVALLLKEQTAYPPTHYIRRVPQRKIHYFTGLQVLQLLLLCAFGMSSLPYMKMIFPLIMIAMIPIRYILLPRIIEAKYLDVMDAEHRP

SEQ ID NO: 42545 - protein, 248 aa, Homo sapiens
  DOMAIN (128)..(145): GTPase-activator protein for Rho-like GTPases domain identified by eMATRIX, accession number PF00620B, p-value=8.941e- 15, raw score of 14.20
  DOMAIN (36)..(199): RhoGAP domain identified by PFam, accession name RhoGAP, E- value=1.4e-37, PFam score of 138.2
MQKALCAAPDLGTFVTVLTPPPGAQIGSRRERSKVPYIVRQCVEEIERRGMEEVGIYHVSGRVAADIQALKAAFDVNNRTMHSSWEESDELLKARDDPHSGQHSRDGALAKAGMADKKDMSVMMSETDMNAIAGTLKLYFRELPEPLFTDEFYPSFAEGIDRLERVAEKEAVNKMSLHNLATVFGPTLLRPSEKESKLPANPSQPITMTDSRSLEVMSQVEVLLYFLRLEAIPALDSKRQSILFSTDV

SEQ ID NO: 42546 - protein, 169 aa, Homo sapiens
  DOMAIN (36)..(62): PROTEIN GTPASE DOMAIN ACTIVATION domain identified by eMATRIX, accession number PD00930A, p-value=1.659e-14, raw score of 25.62
MQKALCAAPDLGTFITVLTPPPGVHIGSRRERSKVPYIVRQCVEEIERRGMEEVRPPRMSGVAADIQALKAAFNVRDGLGPLDIGGEQDALSLAVQGRDGLQPQEVQQHLDLPSRSGEEESGSEGGSQLLLQSELSHLHTTVADTFIKKFLETTCVHVDFMISPAGKNP

SEQ ID NO: 42547 - protein, 967 aa, Homo sapiens
  DOMAIN (866)..(907): PROTEIN GTPASE DOMAIN ACTIVATION domain identified by eMATRIX, accession number PD00930B, p-value=2.241e-27, raw score of 33.72
  DOMAIN (242)..(430): RhoGEF domain identified by PFam, accession name RhoGEF, E- value=6.1e-85, PFam score of 295.6
  misc_feature (1)...(967): Xaa = X or * as defined in Table 2
STPMAVAGPLGRPWSTSPTRASTSGASWKGRARARSCAARAPLSRRSALPGPAGPTPPGVLRIAEAAIPRTAAPMRTSPPARRTSPLASPAACPQAPPPTACSGTKAALPRRTRNSPSTAAVPPRRSAISGTGTARLSCPRPPSWASARPGRSGPTMTRAPSMETQMARSEHHLDTAALQTGQRSSAGTKMGCPTLMTRPPHRPTSAARAGAAGMRWSREPXSPLKRSELDLEKGLEMRKWVLSGILASEETYLSHLEALLLPMKPLKAAATTSQPVLTSQQIETIFFKVPELYEIHKESYDGLFPRVQQWSHQQRVGDLFQKLASQLGVYRAFVDNYGVAMEMAEKCCQANAQFAEISENLRARSNKDAKDPTTKNSLETLLYKPVDRVTRSTLVLHDLLKHTPASHPDHPLLQDALRISQNFLSSINEEITPRRQSMTVKKGEHRQLLKDSFMVELVEGARKLRHVFLFTDLLLCTKLKKQSGGKTQQYDCKWYIPLTDLSFQMVDELEAVPNIPLVPDEELDALKIKISQIKSDIQREKRANKGSKATERLKKKLSEQESLLLLMSPSMAFRVHSRNGKSYTFLISSDYERAEWRENIREQQKKCFRSFSLTSVELQMLTNSCVKLQTVHSIPLTINKEDDESPGLYGFLNVIVHSATGFKQSSNLYCTLEVDSFGYFVNKAKTRVYRDTAEPNWNELDPQALQDRDWQRTVIAMNGIEVKLSVKFNSREFSLKRMPSRKQTGVFGVKIAVVTKRERSKVPYIVRQCVEEIERRGMEEVGIYRVSGVATDIQALKAAFDVNNKDVSVMMSEMDVNAIAGTLKLYFRELPEPLFTDEFYPNFAEGIALSDPVAKESCMLNLLLSLPEANLLTFLFLLDHLKRVAEKEAVNKMSLHNLATVFGPTLLRPSEKESKLPANPSQPITMTDSWSLEVMSQVQVLLYFLQLEAIPAPDSKRQSILFSTEV

SEQ ID NO: 42548 - protein, 369 aa, Homo sapiens
  DOMAIN (208)..(234): PROTEIN GTPASE DOMAIN ACTIVATION domain identified by eMATRIX, accession number PD00930A, p-value=9.217e-21, raw score of 25.62
  DOMAIN (208)..(369): RhoGAP domain identified by PFam, accession name RhoGAP, E- value=3.6e-06, PFam score of 30.8
MRTPYKTSPMRMLYMTSLMTPTRHANEDAVDDIAYKDTVQDITSEDAVYDIANEDVVYDIANEDALQDIANEVAVYDIANEDIVYDIANEDALYDITNEDAVYNIANEDAVYGIANEDAVYEFANKHAVYDIANEDTVQDICKKEDAANKCYFPGFFPIRCRHEHLPVCIIDVICSLIKCRHEHLPSSLIGQDRLGAQASRRERSKVPYIVRQCVEEIERRGMEEVGIYRMSGVAADIQALKAAFNVSECRPAQDGMEVWAVVSAMRSQSAPRPRHVTSFSVSFLHLSGSSRRPLHFRALSNNKDVSVMMSEMDVNAIAGSLKLYFRELPEPLFTDEFYPNFAEGIGEHWRPWPHGRRLLHVHCCPQRL

SEQ ID NO: 42549 - protein, 985 aa, Homo sapiens
  DOMAIN (885)..(926): PROTEIN GTPASE DOMAIN ACTIVATION domain identified by eMATRIX, accession number PD00930B, p-value=3.172e-27, raw score of 33.72
  DOMAIN (215)..(403): RhoGEF domain identified by PFam, accession name RhoGEF, E- value=7.2e-88, PFam score of 305.3
WKGRARARSCAARAPLSRRSALPGPAGPTPPGVLRIAEAAIPRTAAPMRTSPPARRTSPLASPAACPQAPPPTACSGTKAALPRRTRNSPSTAAVPPRRSAISGTGTARLSCPRPPSWASARPGRSGPTMARAPSMETQMARSEHHLDTAALQTGQRSSAGTKMGCPTLMTRPPHRPTSAARAGAAGMRWSREPWSPLKRSELDLEKGLEMRKWVLSGILASEETYLSHLEALLLPMKPLKAAATTSQPVLTSQQIETIFFKVPELYEIHKEFYDGLFPRVQQWSHQQRVGDLFQKLASQLGVYRAFVDNYGVAMEMAEKCCQANAQFAEISENLRARSNKDAKDPTTKNSLETLLYKPVDRVTRSTLVLHDLLKHTPASHPDHPLLQDALRISQNFLSSINEEITPRRQSMTVKKGEHRQLLKDSFMVELVEGARKLRHVFLFTELLLCTKLKKQSGGKTQQYDCKWYIPLTDLSFQMVDELEAVPNIPLVPDEELDALKIKISQIKSDIQREKRANKGSKATERLKKKLSEQESLLLLMSPSMAFRVHSRNGKSYTFLISSDYERAEWRENIREQQKKCFRSFSLTSVELQMLTNSCVKLQTVHSIPLTINKEDDESPGLYGFLNVIVHSATGFKQSSNLYCTLEVDSFGYFVNKAKTRVYRDTAEPNWNEEFEIELEGSQTLRILCYEKCYNKTKIPKEDGESTDRLMGKGQVQLDPQALQDRDWQRTVIAMNGIEVKLSVKFNSREFSLKRMPSRKQTGVFGVKIAVVTKRERSKVPYIVRQCVEEIERRGMEEVGIYRVSGRVATDIQALKAAFDVNNKDVSVMMSEMDVNAIAGTLKLYFRELPEPLFTDEFYPNFAEGIALSDPVAKESCMLNLLLSLPEANLLTFLFLLDHLKRVAEKEAVNNMSLHNLATVFGPTLLRPSEKESKLPANPSQPITMTDSWSLEVMSQVQVLLYFLQLEAIPAPDSKRQSILFSTEV

SEQ ID NO: 42550 - protein, 338 aa, Homo sapiens
MLRCDSRRSPVFGKQNTYIRLEPFKINVLEQITKHIEKLQCGGVVKQLSRRGNNQHISSTYDINRADTQVRRAVNNYDIIVMSNSFNGQSEHQVWIDRKAGECLLHEYEDLVPIRDTLRLFPGGRYLPRAKHVAPSEPDPEQDEQKLRFCKRHLYGQHPDHRRIPSRRRKAAALTESDYRVLVGELDDEQMAALSRLGNDYRPTSAYERGQRYASRLQNEFAGNISALADAENISRDALQKAFTDKEELLKQQASNLHEQKKAGVIFEAEEVITLLTSVLKTSSASRTSLSSRHQFAPGATVLYKGDKMVLNLDRSRVPTECIEKIEAILKELEKPAP

SEQ ID NO: 42551 - protein, 174 aa, Homo sapiens
  DOMAIN (98)..(141): 1 kw MIND INHIBITOR DIVISION CONTROL domain identified by eMATRIX, accession number DM01756B, p-value=4.822e-15, raw score of 22.91
  DOMAIN (69)..(174): ParA family ATPase domain identified by PFam, accession name ParA, E-value=5.2e-19, PFam score of 76.6
EEKYNMQTRLRRAEDVFPPVIGVAAHKGGVYKTSVSVHLAQDLALKGLRVLLVEGNDPQGTASMYHGWVPDLHIHAEDTLLPFYLMLRLAIETVAHDYDVIVIDSAPNLGIGTINVVCAADVLIVPTPAELFDYTSALQFFDMLRDLLKNVDLKGFEPDVRILLTKYSNSNGWG

SEQ ID NO: 42552 - protein, 27 aa, Homo sapiens
  misc_feature (1)...(27): Xaa = X or * as defined in Table 2
NFLFVLRRQLWVGGLCWXAAELNKVCL

SEQ ID NO: 42553 - protein, 300 aa, Homo sapiens
FSDMLRDLLKNVDLKGFHPHVGILVTKYSNSNGPPSQWMEEQKKDAWGSMVLKNVVRETDEVGKASQKQKAWLLPARQGTASSRVHPPTVVSLEQTESFTRTLCSVLQLTSFPIFKTGEKIGGHFAGLLGGGEMEQARTPVCSMDKYDDLGLEASKFIEDLNMYEASKDGLFRVDKGAGNNPEFEETRRVFATKMAKIHLQQQQQQLLQEETLPRGSRGPVNGGGRHGPTGPLGSCGQQADCGWCCQASSCCLDRGTWGSHHPRCWAAPVPTAGAEIQAIPAWHEAWQPGLWFQGEPGDF

SEQ ID NO: 42554 - protein, 153 aa, Homo sapiens
  DOMAIN (37)..(67): PATHOGENESIS-RELATED PROTEIN SIGNATURE domain identified by eMATRIX, accession number PR00347D, p-value=7.915e-09, raw score of 15.92
  misc_feature (1)...(153): Xaa = X or * as defined in Table 2
KPRELGPISPVWLPPDRLPERPQRRRPSGVDPGSWLGSGSCGSTGCSALMSCSCGSTPLLSLALKVTPGGVLGAPSGSEDGSXPNRKACGSEMEICLTTRGVWGPEVALGVGGGLQQSCRAPCGGLPKLLRSWSQSSLSPNSPGRGASSGEAA

SEQ ID NO: 42555 - protein, 646 aa, Homo sapiens
  DOMAIN (391)..(412): CYTOSOL AMINOPEPTIDASE SIGNATURE domain identified by eMATRIX, accession number PR00481D, p-value=3.727e-21, raw score of 9.86
  DOMAIN (75)..(499): Cytosol aminopeptidase family domain identified by PFam, accession name Peptidase_M17, E-value=1e-181, PFam score of 617.1
MFLLPLPAAGRVVVRRLAVRRFGSRSLSTADMTKGLVLGIYSKEKEDDVPQFTSAGENFDKLLAGKLRETLNISGPPLKAGKTRTFYGLHQDFPSVVLVGLGKKAAGIDEQENWHEGKENIRAAVAAGCRQIQDLELSSVEVDPCGDAQAAAEGAVLGLYEYDDLKQKKKMAVSAKLYGSGDQEAWQKGVLFASGQNLARQLMETPANEMTPTRFAEIIEKNLKSASSKTEVHIRPKSWIEEQAMGSFLSVAKGSDEPPVFLEIHYKGSPNANEPPLVFVGKGITFDSGGISIKASANMDLMRADMGGAATICSAIVSAAKLNLPINIIGLAPLCENMPSGKANKPGDVVRAKNGKTIQVCKCVEVEHTVLHHGPCTEGDVAAGPLGGTCMQVDNTDAEGRLILADALCYAHTFNPKVILNAATLTGAMDVALGSGATGVFTNSSWLWNKLFEASIETGDRVWRMPLFEHYTRQVVDCQLADVNNIGKYSLPFFLKRELRVRVSPPGIRATNSQMGKLRLKACFASLVSQDYVNGTDQEEIRTGVDQCIQKFLDIARQTECFFLQKRLQLSVQKPEQVIKEDVSELRNELQRKDALVQKHLTKLRHWQQVLEDINVQHKKPADIPQGSLAYLEQASANIPAPLKPT

SEQ ID NO: 42556 - protein, 745 aa, Homo sapiens
  DOMAIN (683)..(705): TRANSFORMING PROTEIN P21 RAS SIGNATURE domain identified by eMATRIX, accession number PR00449A, p-value=7.188e-11, raw score of 13.20
  DOMAIN (1)..(143): Cytosol aminopeptidase family domain identified by PFam, accession name Peptidase_M17, E-value=5.3e-12, PFam score of -96.3
MPSGKANKLGDVVRARNRKTIQVGNTDAEGRLILADALCYVHTFNPKVILNATTLTGVIDVALGSGATGVFTNSSWLWNKLFEASIETGDRVWRMPLFKHCTRQVVDCQLADVNNIGKYRSAGACTSAAFLKEFVTHPKWAHLDIAAALGKSLPARVGQRPQAQFARGVGMKSVSLEGPRKGEESGVDFPGAGEKTPDPQAASPEEAPLPGLFGDNDDWDQLLSNFGSPPHGALQLCWSPPPTPRATSGPQTPRVVRQISISEPQAFLFGQEPSSDPDGAPRTPPGVTFSAKDNKGVDPHEQDIRAEQPVEPHDPDPNQEPGSTPEGRLLWGLSGSLVAPAFKVLIPLEDGPPPLENSPPPQAPAGSSKQIQASDPDDKGPGSWAPPSGAQPGAGAGPQEPTQTPPTMTERETQPGPSPTTALTGVGPAKPPRQRDALQQDLHATGSEPRLGTQRARALTLGPAEPFQGLEFVGPVPTERLEQGQAGPAVQEGLPEGLREAHGQVLGLGELSAFPHQELEEEPRSEEGKQEGRGGQDLSSEQSEQSVEAHGLETAHSELPQQDSLLVSLPSATPQAQVEAEGPTPGKSAPPRGSPPRGAQPGAGAGPQEPTQTPPTMAEQEAQPRPSLTTAHAEEQGPPHSREPRAESRLEDPGMDSREAGLTPSPGDPMAGGGPQANPDYLFHVIFLGDSNVGKTSFLHLLHQNSFATGLTATVGKGIGEGGREQGETQGPGPTSESGPRPSPP

SEQ ID NO: 42557 - protein, 592 aa, Homo sapiens
  DOMAIN (406)..(427): CYTOSOL AMINOPEPTIDASE SIGNATURE domain identified by eMATRIX, accession number PR00481D, p-value=1.450e-23, raw score of 9.86
  DOMAIN (123)..(533): Cytosol aminopeptidase family domain identified by PFam, accession name Peptidase_M17, E-value=7.9e-202, PFam score of 683.9
  misc_feature (1)...(592): Xaa = X or * as defined in Table 2
THVRLAGARASPRAPRLRPRKPRPQGLPCLPGLRRARLEGGARGRADEMFLLPLPAAGRVVVRRLAVVRSGSRSLSTADMTKGLVLGIYSKEKEDDVPQFTSAGENFDKLLAGKLRETLNISGPPLKAGKTRTFYGLHQDFPSVVLVGLGKKAAGIDEQENWHEGKENIRAAVAAGCRQIQDLELSSVEVDPCGDAQAAAEGAVLGLYEYDDLKQKKKMAVSAKLYGSGDQEAWQKGVLFASGQNLARQLMETPANEMTPTRFAEIIEKNLKSASSKTEVHIRPKSWIEEQAMGSFLSVAKGSDEPPVFLEIHYKGSPNANEPPLVFVGKGITFDSGGISIKASANMDLMRADMGGAATICSAIVSAAKLNLPINIIGLAPLCENMPSGKANKPGDVVRAKNGKTIQVDNTDAEGRLILADALCYAHTFNPKVILNAATLTGAMDVALGSGATGVFTNSSWLWNKLFEASIETGDRVXRMPLFDHYTRQVVDCQLADVNNIGKYRSAGACTAAAFVKEFVTHRKWAHLDIAGVMTNKDEVPQSTGKAXLGRPTRTLIEFLLRFSQDNCLVQILKNVFHSVLNWTVELKKVFE

SEQ ID NO: 42558 - protein, 134 aa, Homo sapiens
GIRSAEVGKHLAHILLSRQQGRRPVTLIGFSLGARVIYFCLQEMAQEKDCQGIIEDVILLGAPVEGEAKHWSLSGRVVSGRIINGYCRGDWLLSFVYRTSSVQLRVAGLQPVLLQDRRVENVDLTSVVSGHLDY

SEQ ID NO: 42559 - protein, 357 aa, Homo sapiens
MCQEGCSSDFFRTQIGANDLFSFDEYRGTWKLQLGGESQVGFSFEWFYVVFLKLSCPWILTVAQECCYYHRWPQGVPALQAAAPRLEKQSQLLAGQTLPGREGALNGRPPEKAAELMVIPGSTTIWHSPNVARDTDGLFWGLLPDCQGIIEDVILLGAPVEGEAKHWEPFRKVVSGRIINGYCRGDWLLSFVYRTSSVQLRVAGLQPVLLQDRRVENVDLTSVVSGHLDYAKQMDAILKAVGIRTKPGWDEKGLLLAPGCLPSEEPRQAAAAASSGETPHQVGQTQGPISGDTSKLAMSTDPSQAQVPVGLDQSEGASLPAAASPERPPICSHGMDPNPLGCPDCACKTQGPSTGLD

SEQ ID NO: 42560 - protein, 136 aa, Homo sapiens
YVWANTVAKQSQIQASLSPGSHGLRMLSHGILACLLGLFLHLPPTNHLLLASFFRLQKKLENLKSLDLFNCEVTNLNDYRENVFKLLPQLTYLDGYDRDDKEAPDSDAEGYVEGLDDEEEDEDEEEYDEDAQVVED

SEQ ID NO: 42561 - protein, 275 aa, Homo sapiens
  DOMAIN (80)..(92): LRR REPEAT domain identified by eMATRIX, accession number DM01022B, p-value=7.107e-10, raw score of 11.68
  misc_feature (1)...(275): Xaa = X or * as defined in Table 2
NARPWVRGLLIEFRRRGSLCRERAREMEMGRRIHLELRNRTPSDVKELVLDNSRSNEGKLEGLTDEFEELEFLSTINVGLTSIANLPKLNKLKKLELSDNRVSGGLEVLAEKCPNLPHLIXGGNKIKDLSTIEPLEKLENLKSLDLFNCEVTNLNDYRENVFKLLPQLTYLDGYDRDDKEAPDSDAEGYVEGLDDEEEDEDEEEYDEDAQVVEDEEDEDEEEEGEEEDVSGEEEEDEKGYNDGEVDDEEDEEELGEEERGQKRKREPEDEGEDDD

SEQ ID NO: 42562 - protein, 129 aa, Homo sapiens
KRGAAMDGRVQLIKALLALPIRPATRRWRNPIPFPETFDGDTDRLPEFIEQTGSYMFVDENTFSSDALKTALPQSLPSIASHRQTAAPSDLDSPRRYLGWPQSLDSDSDSWPPPKGSVTFSETYFLPTP

SEQ ID NO: 42563 - protein, 42 aa, Homo sapiens
LTGPALQWVIPYIKKESPLLNDYRGFLAEMKRVFGWEEDEDF

SEQ ID NO: 42564 - protein, 142 aa, Homo sapiens
ISLRYLDGLAGPTHASAATEASDRSEDLRWTVCAQLIQALLALPIRPATRRWRNPIPFPETFDGDTDRLPEFIVQTCSYMIVDENTFSSDALKVTFLITRLTGPALQWVIPYIKKESPLLNDYRGFLAEMKRVFGWEDDEDF

SEQ ID NO: 42565 - protein, 207 aa, Homo sapiens
VTAWTKPPVSCFVHFIVLGHESHHRGRKEKTASSFMRLSGKGDHCQFRRVTGSSVSGKLAKHEDPCLSLSNLIAQVWDRVRERGSFMRFPGGFDTDGLRPPSRILQRSDGFIRGSSPASLGTSSCCLVKKVLCFPFSFHRDCKFPAACPSMLNCESIKALSDPFSLSLHPFSLFSNRLLPRDDKEEGNKHKSRARNCLFGDKSLILI

SEQ ID NO: 42566 - protein, 254 aa, Homo sapiens; identical to SEQ ID NO: 40176
  DOMAIN (169)..(219): ENV polyprotein (coat polyprotein) domain identified by eMATRIX, accession number PF00429, p-value=4.724e-11, raw score of 31.08
  DOMAIN (162)..(202): ENV polyprotein (coat polyprotein) domain identified by PFam, accession name ENV_polyprotein, E-value=9.9e-12, PFam score of 41.6

SEQ ID NO: 42567 - protein, 156 aa, Homo sapiens
  DOMAIN (71)..(121): ENV polyprotein (coat polyprotein) domain identified by eMATRIX, accession number PF00429, p-value=4.724e-11, raw score of 31.08
  DOMAIN (64)..(104): ENV polyprotein (coat polyprotein) domain identified by PFam, accession name ENV_polyprotein, E-value=9.9e-12, PFam score of 41.6
DGEPIKHDCQQIIVQIYAARDDLLEVPLANPDLNLYIDGSSFVENGIRRAGYAIVSDVTVLENSLAAVTLQNRQGLDLLTAEKGGLCTFSGKECCFYTNQSGISSPLEDTTTAGPFLHPIQQEVARAIIGQFPTAFGVSCLEGRLRGEASWTSWVE

SEQ ID NO: 42568 - protein, 231 aa, Homo sapiens
  DOMAIN (75)..(125): ENV polyprotein (coat polyprotein) domain identified by eMATRIX, accession number PF00429, p-value=6.760e-14, raw score of 31.08
  DOMAIN (53)..(177): ENV polyprotein (coat polyprotein) domain identified by PFam, accession name ENV_polyprotein, E-value=1.1e-30, PFam score of 106.1
  misc_feature (1)...(231): Xaa = X or * as defined in Table 2
KREEETKKKSKREMEVVKKKQCTYSFKSQGKFLSTHARQFSIGSQPISASQTVEEIMKSILTLQSQINSLAAVTLQNRXGLDLLTAEKGGLCTFLGEECCFYTNQSGIAXDATQRLQEKASEIRRLSNSYTNLWSWATWLLPFLGPVAAILLLLAFGPRIFNLLVKFVWSRIEAIKLQMVLQIEPQMSSTNNFYRGPLDXPAGTSPGLESSPLKDTTTAKPLLRPYPAGSS

SEQ ID NO: 42569 - protein, 303 aa, Homo sapiens
TLDTPPLRTVTLAASVCGFILEVSETKNPPEGTNSGHILVTTKGLLPITKRGCFCCCVGEHNYSNQQGPGTVAGSWARGVSAAALQIKADLGKLSDDLDRYTDVLQGRGQTFYLTWRDVMLVLDQTLAFNEKNVALAAAQEFGDTWYLSPVNDRMTVEERDKFLTSQQAVCQRWQSYTAEAIKKGKEKGERQHKRLAEAGKDQQRERGKVKDRRKERKRQRSQRERDRSSKEKTVHPIPLKARIKAIKLQMVLQTETQMSSTNNFYRGPLDRPTGPFTGLESSPLEDTTTAGPLLCPCPAGSS

SEQ ID NO: 42570 - protein, 132 aa, Homo sapiens
  DOMAIN (64)..(110): DEAD-box subfamily ATP-dependent helicases proteins domain identified by eMATRIX, accession number BL00039D, p-value=5.000e- 26, raw score of 21.67
  DOMAIN (23)..(106): Helicases conserved C-terminal domain identified by PFam, accession name helicase_C, E-value=7.5e-10, PFam score of 46.2
GDDETKLTLHGLQQYYVKLKDDEKNRKLFDLLDVLEFNQVVIFVKSVQRCIALAQQFKDFQRRILVATNLFGRGMDIERVNIAFNYDMPEDSDTYLHRVARAGRFGTKGLAITFVSDENDAKILNDVQDRFE

SEQ ID NO: 42571 - protein, 38 aa, Homo sapiens
  misc_feature (1)...(38): Xaa = X or * as defined in Table 2
LFCQSGFHSLLTPSTATCSTIRXVATSRLRPVFTCRRS

SEQ ID NO: 42572 - protein, 444 aa, Homo sapiens
  DOMAIN (221)..(267): DEAD-box subfamily ATP-dependent helicases proteins domain identified by eMATRIX, accession number BL00039D, p-value=6.159e- 11, raw score of 21.67
  DOMAIN (1)..(26): Intermediate filament proteins domain identified by PFam, accession name filament, E-value=0.0025, PFam score of 16.3
MADWLRDYQDLLQVKTGLSLEVATYRTPTEESHNSIFIFTSPSGWREEAGLKGDKDSSAGKRGESHGLGRQCKAEKRRDLHGMAARKDEEVLKKNCLHIVVGTPGRILALAGNKSLNLKHIKHFISNECDKTFEQLNMCRDVQGIFRMTPPATLSKEIRPVCHKFMQDPVEIFVDNEMKLMLHGLQQYYMKLKDNQKNWKRYDLLNVLEFNQVMIFLKSVQRRIASAQLLGMDIERVNIAFNYDMPEDSDTYLHWVARASRFGTKSLAITFVSDENDAKILKDMQDRFEVNRSDLPDERDIFSCFEKTWGCVPQQDEPLEVMAVSVKGTVPGFGPAEWVTDKKIHLEAKLSLITSPRHAFQLESSSRMILALGTWAPCREEPTAIWKTYMLFGPTGPAKISAASQHQSPDMVPSTFAMTFVHCVFRQCGAPERLWLKFSDRHIL

SEQ ID NO: 42573 - protein, 417 aa, Homo sapiens
  DOMAIN (329)..(375): DEAD-box subfamily ATP-dependent helicases proteins domain identified by eMATRIX, accession number BL00039D, p-value=5.000e- 26, raw score of 21.67
  DOMAIN (58)..(239): DEAD/DEAH box helicase domain identified by PFam, accession name DEAD, E-value=1.1e-52, PFam score of 169.5
MAENDVDNELLDYEDDEVETAAGGDGAEAPAKKDVKGSYVSIHSSGFRDFLLKPELLRAIVDCGFEHPSEVQHECIPQAILGMDVLCQAKSGMGKTAVFVLATLQQLEPVTGQVSVLVMCHTRELAFQISKEYERFSKYMPNVKKDEEVLKKNCPHIVVGTPGRILALARNKSLNLKHIKHFILDECDKMLEQLDMRRDVQEIFRMTPHEKQVMMFSATLSKEIRPVCRKFMQDPMEIFVDDETKLTLHGLQQYYVKLKDNEKNRKLFDLLDVLEFNQVVIFVKSVQRCIALAQLLVEQNFPAIAIHRGMPQEERLSRYQQFKDFQRRILVATNLFGRGMDIERVNIAFNYDMPEDSDTYLHRVARAGRFGTKGLAITFVSDENDAKILNDVQDRFEVNISELPDEIDISSYIEQTR

SEQ ID NO: 42574 - protein, 193 aa, Homo sapiens
MIASPYEVDPFSVLVLNISLLGCEIGTIWGTRKRGNPETEPTVLPNSHSCESHGETAVDDRLLWNPSPNSLQAKILSMMEDNKQLALRIDGAVQSASQEVTNLRAELTATNRRLAELSGGGGPGPGPGAAASASAAGDSAATNMENPQLGAQAATQICAADPSRTFVCHQLILSVPSNNLNSETDKLETEESS

SEQ ID NO: 42575 - protein, 236 aa, Homo sapiens
ESEDAVKALAKEKDLLEREKWELRRQAKEATDHATALRSQLDLKDNRMKELEAELAMAKQSLATLTKDVPKRHSLAMPGETVLNGNQEWVVQADLPLTAAIRQSQQTLYHSHPPHPADRQAVRVSPCHSRQPSVISDASAAEGDRSSTPSDINSPRHRTHSLCNGDSPGPVQKNLHNPIVQSLEDLEDQKRKKKKEKMGFGSISRVFARGKQRKSLDPGLFDGTAPDYYIEEDADW

SEQ ID NO: 42576 - protein, 519 aa, Homo sapiens; identical to SEQ ID NO: 36241

SEQ ID NO: 42577 - protein, 103 aa, Homo sapiens
  DOMAIN (9)..(53): Synapsins proteins domain identified by eMATRIX, accession number BL00415N, p-value=5.328e-10, raw score of 4.29
HPPSQGPQHHLSQGPQHPPHQGPQHPPSQGPQHPPHLGPQHPPSQGPQHPPRRGPQHPPSRGPQHPPSHGPQHPPHLGPQHPPSQGPQHPPHRGPQHPPSGGP

SEQ ID NO: 42578 - protein, 103 aa, Homo sapiens
CPAKAGSGRATRPPASPQCPPRWAARRAAASPPGPPSGRGSPSCHQASAGFSQNGNSHALRESRRGLWEPSSSSSFLEGLLGTQIRKTAASTILTRWPGEHCL

SEQ ID NO: 42579 - protein, 68 aa, Homo sapiens
  misc_feature (1)...(68): Xaa = X or * as defined in Table 2
GALARTXPPQQRWVSCPRGVPGALXREFTMFLSLQAENSIDFVSRELCAHSIRKLQAHVLLIKXVFIK

SEQ ID NO: 42580 - protein, 63 aa, Homo sapiens
SWLCPGATSQPKPGAPCRALQFSACTAGWTMPASFDRLIPSSSRKTFINVAMGFSEVIGLLSH

SEQ ID NO: 42581 - protein, 117 aa, Homo sapiens
VWTHPLQPPAKETWAPGIFMIDTMKSTLKEVRRGSGSWCPATVAHSGPTSGNTDPGASAGFLALSQREEAHLWLAGCQVRAKAGKAFLSGFFFFFFEIVASIISSFLQCTHMLPAQL

SEQ ID NO: 42582 - protein, 83 aa, Homo sapiens
MVGTGLTSLEAQPRMVVRGRSEIPTSTSVTSRGRQSLGSRAAFSWLIINIQPAGGRKGGLGPPSLSLLPNWMENTRTFYSHCF

SEQ ID NO: 42583 - protein, 134 aa, Homo sapiens
DLHFEIQVLLEALRGLCSLYPKHREGSLKVHPGHLCWMPTVTRPGTPPSQASTGAQELPGGEKKTCRWEKKKKTFPGSAGLTGKSIERLTRPALYLRPLLFSSFPVRVTLEALPGGVPKRSASRMPVEMKRGPF

SEQ ID NO: 42584 - protein, 87 aa, Homo sapiens
  misc_feature (1)...(87): Xaa = X or * as defined in Table 2
VPFLTSWVNVGFKSSALHSSALLQFWLTLWEXLPAWARCCCCLPNGSFWGPRSSRLDVAWERPVAPGWREVSPLLSELWTAASGPYG

SEQ ID NO: 42585 - protein, 537 aa, Homo sapiens
MPFEQQVPGCSKLFGGIRKVIPEGRSEVQEDMMNKEIGKHEGCRVSVPVPIPIEFGVLCLIQKTSLQAMPVRGSRAPALAAGLHPGLTALSPGRKHGLHLCVADSDSQCSPTRQSLSLSEGEEQMDRLQQVELVRTTPMSHWKAGTVQAWLEVVMAMPMYVKACTENVKSGKVLLSLSDEDLQLGLGVCSSLHRRKLRLAIEDYRDAEAGRSLSKAAELDHHWVAKAWLNDIGLSQYSQAFQNHLVDGRMLNSLMKRDLEKHLNVSKKFHQVSILLGIELLYQVNFSREALQERRARCETQNIDPVVWTNQRVLKWVRDIDLKEYADNLTNSGVHGAVLVLEPTFNAEAMATALGIPSGKHILRRHLAEEMSAVFHPANSTGIREAEAFWDRPLARASSVTRAGKEENSSGLKYKAGRLPLGKIGRGFSSKDPDFHDDYGSLQNEDCGDDDPQSRLEQCRLEGYNSLEVTNVSARRTEGGDLAERLKLIVTGYRGASSRTVTSYILSKQPECGLGPCRAMWASGPGDDVDALLGKLL

SEQ ID NO: 42586 - protein, 360 aa, Homo sapiens
MEYYAVIKKDEFMSFAGTWMKLETIILSKLTQEPETHPPHVLTHKWELNNENTWAQGGEHHTLRPFREWGPRGVIALGEISNVDDGLMGAAKRGGENRRRDNYDFCPQIPGKLPVNTGPFMTKGLCRCDSVKDLWMGSLSGHSQCNHKSPYNKGAGEFTAERRRGGSSSRGRSNAIAEEGWKVILLPKQFKAVVLNLFQQLGKDISDRGASTEKDRAILEQQRGSHLDILVSSNIRSFHIIAGGLGMDFTSQKLLAFGPNKAPRTSGIICWPEIQSAFQGVGNLYFTIPIVDLNSTNYVLRQKSSNIHLDTAEGKERLKGLDQGSRKGNFWGISFPQSQNSHRNHSHQELLLLNNMTVMG

SEQ ID NO: 42587 - protein, 71 aa, Homo sapiens
  DOMAIN (20)..(30): RsuA family of pseudouridine synthase proteins domain identified by eMATRIX, accession number BL01149D, p-value=1.205e- 11, raw score of 8.92
TKPAVLEVITPTQVRLTISEGRYHQVKRMFAAVGNHVVELHRERIGGITLDADLTPGEYRPLTEEEIASVA

SEQ ID NO: 42588 - protein, 68 aa, Homo sapiens
  misc_feature (1)...(68): Xaa = X or * as defined in Table 2
VESGTHLGQYKIYFGFLYQKKFSLQSHGYILFGCPQYWITSTDCPSIPCMWYSRTLXVTWSKKQVTSE

SEQ ID NO: 42589 - protein, 1303 aa, Homo sapiens
  DOMAIN (782)..(801): ACRIFLAVIN RESISTANCE PROTEIN FAMILY SIGNATURE domain identified by eMATRIX, accession number PR00702B, p-value=4.375e- 19, raw score of 12.77
  DOMAIN (768)..(838): AcrB/AcrD/AcrF family domain identified by PFam, accession name ACR_tran, E-value=2.6e-32, PFam score of 120.8
MAATRGEEKICMSMYQRINGADWRNIFVVGDLHGCYTLLMNELEKVSFDPACDLLISVGDLVDRGAENVECLELITMPWFRAVRGNHEQMMIDGLSEYGNVNHWLENGGVWFFSLDYEKEVLAKAGYQDDFAFCERLKRVRYMRIAQARKLGNNRICHAVLFLVPSRSIDVTIVISGPTCSGMRRNNDAMPSLTGDPLESTTVNPDCPRRVFTTFMAPNCFTDKKKKPASSALVVGAQVAPNRLILYALQVPLQMFPANTLQASITGVLVIALEIKRLALGLGIFDPLIGLMSPDCGYAAKRKPRNRSLSMNIELLQQLCEASAVSGDEQEVRDILINTLEPCVNEITFDGLGSFVARKGNKGPKVAVVGHMDEVGFMVTHIDESGFLRFTTIGGWWNQSMLNHRVTIRTHKGVKIPGVIGSVAPHALTEKQKQQPLSFDEMFIDIGANSREELATHRAVIRVSGHNIGHIFPPTLANISAGNRIPAFFRFNLYHGKQQITRFVEIDGVVMRTDLYSPKAAEGKNIQLHPKVNTVGKVHYLQSLIVLVTIIGIVDSEPRFKRGLKDGELWNKFFVRILNANDEAQVSVLGELQQEMNGVFDTTFQSHLNKALWKKKRVVSRNWARGTCGPRVTNEMLEDEDAEDHGGTFCLGELVELAVTMENKAEGKRIVSEKPTRARNQGIEGSPGGRVTRSPPTQVAISSDSARKVRKIAPTPHATASEIAVSCVTARASNHPVYIRDTGIGIGDPKEPEGHYGLNIMRERAERLGTLAIFSLPVEQYPDLAPPNVRVTANYPGASAQTLENTVTQVIEQNMTGLDNLMYMSSQSSGTGQASVTLRGTELEFVQIKHGGFPCHVDDSIQVNQQKCIGCKSCVVACPFGTMQIVLTPVAAGKVKAPAHKCDLCAGPETGPACVENCPPDALQLVTDVALSGMAKSRRLRTARQEHQPWHASTAAQEMPVMSKVEQMQATPARGEPDKLAIEARKTGFDEIYLPFRADQAQREASRCLKCGEHSVCEWTCPLHNHIPQWIELVKAGNIDAAVELSHQTNTLPEITGRVCPQDRLCEGACTIRDEHGALSRRRRADECRQAKKAIKKQRKLGMKVTFEQLKAAFNRVLISRGVDSETADACAEMFARTTESGVYSHGVNRFPRFIQQLENGDIIPDAQPKRITSLGAIEQWDAQRSIGNLTAKKMMDRAIELAADHGIGLVALRNANHWMRGGSYGWQAAEKGYIGICWTNSIAVMPPWGAKECRIGTNPLIVAIPSTGTELELVKPPFEENFFGEAPQEITKIGFLPQTIIC

SEQ ID NO: 42590 - protein, 90 aa, Homo sapiens
EFPSLTGTGDWRTFVSFSPQGLVHSYRLLWHKPGWNMARQLCHATLDTQRCYSTRKVLIYLAGSSSSWPETQIPRKGWWALSPHPETIQS

SEQ ID NO: 42591 - protein, 441 aa, Homo sapiens; identical to SEQ ID NO: 31947

SEQ ID NO: 42592 - protein, 155 aa, Homo sapiens
  misc_feature (1)...(155): Xaa = X or * as defined in Table 2
VWDGSILYQKLGALDGLSSXVIPLASSLQSLQYPLPSSFIQRILNTYSVKGLRSWTVNEDRVDAVSSGGIWLQVEASLVLYXMLYFSIITLLILGLVHVNFKILDSSSELITDKLCGGLGFTLYTGSKLIXSDVTFPRAFSASTQTSMLTKYTVE

SEQ ID NO: 42593 - protein, 369 aa, Homo sapiens
MGLRKKSTKNPPVLSQEFILQNHADIVSCVGMFFLLGLVFEGTAEASIVFLTLQHSVAVPAAEEQATGSKSLYYYGVKDLATVFFYMLVAIIIHATIQEYVLDKINKRMQFTKAKQNKFNESGQFSVFYFFSCIWGTFILISENCLSDPTLIWKARPHSMMTFQMKFFYISQLAYWFHAFPELYFQKTKKQDIPRQLVYIGLHLFHITGAYLLYLNHLGLLLLVLHYFVELLSHMCGLFYFSDEKYQKGISLWAIVFILGRLVTLIVSVLTVGFHLAGSQNRNPDALTGNVNVLAAKIAVLSSSCTIQAYVTWNLITLWLQRWVEDSNIQASCMKKKRSRSSKKRTENGVGVETSNRVDCPPKRKEKSS

SEQ ID NO: 42594 - protein, 122 aa, Homo sapiens
  DOMAIN (105)..(122): PROFILIN SIGNATURE domain identified by eMATRIX, accession number PR00392F, p-value=3.750e-13, raw score of 17.40
  DOMAIN (4)..(118): Profilins domain identified by PFam, accession name profilin, E-value=8.2e-44, PFam score of 159.0
GTRSYVDNLMCDGCCQEAGIGGYCDAKYVWAATAGGVFQSITPIEIDMIVGKDREGFFTNGLTLGAKKCSVIRDSLYVDGDCTMDIRTKSQALVIVMGKEGVHGGTLNKKAYELALYLRRSD

SEQ ID NO: 42595 - protein, 177 aa, Homo sapiens
  DOMAIN (9)..(27): PROFILIN SIGNATURE domain identified by eMATRIX, accession number PR00392F, p-value=3.750e-13, raw score of 17.40
  DOMAIN (1)..(22): Profilins domain identified by PFam, accession name profilin, E-value=8.5e-06, PFam score of 25.5
MGKEGVHGGTLNKKAYELALYLRRSDVNSDAVTLLRLGFKKPCRVHQGPLEHKLWEKQSLKKASHYGRNPTTLRPLCCCKLSRLRPHLSSLKCDPFVCPPKIPRQKRGNASNQAAFVAFQTACCPLGRFPPRAFGIKLGESPFQDNKSGGPVIPEALGHLWQKLNLFSPVKSFQLSP

SEQ ID NO: 42596 - protein, 125 aa, Homo sapiens
MTITQCSTQICRQPHCIVGSPPLTVCPGCPLCSHHRTYRLSLITEHFFCAKSQTVGKETFPVFSYNHIYFYWRNALKRRPRPWLPRRIWRRSSRQWRPPGSSHRTSGYPRSSANRHIFESFELHR

SEQ ID NO: 42597 - protein, 215 aa, Homo sapiens
MGANQLVVLNVCDMYWMKEYTSSIGIGVFHSEIEVYGREFAYGGHPYPFSGIFEISPGNASELGEPFKFKEVVLGSTDFLEDDIEKIVEELGKEYKGNVYHLMHKNCNHFSSALSEARAEAMPGILGKQCINHPEQSHPSVPELKQYLVSWENSTLAIESSHASPVPKFKQHPTYHPAFQHTKDQVQVKASMKVTVEKWEDAIVSPDAQTSMQGQ

SEQ ID NO: 42598 - protein, 97 aa, Homo sapiens
MHKNWQSFFFSLYPEIPLWGKRFPRWDQSDFALLQAPGIPFSYRVASPKELGSRPAAPAVLVSSQELQDELGGSRGCCRIRFPWQAAGSRLQTRAPH

SEQ ID NO: 42599 - protein, 614 aa, Homo sapiens
  DOMAIN (15)..(70): kw TRANSCRIPTASE REVERSE II ORF2 domain identified by eMATRIX, accession number DM01354Q, p-value=1.000e-40, raw score of 9.23
  DOMAIN (1)..(243): Reverse transcriptase domain identified by PFam, accession name rvt, E-value=1.6e-60, PFam score of 214.5
KKRESMNIDAKILNKILANRIQQHIKKLIHHDQVGFIPGRQGWFNICKSINVIQHINRAKDKNHMIISIDAEKAFDKIQQLFMLKTLNKLGIDGTYFKIIRAIYDKPTANIILNGKKLEAFPLKTGTRQGCPLSPLLFNIVLEVLARAIRQEKEIKGIQLGKEEVKLSLFADDMIVYLENPIVSAQNLLKLISNFSKVSGYKINVQKSQAFLYTNNRQTESQIMSELPFTIASKRIKYLGIQLTRDVKDLFKENYKPLLKEIKEDANKWKNIPCSWVGRINIVKMAILPKVIYRFNAIPIKLPMTFFTELEKTTLKFIWNQKRAHITKAILSQKNKARGITLPDFKLYYKATVTKTAWYWYQNRDIDQWNRTQPSEITPHIYNYLIFDKPDKNKQWGKGSLFNKWCWENWLAICRKLKLDPFLTPYTKINSRWIKDLNVRPKTTKTLEENLGITIQDIGMGMDFMSKTPKAMATKDKIDKWDLIKLKSFCTAKETTIRVNRQPTKWEKIFTTYSSDKGLISRIYNELKQIYKKKTNNPIKKWAKDMNRHFSKEDIYAAKKHMKKCSPSLAIREMQIKTTMRYHLTPVRMAIIKKSGNNRCWRGCGEIGTLLHCW

SEQ ID NO: 42600 - protein, 175 aa, Homo sapiens
  misc_feature (1)...(175): Xaa = X or * as defined in Table 2
ENLGNTIQDTGMGKDFMTETPKAMTTKAKIDKRDLIKLKSFCTAKETTIRVNRQPTEWEKIFAVYPSDKGPISRIYKQLKQIYKKKSNNPIKKWAKNRNRHFSKEDIYVAKKHMEKSSSSLVIRKMHIKTTVGYHLMPVRMAIIKKSGNNRCWRGCGECXWEGQLVQPLWKTVWQ

SEQ ID NO: 42601 - protein, 453 aa, Homo sapiens
  DOMAIN (8)..(63): kw TRANSCRIPTASE REVERSE II ORF2 domain identified by eMATRIX, accession number DM01354Q, p-value=1.000e-40, raw score of 9.23
MDAKILNKILANRIQQHIKKLIHHDQVGFIPGMQGWFNIHKSINVIQHINRTNDKKHTIISIDAEKAFDKIQQPFILKTLNKLGIDGTCFKENKIPMNTTYKGCEGPLQGELQTTAQGNKRGYKQMEEHSMLVGRKNQYRENGHAAQELEKTTLKFIWNEKRARIAKSILSQKNKAGGIMLPDFKLYYKATVTKTAWYWYQNRDIDQWNRIEPSEIMPHIYNYLIFDKPDKNKQWGKDSLFNKWCWENWLAICRKLKLDPFLAPYTKINSRWIKDLNVRPKTIQTLEENLGNTIQDIGMGKDFMSKTPKAMATKAKIDKCDLIKLKNFCTAKETTIRVNRQPTEWEKIFAIYSSDKGLISRIYDELKQIYKKKTNNPINKWAKDMNRHFSKEDIYAANRHMKKCSSSLAIREMQIKTTMRYHLTPVRMAIIKKSGNNRCWRGCGEIGTLLQCW

SEQ ID NO: 42602 - protein, 227 aa, Homo sapiens
  DOMAIN (141)..(190): kw TRANSCRIPTASE REVERSE II ORF2 domain identified by eMATRIX, accession number DM01354Z, p-value=4.875e-24, raw score of 9.06
  misc_feature (1)...(227): Xaa = X or * as defined in Table 2
TQTNLQEKNKQLHQKVGKGYEQTLLKRRHLCSQQTHMQPTDTWKNAHHQLAIREMQIKTTMRYHLTPLRMAIIKKSGNNSCWRGCGEIGTLLHCWWDCKLVQPLWKTVWRFLKDLESEIPFDLAIPLLCIYPKDYTSFCYKDTCTCMFIAALFTIAKTWNXPKCSSVIDWIKKMWHIYTTMEYYGAIKRNKIMSFAGTWMKLDAIILSKLTQKQKTKLRMFLLISRS

SEQ ID NO: 42603 - protein, 134 aa, Homo sapiens
MEYYAAVKRNEIMSFAGTWKKLEAIILSKLTQEQKTKYPMFSLIECIHSNIATTCSEHHSDENKEKAICRLIFGPKSDDTAATSTNTPLPKALNRSRCQSRCSRGESPAASGAPNTDELRGGEGEQSHAGGEWK

SEQ ID NO: 42604 - protein, 86 aa, Homo sapiens
  DOMAIN (1)..(50): kw TRANSCRIPTASE REVERSE II ORF2 domain identified by eMATRIX, accession number DM01354Z, p-value=7.474e-36, raw score of 9.06
FFYAHIMFIAALFTIAKTWNQSKCTSMIDWIKKMWHIHTMEYYAAIKRRGFMSFTRTWMKLEAIILSKLTQEQKTKHHMFSLIRGS

SEQ ID NO: 42605 - protein, 118 aa, Homo sapiens
LGLFCILPIDTLCAVLERDTLSIRESRLFGAVVRWAEAECQRQQLPVTFGNKQKVLGKALSLIRFPLMTIEEFAAGPAQSGILSDREVVNLFLHFTVNPKPRVEYIDRPRCCLRGKEC

SEQ ID NO: 42606 - protein, 311 aa, Homo sapiens
MYDTLCAVLERDTLSIRESRLFGAVVRWAEAECQRQQLPVTFGNKQKVLGKALSLIRFPLMTIEEFAAGKVFIEKRRRPRPIPQEIPIFRRQEQEIENLKRGSVTIEKLRKMLPHLVSGIKKDIWKRGFLECFLAVSLARNLAAILDSSISLTPDTQCLPKSCELQLLTELSLLFVHSSSFLHVTLLVTALIIFHTNQAEMGAIDGHSSLTLAPNFPGSDSRLSKQPSNDDSLKEISQRDRMFSLADPTIQSIWQLCSSLKLISWHLDKKLAPCQLPSLDPFSETLATWISETCRVKEGTQDHADSTMAMG

SEQ ID NO: 42607 - protein, 202 aa, Homo sapiens
ILYVFIYLIGLHPPGPPLARPILPRERGALDRIVEYLVGDGPQNRYALICQQCFSHNGMALKEEFEYIAFRCAYCFFLNPARKTRPQAPRLPEFSFEKRQVVEGSSSVGPLPSGSVLSSDNQFNEESLEHDVLDDNTEQTDDKIPATEQTNQVIEKASDSEEPEEKQETENEEASVIETNSTVPGADSIPDPELSGESLTAE

SEQ ID NO: 42608 - protein, 113 aa, Homo sapiens
MKEKMLRAAREKGRVTLKGKPIRLTADLSAETLQARREWGPMFNILKEKNFEPRISYPAKLSFISEGEIKYFTDKQMLRDFVTTRPALQELLKEALNMERNNGYQPLQNHAKM

SEQ ID NO: 42609 - protein, 139 aa, Homo sapiens
SWRNSLTLVLWRQTRGCHGNRERSARDWSSDALHQDSIADLSEESFRQEGSRIPQARPRLGRGSPPTRRGMKGSSGPTSPTPRTRESSELELGSCSATPGLPQARPPRPRSAPAFSPISCSLSDSPSWNCYSRGPLGQT

SEQ ID NO: 42610 - protein, 157 aa, Homo sapiens
  DOMAIN (90)..(111): Myc-type 'helix-loop-helix' dimerization domain proteins. domain identified by eMATRIX, accession number BL00038B, p-value= 3.093e-09, raw score of 16.97
MVLAFRDLMSSMGTDADPWALGLRDLKSSRMKGGDLKDGQYLLAELEEGILGRGKSEASPENAARERSRVRTLRQAFLAMQAALPAVPPDTKLSKLDVLVLAASYIAHLTRTLGHELPGPAWPPFLRGLRYLHPLKTVTHAYGPGFSTSPQILSHQT

SEQ ID NO: 42611 - protein, 321 aa, Homo sapiens
  DOMAIN (64)..(85): Myc-type 'helix-loop-helix' dimerization domain proteins. domain identified by eMATRIX, accession number BL00038B, p-value= 3.093e-09, raw score of 16.97
MVLAFRDLMSSMGTDADPWALGLRDLKSSRMKGGDLKDGQYLLAELEEGILGRGKAALPAVPPDTKLSKLDVLVLAASYIAHLTRTLGHELPGPAWPPFLRGLRYLHPLKVPRCPEKYSASISDLLQPIHLTDGKERRKFKKKAREQLLTLVLWRQTRGCHGNRERSARDWSSDALHQDSIADLSEESFRQEGSRIPQVTHLVAAARNSPATNSDSVQIPMLALGTGRYSPGPLPGAEKAPLSFLLLGIVDGHVVIENDKQEERHAQHVGEDGELHASHGHGHGGAGPVERPLRASDLTSPARLRRHQRTSPKSETWTGTS

SEQ ID NO: 42612 - protein, 55 aa, Homo sapiens
  misc_feature (1)...(55): Xaa = X or * as defined in Table 2
ENDKARRSDTPSMLXWVEGMKXSVKAPHTLHLASDYVLEPWGGESATFIPASWDC

SEQ ID NO: 42613 - protein, 715 aa, Homo sapiens
MPQPPGHRPAPVHGLLGTRRTTGGEQQSSDYTKPGDIDPTSVASPKDPEDIPTFDEWKKKVMEVEKEKSQSMHASSNGGSHATKKVQKNRNNYASVECGAKILAANPEAKSTSAILIENMDLYMLNPCSTKIWFVIELCEPIQVKQLDIANYELFSSTPKDFLVSISDRVFGTSMVEEYEEIADSQYHSERQELFDEDYDYPLDYNTGEDKSSKNLLGSATNAILNMVNIAANILGAKTEDLTEGNKSISENATATAAPKMPESTPVSTPVPSPEYVTTEVHTHDMEPSTPDTPKESPIVQLVQEEEEEASPSTVTLLGSGEQEDESSPWFESETQIFCSELTTICCISSFSEYIYKWCSVRVALYRQRSRTALSKGKDYLVLAQPPLLLPAESVDVSVLQPLSGELENTNIEREAETVVLGDLSSSMHQDDLVNHTVDAVELEPSHSQTLSQSLLLDITPEINPLPKIEVSESVEYEAGHIPSPVIPQESSVEIDNETEQKSESFSSIEKPSITYETNKVNELMDNIIKEDVNSMQIFTKLSETIVPPINTATVPDNEDGEAKMNIADTAKQTLISVVDSSSLPEVKEEEQSPEDALLRGLQRTATDFYAELQNSTDLGYANGNLVHGSNQKESVFMRLNNRIKALEVNMSLSGRYLEELSQRYRKQMEEMQKAFNKTIVKLQNTSRIAEEQALVCDVPHPVSKYSHCSIPTYE

SEQ ID NO: 42614 - protein, 627 aa, Homo sapiens
  DOMAIN (298)..(328): kw TRANSCRIPTASE REVERSE II ORF2 domain identified by eMATRIX, accession number DM01354R, p-value=5.255e-26, raw score of 8.50
MAFLETSAPLYEHIWTLQVAFSTVGLGETLKVAMISMSTSSGYFLQLLQYCCSSTITITGYKGFLRDLKVETRADGVMRTMAPEKLLKSMPILQGQIDALLEFDVHPNELTNGVINAAFMLLFKDLIKLFACYNDGVINLLGTWMKLETIILSKLLQRQKTKHCMFSLIGGNRTMRTLGHRKGNITHQGLLWEKFFEMKKGQCKDALEIYKRFLTRMTRVSEFLKVAENLEQSLDPLKALRNETDQLYTTFTTVNPYGKKECKNKKPYPNESKLTKKKKSQLPQTRRNQLKNLGNAKNAEKAFDKFQHPFMIKTLSKTGIQGTYINIIKAIYDKPTTSIILNGEKLIAFPLRTGTRQECLLSPLLFNIVPEVLARAIKQEYEMASKLQVGIDKGDIPDLTQSSPATTVTSPNSTPAKTIDTSPPVDLFATASAAVPVSTSKPSSDLLDLQPDFSSGGAAAAAAPAPPPPAGGATAWGAQISDPFAPEPTPPTTTAEIATASASASTTTTVTAVTAEVDLFGGHFENMVKKLEEENGESKRDLAGFGVINMYPWEHTFNTLSPTTLLHAMLQSLRLANIIQDKEHSTRHSFVATAAQKTFSAALLSIPMEQEKPVCKRVGEKGLQTLE

SEQ ID NO: 42615 - protein, 357 aa, Homo sapiens
MVNYTIQSFQPYLQEHSIQYEQDKFQELRDKQPSLLNYTTKWLTKAATDITTLCLSSPDSPSSSCSMACSLPNWGGNNSEPTSPTMVLYQGYLNLLLWDPENEELSETLLMDRIWLQELAFQLHQLTVLASVLLVARSFSGEVLFRSPEFVDILKCTTKALTEEFISRDMDGAGHHHSQQTIARTKNQTPHVVTHRWELNNENTWTQEGEHHTLGPVESLLHFPGGLILIEGELAELGWKFVILKYHNQQVFGPYYAEILKNIIHPAQAQETDSAAPQPWQQERKLNENPVGPPVSLHWLIILQYAGLSQNQGIRHSAKDRSQLPRDFSFFQVILGVTPSLGLQLPGYEYQLTQHHK

SEQ ID NO: 42616 - protein, 98 aa, Homo sapiens [sequence omitted]

SEQ ID NO: 42617 - protein, 79 aa, Homo sapiens
MDFREILMIASKGQGVNNVPKGTCSSCERSFSFLEICDEVEDYSYDNHLEGDDPRREALVCDVPHPVSKCSYCSIPTYE

SEQ ID NO: 42618 - protein, 42 aa, Homo sapiens
  misc_feature (1)...(42): Xaa = X or * as defined in Table 2
NHKNPRRKPRQYHSGHRHGQGLHVXNTKNNGNKSQNGQMGSN

SEQ ID NO: 42619 - protein, 195 aa, Homo sapiens
  misc_feature (1)...(195): Xaa = X or * as defined in Table 2
CPSLPPPHGKPAAACPRSPPGGCCTPRSARTVPRGLSENSQTKCHSADLPPEGPRVFWTPPGTGAAPAPPAPAPGPARCGPRRCHAWPPQRRSSGAGRSPPPRHFAEFLKMVAFLRILILRAVSLLRSLDLEISXGXRPXGPSWGGPPQSTPSAASAASKTSSPRRWSTPAWAFLARAHPRWVAPSTAAQCTAAP

SEQ ID NO: 42620 - protein, 189 aa, Homo sapiens
  DOMAIN (77)..(87): Eukaryotic  RNA-binding region RNP-1 proteins domain identified by eMATRIX, accession number BL00030B, p-value=3.368e- 09, raw score of 7.03
  misc_feature (1)...(189): Xaa = X or * as defined in Table 2
ESWLVLGRRKAGRLIGACGFEPPHFLTLDLEMHRDSCPLDCKVYVGNLGNNGNKTELERAFGYYGPLRSVWVARNPPGFAFVEFEDPRDAADAVRELDGRTLCGCRVRVELVRMGEKRSRNRGPPPSWGRRPRDDYRRRSPPPRRRSPRRRSFSRSRSRSLSXERVGWCWAGGKREDSSERVDLSRRIF

SEQ ID NO: 42621 - protein, 41 aa, Homo sapiens
AKYQTLYPSNSKRPSRSSTSFSSKERERGRTACQQHSPKNS

SEQ ID NO: 42622 - protein, 66 aa, Homo sapiens
  misc_feature (1)...(66): Xaa = X or * as defined in Table 2
CFSPGMWQKTHSRKHSPGAICPINPVGECLVRKIKQLDXITWINAIXLPLRDGLFYFLNFPFCCRG

SEQ ID NO: 42623 - protein, 745 aa, Homo sapiens
  DOMAIN (250)..(275): 7 kw REVERSE TRANSCRIPTASE RNA POLYMERASE domain identified by eMATRIX, accession number DM00895E, p-value=2.345e-10, raw score of 15.72
MRTDTTYQNLWDTFKAVCRGKFIALNDHKRKQERSKIDTLTSQLKELEKQEQTHSKASRRQEITKIRAELKEIETQKTLQKINESRSWFFERINKTDKPLARLIKKKREKNQIDAIKNDKGDITTNPTEIQTTIREYYKHLYANKLENLEEMDKFLNTYTLPRLNQEEVESLNRPITGSEIVAIINSLPTKKSPGPDGFTAEFYQRYMEELVPFLLKLFQSIEKEGILPNSFYEASIILIPKLGRDTTKKENSRPISLMNIDAKILNKILANRIQQHIKKLIHHDQVGFIPGMQGWFHIHKSINVIQHINRNKDKNHMIISIDAEKAFDKIQQRFMLKTLNKLGIDGTYFKMITAIYDKPTANIILNGQKLEAFPLKTGTRQGCPLSPLLFNIVLEVLARAIRQEKEIKGIQLGKEEVKLSLFADDMVCLENPIVSAQNLLKLISNFSKVSGYKINVQKSQAFLYTNRQTESQIMSELPFTIASKRIKYLGIQLTRDVKDLFKENYKPLLKEIKEDTSKWKNIPCSWIGRINIVKMAILPKVIYRFNAIPIKLPMTFFTELEKTTLKFMWNKKRARITKSILSQKNKAGGITLPDFKLYYKATVTKTAWTWKTPLPNTVGAPTAEVGKGEPRLSQTHTPTGEAEEQALVSTAERPIDGSHHRTLCTHPPSRSQEPSRLTEWLDPEERQQSLQLGSQEDTPIGKGGEYYIKGTPRGTKESEQQPSALDLPSDRGYPNEKEPENQLW

SEQ ID NO: 42624 - protein, 85 aa, Homo sapiens
MAHYKAANLKREQFRRYLEKSGVLDTLTKVLHHLGTATPENPEIELLCLELAKTKEKYKAIVEKNKKLKAKLAQYEPPQEEKYAE

SEQ ID NO: 42625 - protein, 140 aa, Homo sapiens
CRADLNSRIDDFVPNPSVAVSGASYAVAAVTMAHYKAADSKREQFRKYFEKSGVLDTLTKVLVALYEEPEKLNSALDFLKHHLGAATPENPEIELLRLELAEMKEKYEAIVEENKKLKAKLAQYEPPQEEKRAELGFFSV

SEQ ID NO: 42626 - protein, 63 aa, Homo sapiens
FPCTSLLASAVAFSVSSNLCPGWSAVVQSRLTVALTSWAQAISPLQPFPTDPVAPRSEHLASP

SEQ ID NO: 42627 - protein, 149 aa, Homo sapiens; identical to SEQ ID NO: 35931

SEQ ID NO: 42628 - protein, 678 aa, Homo sapiens; identical to SEQ ID NO: 35933

SEQ ID NO: 42629 - protein, 108 aa, Homo sapiens
MGESWRIGFGGIKFVVLADPRQAGIDSLLRKIYEIYSDFALKNPFYSLEMPISAPAGEEYQLENPFVLVTPATGCLISDPQQPQRFHPELVAAQSSAPNPNLEPPLGE

SEQ ID NO: 42630 - protein, 227 aa, Homo sapiens
FGTRGKAAMAIFSVYVVNKAGGLIYQLDSYAPRAEAEKTFSYPLDLLLKLHDERVLVAFGQRDGIRVGHAVLAINGMDVNGRYTADGKEVLEYLGNPANYPVSIRFGRPRLTSNEKLMLASMFHSLFAIGSQLSPEQGSSGIEMLETDTFKLHCYQTLTGIKFVVLADPRQAGIDSLLRKIYEIYSDFALKNPFYSLEMPIRCELFDQNLKLALEVAEKAGTFGPGS

SEQ ID NO: 42631 - protein, 552 aa, Homo sapiens; identical to SEQ ID NO: 39780
  DOMAIN (40)..(57): RNase H domain identified by eMATRIX, accession number PF00075A, p-value=4.060e-12, raw score of 14.44

SEQ ID NO: 42632 - protein, 331 aa, Homo sapiens
  DOMAIN (2)..(19): RNase H domain identified by eMATRIX, accession number PF00075A, p-value=8.020e-12, raw score of 14.44
  misc_feature (1)...(331): Xaa = X or * as defined in Table 2
VQKPNRQWRLVQDLRIINEAVVPLYQAVRNPYTLLSQIPEETGWFTVLDLKDALFCIAVHPDSQFLLAFEDPLNPTSQLTWTVLPQGFRDSPHLFGQALAQDLSQFSYLDTLVLRYVDDLLLAAPSETLCHQATQVLLNFLATCGYKVSKLKAQICSQQVKYLGLKLSKGTRALSEERIQPILAYPHPKTRKQLRGLLGITGFCQIWIPRYSEIARPLHTLIKKTQKANTHLVRWTPEAEAAFQVLKKALTQAPVLSLPTGQDFSLYVTEKTGIALGVLTQHYGEERNSXLPTEYLSNIRKPLGDYYWLYRNLKRWQSYTARVIRKERKGK

SEQ ID NO: 42633 - protein, 139 aa, Homo sapiens
QLILKDKFITQSAADIKEKLQKSTLGPERNLKTLLNLATSVFYNRDQEEQAERDKRGKKKATTLVMALGQADFGGSGTRKAWANRMPNRACFQQYPLRPEAQQGLQKIVKDLKAQGLVKPCSSPSDTPILGVQKPNGQW

SEQ ID NO: 42634 - protein, 1600 aa, Homo sapiens; identical to SEQ ID NO: 39776
  DOMAIN (329)..(376): AAA-protein family proteins domain identified by eMATRIX, accession number BL00674D, p-value=1.783e-34, raw score of 23.41

SEQ ID NO: 42635 - protein, 741 aa, Homo sapiens; identical to SEQ ID NO: 33765
  DOMAIN (247)..(264): RNase H domain identified by eMATRIX, accession number PF00075A, p-value=4.400e-13, raw score of 14.44

SEQ ID NO: 42636 - protein, 1288 aa, Homo sapiens; identical to SEQ ID NO: 34793
  DOMAIN (602)..(613): RNase H domain identified by eMATRIX, accession number PF00075B, p-value=6.276e-12, raw score of 12.56
  misc_feature (1)...(1288): Xaa = X or * as defined in Table 2

SEQ ID NO: 42637 - protein, 253 aa, Homo sapiens
  DOMAIN (39)..(56): RNase H domain identified by eMATRIX, accession number PF00075A, p-value=6.833e-11, raw score of 14.44
DCACTFHCRSATKIVKDLKAQGLVKPCNSPCSTPILGVQKPNGQWRLVQDLRIIDEVVVYVDDLLLAARSKTLCHQATQALLNFLITCDYKVSKPKAQLCSQKVKYLGLKLSKGTRVLSEERIQPIPAYPHPKTPKQLRGFLGITGFCRIWIPRYSEIARPLYTLIKKTQKADTHLVEWTPEAEVAFQALKEALTQAPVLSLPMGQDVPLYVTEKTGIALGVLGVLTQVRGLSLQPMAYLSKEMDVVAKGWPH

SEQ ID NO: 42638 - protein, 392 aa, Homo sapiens; identical to SEQ ID NO: 37890
  DOMAIN (161)..(172): RNase H domain identified by eMATRIX, accession number PF00075B, p-value=6.276e-12, raw score of 12.56
  misc_feature (1)...(392): Xaa = X or * as defined in Table 2

SEQ ID NO: 42639 - protein, 280 aa, Homo sapiens
  DOMAIN (161)..(172): RNase H domain identified by eMATRIX, accession number PF00075B, p-value=6.276e-12, raw score of 12.56
MPESPTPLLGRDILAKAGAIIHLNIGEGTPVCCPLLKEGINPEVWATEGQYGRAKNAHPVQVKLKDSASFPYQRQYPLRPEAQQGLQKIVKDLKVQGLVKTCNSPCDTPILGVQKPNGQWRLVQDLRIIDEAIVPLYPAVPNPYTLLSQIPEEAELFTVLDLKDAFFCIPVHPESQFLFAFEDPSIPMSQLTWTVLPQGFRDSPHLFHHTLAQDLSQFSYLDTLVLCLPLRNQQECHQATQVLLNVLATCGYKVSKQKAQLCSQQVKYLGVKLSKGTRAL

SEQ ID NO: 42640 - protein, 475 aa, Homo sapiens
  DOMAIN (159)..(176): RNase H domain identified by eMATRIX, accession number PF00075A, p-value=4.400e-13, raw score of 14.44
GKRSPQGKNTPKMYSGEFSPVRVHVPFSLSDLKQIKIDLGKFSDDPDGYIDVLQGEDILAKAGAIRHLNIGEGTHVCCPLLEEGINPEVWATEGKYGRAKNAHPIQVKLKDSASFPYQRQYPLRPEAQQGLQKIVKDLKAQGLVKPCSSPCNTPILGVQKPNGQWRLVQDLRIINEAIVPLYPAVPNPYTPLSQILEEAEWFTVLDLRDAFFCIPVHPDSQFLFAFEDPLNPMSQLTWTVLPQGFRDSPYLFGQALAQDLSQFSYLDTHVLWYMDDLLLAARSETLCHQATQALLNFLATCGYKVSKPKAQLCLQQVKHLRLKLSKGTRALSEERIQPISAYPHPKTLKQLRMFLGITGFCQIWINRYGKIARPLYTLIKETQKANTHLVRRTSLQPVAYLSKETGTSLQPVAYLSKEIDVVAKRWPHCLRVVAAIAVLVSKAVKMIQGRALTVWTSHDVNSILTAKGDLWLSDN

SEQ ID NO: 42641 - protein, 88 aa, Homo sapiens
WWWLLPRWWQASCSLPWGSWPHRFQGMESWAMWNCGKPLAQSRVAMGALLDQEHSRHPARSRGIEVSGGSATAAGISGGQRAKAQLEL

SEQ ID NO: 42642 - protein, 299 aa, Homo sapiens; identical to SEQ ID NO: 33771
  DOMAIN (117)..(134): RNase H domain identified by eMATRIX, accession number PF00075A, p-value=4.400e-13, raw score of 14.44

SEQ ID NO: 42643 - protein, 549 aa, Homo sapiens
  DOMAIN (230)..(241): RNase H domain identified by eMATRIX, accession number PF00075B, p-value=7.366e-10, raw score of 12.56
MNKEDYNDDDDNGDIKYLPDIKTGYNKTVQIPITSENSTVGLSNTEADEMDRLKCERDDALKEVNTLKRRTKGGKHLTLKVTYTLSETNLHKNYLWECILMGQLGCYEILRKPSPALGLTPEHKGNVGHTGEKTGAGLLHRVPPTPSPTNKDPLSTQTVQKEIDKGVNNKPKSANIPRLCPLQAVGGGEFGPARVHVPFSLSDLIDLAVPNPYTLLSQIPEEAEWFTVLDLKDVFFCIPVHPDSQFLFAFEDPLNPMSQLTCTVLPQGFRDSPHLFGQALAQDLSQLSYLDTLVLQYVDDLLLAACSETLCHQATQALLNFLATCGYKVSKEKAQLCSQQVKYLGLKLSKGTKALSEECIQPILAYPHLKTLKQLREFLGITGFCRIWISRLYYLKGQCCNCALVQLLTQSHFFQTMKIEYNCQQIISQTYATRGDLLEVPLTDPDLNLYTDGSSFVEKGPQKAGERRAVLASQTSLTPLGRNGRSIPATLALESKELVKSVRALLDMDCAIPFLVGTSIVDPYLKYEPTTKNHLIMVQGEKNCITGRF

SEQ ID NO: 42644 - protein, 257 aa, Homo sapiens
  DOMAIN (43)..(60): RNase H domain identified by eMATRIX, accession number PF00075A, p-value=6.833e-11, raw score of 14.44
TPGSTVHAPEADQGLQKIVKDLKAQGLVKPCNSPCSTPILGVQKPNGQWRLVQDLRIIDEVVVYVDDLLLAARSKTLCHQATQALLNFLITCDYKVSKPKAQLCSQKVKYLGLKLSKGTRVLSEERIQPIPAYPHPKTPKQLRGFLGITGFCRIWIPRYSEIARPLYTLIKKTQKADTHLVEWTPEAEVAFQALKEALTQAPVLSLPMGQDVPLYVTEKTGIALGVLGVLTQVRGLSLQPMAYLSKEMDVVAKGWPH

SEQ ID NO: 42645 - protein, 739 aa, Homo sapiens; identical to SEQ ID NO: 33776
  DOMAIN (442)..(453): RNase H domain identified by eMATRIX, accession number PF00075B, p-value=7.517e-12, raw score of 12.56

SEQ ID NO: 42646 - protein, 2176 aa, Homo sapiens
  DOMAIN (762)..(782): ENDOPEPTIDASE LA (LON) SERINE PROTEASE (S16) SIGNATURE domain identified by eMATRIX, accession number PR00830A, p-value=7.429e- 11, raw score of 8.41
  misc_feature (1)...(2176): Xaa = X or * as defined in Table 2
MWGSDRLAGAGGGGAAVTVAFTNARDCFLHLPRRLVAQLHLLQNQAIEVVWSHQPAFLSWVEGRHFSDQGENVAEINRQVGQKLGLSNGGQELHAVSLEQHLLDQIRIVFPKAIFPVWVDQQTYIFIQIVALIPAASYGRLETDTKLLIQPKTRRAKENTFSKADAEYKKLHSYGRDQKGMMKELQTKQLQSNTVGITESNENESEIPVDSSSVASLWTMIGSIFSFQSEKKQETSWGLTEINAFKNMQSKVVPLDNIFRVCKSQPPSIYNASATSVFHKHCAIHVFPWDQEYFDVEPSFTVTYGKLVKLLSPKQQQSKTKQNVLSPEKEKQMSEPLDQKKIRSDHNEEDEKACVLQVVWNGLEELNNAIKYTKNVEVLHLGKVWPKDISEEDIKTVFYSWLQQSTTTMLPLVISEEEFIKLETKDGPSRSYGKRRKQGVNSLGVSSLEHITHSLLGRPLSRQLMSLVAGLRNGALLLTGGKGSGKSTLAKAICKEAFDKLDAHVERVDCKALRGKRLENIQKTLEVAFSEAVWMQPSVVLLDDLDLIAGLPAVPEHEHSPDAVQSQRLAHALNDMIKEFISMGSLVALIATSQSQQSLHPLLVSAQGVHIFQCVQHIQPPNQEQRCEILCNVIKNKLDCDINKFTDLDLQHVAKETGGFVARDFTVLVDRAIHSRLSRQSISTREKLVLTTLDFQKALRGFLPASLRSVNLHKPRDLGWDKIGGLHEVRQILMDTIQLPAKYPELFANLPIRQRTGILLYGPPGTGKTLLAGVIARESRMNFISVKGPELLSKYIGASEQAVRDIFIRAQAAKPCILFFDEFESIAPRRGHDNTGVTDRVVNQLLTQLDGVEGLQGVYVLAATSRPDLIDPALLRPGRLDKCVYCPPPDQDGSSSSDSDLSLSSMVFLNHSSGSDDSAGDGECGLDQSLVSLEMSEILPDESKFNMYRLYFGSSYESELGNGTSSDLEDESMNQPGPIKTRLAISQSHLMTALGHTRPSISEDDWKNFAELYESFQNPKRRKNQSGTMFRPGQKFFDEITELTYLPSFHHKAAPHQAEPGPNSSSASAPPPYNPFITSSPHTQSGLQFRSVTSPPPSAQQFPLKEVAGAKGIVKTALETAPTLALPVSSQPFSLHTAEVQGCAVGILTQGPGPCPVAFLSKQLDLTVLGSPSCLHAVASAALILLEALKITNYAQLTLYSSHNFQNLFSFSHLTHILSAPRLLQLYSLFVESPTITILPGPDFNLASHIILDTTPDPDDCMSLIYLTFTPFPHISFFSVPHVDHIWFTDGSSTRPDRHSPAKAGYAIESSTSIIEATALPPSTTSQQAELIALTRAFTLAKGLHVNIYTDSKYAFHILHHHAVIWAERGFLTTQGSSIINASLIKTLLKAALLPKEAGVTHCKGHQKASDPITLGNAYADKGVRCAPDPARRPLPLPIGLKACHCSCTAKIGGKYRALVGQLKTISVATGLKTQDRTIDGSSQVIEEKNHNGYSVIDTGTLVEAELEKLPNNWSPQTCELFALSQALKYLQNQKTISILIQKEPSPALGLTPERKGNVGHAGKGPLESSSPDPFLCGQERREKGCRTATSVSITNPINRGPWVVTHPGKELTPEHKGNVGHAGRDILAKAGAIIHLNIGEGTPVCCPLLEEGINPEVWATEGQYGRAKNARPVQVKLKDSTSFPYQRQYPLRPKAQQGLQKIVKDLKAQGLVKPCSNPCSTPILGVQKPNRQWRTLCHQATQALFNFLATCGYMVSKPKAQLCSQQRYLGLKLSKGTRALSEEHIQPILAYPHPKTLKQLRGFLGVIGFCRKWIPRYGEIARSLNTLIKETQKANTHLVRWTTEVEVAFQALTQAPVLSLPTGQDFSSYVTEKTGIALGVLTQIRGMSLQPVAYLTKEIDVVAKGXPHCLRVVVAVAVLVSEAVKIIQGRDLTVWTSHDVNGILTAKGDLWLSDNCLLKCQALLLEGPVLRLCTCATLNPATFLPDNEEKIKHNCQQVISQTYATRGDLLEVPLTDPDLNLYTDGSSFVEKGLRKVGYAVVSDNGILESNPLTPGTSAQLAELIALTWALELGEEKRANIYTDSKYAYLVLHAHAAIWKEREFLTSERTPIKHQEAIRKLLLAVQKPKEVAVLHCRGHQKGKEREIEENCQADIEAKRAARQDPPLEMLIKQPLV

SEQ ID NO: 42647 - protein, 872 aa, Homo sapiens
  DOMAIN (254)..(265): RNase H domain identified by eMATRIX, accession number PF00075B, p-value=6.276e-12, raw score of 12.56
  misc_feature (1)...(872): Xaa = X or * as defined in Table 2
MPNRACFQCGLQGHFKKDCPSRKPQVCLTIESQEVNCLLDAGAAFSVLLSCPGQLSSRSVTIRGVLGQPVTRYFFQPLSCDWGALPFSHAFLIMPESLTPLLEREILVKAGAIIHLNIGEGTPICRLLFEEGISPEVWATEGQYGQAKNAHFVQVKLKDSTSFPYQRQYPLRPEAQQRLQKIVKDLKAQGLVKPYSSPCNTPILGVQKPKRQWRLVQDLRIINEAVFPLYPAIPSPYTLLSQIPEEAEWFTVLDLKDAFFCIPVHPDSQFLFAFEDPSNPTSQLTWTVLPQGFRDSPHLFGQALAQDLSQFSYLDTPVLQCMDDLLLAARSETLCHQATQALLNFLTTCGYKVSKPKAQLCSQQVKCLGLKLSKVTRALSEERIQPILAYPYPKTLKQLRGFLGITGFCRIWIPRYGKIARPLYTLIKETQKANTHLVRWTPEAEAAFHALKKALMQAPVLSLLTGQDFSSYVTKNKQTKKKKTXIALRVLALVXGTSLQPVAYLSKEIDVVAKGQPHCLRVVVAVAVLVSEAVKIIQGRNLTVWTSHDVNGILTAKGDLWLSDNHLLKYQALLLEGPMLRLCTCAALNLDTFLPHNEEKIEHNCQQVIAQTYATRGDHLEVPLTDPNPNLYTDGRSFVEKGLQKVGYAVVSDNGILESNPLTPGTSAQLAKLTRALELGEGKRVNIYTDSKYAYLVLHAHAVIWREREFLTSEGTPIKHQEAIRELLLAVQKPKEVAVLHCRGHQKGKEREIERNRQADIEAKRAARQDPPLEMLIEGPLVWGNPLWETKPQYSEEEIEWGISRGHSFLPSGWQATEQGKIPLPAANQWKLLKTTHQNFHLCIDSTHQMAKLLFTGPGLFKTLKQIVGACK

SEQ ID NO: 42648 - protein, 44 aa, Homo sapiens
IILSNSMSSTHIGLPVLQERGLDPDPKRGFLDLAQERIQGESIE

SEQ ID NO: 42649 - protein, 303 aa, Homo sapiens
MAKLAVLEALERSICGRFAGNLDLTGQKQVFKAENNPWVTPIADQFQLGVSHVFEYIRSETYKYAGITGLPILPPRGEEEGAEEYRGCKEEYVWILGPVWSCVMALGVLLQERGPDPDPKRGFLDFAQERSRVSLQGKVKKQSGVPVTAGSPVRSDRETHDTFPTLYRSINHDLVMRKKVDGNQDEQQQTSTHLGSRVPKVPIVISIQLSASKPFLIINLAITEKTVTFHRRDVKASSCMTAAMSSIGGTVPSVSPEGRIQGAAVSPARLLRYIAGYTALNSPASRTLRAPLGPPIVIVPAAP

SEQ ID NO: 42650 - protein, 80 aa, Homo sapiens
MIGVHSDLPQSTSSSSSESVWSCVMALGVLLQERGPDPDPKRGFLDFAQERSRVSPAQSQTVQPSPCLPALLPGWEVGLL

SEQ ID NO: 42651 - protein, 360 aa, Homo sapiens
  DOMAIN (54)..(90): Ribosomal protein L6e proteins domain identified by eMATRIX, accession number BL01170A, p-value=7.917e-11, raw score of 12.34
MEKEKEEEEEEERRKAEEEKEGKKENEWWRGEERVLQALWKHPFMLSTPPRVRARNSQVDIECQPLSLNIPSRGKRVVFLKQLASGLLLVTGPLVLNRVPLRRTHQKFVIATSTKIDISNVKIPKHLTDAYFKKKKLRKPRHQEGGSEHEAMREWKLTCVKGVPSKEKCRSPEMAAYEAAQGTTEAKETEQAYSHCKNVLESNHTLILFPNHEKCTGQKMHRARRQLIECKVQLIREDRKKCLEIVFVVTAKEGEVLQTSPETSKLLALDLDLNAICYTAPIRVRVQVGYIGKLVSWGFVVQIISSPRWNRLENRRATLHLFQPRTETGACHKHLLEQLQQKDPGDGPPASHSGVQTSVK

SEQ ID NO: 42652 - protein, 314 aa, Homo sapiens
  DOMAIN (155)..(191): Ribosomal protein L6e proteins domain identified by eMATRIX, accession number BL01170A, p-value=7.286e-27, raw score of 12.34
  misc_feature (1)...(314): Xaa = X or * as defined in Table 2
VPRKSVHSGDAEYHKVLKEEASDSRENKVGTTWLQILSGSFASRVTEHITQPLQESVSLWISSEQNIPPKFMGRLNKLRKATYKRKYSAAKSKVEKKKKEKVFATVTKPVGGDKNGGTRVVQTRKLPRYHPTEDVPRKIVEPPQKNLFSQHVRKTAKTALPPGTILIILTGRHRGKRVVFLKQLASGLILVTAPLVLNRVPLRRTHQKFVIATSTKIDISNVKIPKKKDKTPLLTDAYLKKKKLRKPRHPRKGEIFDTVKRGNMRITEQRTIDQKAVDSQILPKIKAIPQALQGYLRILCLLXRNGIYPHKLVF

SEQ ID NO: 42653 - protein, 185 aa, Homo sapiens
GSTNTSYRRALAGIWWVPSGRSFQRKEQAAIFAVLQPLLVILRQTGSGVAPQQTPADLQRENEQMKRNSININKKDIHTKTPETPCEGHKHQRPKDYNSLPAREQNWTENEFDELTEVGFRKRVITNSSELKEHVLTQCKKAKNLEKRLEELLSRITSLEKNIKDLMELKNAARELCEPYTSISS

SEQ ID NO: 42654 - protein, 100 aa, Homo sapiens
MRKSQCKKAENSKNQDTSSPPKDHTSLSAKEQNWTENEFDKLIEVGFRRDMDEGENYHSQQTNTGTENQTLHVLTHKWELDNENTWTQGGEHHTPEPVMG

SEQ ID NO: 42655 - protein, 196 aa, Homo sapiens
MAKQEQLQFVAPSKINAEGRAPRGRGGCGRSFSRLKCSCLPALKRAVDFPAQLSTSAKGQTASSESNSININQKDVHTETPSEPHQHQRPKVDKSTKMRKNQRKKAENSKNQNASSPKDHNSSPAREQNWMENEFDELTEVGFRRWVITNSSELKEHVLTQCKEGKNLEKRLEELLTRITSLEKNINDLMELKNTA

SEQ ID NO: 42656 - protein, 88 aa, Homo sapiens
MRKKQDKKAENSKNQNASSPPKDHNSLPAREQNWMENEFDELTEVGFRRWELNNENTWTQEGEHHTLRTVVGWGEEGGIALGDIPNAK

SEQ ID NO: 42657 - protein, 290 aa, Homo sapiens
  DOMAIN (109)..(148): kw TRANSCRIPTASE REVERSE II ORF2 domain identified by eMATRIX, accession number DM01354X, p-value=8.389e-09, raw score of 13.86
MAESEQLQSTAPSKINAEGRQTESRVDLQQTPADLQQRGLNVRRKTNEQKGIASTSTKRMSTQKPYQKDHNSSAAREQNWMENEFDEFTEVGFRSWVVTNSFKLKDHVLTQCKEAKNLKKRIGKNYFKVHMEPKRAHIAKTILSKKNKAGGITLPDFKLYYKPTVTKTTWDMDEAGNHHSQQTNTGTENQTLHVLTLKWELNNENTWTQGGEGTSHTEALSLQSFKEQTPSTVQYKRKRSDRHSEVLATNIRSCGTVPQTFNPYSHKELFAAFGFFRSPNMSKVKVGTEF

SEQ ID NO: 42658 - protein, 53 aa, Homo sapiens
MDEAGNHHPQQTNTGTENQTPHVLTHKWELNNENTWTQEGETPHPGACWGDGG

SEQ ID NO: 42659 - protein, 29 aa, Homo sapiens
  misc_feature (1)...(29): Xaa = X or * as defined in Table 2
SWKPSFSANXHRNRKPNTTCSHSQVGVDL

SEQ ID NO: 42660 - protein, 23 aa, Homo sapiens
SWKPSFAANSHRNRKPSTACSHS

SEQ ID NO: 42661 - protein, 55 aa, Homo sapiens
HQSDSPEHKIIFNKTPTSPGKRMEIIDDDVPSFHANGYQRKVSSVWVRSGMWVGY

SEQ ID NO: 42662 - protein, 116 aa, Homo sapiens
GCCGGTIKNSFSFPPLPNWPRFVMFPSLCVLIVETCETWICTLIVQLPLMSENMRCLIFCSCVSLLRMMVSSFVHVHDHKVKSHSRPSGNLRSKEASPSPKTSKVGKLTVQPSVCG

SEQ ID NO: 42663 - protein, 115 aa, Homo sapiens
  misc_feature (1)...(115): Xaa = X or * as defined in Table 2
SYGQMMKCQPFTFPSPGYGAGVFSSDKIGQMTFMERTXRMSCKEAAQDHTAREKEKVELKFPSLPFRRKELLXPCTWLGSPISLVTLDFPWPQGSGRLSMPVLWTCLIPGSLEIG

SEQ ID NO: 42664 - protein, 302 aa, Homo sapiens
  DOMAIN (7)..(54): kw TRANSCRIPTASE REVERSE II ORF2 domain identified by eMATRIX, accession number DM01354V, p-value=1.000e-40, raw score of 12.97
MSELPFTIATKRIKYLGIQLKSDVKDLFKENYKPLLNEIREDTYKWKNTPCSWIGRINIMNMAILPKVIYGFNAILIKLPLTFFTELEKTTLKFTQSLKRAHIAKTILSKKNKAGGIMLPDFKLYYKATVTKTACTIHNSKDLEPTEMPSNDTLDKENVAYIHHGILCSHSKGRVHILCRDMDEAGNHHSRQTNTGTENQTLHVLTHKWELNDENTWTQGGEHHISGPVRTNNKNHMIISIGAEKAFDKIQQPFMLKTLNQLGIDGTYLKIIRDIFDRPIANILLNGQKREASPLKTGTRQG

SEQ ID NO: 42665 - protein, 576 aa, Homo sapiens
MESISMMGSPKSLSETFLPNGINGIKDARKVTVGVIGSGDFAKSLTIRLIRCGYHVVIGSRNPKFASEFFPHVVDVTHHEDALTKTNIIFVAIHREHYTSLWDLRHLLVGKILIDVSNNMRINQYPESNAEYLASLFPDSLIVKGFNVVSAWALQLGPKDASRQVYICSNNIQARQQVIELARQLNFIPIDLGSLSSAREIENLPLRLFTLWRGPVVVAISLATFFFLYSFVRDVIHPYARNQQSDFYKIPIEIVNKTLPIVAITLLSLVYLAGLLAAAYQLYYGTKYRRFPPWLETWLQCRKQLGLLSFFFAMVHVAYSLCLPMRRSERYLFLNMAYQQSTLGYVALLISTFHVLIYGWKRAFEEEYYRFYTPPNFVLALVLPSIVILDLSVEVLASPAAAWKCLGANILRGGLSEIVLPIEWQQDRKIPPLSTPPPPAMWTEEAGATAEAQESGIRNKSSSSSQIPVVGVVTEDDEAQDSIDPPESPDRALKAANSWRNPVLPHTNGVGPLWEFLLRLLKSQAASGTLSLAFTSWSLGEFLGSGTWMKLETIILSKLTQEQKSKHCMFSLISGS

SEQ ID NO: 42666 - protein, 82 aa, Homo sapiens
GLKVCGTVPQERMLVAKTSECLSLLFRLYCTVEGVCSLNDCRDRASVCDVPSPPCVHVFSLFNSHLRVRTCSVWFSVPVLVC

SEQ ID NO: 42667 - protein, 47 aa, Homo sapiens
  misc_feature (1)...(47): Xaa = X or * as defined in Table 2
TCTCVFIAALFTIAKTWNXSKCPSMRDWIKKNVAHTHHGILCSHKKE

SEQ ID NO: 42668 - protein, 131 aa, Homo sapiens
MIGSKINEIEHKKQQRKIKEAKTRFFVKINNKSLARQRKNREDNIRTEIRDMDEAGNHHSQQTNTGTENQTLHVLTHKWELNNENPWTQGREHHTPGPVRGWRNVDLQTSLISSQLSSVQPHDSAFLTIMS

SEQ ID NO: 42669 - protein, 324 aa, Homo sapiens
REHLAEGMAVGTASADLNISACWLRREQQISQHSARALLRDRLPPQENSSWHPAGAPLGRNFQRKEQAAIFAVLQPPLVIPRKTGSGVDLEQTPADLQKRGLTVTRKTNKQKAIASTSTERTPTQKPPFKSHQHQRPNVDKSAKMRKNQSKKAENSKNQNTSSPPKDHNSSPAREQNWMENEFDELTEVGFRRWVITNSSELKKHVLTQCKEAKNLEKRDMDEAGNHHSQQTNTGTENQTPHVLTHKWELNNENTRTRIYKKHGAAICLASGIYHSVDLPFWGLDLPFWDLEDSGSTILGSGGQWPSSHSSTRQCTSVDSVWGL

SEQ ID NO: 42670 - protein, 37 aa, Homo sapiens
MDLSAWVLPPWGPERAAGEPGERSRRERAFFGVGETR

SEQ ID NO: 42671 - protein, 104 aa, Homo sapiens
  DOMAIN (33)..(71): Ribosomal protein L21e proteins domain identified by eMATRIX, accession number BL01171, p-value=1.000e-40, raw score of 19.94
FAKMTNTKGKRRGTRYMFSRPFRKHGVVPLATYMRIYKKGDIVDIKGMGTVQKGMPHKCYHGKTGRVYNVTQHAVGIVVNKQVKGKILAKRINVRIEHIKRLIA

SEQ ID NO: 42672 - protein, 195 aa, Homo sapiens
  DOMAIN (30)..(68): Ribosomal protein L21e proteins domain identified by eMATRIX, accession number BL01171, p-value=8.981e-25, raw score of 19.94
MMNTTGKMRGTPYVIFRPFRKHEVVPLAMYMQICKKGDIIDIKGVGTVQKGMPHKCYHGKAERVYLVPQHAAGIVVNKQLKGKIPAKRINENDQKKKEAKENGTWVQLKRQPPPPRKADFVRTNGKKPELLDPLPYEFRGSSPYNVNALDKSPAEYNKTENLTEEKPLYLYIYKPKHNCPCRMKMHMCCIFTSNP

SEQ ID NO: 42673 - protein, 4899 aa, Homo sapiens
  DOMAIN (185)..(210): RYANODINE RECEPTOR SIGNATURE domain identified by eMATRIX, accession number PR00795C, p-value=1.443e-30, raw score of 6.30
AAAVSARRAAAGGSRGAGGWGTADASGAMAEGGEGGEDEIQFLRTEDEVVLQCIATIHKEQRKFCLAAEGLGNRLCFLEPTSEAKYIPPDLCVCNFVLEQSLSVRALQEMLANTGENGGEGAAQGGGHRTLLYGHAVLLRHSFSGMYLTCLTTSRSQTDKLAFDVGLREHATGEACWWTIHPASKQRSEGEKVRIGDDLILVSVSSERYLHLSVSNGNIQVDASFMQTLWNVHPTCSGSSIEEGYLLGGHVVRLFHGHDECLTIPSTDQNDSQHRRIFYEAGGAGTRARSLWRVEPLRISWSGSNIRWGQAFRLRHLTTGHYLALTEDQGLILQDRAKSDTKSTAFSFRASKELKEKLDSSHKRDIEGMGVPEIKYGDSVCFVQHIASGLWVTYKAQDAKTSRLGPLKRKVILHQEGHMDDGLTLQRCQREESQAARIIRNTTALFSQFVSGNNRTAAPITLPIEEVLQTLQDLIAYFQPPEEEMRHEDKQNKLRSLKNRQNLFKEEGMLALVLNCIDRLNVYNSVAHFAGIAREESGMAWKEILNLLYKLLAALIRGNRNNCAQFSNNLDWLISKLDRLESSSGILEVLHCILTESPEALNLIAEGHIKSIISLLDKHGRNHKVLDILCSLCLCNGVAVRANQNLICDNLLPRRNLLLQTRLINDVTSIRPNIFLGVAEGSAQYKKWYFELIIDQVDPFLTAEPTHLRVGWASSSGYAPYPGGGEGWGGNGVGDDLYSYGFDGLHLWSGRIPRAVASINQHLLRSDDVGKLLPGPRGCPASHSASMGSPCRGCLENFNTDGLFFPVMSFSAGVKVRFLMGGRHGEFKFLPPSGYAPCYEALLPKEKMRLEPVKEYKRDADGIRDLLGTTQFLSQASFIPCPVDTSQVILPPHLEKIRDRLAENIHELWGMNKIELGWTFGKIRDDNKRQHPCLVEFSKLPETEKNYNLQMSTETLKTLLTLGCHIAHVNPAAEEDLKKVKLPKNYMMSNGYKPAPLDLSDVKLLPPQEILVDKLAENAHNVWAKDRIKQGWTYGIQQDLKNKRNPRLVPYALLDERTKKSNRDSLREAVRTFVGYGYNIEPSDQELADSAVEKVSIDKIRFFRVERSYPVRSGKWYFEFEVVTGGDMRVGWARPGCRPDVELGADDQAFVFEGNRGQRWHQGSGYFGRTWQPGDVVGCMINLDDASMIFTLNGELLITNKGSELAFADYEIENGFVPICCLGLSQIGRMNLGTDASTFKFYTMCGLQEGFEPFAVNMNRDVAMWFSKRLPTFVNVPKDHPHIEVMRIDGTMDSPPCLKVTHKTFGTQNSNADMIYCRLSMPVECHSSFSHSPCLDSEAFQKRKQMQEILSHTTTQCYYAIRIFGGQDPSCVWVGWVTPDYHLYSEKFDLNKNCTVTVTLGDERGRVHESVKRSNCYMVWGGDIVASSQRSNRSNVDLEIGCLVDLAMGMLSFSANGKELGTCYQVEPNTKVFPAVFLQPTSTSLFQFELGKLKNAMPLSAAIFRSEEENPVPQCPPRLDVQTIQPVLWSRMPNSFLKVETERVSERHGWVVQCLEPLQMMALHIPEENRCVDILELCEQEDLMRFHYHTLRLYSAVCALGNSRVAYALCSHVDLSQLFYAIDNKYLPGLLRSGFYDLLISIHLASAKERKLMMKNEYIIPITSTTRNICLFPDESKRHGLPGVGLRTCLKPGFRFSTPCFVVTGEDHQKQSPEIPLESLRTKALSMLTEAVQCSGAHIRDPVGGSVEFQFVPVLKLIGTLLVMGVFDDDDVRQILLLIDPSVFGEHSAGTEEGAEKEEVTQVEEKAVEAGEKAGKEAPVKGLLQTRLPESVKLQMCELLSYLCDCELQHRVEAIVAFGDIYVSKLQANQKFRYNELMQALNMSAALTARKTKEFRSPPQEQINMLLNFQLGENCPCPEEIREELYDFHEDLLLHCGVPLEEEEEEEEDTSWTGKLCALVYKIKGPPKPEKEQPTEEEERCPTTLKELISQTMICWAQEDQIQDSELVRMMFNLLRRQYDSIGELLQALRKTYTISHTSVSDTINLLAALGQIRSLLSVRMGKEEELLMINGLGDIMNNKVFYQHPNLMRVLGMHETVMEVMVNVLGTEKSQIAFPKMVASCCRFLCYFCRISRQNQKAMFEHLSYLLENSSVGLASPSMRGSTPLDVAASSVMDNNELALSLEEPDLEKVVTYLAGCGLQSCPMLLAKGYPDVGWNPIEGERYLSFLRFAVFVNSESVEENASVVVKLLIRRPECFGPALRGEGGNGLLAAMQGAIKISENPALDLPSQGYKREVSTEDDEEEEEIVHMGNAIMSFYSALIDLLGRCAPEMHLIQTGKGEAIRIRSILRSLVPTEDLVGIISIPLKLPSLNKDGSVSEPDMAGNFCPDHKAPMVLFLDRVYGIKDQTFLLHLLEVGFLPDLRASASLDTVSLSTTEAALALNRYICSAVLPLLTRCAPLFGGTEHCTSLIDSTLQTIYRLSKGRSLTKAQRDTIEECLLAICNHLRPSMLQQLLRRLVFDVPQLNEYCKMPLKLLTNHYEQCWKYYCLPSGWGSYGLAVEEELHLTEKLFWGIIDSLSHKKYDPDLFRMALPCLSAIAGALPPDYLDSRITATLEKQISVDADGNFDPKPINTMNFSLPEKLEYIVTKYAEHSHDKWACDKSQSGWKYGISLDENVKTHPLIRPFKTLTEKEKEIYRWPARESLKTMLAVGWTVERTKEGEALVQQRENEKLRSVSQANQGNSYSPAPLDLSNVVLSRELQGMVEVVAENYHNIWAKKKKLELESKGGGSHPLLVPYDTLTAKEKFKDREKAQDLFKFLQVNGIIVSRGMKDMELDASSMEKRFGYKFLKKILKYVDSAQEFIAHLEAIVSSGKTEKSPRDQEIKFFAKVLLPLVDQYFTSHCLYFLSSPLKPLSSSGYASHKEKEMVAGLFCKLAALVRHRISLFGSDSTTMVSCLHILAQTLDTRTVMKSGSELVKAGLRAFFENAAEDLEKTSENLKLGKFTHSRTQIKGVSQNINYTTVALLPILTSIFEHVTQHQFGMDLLLGDVQISCYHILCSLYSLGTGKNIYVERQRPALGECLASLAAAIPVAFLEPTLNRYNPLSVFNTKTPRERSILGMPDTVEDMCPDIPQLEGLMKEINDLAESGARYTEMPHVIEVILPMLCNYLSYWWERGPENLPPSTGPCCTKVTSEHLSLILGNILKIINNNLGIDEASWMKRIAVYAQPIISKARPDLLRSHFIPTLEKLKKKAVKTVQEEEQLKADGKGDTQEAELLILDEFAVLCRDLYAFYPMLIRYVDNNRSNWLKSPDADSDQLFRMVAEVFILWCKSHNFKREEQNFVIQNEINNLAFLTGDSKSKMSKAMQVKSGGQDQERKKTKRRGDLYSIQTSLIVAALKKMLPIGLNMCTPGDQELISLAKSRYSHRDTDEEVREHLRNNLHLQEKSDDPAVKWQLNLYKDVLKSEEPFNPEKTVERVQRISAAVFHLEQVEQPLRSKKAVWHKLLSKQRKRAVVACFRMAPLYNLPRHRSINLFLHGYQRFWIETEEYSFEEKLVQDLAKSPKVEEEEEEETEKQPDPLHQIILYFSRNALTERSKLEDDPLYTSYSSMMAKSCQSGEDEEEDEDKEKTFEEKEMEKQKTLYQQARLHERGAAEMVLQMISASKGEMSPMVVETLKLGIAILNGGNAGVQQKMLDYLKEKKDAGFFQSLSGLMQSCSVLDLNAFERQNKAEGLGMVTEEGTLIVRERGEKVLQNDEFTRDLFRFLQLLCEGHNSDFQNFLRTQMGNTTTVNVIISTVDYLLRLQESISDFYWYYSGKDIIDESGQHNFSKALAVTKQIFNSLTEYIQGPCIGNQQSLAHSRLWDAVVGFLHVFANMQMKLSQDSSQIELLKELLDLLQDMVVMLLSLLEGNVVNGTIGKQMVDTLVESSTNVEMILKFFDMFLKLKDLTSSDTFKEYDPDGKGIISKKEFQKAMEGQKQYTQSEIDFLLSCAEADENDMFNYVDFVDRFHEPAKDIGFNVAVLLTNLSEHMPNDSRLKCLLDPAESVLNYFEPYLGRIEIMGGAKKIERVYFEISESSRTQWEKPQVKESKRQFIFDVVNEGGEQEKMELFVNFCEDTIFEMQLASQISESDSADRPEEEEEDEDSSYVLEIAGEEEEDGSLEPASAFAMACASVKRNVTDFLKRATLKNLRKQYRNVKKMTAKELVKVLFSFFWMLFVGLFQLLFTILGGIFQILWSTVFGGGLVEGAKNIRVTKILGDMPDPTQFGIHDDTMEAERAEVMEPGITTELVHFIKGEKGDTDIMSDLFGLHPKKEGSLKHGPEVGLGDLSEIIGKDEPPTLESTVQKKRKAQAAEMKAANEAEGKVESEKADMEDGEKEDKDKEEEQAEYLWTEVTKKKKRRCGQKVEKPEAFTANFFKGLEIYQTKLLHYLARNFYNLRFLALFVAFAINFILLFYKVTEEPLEEETEDVANLWNSFNDEEEEEAMVFFVLQESTGYMAPTLRALAIIHTIISLVCVVGYYCLKVPLVVFKREKEIARKLEFDGLYITEQPSEDDIKGQWDRLVINTPSFPNNYWDKFVKRKVINKYGDLYGAERIAELLGLDKNALDFSPVEETKAEAASLVSWLSSIDMKYHIWKLGVVFTDNSFLYLAWYTTMSVLGHYNNFFFAAHLLDIAMGFKTLRTILSSVTHNGKQLVLTVGLLAVVVYLYTVVAFNFFRKFYNKSEDDDEPDMKCDDMMTCYLFHMYVGVRAGGGIGDEIEDPAGDPYEMYRIVFDITFFFFVIVILLAIIQGLIIDAFGELRDQQEQVREDMETKCFICGIGNDYFDTTPHGFETHTLQEHNLANYLFFLMYLINKDETEHTGQESYVWKMYQERCWDFFPAGDCFRKQYEDQLG

SEQ ID NO: 42674 - protein, 212 aa, Homo sapiens
  DOMAIN (28)..(48): RYANODINE RECEPTOR SIGNATURE domain identified by eMATRIX, accession number PR00795E, p-value=4.375e-22, raw score of 14.24
MRRQEEGSTVGVEGHLMSKFDVCGIHVGILEVLHCILTESPEALNLIAEGHIKSIISLLDKHGRNHKNGSTIADELDGTSAALLGITLEIRRSLGFGIPCWISVSSGRKISDLQGREKYKKASGGRGHHPGHLVLQILAKLSVYVCVVYVYVENGMPIDHEKQKQPENGERKVLLKRHSIIATMQAETSANITLCPRVTVGRQLQQSQRSQN

SEQ ID NO: 42675 - protein, 542 aa, Homo sapiens
  DOMAIN (258)..(298): G-protein coupled receptors proteins domain identified by eMATRIX, accession number BL00237A, p-value=7.955e-21, raw score of 27.68
SSSPRAARAGLGAVLGGLGNRAVWRSEAPGTRGKRRAGRQPEEPRVLELGAGSWESGGERSPEPGARGGASGSGASRLDGAPAGLRHAPSPGLAFIGPRLRRAHSCPDFQPRRRRTEPRTPAPTMRLNSSAPGTPGTPAADPFQRAQAGLEEALLAPGFGNASGNASERVLAAPSSELDVNTDIYSKVLVTAVYLALFVVGTVGNTVTAFTLARKKSLQSLQSTVHYHLGSLALSDLLTLLLAMPVELYNFIWVHHPWAFGDAGCRGYYFLRDACTYATALNVASLSVERYLAICHPFKAKTLMSRSRTKKFISAIWLASALLTVPMLFTMGEQNRSADGQHAGGLVCTPTIHTATVKVVIQVNTFMSFIFPMVVISVLNTIIANKLTVMVRQAAEQGQVCTVGGEHSTFSMAIEPGRVQALRHGVRVLRAVVIAFVVCWLPYHVRRLMFCYISDEQWTPFLYDFYHYFYMVTNALFYVSSTINPILYNLVSANFRHIFLATLACLCPVWRRRRKRPAFSRKADSVSSNHTLSSNATRETLY

SEQ ID NO: 42676 - protein, 1082 aa, Homo sapiens
  DOMAIN (214)..(241): G-protein coupled receptors proteins domain identified by eMATRIX, accession number BL00237C, p-value=4.682e-15, raw score of 13.19
FPHFETVEVPCVYAQQLSCFIGTGCTDVISTGPSVQEGACPSPRSVLPSPPLTPRQQSQAFLRVPALPMDVLPLLVVEDPPTGAARGPGPDPTTHQPPEVAIFAASRVEGGLRPEQENRRDAGRPQIRTPKQGRAEQTRHPARVSSGGGGSQEPTQVNTFMSFIFPMVVISVLNTIIANKLTVMVRQAAEQGQVCTVGGEHSTFSMAIEPGRVQALRHGVRVLRAVVIAFVVCWLPYHVRRLMFCYISDEQWTPFLYDFYHYFYMVTNALFYVSSTINPILYNLVSANFRHIFLATLACLCPAKAQGLCQDTTWEGAQASASRSSAVASRARQKGRRIRGLVSSTCPSGRGQDGDPGSTEHMTSQAPGLRRSPKPKRRQSQEKLAGTSQELGATGSKSRDTCPRTTDTPTTPDLVSLACGQVMMWPRKLALRAMSASVMESGAPEPAPGDGTALTAQTPTPTPTICRPVSLLAQSGTRALDCCPPRAPCLNLSTPRFVPRVGHSVMFKGSLGSVPRRKELEQRGNKADGRAHVRTTREPVPDQFPRPQLSPRRSEGHRRSLHPNRRNTDIDDNIIGMEIQPWNSSSVMEREIWGHWPGSLPQAPLNSSPLKPEPGPTNQVTSRATGDTPSQAQTPANYPGPGARPCQLNPHHLTWFKAHGHREPVCSWAKGQTGPGEVDVSCTYTSSRQEDARRTDGETGWERECDLPVIPEVWLPELELKPEPFTKSSSQDLSWPWMNPVRCLSCLYRGIRALPASHYWTLVKELGDRVAAEGTEPAVSRVQRRTTRQSAKGSVRRSSMGRAPCHFQQGAHREGEPPVKHPSPKSPAGIGCSSLCVETSHSGVFFTQGLHLGVHWGGLSLSRVLHPTHLSLGSHGEQEHRGQQAEGSARAKGTFALASCSPGTRSRTSADPKGVHSGYGPSGVPLKAGRGQDFILFLPPLRAVTNCSPDEVNSMSDGVVPSLPDGVVPSLSDGMVPGLSDGVVPSLSDGVVPGLSDGVVPGLSDGMVPGLSDGVVPSLSDGVVPGLSDGLVPGLFDGVVPSLSEGVVPSLSDGVVPGLSDGLVPGLFDGVVPSLSEDGERS

SEQ ID NO: 42677 - protein, 46 aa, Homo sapiens
MLFLRYAPLVGGSFCIWSHPLQFFLTSIKVNFVETLFCFQSFKDIF

SEQ ID NO: 42678 - protein, 95 aa, Homo sapiens
RVPALAYWPGRVPVNVTSTALLSVLDIFPTVVALAQASLPQGRRFDDVDVSEVLFGRSQPGHRVLFHPNSGAAGEFGALQTVRLERYKAFYITGE

SEQ ID NO: 42679 - protein, 392 aa, Homo sapiens
MLFSHRRCTAKFFAMEMASWICLKAAIRIMAKEEEEEEEERLVLLSQGWQWQKKIHVLRGPMQFKSVSLKGAQFRENSSKQLQTTAAFSDCFVVLFAFRSRNPGGTERKNKQASLPQGRRFDGVDVSEVLFGRSQPGHREVIILSSCSYTSFYETLGSDNTYSWAAPAMKTPPRGPAAFASRAFVQWRAALRSQGVVAAGRVRISCHGLAKGGGAACRGLGSWPMVAGRGAPPYQGFVFLLLLAPLSRLEFHKSRVSSATLSQVLFHPNSGAAGEFGALQTVRLERYKAFYITVSKVLGNEKRLGNHRFQFLSIFPEINNPYKIDRGRVAAYVQSWLKEKQLSADSTPPGGASAASASIGGSAREHTAPSKAFPINYWESPEMPRTCGDLPF

SEQ ID NO: 42680 - protein, 313 aa, Homo sapiens
MGFYHVGQAGTELLTSNDPLTSASQSARITGKALQKPTEVPVPYEKMLQDQSALIVQGLPEGVAFKHPENYDLATLKWILENTAGISFIINRNRILLCHPGWSSVVQSQLIVASTPQASNPTTAFRVAVTTGREQLVGGITLATTVTKRIGGGQVKDTGKLEEELTSEVPERAESPDKDGLLKSFLETLLQNDVCLPKATHQKEFDTLSGKLEGIPRAEENEKIRKEKVVKEEMKIEKDREYREDGKEQEAGLYNGGWDMDETGNHHSQQTIARTKNQTLRVLTHRCELNNENTWTQEAEHHTPGTVVGLEEG

SEQ ID NO: 42681 - protein, 35 aa, Homo sapiens; identical to SEQ ID NO: 42450

SEQ ID NO: 42682 - protein, 29 aa, Homo sapiens
WMKLETIILSKVSQGQKTKHCMFSLLGGN

SEQ ID NO: 42683 - protein, 236 aa, Homo sapiens; identical to SEQ ID NO: 42320
  DOMAIN (53)..(98): kw TRANSCRIPTASE REVERSE II ORF2 domain identified by eMATRIX, accession number DM01354N, p-value=1.000e-40, raw score of 13.17

SEQ ID NO: 42684 - protein, 30 aa, Homo sapiens
  misc_feature (1)...(30): Xaa = X or * as defined in Table 2
TWMKLETIILSKLXQRQKTKHRMFLLIGGN

SEQ ID NO: 42685 - protein, 536 aa, Homo sapiens; identical to SEQ ID NO: 37771
  DOMAIN (57)..(100): kw TRANSCRIPTASE REVERSE II ORF2 domain identified by eMATRIX, accession number DM01354T, p-value=1.000e-40, raw score of 9.48

SEQ ID NO: 42686 - protein, 94 aa, Homo sapiens
  DOMAIN (9)..(58): kw TRANSCRIPTASE REVERSE II ORF2 domain identified by eMATRIX, accession number DM01354Z, p-value=5.574e-32, raw score of 9.06
DTISHQLEWQSLKSQETTALLTIAKTWNQPKCPSMIGWIKKMWHIYTMEYYAAIKSDEFMCFAWTWMKLETIILSKLSQEHKTKHHMFSLTSGS

SEQ ID NO: 42687 - protein, 183 aa, Homo sapiens
TWMKLETIILSKLSQGEKTKHRMFSHIELNNDYTLKKVMKPLITSNTVTDEIERANVFKMNGKWYLFTDSRGSKMTIDGINSNDIYMLGYVSNSLTGPYKPLNKTGLVLQMGLDPNDVTFTYSHFAVPQAKGNNVVITSYMTNRGFFEDKKATFAPSFLMNIKGNKTSVVKNSILEQGQLTVN

SEQ ID NO: 42688 - protein, 476 aa, Homo sapiens; identical to SEQ ID NO: 32684
  DOMAIN (201)..(250): kw TRANSCRIPTASE REVERSE II ORF2 domain identified by eMATRIX, accession number DM01354Z, p-value=1.000e-40, raw score of 9.06

SEQ ID NO: 42689 - protein, 36 aa, Homo sapiens
PFAVWWTWMKLETIILSKLSQDQKIKQRTFSLISGS

SEQ ID NO: 42690 - protein, 252 aa, Homo sapiens
MEYYAAIKNDEFTVFVGTWMKLETIILSKLSQGQKSKHRMFSLIDLKRIKIDLGKFSDNPDGYIDILQGLGKSFDLTWRDIMLLLDQTLTPNERSAAITAAREFDDLWYLGQVNDRMTTEEREQFPTGQQAVPSVDPHWDTESEHGDWCHRHLLTCMLEGLRKTRKKPFASSTIETAKLQIILQMESQMQSMTKIYCVPLNWPASPCSNVNDIEVTPPKEISTAQPYYAPIQQEAVKSDRQPTSPTALGFSC

SEQ ID NO: 42691 - protein, 299 aa, Homo sapiens; identical to SEQ ID NO: 38301

SEQ ID NO: 42692 - protein, 50 aa, Homo sapiens
SLTNLRKRSNGERIPYLINGTWMKLETIILSKLSQGQETKHHMFLLIDGN

SEQ ID NO: 42693 - protein, 54 aa, Homo sapiens
RSRKTESTERTGRNKRQVYIMEDGTWMKLETIILSKLSQGQKTKHCAFSLIGVN

SEQ ID NO: 42694 - protein, 87 aa, Homo sapiens
RCTQLPRQWLPEKGVICVGAEWHVGWLLVPWLPWAAVPAGEGRLQGQQRLWGPSPSGTWMKLETIILSKLTQKQKTKHHMFSLISGS

SEQ ID NO: 42695 - protein, 839 aa, Homo sapiens
  DOMAIN (10)..(65): kw TRANSCRIPTASE REVERSE II ORF2 domain identified by eMATRIX, accession number DM01354Q, p-value=1.000e-40, raw score of 9.23
MNIDAKILNKILANRIQQHIKKLIHHDQVGFIPGMQGWFNIRKSINIVQHINRTNDKNHMIISIDAEKAFDKIQQRFMLKTLNKLGIDGTYLKIIRAIYDKSTANIVLNGQKLEAFPLKTGTRQGCPLSPLLFNIVLEVLARAIRQEKEIKGIQLRKEEIKLSLFADDMIVHLENPIVSAQNLLKLIDNFSKVSGYKINVQKSQAFLYTNNRQTESQIMSELPFTIASERIKYLGIQLTRDVKDLFKENYKPLLNDIKEDTNKWKNTPRSWVGRINIMKMAILPKVIYRFNAIPIKLPMTFFTELEKTTLKFIWNQKGARIAKSILIYRFNAQELEKTTLKFIWNQKGARIAKSILSQKNKAGGITLPDFKLYYKATVIKTAWYWYQNRDIDQWNRTEPSEIMPHIYNHLIFDKPDKNKKWGNDSLFNKWCWENWLAICRKLKLDPFLIPYTKINSRWIKDLNVRPKTIKTLEENLGNTIQDIAMGKDFMSKTPKAMATKAKIDKWDLINLKSFCTAKETTIRVNRQPIEWEKIFAIYSSDKGRISRIYNELKQIYKKKTNNPIKKWAKDMNRHFSKEDIYAAKRHMKKCSSSLAIREMHIKTTMRHHLTSVRMAIIKKLGNDWCWRGCGEIGRLLHCWWDCKLVQPLWKSVWRFLRDLELETPFDPASPLLGIYQKEYKSCYYKDICTRVCVPAALFTIANTWNQPKCTSMIDWVKKMWHIYTMEYYAAIKTDEFMSFAGTWMKLETIILRKLSQGQKTKHRMYSLIGGNLTMRTFGHSAGSHHTPGPIMRCGAGGGIALGEIPNVNDELMGTANQHGTCIPMQQNCTLCTCTLKLKV

SEQ ID NO: 42696 - protein, 1685 aa, Homo sapiens
  DOMAIN (545)..(590): kw TRANSCRIPTASE REVERSE II ORF2 domain identified by eMATRIX, accession number DM01354N, p-value=1.000e-40, raw score of 13.17
MIVYLENAIISAQNLLKLISNFSKVSGYKINVQKSQAFLHTNNRQTESQIMSELPFTIASKRIKYLGIQLIRDVKDLFKENYKPLLNEIKEDTNKWKNIPCSWVGRINIVKMAILPKVIYRFNAIPIKLPMTFFTELEKTTFKFIWNQKRARIAKSILSQKNKAGGITLPDFKLYYKATVTKTAWDMDEAGNHHSQQTITRTKNQTPHVLTHRWELNNENTWTQEGEHHTPGPAALTFYKSVNVLENLKVQVLLERDANLDAKRGFLDLAKERIQGVIPTHTSPPPINVSHSLLCLSICFLEDPTDTVAIDHDSRKQDVSPFNVVAWHGNYTPYKYNLKNFMVINSVAFDHADPSIFTVLTAKSVRPGVAIADFVIFPPRWGVADKTFRPPYYHRNCMSEFMGLIRGHYEAKQGGFLPGGGSLHSTMTPHGPDADCFEKASKVKLAPERIADGTMSPEKTGSNPSSAMTCRLKQVVSQLSALIPPLQNGKYDFPHKDIATINKIDRLLARLIKKKREKNQIDAIKNDKGDITTDPTEIQTTIREYYKHLYTNKLENLEEMDKFLNTYTLPRLNQEEVESLNRPITGSEIVAIINSLPTKKSPGPDGFTAEFYQRYKEELVPFLLKLFQSIEKEGILPNSFYEASIILIPKPGRDTTKKENFRPISLRNIDAKILSKILANRIQQHIKKLIHHDQVGFIPGMEGWFNIRKSINVIQHINRTKDKNHMIISIDSEKTFDKIQQPFMLKTLNKLGIDGTYLKIIRAIYDKPTANIILNGQKLEAFPLKTGTRQGCPLSPLLFNIVLEVLARAFRQEEEIKGIQLGKEEVKLSLFADDMIVYLENPIVSAQNLLKLISNFSKVSGYKINVQKSQAFLYTNNTDKQESQIMSELPFTTASKRIKYLGIQLTRDVKDLFKENYKPLLNEIKEDTNKWKNVPCSWVGRISIVKMAILPKVIYRFNAIPIKLPMTFFTELEKTTLKFIWNQKRAHITKSILSQKNKAGGITLPDFKLYYKATVTKTAWYWYQNRYIDQWNRIEPSEIMPHIYNYLIFDKPDKNKKWGKDSLFNKWCWENWLAICRKLKLDPFLTPYTKINSRWIKDLNVRPKTIKTLEENLGNTIQDTGMGKDFMSKTPKAIATKAKIDKWDLIKLKSFCSLLGYLKTENTAKETTIRLNRQPTEWEKIFAIYSSDKGLISRIYKELKQIYKKKTNNPIKKWAKDMNRHFSKEDIYAAKKHMKKCSSSLAIREMQIKTTMRYYLTPVRMAIIKKSRNNRCRRGCGEIGTLLHCWWDCKLVQPLWKTVWRFLKDLELEKPFDPAIPILVISWRELLLIWLRAANASINPGVEQSPSGDPKTVTGFPFLRLEAADWVEEASVPKGVHIALSSQEQRAGDPRDLEAPSNLVISERTHRSFRVSWTPPSDSVDRYKVEYYPVSGGKRQEVVRTPGVPDLRLPAIIPQAAWLLAHLPAPSAPPTELPTKHTEAQSQRCWSLLLCSVTEVAAPSQVVKEAPPSFHTGTENGYQGEESLFNKAYYGGGTNFFRKESQKLQQSAKKRDAELANGALGIIELNNDYTLKKVMKPLITSNTVTDEIERANVFKMNGKWYLFTDSRGSKMTIDGINSNDIYMLGYVSNSLTGPYKPLNKTGLVLQMGLDPNDVTFTYSHFAVPQAKGNNGGYHKLHDKQRLLRG

SEQ ID NO: 42697 - protein, 145 aa, Homo sapiens
MPFYTGVTTAAALSILETNNVHTRAYFQYRERSPFSKRKSDQNKEKHTAKKQNCHENQIQQSLKPLLLTLNLTGHTSSCVHQPVFHKATPAHASISVYYLTANQRHGSISLYSLRHNSFMVDQLVFLRHNTLMVHQLVILRHTSS

SEQ ID NO: 42698 - protein, 157 aa, Homo sapiens
MSFAATWMQLDAIILCELMQEQKTKPHVLISMIDIDRRIPRGQSKCKFFPYNERIALGILNKCTGNVVNQPVQLKTSISSQYVIRMQPTNRCLSTLECAAVALSILEKNNYIQEVFTRNYGVQKPSAHFKRARRGGLKGSSKKKRQILKVTDIPSSQ

SEQ ID NO: 42699 - protein, 78 aa, Homo sapiens
  misc_feature (1)...(78): Xaa = X or * as defined in Table 2
IAIMRLLLQISIIILSSCLREVKSMQAYRKALRKLKLADVKRYQKSLVVQKRSXERXSLVLILILPARTFQSYLAPIC

SEQ ID NO: 42700 - protein, 182 aa, Homo sapiens
MHVVAPEDLPVGQIVEVETVILVILNLCRPTLIARNPGVSYCTWLKDNIIKEILPKLIYRFNAKPIKISAAFLQKLLSEGSQKHASLQKSIEKAKIGRCETEERTRLAKELSSLRDQREQLKAEVEKYKDCDPQVVEEIPRLVTLKKQAEIQVNASILDNGMLSVANEMKKQNVKDSASHVS

SEQ ID NO: 42701 - protein, 138 aa, Homo sapiens
YCPVPVGVTGPTISSSHGALWAHRSYRLRRIGTGPAACGHHGLHGVRGSVKKLTHLTWKQCLNKLKEQLWKEVTKHWDGDCSHQSLGPLPACDLCDQRHLCSRQGGSVCGCDPCEQLLLLVSQLRAPGVDSAAAGHPV

SEQ ID NO: 42702 - protein, 147 aa, Homo sapiens
ETSHQVMDRSNPVKPALDYFSNRLVNYQISVKCSNQFKLEVCLLNAENKVVDNQAGTQGQLKVLGANLWWPYLMHEHPAYLYSWEDGDCFTPKALDPLPACDLCDQLHLRSRQGGSVCGCDPCEQLLLLVSQLQAPAIDSAAAGRPV

SEQ ID NO: 42703 - protein, 156 aa, Homo sapiens
  DOMAIN (62)..(84): WAP-type 'four-disulfide core' domain proteins domain identified by eMATRIX, accession number BL00317B, p-value=5.333e- 15, raw score of 14.58
RPSKEGECPPDKNPCKELCQGDELCPAEQKCCTTGCGRICRDIPKEFGGECPADPLPCEELCDGDASCPQGHKCCRTGCGRTCLGDIEGGRGGDCPKVLVGLCIVGCVMDENCQAGEKCCKSGCGRFCVPPVLPPKLTMNPNWTVRSDSELEIPVP

SEQ ID NO: 42704 - protein, 153 aa, Homo sapiens
MTVTASDTCSSWTRSQLVCKRMPVPYKPVRARQRVLPGVGAGLPMRHHSRLFLECPICGVIYRTNAYRLRNCWEGRLGAGPFSYYASCRKGHPPPLAIQSGFQERKETFAEKEIKETCRVCVYKIPTEGAVARSMTGNGPWERFTLQCLGLFE

SEQ ID NO: 42705 - protein, 185 aa, Homo sapiens
PCSLSSDCCASNQRDSVGIGPSEPRVGYNILVIRFLSPSEKRSPRRGSDPIFQCLGTLTTGRDFADFGTTIKQDFRLLGQTSVDRLLQLSQGQAVKGNQLLPVSLVKRKTTLAPNTQTASPRALADSLMQLARQVSRLESGHDYRVLVGELDDEQMAALSRLGTDYRPTSAYERGQRYASRLQNE

SEQ ID NO: 42706 - protein, 283 aa, Homo sapiens
  DOMAIN (37)..(83): kw TRANSCRIPTASE REVERSE II ORF2 domain identified by eMATRIX, accession number DM01354O, p-value=2.333e-17, raw score of 8.73
MDKFLDTNTLPRLNQEEVEFLNRPITGFEIVAIINSLPTKKSPGPDGFTAKFYQTYKEELGFCRFRNHHQTGFSPAGANQRGPLAATLSGPGGEGQSAVARLTGEKKNHPGAQYANRLSPRVGRFINAAGTTGGIFEYVLSGPMGAEELAFRFAVNTINRNRTLLPNTTLTYDTQKINLYDSFEASKKGILPISDTTIKQDFRLLGQTSVDRLLQLSQGQAVKGNQLLPVSLVKRKTTLAPNTQTASPRALADSLMQLARQVVFLNMSYLAQWELRNLHSDLL

SEQ ID NO: 42707 - protein, 334 aa, Homo sapiens
CSWHDRFPDWKAGRILPISEPPSNRIFACWGKPAWTACCNFSQGQAVKGNQLLPVSLVKRKTTLAPNTQTASPRALADSLMQLARQVSRLESGQDFADFGTTIKQDFRLLGQTSVDRLLQLSQGQAVKGNQLLPVSLVKRKTTLAPNTQTASPRALADSLMQLARQVSRLESGQDFADFGTTIKQDFRLLGQTSVDRLLQLSQGQAVKGNQLLPVSLVKRKTTLAPNTQTASPRALADSLMQLARQVSRLESGQDFADFGTTIKQDFRLLGQTSVDRLLQLSQGQAVKGNQLLPVSLVKRKTTLAPNTQTASPRALADSLMQLARQVSRLESGQ

SEQ ID NO: 42708 - protein, 116 aa, Homo sapiens
WDISPSVQRKSTRRFLRWMWLPGTGDFADFGTTIKQDFRLLGQTSVDRLLQLSQGQAVKGNQLLPVSLVKRKTTLAPNTQTASPRALADSLMQLARQALIHILARLMKVLRSSVWQ

SEQ ID NO: 42709 - protein, 111 aa, Homo sapiens
MGVVPEELFLEELNLSGLKWDFADFGTTIKQDFRLLGQTSVDRLLQLSQGQAVKGNQLLPVSLVKRKTTLAPNTQTASPRALADSLMQLARQVSRLESGQHPEFAPPSHGD

SEQ ID NO: 42710 - protein, 81 aa, Homo sapiens
GDFADFGTTIKQDFRLLGQTSVDRLLQLSQGQAVKGNQLLPVSLVKRKTTLAPNTQTASPRALADSLMQLARQVSRLESGQ

SEQ ID NO: 42711 - protein, 406 aa, Homo sapiens
  DOMAIN (266)..(308): Chloramphenicol acetyltransferase proteins domain identified by eMATRIX, accession number BL00100C, p-value=1.000e-39, raw score of 23.60
MEKKITGYTTVDISQWHRKEQFEAFQSVAQCTYNQTVQLDITAFLKTVKKNKHKFYPAFIHILARLMNAHPEFRMAMKDECTTPRVNLNVNYGPWMIMDVDKAGNHHSQQTNTGTENQTPYVLTHKWELTNENTWTQGGDHHAQGPVRGCGARDFADFGTTIKQDFRLLGQTSVDRLLQLSQGQAVKGNQLLPVSLVKRKTTLAPNTQTASPRALADSLMQLARQVSRLESGQPVKKNKHKFYPAFIHILARLMNAHPEFRMAMKDGELVIWDSVHPCYTVFHEQTETFSSLWSEYHDDFRQFLHIYSQDVACYGENLAYFPKGFIENMFFVSANPWVSFTSFDLNVANMDNFFAPVFTMGKYYTQGDKVLMPLAIQVHHAVCDGFHVGRMLNELQQYCDEWQGGA

SEQ ID NO: 42712 - protein, 368 aa, Homo sapiens
  DOMAIN (76)..(105): kw REPLICATION REPB REPA INITIATION domain identified by eMATRIX, accession number DM00653A, p-value=7.207e-27, raw score of 20.40
KGPSAAMEAEPLSDTQALKSFAGKEVVFYRPEEDAGDEKGYESFPWFIKRAHSPSRGLYSVHINPYLIPFFIGLQNRFTQFRLSETKEITNPYAMRLYESLCQYRKPDGSGIVSLKIDWIIERYQLPQSYPPTPDFRRRYKKKGPSAALEAEPLSDTQSLELFLSLAWSLKIRISNKFPDALAVAAGWNHTLKTTDLGGFISIESAKGLDVWDSWPLQNADGTVAEYNGYHVVFALAGSPKDADDTSIYMFYQKVGDNSIDSWKNSGRVFKDSDKFDANDPILKDQRGDFADFGTTIKQDFRLLGQTSVDRLLQLSQGQAVKGNQLLPVSLVKRKTTLAPNTQTASPRALADSLMQLARQVSRLESGQ

SEQ ID NO: 42713 - protein, 176 aa, Homo sapiens
RAGTAWVTRDFADFGTTIKQDFRLLGQTSVDRLLQLSQGQAVKGNQLLPVSLVKRKTTLAPNTQTASPRALADSLMQLARQVSRLESGHARTLPSSPSARPTKNATSRKISPHTTGISIRCTNCASVECGLLRWRIAMAISATAAPDEMPEKRNSTGRIGLLRNGYDFSADSRKPV

SEQ ID NO: 42714 - protein, 88 aa, Homo sapiens
  misc_feature (1)...(88): Xaa = X or * as defined in Table 2
XTGMTQQRDFADFGTTIKQDFRLLGQTSVDRLLQLSQGQAVKGNQLLPVSLVKRKTTLAPNTQTASPRALADSLMQLARQVSRLESGQ

SEQ ID NO: 42715 - protein, 227 aa, Homo sapiens
  DOMAIN (161)..(194): ESICULAR LUMEN DOMAIN domain identified by eMATRIX, accession number DM01292C, p-value=4.672e-09, raw score of 12.45
MEAITNGMMNLNRQRHQHLVALRIIFAHARDFLQGWPSQQMKILQRKALLLTKVLDPAGRDFADFGTTIKQDFRLLGQTSVDRLLQLSQGQAVKGNQLLPVSLVKRKTTLAPNTQTASPRALADSLMQLARQVSRLESGQHRLGYAGTAGLLRDIVHSDSIASHYGVLLALYALMQFLCAPVLGALSDRFGRRPVLLASLLGATIDYAIMATTPVLWIYPLVNSPSC

SEQ ID NO: 42716 - protein, 477 aa, Homo sapiens
MVEDEKLKTQLSGKDNCRSLDATYNKGGRQLQVVMWVPLLCEPAAGPGTPQAASMAGTGEHSGAWKLGDLRNLRAPCGEQGECFSPVCVTAALLALPFSRSQVLVLQPGRMRCTDKGVMGPSSCRKTRDSSQGYQSSVHKPLVGDAEIPTRRSHLVWRSISVSCLNMQSGHEVIQPLCCAVGNCSWSRLPHLTGTDGRAKLANRSRNDVKNSESAKGLYVWDSWPLQNADVTVAEYNGYPVVFALAGSPKDADDTSIYMFYRKVGANSIDSCKNAVRVFSDSDKFDAIDPILKDHTQEWSGSATFTSDAKIRLFYADYFGKHYGKQSLTTAQTKAINTLYSKTNTGSENGYQGEESLFNKAYYGGGTNFFRKESQKLQQSAKKRDAELANGALVFIRDFADFGTTIKQDFRLLGQTSVDRLLQLSQGQAVKGNQLLPVSLVKRKTTLAPNTQTASPRALADSLMQLARQVSRLESGQ

SEQ ID NO: 42717 - protein, 101 aa, Homo sapiens
SVTSCLKVTSVCLTSAAASCRDFADFGTTIKQDFRLLGQTSVDRLLQLSQGQAVKGNQLLPVSLVKRKTTLAPNTQTASPRALADSLMQLARQVSRLESGQ

SEQ ID NO: 42718 - protein, 278 aa, Homo sapiens
RDPHYVEDKGHKYLVFEANTGTENGYQGEESLFNKAYYGGGTNFFRKESQKLQQSAKKRDAELANGALGIIELNNDYTLKKVMKPLITSNTVTDEIERANVFKMNGKWYLFTDSRGSKMTIDGINSNDIYMLGYVSNSLTGPYKPLNKTGLVLQMGLDPNDVTFTYSHFAVPQAKGNNVVITSYMTNRGFFEDKKATLGDFADFGTTIKQDFRLLGQTSVDRLLQLSQGQAVKGNQLLPVSLVKRKTTLAPNTQTASPRALADSLMQLARQVSRLESG

SEQ ID NO: 42719 - protein, 233 aa, Homo sapiens
  DOMAIN (101)..(144): 1 kw MIND INHIBITOR DIVISION CONTROL domain identified by eMATRIX, accession number DM01756B, p-value=3.096e-15, raw score of 22.91
GYVFLLEEGNDPQGTASMYHGWVPDHHIHAEDTLLPFYHGEKDDVTYAIKPTCWPGLDIIPSCLALHRIETELMGKFDEGKLPTDPHLMLRLAIETVAHDYDVIVIDSAPNLGIGTINVVCAADVLIVPTPAELYDYTSALQFSICFVICSRTRDFADFGTTIKQDFRLLGQTSVDRLLQLSQGQAVKGNQLLPVSLVKRKTTLAPNTQTASPRALADSLMQLARQVSRLESG

SEQ ID NO: 42720 - protein, 386 aa, Homo sapiens
  DOMAIN (360)..(386): Profilin proteins domain identified by eMATRIX, accession number BL00414D, p-value=1.380e-09, raw score of 15.59
  misc_feature (1)...(386): Xaa = X or * as defined in Table 2
MLQIPKQQQNEKYQVPQFDQSTIKNIESAKGLDVWDSWPLQNADGTVAEYNGYHVVFALAGSPKDADDTSIYMFYQKVGDNSIDSWKNAGRVFKDSDKFDANDPILKDQTQEWSGSATFTSDGKIRLFYTDYSGKHYGKQSLTTAQIHFPLISILSYATWGLSLLECIPGSPVCTLLVRFSNVGTRWSLEVRGRDFADFGTTIKQDFRLLGQTSVDRLLQLSQGQAVKGNQLLPVSLVKRKTTLAPNTQTASPRALADSLMQLARQVSRLESGHCLEQPDSCQPYGSSFYALEEKHVGFSLDVGGKTFLNITPAEVGVLVGKDWSSFVMNGLTLGGQKYTVVLDSLLQDGELTTDLCMKSIGGAPTFNVIVTMTAKTLGLLMGKEX

SEQ ID NO: 42721 - protein, 132 aa, Homo sapiens
QMTHDSKGQIQEALVQYTLLGMTIFYALYSQHGGSEELVKVPPNKTNPEEYSTYPKLEILSKSNFIFKSYDYKGFGHFATTIFQDFRMLGQTSVVSLVQLSQEQTVKGNQLLPVSLVKRKTTLAPNTQTASI

SEQ ID NO: 42722 - protein, 398 aa, Homo sapiens
  DOMAIN (332)..(365): ESICULAR LUMEN DOMAIN domain identified by eMATRIX, accession number DM01292C, p-value=4.672e-09, raw score of 12.45
TKAINTLYSKTNTGSENGYQGEESLFNKAYYGGGTNFFRKESQKLQQSAKKRDAELANGALVFIRDFADFGTTIKQDFRLLGQTSVDRLLQLSQGQAVKGNQLLPVSLVEGALWTAVRSPQPLRGGVGYGEVVLPVPCLGTRGLQPDHLEKEGGGCLEEGTWAGRGWRAPGGSWGSAQVRGLSRYAVAVTWTHNRNPKCRDFADFGTTIKQDFRLLGQTSVDRLLQLSQGQAVKGNQLLPVSLVKRKTTLAPNTQTASPRALADSLMQLARQVSRLETRAVSATQLIQAPCMKSNNALIVILGTVTLDAVGIGLVMPVLPGLLRDIVHSDSIASHYGVLLALYALMQFLCAPVLGALSDRFGRRPVLLASLLGATIDYAIMATTPVLWIYPLVNSPSC

SEQ ID NO: 42723 - protein, 642 aa, Homo sapiens
LLEGKLTNRKDIPHQNPICTSPSSKTKGILPISEPPSNRIFACWGKPAWTACCNFSQGQAVKGNQLLPVSLVKRKTTLAPNTQTASPRALADSLMQLARQVSRLESGQDFADFGTTIKQDFRLLGQTSVDRLLQLSQGQAVKGNQLLPVSLVKRKTTLAPNTQTASPRALADSLMQLARQVSRLESGQINHTPNSFHIGAGGSWCLSESPCVVLNYKYPLVCGYTDGNAEVSKFGNFFLDLSRTRCLAEGNYTSGDNHTLRDPHYVEDKGHKYLVFEANTGTENGYQGEESLFNKAYYGGGTNFFRKESQKLQQSAKKRDAELANGALGIIELNNDYTLKKVMKPLITSNTVTDEIERANVFKMNGKWYLFTDSRGSKMTIDGINSNDIYMLGYVSNSLTGPYKPLNKTGLVLQMGLDPNDVTFTYSHFAVPQAKGNNVVITSYMTNRGFFEDKKATFAPSFLMNIKGNKTSVVKNSIRREGFCRFRNHHQTGFSPAGANQRGPLAATLSGPGGEGQSAVARLTGEKKNHPGAQYANRLSPRVGRFINAAGTTGFPTGKRAGFCRFRNHHQTGFSPAGANQRGPLAATLSGPGGEGQSAVARLTGEKKNHPGAQYANRLSPRVGRFINAAGTTGFPTGKRAV

SEQ ID NO: 42724 - protein, 462 aa, Homo sapiens
IIVSNSKNQRGWGEKPIPIQREPACPKAPGKKKYFPEFQVTRRKRSISKEKADTGKEKSLARDFADFGTTIKQDFRLLGQTSVDRLLQLSQGQAVKGNQLLPVSLVKRKTTLAPNTQTASPRALADSLMQLARQVSRLESGHQTTSLRRHIVSPGDQKRMLYLFVDQIRKSDGTLQEHDGICEIHVAKYAEIFGLTSAEASKDIRQALKSFAGKEVVFYRPEEDAGDEKGYESFPWFIKRWAALLGRVSTPLGYRKNLSIQGLRWWLQWLGINFALFLGLFFLTTPSIILSTMDKFNVTPPIHALNQPVLHPCVVRDGVFLPQDTSHWDDVAPCWYLGHPDANASAPSRGEGFQIVEHIVEEKPLGEKGEVQSVVNGGKELRDFADFGTTIKQDFRLLGQTSVDRLLQLSQGQAVKGNQLLPVSLVKRKTTLAPNTQTASPRALADSLMQLARQVSRLESGQ

SEQ ID NO: 42725 - protein, 1362 aa, Homo sapiens
  DOMAIN (212)..(223): PROTEIN GLYCOPROTEIN PRECURSOR RE domain identified by eMATRIX, accession number PD00306B, p-value=2.500e-09, raw score of 5.57
RGFLWRKKKRKCHALDPPGKERLTVAVSTRGTWGQLTLVLQTQVLGSVGRDFADFGTTIKQDFRLLGQTSVDRLLQLSQGQAVKGNQLLPVSLVKRKTTLAPNTQTASPRALADSLMQLARQVSRLESGQLFGGKPTKQVPIATAENMKNSVVISNPHATMTQQGNLDSPSGSGVLSSGSSSPLYSKNVDLNQSPLASSPSSAHSAPSNSLTWGTNASSSSAVSKDGLGFQSVSSLHTSCESIDISLSSGGVPSHNSSTGLIASSKDDSLTPFVRTNSVKTTLSERQTIGGTLYAGHHAVDGVHSEWKHTVSESFPRCTSCGTRTHGWATNTSRLAPLVYKRVDLYRTERGKMFVPTTPLRPLSLFPENINGFLLAKANGQLSVLTLLEFSAAAAPMVDSLIARVGVMARGNAITLPVCGRDVKFTLEVLRGDSVEKTSRVWSGNERDQELLTEDALDDLIPSFLLTGQQTPAFGRRVSGVIEIADGSRRRKAAALTESDYRVLVGELDDEQMAALSRLGNDYRPTSAYERGQRYASRLQNEFAGNISALADAENISRKIITRCINTAKLPKSVVALFSHPGELSARSGDALQKAFTDKEELLKQQASNLHEQKKAGVIFEAGDFLESHRRDFADFGTTIKQDFRLLGQTSVDRLLQLSQGQAVKGNQLLPVSLVKRKTTLAPNTQTASPRALADSLMQLARQVSRLESGQLFGGKPTKQVPIATAENMKNSVVISNPHATMTQQGNLDSPSGSGVLSSGSSSPLYSKNVDLNQSPLASSPSSAHSAPSNSLTWGTNASSSSAVSKDGLGFQSVSSLHTSCESIDISLSSGGVPSHNSSTGLIASSKDDSLTPFVRTNSVKTTLSERQTIGGTLYAGHHAVDGVHSEWKHTVSESFPRCTSCGTRTHGWATNTSRLAPLVYKRVDLYRTERGKMFVPTTPLRPLSLFPENINGFLLAKANGQLSVLTLLEFSAAAAPMVDSLIARVGVMARGNAITLPVCGRDVKFTLEVLRGDSVEKTSRVWSGNERDQELLTEDALDDLIPSFLLTGQQTPAFGRRVSGVIEIADGSRRRKAAALTESDYRVLVGELDDEQMAALSRLGNDYRPTSAYERGQRYASRLQNEFAGNISALADAENISRKIITRCINTAKLPKSVVALFSHPGELSARSGDALQKAFTDKEELLKQQASNLHEQKKAGVIFEAGDFLESHRRDFADFGTTIKQDFRLLGQTSVDRLLQLSQGQAVKGNQLLPVSLVKRKTTLAPNTQTASPRALADSLMQLARQVSRLESGQFLSEVTPSSCPSEVKPLLSDVQLWSPTFSCFSSLPGGIWGLYRHRVGQGFSPAGANQSWTACCNSLRARR

SEQ ID NO: 42726 - protein, 51 aa, Homo sapiens
  misc_feature (1)...(51): Xaa = X or * as defined in Table 2
MRRHYPSPGCALVPDILRVVGYRRYRRQLHVISPPLTTIKQDFRLLGQTQX

SEQ ID NO: 42727 - protein, 1130 aa, Homo sapiens
VNVSKSDDTLKINGVEDHKTIFDGDGKTYQNVQQFIDEGNYTSGDNHTLRDPHYVEDKGHKYLVFEANTGTENGYQGEESLFNKAYYGGGTNFFRKESQKLQQSAKKRDAELANGALGIIELNNDYTLKKVMKPLITSNTVTDEIERANVFKMNGKWYLFTDSRGSKMTIDGINSNDIYMLGYVQEAPGYFPRFRAVIIKLCNGDSLRHFMTSVYALGFCRFRNHHQTGFSPAGANQRGPLAATLSGPGGEGQSAVARLTGEKKNHPGAQYANRLSPRVGRFINAAGTTGFPTGKRAGFCRFRKPPSNRIFACWGKPSVDRLLQLSQGQAVKGNQLLPFSLVKRKTTLAPNTQTASPRALADSLMQLARQVSRLESGQICYMLGIHVKSWIYNNNALPEIQSQEKSRQWETVGKVFQLLWENMTGGMASRIIKKFSVGEAQSVRKASKELRLQEQLGVNVSKSDDTLKIGGVEDHKPIFAGDGKTYQNVQQFIDEGNYTSGDTHTMRDPQYVEDKGHKYLVFEANTGTENGYQGEESLFNKAYYGGGTNFFRKESQKLQQSAKKRDDELASGALGIIELNNDYTLKKEPDDESPTGKTPAFGRRVSGVIEIADGSRRRKAAALTESDYRVLVGELDDEQMAALSRLGNDYRPTSAYERGQRYASRLQNEFAGNISALADAENISRKIITRCINTAKLPKSVVALFSHPGELSARSGDALQKAFTDKEELLKQQASNLHEQKKAGVIFEAEEVITLLTSVLKTSSASRTSLSSPHQFAPGATVLYKGDKMVLNLDRDFADFGTTIKQDFRLLGQTSVDRLLQLSQGQAVKGNQLLPVSLVKRKTTLAPNTQTASPRALADSLMQLARQVSRLESGQDFADFGTTIKQDFRLLGQTSVDRLLAMCAGPGGEGQSGPGGEGQSAVARLTGEKKNHPGAQYANRLSPRVGRFINAAGTTGFPTGKRAVSATQLMNLADLGTTIKQDFRLLGQTSVDRLLQFSQGQAVKGNQLLPVSLVKRKTTLAPNTQTASPRALADSLMQLARQVSRLESGQDFADFGTTIKQDFRLLGQTSVDRLLQLSQGQAVKGNQLLPVSLVKRKTTLAPNTQTASPRALADSLMQLARQVSRLESGQ

SEQ ID NO: 42728 - protein, 99 aa, Homo sapiens
  DOMAIN (45)..(70): CAP-Gly domain proteins domain identified by eMATRIX, accession number BL00845, p-value=9.085e-16, raw score of 16.43
  misc_feature (1)...(99): Xaa = X or * as defined in Table 2
XGAAPPTAGGIEGSVKLHEGSQVLLTSSNEMGTVRYVGPTDFASGIWLGLELRSAKGKNDGSVGDKRYFTCKPNHGVLVRPSRVTYRGINGSKLVDENC

SEQ ID NO: 42729 - protein, 231 aa, Homo sapiens
  DOMAIN (110)..(143): Ribosomal protein S13 proteins domain identified by eMATRIX, accession number BL00646B, p-value=6.100e-30, raw score of 21.42
MSLVIPEKFQHILRVLNTNIDGQRKIAFAITAIKGVGRRYAHVVLRKADTDLTKRAGELTDDEVERVITVMQNPRQYKIPDWFLNRQKDVKDGKYSQVLANGLDNKLREDLERLKKIRAHRGLRHFWGLRVRGQHTKTTGRRGRTVGPPLGPGGDEQWPALPRQGGDVGPEPRGPHRACPRQVWAQHLAGHAKDVTTPPNNHRVFGASRRGGSLERSRGMKRGRLRKRKWM

SEQ ID NO: 42730 - protein, 38 aa, Homo sapiens
SIIFSFHFPVEYIIGYICIPHNCSFFKNQYFVLFCCLQ

SEQ ID NO: 42731 - protein, 79 aa, Homo sapiens
  misc_feature (1)...(79): Xaa = X or * as defined in Table 2
AGGWALPSLGLPSWTSRCPWRRGSAGLLLEASVPVQQXPKLLDRLSRRWPGEGHPRPARVRSCMALGPRRLGVLCQEPS

SEQ ID NO: 42732 - protein, 569 aa, Homo sapiens
  DOMAIN (195)..(216): EBI1 ORPHAN RECEPTOR SIGNATURE domain identified by eMATRIX, accession number PR00641A, p-value=3.400e-27, raw score of 13.73
MRRKDAGTGDPILKTWYGIPKEFELYPENNGDPSKIFIFQVGELKDEICVLEGVLWQQRGSKARVRTEETLRLGFMHVWLRTHLDARKMLLGQWLPAPKQGWKRVHLPHDLIALPPHPTSGPGSGGGQEGGEDSDAGQQARCSKAQSGSDVLFQQTQCLELGRKVPNSVSPSTAFFNNKDLSLPSNNFLALSPTGKPMKSVLVVALLVIFQVCLCQDEVTDDYIGDNTTVDYTLFESLCSKKDVRNFKAWFLPIMYSIICFVGLLGNGLVVLTYIYFKRLKTMTDTYLLNLAVADILFLLTLPFWAYSAAKSWVFGVHFCKLIFAIYKMSFFSGMLLLLCISIDRYVAIVQAVSAHRHRARVLLISKLSCVGIWILATVLSIPELLYSDLQRSSSEQAMRCSLITEHVEAFITIQVAQMVIGFLVPLLAMSFCYLVIIRTLLQARNFERNKAIKVIIAVVVVFIVFQLPYNGVVLAQTVANFNITSSTCELSKQLNIAYDVTYSLACVRCCVNPFLYAFIGVKFRNDLFKLFKDLGCLSQEQLRQWSSCRHIRRSSMSVEAETTTTFSP

SEQ ID NO: 42733 - protein, 299 aa, Homo sapiens
  DOMAIN (167)..(188): EBI1 ORPHAN RECEPTOR SIGNATURE domain identified by eMATRIX, accession number PR00641A, p-value=5.909e-17, raw score of 13.73
MVFAASMNLSRCHTLYLSSVSVETLTGALAVQKAISPPFERDILPTPTVVHFKVTEQGITLTDVQRESSQDLKESKSGNGVISGRLTKGKGTASQPVSQRLVTWIPAPLLDRVAVPDLGVEEDKKEQTQCLELGRKVPNSVSPSTAFFNNKDLSLPSNNFLALSPTGKPMKSVLVVALLVIFQTPRNSVPGTKLRNSAEETTGISFEEEFGPWSPLPTHWWEGAKTSVAAATPANPKPQECNGVTWGQREMDGQRVGSPHDSQEPCRWAEPTLDHTVADAEGTPQLQEKASFTSSQTSS

SEQ ID NO: 42734 - protein, 128 aa, Homo sapiens
LTRPFPTGTPAPLPPKNVPATPPRTGSPLTIGPGASSPARPATPLVPCRSTTPPPPPPRPPSRPKLPPGKPGVGDVSRPFSPPIHSSSPPPIAPLARAESTSSISSTNSLSAATTPTVVSEDDVFYDK

SEQ ID NO: 42735 - protein, 71 aa, Homo sapiens
YTVITALWPPVFPAILMLVCFSGASSPARPATPLVPCRSTTPPPPPPRPPSRPKLPPGKPRFASFSSRALA

SEQ ID NO: 42736 - protein, 301 aa, Homo sapiens
MTMRNEFVKGILASLESSVIALPCGPDFTVAPAVTELGNLNAMGVIGSQGGRNQVKILNYQRQELEALLSFSIPAAYDLSLVVRIIKRALISRFVALGFFPSSSLRWPKVARKVITPQTVEYPAFLSPDLNVTVGTPAVQSSNQPSVVRLEKLQQQPRESPPAPSLRLRRPRVTSGYRRTLGRGGPSAFRGSCQGQVRVLRGQLTHWSGSASSVVRPRFLRKPLMQRQPESSSRSCCRCSHCQQPPGRGRDRRATSQHHHSATSVLRRHRVNGSPHTIGEAKGEPLSQRPPRPQRKTCWEL

SEQ ID NO: 42737 - protein, 542 aa, Homo sapiens
  DOMAIN (359)..(406): Intermediate filaments proteins domain identified by eMATRIX, accession number BL00226D, p-value=8.393e-35, raw score of 19.10
MQDSPLGPVLTGWGGRVGLPRVDRAAVPDLRHICGCCPWNNSPLPWTLDGNHRLRSKPQYEGGWPNGRPGWRLKPGYQNKVEIHVLQSHISDTSVVVKLDNSQDLNMDCIIAEIKAQYDDIVTCSWAKAESWYHGCLPDCEEMKATVIWHGETLRRTKEEINELNRMIQRLTAEVENAKCQEQLGLKELDNCPDKAAKVSVGFQKVACMCAPGPKGGAPGQDSEWAGDSERDRQTNSKLEAAVAQSEQQGEAALSDARCKLAELEGALQKAKQDMACLIREYQEMRKLRPSQDSSTGQDRHDANEAGTFGLALQSPTYRAGPFTLSSWLQCLKLEENIKTAEEQGELAFQDAKTKLAQLEAALQQAKQDMARQLRKYQELMNVKLALDIEIATYRKLVEGEEGRWRLGFTGMEEFRVGAQLLGTGMKKVFLTCPVVRQECSWHLLNAGYMNRGLSGRGLQLQRDERVGDGTGGCKKKQRRVTSAGSGTELPLTETSMYLQLEEQAARSAEYGSSLQSSRSEIADLNVRIQKLRSQILSVKSH

SEQ ID NO: 42738 - protein, 89 aa, Homo sapiens
  misc_feature (1)...(89): Xaa = X or * as defined in Table 2
XIQEVTVNQSLLAPLRLDADPSLQAGAPGGESSRSRPSNNKFASFHRTRTLNETELTRAAVPDLRHHLWCLSMDNKSAPMDHGRHHRMS

SEQ ID NO: 42739 - protein, 551 aa, Homo sapiens
  DOMAIN (460)..(491): Protein kinases ATP-binding region proteins domain identified by eMATRIX, accession number BL00107A, p-value=7.158e-18, raw score of 18.39
  misc_feature (1)...(551): Xaa = X or * as defined in Table 2
MGTVPRSAGQETWVLCEHIIGGERSFTEYSLCHRIESSTSSIKLELGGNNVEPLESSRVFDSTVQNEEADAVSTGEEGVTHEGTQGGKVIPQMHMGSGLQPKSFSQNRSQVNNDMIVTDNNGAVKFPQLCKFCDVRFSTCDNQKSCMSNCSITSICEKPQEVCVAVCWMSEEICTNVMYSPLPCKFLHLSPIEVLPIIRSPVNQSGRCKIRHIGSNNRLQRSTCQNTGWESAHVMKTPGFREYNTSNPDLLLVIFQVTGISLLPPLGVAISVIIIFYCYRVNRQQKLSSTWETGKTRKLMEFSEHCAIILEDDRSDISSTCANNINHNTELLPIELDTLVGKGRFAEVYKAKLKQNTSEQFXDSGQFKILFPIEEYASWKTEKDIFSDINLKHENILQFLTAEERKTELGKQYWLITAFHAKGNLQEYLTRHVISWEDLRKLGSSLARGIAHLHSDHTPCGRPKMPIVHRDLKSSNILVKNDLTCCLCDFGLSLRLDPTLSVDDLANSGQCYEVCSSGRFLVTIFKGNRLRERTEKNTRITPRDWVYEWLW

SEQ ID NO: 42740 - protein, 573 aa, Homo sapiens
  DOMAIN (375)..(406): Protein kinases ATP-binding region proteins domain identified by eMATRIX, accession number BL00107A, p-value=1.857e-16, raw score of 18.39
RAAGSAMGRGLLRGLWPLHIVLWTRIASTIPPHVQKSVNNDMIVTDNNGAVKFPQLCKFCDVRFSTCDNQKSCMSNCSITSICEKPQEVCVAVWRKNDENITLETVCHDPKLPYHDFILEDAASPKCIMKEKKKPGETFFMCSCSSDECNDNIIFSEEYNTSNPDLLLVIFQVTGISLLPPLGVAISVIIIFYCYRVNRQQKLSSTWETGKTRKLMEFSEHCAIILEDDRSDISSTCANNINHNTELLPIELDTLVGKGRFAEVYKAKLKQNTSEQFETVAVKIFPYEEYASWKTEKDIFSDINLKHENILQFLTAEERKTELGKQYWLITAFHAKGNLQEYLTRHVISWEDLRKLGSSLARGIAHLHSDHTPCGRPKMPIVHRDLNSSNILVKNDLTCCLCDFGLSLRLDPTLSVDDLANSGQVGTARYMAPEVLESRMNLENAESFKHTDVYSMALVLWEMTSRCNALGEVKDYEPPFGSKVREHPCVESMKDNVLRDRGRPEIPSFWLNHQGIQMVCETLTECCDHDPYARLTAQCVAERFSELEHLDRLSGRSCSEEKIPEDGSLNTTK

SEQ ID NO: 42741 - protein, 450 aa, Homo sapiens
  DOMAIN (217)..(248): Protein kinases ATP-binding region proteins domain identified by eMATRIX, accession number BL00107A, p-value=7.158e-18, raw score of 18.39
YNTSNPDLLLVIFQVTGISLLPPLGVAISVIIIFYCYRVNRQQKLSSTWETGKTRKLMEFSEHCAIILEDDRSDISSTCANNINHNTELLPIELDTLVGKGRFAEVYKAKLKQNTSEQFETVAVKIFPYEEYASWKTEKDIFSDINLKHENILQFLTAEERKTELGKQYWLITAFHAKGNLQEYLTRHVISWEDLRKLGSSLARGIAHLHSDHTPCGRPKMPIVHRDLKSSNILVKNDLTCCLCDFGLSLRLDPTLSVDDLANSGQVGTARYMAPEVLESRMNLENVESFKQTDVYSMALVLWEMTSRCNAVGGSFFPEHTVIASQVPSAMSSLQLYAESFSLLEAVTTIDHETVDRMGNKHLGRKNDENITLETVCHDPKLPYHDFILEDAASPKCIMKEKKKPGETFFMCSCSSDECNDNIIFSEEAEEHGNILTSDTGVIDALSSED

SEQ ID NO: 42742 - protein, 56 aa, Homo sapiens
PTRPATQSNICDEDSATETCYTYDRNKCYTAVVPLVYGGETKMVETALTPDACYPD

SEQ ID NO: 42743 - protein, 48 aa, Homo sapiens
SPAFPPFWSSSSSISRASTSSSSSSPSSWSPLCTSFQPLDKAARDRAS

SEQ ID NO: 42744 - protein, 171 aa, Homo sapiens
LQFFRRSEVKMKNHLLFWGVLAVFIKAVHVKAQEDERIVLVDNKCKCARITSRIIRSSEDPNEDIVERNIRIIVPLNNRENISDPTSPLRTRFVYHLSDLCKKCDPTEVELDNQIVTATQSNICGWMTVPQSTCYTLSTGNKCYTAVVPLVYGGETKMVETALTPDACYPD

SEQ ID NO: 42745 - protein, 90 aa, Homo sapiens
EDSATETCYTYDRNKCYTAVVPLVYGALWPRRWRRRLRSVPAAAAAGLLEDPAVPGLTAALPAVELPERRRRQQRQRQAPGHQLLPRSGR

SEQ ID NO: 42746 - protein, 40 aa, Homo sapiens
GTSNGGRPPPASLPPCSLISDCCASNQRDSVGVGPSEPVR

SEQ ID NO: 42747 - protein, 114 aa, Homo sapiens
PVPQDLQAAVLGRTTALFKAVKTGTLQVCKRLLLSFVCLCPAPRGRQASLSCGGLHPVRASWLLCLPKQAWAMAGAPPPAWLPPCSLISDCCASNQRDSVGVRPSEPGVGYSLV

SEQ ID NO: 42748 - protein, 123 aa, Homo sapiens
  DOMAIN (63)..(110): kw TRANSCRIPTASE REVERSE II ORF2 domain identified by eMATRIX, accession number DM01354V, p-value=1.000e-40, raw score of 12.97
LISDSCASNQRDSVGVGPSEPGAGYNLVVRSFLSRSEKRNIRVGVTRFSRQTESQIMSELPFTIASKRIKYLGIQLRRDVKDLFKENYKPLLNEIKEDTNKWKNIPCSWVGRINIVKMAILPK

SEQ ID NO: 42749 - protein, 1045 aa, Homo sapiens
  DOMAIN (692)..(737): kw TRANSCRIPTASE REVERSE II ORF2 domain identified by eMATRIX, accession number DM01354N, p-value=1.000e-40, raw score of 13.17
MAGDGIILIGLDLSGSNIQADDGYESTPPKQNGYCVLGEMQPRGLRKTSFPYFPVSLYGKQKMAIVILLSLHLLCEEETKPESLGPPLSSRRSSEWPRSDQTPIPDCCASNQRDSVGVGPSEPGVGYSLVVRRFLSPSEKRNIRVGVTRFSRDIDGAGSHYRHQQTNAGTENQTPHVFTYNWELNDQSTCTHGGEKHTLEPVSGGKTSLLPILSPEIYPLHGAAKPLSLGSAKGSSPEKRWHRVVVRDTASQQPPFLPLTMGTAGKALNPPVSSWCYPEFREEKKIERFQVLSVVLNAFHTLCNFISTKLSEVDARFIDDAKRLLEELKYRHFLRTVQGDRETDGKDILFKELMSWRENVQMQFRMLCAGYPPLANRTVCHFCHEADLQAEQHQGSLSFSSQMDQSMPLAEDPRQEEKEVGVSAPLTPDFSTEFLAVSASFYGYSSCQPTTSLSTHGSTGTRLRVLYESACKEECLGGRQDAEAKLAASRRGQPSSLMSSREGGWGEGSQSRNSSHGALKEAQFIITNAEKSLKDLMELKTMAQELRDECTSLSSRFDQLEEKVSVMEDEINEMKQEEKVREKRIKRNEQSLQEIWDYVKRPNLHLIGVPESDRENGTKLENTLQDIIQENFPNLARQANIQIQEIQRMPQRYSSRRATPRHIIVRFTKVEMKEKMLRAAREKEIQTTIREYYKHLYTNKLENLEEMDKFLDTYSLPRLNQEEVESLKRPITGSEIGAIINSLPTKKSPGPDGFTAEFYQRYKKELVPFLLKLFQSTEKERILPNSFYEASIILIPKPGRDTTKKENFRPISLMNINAKILNKILANQIQQHIEKLIHHDQVGFIPGMQGWFNIRKSINVIQHINRTNEKNHMIISIDAEKAFDKIQQPFMLKTLNKLGIDGTYLKIVRAIYDKLTANIILNGQKLEAFPLKTGTRQGCPLSPLLFNIVLEVLARAIRQEKEIKGIQLGKEQVKLSLFADDMIVYLENPIVSAQNLLKLISNFSKVSGYKINVQKSQAFLYTNNRQTESQIMSELPFTIASKRIK

SEQ ID NO: 42750 - protein, 314 aa, Homo sapiens; identical to SEQ ID NO: 42212
  DOMAIN (160)..(207): kw TRANSCRIPTASE REVERSE II ORF2 domain identified by eMATRIX, accession number DM01354V, p-value=4.692e-17, raw score of 12.97

SEQ ID NO: 42751 - protein, 154 aa, Homo sapiens
MAGAPPAASLPPCSLISDCCASNQQDSMGVGPSKPEAKNLEKRLDEWLTTITNEEKSLNDLMELKTMTRELRDACTSFSTRFDQLEERVSVIEDQMNEMKQEEKFGEKRVKRNEQSLQEIWDYVKRPNLRLIGVPESDGENGTKLENTLQDIIQ

SEQ ID NO: 42752 - protein, 99 aa, Homo sapiens
MAGAPPPASLPPCSLISDCCASNQRDSVGVGPSEPGVGYSLVVRRFLSRSEKRNIRVGVTRFSRYHSVGNAEITCILRWSQWELQTKAVPIWSSCQQLP

SEQ ID NO: 42753 - protein, 134 aa, Homo sapiens
  misc_feature (1)...(134): Xaa = X or * as defined in Table 2
CTDGFLVWMSFLFVSFPLPPCSLISDCSASNERDSVGVGPSEPGAGYNLVVRRFLSPSEKRSIRVXVTRFSRCRPSPLSLTRKGNSLTPCASQVRQCLALFRLAHGVRTHSPAPTVWHSLPKVGPFLENSVPGL

SEQ ID NO: 42754 - protein, 89 aa, Homo sapiens
MVGAPPPALLPPCSLISDCCASNQRDSLGVGPSEPGAGYNLVVRRFLSRSEKRSIRVGVTRFSSLKVGTAMLHKQQRWQPTPPSGSSIP

SEQ ID NO: 42755 - protein, 159 aa, Homo sapiens; identical to SEQ ID NO: 37958

SEQ ID NO: 42756 - protein, 87 aa, Homo sapiens
MADAPPPASLPPCSLISDCCASRLALLEEKLRYSNEKYQKFKAVEESLRKELVDMLGDDGVFLYPSHPTVAPKHHVPLTRPFNFAYT

SEQ ID NO: 42757 - protein, 100 aa, Homo sapiens
MAGAPAPASLPPCSLISDCCASNQRDSMGVGPSEPGAGYNLVPVEKRSIRVGVTGFSRCCPSPLSLTRKGNSLTPWASQVRQCLALLQLAHGRGSPNPRP

SEQ ID NO: 42758 - protein, 170 aa, Homo sapiens
NLLAEKVEQLMEWSSRRSIFRMNGDKFRKFIKAPPRNYSMIVMFTALQPQRQCSVCSLISDCCASSQRDSVGVGPSEPGVGYNLVVRRFLSRSEKRNIRVAVTRFSRSLNNAKKRGPTCQTDAPGPVSKLKGFRDPDGIEKICTPENGWVTANRGYKPGTEFSRNGPTLG

SEQ ID NO: 42759 - protein, 418 aa, Homo sapiens
MSHLPMKLLRKKIEKRNLKLRQRNLKFQGASNLTLSETQNGDVSEETMGSRKVKKSKQKPMNVGLSETQNGGMSQEAVGNIKVTKSPQKSTVLTNGEAAMQSSNSESKKKKKKKRKMVNDAEPVSPLQTVSSVIVGHPSIVFTIASLASESAWPTVSSELFDHLKSSSLNSSKSFSIQLCSVAGEELRSFGGGETRPSAAGLLEFARGPLYTLFAWVSAAVSAEQRFFVNHEFSGSFVSEEYPAILISDCCASNQRDSVGVRPSEPGAGYNLVLRRFLSPSEKRSIWVGVTRFSSEMNLVPQMEMQKSPVFCALTLGAVDRSCSYSAILAPPPKRKYLINEYILVHLISTCPSLLGRLCQFDQQAKEEADSFYHLVCQQLPTAESPEYLLCHALRQHKSPYQNLSRHQSILLVQTAEP

SEQ ID NO: 42760 - protein, 235 aa, Homo sapiens; identical to SEQ ID NO: 42216

SEQ ID NO: 42761 - protein, 1013 aa, Homo sapiens
  DOMAIN (482)..(522): G-protein coupled receptors proteins domain identified by eMATRIX, accession number BL00237A, p-value=6.516e-15, raw score of 27.68
MGVGPSDPGVGYSLVVRRFLSRSEKRNIRVGVTRFSRDFADFGTTIKQDFRLLGQTSVDRLLQLSQGQAVKGNQLLPVSLVKRKTTLAPNTQTASPRALADSLMQLARQVSRLESGHRSEKRNIRVGVTRFSSWVRQPLREMVVLLERVSTITLGATTDENMTSKRDKKGFCRFRTHHQTGFSPAGANQRGPLAATLSGPGGEGQSAVARLTGEKKNHLGAQYANRLSPRVGRFINAAGTTGFPTGKRAEELHDASCEGDGSVFHNQVLQQFGCNCGGITEINKGQVAEEKVHAGVEFGVDPDDHDHAQVSQYSDCVDGPGGEGQSAVARLTGEKKNHPGAQYANRLSPRVGRFINAAGTTGFPTGKRAVSATQLMDFADFGTTIKQDFRLLGQTSVDRLLQLSQGQAVKGNQLLPVSLVKRKTTLAPNTQTASPRALADSLMQLARQVSRLESGHHLSSVDFCYSSIIVPKMLANIFNKDKAISFLGCMVQFYLFCTCVVTEVFLLAVMAYDRFVAICNPLLYTVTMSWKVRVELASCCYFCGTVCSLIHLCLALRIPFYRSNVINHFFCDLPPVLSLACSDITVNETLLFLVATLNESVTIMIILTSYLLILTTILKMGSAEGRHKAFSTCASHLTAITPKVDKTTKMGKKQNRKTGNSKKQSASPPPKERSSSPATEKRWMENDFDELREEGFRRSNYSELREDIQTKGKEVENFEKNLEECITRITNTEKCLKELMELKTKARELCEECRSLRSRCDQLEERGFCRFRNHHQTGFSPAGANQRGPLAATLSGPGGEGQSAVARLTGEKKNHPGAQYANRLSPRVGRFINAAGTTGFPTGKRAVSATQLMDFADFGTTIKQDFRLLGQTSVDRLLQLSQGQAVKGNQLLPVSLVKRKTTLAPNTQTASPRALADSLMQLARQVSRLESGQDFADFGTTIKQDFRLLGQTSVDRLLQLSQGQAVKGNQLLPVSLVKRKTTLAPNTQTASPRALADSLMQLARQVSRLESGQ

SEQ ID NO: 42762 - protein, 134 aa, Homo sapiens
MAGAPPPASLPPCSLISDCCASNQRDSVGVGPSEPVVGYSLVVRRFLSPSEKRNIRVGSGPDFPGAVRHPFSLNSEKGLPWTPCAYPAPPMVDSLIARVGVMARGNAITLPVCGRDVNFTLELLRRDSVDNTPP

SEQ ID NO: 42763 - protein, 129 aa, Homo sapiens
MRAASLCSLVTNAYDGPHIEKVVIIGLEVNFQLESFDSRERSEALSLRRVLSAVLQSVGLRGLWGGGPPSDSGCVPTHSTVLSADHRGGGCCPKDGPFTGQATSSEVHSHHPHLIASVRFQIFKNAENI

SEQ ID NO: 42764 - protein, 308 aa, Homo sapiens
  misc_feature (1)...(308): Xaa = X or * as defined in Table 2
SFQFFCSVFSPSLWFYLLLVFDDGDVQMRFRCGCPFCLLVFLLTDRTLSCRSVGIPCRVRCQCALLGGASQLGCSGVKGSRDPLEEAVCPFSDLQLRAGGNTALFKAVRQGHLSLQRLLLSFVCLCPAPRGGAYRGGQASLSCGGLHPVXASRLLCLPKQAWAMAGAPPPASLLPCILISDCCASNQRDSVGVGPSERPGVGYSLVVRRFLSRSEKRNIRGGVTRFSRCRPSPLSLTRKGNSLTPCASQSEGNAIGPAFGFAHGARTHWALRPTVWHSLCEMNPVPQMEMQKSPVFCVAHAGGCRPEL

SEQ ID NO: 42765 - protein, 346 aa, Homo sapiens
MAGAPPPASLPPCSLISDCCASNQRDSVGVGPSEPGVGYSLVVRRFLSRSEKRNIRVGVTRFSRSFSGIKGLQLKVNLQPNDNYFFYVRAINAFGTSEQSEAALISTRVAPAKGSIKEKKRQRRRIGWRKLPCNLPASSGGYFAEQNGKMGEVVSELGWDHLQDTVKRGSQEECGQSGARSPEGSYHQSPKGSGLSVGQRYTFFYSGIVSDVHVTERPARVGILLDYNNQRLIFINAESEQLLFIIRHRFNEGVHPAFALEKPGKCTLHLGIEPPDSVKAQVILGFQNLQEQRFEFWGGLLFIPLGAIHYSKSLPRICTNDGCMHSNQHCEQNRQESLGFTEPVCE

SEQ ID NO: 42766 - protein, 133 aa, Homo sapiens
  misc_feature (1)...(133): Xaa = X or * as defined in Table 2
LADRSAIPGFAIFAVTFLLALVGAVLYLYPWTLLKPCXSHYXGINLVVAVXVKTTXGKNCMKMVXLILXRVTLPSSXRFGLRLEKAFXMGHLIKTXLGKNNMKMPSCNWSLFXGTSXKNEKEGTSVNIFSLTP

SEQ ID NO: 42767 - protein, 85 aa, Homo sapiens
  DOMAIN (67)..(85): E-CLASS P450 GROUP II SIGNATURE domain identified by eMATRIX, accession number PR00464D, p-value=6.182e-12, raw score of 17.40
  misc_feature (1)...(85): Xaa = X or * as defined in Table 2
NKPCEEFYFLAALIYLLYHGRKKADTKIPPXISRFFLILYPSHELTIFIVIHIMCDLGCTWAICFLTTSEEVQKKLYEEINQVFG

SEQ ID NO: 42768 - protein, 148 aa, Homo sapiens
  misc_feature (1)...(148): Xaa = X or * as defined in Table 2
TSSEVVKKQIAQVHNFAVIMQLARENIILSSEDLLVIKVPLYXGVNENMLTEVPSFSFFYDVPXNRLQLHEGIFILFFPSHVFIKXPIXKAFSNLRPNCAMILLEANDFLIIFKCTTHYHLCNRLHSKTKHMLAEGHVLGLWVGEPFI

SEQ ID NO: 42769 - protein, 643 aa, Homo sapiens
  DOMAIN (271)..(289): E-CLASS P450 GROUP II SIGNATURE domain identified by eMATRIX, accession number PR00464D, p-value=6.182e-12, raw score of 17.40
MLKDNKIIPVFLGKVCAMASAKLNTLLQTKVIENQDEACYILGKLEHVLSQSIKEQTEIYSFLIPLVRTLVSKIYELLFMNLHLPSLPFTNGSSSFFEDFQEYCNSNEWQVYIEKYIVPYMKQYEAHTFYDGHENMALYWKDCYEALMVNMHKRDREGGESKLKFQELFVEPFNRKARQENLRYNNMLKQLSSQQLATLRRWKAIQLYLTCERGPWAKRKQNPIHWKLANVENYSRMRLKLVPNYNFKTHEEASALRDNLVCTWAICFLTTSEEVQKKLYEEINQVFGNGPVTPEKIEQLRYCQHVLCETVRTAKLTPVSAQLQDIEGKIDRFIIPREGIFLSDYFDTEIFNLSVSADPFETMLKSLLRYQSGGGSVSENHMRKKLYENGVTDSLKSNFALLLKVLQILQFQPDAAHQISQQVGWQDTLVRLFLKAKFENGNTLHKHSRAVLMKDNDKNMSTEDTKKNSDEKTDEEKITSFASANVSSDQWSLEDRHSLDSNTPLFPEDSSVGELSFKSENQEEFWHSNPSHLSLDLSGIDSCEMSDSGSQVPDSLPSTPSPVESTKSFSVHSDRESSITNDMGFSDDFSLLESQERCEEELLQLLTHILNYVMCKGLEKSDDDTWIERGQVFSALSKPGIIQ

SEQ ID NO: 42770 - protein, 120 aa, Homo sapiens
  DOMAIN (21)..(66): Pancreatic ribonuclease family proteins domain identified by eMATRIX, accession number BL00127B, p-value=3.455e-09, raw score of 26.57
EHLHVDYPQNDVPVPARYCNHMIIQRVIREPDHTCKKEHVFIHERPRKINGICISPKKVACQNLSAIFCFQSETKFKMTVCQLIEGTRYPACRYHYSPTEGFVLVTCDDLRPDSFLGYVK

SEQ ID NO: 42771 - protein, 34 aa, Homo sapiens
  misc_feature (1)...(34): Xaa = X or * as defined in Table 2
GVSLQSTSEEGRGMRQEXTEREIKVTCRSHYRLA

SEQ ID NO: 42772 - protein, 136 aa, Homo sapiens
QPPAENVFFVAHSYGGLAFVELMIQREADVKNKVTAVALTDSVHNVWHQEAGKTIREWMRENCCNWVSSSEPLDTSVESMLPDCPRVSAGTDRHELTSWKSFPSIFKFFTEASEAKTSSLKPAVARRSHRIKHEGE

SEQ ID NO: 42773 - protein, 269 aa, Homo sapiens
LQLLEIKDTLREVQNALESLSNGIKQAEERTSELEDKAFELTQCVKDRFESRMLIVTTHLNILHAKRCLRVFPREPTCDKRLPNPELTDKSSTGHTCNQVGLDSTGQSTMKWRICRQKCKVIGEMIQREADVKNKVTAVALTDSVHNVWHQEAGKTIREWMRELAHCDGNQLPGCKLPCGEAHMARNWYIRPKAREDLRSTNSHTELATECNFSFPVGFCSNKFGLNQKEIVHTFPSTYPFITKVFIDIYCVPGTVLEAGDIAVNKSSS

SEQ ID NO: 42774 - protein, 74 aa, Homo sapiens
RERKRPKKKGRKGEKEGWRREEGREGGGEGRERGRCCCSFLELSSWAYFTPQVSTETVPPPENQLVLLTVPMTL

SEQ ID NO: 42775 - protein, 170 aa, Homo sapiens
HRFSSFWKSSMARSDAIQLNTPKREDILLNMKMWSEYPPTPQFFDSLIQEEGENLSTKCEDSAWAFGCLRLEFESEHCVIFSCKRCHVSTETVPPPENQLVLLTVPMTLCFSYDNSYHALLELFVAFLSFQAPLKNRGALKDWQYTWKRFGDLRSYEDCGLDIVLLIISE

SEQ ID NO: 42776 - protein, 142 aa, Homo sapiens
MHLSRLSMSFLASPPLGACMMVSGHINSPYVSKNSLGHGCWNDSSFSICSLGFPLLLNFHEGAVLDQSLPKGTGPQPSLKGPGSGINLTMGENRIQLQTTSRANLKGSKNHNMGVGTGPQSYSGHFLPTTSCELYLAHCPKG

SEQ ID NO: 42777 - protein, 74 aa, Homo sapiens
WLERKPAPQSSWGHLKSPSSPHWSLGIHLALWNLILPGAPGVEHVTQTSTFGSPAMWLAMGRSSPQDLPSPHAR

SEQ ID NO: 42778 - protein, 515 aa, Homo sapiens
RQPPAAAESPAASPPRAPSSTSRPALRSAADMCAAQMPPLAHIFRGTFVHSTWTCPMEVLRDHLLGVSDSGKIVFLEEASQQEKLAKEWCFKPCEIRELSHHEFFMPGLVDTHIHASQYSFAGSSIDLPLLEWLTKYTFPAEHRFQNIDFAEEVYTRVVRRTLKNGTTTACYFATIHTDSSLLLADITDKFGQRAFVGKVCMDLNDTFPEYKETTEESIKETERFVSEMLQKNYSRVKPIVTPRFSLSCSETLMGELGNIAKTRDLHIQSHISENRDEVEAVKNLYPSYKNYTSVYDKNNLLTNKTVMAHGCYLSAEELNVFHERGASIAHCPNSNLSLSSGFLNVLEVLKHEVKIGLGTDVAGGYSYSMLDAIRRAVMVSNILLINKVNEKSLTLKEVFRLATLGGSQALGLDGEIGNFEVGKEFDAILINPKASDSPIDLFYGDFFGDISEAVIQKFLYLGDDRNIEEVYVGGKQVVPFSSSVHYLYLGPDFLHFEMLPLPNERNNSLTSLLT

SEQ ID NO: 42779 - protein, 309 aa, Homo sapiens
SKSKSESAVFLRCGSQPTDGLSWMPGTCLGWKRTAPQLQAFLWLVVAHRILAAGGRAVVPFEAMEDLLIASKMSSQPVVPGAAVQGSGDGHERAKVRSDPMLLWHDTSSKRIINELDTGIWIQDPNKLREFAGVTGHIRHLNSGAKVPICLWLFGATNGPDEKSDSNSRMFGLQRGLKRNHAGKMKERGHREIRVVTQAHIAPVTEMKKLTSGEVEVICTKIHLATLGLDGEIGNFEVGKEFDAILINPKASDSPIDLFYGDFFGDISEISPERQEPPISSFYRCGTEAQPQLSDLPKATQPVKDKART

SEQ ID NO: 42780 - protein, 121 aa, Homo sapiens
MIVSPPQPCGTFDMQRITLEELKHILYHAFRDHLTMKDIENIIINEEESLNETSGNCQTEFEGGSLRSACDWMCGFVLFAFSWLWLHGAVQRAYFGCPANLGRVRCVTLGKGWTFSVFPHL

SEQ ID NO: 42781 - protein, 117 aa, Homo sapiens
MIVSPPQPCGTFDMQRITLEELKHILYHAFRDHLTMKDIENIIINEEESLNETSGNCQTEFEGGISFLLLSLEQTVHSQKQNRQTCVRKSLICAFAMAFIISVMLIAANQILRSGME

SEQ ID NO: 42782 - protein, 61 aa, Homo sapiens
  misc_feature (1)...(61): Xaa = X or * as defined in Table 2
XRSRTLLLGENPEGDGPVDHPQEATVAEPDGHPEAPTQLEALWAVSPDIKDQQTMQKSLTW

SEQ ID NO: 42783 - protein, 626 aa, Homo sapiens
MTYKYQAGHMFLERRPKHVCRLGKHVRYTELQVDHMVLGPQRNAASNGWDVGARQPGVEEGRSRTLLLGENPEGDGPVDHPQEATVAEPDGHPEAPTQLEALWAVSPDIKDQQTMQKSLTWRWPSIHMTMWLSKNLEKHTCSKWNKHYLPVHVGITTPPVGTAWFSSLPHIQCPRYAHIPYTVKCLGITLFLGPWRLAGVQLSFRSRHMVVSGANIGPSTSQGDTKHLPVNRAPLSWVQTSSGATPGSAVPTIALCSYCCTHPEAENPAAAAKQGWEMPAGKKPGQGPQPLSASGERVKQLVVASQDGPHITGREEGAHQACIKMWLLKPPNIDPSVLAGLAGRLVQAQLGSRGEQLEASYHVLSMLNGPWRPLVNSHLGNAGSRPPAPVKPSDACSPGQKLTSSEEDVQKTAAGDSAAPVGLGKPLPEMAYVPHPESQLVGALYMMGSLRLYLCLWLLLHFLTDLYDRTAGTCRNPRDSPWLLDLPSALVYSSTQLPLGNQGGPPRMRGHSRQQEQHVSGYGAVKGMHLWVVGHCYIAEGISGYTGTCSEQLPQASEQNWAAEGPCGDSGSPSTQIRVAFESSCCTCGPNLNTCRQLQTWGTMPVQQENVTKCLLHDRGGPEELS

SEQ ID NO: 42784 - protein, 72 aa, Homo sapiens
LWAFVLSSGHAGAAPLVPPALPAAGAQAAVSRGGGAPRQKGAPHRVPSGYRRGPPGSLPAAVRHLDWPFSPP

SEQ ID NO: 42785 - protein, 1186 aa, Homo sapiens
  DOMAIN (209)..(253): Osteopontin proteins domain identified by eMATRIX, accession number BL00884B, p-value=8.065e-09, raw score of 12.47
MPLVLLMEWPEATNFACLIAGYCRLLLDSRKMVFSRPASQPLPPPMIKADYMHSAHRPVTGGHLGKKESSYVGSVGTSPRKSSRCTPPPADSELVSFCYLHMREQRKEQESRTDVNENLIFFEETRPRTKSDPTSKSSGQGYEVVPDDFDAASLDHEPCASRARSYTLDNSLGAEALNFYCDSCKAKLQEQLGPRKGGKPGSSRDNIVDLMSLPPPGSEEEEEEEDETTSLLPAIAAPPPGFRDNSSDEDDPKRRAVQSQEQGRHLRGLLYDEIPVTLIDSVQTRTVRDHAQELDDALVSTLQALEALAASEDGPHPPPPQTAGLIVLATITPESSLDSGHETNSSELTDMSEMMSAMKQHQNTTYFLAQHLNKDSLLARKDLPFRIQSCAAQAVLTAPYSLGRPDPNPSLQPIATGQSPGPPGARRKLPQSEGQVQGERTYSLAVHPALSPQLSEQKNLSLLSPVPEDKGPGHTRAGLEMSLRAATSSLSEEQVSELRDNLPKEVRLSPKLILDPKSSVTPAIISAALQQVVHNKSLVTAGGALGNPPSRGERRLEASMGRPEVSMMSSSASKNLKFKISPSAPETSWNSQHQLGAEVSSSPRAPTGSRADSLHLSQQEDSLPVQNFPPKSYLLRTSRESVGKQATGEVAGKGGPVGGKPTLQKQGTISSQGEKAQLESTPKRSKLEETSLVPRATYPMALQSPSCQSRSHSPSCQPHGHSPSSQSRGQSPSCQPRGQSPLRSQAASRQVSTMPSRKLETTLNGAHSTSEGPAKPKSSRGPFRLRNLFSATFPTRQKKETDERQAQLQKVKQYELEFLEELLKPPSQGELPGTEYLQPPAPGRCSCQLRSSPVQQGPGMSREQRRSCDCKRICRGGRPQATQTPVPSLRGRERDRVLPSQRQPEAGPGVSLSSPINVQRIRSTSLESRECRSDPESGVSCLTTCASGGECLGAPNYRKLMRRYSISELDQGDRASLTSDVYPHPPLGMLPREAKEVEASLPIALGPKSRSLESPTLGDPSYVQVAPETKGPRQMAVFSLPEEVYRKPAELDEDSESSKCCSIRYCFYYRKCDMADDASDGKDELSYSIHHEDPAWHEAGRAGTYLEVELLNRKGDEETSNNCFFRFTHSIITYLDFGLSDIALPPNLNAQYPTLYDTIHSSSLPPQGLPLQEASERVMITYSLPT

SEQ ID NO: 42786 - protein, 158 aa, Homo sapiens
  misc_feature (1)...(158): Xaa = X or * as defined in Table 2
HNSLKSDENKENSFSADHVTTAVEKSKESQVTADDLEEEKAKAELIMDDDRTVDPLLSKSQSILISTSATASSKKTIEDRNIKNKKSTNNRASSASARLMTSEFLKKSSSKRRTPSTTTSSHYLGTLKVLDQKPFTETEAXEPDRADNIRGSCLFRSG

SEQ ID NO: 42787 - protein, 349 aa, Homo sapiens
MEEKDGLEDKETALSEELELHSAPSSLPTPNGIQLEAEKKAFSENLDPEINSSKESNSELSDFKPMLPQNKFQKNGHNETNRIKTFHSKDSGLAARWTLVELKVGDPIPKCDPNEEITENHNSLKSDENKENSFSADHVTTAVEKSKESQVTADDLEEEKAKAELIMDDDRTVDPLLSKSQSILISTSATASSKKTIEDRNIKNKKSTNNRASSASASHVKELVWRLTAASGRDTDRGQEKAVGFIEQSESTKIPQPGPERVARVRLYDCLLNSLSNVPNIAIECLIEDSMAALIRAGCSPTRGNACREPVLLSMADSPRGGQGTRVAASSVTDKLINNLGDFNDLEGS

SEQ ID NO: 42788 - protein, 351 aa, Homo sapiens
  DOMAIN (160)..(213): Wnt-1 family proteins domain identified by eMATRIX, accession number BL00246D, p-value=1.000e-40, raw score of 23.97
MFLSKPSVYICLFTCVLQLSHSWSVNNFLMTGPKAYLIYSSSVAAGAQSGIEECKYQFAWDRWNCPERALQLSSHGGLRSANRETAFVHAISSAGVMYTLTRNCSLGDFDNCGCDDSRNGQLGGQGWLWGGCSDNVGFGEAISKQFVDALETGQDARAAMNLHNNEAGRKAVKGTMKRTCKCHGVSGSCTTQTCWLQLPEFREVGAHLKEKYHAALKVDLLQGAGNSAAARGAIADTFRSISTRELVHLEDSPDYCLENKTLGLLGTEGRECLRRGRALGRWELRSCRRLCGDCGLAVEERRAETVSSCNCKFHWCCAVRCEQCRRRVTKYFCSRAERPRGGAAHKPGRKP

SEQ ID NO: 42789 - protein, 133 aa, Homo sapiens
HLQNFWGMILKAFKRYKESIRWLEDEKALLEMTEEVDYDVDSYATQLEAILEQKIDILTELRENETLVPKTTKTNKTHKDCGARGGANQKTTEGKAIHSEKRAPNKSATYTAKEEHNKTGQERREPEKYRESE

SEQ ID NO: 42790 - protein, 63 aa, Homo sapiens
YVMGRNDGGYLMIDSKTAEIKFVKNMNRDSTFIVNKTITAEVLAIDRYSGKNCLLISWSYICG

SEQ ID NO: 42791 - protein, 143 aa, Homo sapiens
  DOMAIN (16)..(64): Cadherins extracellular repeat proteins domain proteins domain identified by eMATRIX, accession number BL00232B, p-value= 7.429e-16, raw score of 32.79
ITCRALNAQGLDVEKPLILTVKILDINDNPPVFSQQIFMGEIEENSASKVCTNTYARGTAVEGTSGMEMTTKLGAATESGGAAGFATGTVSGAASGFGAATGVGICSSGQSGTMRTRHSTGGTNKDYADGAISMNFLDSYFSQ

SEQ ID NO: 42792 - protein, 167 aa, Homo sapiens
  DOMAIN (47)..(62): Cadherins extracellular repeat proteins domain proteins domain identified by eMATRIX, accession number BL00232D, p-value= 4.938e-09, raw score of 16.25
KAFACAEEDDGQEANDCLLIYDNEGADATGSPVGSVGCCSFIADDLDDSFLDSLGPKFKKLAEISLGVDGEGKEVQPPSKDSGYGIESCGHPIEVQQTGFVKCQTLSGSQGASALSTSGSVQPAVSIPDPLQHGFDPLLTQNVIVTERVICPISSVPGNLAGPTQLR

SEQ ID NO: 42793 - protein, 274 aa, Homo sapiens
  DOMAIN (118)..(166): Cadherins extracellular repeat proteins domain proteins domain identified by eMATRIX, accession number BL00232B, p-value= 8.147e-34, raw score of 32.79
  misc_feature (1)...(274): Xaa = X or * as defined in Table 2
GTTKWQTVRRQKREWIKFAAACREGEDNSKRNPIAKXSDLQNSLLPALYXKHIRSDCESNQKITYRISGVGIDRPPYGVFTINPRTGEINITSVVDREITPLFLIYCRALNSRGEDLERPLELRVKVMDINDNAPVFSQSVYTASIEENSDANTLVVKLCATDADEENHLNSKIAYKIVSQEPSGAPMFILNRYTGEVCTMSSFLDREQHSMYNLVVRGSDRDGAADGLSSECDCRIKVLDVNDNFPTFRENFKQNSSRFSNSLLSSFDQWRKL

SEQ ID NO: 42794 - protein, 1014 aa, Homo sapiens
  DOMAIN (155)..(203): Cadherins extracellular repeat proteins domain proteins domain identified by eMATRIX, accession number BL00232B, p-value= 4.706e-34, raw score of 32.79
KQRLTWTFSPGKSETMMGLFPRTTGALAIFVVVILVHGELRIETKGQYDEEEMTMQQAKRRQKREWVKFAKPCREGEDNSKRNPIAKITSDYQATQKITYRISGVGIDQPPFGIFVVDKNTGDINITAIVDREETPSFLITCRALNAQGLDVEKPLILTVKILDINDNPPVFSQQIFMGEIEENSASNSLVMILNATDADEPNHLNSKIAFKIVSQEPAGTPMFLLSRNTGEVRTLTNSLDREQASSYRLVVSGADKDGEGLSTQCECNIKVKDVNDNFPMFRDSQYSARIEENILSSELLRFQVTDLDEEYTDNWLAVYFFTSGNEGNWFEIQTDPRTNEGILKVVKALDYEQLQSVKLSIAVKNKAEFHQSVISRYRVQSTPVTIQVINVREGIAFRPASKTFTVQKGISSKKLVDYILGTYQAIDEDTNKAASNVKYVMGRNDGGYLMIDSKTAEIKFVKNMNRDSTFIVNKTITAEVLAIDEYTGKTSTGTVYVRVPDFNDNCPTAVLEKDAVCSSSPSVVVSARTLNNRYTGPYTFALEDQPVKLPAVWSITTLNATSALLRAQEQIPPGVYHISLVLTDSQNNRCEMPRSLTLEVCQCDNRGICGTSYPTTSPGTRYGRPHSGRLGPAAIGLLLLGLLLLLLAPLLLLTCDCGAGSTGGVTGGFIPVPDGSEGTIHQWGIEGAHPEDKEITNICVPPVTANGADFMESSEVCTNTYARGTAVEGTSGMEMTTKLGAATESGGAAGFATGTVSGAASGFGAATGVGICSSGQSGTMRTRHSTGGTNKDYADGAISMNFLDSYFSQKAFACAEEDDGQEANDCLLIYDNEGADATGSPVGSVGCCSFIADDLDDSFLDSLGPKFKKLAEISLGVDGEGKEVQPPSKDSGYGIESCGHPIEVQQTGFVKCQTLSGSQGASALSASGSVQPAVSIPDPLQHGNYLVTETYSASGSLVQPSTAGFDPLLTQNVIVTERVICPISSVPGNLAGPTQLRGSHTMLCTEDPCSRLI

SEQ ID NO: 42795 - protein, 1191 aa, Homo sapiens
  DOMAIN (358)..(376): CADHERIN SIGNATURE domain identified by eMATRIX, accession number PR00205B, p-value=4.529e-11, raw score of 11.39
  misc_feature (1)...(1191): Xaa = X or * as defined in Table 2
MKQVQGMMLDYEQAPNIQLSIGVKNQADFHYSVASQFQMHPTPVRIQVVDVREGPAFHPSTMAFSVREGIKGSSLLNYVLGTYTAIDLDTGNPATDVRYIIGHDAGSWLKIDSRTGEIQFSREFDKKSKYIINGIYTAEILAIDDGSGKTATGTICIEVPDINDYCPNIFPERRTICIDSPSVLISVNEHSYGSPFTFCVVDEPPGIADMWDVRSTNDYEQLQSVKLSIAVKNKAEFHQSVISRYRVQSTPVTIQVINVREGIAFRPASKTFTVQKGISSKKLVDYILGTYQAIDEDTNKAASNVKYVMGRNDGGYLMIDSKTAEIKFVKNMNRDSTFIVNKTITAEVLAIDEYTGKTSTGTVYVRVPDFNDNCPTAVLEKDAVCSSSPSVVVSARTLNNRYTGPYTFALEDQPVKLPAVWSITTLNATSALLRAQEQIPPGVYHISLVLTDSQNNRCEMPRSLTLEVCQCDNRGICGTSYPTTSPGTRYGRPHSGRLGPAAIGLLLLGLLLLLLAPLLLLTCDCGAGSTGGVTGGFIPVPDGSEGTIHQWGIEGAHPEDKEITNICVPPVTANGADFMESSEVCTNTYARGTAVEGTSGMEMTTKLGAATESGGAAGFATGTVSGAASGFGAATGVGICSSGQSGTMRTRHSTGGTNKDYADGAISMNFLDSYFSQKAFACAEEDDGQEANDCLLIYDNEGADATGSPVGSVGCCSFIADDLDDSFLDSLGPKFKKLAEISLGVDGEGKEVQPPSKDSGYGIESCGHPIEVQQTGFVKCQTLSGSQGASALSTSGSVQPAVSIPDPLQHGSQVLEQLEKCRQPVLPQMGVLLQQGFQCAHLKWEKLDPVQQPAYTNEGVAASQRLTGTLCQLHLNRKEHCKQSSDWLTSKRKELLINKLVLHMRMTSKLTTYFKRVKEFDIENGTTKWQTVRRQKREWIKFAAACREGEDNSKRNPIAKIRSDCESNQKITYRISGVGIDRPPYGVFTINPRTGEINITSVVDREITPLFLIYCRALNSRGEDLERPLELRVKVMDINDNAPVFSQSVYTASIEENSDANTLVVKLCATDADEENHLNSKIAYKIVSQEPSGAPMFILNRYTGEVCTMSSFLDREQHSMYNLVVRGSDRDGAADGLSSECDCRIKVLDVNDNFPTLEKTSYSASIEENCLSSELIRLQAIDLDEEGTDNX

SEQ ID NO: 42796 - protein, 198 aa, Homo sapiens
  DOMAIN (183)..(196): SH3 DOMAIN SIGNATURE domain identified by eMATRIX, accession number PR00452D, p-value=3.769e-09, raw score of 17.02
MFSLTDRLDVDSLFSNIESVHQISAKLLSLLEEATTDVEPAMQVIGQCGGLGDTQMQQLEDQNANVRSNRKAVRFGENDNGEMVFSGSRIHQSSQERKNQQEAELYGSSAPQGALGCNLLPAHSSTHQEVAVIFMDKIFYAVHAFQARSDHELSLQEYQRVHILRFCDLSGNKEWWLAEAQGQKGYVPANYLGKMTYA

SEQ ID NO: 42797 - protein, 204 aa, Homo sapiens
  DOMAIN (106)..(134): Granins proteins domain identified by eMATRIX, accession number BL00422C, p-value=7.750e-11, raw score of 16.18
MTTKDCCKGYGGCQPGTIVKHQYKYVCHNPTLPDLIGVARTAHGPHSPRTVQAETLGVLRHWTSAGVAVLSASVRRKKKKEEEEKEKEKKKKKKTEEEEEEEEEEEEERRKKEKKKERKKEEEEEKEERTVHEAAFAHRLAVRSLWSKKPARGRSAEAVFAVSATLASWSILSYGLRGLTIEAFTCSFVKDQRSVCISCPRDGS

SEQ ID NO: 42798 - protein, 110 aa, Homo sapiens
  DOMAIN (15)..(30): SH2 DOMAIN SIGNATURE domain identified by eMATRIX, accession number PR00401A, p-value=3.348e-13, raw score of 14.00
MQLARQVSRLESGHWYHGAISRTDAENLLRLCKEASYLVRNSETSKNDFSLSLNAASQRQQCGYHKGHDKHRLKKEKKATFAPSFLMNIKGNKTSVVKNSILEQGQQTVN

SEQ ID NO: 42799 - protein, 244 aa, Homo sapiens
  DOMAIN (1)..(16): SH2 DOMAIN SIGNATURE domain identified by eMATRIX, accession number PR00401A, p-value=3.348e-13, raw score of 14.00
WYHGAISRTDAENLLRLCKEASYLVRNSETSKNDFSLSLKHLEAALAVGRAQYGRFVTYWRPMPARLHVLFDVVSGGNPRLPRRVPSQSASHLETLCLNSTNAGDVVLALSKEPLGPPEPDGVPTTPGTLVTSFQPLLFTEAHREKFQRSCLHQTVQQFKRFIENYRRHIGCVAVFYAIAGGLFLERAYYYAFAAHHTGITDTTRVGIILSRGTASQHLFHVLLHLAHHVPQPHHLPARNLPQP

SEQ ID NO: 42800 - protein, 131 aa, Homo sapiens
HCLKSTLASPRPSPGTEAGVSFSSHGRPGPSPPTSGPHSQGAGNALPACSPDGETGSGSSETAPCQAQSQPELQERSSGAVRTGCPGIHVRVAIALRTIALSWVCPGPACNCPTNGKIIDEPGDWSSRSRR

SEQ ID NO: 42801 - protein, 420 aa, Homo sapiens
  DOMAIN (68)..(92): E-CLASS P450 GROUP IV SIGNATURE domain identified by eMATRIX, accession number PR00465B, p-value=3.189e-20, raw score of 16.84
  misc_feature (1)...(420): Xaa = X or * as defined in Table 2
GQAASPASPASPASPAMAWAALLGLLVALLLLLLLSRRRTRRPGEPPLDLGSIPWLGYALDFGKDAASFLTRMKEKHGDIFTILVGGRYVTVLLDPHSYDAVVWEPRTRLDFHAYAIFLMERIFDVQLPHYSPSDEKARMKLTLLHRELQALTEAMYTNLHAVLLGDATEAGSGWHEMGLLDFCLQLPAQSRLPDSLRNXGAATHPXKPGPGPRPLSXCLPHLSPARPAAPQTGPWLPVSGGQGPHVQCQKSPVEAAIPSQAGQAGPPEQMAGELPAAPGGDGCVRGDAGTGPGAAAVGHTGEYGSRCLLAPALPSQESXSPGCCPRRAREYPLASGAACLADDHSPTEGSRQHTCDLIACXVRASGLQLPPSSPARLGGPGHAHGRRERIQPATWXPPPPLPLPEPPERPRNLHRPRGI

SEQ ID NO: 42802 - protein, 154 aa, Homo sapiens
PTRFHRVHGANIRVDPSGTRATRVESFAHGVCFSREPLAPGQVFLVEIEEKELGWCGHLRLGLTALDPASLAPVPEFSLPDLVNLGHTWVFAITRHHNRVPREGRPEAEAAAPSRPPTLLVEPYLRIEQFRIPRDSPGGPQPARALQPSLGPAL

SEQ ID NO: 42803 - protein, 378 aa, Homo sapiens
DTYCRGDQLHILLVVRDHLGRRKQYGGDFLRARRSSPALMAGASGKVTDFNNGTYLVSFTLFWEGQVSLSLLLIHPSEGVSALWSARNQGYDRVIFTGQFVNGTSQVHSECGLILNTNAELCQYLDNRDQESFYWVRPQHMRCAALTHMYSKNKKVSYLSKQEKSLFERSNVGVEIMEKFNTISVSKCNTLKSVDLHESGKLQHQLAVDLDRNINIQWQKYCYPLIGSMTYSVKEMEYLTRAIDRTGGEKNTVIVISLGQHFRPFPIDVFIRRALNVHKAIQHLLLRSPDTMVIIKTENIREMYNDAERFSDFHGYIQYLIIKDIFQDLSDIRHVLKYNASKNAADLDLFFSSNLDDFYNFSELHKGRSKSPLMQITQ

SEQ ID NO: 42804 - protein, 403 aa, Homo sapiens
WTPPGAPGAKGPRQGGCCSGLLRPPRVSGKTCGARPPWPWRSLSRIPKREGLGEEDTAVAGHELLLPNERSFQNAAKSNNLDLMEKLFEKKVNINVVNNMNRTALHFAVGRNHLSAVDFLLKHKARVDVADKTRMRELLLEIFLTVPRAQFHDLHCLESKLEDCEMRDTLRHMQAVYRETNILTHTVTCVRLGALSYLKTMACRPQQNILSDKNMDSVLTSYMNLGKLHNLSVLQFLYLKNEDKNSTYVNLILSERIPTLIFQIQKPKYREVMQLAQMLVVLALTLFSFTVVVLNSIRAMVPSERIFKAKDLLSRKIHIHIYDKNIAYESAVPIMPVIPQTGSPTYTSSAALPQCLTPGNTIHSVAIVNGSSWSSALRSQCDHRLHTCSFTLVPQRHPHTQLI

SEQ ID NO: 42805 - protein, 135 aa, Homo sapiens
HEMLLASEIKHLPRRLLIGQERETQTSELKIKRRGNEEAPSPPPSSAYERGTKRPDDRYDTPTSKKKVRIKDRNKLSTEERRKLFEQEVAQREAQKQQQQMQNLGMTSPLPYDSLGYNAPHHPFAGYPPGYPMQA

SEQ ID NO: 42806 - protein, 235 aa, Homo sapiens
SAWWLQGSHLIYPLWSHLFISRPDTPPSKPVAFEEFKNEQGSEINRIFKENKSILNERRKRASETTQHINAIKREIDVTKEALNFQKSLREKQGGQIEVGLLVGTMKNQVREQECGCQRAKGLTFSKAIPYAESLTPVLGATFCGPYFLSRYDTPTSKKKVRIKDRNKLSTEERRKLFEQEVAQREAQKQQQQMQNLGMTSPLPYDSLGYNAPHHPFAGYPPGYPMHRLCGSQQP

SEQ ID NO: 42807 - protein, 90 aa, Homo sapiens
MTSDCQLGTRQYLCRSWQKLYFPARVCRYIRIVGTHNTVNKIFHIVAFECMFTNKTFTLEKGLIGYYFGIVTLKVDTVEHLGEKRKRPHE

SEQ ID NO: 42808 - protein, 442 aa, Homo sapiens
LDWVRVIDHSQYLCRSWQKLYFPARVCRYIRIVGTHNTVNKIFHIVAFECMFTNKTFTLEKGLIVPMENVATIADCASVIEGVSRSRNALLNGDTKNYDWDSGYTCHQLGSGAIVVQLAQPYMIGSIRVLLWDCDDRSYSYYVEVSTNQQQWTMVADRTKVSCKSWQSVTFERQPASFIRIVGTHNTANESHCVKRVPPRNLWFKRGSIGNDGSKCNSLGGKSEDAVTAALFILNPTGYHERPSTEDGVFIDLFILVQEPEQVFHCVHFECPEQQSSQKEENSEESGTGDTSLAAQAPTHAPPTGSTNKGGSGPGVTWWARATAGNGLLPEQGSLLTAPTSAPFQGGADLAAKADTEQVFSQGQKGAALFFSIYPNQAGLKGEKMGLQSSSSPPLTPYLSNLAQAQGTGGSHRQACVGIQKWHANTQAEEKAIGPLLPGGTL

SEQ ID NO: 42809 - protein, 956 aa, Homo sapiens [sequence omitted]

SEQ ID NO: 42810 - protein, 418 aa, Homo sapiens
  DOMAIN (57)..(90): Bacterial extracellular solute-binding proteins family 3 sig. domain identified by eMATRIX, accession number BL01039B, p-value= 8.138e-10, raw score of 20.00
MLWSNSAMQTAAAQRCFLSPSSTPDGGHRVVLRGTEGCSSLPAQSLPHPREWHGPCCCSVSPAEKADLAVAGLTITAEREKVIDFSKPFMTLGISILYRVHMKSLPFLLSAELALSAERHTDLPNTLVIFSAHDSAAMVCSRTEPVPRGCPTGSRQPRGILALQCGGQKRRGILTKQSGQIAIFPRDLGMDNVRCDALNLIVKNCLYNGASLGMENIGGIFVVLICGLIVAIFMAMLEFLWTLRHSEATECLGQKCGHILTPKKLGEFQVPCKFDANALSGSVAWLMFVAFISHARLMSQEKSSGHAKPSGFDRNGGSCTAPINLQEAKEKRSILLTAIIHLSKVGTTHQVCTDCAPDEILPVSFLGSSLPVFSYLFSARHRAAHFPSGSHLPWCCLDGAQCTSVAVKAGAVTKIQVF

SEQ ID NO: 42811 - protein, 192 aa, Homo sapiens
MGSGHCAQSDMLAATAGQAAPAGYPNVCSALAESRAFMGFRVEEVSADWPMGGHRQAQKRYHKFPLQSVGVAVWPEALPTGAYPAHSAPAAPAGAPTPMPCQWSGNTPASLSQPKLNSERPEDKAADPVPVPQDDHTSSPVVDPNQNEMAEMPGREFRIGMIRKHTETQEEVETQPRQNSKTTQQLKDDITI

SEQ ID NO: 42812 - protein, 375 aa, Homo sapiens [sequence omitted]

SEQ ID NO: 42813 - protein, 333 aa, Homo sapiens
MLSIRNSPWKASAGSVLVTTCLDPHFYVEEGYDVPFRENSRSSTQAQALGLLAVSSVLVNPQGRSSETVAPNLFWHQGTGFVEDNFSTDVGVGGVVSGGNRSTSDHQALDSHKECAACLPGPKAQSDKCVPDRDPRWEVLDVTKKVVASPRIISLAKPKVRKGLNEGYDRRATGPSESERQPQSKQPTLLLRAHGTVGVGTTATVKAADAPPEGPRDRRSRNDSHSQTSRRFPPLLRGHGTVGVGTTATVKPADAPAEGPRDRRSRNDSHRATGPSESERQPQSNQPTLLLRGHGTVGVGTTATVKPADAPAEGPRDRRSRNDSHSQTSRRSC

SEQ ID NO: 42814 - protein, 39 aa, Homo sapiens
  misc_feature (1)...(39): Xaa = X or * as defined in Table 2
NHLSVAGNGSSPCGLXAGALGLLLWLLASSGHRVLSGMI

SEQ ID NO: 42815 - protein, 59 aa, Homo sapiens
LLLLIASIVAASKSDNQSGLVAGAVRMFWGAFRNEFLFKMLIFFLMGEEKGLVSGAFPS

SEQ ID NO: 42816 - protein, 92 aa, Homo sapiens
MQFKYHLCPLILFHKELLHYLIGTLLLLIASIEAASKSYNQSGLVAGAMASNMWSETAFRRENEQRPSPDVDTQYFTTRCAFTLAIVIQLLT

SEQ ID NO: 42817 - protein, 246 aa, Homo sapiens
MLELSDHEFKTTMTNTLRTLVEKVDNMQEQMGNVKQRGQKPSNIGNFVQLGLICKPQVTITLSSLLYGYPADERDGSALLFSCFPASSEGASRWHNLTNFREDEVTLLIAFICVRSSLWTNYSAYSYFEVVTICDLIMILAFYLVHLFRFYRVLTCISWPLSELLHYLIGTLLLLIASIVGSFQELTTRAGLVGRSDNWYKRSPGKETRGRSGCGLLPVLFTSKENGCRLQSPEIPEEATASSSTI

SEQ ID NO: 42818 - protein, 108 aa, Homo sapiens
WTNYSAYSYFEVVTICDLIMILAFYLVHLFRFYRVLTCISWPLSELLHYLIGTLLLLIASIVAASKSYNQSGLVAGAIFGFMATFLCMASIWLSYKISCVTQSTDAAV

SEQ ID NO: 42819 - protein, 187 aa, Homo sapiens
RPRWAAHCCSVPVPSRHPSSGPLLPPRFYPRYVLPLAFGEYFASVSAHVSIWKVPVSYAHTVKATMPIWVVLLSRIIMKEKQSTKVYLSLIPIISGVLLATVTELSFDMWGLVSALAATLCFSLQNIFSKKVFGHHQRTCMGFQGCAGSKLHVIPELPTLEKRPAAADICKVLGKRQSALPKTWCKQ

SEQ ID NO: 42820 - protein, 155 aa, Homo sapiens
  DOMAIN (93)..(126): Ribosomal protein L23 proteins domain identified by eMATRIX, accession number BL00050A, p-value=9.795e-18, raw score of 23.71
MALKAEKEAPATPKAKAKALKAKKAVLKGVHSHKKQKIYMSPTFQWPKTLRLQRQPKDPRKSTPRRNELDHYAVIKFLLTTEPAMKKIEDNNNMLVFIKDVKANKHQIKQAVKKLYNIDVAQFNTLIRPDGEKKAYVQPSPDYDALDVANKIGII

SEQ ID NO: 42821 - protein, 389 aa, Homo sapiens
MEVLLCRASLIAQCSLEHTLRNLYWLISTDPLAPDWWVKQVRGGEANVAEGGDGNGQKAVLTRDGYWVTGQIQHMYELLILFIEYPSQALYELLKCNHNIKEAIERYCCNGKASQEGMTAWTEEECRSFEHALMLFGKDFHLIQKNKVRTRTVAECVAFYYMWKKSERYDYFAQQTRFGKKRYNHHPGVTDYMDRLVDETEALGGTVNASALTSNRPEPIPDQQLNILNSFTASDLTALTNSVATVCDPTDVNCLDDSFPPLGNTPRGQVNHVPVVTEELLTLPSNGESDCFNLFETGFYHSELNPMNMCSEESERPAKRLKMGIAVPESFMNEVSVNNLGVDFENHTHHITSAKMAVSVADFGSLSANETNGFISAHALHQHAALHSE

SEQ ID NO: 42822 - protein, 45 aa, Homo sapiens
  misc_feature (1)...(45): Xaa = X or * as defined in Table 2
EVATATPTLSNHYPDQSAAINDQGXPLHQQKDHILQKAQMNISIF

SEQ ID NO: 42823 - protein, 249 aa, Homo sapiens
FRCVLISFWSHKLHLWYHEGRIVPSDRIVPPHGIVSSHGVALPQRILMRQFTLLEGLNKDGRFLIQLSGTAPWSSYFNSVAKFGVIHRIHSFFLSHNGHKAVAPLDLLSNVGGSCLCGDASSFTTPSRITMTSKSWLARSVAEMSYRWTALVNHVADDQRGHQKNVIALDWVINRNVQLVNRNHLPFRCSCFLDHLDAHRGTNDHAFPQVTHSEHEAQLAISDGNHSMAAENQSFCPSVSLSCFHENAA

SEQ ID NO: 42824 - protein, 655 aa, Homo sapiens
  DOMAIN (286)..(333): Inward rectifier potassium channel domain identified by eMATRIX, accession number PF01007A, p-value=1.000e-40, raw score of 17.16
MKLPEKGTGSILCCPAASTGDTQANRVWSGPPPNFSRLQLRGLTVKRKTNKQKAKASTSTKRMSTKKPHLQVTNIKYQRITIPHQQGNKTGRTENEFDESTEVGFRRWVITNSSELKEHVQTKCKEAKNLEKRDMDEAGNHHSQQTIAGTKNQTPHVLTHKWELDDENTWTQEGEHHTPGPVGGTRSPQFVPPAWAAPGPARQHGRARDLPAARRRVQGGPAAAPATRSLTMLARKSIIPEEYVLARIAAENLRKPRIRDRLPKARFIAKSGACNLAHKNIREQGRFLQDIFTTLVDLKWRHTLVIFTMSFLCSWLLFAIMWWLVAFAHGDIYAYMEKSGMEKSGLESTVCVTNVRSFTSAFLFSIEVQVTIGFGGRMMTEECPLAITVLILQNIVGLIINAVMLGCIFMKTAQAHRRAETLIFSRHAVIAVRNGKLCFMFRVGDLRKSMIISASVRIQVVKKTTTPEGEVVPIHQLDIPVDNPIESNNIFLVAPLIICHVIDKRSPLYDISATDLANQDLEVIVILEGVVETTGITTQARTSYIAEEIQWGHRFVSIVTEEEGVYSVDYSKFGNTVKVAAPRCSARELDEKPSILIQTLQKSELSHQNSLRKRNSMRRNNSMRRNNSIRRNNSSLMVPKVQFMTPEGNQNTSES

SEQ ID NO: 42825 - protein, 54 aa, Homo sapiens
MICAIIKFEFSPCRIYVGRKSLNQSSKGDHILQVMLSFDSLGGWGSGEEPFTVI

SEQ ID NO: 42826 - protein, 202 aa, Homo sapiens
  misc_feature (1)...(202): Xaa = X or * as defined in Table 2
GRHLTTNHTAAVVVFPFRPLCSSFFRYSGFRGVAGATASGRGQGPAGXDNCQRAWRGAFYKFQATLSAGAGTRAEEGSDGDGEAAEPGAGTAREPARLRGYRSRRFVLDGRRCCLCYFKNPHDPLPLGHLDIAEACFSYQRADEAAEQPAHFQVRSAGAATVLEVGTRALRGVHLLRAHRGIWAQAWSPVSFLQAVLPAWLL

SEQ ID NO: 42827 - protein, 452 aa, Homo sapiens
MGSTCGCSFYSEKTLPQNINNYCSMTELLRYFNILVLTYQSPSDSVTDAKFTFHKAIADIDSESCDGAGQSKFKTIWKGFTILDAIKNICDSREEVRILTLTGVGKKFILILMNEFEGFNTSVEGVTAHVVEIARELELQGHSEDVTELLQSHDKTWMNEELLLLDKQPKWFLEMESTLGEDAVNTVEMTTKNSEDYINLVDKAVAGFEKISSSFERSSTDTQPPICPSGLGGPWSRAPAWESEGPARGPPACARRSSRRARYPESLIFHQETSANLRLTRCQPPQEQLCPASGAGDEENFMIRVKNSNPGSATSPSCPGPWTPQESRGTERGRRRTREAGSTPTDEDPNSEAFPRKPSQPATSTSDSRRGRERGSAATARLGTGGLMHPRSSLSTDGPALTVPEKARAEGSERENNYGCGVVGGEMTTLVLDNGAYNAKIGYSHENVSVYS

SEQ ID NO: 42828 - protein, 482 aa, Homo sapiens
  DOMAIN (79)..(121): Chloramphenicol acetyltransferase proteins domain identified by eMATRIX, accession number BL00100C, p-value=1.000e-39, raw score of 23.60
MEKKITGYTTVDISQWHRKEHFEAFQSVAQCTYNQTVQLDITAFLKTVKKNKHKFYPAFIHILARLMNAHPEFRMAMKDGELVIWDSVHPCYTVFHEQTETFSSLWSEYHDDFRQFLHIYSQDVACYGENLAYFPKGFIENMFFVSANPWVSFTSFDLNVANMDNFFAPVFTMGKYYTQGDKVLMPLAIQVHHAVCDGFHVGRMLNELQQYCDEWQGGAHWQYRSDQNKVPTSIGACITGAITMALLENLVAGNVYIVKISASNEVGEGPFSNSVELAVLPKETSESNQRPKRLDSADAKVTVPEMPESLRTPRDIWKSSASKTAQNGTQQLPRTSASLASGNEVGKNLEGAVGNEESLMPMIMPNSFIDAKAPCMKSNNALIVILGTVTLDAVGIGLVMPVLPGLLRDIVHSDSIASHYGVLLALYALMQFLCAPVLGALSDRFGRRPVLLASLLGATIDYAIMATTPVLWIYPLVNSPSC

SEQ ID NO: 42829 - protein, 815 aa, Homo sapiens
  DOMAIN (255)..(274): FIBRONECTIN TYPE III REPEAT SIGNATURE domain identified by eMATRIX, accession number PR00014C, p-value=4.600e-10, raw score of 15.44
FFLLLCCWARLELAPDSMSEAMTQVSEQAVPLASSLNNYMGAGMMLNFVSRRCWRDIIRVRGFCFPSCFGCSSERVSAAFIASFQVLQCWQHQCQALQCRQHPGHLPLALPSEGSTTAASLASSEPQLCTHRVSKIFPMLAPGLGRNKGLSLYLSCSDPQWKDPRRKYHVRLLAYNNIDDGYQADQTVSTPGCVSVRDRMVPPPPPPHHLYAKANTSSSIFLHWRRPAFTAAQIINYTIRCNPVGLQNASLVLYLQTSETHMLVQGLEPNTKYEFAVRLHVDQLSSPWSPVVYHSTLPEAPAGPPVGVKVTLIEDDTALVSWKPPDGPETVVTRYTILYASRKAWIAGEWQVLHREVDKQQGMVHRFRSKIKMFADKHPSKCTEAMKSSSMLVKHHSISAFEVQPISTEVHEGGVARFACKISSHPPAVITWEFNRTTLPMTMDRITALPTGVLQIYDVSQRDSGNYRCIAATVAHRRKSMEASLTVIPAKESKSFHTPTIIAGPQNITTSLHQTVVLECMATGNPKPIISWSRLDHKSIDVFNTRVLGNGNLMISDVRLQHAGVYVCRATTPGTRNFTVAMATLTVLVKKDDRYIYFKCVYIDALNREIMEEVNTEQCREKAPGEMYGDVDRSSASPPSFVEWPESLTRPRAGTARFVCQAEGIPSPKMSWLKNGRKIHSNGRIKMYNSKLVINQIIPEDDAIYQCMAENSQGSILSRARLTVVMSEDRPSAPYNVHAETMSSSAILLAWERPLYNSDKVIAYSVHYMKAEGPQSLLPEIVNSLSSENMSYLSVLLTARTVPCIQQALDKGLLE

SEQ ID NO: 42830 - protein, 1109 aa, Homo sapiens
  DOMAIN (732)..(751): FIBRONECTIN TYPE III REPEAT SIGNATURE domain identified by eMATRIX, accession number PR00014C, p-value=4.600e-10, raw score of 15.44
MAEVTGTKRGRTKETLYTKHHLAQRYSGETEERIHIVLRFLARKVDKQQGMVHRFRSKIKMFADKHPSKCTEAMKSSSMLVKHHSISAFEVQPISTEVHEGGVARFACKISSHPPAVITWEFNRTTLPMTMDRITALPTGVLQIYDVSQRDSGNYRCIAATVAHRRKSMEASLTVIPAKESKSFHTPTIIAGPQNITTSLHQTVVLECMATGNPKPIISWSRLDHKSIDVFNTRVLGNGNLMISDVRLQHAGVYVCRATTPGTRNFTVAMATLTVLESLTRPRAGTARFVCQAEGIPSPKMSWLKNGRKIHSNGRIKMYNSKLVINQIIPEDDAIYQCMAENSQGSILSRARLTVVMSEDRPSAPYNVHAETMSSSAILLAWERPLYNSDKVIAYSVHYMKAEGLNNEEYQVVIGNDTTHYIIDDLEPASNYTFYIVAYMPMGASQMSDHVTQNTLEDAKYRRGQVVLYRLSFRLSTENSIQVLELPGTTHEYLLEGLKPDSVYLVRITAATRVGLGESSVWTSHRTPKATSVKAPKSPELHLEPLNCTTISVRWQQDVEDTAAIQGYKLYYKEEGQQENGPIFLDTKDLLYTLSGLAFFLLLCCWARLELAPDSMSEAMTQVSEQAVPLASSLNNYMGDPRRKYHVRLLAYNNIDDGYQADQTVSTPGCVSVRDRMVPPPPPPHHLYAKANTSSSIFLHWRRPAFTAAQIINYTIRCNPVGLQNASLVLYLQTSETHMLVQGLEPNTKYEFAVRLHVDQLSSPWSPVVYHSTLPEAPAGPPVGVKVTLIEDDTALVSWKPPDGPETVVTRYTILYASRKAWIAGEWQVLHREGAITMALLENLVAGNVYIVKISASNEVGEGPFSNSVELAVLPKETSESNQRPKRLDSADAKVYSGYYHLDQKSMTGIAVGVGIALTCILICVLILIYRSKARKSSASKTAQNGTQQLPRTSASLASGNEVGKNLEGAVGNEESLMPMIMPNSFIDAKGGTDLIINSYGPIIKNNSKKKWFFFQDSKKIQVEQPQRRFTPAVCFYQPGTTVLISDEDSPSSPGQTTSFSRPFGVAADTEHSANSEGSHETGDSGRFSHESNDEIHLSSVISTTPPNL

SEQ ID NO: 42831 - protein, 453 aa, Homo sapiens
MGMVEKWLQQVEQMMLASMREVIGLGIEAYVKVPRNHWVLQWPGQVVICVSSIFWTQEVSQALAENTLLDGNDFKEPYQEMKFFIPQLIMIKLEVSEPIIVFNPSFDGCWELIRDSFLEIIKNSNGIPKLKYIPLKFSFTAAAADRQCVKAAEPGEPSMHAAATAMAGTRAGTTFDELQCQEDMVCTRCGMIYMEPHQLGWKPLKDSYMDTLPSSLTKEHKELRYYYYLTNGIRKDMIAPEEGEVMVRISKLISNTLLTSPFLEPLMVVLVQEKENDYYCSLMKSIGPNLIYLPLRVYNLAFSDTSVDKVFLPFSSDKDTNILCAIDDIQMLLDDHVIKTQTMCGSPFIKPIEAECRKWEEKLIRIQDNLDAWLKCQATWLYLEPIFSSEDIIAQMPEEGRKFGIVDSYWKSLMSQAICADDLKAALSANLALPVVRCFSAATTTNHLYRKKE

SEQ ID NO: 42832 - protein, 224 aa, Homo sapiens
  DOMAIN (134)..(161): PMP-22 / EMP / MP20 family proteins domain identified by eMATRIX, accession number BL01221D, p-value=3.475e-09, raw score of 13.99
MLQAVRALMIVGIVLGAIGLLVSIFALKCIRIGSMEDSAKANMTLTSGIMFIVSGLCAIAGVSVFANMLVTNFWMSTANMYTGMGGMVQTVQTRVPDQLAVTHRNVCSGAWSGMDVESKSGDRKNRHSQVQYTFGAALFVGWVAGGLTLIGGVMMCIACRGLAPEETNYKAVSYHASGHSVAYKPGGFKASTGFGSNTKNKKIYDGGARTEDEVQSYPSKHDYV

SEQ ID NO: 42833 - protein, 427 aa, Homo sapiens
MGHDGLSEPEVPAWEGSPGVAVKVEEPRYKKDKQLNEKISLLRSDITKLEVDAIVNAGLCFLLCKMRVVKKPPVRLLGALGADARDVQMTVTQHLAGIGAQHLALVLKLVSSAPFWASPLSQRCRGTCTGSPCLILSCRLEGPAEPGLWAGEMAGPATSPGLAVQQTLQLEPVSDMGLALGSLLLGEAKRRGLRTSDPSQTQRVLGGSDEGGQEQPKRDHSKAVTTNQAFIEHLLHARPCSDGEHAANGTESPLPCGAHVLPAGSSPVLRKHWTQPQHLLQELMKRMNDCYRLHGSDSKPRSGEVPGGEGFSAGTWRTVGVSQGNGGEGAPDREGLFFTYTEKSTLPVAGKVPQMAPEGSQLAYPGIAEDRMTLAIPGCLSTLSPLTLGIYQSKEQHSFPLHPEGVPGVCVQLTELADGLDAGCERG

SEQ ID NO: 42834 - protein, 133 aa, Homo sapiens
MWPRGKGVRSQGCWELRLCLAGFIIDQAETQEHPSTARRENLRKFYKGKKYQPVDLQPKKTCAMSHCLNKHEENLKGKKQQWKEWLSPLRKEEGAPVPAEEGLPGCPGIQPRKAALPGNGLEQMSAYSIAPSW

SEQ ID NO: 42835 - protein, 133 aa, Homo sapiens; identical to SEQ ID NO: 42834

SEQ ID NO: 42836 - protein, 139 aa, Homo sapiens
  misc_feature (1)...(139): Xaa = X or * as defined in Table 2
PVSCATGEEEDNVLFPKGDDLPRXXPGKLWCEFHASSISQALGQHPRRSVLDTDQSHVPLVRRKTTCFSQRAMISPDDDPSQEAGALSRNNLLAPYSALTFMENGNCLLQLFQLGKLLVQASHLHGQLLVFVQKIIISM

SEQ ID NO: 42837 - protein, 329 aa, Homo sapiens
  DOMAIN (52)..(66): LEUCINE-RICH REPEAT SIGNATURE domain identified by eMATRIX, accession number PR00019A, p-value=2.333e-09, raw score of 11.19
MAEQWELDEEGIRRLGALTLEQPELVESLSLQGSYAGKIHSIGDAFRNFKNLRSLDLSRNLITSLKGIQYLCSLQDLNLYYNNIPSLVEVSRLQPLPFLKELDLRLNPVVRKDTDYRLFAVYTLQTLEKLDDRTVREGERKAAKLHFSQLGNSENFLLEVEKSSREKTMKNCVTDLYATTHFNSDPAVLVNVEQQLSTSLDDLTPAHGSVPNNAVLGNRTTPLRTLLLSPGTSEHRKIFTKRSLSPSKRGFKWKDNILANLNLKHGFQDANRQRGKCWLVCVCARNRSGKFEAKTGQSAGGKPHFVRKNSTVGGRCCHLNCEWATVTYL

SEQ ID NO: 42838 - protein, 41 aa, Homo sapiens
  misc_feature (1)...(41): Xaa = X or * as defined in Table 2
LFHPCQDSQQHHXCVCCRLTGHGAAXVHGPCQAVQTYRASH

SEQ ID NO: 42839 - protein, 189 aa, Homo sapiens
  misc_feature (1)...(189): Xaa = X or * as defined in Table 2
MTMEYIPRLLSFWAPTPSLGPGAFKGPVPQKVFTLHFAQASKPSSSSSFFTFSPVISKQVRVLYKPQVKAGGPRGWGRDGMKRGEEPVQGPXLFMGSPNFTTSSSFASTTDLKKXATVGITRLSLKTCCKNQRTGMGSTGQHLVGLAGKETAAVASFFQMGQGCCSSNTQSGCCTAWHGPMYSCCSMPL

SEQ ID NO: 42840 - protein, 52 aa, Homo sapiens
ILTLNTSSRQVSLGFLLSLGSVVGKCGFVPSCLYSPAGFSPMSCSGSAMSHL

SEQ ID NO: 42841 - protein, 425 aa, Homo sapiens
  DOMAIN (40)..(77): S-100/ICaBP type calcium binding protein domain identified by eMATRIX, accession number BL00303B, p-value=6.946e-12, raw score of 26.15
METVLFTFHRFAGDKGYLMKEGLKVLMGKEFLGFLENQKDPLAADITMKDMDQCQDSTLNFQNLFSLTAGLTTVDNNYFVVPMKQKGTKQAELSNYSALIDTQHTSGSSGGVQIGQAQDNILFREGKNRRCKAGSDDSDDAIWPERRRESPSGNHPETQKIEFATALRGRHTRRDRPGLKTRHGSQRGLTMGTSRSVVALLLRLGGRAPSGGFLVTHTQPGRQEDRRLPGTATLDTQKPGDFQKTHQHAGKTASAWQPGDPGPVPGLCLAGHVTSGEYKQEGTNPHLPTTDPSDNKKPSDTCLGILFPLQTVFEFMGDLELVFKVRIQNPKENDFIEIELKRQELSYQNLLNVSCCELGIKPERVEKIRKLPNTLLRKDKDIRRLRDFQEVELILMKNGSSRLTEYVPSLTERPCYDSKAAKMTY

SEQ ID NO: 42842 - protein, 42 aa, Homo sapiens
GGGGDDGGGGGGSNDGGGSDIQHPPWAISELLSAGIRFCGLQ

SEQ ID NO: 42843 - protein, 587 aa, Homo sapiens
  DOMAIN (457)..(507): ENV polyprotein (coat polyprotein) domain identified by eMATRIX, accession number PF00429, p-value=3.829e-15, raw score of 31.08
  misc_feature (1)...(587): Xaa = X or * as defined in Table 2
ESDPSNSTTSMDRTLLMSSIVPRLPSACRILPTGFTIPEXSCVHRTASLIPPLPPGSRKYSPPLPLNSLIFLKNSAYTAVPALQTDWATSPISLHLRTSFNSPHLYPPEELIYFLDRSSKTSPDISHQQAAALLRTYLKNLSPYINSTPPIFGPLTTQTTIPVAAPLCISWQRPTGIPLGNLSPSRCSFTLHLRSPTTNINETIGAFQLHITDKPSINTDKLKNISSNYCLGRHLPCISLHPWLSSPCSSDSPPRPSSCLLIPSPENNSERLLVDTRRFLIHHENRTFPSTQLPHQSPLQPLTAAALAGSLGVWVQDTPFSTPSHLFTLHLQFCLAQGLFFLCGSSTYMCLPANWTGTCTLVFLTPKIQFANGTEELPVPLMTPTQQKRVIPLIPLMVGLGLSASTVALGTGIAGISTSVMTFRSLSNDFSASITDISQTLSVLQAQVDSLAAVVLQGQLRGLDLLTAEKGGLCIFLNEECCFYLNQSGLVYDNIKKLKDRAQKLANQASNYAESPWALSNWMSWVLPIVSPLIPIFLLLLFGPCIFRLVSQFIQNRIQAITNHSIRQMFLLTSPQYHPLPQDLPSA

SEQ ID NO: 42844 - protein, 130 aa, Homo sapiens
QFANRTEELPVPLMTPTRQKRVIPLIPLLVGLGLSASTIALGTGIGGISTSVTTFHSLSSVFSASITDISQTLSVLQAQVDSLAAVILQNHRGLDLLTAVWSADLEAQRSLLLIFLLVPLFTCRSPVSSY

SEQ ID NO: 42845 - protein, 294 aa, Homo sapiens
METETGVMQPQSKEDLEPPETARVKEGFSHRASGKNLALANLDSRLLAFRMLLMLQFSQPLWRDLKPAVTSQGTKKCSRTSCRQNPSDTKIVKGVALISWKHRQTSVLKSRLLRDQCKPLPPGTSTELALTRALELGKGKRTNVYTDSKCAYLILHAHAAIWKERAFLTSGGTSIKYHKETMELLHAVQKPKELAVLCCQSHQKGKERGEQQHKQLAEAKERPARKERERDRKRERKRKRDKVKDRRRYLLLLVLSRVFVFLCFFIRFFGSSLLCTAFSLCSRSVLRLRPSFCS

SEQ ID NO: 42846 - protein, 121 aa, Homo sapiens
KDHLVNDYEQNMKLLQTKYDADINLLKQEHALSASKASSMIEELEQNVCQLKQQLQESELQRKQQLRDQENKFQMEKSHLKHIYEKKAHDLQSELDKGKEDTQKKIHKFEEALKWKKWRQI

SEQ ID NO: 42847 - protein, 345 aa, Homo sapiens
  DOMAIN (131)..(185): Kinesin light chain repeat proteins domain identified by eMATRIX, accession number BL01160B, p-value=9.008e-09, raw score of 19.54
RPTRPERKNNEIEELKTLYRSKQHETEETIRKLEKKVQTLIRDCQVIRETKEDQIAELKKICEQSTESLNNDWEKKLHNAVAEMEQEKFDLQKQHTENIQELLEDTNVRLNKMESEYMAQTQSTNHMIKELEARVQQLTGEAENSNLQRQKLIQEKAELERCYQITCSELQEVKARRNTLHKEKDHLVNDYEQNMKLLQTKYDADINLLKQEHALSASKASSMIEELEQNVCQLKQQLQESELQRKQQLRKKIKVDNQLLQHIGFPGRGPVSALSHRKHCEFLKGEIFLRIARDKGRASVLLFVHLPRFPLGINTTTRHFSLRMARSGCLVNLPHRNVPGFQLLH

SEQ ID NO: 42848 - protein, 65 aa, Homo sapiens
SWRTRSNGKMRTAGPPGHTHPAHGLAPTLSCWGPDSVPEHLSDPVSCVLRTRRIAFAFPDLWRKA

SEQ ID NO: 42849 - protein, 361 aa, Homo sapiens
  DOMAIN (303)..(318): G-PROTEIN BETA WD-40 REPEAT SIGNATURE domain identified by eMATRIX, accession number PR00320B, p-value=3.903e-11, raw score of 12.19
MWVAKHGRHMARAYQASLGSMPKFSIAANHSPGSCFNLRPFPLRQSCRALSAAGLPGPGSALKGLGAAHPDLRASGGSGAGKAKKSVDKNSNEYRVRRERNNIAVRKSRDKAKQRNVETQQKVLELTSDNDRLRKRVEQLSRELDTLRGIFRQLPESSLVKAMGNCARHYMPPQWTELPSGHAASWLGLIRSLQFQDSCQGVDHGDCFLLLWSAVLIMYPTSLAVISMTFSNYVLQPVFPNCIPPTTASRVLSMACLMLLTWVNSSSVRWATRIQDMFTGGKLLALSLIIGVGLLQIFQGSFLISGGFDRTVAIWDVAEGYRKLSLKCLPEVTECDLLQVKRSSQDHQAGADVLWSVARPS

SEQ ID NO: 42850 - protein, 373 aa, Homo sapiens; identical to SEQ ID NO: 38852
  DOMAIN (242)..(257): G-PROTEIN BETA WD-40 REPEAT SIGNATURE domain identified by eMATRIX, accession number PR00320B, p-value=3.903e-11, raw score of 12.19

SEQ ID NO: 42851 - protein, 114 aa, Homo sapiens
AKQLRVIREDQLLCYKSSKDRQPHLRLALDTCSIIYVPKDSRHKRHELRFTQGATEVLVLALQSREQAEEWLKVIREVSKPVGGAEGVEVPRSPVLLCKLDLDKAKGRRAAWQN

SEQ ID NO: 42852 - protein, 150 aa, Homo sapiens
MSSSYESYDEEEEEGKSPQPRHQWPSEEASMHLVRECRICAFLLRKKRFGQWAKQLTVIREDQLLCYKSSKDRQPHLRLALDTCSIIYVPKDSRHKRHELRFTQGATEVLVLALQSREQAEEWLKQTSSLHRLYFTLTPSFPPLIFLLEQ

SEQ ID NO: 42853 - protein, 157 aa, Homo sapiens
FTQGATEVLVLALQSREQAEEWLKVIREVSKPVGGAEGVEVPRSPVLLCKLDLDKRLSQEKQTSDSDSVGVGDNCSTLGRRETCDHGKGKKSSLAELKGSMSRAAGRKITRIIGFSKKKTLADDLQTSSTEEEVPCCEALTLNERKSQLTTVFLCSL

SEQ ID NO: 42854 - protein, 469 aa, Homo sapiens
  DOMAIN (181)..(227): kw TRANSCRIPTASE REVERSE II ORF2 domain identified by eMATRIX, accession number DM01354O, p-value=1.000e-40, raw score of 8.73
  misc_feature (1)...(469): Xaa = X or * as defined in Table 2
WGKNRAEKLETLKSRVPLLLQRNAVPHQQWNKAGRRMTLTSXEKKASDDPNYSKLQEEIQTKGKEVKHFEKNLDECITRITNREKCLKELMELKAKARELREECRSLRSQCDQLEERVSVMEEIQTTIREYYKHLYENKLQNLEEMDKFLDTYTLRRLNQEEVESLNRPITGSEIVAIINSLPTKKSPGPDGFTAKFYQRYKEELIPFLLKLFQSIEKEGILPNSFYEASIILIPKQGRDTTKKENFRPIFLMNINAKILNKILANRIQQHIKKLIHHDQVGFIPGMQGWFNICKSRNVIHHINRTKDKNHMIISIDAEKAFDKIQQPFMLKTLNKLGIDETYLKIIRAIYDKPTANIILNGQKLEAFPLKTGTRQGCPLSPLLFNIVLEVLARAIRQEKEIKGIQLGKEEVKLSLFADDMIVYLENPIVSAQNLFELISNFSKVSGYKINVQISQAFLYTNYRQSAKS

SEQ ID NO: 42855 - protein, 282 aa, Homo sapiens
  DOMAIN (208)..(253): kw TRANSCRIPTASE REVERSE II ORF2 domain identified by eMATRIX, accession number DM01354N, p-value=1.000e-40, raw score of 13.17
MGKKQSRKTGNSKKQSTSPPPKERSSSPATEQSWTDNDFDKLREEWFRRSNYSELQDDIQTKVKEVENFEKNLEECIARITNTEKCLKELMELKTRLKNYVKNAEASGTNAINWKKGTRKARANTFRASRRQEITKIRAELKEMETQKTLQKINESRSWFFEKIDKIDRPLARLIKKKREKNQIDTIKNDKGDITTDPKEIQTTIREFYKHLYANKLENLEEMDKFLDTYTLPRLNQEEVESLNRAITGAEIVAVINSLPTKKSPGPDGFTAEFYQRYKEEL

SEQ ID NO: 42856 - protein, 427 aa, Homo sapiens
  DOMAIN (278)..(323): kw TRANSCRIPTASE REVERSE II ORF2 domain identified by eMATRIX, accession number DM01354N, p-value=1.000e-40, raw score of 13.17
NNQYREPIQNQYICLKEQMELKAKTRELREECRSLRSRCNQLEERVSAMEDEMNEMKREGKFREKRIKRNEQSLQEIWDYVKRPNLRLIGVPESDGENGTKLENTLQDIIQENFPNLARQANVQIQEIQRTPQRYSSRRAPPRHIIVRFTKVEMKEKMLRAAREKALNAHKRKQERSKIDTLTSQLKELEKQEQTHSKASRRQEITKIRAELKEIETQKTLQNINESRSWFFERINKIDRPLARLIKKKRENQIDAIKNDKGDITTDPTEIQTTIREYYKHLYAIKLENLEEMDKFLDTYTLPRLNQEEVESLNRPITGAEIVAIINSLPTKKSPGPDGFTAEFYQRYKDELIPFLLKLFQSIEKEGILPNSFYEASIILIPKPGRDTTKKENFRPISLMNIDAKILNKILANGIQQHIKKLIHHDQ

SEQ ID NO: 42857 - protein, 92 aa, Homo sapiens
  DOMAIN (37)..(83): kw TRANSCRIPTASE REVERSE II ORF2 domain identified by eMATRIX, accession number DM01354O, p-value=6.715e-10, raw score of 8.73
  misc_feature (1)...(92): Xaa = X or * as defined in Table 2
MDKFLDTYTLPRLNQEEVESLNRPITGSEIVAIINSLPTKKSPGPDGFTAEFYQRNPTYKGCEGPLQAELQTTVQGNKRGYKQMEEHSMLMX

SEQ ID NO: 42858 - protein, 754 aa, Homo sapiens; identical to SEQ ID NO: 32653
  DOMAIN (208)..(254): kw TRANSCRIPTASE REVERSE II ORF2 domain identified by eMATRIX, accession number DM01354O, p-value=1.000e-40, raw score of 8.73

SEQ ID NO: 42859 - protein, 914 aa, Homo sapiens
  DOMAIN (216)..(257): kw TRANSCRIPTASE REVERSE II ORF2 domain identified by eMATRIX, accession number DM01354I, p-value=1.000e-40, raw score of 15.55
MEGEMNEMKREGKFREKRIKRNEQSLQEIWDYVKRPNLRLIGVPESDGENGTKLENTLQDIIQENFPNLARQANVQIQEIQRTPQRYSSRRATPRHIIVRFTKVEMKEKMLRAAREKDRSTRQKVNKDTQELNSALHQADLIDIYRTLHLKSTEYTFFSAPHHTYSKIDHILGSKALLSKCKRTEIITNYLSDHSAIKLELRIKNLTQNRSTTWKLNNLLLNDYWVHNKMKAEIKMFFETNENKDTTYQNLWDTFKAVCRGKFIALNAHKRKQERSKIDTLTSQLKELEKQEQTHSKASRRQEITKIRAELKEIETQKTLQKINESRSWFFERINKIDRPLARLIKKKREKNLIDAIKNDKGDITTDPTEIQTTIREYYKHLYTNKLENLEEMDKFLDTYTLPRLNEEEVESLNRPITGAEIVAIINSLPTKKSPGPDGFTAEFYQRYKEELVPFLLKLFQSIEKEGILPNSCYEASIILIPKPGRDTTKKENFRPISLMNIDAKILNKILAKRIQQHIKKLIHHDQVGFIPGMQGWFNIRKSINVIQHINRAKDKNHMIISIDAEKAFDKIQQPFMLKTLNKLELEETTVKFIWNQKRAHIAKSILSQKNKAGGITLRDFKLYYKATVTKTAWYWYQNRDIDQWNRTEPSEITLHIYNYLIFDKPEKNKQWGTDSLFNKWCWENWLAICRKLKLDPFLTPYTKINSRWIKDLNVRPKTIKTLEENLGITIQDIGMGKDFMSKTPKAMATKAKIDKWDLIKLKSFCTAKETTIRVNRQPTKWEKIFTTYSSDKGLISRIYNELKQIYKKKTNNPIKKWAKDMNRHFSEEDIYAAKKHMKKCSSSLAIREMQIKTTMRYHLTPVRMAIIKKSGNNRHAPFSIHTHIMFGSLYLQIQKDLSILGFWYPRGILEPIY

SEQ ID NO: 42860 - protein, 424 aa, Homo sapiens
  DOMAIN (68)..(115): kw TRANSCRIPTASE REVERSE II ORF2 domain identified by eMATRIX, accession number DM01354V, p-value=1.000e-40, raw score of 12.97
MDKFLDTYTLPRLNQEEVESLNRPITGAEIVAIINSLPTKKSPGPDGFTAKFYHRQTKSQIMSELPFTIASKRIKYLGIQLTRDVKDLFKENYKPLLKEIKKYTNKWKNSPCSWVGRINIMKMAIVPKVIYRFNAIPIKLPMTFFTELEKATLKFIWNQKRAHITKSILSQKNKAGGITLPDFKLYYKATGTKTAWYWYQNRDIDQWNRTEPSEIMPHIYNYLIFDKPEKNKQWGKDSLFNKWCWENWLAICRKLKLDPFLTPYTKINARWIKDLNIRPKTIKTLEENLGITIQDIGMGKDFMSKTPKAMATKDKIDKWDLIKLKSFCTAKEITIRVNRQPTNWEKIFTTYSSDKGLISRIYNELKPIYKKKPNNPIKKWAKDMKRHFSKEDIYAAKKREKMLTITGHQRNANQNHNEIPSHTS

SEQ ID NO: 42861 - protein, 637 aa, Homo sapiens
  DOMAIN (210)..(256): kw TRANSCRIPTASE REVERSE II ORF2 domain identified by eMATRIX, accession number DM01354O, p-value=1.000e-40, raw score of 8.73
  misc_feature (1)...(637): Xaa = X or * as defined in Table 2
RKKNKKKXTKPPRNMGLREKTKSMSDWCTXKXRGEWNQVAKTLCRILSRRTYPNLARQADIQIQEIQRTPQRYSSRRATPKHIIVRFTKVEMKEKMLRAAREKGRVTHKGKPIRLTADLSAETLQARREWGQIFNILKEKNFQPRISYPAKLSFISEGEIKPFTDKQMLRDFVTTRPALKELLKEVLNMERNNRKKLNRPITGSEIVAIINSLPTKKSPGPDGFTAEFYQRYKEELVPFLLKLFQSKEKEGIHPNSFDEASIILIPKAGRDTTTKDNFRPISLMNIDAKILNKILANQIQQHIKKLIHHDQVGFIPGMQGWFNICQSINVIQHINRTKDKNHVIISIDAEKAFDKIQQRFMLKTLNKLGIDRMYLKIIRAIYDKPTANIILNGQKLEAFPLKMGTRQGCPLSPLLFNIVLEVLARAIRQEKEIKHIQLGKKEVILSLFADDMIVYLENSIVSAQNLLKLISNFSKVSGYKINVQKSHAFLHTNNRQTESQIMSELPFTIASKRIKYLGIQLTKDVKDLFKENYKPLLNEIKEDTKKWKHIPCSWVGRINIVKMAILPKVIYRFNAIPIKLPMTFFTELEKTTLKFIWNQKRAHTAKSILSQKNKAGGITLPDFQLYCKATVTKTAWY

SEQ ID NO: 42862 - protein, 158 aa, Homo sapiens
  DOMAIN (84)..(129): kw TRANSCRIPTASE REVERSE II ORF2 domain identified by eMATRIX, accession number DM01354N, p-value=1.000e-40, raw score of 13.17
MELKTKARELREECRSLRSRCDQLEERVSAMEDEMNEMKREGKFREKRIKRNEQSLQEIWDYVKRPNLRLIGVPEKIQTTNREYYKHLYANKLENLEEMDTFLDTYTLPRLNQEEVESLNRPITGAEIVAIINSLPTKKSPGPDGFTAEFYQRYKEEL

SEQ ID NO: 42863 - protein, 399 aa, Homo sapiens
  DOMAIN (7)..(54): kw TRANSCRIPTASE REVERSE II ORF2 domain identified by eMATRIX, accession number DM01354V, p-value=1.000e-40, raw score of 12.97
MSELPFTIASKRIKYLGIQLTRDVKDLFKENYKPLLKEIKEDTNKWKNIPCSWVGRIDIVKMAILPKVIYRFNAIPIKLPMTFFTELEKTTLKFIWNQKRACIAKSILSQKNKAGGITLPDFKLYYKATVTKTAWYWYQNRHIDQWNRTEPSEIMLHIYNYLIFDKPDRNKQWGKDSLFNKWCWENWLAICRKLKLDPFLTPYTKINSRWIKDLNVRPKTIKTLEENLGNTIQDIGMGKDFMSKTPKAMATKAKIDKWDLIKLKSFCTAKETTISMNRQPTEWEKIFATYSSDKGLISRIYNELKQIYKKKTNNPIKKWAKDMNRHFSKKDIYAAKRHMKKCSSSLAIREMQIKTTMRCHFTPVRMVIIKKSGNNRWELNNDNTWTREGEHHTPGTIVG

SEQ ID NO: 42864 - protein, 506 aa, Homo sapiens
  DOMAIN (268)..(313): kw TRANSCRIPTASE REVERSE II ORF2 domain identified by eMATRIX, accession number DM01354N, p-value=1.000e-40, raw score of 13.17
MGDFNTPLSTLDRSTRQKVNKDTQELNLALYQADLIDIYRTLHPKSTEYTFFSAPHHTYSKIDHILGSKALLSKCKTTEIITNYLSDHSAIKLEIRIKNLTQNRSTTWKLNNLLLSDYWVHNEMKAEIKMFFETNENKDTTYQNLWDAFKAVCRGKFIALNAHKRKQERSKIDTLTSQLKELEKQEQTHSKASRRQEITKIRAELKEIETQKTLQKINESRSWINKIDRPLARLIKKKREKNQIDAIKNDKGDITTNPTEIQTTIREYYKHLYANKLENLEEMDKFLDTYTLPRLNQEEVESLNRPITGSEIVAIINSLPTKKSPGPDGFTAEFYQKYKEEVVPFLLKLFQSIEKEGMLPNSFYEASIIVIPKLGRDTTKKESFRPISLMNIDAKILNKILANRIQQHIKKLIYHDQVGFIPGMQGWFNILKSVNVIQHINRTKDKNHMIISIDAEKAFDKIQQPFMLKTLNKLGIDGMYLKIIRAIYDKPTTNIILNGQKLEAFP

SEQ ID NO: 42865 - protein, 1063 aa, Homo sapiens; identical to SEQ ID NO: 34337
  DOMAIN (272)..(317): kw TRANSCRIPTASE REVERSE II ORF2 domain identified by eMATRIX, accession number DM01354N, p-value=1.000e-40, raw score of 13.17

SEQ ID NO: 42866 - protein, 733 aa, Homo sapiens; identical to SEQ ID NO: 39017
  DOMAIN (345)..(391): kw TRANSCRIPTASE REVERSE II ORF2 domain identified by eMATRIX, accession number DM01354O, p-value=1.000e-40, raw score of 8.73

SEQ ID NO: 42867 - protein, 939 aa, Homo sapiens
  DOMAIN (137)..(182): kw TRANSCRIPTASE REVERSE II ORF2 domain identified by eMATRIX, accession number DM01354N, p-value=1.000e-40, raw score of 13.17
ENKDTTYQNLWDAFKAVCRGKFIALNAHKRKQERSKIDTLTSQLKELEKQEQTHSKASRRQEITKIRAELKEIETQKSLQKINESRSWFFERINNIDRPLARLIKKKREKNQIDTIKNDKGDITTDPTEIQTTIREYYKHLYANKLKNLEEMDKFLDTYTLPRLNQEEVESLNRPITGSEIVTIINSLPTKKSPGPDGFTAEFYQRYKEELVPFLLKLFQSIEKEGILPNSFYEASIILIPKPGRDTTKKENFRPISLMNIDAKILNKILANRIQQHIKKLIHHDQVGFIPGMQGWFNIRKSINVIQHVNRAKDKNHMIISIDAEKDFDKIQQPFMLKTLNKLGIDGTYLKIIRAIYDKPTANIILNGQKLEAFPLKTGTRQGCPLSPLLFNIVVEVLASAIRQEKEIKAQNLLKLISNFSKVSGYKINVQKSQAFLYTNNRQTESQIMSELPFIIASKRIKYLGIQLTRDVKDLFKENYKPLIKEIKEDTNKRKNIPCSRVGRINIVKMAILPKVIYRFNAIPIKLPMTFFTELEKTTLKFIWNQKRAHIAKSILSQKNKAGGITLPDFKLYYKATVTKTAWYSYQNRDIDQWNRTEPSEITPHIYNYLIFDKPEKNKQWGKDSLFNKWGWENWLAIWRKLKLDPFLTPYTKINSRWIKDLNVRPKTIKTLEENLGITIQDIGMGKDFMSKTPKAMATKDKIDKWDLMKLKSFCTAKETTIRVNRQPTEWEKIFATYSSDKGLISRIHNELKQIYKKKTNNPNKTWAKDMNRHFSKEDIYAAKKHMKKCSSSLAIREMQIKTTMRYHLTPVRMAVIKKSGNNRDMDETGNHHSQQTVTRTKNQTPHILTHTWELNNEITWTQEGEYHTLGTVTSELQVLWSLDSGTYSSGPLVFSGLGLESYTICCPESETLGLGLNHTTNFLSSPTCRQLNMGLLSF

SEQ ID NO: 42868 - protein, 530 aa, Homo sapiens
  DOMAIN (236)..(281): kw TRANSCRIPTASE REVERSE II ORF2 domain identified by eMATRIX, accession number DM01354N, p-value=1.000e-40, raw score of 13.17
MGKKQNRKTGNSKKQSTSPPPKERSSSPAMEQSWMENDFVELREEGFRRSNYSELQEDIQTKGKEVENFEKNLEECMTRITNTEKCLKELMELKTKARELHEECRSLRSRCDQLEERVSAMEDEMNEMKREGKFREKRIKRNEQSLQEIWDYVKRPNLHLMGVPESDGENGSKLENTLQDIIQENFPNLARINKIDRPLARLIKKKREKNQIDTIKNDKGDITTNPTEIQTTIREYYKHLYANKLENLEEMDTFLDTYTLPRLNQEEVESLNRPITGAEIVAIINSLPTKKSPGPDGSIAEFYQRYKEELLISNFSKVSAYKINVQKSQAFLYTNNRQTESQIMSELPFTIASKRIKYLGIQLTRDVKDFFQENYKPLLKEIKEDTNKRKNIPCSWVGRINIVKMAILPKVIFRFNAIPIKLPMPFFTELEKTTLKFIWNQKRARIAKSILSQKNKAGGITLPDFKLYYKATVTKTAWYWYQNRDIDQWNRTEPSEIMPHIYNYLIFDKPEKNTQWGKVPYLINGAGKTG

SEQ ID NO: 42869 - protein, 1183 aa, Homo sapiens
  DOMAIN (385)..(410): 7 kw REVERSE TRANSCRIPTASE RNA POLYMERASE domain identified by eMATRIX, accession number DM00895E, p-value=4.103e-10, raw score of 15.72
  misc_feature (1)...(1183): Xaa = X or * as defined in Table 2
MGDFNTPLSTLDRSRRQKVNKDTQELNSALHQVDLIDIYRTLHHKSTEYTFFSAPHHTYSKIDHIVGSKALLSKCKRTEIITNYLSDHSAIKLELRIKNLTQNRSTTWKLNNLLLNDYWIHNKMKAEIKMFFETNKNKDTTYQNLWDAFKAVCRGKFIALNAHKRKQERSKIDTLTSQLKELEKQEQTHSKASRRQEVTKIRAELKEIETQKTLQKINESRSWFFERINKIDRMLARLIKKKREKNQIDTIKNDKGDITTDPTEIQTTIREYYKHLYANKLENLEEMDKFLDTYTLPRLNQEEVESLNRPITGAEIVAIINSLPTKKSPGPDGFTAEFYQRYKEELVPFLLKLFQSIEKEGILPNSFYEASIILIPKPGRDTTKKENFRPISLMNIDAKILNKILAKRIQQHIKKLIHHDQVGFIPGMQGWFNIRKSINVIQHINRNKDKNHMIISIDAEKAFDKIQQPFMLKTLNRLGIDGTYFKIIRAIYDKPTANIVLKGQKLEAFPLKTGTRQGCPLSPLVFNIVLEVLARAIRQEKEIKGIQLGKEEVKLSLFADDMIVYLENPIVSAQNLLKLISNFSKVSGYKINVQKSQAFLYTNNRQTEPNHEXTPFTTASKIIKYLGIQLTRDVKDLFKENYKPLLKEIKEDTNKWKNIPCSWVGRINIVKMAILPKVIYRFNAIPIKLPMTFFTQLEKTTLKFIWNQKRARIAKAILSQKNKAGGITLPDFKLYYKATVTKTAWYWYQNRDIDQWNRTEPSEITPHIYNYLIFDKPEKNKQWGKDSLFNKWCWENWLAICRKLKLDPFLTPYTKINSRWIKDLNVRPKTIKTLEENLGITIQDIGMGKDFMSKTPKAMATKAKIDKWDLIKLKSFCTAKETTIRVNRQPTKWEKIFATSSSDKGLISRIYNELQQIYKKKTNNPIKKWAKDMNRHFSKEDIYAAKKHMKKCSSSLAIREMQIKTTMRYHLTPVRMAIIKKSGNNRNPTYKGCEGPLQGELQTTAQGNKRGYKQMEEHSMLMGRKNQYRENGHTAQELEKTTLKFIWNQKRARIAKAILSQKNKAGGITLPDFKLYYKATVTKTVWRSDIKRQRLHQNLEKKVNPDSHSTNFIFEKFISPVGFIEAITQEIKERGFYIDLRVIFVVLRWKLDSKAKAVIKHLGGPGLNCDRPDKAGSGLLKLG

SEQ ID NO: 42870 - protein, 908 aa, Homo sapiens; identical to SEQ ID NO: 35997
  DOMAIN (233)..(279): kw TRANSCRIPTASE REVERSE II ORF2 domain identified by eMATRIX, accession number DM01354O, p-value=1.000e-40, raw score of 8.73

SEQ ID NO: 42871 - protein, 1189 aa, Homo sapiens
  DOMAIN (655)..(700): kw TRANSCRIPTASE REVERSE II ORF2 domain identified by eMATRIX, accession number DM01354N, p-value=1.000e-40, raw score of 13.17
MGLSEDPELQPVLAGLSLSMYLVTVLRNLLSILAVSSDSHLHTPMYFFLSNLCWADIGFTSATVPKIIVDMQSHSRVISYVGCLTRMSFLVLFACIEDMLLTVMAYDCFVAICRPLHYPVIVNAHLRVFLVLVSFFLSLLDSQLHRILLSYCKIVPSILRISTSDGKYKAFSTCGSHLALVCLFYGAGIGVYLTSAVSPPPRNGVVVSVMYTVVTPMLNPFIYSLRNRDIQSTLRRLLSRTVESHDLFHPFSCVGKRKSNQECDTTHLDGCDKQTSIGETRGKEYTLCDSRSNLTQGYKEQIQRMHTCCDISSNIHLGYYEYYHNVNTPCDIRSNIPLQYWEPYHTVYTPCDIRGRPMNRGSRWPSVAAVTAQHKAKHFYLLYHSKAASACKGSNSPKQAPGPKESPRQGNIECQAQGIRPSGHLDTVRLQELPPLHQEELTYQGDSLETACPIKAMIPNLTLQLREDIQTKGKEVENFEKNLEECITRITNTEKCLKELMELKTKARELRKECSSLRSRCHQLEERVSAMEDEMNEMKWEGKFREKRIKRNKQSLQEIWDYVKRPNLRLIGVPESDGENGTKLENTLQDIVQNFPNLARQTNVQIQEIQRTPQRYSSRRATPRHIIVRFTKVEMKEKMLRAAREKEIQTTIREYYKHLYANKLENLEEMDKFLDTYTLPRLNQEEVESLNRPITGSEIVAIINSLPTKKSPGPDGFTAEFYQRYKEELVPFLLQLFQSIEKEGILPNSFYEASIILIPKAGRDTTKKENFRPISLMNVDAKILNKILAKRIQQHIKKLIHHDQVGFIPGMQGWFNIRKSINVIQHINRAKDKNHMIISIDAEKAFDKIQQPFMLKTLNKLELEKTTLKFIWNQKRARIAKSILSQKNKAGGITLPDFKLYYKATVTKTACLAPHHSPSTPAPGGNLRNPQSSDLLQVTKQQGQALAIQREAPLHRIPAPEAIPWYFQPQPATQLGSPPVDPPSSAMMAEEHTDLEAQIVKDIHCKEIDLVNRDPKNINEDIVKNACLLQKNKHPFAPRLRLHNTQRNQMPTSPTNTCSRFVLIRDTLLHKEETDLVDFEDVIAEPVGTYSFDGVWKVSYTTFTVSKYWCYRLLSTLLGVPLALLWGFLFACISFCHIWAVVPCIKSYLIEIQCISHIYSLCIRTFCNPLFAALGQVCSSIKVVLRKEV

SEQ ID NO: 42872 - protein, 451 aa, Homo sapiens
  DOMAIN (102)..(149): kw TRANSCRIPTASE REVERSE II ORF2 domain identified by eMATRIX, accession number DM01354V, p-value=1.000e-40, raw score of 12.97
MIKWASSLGCKAVLEVLARAIRQEKEIKGIQLGKEEVKLSLFADDMIVYLENPIVSAQNLLKLISNFSKVSGYKINVQKSQAFLYTNNRQTESQIMSELPFTIASKRIKYLGVHLTRDVKDLFKENYKPLLNEIKEDTNKWKNIPCSRIGRINIVKMAILPKVIYRFNAIPINLPMTFFTELEKTTLKFIWNQKRARITKSILSQKNKAGGIMLPDFKLYYKATVTKTAWYWYQNRDIDQWNRTEPSEITPHIYNYLIFDKPEKNKQWGKDSLFNKWCCENWLAIYRKLKLDPFFTPYTKINSRWTKDLNVRPKTIKTLEENLGITIQDIGMGKDFMSKTPKATAAKAQIDKWDLIKLKSFCTAKETTIRVNRQPTKWEEIFATYSSDKGLISRIYNELKQIYKKKTNNPIKKWAKDMNRHFSKQDIYAAKKHMKKCSSSLAIRECKSKPQ

SEQ ID NO: 42873 - protein, 1123 aa, Homo sapiens
  DOMAIN (366)..(411): kw TRANSCRIPTASE REVERSE II ORF2 domain identified by eMATRIX, accession number DM01354N, p-value=1.000e-40, raw score of 13.17
MELKTKAQELREECRSLRSRCDQLEERVSAMEDEMNEMKREGKFREKSIRRNEQSLQEVWDYVKRPNLHLIGVPESDGENGTKLENTLQDIIQENFPNLARQANVQIQEIQRTPQRYSSRRATPRHIIVRFTKVEMKEKTLRAAREKAPHHTYSKIDHIHGSKALLSKCKRTEIITNYLSDHSAIKLELRIQKLTQNRSTTWKLNNLLLNDYWIHNEMKAEIKMFFETNENKDTMYQNLWDAFKAVCRGKFIALNAHKRKQERSKIDTLTSQLKELEKQEQTHSKASRKQEITKIRAELKEIETQKTLQKINEPRSWFFERINKIDRLLARLIKKKREKNQIDAIKNDKGDITTDPSEIRTNIREYYKHLYANKLENLEEMDKFLDIYTLPRLNQEEVESLNRPITGAEIVAIINSLPTKKSPGPDGFTAEFYQRYKEELVPFLLKLFQSIEKEGILCNSFYEASIILIPKPGRDTTKKENFRPISLMNIDAKILNKILANRIQQHIKKLIHHDQVGFIPGMQGWFNICKSINVIHHINRAKDKNHMIISIDAEKAFDKIQQPFMLKTLNKLGTDGTYFKIIRAIYDKPTANIILNGQKLEAFPLKTGTRQGCPLSPLLFNIVLEVLARAIRQGKEIKGIQLGKEEVKLSLFADDMIVYLENPIVSAQNLLKLISNFSKVSGYKINVQKSQAFLYTNNRQTESQIMSELPFTIASKRIKYLGIQLTRDVKDLFEENYKPLLKEIKEDTNKWKNIPCSWVGRIKIVIMAILPKAIYRLNAIPIKLPMTFFTELEKTTLKFIWNQKRAHTAKAILSQKNKAGGITLPDFKLYYKATVTKTAWYWYQNRDIDQWNRTEPSEIMPHIYNYLMFDKPEKNKQWGKDSLFNKWCWENWLAICRKLKLDPFLTPYTKINSRWIKDLNVRPKTIKTLEENLGITIQDIGMGKDFMSKTPKAMAAKARIDKWDLIKLKSFCTAKETTIRVNRQPTKWEKIFATYSSEKGLISRIYNELKQIYKKKTNNPIKKWAKDMNRHFSKEDIYAAKKHMKKRSSSLAIREMQIKTTMRYHLTPVRMAIIKKSGNNRIKRLTDSERRKMKSEDRLTCEDSRNLITFIQWNKEQEEERKT

SEQ ID NO: 42874 - protein, 674 aa, Homo sapiens
  DOMAIN (362)..(407): kw TRANSCRIPTASE REVERSE II ORF2 domain identified by eMATRIX, accession number DM01354N, p-value=1.000e-40, raw score of 13.17
  misc_feature (1)...(674): Xaa = X or * as defined in Table 2
MGFYHVGQAGTELLTSNDPLTSASQSARITGKALQKPTEVPVPYEKMLQDQSALIVQGLPEGVAFKHPENYDLATLKWILENTAGISFIINSATIEPPAAQPMSFTHMGHSLCVLVVETHAKPVAVQSSSFTRNPEVISLEVAAVTVKEESEDPDYDYITFKDLPGIAYETKAYVLWPQLSKICSKNGDKNKAYRGQQCRLRQQNPLAALTGKISVSVYVSHPSLRSVSIGWTRQVARQTMQKDRDGPLKNEGEKNCAGSEKNTLTSQLKELEKQEQTHSKASRRQEITKIRAELKEIETQKTVEKINESRSWFFERINKIDRPLARLIKKKREKNQVDAIKNDKGDITTDPTEIQTTIREYYKHLYANKLENVEEMDKFLDTYTLPRLNQEEVESLNRPITGSEIVAIINSLPTKKSPGPDGFTAEFYQRYKEELVPFLLKLFQSIEKEGILPNSFYEASIILIAKPGRDTTKKENFRPISLMNIDAKILNKILAKRIQQHIKKLIHHDQVGFIPGMQGWFNIRKSINVIQHINRAKDKKHMIISIDAEKAFDKIQQPFMLKSLNKLDIGKNYFKVHMGPKKSPCRQVNPKPKEQSWRHHSTXLQTILQGYSNQNSMVLVPKQRYRSMEQNTALRNNATYLQLSDLXQTXEKQAMGKGFPIXXMVLGKLASHM

SEQ ID NO: 42875 - protein, 1164 aa, Homo sapiens
  DOMAIN (1108)..(1121): PROTEIN ZINC-FINGER METAL-BINDI domain identified by eMATRIX, accession number PD00066, p-value=4.462e-15, raw score of 13.92
SIAYQPKKSPGPDGSTAEFYQRIKYLGIQLTRDVKDLFKENYKPLLKEIKEDTNKWKNIPCSWVGRINIMKMAILPKVIYRFNAIPIKLPMTFFTELEKTTLKFIWNQKRARITKSILSQKNKAGGITLPDFKLYYKATVTKTAWYWYQNRDIDQWNRAEPSEIMLPIYNYLIFDKPDKNKQWGKDSLFNKWCWENWLAICRKLKLDPFLTPYTKINSRWIKDLHVRPKTIKTLEENLGNTIQDIGMGKDFMSKTPKAMATKAKIDKWDLIKLKSFCTAKETTIRVNRQPTKWEKIFTTYSSDKGLISRIYNELKQIYKKKTTPSKNLESKYGPEKISPENDIFEINLPKHVIKQISKTLGLEAFYFRNDSEYRSRFEGRQGHQEGYINQKIISYEEMPAYTHASPIHNTHKPYECKECGKYFSCGSNLIQHQSIHTGEKPYKCKECGKAFQLHIQLTRHQKFHTGEKTFECKECGKAFNLPTQLNRHKNIHTVKKLFECKECGKSFNRSSNLTQHQSIHAGVKPYQCKECGKAFNRGSNLIQHQKIHSNEKPFVCRECEMAFRYHYQLIEHCRIHTGEKPFECKECRKAFTLLTKLVRHQKIHMGEKPFECRECGKAFSLLNQLNRHKNIHTGEKPFECKECGKSFNRSSNLIQHQSIHADVKPYECKECGKGFNRGANLIQHQKIHSNEKPFVCRECEMAFRYHYQLIQHCQIHTGGKPFECKECGKAFSLLTQLARHKNIHTGEKPFECKDCGKAFNRGSNLVQHQSIHTGEKPYECKECGKAFRLHLQLSQHEKTHTGEKPFECKECGKFFRRGSNLNQHRSIHTGKKPFECKECGKAFRLHMHLIRHQKFHTGEKPFECKECGKAFSLHTQLNHHKNIHTGEKPFKCKECGKSFNRVSNLVQHQSIHAGVKPYECKECGKGFSRVSNLIQHQKTHSSAKPFVCKECRKTFRYHYQLTEHYRIHTGEKPFECKECGKAFGLLTQLAQHQIIHTGEKPFKCKECGKAFNRGSNLVQPQSIHTGEKPYECKECGKAFRLHLQLSLHQKLVQKIHTWVKTFECKECGKAFQYHYQFHGHYRFHIRENPYECQGCGKCFTSGRNLRVHQRIHTGEKPYQCEECGKAFSHSSNLLNMLKFILMRNPMNVRNVKRPLAVIMILLYI

SEQ ID NO: 42876 - protein, 308 aa, Homo sapiens
  DOMAIN (110)..(155): kw TRANSCRIPTASE REVERSE II ORF2 domain identified by eMATRIX, accession number DM01354N, p-value=1.000e-40, raw score of 13.17
  misc_feature (1)...(308): Xaa = X or * as defined in Table 2
KNRDYNKLSLRPQCNQTRTQNXESHSKPLNYMETEQPAPEXLLDTXRMKAEIKMFFETNENKDTTYQNLWDAFKATASKTNKEKEKNQIDTIKNDKGDITTDPTEIQTTIREYYKHLYANKLENLEEMDKFLDTYTLPRLNQEEVESLNRPITGAEIVAIINSLPTKKSPGPDGFTAEFYQRYKEELIGWLRESVSKICLKFDHQVQVITGRLIIRFQIAFGTVVLCQLTRHIDVFVGKRLANARFAPSLGGAPDLFTLKPCFVAVETQGDLPQATTVVDIDGCLGKPANVQVALDLDVKGFQQWVAE

SEQ ID NO: 42877 - protein, 676 aa, Homo sapiens
  DOMAIN (154)..(195): kw TRANSCRIPTASE REVERSE II ORF2 domain identified by eMATRIX, accession number DM01354I, p-value=1.000e-40, raw score of 15.55
MVKGSIQQEELTILNIYALNTGAPRFIKQVLSDLQRDLDSHTLIMGDFNTPLSTLDRSMRQKVNKDTQELNSALHQADLIDIYGTLHPQSTEYTFFSAPYHTYSKIDHILGSKALLSKCKRREIIINYLSDHSAIKLELRIKNLTQNLSTTWKLNNLLLNDYLVHNEMKAEIKMFFETNENKDTTYQNLWDTFKAVCGGKFIALNAHKRKQERSKIDTLTSQLKELEKQEQTHSKASRRQEITKIRAELKEIETQKTLQKMNPGAEIQTTIREYYKHLYTNKLENLEEMDKFLDTYTLPRLNQEEVESLNRPITGSEIVAIINSLPTKKSPGPDGFTAEFYQRYKEELGTPTDLQLRVLLEGKLTNRKDIHTKNPSVHHHHQRPKVDKTTKMGKKQSRKTGNSKNQSASPPPKECNSSPATKQSWTENDFEELREEGFRRSNYSELWEDIQTNGKEVKNFEKNLEEWITRITKAEKCLKDLMELKAKAPELRDKCRSLRSRCDQLEERVSAMEDKMNEMKREEKFREKRIKRNEQSLQEIWDYVKRPNLRLIGVPESDGENGTKLENTLQDIIQENFPNLARQANVQIQEIQRTPQRSSSRRATPRHIIVRFTKVEMKEKMLRAAREKGRVTLKGKPIRLTADLLAETLQARREWGPIFNILKEKIFNPEFHIQPN

SEQ ID NO: 42878 - protein, 754 aa, Homo sapiens; identical to SEQ ID NO: 40792
  DOMAIN (71)..(117): kw TRANSCRIPTASE REVERSE II ORF2 domain identified by eMATRIX, accession number DM01354O, p-value=1.000e-40, raw score of 8.73

SEQ ID NO: 42879 - protein, 710 aa, Homo sapiens; identical to SEQ ID NO: 39036
  DOMAIN (433)..(480): kw TRANSCRIPTASE REVERSE II ORF2 domain identified by eMATRIX, accession number DM01354V, p-value=1.000e-40, raw score of 12.97

SEQ ID NO: 42880 - protein, 966 aa, Homo sapiens
  DOMAIN (212)..(257): kw TRANSCRIPTASE REVERSE II ORF2 domain identified by eMATRIX, accession number DM01354N, p-value=1.000e-40, raw score of 13.17
MENDFDELREEGFRQSNYSELREDIQTKGKEVENFEKNLEECITRITNTEKCLKELMELKTKAQELREEWRSLRSRCDQLEERVSAMEDEMNEMKGEGKFREKRIKRNEQSLQEIWDYVKRPNLCLIGVPERDGQNGTKLENTLQDVIQENFPNLARQANVQIQEIQRTPQRYSSRRATPRHIIVRFTKVEMKEKMLRAAREKEIQTTISEYYKHLYTNKLENLEEMDKFLDTYTLPTLNQEEVESLNRPITGAEIVAIINSLPTKKSPGPDGFTAEFYQRYKEELVPFLLKLFQSIEKEGILPNSFYEASIILIPKSGRDTTKKENFRPISLMNIDAKILNKILANRIQQHIKKLIHHDQVGFIPGMQGWFNIRKSINIIQHINRAKDKNHMIISIDAEKAFDKIQQPFMLKTLNKLAQNLLKLISNFIKVSVYKINVQKSQAFLYTNNRQTESQIMSELPFTIASKRIKYLGIQLTRDVKDLFKENYKPLLKEIKEDTNKWKNIPCSRVERINIVKMAILPKVIYRFNAIPIKLPMTFFTELEKTTLKFIWNQKRARIAKSILNQKNKDGGITLPDFKLYYKATVTKTAWYWYQNMSIDQWNRTEPSVIMSHIYNHLIFDKPEKNKQWGKDSLFNKWCWENWLAICRKLKLDPFLTPYTKINSRWIKDLNVGPNTIKTLEENLGITIQDIGTGKDFMSKTPKAMATKAKIDKRDLIKLNSFCTAKETTIRVNRQPTKWEKIFTTYSSDKGLISRIYNELKQIYKKKTNNPIKKWAKDMNRHFSKEHIYAAKKHMKKCSPSLAIREMQIKTTMRYHLTPVRMAIIKKSGNNRSSNLAVQKGRRKVLQSPQKTQARTEKHPPRDSEATHPLRASYQGGQLHPSKQTKAPVLQAKEKGMANRNKQEPLSAFIFRALPQQTPGNSFSICAMIEVLFVFSFIQKHTELGDGEQDGHKAFLSGKDLKIPS

SEQ ID NO: 42881 - protein, 915 aa, Homo sapiens; identical to SEQ ID NO: 32665
  DOMAIN (272)..(317): kw TRANSCRIPTASE REVERSE II ORF2 domain identified by eMATRIX, accession number DM01354N, p-value=1.000e-40, raw score of 13.17

SEQ ID NO: 42882 - protein, 1095 aa, Homo sapiens; identical to SEQ ID NO: 39504
  DOMAIN (122)..(162): G-protein coupled receptors proteins domain identified by eMATRIX, accession number BL00237A, p-value=7.097e-15, raw score of 27.68

SEQ ID NO: 42883 - protein, 479 aa, Homo sapiens
  DOMAIN (61)..(106): kw TRANSCRIPTASE REVERSE II ORF2 domain identified by eMATRIX, accession number DM01354N, p-value=1.000e-40, raw score of 13.17
TANIADQQMLLSDRSSGSSVPCTSWVGRCLALLRLTLSALHPLSCTHCLALPKIQTTIREYYKHLYTNKLENLEEMDTFLDTYTLPRLNQEEVESLNRPITGAEIVAIINSLPTKKSPGPDGFTAEFYQRYKEELVPFLLKLFQSIEKQGILPNSFYEASIILIPKPGRDTTKKENFRPISLMNIDAKILNKILAKRIQQHIKKLIHHDQVGFIPGMQGWFNIHKSINVIQHINRTKDKNHMIISIDAEKAFDKIQQPFMLKTLNKLELEKTTLKFIWNQKRARIAKSILSQKNKAGGITLPDFKLYYKATVTKTACFLTCKLGMYENFKHLLQAPLDDAQEILQARFPMPRYINTEHGGSQEFSPQIHKLSCINFIYMDQFPGPQKPQTLNIALRSAPSSPVGGDGKFGAYMQVHIQNDGPVTIELESPAPGTATSDPKQHPPGSSRGGRRVCDDMMAGGGPGAGRGRQGGLSRQPIV

SEQ ID NO: 42884 - protein, 1080 aa, Homo sapiens
  DOMAIN (191)..(232): kw TRANSCRIPTASE REVERSE II ORF2 domain identified by eMATRIX, accession number DM01354I, p-value=1.000e-40, raw score of 15.55
MYQANGKQKKAGVAILVSDKTDFKPTKIKRDKEGHYIMVKGSIQQEELTILNIYAPNTGAPTFIQQVLSDLQRDLDSHTLIIGDFNTPLSTSDRSTRQKVNKDTQELNSALHQADLIDIYRTLHPKSTEYTFFSAPHHTYSKIDHILGSKALLSKCKRTEIITNYLSDHSAIKLELMIKNLTQNHSTIWKLNNLLLNDYWVHKEMKAEIKMFFETNENKDTTYQNLWDTFKAVCRGKFIALNAHKRKQERSKIDTLTSQLKELEKQEQTLSKASRRQEITKIRAELKEIETQKTLQKINESRSRFFERINKIDSLLARLIKKKREKNQIDAIKNDKGDITTNPTEIQTTIREYYKHLYANKLENLEEMDKFLDTYTLPRLNQEEVESLNRPITGAEIVAIINSLPTKKSPGPDGFTAEFYQRYKEEQVPFLLKLFQSIEKEGILPNSFYVSSIILIPKPGRDTTKRENFRPISLMNIDAKILNKILANRIQQHIKKLIHHDQVGFIPGMQGWFNICKSINVIQHINRTKDKNHMIISIDAEKAFDKIQQPFMLKTLNKLDIDGLEVLARAIRQEKEIKGIQSGKEEVKLSLFADDMIAYLENPIVSAQNLLKLISNFNKVSGYKINVQKSQAFLCTNNRQTESQIMSELPFTIASKRIKYLGIQLTRDVKDLFKESYKPLLNEIKEDTNKWKNIPCSWVGRINIVKMAILPKVIYRFNAIPIKLPMTFFTELEKTTLKFIWNQKRARIAKSILSQKNKAGGIMLPDFKLYYKAAVTKTAWYWYQNRDIDQWNRTEPSEITPHIYNYLIFDKPEKNKQWGKDSLFNKCLDMTNHRRCGTTLEDPRMNPSDRPLARLIKKKREMNQIDAIKNDKGDITTDPTEIQTTIREYYKHLYANKLENLEEMDKFLDTYTLPRLNQEEVESLNRPITGAEIVAIINSLPTKKSPGPDGFTAEFYQRYKEELVPFLLKLFQSIEKEEILPNSFYEASIILIPKPGRDTIKKENFRPISLMNTDAKILNKILAKRIQQHIKKLIHHDQVGFIPGDARLVQYTQINKCNPAYKQSQRQKPHDYLNRCRKGL

SEQ ID NO: 42885 - protein, 1703 aa, Homo sapiens
  DOMAIN (1414)..(1459): kw TRANSCRIPTASE REVERSE II ORF2 domain identified by eMATRIX, accession number DM01354N, p-value=1.000e-40, raw score of 13.17
  misc_feature (1)...(1703): Xaa = X or * as defined in Table 2
RAKSPANIIMTGSNSHITILTLNVNGLNSPIKRHRLASWIKSQDPSVCCIQETHLMCRDTHRLKIKGWRKIYQANGKQKKAGVAILVSDKTDFKPTKIKRDKEGHYMMVKGSIQQEELTILNMYAPNTGAPRFIKQVLSDLQRDLDSHTLIMGDFNTPLSTLDRSTRQKVNKDTQELNSALHQADLIDIYRTLHPKSTEYTFFSAPHHSYSKIDHILGSEALLSKCKRTEIITNYLSDHSAIKLELRIKNLTQSRSTTWKLNNLLLNDYWVHNEMKAEIKMFFETNENKDTTYQNLXDAFKAVCRGKFIALNAHKRKQERSKIDTLTSQLKELEKQEQTHSKASRRQEITKIRAELKEIETTKKKTLQKINESRSWFFERINKIDRPLARLTKRKREKNQIHAIKNDKGDITTTDPHRNTNYPSRDYYKHLYANKLENLGEMKDXFLDTYTLPRLNQEEVESLNRPITGAEIVAIINSLPTKKSPGPDGFTAEFYQRYKEELVPFLLKLFQSIEKEGILPNSFDETSIILIPKPSRDTTKRENFRPRSLMNIDAKILNKILAKRIQQHIKKVIHHDQVGFIPGMQGWFNIRKSMNVIQHINRTKDKNHMIISIDAEKAFDKIQQPFMLKTLNKLGIDGTCFKIIRAIYDKPTANIILNGQKLEAFPLKTGTRQGCPLSPHTTINIVLLPHSVLARAIRQEKEIKGIQLGKEEVKLSLFADDMIVYLENPIVSAQNLLKLISNFSKVSGYKINDKKSQAFLYTNNRQTENQIMSELPFTIASKRIKYLGIQFTRDVKDLFKENYKPLLNEIKEDTNKWKNIPCSWVGRINIVKMAILPKVIYRFNAIPIKLPMTFFTELDKTTLKFIWNQKRALIAKSILSQKNKAGGITLPDFKLYYKATVTKTAWYFYQNRDIDQWNTTEPSEITPHIYNYLIFDKSDKNNKWGKDSLFNEWCWENWLAIWRKPKLDPFLTPYTKINSRWIKDLNVRPKTIKTLEENLGITIQDIGVGKDFMSKTPKAMATKAKIDKWDLIKLKSFCTAKETTIRVNRQPTTWETIFTTYSSDKGLISRIYNELKQIYKKKTNNPIKKWAKDMNRHFSKEDIYAAKKHMKKCSSSLAIREMQIKTTMRYHLTPVRMAIIKKSGNNRTNDKNQVIISIDAAKAFEKIQHPFMPKILKKLGIDGTYLKIIRAIYDEPTANIILNRQKLKAFPLKTSTRQGCLLLPLLFSIVLEVLTRAIRQEKEIKGIQIGRKEVKSSLFADDMIVYLENPKASSKKLPELNKDTIYQNLWDAFKAVCRGKFTALNAHKRKQERSKIDTLTSQLKELEKQEQTHSKAIRRQEITKIRAELKEIETQKTLQKINESRSWFFERINKIDRPLARLIKKKREKNQIDTIKNDKGDITTNPTEIQTTIREYYKHLYANKLENLEEMDTFLDTYTLPRLNQEEVESLNRPITGAEIVAIINSLPTKKSPGPDGSIAEFYQRYKEELLISNFSKVSAYKINVQKSQAFLYTNNRQTESQIMSELPFTIASKRIKYLGIQLTRDVKDFFQENYKPLLKEIKEDTNKRKNIPCSWVGRINIVKMAILPKVIFRFNAIPIKLPMPFFTELEKTTLKFIWNQKRARIAKSILSQKNKAGGITLPDFKLYYKATVTKTAWYWYQNRDIDQWNRTEPSEIMPHIYNYLIFDKPEKNKQWGKDSLFN

SEQ ID NO: 42886 - protein, 333 aa, Homo sapiens
  DOMAIN (43)..(82): kw TRANSCRIPTASE REVERSE II ORF2 domain identified by eMATRIX, accession number DM01354X, p-value=5.135e-15, raw score of 13.86
MDKFLEKYTLLRLNQEEVESLNRPIAGAEIVAIINSLLTKKSSGSDGFTAEFYQRIGKTTLKFIRNQKRAHIAKSILSQKNTAGGITLPDFKLYYKATVTKRAWLSAEAREDCGWKAAEHMDELLARLLQGLGSQAGGRGRPRSLGGTWGLGCTGRADAGKRERVILRPVVDTDVCREIFLHISNGRTLGVTLQTQSLKSPVKVIFKVLLSHPLPSPLSFCPCHTLVTITPPLAPLALCQMIRYTSEHLRSSVIDRKDLIIKRIKPKPQQGDDITVVDVEKQIEAFRSRLIQMLGEPLVPQLQDKVHLLKLLLFYAADLNPDAEPFQKGWSGS

SEQ ID NO: 42887 - protein, 325 aa, Homo sapiens
  DOMAIN (223)..(266): kw TRANSCRIPTASE REVERSE II ORF2 domain identified by eMATRIX, accession number DM01354T, p-value=6.545e-13, raw score of 9.48
  misc_feature (1)...(325): Xaa = X or * as defined in Table 2
MNNAKENFLGRFQDGRIGTAPVYSPQHQRRRRRVISALPTEPPLVIPRQTGFGVDLQQTPTDLQLRVLTVRRKTTKQEGHSTKTPSVRYHHQRPKEDKTTKMGRNQSRKAENSKNESASSPPKECSSSPATEQSWMENDFDKYTEVGFRQLVITNFSELKEDVQTHHKEAKNLEKRLDEWLTRINSIENTLIDLMELKTMARELRDSCTSFSRQFDQVEERVSVIEDQMNEMKREEKFREKKMLEVLPRAIRQEKEIKGIQLGKEEVKLSLFADNMTVYLENPIISPKISLSXXATSAKSQDIKSMCKNHKHSYTPITDKQRAKS

SEQ ID NO: 42888 - protein, 357 aa, Homo sapiens
  DOMAIN (156)..(203): kw TRANSCRIPTASE REVERSE II ORF2 domain identified by eMATRIX, accession number DM01354V, p-value=1.000e-40, raw score of 12.97
  misc_feature (1)...(357): Xaa = X or * as defined in Table 2
KPWHKNFVTHAQASIADLIKWKKGYQXLKIKLMKXSKKTRNTNYHQNTINISMQINXKIXKKWRNSWTHTLSQYXTRKKLNLXIDQXQALKLQAIIYSLPTKNVQGQMDSQSNTTRVWGILARAIRQEKEIKDIQLENEEVKLSLFADDMTVYLENSIVSAQNLLKLRIKYLGIQLTTDVKDLFKENYKPLLNKIKEDTNKWKNIPCSWIRGINIMKMAILPKLIYRFNAIPIKLPMTFFTELEKATLKFIWNQKRAHIAKTILSKKNKAGGIMLPDFKLYYKATATKAAWYWYQNRDIDKKLTQIYKKKTNNPIKKWAKDMNRHLSKEDIYGANRHMKKCSSSLVIREKQIKTTMR

SEQ ID NO: 42889 - protein, 59 aa, Homo sapiens
  misc_feature (1)...(59): Xaa = X or * as defined in Table 2
GLCSVPLLCISVLVPVPCCFGYCSLVVXFEVRXSDASSFVLLAXDFLGNAVSFLVPYEL

SEQ ID NO: 42890 - protein, 470 aa, Homo sapiens
  DOMAIN (160)..(207): kw TRANSCRIPTASE REVERSE II ORF2 domain identified by eMATRIX, accession number DM01354V, p-value=1.957e-37, raw score of 12.97
MGRNQSRKAENSKNQSTSSPPKDCNSSPATEQRWMENDFDELTEVGFRRTNEKNHMIILIVAEKAFDKIQQPFMLKTLNKLRIDGMYVKIITAIYDKPTANIILNGQKLERFPLKTGTRQGHPLSPLLFNIVSEVLARAIRQEKEIKDKQSQIMSELPFTIATKRIKYLGIQLMRDVNDLFKENYKPLLNEIKEDTNKWRNILCSRLGGINIVKMAILPKNWKKTTLKFIWNQKRARIAKTLLSKKNKAGSIMLPDFKLYYKATVIKTACYWYQNRYINQWNRMEASEITPHIYNHLIFDKPDKNKKWGKDSLFNKWYWGNWLAMCRKLKLDPFLTPHIKINSRWIKDLNIRPKTIKTLEENLGNTIQDIGMGKDFMTKTPKSMAAKAKIDKWDLIKLKSFGTAKESTIRVNRLPTEWEKIFAIYSSDKGLISRIYNEFKQIYEKKIKQPHQKVGKGYEQTLLKRRHLCS

SEQ ID NO: 42891 - protein, 487 aa, Homo sapiens; identical to SEQ ID NO: 39319
  DOMAIN (110)..(151): kw TRANSCRIPTASE REVERSE II ORF2 domain identified by eMATRIX, accession number DM01354I, p-value=1.000e-40, raw score of 15.55

SEQ ID NO: 42892 - protein, 126 aa, Homo sapiens
  DOMAIN (56)..(90): kw TRANSCRIPTASE REVERSE II ORF2 domain identified by eMATRIX, accession number DM01354P, p-value=1.833e-34, raw score of 9.18
  misc_feature (1)...(126): Xaa = X or * as defined in Table 2
QALKLRQXLIAYQPKRVQDQMDSQTNSARGTKRSWYHSFXNYSNPTEKEGILLNSFYEAGIILIPKPGRDTTKKENFRPISLMSINAKILNKILANRILQHIKKLIITIKSASSLGCKAGSTYANQ

SEQ ID NO: 42893 - protein, 305 aa, Homo sapiens
  DOMAIN (39)..(70): kw TRANSCRIPTASE REVERSE II ORF2 domain identified by eMATRIX, accession number DM01354G, p-value=1.500e-37, raw score of 11.57
  misc_feature (1)...(305): Xaa = X or * as defined in Table 2
MGDFNTPLSTLDRSTRQKVNKDIQELNSALHQADLIDIYRTLHPKSTEYTFFSAPHHTYSKIDHILGSKALLSKCKRTEIITNCLSDHSAIKLELRIKKLTQNCSTTWKLNNMLLNDYWEHNKMKAEIKMFFETNKNKDTTYQNLWDTLKAVCRGKFKALNAHKRKKERSQIDTLTSQLKELEKQEQTHSKASRRQEITKIRAELKETETQKTLQRLMNPGAVLEVLARAIRQEKEIKGIQLGKEEVKLSLFADDMIVYLENPMSQPKISLSXXATSAKSQDIKSIYKNHQHSYTPIRDKQRAKS

SEQ ID NO: 42894 - protein, 595 aa, Homo sapiens
  DOMAIN (37)..(83): kw TRANSCRIPTASE REVERSE II ORF2 domain identified by eMATRIX, accession number DM01354O, p-value=1.000e-40, raw score of 8.73
  misc_feature (1)...(595): Xaa = X or * as defined in Table 2
MDKFLDTYTLPRLNQEEVESLNRPITGSEIEAIINSLPTQKSSGPDGFTAEFYQRYKEELVPFLLKLFQSIEKEGILPNSFYEASIILIPKPGRYTHKKNNFRPISLMNIDAKILNKILANRIQQHIKKLIHQDQVGIIPGMQSWFNIHKSINVIQHINRTKDKNHMIISIDAEKAFDKIQQPFMLKTLNKLENKIPKNPTYKGCEGPLQGELQITAQRNKGRHKQMEEHPMLMDRKNEYHKNGHTPKVIYRFNVIPIKLPMTFFSELEKSTLKFIWNQKRARIAKTILSQKNKAGGIMLPDFKLYYKATVTKTAWYWYQNRDIDQWNRTEPSEMTPHIYNHLIFDKPDKNKQWGKDSLFNKWCWENWLAIGRQLKLDPFLTPYTKINSRWIKDLNVRPKTIKTLEENLGNTIQDISMGKDFMSKTPKAMATKAKMDKWDLIKLKSFCTAKETTIRQSWPEMTKFTFSSNTDVKNWKHGKNNIGRHKTSVNTCKMDSGLVLERWMEWNPGFPLSIDAKCHKDLPRDIQFDSEKGVDFVLNYSKANMRWAGSMFLXFIESFXHEWLLNFVKGLFCIYXDNHVVFVFGSVYMLDYIY

SEQ ID NO: 42895 - protein, 608 aa, Homo sapiens
  DOMAIN (149)..(194): kw TRANSCRIPTASE REVERSE II ORF2 domain identified by eMATRIX, accession number DM01354N, p-value=1.000e-40, raw score of 13.17
MKAEIKMFFETNENKDTTCQNLWDAFKAVCRGKFIALNAHKRKQERSKIDTLTSQLKELEKQEQTHSKASRRQEITKIRAELKEIETQKTLQKINESRSWFFERINKIDRTPARLIKKKREKNQIDAVKNDKGDITTNPTEIQSTIREYYKHLYANKLENLEEMDKFLDTYTLPRLNQEEIESLNRPITGSEIVAIINSLPTKKSPGPDGFTAEFYQRYKEELVPFLLKLFQSVEKEGILPNSFYEASIILIPKPGRDTTKKENFRPISLMNIDAEILNKILAKQIQQHIKKLTHHNQRIKYLGIQLTRDVKDLFEENYKPLLKEIKEDTNKWKNIPCSWVGRINIVKMALLPKVIYRFNAIPIKLAMAFFTELEKTTLKFIWNQKRAHIAKSILSQKNKAGGITLPDFKLHYKATVTKTAWYWYQNRDIDQWNRTEPSEITPHIYNYLIFDKPEKNKQWGKDSLFNKWCWENWLAICRKLKLDPFLTPYTKINSRWIKDLNVRPKTIKTLEENLGITIQDIGMGKDFMSKTPKAMATKAKIDKWDLIKLKSFCTAKETTIRVNRQPTKWEKIFTTYSSDKGLISRIYNELKQIYKKKTTPSKSGRRT

SEQ ID NO: 42896 - protein, 454 aa, Homo sapiens
  DOMAIN (140)..(187): kw TRANSCRIPTASE REVERSE II ORF2 domain identified by eMATRIX, accession number DM01354V, p-value=1.000e-40, raw score of 12.97
MPRQTGSGVDLQQTPTDLQLRVLILRRKTNKQKGHPHQNPICTSPSSKTKVLEVLARAIRQEKEIKGIQLGKEEVKLSLFADDMIVYLENPIISAQNLLKLISNFSKVSGYKINVQKSQAFLYSNNRQTESQIMSELPFTIASKRIKYLAIQLTRDVKDLFKENYKPLLNEIKEDTNKWKNIPCSWVGRINIMKMDILPKVIYRFNAIPIKLPMTFFTELEKTTLKFIWNQKRARIAKTILSQKNKAGGITLPDFKLYYKATVTKTAWYWYQNSDIDHWNRTEPSEIMPHIYNYLIFDKSDKSRKWGKDFLFNKWCWENWLAVCRKLKLDLFLTPCRKINSRWIKNLNVRPKTIKTLEENLGNTIQDIGMGKDFMSKTPKAMATKAKIDKWDLIKLKSFCTAKETTVRVNRQPTEWENIFAIYLSDKGLISRIYKELKQIYKNKTTPSTSGQRI

SEQ ID NO: 42897 - protein, 35 aa, Homo sapiens
  misc_feature (1)...(35): Xaa = X or * as defined in Table 2
KTPLSQPKISLSXXATTAKSQDTKSVYKNQQHSYT

SEQ ID NO: 42898 - protein, 597 aa, Homo sapiens
  DOMAIN (90)..(145): kw TRANSCRIPTASE REVERSE II ORF2 domain identified by eMATRIX, accession number DM01354Q, p-value=1.000e-40, raw score of 9.23
  misc_feature (1)...(597): Xaa = X or * as defined in Table 2
QAPKLRQXLIAYQPKKVQDQTDSQPNSTRGTKKSWYHSFXNFSNPIEKEGIFPNLFYEANIILIPKPGRDTTKKENFRPISLMNVNAKILNKLLANQIQQHIKKLIHHNQVGFIPGMQGWFNICKSINVIQHINRTKDKNHRSISIDAEKAFNKIQQPFMLKTLNKLDDMIVYLENPIVSAKNLLKLISNFSKVSGYKINVQKSQAFLYTNNRQAESQIMSAVSFTIASKRIKYLGIQLTRDVKDLFKENYKPVLNKIKEDTNKWKNIPSLWIGRVNIMKMAILPKVIYRFNAIPIKLPMTFFTELEKTTLKFIWNQKRAHIAKTILSKKNKAGGITLPDFKLYYKATVTKTAWHWYQNRDIDQWNRTEPSEIIPHIYNHLIFDKLDKNKTLGKDYLFNKRCWENWLAICRKLKLDPFLTRYTKINSRWIKDLNIRPKTIKTLEENLGDTIQDIGMGKDFITKTPKAMATKAKIDKWDLIKLKSFCTAKETTIRVNRQPTEWENIFAIYPSDKGLISRIYKELKQIYKKKSNNPIKKWAKDMNRYFSKEDIYAANRHMKKCSSSLALREMQIKTTMRYHLIPVRMAIIKKSGNNRCW

SEQ ID NO: 42899 - protein, 59 aa, Homo sapiens
  misc_feature (1)...(59): Xaa = X or * as defined in Table 2
GLCCVPLIYISVLVPVPCCFGYCSLVVXFEVRXHDASSFVLLAXDXLGDVGSFLVPYEL

SEQ ID NO: 42900 - protein, 46 aa, Homo sapiens
SLLLSIHQTHSLSSFVPLLERSCDPLRERRRSGFWNFQPFCAGFSP

SEQ ID NO: 42901 - protein, 59 aa, Homo sapiens
  misc_feature (1)...(59): Xaa = X or * as defined in Table 2
GLCSVALVCISVLVPVPCCFGYCSLVVXFEVRXHDASSFVLFAXDXLGNVDSLLVPYEL

SEQ ID NO: 42902 - protein, 37 aa, Homo sapiens
QLCVLELLFSRSIFVAFSVFPESECWLAFLGWGSPSG

SEQ ID NO: 42903 - protein, 670 aa, Homo sapiens
  DOMAIN (301)..(346): kw TRANSCRIPTASE REVERSE II ORF2 domain identified by eMATRIX, accession number DM01354N, p-value=1.000e-40, raw score of 13.17
  misc_feature (1)...(670): Xaa = X or * as defined in Table 2
MKREGSLEKKRIKRNEQSLQEICDYVKRANLRLIGGPESDGENGTKLENTLQDMQEKFPNLARQANIQIQEIQRTPQRYSSRRATPRHIIVRFTKVEMKEKMLRAAREKGQVTHKGKSIRLTADLSAETLQARREWGPIFNILKEKNFQPRISYPGKLSFISEGEIKSFTDKQMLRDFVTTRPALKELLKEALNMEKNKQYQPPQKHAKLTREARANTFKPSRRREITKIRAELKEIETPKTAQKINESRSWFSERINKIDRPLARLRKKKREKNQIDTIKNDEGDITTHPTEIHTIIREYYKHLYANKLENLEEMDKFLDTYTLPRPNQEEVESLNGPIAGSEIQAIINSLPTKKSPGPDGFYQRYKEELVPFRLKLFQSIEKEGILPNSFYEASIILIPKPGRDTTKKENFRPISLLNINAKILNKILANRIQQHIKKLMHHDQVGFIPGMQGWFNIRKSINVIQHINRTKDKNHMIISIDAEKAFDKIQQPFMLKTLNKLGIDGTYHKIIRANYDKPTANIILNGQKLEAFPLKTGTRQGCPLSPLLFNIVLEVLARAIRQEKETEGIQLGKEEVKLSLFADDMIVYLENPMSQPKISLSXXATSAKSQDTKSMCKNHKYSYTPITDKQRAKSSVNSPFTIASKRIKYLGIQLTRYVKDLFKERSMK

SEQ ID NO: 42904 - protein, 232 aa, Homo sapiens
  DOMAIN (118)..(161): kw TRANSCRIPTASE REVERSE II ORF2 domain identified by eMATRIX, accession number DM01354T, p-value=1.000e-40, raw score of 9.48
  misc_feature (1)...(232): Xaa = X or * as defined in Table 2
MDKFLDTYTLPRLNQEEVESLNRPITGSEIEAIINSLSTKKSPGPDGFIAQFYQRTKDKNHMIISIDAEKAFDKIQQHFMLKTLNKLGIDGTYLKIIRAVYDKPTASIILNGQKLEAFPLKTGTRQGCPLSPLLFNIVLEVLARAIRQEKEIKGIQLGKEEVKLSLFADDMIVYLENPMSQPKISLSXXANSAKSQDIKSMCKNLKHSYTLITDKQRAKSSVNSHSQLLQRE

SEQ ID NO: 42905 - protein, 588 aa, Homo sapiens
  DOMAIN (42)..(96): Chaperonins cpn60 proteins domain identified by eMATRIX, accession number BL00296A, p-value=1.000e-40, raw score of 17.20
DDLSRRAHACRRPAEMLRLPTVFRQMRPVSRVLAPHLTRAYAKDVKFGADARALMLQGVDLLADAVAVTMGPKGRTVIIEQSWGSPKVTKDGVTVAKSIDLKDKYKNIGAKLVQDVANNTNEEAGDGTTTATVLARSIAKEGFEKISKGANPVEIRRGVMLAVDAVIAELKKQSKPVTTPEEIAQVATISANGDKEIGNIISDAMKKVGRKGVITVKDGKTLNDELEIIEGMKFDRGYISPYFINTSKGQKCEFQDAYVLLSEKKISSIQSIVPALEIANAHRKPLVIIAEDVDGEALSTLVLNRLKVGLQVVAVKAPGFGDNRKNQLKDMAIATGGAVFGEEGLTLNLEDVQPHDLGKVGEVIVTKDDAMLLKGKGDKAQIEKRIQEIIEQLDVTTSEYEKEKLNERLAKLSDGVAVLKVGGTSDVEVNEKKDRVTDALNATRAAVEEGIVLGGGCALLRCIPALDSLTPANEDQKIGIEIIKRTLKIPAMTIAKNAGVEGSLIVEKIMQSSSEVGYDAMAGDFVNMVEKGIIDPTKVVRTALLDAAGVASLLTTAEVVVTEIPKEEKDPGMGAMGGMGGGMGGGMF

SEQ ID NO: 42906 - protein, 770 aa, Homo sapiens
  DOMAIN (108)..(133): 7 kw REVERSE TRANSCRIPTASE RNA POLYMERASE domain identified by eMATRIX, accession number DM00895E, p-value=3.333e-11, raw score of 15.72
MPGEEKCASELKQSAQRGGDRLNQEEGESLNRPITGSEIEAIINSLPTKKSPGPDGITAEFYQRYKEELVPFLVKLFQSTEKEGILPNSFYEASIILIPKPGRDTTKKENFRPISLMNIDAKILNKILANRIQQHIKKLIHNGQHINRTNDKSHIIISIDAEKTFGKIQQPFMLKTLNKLGIDGTYLKIIRAIYDKPTANIILTGQKLEAFPMKTGTREGCPLSPLLFNIVLEVLARAIRQEKEIKGIQLGKEEVKLSLFADDMIVYLENPIVSAQNLLRLISTFSKVSGYKINVQKSQAFLYTNNRQTESQILSELPFTIASKRIKYLGIQLTRDVKDLFKENYKALLNEIKEDINKWKNIPCSWVGRINIVKMAILPKVIYRFNAIPIKLPMTFFTELEKTTLKFIWNQKSARIAKSILSQKNKAGGIMLPDFKLYYKATVTKTAWYWYQNRDIDQWNTTEPSEIMLHIYDHLIFDKPDKNKKWGNNSLFNKWCWENWLAIWRKLKLDPFLTPYTKINSRWIKDLHVRPKIIKTLEENLGNTIQDIVMGKDFMSKTPKAMATKAKIDKWDLIKLKSFCTAKETTIRVNRQPTKWEKIFGIYSSDKGLISRIYNELQQIYKKKTNNPIKKWVKDMNRYFSKEDIYAAKRHMKKCSSSLAIREMQIKTTMRYYLTPLRMAIIKKFGNNRQETVREMACLLSGTMDFRHRACFVLSKPDFSTRWPGADAQRPPVLVVVALDSSLPFPQASGQRPPSLEDVDGGAGALVAPC

SEQ ID NO: 42907 - protein, 278 aa, Homo sapiens
  DOMAIN (176)..(219): kw TRANSCRIPTASE REVERSE II ORF2 domain identified by eMATRIX, accession number DM01354T, p-value=1.000e-40, raw score of 9.48
  misc_feature (1)...(278): Xaa = X or * as defined in Table 2
MENEFDELTEVHFRRWVITNSSELKEHVLTQCEEAKNLARRNKLENLEEMDKFLATYTFPSLNQEEVESLNRPITSSEIEAAINSLPTKKHPGPDGFTAKFYQRYKEELHINRAKDKNHMIISIDAEKAFDKIQHPVKLKILNKLGIDGTYLKIIRAIYDKPTANLILNGQKLEAFPLKTGTRQGCPLSPLLFNIVLEVLARAIRQEKEIKGIQLGKEEVKLSLFADDRLYIXGTPLSQPKISLSXXATSAKSQDTKSMYKNHKHSYTPTTDKQRAKS

SEQ ID NO: 42908 - protein, 54 aa, Homo sapiens
  misc_feature (1)...(54): Xaa = X or * as defined in Table 2
QSARFRGRRTLRRPGVGYSLVVXFEVRXCDASSFVLLAXDCLGNAGSFLVPYEL

SEQ ID NO: 42909 - protein, 38 aa, Homo sapiens
LTILSRTGTWMKLEVIILSKPTQEQEIKHHMFSLINGS

SEQ ID NO: 42910 - protein, 50 aa, Homo sapiens
  misc_feature (1)...(50): Xaa = X or * as defined in Table 2
YYTRCSKWWNCSVLPXIYIYNFHLPHGKLKNTDYIKKKLHDFFFKNSKHI

SEQ ID NO: 42911 - protein, 213 aa, Homo sapiens
  DOMAIN (22)..(74): Ribosomal protein L31e proteins domain identified by eMATRIX, accession number BL01144, p-value=5.721e-24, raw score of 25.07
MASAKKGGQKKKGRSAINEVVTQEYTINIHKRTHGVRFKKCAPWALKEIRKFAMKEMVAPDIASPARPTTMSCQHNLIAVIWAFNCHLGAFLWTLTWDLLSGHTVQLASAAGEFTPCEVTLTNGTQEPKKKEEEEEEEEEEEEEEDRRRTRRRGGEEGEGEEEEKRRKKKEEEEEKWPYSKIGRWMVHPKPKNIPTAFHPPSHQTCGHICPRA

SEQ ID NO: 42912 - protein, 128 aa, Homo sapiens
  DOMAIN (22)..(74): Ribosomal protein L31e proteins domain identified by eMATRIX, accession number BL01144, p-value=1.000e-40, raw score of 25.07
MAPAKKGGEKKKGRSAINEVVTREYTINIHKRIHGVGFKKRAPRALKEIRKFAMKEMGTPDVRIDTRLNKADWAKGIRNVPYRIRVRLTRKRNEDEDSPNKLYTLVTYVPVNPFSKIYRQSMWMRTNR

SEQ ID NO: 42913 - protein, 108 aa, Homo sapiens
  DOMAIN (40)..(77): S-100/ICaBP type calcium binding protein domain identified by eMATRIX, accession number BL00303A, p-value=6.333e-26, raw score of 21.77
FRGEAPDPHAARTELSAPLPATASRASLSSNMAKISSPTETERCIESLIAVFQKYAGKDGYNYTLSKTEFLSFMNTELAAFTEVLVPVSPTSPNYPQHETRPWQNGQE

SEQ ID NO: 42914 - protein, 147 aa, Homo sapiens
  DOMAIN (49)..(86): S-100/ICaBP type calcium binding protein domain identified by eMATRIX, accession number BL00303A, p-value=6.333e-26, raw score of 21.77
  misc_feature (1)...(147): Xaa = X or * as defined in Table 2
PGSTHASAHACERLQTRTLRAFSSQRRFPATASRASLSSNMAKISSPTETERCIESLIAVFQKYAGKDGYNYTLSKTEFLSFMNTELAAFTKNQKDPGCPXPHDGRKLGQPTVDGQLDFSEFLNLIGGQAMACHDSFLKAVPSQKRT

SEQ ID NO: 42915 - protein, 2002 aa, Homo sapiens
  DOMAIN (720)..(731): PROTEASE POLYPROTEIN HYDROLASE ASP domain identified by eMATRIX, accession number PD00302A, p-value=4.484e-11, raw score of 6.33
VKVRSSVVIEDKSTRDPEYIYSQPYEQGTSDLKDWKRIGKELKQAGRKGNIIPLTVWNDWAIIKAALEPFQTEEDSISVSDAPGSCLIDCNENTRKKSQKETESLHCEYVAEPVMAQSTQNVDYNQLQEVIYPETLKLEGKGPELMGPSESKPRGTSPLPAGQVLVRLQPQKQVKENKTQPQVAYQYWPLAELQYRPPPESQYGYPGMPPAPQGRAPYHQPPTRRLNPMAPPSRQGSELHEIIDKSRKEGDTEAWQFPVTLEPMPPGEGAQEGEPPTVEARYKSFSIKMLKDMKEGVKQYGPNSPYMRTLLDSIAYGHRLIPYDWEILAKSSLSPSQFLQFKTWWIDGVQEQVRRNRAANPPVNIDADQLLGIGQNWSTISQQALMQNEAIEQVRAICLRAWEKIQDPGSTCPSFNTVRQGSKEPYPDFVARLQDVAQKSIADEKAGKVIVELMAYENANPECQSAIKPLKGKVPAGSDVISEYVKACDGIGGAMHKAMLMAQAITGVVLGGQVRTFGGKCYNCGQIGHLKKNCPVLNKQNITIQATTTGFSGTTTPTVPSVSGNKPVTTIQQLSLTTSGSAAVDLCTIQAVSLLPGEPPQKIPTGVYGPLPEGTVGLILGRSSLNLKGVQIHTSVVDSDYKGEIQLVISSSIPWSASPRDRIAQLLLLPYIKGGNSEIKRIGGLVSTDPTGKAAYWASQVSENRPVCKAIIQGKQFEGLVDTGADVSIIALNQWPKNWLKQKAVTGLVGIGTASEVYQSMEILHCLGPDNQESTVQPMITSIPLNLWGRDLLQQWEKPVWVNQWPLPKQKLEALHLLANEQLEKGHIEPSFSPWNSPVFVIQKKSGKWHTLTDLRAVNAVIQPMGPLQPGLPSPAMIPKDWPLIIIDLKDCFFTIPLAEQDCEKFAFTIPAINNKEPATRFQWKVLPQGMLNSPTICQTFVGRALQPVREKFSDCYIIHYIDDILCAAETKDKLIDCYTFLQAEVANAGLAIASDKIQTSTPFHYLGMQIENRKIKPQKIEIRKDTLKTLNDFQKLLGDINWIRPTLGIPTYAMSNLFSILRGDSDLNSQRILTPEATKEIKLVEEKIQSAQINRIDPLAPLQLLIFATAHSPTGIIIQNTDLVEWSFLPHSTVKTFTLYLDQIATLIGQTRLRITKLCGNDPDKIVVPLTKEQVRQAFINSGAWQIGLANFVGLIDNHYPKTKIFQFLKLTTWILPKITRREPLENALTVFTDGSSNGKAAYTGPKERVIKTPYQSAQRAELVAVITVLQDFDQPINIISDSAYVVQATRDVETALIKYSMDDQLNQLFNLLQQTVRKRNFPFYITYIRAHTNLPGPLTKANEQADLLVSSALIKAQELHALTHVNAAGLKNKFDVTWKQAKDIVQHCTQCQVLHLPTQEAGVNPRGLCPNALWQMDVTHVPSFGRLSYVHVTVDTYSHFIWATCQTGESTSHVKKHLLSCFAVMGVPEKIKTDNGPGYCSKAFQKFLSQWKISHTTGIPYNSQGQAIVERTNRTLKTQLVKQKEGGDSKECTTPQMQLNLALYTLNFLNIYRNQTTTSAEQHLTGKKNSPHEGKLIWWKDNKNKTWEIGKVITWGRGFACVSPGENQLPVWLPTRHLKFYNEPIGDAKKRASTEMVTPVTWMDNPIEVYVNDSIWVPGPIDDRCPAKPEEEGMMINISIGYRYPPICLGRAPGCLMPAVQNWLVEVPTVSPISRFTYHMVSGMSLRPRVNYLQDFSYQRSLKFRPKGKPCPKEIPKESKNTEVLVWEECVANMIMGLIAVTATAAVAGVALHSSVQSVNFVNDWQKNSTRLWNSQSSIDQKLANQINDLRQTVIWMGDRLMSLEHRFQLQCDWNTSDFCITPQIYNESEHHWDMVRRHLQGREDNLTLDISKLKEQIFEASKAHLNLVPGTEAIAGVADGLANLNPVTWVKTIGSTTIINLILILVCLFCLLLVCRCTQQLRRDSDHRERAMMTMAVLSKRKGGNVGKSKRDQIVTVSV

SEQ ID NO: 42916 - protein, 108 aa, Homo sapiens
TEECNATPATAAVAVTAINPIITAIKVKMNLLDLFKMPFNISVKIWMDGEASHGRSVDTGIHMPSLALTSRIRCCQLKVESMQVNNLQFSQVIVWEAGLITIFPTTSI

SEQ ID NO: 42917 - protein, 402 aa, Homo sapiens
  DOMAIN (369)..(389): SYNAPTOBREVIN SIGNATURE domain identified by eMATRIX, accession number PR00219C, p-value=7.150e-09, raw score of 9.04
  misc_feature (1)...(402): Xaa = X or * as defined in Table 2
MAARGTGDKVKPGCEEAGAAFELPPSVYAAALHESHQHQPCPAGGARAQRVPGGIVTEPLTCTPPKDMVFLSDDGDDDDDDDNDDGGGDDDNDGNDNDGDNDNGDDDDGDDNDDDGGDDDNDGNGNDGDNDNDDGDNDDSNGNDDGDGDDDGVDDDDDNSDGNDGDDDDSDDDDGDSNGYDDDGDGNDDDDGDSDDDDSDNGDGDNGDGDDDGGGGDDDDNGHDDDGDMMMMIVMMVMVMMVVMMVMVMMVVVVQLRKRAEASVSEAKCSINVSDDNDDGDGNDGDDDDSDGDDDDGGGDGGDSELTNQFPTNHSGMKASKLRKDSDHREWXWXXWWWWCNXGREQRPVFLKQSAQLMSVMIMMMVMVMMVMMMIVMVMMTMVVVMVVIVNSPINSRLITQA

SEQ ID NO: 42918 - protein, 126 aa, Homo sapiens
EERLCLAAVQSSKCEVTAFLQVYPTAPKRQQPSRTGHDDDGGFVEKKRGKRGEKKERSDCYCVCVERSPHMAAHGTISRHFLTSEPIKTPDSARLQQMGLPAVGKSYPLQVSWTHQDDLPLERSYP

SEQ ID NO: 42919 - protein, 254 aa, Homo sapiens
  DOMAIN (198)..(213): G-PROTEIN BETA WD-40 REPEAT SIGNATURE domain identified by eMATRIX, accession number PR00320B, p-value=4.774e-11, raw score of 12.19
RQWEVGRWSGTTIFSCFCKKTLYFTNPSPSSSSLVTVILRREVTHCGGAPEQRYQIIPVCVAARLPTRAQDVLDAHLSEVNAVRFGPNSSLLATGGADRLIHLWNVVGSRLEANQTLEGAGGSITSVDFDPSVRNSAPVAWDCALSDLHTGQGYQVLAATYNQAAQLWKVGEAQSKETLSGHKDKVTAAKFKLTRHQAVTGSRDRTVKEWDLGRAYSPKRQRPSRTGHDDDGGFVEKKRGKCGEKRDQIVTVSV

SEQ ID NO: 42920 - protein, 933 aa, Homo sapiens
  DOMAIN (149)..(194): kw TRANSCRIPTASE REVERSE II ORF2 domain identified by eMATRIX, accession number DM01354N, p-value=1.000e-40, raw score of 13.17
MKPEIKMFFETNENKDTTYQNLWDTFKAVCRGKFIALNAHKRKQERSKINTLTSQFKELEKQEQTNSKASRRQEITKIRAELKEIETQKPLQKINESRSWFFEKINKIDRPLARLIKKKREKNQIDAIKNDKGDITTDPTEIQTTIREYYKHLYANKLENLEEMDKFLDMYTLPRLNQEEVESLNRPITGSEIEAIINSLPTKKSPGPDGFTAEFYQRYKEELVSFLLKLFQSIKKEGILLNLFYEDSIILKPKPGRDTTKKENFRPISLMNIDAKILIKILANRIQQHIKKLIHHDQVGFIPGMQGWFNIRKSINVIQHINRTKDKNHMIISIDAEKAFDKIQQPFMLKTLNKLGIHGTYLKIIRAIYDKPTANIILNGQKLKAFPLKTGTRQGCPLSPLVFNIVLEVLAWAIRQEKEIKGIQLGKEEVKLSLFADDMTVYLENPIISAQNLLKLISNFSKVSGYKINVQKSQAFLYTNNGQTESLIMSELPFTIASKRIKYLGIQLTRDVKDLFKENYKPLLNEIKEDYKQMEEHSMLMGRKNQYRENGHTAQVRSASARPPIVWEVRSASARPPIIWEVRSASARPPIVWEVRSASARPPCLGSEEHLCPAAVQSSKCEGQPFCRCTQQLQRDSDHREGAMMTMAVLSKRKGGNAKKLKTLKKNLEECITRITNTEKCLKELMELKTKARELREECRSLRSRCDQLEERVSAMEDEMNEMKREGKFREKRIKRNEQSLQEIWDYVKRPNLCLISVPESDGENGTKLENTLQDIIQENFPNLPRQANVEIQEIQRTPQRYSSRRATPRHIIVRFTKVEMKEKMLRAAREKGRVTLKGKPIRLTADLSAEILQARREWGPIFNILKDKNFQPRISYPAKLSFISEGEIKSFTDKQMLRDFVTTRPALKELLKEVLNMERNNWYQPLQNHAKM

SEQ ID NO: 42921 - protein, 84 aa, Homo sapiens
QNRHRHHGPFSMVAVSSQLLDTPAERLSLHTWKIAQRPGRGTPHFPDGAVVQAETLPQTGRPGRGTPHFPDGAASSFGYCSLVA

SEQ ID NO: 42922 - protein, 1396 aa, Homo sapiens
  DOMAIN (101)..(117): PROTEASE POLYPROTEIN HYDROLASE ASP domain identified by eMATRIX, accession number PD00302B, p-value=1.000e-13, raw score of 9.52
EGLEALIHQERLSYWANQVSEDRPVCKAIIQGKQFEGLVDTGADVSIIALNQWPKNWPKQKAVTGLVGIGTASEVYQSMEILHCLGPDNQESTVQPMITSIPLNLWGRDLLQQWGAEITMPAPLYSPTSQKIMTKMGYIPGKGLGKNEDGIKVPVEAKINQEREGIGYPFLGAVTVEPPKPIPLTWKTEKPVWVNQWPLPKQKLEALHLLANEQLEKGHIEPSFSPWNSPVFVIQKKSGKWHTLTDLRAVNAVIQPMGPLQPGLPSPAMIPKDWPLIIIDLKDCFFTIPLAEQDCEKFAFTIPAINNKEPATRFQWKVLPQGMLNSPTICQTFVGRALQPVREKFSDCYIIHYIDDILCAAETKDKLIDCYTFLQAEVANAGLAIASDKIQTSTPFHYLGMQIENRKIKPQKIEIRKDTLKTLNDFQKLLGDINWIRPTLGIPTYAMSNLFSILRGDSDLNSQRILTPEATKEIKLVEEKIQSAQINRIDPLAPLQLLIFATAHSPTGIIIQNTDLVEWSFLPHSTVKTFTLYLDQIATLIGQTRLRITKLCGNDPDKIVVPLTKEQVRQAFINSGAWQIGLANFVGLIDNHYPKTKIFQFLKLTTWILPKITRREPLENALTVFTDGSSNGKAAYTGPKERVIKTPYQSAQRAELVAVITVLQDFDQPINIISDSAYVVQATRDVETALIKYSMDDQLNQLFNLLQQTVRKRNFPFYITHIRAHTNLPGPLTKANEQADLLVSSALIKAQELHALTHVNAAGLKNKFDVTWKQAKDIVQHCTQCQVLHLPTQEAGVNPRGLCPNALWQMDVTHVPSFGRLSYVHVTVDTYSYSHFIWATCQTGESTSHVKKHLLSCFAVMGVPEKIKTDNGPGYCSKAFQKFLSQWKISHTTGIPYNSQGQAIVERTNRTLKTQLVKQKEGGDSKECTTPQMQLNLALYTLNFLNIYRNQTTTSAEQHLTGKKNSPHEGKLIWWKDNKNKTWEIGKVITWGRGFACVSPGENQLPVWLPTRHLKFYNEPIGDAKKRASTEMVTPVTWMDNPIEVYVNDSIWVPGPIDDRCPAKPEEEGMMINISIGYRYPPICLGRAPGCLMPAVQNWLVEVPTVSPISRFTYHMVSGMSLRPRVNYLQDFSYQRSLKFRPKGKPCPKEIPKESKNTEVLVWEECVANMIMGLIAVTATAAVAGVALHSSVQSVNFVNDWQKNSTRLWNSQSSIDQKLANQINDLRQTVIWMGDRLMSLEHRFQLQCDWNTSDFCITPQIYNESEHHWDMVRRHLQGREDNLTLDISKLKEQIFEASKAHLNLVPGTEAIAGVADGLANLNPVTWVKTIGSTTIINLILILVCLFCLLLVCRCTQQLRRDSDHRERAMMTMAVLSKRKGGNVGKSKRDQIVTVSV

SEQ ID NO: 42923 - protein, 144 aa, Homo sapiens; identical to SEQ ID NO: 41722
  DOMAIN (60)..(112): Ribosomal protein S3Ae proteins domain identified by eMATRIX, accession number BL01191C, p-value=1.000e-33, raw score of 16.50
  misc_feature (1)...(144): Xaa = X or * as defined in Table 2

SEQ ID NO: 42924 - protein, 214 aa, Homo sapiens; identical to SEQ ID NO: 41680
  DOMAIN (13)..(64): Ribosomal protein S3Ae proteins domain identified by eMATRIX, accession number BL01191A, p-value=1.000e-40, raw score of 15.57

SEQ ID NO: 42925 - protein, 91 aa, Homo sapiens; identical to SEQ ID NO: 41724
  DOMAIN (7)..(59): Ribosomal protein S3Ae proteins domain identified by eMATRIX, accession number BL01191C, p-value=8.096e-38, raw score of 16.50

SEQ ID NO: 42926 - protein, 146 aa, Homo sapiens; identical to SEQ ID NO: 41725

SEQ ID NO: 42927 - protein, 119 aa, Homo sapiens; identical to SEQ ID NO: 41726

SEQ ID NO: 42928 - protein, 84 aa, Homo sapiens
IFSTPRYHPKSQPFVDHVFTFTILDNRIWFRNFQIIEEDAALVEIGPRFVLNLIKIFQGSFGGPTLYENPHYQSPNMHRRVIRS

SEQ ID NO: 42929 - protein, 290 aa, Homo sapiens
RDRIPGPVCKGKWKNKERILIFSSRGINFRTRHLMQDLRMLMPHSKHDTNMARSDNLSVINEGCEMNNWLRCIYFEAKKKQDLYMWLSNSPDGPSAKFLVQNIHTLAELKMTGNCLKGSRPLLSFDPAFDELPHYALLKELLIQIFSTPRYHPKSQPFVDHVFTFTILDNRIWFRNFQIIEEDAALVEIGPRFVLNLIKIFQGSFGGPTLYENPHYQSPNMHRRVIRSITAAKYREKQQVKDVQKLRKKEPKTLLPHDPAADVFVTPAEEKPIEIQWVKPETKVDLKASV

SEQ ID NO: 42930 - protein, 114 aa, Homo sapiens
  DOMAIN (85)..(111): PpiC-type peptidyl-prolyl cis-trans isomerase proteins domain identified by eMATRIX, accession number BL01096C, p-value=6.063e- 18, raw score of 21.86
MRQRKSNEGERRHSRQATGTADRLQPRVRTNLGHMPGHAGTEPAGPPTQTADVRRRPQPARQPPARPHPPRRHPPPTPSQMQKPFEDASFALRTGEMSGPVFTDSGIHIILRTE

SEQ ID NO: 42931 - protein, 191 aa, Homo sapiens
  DOMAIN (33)..(48): WW/rsp5/WWP domain proteins domain identified by eMATRIX, accession number BL01159, p-value=3.077e-15, raw score of 13.85
  misc_feature (1)...(191): Xaa = X or * as defined in Table 2
PGWEKRMSRSSGVNTQEALPTAAIPTDAKVRVYYFNHITNASQWERPIGNSSSGGKNGQGEPARVRCSHLLVKHSQSRRPSSWRQEKITRTKEEALELINGYIQKIKSGEEDFESLASQFSDCSSAKARGDLGSFSRGQMQKPFXRTPRFALRTGGDERGPCFTDSGIHIILPHLSEGGKPRPGLGAGQGG

SEQ ID NO: 42932 - protein, 37 aa, Homo sapiens
GWMDGWMDGWMDGWTGGRKDKWMDEWMDGCTDFCHGK

SEQ ID NO: 42933 - protein, 83 aa, Homo sapiens
LNGQEETAGVVSTNLILNGDWTFQIVVMLEMTPQQGDVYISQVEHTSLDSPVTVEWKAQEEQESSTRICINRVPDLTEKTNVP

SEQ ID NO: 42934 - protein, 170 aa, Homo sapiens
  DOMAIN (118)..(153): Class II histocompatibility antigen beta domain proteins. domain identified by eMATRIX, accession number PF00969E, p-value= 7.686e-35, raw score of 11.49
EDYLERKRQVPTECQTHSKLGGPMTLKREVKPKVDVSPSKKGPLQHHTLLVCHVRIFYPGSIQVRWFLNGRKKTAGVVSPNLIRNGDWTFQILVMLEMTPQQGDVYTCQVEHTSLDSPVTVEWKAQSDSARSKTLTGAGGFVLGLIICGVGIFMHRRSKKFNEDLHKQGS

SEQ ID NO: 42935 - protein, 121 aa, Homo sapiens
  DOMAIN (24)..(59): Class II histocompatibility antigen beta domain proteins. domain identified by eMATRIX, accession number PF00969E, p-value= 5.154e-33, raw score of 11.49
MLEMTPQQGDVYICQVEHTSLDSPVTVEWKAQSDSARSKTLTGAGGFVLGLIICGVGTFMHRRSKKGEKACKFNEDLHKQELEALFLVLKGQSDKRHSIAHGLRLPDAQGLTLVARTDVLS

SEQ ID NO: 42936 - protein, 126 aa, Homo sapiens
  DOMAIN (56)..(92): Class II histocompatibility antigen beta domain proteins. domain identified by eMATRIX, accession number PF00969B, p-value= 1.000e-40, raw score of 9.97
MMVLQVSAAPRTVALTALLMVLLTSVVQGRATPENYLFQGRQECYAFNGTQRFLERYIYNREEFARFDSDVGEFRAVTELGRPAAEYWNSQKDILEEKRAVPDRMCRHNYELGGPMTLEARSPSLG

SEQ ID NO: 42937 - protein, 143 aa, Homo sapiens [sequence omitted]

SEQ ID NO: 42938 - protein, 427 aa, Homo sapiens
MDDMGLVAKACGCPLYWKGPLFYGAGGERTGSVSVHKFVAMWRKILQNCHDDAAKFVHLLMSPGCNYLVQEDFVPFLQDVVNTHPGLSFLKEASEFHSRYITTVIQRIFYAVNRSWSGRITCAELRRSSFLQNVALLEEEADINQLTEFFSYEHFYVIYCKFWELDTDHDLLIDADDLARHNDHALSTKMIDRIFSGAVTRGRKVQKEGKISYADFVWFLISEEDKKTPTSIEYWFRCMDLDGDGALSMFELEYFYEEQCRRLDSMAIEALPFQDCLCQMLDLNLKRCKLANVFFDTFFNIEKYLDHEQKEQISLLRDGDSGGPELSDWEKYAAEEYDILVAEETAGEPWEDGFEAELSPVEQKLSALRFPAGPEALLRGALTAGRRGPVRVRVRGRGPGAAVTPPARTPPRGRPPRATNRGQPRLV

SEQ ID NO: 42939 - protein, 148 aa, Homo sapiens
GLELPGRDKQTVAYRLLLGALALAYGEKNLTFEGPLPEKIKLLAHKGLLNLTYYQQIQVQKKDNKIFEISCCSDHRCKWLPASMNTVCTQSLTLAIDSCHGTVVALRYAWTTWPCEYKQCPLYHPSSALPAPPFIAFITDQGPGKKKK

SEQ ID NO: 42940 - protein, 139 aa, Homo sapiens
MRGTVAAVFGETLPQHIHPRDKQTVAYRLHLGARALAYGEKNLTFEGPLPEKIELLAHKGLLNLTYYQQIQVQKKDNKIFEAQRIGVLRGDFKAGSGEWHNLPMPVGITLLLPHSQAAIQSRNSGIQCPSTCVRPHHAP

SEQ ID NO: 42941 - protein, 99 aa, Homo sapiens
  misc_feature (1)...(99): Xaa = X or * as defined in Table 2
TILRSFGYFFRRINIMLTEEKIKSDHRKISQLIFLQKLCQTLQSENVSQGGMLYRAKAXHXTXTLVWVXHVMSYPHKGLGLMLSLCSVKHSTLRDVFTL

SEQ ID NO: 42942 - protein, 434 aa, Homo sapiens
NVWGFLRVFSKMLNKLLFSHSTPFRKAKALYACKAEHDSELSFTAGTVFDNAGACRPQQTAGAVGLLKAVQSHFTASCLLHVLKQGRQTMTCPSNPTCHLSPNNSVTAPTYNMVVIINPIGIVESRRKVWLRNFRADEENELVIRVEDHGPGSLSFPSSLQFPFTCLTKELPKVEGKAIESRCHSEPVLAEMWSSSGSTCIIERKKCWMQSNTRTREKEKVGSNWPWPIESNHPRFFMFPFSHQLLTTSSMPELLQPGSSQVFIYSSARINTTPKPEAIKMPVVWLKHMMQANQIFAPLPPLAPLHVKSKVAPKQEMGLLSYRDEACVASPSDSGMECGLLSCHSPWTETVSRDSRTFLRLEHSVWSSTERIRDMAVMDRKGGNYHRKVGDSVAVIPLGGRKLGSVQKPLDKPGGSPSQKSSVAPGLLPTPSDG

SEQ ID NO: 42943 - protein, 324 aa, Homo sapiens
  DOMAIN (60)..(97): Aldehyde dehydrogenases glutamic acid proteins domain identified by eMATRIX, accession number BL00687C, p-value=4.750e- 21, raw score of 24.13
MNPLECVDRSSQPWGNPTWTSSGMRSVTFLVGFKLTFLALAQTLNAAASLTGQELLAGFPPGVINILPGYGPTAGAAIASHIGIDKIAFTGSTEKEAELHSWIKGLTCISIEPDFQKSLKDGIILCILMNKLQPASFPKINHSMQKWHQLENLSNFIKAVVSYDMNPMDLFKANNLFESGNMRHMQVSLFALAGKVKTKRPQSGVDIGIKYSEKQEQNFSDAAMKAGQCVIGLQMGTNKCTSQLGMTVYGMGTNNCASQVSMTAPGTRQHICDTKLGTDKCGNSSMSLQMGYTQGAANQPRVCEWQRGIRQQGFLPPCLGPSQE

SEQ ID NO: 42944 - protein, 367 aa, Homo sapiens
  DOMAIN (103)..(140): Aldehyde dehydrogenases glutamic acid proteins domain identified by eMATRIX, accession number BL00687C, p-value=4.750e- 21, raw score of 24.13
MNPLECVDRSSQPWGNPTWTSSGMRSVTFLVGFKLTFLALAQTLNAAASLTGQELLWNFPLLMFAWKIAPALCCGNTVVIKPAEQTPLSALYMGALIKEAGFPPGVINILPGYGPTAGAAIASHIGIDKIAFTGSTEKEAELHSWIKGLTCISIEPDFQKSLKDGIILCILMNKLQPASFPKINHSMQKWHQLENLSNFIKAVVSYDMNPMDLFKANNLFESGNMRHMQVSLFALAGKVKTKRPQSGVDIGIKYSEKQEQNFSDAAMKAGQCVIGLQMGTNKCTSQLGMTVYGMGTNNCASQVSMTAPGTRQHICDTKLGTDKCGNSSMSLQMGYTQGAANQPRVCEWQRGIRQQGFLPPCLGPSQE

SEQ ID NO: 42945 - protein, 243 aa, Homo sapiens
  DOMAIN (100)..(116): CALPONIN SIGNATURE domain identified by eMATRIX, accession number PR00889E, p-value=1.422e-14, raw score of 12.18
MNKLQPASFPKINHSMQKWHQLENLSNFIKAVVSYDMNPMDLFKANNLFESGNMRHMQVSLFALAGKVKTKRPQSGVDIGIKYSEKQEQNFSDAAMKAGQCVIGLQMGTNKCTSQLGMTVYGMGTNNCASQVSMTAPGTRQHICDTKLGTDKCGNSSMSLQMGYTQGMSHQAVEEKGSRPYPNMCMVRVPAGTSRLPAELWPGRRDLGLEGTSTRRFPVALPLPTFVSRSVCGFYTRKSFRMH

SEQ ID NO: 42946 - protein, 44 aa, Homo sapiens
  misc_feature (1)...(44): Xaa = X or * as defined in Table 2
SFCSANFEVFRLTAQQXFVRXHALSHIFXGXVXSFPKSTKRVNF

SEQ ID NO: 42947 - protein, 222 aa, Homo sapiens
  DOMAIN (89)..(109): POTASSIUM CHANNEL SIGNATURE domain identified by eMATRIX, accession number PR00169A, p-value=1.806e-11, raw score of 16.77
VHLLLFPPPRTVGPICQDSLITRSPASPLNNQGIPTPAQLTKSNAPVHIDVGGHMYTSSLATLTKYPESRIGRLFDGTEPIVLDSLKQHYFIDRDGQMFRYILNFLRTSKLLIPDDFKDYTLLYEEAKYFQLQPMLLEMERWKQDRETGRFSRPCECLVVRVAPDLGERITLSGDKSLIEEVFPEIGDVMCNSVNAGWNHDSTHVIRFPLNGYCHLNSVQVL

SEQ ID NO: 42948 - protein, 275 aa, Homo sapiens
  DOMAIN (48)..(68): POTASSIUM CHANNEL SIGNATURE domain identified by eMATRIX, accession number PR00169A, p-value=1.806e-11, raw score of 16.77
MKRYSYGSVLFTAFDLGYLDPDEVQQGHEIGRLFDGTEPIVLDSLKQHYFIDRDGQMFRYILNFLRTSKLLIPDDFKRTLVFILPLAAPFSVGLEACPLAGKRLKGSVCPELEFPLWKKHRVFSQSLPYKTHAFNEERLQDNKSYIHSVLQEPREDTDPEGAGAAPDHRSTYKLLSPALSLNLGEKNKWLRRYIELLISEREMAAAGSSIPSWTSVSIQVKLRKCQLQLLAKEEVATIVLDETSGVNGIHIEHQLQCLIQVPKLSAPNIAPPTPA

SEQ ID NO: 42949 - protein, 156 aa, Homo sapiens
WPNPVLLKQPEECNLNLPVWDPRVNPSDRYHLMPIITPAYPQQNSTYNVSTSTRTVMVEEFKQGLAVTDEILQGKSDWSKLLEPPNFFQKYRHYIVLTASASTEENHLEWVGLAESKIRVLVGNLERNESITLAHVNPQSFPGNKEHHKDNNYVSM

SEQ ID NO: 42950 - protein, 561 aa, Homo sapiens
MLLNRNVAEERSQSQNWPGVSVGCGGRGKIEDCVWVLLKVPLGGGGTGLSSGGKEGNRNGPHLHTSETNPIHLAAIKPVPVFLNPGWGALKNACAQVSLQANLITPSVDGSRASRLCEAELGPLASASLDLKVFPEGQFGLACRYLCRPQQCTENTPSQHAHKSGSSAKHQTPTLLPMPDAKEWPNPVLLKQPEESNLNLPVWDPRVNPSDRYHLMPIITPAYPQQNSTYNVSTSTRTVMVEEFKQGLAVTDEILQGKSDWSKLLEPPNFFQKYRVGLVESKIRVLVGNLERNEFITLAHVNPQSFPGNKEHHKEQANNINMLKEGMKIEATHVKKKQLHHYLPAEILQKKKKQSLSDVNRSSGGLQSKRLSLDSSCLDSSRDTDNGTPFNSPASKSDSPSVGETERNSAEPAAVIVEKPLSVPPAQGLSIPVIGAKVDSTVKTVSPPTVCTIPTVVGRNVIPRITTPHNPAQGQPHLNGMSNITKTVTPKRSHSPSIDGTPKRLKDVEKDAIGGESMPIPTIDTSRKKRLPSKELPDSSSPVPANNIRVIKNSIRLTLNR

SEQ ID NO: 42951 - protein, 583 aa, Homo sapiens
  DOMAIN (504)..(516): KH domain proteins family of RNA binding proteins domain identified by eMATRIX, accession number PF00013, p-value=1.000e-10, raw score of 5.78
  misc_feature (1)...(583): Xaa = X or * as defined in Table 2
MNKPYIRNLSENAAPLDLEGILKDAKIPVSGPFLVKIGYAFVDCPDEIWALKAIEALSGKIELHGKPIEVEHSVPKRQRIRKLQIRNIPPHLQWEVLDSXLVQYGVVESCQQVNTDSETAVVNVTYSSKDQARQALDKLLDKLNGFQLENFTLKVAYIPDEMATQQNPFLQPRGRRGLGQRGSSRQGSPGSVSKQKPCDLPLCLLVPTQFVGAIIGKEGATIRNITKQTQSKIDVHRKENAGAAEKSITILSTPEGTSAACKSILEIMRKETQDVKFTEEIPLKILAQNNFVGRLIGKEGRNLKKIEQDTDTKITISPLQELMQYNPEHTITAKGNVETCAKAEEEIMKKIRERXENDITSMNLQAHLIPGLNLNALGLFPPTSGMPPPTSGPPSAMTPPSPQSEQSESETVHLFIPALSVRALISKQGQHIKQLSRFAGASSKIAPVEAPDAKVRMVMIAGSPEARFKAQGRIYGKIKEENFVSPKEEVKLEAHIRVPSFAAGRVIGKGGKTVNELQNFSSAEVVVPRDQTPDENDQVVVKITGHFYACQVAQRKIQEILTQVKQHQQQKALQSGPPQSRRK

SEQ ID NO: 42952 - protein, 266 aa, Homo sapiens
ILKDAKIPVSGPFLVKIGYAFVDCPDEIWALKAIEALSGKIELHGKPIEVEHSVPKRHHRKENAGAAEKSITILSTPEGTSAACKSILEIMRKETQDVKFTEDVHLFIPALSVRALISKQGQHIKQLSRFAGASSKIAPVEAPDAKVRMVMIAGVVPCDQTPDENDQVVVKITGHFYACQVAQRKIQEILTQVKQQQQQKALQSGPPQSRRSFVEDNVSVEEGGVQGGKMFGDEAVPPQIISHWILIRSVQPGFPHAQFTVGFQLL

SEQ ID NO: 42953 - protein, 110 aa, Homo sapiens
  DOMAIN (70)..(82): Enoyl-CoA hydratase/isomerase proteins domain identified by eMATRIX, accession number BL00166A, p-value=7.429e-10, raw score of 14.82
MDKLEIITQCDKFQGAEDSQKGLTGSNYPGLSISLRLTGSSAQEEASGVALGEAPDHSYESLRVTSAQKHVLHVQLNRPNKRNAMNKVFWRSDLQILEACLRGEAGLRDW

SEQ ID NO: 42954 - protein, 71 aa, Homo sapiens
  misc_feature (1)...(71): Xaa = X or * as defined in Table 2
MAVEYVLEASLRNXREVYSLPEMSLLSNVTLELLYTTFSFLLFMKNGIPPGSSKILLTETNVGVRKITHIA

SEQ ID NO: 42955 - protein, 55 aa, Homo sapiens
KLHQFHHSDCLSTWLLHFIATNYLIFSQKPEFQDLSSSFKGTSNGSSSFQSNFRQ

SEQ ID NO: 42956 - protein, 297 aa, Homo sapiens
KASCFQPTDKGILLFLAQYQRMSKKVNLQKKGLSEIIKCYEALPAVISPSLLPTDFQKVLVSYIGLKGLYFTGYLLFGLGTGFIGLFPNVYSTLVLCSLFGVMSSTLYTVPFNLITEYHREEEKERYNEPPTKHEGASDPSKSNKLLTVRLKRIKQQQQIVHQNASNASYNNMSSEIHKEKQPAVVSETGQEKGVSRYPSLVMLDCCRWHYTDRFTWFYLGEIGHLRYPEGVPRVNTQNSTPQNTIHPNMNATQLKTPPHANTVFLTPLRSGFNTPVAATTRLILRLGIAAQIVRVV

SEQ ID NO: 42957 - protein, 622 aa, Homo sapiens
  DOMAIN (187)..(241): Kinesin light chain repeat proteins domain identified by eMATRIX, accession number BL01160B, p-value=4.088e-12, raw score of 19.54
MFTSKSNSVSPSPSLEQADSDALDISTKVQLYGVLWKRPFGRPSAKWSRRFFIIKESFLLYYSESEKKSFETNKYFNIHPKGVIPLGGCLVEPKEEPSMPYAMKISHQDFHGNILLAAESEFEQTQWLEMLQESGKVTWKNAQLGEAMIKSLEAQGLQLAKEKQEYLDKLMEETEELCLQREQREELERLNQVLEAEKQQFEEVVQELRMEQEQIKRELELTARCLKGVEQEKKELRHLTESLQQTLEELSIEKKKTLEMLEENENHLQTLANQSEQPPPSGGLHSNLRQIEEKMQQLLEEKLLAEKRMKENEERSRALEEEREFYSSQSQALQNSLQELTAEKQQAERELKAEVKVRMDLERRLREAEGALRSLEQGLNSKVRNKEKEERMRADVSHLKRFFEECIRNAELEAKMPVIMKNSVYIHKAATRRIKSCRFHRRRSSTSWNDMKPSQSFMTSQLDANNMEELKEVAKRLSRDQRFRESIYHIMATQPGAPSALSRGGNCKMFSHHIGTDGRKKWLLLSAPEDLISSQRLAPRAPHPTLGHACGLARVGETRPPSFTSNAAQTKPCGLHGIINSENAPRDLRKETPLVAGLQVLVCLCPTDDTILPVTPGSPMAS

SEQ ID NO: 42958 - protein, 44 aa, Homo sapiens
KNFEESRDGRVDSWRNFQANTKGKKEKKNRTFLRPPKVKMEQRE

SEQ ID NO: 42959 - protein, 82 aa, Homo sapiens
  DOMAIN (27)..(38): PROTEIN REPEAT MUSCLE CALCIUM-BI domain identified by eMATRIX, accession number PD00301B, p-value=2.731e-09, raw score of 5.49
ELEIKRKEREAKEMHERKRQREEEIEAQEKAKREREWQKNFEESRDGRVDSWRNFQANTKGKKEKKNRTFLRPPKVKMEQRE

SEQ ID NO: 42960 - protein, 269 aa, Homo sapiens
  DOMAIN (85)..(102): Nt-dnaJ domain proteins domain identified by eMATRIX, accession number BL00636A, p-value=4.724e-13, raw score of 8.07
FGMRGSRGGWAGEMAASGESGTSGGGGSTEEAFMTFYSEVKQIEKRDSVLTSKNQIERLTRPGSSYFNLNPFEVLQIDPEVTDEEIKKRFRQLSILVHPDKNQDDADRAQKAFEAVDKAYKLLLDQEQKKRALDVIQAGKEYVEHTVKERKKQLKKEGKPTIVEEDDPELFKQAVYKQTMKLFAELEIKRKEREAKEMHERKRQREEEIEAQEKAKREEREWQKNFEESRDGRVDSWRNFQAQFRRGKKEKKNRTFLRPPESKNGSNVE

SEQ ID NO: 42961 - protein, 39 aa, Homo sapiens
SDSPSTPRQETLRYRKPFCPCDKLLAEKVPARPHLDLEK

SEQ ID NO: 42962 - protein, 58 aa, Homo sapiens
  misc_feature (1)...(58): Xaa = X or * as defined in Table 2
LMTLPCKIPSPGSSWLKISPIEHLMTPTPASQRTTPFDCNFPLPTQILXNGPTPISLH

SEQ ID NO: 42963 - protein, 746 aa, Homo sapiens
  DOMAIN (170)..(201): Protein kinases ATP-binding region proteins domain identified by eMATRIX, accession number BL00107A, p-value=5.091e-15, raw score of 18.39
KIFPFDASFLPCLHKFNLKGKGNSKGFKMAEKFESLMNIHGFDLGSRYMDLKPLGCGGNGLVFSAVDNDCDKRVAIKKIVLTDPQSVKHALREIKIIRRLDHDNIVKVFEILGPSGSQLTDDVGSLTELNSVYIVQEYMETDLANVLEQGPLLEEHARLFMYQLLRGLKYIHSANVLHRDLKPANLFINTEDLVLKIGDFGLARIMDPHYSHKGHLSEGLVTKWYRSPRLLLSPNNYTKAIDMWAAGCIFAEMLTGKTLFAGAHELEQMQLILESIPVVHEEDRQELLSVIPVYIRNDMTEPHKPLTQLLPGISREALDFLEQILTFSPMDRLTAEEALSHPYMSIYSFPMDEPISSHPFHIEDEVDDILLMDETHSHIYNWERYHDCQFSEHDWPVHNNFDIDEVQLDPRALSDVTDEEEVQVDPRKYLDGDREKYLEDPAFDTNYSTEPCWQYSDHHENKYCDLECSHTCNYKTRSSSYLDNLVWRESEVNHYYEPKLIIDLSNWKEQSKEKSDKKGKSKCERNGLVKAQIALEEASQQLAGKEREKNQGFDFDSFIAGTIHLSSQHEPTDVGDKLNDLNSSVSQLELKSLISKSVSQEKQEKGMANLAQLEALYQSSWDSQFVSGGEDCFFINQFCEVRKDEQVEKENTYTSYLDKFFSRKEDTEMLETEPVEDGKLGERGHEEGFLNNSGEFLFNKQLESIGIPQFHSPVGSPLKSIQATLTPSAMKSSPQIPHQSDKQAAF

SEQ ID NO: 42964 - protein, 72 aa, Homo sapiens
  misc_feature (1)...(72): Xaa = X or * as defined in Table 2
WKITVKGGVFLWWAGVGDTKVLSGGAFXARMSQEEDFHKVMSSVKARTGHLHFFCGGMSSVKAGQGPFSVLL

SEQ ID NO: 42965 - protein, 494 aa, Homo sapiens
GVNSRNPRRPPPSSVNTGGITEIMAEGGELEFVKRIIHDSLQLKKRLRIDMAALLIGVCSEVSGRKDWIQQLAPRWYSCMLGKKCSLAPLKEELRIQGVPKVTYTEFCQGRTMRWALAWSFYDDVTVPVHEGRLAVGGVTSDSQNKGSASPPSKRRKLEKPRKPITFVVLASVMKELSLKASPLRSETAEGIVVVTTWIEKILTDLKVQHKRVPCGKEEVSLFLTAIENSWIHLRRKKRERVRQLREVPRAPEDVIQALEEKKPTPKESGNSQELARGPQERTPCGPALREGEAAAVEGPCPSQESLSQEENPEPTEDERSEEKGGVEVLESCQGSSNGAQDQEASEQFGSPVAERGKRLPGVAGQYLFKCLINVKKEVDDALVEMHWVEGQNRDLMNQLCTYIREQEAGKSTDFDVQTWVPVQFHSLHRGPSHLLREESEGVYPWACLLFLPLLADLIHASFFNHSSYIHCAQIQTHPELPASSFLTRRPMAV

SEQ ID NO: 42966 - protein, 161 aa, Homo sapiens
WDLIYVGRKRMQVEHPEKAVPRVRNLVEADYSYWTLAYVISLQGARKLLAAEPLSKMLPVDEFLPVMFDKHPVSEYKAHFSLRNLHAFSVEPLLIYPTHYTGDDGYVSDTETSVVWNNEHVKTDWDRAKSQKMREQQALSREAKNSDVLQSPLDSAARDEL

SEQ ID NO: 42967 - protein, 37 aa, Homo sapiens
KNGMNMSFSFSNYAQSSQFRTWQDSSVSYAAGALTVH

SEQ ID NO: 42968 - protein, 297 aa, Homo sapiens
  misc_feature (1)...(297): Xaa = X or * as defined in Table 2
MSNRVVCREASHAGSWYTASGPQLNAQLEGWLSQVQSTKRPARAIIAPHAGYTYCGSCAAHAYKQVDPSITRRIFILGPSHHVPLSRCALSSVDIYRTPLYDLRIDQKIYGELWKTGMFERMSLQTDEDEHSIEMHLPYTAKAMESHKDEFTIIPVLVGALSESKEQEFGKLFSKYLADPSNLFVVSSDFCHWGQRFRYSYYDESQGEIYXSIEHLDKMGMSIIEQLDPVSFSNYLKKYHNTICGRHPIGVLLNAITELQKNGMNMSFSFLNYAQSSQCRNWQDSSVSYAAGALTVH

SEQ ID NO: 42969 - protein, 37 aa, Homo sapiens; identical to SEQ ID NO: 42967

SEQ ID NO: 42970 - protein, 297 aa, Homo sapiens; identical to SEQ ID NO: 42968
  misc_feature (1)...(297): Xaa = X or * as defined in Table 2

SEQ ID NO: 42971 - protein, 304 aa, Homo sapiens
  DOMAIN (101)..(147): RECEPTOR PRECURSOR TRANSMEMBRANE domain identified by eMATRIX, accession number PD02520A, p-value=8.054e-39, raw score of 24.85
MRPTLLWSLLLLLGVFAAAAAAPPVFLEENNFLVMAEESENAFLFLICKVMERWEMVNRRVEGGIMVPKDVHALILRVREPGNVLPDVQKGLRRYPLSQLPAPQHPKIRLYNAEQVLSWEPVALSNSTRPVVYQVQFKYTDSKWFTADIMSIGVNCTQITATECDFTAASPSAGFPMDFNVTLRLRAELGALHSAWVTMPWFQHYRNASTELQQVILISVGTFSLLSVLAGACFFLVLKYRGLIKYWFHTPPSIPLQIEEYLKDPTQPILEALDKDSSPKDDVWDSVSIISFPEKEQEDVLQTL

SEQ ID NO: 42972 - protein, 52 aa, Homo sapiens
MRPTLLWSLLLLLGVFAAAAAAPPVFLEENNFLVMAEESENAFLFLICKVME

SEQ ID NO: 42973 - protein, 336 aa, Homo sapiens
  DOMAIN (210)..(256): RECEPTOR PRECURSOR TRANSMEMBRANE domain identified by eMATRIX, accession number PD02520A, p-value=7.811e-39, raw score of 24.85
YVLWGLLKQTFRLKGRILELCDQAPERRVGGGQEGWGLQGTPGGLGRGLAGPFRKDRGPRRWASRGAPVSRTFREAPRSGRPAAWGPRAAAAEAPQGRGSRSGKVPRGGGGLGGGTGRGRGRGRPSRIPSTGTPRCRSGRGGPCAPCARHGGLGGDVSGSADPERGPGRDLSRRRAPGAMRPTLLWSLLLLLGVFAAAAAAPPDPLSQLPAPQHPKIRLYNAEQVLSWEPVALSNSTRPVVYRVQFKYTDSKWFTADIMSIGVNCTQITATECDFTAASPSAGFPMDFNVTLRLRAELGALHSAWVTMPWFQHLSECDCRASRKQLGDPRRRLPHQ

SEQ ID NO: 42974 - protein, 127 aa, Homo sapiens
NMNKPITPSTYVRCLNVGLIRKLSDFIDPQEGWKKLAVAIKKPSGDDRYNQFHIDAVPKTANTLPSKEAITVQQKQMPFCDKDRTLMTPVQNLEQSYMPPDSSSPENKSLEVSDTRFHSFSFYELKN

SEQ ID NO: 42975 - protein, 102 aa, Homo sapiens
MQDILVLQNFACVHAAWDVLLHKGSLQSTHPHCLSRFLRRFEALLQTGKSPTSELLFDWGTTNCTVGDLVDLLIQNEFFAPASLLLPGKLEHPKNLQPCPCF

SEQ ID NO: 42976 - protein, 375 aa, Homo sapiens
MSLFSRLVKYNLSQIIFPKNQKLDLQNLSLEDGRNQEVHTLIKYTDGDQNHQSGSEKEDTIVDGTSKCEEKADVLSSFLDEKTHELLNNFACDVREKWLSKTELIGLPPEFSIGRILDKNQRASLHSAIRQKFPFLVTVGKNSEIVVKPNLEYKELCHLVSEEEAFDFFKYLDAKKENSKFTFKPDTNKDHRKAVHHFVNKKFGNLVETKSFSKMNCSAGNPNVVVTVRFREKAHKLDSTKISVQPFPLCRNWWVLGLTDFKNEAADPRSESYGPKHCGFHSFSFYELKNVTNNFDERPISVGGNKMGEGGFGVVYKGYVNNTTVAVKKLAAALAVRCVRAVGVRVLAVFCSRGTCPEIKCLHWLKGMVTNQTKP

SEQ ID NO: 42977 - protein, 455 aa, Homo sapiens
  DOMAIN (237)..(264): Receptor tyrosine kinase class V proteins domain identified by eMATRIX, accession number BL00790N, p-value=8.958e-10, raw score of 13.25
MNKPITPSTYVRCLNVGLIRKLSDFIDPQEGWKKLAVAIKKPSGDDRYNQFHIRRFEALLQTGKSPTSELLFDWGTTNCTVGDLVDLLIQNEFFAPASLLLPDAVPKTANTLPSKEAITVQQKQMPFCDKDRTLMTPVQNLEQSYMPPDSSSPENKSLEVSDTRFHSFSFYELKNVTNNFDERPISVGGNKMGEGGFGVVYKGYVNNTTVAVKKLAAVSYIFRNKKKELLHSVPYNSANILLDEAFTAKISDFGLARASEKFAQTVMTSRIVGTTAYMAPEALRGEITPKSDIYSFDHQATIVDGTSKCEEKADVLSSFLDEKTHELLNNFACDVREKWLSKTELIGLPPEFSIGRILDKNQRASLHSAIRQKFPFLVTVGKNSEIVVKPNLEYKELCHLVSEEEAFDFFKYLDAKKENSKFTFKPDTNKDHRKAVPPILSTKKFGNLVETQIFF

SEQ ID NO: 42978 - protein, 46 aa, Homo sapiens
VVSTVVPDSAHKLFIGGLPNYLNDDQCHGLSKGYAFCEYVDINVTV

SEQ ID NO: 42979 - protein, 417 aa, Homo sapiens
  DOMAIN (287)..(312): Bacterial type II secretion system protein N proteins domain identified by eMATRIX, accession number BL01142C, p-value=6.182e- 10, raw score of 14.13
GTRSTSSLRRQMKNIVHNYSEAEIKVREATSNDPWGPSSSLMSEIADLTYNVVAFSEIMSMIWKRLNDHGKNWRHVYKAMTLMEYLIKTGSERVSQQCKENMYAVQTLKDFQYVDRDGKDQGVNVREKAKQLVALLRDEDRLREERAHALKTKEKLAQTATASSAAVGSGPPPEAEQAWPQSSGEEELQLQLALAMSKEEADQEERIRRGDDLRRRWQSRRARGRLGARRSRPSWTLLTSSRPQLLPRPQTPGGAQHPWLLPSPRLPPPRTPGAAPLSLQLLIPGEVQPPRRPLGTPGGLLPLQDPQLTLGVGPQPLQLGRGPRLIHGEVPMVGSRSVGPQPPIPGHRPRPSQIPGEGHLPSPAPMAQQQPGDSTRSPTSSLTLTDSARHCRPPGAAQESWSCWQERCRPEALGRLT

SEQ ID NO: 42980 - protein, 475 aa, Homo sapiens
AERMGHSNGGRVSKGRWRKSVESTCRLVCALGWKPSKTLDPASHSQPTVPSEIRAANAADAVLRLPGQPRLLIVSCHPWVVSTVVPDSAHKLFIGGLPNYLNDDQVKELLTSFGPLKAFNLVKDSATGLSKGYAFCEYVDINVTDQAIAGLNGMQLGDKKLLVQRASVGAKNATLSTINQTPVTLQVPGLMSSQVQMGGHPTEVLCLMNMVLPEELLDDEEYEEIVEDVRDECSKYGLVKSIEIPRPVDGVEVPGCGKGVSSLDDRMEPHLTEEKAEVQKIQPAQDAVTCQHLPQPSSGSRPISPRIGALCPLLLQPGTMSTSSLRRQMKNIVHNYSEAEIKVREATSNDPWGPSSSLMSEIADLTYNVVAFSEIMSMIWKRLNDHGKNWRHVYKSPSGSTGDEDNPTGPEALSHCEAATPPLALSGALCADLFWHEGESSCFSPSLRHMVSSCHFSPRWWVVQEQSFHFDGWGN

SEQ ID NO: 42981 - protein, 137 aa, Homo sapiens
  DOMAIN (116)..(135): ALPHA/BETA GLIADIN FAMILY SIGNATURE domain identified by eMATRIX, accession number PR00209B, p-value=9.707e-10, raw score of 4.88
EAGNDFYDGSYDDPSVPLLGQGKEKPQYGKNPVVMVDEIMSSSPPKFTFPEAGLRIMITNKFGPRTRLRMASRIIINERQRLINSANGVSSKPLQNGRHENIENGNVPVENPEDPQQNQEQQPPPQPPPPEPEPVEA

SEQ ID NO: 42982 - protein, 480 aa, Homo sapiens
  DOMAIN (218)..(237): ALPHA/BETA GLIADIN FAMILY SIGNATURE domain identified by eMATRIX, accession number PR00209B, p-value=9.707e-10, raw score of 4.88
MSELTRKHVTTVLSDISVLSAQEEIYTAGQTPGPVKQKSIANGNPVNSELEAGNDFYDGSYDDPSVPLLGQERSALITVLRSTVKEKPQYGKNPVVMVDEIMSSSPPKFTFPEAGLRIMITNKFGPRTRLRMASRIIINEGEPRMMAVTRAVGWVVELAVGRGGPGPLINPQSFPGNHANRQRLINSANGVSSKPLQNGRHENIENGNVPVENPEDPQQNQEQQPPPQPPPPEPEPVEADFLSPFSVPDENNVFPDSVGVSLMQPRFNAPQGLQIQEARGDKVKWVFTWPLIFLLCVTIPNCSKPRWEKFFMVTFITATLWIAVFSYIMVWLVTIIGYTLGIPDVIMGITFLAAGTSVPDCMASLIVARQGLGDMAVSNTIGSNVFDILVGLGVPWGLQTMVVNYGSTVKINSRGLVYSVVLLLGSVALTVLGIHLNKWRLDRKLGVYVLVLYAIFLCFSIMIEFNVFTFVNLPMCREDD

SEQ ID NO: 42983 - protein, 65 aa, Homo sapiens
  DOMAIN (14)..(58): Ribosomal protein L6 proteins 2 domain identified by eMATRIX, accession number BL00700D, p-value=1.000e-40, raw score of 21.51
MRPGVACSVSQAQKDELILEGNDIELVSNSAALIQQATTVKNKDIRKFLDGIYVSEKGTVQQADE

SEQ ID NO: 42984 - protein, 38 aa, Homo sapiens
  DOMAIN (19)..(29): Ribosomal protein L6 proteins 2 domain identified by eMATRIX, accession number BL00700C, p-value=4.000e-13, raw score of 11.76
SLYAHFPINVVIQENGSLVEIRNFLGEKYIRRVRMRPD

SEQ ID NO: 42985 - protein, 243 aa, Homo sapiens
  DOMAIN (125)..(169): Ribosomal protein L6 proteins 2 domain identified by eMATRIX, accession number BL00700D, p-value=1.243e-38, raw score of 21.51
MKTIRSNQTVDIPENVITLKGCRVIVKGPRGTLWRDFNHISIELSLLVKKKKRLRLNNTWGENMIKGVTLGFHYKMRSVYAHFPINIVTRENGSFVEIRNFLGEKYIRRVRMRPGVACSVCQTQKHELILEGNDIELVSNSAALIQQATTVKNKHIRKFLDGIYVSEKETAQHIRKFLDGIYVSEKGGSYRATRQARKLRLGWWRRGLGVRATLTAKTGLIPADRALPAAAPQAGQNRSASGN

SEQ ID NO: 42986 - protein, 259 aa, Homo sapiens
  DOMAIN (35)..(73): Ribosomal protein L6 proteins 2 domain identified by eMATRIX, accession number BL00700A, p-value=4.930e-13, raw score of 19.34
  misc_feature (1)...(259): Xaa = X or * as defined in Table 2
EWSSVRRSLVEKRALRRPHPQCLCFRMKTILSNQTCRPFPENVDITLKGRPVIVXGPAEGTLRRDFNHLQWXNLSLSWKEKKRGSRVDKWWGNRKGNWPTVRTYLVVHVQNMIKGVLPLGLPVTKDEGLVYAHFPHPTLVIPGRNGSSLLKSRNFLGVKNTSRRVSGXRPGVACSVSSSPRKDEFNPLKGNDIGACFQISAGFGFQQAPHTCLKTRDIQGNFWDGYPMVLWKKGTVSARAGWNKDLKEFTWATERKMPG

SEQ ID NO: 42987 - protein, 97 aa, Homo sapiens
ARACRHPMEDSMDMDMSPLRPQNYLFGCELKADKDYHFKVDNDENEHQLSLRTVSLGAGAKDELHIVEAEAMNYEGSPIKVTLATLKMSVQPNSSIM

SEQ ID NO: 42988 - protein, 90 aa, Homo sapiens; identical to SEQ ID NO: 36901

SEQ ID NO: 42989 - protein, 436 aa, Homo sapiens
  DOMAIN (107)..(151): Osteopontin proteins domain identified by eMATRIX, accession number BL00884B, p-value=1.673e-09, raw score of 12.47
MEDSMNMDMSPLRPQTYLFNCEPKADKDDHFKVNDDENKHQLSLRTVSLGAGAKDELHIVEAEAMNYKGSPIKVTLATLKMSVQATVSLGGFEIPLPVVLQSKCGLGPVHISGQHLVAVEEDAESEDEGSMEKSKTCCDDDDDDDDDDEDDEETEEKLRKTFKKWLLIPHAKRTGCCEADVGHILNSGINSLCFVGAVKLLADSRYECRGGLLCSGHCYQGGFQEDWEALLGEEKWIRVSPNEAVWPWSATAVPWGIPPSANHPVSLAPAGENGRLELQGWRLSPPPTQPTWVCLRQSPVCCHWPQPERLPNVCTVLCLGPKALVAWAHGGDLLIAGCTDPWKKHVFLGGVEQSLTASLGWGWEFPLPCAAPGWAFAPLCFSSFSVGHANRLISPNKRICIPQLKVQDPLTIFVLLSGSRGSQWLLVGHLGPSIGF

SEQ ID NO: 42990 - protein, 334 aa, Homo sapiens
  DOMAIN (207)..(241): Amyloidogenic glycoprotein extracellular domain proteins domain identified by eMATRIX, accession number BL00319C, p-value= 2.881e-11, raw score of 17.12
DKNSMGLPGVIPSCAAVLWSSIHLSSSALSPTISACRHPMEDSMDMDMSPLRPQNYLFGCELKADKDYHFKVDNDENEHQLSLRTVSLGAGAKDELHIVEAEAMNYEGSPIKVTLATLKMSVQPTVSLGGFEITPPVVLRLKCGSGPVHISGQHLVAVEEDAESEDEEEEDVKLLSISGKRSAPGGGSKVPQKKVKLAADEDDDDDDEEDDDEDDDDDDFDDEEAEEKAPVKKSIRDTPAKNAQKSNQNGKDSKPSSTPRSKGQESFKKQEKTPKTPKGPSSVEDIKAKMQASIAEKGGSLPKVEAKFINYVKNCFRMTDQEAIQDLWQWRKSL

SEQ ID NO: 42991 - protein, 71 aa, Homo sapiens
RPNRIQVQFFLGSGQDYVGCGEHLVRTILARECSHALQAEDAHQALLETMQNKFIRKDSSRVPMEEEILEI

SEQ ID NO: 42992 - protein, 225 aa, Homo sapiens
  DOMAIN (50)..(83): HYDROLASE N4- PRECURSOR PROTEIN SIGNAL BE domain identified by eMATRIX, accession number PD02894B, p-value=6.959e-16, raw score of 13.93
SECLNPRKLNLAEKADTDSMRLAKRRLSSEKENDSSTLDTVGAVVVDHEGNVAAAVSSGGLALKHPGRVGQAALYGCGCWAENTGAHNPYSTAVSTSGCGEHLVRTILARECSHALQAEDAHQALLETMQNKFISSPFLASEDGVLGGVIVLRSCRCSAEPDSSQNKQTLLVEFLWEPHDGEHVCRIYVSPGWESQDSHFKTFFWCGGRTVCGIPRWGVPPGRAQ

SEQ ID NO: 42993 - protein, 715 aa, Homo sapiens
  DOMAIN (588)..(605): PWWP domain proteins domain identified by eMATRIX, accession number PF00855, p-value=8.000e-15, raw score of 13.75
RAHSYWLLKRLSRNGAPLLRRLQSSLQSQRSSQQRENDEEMKAAKEKLKYWQRLRHDLERARLLIELLRKREKLKREQVKVEQVAMELRLTPLTVLLRSVLDQLQDKDPARIFAQPVSLKEVPDYLDHIKHPMDFATMRKRLEAQGYKNLHEFEEDFDLIIDNCMKYNARDTVFYRAAVRLRDQGGVVLRQARREVDSIGLEEASGMHLPERPAAAPRRPFSWEDVDRLLDPANRAHLGLEEQLRELLDMLDLTCAMKSSGSRSKRAKLLKKEIALLRNKLSQQHSQPLPTGPGLEGFEEDGAALGPEAGEEGDKSPPKLEPSDALPLPSNSETNSEPPTLKPVELNPEQSKLFKRVTFDNESHSACTQSALVSGRPPEPTRASSGDVPAAAASAVAEPASDVNRRTSVLFCKSKSVSPPKSAKNTETQPTSPQLGTKTFLSVVLPRLETLLQPRKRSRSTCGDSEVEEESPGKRLDAGLTNGFGGARSEQEPGGGLGRKATPRRRCASESSISSSNSPLCDSSFNAPKCGRGKPALVRRHTLEDRSELISCIENGNYAKAARIAAEVGQSSMWISTDAAASVLEPLKVVWAKCSGYPSYPALIIDPKMPRVPGHHNGVTIPAPPLDVLKIGEHMQTKSDEKLFLVLFFDNKRSWQWLPKSKMVPLGIDETIDKLKMMEGRNSSIRKAVRIAFDRAMNHLSRVHGEPTSDLSDID

SEQ ID NO: 42994 - protein, 73 aa, Homo sapiens
PTLKPVELNPEQSKLFKRVTFDNESHSACTQSALVSGRPPEPTRASSGDVPAAAVPSTLSRMLTWWFPPGGPT

SEQ ID NO: 42995 - protein, 56 aa, Homo sapiens
  DOMAIN (21)..(34): LUTEOVIRUS ORF6 PROTEIN SIGNATURE domain identified by eMATRIX, accession number PR00910A, p-value=3.679e-09, raw score of 2.51
IHGHLGAVGTEARLASSSPSPFPSPSRSPSPSPSSSSSFSFLLYSVSLCCPGSAPR

SEQ ID NO: 42996 - protein, 112 aa, Homo sapiens
  DOMAIN (43)..(73): Flocculin repeat proteins domain identified by eMATRIX, accession number PF00624I, p-value=9.775e-10, raw score of 9.10
IHGHLFFFFFFLLSSFFSFSFSFFLLSSFFSSSSSSAAAAAPSPSPSSSSSSSSSSFSSCSPSSSSSSAAASPPPPSSSFFFLPSPPPSPSSPSPFSLLPSPYFFFFFSRKE

SEQ ID NO: 42997 - protein, 92 aa, Homo sapiens
  DOMAIN (41)..(63): PROSTANOID EP1 RECEPTOR SIGNATURE domain identified by eMATRIX, accession number PR00580E, p-value=8.200e-09, raw score of 7.15
  misc_feature (1)...(92): Xaa = X or * as defined in Table 2
SRRWGGVHSCPPSPPPTAGHWTLLILCAKARRSEAAMVLASRRRRPGPRPRRRRRLPVLGSRGGAGPARGRGPSGWPGPLRAAPSPXPSSTV

SEQ ID NO: 42998 - protein, 232 aa, Homo sapiens
  DOMAIN (77)..(100): TRANSFORMING PROTEIN P21 RAS SIGNATURE domain identified by eMATRIX, accession number PR00449C, p-value=6.625e-20, raw score of 17.27
GYQVSLSQEACAKMASAGDTQAGPRDAANQNFDYMYKLLLIRNSSVGKTSFLIRYADDSFTPAFDSTVGIDFKVKTVYRHDKRIKLQIWDTAGQERYRTITTAYYRGAMGFLLMYDIANQESFAAVQDWATQIKTYSWDNAQVILVGNKCDLEDERVVPAEDGRRLADDLGFEFFEASAKENINVKQVFERLVDVICEKMNESLEPSSSSGSNGKGPAVGDAPAPQPSSCSC

SEQ ID NO: 42999 - protein, 297 aa, Homo sapiens
  DOMAIN (23)..(67): GTP-binding nuclear protein ran proteins domain identified by eMATRIX, accession number BL01115A, p-value=3.208e-11, raw score of 10.22
MASAGDTQAGPRDAADQNFDYMFKLLLIGNSSVGKTSFLFRYADDSFTPAFVSTVGIDFKVKTVYRHDKRIKLQIWDTAGQERYRTITTAYYRGAMGFLLMYDIANQESFAAVQDWATQIKTYSWDNAQVILVGNKCDLEDERVVPAEDGRRLADDLAASTASRVSWRRPVEARPYVPGLGQDSPCQTRPNVPGCPRDPAQPLKCCGVNNYTDFSGSSFEMTTGHTYPRSCCKSIGSVSCDGRDVSPNVIHQKTCGKSFKRKNHLEVHRRTHTGETPLQCEICGYQLPASARRSTGT

SEQ ID NO: 43000 - protein, 259 aa, Homo sapiens
  DOMAIN (173)..(188): ACRIFLAVIN RESISTANCE PROTEIN FAMILY SIGNATURE domain identified by eMATRIX, accession number PR00702I, p-value=8.603e- 09, raw score of 17.85
MQGVRHGRYYGLPGAYQRVGRRSHNNLIGTNHGRPVVKEFEVPFQKPINNPKETKEMQELKLNSSKSASRHRWPTENYGPDSVPDGYQGSQTFHGAPLTEPPLWHAEFTKEELVQKLRSTTKSADHLNGLLREIEATNAVLMEQIKLLKSEIRRLERNQEREKSAANLEYLKNVLLQFIFLKPGSERERLLPVINTMLQLSPEEKGKLAAVAQGEGILISSEASELLHFIDNQGPVHVIQKYLEHPLLLEPGHRKFDIR

SEQ ID NO: 43001 - protein, 146 aa, Homo sapiens
KTQVAPSTDGIQPPSSNSRTDEREFFIASYNRKKEDGEGNVWIAKSSAGAKGEGILISSEASELLDFIDNQAQVHVIQKYLEHPLLLEPGHRKFDIRSWVLVDHQYNIYLYREGVLRTASEPYHVDNFQDKTCHLTNHCIQKKKKK

SEQ ID NO: 43002 - protein, 131 aa, Homo sapiens
SGTRPVFLVPHTIGIPHPAIVTPQVKQEHPHTDSDLMHVKPQHEQRKEQEPKRPHIKKPLNAFMLYMKEMRANVVAECTLKESAAINQILGRRWHALSREEQAKYYELARKERQLHMQLYPGWSARDNYGK

SEQ ID NO: 43003 - protein, 263 aa, Homo sapiens
MNGKESHSLQWEGSKMGSSTPESWGRAGAGRLPADRLCVHTATIASVSYPHGQWFSQIPDGSPWKVLLADPGIGEVGKIHEHCLLGTGWHALSREEQAKYYELARKERQLHMQLYPGWSARDNYGKKKKRKREKLQESASESPQNGSVPRAGTRFTSLLFAPKSVKLTIYIKKHGKMYFCISEFGSRFGVLQDEHPMAIPPLVRLQLVELPVIRVSGVALPLIPGSVMQPLKSLPCTPSEFGDQNWQLLDKNCRVERSSDPPS

SEQ ID NO: 43004 - protein, 290 aa, Homo sapiens
MNGKESHSLQWEGSKMGSSTPESWGRAGAGRLPADRLCVHTATIASVSYPHGQWFSQIPDGSPWKVLLADPGIGEVGKIHEHCLLGTGWHALSREEQAKYYELARKERQLHMQLYPGWSARDNYGKKKKRKREKLQESASESPQNGSVPRAGTRFTSLLFAPKSVKLTIYIKKHGKMYFCISEFGSRFGVLQDEHPMIDSLSSLSLMFRALKLYVVTISSPKETIILSNSVEATLVSPTWVKLPPQSIISCGQRRRSHCTKWLSGAHCSNSVGVGIMERRAGQQPDRCPL

SEQ ID NO: 43005 - protein, 243 aa, Homo sapiens
  DOMAIN (106)..(151): Ribosomal protein L22 proteins domain identified by eMATRIX, accession number BL00464B, p-value=9.000e-33, raw score of 28.48
MVRYSLDPENPTKSGKSRGSNLRVHFKNTRETAQAIKGMHIRKATKYLKDVTLQKQCVPFRHYNGGVGRCAQAKQWGWTQGRWPKKSAEFLLHMLKNAESNAELKGLDVDSLVIEHIQVNKAPKMHRRTYRAHGRINPYMSSPCHIEMILTEKEQIVPKPEEEVAQKKKISQKKLKKQKLMAREKLPADVEKPSVTDPLLKETARNQKHDQEDKQLLRSQLLSRVASSSEISLAFIFTEEIGP

SEQ ID NO: 43006 - protein, 276 aa, Homo sapiens
MKDWRPRRKKWFPGPGPGPHCCEEPRDLVSYILAAPAMAKRGQGRARVVVSEGAAWQLPHGVEPVGAQKSRTKLNNTVQEFHNAITSINSRINQAEERISELENWLSEIRQSDKNKEKRIKRNEQNLQEVGDYVKKPNLQITVIPERKGEKANSLENVFQYIVHENFHNLAREDNSQIQEIQTTPARFYTGRSSPRHIIVRFSKDPDSLEGDLHRLRINLLWHSATHKYRLHLGFSSVGLLAASDEGLFKGFHGGPLTLTLGFKLVVNRFDPGIYT

SEQ ID NO: 43007 - protein, 71 aa, Homo sapiens
MAAGSSFSGHTTAARPVAGRAVAVASSPLAAASAAAPVAPAAAAFAKAERRGGAGQEAMEFCAAADSRGAD

SEQ ID NO: 43008 - protein, 221 aa, Homo sapiens
MGFHHVGQAALELLTSGMPEEQREGLQEELIDIILLILERNPQLHYYQGYHDIVVTFLLVVGERLATSLVEKLSTHHLRDFMDPTMDNTKHILNYLMPIIDQVNPELHDFMQSAEVGTIFALSWLITWFGHVLSDFRHVVRLYDFFLACHPLMPIYFAAVIVLYREQEVLDCDCDMASVHHLLSQIPQDLPYETLISRAGDLFVQFPPSELAREAAALTAS

SEQ ID NO: 43009 - protein, 231 aa, Homo sapiens
MAQKHLTGLYGPVLIAVITQFWHLFLLPPDIVRLADFHKKPHRNHTHDHSSALLSSRTTMAEMANIRPNTRRKQPRDQSDKSQEARTPRTQSDERRSNRPTGKRKKRTQKETKTTKAAKQEEKTRQEHTNRREQETQNQPRKRTARTSGQRTKNREKKTSFLILLHKQIQVKALADLTGSPSACRWAGAQARGCGARRRVLVILLAAPARPARGSVAPDVGCGAWAGGAGR

SEQ ID NO: 43010 - protein, 57 aa, Homo sapiens; identical to SEQ ID NO: 39783
  DOMAIN (18)..(42): Ribosomal protein S26e proteins domain identified by eMATRIX, accession number BL00733C, p-value=6.940e-24, raw score of 10.40

SEQ ID NO: 43011 - protein, 79 aa, Homo sapiens; identical to SEQ ID NO: 39786
  DOMAIN (5)..(48): Ribosomal protein S26e proteins domain identified by eMATRIX, accession number BL00733A, p-value=1.000e-40, raw score of 11.62

SEQ ID NO: 43012 - protein, 145 aa, Homo sapiens
  DOMAIN (71)..(104): Ribosomal protein S26e proteins domain identified by eMATRIX, accession number BL00733B, p-value=8.457e-35, raw score of 12.04
  misc_feature (1)...(145): Xaa = X or * as defined in Table 2
EGPARHRLLSPVRASKMTKKRRNNGRAQKRAARHVRGPSPLKCFPSGPLPPNCARCVPKDKAIKKFVIRNIVEAAAARDISEASVFDAYLLPKLYVKLHYCVSCAIHKQKXSGNRSSXSPAKTRTPPPRFRPGGXLPHGPPTKSP

SEQ ID NO: 43013 - protein, 101 aa, Homo sapiens
MRGVWPPPVSALLSALGMSTYKRATLDEEDLVDSLSEGDAYPNGLQSLPATCFWGHSPGGRVESTPETRTGPVPFPQKAQFVHVPGLAQALYRQSLRLFLF

SEQ ID NO: 43014 - protein, 105 aa, Homo sapiens; identical to SEQ ID NO: 41835
  DOMAIN (25)..(48): LACY PROTON/SUGAR SYMPORTER SIGNATURE domain identified by eMATRIX, accession number PR00174A, p-value=7.987e-09, raw score of 8.67

SEQ ID NO: 43015 - protein, 925 aa, Homo sapiens
  DOMAIN (198)..(208): 4 kw A55R REDUCTASE TERMINAL DIHYDROPTERIDINE domain identified by eMATRIX, accession number DM00099B, p-value=6.625e- 09, raw score of 14.73
MHVERRVCHAVSKYNVTLSCVAGGLAAKSSGLELIWLCDLLVRELGQLTGPVCKVRTPALIYGRHHQPPLPRPLPTLTCAASRWPQPEEATAPPGEGGQKDRALLPGIPAGPKDQCQNRRKISSRTATRPEPEPPQDRSQNRRKTSARTAEPQGLSLPEDDDPAPLSCRLGCLLTHCLPSWVPCCPPESTTLDVVEVESYDPYTDSWTPVSPALKYVSNFSAAGCRGRLYLVGSSACKYNALALQCYNPVTDAWSVIASPFLPKYLSSPRCAALHGELYLIGDNTKKVYVYDPGANLWQKVQSQHSLHENGALVPLGDALYVTGGRWQGMEGDYHVEMEAYDTVRDTWTRHGALPRLWLYHGASTVFLDVSNKKTEGYRPLLQLVGPSVDPAESMCMDGECANGLRREGTATYTGKMLHLRGRVIHRPSPVPGVVSADRSEVWLLLPDSAAPGTWQGSQSLLPHPVNQDRVRPPFPSGLFSKEFPGNSSPRCECKGFGAWTAEQRVVRLGRLLGTAAPIFPPQHPGLRIGQPAPKRRPCIPPDQPGTKGSDLAAGFVSDKRAQSALKSQGPSLAALPGAQIAQGLSQEGPSQNCAQCQHQSGCSADRNGNFRKHHCPCFGLPGPPGPPGPQGPPGPIIPPEALLKEFQLLLKGAVRQRERAEPEPCTCGPAGPVAASLAPVSATAGEDDDDVAAFLCRLRRDALVERRALHELGVYYLPDAEGAFRRGPGLNLTSGQYRAPVAGFYALAATLHVALGEPPRRGPPRPRDHLRLLICIQSRCQRNACRQAPEERPRPLGGSPGLSQHGEHGSRGSVCMREVLRPCRAGTRWRKSLALQKLGSHPLHTHYQGRGRKHQGSHLLSSEREVTAKNLNYECRSRTGGKGRLRLILLFVQPVEVAGLPVPGRYLQGSSVPWNLGDTFKSKY

SEQ ID NO: 43016 - protein, 2013 aa, Homo sapiens
  DOMAIN (351)..(381): Actinin-type actin-binding domain proteins domain identified by eMATRIX, accession number BL00019D, p-value=7.585e-21, raw score of 15.33
MESGKGRSKLKEQLKPSLGAGELWSCSGNDCSTPCGGRAAPWASASWEPGPPPGVGEVAGGEGRMMKEDIIWQWPWSIPEPPPPCLGHALWQPLLSAISIRPAGPPLWNPGITKVSSPCYLPSPSVQQSRLCGTQASPRFREPSSSSSSPKSAGLMAGQPHSPRELLGAAGHRSRRPSTELRVPPSPSLTMDSQYETGHIRKLQARHMQMQEKTFTKWINNVFQCGQAGIKIRNLYTELADGIHLLRLLELISGEALPPPSRGRLRVHFLENSSRALAFLRAKVPVPLIGPENIVDGDQTLILGLIWVIILRFQISHISLDKEEFGASAALLSTKEALLVWCQRKTASYTNVNITDFSRSWSDGLGFNALIHAHRPDLLDYGSLRPDRPLHNLAFAFLVAEQELGIAQLLDPEDVAAAQPDERSIMTYVSLYYHYCSRLHQGQTVQKRLTKILLQLQETELLQTQYEQLVADLLRWIAEKQMQLEARDFPDSLPAMRQLLAAFTIFRTQEKPPRLQQRGAAEALLFRLQTALQAQNRRPFLPHEGLGLAELSQCWAGLEWAEAARSQALQQRLLQLQRLETLARRFQRKAALRESFLKDAEQVLDQARAPPASLATVEAAVQRLGMLEAGILPQEGRFQALAEIADILRQEQYHSWADVARRQEEVTVRWQRLLQHLQGQRKQVADMQAVLSLLQEVEAASHQLEELQEPARSTACGQQLAEVVELLQRHDLLEAQVSAHGAHVSHLAQQTAELDSSLGTSVEVLQAKARTLAQLQQSLVALVRARRALLEQTLQRAEFLRNCEEEEAWLKECGQRVGNAALGRDLSQIAGALQKHKVPLEAEVHRHQAVCVDLVRRGRDLSAPQAPNAAGSPGNGQRPFREGGSCSRPGCRLFSGVANARYPDTIALTFDPTNQWLSCVYNDHSIYVWDVRDPKKVGKVYSALYHSSCVWSVEVYPEVKDSNQACLPPSSFITCSSDNTIRLWNTESSGVHGSTLHRNILSSDLIKIIYVDGNTQALLDTELPGGDKADASLLDPRVGIRSVCVSPNGQHLASGDRMGTLRVHELQSLSEMLKVEAHDSEILCLEYSKPDTGLKLLASASRDRLIHVLDAGREYSLQQTLDEHSSSITAVKFAASDGQVRMISCGADKSIYFRTAQKSGDGVQFTRTHHVVRKTTLYDMDVEPSWKYTAIGCQDRNIRIFNISSGKQKKLFKGSQGEDGTLIKVQTDPSGIYIATSCSDKNLSIFDFSSGECVATMFGHSEIVTGMKFSNDCKHLISVSGDSCIFVWRLSSEMTISMRQRLAELRQRQRGGKQQGPSSPQRASGPNRHQAPSMLSPGPALSSDSDKEGEDEGTEEELPALPVLAKSTKKALGLWQLASVPSPALPRSLSHWEMSRAQESVGFLDPAPAANPGPRRRGRWVQPGVELSVRSMLDLRQLETLAPSLQDPSQDSLAIIPSGPRKHGQEALETSLTSQNEKPPRPQASQPCSYPHIIRLLSQEEGVFAQDLEPAPIEDDSESTEPLSVDGISSDLEEPAEGDEEEEEEEGGMGPYGLQEGSPQTPDQEQFLKQHFETLASGAAPGAPVQVPERSESRSISSRFLLQVQTRPLREPSPSSSSLALMSRPAQVPQASGEQPRGNGANPPGAPPEVEPSSGNPSPQQAASVLLPRCRLNPDSSWAPKRVATASPFSGLQKAQSVHSLVPQERHEASLQAPSPGALLSREIEAQDGLGSLPPADGRPSRPHSYQNPTTSSMAKISRSISVGENLGLVAEPQAHAPIRVSPLSKLALPSRAHLVLDIPKPLPDRPTLAAFSPVTKGRAPGEAEKPGFPVGLGKAHSTTERWACLGEGTTPKPRTECQAHPGPSSPCAQQLPVSSLFQGPENLQPPPPEKTPNPMECTKPGAALSQDSEPAVSLEQCEQLVAELRGSVRQAVRLYHSVAGCKMPSAEQSRIAQLLRDTFSSVRQELEAVAGAVLSSPGSSPGAVGAEQTQALLEQYSELLLRAVERRMERKL

SEQ ID NO: 43017 - protein, 1219 aa, Homo sapiens
  DOMAIN (121)..(132): Trp-Asp (WD) repeat proteins proteins domain identified by eMATRIX, accession number BL00678, p-value=9.400e-10, raw score of 9.67
SNKVSSRVTAVSFSEDCSYFVTAGNRHIKFWYLDDSKTSKVNATVPLLGRSGLLGELRNNLFTDVACGRGKKADSTFCITSSGLLCEFSDRRLLDKWVELRVYPEVKDSNQACLPPSSFITCSSDNTIRLWNTESSGVHGSTLHRNILSSDLIKIIYVDGNTQALLDTELPGGDKADASLLDPRVGIRSVCVSPNGQHLASGDRMGTLRVHELQSLSEMLKVEAHDSEILCLEYSKPDTGLKLLASASRDRLIHVLDAGREYSLQQTLDEHSSSITAVKFAASDGQVRMISCGADKSIYFRTAQKSGDGVQFTRTHHVVRKTTLYDMDVEPSWKYTAIGCQDRNIRIFNISSGKQKKLFKGSQGEDGTLIKVQTDPSGIYIATSCSDKNLSIFDFSSGECVATMFGHSEIVTGMKFSNDCKHLISVSGDSCIFVWRLSSEMTISMRQRLAELRQRQRGGKQQGPSSPQRASGPNRHQAPSMLSPGPALSSDSDKEGEDEGTEEELPALPVLAKSTKKALASVPSPALPRSLSHWEMSRAQESVGFLDPAPAANPGPRRRGRWVQPGVELSVRSMLDLRQLETLAPSLQDPSQDSLAIIPSGPRKHGQEALETSLTSQNEKPPRPQASQPCSYPHIIRLLSQEEGVFAQDLEPAPIEDGIVYPEPSDNPTMDTSEFQVQAPARGTLGRVYPGSRSSEKHSPDSACSVDYSSSCLSSPEHPTEDSESTEPLSVDGISSDLEEPAEGDEEEEEEEGGMGPYGLQEGSPQTPDQEQFLKQHFETLASGAAPGAPVQVPERSESRSISSRFLLQVQTRPLREPSPSSSSLALMSRPAQVPQASGEQPRGNGANPPGAPPEVEPSSGNPSPQQAASVLLPRCRLNPDSSWAPKRVATASPFSGLQKAQSVHSLVPQERHEASLQAPSPGALLSREIEAQDGLGSLPPADGPPSRPHSYQNPTTSSMAKISRSISVGENLGLVAEPQAHAPIRVSPLSKLALPSRAHLVLDIPKPLPDRPTLAAFSPVTKGRAPGEAEKPGFPVGLGKAHSTTERWACLGEGTTPKPRTECQAHPGPSSPCAQQLPVSSLFQGPENLQPPPPEKTPNPMECTKPGAALSQDSEPAVSLEQCEQLVAELRGSVRQAVRLYHSVAGCKMPSAEQSRIAQLLRDTFSSVRQELEAVAGAVLSSPGSSPGAVGAEQTQALLEQYSELLLRAVERRMERKL

SEQ ID NO: 43018 - protein, 391 aa, Homo sapiens
MGLILLAASPLMASSSIDEFYKYNVEGEKRQRIPGENLGLVAEPQAHAPIRVSPLSKLALPSRAHLVLDIPKPLPDRPTLAAFSPVTKGRAPGEAEKPGFPQLPVSSLFQGPENLQPPPPEKTPNPMECTKPGAALSQDSDGEAGRVRGTGKGQGTASLAASVTWGQLEALKREKAVQLAHSVEVCSFLQECGPTQVQLRDVLLQLEALQPGSSEDTCHALQLAQKKTLVLERRVHFLQSVVVKYGQRSGGIGRQVHELQSLSEMLKVEAHDSEILCLEYSKPDTGLKLLASASRDRLIHVLDAGREYSLQQTLDEHSSSITAVKFAAVMEDECSSSVCCRLYSRPASSTWISRSRLADASSFRPGDERTPSAHECPEQPLSGPGKEPQGN

SEQ ID NO: 43019 - protein, 543 aa, Homo sapiens
  DOMAIN (60)..(83): PYRIDINE NUCLEOTIDE DISULPHIDE REDUCTASE CLASS-I SIGNATURE domain identified by eMATRIX, accession number PR00411A, p-value= 4.879e-09, raw score of 15.95
MPNPKNSKGGRKNKRANSSGDEQENGAGALAAAGAAGAAAGGALAAAAGCGAAAAGAPGAGGAAGAGGAGTGAANAAAAAGAAAAGDAKNEAPCATPLICSFGRPVDLEKDDYQKVVCNNEHCPCSTWMHLQCFYEWESSILVQFNCIGRARTWNEKQCRQNMWTKKGYDLAFRFCSCRCGQGNLKKDTDWYQVKRMQDEKKKKSGSEKNTGRPPGEAAEEAKKCRPPNKPQKGPSHDLPRRHSMDRQNSQEKAVGAAAYGARSPGGSPGQSPPTGYSILSPAHFSGPRSSRYLGEFLKNAIHLEPHKKAMAGGHVFRNAHFDYSPAGLAVHRGGHFDTPVQFLRRLDLSELLTHIPRHKLNTFHVRMEDDAQVGQGEDLRKFILAALSASHRNVVNCALCHRALPVFEQFPLVDGTLFLSPSRHDEIEYDVPCHLQGRLMHLYAVCVDCLEGVHKIICIKCKSRWDGSWHQLGTMYTYDILAASPCCQARLNCKHCGKPVIDVRIGMQYFSEYSNVQQCPHCGNLDYHFVKPFSSFKVLEAY

SEQ ID NO: 43020 - protein, 495 aa, Homo sapiens
MQEAPCATPLICSFGRPVDLEKDDYQKVVCNNEHCPCSTWMHLQCFYEWESSILVQFNCIGRARSWNEKQCRQNMWTKKGYDLAFRFCSCRCGQGHLKKDTDWYQVKRMQDEKKKKSGSEKNTGRPPGEAAEEAKKCRPPNKPQKGPSHDLPRRHSMDRQNSQEKAVGAAAYGARSPGGSPGQSPPTGYSILSPAHFSGPRSSRYLGEFLKNAIHLEPHKKAMAGGHVFRNAHFDYSPAGLAVHRGGHFDTPVQFLRRLDLSELLTHIPRHKLNTFHVRMEDDAQVGQGEDLRKFILAALSASHRNVVNCALCHRALPVFEQFPLVDGTLFLSPSRHDEIEYDVPCHLQDPYKHNSEEKQWSEKGQGIFRLVELILKFMKDESVLIAAKGRLMHLYAVCVDCLEGVHKIICIKCKSRWDGSWHQLGTMYTYDILAASPCCQARLNCKHCGKPVIDVRIGMQYFSEYSNVQQCPHCGNLDYHFVKPFSSFKVLEAY

SEQ ID NO: 43021 - protein, 358 aa, Homo sapiens
MVAGIPGSAQVSSKGDRLLEKLPDAVRFLVVSEDESLLAAGFGRSVRIFLADSRGFRRFMAMDLEHEDMVETAVFGTENNLIITGSLDALIQLHHLVSDDVCLKVVELYLNEKKRGAAGGNLSSRCVRAARETSYQWKAERCMADENCFKVMFLQRKGQVIMTIELLDTEEAQTEDPVEVQHLARYVEQYVGTEGASSSPTEGFLLKPVFLQRNLKKFRRRWQSEQARALRGEARSSWKRLVGVESACDVDCRFKLSTHKMVFIVNSEDYMYRRGTLCRAKQVQPLVLLRHHQHFEEWHSRWLEDNVTVEAASLVQDWLMGEEDEDMVPCKTLCETVHVHGLPVTRYRVQYSRRPASP

SEQ ID NO: 43022 - protein, 1130 aa, Homo sapiens
MAHAGGGSGGSGAGGPAGRGLSGARWGRSGSAGHEKLPVHVEDALTYLDQVKIRFGSDPATYNGFLEIMKEFKSQSIDTPGVIRRVSQLFHEHPDLIVGFNAFLPLGYRIDIPKNGKLNIQSPLTSQENSHNHGDGAEDFKQQVPYKEDKPQVPLESDSVEFNNAISYVNKIKTRFLDHPEIYRSFLEILHTYQKEQLNTRGRPFRGMSEEEVFTEVANLFRGQEDLLSEFGQFLPEAKRSLFTGNGPCEMHSVQKNEHDKTPEHSRKRSRPSLLRPVSAPAKKKMKLRGTKDLSIAAVGKYGTLQEFSFFDKVRRVLKSQEVYENFLRCIALFNQELVSGSELLQLVSPFLGKFPELFAQFKSFLGVKELSFAPPMSDRSGDGISREIDYASCKRIGSSYRALPKTYQQPKCSGRTAICKEVLNDTWVSFPSWSEDSTFVSSKKTPYEEQLHRCEDERFELDVVLETNLATIRVLESVQKKLSRMAPEDQEKFRLDDSLGGTSEVIQRRAIYRIYGDKAPEIIESLKKNPVTAVPVVLKRLKAKEEEWREAQQGFNKIWREQYEKAYLKSLDHQAVNFKQNDTKALRSKSLLNEIESVYDEHQEQHSEGRSAPSSEPHLIFVYEDRQILEDAAALISYYVKRQPAIQKEDQGTIHQLLHQFVPSLFFSQQLDLGASEESADEDRDSPQGQTTDPSERKKPAPGPHSSPPEEKGAFGDAPATEQPPLPPPAPHKPLDDVYSLFFANNNWYFFLRLHQTLCSRLLKIYRQAQKQLLEYRTEKEREKLLCEGRREKGSDPAMELRLKQPSEVELEEYYPAFLDMVRSLLEGSIDPTQYEDTLREMFTIHAYVGFTMDKLVQNIARQLHHLVSDDVCLKVVELYLNEKKRGAAGGNLSSRCVRAARETSYQWKAERCMADENCFKVMFLQRKGQVIMTIELLDTEEAQTEDPVEVQHLARYVEQYVGTEGASSSPTEGFLLKPVFLQRNLKKFRRRWQSEQARALRGEARSSWKRLVGVESACDVDCRFKLSTHKMVFIVNSEDYMYRRGTLCRAKQVQPLVLLRHHQHFEEWHSRWLEDNVTVEAASLVQDWLMGEEDEDMVPCKTLCETVHVHGLPVTRYRVQYSRRPASP

SEQ ID NO: 43023 - protein, 730 aa, Homo sapiens
  DOMAIN (366)..(382): Calcium-binding EGF-like domain proteins pattern proteins domain identified by eMATRIX, accession number BL01187B, p-value= 5.696e-13, raw score of 12.04
MSCDTNGEVEGGRVDSKTRGRQEVERNTETHLGSGLNCDIPLIFLTYEWRGILEYKIFSVKTGEVLGKPGQLGHPTGQTTFFETGTQVTSMQEMGSYSFGQPHPVALQGTAPLPAAFTGWRLASVAFPGTQCKLSVDLPIWGLEDSGPLLTAPLGSAPVGPLCGGSDPTFPFCTALTGPSAASLLEFARGPLQTLFAWVSAEVSAEQGFFVNHECCCLIVPLEVLSQRSTRPCEVSVCPYWGVPPRDRSNQCPSGFTLDSVGPFCADEDECAAGNPCSHSCHNAMGTYYCSCPKGLTIAADGRTCQDIDECALGRHTCHAGQDCDNTIGSYRCVVRCGSGFRRTSDGLSCQDINECQESSPCHQRCFNAIGSFHCGCEPGYQLKGRKCMDVNECRQNVCRPDQHCKNTRGGYKCIDLCPNGMTKAENGTCIGECLAVSVTEISLPSTSQILMNVKMGPISADITRYVRIQEAAIVVYAQEVIGLKELEDPAWILMNVKIQMPASMSVRIPLEVISASAHLAINSHTMERHAKENCHLNKLKVGGASKEKEKSDDFLEKGEKNLGIIKVTKRVANVLMLWKSLDSIHLDPFGTSVNYLDSAFRNIRNLGIVSVTSTDISSLYAKAQHVARRHYGCNIVRTEYYKELAARIVVAAVASVSVEFAGSEDCHSNIQDEGLLLAALLDVMKEGFPTLPCILRELSGLVIDLIAYLCSTTGMLKINFKEMLSEVLG

SEQ ID NO: 43024 - protein, 417 aa, Homo sapiens
  DOMAIN (253)..(294): kw TRANSCRIPTASE REVERSE II ORF2 domain identified by eMATRIX, accession number DM01354I, p-value=8.412e-31, raw score of 15.55
MPVDPAIRGADVEESLKPRIMGLQWAKHLGNAVKVTINDLNENSVTLIQENCHLNKLKVVVDSKEKEKSDDILEEGEKNLGNIKVTKMDANVLMHLRSFDFIHLDPFGTSVNYLDSAFRNIRNLGIVSVTSTDISSLYAKAQHVARRHYGCNIVRTEYYKELAARIVVAAVARAAARCNKGIEVLFAVALEHFVLVVVRVLRGPTSADETAKKIQYLIHCQWCEERIFQKDGNMVEELRIKKLTQNHTTSWKLNNLLLNDYRVNNEMKAEINKLFETSQNKDTMLQNLWDTAKAVFRGKFIALKAHKRKQERSKIDTLTSQLKDVEKQEQTNSKASRRKEITKITAELKEIETQKTLQKLNESRSWFFERSTKQTASQTNKEEKRDNKKMIKGISPPIPQKYKLPSENTINTFMQIN

SEQ ID NO: 43025 - protein, 570 aa, Homo sapiens
MGKDFMTKTPKAMATKAKTDKWDLIKLKSFCTAKETIIRVNKQPTEFGEIEIKSTKETSKGTVNDIQREPRDYGLLKARYIKTSGNATVDHLSKYLAVRLALEELRSKGESNQMNLDTASEKQYTIYIATASGQFTVLNGSFSLELVRIMGLQWAKHLGNAVKVTINDLNENSVTLIQENCHLNKLKVVVDSKEKEKSDDILEEGEKNLGNIKVTKMDANVLMHLRSFDFIHLDPFGTSVNYLDSAFRNIRNLGIVSVTSTDISSLYAKAQHVARRHYGCNIVRTEYYKELAARIVVAAVARAAARCNKGIEVLFAVALEHFVLVVVRVLRGPTSADETAKKIQYLIHCQWCEERIFQKDGNMVEENPYRQLPCNCHGSMPGKTAIELGPLWSSSLFNTGFLKRMLFESLHHGLDDIQTLIKTLIFESECTPQSQFSIHASSNVNKQEENGVFIKTTDDTTTDNYIAQGFRVSRTHFDPMGVRTDAPLMQFKSILLKYSTPTYTGGQSESHVQSASEDTVTERVEMSVNDKAEASGCRRCFQKKSTLLTPRFQISGLQNCENNFKPPSLE

SEQ ID NO: 43026 - protein, 225 aa, Homo sapiens
DAWGNMVEENPYRQLPCNCHGSMPGKTAIELGPLWSSSLFNTGFLKRMLFESLHHGLDDIQTLIKTLIFESECTPQSQFSIHASSNVNKQEENGVFIKTTDDTTTDNYIAQGKRKSNEMITNLGKKQKTDVSTEHPPFYYNIHRHSIKGMNMPKLKKFLCYLSQAGFRVSRTHFDPMGVRTDAPLMQFKSILLKYSTPTYTGGQSESHVQSASGRSRNLEKLKGR

SEQ ID NO: 43027 - protein, 42 aa, Homo sapiens; identical to SEQ ID NO: 42462

SEQ ID NO: 43028 - protein, 57 aa, Homo sapiens
DTISHQLEWQSLKSQETTGTWMKLETIILSKLLQGQKTKHHMFSLTGLFLKTCKGPV

SEQ ID NO: 43029 - protein, 64 aa, Homo sapiens
WMKLETILSKLSQGQKTKHLMFSLTGQNRMQDPSKKPPKQRSSKASTDFYNFFPRVNLVLLIGV

SEQ ID NO: 43030 - protein, 879 aa, Homo sapiens
  DOMAIN (223)..(266): kw TRANSCRIPTASE REVERSE II ORF2 domain identified by eMATRIX, accession number DM01354T, p-value=1.000e-40, raw score of 9.48
MYSHVITVCRHVKNGDILLLNRQPTLHRPSIQAHRARILPEEKVLRLHYANCKAYNADFDGDEMNAHFPQSELGRAEAYVLACTDQQYLVPKDGQPLAGLIQDHMVSGASMTTRGCFFTREHYMELVYRGLTDKVGRVKLLSPSILKPFPLWTGKQHINRTKDKNHMIISIDAEKAFDKIQQPFMLKTLNKLGIDGTYLKIIRAIYDKPTASIILNGQKLEAFPLKTGTRQGCPLSPLLFNIVLEVLARAIRQEKEIKSIQLGKEEVKLSLFADDMIVYLENPTVSAQNLLKLMSNFSKVSGYKINVQKSQAFLYTNNRQTESQIMSGLPFTITSKRITYLGIQLTRDVKDLFKENYKPLLKEIKEDTNKWKNIPCSWVGRINIVKMAILPKVIYRFNTIPIKLPMTFLTELEKTTLKFIWNQKRAHIAKSILSQKNKAGGIMLPDFKLYYKATVTKTAWYWYQNRDIDQWNRTEPSEIMPHIYNYLIFDKPDKNKQWGKDSLFNKWCWENWLAICRKLKLDPFLTPYTKINSRWIKDLHVRPKTIKTLEENLGNTIQDIGMGKDFMSKTPKAMATKAKIDKWDLIKLKSFCTAKETTIRVNRQPTEWEKIFATYSSDKGLISRIYNELKQIYKKKTNNPIKKWAKDMNRHFSEEDIYAAKKHMKKCSSSLAIREMQIKTTMRYHLTPVRMVIIKKSGNNRCWRGCGEIGTLLHCWWDCKLVQPLWKSVWQFLRDLELEIPFDPAIPLLGIYPEDYKPCCYKDTCTRMFIAALFTIAKTWNQPKCPTMIDGIKKMWHIYTMEYYAAIKKDEFMSFVGTWMKLETIILSKLSQGQKTKHRMFSLVLLLSPKAIILCLELVPSSGFLVLLTSGVKPQTFTD

SEQ ID NO: 43031 - protein, 56 aa, Homo sapiens
  DOMAIN (11)..(26): WILM'S TUMOUR PROTEIN SIGNATURE domain identified by eMATRIX, accession number PR00049D, p-value=7.807e-11, raw score of 0.00
SQIDLQKKKRRAPAPPPPQPPPPSPLIPNRTEDKEENRKSTMVYCCASFPTQAKRF

SEQ ID NO: 43032 - protein, 493 aa, Homo sapiens
  DOMAIN (209)..(224): WILM'S TUMOUR PROTEIN SIGNATURE domain identified by eMATRIX, accession number PR00049D, p-value=7.807e-11, raw score of 0.00
MEVAKNPTFKDYPEGSADADDDAEPVGAEMSTGTALAVVWSSQGGAFTQLHQAMHVSIHSSTVDSIPRLTPTESLSTVQHIKRGVFTPSATAQQRATQQRMSLRAKEARYHDTKPQNRQSQPPLMPPGEWLLSGEGGESECWPEDPWVVLTVRNTHSPVQTQRMGSETRKTAEARLLMAVLEDRASCRQAHPGQVSLGSQIDLQKKKRRAPAPPPPQPPPPSPLIPNRTEDKEENRKSTMGGGRQVPQKPPRGTARGPPQLVLPPPPPYPPPDTDVVEPLSFPGEGAGSEASDPIPKQMSARSQCSHIRMNLRVSVERDSCPAQPSCDLDGGLTQAGCGHTCRDRTQELGGRPSAVEPPHLLPLDLWTGLSRKESEVAERKPDSPSSCLVAPFPPCALLPTPYQFIPPGIEYGKGSGMSLLTSKIRVEKDCGLHLGHPRSLAHSEESQPPRCELLYGDPHGKELRETSANCQRGAEALCPLIMSLETCQQPLE

SEQ ID NO: 43033 - protein, 307 aa, Homo sapiens
MTKSPKAIATKTKIDKWDLIKLKSFCTTEETIIRVKRKPTEWEKSSEIYPSDKGLISRIYSQGGNVGYAGPPDQADVVMSMTTDDNVKMFSVCALAPSQLSPGVLKPNEMTTKKKELKSVRTLENKKGGLQKNYKQKYCKKGKRLNQILTTQKGFNVNHLDIAPRYASILMGISNGVGTLSGMVCPIIVGAMTKNKSREEWQYVFLIAALVHYGGVIFYAIFASGEKQPWADPEETSEEKCGFIHEDELDEETGDITQNYINYGTTKSYGATTQANGGWPSGWEKKEEFVQGEVQDSHSYKDRVDYS

SEQ ID NO: 43034 - protein, 266 aa, Homo sapiens
MEKEAVSVTVLLSAAPCLLSCFLGSSVSGLAFWVSQQKTKGPERCKNTHHLAGTGNIVVIMISYPKGREILELVQKGIPVTMTIGVGTRHVQEFISASWTLLLNQKDLPEAALERRLFRFPGTRLLSAAMRERPDAQLAPRRASASLPSPSIPARGALAPARSVPAAVKRAVTRLRRKQNTSGKPDRRGEGQRPAKARLMERSQEEDAETRGEPGDCMRLRSCEVKPPFGGPQDGSWCQTVPPLISFPIFGNQTSIQDNINYATGC

SEQ ID NO: 43035 - protein, 257 aa, Homo sapiens
  DOMAIN (194)..(210): 43 KD POSTSYNAPTIC PROTEIN SIGNATURE domain identified by eMATRIX, accession number PR00217C, p-value=5.648e-09, raw score of 10.91
GCAPDTRFFVPEPGGRGAAPWVALVARGGCTFKDKVLVAARRNASAVVLYNEERYGNITLPMSHAGTGNIVVIMISYPKGREILELVQKGIPVTMTIGVGTRHVQEFISGQSVVFVAIAFITMMIISLAWLIFYYIQRFLYTGSQIGSQSHRKETKKVIGQLLLHTVKHGEKGIDVDAENCAVCIENFKVKDIIRILPCKHIFHRICIDPWLLDHRTCPMCKLDVIKALGYWGEAWGMYRRCLLPESPPGKGSSWQI

SEQ ID NO: 43036 - protein, 83 aa, Homo sapiens
  misc_feature (1)...(83): Xaa = X or * as defined in Table 2
XPVDWTHGLSRNASRARKPSAAVEPSREALPARVKCVRRQGTASRSRWEGGRYGGPGDPRRMSANDEYEEDVAPHRWGTALGS

SEQ ID NO: 43037 - protein, 138 aa, Homo sapiens
CFWCYYWKLCPAQSDIRGPGTATTTPSCPSPAAHLQWLPLPRACPSRASKTSPWNHTQISCPPPTLPWHTPPPTWHPLLTSASPAIGPCGQNPWTGPTASAETRPGRGNPRPPWNLPGKLSPRGSYNQDSVLGAKMPC

SEQ ID NO: 43038 - protein, 1063 aa, Homo sapiens
  DOMAIN (700)..(719): MUSCARINIC M1 RECEPTOR SIGNATURE domain identified by eMATRIX, accession number PR00538C, p-value=7.680e-10, raw score of 9.08
MHTFSQLQKLKGLQPPVVVLRNKIKPCLTIDSSPLSADLKKPLAVIVCPGWKKAQFIFELLGEYSMSSRPLHPVLLTIGLHKEEAKNTKLPRGCDVIVTTPYSLLRLLACQSLLFLRLCHLILDEVEVLFLEANEQMFAILDNFKKNIEVEERESAPHQIVAVGVHWNKHIEHLIKEFMNDPYIVITAMEEAALYGNVQQVVESSSIFCLKMHKEMIFNLQNVLEQWKKKLSSGSQIILALTDDCVPLLAITDATCVIHFSFPASPKVFGGRLYCMSDHFHAEQGSPAEQGDKKAKSVLLLTEKDASHAVGVLRYLERADAKVPAELYEFTAGVLEAKEDKKAGRPLCPYLKAFGFCKDKRICPDRHRINPETDLPRKLSSQALPSFGYIKIIPFYILNATNYFGRIVDKHMDLYATLNAEMNEYFKDSNKTTVEKVEKFGLYGLAEKTLFHRVQVLEVNQKEDAWALDDILVEFIDEGRTGLVTRDQLLHLPEHFHTLPPQAVEFIVCRVKPADNEIEWNPKVTRYIHHKIVGKLHDAKVILALGNTVWIDPMVHITNLSSLKTSVIDYNVRAEILSMGMGIDNPEHIEQLKKLREDAKIPACEESLSQTPELNIPVVTNTEHTALRGFTESLLEETPYQTAPGEQGILTGLNCLFKDVQKLSHIVTHEEGSWLAGEQGTPPAEDAACLQSPQPEDTGAEGGAESKTSSENQKPGSSSQSHVLLLLAVTVAGEVRGAGEEKGSSGAEWVSGIWTVSVSMWLEKYDASIVLPHAGSASPAAAGRSQVDPVPSSADVTPACHCARQGFWRTQNPNVAFDFDHWEDCEEDSHFPKVVNSKNLPYTVTEVVEDSSSTSEDDDSESEREGSWEVESSGVFAGEGFDCGALLTPISVSVSLHVAAALLVELWGQRPGRRPVAPRAHQLPAVYTQSPSPDQGYKKQAALKLGDISHRLLEQQEDFAGKTAQYRQEMRHLHQVLKDKQEVLDQALQQNREMEGELEVIWESTFRENRRIRELLQDTLTRTGVQDNPRALVAPSLNGVSQADLLDGCDVCSYDLKSHAPTC

SEQ ID NO: 43039 - protein, 449 aa, Homo sapiens
  DOMAIN (104)..(144): G-protein coupled receptors proteins domain identified by eMATRIX, accession number BL00237A, p-value=3.143e-22, raw score of 27.68
ACGAMERAPPDGPLNASGALAGDAAAAGGARGFSAAWTAVLAALMALLIVATVLGNALVMLAFVADSSLRTQNNFFLLNLAISDFLVGAFCIPLYVPYVLTGRWTFGRGLCKLWLVVDYLLCTSSAFNIVLISYDRFLSVTRAVSYRAQQGDTRRAVRKMLLVWVLAFLLYGPAILSWEYLSGGSSIPEGHCYAEFFYNWYFLITASTLEFFTPFLSVTFFNLSIYLNIQRRTRLRLDGAREAAGPEPPPEAQPSPPPPPGCWGCWQKGHGEAMPLHRYGVGEAAVGAEAGEATLGGGGGGGSVASPTSSSGSSSRGTERPRSLKRGSKPSASSASLEKRMKMVSQSFTQRFRLARDRKEAKSLAVIVSIFGLCWAPYTLLMIIRAACHGHCVPDYWYETSFWLLWANSAVNPVLYPLCHHSFRRAFTKLLCPQKLKIQPHSSLEHCWK

SEQ ID NO: 43040 - protein, 714 aa, Homo sapiens
  DOMAIN (157)..(197): G-protein coupled receptors proteins domain identified by eMATRIX, accession number BL00237A, p-value=3.143e-22, raw score of 27.68
MERAPPDGPLNASGALAGEAAAAGGARGFSAAWTAVLAALMALLIVATVLGNALVMLAFVADSSLRTQNNFFLLNLAISDFLVGKSPAPGRWGPRGAQRGRASGDWNTDLGPGDTDSAGSYVGVKAGGRAEFVADTRWRGGAFCIPLYVPYVLTGRWTFGRGLCKLWLVVDYLLCTSSAFNIVLISYDRFLSVTRAVSYRAQQGDTRRAVRKMLLVWVLAFLLYGPAILSWEYLSGGSSIPEGHCYAEFFYNWYFLITASTLEFFTPFLSVTFFNLSIYLNIQRRTRLRLDGAREAAGPEPPPEAQPSPPPPPGCWGCWQKGHGEAMPLHRYGVGEAAVGAEAGEATLGGGGGGGSVASPTSSSGSSSRGTERPRSLKRGSKPSASSASLEKRMKMVSQSFTQRFRLSRDRKVAKSLAVIVSIFGLCWAPYTLLMIIRAACHGHCVPDYWYETSFWLLWANSAVNPVLYPLCHHSFRRAFTKLLCPQKLKIQPHSSLEHCWKSPGHLALLPPTRLVPPGKDEEENMSVNLMFLGCLIKRDKIAEELRAGLAEWARPRSGVDGAAVAEIEQEHQEGTVPGGLGWLQPEHSMEPPGARQRAVGSRRLDFSSFEIVVDSMLLGATLQRPHVPFIGFPHREAWVDAMHAELHPAPAKHCRTPRLCSLFSGTRTGPRHVCSLMRRSGCLSMSALQASIPGPAPTRALHTDKRGLCSPGA

SEQ ID NO: 43041 - protein, 237 aa, Homo sapiens
  misc_feature (1)...(237): Xaa = X or * as defined in Table 2
VWWNSDLMVINRSTTELPLTVSYDKVSLGRLRFWIHMQDAVYSLQQFGFSEKDADEVKGIFVDTNLYFLALTFFVAAFHLLFDFLAFKNDISFWKKKKSMIGMSTKAVLWRCFSTVVIFLFLLDEQTSLLVLVPAGVWAAAIELWESXRKVIXRWTIFWRGLMPEFQFGTYSESERKTEEYDTQAMKYLSYLLYPLCVGGAVYSLLNIKYKSWYSWLINSFVNGVYAFGFLFMLPQL

SEQ ID NO: 43042 - protein, 675 aa, Homo sapiens
  DOMAIN (443)..(496): Sodium:neurotransmitter symporter family proteins domain identified by eMATRIX, accession number BL00610D, p-value=1.931e- 28, raw score of 20.97
MERGAVGCSWSCCRWLGAAIPAGSPAPVPRALLHLHGRGSGAGAGSEAAGLLCCGRCGGRRGAELLTRLTPPSALLASEPVLWGLCERLVPPTPAVSTVSLCSARPTPGCRRVPSLHGLHLCRLSQVVLRFPSVSFCLHLDTICPECTLQLLFDFLAFKNDISFWKKKKSMIGMSTKCSPTILSPVLWRCFSTVVIFLFLLDEQTSLLVLVPAGVGAAIECSGSCGMAGSGCKGFEQVESKEMRVRVVSAHEALSTKQWPGPCWKRLHLPVSPGFHGDWRHAATRVWLTFLQREEPQSFACGRRRWAVRSWWVLSLVFKNEAADPRGTCYGYLKTVCLEFVPSGAFVVYTDFRSETANLRGASWTHSRCFSGKGSDAAHPTRDSSANQPAPAGLPNLGRKAATQAPRRPKQTAGGLPTPFGPPLGAGPTWPSAAQAWAAEFPHGPSASVWIDAATQVCFSLGVGFGVLIAFSSYNKFTNNCYRWVLHQEPAVSPAPVGCGDLESTWAVFMLQEPMKGQGRAGVIAVEGGTQLAPNECPELGGRPVRQGRLSGEGRWNRKYSEHPRAPGGRVHLLPFDGEDGILQTWKTYTLGSQNHKAGFLRRGKMNPKIGVLTGSGDWKSNIKAADSVPGEASLPGLQMAAFLLYLHMAESKMERASSSYKATVLLGYDPTLTI

SEQ ID NO: 43043 - protein, 84 aa, Homo sapiens
  misc_feature (1)...(84): Xaa = X or * as defined in Table 2
ATVKWITLCRNRNIKLPTFIKKEGTGKAPKKSRKSVLGLGPXVHTSPGDPAEGEGLPAGERPDGNLSQSPNSLRFYIKKKKAYK

SEQ ID NO: 43044 - protein, 240 aa, Homo sapiens
RGGIREETRRKIVILGDNWKHELTKFISPDQLPVEFGGTMTDPDGNPKCLTKINYGGEVPKSYYLCEQVRLQYEHTRSVGRGSSLQVENEILFPGCVLRWQFASDGGDIGFGVFLKTKMGEQQSAREMTEVLPSQRYNAHMVPEDGSLTCLQAGVYVLRFDNTYSRMHAKKLSYTVEVLLPDKASEETLQSLKAMRPSPTQLTWHSGQAGRGHQCIAHAEDSDRNLFPCSQKNAAENENA

SEQ ID NO: 43045 - protein, 165 aa, Homo sapiens
  misc_feature (1)...(165): Xaa = X or * as defined in Table 2
RSWVLLGVGARGSTPRTYQVPSPSLAPSALCXVSXVPLESLSCSHADNWKQELTKFISPDQLPVEFGGTMTDPDGNPKCLTKINYGGEVPKSYYLCKQVRLQYEHTRSVGRGSSLQVENEILFPGCGLRVLRFYNTYSLVHSKRISYTVEVLLPDQTFMEKMEKF

SEQ ID NO: 43046 - protein, 502 aa, Homo sapiens
  DOMAIN (37)..(60): CELLULAR RETINALDEHYDE-BINDING PROTEIN SIGNATURE domain identified by eMATRIX, accession number PR00180A, p-value=3.473e- 11, raw score of 10.11
MSSRVGDLSPQQQEALARFRENLQDLLPILPNADDYFLLRWLRARNFDLQKSEDMLRRHMEFRKQQDLDNIVTWQPPEVIQLYDSGGLCGYDYEGCPVYFNIIGSLDPKGLLLSASKQDMIRKRIKVCELLLHECELQTQKLGRKIEMALMVFDMEGLSLKHLWKPAVEVYQQLLKRFTCVSAPKLFPVAFNLVKSFMSEETRRKIVILGDNWKQELTKFISPDQLPVEFGGTMTDPDGNPKCLTKINYGGEVPKSYYLCEQVRLQYEHTRSVGRGSSLQVENEILFPGCVLRWQFASDGGDIGFGVFLKTKMGEQQSAREMTEVLPSQRYNAHMVPEDGSLTCLQAGVYVLRFDNTYSRMHAKKLNFHPGRCWLPDKACEETLQSLKPMETLPNTVKTPSHFYLGDSNPFTPTLLTLAFPGRVVLEVAAKSHLSHVTISSHCRLTWHSGQAGRGHQCIAHAEDSDRNLFPCSQRMRLRMRTLKMINPLRMVLLAELALYPS

SEQ ID NO: 43047 - protein, 161 aa, Homo sapiens
  misc_feature (1)...(161): Xaa = X or * as defined in Table 2
CQPVRAAXRHGNTPLATVXPASTWWKWSEKQKEEQEMQNWRESASVSGYPQDILSCAMSQNPRKRKRPRNVSAPPVHQMAQMNISVEQMETSKTHQATPLTWGQMKRLAHVAEENLRSQNKPLTTSNLMVAMMVVISLAVSLPVAGADQNYIYWAYIPFPH

SEQ ID NO: 43048 - protein, 481 aa, Homo sapiens
  DOMAIN (334)..(352): CALCITONIN RECEPTOR SIGNATURE domain identified by eMATRIX, accession number PR00361E, p-value=9.407e-09, raw score of 7.63
MGKCRMKGMYKKKRLKKNTVYMEMEKNKKEERKRRKKERQESLPASGRDCNQKVIAGGFVCVHIMTVSDKASLLGIITRDTAMYCSVTIPVSATVNGFIPGNRSWVYDVTILVLNYLYCFTATQTFLANGVTLSNRVYVQGLLILEWAWVHSMTISVSRFVEGFTPTDSAWFGGITVAALQPFHTEEEEEKFQDDIEKFNNQESANQQSELSQSSFKKGEKWEVIYPNLQKLMKETVLPTAPLGEECQAAIRPIKGKADLNEEKSLSEYIKAYHGIVGHLHKASLLALAVDELKIKRLAHIAEENLRSQNKPLTTSNLMLAMMVVISLVLQILSSKLLLKIQPYAMECLCHIQAVSKDFLLQIQTVHSVIVAARGSIHGYPAINSARFHSVMVLAMDIVQVFTDGHSTWVQGTIMEGIGCVHGITAGDTARAHGVTLEVAASVHRFTIGDSACVHRIMLSDSGSVQRFTAEDSSGAHGLIV

SEQ ID NO: 43049 - protein, 254 aa, Homo sapiens
PMSSPVREPPQLEEERQVRISESGQFSDGLEDRGLLESSTRLKPHEAQNYRKKALWVSWFSIIVTLALAVAAFTVSVMRYSASAFGFAFDAILDVLSSAIVLWRYSNAAAVHSAHREYMLYNHGTNICWTSSEGLRMLTIMVEDDSLLFHSPVVGHLGYFQFLTIMKLAAENTGVQVFVWTYAFISLGVELLNPMVAPKHICQVEYHGEASALSIITGAPPDLAENSLCLGLGRRAEVQRKPCPVLSGSAPEFH

SEQ ID NO: 43050 - protein, 74 aa, Homo sapiens
QLTHWLSPPRELWTRSSMWMQQIRRKTAPASARSASRRNCSEDLLCILKRAPFKKSWAYLQATYQFQQSTQSFS

SEQ ID NO: 43051 - protein, 73 aa, Homo sapiens
LKYFICLQLSLLTLYNENVQRIMLQFLVRFKSKTFINKESSNVNIPEISLSHLITTTVSEYYLTLEGIGIHLN

SEQ ID NO: 43052 - protein, 83 aa, Homo sapiens
  DOMAIN (38)..(68): kw TRANSCRIPTASE REVERSE II ORF2 domain identified by eMATRIX, accession number DM01354R, p-value=7.000e-30, raw score of 8.50
SSVLHPWDARLVQHTKSIHIIHHINRTNDKNHMIISIDAEKAFDKIQQDFMLKTLNKLGIDGTYLKIVRATYDKPTASIILNG

SEQ ID NO: 43053 - protein, 584 aa, Homo sapiens; identical to SEQ ID NO: 35297
  DOMAIN (399)..(454): kw TRANSCRIPTASE REVERSE II ORF2 domain identified by eMATRIX, accession number DM01354Q, p-value=1.000e-40, raw score of 9.23

SEQ ID NO: 43054 - protein, 754 aa, Homo sapiens
  DOMAIN (374)..(421): kw TRANSCRIPTASE REVERSE II ORF2 domain identified by eMATRIX, accession number DM01354V, p-value=1.000e-40, raw score of 12.97
MGKKQNRKTGNSKMQSASPPPKECSSSPAMEQSWMENDFDELREEGFRLSNYSELQEDIQTKGKEVENFERNLEECISRITNTEKCLKELMELKTKARELREECRSLRSRCDQLEERVSAMEDEMNEMKLNQEEVESLNRPITGAEIVAIINSLPTKKSPGPDGFTAEFYQRYKEEQHINRAKDKNHMIISIDAEKAFDKIQQHFMLKTLNKLGIDGTYFRKSINVIQHINRAKDKNHMIISIDAEKAFDKIQQHFMLKTLNKLGIDGTYFRKSINVIQHINRAKDKNHMIISIDAEKAFDKIQQPFMLKTLNKLDNIIVYLENPIVSAPNLLKLISNFSKVSGYKINVQKSQAFLYTNNSQTESQIMSELPFTIASKRIKYLGIQLTRDVKDLFKENYKPLLKEIKEDTKKWKNIPCSWVGRINIVKMAILRKVIYRFNAIPIKLPMTFFTELEKTTLKFIWNQKRAPVAKAILSQKNKAGGITLPDFKLYYKATVTKTAWYWYQNRDIGQWNRTEPSEITPHVYNYLIFDKPEKTKQWGKDSLFNKWCWENWLAICRKLKLDPFLTPYTKINSRWIKDLNVRPKTIKTLEENLGITIQDIGMGKDFMSKTPKAMATKDKIDKWDLIKLKSFCTAKETTIRVNRQPTEWEKTFATYSSDKGLISRIYNELKLIYKKKTNNPIKKWAKDMNRHFSKEDIYAAKKHMKKCSSSLAIREMQIKTTVRYHLTPVRMAIIKKSGNNRDMDEVGNHHSQ

SEQ ID NO: 43055 - protein, 499 aa, Homo sapiens; identical to SEQ ID NO: 40425
  DOMAIN (189)..(234): kw TRANSCRIPTASE REVERSE II ORF2 domain identified by eMATRIX, accession number DM01354N, p-value=1.000e-40, raw score of 13.17

SEQ ID NO: 43056 - protein, 508 aa, Homo sapiens
  DOMAIN (283)..(308): 7 kw REVERSE TRANSCRIPTASE RNA POLYMERASE domain identified by eMATRIX, accession number DM00895E, p-value=3.333e-11, raw score of 15.72
MGDFNIPMSILDRSTRQDLNSALQQADLIDIYRTLHPKSTEYTFFSAPHRTYSKIDHIIGNKALLSKCKRIEITTNCLSDHSAMKLELRIKKLTQNCTTTWKMNNVLMNSYWVNNEMKAEIKIFFETNENKDTTYQNLWDTFKAVCRGKFRALNAHKRKQERSKIDTLTSQLKELEKQEPINSKANRRQEITKIKAELKEIETKKPFKKSVNPGAGIQTIIREYYEHLYANKLENLEEMDKFLDTYTLPRLNQSIGKEGILPNSFYEASIILIPKPGRDTTRKDNFRPISLMNTDVKILNKILANRIQQHIKKLIHHDQVGFIPGMQGWFNIHKSINVIHHINRTNHKNHMIISIDAEKAFNKIQQPYMLKTLNKLGIDGMYLKIIRAIYDKHTANIIVNGEKLEAFPLKTGTRQGCPLSPLLFNIVLEVLARAIRQEKEIKCIRLGKVEVKLSLFADVMIVDLENPIISAPNLLKLISNFSKVSGYKINVQKPQAFLYTVNRQTAKS

SEQ ID NO: 43057 - protein, 581 aa, Homo sapiens
  DOMAIN (65)..(110): kw TRANSCRIPTASE REVERSE II ORF2 domain identified by eMATRIX, accession number DM01354N, p-value=1.000e-40, raw score of 13.17
METQKTLQKINESRSWFFEKINKIDRPLARLIKKKREKNQIDTIKNDKGDITTDPTEIQTTIREYYKHLYANKLENLEEMDKFLDTYTLPRLNQEEAESLNKPITGPEIEAIINSLPTKKIPGPDGFTAEFYQRYKEELQHIKKLIHHDQVGFIPGMQGWFNIHKLINVIQYINRTKDKNHMIISIDAEKASDKIQQPFMLKTLNKLGIDGTYLKIIRAIYDKPTANIILNGQKLEAFPLKTGTRQGCLLSPLLFNIVLEVLARAIRQEKEKKCIRLGKEEVKLSLFADDMIVYLENPIVSAQNLLKLISNFSKVSGYKINVQKSQAFLYTNNRQIESQIMSELPFTIASKRIQYLGIQLTRDVKDLFKENYKPLLNEIKEDTNKWKNIPCSWIGRINIMKMAMLPKVIYRFDAIPIKLPMTFFTELEKTTLKFIWNQKRARIAKSILSQKNKAGGITLPDFKLYYKAIVTKTAWYWYQKRDVDQWNRIEPSETIPHICNHLIFDKPDKNKQWGKDSLFNKWCWEIWLAIGRKRKLDPFLTPYTKINSRWIKDFNIRPKTIKTLEESLGNSRHKHGQEIHV

SEQ ID NO: 43058 - protein, 950 aa, Homo sapiens
  DOMAIN (601)..(656): kw TRANSCRIPTASE REVERSE II ORF2 domain identified by eMATRIX, accession number DM01354Q, p-value=1.000e-40, raw score of 9.23
MGMGPAKPGMGGNLLVCWLQRPWEKRSIWAEVYRSSRYSHSWLPLSRKGCDFSGTCRQTLSILTQPLRQWGLEGIKKPNSWIISEESVSNGGPPLLIPRQTASGVDLQQTPTDLQLRVLTVRRKTNKQKGIASTSTKRTSTPKPHLYVTIIKDQSYIKPQRWGKNIAEKLKILKIRVALSLQRNAAPHQQWNKAGRRMSLMSSQKKASEVIESQMNEIKGEEKFREKRVKRNEQSLQEIWDYVKRPDLRLIGVPDSDGENGTRLENTLQDIIRENFPNLARQASIQIQEIQRTPQRYSSRRATPRHIIVRFTKVEMKEKMLRAAREKELKIKKLTQNCLTTWKLNNLLLNDYWVHNEMKGEIKMFFETNENIDTTYQNLWHTFKAVCRGKFIALNAHKRKQERSKIDTLASQLKEIEKQEQTHSKASRRQEITKIRVELKEIETQKSLQKINESRSWFFEKINKIDRPLPRLIKKKREKNQIDTIKNDKGDITTNPTEIQTISREYYKHLYANKLENLEEMDKFLDTYTLSGLNKEEVESLNTSITGSEVEAIINSIPTKKKSRTRWIHSRILPELSRDTTKKENFRPISLMNIDVKILNKMLANGIQQHIKKLIHHDQVGFIPGMQGWFNIHKSINVIQHINRTKDKNHMIISIDAEKAFDKIQQPFMLKTLNKLDIDGTYLKIIRAIYDKPTANIILNGQKLEAFPLKSSTRQGCPLSPHLFNIVLEVLARAIRQEKEIKGIQLGKEEVKLSLFADDMIVYLENPIISAQNLLKLISNFSKVSGYKINVQKSQAFLYTSNRQTESQIMSELPFTIASKRIKYLEIQLTRDVKDLFKENYKPLLNEIKEDTNKWKNIPCSWIGRINIVKMAILPKDDKKCVSDDHDADNDSDNDGDNFLQVSAAKSYISHYFPVIRLLTAYWRRLSNSLEKAKGHDVEGPCGKELVVGL

SEQ ID NO: 43059 - protein, 492 aa, Homo sapiens
  DOMAIN (10)..(65): kw TRANSCRIPTASE REVERSE II ORF2 domain identified by eMATRIX, accession number DM01354Q, p-value=1.000e-40, raw score of 9.23
MNIDAKILNKILANRIQQHIKKLIHHDQVGFIPGMQGWFNIRKSINVIWHINRTKDKNHMIISIDAEKVFDKIQQPFMLKTLNKLGIDGTYLKILRAIYDKPTANIILNGQKLEAFPLKTGTRQGCPLSPLLFNIVLEVLARAIRQEKEIKGIQLGKEEVKPSLFADDVIVYLENPIISVQNLLKLISNFSKNKIPRNPTYKECEVPLQGELQITAQRNKRGHKQMEEHSMLMDRKNQYRENGHTAQELEKTTLKFIWNQKRVRIAKSILSQKNKAGGITLPDFKLYYKATVTKTAWDMDEAGKHHSQQTIARDKNQMLHVLTHRWELNNENTWTQEGEHHTPGLVVVCRHESAPTLFPLREVPRGGMGIGFVNAPLTSLEVRNLKRELKPLLDDPFGVTDQIDQFLGPQVYTWAELMSIFSILFSREERTMIRRAAMIVWEHKHPPGQNIPAAEQKFLAQDPQWDNNNAAHRENLKDLREMIVKGIQESVP

SEQ ID NO: 43060 - protein, 643 aa, Homo sapiens
  DOMAIN (284)..(329): kw TRANSCRIPTASE REVERSE II ORF2 domain identified by eMATRIX, accession number DM01354N, p-value=1.000e-40, raw score of 13.17
MKQDDAKINKYLMEDRYGIKERGQQRSEAGATGAQPSQRDSIKWEERNQREEEGRKVGARGKHAELAAPSPSTLQERHLHENRAEDSSLPGPEVTIWPFWAAANASSSILPPFHSQWPLIVRQDLREIRQFISENTYWSLATSKALRAYTGGDGENILYEDWKLEDVKVKNRHLTTLKSNIFDGKIYPKQGLLCYQHAGSLWEPAGHLSKPGNDHSSSPTTEQSWMENDFDELTEVGFRRSVITNVSKLKEDVRTHRKEAKNLEKILHEWLTRTNKIQTTIREYYKHLYANELENLEEMDKFLDTYTLPRLNQEEGESLNRPITGSEIEAIINNLPTKKSPGPDGFTAKFYQSTNNKNHMIISIDAEKAFHKIQQPFMLKTLNKLGIDGTYLKIIRAIYDKPTANIILNGQKLEAFPLKTGTRQGCPLSPLPFNIVLEVLARAIRQEKEINCIQLHNEEVKLSPFADDMIAYLENPIVSAQNLLKLISNFSKVSGYKINVQKSQAFLYTINRQTESQIMSELPFTIATKRIKYLGIQLTRDVKYLFKENYKPLLNEIKEDTNKWKYIPCSWIGRINIVKMAILPKVIYRFNAIPIKLPMTLSSQNWKKTTLKFIWNQKRARIAKSILSKKNKAGSIMLPDFKL

SEQ ID NO: 43061 - protein, 104 aa, Homo sapiens
  DOMAIN (55)..(85): kw TRANSCRIPTASE REVERSE II ORF2 domain identified by eMATRIX, accession number DM01354R, p-value=3.280e-18, raw score of 8.50
NTGKPNPAAHQKGYPPRSSGPHPWDARLVQHTKSINIIHHINRTKDKNHMIISIDAEKAFDKIQLPFMLKTLSKLGVSYNMFTRLTIPIAQVDTRGNQLPSYLI

SEQ ID NO: 43062 - protein, 1468 aa, Homo sapiens
  DOMAIN (959)..(970): NEUROKININ RECEPTOR SIGNATURE domain identified by eMATRIX, accession number PR00244D, p-value=1.000e-13, raw score of 6.84
MGRKNRKLDSRQHSYTSPQSRSHEDPAAVLQALSSSGVVIYQSLVAVQSPLAAPGCDGSRCEVRGLTVGSRYGSWRLAGCRDNEMVNACQSGWCYQNLTVLRGWKVLLEMTPHHTYSKIDHILGSKALLSKCKRTEIITNYLSDHSAMKRELRIKNLTQNRSTTWKLNNLLLNDYWVHNEMKAEIKMFFETNENKDTTYQNLWDIFKAVCRGKFIALNAHKRKQERSKTDTLTSQLKELEKQEQTHSKASRRQEITKIRAELKEIETQKTLQKINESRSWFFERINKIDRPLARLIKKKREKNQIDAIKNDKGDITTDPTEIQTTIREYYKHLYANKLEDLEEMDKFLNTYTLPRLNQEEVESLNRPITGAEIVAIINSLPTKKSPGPDGFTAEFNQRYKEELVSFLLKLFQSIEKEGILPNSLDEASIILIPKPGRDTTKKENFRPISLMNIDAKILNKILANRIQQHIKKLIHHDQVGFIPGMQGWFNRCKSINVIQHINRTNDKNHMIISIDAEKAFNKIQQPFMLKTLNKLGIDGTYLKIIRAIYDKPTANSILNGQKLEAFPLKTGTRQGCPLSPLLFNIVLEVLARAIRQEKEIKGIQLGKEEVKLSLFADDMIVYLENPMVSAQNLLKLISNFSKVSGCKINVQKSQAFLYTNNRQTESQIMSEFPFTIASKRIKYLGIQLTREVKDLFKENYKPLLKEIKEDTNKWKNIPCSWIGRINITKMAILPKVIYRFNAIPIKLPMTFFTELEKTTLKFIWNQKRAHIAKSILSQKNKAGGITLPDFKLYYKATVTKTAWNPYGATTTIPALLLHNPTGQSAVLTPVIRVLCKAIEEDHLSSSRNKDLNVKPKAIKALEGNLGDTLLDKGRDKDFITRTPKAIATKAKIDKWDLIKLKSFCTAKETINRAYRQPTEWEEIFVNYPSDNGLISSISEQSVLLFYPITGRYMAIIHPLQPRLSATATKVVICVIWVLALLLAFPQGYYSTTETMPSRVVCMIEWPEHPNKIYEKVSYFGQPSGNQPEMLALYTALFPQPPLEEGIHWRMLQVVQLQDAEPPSPKFLTKEKDSPGLGGTYTGKEYRRVDHSVPPITLRPNLAQCPVAMSRQSSANMFWSQTISLHEAGLFFQDSPLADPSQKPESKGVLWCGPYSTHLDAEEDKDREALERAVAANALKPSGHPIATKSSHLGKYVMGRYHDPSVCTKAPVAIPFLLWTYSPLKSHKESVWNLHNENLVEFLEVRSIRVTAPLKRVDSRSSLLSCYSSQPLVIAQTSHGHVSLPIKDYVSSAPGIYEEELPMSSIGSTEDSTKLPVLRYQLELTDDYIIRINRLKMKGRIKVMFGCALQAVRPYGYLLCSLNIAVILFFFKLPRFHNAQTHMFYKQFVQEATYAEHFLHLCSNEQQLHPGLIWKTDRNSGRPCREELIDEISAYPGIGEGRTGRVCNDDIQLIDTVRIPVGVHWPCLT

SEQ ID NO: 43063 - protein, 412 aa, Homo sapiens
  DOMAIN (163)..(204): kw TRANSCRIPTASE REVERSE II ORF2 domain identified by eMATRIX, accession number DM01354I, p-value=1.000e-40, raw score of 15.55
MLSHTKVLRPTSAGDTQANRVGVDLQQTPTDLQLRVLTVRKKTNKQKGHPHQNPICTSPSSKTKDRSTRQKVNKDIQDLNSALHKADLIDIYRTLHPKSTEYTFFLAPHHTYSKIDHIVRSKALLSKCKSIEIITNCLSDHSAIKLQLRIKKLTQNHSTTWKLDNLLLNDYWVHNEMKAEIKMFFETNENKDTTYQNLWDTFKAVCRGKFIALNAHKRKQERSKMGTLTSQLKELEKQEQTYSKASRRQEITKIRAELKEIETQKTLQKKINDSRSWFLEKINKIDKPLARLIKKKGEKNQIDAIKNDKGDLTTDPTEIQTTIREYYKHLYANKLENLEEMDKFLHPHTLSRLNQEEVESLNRPITGSEIEAIINSIPTKKKSRTRWIHSRILPQHHPDTKAWQRHNKKREF

SEQ ID NO: 43064 - protein, 1814 aa, Homo sapiens
  DOMAIN (380)..(421): kw TRANSCRIPTASE REVERSE II ORF2 domain identified by eMATRIX, accession number DM01354I, p-value=1.000e-40, raw score of 15.55
MGKKQSRKTGNSKNQSASPPPKERSSSPAMEQSWMENDFDDLREEGFRQSNYSELKEEVRTHGKEVKNLEKKLDEWLTRITNAEKSLKDLMELKTTARELHDECTSLKRVSVTEDQMNEMKREEKFREKRIKRNEQSLQEIWDYVKRPNLHLIGVPESDRENGTKLENTLQDIIQENFPNLVRQANIQIQEIQRTPQRYSSRRATPRHIIVRFTKVEMKEKMLRAAREKGRVTHKGKPIRLTADLLAETLQARREWGPIFNILKEKNFQPRISYPAKLSFIDRSTRQKVNKDTQELNSALHQADLIDIYRTLHPKSTEYTFFSAPHHTYSKIDHIVGSKALLSKCKRTEIITNCLSDHSAIKLELRIKKLTRNHSTTWKLNNLLLNDYWVHNEMKAEIKMFFETNENKDKTYQNLWDTFKTVCRGKFIALNAHKRKQERSKIDTLTSQLKGLEKQEQTHSKASRRQEITKIRAELKEIETQKTLQKINESRSWFFEKINKIDRPLARLIKNKREENQIDAIKNDKGDITTDPTEIQTAISEYYKHLYANKLENLEEMDKFLDTYTLPRLNQEEVESLNRPITGSEIEAIINSLPTKKSPGPDGFMAEFYQRDKEELVPFLLKLFQSIEKEGILPNSFYEASIMLIPKPGRDTTKKENFRPISLMNIDAKILNKILANRIQQHIKKLIHHDQVGFIPGMQGWFNLRKSLNVIQHINRTNDKNHMIISIDAEKAFDKIQQPFMLKTLNKLGIDGMYLKIIRAIYDRPTANIILNGQKLEAFPLKTGTRQGCPLSPLLFNIVLEVLARAIRQEKEIKGIQLGKEEVKLSLFADDMTVYLENAIVSAPNLLKLIGNFSKVSGYKINVQKSQAFLYTNNRQTESQIMSELPFRIASKRIKYLGIQLTRDVKDLFKQNYKPLLNEIKEDTNKWKNIPCSWVGRINIVKMAILPKLQLGLPLRAQLQEATDNTFIIIAIAAFVLAAPGAKEKPELEVATIASELGKLHTKGISRSSGGKNHVVNLKQQRQDKREEKKKVNKDIQDLNSALLQADLIDIYITLHPKSTDYTFFSATHHIYFNTDHIVGSKAPISECKRTEITTNCLSDHSAIKLELTIKKLTQNLTTTWKLNNLLLNDYWGTFTCFIKQQGPNQYPLGQRSTSSAGRGHSCGALAVPDGAKGGKTPKHSKLFSDQRHARPKISLLQLGRCQPRFNPLRAEIQTTIREYYKHLYASKLENLEEMDKFLDTYTLPRLNQEEVESLNRPITGSEIVAIINSLPTKKSPEPDGFTAKFYQRYKEELVPFLLKLFQSIEKQGILPNSFYEASIILIPKPGRDTTKKENFRPISLMNIDAKILNKILANRIQQHIIKLIYHDQVGLIPGMQGWFNIHKSINVIQHINRTKDKNHMIISIDAEKAFDKIQQPFMLKTLNKLGIDGTYFKIIRAIYDKPTANIILNGKKLEAFPLKTGTRQGCPLLPLLFNVVLEVLARAIRQTESQMMSELPFTIASKRIKYLGIQLTRDVKDLFKENYKPLLNEIKEDTNKWKNIPCSWVGRINIVKMAILPKVIYRFNAIPIKLPMTFFTELEKTTLKFIWNQKRARITKSILSQKNKAGGITLPDFKLYYKATVTKTAWYWYQNRDIDQWNRTEPSEITPHIYNYLIFDKPEKNKQWGKDSLFNKWYWENWLAICRKLKLDPFLTPYTKINSRWIKDLNVRPKTIKTLEENLGITIQDIGMGKDFMSKTPKAMATKAKIDKWDLIKLKSFCTAKETTIRVNRQPTKWEKIFATYSSDKGLISRIYNELKQIYKKKQTTPSKSGRRT

SEQ ID NO: 43065 - protein, 671 aa, Homo sapiens
  DOMAIN (154)..(195): kw TRANSCRIPTASE REVERSE II ORF2 domain identified by eMATRIX, accession number DM01354I, p-value=1.000e-40, raw score of 15.55
MVKGSIQQEELTILNIYAPNTGAPRFIKQVLSDLQRDLDSHTLIMGDFNTPLSILDRSTRQKVNKDTQELNSALHQADLIDIYRTLHPKSTEYTFFSAPHHTYSKIDHIVGSKALLSKCKRTEIITNYLSDHSAIKLELRIKNLTQSRSTTWKLNNLLLNDYWVHNEMKAEIKMFFETNENKDTTYQNLWDAFKAKYNLASREYYKHLYAHVLEFLEEMDKFLITYALPRLNQEEVESLNRTITGPEIVAIINSLPTKKSPGPDGFTAEFYQRYKEELVPFLLKLFQSIEKEGILPNSFYEASIILIPKPGRDTTKKENFRPISLMNIDAKILNKILANRIQQHIKKLICHDQVGFIPGMQGWFNIRKSINVIQHININRTKNKNHMIISIDAEKAFDKIQQLFMLKTLNKLGIDGMYLKIIRAIYDKHTANIILNGQKLEAFPLKTGTRQGCPLSPLLFNIVLVEVLARAIRQEKEIKGIQLGKEEVKLSLFADDMIIYLENPIVSAQNLLKLISNFSKVSGYKISEQNQCAKITSILIYTKNRQTESQIMSELPFTIASKRIKYLGIHLTRDVKVLYKENYKPLLKEIKEDTNKWKNIPCSLIGRINTMKMAILPKGIYRFNAISIKLPMTFFTELEKNYFQVHMEAKKSPRRQVNPKPKEQSWRHRAT

SEQ ID NO: 43066 - protein, 123 aa, Homo sapiens
LINFRGIPFIISGSLSVAAEKNHTSCLVRSSLGTNILSVMAAFAGTAILLMDFGVTNRDVDRGYLAVLTYFHCPGVLHSAHWHALRVPSHPCPGQCTCDLPAKRLQRRLQHSPAPAFLCAPCL

SEQ ID NO: 43067 - protein, 326 aa, Homo sapiens
  DOMAIN (54)..(96): Serpins proteins domain identified by eMATRIX, accession number BL00284C, p-value=2.698e-14, raw score of 28.56
GKGVDGQSGAQSLDLVLTNKEKLMHNGEVTLAFSTGRAGKISEVLDAGTVDPLTKLVLVNAIYFKGKWNEQFDRKYTRGMLFKTNELPKGFSLPTAHIEPIYLDTGIATEKECIALDPLQNTGLHAKMSSEDGNYLVPPLDMINLHRLCIIHGPGGEGQSAVARLTGEKKNHPGAQYANRLSPRVGRFINAAGTTGFPTGKRAVSATQLITSSSTFWEHTEKEGHDSRVVPTSRRQSDTPERQEELDFADFGTTIKQDFRLLGQTSVDRLLQLSQGQAVKGNQLLPVSLVKRKTTLAPNTQTASPRALADSLMQLARQVSRLESGQ

SEQ ID NO: 43068 - protein, 126 aa, Homo sapiens
  DOMAIN (85)..(106): RIBOSOMAL PROTEIN L7A FAMILY SIGNATURE domain identified by eMATRIX, accession number PR00882G, p-value=6.016e-15, raw score of 10.27
MSHRARPEQVHGHQQAAQAGAGPANWVTSRPEPTRIQRPNFSGDLMVFSLNRSPYPGRMTETGWLLFVLLLIIVKMGEIQILLENRNDRYDEICRHWEGDVLGYKSVAQIAKLEKAKAKELGTKLG

SEQ ID NO: 43069 - protein, 121 aa, Homo sapiens
  DOMAIN (36)..(48): Ribonuclease T2 family histidine proteins 1 domain identified by eMATRIX, accession number BL00530C, p-value=1.000e-17, raw score of 11.43
  misc_feature (1)...(121): Xaa = X or * as defined in Table 2
PGVALPGRCRQAPADLLPXMRAYWPDVIYSFANRSRFWKHEWEKHGTCAAQVDALNSQNKYFGTSLELYRELDLNSVLLKLGIKPSINYYQVADFKDALARVYGVIPKIQCLPPSQDEDRQ

SEQ ID NO: 43070 - protein, 193 aa, Homo sapiens
  DOMAIN (62)..(74): Ribonuclease T2 family histidine proteins 1 domain identified by eMATRIX, accession number BL00530C, p-value=1.000e-17, raw score of 11.43
QRFKNDCRDPRDTGPIHGLWPDKSEGCNRSWPFNLEEIKDLCPEMRAYWPDVIHSFPNRSRFWKHEWEKHGTCAAQVDALNSQKKYFGRSLELYRELDLNQVADFKDALARVYGVIPKIQCLPPSQDEEVQTIGQIELCLTKQDQQLQNCTEPGEQPSPKQEVWLANGAAESRGLRVCEDGPVFYPPPKKTKH

SEQ ID NO: 43071 - protein, 208 aa, Homo sapiens
  DOMAIN (99)..(111): Ribonuclease T2 family histidine proteins 1 domain identified by eMATRIX, accession number BL00530C, p-value=1.000e-17, raw score of 11.43
  misc_feature (1)...(208): Xaa = X or * as defined in Table 2
MRPAALRGALLGCLCLALLCLGGADKRLRASVSRPFSLEHPEPGHCLDLHLRAYPARWSSXPWPQDFWVRXPTWESVSDLLPEMRAYWPDVIHSFPNRSRFWKHEWEKHGTCAAQVDALNSQKKYFGRSLELYRELDLNRGERVPTQFPRELVVNRSLAPPPTPGFLSGHVISVHTSSPLPSAMSGSFLRPLPEAESGSMLLGQPADP

SEQ ID NO: 43072 - protein, 204 aa, Homo sapiens
  DOMAIN (75)..(87): Ribonuclease T2 family histidine proteins 1 domain identified by eMATRIX, accession number BL00530C, p-value=5.705e-12, raw score of 11.43
MTHFEVLAGHESLGDMIQTITGCDQTINFISNPNLAVFGDKAYKKVIKNAVFLNDRQWLTKHFQYGPYKMGTLVSEKHEWEKHGTCAAQVDALNSQKKYFGRSLELYRELDLNSLTAGSRGVGVDLTALQQLLHVHYSATGIIPEECSEPTKPFQIILHHESHRVGAEYWDAHLGTILHSFRVRPLGKTRDFQPACCRFSAMIS

SEQ ID NO: 43073 - protein, 342 aa, Homo sapiens
  DOMAIN (142)..(155): Ribonuclease T2 family histidine proteins 1 domain identified by eMATRIX, accession number BL00530B, p-value=8.364e-14, raw score of 13.73
RGAPRGPGRQGCCGHSRSPARGPRDTGLGRPRAPGAPGGRCCSGGSAAARGLGDSVSPGSLPRAAGGKWEPERQLAAFSPQVGTMRPAALRGALLGCLCLALLCLGGADKRLRDNHEWKKLIMVQHWPETVCEKIQNDCRDPPDYWTIHGLWPDKSEGCNRSWPFNLEEIKDLLPEMRAYWPDVIHSFPNRSRFWKHEWPKRHGTCAAQVDALNSQKKYFGRSLELYRKLDLNSVLLKLGIKPSINYYQVADFKDALARVYGVIPKIQCLPTSQGEEVQTIGQIDLCLIKARTRQLQNCTEPGEQPSPKQEVWLANGAAESRGLRVCEDGPVFYPPPKKTKH

SEQ ID NO: 43074 - protein, 171 aa, Homo sapiens
NGYKFLYCSARAIGMADLTKGYLQWVSEGGCSLPKGPILLSPSSLFSALHREVIEKKPEVFKVACLSDIQQLFLPHGQPFYAAFGNRPNDVFAYRQVGLPESRIFTVNPRGELIQELIKNHKSTYERLGEVVELLFPPVARGPSTDLANPEYSNFCYWREPLPAVDLDTLD

SEQ ID NO: 43075 - protein, 100 aa, Homo sapiens
  DOMAIN (60)..(86): PROTEIN GTPASE DOMAIN ACTIVATION domain identified by eMATRIX, accession number PD00930A, p-value=4.600e-20, raw score of 25.62
  misc_feature (1)...(100): Xaa = X or * as defined in Table 2
ALQDRDWQRAVIAMNGIEVKLSVKFNSREFSLKRMPSRKQTGVFGVKIAVVTKRERSKVPYIMRQCVEEIERRGMEEVGIYRVSGVATDIQALKAGFNVX

SEQ ID NO: 43076 - protein, 128 aa, Homo sapiens
  DOMAIN (55)..(72): GTPase-activator protein for Rho-like GTPases domain identified by eMATRIX, accession number PF00620B, p-value=4.375e- 11, raw score of 14.20
MPSRKQTGFFEVKIAVVTRERGPKCPTSCASAEGDRAPRHVVDTRYVSVMMSEMYVNAIAGTLKLYSRELPEPLFTDEFYPNFAEGIGAGEGLDASVTSHKAWLPDSPAGSDAFLPRALGLKQPGFLL

SEQ ID NO: 43077 - protein, 179 aa, Homo sapiens
  DOMAIN (17)..(43): PROTEIN GTPASE DOMAIN ACTIVATION domain identified by eMATRIX, accession number PD00930A, p-value=8.258e-17, raw score of 25.62
DTENIPSSRRRERSKVPYIVRQCVEEIERRGMEEVGIYHVSGRVAADIQALKAAFNVSECRPAQDGMEVWAVVSAMRSQSAPRPRHVTSFSVSFLHLSGSSRRPLHFRALSNNKDVSVMMSEMDVNAIAGSLKLYFRELPEPLFTDEFYPNFAEGIGEHWRPWPHGRRLLHVHCCPQRL

SEQ ID NO: 43078 - protein, 315 aa, Homo sapiens
  DOMAIN (199)..(216): GTPase-activator protein for Rho-like GTPases domain identified by eMATRIX, accession number PF00620B, p-value=1.750e- 10, raw score of 14.20
GSNLYCTLEGDSFGYFVNKAKTRVYRDTHADPNWNEEFEIELEGSQTLRILCYEKCYNKTKIPKEDGESTDRLMGKGQVQLDPQALQDRDWQRTVIAMNGIEVKLSVKFNSREFSLKRMPSRKQTGVFGVKIAVVTKRERSKVPYIVRQCVEEIEPPKALEGGWASTACPAGVATDIQALKAAFDGNNKDVSVMMSEMDVNAIAGTLNLYFRELPEPLFTDEFYPNFAEGIRVAEKEAVNNMSLHNLATVFGPTLLRPSEKESKLPANPSQPITMTDSWSLEVMSQVQVLLYFLQLEAIPAPDSKRQSILFSTEV

SEQ ID NO: 43079 - protein, 213 aa, Homo sapiens
  DOMAIN (113)..(154): PROTEIN GTPASE DOMAIN ACTIVATION domain identified by eMATRIX, accession number PD00930B, p-value=4.649e-22, raw score of 33.72
NKDVSVMMSEMDVNAIAGTLKLYFRELPEPLFTDEFYPNFAEGIGSSLAASAVGVTMMTSLNCARTRVPGAPCDHLGRGLRLVVTQRSDPLPPAALSDPVAKKSCMLNLLSSLPEANLLTFLFLLDRLERMAEKEAVNKMSLHNLGTVFGPTLLRPSEKESKLPANPSQPITMTDSWSLEVMSQVEVLLYFLQLEAIPAPDSKRQSILFSTEV

SEQ ID NO: 43080 - protein, 69 aa, Homo sapiens
  DOMAIN (16)..(56): Cyclophilin-type peptidyl-prolyl cis-trans isomerase signatur domain identified by eMATRIX, accession number BL00170B, p-value= 8.986e-12, raw score of 20.97
TENFRALSTGEKGFGYKGSCFHRIIPGFMCQVRNLLNFILFGLLPSFGIEPEYFRIHISELLLYHFGSI

SEQ ID NO: 43081 - protein, 162 aa, Homo sapiens
  DOMAIN (48)..(88): Cyclophilin-type peptidyl-prolyl cis-trans isomerase signatur domain identified by eMATRIX, accession number BL00170B, p-value= 1.000e-35, raw score of 20.97
MVNPTVSFNITVNGEPLGCVSFKLFADKFPKTAENFRALSTGEKGFDYKCSSFHRIIPGFMCQGGDFTRHNGTGGKSIYGEKFDDENFILKHTVLGLRHEPPSPGNSQFFICTAKTEWLDGKPMVFGKVKDGMNIVEAMEHFGSGNGKTIKKITIADCTQLD

SEQ ID NO: 43082 - protein, 151 aa, Homo sapiens
  DOMAIN (114)..(141): COMPLEMENT C1Q DOMAIN SIGNATURE domain identified by eMATRIX, accession number PR00007A, p-value=5.263e-16, raw score of 19.33
AGEGPRRREPPWPAPQICPAGRGGGGTRAGGGAGRSSGRGGEGYGDLRVAAPLRAEPPLLSTCRPAYPAGLPGPRGDPGPRGEAGPAGPTGPAGECSVPPRSAFSAKRSESRVPPPSDAPLPFDRVLVNEQGHYDAVTGKFTCQVPGVYYF

SEQ ID NO: 43083 - protein, 220 aa, Homo sapiens
  DOMAIN (92)..(119): COMPLEMENT C1Q DOMAIN SIGNATURE domain identified by eMATRIX, accession number PR00007A, p-value=5.263e-16, raw score of 19.33
PSLCPGHPGLPGTPGHHGSQGLPGRDGRDGRDGAPGAPGEKGEGGRPGLPGPRGDPGPRGEAGPAGPTGPAGECSVPPRSAFSAKRSESRVPPPSDAPLPFDRVLVNEQGHYDAVTGKFTCQVPGVYYFAVHATVYRASLQFDLVKNGESIASFFQFFGGWPKPASLSGGAMVRLEPEDQVWVQVGVGDYIGIYASIKTDSTFSGFLVYSDWHQLPQSLA

SEQ ID NO: 43084 - protein, 118 aa, Homo sapiens
LLKYPINHFWGVSSIYRMILQQDFTSIRFPALEHCYTGGEVVLPKDQEEWKRRTGLLLYENYGQSETGLICATYWGMKIKPGFMGKATPPYDVQVIDDKGSILPPNTEGNIGIRIKPV

SEQ ID NO: 43085 - protein, 139 aa, Homo sapiens
SRAGNLMLVKSCCRIIRYIDDTPQKWLMGYFNNVCMMTLVSNCGRWWIKTVQPAVHGSTRVQMVATIHPESDRHQETSDVFRLRNFLLPGKEGCKANPWECFAILGKPVVPLVKKMTIGSKVFDLTQVCSGDADLRRRN

SEQ ID NO: 43086 - protein, 302 aa, Homo sapiens
IVRRDWQEVSDIHLAMANCKMTKSIRFPALEHCYTGGEVVLPKDQEEWKRRTGLLLYENYGQSETGLICATYWGMKIKPGFMGKATPPYDVQFHMEASVENCIIVSMNTADPGSQGITHSLLLQVIDDKGSILPPNTEGNIGIRIKPVRPVSLFMCYEGDPEKTAKVECGDFYNTGDRGKMDEEGYICFLGRSDDIINASGYRIGPAEVESALVEHPAVAESAVVGSPDPIRGEVVKAFIVLTPQFLSHDKDQLTKELQQHVKSVTAPYKYPRKVEFVSELPKTITGKIERKELRKKETGQM

SEQ ID NO: 43087 - protein, 282 aa, Homo sapiens
MYANVHSSFTLNSQNLKTTIQMAFNRLYVNAELIAGDPEKTAKVECGDFYNTGDRGKMDEEGYICFLGRSDDIINASGYRIGPAEVESALVEHPAVAESAVVGSPDPIRGESKGWRQNGISAMWLPNIHALKTGILLRDSRNYRGSPDASVLVSRSSLSRGNLGSDSIGQLAASIQRQSPVAVAVRIWVDQTQHKAVEATKSGGVKGIRKDKLRVHKVGPGDQHWYGGCEDPKLWEPTLFIGDQTKKQVTLLKYPINHFWGVSSIYRMILQQDFTRYGRSGL

SEQ ID NO: 43088 - protein, 108 aa, Homo sapiens
  misc_feature (1)...(108): Xaa = X or * as defined in Table 2
MAITMIITGSTYLGSPQIGSGLGHLQASAPSLTKGLEEVSAGSTLILHDXXXXXXXXXXXXXXXXXXXXXXPLPLRLGALPRALLMLTLTPALLFQFFLVISENLATR

SEQ ID NO: 43089 - protein, 169 aa, Homo sapiens
  DOMAIN (59)..(94): CORE POLYPROTEIN PROTEIN GAG CONTAINS: P domain identified by eMATRIX, accession number PD02059B, p-value=9.410e-11, raw score of 24.48
MCQGDTYAWGGHMCRGGHLRRGHSHERDTPRGPERPPRPPARDRESKDERRRPPPKDPPAVRTCPDSPSTATPPPPPPPPPPPPPPPPPPAAPSAFAALRLRGPGRKWTARGQLPLPATAPEARVRALPRGGYSSPGRATSARGPAPWPLPSRTGKPPRPCSANTQEHC

SEQ ID NO: 43090 - protein, 131 aa, Homo sapiens
EFEARVRALPRGGYSSPGRATSARGPAPWPLPSRTGKPPRWGASCPSQPPQLRPSRCPWRPPRAPFPRAGAVLDASAERDCVHFLSFPFPTCGEKTAPEPLSPSSADACCLYVGLVVRTAVWQGRPSFPAD

SEQ ID NO: 43091 - protein, 194 aa, Homo sapiens
  DOMAIN (105)..(148): Ribosomal protein S4 proteins domain identified by eMATRIX, accession number BL00632, p-value=9.690e-37, raw score of 23.79
MPVARSWVCRKTYVTPRRSFEKSRLDQELKLIEEYGLRNKREVWRVKFTLAKIRKAARELLTLDQKDPRRLFEGNALLWRLVCIGVLDEGKMKLDYILGLKIEDFLERRLQTQVFKLGLAKSIHHARVLIRQRHFRVRKQVVNIPSFIVRLDSQKHIDFSLCSPYGGGRPGRVKRKNAKKGQGGAGAGDHKEED

SEQ ID NO: 43092 - protein, 474 aa, Homo sapiens
MAFLMHLLVCVFGMGSWVTINGLWVELPLLVMELPEGWYLPSYLTVVIQLANIGPLLVTLLHHFRPSCLSEVPIIFTLLGVGTVTCIIFAFLWNMTSWVLDGHHSIAFLVLTFFLALVDCTSSVTFLPFMSRLPTYYLTTFFVGEGLSGLLPALVALAQGSGLTTCVNVTEISDSVPSPVPTRETDIAQGVPRALVSALPGMEAPLSHLESRYLPAHFSPLVFFLLLSIMMACCLVAFFVLQRQPRCWEASVEDLLNDQVTLHSIRPREENDLGPAGTVDSSQGQGYLEEKAAPCCPAHLAFIYTLVAFVNALTNGMLPSVQTYSCLSYGPVAYHLAATLSIVANPLASLVSMFLPNRSLLFLGVLSVLGTCFGGYNMAMAVMSPCPLLQGHWGGEVLIVSIRPVASWVLFSGCLSYVKVMLGVVLRDLSRSALLWCGAAVQLGSLLGALLMFPLVNVLRLFSSADFCNLHCPA

SEQ ID NO: 43093 - protein, 360 aa, Homo sapiens
  DOMAIN (12)..(27): TYPE I ANTIFREEZE PROTEIN SIGNATURE domain identified by eMATRIX, accession number PR00308A, p-value=7.949e-10, raw score of 5.90
MAEAAALRPTATTSGAAVAAAAAAAAASPTRIPTVTILSPGGRRGGRGSDGSGGSWTKQVTCRYFMHGVYKEGDNCCKLHDLSDSPYNVVYKSLQPGYCIYGDCCRYEHSKPLKQKEATATELTTKSSLAASSSLSWIVGPLVEMNTGEAESRNSNFVTVGAGSEGWVNAVEFVPGQPYCGRTAPSCTEAPLQGSVTKEESEKEQTAVETKKQLCPYAAVGECRYRENLCVYGDSCDMCGCSEYWVEEKEEKQKLILKYKEAMSNKACRYFDEGHGSCPFGGNGFYKHVYPDGHREEPQRQKERENSSPFDNDEEEVVTFELGELLLMLLAAVGDDELTDSEDESDLFHEELEDFYDLDL

SEQ ID NO: 43094 - protein, 85 aa, Homo sapiens
SCPFGGNCFYKHAYPDGRREEPQRQKVGTSSRYRAQRRNHFWELIEERENSNPFDNDEEEVVTFELGEMLLMLLAAGGDDELTNS

SEQ ID NO: 43095 - protein, 235 aa, Homo sapiens
  DOMAIN (211)..(220): Zinc finger C3HC4 type (RING finger), proteins. domain identified by eMATRIX, accession number BL00518, p-value=1.000e-08, raw score of 12.23
  misc_feature (1)...(235): Xaa = X or * as defined in Table 2
XPYSVVFKYSQRGYCMYGDRCRYEHSKPLKQEEATATELTTKSSLAASSSLSSIVGPLVEMNTGEAESRNSNFATVGAGSEDWANAIEFVPGQPYCGRTAPSCTEAPLQGSVTKEESEKEQTARGDKEAAVPLCCSGRVPIRGELVCISTGDSCDIDSQALSNRAFEAHEKDMELSFAVQRSKDMVCGICMEVVYEKANPSERRFGILSNCNHTYCLKCIRKWRSAKQFESKIIN

SEQ ID NO: 43096 - protein, 78 aa, Homo sapiens
SAPCPPPVSSCCGSSSGGCCSSEGGGCCLSHHRPRQSLRRRPQSSSCCGSGSGQQSGGSSCCHSSGGSGCCHSSGGCC

SEQ ID NO: 43097 - protein, 339 aa, Homo sapiens
  DOMAIN (209)..(252): Initiation factor 2 subunit domain identified by eMATRIX, accession number PF01008B, p-value=9.609e-36, raw score of 25.59
MEMPASDAQIPAPQVRGAPAIALVGCLSLAVELQAGAGGPGLAALVAFVRDKLSFLVTARPTAVNMARAARDLADVAAREAEREGATEEAVRERVICCTEDMLEKDLRDNRSIGDLGARHLLERVAPSGGKVTVLTHCNTGALATAGYGTALGVIRSLHSLGRLEHAFCTETRPYNQGARLTAFELVYEQIPATLITDSMVAAAMAHRGVSAVVVGADRVVANGDTANKVGTYQLAIVAKHHGIPFYVAAPSSSCDLRLETGKEIIIEERPGQELTDVNGVRIAAPGIGVWNPAFDVTPHDLITGGIITELGVFAPEELRTALTTTISSRDGTLDGPQM

SEQ ID NO: 43098 - protein, 312 aa, Homo sapiens
MEYYAAIKKDEFMPFVGTWMKLETIILSKLSQGQKTKHHMFSLIAAARQPHAECSTLSKDSPHFGVSCTPKCGIAESIHRGCPEKDNDFCRAGEAVLVKITESTRVCGLCWGNVGDFNDVRQSVQLKYVKNGSINAPGSYLAIKSQPSHPWNQASLEPSKISAVDLHFAIEKKILSTHRKQQQDGFQAPAVTGLVLLQSKLSTQGRSHKARSPVSRPRTSCGTICSPPPTLTNCQAPIVVGGGGPFFAGMVDGSVRHQRATAQLSHLTVESSNALAMPSAKMGKSRQSETYVTCSTSPGSPFIQRLEKPAFG

SEQ ID NO: 43099 - protein, 236 aa, Homo sapiens; identical to SEQ ID NO: 42320
  DOMAIN (53)..(98): kw TRANSCRIPTASE REVERSE II ORF2 domain identified by eMATRIX, accession number DM01354N, p-value=1.000e-40, raw score of 13.17

SEQ ID NO: 43100 - protein, 883 aa, Homo sapiens
  DOMAIN (110)..(151): kw TRANSCRIPTASE REVERSE II ORF2 domain identified by eMATRIX, accession number DM01354I, p-value=1.000e-40, raw score of 15.55
MGDFNTPLSTLDRSMRQKVNKDIQELNSALHQADLIDIYRNLHPESTEYTFFSAPHHTYSKIDHILGSKAPLSKYRRSEIKINCLSDHSAIKLELRIKKLTQNRSTTWKLNNLLLNDYWVHNEMKAEIKMFFETNENKDTTYQNLWDTLKAVCRGKFIALNAHKRKQERSKIDTLTSQLKELEKQEQTHSKASRRQEISKIRGELKEIETQKTLQKINESRGWFFEKINKIDRLLARLIKKKREKNQIHAIKNDKGDMSTNHTEIQTTIREYYKHLYANKLENLKEIDKFLETYSLPRLNQEEVESLNRPITGSEIEAIINSLPNKRSPGPDGFTAKFYQRYKEELLISNFSKVSGYKINVQKSQAFLYTNNRQTESQIMSELPFTIASKRMKYLGIQPTRDMKDLFKENYKPLLNEIKEDTNKWKNIPCSWVGRINIVKMAILPKNWKKTTLKFIWNQKRARIAKSILSQKNKAGGIMLPDFKLYYKATITKTAWYWYQNRDIDQWNRTEPSEIMPHIYNHLIFDKPDKNKKWGKDSLFNKWCWENWLAICRKLKLDPFLTPYTKINSRWIKDLNVRPKTIKTLEENPGNTIQDIGMGEDFMSKTPEAMATKAKIDKWDLIKLKSFCTAKETTIRLNRPPTEWEKIFAIYSSDKGLISRIYNELQQIYEKKTNNPIKKWAKDMNRHLSKEDIYAAKRHMKKCASSLAIREIQIKTTMRYHLTPVRMAIIKKSGNNRCWRGCGEIGTLLHCWWDCKLVQPLWKSVWRFLRDLELEIPFDPAIPLLGIYPKDYKSCCYEDTCTHMFIVALFTIAKTWNQPKCPTMIDWIKKMWHIYTMEYYADIKKDEFMSFVRTRMKLETIILSKISQEKKTKHRMFSLIGGN

SEQ ID NO: 43101 - protein, 915 aa, Homo sapiens; identical to SEQ ID NO: 32665
  DOMAIN (272)..(317): kw TRANSCRIPTASE REVERSE II ORF2 domain identified by eMATRIX, accession number DM01354N, p-value=1.000e-40, raw score of 13.17

SEQ ID NO: 43102 - protein, 654 aa, Homo sapiens; identical to SEQ ID NO: 40189
  DOMAIN (57)..(100): kw TRANSCRIPTASE REVERSE II ORF2 domain identified by eMATRIX, accession number DM01354T, p-value=1.000e-40, raw score of 9.48

SEQ ID NO: 43103 - protein, 610 aa, Homo sapiens
  DOMAIN (57)..(100): kw TRANSCRIPTASE REVERSE II ORF2 domain identified by eMATRIX, accession number DM01354T, p-value=1.000e-40, raw score of 9.48
MIISIDAEKAFDKIQQPFMLKTLNKLGIDGTYFKIIRAIYDKPTANITLNGQKLEAFPLKTGTRQGCPLSPLLFNKVLEVLARAIRQEKEIKGNQLGKEEVKLSLFADDMIVYLENPIVSAQNLLKLVSNFSKVSGYKINVQKSQAFLYTNNRQTESQIMSELPLTIASKRIKYLGIQLTRDVKDLFKENYKPLLKEIKEDANKWKNIPCSWVGRISIVKMAILPKVIYRFNAIPIKLPMPFFTELEKTTLKFIWNQKRARITKSILSQKNKAGGITLPDFKLYYKATVTKTAWYWYQNRDIDQWNRTEPSEITLHIYNYLIFDKPEKNKQWGKDSLFNRWWWENWLAICRKLKLDPFLTPYTKINSRWIKDLHVRPKIIKTLEENLGITIQDIGLGKDFMSKTPKEMGTKAKIDKGDLIKLKSFCTAKETTIRVNRQPTKWEKIFTTYSSDKGLISRIYNELKQMYKKKTNNPIKKWAKDMNRHFSKEDIYAAKTHMKKCSPSLAITEMQIKTTMRYHLTPVRMAIIKKSGNNSTVDNSKDLEPTQMPINDRLDKENVAHIHHGILCSHKKDEFMCFAWTWMKLETIILSKLSQEHKTKHHMFSLTSGS

SEQ ID NO: 43104 - protein, 81 aa, Homo sapiens
  misc_feature (1)...(81): Xaa = X or * as defined in Table 2
QQPASPTRSVLLFPKTAHISGSPAPPNVGLLNPSTGAAQKKTMTSAGLGRLSLXKXLNLPECVACAGETWVTSMMSGNQCN

SEQ ID NO: 43105 - protein, 537 aa, Homo sapiens
  DOMAIN (40)..(87): kw TRANSCRIPTASE REVERSE II ORF2 domain identified by eMATRIX, accession number DM01354V, p-value=1.000e-40, raw score of 12.97
LISNFSKVSGYKINVQKSQAFLYTNNRQTESQIMSELPFTIASKRMKYLGIQPTRDMKDLFKENYKPLLNEIKEDTNKWKNIPCSWVGRINIVKMAILPKNWKKTTLKFIWNQKRARIAKSILSQKNKAGGIMLPDFKLYYKATITKTAWYWYQNRDIDQWNRTEPSEIMPHIYNHLIFDKPDKNKKWGKDSLFNKWCWENWLAICRKLKLDPFLTPYTKINSRWIKDLNVRPKTIKTLEENPGNTIQDIGMGEDFMSKTPEAMATKAKIDKWDLIKLKSFCTAKETTIRLNRPPTEWEKIFAIYSSDKGLISRIYNELQQIYEKKTNNPIKKWAKDMNRHLSKEDIYAAKRHMKKCASSLAIREIQIKTTMRYHLTPVRMAIIKKSGNNRCWRGCGEIGTLLHCWWDCKLVQPLWKSVWRFLRDLELEIPFDPAIPLLGIYPKDYKSCCYEDTCTHMFIVALFTIAKTWNQPKCPTMIDWIKKMWHIYTMEYYADIKKDEFMSFVRTRMKLETIILSKISQEKKTKHRMFSLIGGN

SEQ ID NO: 43106 - protein, 332 aa, Homo sapiens; identical to SEQ ID NO: 42324
  DOMAIN (195)..(250): Beta-lactamase class-A proteins domain identified by eMATRIX, accession number BL00146C, p-value=1.000e-40, raw score of 25.08

SEQ ID NO: 43107 - protein, 252 aa, Homo sapiens; identical to SEQ ID NO: 42690

SEQ ID NO: 43108 - protein, 476 aa, Homo sapiens; identical to SEQ ID NO: 32684
  DOMAIN (201)..(250): kw TRANSCRIPTASE REVERSE II ORF2 domain identified by eMATRIX, accession number DM01354Z, p-value=1.000e-40, raw score of 9.06

SEQ ID NO: 43109 - protein, 791 aa, Homo sapiens
  DOMAIN (10)..(65): kw TRANSCRIPTASE REVERSE II ORF2 domain identified by eMATRIX, accession number DM01354Q, p-value=1.000e-40, raw score of 9.23
MNIDAKILNKILANRIQQHIKKLIHHDQVGFIPGMQGWFNIRKSINIVQHINRTNDKNHMIISIDAEKAFDKIQQRFMLKTLNKLGIDGTYLKIIRAIYDKSTANIVLNGQKLEAFPLKTGTRQGCPLSPLLFNIVLEVLARAIRQEKEIKGIQLRKEEIKLSLFADDMIVHLENPIVSAQNLLKLIDNFSKVSGYKINVQKSQAFLYTNNRQTESQIMSELPFTIASERIKYLGIQLTRDVKDLFKENYKPLLNDIKEDTNKWKNTPRSWVGRINIMKMAILPKVIYRFNAIPIKLPMTFFTELEKTTLKFIWNQKGARIAKSILIYRFNAQELEKTTLKFIWNQKGARIAKSILSQKNKAGGITLPDFKLYYKATVIKTAWYWYQNRDIDQWNRTEPSEIMPHIYNHLIFDKPDKNKKWGNDSLFNKWCWENWLAICRKLKLDPFLIPYTKINSRWIKDLNVRPKTIKTLEENLGNTIQDIAMGKDFMSKTPKAMATKAKIDKWDLINLKSFCTAKETTIRVNRQPIEWEKIFAIYSSDKGRISRIYNELKQIYKKKTNNPIKKWAKDMNRHFSKEDIYAAKRHMKKCSSSLAIREMHIKTTMRHHLTSVRMAIIKKLGNDWCWRGCGEIGRLLHCWWDCKLVQPLWKSVWRFLRDLELETPFDPATPLLGIYPKDYKSCCYKDICTRVCVPAALFTIANTWNPTPKCPSMIDWIKKMWHIYTMEYYAAIKKDEFMSFAGTWMKLETIILRKLSQGQKTKHRMSSLIGGNLTMRTFGHSAGNITHQGLS

SEQ ID NO: 43110 - protein, 3069 aa, Homo sapiens
  DOMAIN (703)..(744): kw TRANSCRIPTASE REVERSE II ORF2 domain identified by eMATRIX, accession number DM01354I, p-value=1.000e-40, raw score of 15.55
MGKDFVSKTPKAMATKAKIDKWDLIKLKSFCTAKETTIRVNRQPTEWEKIFAIYSSDKGLISKIYKELKQIYKKKNNPIKKEAKDMNRHFSREDIYAANRHMKKCSPSLAVREMQIKTTMRYHLIPVRMAIIKKSGNNRCWRGCGEIGTLLHCWWDCKLVQPLWKTVWRFLKDLELEIPFDPATPLLNIYSKEYKSCCYKDTCTCMFIVELFTIAKTWNQAKCATMIDWIKKVWRIYSMEYYAAIKKDEFMSFVGTWMKLETIILSKLSSSLKHGHSWEVLSVPQAQLFSYLQLLLLHSHLLEGARAREIQGSSVAKGKMPAKNAELLVKNQMISWIGQINSRPKEQKNPKTETEAVRSERRCGCCCPSVWKPEHSHDLLQSHREPAAELWVQVSGHLAHISVCERMCMMWSQSSGPVLLLYSCREQQAREARKQVGQRNLQAHEKMMCRDYSHQMASELFTECNRPVEKGVHICQKGTLSSSKIRGETCCTQLCRTFHTPQWRKELAPSRRGLRIWKVLSSHSYWHVYLHADLTPTEDLSSQRHEVESNKASAIQQEELTILNIYAPNTGGPRFIKQVLSDLQGDVDSHTIIMGDFNTPLSTLDRSTRQKVNKDTQELNSALHQADLIDIYRTLHPKSKEFTFFSAPHHTYSKIDHILGSKALLSKCKRTEIITNCLSDHSAIKLELRIKKLTQNCSTTWKLNNLLLNDYWVHNEMKAEIKMFFETNENKDTTYQNLWDTFKAVCRGKFIALNAHKRKQERSKIDTLTSQLKELEKQEQTHSKASRRQEITKIRAELKEIKTKKKTLQKINESRSWFFERINKIDRPLARLINKKREKHQIDAIKNDKGDITTDPTEIQTTIREYYKHLYANKLENLGEMDKFLDTYTLPRLNQEEVESLNRPITGSEIVAIINSLPTKKSPGPDGFTAEFYQRYKEELVPFLLKLFQSIEKEGILPNSFQEASIILIPKPGRDTTKKENFRPISLMNIDAKILNKILANRIQQHIKKLIHHDQLGFIPGMQGWFNIHNIHKLINVIHHINRTNDKNHMIVSIDAEKAFDKIQQPFMLKTINKIGIDGMYFKIIRAIYDKTTANIILNGQKLEAFPLKTGTRQGCPLSPLLFNIVLEFLARAIRQEKEIKGIQLGKEEVKLSLFADDMIVDLENPIVSAQNLLKLISNFSKVSGYKINVQKSQAFLYTNNTDKQESQIMSELPFTTASKRIKYLGIQLTRDVKDLFKENYKPLLNEIKEDTNKWKNVPCSWVGRISIVKMAILPKVIYRFNAIPIKLPMTFFTELEKTTLKFIWNQKRAHITKSILSQKNKAGGITLPDFKLYYKATVTKTAWYWYQNRYIDQWNRIEPSEIMPHIYNYLIFDKPDKNKKWGKDSLFNKWCWENWLAICRKLKLDPFLTPYTKINSRWIKDLNVRPKTIKTLEENLGNTIQDTGMGKDFMSKTPKAMATKAKIDKWDLIKLKSFCSLLGYLKTENTAKETTIRLNRQPTEWEKIFAIYSSDKGLISRIYKELKQIYKKKTNNPIKKWVKDINRHFSKEDIYAAKKHMKKCSSSLAIREIQIKTTMRYHLTPVRMAIIKKSGNNRCWRGCGEIGTLLHCWWDCKLVQPLWKTVWRFLKDLELEIPFDPATPLLNIYSKEYKSCCYKDTCTCMFIVELFTIAKTWNQAKCATMIDWIKKVWRIYSMEYYAAIKKDEFMSFVGTWMKLETIILSKLSSSLKHGHSWEVLSVPQAQLFSYLQLLLLHSHLLEGARAREIQGSSVAKGKMPAKNAELLVKNQMISWIGQINSRPKEQKNPKTETEAVRSERRCGCCCPSVWKPEHSHDLLQSHREPAAELWVQVSGHLAHISVCERMCMMWSQSSGPVLLLYSCREQQAREARKQVGQRNLQAHEKMMCRDYSHQMASELFTECNRPVEKGVHICQKGTLSSSKIRGETCCTQLCRTFHTPQWRKELAPSRRGLRIWKVLSSHSYWHVYLHADLTPTEDLSSQRHEVESNKASAIQQEELTILNIYAPNTGGPRFIKQVLSDLQGDVDSHTIIMGDFNTPLSTLDRSTRQKVNKDTQELNSALHQADLIDIYRTLHPKSKEFTFFSAPHHTYSKIDHILGSKALLSKCKRTEIITNCLSDHSAIKLELRIKKLTQNCSTTWKLNNLLLNDYWVHNEMKAEIKMFFETNENKDTTYQNLWDTFKAVCRGKFIALNAHKRKQERSKIDTLTSQLKELEKQEQTHSKASRRQEITKIRAELKEIKTKKKTLQKINESRSWFFERINKIDRPLARLINKKREKHQIDAIKNDKGDITTDPTEIQTTIREYYKHLYANKLENLGEMDKFLDTYTLPRLNQEEVESLNRPITGSEIVAIINSLPTKKSPGPDGFTAEFYQRYKEELVPFLLKLFQSIEKEGILPNSFQEASIILIPKPGRDTTKKENFRPISLMNIDAKILNKILANRIQQHIKKLIHHDQLGFIPGMQGWFNIHNIHKLINVIHHINRTNDKNHMIVSIDAEKAFDKIQQPFMLKTINKIGIDGMYFKIIRAIYDKTTANIILNGQKLEAFPLKTGTRQGCPLSPLLFNIVLEFLARAIRQEKEIKGIQLGKEEVKLSLFADDMIVDLENPIVSAQNLLKLISNFSKVSGYKINVQKSQAFLYTNNTDKQESQIMSELPFTTASKRIKYLGIQLTRDVKDLFKENYKPLLNEIKEDTNKWKNVPCSWVGRISIVKMAILPKVIYRFNAIPIKLPMTFFTELEKTTLKFIWNQKRAHITKSILSQKNKAGGITLPDFKLYYKATVTKTAWYWYQNRYIDQWNRIEPSEIMPHIYNYLIFDKPDKNKKWGKDSLFNKWCWENWLAICRKLKLDPFLTPYTKINSRWIKDLNVRPKTIKTLEENLGNTIQDTGMGKDFMSKTPKAMATKAKIDKWDLIKLKSFCSLLGYLKTENTAKETTIRLNRQPTEWEKIFAIYSSDKGLISRIYKELKQIYKKKTNNPIKKWVKDINRHFSKEDIYAAKKHMKKCSSSLAIREIQIKTTMRYHLTPVRMAIIKKSGNNRCWRGCGEIGTLLHCLVGL

SEQ ID NO: 43111 - protein, 94 aa, Homo sapiens
  misc_feature (1)...(94): Xaa = X or * as defined in Table 2
EYKNRXGLSLNPWGKTVHISWDVWSVGSSKAKRNWESWESXCRGIQKKASLRSRTGNHSASSGIXESRVXGLGTTGYRGITASLMSLRSCTRLH

SEQ ID NO: 43112 - protein, 68 aa, Homo sapiens
  misc_feature (1)...(68): Xaa = X or * as defined in Table 2
EEWPKRKSEIRERPRPXSWPSDKQTLVVQRGQKMEQANHPDPTDHMSQLMWTACPKGLGIALICLVRH

SEQ ID NO: 43113 - protein, 68 aa, Homo sapiens
  misc_feature (1)...(68): Xaa = X or * as defined in Table 2
GGGRNTWLQAVPGFPGWXRTLRTAVWDRRLTLRKPHHCPGGSQFPGPQRQVIGLLHFLSSLNHQGWFV

SEQ ID NO: 43114 - protein, 136 aa, Homo sapiens
  misc_feature (1)...(136): Xaa = X or * as defined in Table 2
MSTITQRKEENPSVFLEWLWEACKKIYSPVTRLTRGSIDPKRXVYYAISHRYQQKAPKPSPGPXTKSGGIIKPGNLGVLYXGPRGTGQKGKARSEKGCSLSHGPQTNKPWWFREDRKWSRPITWYGFLSVWFARTP

SEQ ID NO: 43115 - protein, 203 aa, Homo sapiens
MEYYAAMKRNKIMSFAGTWMELEAIILSKLMQEQKTKDCMLSVLSGSRRMRTHGHMEGSNTHQGLLGGDPSAPPAPANLRLANSTVNSDGSVTVTIVWDLPEEPDIPVHHYKVFWSWMVSSKSLVPTKKKRRKTTDGFQNSVILEKLQPDCDYVVELQAITYWGQTRLKSAKVSLHFTSTHATNNNRTTGNSGSRNDQHGVGE

SEQ ID NO: 43116 - protein, 124 aa, Homo sapiens
  misc_feature (1)...(124): Xaa = X or * as defined in Table 2
KYRAQRRMIARWLPQDLERGEAMLPNSSGWYKSLKGIVLISEAFSCKCRAASLTIADWLVXKQHSSPKKVQSPPFSAVRRSKPWQFWRVTAAKQSIWDCRVRIDFVISCKLRNPLRVCGSRILK

SEQ ID NO: 43117 - protein, 730 aa, Homo sapiens
  DOMAIN (200)..(222): WAP-type 'four-disulfide core' domain proteins domain identified by eMATRIX, accession number BL00317B, p-value=3.423e- 22, raw score of 14.58
  misc_feature (1)...(730): Xaa = X or * as defined in Table 2
VGEEGPAGVEGLNFPAQSRRLPGPQQCSPGAEQGASARARRPRPRPRPAAMVPGVPGAVLTLCLWLAASSGSWRPAPARLCAAAGRVAVCRERPARSCASRCLSLQITRISAFFQHFQNNGSLVWCQNHKQCSKCLEPCKESGDLRKHQCQSFCEPLFPKKSYECLTSCEFLKYILLVKQGDCPAPEKASGFAAACVESCEVDNECSGVKKCCSNGCGHTCQVPKTLYKGVPLKPRKELRFTELQSGQLEVKWSSKFNISIEPVIYVVQRRWNYGIHPSEDDATHWQTVAQTTDERVQLTDIRPSRWYQFRVAAVNVHGTRGFTAPSKHFRSSKDPSAPPAPANLRLANSTVNSDGAVXTVTIVWDLPEEPDIPVHHYKVFWSWMVSSKSLVPTKKKRRKTTDGFQNSVILEKLQPDCDYVVELQAITYWGQTRLKSAKVSLHFTSTHATNNKEQLVKTRKGGIQTQLPFQRRRPTRPLEVGAPFYQDGQLQVKVYWKKTEDPTVNRYHVRWFPEACAHNRTTGSEASSGMTHENYIILQDLSFSCKYKVTVQPIRPKSHSKAEAVFFTTPPCSALKGKSHKPIGCLGEAGHVLSKVLAKPENLSASFIVQDVNITGHFSWKMAKANLYQPMTGFQVTWAEVTTESRQNSLPNSIISQSQILPSDHYVLTVPNLRPSTLYRLEVQVLTPGGEGPATIKTFRTPELPPSSAHRSHLKHRHPHHYKPSPERY

SEQ ID NO: 43118 - protein, 470 aa, Homo sapiens
METPGKAFRQIDRKTSAASWFSFPRTSVTGLRGGGDKMKGALGDPSAPPVPANLRLANSTVNSDGSVTVTIVWGLPEEPDILVHHYNVFWSWTISSKSLVPTKKKQRKTTDGDWQAAPPATGCRIHWVKPAVLLSLVGTWRTFMSSQGIVNTPVSTLHLAQVRPRTHQFWTDFGDHEGTITNRQASSGTKYQAPVGQLKATSMAAGLKTQVSCFLGKGSLMTPGLFGVGTVGGQARVQVFKNVSVSAAKSDLPWSSIWSGRKTSVSAAASLLGGGEFGPTRIHIPFSLSDLKQIKAGLGRFSDDPDRDQEEQAQKEKRDQRKAAALVMALRQTNLGGSERTENGAGQSPERAGIALGDLIQTRGKTPQPVAYLSKEIDAVAKVWPHCLKLVAAVAVFVSEAIKIIQGKDLTVWTTHEEPVGSSAQQSQHQPDQPRYTCKLLEDLHLLFRKEISQTKKAPILFDPVIKREK

SEQ ID NO: 43119 - protein, 99 aa, Homo sapiens
SRVEIFSYLPVRDRIRISRVCHRWKRLVDDRWLWRHVDLTLYTVRAAGRAGLGRGRGARTPKTTSPTLGLCVGARAGDLEPGDPGPISASSLTSSSSTS

SEQ ID NO: 43120 - protein, 143 aa, Homo sapiens
  misc_feature (1)...(143): Xaa = X or * as defined in Table 2
XVCHRWKRLVDDRWLWRHVDLTLYTMRPTVMWHLLRRYMASRLHSLRMGGYLFSGSQAPQLSPALLRALGQKCPNLKRLCLHVADLSMVPITSLPSTLRTLELHSCEISMAWLHKQQDPTVLPLLECIVLDRVPPSVTSTCRA

SEQ ID NO: 43121 - protein, 144 aa, Homo sapiens
PEAEVRVGGIMATLVELPDSVLLEIFSYLPVRDRIRISRVCHRWKRLVDDRWLWRHVDLTLYTVRAAGRAGLGRGRGARTPKTTSPTLGLCVGARAGDLEPGDPGPISASSLTSSSSTSGPQFPHPCNGDKGQYLPHGAIMGLH

SEQ ID NO: 43122 - protein, 256 aa, Homo sapiens
  DOMAIN (224)..(245): Tobacco mosaic virus coat domain identified by eMATRIX, accession number PF00721B, p-value=2.746e-09, raw score of 13.26
MATLVELPDSVLLEIFSYLPVRDRIRISRVCHRWKRLVDDRWLWRHVDLTLYTTLEFNVFSGNQHGRSEQSLLKHKDISYLIPHNHMIEGPVRQRKTLTYKNANKVVKRDVSVIYCRITNHQETAHPRTSRMNAEESEQRHFEVPPNRLPPSWSRPHPKPPPGSAPTVPSEAGGTGSNRCRLRGNWDFSPGSWRTRPPTLPPPHASETGSRALSRFRAPRGESEVRVIRAAPPSQEPQLNQRFPLHQPLRPDQKTM

SEQ ID NO: 43123 - protein, 133 aa, Homo sapiens
  DOMAIN (90)..(101): Polyprenyl synthetases proteins domain identified by eMATRIX, accession number BL00723A, p-value=7.097e-10, raw score of 8.10
  misc_feature (1)...(133): Xaa = X or * as defined in Table 2
ERMCAGPWRKGAETGPYFCNDTVRHRKASLLCPFXRMNGDQNSDVYAQEKQDFVQHFSQIVRVLTEDEMGHPEIGDAIARLKEVLEYNAIGGKYNRGLTVVVAFRELVEPRKQDADSLQRAWTVGWCVELLQA

SEQ ID NO: 43124 - protein, 266 aa, Homo sapiens
  DOMAIN (147)..(170): Polyprenyl synthetases proteins domain identified by eMATRIX, accession number BL00723D, p-value=6.488e-15, raw score of 17.32
  misc_feature (1)...(266): Xaa = X or * as defined in Table 2
MNGDQKSDVYAQEKQDFFQHFSQIVGVLTEDEMGHSEIGDAIARLKDVLEYNAIGGKYHRGLTVLVAFQELDAINYAILLEACIYYLLKLYCQAQPYYLNLIELFLQISCQPEIGQTLDLITAPQDNVDFGRFTEKQHANAXKILLEIGEFFQIQDGYLDLFGDPTVTRKVGTDIQDNKCSWLVVQCLQRSTLEQYQILKENYGQKKAKKVVQVKALYEELDLPAVFLQYEEDGYSHIMGLTEQYAAPLLPAMFLGLVYKIYKQKK

SEQ ID NO: 43125 - protein, 110 aa, Homo sapiens
  misc_feature (1)...(110): Xaa = X or * as defined in Table 2
MNGDQKSDVYAQEKQDFFQHFSQIVGVLTEDEMGHSEIGDAIARLKDVLEYNAIGGKYHRGLTVLVAFQELDAINYAILLEACIYYLLKLYCQAQPYYLNLIELFLQISX

SEQ ID NO: 43126 - protein, 288 aa, Homo sapiens
  DOMAIN (157)..(180): Polyprenyl synthetases proteins domain identified by eMATRIX, accession number BL00723D, p-value=1.500e-16, raw score of 17.32
DQKSDVYAQEKQDFVQHFPQIIRVLSEDEMGHSETGDAVDRLKEVLEYNAIGGKYHQDLMVLVAFWELVEPRKQDADSLQQALTVGWCVELLQAFFLVADDIMDSSVSRRGQIWWYQKPGMGLDAINDAMLLEVCICTAGIDGDKEHANGKKILLEMGEFFQIQDDYLDLFGDPSVTSKVGTDIQDNKCGWLVVHLKENYRQKKAKKVAQVKALSEELNLLAVFLQYEEDSYSHIMGLIEQYAAPLTPAIFLGLVRNRGSSWLLEAIHIPFHVASAIFKASNEEPALC

SEQ ID NO: 43127 - protein, 238 aa, Homo sapiens
  DOMAIN (202)..(225): Polyprenyl synthetases proteins domain identified by eMATRIX, accession number BL00723D, p-value=7.136e-20, raw score of 17.32
  misc_feature (1)...(238): Xaa = X or * as defined in Table 2
MPLSRWLRSVGVFLLPAPYWAPRERWLGSLRRPSLVHGYPVLAWRSWEYNAIGGKYNRGLTVVVAFRELVEPRKQDADSLPAGPWTVGWCVELLQAFFLVADDIMDSSLTPPGNRSCWYQKPGVGLDAINDACIYRLLKLYCREQPYYLNLIELFLQSSYQTEIGQTLDLLTAPQGNLQPCTWQELMARRSTPMPKKILLEMGEFFQIQDDYLDLFGDPSVTGKIGTDIQDNKCSWLX

SEQ ID NO: 43128 - protein, 89 aa, Homo sapiens
  DOMAIN (29)..(67): Ribosomal protein L21e proteins domain identified by eMATRIX, accession number BL01171, p-value=7.983e-22, raw score of 19.94
  misc_feature (1)...(89): Xaa = X or * as defined in Table 2
KHISPALKALELPFERNLIIPLQLLKVRILKEGEMLDIXHWFLXXGMGTVQKGMPHKCYHGKTGRVYNVTQHAVGIVVNKQVKXVVLCG

SEQ ID NO: 43129 - protein, 345 aa, Homo sapiens; identical to SEQ ID NO: 36807
  DOMAIN (30)..(68): Ribosomal protein L21e proteins domain identified by eMATRIX, accession number BL01171, p-value=9.719e-36, raw score of 19.94

SEQ ID NO: 43130 - protein, 194 aa, Homo sapiens
  misc_feature (1)...(194): Xaa = X or * as defined in Table 2
INPPPPPFRPELPSSSNSPKMTDHKGERGEATRYMFSRPFKKTMGVVPLGHNNXRFYKKGDIVDIKGMGYCVQNGMPHKCYPWPKLEGVLQLLPQHAVAIVVNQPVLGQSFFPREXIVRIEHIKHFXEPEISFLKRVLKENDSEKERSPNEKGTWGSNLKRHLAPPQKKHTLXRTNGKEPELLEPIPYEFHGHN

SEQ ID NO: 43131 - protein, 105 aa, Homo sapiens
QRPSEAKEIKLYAQIPPIEKMDASLSMLANCEKLSLSTNCIEKIANLNGLEAVGDTLEELWISYNFIEKLKGIHIMKKLKILYMSNNLVKDWGTPVIKGDEEEDN

SEQ ID NO: 43132 - protein, 144 aa, Homo sapiens
QPPEWKLSLSTNCIEKIANLNGLKNLRILSLGRNNIKNLNGLEAVGDTLEELWISYNFIEKLKGIHIMKKLKILYMSNNLVKDWAEFVKLAELPCLEDLVFVGNPLEEKHSAENNWIEEATKRVPKLKKLDGTPVIKGDEEEDN

SEQ ID NO: 43133 - protein, 318 aa, Homo sapiens
  DOMAIN (79)..(114): Type I fibronectin domain proteins domain identified by eMATRIX, accession number BL01253H, p-value=5.315e-21, raw score of 13.15
MANEPFLRKNGKRARGMRHATPRRVLHTTQIAGLLGRKKLQAPSPEPQQSCDMVPFPPTIGQESQLRNREGGLALVIAPSLAGVVRWGEGCAQPNRPGIYTRVTYYLDWIHQYVPKKPCAAAVREEGARPWVHCWPRMLVLSLLVTRKNTEPPVLSLGYPTCWRAGGHVCAWEATSWLGRHYPQLGSVSERQLGLRRLFWLFSPTDERVRAEQGQGAVSTGGGMFTAGGAGRPGVKCGWGSVGPRQCCGVRVGRLKVLGPQQPSLNSEASLQVSDVTGMMLGWTGPRAQGVGRTRWVSGARVAACSIRLAQGESAFPA

SEQ ID NO: 43134 - protein, 162 aa, Homo sapiens
MEDQVKKTRKEQPVRDLDIQIQQAQRTSGKFITKRSLPRHIIIRLSEVNTKERILRAVRQKHQVTYKRKPIKLTANFSSETLQARRDWGFTFSSLKQNNYQPRILYPVKQSFINEGKIQSFTDQQMLREYAITKPALQELLKGALSLETKPGNTSKQNLFKA

SEQ ID NO: 43135 - protein, 122 aa, Homo sapiens
PRTKDYRPVQDLRLLHQATLTLHPTVPNPSTLLVLPPAEDSWFTFWNLKDAFFPIRLAPERQKLFAFQWEDPESESPVEPDCVEVLDSVDSSRPDLRDQAWASVDWELYVYGSSFFNPQGER

SEQ ID NO: 43136 - protein, 63 aa, Homo sapiens
  misc_feature (1)...(63): Xaa = X or * as defined in Table 2
LISRAKEDDMTLNIAEGVHPSYNIVLNTLHTCGISVKSTWRPSKGAAPXARMPGGTAGPCLAS

SEQ ID NO: 43137 - protein, 236 aa, Homo sapiens
  DOMAIN (163)..(174): RNase H domain identified by eMATRIX, accession number PF00075B, p-value=3.415e-10, raw score of 12.56
  misc_feature (1)...(236): Xaa = X or * as defined in Table 2
MRGAQKATNVNKLSEDIQGKEESPTQFYERLWEAYRMYTPFDPDSPENQRMIPMALVRQSAEDMRRKLQKQAGLAGMNPSQLLEIASQVFVNRDAVSRKENGKENGGQARRYADLFSRTKNYQPVQDLRLLHQAKLTFHPTVPNPSTLLGFPPAEDSWFTCLDLKDAFFPIRLAPERQKLFAFQWEDPESGWPPCWRAWQQLPCXYKIVPSILRISSSDGKYKAFSTCGSHLAVVC

SEQ ID NO: 43138 - protein, 211 aa, Homo sapiens
  DOMAIN (163)..(174): RNase H domain identified by eMATRIX, accession number PF00075B, p-value=3.415e-10, raw score of 12.56
  misc_feature (1)...(211): Xaa = X or * as defined in Table 2
MRGAQKATNVNKLSEDIQGKEESPTQFYERLWEAYRMYTPFDPDSPENQRMIPMALVRQSAEDMRRKLQKQAGLAGMNPSQLLEIASQVFVNRDAVSRKENGKENGGQARRYADLFSRTKNYQPVQDLRLLHQAKLTFHPTVPNPSTLLGFPPAEDSWFTCLDLKDAFFPIRLAPERQKLFAFQWEDPESGWPPCWRAWQQLPCXYKKQIS

SEQ ID NO: 43139 - protein, 210 aa, Homo sapiens
  DOMAIN (22)..(33): RNase H domain identified by eMATRIX, accession number PF00075B, p-value=9.561e-10, raw score of 12.56
  misc_feature (1)...(210): Xaa = X or * as defined in Table 2
XPSPSTLLGLLPAEDSWFTCLDLRDAFFPIRLAPESQKLFAFQWEDPESALAKTVRQRCVSCRQHHARQGPAVPPGIQAYGAAAFEDLQVDFTEMPECGGNKYLPVLGRTYSGWVETYPTRAEKAREVTRVLLRDLIPRLELPFRIGSDNGPAFVADLLQKTATVLGITRKLHAASRPQSSGKGIQNNRTGGVYTPCDIESHVILFRSGY

SEQ ID NO: 43140 - protein, 86 aa, Homo sapiens
FLGVPTLGGWRPIQHELRKPREVTPVLLRDLIRRFRPPLWIGSDNGPAFLAALVQKTAKGIQNNITGGVYTLCDIDSHIILFRSGY

SEQ ID NO: 43141 - protein, 331 aa, Homo sapiens
  DOMAIN (129)..(141): RNase H domain identified by eMATRIX, accession number PF00075C, p-value=1.321e-13, raw score of 11.58
MLTGGVRDSRIRDKGLYYHSNSNSQTIKVFAPVPSASVSTGPHEEGQPRTKDYRPVQDLCLLNQATLTLHPTVPNPSTLLGLLPAEDSWFTCLDLKDAFFPIRLSPERQKLFAFQWEDPESGVTNQYTWTGLPQGFKNSPTIFGKALARDHQKFPTRDLGCVLLQTPIALAGGIPQEEGTESQPLFPPWLLGPPSQRGEAPPGRRGLRTSPYSPPGFGTLIAESPVEPDCVEVLDSIDSSRPDLRDQPWASVDWELYVDGSSFFNPQGEREARKAASAPFRASVLPQAPDLGPTSSKEEKDFLQGIQNNRTGGVYTLCDIESHIILFRSGY

SEQ ID NO: 43142 - protein, 57 aa, Homo sapiens
  misc_feature (1)...(57): Xaa = X or * as defined in Table 2
DSPRGEAESXAXLPEKLLEMSGNRLVDNKDPGKKQTQRRIPHSPSQIPVPLPEIWCT

SEQ ID NO: 43143 - protein, 373 aa, Homo sapiens
MMAIQCDKCSEKGMHRMFEQPKAGGSMTIQKVKGLLSRLLKVPVSDLLLSYESPKGKPLKKKTRDTGKAKVVFRVVEPTNKTIRWAPLPALFHSWEISETQRDKRFAKRETQTVADTDRTLAFSDRQMHTMARPPDTPVLFIWKRDNSFTFTSWAEGDALLHNLHSRPQRLIDHIRNLHEEDALLKEESSIYDDIVFVDVVDTYRNVPAKLLNFYRWTVETTSFNLLLKTDDDCYIDLEAVFNRIVQKNLDGPNFWWGKLNWAVDRTGKWQELEYPSPAYPAFACGSGYVISKDIVKWLASNSGRLKTYQGEDVSMGIWMAAIGPKRYQDSLWLCEKTCETGMLSSPQYSPWELTELWKLKERCGDPCRCQAR

SEQ ID NO: 43144 - protein, 144 aa, Homo sapiens
SFQRKDQAAIFAVLQPPLVIPRQTGSGVDLQQTPTDLQLRNHLTGDEQVIPGSNSHWHLPLQARRSFSLWRQRLLPHQQGSSVVEIYSRSHPKCHRKVPLVIEEKLLADQEAAIHKETATCICFHAVDHFYFFFRKMSIQVLCP

SEQ ID NO: 43145 - protein, 33 aa, Homo sapiens
RFKGLANTSCPSLQRWQGVDVMGLYELPAEMPR

SEQ ID NO: 43146 - protein, 254 aa, Homo sapiens
MNNTKLINQQSENSEESSGSLSTRSNSENEQTTSSSGSLTLCSLTGKHLPVGADRHSNRQVTLWDEASRGRIGSNICCYAASAVNTKTTGSGVDLRQTPTDLQLRGSERLRLAGGVPGVCQTFKSSGSMSAKLVMQVLKLVLNCLNFDLLAVQQMNLQMIFARCRSNNLENNKEVEDNGIWEMGTSTQDDMKDIERLQLYNKVKEQPFKLKALGAWNLVPCVAAAPAVAERGNVELRPRLQRVQAPSLAPSMWC

SEQ ID NO: 43147 - protein, 226 aa, Homo sapiens
MWENLEPPRDLLNDFDKNADSVLNNKVQAEVVSDGDEELVVNWSKGHDSFDGSGQSQFGTFWKGFTMIDATKDIHDSPEEVKIAALIGVWKKLILTLINDFEGFAPLAEEVTTVVVKIARKLELQVEPEDVMLMQDVGSHGLGQLCPCGFERPQLLRGTLQKRFPNQYLYGAASLMGWVLNSSAFPICSVLTHLGTILPVGVECLQLFQVTRPVMEGAAMKTSGMP

SEQ ID NO: 43148 - protein, 164 aa, Homo sapiens
NRTLCHALATATFAYIHSLIATFADFTRQALHRRYTLGLRYSALPHLDPTKLDLGDGSQYEKIFEMLEGVQGPTAVRKRFFESIIKEAARCSHRSRHPSSTGRCYEYVTVYSEIAPNTASQRSMTCLSWYSQYALRSDTVSDAPARSRIHQRKALSYVAYTRSV

SEQ ID NO: 43149 - protein, 50 aa, Homo sapiens
  misc_feature (1)...(50): Xaa = X or * as defined in Table 2
NALGKRTSFTNRNFLASGRLFDSVTYARRLQQYPAPLXKTAIXSFSLLNH

SEQ ID NO: 43150 - protein, 135 aa, Homo sapiens
  misc_feature (1)...(135): Xaa = X or * as defined in Table 2
SPDPWVSTYKSTCHIAQEIAEKIHLRNQYERKGEXAPRSNLMSEDANGGAPNPWLFEEPEETIGWGFDEIRQQQHNIIRXQDAGLDALSSIISRQKQMGIEIGNELHEQNEIIDDLANLMENTDEKLRNETRRVN

SEQ ID NO: 43151 - protein, 466 aa, Homo sapiens
  DOMAIN (295)..(316): CRAL/TRIO domain proteins domain identified by eMATRIX, accession number PF00650A, p-value=6.745e-09, raw score of 19.64
IIDDLANLVENTDEKLRNETRRALVSVNLGELQPGSGAGVPNPWARTGTGLWPFRNWAAQQQLLKGGKIKAIHTPGDLLLQNNWFLFARNIITAKPRKQKDVMELNLSASQSYPTIWASSEISYKKEKYGETKVRKMLFLSIISKENSTEEAGFFTARPVLTTSFSNQWVVTGAQKTSPADLLPHNLENKLEGDTNNQDKEQKEWNRFVGKDTEPCFRHVAFEGPFSNGCFCTVTAMVNSCNTDHTFWGTKLTIWPFGDKVSDPPKIKEKHCATGSCKELPQIKVEPLGTTQALGTQGKLLCLAEIPLGHTRSHLIHSQMGQFKVLSMPKCHTLGYRVLIPDGHLRINNSGKLLIPPRFQALRKLKSVSAACEVLSFLAEGCNSTPAIPAPLAKEKLLLDQSNLQDILTSFLCFSVELTRAMDPRAVAHRTALLGPVAADSSEFSPEQQQKKGPKSFQSEKRTIRQ

SEQ ID NO: 43152 - protein, 236 aa, Homo sapiens
MAPDPWFSTYDSTCQIAQEIAEKIQQRNQYERKGEKAPKLTVTIRALLQNLKEKIALLKDLLLRAVSTHQITQLEGDRRQNLLDDLVTRERLLLASFKNEGAEPDLIRSSLMSEEAKRGAPNPWLFEEPEETRGLGFDEIRQQPQKIIQEQDARLDALSSIISSQKQMGQEIGNELDEQNEIIDDLANLVENTDEKLRNETRRVNMVDRKSASCGMIMVILLLLVAIVVVAVWPTN

SEQ ID NO: 43153 - protein, 312 aa, Homo sapiens
MAALYACTKCHQRFPFEALSQGQQLCKECRIAHPVVKCTYCRTEYQQERLECNGTISAHCNLHLPGSSDSPASSSRVAGITGIKTNTICKKCAQNVQLYGTPKPCQYCNIIAAFIGNKCQRCTNSEKKYGPPYSCEQCKQQCAFDRKDDRKKVDGKLLCWLCTLSYKRVLQKTKEQRKHLSSSSRAGHQEKEQYSRLSGGGHYNSFSPDLALDSPGTDHFVIIAQLKEEVATLKKMLHQKDQMILEKEKKITELKADFQYQESQMRAKMNQMEKTHKEVTEQLQAKNRELLKQAAALSKSKKSEKSGAITSP

SEQ ID NO: 43154 - protein, 341 aa, Homo sapiens
MAALYACTKCHQRFPFEALSQGQQLCKECRIAHPVVKCTYCRTEYQQERLECNGTISAHCNLHLPGSSDSPASSSRVAGITGIKTNTICKKCAQNVQLYGTPKPCQYCNIIAAFIGNKCQRCTNSEKKYGPPYSCEQCKQQCAFDRKDDRKKVDGKLLCWLCTLSYKRVLQKTKEQRKHLSSSSRAGHQEKEQYSRLSGGGHYNSQKTLSTSSIQNEIPKKKSKFESITTNGDSFSPDLALDSPGTDHFVIIAQLKEEVATLKKMLHQKDQMILEKEKKITELKADFQYQESQMRAKMNQMEKTHKEVTEQLQAKNRELLKQAAALSKSKKSEKSGAITSP

SEQ ID NO: 43155 - protein, 211 aa, Homo sapiens
PSCCSGISHATRSSFTLLVSQANDTVDCTAFICTAWTLFIPRASELVAVTWISSFGSLFHLLSSALSSMGTCPVDSYWTLMNSEEKSSEPLVLCDLWYFIALPSPLVTFYCYLPYIGSCQGPSLSLFSFFFFFFFFLRRRTESCSVAQVGVQWRDLGSLQPPPPGFKRFSCLSLPSSWDYRRAPPRPANFYIFSRDGVSPCWPGWSRTPIS

SEQ ID NO: 43156 - protein, 115 aa, Homo sapiens
  DOMAIN (12)..(50): Ribosomal protein L6 proteins 2 domain identified by eMATRIX, accession number BL00700A, p-value=9.308e-33, raw score of 19.34
HEARMKTILSNQTVDIPENVDITLKGRTVIVKGPRGTLRRDFNHINVELSLLGKKKKRLRVDKWWGNRKELATVRTICSHVQNMIKGVACSVSQAQKDELILEGNDIELVSNSAA

SEQ ID NO: 43157 - protein, 555 aa, Homo sapiens
  DOMAIN (49)..(93): Ribosomal protein L6 proteins 2 domain identified by eMATRIX, accession number BL00700D, p-value=1.409e-34, raw score of 21.51
MIKGVTLDFHYNMRSVYAHFPINVIIPENRSLFEIRHFLDKAGISQAQKDDLILEGNDIELVSNSAALIQQATTAKNKSIRKILDGIYVSEKGTVQQAEWLEAGSGLGTGASSACLITVHSHAGFSGPGALTITQSWRRYIRSKLPCRLKGDTRPLQQLEAEPSESNVTSGNSSGTLIIHFHWERYAFLRPFPRNRTGNRLAISLSTGGGQWKEHLRSPEPGSPPTPLLPALVLQVTRVHTPTPSEGQLRKPLGIVREESLSGFMVSLASGVKLQTFAVSVTVHKGGASGVVRSSLLELFIPAGGFTVSLASGVKLQTFEGFAAPSPGTPAAQRELVPDNQEEKRGSEKETETRHHGQRPHEEGMAFHARDPVSDQAQQAPPAALSAGRAHAHLEHTLAHEHHAPGEGPPQRSSGLKVSSSAARVDAKAEEAPRDHNSSPARGQNRTENEFDKLTEVGFRRRVITNSSELKKHVLTQSKEAKNFEKRLQELLSRIIRLEKNINDLKELKNSAQELREAYTSTNSRINQVEEKISETKDQLNEMNHEEKRKKNEKE

SEQ ID NO: 43158 - protein, 196 aa, Homo sapiens
  DOMAIN (66)..(105): Ribosomal protein L6 proteins 2 domain identified by eMATRIX, accession number BL00700B, p-value=1.000e-40, raw score of 18.26
VDARMKTILSNQTVDIPENVDITLKGRTVIVKGPRGTLRRDFNHINVELSLLGKKKKRLRVDKWWGNRKELATVRTICSHVQNMIKGVTLGFRYKMRSVYAHFPINVVIQENGSLVEIRNFLGEKYIRRVRMRPGVACSVSQAQKDELILEGNDIELVSNSAALIQQATTVKNKDIRKFLDGIYVSEKGTVQQADE

SEQ ID NO: 43159 - protein, 553 aa, Homo sapiens
SREDQEWVDTQHSYAQPRNVVISTVLLSCPGHMLSCRHYMLSRPRHMLSRPCPHVLGFGMSLPWAHPLSPLMWATVQTTGLVSSEVSRRRRTVKAEKAHSRGKVDRATRQQRRAVQDSNGHEVVEGRQEGIQGRKYWVVISKFYVQEEMLVIPGHAGHPELNSQMGSPRHRQFVVREDKCGQRSNGFGHSMEIEEEVNDLMGEKMKKELDEVDLSTHCGFMGGLQRNGSTGQTAPYYATSTVEVIFHVSTRMPSDSDDSLTKKASLRRCASGTGERPQGEGNFQLDFITISTKHEVSWTESRGGESGVGSQRLDGCRKHSTGGGAWISPRAPAQHLCRVGALAFQPELVLTDSNMKTANSKPGLLPSPPGCLRTQMQSPRGARQAQIPTPAKSECVEVDEGPSRNHGLNAPGADTELQGISGQLTGCNYFNIGREADRTLVKGQVQGIRQTVIMSVPGRKEGDKLKEVSDGREAANQAGMKWGKECKSSSGTENAMSGKEVGILQEEKGDWSHGVVRGWQEVQLKDKLGLGTGGPNGLRQGSNMMSLKLLYCP

SEQ ID NO: 43160 - protein, 302 aa, Homo sapiens
  DOMAIN (103)..(133): Glutathione S-transferases domain identified by eMATRIX, accession number PF00043, p-value=8.941e-22, raw score of 21.83
MVCYVAHAALKLLAQVILPLLSPKVLGLQVPRGLERKMVLWAKPFSLTLSQSYEEVSTQEIQTLPFQVVFFVQMNTLFHCHPDISSAAQGCVQSPDESFMFQQVPMVEIDGMKLVQTRAILNYIASKYNLDGENGTKLENTLQDIIQENFPNLARQANIQIQEIQRMPQRYSSRRATPRRIIVRFTKVETKEKMLRAAREKGRVTHKGKPIRLTADALAETLQARKEWGPIFNILKEKNFQPRISYPAKLSFISEGEIKSFTDKEVLRDFVTTRPAIQELLKEALNVERNNQYQPLQKHAKS

SEQ ID NO: 43161 - protein, 76 aa, Homo sapiens
  DOMAIN (32)..(48): COLD SHOCK PROTEIN SIGNATURE domain identified by eMATRIX, accession number PR00050A, p-value=3.483e-13, raw score of 11.28
MSEGGASKGGGEEPGKLPEPAEEESQVLRGTGHCKWFNVRMGFGFISMINREGSPLDIPVDVFVHQAATKHYLDLV

SEQ ID NO: 43162 - protein, 106 aa, Homo sapiens
LRGGWRGEELGHRAPRPEPRTAARLPLCGGGGCSGRWVARWLAGWLAGWLAGWLAGSLAGCPADSSLWLPVGLDKGHFQTSLVSDGETWHVMGISSLLPSQRKSPS

SEQ ID NO: 43163 - protein, 130 aa, Homo sapiens
TSKAPGAQGEQGFEECFLAVALAGRPLPSLWALFQATTPVLQGLKEAFFRPEVPLRRDLPLLLFRTQTSDPAMLPTMIGLLAEARRAGCLSYQTSLVSDGETWHVMGISSLLPSLEGWKQHVTEAFQFHF

SEQ ID NO: 43164 - protein, 106 aa, Homo sapiens
  misc_feature (1)...(106): Xaa = X or * as defined in Table 2
SAGGSGRRTLHSRTMAQFVRNLVEKTPALVNAAVTYSKPRLATFWYYAKVELVPPTPAEIPRAIQSLKKIVNSAQTGSFKQLTVKVTTGXMKTDVHNRKCLPLGFF

SEQ ID NO: 43165 - protein, 110 aa, Homo sapiens
  misc_feature (1)...(110): Xaa = X or * as defined in Table 2
WTFHPTTMAPFVRDLGEKTPALGKAAVTYLKPRLAAFWYYHQVELVPPTPAEIPRAIQSLKKIVNSAQTGSFKQLTVKEALLNDLVATEVSTWFYVREITGKRGIIGXNV

SEQ ID NO: 43166 - protein, 160 aa, Homo sapiens
  misc_feature (1)...(160): Xaa = X or * as defined in Table 2
HSSPAVPGRTDFSHSQNPWPQFCPVTLVGEDPRALVNAAVTYTRKPRIGLHFWYYAKVELVPPTPAEIPRAIQSLKKIVNSAQTGTLANSSHVKEAVLXNGLVATEVLMWFLCSERLLGKRGHSLGYGCFEDQSFNIWIIFWILFILELFVWDHVVDPDC

SEQ ID NO: 43167 - protein, 46 aa, Homo sapiens
  DOMAIN (4)..(37): PROLINE-RICH PROTEIN 3 domain identified by eMATRIX, accession number DM00215, p-value=9.750e-17, raw score of 19.43
RCSLPPPPPPPPPPPPPPPPPPPPPPPLPPPHTGHPLQLRFRLLAV

SEQ ID NO: 43168 - protein, 50 aa, Homo sapiens
HLLLRSLFLLLQPCKTCVFLFTFCHDYKFPEVSPTMLPIQHADFLPPLPP

SEQ ID NO: 43169 - protein, 465 aa, Homo sapiens
MKKYGTTRTFCTFVILGAPHVKTRKREAVSGREMVILVDPSLETSESREKRWSIRGPSGTRFADKHKYASRDTQTDLNKIVFQHKGNTVTLKFWLGYINSLARCQNLVNRDLDHLSLPQDSTLVHYIDDIVLNGFSEEEKDHSGYNFDKEFDRSKALGVGVCAVTSWKIQCIIPVSDGSGLKSDRKQLASENERMALKSELSLQLGVTLPVALMRLGVFVPKPSKSKGESKEIDATKAFSQLEIAKAEGYDDIKITGPRLDMDTDFKTWIGVIYAFSKYGLSSNTIQLSFQEFAKACGFPSKRLDAKLRLTIHESLGRLRNKGIAFKRGKDAKGGYQTGLLKVGRFDADLDLIELEADSKLWELFQLDYRVLLQHHALRALPKKEAAQAIYTFIESLPQNPLPLSFARIRERLALQSAVGEQNRIIKKAIEQLKTIGYLDCSIEKKGRESFVIVHSRNPKLKLPE

SEQ ID NO: 43170 - protein, 50 aa, Homo sapiens; identical to SEQ ID NO: 43168

SEQ ID NO: 43171 - protein, 3660 aa, Homo sapiens
  DOMAIN (3602)..(3636): PROTEIN TRANSCRIPTION REGULATION NUCLEAR domain identified by eMATRIX, accession number PD02411, p-value=9.609e-32, raw score of 21.89
RPLRVSSLILNWKSPRKSGKTRKEHLHLQKKIRQLSDKALEGLSQLGLFLLQKGQMQPLLSNSYRGQKKGAQKKIEKEAAQLQGRKVKTQVKNIRQFIMPVVSAISSRIIKTPRRFIEDEDYDPPIKIARLESTPNSRFSAPSCGSSEKSSAASQHSSQMSSDSSRSSSPSVDTSTDSQASEEIQVLPEERSDTPEVHPPLPISQSPENESNDRRSRRYSVSERSFGSRTTKKLSTLQSAPQQQTSSSPPPPLLTPPPPLQPASSISDHTPWLMPPTIPLASPFLPASTAPMQGKRKSILREPTFRWTSLKHSRSEPQYFSSAKYAKEGLIRKPIFDNFRPPPLTPEDVGFASGFSASGTAASARLFSPLHSGTRFDMHKRSPLLRAPRFTPSEAHSRIFESVTLPSNRTSAGTSSSGVSNRKRKRKVFSPIRSEPRSPSHSMRTRSGRLSSSELSPLTPPSSVSSSLSISVSPLATSALNPTFTFPSHSLTQSGESAEKNQRPRKQTSAPAEPFSSSSPTPLFPWFTPGSQTERGRNKDKAPEELSKDRDADKSVEKDKSRERDREREKENKRESRKEKRKKGSEIQSSSALYPVGRVSKEKVVGEDVATSSSAKKATGRKKSSSHDSGTDITSVTLGDTTAVKTKILIKKGRGNLEKTNLDLGPTAPSLEKEKTLCLSTPSSSTVKHSTSSIGSMLAQADKLPMTDKRVASLLKKAKAQLCKIEKSKSLKQTDQPKAQGQESDSSETSVRGPRIKHVCRRAAVALGRKRAVFPDDMPTLSALPWEEREKILSSMGNDDKSSIAGSEDAEPLAPPIKPIKPVTRNKAPQEPPVKKGRRSRRCGQCPGCQVPEDCGVCTNCLDKPKFGGRNIKKQCCKMRKCQNLQWMPSKAYLQKQAKAVKKKEKKSKTSEKKDSKESSVVKNVVDSSQKPTPSAREDPAPKKSSSEPPPRKPVEEKSEEGNVSAPGPESKQATTPASRKSSKQVSQPALVIPPQPPTTGPPRKEVPKTTPSEPKKKQPPPPESGPEQSKQKKVAPRPSIPVKQKPKEKEKPPPVNKQENAGTLNILSTLSNGNSSKQKIPADGVHRIRVDFKEDCEAENVWEMGGLGILTSVPITPRVVCFLCASSGHVEFVYCQVCCEPFHKFCLEENERPLEDQLENWCCRRCKFCHVCGRQHQATKQLLECNKCRNSYHPECLGPNYPTKPTKKKKVWICTKCVRCKSCGSTTPGKGWDAQWSHDFSLCHDCAKLFAKGNFCPLCDKCYDDDDYESKMMQCGKCDRWVHSKCENLSGTEDEMYEILSNLPESVAYTCVNCTERHPAEWRLALEKELQISLKQVLTALLNSRTTSHLLRYRQAAKPPDLNPETEESIPSRSSPEGPDPPVLTEVSKQDDQQPLDLEGVKRKMDQGNYTSVLEFSDDIVKIIQAAINSDGGQPEIKKANSMVKSFFIRQMERVFPWFSVKKSRFWEPNKVSSNSGMLPNAVLPPSLDHNYAQWQEREENSHTEQPPLMKKIIPAPKPKGPGEPDSPTPLHPPTPPILSTDRSREDSPELNPPPGIEDNRQCALCLTYGDDSANDAGRLLYIGQNEWTHVNCALWSAEVFEDDDGSLKNVHMAVIRGKQLRCEFCQKPGATVGCCLTSCTSNYHFMCSRAKNCVFLDDKKVYCQRHRDLIKGEVVPENGFEVFRRVFVDFEGISLRRKFLNGLEPENIHMMIGSMTIDCLGILNDLSDCEDKLFPIGYQCSRVYWSTTDARKRCVYTCKIVECRPPVVEPDINSTVEHDENRTIAHSPTSFTESSSKESQNTAEIISPPSPDRPPHSQTSGSCYYHVISKVPRIRTPSYSPTQRSPGCRPLPSAGSPTPTTHEIVTVGDPLLSSGLRSIGSRRHSTSSLSPQRSKLRIMSPMRTGNTYSRNNVSSVSTTGTATDLESSAKVVDHVLGPLNSSTSLGQNTSTSSNLQRTVVTVGNKNSHLDGSSSSEMKQSSASDLVSKSSSLKGEKTKVLSSKSSEGSAHNVAYPGIPKLAPQVHNTTSRELNVSKIGSFAEPSSVSFSSKEALSFPHLHLRGQRNDRDQHTDSTQSANSSPDEDTEVKTLKLSGMSNRSSIINEHMGSSSRDRRQKGKKSCKETFKEKHSSKSFLEPGQVTTGEEGNLKPEFMDEVLTPEYMGQRPCNNVSSDKIGDKGLSMPGVPKAPPMQVEGSAKELQAPRKRTVKVTLTPLKMENESQSKNALKESSPASPLQIESTSPTEPISASENPGDGPVAQPSPNNTSCQDSQSNNYQNLPVQDRNLMLPDGPKPQEDGSFKRRYPRRSARARSNMFFGLTPLYGVRSYGEEDIPFYSSSTGKKRGKRSAEGQVDGADDLSTSDEDDLYYYNFTRTVISSGGEERLASHNLFREEEQCDLPKISQLDGVDDGTESDTSVTATTRKSSQIPKRNGKENGTENLKIDRPEDAGEKEHVTKSSVGHKNEPKMDNCHSVSRVKTQGQDSLEAQLSSLESSRRVHTSTPSDKNLLDTYNTELLKSDSDNNNSDDCGNILPSDIMDFVLKNTPSMQALGESPESSSSELLNLGEGLGLDSNREKDMGLFEVFSQQLPTTEPVDSSVSSSISAEEQFELPLELPSDLSVLTTRSPTVPSQNPSRLAVISDSGEKRVTITEKSVASSESDPALLSPGVDPTPEGHMTPDHFIQGHMDADHISSPPCGSVEQGHGNNQDLTRNSSTPGLQVPVSPTVPIQNQKYVPNSTDSPGPSQISNAAVQTTPPHLKPATEKLIVVNQNMQPLYVLQTLPNGVTQKIQLTSSVSSTPSVMETNTSVLGPMGGGLTLTTGLNPSLPTSQSLFPSASKGLLPMSHHQHLHSFPAATQSSFPPNISNPPSGLLIGVQPPPDPQLLVSESSQRTDLSTTVATPSSGLKKRPISRLQTRKNKKLAPSSTPSNIAPSDVVSNMTLINFTPSQLPNHPSLLDLGSLNTSSHRTVPNIIKRSKSSIMYFEPAPLLPQSVGGTAATAAGTSTISQDTSHLTSGSVSGLASSSSVLNVVSMQTTTTPTSSASVPGHVTLTNPRLLGTPDIGSISNLLIKASQQSLGIQDQPVALPPSSGMFPQLGTSQTPSTAAITAASSICVLPSTQTTGITAASPSGEADEHYQLQHVNQLLASKTGIHSSQRDLDSASGPQVSNFTQTVDAPNSMGLEQNKALSSAVQASPTSPGGSPSSPSSGQRSASPSVPGPTKPKPKTKRFQLPLDKGNGKKHKVSHLRTSSSEAHIPDQETTSLTSGTGTPGAEAEQQDTASVEQSSQKECGQPAGQVAVLPEVQVTQNPANEQESAEPKTVEEEESNFSSPLMLWLQQEQKRKESITEKKPKKGLVFEISSDDGFQICAESIEDAWKSLTDKVQEARSNARLKQLSFAGVNGLGMLGILHDAVVFLIEQLSGAKHCRNYKFRFHKPEEANEPPLDPHGSARAEVHLRKSAFDMFNFLASKHRQPPEYNPNDEEEEEVQLKSARRATSMGLPMPMRFRHLKKTSKEAVGVYRSPIHGRGLFCKRNIDAGEMVIEYAGNVIRSIQTDKREKYYDSKGIGCYMFRIDDSEVVDATMHGNAARFINHSCEPNCYSRVINIDGQKHIVIFAMRKIYRGEELTYDYKFPIEDASNKLPCNCGAKKCRKFLN

SEQ ID NO: 43172 - protein, 270 aa, Homo sapiens
MFVYCQVCCEPFHKFCLEENERPLEDQLENWCCRRCKFCHVCGRQHQATKNSAESPQAKRPSPDVPLNRVLPGPQNSKRINAGTKNQTVHVLTCKWELKRPGTQHMKVKSLEDAEKNPKAIDTWIESISELHRSKPPATVHYTRPMPDIDTLMQEWSPEFEELLGKVSLPTAEIDCSLAEYIDMICAILDIPVYKSRIQSLHLLFSLYSEFKNSTAFLKALAEGQESIHSFIPIPPSQAGDMGDINLSSWGQLPKAAVSKGCSWPPLPPA

SEQ ID NO: 43173 - protein, 47 aa, Homo sapiens
VLQEVRELRDLYRQMDLQTPDSHLRQTTPHNIKAMTANSPFLLRFLI

SEQ ID NO: 43174 - protein, 400 aa, Homo sapiens
GPQDGNQQPAPPEKVGWVRKFCGKGIFREIWKNRYVVLKGDQLYISEKEVKDEKNIQEVFDLSDYEKCEELRKSKSRSKKNHSKFTLAHSKQPGNTAPNLIFLAVSPEEKESWINALNSAITRAKNRILDEVTVEEDSYLAHPTRDRAKIQHSRRPPTRGHLMAVASTSTSDGMLTLDLIQEEDPSPEEPTSCAESFRVDLDKSVAQLAGSRRRADSDRIQPSADRASSLSRPWEKTDKGATYTPQAPKKLTPTEKGRCASLEEILSQRYAASAHTLQLRAEEPPTPALPNPGQLSRIQDLVARKLEETQELLAEVQGLGDGKRKAKDPPSRSPPDSESEQLLLETERLLGEASSNWSQAKRVLQQVRELRDLYRQMDLQTPDSHLRQTTPHSQYRKSLM

SEQ ID NO: 43175 - protein, 388 aa, Homo sapiens
  misc_feature (1)...(388): Xaa = X or * as defined in Table 2
TTLINPGGPAPLLSLPTSSITGFTTFYHPNLKPLRTCPSXVQAWPCRHPIXSRDYQRDAEPTTCISKLLGENIRRDEFWKVQIKARSGETEQNPRSTAFAFGELPLANREELNLLLNKGILPLCDQRQEIESECAFTIFCAGDANCFPPSPTHLPLTALQQRPCGLSGSASKEAWGNSLVCGPRGDTLPMAIAKPHRSASKHSTLHQYPTPPRSLCHQHRDEQPTNHLQTLNTIPAWIHTKWVPGLDHINKPWRSCSSSQSAYLFYHWLHYFLPPKLKTSKDLSILSAGLAMSAPHLIFRVSAITSNSSCKPSSTSKACEELFKEHQCLGSTDIPIHIQGGAPFSAVSPQRLVLRGSQDGSHMVRPRLPFPDSAGLANFHLFSKLFLD

SEQ ID NO: 43176 - protein, 202 aa, Homo sapiens
MPSQEAVGAEPHRSGSWPVGTSMGSGGPLLLEVIAETRKIKWGADMARPALKMDRNLNCEFLEASFTGAPWLPEAGLLEVTPVGWAEMRRLLEYSRGRVGFGKEQVNSRHLPGIMAGPGALTKVKESRRHVEEGKMEVQKADGIQDRCNTISFATLAEIHHFHQIRVRDFKSQMQHFLQQQIIFFQKVTQKLEEALHKYDSV

SEQ ID NO: 43177 - protein, 58 aa, Homo sapiens
  misc_feature (1)...(58): Xaa = X or * as defined in Table 2
VSWRFVQVFIXVAGGSRICAAAGLSPGTPPPCATSLIGACSLIFIPRLLSLFCGDEAL

SEQ ID NO: 43178 - protein, 87 aa, Homo sapiens
MSLENECKVLLSGSSSQQIGESEGRWFSPGVGPLGGLGSPLAALAKCRSAGGWPAGVLVPPDVLLAMSSHLCVCLLGSAQTPSPARG

SEQ ID NO: 43179 - protein, 403 aa, Homo sapiens; identical to SEQ ID NO: 33630

SEQ ID NO: 43180 - protein, 106 aa, Homo sapiens
  misc_feature (1)...(106): Xaa = X or * as defined in Table 2
VAHQEKGIAEPGLRPTGDSRQTHRRLDVERSTSVQEHMGGCHFSPFPEREKLSTLRGIHQQAPALWQATDQWIDIEFGLGQPEESLGRXITRLQGKTILPFGSPIC

SEQ ID NO: 43181 - protein, 115 aa, Homo sapiens
MEVLMQPKVTKWRRQEKFLKRVGLVLPEEEEERGGANRTTKVYCLLSFQLGKIEAVNLKIVLQMEPQMQSMAKIYRRPLDWPASPCFDVNDIEGTPLEEISTAQPLVCPNSAGSS

SEQ ID NO: 43182 - protein, 150 aa, Homo sapiens
QFPTGQQAVPSVDPHWDTESEHGNWCRRHLLTCVLGLRKTRKKPMNYAMMSTITQGKEENPTAFLVRLREALRKHTSLSPDSIEGQLIRQADFGVSGKGKSWANRMPNMACFQCGLQGHFKKDCPSRSKLPPRPCPLCQGNHWKAHCPRG

SEQ ID NO: 43183 - protein, 95 aa, Homo sapiens; identical to SEQ ID NO: 42349

SEQ ID NO: 43184 - protein, 283 aa, Homo sapiens
GENPRSENTRLATILEVACCHFGSSPPPSGSSGRKDPPLTFGDHEGTSKAEPSPALGLTPEHKGNVGHAARIQQPGPLSLWSRKAGKGVQDCYIDLKQIKIDLDKFSDNPDGYIDVLQGLGQSFDLTWRNIMLLLNQTLTPNERSATITAAREFGDLWYLSQVNDRIAAEKREKFLTGQQAVPSVGSHWDTESEHGDWCCRHLLTCMLEGLRKTRKKPMNYSMMSTITQGKEENPTAFLERLREALRKHTSLSLDSIEGQLILKDTFITQSAADIRKNFKSPP

SEQ ID NO: 43185 - protein, 252 aa, Homo sapiens; identical to SEQ ID NO: 42690

SEQ ID NO: 43186 - protein, 180 aa, Homo sapiens
CTRRSSRTRTSTACALSTTPSRHGSAPSTTTASWWASSSPSACCWRPTRASCAPCAGATAPRRAARTRSSGWCSAPWSSSWPASCPTTCCCWCAGTGRPAATSPRAFSTPTTSPSCSPASTASPTPCSTASSARPPTGTWPASAGPAWPSSPAPGPAGPGRPTRWVPPRPPGKAGPRRRK

SEQ ID NO: 43187 - protein, 56 aa, Homo sapiens
  DOMAIN (15)..(26): RNase H domain identified by eMATRIX, accession number PF00075H, p-value=7.107e-09, raw score of 10.48
MAKLLFTGPGLFKTVKQIVKACKVCQRNNPLHCRPYISIPVSLTSLLSLSLPESKL

SEQ ID NO: 43188 - protein, 311 aa, Homo sapiens
  misc_feature (1)...(311): Xaa = X or * as defined in Table 2
PPCAVVCLLWIAAVYCLSTTFCAPLCGQNTWLPKPCRHVNRAASNASVSLSTVTLFSRLSXPQRKGSELLDSSGPLPASPSLPLCSGVSPRAGLGSAWPKIPFLGIREAKNPRSENTRLATILEAGHRHLGTSVSKDHPVTFWRPRRDLQSDLKQIKIDLGKFSDNPDGYIDVLQELGQSFDLTWRDIMLLLNQTLTPNERSATITAAREFGDLWYISQVVAAVAGLVSEAVKIIQGSYCVDIHDVNGILTAKGDLWLSDNHLLKYQALLLEGPVLRLRTCATLNPATFLPDNEEKIEHNCQQVIAQTYAT

SEQ ID NO: 43189 - protein, 536 aa, Homo sapiens
SRKVGKQVQDCYIDGKCSPQGKNALKMYSGEFDPVRVCVPFSLSDLKQLKIDLGRFSDNPDGYIDVLQGLGQSFDLTWRDIMLLLDQTLTPNERNATITAAREFGDLWCLSQVNDRMTTEQRERFPTGQQAVPSVDPRWDTESEHGDGCHRHLLTCMLEGLRKTKKKPMNYSMMSTITQGKEKNPNAFLERLRQALRKHTSLSPDSIEGQLILKDKCITLSAADIRKNFKNLETLLNLATLVFHNRDKEKQAEQDKRDLKKATALVMALRQADFGGSGTRKGWANPMPNRACFQCGLQGHFKKIVQIQISHPLIHAPYVKGINGRPTAPGDKGFQTKAQLCSEQAKYLGLKLSKGTRALSEERIQPILAYPHPKTLKQLRGFFGIPGFCRIWIPRIKAVKLHIVLQMDPQRQSMTKIYHGPLDWPASPCSDVNDTKGNPPEEISTAPPLLCPNSAGSSWSGDNTERRPLPDAGPLTLDFLGSKPRVQNNSDASREKHSHETKHPDQRHRTASYSHFQAKQGASVLPCILEKREASY

SEQ ID NO: 43190 - protein, 511 aa, Homo sapiens
  DOMAIN (64)..(81): RNase H domain identified by eMATRIX, accession number PF00075A, p-value=4.400e-13, raw score of 14.44
  misc_feature (1)...(511): Xaa = X or * as defined in Table 2
NPAAQTPFFVVKKGGKRGAGLLHRQYPLRLEAKQGLKKIVKDLKAQGLVTPCSSPCNTPTLAVQKPNGQWRLVQDLRIINEAVVPLYPAVPNPYILLSQIPEEAEWFTVLDLKDAFFCIPVHPDSQFLFAFEDPSNPMSQLTWTVLPQGFRDSLHLFGQALAQDLSQFSYLDTLVLQYMDDLLLVTHSETWCHQATQALLNFLATCGYKVSKQNAQLCSQQVKNLGLKLSKGTRALSEERIQPILAYPHPKTLKQLRGFLGITSFCRIWIPRIKAVKLQIILQMEPQMQSMTKIYHGPLDRPTSPSSNVNDIEGTNASDFPFLSQVLEQVVSPKGSKEAQCCVLRPLGCESNLKQIKIDLGKFSDTPDGYIDVLQGLGQPYYLTWRDIMLLLDQTLTPNERSAAITAVREFGDLWYLSQVNDRKITEEREQFPTGQQAVPSVDPHWDTESEHGDWCHRYLLTDVLEGLRKTRKKPINXSMISTITQGKEENPTAFLERLREALRKHTSLSP

SEQ ID NO: 43191 - protein, 214 aa, Homo sapiens
  DOMAIN (55)..(90): Matrix protein (MA) p15. domain identified by eMATRIX, accession number PF01140D, p-value=4.150e-10, raw score of 15.54
QKGDFLEGTEGTQNEQEAGEQAWTKGRTKRGILAKGRLQAQSDPGFSTVEQDPVLKKRKREREKERKEKEERKKERKRKKKEKKKKKELTRKKERKEGKSGQALGSGLDLDLESGLGQPKEAGEGSDAPVKSDWPLGAKGVTEALTRWVEALTCNTSSGLESFASSTTAGTSGGKAEGPEQGGLLLRGCHRCPETFVELLVYTVQTVSPEKLIV

SEQ ID NO: 43192 - protein, 66 aa, Homo sapiens
MGTNGSGGGEWGRTSPCQCLRLALTRSFLPVSVAQKQVKGRGRWGDAGATQSPVAVRELGTLRGAC

SEQ ID NO: 43193 - protein, 63 aa, Homo sapiens
  misc_feature (1)...(63): Xaa = X or * as defined in Table 2
NGVGHNRMGTNGSGGGEWGPPAPASAXGCSLASAFASASPRWWFEMGCRGIYDAQQVALSRSF

SEQ ID NO: 43194 - protein, 111 aa, Homo sapiens
  DOMAIN (44)..(59): LIM domain proteins domain identified by eMATRIX, accession number BL00478B, p-value=2.000e-11, raw score of 14.79
ALGQHLAELPAQSFSLRAQVKETCAACQKTVYPMERLVADKLIFHNSCFCCKHCHTKLSLGSYAALHGEFYCKPHFQQLFKSKGNYDEGFGRKQHKELWAHKEVDPGTKTA

SEQ ID NO: 43195 - protein, 135 aa, Homo sapiens
  DOMAIN (68)..(83): LIM domain proteins domain identified by eMATRIX, accession number BL00478B, p-value=2.000e-11, raw score of 14.79
  misc_feature (1)...(135): Xaa = X or * as defined in Table 2
XGFTSNEPCSRLQEPPRPPPLIPPKAAVTSTVQRSKSFSLRAQVKETCAACQKTVYPMERLVADKLIFHNSCFCCKHCHTKLSLGSYAALHGEFYCKPHFQQLFKSKGNYDEGFGRKQHKELWAHKEVDPGTKTA

SEQ ID NO: 43196 - protein, 417 aa, Homo sapiens
  DOMAIN (279)..(323): Synapsins proteins domain identified by eMATRIX, accession number BL00415N, p-value=1.328e-09, raw score of 4.29
MERPDGLGAAAGGARLSSLPQAAYGPAPPLCHTPAATAAAEFQPPYFPPPYPQPPLPYGQAPDAAAAFPHLAGDPYGGLAPLAQPQPPQAAWAAPRAAARAHEEPPGLLAPPARALGLDPRRDYATAVPRLLHGLADGAHGLADAPLGLPGLAAAPGLEDLQAMDEPGMSLLDQSVIKKGEAKVEVVVAGLGLDFQELGLSYQELGILGVRRNPPKQSKEHNESPNIPGGGALAPWSGAGRGRADSRAQPRGTGPRGLTCTTAGPQRQRDPSASGTPAPAGPQRQRDPSASGTPAPAGPQRQRVCGPVERVERWRPERRLRPGRPSLDVKLQPAQQQQRGRGRSRAQLDPEVVTQGKAWAVDPGQLRRRGRPSASAECGTGACPARALESEKVALWPPEASDPYSASQPGRERRLRR

SEQ ID NO: 43197 - protein, 145 aa, Homo sapiens
  DOMAIN (83)..(131): Ubiquitin-conjugating enzymes proteins domain identified by eMATRIX, accession number BL00183, p-value=1.000e-40, raw score of 28.97
ESERRGEFCLCKIISEQGRAVCVEDEQTSHFALTGNNGIYRKSQQQWQQELSDLARDPPAQCSAGPVGDDMFHWQATIMGPNDSPYQGGVFFLTIHFPTDYPFKPPKVAFTTRIYHPNINSNGSICLDILRSQWSPAFNQFPKSS

SEQ ID NO: 43198 - protein, 184 aa, Homo sapiens
  DOMAIN (74)..(122): Ubiquitin-conjugating enzymes proteins domain identified by eMATRIX, accession number BL00183, p-value=8.650e-25, raw score of 28.97
  misc_feature (1)...(184): Xaa = X or * as defined in Table 2
QSCPAAGIIKSFGRTFEHTPREVRKPDDKHTLLALKRINKDLSDLARDPPAQCSAGPVGDDMFHWQATIMGPNDSPYQGGVFFLTIHFPTDYPFKPPXGLHFTTRFYHPNINSKWAAFCLRYSXDSQWSPALTFSKVLLSICSLLCDPNPDDPLVPGDWHGSYXNRTGDKYNRISREWTQKYAM

SEQ ID NO: 43199 - protein, 132 aa, Homo sapiens
MGLKSRSKGRWSDGWNGRHPSTLKAIPMDTGQKVVAPVTVSAVPRATALSSIQAGIQQARQEGQNQQPILIPSGHLKPYHEPDAKEEIPGGSRGPPGCSHVETDAEEDPSCHEQHLSNTATYLGTDEEAVQM

SEQ ID NO: 43200 - protein, 96 aa, Homo sapiens
ALNKSTSEACVPKAWLRLPCCARTCVHRQVCACPSASSSCVVVKCCRHLFIKIAASEPTPTGSVSLEAILPMALFKALPSLRVALCTYTSRCMPCR

SEQ ID NO: 43201 - protein, 88 aa, Homo sapiens
  misc_feature (1)...(88): Xaa = X or * as defined in Table 2
XVQRQGMHLLVYVHKATRREGRALKSAIGRMASKETEPVGVGSEGLGAEGISDARPRMCLTPTVASTDCGLQSCFSLSTQPEFGHNIN

SEQ ID NO: 43202 - protein, 99 aa, Homo sapiens
VKHTAGSNHGFSFKSTSMLSNTATNSVRKDSHATVRERESGQARQRDSKFIDRTCFFFFFYTRKCCLHCCFVLFSDLFKRSSLPTRLRFLRTGTLKHLT

SEQ ID NO: 43203 - protein, 319 aa, Homo sapiens
  DOMAIN (302)..(313): MEMBRANE ALANYL DIPEPTIDASE (M1) FAMILY SIGNATURE domain identified by eMATRIX, accession number PR00756C, p-value=7.429e- 09, raw score of 11.60
  misc_feature (1)...(319): Xaa = X or * as defined in Table 2
MVNTECQLDWIEGCKVLILGVSKEASQGLGGRSRGRNVRQSTDADIRPTSEKDARSLMTTRQEDNISVDQRGFLSGVQKKSGCANGLKGSVCGGFYWVMAVIRMGVGKAMGLNLKLGIKFEIKKGYLKGCRDSLRLSPTGFGKFTATSHEVAATVPIKVVLELTLQTHKILRGVFAHLTSCLQLHSLPPGSSMDSAKARRQLQVAGQGHSLVKQKGFHVEAPDHHPVQLSDISCKSYRWGHKLIKINFLIPPLWWYYDLEEVKREQSEEKQQAKIMADIIGDALNAQKAFKGNPKGHKPLPFSAGQMENWXCPECPKSI

SEQ ID NO: 43204 - protein, 75 aa, Homo sapiens
LCRDQPQLKCSQVLALSDCSFSTCREQAAIGSTILEGSGGWWPSSDSSTMQCPCWDTVWGLKPHISFPYYHSRDS

SEQ ID NO: 43205 - protein, 195 aa, Homo sapiens
  misc_feature (1)...(195): Xaa = X or * as defined in Table 2
MEILTTCDKGLIFTGNTRKSETSTSECTCPLDINCSLSHSPPSPSDEETQHHTDSLHVRPRKGYLLCIYHIPDIVAVMVNIQCQLDWIEGCKVLFLGVSVKVLPKEINTGISGLGKADPPSIWKSXQHVTKDLYLQVILENQKLVPANALVRWILTVPFPTLLRALQMRKHSTTLTVCMSDRGKDIYCASTIYQI

SEQ ID NO: 43206 - protein, 63 aa, Homo sapiens
  misc_feature (1)...(63): Xaa = X or * as defined in Table 2
NKMSFKLKEDCFGRSKCNLXTXCWKSINEAXKDLELQLQFGPQEKLFALEQQVKKKLNLVPDA

SEQ ID NO: 43207 - protein, 501 aa, Homo sapiens
MGNPDPHLLGVALEEEQNLSALQPWFSGKGADLPKVKAGPERPQSWLGALPAPACSLSCRKERIDLARAGAVGKEDWMLSWQHHPRLKDQANCESNGISLVLRGCRAVIPYALLRDPNSILDPSKPADDFVIFSTKKEGHDRGTFFNCLSFNSQIPHASGEKVSLPFHLCTHPITSHPSIQPYRLCAGVIVYVDLAAGASWQYAHLKVCLPANYCNFLKLLAYIGLFSIMDSDLLNPNATYAKEFTSMLPVKCSSKICKAKYVQGHVCSKTVKKRKNESVQRKAHHPLSNSASPHRKSNHITGCVSVFILATRELNVSFEAQLRHTQEQYFASFIPIKLALNINHHRGPVEYSCIWGIMGLYFSSMSRFFMKQVGDEMTLKRLPHFTLGILPLPFNGQVCPMFRITVPEKGPPWEDVHISEDRKAREGAKRSPNLSPKTHPELSMHCKQCLQALACERRHLKGGFSLNLQDTGLHKSEESIPQEGEWHLDHQVTSSIQHSI

SEQ ID NO: 43208 - protein, 405 aa, Homo sapiens
PLLRGDSVEKTSRVWSGGERDQELLTEDALDDLIPSFLLTGQQTPAFGRRVSAAALTESDYRVLVGELDDEHMAALSTLGNDYRPTSAYERGQRYARRLHNEFAGNISALADAENISRKIITRCINTAKLPKSDVALFSHPGELSARSGDALQKASTDKEELLKQQASNLHEQKKAGAKILCDGGSEIGKIPYKSQEYPEIGLSVVPVWNKSPLLKNVDSNVKGRKTVYQGDGPLLEPSPKSSFFGSRRTQEQYFASFNPIKLTLNINHYMGQLIKAHLESAWQHLYLKIEFANEFYEQMVLPLKTQLSIQVMSGRGRAQACGDTGVHEAVRRPWAAASYWLSTMSVAAAAPSYSGDPEEEGAQTGWVSEYTELSGTLFLLCFFWLTPIQIKSPFSENLMTQHPM

SEQ ID NO: 43209 - protein, 245 aa, Homo sapiens
MDPRGVKLQTSTMSVTAHKGSADPKSEQQQYLLQREKEQIFHTVEGDPSRSLAETGTITGVAARCLESPSSFSSWRKEKGVHVKFLTKPKKKLFGWLLSVMVNIECQLDWIEGCKVLFLSVSTPSFSAFGLLDLTRMVCQGLSGLRPQTEGCIVGFPTFEVLGLRLASLLLSLEMAGYGTSPCDHASLTPHALGRPSLPRSRPSFHNAQPKYFPPPRLHSGEVSTRMHALWIDGCHSFHSRPKAP

SEQ ID NO: 43210 - protein, 30 aa, Homo sapiens
WMKVETIILSKLSQRENTKHLMFSLIGKER

SEQ ID NO: 43211 - protein, 32 aa, Homo sapiens
  misc_feature (1)...(32): Xaa = X or * as defined in Table 2
WLILSVNLIGLKDAKYCSCVCLXGCCQRRLTF

SEQ ID NO: 43212 - protein, 79 aa, Homo sapiens
DTISHQLEWQSLKSQETIGTWMKLETVILSKLSQGQKTKHHMFSLIGGNRTRRTHGHRKGNITLWGLLSDSVNCASSSG

SEQ ID NO: 43213 - protein, 83 aa, Homo sapiens
MEYYAAIKKDEFMSFVRIWMKLETIILSKLSQGQKTKHRRFSLIDGTITEALQGLKTLANELAENAGIDDPLVGWLEVGLERH

SEQ ID NO: 43214 - protein, 87 aa, Homo sapiens
MEYYAAIKNDEFMSFVGTWMKLETIILSKLLQGPKNNHCMFSLTDIFQTCCYADIIVRKPQGPTQEVKPKLRWINEPHPQSQLLAGR

SEQ ID NO: 43215 - protein, 27 aa, Homo sapiens
WMKLETMILSRLLQGQKTKHCMFSLTG

SEQ ID NO: 43216 - protein, 97 aa, Homo sapiens; identical to SEQ ID NO: 37355

SEQ ID NO: 43217 - protein, 107 aa, Homo sapiens
MEYYAAIKNDEFMSFVGTWMKLEIIILSKLLQGQKTKHRMFSLIDFIMWATCCNWFCLDGQPEEVPPPQGARMQAYSNPGYSSFPSPTGLEPSCKSCGAHFANTARK

SEQ ID NO: 43218 - protein, 123 aa, Homo sapiens
MEYYAAIKNDDFLSFLGTWMKLETIILSKLLQGRKTKHRMFSLIGGAGGQQGFLGCIRSLRMNGVTLDLEERAKVTSGFISGCSGHCTSYGTNCENGGKCLERYHGYSCDCSNTAYDGTFCNK

SEQ ID NO: 43219 - protein, 228 aa, Homo sapiens; identical to SEQ ID NO: 42434
  DOMAIN (141)..(184): kw TRANSCRIPTASE REVERSE II ORF2 domain identified by eMATRIX, accession number DM01354T, p-value=1.176e-39, raw score of 9.48

SEQ ID NO: 43220 - protein, 70 aa, Homo sapiens; identical to SEQ ID NO: 37359

SEQ ID NO: 43221 - protein, 29 aa, Homo sapiens
WMKLETITLSKLSQGQKTKHCMFSLIRRN

SEQ ID NO: 43222 - protein, 81 aa, Homo sapiens
MEYYAAMKDEFMSFAGTWMKLETIILSKLSQGQKAKHRMFSLIGKIYKSLKLQRNTVTESGRDREEMPKEWPRTQGYSEYL

SEQ ID NO: 43223 - protein, 117 aa, Homo sapiens
  misc_feature (1)...(117): Xaa = X or * as defined in Table 2
WMKLETIILSKLSXGQKTKHRMSSLIGSTDQQRLVVKNVQGRVCPGSTGHGAWEAWTAMRKVDSPLQTGSLRPGWCRQVGSHARSGSAEAAGNPGLHPGICPRVEDGIQVAENFPEV

SEQ ID NO: 43224 - protein, 96 aa, Homo sapiens
MDEAGNRHSQQTITRTENRTPHVLTHRLGGGLILEVRVELARNGWIIMDGMVGWQEVAVNLLKVVLKGFGGGLQGVWPEQLEEESHYFLSTLFVGS

SEQ ID NO: 43225 - protein, 398 aa, Homo sapiens; identical to SEQ ID NO: 33585

SEQ ID NO: 43226 - protein, 32 aa, Homo sapiens
KSGTWMKLETIILSKLSQSQKTKHCMFSLIGT

SEQ ID NO: 43227 - protein, 97 aa, Homo sapiens
MEYYAAIKNDEFMSFVGTWMKLETIILSKLSQGQKTKHHMFSLIGLAVLKHVLTPRIKATHVAFDCMKNYLDAIYDVTVVYEGKDDGGQRRESPTMT

SEQ ID NO: 43228 - protein, 58 aa, Homo sapiens
WMKLESIILSKLSQGQKTKHYMFSLVVFCTGLWLQALGLGDLSRFFSLPRVKNLLKIL

SEQ ID NO: 43229 - protein, 414 aa, Homo sapiens; identical to SEQ ID NO: 42465
  DOMAIN (284)..(325): CORE POLYPROTEIN PROTEIN GAG CONTAINS: P domain identified by eMATRIX, accession number PD02059A, p-value=8.013e-11, raw score of 28.10

SEQ ID NO: 43230 - protein, 79 aa, Homo sapiens
WMKLETIILSKLLQGQKTKHRMFSLIEGSCPTQQKAAMGLSQACSHRPNWGKGLKEWLTHRHPFQMARLNTQSQWPWDP

SEQ ID NO: 43231 - protein, 225 aa, Homo sapiens
MEYYAAIKKDELMSFAGTWVKLETIILSKLSHGQKTKHRMFSLIAPGSHHSAFCLYEFDSSRDFLDFADFGTTIKQDFRLLGQTSVDRLLQLSQGQAVKGNQLLPVSLVKRKTTLAPNTQTASPRALADSLMQLARQVSRLESGQDFADFGTTIKQDFRLLGQTSVDRLLQLSQGQAVKGNQLLPVSLVKRKTTLAPNTQTASPRALADSLMQLARQVSRLESGQ

SEQ ID NO: 43232 - protein, 135 aa, Homo sapiens
TPTNLQEKNKQPHQKVGEGYEQTLLKRRHLCSQKTHGKNAHHHWPSEKCKSKPQWIPSISHQLEWQSLKSQETTGTWMKLETIILSKLLQGQKTKHHMFSLIGGNRTRRTHGHRKGNITLWGLLSDSVNCASSSG

SEQ ID NO: 43233 - protein, 94 aa, Homo sapiens
PKQHGTWMKLETIILSNLLQGQKSKHRMFLLIVQGHRWPEPLAAGTPVDRRTSHRRAHSHTHSHSLTLGPLTHTFTLAHTGTTQICQFIPLAQL

SEQ ID NO: 43234 - protein, 1318 aa, Homo sapiens
  DOMAIN (77)..(132): kw TRANSCRIPTASE REVERSE II ORF2 domain identified by eMATRIX, accession number DM01354Q, p-value=1.000e-40, raw score of 9.23
MGSCPGGFTAEFYQRYKEELVPFLLKLFQSIEKQGTLPNSFYEASIILIPKPGRDTTKKENFRPISLMNIDAKILNKILTNRIQQHIKKLIHHDQVGFIHGMQGWFNIRKSINVIQHINRTNDKKHMIISIDAEKAFDKIQQPFMLKTLNKLGTWMKLETIILSKRSQGQKTKHRMFSLIVNIIPTIKILIKQNMTAMETLCPIFKLEGDTMDNPIANRRVRTAVPTSVVCLHVGTEPEARLPHGPMITAQSPFGQCLPGVVGQFRKREDLKKEGHTKLLSKKEARPQTGLRTWALDSGTKGTDEGEPPLLIPRQTGSAVDLQQITTDLQLRVLTVRRKTNKQKGHPHQNPTCTSPSSKNKEKEGILPNSFYEASIILIPKPGRDTTKKENFRPISLMNIEAKILNKVLANRIQQHIKNLIHHDQVGFIHGMQGWFNIRKSINVIQHINRTKDKNHMIISIDAEKAFDKIQQPFMLKTLNKLGIDGTYLKIIRAIYDKPTASIILNGQKLEAFPLKTGTRQGCPLSPLLFNIVLEVLARAIRQEKEIKSIQLGKEEVKLSLFADDMIVYLENPTVSAQNLLKLMSNFSKVSGYKINVQKSQAFLYTNNRQTESQIMSGLPFTITSKRITYLGIQLTRDVKDLFKENYKPLLKEIKEDTNKWKNIPCSWVGRINIVKMAILPKVIYRFNTIPIKLPMTFLTELEKTTLKFIWNQKRAHIAKSILSQKNKAGGIMLPDFKLYYKATVTKTAWYWYQNRDIDQWNRTEPSEIMPHIYNYLIFDKPDKNKQWGKDSLFNKWCWENWLAICRKLKLDPFLTPYTKINSRWIKDLHVRPKTIKTLEENLGNTIQDIGMGKDFMSKTPKAMATKAKIDKWDLIKLKSFCTAKETTIRVNRQPTEWEKIFATYSSDKGLISRIYNELKQIYKKKTNNPIKKWAKDMNRHFSEEDIYAAKKHMKKCSSSLAIREMQIKTTMRYHLTPVRMVIIKKSGNNRCWRGCGEIGTLLHCWWDCKLVQPLWKSVWQFLRDLELEIPFDPAIPLLGIYPEDYKPCCYKDTCTRMFIVALLTIAKTWNQPKCPTMIDWIKKMWHKCTMEYYAAIKNNEFMSFVGTWMKLETIILSKLSQGQKTKHRMFSLIVRTLSCRSVGVYSKSTPDPVCMGISSGCCRTADIGEVQMLLPDRSSGSFVSEEYLVLCVVSLPLLGGASLLGHSGIRDPLEEAVCPFSDLKLCAWRTTTLFKAMSENMQCSVFCPCNSLLRMTVSSFIHVPVPPEPLRARNKSGCAIVLYRIPSLPPHTSSFWVFPLSTLSAFPLKISSSLYLW

SEQ ID NO: 43235 - protein, 285 aa, Homo sapiens
MWESLELPRDLLDGVDQNADNDMDHEIQAAVVSDGDEELGKHRLHVDTGMEGDWCGLIPVGQPCMQVTTTGLKWNLRTCDYTRTTWIAKDNPVPRLIRLIRLNHICKVPLAMLHYQEGLYVQDERSLLMLKDQKDQETPEIQGEMEETGKGWVKCGSGIPQDGRWNSDWGWEPFEKSVFSSTFESRDNEMRDDELVTDSDKRQERVAMAVAIALAWATQCSSAARAQYSLHGTVSHRAETAKRRSWSIPGWDLHAHGQRWKLEFHPINIPGGSVDIKKQKLQLSL

SEQ ID NO: 43236 - protein, 85 aa, Homo sapiens
MKQKRKAASSEPTSEVALGGSAGPVRSHLHPEGLLWCSRCFFSLRPKGTEPPGRSAGLQGATERSGWTSVQAQAQACENLVPAAV

SEQ ID NO: 43237 - protein, 1070 aa, Homo sapiens
  DOMAIN (571)..(589): CADHERIN SIGNATURE domain identified by eMATRIX, accession number PR00205B, p-value=7.529e-11, raw score of 11.39
GQVSSLDREAFSPPILELLLLAKDIGLLNSTAHLLITILDDNDNRPTFSPATLTVHLLENCPPGFSVLQVTATDEDSGLNGELVYRIEAGAQDRFLIHLVTGVIRVGNATIDREEQESYRLTVVATDRGTVPLSGTAIVTILIDDINDSRPEFLNPIQTVSVLESAEPGTVIANITAIDHDLNPKLEYHIVGIVAKDDTDRLVPNQEDAFAVNINTGSVMVKSPMNRELVATYEVTLSVIDNASDLPERSVSVPNAKLTVNVLDVNDNTPQFKPFGITYYMERILEGATPGTTLIAVAAVDPDKGLNGLVTYTLLDLVPPGYVQLEDSSAGKVIANRTVDYEEVHWLNFTVRASDNGSPPRAAEIPVYLEIVDINDNNPIFDQPSYQEAVFEDVPVGTIILTVTATDADSGNFALIEYSLGDGESKFAINPTTGDIYVLSSLDREKKDHYILTALAKDNPGDVASNRRENSVQVVIQVLDVNDCRPQFSKPQFSTSVYENEPAGTSVITMMATDQDEGPNGELTYSLEGPGVEAFHVDMDSGLVTTQRPLQSYEKFSLTVVATDGGEPPLWGTTMLLVEVIDVNDNRPVFVRPPNGTILHIREEIPLRSNVYEVYATDKDEGLNGAVRYSFLKTAGNRDWEFFIIDPISGLIQTAQRLDRESQAVYSLILVASDLGQPVPYETMQPLQVALEDIDDNEPLFVRPPKGSPQYQLLTVPEHSPRGTLVGNVTGAVDADEGPNAIVYYFIAAGNEEKNFHLQPDGCLLVLRDLDREREAIFSFIVKASSNRSWTPPRGPSPTLDLVADLTLQEVRVVLEDINDQPPRFTKAEYTAGVATDAKVGSELIQVLALDADIGNNSLVFYSILAIHYFRALANDSEDVGQVFTMVHQRHPYRPALLPLRSCTSSRAVMVSARVKNVAMMLSSLTVPCPHPHSLGAMSTEGPSLASSPAISPLAFLSAPVTPGTLAEATDPLPMLIALACIFLLLATCLLFMTLCKPAALDPSRRRAHECMPHHPGSPSEPQLRLWKRLGSLRLSLHSFRHGRPTVPRQPLPGPEDNRSHCDYMESTKM

SEQ ID NO: 43238 - protein, 124 aa, Homo sapiens
  DOMAIN (68)..(92): HMW KININOGEN SIGNATURE domain identified by eMATRIX, accession number PR00334B, p-value=2.800e-10, raw score of 8.69
KFCTAFLALSVGKAIGSQDNHHHHHHHHYYHHEHQDQHYHHHHNHHHHHHHDHQDQHHHHHHYHHQDHHYHYHHHHHHHHHHHHHHHHHHHHHHCYHCGKYGSRGHGDNGSVTGLLLGAVPPVL

SEQ ID NO: 43239 - protein, 83 aa, Homo sapiens
GRECQGTASAISSVFFDQLTLDTLKGCGTILLSGPHKGQEVYWHFSKALGTQHSHTKPCVHSRDQKFKHIRGLFILISYVRFR

SEQ ID NO: 43240 - protein, 95 aa, Homo sapiens
DISFMAWALLLLTLLTQGTGSWAQSALTQPASVSGSPGQSITISCTGTSSDVGGYNYVSWYQQHPGKAPKLMIYEESPPVHIGPVFVSRTNQSHP

SEQ ID NO: 43241 - protein, 118 aa, Homo sapiens
  DOMAIN (78)..(112): IMMUNOGLOBULIN V REGION domain identified by eMATRIX, accession number DM00031B, p-value=5.135e-10, raw score of 15.41
MACALLLLSLLTQGTGSWTQSALTQPRSVSGSPGQSVTISCTGTSSDVGAYNYVSWYQQHPGTAPKVMIYDVNKRPSGVPDRFSGSKSGNTASLTISGLQAEDEAEYYCCSYASDSAF

SEQ ID NO: 43242 - protein, 148 aa, Homo sapiens
  DOMAIN (93)..(127): IMMUNOGLOBULIN V REGION domain identified by eMATRIX, accession number DM00031B, p-value=5.235e-12, raw score of 15.41
IREFRGSTISWDVSTMAWALLLLTLLTQDTGSWAQSALTQPASVSGSPGQSITISCTGTSSDVGNYNLVSWYQQHPGKAPKLIIYEGSKRPSGVSSRFSGSKSGNTASLTMSGLQAEDEADYYCCSYAGSSTYVFGPGTKVTVLGQPK

SEQ ID NO: 43243 - protein, 151 aa, Homo sapiens
  DOMAIN (86)..(120): IMMUNOGLOBULIN V REGION domain identified by eMATRIX, accession number DM00031B, p-value=5.329e-09, raw score of 15.41
AVNSDVCTMAWALLFLTLLTQGTGSWAQSALTQPASVSGSPGQSITISCTGTSNDVGGYNYVSWYQQHPGKAPELIIFDVSNRPLGVSTRFSGSKSGIMASLTISGLQAEDEADYYCCSFTSRNSRVFGSGTKVTVLGHPKANPTVTLFPA

SEQ ID NO: 43244 - protein, 162 aa, Homo sapiens
  DOMAIN (83)..(117): IMMUNOGLOBULIN V REGION domain identified by eMATRIX, accession number DM00031B, p-value=5.310e-11, raw score of 15.41
TQRSRDVSTMAWALLFLTLLTQGTASWAQSALTQPASVSGSPGQSITISCTGVGGYHYVSWHQQHPGKAPKLLIFDVSDRPSGVSNRFSGSQSGNTASLTISGLQAEDEADYYCSSFTGGSNLWVFGAGTKLSVLGQPKAAPFVTLFPPSSEELQANKATLG

SEQ ID NO: 43245 - protein, 249 aa, Homo sapiens
  DOMAIN (168)..(191): Immunoglobulins and major histocompatibility complex proteins domain identified by eMATRIX, accession number BL00290A, p-value= 1.529e-14, raw score of 20.89
CWGLRRQRSQDVTTMAWALLILTLLTQGTGSWAQSALTQPPSASGSLGQSVTFSCSGTSSDIGNYNYVSWYRQHPGKAPKLMIYEVTKRPSGVPNRFSGSKSGNTASLTVSGLQAEDEADYYCSSYAGSNSLIFGGGTRLTVLGQPKAAPSVTLFPPSSEELQANKATLVCLISDFYPGAVTVAWKADSSPVKAGVETTTPSKQSNNKYAASSYLSLTPEQWKSHRSYSCQVTHEGSTVEKTVAPTECS

SEQ ID NO: 43246 - protein, 161 aa, Homo sapiens
  DOMAIN (99)..(133): IMMUNOGLOBULIN V REGION domain identified by eMATRIX, accession number DM00031B, p-value=5.865e-10, raw score of 15.41
IIVYTREKERERRQRSQDVPTMAWALLLLTLLTQGTGSWAQSALTQPPSASGSPGQSVTISCTGTSSDIGYYDFVSWYQQRPGKAPKLIIFEVNKRPSGVPDRFSGSKSANTASLTVSGLQAEDEADYYCGSYAANDNGLFGRGTKLTVLGQPKAAPSVTL

SEQ ID NO: 43247 - protein, 170 aa, Homo sapiens
MAWALLLLTLLTQGTGSWAQSALTQPPSVSGSPGQSVTISCTGTSSDVGSYNRVSWYQQPPGTAPKLMIYENFSNYILMVIATTLILNNSAANIPTQTPLSSCVNMTTGFISKSEIADVADADLFISSNLCKQSGKLDFSEHPDDNGRGGFVASRKLTPEPAVSVDSQQG

SEQ ID NO: 43248 - protein, 185 aa, Homo sapiens
RPHASAHASGRQRSQDVTTMVWALLLLTLLTQGTGSWAQSALTQPPSASGSPGQSITISCTGLINDVASYNFVSWYQQHPGKAPKLMIYEVTKRPSGVPDRFSGSKSGNTASLDHLWGSRLEDEADYYCLLICRRLHPGGGIRRWDPRVTVLGSAQRPTPTVTSGSRPSSEGAPSQQGHTSVSDQ

SEQ ID NO: 43249 - protein, 651 aa, Homo sapiens
  DOMAIN (576)..(587): ANNEXIN TYPE V SIGNATURE domain identified by eMATRIX, accession number PR00201F, p-value=9.811e-10, raw score of 9.52
MSVQRKDRVRTQQGGSVASSMLTQEPVGSVALGQSARDRDPDCSDSVSVYLMDTWQSVIIGFAESAATLGDPPELPMHPEGSEASYELTQPPSVSVSPGQTARITCSGDALPKQYAYWYQQKPGQAPVLVIYKDSERPSGIPERFSGSSSGTTVTLTISGVQAEDEADYYCQSADSSGTYPTVTQADRETPTHQYSRHPSYAKGFVFLWGSWAQSALTQPASVSGSPGQSITISCTGTSSDVGSYNLVSWYQQPQGKAPKLMIYEVDSKRPSGVSNRFSGSKSGNTASLTISGVPGLRDEGDYYCCSYAGSVASYELTQLPSVSVSPGQTARITCSGDVLGENYADWYQQKPGQAPELVIYEDSERYPGIPERFSGSTSGNTTTLTISRVLTEDEADYYCLSGDEDNPSVTQADGEDTGIRSHYEGTLALYLYPEPVKATCSVTSYVLTQPPSVSVAPGQTARITCGGNNIGSKSVHWYQQKPGQAPVLVVYDDSDRPSGIPERFSGSNSGNTATLTISRVEAGDEADYYCQSLSTLGPKTLGDTVLRPMIYSVSIQASGVPDGFSGSKSGNTASMTISGFQAEDEADYYCNSHRRGSVVSSELTQDPAVSVALGQTVRITCQGDSLRSYYASWYQQHPGKAPKLIIYDGH

SEQ ID NO: 43250 - protein, 121 aa, Homo sapiens; identical to SEQ ID NO: 38336

SEQ ID NO: 43251 - protein, 125 aa, Homo sapiens; identical to SEQ ID NO: 41924

SEQ ID NO: 43252 - protein, 392 aa, Homo sapiens; identical to SEQ ID NO: 36517

SEQ ID NO: 43253 - protein, 244 aa, Homo sapiens
VMLIQEMGSHGLGQLHPCGFSGYRSATGCFHKQVLSGCGFSRHMVQAGISERKAVDPVRGLYIKLPSPWDRAPGGGGSCGHSLSRLKSSFLLALKRAADLPAQCSSSAKGPTASDHNSSPARERNWTEIEFDKLTEVGFRRWVITNSSELKEHVLAQCNEAKNLEKRLDKLLTRITSLEKNINELMELKNTARELCEAYTSINSQIDQAEERMSEIEDQLNEIKHEDKIRERRMKSNEQSLQEI

SEQ ID NO: 43254 - protein, 205 aa, Homo sapiens
MLCFTADERTGQMPALAQALPDFSLHPFLTGITLTPAGQQHQRPKVDKSTKIRNSQHKKVENSKNQNASSPPKDHNSLPAREQNRTENEFDELTEVGFRRWVITNSSELKEHILTQCKEAKNLEKRLQELLTRITSSGKNINYLMELKITAQELNEAHVSINSEIDQVEERISEIEDQLNERKHEDKIREKTMKRNKASKKYGTM

SEQ ID NO: 43255 - protein, 337 aa, Homo sapiens; identical to SEQ ID NO: 42053
  DOMAIN (126)..(147): Glyceraldehyde 3-phosphate dehydrogenase proteins domain identified by eMATRIX, accession number BL00071E, p-value=7.545e- 17, raw score of 11.48

SEQ ID NO: 43256 - protein, 420 aa, Homo sapiens
GRTIQTKGKEVENFEKNLEECITRITNTEKCLKELMELKTKAREVREECRSLRSQCDQLEERVSAMEDEMNEMKQEGKFREKRIKRNEQSLQEIWDYVKRPNLRLIGVPESDVENGTKLENTLQDIIQENFPNLARQANVQIQERQRTPQRYSSRRATPRHIIVRFTKVEMKEKMGLLVPNWTNHSPLFRAILFDYKGFCRFGTTHQTGFSPAGANQRGPLAATLSGPGGEGQSAVARLTGLIGVPESDVEKETKLETTLQDIIQENFPILARQANVQIQEIQRTPQRYSSRRATPRHIIVRFTKVEMKEKMLRAAREKGRVTLKGKPIRLTADLSAETLQARREWGPIFNILKEKNFQPRISYPAKLSFISEGEIKSFTDKQMLRDFVTTRPALKELLKEALNMERNNRYQPLQNHAKM

SEQ ID NO: 43257 - protein, 464 aa, Homo sapiens; identical to SEQ ID NO: 42057

SEQ ID NO: 43258 - protein, 408 aa, Homo sapiens
MAKQEQLQFVAPSKINAEGRAPRGRGGCGRSFSRLKCSCLPALKRAVDFPAQLSTSAKGQTASSESNSININQKDVHTETPSEPHQHQRPKVDKSTKMRKNQRKKAENSKNQNASSPKDHNSSPAREQNWMENEFDELTEVGFRRWVITNSSELKEHVLTQCKEGKNLEKRLEELLTRITSLEKNINDLMELKNTAQELHEAYTSINTQIDQAEEKISEIEDQLNEIKPNLRLIGVPESDGENGTKLENTLQDIIQENFSNLAKQANIQIQEIQRTPQRYSSRRTTPRHIIIRFTKVGMKEKMLRAAREKSRVTHKGKPIRLTVDLSAETRKEWGPIFSICKEKNFQPRISYPAKLSFISEGEIKSFTNKQMLRDFVTTRPALQELLKEALNMEKNNRYQPLQKHTKL

SEQ ID NO: 43259 - protein, 323 aa, Homo sapiens
MGKKQNRKTGNSKKQSASPPPKERSSSPATEQSWMENDFDEQREEGFRRSNYSELREDIQTKGKEVENFEKNLEECITRITNTEKCLKELMELKTKARELQRVSAMEDEMNEIKREGKFREKRIKRNEQSLQEMWDYVKRPNLRLIGVPESDGENGTKLENTLQDIIQENFPNLARQANVQIQEIQRTPQRYSSRRATPRHIIVRFTKVEMKEKMLRAAREKGRFTHKGKPIRLTADLSAETLQARREWGPIFNILKDKNFQPRISYPAKLSFISEGEIKYFTDKQMLRDFVTTRPALKELLKEALNMERNNRYQPLQNHAKM

SEQ ID NO: 43260 - protein, 317 aa, Homo sapiens
  DOMAIN (189)..(230): 2'-5'-oligoadenylate synthetases proteins domain identified by eMATRIX, accession number BL00832B, p-value=5.500e-09, raw score of 15.45
  misc_feature (1)...(317): Xaa = X or * as defined in Table 2
MDGDLHKGVAVFWPPDAAGGHTCCRSMVCRSLLGGAQWKFHSFRCRIRFELILHMIQERNSINISQKDVHTETPSETHHHQRPKVDKSMKMRRNQCKKAENSKNQKASSPPKEHNSWRAREQNWTENEFDKLTEVGFRRWVITNSSELKEHILTQCKEAKNLEKTLEELLTRITSLEKNINDLMKLKNTAXELREAYTSINSQISQAEERISEIEDQLNEMKHEHRIREKRMKRNKQSFQEIWDYVKRPNLRLISVPESDGENGNKXENILQDIIQENFPNLARQANIQIQEIQRTPQRYSSRRATPRHIIVRFTKV

SEQ ID NO: 43261 - protein, 386 aa, Homo sapiens
MGARAGGSCSCLMWLLLASGHFMGCVAAGDTVGPEKFRSCYTITLLQSKLSYSFGKNNKNFQLRKCLQTVDNLFVPNQNGYYCHSQTSLDRAQIDLNGRIRNGSVYSAHSTNSLNNPQPYLQPSPMSSNPSITGSDVMRPDYLPSHRHSAVIPPSYRPTPDYETVMKQLNRGLVHAERQSHSLRNLNIGSSYAYSRPAALVYSQPEIREHAQLPSPAAAHCPFSLSYSFHSPSPYPYPAERRPVVGAVSVPELTNAQLQAQDYPSPNIMRTQVYRPPPPYPPPRPANSTPDLSRHLYISSSNPDLITRRVHHSVQTFQEDSLPVAHSLQEERSSSPATEQSWTENDFDELREEGFRRSNYSELREDIQTKGKEVENFEKKFRRMYN

SEQ ID NO: 43262 - protein, 105 aa, Homo sapiens
  DOMAIN (46)..(72): C2 domain proteins domain identified by eMATRIX, accession number PF00168C, p-value=5.909e-10, raw score of 27.49
GSRGELLLSLCYNPSANSIIVNIIKARNLKAMDIGGTSDPYVKVWLMYKDKRVEKKKTVTMKRNLNPNFNESFAFDIPTEKLRETTIIITVMDKDKLSRNDVIGK

SEQ ID NO: 43263 - protein, 124 aa, Homo sapiens
  misc_feature (1)...(124): Xaa = X or * as defined in Table 2
SWGPHCTHKLKKSFSLMPEMTDAMDRERMRGSKKDVRXVLGGCAATWTPRAGGRQQSPGTTVDKREDTPDCAMCDQSTSHPISASSPSLLPGSSFTTQTFPPGIAHYRASFLIVAYYPSNKNSK

SEQ ID NO: 43264 - protein, 65 aa, Homo sapiens
  misc_feature (1)...(65): Xaa = X or * as defined in Table 2
GEGQVGWPQGEVQQDEEVIEEVGAXDAGSGYQEEEEGPQSLRREVVGVELVVGADPSGEGPKEDD

SEQ ID NO: 43265 - protein, 393 aa, Homo sapiens
MAVALMDHCVAPRMHLSSLNVPPGLPLHGAQPLTNLIKLSCKWPKGYYIPALAPALPVKPPGRPPCQLWWMRLLHCRVRNESSFTIGLRRASDHAHLFTGTYAEVVVASENSVHKLLELLPGKVLNGEKVDVRPATRQNLSQFEAQARKLSLLEDEYSNVSYMQRSGTYVICSIVAGSERTSPIRVGGVRDHSTDRNREGSRFELNSQPSNVHGPGNHAHRSPAPGRGSRGELLLSLCYKPSANSIIVNIIKARDLKNMDIWGTSLVPGLCCLPPALGVHVAAQLLKPIHVFFGAAILSLSIASVISGINEKLFFSLHPEVHHLTPRLVHRGAENRAKADLPTSAGYLQRLAPAPLRTQTIPTYSHDDHTQQRLTTPPTAHNDGNRTIPTHPK

SEQ ID NO: 43266 - protein, 210 aa, Homo sapiens
  DOMAIN (18)..(45): Protamine P1 proteins domain identified by eMATRIX, accession number BL00048, p-value=5.725e-09, raw score of 6.39
ACQLQQQNKRYNINTQCAQRPRKSGLRQRSETPRRGRSRERERRPRPGQAGEGGEGRHGCGRLLSAPRREPRGPFVSGRGQQKTLPPWRAASAEPEWPRRLGANSVPFLAVPAALTVPVAQLNGLQAEVFDHLLTGAASITAPMIAPTASSVHTFAVFARSERTGQPFLTLTFLLHYTARWHRLPNMCRTVVQRSSDPNLTICIDRLTLY

SEQ ID NO: 43267 - protein, 129 aa, Homo sapiens
  misc_feature (1)...(129): Xaa = X or * as defined in Table 2
CYVVQEVLPSLLCHCLVICSRPGRTAEWPPGXGFXSPPHRGWWGCXGHDHRRGTSIFPTHVXSPPASYPGSLCRPGGQEEREREGEWQREGRRPGTRXCGAEAEARGWRAAAKATAVAGARNRRPGISG

SEQ ID NO: 43268 - protein, 394 aa, Homo sapiens
MDEDGNRHSQQTITRTENQTPHVLTHKWELNNENTWTQGGEHHTGACRGSVPGYAYAQRHLALAIFAAAHDQYANHIVTRRDRYLRDCALLFGGGRYTFGDMVHYANASLLKCVIRRNHKDGGRRQTPARFQKGGPGADIIHLPEVNPTATRRAKGLSATYGRVTKGHMDTQQRRVLHLRALDPAANGHSPEKVNQGVSSWFGSIAGLVTQQVYQALGWYSRGVVCTESCDVNFHGSLSHGYQHLFWWRYFSFLTPNNNPNEVAIITPPSPTQQIGELWATKVKQLTEQLQKRFPDPLIYLLQPGVAAHLQVMASGEPLKTWSRGGSELKDTDNWQLASVLFSPFPHRNGAGQLSSPYERSNLIAEHLRATIRASGQQPFKLRGHSTISLFNIV

SEQ ID NO: 43269 - protein, 253 aa, Homo sapiens
LSSSPKPTIPASATSVQLGENFSVTYLVLGEPEIAMDFSCGISRAEDKRCISLHSLIPQRWSERGHVQSDNAQKAETMLSILLRLQTWVIWTLSQVNQGVSSWFGSVADLSSSPKPTIQASATSVQLGENFSVTYMVLGEPEIAMDFSWVYPGQKLALAVPARGISIIASPLTVRTGPLGISFSSKIPETEKQLTRNEEKAQDGHVASSDLKVCNRAGKKESTKRSMQKSRSGKVSIKANCLGSKADRQKLVQ

SEQ ID NO: 43270 - protein, 305 aa, Homo sapiens
  DOMAIN (100)..(140): G-protein coupled receptors proteins domain identified by eMATRIX, accession number BL00237A, p-value=3.057e-13, raw score of 27.68
QPHPSRYKQEQAMVNQSSTPGFLLLGFSEHPGLERTLFVVVFTSYLLTLVGNTLIILLSALDPKLHSPMYFFLSNLSFLDLCFTTSCVPQMLVNLWGPKKTISFLDCSVQIFIFLSLGTTECILLTVMAFDRYVAVCQPLHYATIIHPRLCWQLASVAWVIGLVESVVQTPSTLHLPFCPDRQVDDFVCEVPALIRLSCEDTSYNEIQVAVASVFILVVPLSLILVSYGAITWAVLRINSAKGRRKAFGTCSSHLTVVTLFYSSVIAVYLQPKNPYAQERGKFFPTHTWGMHSAGHMTLLLHLSP

SEQ ID NO: 43271 - protein, 433 aa, Homo sapiens
  DOMAIN (57)..(79): OLFACTORY RECEPTOR SIGNATURE domain identified by eMATRIX, accession number PR00245A, p-value=7.652e-24, raw score of 18.03
MVNQSSTPGFLLLGFSEHPGLERTLFVVVFTSYLLTLVGNTLIILLSVLDPKLHSPMYFFLSNLSFLDLCFTTSCVPQMLVNLWGPKKTISFLDCSVQIFIFLSLGTTECILLTVMAFDRYVAVCQPLHYATIIHPRLCWQLASVAWVIGLVESVVQTPSTLHLPFCPDRQVDDFVCEVPALIRLSCEDTSYNEIQVAVASVFILVVPLSLILVSYGAITWAVLRINSAKGRRKAFGTCSSHLTVVTLFYSSVIAVYLQPKNPYAQERGKFFGLFYAVGTPSLNPLIYTLRNKELCCISPSVQPTQASVRVPITAAAGAELTFQESLQHILPHSREPWCPKTTKDCGRSNWQDHLQHFPFSAGVRSQLAPKHPEESRACGYFTVGRRETQIKSNWSKVDNHSGKFFKYWSKIQPAHALVEVQKLALNSCLTKI

SEQ ID NO: 43272 - protein, 392 aa, Homo sapiens
  DOMAIN (57)..(79): OLFACTORY RECEPTOR SIGNATURE domain identified by eMATRIX, accession number PR00245A, p-value=7.652e-24, raw score of 18.03
MVNQSSTPGFLLLGFSEHPGLERTLFVVVFTSYLLTLVGNTLIILLSALDPKLHSPMYFFLSNLSFLDLCFTTSCVPQMLVNLWGPKKTISFLDCSVQIFIFLSLGTTECILLTVMAFDRYVAVCQPLHYATIIHPRLCWQLASVAWVIGLVESVVQTPSTLHLPFCPDRQVDDFVCEVPALIRLSCEDTSYNEIQVAVASVFILVVPLSLILVSYGAITWAVLRINSAKGRRKAFGTCSSHLTVVTLFYSSVIAVYLQPKNPYAQERGKFFGLFYAVGTPSLNPLIYTLRNKELCCISPSVQPTQASVRVPITAAAGAELTLAGEFPAYPTTLQGAIGYFTVGRRETQIKSNWSKVDNHSGKFFKYWSKIQPAHALVEVQKLALNSCLTKI

SEQ ID NO: 43273 - protein, 140 aa, Homo sapiens
MDGFGISHNDGPIYTSLCCNLMDRIGFHKALELSPVWVNLYVNFSACGPSACWVDFYLLAHHVRQGCGIPTHYVCVLNTANLSPDHMQRLTFKLCHMYWNWPGTIRVPAPCKYAHKLAFLSGHILHHEPAIQLCENLFFL

SEQ ID NO: 43274 - protein, 108 aa, Homo sapiens
  misc_feature (1)...(108): Xaa = X or * as defined in Table 2
VKFGPEIWCRDSDQGRGGVGTSLGRSIPCPPALCSVRKIYLRPLVLRPTSPRNISPILNRDPTVQLTWQPLPEPLELWPKALXLTPSQIYSAXRLKTDAARLPRKPPR

SEQ ID NO: 43275 - protein, 126 aa, Homo sapiens
MVYRASEAIGQCQSSAAKPRRSGKESVREPWARVPGGSGSGCQRWDAAYEESQAAGIPWPDGQISSTCSKLLGEEVLEECLAAAVQAFGSSCVLEMWLGFVSQWRQGIATQKYIATWLSLLYYCTP

SEQ ID NO: 43276 - protein, 250 aa, Homo sapiens
MALQNVRVLIPRICQYVTLHGQWVFKDVTKSSFKRWGDYPGLSGDASEIWCRDSDRGTSLRRSIPCPPALCFVRKIHLRPLVLRPTSPRNISPILNPRLKTDAASSPQKPPKPSRTPSFGYLSQQKVCWQLCSLTQSLNTNNVKSLMLFRPHNCFPPEIPPCKDRENDCIEVGRPNQGIMSDRREEMTVVALSDPVGKASTHLVKVSTQTKRLLRRSGSVSLQLLSREDLGRIQSESLGPEFQGLWEWLP

SEQ ID NO: 43277 - protein, 109 aa, Homo sapiens
  misc_feature (1)...(109): Xaa = X or * as defined in Table 2
ICLSYPAPPCKRFPHYTRVLYHXSLFNENTSQSCFTSRWKLESFTTRAIERHQIPLLXATLTLIRWLDKKLAFQLLSLTASFSPSYQSLPPTPPLKLPPIISSHTRQMV

SEQ ID NO: 43278 - protein, 122 aa, Homo sapiens
LIRHELTLKSEHSVAVFYRTVIAQIVPLTREISRALRKQLMKTTCVTFGAEDPGQRDSFGGPVRCPCPHSVRRPTYDLGSSDQPAQGTSHQFQIGTPLENGLSNSPGSHSQSPWNSGPRLSD

SEQ ID NO: 43279 - protein, 139 aa, Homo sapiens
QSDLSASQHGLFPLATEVRSSGAASCPDSDSICPAPTIAPGRATPPQANCWASEGTLRYQALPGNRAPVSQVSQAGGANLCVQQPKKHLTNFKSGKRPLFTLFSNLQGPRSRPVAFLSKQLDLTVLGWPSCLVQQLLPP

SEQ ID NO: 43280 - protein, 171 aa, Homo sapiens
MEARETGPWKEGNVERVASVLIKKGTGLPSTVRVTGSSASVMVYGASEAIGQHQSSAAKPRRSVKESVREPWARVPGALGVAASMKSHGHNRYPMSPQVGLPLPEQEPEPEPESEPEQEREKQEPQQGQEPAAAAIALARAAARAKTKLKRRSKTMTMSGNPRAGVLAGIK

SEQ ID NO: 43281 - protein, 154 aa, Homo sapiens
WSMGLPRRSGCVSLQPLSQEDLGRSQSESLGPEFQGLWEWLPEQLPRSFIQALGSLSYFPRTLMNLSWPLCLRKWGYLSLYLPFQVGLPSTVPWPLILPSKVPEEEGQLQSTLPCGIKLLPVFTSHHAFLGVFCNQWVSDVFLALFLMKLLGAQ

SEQ ID NO: 43282 - protein, 51 aa, Homo sapiens
EDLGRSQSESLGPEFQGLWEWLPVPTPSVAFNLPFLPTHLTSPFIPRLLLL

SEQ ID NO: 43283 - protein, 386 aa, Homo sapiens
MNDGVYPRQLAPLGFDLMSQKPKRGDRSRRDDDRYLFLEALISAQQKLYISYIGRSIQDNSERFPSVLVQELIDYIGQSHYLPGDEALNCDESEARVKAHLTCLHTRMPFDPQNYQPGERQSYAREWLPAASQAGKAHSEFVQPLPFTLPETVPLETLQRFWAHPVRAFFQMRLQVNFRTEDSEIPDTEPFILEGLSRYQINQQLLNALVEQDDAERLFRRFRAAGDYPIYGVKCGDEVIKPDAYVMAFGSYSTAMLKGIVDIPVYPLKGYSLTIPIAQEDGAPVSTILDETYKIAITRFDNRIRVGGMAEIVGFNTELLQPRRETLEMVVRDLYPRGGHVEQATFWTGLRPMTPDGTPVVGRTRFKNLWLNTGHGTLGWTMACGS

SEQ ID NO: 43284 - protein, 287 aa, Homo sapiens; identical to SEQ ID NO: 31761
  DOMAIN (200)..(243): 1 kw MIND INHIBITOR DIVISION CONTROL domain identified by eMATRIX, accession number DM01756B, p-value=4.822e-15, raw score of 22.91

SEQ ID NO: 43285 - protein, 385 aa, Homo sapiens; identical to SEQ ID NO: 37077
  DOMAIN (306)..(314): RNase H domain identified by eMATRIX, accession number PF00075E, p-value=7.545e-10, raw score of 8.53

SEQ ID NO: 43286 - protein, 94 aa, Homo sapiens
  misc_feature (1)...(94): Xaa = X or * as defined in Table 2
SRRPLFMGLVRVLCKMSGRGPLCFPGGHWIVFLWGGTVLWLWTXSPHWHRKANXDLFLQKLPRLXVSHQCDPCLPVCHLWNCLFLLPLWGPPAG

SEQ ID NO: 43287 - protein, 59 aa, Homo sapiens
MVYGDSEAIGQHQSSVAKPRRSGKESESLGPEFQGLWEWLPVYELGTLHAGSEPGGALP

SEQ ID NO: 43288 - protein, 136 aa, Homo sapiens; identical to SEQ ID NO: 30814

SEQ ID NO: 43289 - protein, 107 aa, Homo sapiens
  misc_feature (1)...(107): Xaa = X or * as defined in Table 2
FGLRLSLAPPFCMFPLTTXHSXPSVLPASFPAALGIPQARAVTPFVSPXLLASLSFWAPPCSLCLDASVXHGSHLWHAQSSCRLRWSFGLAASQMQPEEPSHGPRRK

SEQ ID NO: 43290 - protein, 246 aa, Homo sapiens; identical to SEQ ID NO: 35161

SEQ ID NO: 43291 - protein, 85 aa, Homo sapiens
HSRIQKFHFLVCSIKRLLKMYKETYTRIFFATRGLLRRSGSVGLQPLSREDLGRSQRALGQSSRGSGSGCQAPLHHSLRRSLLII

SEQ ID NO: 43292 - protein, 216 aa, Homo sapiens
  misc_feature (1)...(216): Xaa = X or * as defined in Table 2
MFSYFLRVYVLGSERGRGKPVTAKFIWVPKTEPAGLVIYVSGYVNEDSEIALLIGESWRRRSLFQSASWERTCLSLVTRANGKGLPRGRKEFVEAVRVRYVAFRYRTPRAVCLRLWSCRREVIMSGRGKQGGKAASEAIGQCQSSAAKPRRSGKESVREPWAGVPGALGVAASTSEDDGYPEDMDQDKHDDSTDDSDTDKSDGESDGDEFVHRDNX

SEQ ID NO: 43293 - protein, 723 aa, Homo sapiens
  DOMAIN (225)..(250): RHODOPSIN-LIKE GPCR SUPERFAMILY SIGNATURE domain identified by eMATRIX, accession number PR00237A, p-value=4.316e-13, raw score of 11.48
  misc_feature (1)...(723): Xaa = X or * as defined in Table 2
MKLVTIFLLVTISLCSYSGYWPENEQMSVGGGDDNGEVLYSALRGASEVIGQCQSSATKPRRSGKESVREPWARVPGALGVGVREIDQTLGIDTILCHHHERLLQSHYGIHKSSLMSVGNSQVAALYQLNVYVVADTVGLIIKSNSILDSVQPNYCSNKHIELRTQVGGARNLRANSPMTSSYNQESSSMENVSALSLLTVESPTSMFDYCDDSLERVKSALDIFSMIIYTVTFFLGLAGNGLVIWVVGFHMSCTVNTCLPSDPHLHGPLTCDPVANLVLEQLHTSKGNSGALEDLAFGNLFLCSLLDLQGNSWWKVSPSLYNQYDLQNETQGSHQLWKEIIIPWXPSAFVVSSGYWPENEQMSVGGGDDNGEVRVFRPEGGFRGDRAVSVFSHXAEKIWEGISQRALVPEFQGLWEWVCREIDQTLGIDTILCHHHERLLQSHYGIHKSSLMSVGNSQVAALYQLNVYVVADTVGLIIKSNSILDSVQPNYCSNKHIELRTQVGGARNLRANSPMTSSYNQESSSMENVSALSLLTVESPTSMFDYCDDSLERVKSALDIFSMIIYTVTFFLGLAGNGLVIWVVGFHMSCTVNTCLPSDPHLHGPLTCDPVANLVLEQLHTSKGNSGALEDLAFGNLFLCSLLDLQGNSWWKVSPSLYNQYDLQNETQGSHQLWKEIIIPWHQTLVTTAHFFFGFFLPLAIITGYYILVALKLRERQLVKFS

SEQ ID NO: 43294 - protein, 122 aa, Homo sapiens
  misc_feature (1)...(122): Xaa = X or * as defined in Table 2
AGARFNVRSHXRNDRVRPHRDVYSLQGRLSDHSPTFQGCQTTQGRLPWSFTLSGKFRFSGEGATTSPAHKNFQTPEPQWPGIPPEPPPTGACYTCRKSGHWAKECPQARIPPKPHPICVGPH

SEQ ID NO: 43295 - protein, 85 aa, Homo sapiens
  misc_feature (1)...(85): Xaa = X or * as defined in Table 2
RWKKNCLSPPRMSXQRXWKPXMQQAACSVGETQPPCTQVKXTALLLTQSLFGGLFTRTHMKFGAVTRIGGPPLGDQSPVLLLFAP

SEQ ID NO: 43296 - protein, 100 aa, Homo sapiens
  misc_feature (1)...(100): Xaa = X or * as defined in Table 2
RVVEQDDAERLFRRFRAAGDLPYGAFGEIFXETQCQEMQQLAEDHASVTMISLEAWRLYRKMVCRIWASMLRLSVCHLCAPKRVWSLISRNGYHLPGSIH

SEQ ID NO: 43297 - protein, 95 aa, Homo sapiens
  misc_feature (1)...(95): Xaa = X or * as defined in Table 2
PEQRTSHRQQQRRQPPPQSRSXPFCPSLPRSALSLSFLCDGYAAPXAYREXIPVTEDHFAEXIISWCPCXYREALGQLLAKMRRXSARKRFQLSP

SEQ ID NO: 43298 - protein, 143 aa, Homo sapiens
YNHITNEETEGQRNPVTFQCYLLASTKGDGLTFHCESYPKLGVREGLGGFRGDRAVSLQPLSPEDLGRSQSESLGPEFQGLWEWLPDKQKSGKAEKERRKGTSEPREEFGWGRSERRLAVGRPNSRGRSSSHSIPFLAPHPSH

SEQ ID NO: 43299 - protein, 122 aa, Homo sapiens
  DOMAIN (77)..(92): TYPE I ANTIFREEZE PROTEIN SIGNATURE domain identified by eMATRIX, accession number PR00308A, p-value=7.152e-10, raw score of 5.90
WGLSVKLCGSTAQKGTDLPSTVRVTRSSASVMVWEGSEVIRQRRSSAAKLRRSGKESESLGPEFQGLWEWLPVRVTLAAAAAAAAAAAAATVVAAAVVAVAAEASWLSAPCLLNFTPLKSGW

SEQ ID NO: 43300 - protein, 325 aa, Homo sapiens
  misc_feature (1)...(325): Xaa = X or * as defined in Table 2
XERERVFPVSQSHADNRRLHEPDLQEGIRAVPREDPPVELPGKFPRKKLQKLESGPQTPQQELINLAFNVYNNREEAARRQCISELQLLASTQQKTDTAQSPQKPTEPSQMLWITLTVEVAAAALILLEALKITNYTQLTLYSSHNFQNLFSYSYLTHMLSASRLLQLYSLFVESPTITIVPGPDFNPASHIIPDTTPDPHDCISLIHLMFTPFPHISFFPVSHPDHTWFIDGSSTRPNRHSPAKAGYAIVSSTSIIEATTLPPSTTSQQAELVALTQALTLAKDYASISILILNMPFIFCTTMRSYGLKEVFSLHKGPPSLMPL

SEQ ID NO: 43301 - protein, 208 aa, Homo sapiens
MEFCISLGRKITFSNIFPYNGANWKVFLKKSQPLLNALVEQDDAERLFRRFRAAGDLPYGAFGEIFWETQCQEMQQLADRVIACRQPGQSMEIDLACNGVQITGWLPQLWDAEGISFSVFSFGMLKGSASVSSALGCWSLLHMLEICHWAKECPQHGIPPKPRPICVGPHRKSDCSSHLAATPRAPGTLAQGSLTDSFPDLLGLAAED

SEQ ID NO: 43302 - protein, 78 aa, Homo sapiens
  misc_feature (1)...(78): Xaa = X or * as defined in Table 2
AHVGRGSTXALPRAMGSDAFXCPLQXMTPASFGSKAALSRVFIKEALMMEDPCVVRKPLSAHMTAWWCRIWKAYLESV

SEQ ID NO: 43303 - protein, 437 aa, Homo sapiens
  misc_feature (1)...(437): Xaa = X or * as defined in Table 2
WEQIPHGLVLSLQQLPRRSGSISLQPLSQEDLGRSQSESLGPEFQGLWQWLSDFQTXHQWFVSGFQAFSDRLKAALSASLLLRFGDSDWLPSSSACKCLMLGLHFVIVGNICATLKEKYSSMLHLDVTMKKNGEKRTRLQKRKKGMPPHPAYEDLNIAAITLPANVVLHQPSGFRTSGQLDPVWWSLDTDAHEIWCQDPGLGSGDFPWEITPLSSYSLLHEKDPPTTSGPQTDQPKKHLTNFKSKTKETGFIHGPKTPAPVTDWEGSLPLVFNHCRDTSLIIHPCFKGVRPRRDACLGPSPLAASPAFLEKGQDLINLAFKVYNNRKKLQFLASTVRQTPATSPAHKNFQTTEPQQPGVPPEPPPTGACYMCRKIWPLGQANARSPGFLLSRVPSVWDPTGNRTVQLTWQPLPEPLELWPKALCLTDSFPDLLGLAA

SEQ ID NO: 43304 - protein, 169 aa, Homo sapiens
  DOMAIN (37)..(83): kw TRANSCRIPTASE REVERSE II ORF2 domain identified by eMATRIX, accession number DM01354O, p-value=3.299e-10, raw score of 8.73
MDKFLDTYTLPRLIQEEVESLKRSITPSEIEAVINSLPTKKSLGPDGFPAKFYQRRRKESRRLKLEEVQRFISDEEHWLVNEEREGATEEAVDNPNGSSIMETKSVEDLLEWHGQLCCALIRGFQKHKDNGEVASREQNDFKQLPPDIPDEQDVEEEDSDIDDPDSVQD

SEQ ID NO: 43305 - protein, 88 aa, Homo sapiens
RGNPPVLPQPAPPVERPSVLPCSQLCHAPVIPQPPSAHPRILARPLTAALREQPGLLGRSTTVFTLMAREPPQPAAADSCLCIVQMEA

SEQ ID NO: 43306 - protein, 206 aa, Homo sapiens
MNNEALGLVHQQQSLFYEQGVFAATYPGKINFMQIAAGFGLETCDLNNEADPQASLQEIINRPGPALIHVRIGNGGHQVSRTRSATGHTDRNIDFPLPASFIWDMFVRVLPEIPKESAFNKLLRQAFDVPIPYLTFLQFSTCSVSTLPFQAFSVKHLHLDQPKLCGIRVYSQPKLLELPLIPRRTCKKLRCDGWSCSSHIVHKATH

SEQ ID NO: 43307 - protein, 143 aa, Homo sapiens
CGKGAENFDKFFTRGQPVLTPPDQLVIANIDQSDFEGFSMHKLRETNTAVPCRHQHVLFRGCGLSSSHCGIGLSSLGRSALLWSLTLGEDSEMPYAAVTLNLLEVKALSAANARAGGEAILKKNKGQFSGLQSNVVSAPLGWP

SEQ ID NO: 43308 - protein, 1189 aa, Homo sapiens [sequence omitted]

SEQ ID NO: 43309 - protein, 117 aa, Homo sapiens
  DOMAIN (55)..(84): Integrins alpha chain proteins domain identified by eMATRIX, accession number BL00242E, p-value=7.828e-14, raw score of 9.03
MQMGTKSFLEQVNGKIEGFCQVGKIEEFCNVGKIEGFCQIVFEISKQEDWQVPIWIIVGSTLGGLLLLALLVLALWKVPHGKHVDDTIPGAVHSHVFLLQPAPRHGRTGLAAAGQQG

SEQ ID NO: 43310 - protein, 112 aa, Homo sapiens
  DOMAIN (4)..(26): Globins profile domain identified by eMATRIX, accession number BL01033A, p-value=1.409e-11, raw score of 16.94
ENVGVAILVRFFVNFPSAKQYFSQFKHMEDPLEMERSPQLRKHACRVMGALNPVVENLHDPDKVSSVLALVGKAHALKHKVEPVYFKILSGVILGGWFAEGILPSDFPNLRR

SEQ ID NO: 43311 - protein, 391 aa, Homo sapiens
  DOMAIN (114)..(137): THROMBOMODULIN SIGNATURE domain identified by eMATRIX, accession number PR00907E, p-value=7.279e-13, raw score of 11.70
MEQAAGPRKRKERGSGEPGKEAEFEWLPFGSVAAVQCQAGRGASLLCVKQPEGGVGWSRAGPLCLGTGCSPDNGGCEHECVEEVDGHVSCRCTEGFRLAADGRSCEDPCAQAPCEQQCEPGGPQGYSCHCRLGFRPAEDDPHRCVDTDECQIAGVCQQMCVNYVGGFECYCSEGHELEADGISCSPAGAMGAQASQDLGDELLDDGEDEEDEDEAWKAFNAPTAAPTALGEAGLAEHSQRDDRWLLVALLVPTCVFLVVLLALGIVYCTRCGPHAPNKRITDCYRWVIPCWEAKSPNRNPCPPGAVLHRGCRPSEPACDGVQTPLMEYGALDTWPGLSPGTHGGLPSWTDGFPAPQAHPGFLSQPLRLWLFRNSCFPGPSASLTKDYTKAL

SEQ ID NO: 43312 - protein, 108 aa, Homo sapiens
  DOMAIN (76)..(108): Eukaryotic-type carbonic anhydrases proteins domain identified by eMATRIX, accession number BL00162E, p-value=9.100e- 31, raw score of 14.93
PYQCRPVTMHSAPSTQAQPQCGPGDPGQTLPEWRPRGFAFDPLTIARSFGKNCPQRDARAAMRPFDPSALLPTCWDYWTYVGSLTTPPLTESVTWIIHKEPVEVAPSQ

SEQ ID NO: 43313 - protein, 115 aa, Homo sapiens
  DOMAIN (38)..(71): Eukaryotic-type carbonic anhydrases proteins domain identified by eMATRIX, accession number BL00162E, p-value=4.900e- 31, raw score of 14.93
  misc_feature (1)...(115): Xaa = X or * as defined in Table 2
PSPSLGYLVGTRGTALRLXDARAAMRPFDPSTLLPTCWDYWTYAGSLTTPPLTESVTWIIQKEPVEVAPSQLSAFRTLLFSALGEEEKMMVNNYRPLQPLMNRKVWASFQATNEG

SEQ ID NO: 43314 - protein, 323 aa, Homo sapiens
  DOMAIN (142)..(179): Eukaryotic-type carbonic anhydrases proteins domain identified by eMATRIX, accession number BL00162C, p-value=4.960e- 39, raw score of 17.78
DSREHHPLQTGVSGNRPKMLGRNTWKTSAFSFLVEQMWAPLWSRSMRPGRWCSQRSCAWQTSNNTLHPLWTVPVSVPGGTRQSPINIQWRDSVYDPQLKPLRVSYEAASCLYIWNTGYLFQVEFDDATEASGISGGPLENHYRLKQFHFHWGAVNEGGSEHTVDGHAYPAELHLVHWNSVKYQNYKEAVVGENGLAVIGVFLKLGAHHQTLQRLVDILPEIKHKDARAAMRPFDPSTLLPTCWDYWTYAGSLTTPPLTESVTWIIQKEPVEVAPSQLSAFRTLLFSALGEEEKMMVNNYRPLQPLMNRKVWASFQATNEGTRS

SEQ ID NO: 43315 - protein, 411 aa, Homo sapiens
  DOMAIN (332)..(365): Eukaryotic-type carbonic anhydrases proteins domain identified by eMATRIX, accession number BL00162E, p-value=8.800e- 31, raw score of 14.93
MPSLVEIFYNVNCLSPYELVELDCLTSIPKVRRWAGGGQSEWDRQSPPFTEPTFGLSLQPYSNPLRVNSYNPNVDNASGISGGPLENHYRLKQFHFHWGAVNEGGSEHTVDGHVYPAELGAHHQMLQRLVDILLEVKHKLSTRFPASSAQLSTRFPASSAQLSIRFPASSTARKDDGDKSVAFLQDQLRKGFEGEGEIPKKCSLFIQQQTKEFQGRRSQRKPQMCGRMRLQPVLTMVRAGPDGAGASPSSRFKEPFDLQKFWQKLPTEGPHPPCLDKLQAPQAAGAPPPPCLRKSQGYRGIGCLVELETAHQDAQAAMRPFDPSALLPTCWDYWTYVGSLTTPPLTESVTWIIQKEPVEVAPSQLSAFRTLLFSALGEEKKMMVNNYRPLQPLMNWKVWASFQATNEGTRS

SEQ ID NO: 43316 - protein, 79 aa, Homo sapiens
  misc_feature (1)...(79): Xaa = X or * as defined in Table 2
IPFISFSCLIALARTSNTMLNKSGERGHPSLVPVFIGNASSFCPVSMILAVGLSXIALIILRYVPSIPNLLRVFSMKGC

SEQ ID NO: 43317 - protein, 246 aa, Homo sapiens
  DOMAIN (186)..(233): kw TRANSCRIPTASE REVERSE II ORF2 domain identified by eMATRIX, accession number DM01354V, p-value=1.000e-40, raw score of 12.97
MNIDAKILNKILANRIQQHIKKLIYHDQVGFIPGMQGWFNICKSINVIFQYTNNRQTESQIMSELPFTIASKRIKYLGIQLTRDVKDLFKENYKPVLNEIRGHKQMEEHSMLMDRKNQYCENGHTAQDDMIVYLENPIISAQNLLKLISNFSKVSAYKINVQKSQAFRYTNNRQTESQIMSELPFTIASKRIKYLGIQLTRDVKDLFKENYRPLLNEIKEDTNKWKNIPCSWVGRINIVIMAILSK

SEQ ID NO: 43318 - protein, 565 aa, Homo sapiens
  DOMAIN (254)..(301): kw TRANSCRIPTASE REVERSE II ORF2 domain identified by eMATRIX, accession number DM01354V, p-value=1.000e-40, raw score of 12.97
MMGDFNTPLSTLDRSMRQKVNKDIQELNSALHHMDLIDIYRTLHPKSTEYTFFSAPQRTYSKIDHIVGSKALLSKCKRTEIITNCLSDHSAIKLELRIKKLTQNHSITWKLNNWLLNDYWVHNEMKAEIKMFFETNEIKDTTYQNLWDTFKATLNQEEVESLNRPITGSEIQAMINSLGTKKLQDQTDSQPSSTRDDMIVYLENPIVSAQNLLKLISNFSKVSGYKINVQKSQAFLYTNNRQTESQIMSKLPFTIASKIIKYLGVQLTRDVKDPFKENYKPLLNEIKEDTNKWKNIPCSWIGRINIMKMAILPKVIYRFNAIPIKLPMTFFTELEKSTLKFIWNQKRACIARSILSQRNKAGGITLPDFKLYYKATVTKTAWYWYQNRDIDQWNITEPSETMPHIYHYLIFEKPDKNKKWGKDSLFNKWCWENWLATCRKLKLDPFLTPYTKINSRWIKDLNVRPKTINTLEENLGNTIQDIGMGKDFMSKTPKAMATKAKIDKWDLIKLKSFCTAKETTTRVNRQPTEWEKIFAIYSSDKGLISRIYKELKQIYKKKTTPSTSG

SEQ ID NO: 43319 - protein, 163 aa, Homo sapiens
  misc_feature (1)...(163): Xaa = X or * as defined in Table 2
VAKIFSHFVCCLFTLMVVSFAVQKLFSLIRSHLSILSFVAIDFGVLDMKSLPMPMSXMVMPRFSSRVFIVLGLTFKSLIHLELIFVXGVRKGSSFSFLHMASQFSQHHLLNRESFPHCLFFSGFSKIRXLXICGIISEGSVMFHXSISLFWYQYHAVLVTVAL

SEQ ID NO: 43320 - protein, 36 aa, Homo sapiens
  misc_feature (1)...(36): Xaa = X or * as defined in Table 2
KITPKKQIRQSPNLTQNTGQQXSLQLWEHFQISTHF

SEQ ID NO: 43321 - protein, 110 aa, Homo sapiens
SFGGEEVLWFLGFSAFLLWFLPIFVVLSTFGLEVPGLRGGAAVPCMAMQGLRPSPACGLQGCPGPCCLAGWDRITALRSTGAEALIGAEGSTAVDSLGLLPATSSLFLST

SEQ ID NO: 43322 - protein, 78 aa, Homo sapiens
  misc_feature (1)...(78): Xaa = X or * as defined in Table 2
IPFISSCLIALARTSNTMLNRSGERGHPCLVPVFKGNASSFFPFSMILAVGLSXIALIILRYIPSIPSLLRVFSVKGC

SEQ ID NO: 43323 - protein, 116 aa, Homo sapiens
  misc_feature (1)...(116): Xaa = X or * as defined in Table 2
HQHLLFPDFLMIAILTGMRWYLIVVLICISLRASDDEHFYHVSVGCINVFFXEISVHILRPLFDGVVXFFLVNLFKFFVDSGYEPFVRWVDCKNVLPFCRLPVHSDGSFFCCAEAL

SEQ ID NO: 43324 - protein, 44 aa, Homo sapiens
  DOMAIN (20)..(40): kw TRANSCRIPTASE REVERSE II ORF2 domain identified by eMATRIX, accession number DM01354U, p-value=8.556e-11, raw score of 12.24
  misc_feature (1)...(44): Xaa = X or * as defined in Table 2
LISNFSKVSGYKINVPKSQAFLYTKNRQTAKSXVNSHSQLLQRE

SEQ ID NO: 43325 - protein, 611 aa, Homo sapiens; identical to SEQ ID NO: 32678
  DOMAIN (37)..(83): kw TRANSCRIPTASE REVERSE II ORF2 domain identified by eMATRIX, accession number DM01354O, p-value=1.000e-40, raw score of 8.73

SEQ ID NO: 43326 - protein, 528 aa, Homo sapiens
  DOMAIN (207)..(252): kw TRANSCRIPTASE REVERSE II ORF2 domain identified by eMATRIX, accession number DM01354N, p-value=1.000e-40, raw score of 13.17
MGDFNTPLSTLDRSMRQKVNKDTQELNSALHQVDLIDIYRTLHCKSTEYTFFSAPHHTYSKIDHIGGSKSLLSKCKRTEIITNCLSDHSEIKLELRIKKLTQNHSTTWKLNNLLLNDYWVHNEMTAEIKMFLETNKNKDTTYQNLWDTFKAVCRGKFIALNAHKRKQERSKIDTLTSQLKELEKQEQTHSKPSRRQEIKIQTTIREYYKHLYTNKLENLEEMNKFLDTYTLPRLNQEEVESLNRTITGSEIVAIINSLPTKKSPGPDGFTAEFYQRYKEELENPIVSVQNLLKLISNFSKVSGYKINVQKSQAFLYTNNRQTESQIMSDLPVTIASKRIKYLGIQLTRDVKDLFKENYKSLLNEIKEDTKKWNNIPCSWVGRINIVKMAILPKVIYRFNAIPIKLPMTFFTELEKTTLKFIWNQKRACIAKSILSQKNKAGRITLPDFKLYYEATVTKTAWDMDEAGNHHSQQTIARTKNQTPHVLTHRWELNNENTWTQEGEHHTLGPVVGCGEWGGIALGDIPNVN

SEQ ID NO: 43327 - protein, 616 aa, Homo sapiens; identical to SEQ ID NO: 32375
  DOMAIN (115)..(158): kw TRANSCRIPTASE REVERSE II ORF2 domain identified by eMATRIX, accession number DM01354T, p-value=1.000e-40, raw score of 9.48

SEQ ID NO: 43328 - protein, 31 aa, Homo sapiens
AIPLRTYAWARTSCLKHQKQWQLKPKLTNGI

SEQ ID NO: 43329 - protein, 108 aa, Homo sapiens
  misc_feature (1)...(108): Xaa = X or * as defined in Table 2
MVLPRFSSRVFMVLGLTFKPLIHLELIFVXGVNFVXGSSFSFPHMASQFSQHHLLNRESFPHFLFLSGLSKIRXLXMCGIISEGSVLFHWSESLFWYQYHAVLVTVAL

SEQ ID NO: 43330 - protein, 863 aa, Homo sapiens
  DOMAIN (93)..(148): kw TRANSCRIPTASE REVERSE II ORF2 domain identified by eMATRIX, accession number DM01354Q, p-value=1.000e-40, raw score of 9.23
MAIREMQIKTTPTNQKKLRPDGFTAEFYQMYKEELVLFLLKLFQNIELKRKNSSLTNCEDSIILIPKPGRDTTKKDNFSPISLMNSNPKILNEILRNRIQQHIKRLIQHDVVGFFSGMQSWFNICKSINVIHHINRTKEKKHMIISIDAEKTFDKIQHPFILKTLKKLVIEGTYHKIIRANYDNPIANIILNGQKLEAFSLKTRKRQGCLLSPLLFNIALEVLAREIRQEKEKNRHPNSKRGAETVPVCRWHNPLAGKPYSLSPKYSMDTFLDTYTLPRLNQEEVESLNRPITGAEIVAIINSLPHHAQSRTRWIHCRILPEVQGGTGTIPSETIPVNRRERESSTNSFYEASIILIPKPGRDTTSTENFRPISLMNIDAKLLSKILASRIQQHIKKLIHHDQVGFIPGMQVWFNIRKSINVIQGINRAKDKNHMIISIDAEKAFDKIQHHFLLQTLNKLGIDGKYLTIIRAIYDKPTVNIILNVQKLEAFPLKTGTRQGCPLSPLLFNIVLEVLGQGQLGRRRKMGKKQNRKTGNSKTQSTSPPPKERSSSPATDQSWMENDFDELREEGFRRSNYSELREDIQTKGKEVENFEKNLEECITRITNTEKCLKELMELKTKARELREECRSLRSQCDQLEERVSAMEDEMNEMKQEGKFREKRIKRNEQSLQEIWDYVKRPNLRLIGVPESDAENGTKLENTLQDIIQETFPNLARQANVQIQEIQRTPQRYSSRRATPRHIIVRFTKVEMKEKMLRAAREKGRVTLKGKPIRLTADLSAETLQARREWGPILNILKEKNFQPRISYPAKLSFISEGEIKYFTDKQMLTDFVTSRPALKELLKEALNMERNNRYQPLQNHAKM

SEQ ID NO: 43331 - protein, 248 aa, Homo sapiens
  DOMAIN (71)..(83): High potential iron-sulfur proteins domain identified by eMATRIX, accession number BL00596B, p-value=9.743e-09, raw score of 13.07
LQIMFSYFSEEKMTAARIRKCHKCGTGLIKSEGCNRMSCRCGAQMCYLCRVSINGYDHFCQHPRSPGAPCQECSRCSLWTDPTLGSSYRFLPRDLVNGPSSLPHRTMLLIGCSLGNLGHVPGFHGGGERGGRRNLAEVTPTSLCSSHLPLPISRLAPHAPEGPPITAQPSQLRHQQPISACSAADGGEDAGEQGAPACSALAAPGTPRVSQIPSPSPPSQRTMTGRQVPPLQAAPYCSSPQSSRSCYP

SEQ ID NO: 43332 - protein, 220 aa, Homo sapiens
  DOMAIN (107)..(119): High potential iron-sulfur proteins domain identified by eMATRIX, accession number BL00596B, p-value=9.743e-09, raw score of 13.07
RGSAVLILTAERKPVGSVRDSGKKHNGLTCEELAEKDDIKYRTSIEEKMTAARIRKCPKCGTGLIKSEGCNRMSSRCGAQMCYLCRVSINGYDHFCQHRRSPGAPCQECSRCSLWTDPPEDDEKLIEEIQKEAEEEQKRKNGENTFKRIGPPLEKPVEKVQRVEALPRPRSAEPATATDATLCLRAPTLPPASRAACCQQLPHSHGAYPSPVRAPSAQRA

SEQ ID NO: 43333 - protein, 69 aa, Homo sapiens
YNWDVQSFLQKYTIIGKQFIGPFNLFHRDTVLERDALQRVESAHPVLHMELDDDGAQRRPHAGGGPFDR

SEQ ID NO: 43334 - protein, 309 aa, Homo sapiens
  DOMAIN (156)..(169): PROTEIN PRECURSOR SIGNAL HYDROLA domain identified by eMATRIX, accession number PD00469A, p-value=6.400e-09, raw score of 13.95
MAHCSLELLVSSNLPISALAGFCQGSIANGAGVHLGPRTPADSPLLAPTAAGFSAPRLPRSAGSSRYRQAAAGAAFALNLAGPMADSSPALSLREGGPRAPRPSAPSPPPRSRSGSESEEAELSLSLARTKTRSYGSTASVRAPLGAGVIERHVEHRVRAGDTLQGIALKYGVTGMQVAEAKQIRVQMPAVISCVALAYSLRLSEPQIPHLSVDGNIRLQTSVQSQKQSLAYIKQNTEPGPVLSARDVPPKECTASLELWLALLSDVMDRCVTAKEMRDFINKQADAYVEKGILDKEEAEAIKRIYSSL

SEQ ID NO: 43335 - protein, 470 aa, Homo sapiens
  misc_feature (1)...(470): Xaa = X or * as defined in Table 2
MGFLGTGTWILVLVLPIQAFPKPGGSQDKSLHNRELSAERPLNEQIAEAEEDKIKKTYPPENKPGQSNYSFVDNLNLLRAITEKEKIEKERQSIRSSPLDNKLNVEDVDSTKNRKLIDDYDSTKSGLDHKFQDDPDGLHQLDGTPLTAEDIVHKIAARIYEENDRAVFDKIVSKLLNLGLITESQAHTLEDEVAEVLQKLISKEANNYEEDPNKPTSWTENQAGKIPEKVTPMAAIQDGLAKGENDETVSNTLTLTNGLERRTKTYSEDNFRDFQYFPNFYALLKSIDSEKEAKEKETLITIMKTLIDFVKMMVKYGTISPEEGVSYLEGLDEMIALQTKNKLEKNATDNISKLFPAPSEKSHEETDSTKEEAAKMEKEYGSLKDSTKDDNSNPGGKTDEPKGKNRSPIWKPIRKNIEWLKKHDKKGNKEDYDPFQRXEVSFNNKADAYVEKGILDKEEAEAIKRIYSSL

SEQ ID NO: 43336 - protein, 293 aa, Homo sapiens
  DOMAIN (52)..(82): Glutathione S-transferases domain identified by eMATRIX, accession number PF00043, p-value=8.500e-21, raw score of 21.83
MGSGASAEDKELAKRSKELEKKLQEDADKEAKTVKLLLLAACKLLPIGGASLLPYLIDGAHKITQSNAILCYIARKHNLCGETEEEKIRVDILENQAMDVSNQLARVCYSPDFGSPSLVKSHWLGPNYTKEGPEGNDIRRTNVPDIRVGYRYETLCQELALITQAVQSEMLETIPEEAVLQASAALEKHQLRGAITWEPGLLSKAGYAICLFGEYADSHYGNLEQVNNSKLFNCYVFQKNQDSSCSPARFLEGPTPHLTLYWPGSPFWVHSYGSRTGNTLFTFLISKAQLRLL

SEQ ID NO: 43337 - protein, 212 aa, Homo sapiens
  DOMAIN (53)..(83): Glutathione S-transferases domain identified by eMATRIX, accession number PF00043, p-value=8.071e-25, raw score of 21.83
PDYDRSQWLNEKFKLGLDFPNVGPGLLFALAYGKGMLGSLVAQLSFPGFPSIQLPYLIDGTHKITQSNAILRYIARKHNLCGETEEEKIRVDILENQAMDVSNQLARVCYSPDFEKLKPEYLEELPTMMQHFSQFLGKRPWFVGDKITFVDFLAYDVLDLHRIFEPNCLDAFPNLKDFISRFEGLEKISAYMKSSRFLPKPLYTRVAVWGNK

SEQ ID NO: 43338 - protein, 83 aa, Homo sapiens
  misc_feature (1)...(83): Xaa = X or * as defined in Table 2
DGRQLRRGSLGGALTGRYLLPNPVAGQAWPASAETSNLVGMRSQALGQSAPSLTASLPCVSKCWENIPPWMNWPPHXIKHIQS

SEQ ID NO: 43339 - protein, 138 aa, Homo sapiens
QSHNSILPRKQFLSLLLSITQSQSLLLHKLPLLGRLSSFRLAVSEGADWPRAWLRMRTRLDVSAEAGQACPATGFGRRYLPVRAPPRLPRLSCLPSSLSCLLYFSDFPGPEATSGLLHFRNGMGGGDNMWSSSSSCSS

SEQ ID NO: 43340 - protein, 452 aa, Homo sapiens
MHYNERKKRQRRRDAEREQTTKPTRQKDGQHDTAKEKKTERAERHRTEREKRKKDTTEKREQRYTDLDHILSPPPMPFRKCSNPDVASGPGKSLKYKRQLSEDGRQLRRGSLGGALTDIALKVKARKQKRYSHLPWDTSIQVHRHKTTTIKTTWQKSGQSQAATASYGPDAEGIVQLITLHHPKGSENSASNLYIFEYKEHHVDVKSDEQIVSFGRFLLFFVFSHNRRSQWTGESGTKNQTTTRDNEREEKRRTQETRQRKERGKKKNRDTTEEHKKKHKTKDLCVTGKGETSARSDPRGQRCQGDTLPRRPQNGRNLPRGPADQTRRARTATRERPNTLHGRQRTKTPTHGPHRKTTARRPDHAHRPATGPPRSHRPKTARQDRSILCIYFQLPHVRPLVSGWVQPHGEIPGTETTDDPERMGMKLRRNFGRLPNTHLLPGSLLVALALDG

SEQ ID NO: 43341 - protein, 149 aa, Homo sapiens
HYAKLGTRPRLKFMSSPSLSDLFKREPAAAADERGTQQRRACANATWNSIHNGVIAVFQRKGLPDQELFSLNEGVRQLLKTELGSFFTEYLQNQLLTKGMVILRDKIRFYEGECGPLGGHSGPCWVLAGCWTAGPRAGGLWVQGVALWS

SEQ ID NO: 43342 - protein, 34 aa, Homo sapiens
SPSLSDLGKREPAAAADERGTQQRRACANATWNR

SEQ ID NO: 43343 - protein, 791 aa, Homo sapiens
  DOMAIN (286)..(319): Bacterial extracellular solute-binding proteins family 3 sig. domain identified by eMATRIX, accession number BL01039B, p-value= 8.457e-18, raw score of 20.00
RYRDTLRRAILLLSPQGAHSFINEAVETNLASKDSHWVFVNEEISDPEILDLVHSALGRMTVVRQIFPSAKDNQKCTRNNHRISSLLCDPQEGYLQMLQISNLYLYDSVLMLANAFHRKLEDRKWHSMASLNCIRKSTKPWNGGRSMLDTIKKGHITGLTGVMEFREDSSNPYVQFEILGTTYSETFGKDMRKLATWDSEKGLNGSLQERPMGSRLQGLTLKVVTVLEEPFVMVAENILGQPKRYKGFSIDVLDALAKALGFKYEIYQAPDGRYGHQLHNTSWNGMIGELISKRADLAISAITITPERESVVDFSKRYMDYSVGILIKKPEEKISIFSLFAPFDFAVWACIAAAIPVVGVLIFVLNRIQAVRAQSAAQPRPSASATLHSAIWIVYGAFVQQGGESSVNSMAMRIVMGSWWLFTLIVCSSYTANLAAFLTVSRMDNPIRTFQDLSKQVEMSYGTVRDSAVYEYFRAKGTNPLEQDSTFAELWRTISKNGGADNCVSSPSEGIRKAKKGNYAFLWDVAVVEYAALTDDDCSVTVIGNSISSKGYGIALQHGSPYRDLFSQRILELQDTGDLDVLKQKWWPHMGRCDLTSHASAQADGKSLKLHSFAGVFCILAIGLLLACLVAALELWWNSNRCHQETPKEDKEVNLEQVHRRMNSLMDEDIAHKQISPASIELSALEMGGLAPTQTLEPTREYQNTQLSVSTFLPEQSSHGTSRTLSSGPSSNLPLPLSSSATMPSMQCKHRSPNGGLFRQSPVKTPIPMSFQPVPGGVLPEALDTSHGTSI

SEQ ID NO: 43344 - protein, 731 aa, Homo sapiens
  DOMAIN (664)..(684): EBI1 ORPHAN RECEPTOR SIGNATURE domain identified by eMATRIX, accession number PR00641I, p-value=8.425e-09, raw score of 9.21
MDLLTIWELKEGAGNGTRVEPSCCTRKQFLAPETVGSLESWAVTMGTLLFLLHCAEGRRPSLDIRNHKRATPSQLPIDDSVHRDLGGNKQVKGAHWSWRGGADMIGEPKKLGTEPSTIPFRAFSSKVCLPSILSSRGDRTATEAAAGPSFTFPYMEIHRRPERKTDIPAHCRCSELSSVLPGKRQHKDRELTTWYNAESCKERGTPTPVLTPDLPGMPLWTNEWRRDEGDVPITGVVSINLTCTMQLADVIQPVISPTVPECLLGLYGGSQKHREVANPWVGAKEMLPRRGNIKLSQKGTFQDLSKQVEMSYGTVRDSAVYEYFRAKGTNPLEQDSTFAELWRTISKNGGADNCVSSPSEGIRKSISHNDSNSALSSYTAEDRVALTHDSLGYKLGNWHLSNTVRPTGKMVVHRMTCTGSHAQDDFSLPFSHIEQQKMSRLWSLTYLGVNSSFRADQSGDGCALSEDDDLNPETTEQIQQVGYYGPSIQGGTASPNPKQSLLPCSVGSLAKVRWGSREDAGDHVTAPIQRDSEDTALSMSGEGRPYTVVLAKDPPSGSLLFNMGSERDAEMPAEQPGVMCQKLYKAIEEAINRTLYFSMITEPSSPRAKIELVPLKVVVLLCPTGCIVAVALGSDRHLKGRRRWTERWRKLTYTGQNNSAVRRTQQTSCAHARSASTSQAAPTLQPCDTHAHPLRPHAPLLRHNALLQPREISVKAYGKYEGCVQWYTIQP

SEQ ID NO: 43345 - protein, 908 aa, Homo sapiens
  DOMAIN (37)..(83): kw TRANSCRIPTASE REVERSE II ORF2 domain identified by eMATRIX, accession number DM01354O, p-value=1.000e-40, raw score of 8.73
MDTFLDTYTLPRLNQEEAESLNRPITGAEIVAIINSLPTKKSPGPDGFTAEFYQRYKEELVPFLLKLFQSIEKEGILPNSFDEASIILIPKPGRDTTKKENFRPISLMNIDAKILNKILANQIQQHIKKLIHHDQVGFIPGMQGWFNIRKSINVIQHINRAKDKNHMIISIDAEKAFDTIQQPFMLKTLNKLGTDGTYFKIIRAIYDKPTANIILNGQKLEAFPLKTGTRQGCPLSPLLFNIVLEVLARAIRQEKEIKGIQLGKEEVKLSLFADDMIVYLENPIVSAQNLLKLISNFSKVSGYKINVQKSQAFLYTNNRQTESQIMSELPFTIASKRIKYLGIQLTRDVKDLFKENHKPLLKEIKEDTNKWKNIPCSWVGRINIVKMAILPKLREEKLQEEKPSEDQIHKLLPEDTETGKRKMDEQKKRDEPLVLKTNLERCPARLSDSENEEPSRGQMTQTHRSAFVSKNNSYSLAFLAGKLNSKVERSQSCSDTAQERAKSRVRAVPGNKAKVTTMTPASNPIIGVLLSTQNNRCVSAPDLTIEKRLPFSSLSSLASLHKPERSVSPESNDSISEELNHFKPIVCSPCTPPKRLPDGRVLSPLIIKSTPRNLNRSLQKQTSYEASPRILKKWEQIFQERQIKKTLSKATLTSLAPEMGEELLGSEGIHSSKEKPLVAVNTRLSGGQVLSEYTGPTSADLDHFPSVSQTKAEQDSDNKSSTEIPLETCCSSELKGGGSGTSLEREQFEGLGSTPDAKLDKTCISRAMKITTVNSVLPQNSVLGGVLKTKQQLKTLNHFDLTNGVLVESLSEEPLPSLRRGRKRHCKTKHLEQNGSLKKLRQTSGEVGLAPTDPVLREMEQKLQQEEEDRQLALQLQRMFDNERRTVSRRKGSVDQYLLRSSNMAGAK
